United States Patent Application Publication US 2018/0305689 A1 - sequence listing, part 47

SEQ ID NO: 614741 - RNA, 19 nt, Artificial Sequence
  Description of Artificial Sequence: Synthetic oligonucleotide
  Antisense strand to SEQ ID NO: 614740
cacuuuaaggcaagauugc

SEQ ID NO: 614742 - RNA, 19 nt, Artificial Sequence
  Description of Artificial Sequence: Synthetic oligonucleotide
  Sense strand starting at position 1137 of SEQ ID NO: 585119
uaaagugaacguuaugcuu

SEQ ID NO: 614743 - RNA, 19 nt, Artificial Sequence
  Description of Artificial Sequence: Synthetic oligonucleotide
  Antisense strand to SEQ ID NO: 614742
aagcauaacguucacuuua

SEQ ID NO: 614744 - RNA, 19 nt, Artificial Sequence
  Description of Artificial Sequence: Synthetic oligonucleotide
  Sense strand starting at position 1256 of SEQ ID NO: 585119
auguguacacuuuauacau

SEQ ID NO: 614745 - RNA, 19 nt, Artificial Sequence
  Description of Artificial Sequence: Synthetic oligonucleotide
  Antisense strand to SEQ ID NO: 614744
auguauaaaguguacacau

SEQ ID NO: 614746 - RNA, 19 nt, Artificial Sequence
  Description of Artificial Sequence: Synthetic oligonucleotide
  Sense strand starting at position 1315 of SEQ ID NO: 585119
gauggaaguacgcgaucaa

SEQ ID NO: 614747 - RNA, 19 nt, Artificial Sequence
  Description of Artificial Sequence: Synthetic oligonucleotide
  Antisense strand to SEQ ID NO: 614746
uugaucgcguacuuccauc

SEQ ID NO: 614748 - RNA, 19 nt, Artificial Sequence
  Description of Artificial Sequence: Synthetic oligonucleotide
  Sense strand starting at position 1316 of SEQ ID NO: 585119
auggaaguacgcgaucaaa

SEQ ID NO: 614749 - RNA, 19 nt, Artificial Sequence
  Description of Artificial Sequence: Synthetic oligonucleotide
  Antisense strand to SEQ ID NO: 614748
uuugaucgcguacuuccau

SEQ ID NO: 614750 - RNA, 19 nt, Artificial Sequence
  Description of Artificial Sequence: Synthetic oligonucleotide
  Sense strand starting at position 2447 of SEQ ID NO: 585119
agugcuaucauuuggguuu

SEQ ID NO: 614751 - RNA, 19 nt, Artificial Sequence
  Description of Artificial Sequence: Synthetic oligonucleotide
  Antisense strand to SEQ ID NO: 614750
aaacccaaaugauagcacu

SEQ ID NO: 614752 - RNA, 19 nt, Artificial Sequence
  Description of Artificial Sequence: Synthetic oligonucleotide
  Sense strand starting at position 2505 of SEQ ID NO: 585119
cugagaaugacauggucac

SEQ ID NO: 614753 - RNA, 19 nt, Artificial Sequence
  Description of Artificial Sequence: Synthetic oligonucleotide
  Antisense strand to SEQ ID NO: 614752
gugaccaugucauucucag

SEQ ID NO: 614754 - RNA, 19 nt, Artificial Sequence
  Description of Artificial Sequence: Synthetic oligonucleotide
  Sense strand starting at position 2549 of SEQ ID NO: 585119
gccaaagacuuucuucuga

SEQ ID NO: 614755 - RNA, 19 nt, Artificial Sequence
  Description of Artificial Sequence: Synthetic oligonucleotide
  Antisense strand to SEQ ID NO: 614754
ucagaagaaagucuuuggc

SEQ ID NO: 614756 - RNA, 19 nt, Artificial Sequence
  Description of Artificial Sequence: Synthetic oligonucleotide
  Sense strand starting at position 2653 of SEQ ID NO: 585119
aaggaaguccgcuggagaa

SEQ ID NO: 614757 - RNA, 19 nt, Artificial Sequence
  Description of Artificial Sequence: Synthetic oligonucleotide
  Antisense strand to SEQ ID NO: 614756
uucuccagcggacuuccuu

SEQ ID NO: 614758 - RNA, 19 nt, Artificial Sequence
  Description of Artificial Sequence: Synthetic oligonucleotide
  Sense strand starting at position 2699 of SEQ ID NO: 585119
cugcaaagcguaggaaaua

SEQ ID NO: 614759 - RNA, 19 nt, Artificial Sequence
  Description of Artificial Sequence: Synthetic oligonucleotide
  Antisense strand to SEQ ID NO: 614758
uauuuccuacgcuuugcag

SEQ ID NO: 614760 - RNA, 19 nt, Artificial Sequence
  Description of Artificial Sequence: Synthetic oligonucleotide
  Sense strand starting at position 2813 of SEQ ID NO: 585119
aggaaauguuuacugagca

SEQ ID NO: 614761 - RNA, 19 nt, Artificial Sequence
  Description of Artificial Sequence: Synthetic oligonucleotide
  Antisense strand to SEQ ID NO: 614760
ugcucaguaaacauuuccu

SEQ ID NO: 614762 - RNA, 19 nt, Artificial Sequence
  Description of Artificial Sequence: Synthetic oligonucleotide
  Sense strand starting at position 2900 of SEQ ID NO: 585119
acggaaagcuaauuaaaca

SEQ ID NO: 614763 - RNA, 19 nt, Artificial Sequence
  Description of Artificial Sequence: Synthetic oligonucleotide
  Antisense strand to SEQ ID NO: 614762
uguuuaauuagcuuuccgu

SEQ ID NO: 614764 - RNA, 19 nt, Artificial Sequence
  Description of Artificial Sequence: Synthetic oligonucleotide
  Sense strand starting at position 2913 of SEQ ID NO: 585119
uaaacaauguuugugaugu

SEQ ID NO: 614765 - RNA, 19 nt, Artificial Sequence
  Description of Artificial Sequence: Synthetic oligonucleotide
  Antisense strand to SEQ ID NO: 614764
acaucacaaacauuguuua

SEQ ID NO: 614766 - RNA, 19 nt, Artificial Sequence
  Description of Artificial Sequence: Synthetic oligonucleotide
  Sense strand starting at position 2983 of SEQ ID NO: 585119
guggucaggcaagaugaau

SEQ ID NO: 614767 - RNA, 19 nt, Artificial Sequence
  Description of Artificial Sequence: Synthetic oligonucleotide
  Antisense strand to SEQ ID NO: 614766
auucaucuugccugaccac

SEQ ID NO: 614768 - RNA, 19 nt, Artificial Sequence
  Description of Artificial Sequence: Synthetic oligonucleotide
  Sense strand starting at position 2991 of SEQ ID NO: 585119
gcaagaugaaugugaagau

SEQ ID NO: 614769 - RNA, 19 nt, Artificial Sequence
  Description of Artificial Sequence: Synthetic oligonucleotide
  Antisense strand to SEQ ID NO: 614768
aucuucacauucaucuugc

SEQ ID NO: 614770 - RNA, 19 nt, Artificial Sequence
  Description of Artificial Sequence: Synthetic oligonucleotide
  Sense strand starting at position 3023 of SEQ ID NO: 585119
cagauagaagucugugaga

SEQ ID NO: 614771 - RNA, 19 nt, Artificial Sequence
  Description of Artificial Sequence: Synthetic oligonucleotide
  Antisense strand to SEQ ID NO: 614770
ucucacagacuucuaucug

SEQ ID NO: 614772 - RNA, 19 nt, Artificial Sequence
  Description of Artificial Sequence: Synthetic oligonucleotide
  Sense strand starting at position 3025 of SEQ ID NO: 585119
gauagaagucugugagaag

SEQ ID NO: 614773 - RNA, 19 nt, Artificial Sequence
  Description of Artificial Sequence: Synthetic oligonucleotide
  Antisense strand to SEQ ID NO: 614772
cuucucacagacuucuauc

SEQ ID NO: 614774 - RNA, 19 nt, Artificial Sequence
  Description of Artificial Sequence: Synthetic oligonucleotide
  Sense strand starting at position 3107 of SEQ ID NO: 585119
gggcacuugcuggauagua

SEQ ID NO: 614775 - RNA, 19 nt, Artificial Sequence
  Description of Artificial Sequence: Synthetic oligonucleotide
  Antisense strand to SEQ ID NO: 614774
uacuauccagcaagugccc

SEQ ID NO: 614776 - RNA, 19 nt, Artificial Sequence
  Description of Artificial Sequence: Synthetic oligonucleotide
  Sense strand starting at position 3109 of SEQ ID NO: 585119
gcacuugcuggauaguaau

SEQ ID NO: 614777 - RNA, 19 nt, Artificial Sequence
  Description of Artificial Sequence: Synthetic oligonucleotide
  Antisense strand to SEQ ID NO: 614776
auuacuauccagcaagugc

SEQ ID NO: 614778 - RNA, 19 nt, Artificial Sequence
  Description of Artificial Sequence: Synthetic oligonucleotide
  Sense strand starting at position 3122 of SEQ ID NO: 585119
aguaauaggaguugagauc

SEQ ID NO: 614779 - RNA, 19 nt, Artificial Sequence
  Description of Artificial Sequence: Synthetic oligonucleotide
  Antisense strand to SEQ ID NO: 614778
gaucucaacuccuauuacu

SEQ ID NO: 614780 - RNA, 19 nt, Artificial Sequence
  Description of Artificial Sequence: Synthetic oligonucleotide
  Sense strand starting at position 3226 of SEQ ID NO: 585119
ggaguaucuugagcuugau

SEQ ID NO: 614781 - RNA, 19 nt, Artificial Sequence
  Description of Artificial Sequence: Synthetic oligonucleotide
  Antisense strand to SEQ ID NO: 614780
aucaagcucaagauacucc

SEQ ID NO: 614782 - RNA, 19 nt, Artificial Sequence
  Description of Artificial Sequence: Synthetic oligonucleotide
  Sense strand starting at position 3230 of SEQ ID NO: 585119
uaucuugagcuugaucuga

SEQ ID NO: 614783 - RNA, 19 nt, Artificial Sequence
  Description of Artificial Sequence: Synthetic oligonucleotide
  Antisense strand to SEQ ID NO: 614782
ucagaucaagcucaagaua

SEQ ID NO: 614784 - RNA, 19 nt, Artificial Sequence
  Description of Artificial Sequence: Synthetic oligonucleotide
  Sense strand starting at position 3232 of SEQ ID NO: 585119
ucuugagcuugaucugauc

SEQ ID NO: 614785 - RNA, 19 nt, Artificial Sequence
  Description of Artificial Sequence: Synthetic oligonucleotide
  Antisense strand to SEQ ID NO: 614784
gaucagaucaagcucaaga

SEQ ID NO: 614786 - RNA, 19 nt, Artificial Sequence
  Description of Artificial Sequence: Synthetic oligonucleotide
  Sense strand starting at position 3344 of SEQ ID NO: 585119
gaaagaaguuucuuccaga

SEQ ID NO: 614787 - RNA, 19 nt, Artificial Sequence
  Description of Artificial Sequence: Synthetic oligonucleotide
  Antisense strand to SEQ ID NO: 614786
ucuggaagaaacuucuuuc

SEQ ID NO: 614788 - RNA, 19 nt, Artificial Sequence
  Description of Artificial Sequence: Synthetic oligonucleotide
  Sense strand starting at position 3712 of SEQ ID NO: 585119
guaauauugcaacagauug

SEQ ID NO: 614789 - RNA, 19 nt, Artificial Sequence
  Description of Artificial Sequence: Synthetic oligonucleotide
  Antisense strand to SEQ ID NO: 614788
caaucuguugcaauauuac

SEQ ID NO: 614790 - RNA, 19 nt, Artificial Sequence
  Description of Artificial Sequence: Synthetic oligonucleotide
  Sense strand starting at position 3803 of SEQ ID NO: 585119
augauaacuuaggugcauu

SEQ ID NO: 614791 - RNA, 19 nt, Artificial Sequence
  Description of Artificial Sequence: Synthetic oligonucleotide
  Antisense strand to SEQ ID NO: 614790
aaugcaccuaaguuaucau

SEQ ID NO: 614792 - RNA, 19 nt, Artificial Sequence
  Description of Artificial Sequence: Synthetic oligonucleotide
  Sense strand starting at position 22 of SEQ ID NO: 585120
cguacuaacagaggacuaa

SEQ ID NO: 614793 - RNA, 19 nt, Artificial Sequence
  Description of Artificial Sequence: Synthetic oligonucleotide
  Antisense strand to SEQ ID NO: 614792
uuaguccucuguuaguacg

SEQ ID NO: 614794 - RNA, 19 nt, Artificial Sequence
  Description of Artificial Sequence: Synthetic oligonucleotide
  Sense strand starting at position 146 of SEQ ID NO: 585120
auuccuugauaauuaggua

SEQ ID NO: 614795 - RNA, 19 nt, Artificial Sequence
  Description of Artificial Sequence: Synthetic oligonucleotide
  Antisense strand to SEQ ID NO: 614794
uaccuaauuaucaaggaau

SEQ ID NO: 614796 - RNA, 19 nt, Artificial Sequence
  Description of Artificial Sequence: Synthetic oligonucleotide
  Sense strand starting at position 303 of SEQ ID NO: 585120
aguaacuugcauuaauguu

SEQ ID NO: 614797 - RNA, 19 nt, Artificial Sequence
  Description of Artificial Sequence: Synthetic oligonucleotide
  Antisense strand to SEQ ID NO: 614796
aacauuaaugcaaguuacu

SEQ ID NO: 614798 - RNA, 19 nt, Artificial Sequence
  Description of Artificial Sequence: Synthetic oligonucleotide
  Sense strand starting at position 379 of SEQ ID NO: 585120
agaaaucagcucugaaucu

SEQ ID NO: 614799 - RNA, 19 nt, Artificial Sequence
  Description of Artificial Sequence: Synthetic oligonucleotide
  Antisense strand to SEQ ID NO: 614798
agauucagagcugauuucu

SEQ ID NO: 614800 - RNA, 19 nt, Artificial Sequence
  Description of Artificial Sequence: Synthetic oligonucleotide
  Sense strand starting at position 654 of SEQ ID NO: 585120
augucauugcaucaggauu

SEQ ID NO: 614801 - RNA, 19 nt, Artificial Sequence
  Description of Artificial Sequence: Synthetic oligonucleotide
  Antisense strand to SEQ ID NO: 614800
aauccugaugcaaugacau

SEQ ID NO: 614802 - RNA, 19 nt, Artificial Sequence
  Description of Artificial Sequence: Synthetic oligonucleotide
  Sense strand starting at position 662 of SEQ ID NO: 585120
gcaucaggauuaguaagaa

SEQ ID NO: 614803 - RNA, 19 nt, Artificial Sequence
  Description of Artificial Sequence: Synthetic oligonucleotide
  Antisense strand to SEQ ID NO: 614802
uucuuacuaauccugaugc

SEQ ID NO: 614804 - RNA, 19 nt, Artificial Sequence
  Description of Artificial Sequence: Synthetic oligonucleotide
  Sense strand starting at position 1106 of SEQ ID NO: 585120
agacauacagcagguauau

SEQ ID NO: 614805 - RNA, 19 nt, Artificial Sequence
  Description of Artificial Sequence: Synthetic oligonucleotide
  Antisense strand to SEQ ID NO: 614804
auauaccugcuguaugucu

SEQ ID NO: 614806 - RNA, 19 nt, Artificial Sequence
  Description of Artificial Sequence: Synthetic oligonucleotide
  Sense strand starting at position 1169 of SEQ ID NO: 585120
gaccaagugguucggagaa

SEQ ID NO: 614807 - RNA, 19 nt, Artificial Sequence
  Description of Artificial Sequence: Synthetic oligonucleotide
  Antisense strand to SEQ ID NO: 614806
uucuccgaaccacuugguc

SEQ ID NO: 614808 - RNA, 19 nt, Artificial Sequence
  Description of Artificial Sequence: Synthetic oligonucleotide
  Sense strand starting at position 1268 of SEQ ID NO: 585120
cuuccuaagguugauuaca

SEQ ID NO: 614809 - RNA, 19 nt, Artificial Sequence
  Description of Artificial Sequence: Synthetic oligonucleotide
  Antisense strand to SEQ ID NO: 614808
uguaaucaaccuuaggaag

SEQ ID NO: 614810 - RNA, 19 nt, Artificial Sequence
  Description of Artificial Sequence: Synthetic oligonucleotide
  Sense strand starting at position 1270 of SEQ ID NO: 585120
uccuaagguugauuacaua

SEQ ID NO: 614811 - RNA, 19 nt, Artificial Sequence
  Description of Artificial Sequence: Synthetic oligonucleotide
  Antisense strand to SEQ ID NO: 614810
uauguaaucaaccuuagga

SEQ ID NO: 614812 - RNA, 19 nt, Artificial Sequence
  Description of Artificial Sequence: Synthetic oligonucleotide
  Sense strand starting at position 1361 of SEQ ID NO: 585120
cagugccaugcucaaagau

SEQ ID NO: 614813 - RNA, 19 nt, Artificial Sequence
  Description of Artificial Sequence: Synthetic oligonucleotide
  Antisense strand to SEQ ID NO: 614812
aucuuugagcauggcacug

SEQ ID NO: 614814 - RNA, 19 nt, Artificial Sequence
  Description of Artificial Sequence: Synthetic oligonucleotide
  Sense strand starting at position 1439 of SEQ ID NO: 585120
ugaagaaagccaugguuga

SEQ ID NO: 614815 - RNA, 19 nt, Artificial Sequence
  Description of Artificial Sequence: Synthetic oligonucleotide
  Antisense strand to SEQ ID NO: 614814
ucaaccauggcuuucuuca

SEQ ID NO: 614816 - RNA, 19 nt, Artificial Sequence
  Description of Artificial Sequence: Synthetic oligonucleotide
  Sense strand starting at position 1440 of SEQ ID NO: 585120
gaagaaagccaugguugaa

SEQ ID NO: 614817 - RNA, 19 nt, Artificial Sequence
  Description of Artificial Sequence: Synthetic oligonucleotide
  Antisense strand to SEQ ID NO: 614816
uucaaccauggcuuucuuc

SEQ ID NO: 614818 - RNA, 19 nt, Artificial Sequence
  Description of Artificial Sequence: Synthetic oligonucleotide
  Sense strand starting at position 2150 of SEQ ID NO: 585120
acacaaaugucuccgccaa

SEQ ID NO: 614819 - RNA, 19 nt, Artificial Sequence
  Description of Artificial Sequence: Synthetic oligonucleotide
  Antisense strand to SEQ ID NO: 614818
uuggcggagacauuugugu

SEQ ID NO: 614820 - RNA, 19 nt, Artificial Sequence
  Description of Artificial Sequence: Synthetic oligonucleotide
  Sense strand starting at position 2152 of SEQ ID NO: 585120
acaaaugucuccgccaaga

SEQ ID NO: 614821 - RNA, 19 nt, Artificial Sequence
  Description of Artificial Sequence: Synthetic oligonucleotide
  Antisense strand to SEQ ID NO: 614820
ucuuggcggagacauuugu

SEQ ID NO: 614822 - RNA, 19 nt, Artificial Sequence
  Description of Artificial Sequence: Synthetic oligonucleotide
  Sense strand starting at position 2187 of SEQ ID NO: 585120
aaggcucuccgugaugcaa

SEQ ID NO: 614823 - RNA, 19 nt, Artificial Sequence
  Description of Artificial Sequence: Synthetic oligonucleotide
  Antisense strand to SEQ ID NO: 614822
uugcaucacggagagccuu

SEQ ID NO: 614824 - RNA, 19 nt, Artificial Sequence
  Description of Artificial Sequence: Synthetic oligonucleotide
  Sense strand starting at position 2680 of SEQ ID NO: 585120
agcguuucagcgccuacaa

SEQ ID NO: 614825 - RNA, 19 nt, Artificial Sequence
  Description of Artificial Sequence: Synthetic oligonucleotide
  Antisense strand to SEQ ID NO: 614824
uuguaggcgcugaaacgcu

SEQ ID NO: 614826 - RNA, 19 nt, Artificial Sequence
  Description of Artificial Sequence: Synthetic oligonucleotide
  Sense strand starting at position 2681 of SEQ ID NO: 585120
gcguuucagcgccuacaau

SEQ ID NO: 614827 - RNA, 19 nt, Artificial Sequence
  Description of Artificial Sequence: Synthetic oligonucleotide
  Antisense strand to SEQ ID NO: 614826
auuguaggcgcugaaacgc

SEQ ID NO: 614828 - RNA, 19 nt, Artificial Sequence
  Description of Artificial Sequence: Synthetic oligonucleotide
  Sense strand starting at position 2891 of SEQ ID NO: 585120
ggaggagccuuucuuucua

SEQ ID NO: 614829 - RNA, 19 nt, Artificial Sequence
  Description of Artificial Sequence: Synthetic oligonucleotide
  Antisense strand to SEQ ID NO: 614828
uagaaagaaaggcuccucc

SEQ ID NO: 614830 - RNA, 19 nt, Artificial Sequence
  Description of Artificial Sequence: Synthetic oligonucleotide
  Sense strand starting at position 2920 of SEQ ID NO: 585120
cguucaugucuugugacgu

SEQ ID NO: 614831 - RNA, 19 nt, Artificial Sequence
  Description of Artificial Sequence: Synthetic oligonucleotide
  Antisense strand to SEQ ID NO: 614830
acgucacaagacaugaacg

SEQ ID NO: 614832 - RNA, 19 nt, Artificial Sequence
  Description of Artificial Sequence: Synthetic oligonucleotide
  Sense strand starting at position 2945 of SEQ ID NO: 585120
ccuaaaggcuaucuuggua

SEQ ID NO: 614833 - RNA, 19 nt, Artificial Sequence
  Description of Artificial Sequence: Synthetic oligonucleotide
  Antisense strand to SEQ ID NO: 614832
uaccaagauagccuuuagg

SEQ ID NO: 614834 - RNA, 19 nt, Artificial Sequence
  Description of Artificial Sequence: Synthetic oligonucleotide
  Sense strand starting at position 2948 of SEQ ID NO: 585120
aaaggcuaucuugguaguu

SEQ ID NO: 614835 - RNA, 19 nt, Artificial Sequence
  Description of Artificial Sequence: Synthetic oligonucleotide
  Antisense strand to SEQ ID NO: 614834
aacuaccaagauagccuuu

SEQ ID NO: 614836 - RNA, 19 nt, Artificial Sequence
  Description of Artificial Sequence: Synthetic oligonucleotide
  Sense strand starting at position 2957 of SEQ ID NO: 585120
cuugguaguuauucuagga

SEQ ID NO: 614837 - RNA, 19 nt, Artificial Sequence
  Description of Artificial Sequence: Synthetic oligonucleotide
  Antisense strand to SEQ ID NO: 614836
uccuagaauaacuaccaag

SEQ ID NO: 614838 - RNA, 19 nt, Artificial Sequence
  Description of Artificial Sequence: Synthetic oligonucleotide
  Sense strand starting at position 2961 of SEQ ID NO: 585120
guaguuauucuaggagcau

SEQ ID NO: 614839 - RNA, 19 nt, Artificial Sequence
  Description of Artificial Sequence: Synthetic oligonucleotide
  Antisense strand to SEQ ID NO: 614838
augcuccuagaauaacuac

SEQ ID NO: 614840 - RNA, 19 nt, Artificial Sequence
  Description of Artificial Sequence: Synthetic oligonucleotide
  Sense strand starting at position 2965 of SEQ ID NO: 585120
uuauucuaggagcaugauu

SEQ ID NO: 614841 - RNA, 19 nt, Artificial Sequence
  Description of Artificial Sequence: Synthetic oligonucleotide
  Antisense strand to SEQ ID NO: 614840
aaucaugcuccuagaauaa

SEQ ID NO: 614842 - RNA, 19 nt, Artificial Sequence
  Description of Artificial Sequence: Synthetic oligonucleotide
  Sense strand starting at position 2973 of SEQ ID NO: 585120
ggagcaugauuaguguuau

SEQ ID NO: 614843 - RNA, 19 nt, Artificial Sequence
  Description of Artificial Sequence: Synthetic oligonucleotide
  Antisense strand to SEQ ID NO: 614842
auaacacuaaucaugcucc

SEQ ID NO: 614844 - RNA, 19 nt, Artificial Sequence
  Description of Artificial Sequence: Synthetic oligonucleotide
  Sense strand starting at position 2989 of SEQ ID NO: 585120
uauguuucugcagaagaga

SEQ ID NO: 614845 - RNA, 19 nt, Artificial Sequence
  Description of Artificial Sequence: Synthetic oligonucleotide
  Antisense strand to SEQ ID NO: 614844
ucucuucugcagaaacaua

SEQ ID NO: 614846 - RNA, 19 nt, Artificial Sequence
  Description of Artificial Sequence: Synthetic oligonucleotide
  Sense strand starting at position 3069 of SEQ ID NO: 585120
ucccuugagcacuggaaga

SEQ ID NO: 614847 - RNA, 19 nt, Artificial Sequence
  Description of Artificial Sequence: Synthetic oligonucleotide
  Antisense strand to SEQ ID NO: 614846
ucuuccagugcucaaggga

SEQ ID NO: 614848 - RNA, 19 nt, Artificial Sequence
  Description of Artificial Sequence: Synthetic oligonucleotide
  Sense strand starting at position 3071 of SEQ ID NO: 585120
ccuugagcacuggaagagu

SEQ ID NO: 614849 - RNA, 19 nt, Artificial Sequence
  Description of Artificial Sequence: Synthetic oligonucleotide
  Antisense strand to SEQ ID NO: 614848
acucuuccagugcucaagg

SEQ ID NO: 614850 - RNA, 19 nt, Artificial Sequence
  Description of Artificial Sequence: Synthetic oligonucleotide
  Sense strand starting at position 3084 of SEQ ID NO: 585120
aagaguugagaguggaagu

SEQ ID NO: 614851 - RNA, 19 nt, Artificial Sequence
  Description of Artificial Sequence: Synthetic oligonucleotide
  Antisense strand to SEQ ID NO: 614850
acuuccacucucaacucuu

SEQ ID NO: 614852 - RNA, 19 nt, Artificial Sequence
  Description of Artificial Sequence: Synthetic oligonucleotide
  Sense strand starting at position 3095 of SEQ ID NO: 585120
guggaaguggccagugagu

SEQ ID NO: 614853 - RNA, 19 nt, Artificial Sequence
  Description of Artificial Sequence: Synthetic oligonucleotide
  Antisense strand to SEQ ID NO: 614852
acucacuggccacuuccac

SEQ ID NO: 614854 - RNA, 19 nt, Artificial Sequence
  Description of Artificial Sequence: Synthetic oligonucleotide
  Sense strand starting at position 3111 of SEQ ID NO: 585120
aguaguacacugcgacaaa

SEQ ID NO: 614855 - RNA, 19 nt, Artificial Sequence
  Description of Artificial Sequence: Synthetic oligonucleotide
  Antisense strand to SEQ ID NO: 614854
uuugucgcaguguacuacu

SEQ ID NO: 614856 - RNA, 19 nt, Artificial Sequence
  Description of Artificial Sequence: Synthetic oligonucleotide
  Sense strand starting at position 3328 of SEQ ID NO: 585120
caggauauugagggccuaa

SEQ ID NO: 614857 - RNA, 19 nt, Artificial Sequence
  Description of Artificial Sequence: Synthetic oligonucleotide
  Antisense strand to SEQ ID NO: 614856
uuaggcccucaauauccug

SEQ ID NO: 614858 - RNA, 19 nt, Artificial Sequence
  Description of Artificial Sequence: Synthetic oligonucleotide
  Sense strand starting at position 3398 of SEQ ID NO: 585120
ccuauuugccuaugagucu

SEQ ID NO: 614859 - RNA, 19 nt, Artificial Sequence
  Description of Artificial Sequence: Synthetic oligonucleotide
  Antisense strand to SEQ ID NO: 614858
agacucauaggcaaauagg

SEQ ID NO: 614860 - RNA, 19 nt, Artificial Sequence
  Description of Artificial Sequence: Synthetic oligonucleotide
  Sense strand starting at position 3572 of SEQ ID NO: 585120
cucugaguuugagccauau

SEQ ID NO: 614861 - RNA, 19 nt, Artificial Sequence
  Description of Artificial Sequence: Synthetic oligonucleotide
  Antisense strand to SEQ ID NO: 614860
auauggcucaaacucagag

SEQ ID NO: 614862 - RNA, 19 nt, Artificial Sequence
  Description of Artificial Sequence: Synthetic oligonucleotide
  Sense strand starting at position 3584 of SEQ ID NO: 585120
gccauauucccaugagaaa

SEQ ID NO: 614863 - RNA, 19 nt, Artificial Sequence
  Description of Artificial Sequence: Synthetic oligonucleotide
  Antisense strand to SEQ ID NO: 614862
uuucucaugggaauauggc

SEQ ID NO: 614864 - RNA, 19 nt, Artificial Sequence
  Description of Artificial Sequence: Synthetic oligonucleotide
  Sense strand starting at position 3587 of SEQ ID NO: 585120
auauucccaugagaaagaa

SEQ ID NO: 614865 - RNA, 19 nt, Artificial Sequence
  Description of Artificial Sequence: Synthetic oligonucleotide
  Antisense strand to SEQ ID NO: 614864
uucuuucucaugggaauau

SEQ ID NO: 614866 - RNA, 19 nt, Artificial Sequence
  Description of Artificial Sequence: Synthetic oligonucleotide
  Sense strand starting at position 3700 of SEQ ID NO: 585120
gaacacaccugguuaggua

SEQ ID NO: 614867 - RNA, 19 nt, Artificial Sequence
  Description of Artificial Sequence: Synthetic oligonucleotide
  Antisense strand to SEQ ID NO: 614866
uaccuaaccagguguguuc

SEQ ID NO: 614868 - RNA, 19 nt, Artificial Sequence
  Description of Artificial Sequence: Synthetic oligonucleotide
  Sense strand starting at position 3911 of SEQ ID NO: 585120
ccaguuaagugguuaaauu

SEQ ID NO: 614869 - RNA, 19 nt, Artificial Sequence
  Description of Artificial Sequence: Synthetic oligonucleotide
  Antisense strand to SEQ ID NO: 614868
aauuuaaccacuuaacugg

SEQ ID NO: 614870 - RNA, 19 nt, Artificial Sequence
  Description of Artificial Sequence: Synthetic oligonucleotide
  Sense strand starting at position 3981 of SEQ ID NO: 585120
guguaauaauaagcauacu

SEQ ID NO: 614871 - RNA, 19 nt, Artificial Sequence
  Description of Artificial Sequence: Synthetic oligonucleotide
  Antisense strand to SEQ ID NO: 614870
aguaugcuuauuauuacac

SEQ ID NO: 614872 - RNA, 19 nt, Artificial Sequence
  Description of Artificial Sequence: Synthetic oligonucleotide
  Sense strand starting at position 40 of SEQ ID NO: 585121
ccucaaaggcuuuagacua

SEQ ID NO: 614873 - RNA, 19 nt, Artificial Sequence
  Description of Artificial Sequence: Synthetic oligonucleotide
  Antisense strand to SEQ ID NO: 614872
uagucuaaagccuuugagg

SEQ ID NO: 614874 - RNA, 19 nt, Artificial Sequence
  Description of Artificial Sequence: Synthetic oligonucleotide
  Sense strand starting at position 115 of SEQ ID NO: 585121
uucuuuagguagcuugaaa

SEQ ID NO: 614875 - RNA, 19 nt, Artificial Sequence
  Description of Artificial Sequence: Synthetic oligonucleotide
  Antisense strand to SEQ ID NO: 614874
uuucaagcuaccuaaagaa

SEQ ID NO: 614876 - RNA, 19 nt, Artificial Sequence
  Description of Artificial Sequence: Synthetic oligonucleotide
  Sense strand starting at position 230 of SEQ ID NO: 585121
aggcaauguguugagagaa

SEQ ID NO: 614877 - RNA, 19 nt, Artificial Sequence
  Description of Artificial Sequence: Synthetic oligonucleotide
  Antisense strand to SEQ ID NO: 614876
uucucucaacacauugccu

SEQ ID NO: 614878 - RNA, 19 nt, Artificial Sequence
  Description of Artificial Sequence: Synthetic oligonucleotide
  Sense strand starting at position 245 of SEQ ID NO: 585121
agaauuaaaugugcaacaa

SEQ ID NO: 614879 - RNA, 19 nt, Artificial Sequence
  Description of Artificial Sequence: Synthetic oligonucleotide
  Antisense strand to SEQ ID NO: 614878
uuguugcacauuuaauucu

SEQ ID NO: 614880 - RNA, 19 nt, Artificial Sequence
  Description of Artificial Sequence: Synthetic oligonucleotide
  Sense strand starting at position 379 of SEQ ID NO: 585121
aggccaaaugccuacauua

SEQ ID NO: 614881 - RNA, 19 nt, Artificial Sequence
  Description of Artificial Sequence: Synthetic oligonucleotide
  Antisense strand to SEQ ID NO: 614880
uaauguaggcauuuggccu

SEQ ID NO: 614882 - RNA, 19 nt, Artificial Sequence
  Description of Artificial Sequence: Synthetic oligonucleotide
  Sense strand starting at position 465 of SEQ ID NO: 585121
uaaccuauuguguaggauu

SEQ ID NO: 614883 - RNA, 19 nt, Artificial Sequence
  Description of Artificial Sequence: Synthetic oligonucleotide
  Antisense strand to SEQ ID NO: 614882
aauccuacacaauagguua

SEQ ID NO: 614884 - RNA, 19 nt, Artificial Sequence
  Description of Artificial Sequence: Synthetic oligonucleotide
  Sense strand starting at position 479 of SEQ ID NO: 585121
ggauuccuccacuggaaua

SEQ ID NO: 614885 - RNA, 19 nt, Artificial Sequence
  Description of Artificial Sequence: Synthetic oligonucleotide
  Antisense strand to SEQ ID NO: 614884
uauuccaguggaggaaucc

SEQ ID NO: 614886 - RNA, 19 nt, Artificial Sequence
  Description of Artificial Sequence: Synthetic oligonucleotide
  Sense strand starting at position 543 of SEQ ID NO: 585121
gagacauucugagcuauug

SEQ ID NO: 614887 - RNA, 19 nt, Artificial Sequence
  Description of Artificial Sequence: Synthetic oligonucleotide
  Antisense strand to SEQ ID NO: 614886
caauagcucagaaugucuc

SEQ ID NO: 614888 - RNA, 19 nt, Artificial Sequence
  Description of Artificial Sequence: Synthetic oligonucleotide
  Sense strand starting at position 597 of SEQ ID NO: 585121
ggcucaaaugcauggaaau

SEQ ID NO: 614889 - RNA, 19 nt, Artificial Sequence
  Description of Artificial Sequence: Synthetic oligonucleotide
  Antisense strand to SEQ ID NO: 614888
auuuccaugcauuugagcc

SEQ ID NO: 614890 - RNA, 19 nt, Artificial Sequence
  Description of Artificial Sequence: Synthetic oligonucleotide
  Sense strand starting at position 598 of SEQ ID NO: 585121
gcucaaaugcauggaaauu

SEQ ID NO: 614891 - RNA, 19 nt, Artificial Sequence
  Description of Artificial Sequence: Synthetic oligonucleotide
  Antisense strand to SEQ ID NO: 614890
aauuuccaugcauuugagc

SEQ ID NO: 614892 - RNA, 19 nt, Artificial Sequence
  Description of Artificial Sequence: Synthetic oligonucleotide
  Sense strand starting at position 667 of SEQ ID NO: 585121
gugguauuacucuacccaa

SEQ ID NO: 614893 - RNA, 19 nt, Artificial Sequence
  Description of Artificial Sequence: Synthetic oligonucleotide
  Antisense strand to SEQ ID NO: 614892
uuggguagaguaauaccac

SEQ ID NO: 614894 - RNA, 19 nt, Artificial Sequence
  Description of Artificial Sequence: Synthetic oligonucleotide
  Sense strand starting at position 881 of SEQ ID NO: 585121
uggugcuuggcguucaaua

SEQ ID NO: 614895 - RNA, 19 nt, Artificial Sequence
  Description of Artificial Sequence: Synthetic oligonucleotide
  Antisense strand to SEQ ID NO: 614894
uauugaacgccaagcacca

SEQ ID NO: 614896 - RNA, 19 nt, Artificial Sequence
  Description of Artificial Sequence: Synthetic oligonucleotide
  Sense strand starting at position 882 of SEQ ID NO: 585121
ggugcuuggcguucaauac

SEQ ID NO: 614897 - RNA, 19 nt, Artificial Sequence
  Description of Artificial Sequence: Synthetic oligonucleotide
  Antisense strand to SEQ ID NO: 614896
guauugaacgccaagcacc

SEQ ID NO: 614898 - RNA, 19 nt, Artificial Sequence
  Description of Artificial Sequence: Synthetic oligonucleotide
  Sense strand starting at position 918 of SEQ ID NO: 585121
agguuaaggcugcaucaaa

SEQ ID NO: 614899 - RNA, 19 nt, Artificial Sequence
  Description of Artificial Sequence: Synthetic oligonucleotide
  Antisense strand to SEQ ID NO: 614898
uuugaugcagccuuaaccu

SEQ ID NO: 614900 - RNA, 19 nt, Artificial Sequence
  Description of Artificial Sequence: Synthetic oligonucleotide
  Sense strand starting at position 1021 of SEQ ID NO: 585121
guugacauuuagggaagaa

SEQ ID NO: 614901 - RNA, 19 nt, Artificial Sequence
  Description of Artificial Sequence: Synthetic oligonucleotide
  Antisense strand to SEQ ID NO: 614900
uucuucccuaaaugucaac

SEQ ID NO: 614902 - RNA, 19 nt, Artificial Sequence
  Description of Artificial Sequence: Synthetic oligonucleotide
  Sense strand starting at position 1055 of SEQ ID NO: 585121
aagauaagguuagcaguua

SEQ ID NO: 614903 - RNA, 19 nt, Artificial Sequence
  Description of Artificial Sequence: Synthetic oligonucleotide
  Antisense strand to SEQ ID NO: 614902
uaacugcuaaccuuaucuu

SEQ ID NO: 614904 - RNA, 19 nt, Artificial Sequence
  Description of Artificial Sequence: Synthetic oligonucleotide
  Sense strand starting at position 1115 of SEQ ID NO: 585121
aguguaaccuauuucugca

SEQ ID NO: 614905 - RNA, 19 nt, Artificial Sequence
  Description of Artificial Sequence: Synthetic oligonucleotide
  Antisense strand to SEQ ID NO: 614904
ugcagaaauagguuacacu

SEQ ID NO: 614906 - RNA, 19 nt, Artificial Sequence
  Description of Artificial Sequence: Synthetic oligonucleotide
  Sense strand starting at position 1163 of SEQ ID NO: 585121
gcacuuagauccuccuaag

SEQ ID NO: 614907 - RNA, 19 nt, Artificial Sequence
  Description of Artificial Sequence: Synthetic oligonucleotide
  Antisense strand to SEQ ID NO: 614906
cuuaggaggaucuaagugc

SEQ ID NO: 614908 - RNA, 19 nt, Artificial Sequence
  Description of Artificial Sequence: Synthetic oligonucleotide
  Sense strand starting at position 1203 of SEQ ID NO: 585121
acaagugacccagagcauu

SEQ ID NO: 614909 - RNA, 19 nt, Artificial Sequence
  Description of Artificial Sequence: Synthetic oligonucleotide
  Antisense strand to SEQ ID NO: 614908
aaugcucugggucacuugu

SEQ ID NO: 614910 - RNA, 19 nt, Artificial Sequence
  Description of Artificial Sequence: Synthetic oligonucleotide
  Sense strand starting at position 1310 of SEQ ID NO: 585121
ccuuuagggaaagguaauu

SEQ ID NO: 614911 - RNA, 19 nt, Artificial Sequence
  Description of Artificial Sequence: Synthetic oligonucleotide
  Antisense strand to SEQ ID NO: 614910
aauuaccuuucccuaaagg

SEQ ID NO: 614912 - RNA, 19 nt, Artificial Sequence
  Description of Artificial Sequence: Synthetic oligonucleotide
  Sense strand starting at position 2421 of SEQ ID NO: 585121
caggauuaaagucgggaau

SEQ ID NO: 614913 - RNA, 19 nt, Artificial Sequence
  Description of Artificial Sequence: Synthetic oligonucleotide
  Antisense strand to SEQ ID NO: 614912
auucccgacuuuaauccug

SEQ ID NO: 614914 - RNA, 19 nt, Artificial Sequence
  Description of Artificial Sequence: Synthetic oligonucleotide
  Sense strand starting at position 2433 of SEQ ID NO: 585121
cgggaaucagauuguucug

SEQ ID NO: 614915 - RNA, 19 nt, Artificial Sequence
  Description of Artificial Sequence: Synthetic oligonucleotide
  Antisense strand to SEQ ID NO: 614914
cagaacaaucugauucccg

SEQ ID NO: 614916 - RNA, 19 nt, Artificial Sequence
  Description of Artificial Sequence: Synthetic oligonucleotide
  Sense strand starting at position 2445 of SEQ ID NO: 585121
uguucuggccaucaggaaa

SEQ ID NO: 614917 - RNA, 19 nt, Artificial Sequence
  Description of Artificial Sequence: Synthetic oligonucleotide
  Antisense strand to SEQ ID NO: 614916
uuuccugauggccagaaca

SEQ ID NO: 614918 - RNA, 19 nt, Artificial Sequence
  Description of Artificial Sequence: Synthetic oligonucleotide
  Sense strand starting at position 2457 of SEQ ID NO: 585121
caggaaagcgcugcguauu

SEQ ID NO: 614919 - RNA, 19 nt, Artificial Sequence
  Description of Artificial Sequence: Synthetic oligonucleotide
  Antisense strand to SEQ ID NO: 614918
aauacgcagcgcuuuccug

SEQ ID NO: 614920 - RNA, 19 nt, Artificial Sequence
  Description of Artificial Sequence: Synthetic oligonucleotide
  Sense strand starting at position 2468 of SEQ ID NO: 585121
ugcguauuugcauaaugua

SEQ ID NO: 614921 - RNA, 19 nt, Artificial Sequence
  Description of Artificial Sequence: Synthetic oligonucleotide
  Antisense strand to SEQ ID NO: 614920
uacauuaugcaaauacgca

SEQ ID NO: 614922 - RNA, 19 nt, Artificial Sequence
  Description of Artificial Sequence: Synthetic oligonucleotide
  Sense strand starting at position 2587 of SEQ ID NO: 585121
agagauuucucugacaaac

SEQ ID NO: 614923 - RNA, 19 nt, Artificial Sequence
  Description of Artificial Sequence: Synthetic oligonucleotide
  Antisense strand to SEQ ID NO: 614922
guuugucagagaaaucucu

SEQ ID NO: 614924 - RNA, 19 nt, Artificial Sequence
  Description of Artificial Sequence: Synthetic oligonucleotide
  Sense strand starting at position 2639 of SEQ ID NO: 585121
cagggaacucgcugauaca

SEQ ID NO: 614925 - RNA, 19 nt, Artificial Sequence
  Description of Artificial Sequence: Synthetic oligonucleotide
  Antisense strand to SEQ ID NO: 614924
uguaucagcgaguucccug

SEQ ID NO: 614926 - RNA, 19 nt, Artificial Sequence
  Description of Artificial Sequence: Synthetic oligonucleotide
  Sense strand starting at position 2776 of SEQ ID NO: 585121
agaauagaagcuuguaaua

SEQ ID NO: 614927 - RNA, 19 nt, Artificial Sequence
  Description of Artificial Sequence: Synthetic oligonucleotide
  Antisense strand to SEQ ID NO: 614926
uauuacaagcuucuauucu

SEQ ID NO: 614928 - RNA, 19 nt, Artificial Sequence
  Description of Artificial Sequence: Synthetic oligonucleotide
  Sense strand starting at position 2786 of SEQ ID NO: 585121
cuuguaauauaugcacaga

SEQ ID NO: 614929 - RNA, 19 nt, Artificial Sequence
  Description of Artificial Sequence: Synthetic oligonucleotide
  Antisense strand to SEQ ID NO: 614928
ucugugcauauauuacaag

SEQ ID NO: 614930 - RNA, 19 nt, Artificial Sequence
  Description of Artificial Sequence: Synthetic oligonucleotide
  Sense strand starting at position 2920 of SEQ ID NO: 585121
uugccuauggagcagagau

SEQ ID NO: 614931 - RNA, 19 nt, Artificial Sequence
  Description of Artificial Sequence: Synthetic oligonucleotide
  Antisense strand to SEQ ID NO: 614930
aucucugcuccauaggcaa

SEQ ID NO: 614932 - RNA, 19 nt, Artificial Sequence
  Description of Artificial Sequence: Synthetic oligonucleotide
  Sense strand starting at position 3004 of SEQ ID NO: 585121
gaguguggucgucuuguua

SEQ ID NO: 614933 - RNA, 19 nt, Artificial Sequence
  Description of Artificial Sequence: Synthetic oligonucleotide
  Antisense strand to SEQ ID NO: 614932
uaacaagacgaccacacuc

SEQ ID NO: 614934 - RNA, 19 nt, Artificial Sequence
  Description of Artificial Sequence: Synthetic oligonucleotide
  Sense strand starting at position 3038 of SEQ ID NO: 585121
ggacgugucgccucaacga

SEQ ID NO: 614935 - RNA, 19 nt, Artificial Sequence
  Description of Artificial Sequence: Synthetic oligonucleotide
  Antisense strand to SEQ ID NO: 614934
ucguugaggcgacacgucc

SEQ ID NO: 614936 - RNA, 19 nt, Artificial Sequence
  Description of Artificial Sequence: Synthetic oligonucleotide
  Sense strand starting at position 3040 of SEQ ID NO: 585121
acgugucgccucaacgaga

SEQ ID NO: 614937 - RNA, 19 nt, Artificial Sequence
  Description of Artificial Sequence: Synthetic oligonucleotide
  Antisense strand to SEQ ID NO: 614936
ucucguugaggcgacacgu

SEQ ID NO: 614938 - RNA, 19 nt, Artificial Sequence
  Description of Artificial Sequence: Synthetic oligonucleotide
  Sense strand starting at position 3239 of SEQ ID NO: 585121
ccggucuuucaaggagaga

SEQ ID NO: 614939 - RNA, 19 nt, Artificial Sequence
  Description of Artificial Sequence: Synthetic oligonucleotide
  Antisense strand to SEQ ID NO: 614938
ucucuccuugaaagaccgg

SEQ ID NO: 614940 - RNA, 19 nt, Artificial Sequence
  Description of Artificial Sequence: Synthetic oligonucleotide
  Sense strand starting at position 3297 of SEQ ID NO: 585121
uaguuaagucugggaccaa

SEQ ID NO: 614941 - RNA, 19 nt, Artificial Sequence
  Description of Artificial Sequence: Synthetic oligonucleotide
  Antisense strand to SEQ ID NO: 614940
uuggucccagacuuaacua

SEQ ID NO: 614942 - RNA, 19 nt, Artificial Sequence
  Description of Artificial Sequence: Synthetic oligonucleotide
  Sense strand starting at position 3415 of SEQ ID NO: 585121
agugaacacugagccaaua

SEQ ID NO: 614943 - RNA, 19 nt, Artificial Sequence
  Description of Artificial Sequence: Synthetic oligonucleotide
  Antisense strand to SEQ ID NO: 614942
uauuggcucaguguucacu

SEQ ID NO: 614944 - RNA, 19 nt, Artificial Sequence
  Description of Artificial Sequence: Synthetic oligonucleotide
  Sense strand starting at position 3449 of SEQ ID NO: 585121
uuugauauuugggaucaca

SEQ ID NO: 614945 - RNA, 19 nt, Artificial Sequence
  Description of Artificial Sequence: Synthetic oligonucleotide
  Antisense strand to SEQ ID NO: 614944
ugugaucccaaauaucaaa

SEQ ID NO: 614946 - RNA, 19 nt, Artificial Sequence
  Description of Artificial Sequence: Synthetic oligonucleotide
  Sense strand starting at position 3501 of SEQ ID NO: 585121
ggcauaaauuaccuuaagu

SEQ ID NO: 614947 - RNA, 19 nt, Artificial Sequence
  Description of Artificial Sequence: Synthetic oligonucleotide
  Antisense strand to SEQ ID NO: 614946
acuuaagguaauuuaugcc

SEQ ID NO: 614948 - RNA, 19 nt, Artificial Sequence
  Description of Artificial Sequence: Synthetic oligonucleotide
  Sense strand starting at position 3699 of SEQ ID NO: 585121
gguagugucagacaacugu

SEQ ID NO: 614949 - RNA, 19 nt, Artificial Sequence
  Description of Artificial Sequence: Synthetic oligonucleotide
  Antisense strand to SEQ ID NO: 614948
acaguugucugacacuacc

SEQ ID NO: 614950 - RNA, 19 nt, Artificial Sequence
  Description of Artificial Sequence: Synthetic oligonucleotide
  Sense strand starting at position 3762 of SEQ ID NO: 585121
gagacacugcagugaacau

SEQ ID NO: 614951 - RNA, 19 nt, Artificial Sequence
  Description of Artificial Sequence: Synthetic oligonucleotide
  Antisense strand to SEQ ID NO: 614950
auguucacugcagugucuc

SEQ ID NO: 614952 - RNA, 19 nt, Artificial Sequence
  Description of Artificial Sequence: Synthetic oligonucleotide
  Sense strand starting at position 61 of SEQ ID NO: 585122
uuuagugaugucuacaaua

SEQ ID NO: 614953 - RNA, 19 nt, Artificial Sequence
  Description of Artificial Sequence: Synthetic oligonucleotide
  Antisense strand to SEQ ID NO: 614952
uauuguagacaucacuaaa

SEQ ID NO: 614954 - RNA, 19 nt, Artificial Sequence
  Description of Artificial Sequence: Synthetic oligonucleotide
  Sense strand starting at position 63 of SEQ ID NO: 585122
uagugaugucuacaauaug

SEQ ID NO: 614955 - RNA, 19 nt, Artificial Sequence
  Description of Artificial Sequence: Synthetic oligonucleotide
  Antisense strand to SEQ ID NO: 614954
cauauuguagacaucacua

SEQ ID NO: 614956 - RNA, 19 nt, Artificial Sequence
  Description of Artificial Sequence: Synthetic oligonucleotide
  Sense strand starting at position 228 of SEQ ID NO: 585122
ugguauuuauaggacugau

SEQ ID NO: 614957 - RNA, 19 nt, Artificial Sequence
  Description of Artificial Sequence: Synthetic oligonucleotide
  Antisense strand to SEQ ID NO: 614956
aucaguccuauaaauacca

SEQ ID NO: 614958 - RNA, 19 nt, Artificial Sequence
  Description of Artificial Sequence: Synthetic oligonucleotide
  Sense strand starting at position 370 of SEQ ID NO: 585122
gguggauauuuauauacaa

SEQ ID NO: 614959 - RNA, 19 nt, Artificial Sequence
  Description of Artificial Sequence: Synthetic oligonucleotide
  Antisense strand to SEQ ID NO: 614958
uuguauauaaauauccacc

SEQ ID NO: 614960 - RNA, 19 nt, Artificial Sequence
  Description of Artificial Sequence: Synthetic oligonucleotide
  Sense strand starting at position 410 of SEQ ID NO: 585122
uuuaaaggacacuguguua

SEQ ID NO: 614961 - RNA, 19 nt, Artificial Sequence
  Description of Artificial Sequence: Synthetic oligonucleotide
  Antisense strand to SEQ ID NO: 614960
uaacacaguguccuuuaaa

SEQ ID NO: 614962 - RNA, 19 nt, Artificial Sequence
  Description of Artificial Sequence: Synthetic oligonucleotide
  Sense strand starting at position 413 of SEQ ID NO: 585122
aaaggacacuguguuagau

SEQ ID NO: 614963 - RNA, 19 nt, Artificial Sequence
  Description of Artificial Sequence: Synthetic oligonucleotide
  Antisense strand to SEQ ID NO: 614962
aucuaacacaguguccuuu

SEQ ID NO: 614964 - RNA, 19 nt, Artificial Sequence
  Description of Artificial Sequence: Synthetic oligonucleotide
  Sense strand starting at position 435 of SEQ ID NO: 585122
cgaaguuaagaucgagaau

SEQ ID NO: 614965 - RNA, 19 nt, Artificial Sequence
  Description of Artificial Sequence: Synthetic oligonucleotide
  Antisense strand to SEQ ID NO: 614964
auucucgaucuuaacuucg

SEQ ID NO: 614966 - RNA, 19 nt, Artificial Sequence
  Description of Artificial Sequence: Synthetic oligonucleotide
  Sense strand starting at position 438 of SEQ ID NO: 585122
aguuaagaucgagaauguu

SEQ ID NO: 614967 - RNA, 19 nt, Artificial Sequence
  Description of Artificial Sequence: Synthetic oligonucleotide
  Antisense strand to SEQ ID NO: 614966
aacauucucgaucuuaacu

SEQ ID NO: 614968 - RNA, 19 nt, Artificial Sequence
  Description of Artificial Sequence: Synthetic oligonucleotide
  Sense strand starting at position 441 of SEQ ID NO: 585122
uaagaucgagaauguuaac

SEQ ID NO: 614969 - RNA, 19 nt, Artificial Sequence
  Description of Artificial Sequence: Synthetic oligonucleotide
  Antisense strand to SEQ ID NO: 614968
guuaacauucucgaucuua

SEQ ID NO: 614970 - RNA, 19 nt, Artificial Sequence
  Description of Artificial Sequence: Synthetic oligonucleotide
  Sense strand starting at position 450 of SEQ ID NO: 585122
gaauguuaaccgcagcaac

SEQ ID NO: 614971 - RNA, 19 nt, Artificial Sequence
  Description of Artificial Sequence: Synthetic oligonucleotide
  Antisense strand to SEQ ID NO: 614970
guugcugcgguuaacauuc

SEQ ID NO: 614972 - RNA, 19 nt, Artificial Sequence
  Description of Artificial Sequence: Synthetic oligonucleotide
  Sense strand starting at position 514 of SEQ ID NO: 585122
uuguuaacugaccauaugu

SEQ ID NO: 614973 - RNA, 19 nt, Artificial Sequence
  Description of Artificial Sequence: Synthetic oligonucleotide
  Antisense strand to SEQ ID NO: 614972
acauauggucaguuaacaa

SEQ ID NO: 614974 - RNA, 19 nt, Artificial Sequence
  Description of Artificial Sequence: Synthetic oligonucleotide
  Sense strand starting at position 531 of SEQ ID NO: 585122
gugcaaguaccauauguac

SEQ ID NO: 614975 - RNA, 19 nt, Artificial Sequence
  Description of Artificial Sequence: Synthetic oligonucleotide
  Antisense strand to SEQ ID NO: 614974
guacauaugguacuugcac

SEQ ID NO: 614976 - RNA, 19 nt, Artificial Sequence
  Description of Artificial Sequence: Synthetic oligonucleotide
  Sense strand starting at position 545 of SEQ ID NO: 585122
uguaccauuguacagagua

SEQ ID NO: 614977 - RNA, 19 nt, Artificial Sequence
  Description of Artificial Sequence: Synthetic oligonucleotide
  Antisense strand to SEQ ID NO: 614976
uacucuguacaaugguaca

SEQ ID NO: 614978 - RNA, 19 nt, Artificial Sequence
  Description of Artificial Sequence: Synthetic oligonucleotide
  Sense strand starting at position 558 of SEQ ID NO: 585122
agaguacuauaaucgcauu

SEQ ID NO: 614979 - RNA, 19 nt, Artificial Sequence
  Description of Artificial Sequence: Synthetic oligonucleotide
  Antisense strand to SEQ ID NO: 614978
aaugcgauuauaguacucu

SEQ ID NO: 614980 - RNA, 19 nt, Artificial Sequence
  Description of Artificial Sequence: Synthetic oligonucleotide
  Sense strand starting at position 575 of SEQ ID NO: 585122
uuauuucaucacggcguga

SEQ ID NO: 614981 - RNA, 19 nt, Artificial Sequence
  Description of Artificial Sequence: Synthetic oligonucleotide
  Antisense strand to SEQ ID NO: 614980
ucacgccgugaugaaauaa

SEQ ID NO: 614982 - RNA, 19 nt, Artificial Sequence
  Description of Artificial Sequence: Synthetic oligonucleotide
  Sense strand starting at position 577 of SEQ ID NO: 585122
auuucaucacggcgugagu

SEQ ID NO: 614983 - RNA, 19 nt, Artificial Sequence
  Description of Artificial Sequence: Synthetic oligonucleotide
  Antisense strand to SEQ ID NO: 614982
acucacgccgugaugaaau

SEQ ID NO: 614984 - RNA, 19 nt, Artificial Sequence
  Description of Artificial Sequence: Synthetic oligonucleotide
  Sense strand starting at position 580 of SEQ ID NO: 585122
ucaucacggcgugaguaaa

SEQ ID NO: 614985 - RNA, 19 nt, Artificial Sequence
  Description of Artificial Sequence: Synthetic oligonucleotide
  Antisense strand to SEQ ID NO: 614984
uuuacucacgccgugauga

SEQ ID NO: 614986 - RNA, 19 nt, Artificial Sequence
  Description of Artificial Sequence: Synthetic oligonucleotide
  Sense strand starting at position 618 of SEQ ID NO: 585122
ugaguugacuuaucugauu

SEQ ID NO: 614987 - RNA, 19 nt, Artificial Sequence
  Description of Artificial Sequence: Synthetic oligonucleotide
  Antisense strand to SEQ ID NO: 614986
aaucagauaagucaacuca

SEQ ID NO: 614988 - RNA, 19 nt, Artificial Sequence
  Description of Artificial Sequence: Synthetic oligonucleotide
  Sense strand starting at position 821 of SEQ ID NO: 585122
ggacuauuggagcgcugau

SEQ ID NO: 614989 - RNA, 19 nt, Artificial Sequence
  Description of Artificial Sequence: Synthetic oligonucleotide
  Antisense strand to SEQ ID NO: 614988
aucagcgcuccaauagucc

SEQ ID NO: 614990 - RNA, 19 nt, Artificial Sequence
  Description of Artificial Sequence: Synthetic oligonucleotide
  Sense strand starting at position 833 of SEQ ID NO: 585122
cgcugaugacucuggauga

SEQ ID NO: 614991 - RNA, 19 nt, Artificial Sequence
  Description of Artificial Sequence: Synthetic oligonucleotide
  Antisense strand to SEQ ID NO: 614990
ucauccagagucaucagcg

SEQ ID NO: 614992 - RNA, 19 nt, Artificial Sequence
  Description of Artificial Sequence: Synthetic oligonucleotide
  Sense strand starting at position 1174 of SEQ ID NO: 585122
guuuguggcaaugauuacu

SEQ ID NO: 614993 - RNA, 19 nt, Artificial Sequence
  Description of Artificial Sequence: Synthetic oligonucleotide
  Antisense strand to SEQ ID NO: 614992
aguaaucauugccacaaac

SEQ ID NO: 614994 - RNA, 19 nt, Artificial Sequence
  Description of Artificial Sequence: Synthetic oligonucleotide
  Sense strand starting at position 1220 of SEQ ID NO: 585122
cguuauaaauaugucgaca

SEQ ID NO: 614995 - RNA, 19 nt, Artificial Sequence
  Description of Artificial Sequence: Synthetic oligonucleotide
  Antisense strand to SEQ ID NO: 614994
ugucgacauauuuauaacg

SEQ ID NO: 614996 - RNA, 19 nt, Artificial Sequence
  Description of Artificial Sequence: Synthetic oligonucleotide
  Sense strand starting at position 1245 of SEQ ID NO: 585122
ccaaguagauggucaucau

SEQ ID NO: 614997 - RNA, 19 nt, Artificial Sequence
  Description of Artificial Sequence: Synthetic oligonucleotide
  Antisense strand to SEQ ID NO: 614996
augaugaccaucuacuugg

SEQ ID NO: 614998 - RNA, 19 nt, Artificial Sequence
  Description of Artificial Sequence: Synthetic oligonucleotide
  Sense strand starting at position 1249 of SEQ ID NO: 585122
guagauggucaucaucaca

SEQ ID NO: 614999 - RNA, 19 nt, Artificial Sequence
  Description of Artificial Sequence: Synthetic oligonucleotide
  Antisense strand to SEQ ID NO: 614998
ugugaugaugaccaucuac

SEQ ID NO: 615000 - RNA, 19 nt, Artificial Sequence
  Description of Artificial Sequence: Synthetic oligonucleotide
  Sense strand starting at position 1369 of SEQ ID NO: 585122
ucggaugucagagggaaau

SEQ ID NO: 615001 - RNA, 19 nt, Artificial Sequence
  Description of Artificial Sequence: Synthetic oligonucleotide
  Antisense strand to SEQ ID NO: 615000
auuucccucugacauccga

SEQ ID NO: 615002 - RNA, 19 nt, Artificial Sequence
  Description of Artificial Sequence: Synthetic oligonucleotide
  Sense strand starting at position 1576 of SEQ ID NO: 585122
gcacgucagcaguucucaa

SEQ ID NO: 615003 - RNA, 19 nt, Artificial Sequence
  Description of Artificial Sequence: Synthetic oligonucleotide
  Antisense strand to SEQ ID NO: 615002
uugagaacugcugacgugc

SEQ ID NO: 615004 - RNA, 19 nt, Artificial Sequence
  Description of Artificial Sequence: Synthetic oligonucleotide
  Sense strand starting at position 2208 of SEQ ID NO: 585122
gcggguagugucuacaaau

SEQ ID NO: 615005 - RNA, 19 nt, Artificial Sequence
  Description of Artificial Sequence: Synthetic oligonucleotide
  Antisense strand to SEQ ID NO: 615004
auuuguagacacuacccgc

SEQ ID NO: 615006 - RNA, 19 nt, Artificial Sequence
  Description of Artificial Sequence: Synthetic oligonucleotide
  Sense strand starting at position 2221 of SEQ ID NO: 585122
acaaauccucuucggaaua

SEQ ID NO: 615007 - RNA, 19 nt, Artificial Sequence
  Description of Artificial Sequence: Synthetic oligonucleotide
  Antisense strand to SEQ ID NO: 615006
uauuccgaagaggauuugu

SEQ ID NO: 615008 - RNA, 19 nt, Artificial Sequence
  Description of Artificial Sequence: Synthetic oligonucleotide
  Sense strand starting at position 2232 of SEQ ID NO: 585122
ucggaauaaucccuuccga

SEQ ID NO: 615009 - RNA, 19 nt, Artificial Sequence
  Description of Artificial Sequence: Synthetic oligonucleotide
  Antisense strand to SEQ ID NO: 615008
ucggaagggauuauuccga

SEQ ID NO: 615010 - RNA, 19 nt, Artificial Sequence
  Description of Artificial Sequence: Synthetic oligonucleotide
  Sense strand starting at position 2376 of SEQ ID NO: 585122
augcacucugaagguauaa

SEQ ID NO: 615011 - RNA, 19 nt, Artificial Sequence
  Description of Artificial Sequence: Synthetic oligonucleotide
  Antisense strand to SEQ ID NO: 615010
uuauaccuucagagugcau

SEQ ID NO: 615012 - RNA, 19 nt, Artificial Sequence
  Description of Artificial Sequence: Synthetic oligonucleotide
  Sense strand starting at position 2875 of SEQ ID NO: 585122
gcaucauauuuaucuuguu

SEQ ID NO: 615013 - RNA, 19 nt, Artificial Sequence
  Description of Artificial Sequence: Synthetic oligonucleotide
  Antisense strand to SEQ ID NO: 615012
aacaagauaaauaugaugc

SEQ ID NO: 615014 - RNA, 19 nt, Artificial Sequence
  Description of Artificial Sequence: Synthetic oligonucleotide
  Sense strand starting at position 2954 of SEQ ID NO: 585122
gucugaaugcuccaaugag

SEQ ID NO: 615015 - RNA, 19 nt, Artificial Sequence
  Description of Artificial Sequence: Synthetic oligonucleotide
  Antisense strand to SEQ ID NO: 615014
cucauuggagcauucagac

SEQ ID NO: 615016 - RNA, 19 nt, Artificial Sequence
  Description of Artificial Sequence: Synthetic oligonucleotide
  Sense strand starting at position 3143 of SEQ ID NO: 585122
ucagcauaacuggguuacu

SEQ ID NO: 615017 - RNA, 19 nt, Artificial Sequence
  Description of Artificial Sequence: Synthetic oligonucleotide
  Antisense strand to SEQ ID NO: 615016
aguaacccaguuaugcuga

SEQ ID NO: 615018 - RNA, 19 nt, Artificial Sequence
  Description of Artificial Sequence: Synthetic oligonucleotide
  Sense strand starting at position 3146 of SEQ ID NO: 585122
gcauaacuggguuacucau

SEQ ID NO: 615019 - RNA, 19 nt, Artificial Sequence
  Description of Artificial Sequence: Synthetic oligonucleotide
  Antisense strand to SEQ ID NO: 615018
augaguaacccaguuaugc

SEQ ID NO: 615020 - RNA, 19 nt, Artificial Sequence
  Description of Artificial Sequence: Synthetic oligonucleotide
  Sense strand starting at position 3241 of SEQ ID NO: 585122
ugauaaauguuagcuguag

SEQ ID NO: 615021 - RNA, 19 nt, Artificial Sequence
  Description of Artificial Sequence: Synthetic oligonucleotide
  Antisense strand to SEQ ID NO: 615020
cuacagcuaacauuuauca

SEQ ID NO: 615022 - RNA, 19 nt, Artificial Sequence
  Description of Artificial Sequence: Synthetic oligonucleotide
  Sense strand starting at position 3302 of SEQ ID NO: 585122
aguguauguuucuucuaag

SEQ ID NO: 615023 - RNA, 19 nt, Artificial Sequence
  Description of Artificial Sequence: Synthetic oligonucleotide
  Antisense strand to SEQ ID NO: 615022
cuuagaagaaacauacacu

SEQ ID NO: 615024 - RNA, 19 nt, Artificial Sequence
  Description of Artificial Sequence: Synthetic oligonucleotide
  Sense strand starting at position 3366 of SEQ ID NO: 585122
acuucucagucucugagau

SEQ ID NO: 615025 - RNA, 19 nt, Artificial Sequence
  Description of Artificial Sequence: Synthetic oligonucleotide
  Antisense strand to SEQ ID NO: 615024
aucucagagacugagaagu

SEQ ID NO: 615026 - RNA, 19 nt, Artificial Sequence
  Description of Artificial Sequence: Synthetic oligonucleotide
  Sense strand starting at position 3582 of SEQ ID NO: 585122
gcggacacuuaggucaauu

SEQ ID NO: 615027 - RNA, 19 nt, Artificial Sequence
  Description of Artificial Sequence: Synthetic oligonucleotide
  Antisense strand to SEQ ID NO: 615026
aauugaccuaaguguccgc

SEQ ID NO: 615028 - RNA, 19 nt, Artificial Sequence
  Description of Artificial Sequence: Synthetic oligonucleotide
  Sense strand starting at position 3663 of SEQ ID NO: 585122
auauguauuuccuuucugu

SEQ ID NO: 615029 - RNA, 19 nt, Artificial Sequence
  Description of Artificial Sequence: Synthetic oligonucleotide
  Antisense strand to SEQ ID NO: 615028
acagaaaggaaauacauau

SEQ ID NO: 615030 - RNA, 19 nt, Artificial Sequence
  Description of Artificial Sequence: Synthetic oligonucleotide
  Sense strand starting at position 3671 of SEQ ID NO: 585122
uuccuuucuguuggaucua

SEQ ID NO: 615031 - RNA, 19 nt, Artificial Sequence
  Description of Artificial Sequence: Synthetic oligonucleotide
  Antisense strand to SEQ ID NO: 615030
uagauccaacagaaaggaa

SEQ ID NO: 615032 - RNA, 19 nt, Artificial Sequence
  Description of Artificial Sequence: Synthetic oligonucleotide
  Sense strand starting at position 330 of SEQ ID NO: 585123
cucuauacacguuagcauu

SEQ ID NO: 615033 - RNA, 19 nt, Artificial Sequence
  Description of Artificial Sequence: Synthetic oligonucleotide
  Antisense strand to SEQ ID NO: 615032
aaugcuaacguguauagag

SEQ ID NO: 615034 - RNA, 19 nt, Artificial Sequence
  Description of Artificial Sequence: Synthetic oligonucleotide
  Sense strand starting at position 336 of SEQ ID NO: 585123
acacguuagcauuacuuau

SEQ ID NO: 615035 - RNA, 19 nt, Artificial Sequence
  Description of Artificial Sequence: Synthetic oligonucleotide
  Antisense strand to SEQ ID NO: 615034
auaaguaaugcuaacgugu

SEQ ID NO: 615036 - RNA, 19 nt, Artificial Sequence
  Description of Artificial Sequence: Synthetic oligonucleotide
  Sense strand starting at position 338 of SEQ ID NO: 585123
acguuagcauuacuuauau

SEQ ID NO: 615037 - RNA, 19 nt, Artificial Sequence
  Description of Artificial Sequence: Synthetic oligonucleotide
  Antisense strand to SEQ ID NO: 615036
auauaaguaaugcuaacgu

SEQ ID NO: 615038 - RNA, 19 nt, Artificial Sequence
  Description of Artificial Sequence: Synthetic oligonucleotide
  Sense strand starting at position 397 of SEQ ID NO: 585123
gaagucucccaaugcuaga

SEQ ID NO: 615039 - RNA, 19 nt, Artificial Sequence
  Description of Artificial Sequence: Synthetic oligonucleotide
  Antisense strand to SEQ ID NO: 615038
ucuagcauugggagacuuc

SEQ ID NO: 615040 - RNA, 19 nt, Artificial Sequence
  Description of Artificial Sequence: Synthetic oligonucleotide
  Sense strand starting at position 447 of SEQ ID NO: 585123
cuaguacacuugguauaca

SEQ ID NO: 615041 - RNA, 19 nt, Artificial Sequence
  Description of Artificial Sequence: Synthetic oligonucleotide
  Antisense strand to SEQ ID NO: 615040
uguauaccaaguguacuag

SEQ ID NO: 615042 - RNA, 19 nt, Artificial Sequence
  Description of Artificial Sequence: Synthetic oligonucleotide
  Sense strand starting at position 450 of SEQ ID NO: 585123
guacacuugguauacauua

SEQ ID NO: 615043 - RNA, 19 nt, Artificial Sequence
  Description of Artificial Sequence: Synthetic oligonucleotide
  Antisense strand to SEQ ID NO: 615042
uaauguauaccaaguguac

SEQ ID NO: 615044 - RNA, 19 nt, Artificial Sequence
  Description of Artificial Sequence: Synthetic oligonucleotide
  Sense strand starting at position 455 of SEQ ID NO: 585123
cuugguauacauuaaaguu

SEQ ID NO: 615045 - RNA, 19 nt, Artificial Sequence
  Description of Artificial Sequence: Synthetic oligonucleotide
  Antisense strand to SEQ ID NO: 615044
aacuuuaauguauaccaag

SEQ ID NO: 615046 - RNA, 19 nt, Artificial Sequence
  Description of Artificial Sequence: Synthetic oligonucleotide
  Sense strand starting at position 468 of SEQ ID NO: 585123
aaaguuugccuauauucga

SEQ ID NO: 615047 - RNA, 19 nt, Artificial Sequence
  Description of Artificial Sequence: Synthetic oligonucleotide
  Antisense strand to SEQ ID NO: 615046
ucgaauauaggcaaacuuu

SEQ ID NO: 615048 - RNA, 19 nt, Artificial Sequence
  Description of Artificial Sequence: Synthetic oligonucleotide
  Sense strand starting at position 653 of SEQ ID NO: 585123
agugacuaagcaugaagaa

SEQ ID NO: 615049 - RNA, 19 nt, Artificial Sequence
  Description of Artificial Sequence: Synthetic oligonucleotide
  Antisense strand to SEQ ID NO: 615048
uucuucaugcuuagucacu

SEQ ID NO: 615050 - RNA, 19 nt, Artificial Sequence
  Description of Artificial Sequence: Synthetic oligonucleotide
  Sense strand starting at position 682 of SEQ ID NO: 585123
gcggaaaccgcauauugaa

SEQ ID NO: 615051 - RNA, 19 nt, Artificial Sequence
  Description of Artificial Sequence: Synthetic oligonucleotide
  Antisense strand to SEQ ID NO: 615050
uucaauaugcgguuuccgc

SEQ ID NO: 615052 - RNA, 19 nt, Artificial Sequence
  Description of Artificial Sequence: Synthetic oligonucleotide
  Sense strand starting at position 823 of SEQ ID NO: 585123
uuccauaggucucuaaaga

SEQ ID NO: 615053 - RNA, 19 nt, Artificial Sequence
  Description of Artificial Sequence: Synthetic oligonucleotide
  Antisense strand to SEQ ID NO: 615052
ucuuuagagaccuauggaa

SEQ ID NO: 615054 - RNA, 19 nt, Artificial Sequence
  Description of Artificial Sequence: Synthetic oligonucleotide
  Sense strand starting at position 927 of SEQ ID NO: 585123
ccgauaucagaaugcccau

SEQ ID NO: 615055 - RNA, 19 nt, Artificial Sequence
  Description of Artificial Sequence: Synthetic oligonucleotide
  Antisense strand to SEQ ID NO: 615054
augggcauucugauaucgg

SEQ ID NO: 615056 - RNA, 19 nt, Artificial Sequence
  Description of Artificial Sequence: Synthetic oligonucleotide
  Sense strand starting at position 974 of SEQ ID NO: 585123
cgaaguaaucauggaauaa

SEQ ID NO: 615057 - RNA, 19 nt, Artificial Sequence
  Description of Artificial Sequence: Synthetic oligonucleotide
  Antisense strand to SEQ ID NO: 615056
uuauuccaugauuacuucg

SEQ ID NO: 615058 - RNA, 19 nt, Artificial Sequence
  Description of Artificial Sequence: Synthetic oligonucleotide
  Sense strand starting at position 993 of SEQ ID NO: 585123
aaggucaauucguucccaa

SEQ ID NO: 615059 - RNA, 19 nt, Artificial Sequence
  Description of Artificial Sequence: Synthetic oligonucleotide
  Antisense strand to SEQ ID NO: 615058
uugggaacgaauugaccuu

SEQ ID NO: 615060 - RNA, 19 nt, Artificial Sequence
  Description of Artificial Sequence: Synthetic oligonucleotide
  Sense strand starting at position 1080 of SEQ ID NO: 585123
guacuaggacauugguaaa

SEQ ID NO: 615061 - RNA, 19 nt, Artificial Sequence
  Description of Artificial Sequence: Synthetic oligonucleotide
  Antisense strand to SEQ ID NO: 615060
uuuaccaauguccuaguac

SEQ ID NO: 615062 - RNA, 19 nt, Artificial Sequence
  Description of Artificial Sequence: Synthetic oligonucleotide
  Sense strand starting at position 1156 of SEQ ID NO: 585123
cuggcagauuacuuugaau

SEQ ID NO: 615063 - RNA, 19 nt, Artificial Sequence
  Description of Artificial Sequence: Synthetic oligonucleotide
  Antisense strand to SEQ ID NO: 615062
auucaaaguaaucugccag

SEQ ID NO: 615064 - RNA, 19 nt, Artificial Sequence
  Description of Artificial Sequence: Synthetic oligonucleotide
  Sense strand starting at position 1158 of SEQ ID NO: 585123
ggcagauuacuuugaauuc

SEQ ID NO: 615065 - RNA, 19 nt, Artificial Sequence
  Description of Artificial Sequence: Synthetic oligonucleotide
  Antisense strand to SEQ ID NO: 615064
gaauucaaaguaaucugcc

SEQ ID NO: 615066 - RNA, 19 nt, Artificial Sequence
  Description of Artificial Sequence: Synthetic oligonucleotide
  Sense strand starting at position 1175 of SEQ ID NO: 585123
ucagcacgcgcucuauaaa

SEQ ID NO: 615067 - RNA, 19 nt, Artificial Sequence
  Description of Artificial Sequence: Synthetic oligonucleotide
  Antisense strand to SEQ ID NO: 615066
uuuauagagcgcgugcuga

SEQ ID NO: 615068 - RNA, 19 nt, Artificial Sequence
  Description of Artificial Sequence: Synthetic oligonucleotide
  Sense strand starting at position 1297 of SEQ ID NO: 585123
aggcuaagauccucucacu

SEQ ID NO: 615069 - RNA, 19 nt, Artificial Sequence
  Description of Artificial Sequence: Synthetic oligonucleotide
  Antisense strand to SEQ ID NO: 615068
agugagaggaucuuagccu

SEQ ID NO: 615070 - RNA, 19 nt, Artificial Sequence
  Description of Artificial Sequence: Synthetic oligonucleotide
  Sense strand starting at position 1433 of SEQ ID NO: 585123
gaacgagaagcuuaggguu

SEQ ID NO: 615071 - RNA, 19 nt, Artificial Sequence
  Description of Artificial Sequence: Synthetic oligonucleotide
  Antisense strand to SEQ ID NO: 615070
aacccuaagcuucucguuc

SEQ ID NO: 615072 - RNA, 19 nt, Artificial Sequence
  Description of Artificial Sequence: Synthetic oligonucleotide
  Sense strand starting at position 1441 of SEQ ID NO: 585123
agcuuaggguucccuaagu

SEQ ID NO: 615073 - RNA, 19 nt, Artificial Sequence
  Description of Artificial Sequence: Synthetic oligonucleotide
  Antisense strand to SEQ ID NO: 615072
acuuagggaacccuaagcu

SEQ ID NO: 615074 - RNA, 19 nt, Artificial Sequence
  Description of Artificial Sequence: Synthetic oligonucleotide
  Sense strand starting at position 2632 of SEQ ID NO: 585123
cgucauuccgcgaagguaa

SEQ ID NO: 615075 - RNA, 19 nt, Artificial Sequence
  Description of Artificial Sequence: Synthetic oligonucleotide
  Antisense strand to SEQ ID NO: 615074
uuaccuucgcggaaugacg

SEQ ID NO: 615076 - RNA, 19 nt, Artificial Sequence
  Description of Artificial Sequence: Synthetic oligonucleotide
  Sense strand starting at position 2681 of SEQ ID NO: 585123
ugcaguguaccuuacauau

SEQ ID NO: 615077 - RNA, 19 nt, Artificial Sequence
  Description of Artificial Sequence: Synthetic oligonucleotide
  Antisense strand to SEQ ID NO: 615076
auauguaagguacacugca

SEQ ID NO: 615078 - RNA, 19 nt, Artificial Sequence
  Description of Artificial Sequence: Synthetic oligonucleotide
  Sense strand starting at position 2719 of SEQ ID NO: 585123
cccacagggcuguaucaaa

SEQ ID NO: 615079 - RNA, 19 nt, Artificial Sequence
  Description of Artificial Sequence: Synthetic oligonucleotide
  Antisense strand to SEQ ID NO: 615078
uuugauacagcccuguggg

SEQ ID NO: 615080 - RNA, 19 nt, Artificial Sequence
  Description of Artificial Sequence: Synthetic oligonucleotide
  Sense strand starting at position 2876 of SEQ ID NO: 585123
gcaagagaauuacaacaaa

SEQ ID NO: 615081 - RNA, 19 nt, Artificial Sequence
  Description of Artificial Sequence: Synthetic oligonucleotide
  Antisense strand to SEQ ID NO: 615080
uuuguuguaauucucuugc

SEQ ID NO: 615082 - RNA, 19 nt, Artificial Sequence
  Description of Artificial Sequence: Synthetic oligonucleotide
  Sense strand starting at position 2894 of SEQ ID NO: 585123
aggaaagaugguuguaauc

SEQ ID NO: 615083 - RNA, 19 nt, Artificial Sequence
  Description of Artificial Sequence: Synthetic oligonucleotide
  Antisense strand to SEQ ID NO: 615082
gauuacaaccaucuuuccu

SEQ ID NO: 615084 - RNA, 19 nt, Artificial Sequence
  Description of Artificial Sequence: Synthetic oligonucleotide
  Sense strand starting at position 3021 of SEQ ID NO: 585123
uuugcuauccuacagagaa

SEQ ID NO: 615085 - RNA, 19 nt, Artificial Sequence
  Description of Artificial Sequence: Synthetic oligonucleotide
  Antisense strand to SEQ ID NO: 615084
uucucuguaggauagcaaa

SEQ ID NO: 615086 - RNA, 19 nt, Artificial Sequence
  Description of Artificial Sequence: Synthetic oligonucleotide
  Sense strand starting at position 3034 of SEQ ID NO: 585123
agagaaagccuguggguuu

SEQ ID NO: 615087 - RNA, 19 nt, Artificial Sequence
  Description of Artificial Sequence: Synthetic oligonucleotide
  Antisense strand to SEQ ID NO: 615086
aaacccacaggcuuucucu

SEQ ID NO: 615088 - RNA, 19 nt, Artificial Sequence
  Description of Artificial Sequence: Synthetic oligonucleotide
  Sense strand starting at position 3112 of SEQ ID NO: 585123
aguaaagguugauuccuua

SEQ ID NO: 615089 - RNA, 19 nt, Artificial Sequence
  Description of Artificial Sequence: Synthetic oligonucleotide
  Antisense strand to SEQ ID NO: 615088
uaaggaaucaaccuuuacu

SEQ ID NO: 615090 - RNA, 19 nt, Artificial Sequence
  Description of Artificial Sequence: Synthetic oligonucleotide
  Sense strand starting at position 3116 of SEQ ID NO: 585123
aagguugauuccuuaaaug

SEQ ID NO: 615091 - RNA, 19 nt, Artificial Sequence
  Description of Artificial Sequence: Synthetic oligonucleotide
  Antisense strand to SEQ ID NO: 615090
cauuuaaggaaucaaccuu

SEQ ID NO: 615092 - RNA, 19 nt, Artificial Sequence
  Description of Artificial Sequence: Synthetic oligonucleotide
  Sense strand starting at position 3172 of SEQ ID NO: 585123
gccugauuuggcuguagac

SEQ ID NO: 615093 - RNA, 19 nt, Artificial Sequence
  Description of Artificial Sequence: Synthetic oligonucleotide
  Antisense strand to SEQ ID NO: 615092
gucuacagccaaaucaggc

SEQ ID NO: 615094 - RNA, 19 nt, Artificial Sequence
  Description of Artificial Sequence: Synthetic oligonucleotide
  Sense strand starting at position 3319 of SEQ ID NO: 585123
gcucacuguccuggauuga

SEQ ID NO: 615095 - RNA, 19 nt, Artificial Sequence
  Description of Artificial Sequence: Synthetic oligonucleotide
  Antisense strand to SEQ ID NO: 615094
ucaauccaggacagugagc

SEQ ID NO: 615096 - RNA, 19 nt, Artificial Sequence
  Description of Artificial Sequence: Synthetic oligonucleotide
  Sense strand starting at position 3389 of SEQ ID NO: 585123
agauuaucucuagagcccu

SEQ ID NO: 615097 - RNA, 19 nt, Artificial Sequence
  Description of Artificial Sequence: Synthetic oligonucleotide
  Antisense strand to SEQ ID NO: 615096
agggcucuagagauaaucu

SEQ ID NO: 615098 - RNA, 19 nt, Artificial Sequence
  Description of Artificial Sequence: Synthetic oligonucleotide
  Sense strand starting at position 3508 of SEQ ID NO: 585123
gccugaaguugagucauuc

SEQ ID NO: 615099 - RNA, 19 nt, Artificial Sequence
  Description of Artificial Sequence: Synthetic oligonucleotide
  Antisense strand to SEQ ID NO: 615098
gaaugacucaacuucaggc

SEQ ID NO: 615100 - RNA, 19 nt, Artificial Sequence
  Description of Artificial Sequence: Synthetic oligonucleotide
  Sense strand starting at position 3530 of SEQ ID NO: 585123
uuggaaaccucauugucuu

SEQ ID NO: 615101 - RNA, 19 nt, Artificial Sequence
  Description of Artificial Sequence: Synthetic oligonucleotide
  Antisense strand to SEQ ID NO: 615100
aagacaaugagguuuccaa

SEQ ID NO: 615102 - RNA, 19 nt, Artificial Sequence
  Description of Artificial Sequence: Synthetic oligonucleotide
  Sense strand starting at position 3695 of SEQ ID NO: 585123
uguguacaccgugaacuau

SEQ ID NO: 615103 - RNA, 19 nt, Artificial Sequence
  Description of Artificial Sequence: Synthetic oligonucleotide
  Antisense strand to SEQ ID NO: 615102
auaguucacgguguacaca

SEQ ID NO: 615104 - RNA, 19 nt, Artificial Sequence
  Description of Artificial Sequence: Synthetic oligonucleotide
  Sense strand starting at position 3749 of SEQ ID NO: 585123
uucugucaaucauugaguu

SEQ ID NO: 615105 - RNA, 19 nt, Artificial Sequence
  Description of Artificial Sequence: Synthetic oligonucleotide
  Antisense strand to SEQ ID NO: 615104
aacucaaugauugacagaa

SEQ ID NO: 615106 - RNA, 19 nt, Artificial Sequence
  Description of Artificial Sequence: Synthetic oligonucleotide
  Sense strand starting at position 3750 of SEQ ID NO: 585123
ucugucaaucauugaguuu

SEQ ID NO: 615107 - RNA, 19 nt, Artificial Sequence
  Description of Artificial Sequence: Synthetic oligonucleotide
  Antisense strand to SEQ ID NO: 615106
aaacucaaugauugacaga

SEQ ID NO: 615108 - RNA, 19 nt, Artificial Sequence
  Description of Artificial Sequence: Synthetic oligonucleotide
  Sense strand starting at position 3756 of SEQ ID NO: 585123
aaucauugaguuuggccaa

SEQ ID NO: 615109 - RNA, 19 nt, Artificial Sequence
  Description of Artificial Sequence: Synthetic oligonucleotide
  Antisense strand to SEQ ID NO: 615108
uuggccaaacucaaugauu

SEQ ID NO: 615110 - RNA, 19 nt, Artificial Sequence
  Description of Artificial Sequence: Synthetic oligonucleotide
  Sense strand starting at position 3759 of SEQ ID NO: 585123
cauugaguuuggccaauca

SEQ ID NO: 615111 - RNA, 19 nt, Artificial Sequence
  Description of Artificial Sequence: Synthetic oligonucleotide
  Antisense strand to SEQ ID NO: 615110
ugauuggccaaacucaaug

SEQ ID NO: 615112 - RNA, 19 nt, Artificial Sequence
  Description of Artificial Sequence: Synthetic oligonucleotide
  Sense strand starting at position 242 of SEQ ID NO: 585124
uggguuauuucucagguaa

SEQ ID NO: 615113 - RNA, 19 nt, Artificial Sequence
  Description of Artificial Sequence: Synthetic oligonucleotide
  Antisense strand to SEQ ID NO: 615112
uuaccugagaaauaaccca

SEQ ID NO: 615114 - RNA, 19 nt, Artificial Sequence
  Description of Artificial Sequence: Synthetic oligonucleotide
  Sense strand starting at position 311 of SEQ ID NO: 585124
auaagcauuugagugcauu

SEQ ID NO: 615115 - RNA, 19 nt, Artificial Sequence
  Description of Artificial Sequence: Synthetic oligonucleotide
  Antisense strand to SEQ ID NO: 615114
aaugcacucaaaugcuuau

SEQ ID NO: 615116 - RNA, 19 nt, Artificial Sequence
  Description of Artificial Sequence: Synthetic oligonucleotide
  Sense strand starting at position 335 of SEQ ID NO: 585124
cucugcaagcuuugaaaua

SEQ ID NO: 615117 - RNA, 19 nt, Artificial Sequence
  Description of Artificial Sequence: Synthetic oligonucleotide
  Antisense strand to SEQ ID NO: 615116
uauuucaaagcuugcagag

SEQ ID NO: 615118 - RNA, 19 nt, Artificial Sequence
  Description of Artificial Sequence: Synthetic oligonucleotide
  Sense strand starting at position 369 of SEQ ID NO: 585124
cuucaugaguuaucgggaa

SEQ ID NO: 615119 - RNA, 19 nt, Artificial Sequence
  Description of Artificial Sequence: Synthetic oligonucleotide
  Antisense strand to SEQ ID NO: 615118
uucccgauaacucaugaag

SEQ ID NO: 615120 - RNA, 19 nt, Artificial Sequence
  Description of Artificial Sequence: Synthetic oligonucleotide
  Sense strand starting at position 433 of SEQ ID NO: 585124
ggacaaauucaagguucgu

SEQ ID NO: 615121 - RNA, 19 nt, Artificial Sequence
  Description of Artificial Sequence: Synthetic oligonucleotide
  Antisense strand to SEQ ID NO: 615120
acgaaccuugaauuugucc

SEQ ID NO: 615122 - RNA, 19 nt, Artificial Sequence
  Description of Artificial Sequence: Synthetic oligonucleotide
  Sense strand starting at position 493 of SEQ ID NO: 585124
ggcccugagacuggguuaa

SEQ ID NO: 615123 - RNA, 19 nt, Artificial Sequence
  Description of Artificial Sequence: Synthetic oligonucleotide
  Antisense strand to SEQ ID NO: 615122
uuaacccagucucagggcc

SEQ ID NO: 615124 - RNA, 19 nt, Artificial Sequence
  Description of Artificial Sequence: Synthetic oligonucleotide
  Sense strand starting at position 556 of SEQ ID NO: 585124
ggaugucccaguugaguuu

SEQ ID NO: 615125 - RNA, 19 nt, Artificial Sequence
  Description of Artificial Sequence: Synthetic oligonucleotide
  Antisense strand to SEQ ID NO: 615124
aaacucaacugggacaucc

SEQ ID NO: 615126 - RNA, 19 nt, Artificial Sequence
  Description of Artificial Sequence: Synthetic oligonucleotide
  Sense strand starting at position 565 of SEQ ID NO: 585124
aguugaguuugguccaaug

SEQ ID NO: 615127 - RNA, 19 nt, Artificial Sequence
  Description of Artificial Sequence: Synthetic oligonucleotide
  Antisense strand to SEQ ID NO: 615126
cauuggaccaaacucaacu

SEQ ID NO: 615128 - RNA, 19 nt, Artificial Sequence
  Description of Artificial Sequence: Synthetic oligonucleotide
  Sense strand starting at position 567 of SEQ ID NO: 585124
uugaguuugguccaaugag

SEQ ID NO: 615129 - RNA, 19 nt, Artificial Sequence
  Description of Artificial Sequence: Synthetic oligonucleotide
  Antisense strand to SEQ ID NO: 615128
cucauuggaccaaacucaa

SEQ ID NO: 615130 - RNA, 19 nt, Artificial Sequence
  Description of Artificial Sequence: Synthetic oligonucleotide
  Sense strand starting at position 931 of SEQ ID NO: 585124
ugggucuuccgaggaggaa

SEQ ID NO: 615131 - RNA, 19 nt, Artificial Sequence
  Description of Artificial Sequence: Synthetic oligonucleotide
  Antisense strand to SEQ ID NO: 615130
uuccuccucggaagaccca

SEQ ID NO: 615132 - RNA, 19 nt, Artificial Sequence
  Description of Artificial Sequence: Synthetic oligonucleotide
  Sense strand starting at position 1806 of SEQ ID NO: 585124
cuggcuuccaucuggagau

SEQ ID NO: 615133 - RNA, 19 nt, Artificial Sequence
  Description of Artificial Sequence: Synthetic oligonucleotide
  Antisense strand to SEQ ID NO: 615132
aucuccagauggaagccag

SEQ ID NO: 615134 - RNA, 19 nt, Artificial Sequence
  Description of Artificial Sequence: Synthetic oligonucleotide
  Sense strand starting at position 1810 of SEQ ID NO: 585124
cuuccaucuggagaucuuu

SEQ ID NO: 615135 - RNA, 19 nt, Artificial Sequence
  Description of Artificial Sequence: Synthetic oligonucleotide
  Antisense strand to SEQ ID NO: 615134
aaagaucuccagauggaag

SEQ ID NO: 615136 - RNA, 19 nt, Artificial Sequence
  Description of Artificial Sequence: Synthetic oligonucleotide
  Sense strand starting at position 1820 of SEQ ID NO: 585124
gagaucuuugauggguaca

SEQ ID NO: 615137 - RNA, 19 nt, Artificial Sequence
  Description of Artificial Sequence: Synthetic oligonucleotide
  Antisense strand to SEQ ID NO: 615136
uguacccaucaaagaucuc

SEQ ID NO: 615138 - RNA, 19 nt, Artificial Sequence
  Description of Artificial Sequence: Synthetic oligonucleotide
  Sense strand starting at position 1821 of SEQ ID NO: 585124
agaucuuugauggguacaa

SEQ ID NO: 615139 - RNA, 19 nt, Artificial Sequence
  Description of Artificial Sequence: Synthetic oligonucleotide
  Antisense strand to SEQ ID NO: 615138
uuguacccaucaaagaucu

SEQ ID NO: 615140 - RNA, 19 nt, Artificial Sequence
  Description of Artificial Sequence: Synthetic oligonucleotide
  Sense strand starting at position 1822 of SEQ ID NO: 585124
gaucuuugauggguacaaa

SEQ ID NO: 615141 - RNA, 19 nt, Artificial Sequence
  Description of Artificial Sequence: Synthetic oligonucleotide
  Antisense strand to SEQ ID NO: 615140
uuuguacccaucaaagauc

SEQ ID NO: 615142 - RNA, 19 nt, Artificial Sequence
  Description of Artificial Sequence: Synthetic oligonucleotide
  Sense strand starting at position 1955 of SEQ ID NO: 585124
cccgccucucuaggauuua

SEQ ID NO: 615143 - RNA, 19 nt, Artificial Sequence
  Description of Artificial Sequence: Synthetic oligonucleotide
  Antisense strand to SEQ ID NO: 615142
uaaauccuagagaggcggg

SEQ ID NO: 615144 - RNA, 19 nt, Artificial Sequence
  Description of Artificial Sequence: Synthetic oligonucleotide
  Sense strand starting at position 2221 of SEQ ID NO: 585124
ccuugcaagcgcguuuauu

SEQ ID NO: 615145 - RNA, 19 nt, Artificial Sequence
  Description of Artificial Sequence: Synthetic oligonucleotide
  Antisense strand to SEQ ID NO: 615144
aauaaacgcgcuugcaagg

SEQ ID NO: 615146 - RNA, 19 nt, Artificial Sequence
  Description of Artificial Sequence: Synthetic oligonucleotide
  Sense strand starting at position 2270 of SEQ ID NO: 585124
gguuuauaggaacguuaag

SEQ ID NO: 615147 - RNA, 19 nt, Artificial Sequence
  Description of Artificial Sequence: Synthetic oligonucleotide
  Antisense strand to SEQ ID NO: 615146
cuuaacguuccuauaaacc

SEQ ID NO: 615148 - RNA, 19 nt, Artificial Sequence
  Description of Artificial Sequence: Synthetic oligonucleotide
  Sense strand starting at position 2449 of SEQ ID NO: 585124
cauggacgucaguaugaaa

SEQ ID NO: 615149 - RNA, 19 nt, Artificial Sequence
  Description of Artificial Sequence: Synthetic oligonucleotide
  Antisense strand to SEQ ID NO: 615148
uuucauacugacguccaug

SEQ ID NO: 615150 - RNA, 19 nt, Artificial Sequence
  Description of Artificial Sequence: Synthetic oligonucleotide
  Sense strand starting at position 2464 of SEQ ID NO: 585124
gaaaguguaccggaguauu

SEQ ID NO: 615151 - RNA, 19 nt, Artificial Sequence
  Description of Artificial Sequence: Synthetic oligonucleotide
  Antisense strand to SEQ ID NO: 615150
aauacuccgguacacuuuc

SEQ ID NO: 615152 - RNA, 19 nt, Artificial Sequence
  Description of Artificial Sequence: Synthetic oligonucleotide
  Sense strand starting at position 2467 of SEQ ID NO: 585124
aguguaccggaguauuagu

SEQ ID NO: 615153 - RNA, 19 nt, Artificial Sequence
  Description of Artificial Sequence: Synthetic oligonucleotide
  Antisense strand to SEQ ID NO: 615152
acuaauacuccgguacacu

SEQ ID NO: 615154 - RNA, 19 nt, Artificial Sequence
  Description of Artificial Sequence: Synthetic oligonucleotide
  Sense strand starting at position 2474 of SEQ ID NO: 585124
cggaguauuagugaugcuu

SEQ ID NO: 615155 - RNA, 19 nt, Artificial Sequence
  Description of Artificial Sequence: Synthetic oligonucleotide
  Antisense strand to SEQ ID NO: 615154
aagcaucacuaauacuccg

SEQ ID NO: 615156 - RNA, 19 nt, Artificial Sequence
  Description of Artificial Sequence: Synthetic oligonucleotide
  Sense strand starting at position 2480 of SEQ ID NO: 585124
auuagugaugcuuaacuuu

SEQ ID NO: 615157 - RNA, 19 nt, Artificial Sequence
  Description of Artificial Sequence: Synthetic oligonucleotide
  Antisense strand to SEQ ID NO: 615156
aaaguuaagcaucacuaau

SEQ ID NO: 615158 - RNA, 19 nt, Artificial Sequence
  Description of Artificial Sequence: Synthetic oligonucleotide
  Sense strand starting at position 2529 of SEQ ID NO: 585124
agugcauucccugaacuca

SEQ ID NO: 615159 - RNA, 19 nt, Artificial Sequence
  Description of Artificial Sequence: Synthetic oligonucleotide
  Antisense strand to SEQ ID NO: 615158
ugaguucagggaaugcacu

SEQ ID NO: 615160 - RNA, 19 nt, Artificial Sequence
  Description of Artificial Sequence: Synthetic oligonucleotide
  Sense strand starting at position 2595 of SEQ ID NO: 585124
cggcgaauccuccuuugcu

SEQ ID NO: 615161 - RNA, 19 nt, Artificial Sequence
  Description of Artificial Sequence: Synthetic oligonucleotide
  Antisense strand to SEQ ID NO: 615160
agcaaaggaggauucgccg

SEQ ID NO: 615162 - RNA, 19 nt, Artificial Sequence
  Description of Artificial Sequence: Synthetic oligonucleotide
  Sense strand starting at position 2738 of SEQ ID NO: 585124
uggauccugucuuuaccua

SEQ ID NO: 615163 - RNA, 19 nt, Artificial Sequence
  Description of Artificial Sequence: Synthetic oligonucleotide
  Antisense strand to SEQ ID NO: 615162
uagguaaagacaggaucca

SEQ ID NO: 615164 - RNA, 19 nt, Artificial Sequence
  Description of Artificial Sequence: Synthetic oligonucleotide
  Sense strand starting at position 2739 of SEQ ID NO: 585124
ggauccugucuuuaccuaa

SEQ ID NO: 615165 - RNA, 19 nt, Artificial Sequence
  Description of Artificial Sequence: Synthetic oligonucleotide
  Antisense strand to SEQ ID NO: 615164
uuagguaaagacaggaucc

SEQ ID NO: 615166 - RNA, 19 nt, Artificial Sequence
  Description of Artificial Sequence: Synthetic oligonucleotide
  Sense strand starting at position 2899 of SEQ ID NO: 585124
agugucacucuugaugacu

SEQ ID NO: 615167 - RNA, 19 nt, Artificial Sequence
  Description of Artificial Sequence: Synthetic oligonucleotide
  Antisense strand to SEQ ID NO: 615166
agucaucaagagugacacu

SEQ ID NO: 615168 - RNA, 19 nt, Artificial Sequence
  Description of Artificial Sequence: Synthetic oligonucleotide
  Sense strand starting at position 2902 of SEQ ID NO: 585124
gucacucuugaugacuuaa

SEQ ID NO: 615169 - RNA, 19 nt, Artificial Sequence
  Description of Artificial Sequence: Synthetic oligonucleotide
  Antisense strand to SEQ ID NO: 615168
uuaagucaucaagagugac

SEQ ID NO: 615170 - RNA, 19 nt, Artificial Sequence
  Description of Artificial Sequence: Synthetic oligonucleotide
  Sense strand starting at position 2987 of SEQ ID NO: 585124
gggcuagauccuggagauu

SEQ ID NO: 615171 - RNA, 19 nt, Artificial Sequence
  Description of Artificial Sequence: Synthetic oligonucleotide
  Antisense strand to SEQ ID NO: 615170
aaucuccaggaucuagccc

SEQ ID NO: 615172 - RNA, 19 nt, Artificial Sequence
  Description of Artificial Sequence: Synthetic oligonucleotide
  Sense strand starting at position 3027 of SEQ ID NO: 585124
cuguccuuuagggaguuua

SEQ ID NO: 615173 - RNA, 19 nt, Artificial Sequence
  Description of Artificial Sequence: Synthetic oligonucleotide
  Antisense strand to SEQ ID NO: 615172
uaaacucccuaaaggacag

SEQ ID NO: 615174 - RNA, 19 nt, Artificial Sequence
  Description of Artificial Sequence: Synthetic oligonucleotide
  Sense strand starting at position 3092 of SEQ ID NO: 585124
gaaagaggauaugaaagaa

SEQ ID NO: 615175 - RNA, 19 nt, Artificial Sequence
  Description of Artificial Sequence: Synthetic oligonucleotide
  Antisense strand to SEQ ID NO: 615174
uucuuucauauccucuuuc

SEQ ID NO: 615176 - RNA, 19 nt, Artificial Sequence
  Description of Artificial Sequence: Synthetic oligonucleotide
  Sense strand starting at position 3130 of SEQ ID NO: 585124
ugcagauuaguauagguua

SEQ ID NO: 615177 - RNA, 19 nt, Artificial Sequence
  Description of Artificial Sequence: Synthetic oligonucleotide
  Antisense strand to SEQ ID NO: 615176
uaaccuauacuaaucugca

SEQ ID NO: 615178 - RNA, 19 nt, Artificial Sequence
  Description of Artificial Sequence: Synthetic oligonucleotide
  Sense strand starting at position 3257 of SEQ ID NO: 585124
cugacuacgacuuagugaa

SEQ ID NO: 615179 - RNA, 19 nt, Artificial Sequence
  Description of Artificial Sequence: Synthetic oligonucleotide
  Antisense strand to SEQ ID NO: 615178
uucacuaagucguagucag

SEQ ID NO: 615180 - RNA, 19 nt, Artificial Sequence
  Description of Artificial Sequence: Synthetic oligonucleotide
  Sense strand starting at position 3352 of SEQ ID NO: 585124
aguuuagacuuucuucuga

SEQ ID NO: 615181 - RNA, 19 nt, Artificial Sequence
  Description of Artificial Sequence: Synthetic oligonucleotide
  Antisense strand to SEQ ID NO: 615180
ucagaagaaagucuaaacu

SEQ ID NO: 615182 - RNA, 19 nt, Artificial Sequence
  Description of Artificial Sequence: Synthetic oligonucleotide
  Sense strand starting at position 3525 of SEQ ID NO: 585124
gugcuucucagugugaguu

SEQ ID NO: 615183 - RNA, 19 nt, Artificial Sequence
  Description of Artificial Sequence: Synthetic oligonucleotide
  Antisense strand to SEQ ID NO: 615182
aacucacacugagaagcac

SEQ ID NO: 615184 - RNA, 19 nt, Artificial Sequence
  Description of Artificial Sequence: Synthetic oligonucleotide
  Sense strand starting at position 3529 of SEQ ID NO: 585124
uucucagugugaguuaauu

SEQ ID NO: 615185 - RNA, 19 nt, Artificial Sequence
  Description of Artificial Sequence: Synthetic oligonucleotide
  Antisense strand to SEQ ID NO: 615184
aauuaacucacacugagaa

SEQ ID NO: 615186 - RNA, 19 nt, Artificial Sequence
  Description of Artificial Sequence: Synthetic oligonucleotide
  Sense strand starting at position 3531 of SEQ ID NO: 585124
cucagugugaguuaauucu

SEQ ID NO: 615187 - RNA, 19 nt, Artificial Sequence
  Description of Artificial Sequence: Synthetic oligonucleotide
  Antisense strand to SEQ ID NO: 615186
agaauuaacucacacugag

SEQ ID NO: 615188 - RNA, 19 nt, Artificial Sequence
  Description of Artificial Sequence: Synthetic oligonucleotide
  Sense strand starting at position 3778 of SEQ ID NO: 585124
caggcaagguuucucauua

SEQ ID NO: 615189 - RNA, 19 nt, Artificial Sequence
  Description of Artificial Sequence: Synthetic oligonucleotide
  Antisense strand to SEQ ID NO: 615188
uaaugagaaaccuugccug

SEQ ID NO: 615190 - RNA, 19 nt, Artificial Sequence
  Description of Artificial Sequence: Synthetic oligonucleotide
  Sense strand starting at position 3779 of SEQ ID NO: 585124
aggcaagguuucucauuac

SEQ ID NO: 615191 - RNA, 19 nt, Artificial Sequence
  Description of Artificial Sequence: Synthetic oligonucleotide
  Antisense strand to SEQ ID NO: 615190
guaaugagaaaccuugccu

SEQ ID NO: 615192 - RNA, 19 nt, Artificial Sequence
  Description of Artificial Sequence: Synthetic oligonucleotide
  Sense strand starting at position 1 of SEQ ID NO: 585125
uuuccauuagaauguauag

SEQ ID NO: 615193 - RNA, 19 nt, Artificial Sequence
  Description of Artificial Sequence: Synthetic oligonucleotide
  Antisense strand to SEQ ID NO: 615192
cuauacauucuaauggaaa

SEQ ID NO: 615194 - RNA, 19 nt, Artificial Sequence
  Description of Artificial Sequence: Synthetic oligonucleotide
  Sense strand starting at position 75 of SEQ ID NO: 585125
cuuugugaacuuggaaugu

SEQ ID NO: 615195 - RNA, 19 nt, Artificial Sequence
  Description of Artificial Sequence: Synthetic oligonucleotide
  Antisense strand to SEQ ID NO: 615194
acauuccaaguucacaaag

SEQ ID NO: 615196 - RNA, 19 nt, Artificial Sequence
  Description of Artificial Sequence: Synthetic oligonucleotide
  Sense strand starting at position 79 of SEQ ID NO: 585125
gugaacuuggaauguccua

SEQ ID NO: 615197 - RNA, 19 nt, Artificial Sequence
  Description of Artificial Sequence: Synthetic oligonucleotide
  Antisense strand to SEQ ID NO: 615196
uaggacauuccaaguucac

SEQ ID NO: 615198 - RNA, 19 nt, Artificial Sequence
  Description of Artificial Sequence: Synthetic oligonucleotide
  Sense strand starting at position 296 of SEQ ID NO: 585125
uguaacucuucuguuaaau

SEQ ID NO: 615199 - RNA, 19 nt, Artificial Sequence
  Description of Artificial Sequence: Synthetic oligonucleotide
  Antisense strand to SEQ ID NO: 615198
auuuaacagaagaguuaca

SEQ ID NO: 615200 - RNA, 19 nt, Artificial Sequence
  Description of Artificial Sequence: Synthetic oligonucleotide
  Sense strand starting at position 367 of SEQ ID NO: 585125
aggcauggcuauuccuuaa

SEQ ID NO: 615201 - RNA, 19 nt, Artificial Sequence
  Description of Artificial Sequence: Synthetic oligonucleotide
  Antisense strand to SEQ ID NO: 615200
uuaaggaauagccaugccu

SEQ ID NO: 615202 - RNA, 19 nt, Artificial Sequence
  Description of Artificial Sequence: Synthetic oligonucleotide
  Sense strand starting at position 371 of SEQ ID NO: 585125
auggcuauuccuuaagaau

SEQ ID NO: 615203 - RNA, 19 nt, Artificial Sequence
  Description of Artificial Sequence: Synthetic oligonucleotide
  Antisense strand to SEQ ID NO: 615202
auucuuaaggaauagccau

SEQ ID NO: 615204 - RNA, 19 nt, Artificial Sequence
  Description of Artificial Sequence: Synthetic oligonucleotide
  Sense strand starting at position 401 of SEQ ID NO: 585125
aaugcuugugaccauaaag

SEQ ID NO: 615205 - RNA, 19 nt, Artificial Sequence
  Description of Artificial Sequence: Synthetic oligonucleotide
  Antisense strand to SEQ ID NO: 615204
cuuuauggucacaagcauu

SEQ ID NO: 615206 - RNA, 19 nt, Artificial Sequence
  Description of Artificial Sequence: Synthetic oligonucleotide
  Sense strand starting at position 535 of SEQ ID NO: 585125
ggcagucauuucuuucuga

SEQ ID NO: 615207 - RNA, 19 nt, Artificial Sequence
  Description of Artificial Sequence: Synthetic oligonucleotide
  Antisense strand to SEQ ID NO: 615206
ucagaaagaaaugacugcc

SEQ ID NO: 615208 - RNA, 19 nt, Artificial Sequence
  Description of Artificial Sequence: Synthetic oligonucleotide
  Sense strand starting at position 536 of SEQ ID NO: 585125
gcagucauuucuuucugag

SEQ ID NO: 615209 - RNA, 19 nt, Artificial Sequence
  Description of Artificial Sequence: Synthetic oligonucleotide
  Antisense strand to SEQ ID NO: 615208
cucagaaagaaaugacugc

SEQ ID NO: 615210 - RNA, 19 nt, Artificial Sequence
  Description of Artificial Sequence: Synthetic oligonucleotide
  Sense strand starting at position 848 of SEQ ID NO: 585125
auaagcauuugagugcauu

SEQ ID NO: 615211 - RNA, 19 nt, Artificial Sequence
  Description of Artificial Sequence: Synthetic oligonucleotide
  Antisense strand to SEQ ID NO: 615210
aaugcacucaaaugcuuau

SEQ ID NO: 615212 - RNA, 19 nt, Artificial Sequence
  Description of Artificial Sequence: Synthetic oligonucleotide
  Sense strand starting at position 872 of SEQ ID NO: 585125
cucugcaagcuuugaaaua

SEQ ID NO: 615213 - RNA, 19 nt, Artificial Sequence
  Description of Artificial Sequence: Synthetic oligonucleotide
  Antisense strand to SEQ ID NO: 615212
uauuucaaagcuugcagag

SEQ ID NO: 615214 - RNA, 19 nt, Artificial Sequence
  Description of Artificial Sequence: Synthetic oligonucleotide
  Sense strand starting at position 906 of SEQ ID NO: 585125
cuucaugaguuaucgggaa

SEQ ID NO: 615215 - RNA, 19 nt, Artificial Sequence
  Description of Artificial Sequence: Synthetic oligonucleotide
  Antisense strand to SEQ ID NO: 615214
uucccgauaacucaugaag

SEQ ID NO: 615216 - RNA, 19 nt, Artificial Sequence
  Description of Artificial Sequence: Synthetic oligonucleotide
  Sense strand starting at position 970 of SEQ ID NO: 585125
ggacaaauucaagguucgu

SEQ ID NO: 615217 - RNA, 19 nt, Artificial Sequence
  Description of Artificial Sequence: Synthetic oligonucleotide
  Antisense strand to SEQ ID NO: 615216
acgaaccuugaauuugucc

SEQ ID NO: 615218 - RNA, 19 nt, Artificial Sequence
  Description of Artificial Sequence: Synthetic oligonucleotide
  Sense strand starting at position 1030 of SEQ ID NO: 585125
ggcccugagacuggguuaa

SEQ ID NO: 615219 - RNA, 19 nt, Artificial Sequence
  Description of Artificial Sequence: Synthetic oligonucleotide
  Antisense strand to SEQ ID NO: 615218
uuaacccagucucagggcc

SEQ ID NO: 615220 - RNA, 19 nt, Artificial Sequence
  Description of Artificial Sequence: Synthetic oligonucleotide
  Sense strand starting at position 1102 of SEQ ID NO: 585125
aguugaguuugguccaaug

SEQ ID NO: 615221 - RNA, 19 nt, Artificial Sequence
  Description of Artificial Sequence: Synthetic oligonucleotide
  Antisense strand to SEQ ID NO: 615220
cauuggaccaaacucaacu

SEQ ID NO: 615222 - RNA, 19 nt, Artificial Sequence
  Description of Artificial Sequence: Synthetic oligonucleotide
  Sense strand starting at position 1104 of SEQ ID NO: 585125
uugaguuugguccaaugag

SEQ ID NO: 615223 - RNA, 19 nt, Artificial Sequence
  Description of Artificial Sequence: Synthetic oligonucleotide
  Antisense strand to SEQ ID NO: 615222
cucauuggaccaaacucaa

SEQ ID NO: 615224 - RNA, 19 nt, Artificial Sequence
  Description of Artificial Sequence: Synthetic oligonucleotide
  Sense strand starting at position 1468 of SEQ ID NO: 585125
ugggucuuccgaggaggaa

SEQ ID NO: 615225 - RNA, 19 nt, Artificial Sequence
  Description of Artificial Sequence: Synthetic oligonucleotide
  Antisense strand to SEQ ID NO: 615224
uuccuccucggaagaccca

SEQ ID NO: 615226 - RNA, 19 nt, Artificial Sequence
  Description of Artificial Sequence: Synthetic oligonucleotide
  Sense strand starting at position 2343 of SEQ ID NO: 585125
cuggcuuccaucuggagau

SEQ ID NO: 615227 - RNA, 19 nt, Artificial Sequence
  Description of Artificial Sequence: Synthetic oligonucleotide
  Antisense strand to SEQ ID NO: 615226
aucuccagauggaagccag

SEQ ID NO: 615228 - RNA, 19 nt, Artificial Sequence
  Description of Artificial Sequence: Synthetic oligonucleotide
  Sense strand starting at position 2347 of SEQ ID NO: 585125
cuuccaucuggagaucuuu

SEQ ID NO: 615229 - RNA, 19 nt, Artificial Sequence
  Description of Artificial Sequence: Synthetic oligonucleotide
  Antisense strand to SEQ ID NO: 615228
aaagaucuccagauggaag

SEQ ID NO: 615230 - RNA, 19 nt, Artificial Sequence
  Description of Artificial Sequence: Synthetic oligonucleotide
  Sense strand starting at position 2357 of SEQ ID NO: 585125
gagaucuuugauggguaca

SEQ ID NO: 615231 - RNA, 19 nt, Artificial Sequence
  Description of Artificial Sequence: Synthetic oligonucleotide
  Antisense strand to SEQ ID NO: 615230
uguacccaucaaagaucuc

SEQ ID NO: 615232 - RNA, 19 nt, Artificial Sequence
  Description of Artificial Sequence: Synthetic oligonucleotide
  Sense strand starting at position 2358 of SEQ ID NO: 585125
agaucuuugauggguacaa

SEQ ID NO: 615233 - RNA, 19 nt, Artificial Sequence
  Description of Artificial Sequence: Synthetic oligonucleotide
  Antisense strand to SEQ ID NO: 615232
uuguacccaucaaagaucu

SEQ ID NO: 615234 - RNA, 19 nt, Artificial Sequence
  Description of Artificial Sequence: Synthetic oligonucleotide
  Sense strand starting at position 2359 of SEQ ID NO: 585125
gaucuuugauggguacaaa

SEQ ID NO: 615235 - RNA, 19 nt, Artificial Sequence
  Description of Artificial Sequence: Synthetic oligonucleotide
  Antisense strand to SEQ ID NO: 615234
uuuguacccaucaaagauc

SEQ ID NO: 615236 - RNA, 19 nt, Artificial Sequence
  Description of Artificial Sequence: Synthetic oligonucleotide
  Sense strand starting at position 2492 of SEQ ID NO: 585125
cccgccucucuaggauuua

SEQ ID NO: 615237 - RNA, 19 nt, Artificial Sequence
  Description of Artificial Sequence: Synthetic oligonucleotide
  Antisense strand to SEQ ID NO: 615236
uaaauccuagagaggcggg

SEQ ID NO: 615238 - RNA, 19 nt, Artificial Sequence
  Description of Artificial Sequence: Synthetic oligonucleotide
  Sense strand starting at position 2758 of SEQ ID NO: 585125
ccuugcaagcgcguuuauu

SEQ ID NO: 615239 - RNA, 19 nt, Artificial Sequence
  Description of Artificial Sequence: Synthetic oligonucleotide
  Antisense strand to SEQ ID NO: 615238
aauaaacgcgcuugcaagg

SEQ ID NO: 615240 - RNA, 19 nt, Artificial Sequence
  Description of Artificial Sequence: Synthetic oligonucleotide
  Sense strand starting at position 2807 of SEQ ID NO: 585125
gguuuauaggaacguuaag

SEQ ID NO: 615241 - RNA, 19 nt, Artificial Sequence
  Description of Artificial Sequence: Synthetic oligonucleotide
  Antisense strand to SEQ ID NO: 615240
cuuaacguuccuauaaacc

SEQ ID NO: 615242 - RNA, 19 nt, Artificial Sequence
  Description of Artificial Sequence: Synthetic oligonucleotide
  Sense strand starting at position 2986 of SEQ ID NO: 585125
cauggacgucaguaugaaa

SEQ ID NO: 615243 - RNA, 19 nt, Artificial Sequence
  Description of Artificial Sequence: Synthetic oligonucleotide
  Antisense strand to SEQ ID NO: 615242
uuucauacugacguccaug

SEQ ID NO: 615244 - RNA, 19 nt, Artificial Sequence
  Description of Artificial Sequence: Synthetic oligonucleotide
  Sense strand starting at position 3001 of SEQ ID NO: 585125
gaaaguguaccggaguauu

SEQ ID NO: 615245 - RNA, 19 nt, Artificial Sequence
  Description of Artificial Sequence: Synthetic oligonucleotide
  Antisense strand to SEQ ID NO: 615244
aauacuccgguacacuuuc

SEQ ID NO: 615246 - RNA, 19 nt, Artificial Sequence
  Description of Artificial Sequence: Synthetic oligonucleotide
  Sense strand starting at position 3017 of SEQ ID NO: 585125
auuagugaugcuuaacuuu

SEQ ID NO: 615247 - RNA, 19 nt, Artificial Sequence
  Description of Artificial Sequence: Synthetic oligonucleotide
  Antisense strand to SEQ ID NO: 615246
aaaguuaagcaucacuaau

SEQ ID NO: 615248 - RNA, 19 nt, Artificial Sequence
  Description of Artificial Sequence: Synthetic oligonucleotide
  Sense strand starting at position 3066 of SEQ ID NO: 585125
agugcauucccugaacuca

SEQ ID NO: 615249 - RNA, 19 nt, Artificial Sequence
  Description of Artificial Sequence: Synthetic oligonucleotide
  Antisense strand to SEQ ID NO: 615248
ugaguucagggaaugcacu

SEQ ID NO: 615250 - RNA, 19 nt, Artificial Sequence
  Description of Artificial Sequence: Synthetic oligonucleotide
  Sense strand starting at position 3132 of SEQ ID NO: 585125
cggcgaauccuccuuugcu

SEQ ID NO: 615251 - RNA, 19 nt, Artificial Sequence
  Description of Artificial Sequence: Synthetic oligonucleotide
  Antisense strand to SEQ ID NO: 615250
agcaaaggaggauucgccg

SEQ ID NO: 615252 - RNA, 19 nt, Artificial Sequence
  Description of Artificial Sequence: Synthetic oligonucleotide
  Sense strand starting at position 3275 of SEQ ID NO: 585125
uggauccugucuuuaccua

SEQ ID NO: 615253 - RNA, 19 nt, Artificial Sequence
  Description of Artificial Sequence: Synthetic oligonucleotide
  Antisense strand to SEQ ID NO: 615252
uagguaaagacaggaucca

SEQ ID NO: 615254 - RNA, 19 nt, Artificial Sequence
  Description of Artificial Sequence: Synthetic oligonucleotide
  Sense strand starting at position 3276 of SEQ ID NO: 585125
ggauccugucuuuaccuaa

SEQ ID NO: 615255 - RNA, 19 nt, Artificial Sequence
  Description of Artificial Sequence: Synthetic oligonucleotide
  Antisense strand to SEQ ID NO: 615254
uuagguaaagacaggaucc

SEQ ID NO: 615256 - RNA, 19 nt, Artificial Sequence
  Description of Artificial Sequence: Synthetic oligonucleotide
  Sense strand starting at position 3436 of SEQ ID NO: 585125
agugucacucuugaugacu

SEQ ID NO: 615257 - RNA, 19 nt, Artificial Sequence
  Description of Artificial Sequence: Synthetic oligonucleotide
  Antisense strand to SEQ ID NO: 615256
agucaucaagagugacacu

SEQ ID NO: 615258 - RNA, 19 nt, Artificial Sequence
  Description of Artificial Sequence: Synthetic oligonucleotide
  Sense strand starting at position 3439 of SEQ ID NO: 585125
gucacucuugaugacuuaa

SEQ ID NO: 615259 - RNA, 19 nt, Artificial Sequence
  Description of Artificial Sequence: Synthetic oligonucleotide
  Antisense strand to SEQ ID NO: 615258
uuaagucaucaagagugac

SEQ ID NO: 615260 - RNA, 19 nt, Artificial Sequence
  Description of Artificial Sequence: Synthetic oligonucleotide
  Sense strand starting at position 3524 of SEQ ID NO: 585125
gggcuagauccuggagauu

SEQ ID NO: 615261 - RNA, 19 nt, Artificial Sequence
  Description of Artificial Sequence: Synthetic oligonucleotide
  Antisense strand to SEQ ID NO: 615260
aaucuccaggaucuagccc

SEQ ID NO: 615262 - RNA, 19 nt, Artificial Sequence
  Description of Artificial Sequence: Synthetic oligonucleotide
  Sense strand starting at position 3564 of SEQ ID NO: 585125
cuguccuuuagggaguuua

SEQ ID NO: 615263 - RNA, 19 nt, Artificial Sequence
  Description of Artificial Sequence: Synthetic oligonucleotide
  Antisense strand to SEQ ID NO: 615262
uaaacucccuaaaggacag

SEQ ID NO: 615264 - RNA, 19 nt, Artificial Sequence
  Description of Artificial Sequence: Synthetic oligonucleotide
  Sense strand starting at position 3629 of SEQ ID NO: 585125
gaaagaggauaugaaagaa

SEQ ID NO: 615265 - RNA, 19 nt, Artificial Sequence
  Description of Artificial Sequence: Synthetic oligonucleotide
  Antisense strand to SEQ ID NO: 615264
uucuuucauauccucuuuc

SEQ ID NO: 615266 - RNA, 19 nt, Artificial Sequence
  Description of Artificial Sequence: Synthetic oligonucleotide
  Sense strand starting at position 3667 of SEQ ID NO: 585125
ugcagauuaguauagguua

SEQ ID NO: 615267 - RNA, 19 nt, Artificial Sequence
  Description of Artificial Sequence: Synthetic oligonucleotide
  Antisense strand to SEQ ID NO: 615266
uaaccuauacuaaucugca

SEQ ID NO: 615268 - RNA, 19 nt, Artificial Sequence
  Description of Artificial Sequence: Synthetic oligonucleotide
  Sense strand starting at position 3794 of SEQ ID NO: 585125
cugacuacgacuuagugaa

SEQ ID NO: 615269 - RNA, 19 nt, Artificial Sequence
  Description of Artificial Sequence: Synthetic oligonucleotide
  Antisense strand to SEQ ID NO: 615268
uucacuaagucguagucag

SEQ ID NO: 615270 - RNA, 19 nt, Artificial Sequence
  Description of Artificial Sequence: Synthetic oligonucleotide
  Sense strand starting at position 3889 of SEQ ID NO: 585125
aguuuagacuuucuucuga

SEQ ID NO: 615271 - RNA, 19 nt, Artificial Sequence
  Description of Artificial Sequence: Synthetic oligonucleotide
  Antisense strand to SEQ ID NO: 615270
ucagaagaaagucuaaacu

SEQ ID NO: 615272 - RNA, 19 nt, Artificial Sequence
  Description of Artificial Sequence: Synthetic oligonucleotide
  Sense strand starting at position 172 of SEQ ID NO: 585126
guuggcagucagcagagau

SEQ ID NO: 615273 - RNA, 19 nt, Artificial Sequence
  Description of Artificial Sequence: Synthetic oligonucleotide
  Antisense strand to SEQ ID NO: 615272
aucucugcugacugccaac

SEQ ID NO: 615274 - RNA, 19 nt, Artificial Sequence
  Description of Artificial Sequence: Synthetic oligonucleotide
  Sense strand starting at position 333 of SEQ ID NO: 585126
acccaaacugcugagaguu

SEQ ID NO: 615275 - RNA, 19 nt, Artificial Sequence
  Description of Artificial Sequence: Synthetic oligonucleotide
  Antisense strand to SEQ ID NO: 615274
aacucucagcaguuugggu

SEQ ID NO: 615276 - RNA, 19 nt, Artificial Sequence
  Description of Artificial Sequence: Synthetic oligonucleotide
  Sense strand starting at position 384 of SEQ ID NO: 585126
uggguauugccucagcaaa

SEQ ID NO: 615277 - RNA, 19 nt, Artificial Sequence
  Description of Artificial Sequence: Synthetic oligonucleotide
  Antisense strand to SEQ ID NO: 615276
uuugcugaggcaauaccca

SEQ ID NO: 615278 - RNA, 19 nt, Artificial Sequence
  Description of Artificial Sequence: Synthetic oligonucleotide
  Sense strand starting at position 431 of SEQ ID NO: 585126
augacugaucaacggcuaa

SEQ ID NO: 615279 - RNA, 19 nt, Artificial Sequence
  Description of Artificial Sequence: Synthetic oligonucleotide
  Antisense strand to SEQ ID NO: 615278
uuagccguugaucagucau

SEQ ID NO: 615280 - RNA, 19 nt, Artificial Sequence
  Description of Artificial Sequence: Synthetic oligonucleotide
  Sense strand starting at position 435 of SEQ ID NO: 585126
cugaucaacggcuaauaaa

SEQ ID NO: 615281 - RNA, 19 nt, Artificial Sequence
  Description of Artificial Sequence: Synthetic oligonucleotide
  Antisense strand to SEQ ID NO: 615280
uuuauuagccguugaucag

SEQ ID NO: 615282 - RNA, 19 nt, Artificial Sequence
  Description of Artificial Sequence: Synthetic oligonucleotide
  Sense strand starting at position 502 of SEQ ID NO: 585126
ucagaacucccucgaggau

SEQ ID NO: 615283 - RNA, 19 nt, Artificial Sequence
  Description of Artificial Sequence: Synthetic oligonucleotide
  Antisense strand to SEQ ID NO: 615282
auccucgagggaguucuga

SEQ ID NO: 615284 - RNA, 19 nt, Artificial Sequence
  Description of Artificial Sequence: Synthetic oligonucleotide
  Sense strand starting at position 532 of SEQ ID NO: 585126
ccauuaagacugcauugca

SEQ ID NO: 615285 - RNA, 19 nt, Artificial Sequence
  Description of Artificial Sequence: Synthetic oligonucleotide
  Antisense strand to SEQ ID NO: 615284
ugcaaugcagucuuaaugg

SEQ ID NO: 615286 - RNA, 19 nt, Artificial Sequence
  Description of Artificial Sequence: Synthetic oligonucleotide
  Sense strand starting at position 707 of SEQ ID NO: 585126
ugcuaacagggaugcauau

SEQ ID NO: 615287 - RNA, 19 nt, Artificial Sequence
  Description of Artificial Sequence: Synthetic oligonucleotide
  Antisense strand to SEQ ID NO: 615286
auaugcaucccuguuagca

SEQ ID NO: 615288 - RNA, 19 nt, Artificial Sequence
  Description of Artificial Sequence: Synthetic oligonucleotide
  Sense strand starting at position 998 of SEQ ID NO: 585126
uuuaaauggcuguaguguu

SEQ ID NO: 615289 - RNA, 19 nt, Artificial Sequence
  Description of Artificial Sequence: Synthetic oligonucleotide
  Antisense strand to SEQ ID NO: 615288
aacacuacagccauuuaaa

SEQ ID NO: 615290 - RNA, 19 nt, Artificial Sequence
  Description of Artificial Sequence: Synthetic oligonucleotide
  Sense strand starting at position 1025 of SEQ ID NO: 585126
auggaugcaucauuacuua

SEQ ID NO: 615291 - RNA, 19 nt, Artificial Sequence
  Description of Artificial Sequence: Synthetic oligonucleotide
  Antisense strand to SEQ ID NO: 615290
uaaguaaugaugcauccau

SEQ ID NO: 615292 - RNA, 19 nt, Artificial Sequence
  Description of Artificial Sequence: Synthetic oligonucleotide
  Sense strand starting at position 1105 of SEQ ID NO: 585126
acaucuuuauaguugcaua

SEQ ID NO: 615293 - RNA, 19 nt, Artificial Sequence
  Description of Artificial Sequence: Synthetic oligonucleotide
  Antisense strand to SEQ ID NO: 615292
uaugcaacuauaaagaugu

SEQ ID NO: 615294 - RNA, 19 nt, Artificial Sequence
  Description of Artificial Sequence: Synthetic oligonucleotide
  Sense strand starting at position 1227 of SEQ ID NO: 585126
uccagaaagcuguaccaau

SEQ ID NO: 615295 - RNA, 19 nt, Artificial Sequence
  Description of Artificial Sequence: Synthetic oligonucleotide
  Antisense strand to SEQ ID NO: 615294
auugguacagcuuucugga

SEQ ID NO: 615296 - RNA, 19 nt, Artificial Sequence
  Description of Artificial Sequence: Synthetic oligonucleotide
  Sense strand starting at position 1287 of SEQ ID NO: 585126
gacagcgaugcacauuauu

SEQ ID NO: 615297 - RNA, 19 nt, Artificial Sequence
  Description of Artificial Sequence: Synthetic oligonucleotide
  Antisense strand to SEQ ID NO: 615296
aauaaugugcaucgcuguc

SEQ ID NO: 615298 - RNA, 19 nt, Artificial Sequence
  Description of Artificial Sequence: Synthetic oligonucleotide
  Sense strand starting at position 1422 of SEQ ID NO: 585126
auauaugagugcucuaugu

SEQ ID NO: 615299 - RNA, 19 nt, Artificial Sequence
  Description of Artificial Sequence: Synthetic oligonucleotide
  Antisense strand to SEQ ID NO: 615298
acauagagcacucauauau

SEQ ID NO: 615300 - RNA, 19 nt, Artificial Sequence
  Description of Artificial Sequence: Synthetic oligonucleotide
  Sense strand starting at position 1424 of SEQ ID NO: 585126
auaugagugcucuauguaa

SEQ ID NO: 615301 - RNA, 19 nt, Artificial Sequence
  Description of Artificial Sequence: Synthetic oligonucleotide
  Antisense strand to SEQ ID NO: 615300
uuacauagagcacucauau

SEQ ID NO: 615302 - RNA, 19 nt, Artificial Sequence
  Description of Artificial Sequence: Synthetic oligonucleotide
  Sense strand starting at position 1426 of SEQ ID NO: 585126
augagugcucuauguaaug

SEQ ID NO: 615303 - RNA, 19 nt, Artificial Sequence
  Description of Artificial Sequence: Synthetic oligonucleotide
  Antisense strand to SEQ ID NO: 615302
cauuacauagagcacucau

SEQ ID NO: 615304 - RNA, 19 nt, Artificial Sequence
  Description of Artificial Sequence: Synthetic oligonucleotide
  Sense strand starting at position 1428 of SEQ ID NO: 585126
gagugcucuauguaaugag

SEQ ID NO: 615305 - RNA, 19 nt, Artificial Sequence
  Description of Artificial Sequence: Synthetic oligonucleotide
  Antisense strand to SEQ ID NO: 615304
cucauuacauagagcacuc

SEQ ID NO: 615306 - RNA, 19 nt, Artificial Sequence
  Description of Artificial Sequence: Synthetic oligonucleotide
  Sense strand starting at position 1432 of SEQ ID NO: 585126
gcucuauguaaugagauga

SEQ ID NO: 615307 - RNA, 19 nt, Artificial Sequence
  Description of Artificial Sequence: Synthetic oligonucleotide
  Antisense strand to SEQ ID NO: 615306
ucaucucauuacauagagc

SEQ ID NO: 615308 - RNA, 19 nt, Artificial Sequence
  Description of Artificial Sequence: Synthetic oligonucleotide
  Sense strand starting at position 1445 of SEQ ID NO: 585126
agaugaauccucugcccau

SEQ ID NO: 615309 - RNA, 19 nt, Artificial Sequence
  Description of Artificial Sequence: Synthetic oligonucleotide
  Antisense strand to SEQ ID NO: 615308
augggcagaggauucaucu

SEQ ID NO: 615310 - RNA, 19 nt, Artificial Sequence
  Description of Artificial Sequence: Synthetic oligonucleotide
  Sense strand starting at position 1819 of SEQ ID NO: 585126
gaagaaacaugccugcaga

SEQ ID NO: 615311 - RNA, 19 nt, Artificial Sequence
  Description of Artificial Sequence: Synthetic oligonucleotide
  Antisense strand to SEQ ID NO: 615310
ucugcaggcauguuucuuc

SEQ ID NO: 615312 - RNA, 19 nt, Artificial Sequence
  Description of Artificial Sequence: Synthetic oligonucleotide
  Sense strand starting at position 2017 of SEQ ID NO: 585126
cugucaacacuuuguggaa

SEQ ID NO: 615313 - RNA, 19 nt, Artificial Sequence
  Description of Artificial Sequence: Synthetic oligonucleotide
  Antisense strand to SEQ ID NO: 615312
uuccacaaaguguugacag

SEQ ID NO: 615314 - RNA, 19 nt, Artificial Sequence
  Description of Artificial Sequence: Synthetic oligonucleotide
  Sense strand starting at position 2469 of SEQ ID NO: 585126
aguugaaucccaggaugca

SEQ ID NO: 615315 - RNA, 19 nt, Artificial Sequence
  Description of Artificial Sequence: Synthetic oligonucleotide
  Antisense strand to SEQ ID NO: 615314
ugcauccugggauucaacu

SEQ ID NO: 615316 - RNA, 19 nt, Artificial Sequence
  Description of Artificial Sequence: Synthetic oligonucleotide
  Sense strand starting at position 2503 of SEQ ID NO: 585126
gagggccaacuguguaaua

SEQ ID NO: 615317 - RNA, 19 nt, Artificial Sequence
  Description of Artificial Sequence: Synthetic oligonucleotide
  Antisense strand to SEQ ID NO: 615316
uauuacacaguuggcccuc

SEQ ID NO: 615318 - RNA, 19 nt, Artificial Sequence
  Description of Artificial Sequence: Synthetic oligonucleotide
  Sense strand starting at position 2504 of SEQ ID NO: 585126
agggccaacuguguaauau

SEQ ID NO: 615319 - RNA, 19 nt, Artificial Sequence
  Description of Artificial Sequence: Synthetic oligonucleotide
  Antisense strand to SEQ ID NO: 615318
auauuacacaguuggcccu

SEQ ID NO: 615320 - RNA, 19 nt, Artificial Sequence
  Description of Artificial Sequence: Synthetic oligonucleotide
  Sense strand starting at position 2505 of SEQ ID NO: 585126
gggccaacuguguaauaua

SEQ ID NO: 615321 - RNA, 19 nt, Artificial Sequence
  Description of Artificial Sequence: Synthetic oligonucleotide
  Antisense strand to SEQ ID NO: 615320
uauauuacacaguuggccc

SEQ ID NO: 615322 - RNA, 19 nt, Artificial Sequence
  Description of Artificial Sequence: Synthetic oligonucleotide
  Sense strand starting at position 3007 of SEQ ID NO: 585126
auuagaacaucuuugguau

SEQ ID NO: 615323 - RNA, 19 nt, Artificial Sequence
  Description of Artificial Sequence: Synthetic oligonucleotide
  Antisense strand to SEQ ID NO: 615322
auaccaaagauguucuaau

SEQ ID NO: 615324 - RNA, 19 nt, Artificial Sequence
  Description of Artificial Sequence: Synthetic oligonucleotide
  Sense strand starting at position 3008 of SEQ ID NO: 585126
uuagaacaucuuugguauu

SEQ ID NO: 615325 - RNA, 19 nt, Artificial Sequence
  Description of Artificial Sequence: Synthetic oligonucleotide
  Antisense strand to SEQ ID NO: 615324
aauaccaaagauguucuaa

SEQ ID NO: 615326 - RNA, 19 nt, Artificial Sequence
  Description of Artificial Sequence: Synthetic oligonucleotide
  Sense strand starting at position 3234 of SEQ ID NO: 585126
auuguaauugcuugauaug

SEQ ID NO: 615327 - RNA, 19 nt, Artificial Sequence
  Description of Artificial Sequence: Synthetic oligonucleotide
  Antisense strand to SEQ ID NO: 615326
cauaucaagcaauuacaau

SEQ ID NO: 615328 - RNA, 19 nt, Artificial Sequence
  Description of Artificial Sequence: Synthetic oligonucleotide
  Sense strand starting at position 3235 of SEQ ID NO: 585126
uuguaauugcuugauaugu

SEQ ID NO: 615329 - RNA, 19 nt, Artificial Sequence
  Description of Artificial Sequence: Synthetic oligonucleotide
  Antisense strand to SEQ ID NO: 615328
acauaucaagcaauuacaa

SEQ ID NO: 615330 - RNA, 19 nt, Artificial Sequence
  Description of Artificial Sequence: Synthetic oligonucleotide
  Sense strand starting at position 3240 of SEQ ID NO: 585126
auugcuugauaugucucaa

SEQ ID NO: 615331 - RNA, 19 nt, Artificial Sequence
  Description of Artificial Sequence: Synthetic oligonucleotide
  Antisense strand to SEQ ID NO: 615330
uugagacauaucaagcaau

SEQ ID NO: 615332 - RNA, 19 nt, Artificial Sequence
  Description of Artificial Sequence: Synthetic oligonucleotide
  Sense strand starting at position 3287 of SEQ ID NO: 585126
uguaauuuauuugggauga

SEQ ID NO: 615333 - RNA, 19 nt, Artificial Sequence
  Description of Artificial Sequence: Synthetic oligonucleotide
  Antisense strand to SEQ ID NO: 615332
ucaucccaaauaaauuaca

SEQ ID NO: 615334 - RNA, 19 nt, Artificial Sequence
  Description of Artificial Sequence: Synthetic oligonucleotide
  Sense strand starting at position 3300 of SEQ ID NO: 585126
ggaugaaacugggucguuu

SEQ ID NO: 615335 - RNA, 19 nt, Artificial Sequence
  Description of Artificial Sequence: Synthetic oligonucleotide
  Antisense strand to SEQ ID NO: 615334
aaacgacccaguuucaucc

SEQ ID NO: 615336 - RNA, 19 nt, Artificial Sequence
  Description of Artificial Sequence: Synthetic oligonucleotide
  Sense strand starting at position 3389 of SEQ ID NO: 585126
uaaauuguggcaggaucuu

SEQ ID NO: 615337 - RNA, 19 nt, Artificial Sequence
  Description of Artificial Sequence: Synthetic oligonucleotide
  Antisense strand to SEQ ID NO: 615336
aagauccugccacaauuua

SEQ ID NO: 615338 - RNA, 19 nt, Artificial Sequence
  Description of Artificial Sequence: Synthetic oligonucleotide
  Sense strand starting at position 3447 of SEQ ID NO: 585126
gcaagacugccucauaggu

SEQ ID NO: 615339 - RNA, 19 nt, Artificial Sequence
  Description of Artificial Sequence: Synthetic oligonucleotide
  Antisense strand to SEQ ID NO: 615338
accuaugaggcagucuugc

SEQ ID NO: 615340 - RNA, 19 nt, Artificial Sequence
  Description of Artificial Sequence: Synthetic oligonucleotide
  Sense strand starting at position 3499 of SEQ ID NO: 585126
cuagaaugcaguugacaag

SEQ ID NO: 615341 - RNA, 19 nt, Artificial Sequence
  Description of Artificial Sequence: Synthetic oligonucleotide
  Antisense strand to SEQ ID NO: 615340
cuugucaacugcauucuag

SEQ ID NO: 615342 - RNA, 19 nt, Artificial Sequence
  Description of Artificial Sequence: Synthetic oligonucleotide
  Sense strand starting at position 3540 of SEQ ID NO: 585126
cauaauugagucuaaggca

SEQ ID NO: 615343 - RNA, 19 nt, Artificial Sequence
  Description of Artificial Sequence: Synthetic oligonucleotide
  Antisense strand to SEQ ID NO: 615342
ugccuuagacucaauuaug

SEQ ID NO: 615344 - RNA, 19 nt, Artificial Sequence
  Description of Artificial Sequence: Synthetic oligonucleotide
  Sense strand starting at position 3847 of SEQ ID NO: 585126
aguuauugcuuucuuggga

SEQ ID NO: 615345 - RNA, 19 nt, Artificial Sequence
  Description of Artificial Sequence: Synthetic oligonucleotide
  Antisense strand to SEQ ID NO: 615344
ucccaagaaagcaauaacu

SEQ ID NO: 615346 - RNA, 19 nt, Artificial Sequence
  Description of Artificial Sequence: Synthetic oligonucleotide
  Sense strand starting at position 3862 of SEQ ID NO: 585126
gggacagagucuccuuaug

SEQ ID NO: 615347 - RNA, 19 nt, Artificial Sequence
  Description of Artificial Sequence: Synthetic oligonucleotide
  Antisense strand to SEQ ID NO: 615346
cauaaggagacucuguccc

SEQ ID NO: 615348 - RNA, 19 nt, Artificial Sequence
  Description of Artificial Sequence: Synthetic oligonucleotide
  Sense strand starting at position 3864 of SEQ ID NO: 585126
gacagagucuccuuaugca

SEQ ID NO: 615349 - RNA, 19 nt, Artificial Sequence
  Description of Artificial Sequence: Synthetic oligonucleotide
  Antisense strand to SEQ ID NO: 615348
ugcauaaggagacucuguc

SEQ ID NO: 615350 - RNA, 19 nt, Artificial Sequence
  Description of Artificial Sequence: Synthetic oligonucleotide
  Sense strand starting at position 3900 of SEQ ID NO: 585126
acuccugagcuccaaagau

SEQ ID NO: 615351 - RNA, 19 nt, Artificial Sequence
  Description of Artificial Sequence: Synthetic oligonucleotide
  Antisense strand to SEQ ID NO: 615350
aucuuuggagcucaggagu

SEQ ID NO: 615352 - RNA, 19 nt, Artificial Sequence
  Description of Artificial Sequence: Synthetic oligonucleotide
  Sense strand starting at position 127 of SEQ ID NO: 585127
ucaguuaccucuguaacca

SEQ ID NO: 615353 - RNA, 19 nt, Artificial Sequence
  Description of Artificial Sequence: Synthetic oligonucleotide
  Antisense strand to SEQ ID NO: 615352
ugguuacagagguaacuga

SEQ ID NO: 615354 - RNA, 19 nt, Artificial Sequence
  Description of Artificial Sequence: Synthetic oligonucleotide
  Sense strand starting at position 149 of SEQ ID NO: 585127
ggucaaacacauugcuuga

SEQ ID NO: 615355 - RNA, 19 nt, Artificial Sequence
  Description of Artificial Sequence: Synthetic oligonucleotide
  Antisense strand to SEQ ID NO: 615354
ucaagcaauguguuugacc

SEQ ID NO: 615356 - RNA, 19 nt, Artificial Sequence
  Description of Artificial Sequence: Synthetic oligonucleotide
  Sense strand starting at position 159 of SEQ ID NO: 585127
auugcuugauuuguaguaa

SEQ ID NO: 615357 - RNA, 19 nt, Artificial Sequence
  Description of Artificial Sequence: Synthetic oligonucleotide
  Antisense strand to SEQ ID NO: 615356
uuacuacaaaucaagcaau

SEQ ID NO: 615358 - RNA, 19 nt, Artificial Sequence
  Description of Artificial Sequence: Synthetic oligonucleotide
  Sense strand starting at position 171 of SEQ ID NO: 585127
guaguaaaggccugucuag

SEQ ID NO: 615359 - RNA, 19 nt, Artificial Sequence
  Description of Artificial Sequence: Synthetic oligonucleotide
  Antisense strand to SEQ ID NO: 615358
cuagacaggccuuuacuac

SEQ ID NO: 615360 - RNA, 19 nt, Artificial Sequence
  Description of Artificial Sequence: Synthetic oligonucleotide
  Sense strand starting at position 195 of SEQ ID NO: 585127
agcugucaugucuauggga

SEQ ID NO: 615361 - RNA, 19 nt, Artificial Sequence
  Description of Artificial Sequence: Synthetic oligonucleotide
  Antisense strand to SEQ ID NO: 615360
ucccauagacaugacagcu

SEQ ID NO: 615362 - RNA, 19 nt, Artificial Sequence
  Description of Artificial Sequence: Synthetic oligonucleotide
  Sense strand starting at position 197 of SEQ ID NO: 585127
cugucaugucuaugggaca

SEQ ID NO: 615363 - RNA, 19 nt, Artificial Sequence
  Description of Artificial Sequence: Synthetic oligonucleotide
  Antisense strand to SEQ ID NO: 615362
ugucccauagacaugacag

SEQ ID NO: 615364 - RNA, 19 nt, Artificial Sequence
  Description of Artificial Sequence: Synthetic oligonucleotide
  Sense strand starting at position 218 of SEQ ID NO: 585127
uauaaagagguauggugau

SEQ ID NO: 615365 - RNA, 19 nt, Artificial Sequence
  Description of Artificial Sequence: Synthetic oligonucleotide
  Antisense strand to SEQ ID NO: 615364
aucaccauaccucuuuaua

SEQ ID NO: 615366 - RNA, 19 nt, Artificial Sequence
  Description of Artificial Sequence: Synthetic oligonucleotide
  Sense strand starting at position 224 of SEQ ID NO: 585127
gagguauggugaucuacug

SEQ ID NO: 615367 - RNA, 19 nt, Artificial Sequence
  Description of Artificial Sequence: Synthetic oligonucleotide
  Antisense strand to SEQ ID NO: 615366
caguagaucaccauaccuc

SEQ ID NO: 615368 - RNA, 19 nt, Artificial Sequence
  Description of Artificial Sequence: Synthetic oligonucleotide
  Sense strand starting at position 255 of SEQ ID NO: 585127
augugacauucugugauua

SEQ ID NO: 615369 - RNA, 19 nt, Artificial Sequence
  Description of Artificial Sequence: Synthetic oligonucleotide
  Antisense strand to SEQ ID NO: 615368
uaaucacagaaugucacau

SEQ ID NO: 615370 - RNA, 19 nt, Artificial Sequence
  Description of Artificial Sequence: Synthetic oligonucleotide
  Sense strand starting at position 256 of SEQ ID NO: 585127
ugugacauucugugauuaa

SEQ ID NO: 615371 - RNA, 19 nt, Artificial Sequence
  Description of Artificial Sequence: Synthetic oligonucleotide
  Antisense strand to SEQ ID NO: 615370
uuaaucacagaaugucaca

SEQ ID NO: 615372 - RNA, 19 nt, Artificial Sequence
  Description of Artificial Sequence: Synthetic oligonucleotide
  Sense strand starting at position 293 of SEQ ID NO: 585127
cuugcagguuugguuauau

SEQ ID NO: 615373 - RNA, 19 nt, Artificial Sequence
  Description of Artificial Sequence: Synthetic oligonucleotide
  Antisense strand to SEQ ID NO: 615372
auauaaccaaaccugcaag

SEQ ID NO: 615374 - RNA, 19 nt, Artificial Sequence
  Description of Artificial Sequence: Synthetic oligonucleotide
  Sense strand starting at position 401 of SEQ ID NO: 585127
cuggauaauguguaucuga

SEQ ID NO: 615375 - RNA, 19 nt, Artificial Sequence
  Description of Artificial Sequence: Synthetic oligonucleotide
  Antisense strand to SEQ ID NO: 615374
ucagauacacauuauccag

SEQ ID NO: 615376 - RNA, 19 nt, Artificial Sequence
  Description of Artificial Sequence: Synthetic oligonucleotide
  Sense strand starting at position 409 of SEQ ID NO: 585127
uguguaucugaaggaugag

SEQ ID NO: 615377 - RNA, 19 nt, Artificial Sequence
  Description of Artificial Sequence: Synthetic oligonucleotide
  Antisense strand to SEQ ID NO: 615376
cucauccuucagauacaca

SEQ ID NO: 615378 - RNA, 19 nt, Artificial Sequence
  Description of Artificial Sequence: Synthetic oligonucleotide
  Sense strand starting at position 549 of SEQ ID NO: 585127
cugggaucggcugaguuga

SEQ ID NO: 615379 - RNA, 19 nt, Artificial Sequence
  Description of Artificial Sequence: Synthetic oligonucleotide
  Antisense strand to SEQ ID NO: 615378
ucaacucagccgaucccag

SEQ ID NO: 615380 - RNA, 19 nt, Artificial Sequence
  Description of Artificial Sequence: Synthetic oligonucleotide
  Sense strand starting at position 642 of SEQ ID NO: 585127
cauaaucgaguuugaccua

SEQ ID NO: 615381 - RNA, 19 nt, Artificial Sequence
  Description of Artificial Sequence: Synthetic oligonucleotide
  Antisense strand to SEQ ID NO: 615380
uaggucaaacucgauuaug

SEQ ID NO: 615382 - RNA, 19 nt, Artificial Sequence
  Description of Artificial Sequence: Synthetic oligonucleotide
  Sense strand starting at position 645 of SEQ ID NO: 585127
aaucgaguuugaccuaaau

SEQ ID NO: 615383 - RNA, 19 nt, Artificial Sequence
  Description of Artificial Sequence: Synthetic oligonucleotide
  Antisense strand to SEQ ID NO: 615382
auuuaggucaaacucgauu

SEQ ID NO: 615384 - RNA, 19 nt, Artificial Sequence
  Description of Artificial Sequence: Synthetic oligonucleotide
  Sense strand starting at position 673 of SEQ ID NO: 585127
acuugaauagcucaugugu

SEQ ID NO: 615385 - RNA, 19 nt, Artificial Sequence
  Description of Artificial Sequence: Synthetic oligonucleotide
  Antisense strand to SEQ ID NO: 615384
acacaugagcuauucaagu

SEQ ID NO: 615386 - RNA, 19 nt, Artificial Sequence
  Description of Artificial Sequence: Synthetic oligonucleotide
  Sense strand starting at position 679 of SEQ ID NO: 585127
auagcucauguguaugagu

SEQ ID NO: 615387 - RNA, 19 nt, Artificial Sequence
  Description of Artificial Sequence: Synthetic oligonucleotide
  Antisense strand to SEQ ID NO: 615386
acucauacacaugagcuau

SEQ ID NO: 615388 - RNA, 19 nt, Artificial Sequence
  Description of Artificial Sequence: Synthetic oligonucleotide
  Sense strand starting at position 681 of SEQ ID NO: 585127
agcucauguguaugaguag

SEQ ID NO: 615389 - RNA, 19 nt, Artificial Sequence
  Description of Artificial Sequence: Synthetic oligonucleotide
  Antisense strand to SEQ ID NO: 615388
cuacucauacacaugagcu

SEQ ID NO: 615390 - RNA, 19 nt, Artificial Sequence
  Description of Artificial Sequence: Synthetic oligonucleotide
  Sense strand starting at position 690 of SEQ ID NO: 585127
guaugaguaguccaugucu

SEQ ID NO: 615391 - RNA, 19 nt, Artificial Sequence
  Description of Artificial Sequence: Synthetic oligonucleotide
  Antisense strand to SEQ ID NO: 615390
agacauggacuacucauac

SEQ ID NO: 615392 - RNA, 19 nt, Artificial Sequence
  Description of Artificial Sequence: Synthetic oligonucleotide
  Sense strand starting at position 692 of SEQ ID NO: 585127
augaguaguccaugucuuc

SEQ ID NO: 615393 - RNA, 19 nt, Artificial Sequence
  Description of Artificial Sequence: Synthetic oligonucleotide
  Antisense strand to SEQ ID NO: 615392
gaagacauggacuacucau

SEQ ID NO: 615394 - RNA, 19 nt, Artificial Sequence
  Description of Artificial Sequence: Synthetic oligonucleotide
  Sense strand starting at position 725 of SEQ ID NO: 585127
guuucacaggugcgauuaa

SEQ ID NO: 615395 - RNA, 19 nt, Artificial Sequence
  Description of Artificial Sequence: Synthetic oligonucleotide
  Antisense strand to SEQ ID NO: 615394
uuaaucgcaccugugaaac

SEQ ID NO: 615396 - RNA, 19 nt, Artificial Sequence
  Description of Artificial Sequence: Synthetic oligonucleotide
  Sense strand starting at position 761 of SEQ ID NO: 585127
guacuuaaucccggucaga

SEQ ID NO: 615397 - RNA, 19 nt, Artificial Sequence
  Description of Artificial Sequence: Synthetic oligonucleotide
  Antisense strand to SEQ ID NO: 615396
ucugaccgggauuaaguac

SEQ ID NO: 615398 - RNA, 19 nt, Artificial Sequence
  Description of Artificial Sequence: Synthetic oligonucleotide
  Sense strand starting at position 764 of SEQ ID NO: 585127
cuuaaucccggucagagaa

SEQ ID NO: 615399 - RNA, 19 nt, Artificial Sequence
  Description of Artificial Sequence: Synthetic oligonucleotide
  Antisense strand to SEQ ID NO: 615398
uucucugaccgggauuaag

SEQ ID NO: 615400 - RNA, 19 nt, Artificial Sequence
  Description of Artificial Sequence: Synthetic oligonucleotide
  Sense strand starting at position 941 of SEQ ID NO: 585127
gccagagauuaguuucuca

SEQ ID NO: 615401 - RNA, 19 nt, Artificial Sequence
  Description of Artificial Sequence: Synthetic oligonucleotide
  Antisense strand to SEQ ID NO: 615400
ugagaaacuaaucucuggc

SEQ ID NO: 615402 - RNA, 19 nt, Artificial Sequence
  Description of Artificial Sequence: Synthetic oligonucleotide
  Sense strand starting at position 944 of SEQ ID NO: 585127
agagauuaguuucucagau

SEQ ID NO: 615403 - RNA, 19 nt, Artificial Sequence
  Description of Artificial Sequence: Synthetic oligonucleotide
  Antisense strand to SEQ ID NO: 615402
aucugagaaacuaaucucu

SEQ ID NO: 615404 - RNA, 19 nt, Artificial Sequence
  Description of Artificial Sequence: Synthetic oligonucleotide
  Sense strand starting at position 945 of SEQ ID NO: 585127
gagauuaguuucucagaug

SEQ ID NO: 615405 - RNA, 19 nt, Artificial Sequence
  Description of Artificial Sequence: Synthetic oligonucleotide
  Antisense strand to SEQ ID NO: 615404
caucugagaaacuaaucuc

SEQ ID NO: 615406 - RNA, 19 nt, Artificial Sequence
  Description of Artificial Sequence: Synthetic oligonucleotide
  Sense strand starting at position 1000 of SEQ ID NO: 585127
gagacuacguauuccaaua

SEQ ID NO: 615407 - RNA, 19 nt, Artificial Sequence
  Description of Artificial Sequence: Synthetic oligonucleotide
  Antisense strand to SEQ ID NO: 615406
uauuggaauacguagucuc

SEQ ID NO: 615408 - RNA, 19 nt, Artificial Sequence
  Description of Artificial Sequence: Synthetic oligonucleotide
  Sense strand starting at position 1005 of SEQ ID NO: 585127
uacguauuccaauauggaa

SEQ ID NO: 615409 - RNA, 19 nt, Artificial Sequence
  Description of Artificial Sequence: Synthetic oligonucleotide
  Antisense strand to SEQ ID NO: 615408
uuccauauuggaauacgua

SEQ ID NO: 615410 - RNA, 19 nt, Artificial Sequence
  Description of Artificial Sequence: Synthetic oligonucleotide
  Sense strand starting at position 1044 of SEQ ID NO: 585127
ugucaagcucugcaacuua

SEQ ID NO: 615411 - RNA, 19 nt, Artificial Sequence
  Description of Artificial Sequence: Synthetic oligonucleotide
  Antisense strand to SEQ ID NO: 615410
uaaguugcagagcuugaca

SEQ ID NO: 615412 - RNA, 19 nt, Artificial Sequence
  Description of Artificial Sequence: Synthetic oligonucleotide
  Sense strand starting at position 1297 of SEQ ID NO: 585127
ugugacagcuuaccucaau

SEQ ID NO: 615413 - RNA, 19 nt, Artificial Sequence
  Description of Artificial Sequence: Synthetic oligonucleotide
  Antisense strand to SEQ ID NO: 615412
auugagguaagcugucaca

SEQ ID NO: 615414 - RNA, 19 nt, Artificial Sequence
  Description of Artificial Sequence: Synthetic oligonucleotide
  Sense strand starting at position 2514 of SEQ ID NO: 585127
aggcaugucucacuacaga

SEQ ID NO: 615415 - RNA, 19 nt, Artificial Sequence
  Description of Artificial Sequence: Synthetic oligonucleotide
  Antisense strand to SEQ ID NO: 615414
ucuguagugagacaugccu

SEQ ID NO: 615416 - RNA, 19 nt, Artificial Sequence
  Description of Artificial Sequence: Synthetic oligonucleotide
  Sense strand starting at position 2534 of SEQ ID NO: 585127
cccauaaugcagugcgaaa

SEQ ID NO: 615417 - RNA, 19 nt, Artificial Sequence
  Description of Artificial Sequence: Synthetic oligonucleotide
  Antisense strand to SEQ ID NO: 615416
uuucgcacugcauuauggg

SEQ ID NO: 615418 - RNA, 19 nt, Artificial Sequence
  Description of Artificial Sequence: Synthetic oligonucleotide
  Sense strand starting at position 2640 of SEQ ID NO: 585127
guuugagcaccggaacuua

SEQ ID NO: 615419 - RNA, 19 nt, Artificial Sequence
  Description of Artificial Sequence: Synthetic oligonucleotide
  Antisense strand to SEQ ID NO: 615418
uaaguuccggugcucaaac

SEQ ID NO: 615420 - RNA, 19 nt, Artificial Sequence
  Description of Artificial Sequence: Synthetic oligonucleotide
  Sense strand starting at position 2702 of SEQ ID NO: 585127
uuucuucuugagugaaugu

SEQ ID NO: 615421 - RNA, 19 nt, Artificial Sequence
  Description of Artificial Sequence: Synthetic oligonucleotide
  Antisense strand to SEQ ID NO: 615420
acauucacucaagaagaaa

SEQ ID NO: 615422 - RNA, 19 nt, Artificial Sequence
  Description of Artificial Sequence: Synthetic oligonucleotide
  Sense strand starting at position 2860 of SEQ ID NO: 585127
aguggugccagggacuaau

SEQ ID NO: 615423 - RNA, 19 nt, Artificial Sequence
  Description of Artificial Sequence: Synthetic oligonucleotide
  Antisense strand to SEQ ID NO: 615422
auuagucccuggcaccacu

SEQ ID NO: 615424 - RNA, 19 nt, Artificial Sequence
  Description of Artificial Sequence: Synthetic oligonucleotide
  Sense strand starting at position 3250 of SEQ ID NO: 585127
guaguacaucuuuggcaca

SEQ ID NO: 615425 - RNA, 19 nt, Artificial Sequence
  Description of Artificial Sequence: Synthetic oligonucleotide
  Antisense strand to SEQ ID NO: 615424
ugugccaaagauguacuac

SEQ ID NO: 615426 - RNA, 19 nt, Artificial Sequence
  Description of Artificial Sequence: Synthetic oligonucleotide
  Sense strand starting at position 3897 of SEQ ID NO: 585127
ugauaaaugugacucuuac

SEQ ID NO: 615427 - RNA, 19 nt, Artificial Sequence
  Description of Artificial Sequence: Synthetic oligonucleotide
  Antisense strand to SEQ ID NO: 615426
guaagagucacauuuauca

SEQ ID NO: 615428 - RNA, 19 nt, Artificial Sequence
  Description of Artificial Sequence: Synthetic oligonucleotide
  Sense strand starting at position 3911 of SEQ ID NO: 585127
cuuacauacugagaaugaa

SEQ ID NO: 615429 - RNA, 19 nt, Artificial Sequence
  Description of Artificial Sequence: Synthetic oligonucleotide
  Antisense strand to SEQ ID NO: 615428
uucauucucaguauguaag

SEQ ID NO: 615430 - RNA, 19 nt, Artificial Sequence
  Description of Artificial Sequence: Synthetic oligonucleotide
  Sense strand starting at position 3935 of SEQ ID NO: 585127
gaaauaguuugggaacaaa

SEQ ID NO: 615431 - RNA, 19 nt, Artificial Sequence
  Description of Artificial Sequence: Synthetic oligonucleotide
  Antisense strand to SEQ ID NO: 615430
uuuguucccaaacuauuuc

SEQ ID NO: 615432 - RNA, 19 nt, Artificial Sequence
  Description of Artificial Sequence: Synthetic oligonucleotide
  Sense strand starting at position 88 of SEQ ID NO: 585128
cugggaucggcugaguuga

SEQ ID NO: 615433 - RNA, 19 nt, Artificial Sequence
  Description of Artificial Sequence: Synthetic oligonucleotide
  Antisense strand to SEQ ID NO: 615432
ucaacucagccgaucccag

SEQ ID NO: 615434 - RNA, 19 nt, Artificial Sequence
  Description of Artificial Sequence: Synthetic oligonucleotide
  Sense strand starting at position 181 of SEQ ID NO: 585128
cauaaucgaguuugaccua

SEQ ID NO: 615435 - RNA, 19 nt, Artificial Sequence
  Description of Artificial Sequence: Synthetic oligonucleotide
  Antisense strand to SEQ ID NO: 615434
uaggucaaacucgauuaug

SEQ ID NO: 615436 - RNA, 19 nt, Artificial Sequence
  Description of Artificial Sequence: Synthetic oligonucleotide
  Sense strand starting at position 184 of SEQ ID NO: 585128
aaucgaguuugaccuaaau

SEQ ID NO: 615437 - RNA, 19 nt, Artificial Sequence
  Description of Artificial Sequence: Synthetic oligonucleotide
  Antisense strand to SEQ ID NO: 615436
auuuaggucaaacucgauu

SEQ ID NO: 615438 - RNA, 19 nt, Artificial Sequence
  Description of Artificial Sequence: Synthetic oligonucleotide
  Sense strand starting at position 212 of SEQ ID NO: 585128
acuugaauagcucaugugu

SEQ ID NO: 615439 - RNA, 19 nt, Artificial Sequence
  Description of Artificial Sequence: Synthetic oligonucleotide
  Antisense strand to SEQ ID NO: 615438
acacaugagcuauucaagu

SEQ ID NO: 615440 - RNA, 19 nt, Artificial Sequence
  Description of Artificial Sequence: Synthetic oligonucleotide
  Sense strand starting at position 218 of SEQ ID NO: 585128
auagcucauguguaugagu

SEQ ID NO: 615441 - RNA, 19 nt, Artificial Sequence
  Description of Artificial Sequence: Synthetic oligonucleotide
  Antisense strand to SEQ ID NO: 615440
acucauacacaugagcuau

SEQ ID NO: 615442 - RNA, 19 nt, Artificial Sequence
  Description of Artificial Sequence: Synthetic oligonucleotide
  Sense strand starting at position 220 of SEQ ID NO: 585128
agcucauguguaugaguag

SEQ ID NO: 615443 - RNA, 19 nt, Artificial Sequence
  Description of Artificial Sequence: Synthetic oligonucleotide
  Antisense strand to SEQ ID NO: 615442
cuacucauacacaugagcu

SEQ ID NO: 615444 - RNA, 19 nt, Artificial Sequence
  Description of Artificial Sequence: Synthetic oligonucleotide
  Sense strand starting at position 229 of SEQ ID NO: 585128
guaugaguaguccaugucu

SEQ ID NO: 615445 - RNA, 19 nt, Artificial Sequence
  Description of Artificial Sequence: Synthetic oligonucleotide
  Antisense strand to SEQ ID NO: 615444
agacauggacuacucauac

SEQ ID NO: 615446 - RNA, 19 nt, Artificial Sequence
  Description of Artificial Sequence: Synthetic oligonucleotide
  Sense strand starting at position 231 of SEQ ID NO: 585128
augaguaguccaugucuuc

SEQ ID NO: 615447 - RNA, 19 nt, Artificial Sequence
  Description of Artificial Sequence: Synthetic oligonucleotide
  Antisense strand to SEQ ID NO: 615446
gaagacauggacuacucau

SEQ ID NO: 615448 - RNA, 19 nt, Artificial Sequence
  Description of Artificial Sequence: Synthetic oligonucleotide
  Sense strand starting at position 264 of SEQ ID NO: 585128
guuucacaggugcgauuaa

SEQ ID NO: 615449 - RNA, 19 nt, Artificial Sequence
  Description of Artificial Sequence: Synthetic oligonucleotide
  Antisense strand to SEQ ID NO: 615448
uuaaucgcaccugugaaac

SEQ ID NO: 615450 - RNA, 19 nt, Artificial Sequence
  Description of Artificial Sequence: Synthetic oligonucleotide
  Sense strand starting at position 300 of SEQ ID NO: 585128
guacuuaaucccggucaga

SEQ ID NO: 615451 - RNA, 19 nt, Artificial Sequence
  Description of Artificial Sequence: Synthetic oligonucleotide
  Antisense strand to SEQ ID NO: 615450
ucugaccgggauuaaguac

SEQ ID NO: 615452 - RNA, 19 nt, Artificial Sequence
  Description of Artificial Sequence: Synthetic oligonucleotide
  Sense strand starting at position 303 of SEQ ID NO: 585128
cuuaaucccggucagagaa

SEQ ID NO: 615453 - RNA, 19 nt, Artificial Sequence
  Description of Artificial Sequence: Synthetic oligonucleotide
  Antisense strand to SEQ ID NO: 615452
uucucugaccgggauuaag

SEQ ID NO: 615454 - RNA, 19 nt, Artificial Sequence
  Description of Artificial Sequence: Synthetic oligonucleotide
  Sense strand starting at position 480 of SEQ ID NO: 585128
gccagagauuaguuucuca

SEQ ID NO: 615455 - RNA, 19 nt, Artificial Sequence
  Description of Artificial Sequence: Synthetic oligonucleotide
  Antisense strand to SEQ ID NO: 615454
ugagaaacuaaucucuggc

SEQ ID NO: 615456 - RNA, 19 nt, Artificial Sequence
  Description of Artificial Sequence: Synthetic oligonucleotide
  Sense strand starting at position 483 of SEQ ID NO: 585128
agagauuaguuucucagau

SEQ ID NO: 615457 - RNA, 19 nt, Artificial Sequence
  Description of Artificial Sequence: Synthetic oligonucleotide
  Antisense strand to SEQ ID NO: 615456
aucugagaaacuaaucucu

SEQ ID NO: 615458 - RNA, 19 nt, Artificial Sequence
  Description of Artificial Sequence: Synthetic oligonucleotide
  Sense strand starting at position 484 of SEQ ID NO: 585128
gagauuaguuucucagaug

SEQ ID NO: 615459 - RNA, 19 nt, Artificial Sequence
  Description of Artificial Sequence: Synthetic oligonucleotide
  Antisense strand to SEQ ID NO: 615458
caucugagaaacuaaucuc

SEQ ID NO: 615460 - RNA, 19 nt, Artificial Sequence
  Description of Artificial Sequence: Synthetic oligonucleotide
  Sense strand starting at position 539 of SEQ ID NO: 585128
gagacuacguauuccaaua

SEQ ID NO: 615461 - RNA, 19 nt, Artificial Sequence
  Description of Artificial Sequence: Synthetic oligonucleotide
  Antisense strand to SEQ ID NO: 615460
uauuggaauacguagucuc

SEQ ID NO: 615462 - RNA, 19 nt, Artificial Sequence
  Description of Artificial Sequence: Synthetic oligonucleotide
  Sense strand starting at position 544 of SEQ ID NO: 585128
uacguauuccaauauggaa

SEQ ID NO: 615463 - RNA, 19 nt, Artificial Sequence
  Description of Artificial Sequence: Synthetic oligonucleotide
  Antisense strand to SEQ ID NO: 615462
uuccauauuggaauacgua

SEQ ID NO: 615464 - RNA, 19 nt, Artificial Sequence
  Description of Artificial Sequence: Synthetic oligonucleotide
  Sense strand starting at position 583 of SEQ ID NO: 585128
ugucaagcucugcaacuua

SEQ ID NO: 615465 - RNA, 19 nt, Artificial Sequence
  Description of Artificial Sequence: Synthetic oligonucleotide
  Antisense strand to SEQ ID NO: 615464
uaaguugcagagcuugaca

SEQ ID NO: 615466 - RNA, 19 nt, Artificial Sequence
  Description of Artificial Sequence: Synthetic oligonucleotide
  Sense strand starting at position 836 of SEQ ID NO: 585128
ugugacagcuuaccucaau

SEQ ID NO: 615467 - RNA, 19 nt, Artificial Sequence
  Description of Artificial Sequence: Synthetic oligonucleotide
  Antisense strand to SEQ ID NO: 615466
auugagguaagcugucaca

SEQ ID NO: 615468 - RNA, 19 nt, Artificial Sequence
  Description of Artificial Sequence: Synthetic oligonucleotide
  Sense strand starting at position 2053 of SEQ ID NO: 585128
aggcaugucucacuacaga

SEQ ID NO: 615469 - RNA, 19 nt, Artificial Sequence
  Description of Artificial Sequence: Synthetic oligonucleotide
  Antisense strand to SEQ ID NO: 615468
ucuguagugagacaugccu

SEQ ID NO: 615470 - RNA, 19 nt, Artificial Sequence
  Description of Artificial Sequence: Synthetic oligonucleotide
  Sense strand starting at position 2073 of SEQ ID NO: 585128
cccauaaugcagugcgaaa

SEQ ID NO: 615471 - RNA, 19 nt, Artificial Sequence
  Description of Artificial Sequence: Synthetic oligonucleotide
  Antisense strand to SEQ ID NO: 615470
uuucgcacugcauuauggg

SEQ ID NO: 615472 - RNA, 19 nt, Artificial Sequence
  Description of Artificial Sequence: Synthetic oligonucleotide
  Sense strand starting at position 2179 of SEQ ID NO: 585128
guuugagcaccggaacuua

SEQ ID NO: 615473 - RNA, 19 nt, Artificial Sequence
  Description of Artificial Sequence: Synthetic oligonucleotide
  Antisense strand to SEQ ID NO: 615472
uaaguuccggugcucaaac

SEQ ID NO: 615474 - RNA, 19 nt, Artificial Sequence
  Description of Artificial Sequence: Synthetic oligonucleotide
  Sense strand starting at position 2241 of SEQ ID NO: 585128
uuucuucuugagugaaugu

SEQ ID NO: 615475 - RNA, 19 nt, Artificial Sequence
  Description of Artificial Sequence: Synthetic oligonucleotide
  Antisense strand to SEQ ID NO: 615474
acauucacucaagaagaaa

SEQ ID NO: 615476 - RNA, 19 nt, Artificial Sequence
  Description of Artificial Sequence: Synthetic oligonucleotide
  Sense strand starting at position 2399 of SEQ ID NO: 585128
aguggugccagggacuaau

SEQ ID NO: 615477 - RNA, 19 nt, Artificial Sequence
  Description of Artificial Sequence: Synthetic oligonucleotide
  Antisense strand to SEQ ID NO: 615476
auuagucccuggcaccacu

SEQ ID NO: 615478 - RNA, 19 nt, Artificial Sequence
  Description of Artificial Sequence: Synthetic oligonucleotide
  Sense strand starting at position 2789 of SEQ ID NO: 585128
guaguacaucuuuggcaca

SEQ ID NO: 615479 - RNA, 19 nt, Artificial Sequence
  Description of Artificial Sequence: Synthetic oligonucleotide
  Antisense strand to SEQ ID NO: 615478
ugugccaaagauguacuac

SEQ ID NO: 615480 - RNA, 19 nt, Artificial Sequence
  Description of Artificial Sequence: Synthetic oligonucleotide
  Sense strand starting at position 3436 of SEQ ID NO: 585128
ugauaaaugugacucuuac

SEQ ID NO: 615481 - RNA, 19 nt, Artificial Sequence
  Description of Artificial Sequence: Synthetic oligonucleotide
  Antisense strand to SEQ ID NO: 615480
guaagagucacauuuauca

SEQ ID NO: 615482 - RNA, 19 nt, Artificial Sequence
  Description of Artificial Sequence: Synthetic oligonucleotide
  Sense strand starting at position 3450 of SEQ ID NO: 585128
cuuacauacugagaaugaa

SEQ ID NO: 615483 - RNA, 19 nt, Artificial Sequence
  Description of Artificial Sequence: Synthetic oligonucleotide
  Antisense strand to SEQ ID NO: 615482
uucauucucaguauguaag

SEQ ID NO: 615484 - RNA, 19 nt, Artificial Sequence
  Description of Artificial Sequence: Synthetic oligonucleotide
  Sense strand starting at position 3474 of SEQ ID NO: 585128
gaaauaguuugggaacaaa

SEQ ID NO: 615485 - RNA, 19 nt, Artificial Sequence
  Description of Artificial Sequence: Synthetic oligonucleotide
  Antisense strand to SEQ ID NO: 615484
uuuguucccaaacuauuuc

SEQ ID NO: 615486 - RNA, 19 nt, Artificial Sequence
  Description of Artificial Sequence: Synthetic oligonucleotide
  Sense strand starting at position 3659 of SEQ ID NO: 585128
cagucaguuccacaguauc

SEQ ID NO: 615487 - RNA, 19 nt, Artificial Sequence
  Description of Artificial Sequence: Synthetic oligonucleotide
  Antisense strand to SEQ ID NO: 615486
gauacuguggaacugacug

SEQ ID NO: 615488 - RNA, 19 nt, Artificial Sequence
  Description of Artificial Sequence: Synthetic oligonucleotide
  Sense strand starting at position 3727 of SEQ ID NO: 585128
auaauuuccugaggccaaa

SEQ ID NO: 615489 - RNA, 19 nt, Artificial Sequence
  Description of Artificial Sequence: Synthetic oligonucleotide
  Antisense strand to SEQ ID NO: 615488
uuuggccucaggaaauuau

SEQ ID NO: 615490 - RNA, 19 nt, Artificial Sequence
  Description of Artificial Sequence: Synthetic oligonucleotide
  Sense strand starting at position 3822 of SEQ ID NO: 585128
gguagaccugcuuggacaa

SEQ ID NO: 615491 - RNA, 19 nt, Artificial Sequence
  Description of Artificial Sequence: Synthetic oligonucleotide
  Antisense strand to SEQ ID NO: 615490
uuguccaagcaggucuacc

SEQ ID NO: 615492 - RNA, 19 nt, Artificial Sequence
  Description of Artificial Sequence: Synthetic oligonucleotide
  Sense strand starting at position 3823 of SEQ ID NO: 585128
guagaccugcuuggacaau

SEQ ID NO: 615493 - RNA, 19 nt, Artificial Sequence
  Description of Artificial Sequence: Synthetic oligonucleotide
  Antisense strand to SEQ ID NO: 615492
auuguccaagcaggucuac

SEQ ID NO: 615494 - RNA, 19 nt, Artificial Sequence
  Description of Artificial Sequence: Synthetic oligonucleotide
  Sense strand starting at position 3832 of SEQ ID NO: 585128
cuuggacaauuugacuaaa

SEQ ID NO: 615495 - RNA, 19 nt, Artificial Sequence
  Description of Artificial Sequence: Synthetic oligonucleotide
  Antisense strand to SEQ ID NO: 615494
uuuagucaaauuguccaag

SEQ ID NO: 615496 - RNA, 19 nt, Artificial Sequence
  Description of Artificial Sequence: Synthetic oligonucleotide
  Sense strand starting at position 3884 of SEQ ID NO: 585128
gggaguaguauaugacuug

SEQ ID NO: 615497 - RNA, 19 nt, Artificial Sequence
  Description of Artificial Sequence: Synthetic oligonucleotide
  Antisense strand to SEQ ID NO: 615496
caagucauauacuacuccc

SEQ ID NO: 615498 - RNA, 19 nt, Artificial Sequence
  Description of Artificial Sequence: Synthetic oligonucleotide
  Sense strand starting at position 3887 of SEQ ID NO: 585128
aguaguauaugacuuguua

SEQ ID NO: 615499 - RNA, 19 nt, Artificial Sequence
  Description of Artificial Sequence: Synthetic oligonucleotide
  Antisense strand to SEQ ID NO: 615498
uaacaagucauauacuacu

SEQ ID NO: 615500 - RNA, 19 nt, Artificial Sequence
  Description of Artificial Sequence: Synthetic oligonucleotide
  Sense strand starting at position 3891 of SEQ ID NO: 585128
guauaugacuuguuagauu

SEQ ID NO: 615501 - RNA, 19 nt, Artificial Sequence
  Description of Artificial Sequence: Synthetic oligonucleotide
  Antisense strand to SEQ ID NO: 615500
aaucuaacaagucauauac

SEQ ID NO: 615502 - RNA, 19 nt, Artificial Sequence
  Description of Artificial Sequence: Synthetic oligonucleotide
  Sense strand starting at position 3902 of SEQ ID NO: 585128
guuagauuccuugucgugu

SEQ ID NO: 615503 - RNA, 19 nt, Artificial Sequence
  Description of Artificial Sequence: Synthetic oligonucleotide
  Antisense strand to SEQ ID NO: 615502
acacgacaaggaaucuaac

SEQ ID NO: 615504 - RNA, 19 nt, Artificial Sequence
  Description of Artificial Sequence: Synthetic oligonucleotide
  Sense strand starting at position 3908 of SEQ ID NO: 585128
uuccuugucgugucucuau

SEQ ID NO: 615505 - RNA, 19 nt, Artificial Sequence
  Description of Artificial Sequence: Synthetic oligonucleotide
  Antisense strand to SEQ ID NO: 615504
auagagacacgacaaggaa

SEQ ID NO: 615506 - RNA, 19 nt, Artificial Sequence
  Description of Artificial Sequence: Synthetic oligonucleotide
  Sense strand starting at position 3970 of SEQ ID NO: 585128
cuggcuguuaaauagguaa

SEQ ID NO: 615507 - RNA, 19 nt, Artificial Sequence
  Description of Artificial Sequence: Synthetic oligonucleotide
  Antisense strand to SEQ ID NO: 615506
uuaccuauuuaacagccag

SEQ ID NO: 615508 - RNA, 19 nt, Artificial Sequence
  Description of Artificial Sequence: Synthetic oligonucleotide
  Sense strand starting at position 3972 of SEQ ID NO: 585128
ggcuguuaaauagguaaac

SEQ ID NO: 615509 - RNA, 19 nt, Artificial Sequence
  Description of Artificial Sequence: Synthetic oligonucleotide
  Antisense strand to SEQ ID NO: 615508
guuuaccuauuuaacagcc

SEQ ID NO: 615510 - RNA, 19 nt, Artificial Sequence
  Description of Artificial Sequence: Synthetic oligonucleotide
  Sense strand starting at position 3973 of SEQ ID NO: 585128
gcuguuaaauagguaaaca

SEQ ID NO: 615511 - RNA, 19 nt, Artificial Sequence
  Description of Artificial Sequence: Synthetic oligonucleotide
  Antisense strand to SEQ ID NO: 615510
uguuuaccuauuuaacagc

SEQ ID NO: 615512 - RNA, 19 nt, Artificial Sequence
  Description of Artificial Sequence: Synthetic oligonucleotide
  Sense strand starting at position 109 of SEQ ID NO: 585129
cacuccugccaggguuauu

SEQ ID NO: 615513 - RNA, 19 nt, Artificial Sequence
  Description of Artificial Sequence: Synthetic oligonucleotide
  Antisense strand to SEQ ID NO: 615512
aauaacccuggcaggagug

SEQ ID NO: 615514 - RNA, 19 nt, Artificial Sequence
  Description of Artificial Sequence: Synthetic oligonucleotide
  Sense strand starting at position 336 of SEQ ID NO: 585129
ugaagacuucuaggucuac

SEQ ID NO: 615515 - RNA, 19 nt, Artificial Sequence
  Description of Artificial Sequence: Synthetic oligonucleotide
  Antisense strand to SEQ ID NO: 615514
guagaccuagaagucuuca

SEQ ID NO: 615516 - RNA, 19 nt, Artificial Sequence
  Description of Artificial Sequence: Synthetic oligonucleotide
  Sense strand starting at position 337 of SEQ ID NO: 585129
gaagacuucuaggucuaca

SEQ ID NO: 615517 - RNA, 19 nt, Artificial Sequence
  Description of Artificial Sequence: Synthetic oligonucleotide
  Antisense strand to SEQ ID NO: 615516
uguagaccuagaagucuuc

SEQ ID NO: 615518 - RNA, 19 nt, Artificial Sequence
  Description of Artificial Sequence: Synthetic oligonucleotide
  Sense strand starting at position 342 of SEQ ID NO: 585129
cuucuaggucuacaucuau

SEQ ID NO: 615519 - RNA, 19 nt, Artificial Sequence
  Description of Artificial Sequence: Synthetic oligonucleotide
  Antisense strand to SEQ ID NO: 615518
auagauguagaccuagaag

SEQ ID NO: 615520 - RNA, 19 nt, Artificial Sequence
  Description of Artificial Sequence: Synthetic oligonucleotide
  Sense strand starting at position 397 of SEQ ID NO: 585129
ugccaugagugcccucaau

SEQ ID NO: 615521 - RNA, 19 nt, Artificial Sequence
  Description of Artificial Sequence: Synthetic oligonucleotide
  Antisense strand to SEQ ID NO: 615520
auugagggcacucauggca

SEQ ID NO: 615522 - RNA, 19 nt, Artificial Sequence
  Description of Artificial Sequence: Synthetic oligonucleotide
  Sense strand starting at position 425 of SEQ ID NO: 585129
gggccauuccuaggacauc

SEQ ID NO: 615523 - RNA, 19 nt, Artificial Sequence
  Description of Artificial Sequence: Synthetic oligonucleotide
  Antisense strand to SEQ ID NO: 615522
gauguccuaggaauggccc

SEQ ID NO: 615524 - RNA, 19 nt, Artificial Sequence
  Description of Artificial Sequence: Synthetic oligonucleotide
  Sense strand starting at position 447 of SEQ ID NO: 585129
ugucuaugaccuugcauca

SEQ ID NO: 615525 - RNA, 19 nt, Artificial Sequence
  Description of Artificial Sequence: Synthetic oligonucleotide
  Antisense strand to SEQ ID NO: 615524
ugaugcaaggucauagaca

SEQ ID NO: 615526 - RNA, 19 nt, Artificial Sequence
  Description of Artificial Sequence: Synthetic oligonucleotide
  Sense strand starting at position 460 of SEQ ID NO: 585129
gcaucauaguuauucgaug

SEQ ID NO: 615527 - RNA, 19 nt, Artificial Sequence
  Description of Artificial Sequence: Synthetic oligonucleotide
  Antisense strand to SEQ ID NO: 615526
caucgaauaacuaugaugc

SEQ ID NO: 615528 - RNA, 19 nt, Artificial Sequence
  Description of Artificial Sequence: Synthetic oligonucleotide
  Sense strand starting at position 461 of SEQ ID NO: 585129
caucauaguuauucgauga

SEQ ID NO: 615529 - RNA, 19 nt, Artificial Sequence
  Description of Artificial Sequence: Synthetic oligonucleotide
  Antisense strand to SEQ ID NO: 615528
ucaucgaauaacuaugaug

SEQ ID NO: 615530 - RNA, 19 nt, Artificial Sequence
  Description of Artificial Sequence: Synthetic oligonucleotide
  Sense strand starting at position 462 of SEQ ID NO: 585129
aucauaguuauucgaugag

SEQ ID NO: 615531 - RNA, 19 nt, Artificial Sequence
  Description of Artificial Sequence: Synthetic oligonucleotide
  Antisense strand to SEQ ID NO: 615530
cucaucgaauaacuaugau

SEQ ID NO: 615532 - RNA, 19 nt, Artificial Sequence
  Description of Artificial Sequence: Synthetic oligonucleotide
  Sense strand starting at position 465 of SEQ ID NO: 585129
auaguuauucgaugagcuc

SEQ ID NO: 615533 - RNA, 19 nt, Artificial Sequence
  Description of Artificial Sequence: Synthetic oligonucleotide
  Antisense strand to SEQ ID NO: 615532
gagcucaucgaauaacuau

SEQ ID NO: 615534 - RNA, 19 nt, Artificial Sequence
  Description of Artificial Sequence: Synthetic oligonucleotide
  Sense strand starting at position 466 of SEQ ID NO: 585129
uaguuauucgaugagcuca

SEQ ID NO: 615535 - RNA, 19 nt, Artificial Sequence
  Description of Artificial Sequence: Synthetic oligonucleotide
  Antisense strand to SEQ ID NO: 615534
ugagcucaucgaauaacua

SEQ ID NO: 615536 - RNA, 19 nt, Artificial Sequence
  Description of Artificial Sequence: Synthetic oligonucleotide
  Sense strand starting at position 474 of SEQ ID NO: 585129
cgaugagcucagcauccaa

SEQ ID NO: 615537 - RNA, 19 nt, Artificial Sequence
  Description of Artificial Sequence: Synthetic oligonucleotide
  Antisense strand to SEQ ID NO: 615536
uuggaugcugagcucaucg

SEQ ID NO: 615538 - RNA, 19 nt, Artificial Sequence
  Description of Artificial Sequence: Synthetic oligonucleotide
  Sense strand starting at position 623 of SEQ ID NO: 585129
guaauuuauuggcugaguc

SEQ ID NO: 615539 - RNA, 19 nt, Artificial Sequence
  Description of Artificial Sequence: Synthetic oligonucleotide
  Antisense strand to SEQ ID NO: 615538
gacucagccaauaaauuac

SEQ ID NO: 615540 - RNA, 19 nt, Artificial Sequence
  Description of Artificial Sequence: Synthetic oligonucleotide
  Sense strand starting at position 651 of SEQ ID NO: 585129
gaaucacucucuggaagag

SEQ ID NO: 615541 - RNA, 19 nt, Artificial Sequence
  Description of Artificial Sequence: Synthetic oligonucleotide
  Antisense strand to SEQ ID NO: 615540
cucuuccagagagugauuc

SEQ ID NO: 615542 - RNA, 19 nt, Artificial Sequence
  Description of Artificial Sequence: Synthetic oligonucleotide
  Sense strand starting at position 696 of SEQ ID NO: 585129
uccaguccacauggagaua

SEQ ID NO: 615543 - RNA, 19 nt, Artificial Sequence
  Description of Artificial Sequence: Synthetic oligonucleotide
  Antisense strand to SEQ ID NO: 615542
uaucuccauguggacugga

SEQ ID NO: 615544 - RNA, 19 nt, Artificial Sequence
  Description of Artificial Sequence: Synthetic oligonucleotide
  Sense strand starting at position 896 of SEQ ID NO: 585129
gaggcaaaccucugucuga

SEQ ID NO: 615545 - RNA, 19 nt, Artificial Sequence
  Description of Artificial Sequence: Synthetic oligonucleotide
  Antisense strand to SEQ ID NO: 615544
ucagacagagguuugccuc

SEQ ID NO: 615546 - RNA, 19 nt, Artificial Sequence
  Description of Artificial Sequence: Synthetic oligonucleotide
  Sense strand starting at position 903 of SEQ ID NO: 585129
accucugucugagucuauu

SEQ ID NO: 615547 - RNA, 19 nt, Artificial Sequence
  Description of Artificial Sequence: Synthetic oligonucleotide
  Antisense strand to SEQ ID NO: 615546
aauagacucagacagaggu

SEQ ID NO: 615548 - RNA, 19 nt, Artificial Sequence
  Description of Artificial Sequence: Synthetic oligonucleotide
  Sense strand starting at position 955 of SEQ ID NO: 585129
caguccugagcuuaagaaa

SEQ ID NO: 615549 - RNA, 19 nt, Artificial Sequence
  Description of Artificial Sequence: Synthetic oligonucleotide
  Antisense strand to SEQ ID NO: 615548
uuucuuaagcucaggacug

SEQ ID NO: 615550 - RNA, 19 nt, Artificial Sequence
  Description of Artificial Sequence: Synthetic oligonucleotide
  Sense strand starting at position 1210 of SEQ ID NO: 585129
cuauuaggcuguucgauga

SEQ ID NO: 615551 - RNA, 19 nt, Artificial Sequence
  Description of Artificial Sequence: Synthetic oligonucleotide
  Antisense strand to SEQ ID NO: 615550
ucaucgaacagccuaauag

SEQ ID NO: 615552 - RNA, 19 nt, Artificial Sequence
  Description of Artificial Sequence: Synthetic oligonucleotide
  Sense strand starting at position 1214 of SEQ ID NO: 585129
uaggcuguucgaugacuaa

SEQ ID NO: 615553 - RNA, 19 nt, Artificial Sequence
  Description of Artificial Sequence: Synthetic oligonucleotide
  Antisense strand to SEQ ID NO: 615552
uuagucaucgaacagccua

SEQ ID NO: 615554 - RNA, 19 nt, Artificial Sequence
  Description of Artificial Sequence: Synthetic oligonucleotide
  Sense strand starting at position 1217 of SEQ ID NO: 585129
gcuguucgaugacuaaauu

SEQ ID NO: 615555 - RNA, 19 nt, Artificial Sequence
  Description of Artificial Sequence: Synthetic oligonucleotide
  Antisense strand to SEQ ID NO: 615554
aauuuagucaucgaacagc

SEQ ID NO: 615556 - RNA, 19 nt, Artificial Sequence
  Description of Artificial Sequence: Synthetic oligonucleotide
  Sense strand starting at position 1218 of SEQ ID NO: 585129
cuguucgaugacuaaauua

SEQ ID NO: 615557 - RNA, 19 nt, Artificial Sequence
  Description of Artificial Sequence: Synthetic oligonucleotide
  Antisense strand to SEQ ID NO: 615556
uaauuuagucaucgaacag

SEQ ID NO: 615558 - RNA, 19 nt, Artificial Sequence
  Description of Artificial Sequence: Synthetic oligonucleotide
  Sense strand starting at position 1252 of SEQ ID NO: 585129
gaacuuagaguagggagua

SEQ ID NO: 615559 - RNA, 19 nt, Artificial Sequence
  Description of Artificial Sequence: Synthetic oligonucleotide
  Antisense strand to SEQ ID NO: 615558
uacucccuacucuaaguuc

SEQ ID NO: 615560 - RNA, 19 nt, Artificial Sequence
  Description of Artificial Sequence: Synthetic oligonucleotide
  Sense strand starting at position 1384 of SEQ ID NO: 585129
uugugugcugaaugauaaa

SEQ ID NO: 615561 - RNA, 19 nt, Artificial Sequence
  Description of Artificial Sequence: Synthetic oligonucleotide
  Antisense strand to SEQ ID NO: 615560
uuuaucauucagcacacaa

SEQ ID NO: 615562 - RNA, 19 nt, Artificial Sequence
  Description of Artificial Sequence: Synthetic oligonucleotide
  Sense strand starting at position 1408 of SEQ ID NO: 585129
ugguuauccuaaucauagg

SEQ ID NO: 615563 - RNA, 19 nt, Artificial Sequence
  Description of Artificial Sequence: Synthetic oligonucleotide
  Antisense strand to SEQ ID NO: 615562
ccuaugauuaggauaacca

SEQ ID NO: 615564 - RNA, 19 nt, Artificial Sequence
  Description of Artificial Sequence: Synthetic oligonucleotide
  Sense strand starting at position 1413 of SEQ ID NO: 585129
auccuaaucauagggcgua

SEQ ID NO: 615565 - RNA, 19 nt, Artificial Sequence
  Description of Artificial Sequence: Synthetic oligonucleotide
  Antisense strand to SEQ ID NO: 615564
uacgcccuaugauuaggau

SEQ ID NO: 615566 - RNA, 19 nt, Artificial Sequence
  Description of Artificial Sequence: Synthetic oligonucleotide
  Sense strand starting at position 1416 of SEQ ID NO: 585129
cuaaucauagggcguaaau

SEQ ID NO: 615567 - RNA, 19 nt, Artificial Sequence
  Description of Artificial Sequence: Synthetic oligonucleotide
  Antisense strand to SEQ ID NO: 615566
auuuacgcccuaugauuag

SEQ ID NO: 615568 - RNA, 19 nt, Artificial Sequence
  Description of Artificial Sequence: Synthetic oligonucleotide
  Sense strand starting at position 1418 of SEQ ID NO: 585129
aaucauagggcguaaauuc

SEQ ID NO: 615569 - RNA, 19 nt, Artificial Sequence
  Description of Artificial Sequence: Synthetic oligonucleotide
  Antisense strand to SEQ ID NO: 615568
gaauuuacgcccuaugauu

SEQ ID NO: 615570 - RNA, 19 nt, Artificial Sequence
  Description of Artificial Sequence: Synthetic oligonucleotide
  Sense strand starting at position 1425 of SEQ ID NO: 585129
gggcguaaauucuugguga

SEQ ID NO: 615571 - RNA, 19 nt, Artificial Sequence
  Description of Artificial Sequence: Synthetic oligonucleotide
  Antisense strand to SEQ ID NO: 615570
ucaccaagaauuuacgccc

SEQ ID NO: 615572 - RNA, 19 nt, Artificial Sequence
  Description of Artificial Sequence: Synthetic oligonucleotide
  Sense strand starting at position 1427 of SEQ ID NO: 585129
gcguaaauucuuggugagu

SEQ ID NO: 615573 - RNA, 19 nt, Artificial Sequence
  Description of Artificial Sequence: Synthetic oligonucleotide
  Antisense strand to SEQ ID NO: 615572
acucaccaagaauuuacgc

SEQ ID NO: 615574 - RNA, 19 nt, Artificial Sequence
  Description of Artificial Sequence: Synthetic oligonucleotide
  Sense strand starting at position 1428 of SEQ ID NO: 585129
cguaaauucuuggugagua

SEQ ID NO: 615575 - RNA, 19 nt, Artificial Sequence
  Description of Artificial Sequence: Synthetic oligonucleotide
  Antisense strand to SEQ ID NO: 615574
uacucaccaagaauuuacg

SEQ ID NO: 615576 - RNA, 19 nt, Artificial Sequence
  Description of Artificial Sequence: Synthetic oligonucleotide
  Sense strand starting at position 1430 of SEQ ID NO: 585129
uaaauucuuggugaguauc

SEQ ID NO: 615577 - RNA, 19 nt, Artificial Sequence
  Description of Artificial Sequence: Synthetic oligonucleotide
  Antisense strand to SEQ ID NO: 615576
gauacucaccaagaauuua

SEQ ID NO: 615578 - RNA, 19 nt, Artificial Sequence
  Description of Artificial Sequence: Synthetic oligonucleotide
  Sense strand starting at position 2800 of SEQ ID NO: 585129
cagggaguacugugauguu

SEQ ID NO: 615579 - RNA, 19 nt, Artificial Sequence
  Description of Artificial Sequence: Synthetic oligonucleotide
  Antisense strand to SEQ ID NO: 615578
aacaucacaguacucccug

SEQ ID NO: 615580 - RNA, 19 nt, Artificial Sequence
  Description of Artificial Sequence: Synthetic oligonucleotide
  Sense strand starting at position 2886 of SEQ ID NO: 585129
gcaguuuccucccugaaac

SEQ ID NO: 615581 - RNA, 19 nt, Artificial Sequence
  Description of Artificial Sequence: Synthetic oligonucleotide
  Antisense strand to SEQ ID NO: 615580
guuucagggaggaaacugc

SEQ ID NO: 615582 - RNA, 19 nt, Artificial Sequence
  Description of Artificial Sequence: Synthetic oligonucleotide
  Sense strand starting at position 2896 of SEQ ID NO: 585129
cccugaaacucagaggaua

SEQ ID NO: 615583 - RNA, 19 nt, Artificial Sequence
  Description of Artificial Sequence: Synthetic oligonucleotide
  Antisense strand to SEQ ID NO: 615582
uauccucugaguuucaggg

SEQ ID NO: 615584 - RNA, 19 nt, Artificial Sequence
  Description of Artificial Sequence: Synthetic oligonucleotide
  Sense strand starting at position 3140 of SEQ ID NO: 585129
ccuggaugaccauguucuu

SEQ ID NO: 615585 - RNA, 19 nt, Artificial Sequence
  Description of Artificial Sequence: Synthetic oligonucleotide
  Antisense strand to SEQ ID NO: 615584
aagaacauggucauccagg

SEQ ID NO: 615586 - RNA, 19 nt, Artificial Sequence
  Description of Artificial Sequence: Synthetic oligonucleotide
  Sense strand starting at position 3195 of SEQ ID NO: 585129
cuggguugucuuugccuga

SEQ ID NO: 615587 - RNA, 19 nt, Artificial Sequence
  Description of Artificial Sequence: Synthetic oligonucleotide
  Antisense strand to SEQ ID NO: 615586
ucaggcaaagacaacccag

SEQ ID NO: 615588 - RNA, 19 nt, Artificial Sequence
  Description of Artificial Sequence: Synthetic oligonucleotide
  Sense strand starting at position 3395 of SEQ ID NO: 585129
acgugaagugccuggaaca

SEQ ID NO: 615589 - RNA, 19 nt, Artificial Sequence
  Description of Artificial Sequence: Synthetic oligonucleotide
  Antisense strand to SEQ ID NO: 615588
uguuccaggcacuucacgu

SEQ ID NO: 615590 - RNA, 19 nt, Artificial Sequence
  Description of Artificial Sequence: Synthetic oligonucleotide
  Sense strand starting at position 3761 of SEQ ID NO: 585129
uuuaguguguaucuagaag

SEQ ID NO: 615591 - RNA, 19 nt, Artificial Sequence
  Description of Artificial Sequence: Synthetic oligonucleotide
  Antisense strand to SEQ ID NO: 615590
cuucuagauacacacuaaa

SEQ ID NO: 615592 - RNA, 19 nt, Artificial Sequence
  Description of Artificial Sequence: Synthetic oligonucleotide
  Sense strand starting at position 52 of SEQ ID NO: 585130
aagacagagugauuauucu

SEQ ID NO: 615593 - RNA, 19 nt, Artificial Sequence
  Description of Artificial Sequence: Synthetic oligonucleotide
  Antisense strand to SEQ ID NO: 615592
agaauaaucacucugucuu

SEQ ID NO: 615594 - RNA, 19 nt, Artificial Sequence
  Description of Artificial Sequence: Synthetic oligonucleotide
  Sense strand starting at position 56 of SEQ ID NO: 585130
cagagugauuauucuugga

SEQ ID NO: 615595 - RNA, 19 nt, Artificial Sequence
  Description of Artificial Sequence: Synthetic oligonucleotide
  Antisense strand to SEQ ID NO: 615594
uccaagaauaaucacucug

SEQ ID NO: 615596 - RNA, 19 nt, Artificial Sequence
  Description of Artificial Sequence: Synthetic oligonucleotide
  Sense strand starting at position 58 of SEQ ID NO: 585130
gagugauuauucuuggaca

SEQ ID NO: 615597 - RNA, 19 nt, Artificial Sequence
  Description of Artificial Sequence: Synthetic oligonucleotide
  Antisense strand to SEQ ID NO: 615596
uguccaagaauaaucacuc

SEQ ID NO: 615598 - RNA, 19 nt, Artificial Sequence
  Description of Artificial Sequence: Synthetic oligonucleotide
  Sense strand starting at position 60 of SEQ ID NO: 585130
gugauuauucuuggacagg

SEQ ID NO: 615599 - RNA, 19 nt, Artificial Sequence
  Description of Artificial Sequence: Synthetic oligonucleotide
  Antisense strand to SEQ ID NO: 615598
ccuguccaagaauaaucac

SEQ ID NO: 615600 - RNA, 19 nt, Artificial Sequence
  Description of Artificial Sequence: Synthetic oligonucleotide
  Sense strand starting at position 184 of SEQ ID NO: 585130
acauaaaguuaggaucuaa

SEQ ID NO: 615601 - RNA, 19 nt, Artificial Sequence
  Description of Artificial Sequence: Synthetic oligonucleotide
  Antisense strand to SEQ ID NO: 615600
uuagauccuaacuuuaugu

SEQ ID NO: 615602 - RNA, 19 nt, Artificial Sequence
  Description of Artificial Sequence: Synthetic oligonucleotide
  Sense strand starting at position 422 of SEQ ID NO: 585130
uuaguuugcuggguuaaau

SEQ ID NO: 615603 - RNA, 19 nt, Artificial Sequence
  Description of Artificial Sequence: Synthetic oligonucleotide
  Antisense strand to SEQ ID NO: 615602
auuuaacccagcaaacuaa

SEQ ID NO: 615604 - RNA, 19 nt, Artificial Sequence
  Description of Artificial Sequence: Synthetic oligonucleotide
  Sense strand starting at position 447 of SEQ ID NO: 585130
ugagauuucuuccagacca

SEQ ID NO: 615605 - RNA, 19 nt, Artificial Sequence
  Description of Artificial Sequence: Synthetic oligonucleotide
  Antisense strand to SEQ ID NO: 615604
uggucuggaagaaaucuca

SEQ ID NO: 615606 - RNA, 19 nt, Artificial Sequence
  Description of Artificial Sequence: Synthetic oligonucleotide
  Sense strand starting at position 465 of SEQ ID NO: 585130
acguaugaccguuaaggca

SEQ ID NO: 615607 - RNA, 19 nt, Artificial Sequence
  Description of Artificial Sequence: Synthetic oligonucleotide
  Antisense strand to SEQ ID NO: 615606
ugccuuaacggucauacgu

SEQ ID NO: 615608 - RNA, 19 nt, Artificial Sequence
  Description of Artificial Sequence: Synthetic oligonucleotide
  Sense strand starting at position 473 of SEQ ID NO: 585130
ccguuaaggcaagguaauu

SEQ ID NO: 615609 - RNA, 19 nt, Artificial Sequence
  Description of Artificial Sequence: Synthetic oligonucleotide
  Antisense strand to SEQ ID NO: 615608
aauuaccuugccuuaacgg

SEQ ID NO: 615610 - RNA, 19 nt, Artificial Sequence
  Description of Artificial Sequence: Synthetic oligonucleotide
  Sense strand starting at position 636 of SEQ ID NO: 585130
acugauuugucauacagca

SEQ ID NO: 615611 - RNA, 19 nt, Artificial Sequence
  Description of Artificial Sequence: Synthetic oligonucleotide
  Antisense strand to SEQ ID NO: 615610
ugcuguaugacaaaucagu

SEQ ID NO: 615612 - RNA, 19 nt, Artificial Sequence
  Description of Artificial Sequence: Synthetic oligonucleotide
  Sense strand starting at position 641 of SEQ ID NO: 585130
uuugucauacagcaagagu

SEQ ID NO: 615613 - RNA, 19 nt, Artificial Sequence
  Description of Artificial Sequence: Synthetic oligonucleotide
  Antisense strand to SEQ ID NO: 615612
acucuugcuguaugacaaa

SEQ ID NO: 615614 - RNA, 19 nt, Artificial Sequence
  Description of Artificial Sequence: Synthetic oligonucleotide
  Sense strand starting at position 644 of SEQ ID NO: 585130
gucauacagcaagaguuua

SEQ ID NO: 615615 - RNA, 19 nt, Artificial Sequence
  Description of Artificial Sequence: Synthetic oligonucleotide
  Antisense strand to SEQ ID NO: 615614
uaaacucuugcuguaugac

SEQ ID NO: 615616 - RNA, 19 nt, Artificial Sequence
  Description of Artificial Sequence: Synthetic oligonucleotide
  Sense strand starting at position 657 of SEQ ID NO: 585130
aguuuaaggcuuugaugau

SEQ ID NO: 615617 - RNA, 19 nt, Artificial Sequence
  Description of Artificial Sequence: Synthetic oligonucleotide
  Antisense strand to SEQ ID NO: 615616
aucaucaaagccuuaaacu

SEQ ID NO: 615618 - RNA, 19 nt, Artificial Sequence
  Description of Artificial Sequence: Synthetic oligonucleotide
  Sense strand starting at position 664 of SEQ ID NO: 585130
ggcuuugaugaugguucua

SEQ ID NO: 615619 - RNA, 19 nt, Artificial Sequence
  Description of Artificial Sequence: Synthetic oligonucleotide
  Antisense strand to SEQ ID NO: 615618
uagaaccaucaucaaagcc

SEQ ID NO: 615620 - RNA, 19 nt, Artificial Sequence
  Description of Artificial Sequence: Synthetic oligonucleotide
  Sense strand starting at position 666 of SEQ ID NO: 585130
cuuugaugaugguucuauu

SEQ ID NO: 615621 - RNA, 19 nt, Artificial Sequence
  Description of Artificial Sequence: Synthetic oligonucleotide
  Antisense strand to SEQ ID NO: 615620
aauagaaccaucaucaaag

SEQ ID NO: 615622 - RNA, 19 nt, Artificial Sequence
  Description of Artificial Sequence: Synthetic oligonucleotide
  Sense strand starting at position 677 of SEQ ID NO: 585130
guucuauucuuguugacaa

SEQ ID NO: 615623 - RNA, 19 nt, Artificial Sequence
  Description of Artificial Sequence: Synthetic oligonucleotide
  Antisense strand to SEQ ID NO: 615622
uugucaacaagaauagaac

SEQ ID NO: 615624 - RNA, 19 nt, Artificial Sequence
  Description of Artificial Sequence: Synthetic oligonucleotide
  Sense strand starting at position 812 of SEQ ID NO: 585130
auaauugaguggucagaua

SEQ ID NO: 615625 - RNA, 19 nt, Artificial Sequence
  Description of Artificial Sequence: Synthetic oligonucleotide
  Antisense strand to SEQ ID NO: 615624
uaucugaccacucaauuau

SEQ ID NO: 615626 - RNA, 19 nt, Artificial Sequence
  Description of Artificial Sequence: Synthetic oligonucleotide
  Sense strand starting at position 892 of SEQ ID NO: 585130
acuaaaggaucugagugaa

SEQ ID NO: 615627 - RNA, 19 nt, Artificial Sequence
  Description of Artificial Sequence: Synthetic oligonucleotide
  Antisense strand to SEQ ID NO: 615626
uucacucagauccuuuagu

SEQ ID NO: 615628 - RNA, 19 nt, Artificial Sequence
  Description of Artificial Sequence: Synthetic oligonucleotide
  Sense strand starting at position 1169 of SEQ ID NO: 585130
cgaauacagccauguuaaa

SEQ ID NO: 615629 - RNA, 19 nt, Artificial Sequence
  Description of Artificial Sequence: Synthetic oligonucleotide
  Antisense strand to SEQ ID NO: 615628
uuuaacauggcuguauucg

SEQ ID NO: 615630 - RNA, 19 nt, Artificial Sequence
  Description of Artificial Sequence: Synthetic oligonucleotide
  Sense strand starting at position 2334 of SEQ ID NO: 585130
acaagaucgccggagucau

SEQ ID NO: 615631 - RNA, 19 nt, Artificial Sequence
  Description of Artificial Sequence: Synthetic oligonucleotide
  Antisense strand to SEQ ID NO: 615630
augacuccggcgaucuugu

SEQ ID NO: 615632 - RNA, 19 nt, Artificial Sequence
  Description of Artificial Sequence: Synthetic oligonucleotide
  Sense strand starting at position 2338 of SEQ ID NO: 585130
gaucgccggagucauauua

SEQ ID NO: 615633 - RNA, 19 nt, Artificial Sequence
  Description of Artificial Sequence: Synthetic oligonucleotide
  Antisense strand to SEQ ID NO: 615632
uaauaugacuccggcgauc

SEQ ID NO: 615634 - RNA, 19 nt, Artificial Sequence
  Description of Artificial Sequence: Synthetic oligonucleotide
  Sense strand starting at position 2345 of SEQ ID NO: 585130
ggagucauauuaucgacgu

SEQ ID NO: 615635 - RNA, 19 nt, Artificial Sequence
  Description of Artificial Sequence: Synthetic oligonucleotide
  Antisense strand to SEQ ID NO: 615634
acgucgauaauaugacucc

SEQ ID NO: 615636 - RNA, 19 nt, Artificial Sequence
  Description of Artificial Sequence: Synthetic oligonucleotide
  Sense strand starting at position 2351 of SEQ ID NO: 585130
auauuaucgacguaguuaa

SEQ ID NO: 615637 - RNA, 19 nt, Artificial Sequence
  Description of Artificial Sequence: Synthetic oligonucleotide
  Antisense strand to SEQ ID NO: 615636
uuaacuacgucgauaauau

SEQ ID NO: 615638 - RNA, 19 nt, Artificial Sequence
  Description of Artificial Sequence: Synthetic oligonucleotide
  Sense strand starting at position 2497 of SEQ ID NO: 585130
cagguugucacccggaaau

SEQ ID NO: 615639 - RNA, 19 nt, Artificial Sequence
  Description of Artificial Sequence: Synthetic oligonucleotide
  Antisense strand to SEQ ID NO: 615638
auuuccgggugacaaccug

SEQ ID NO: 615640 - RNA, 19 nt, Artificial Sequence
  Description of Artificial Sequence: Synthetic oligonucleotide
  Sense strand starting at position 2499 of SEQ ID NO: 585130
gguugucacccggaaauaa

SEQ ID NO: 615641 - RNA, 19 nt, Artificial Sequence
  Description of Artificial Sequence: Synthetic oligonucleotide
  Antisense strand to SEQ ID NO: 615640
uuauuuccgggugacaacc

SEQ ID NO: 615642 - RNA, 19 nt, Artificial Sequence
  Description of Artificial Sequence: Synthetic oligonucleotide
  Sense strand starting at position 2942 of SEQ ID NO: 585130
cggcguaagccgagaagug

SEQ ID NO: 615643 - RNA, 19 nt, Artificial Sequence
  Description of Artificial Sequence: Synthetic oligonucleotide
  Antisense strand to SEQ ID NO: 615642
cacuucucggcuuacgccg

SEQ ID NO: 615644 - RNA, 19 nt, Artificial Sequence
  Description of Artificial Sequence: Synthetic oligonucleotide
  Sense strand starting at position 2990 of SEQ ID NO: 585130
cugauuuggccacggugaa

SEQ ID NO: 615645 - RNA, 19 nt, Artificial Sequence
  Description of Artificial Sequence: Synthetic oligonucleotide
  Antisense strand to SEQ ID NO: 615644
uucaccguggccaaaucag

SEQ ID NO: 615646 - RNA, 19 nt, Artificial Sequence
  Description of Artificial Sequence: Synthetic oligonucleotide
  Sense strand starting at position 3288 of SEQ ID NO: 585130
uuuccuuuggccgagucaa

SEQ ID NO: 615647 - RNA, 19 nt, Artificial Sequence
  Description of Artificial Sequence: Synthetic oligonucleotide
  Antisense strand to SEQ ID NO: 615646
uugacucggccaaaggaaa

SEQ ID NO: 615648 - RNA, 19 nt, Artificial Sequence
  Description of Artificial Sequence: Synthetic oligonucleotide
  Sense strand starting at position 3307 of SEQ ID NO: 585130
cugcggugccgaguuguau

SEQ ID NO: 615649 - RNA, 19 nt, Artificial Sequence
  Description of Artificial Sequence: Synthetic oligonucleotide
  Antisense strand to SEQ ID NO: 615648
auacaacucggcaccgcag

SEQ ID NO: 615650 - RNA, 19 nt, Artificial Sequence
  Description of Artificial Sequence: Synthetic oligonucleotide
  Sense strand starting at position 3308 of SEQ ID NO: 585130
ugcggugccgaguuguauu

SEQ ID NO: 615651 - RNA, 19 nt, Artificial Sequence
  Description of Artificial Sequence: Synthetic oligonucleotide
  Antisense strand to SEQ ID NO: 615650
aauacaacucggcaccgca

SEQ ID NO: 615652 - RNA, 19 nt, Artificial Sequence
  Description of Artificial Sequence: Synthetic oligonucleotide
  Sense strand starting at position 3337 of SEQ ID NO: 585130
agguguguccgagaaccau

SEQ ID NO: 615653 - RNA, 19 nt, Artificial Sequence
  Description of Artificial Sequence: Synthetic oligonucleotide
  Antisense strand to SEQ ID NO: 615652
augguucucggacacaccu

SEQ ID NO: 615654 - RNA, 19 nt, Artificial Sequence
  Description of Artificial Sequence: Synthetic oligonucleotide
  Sense strand starting at position 3347 of SEQ ID NO: 585130
gagaaccauucuuaggaga

SEQ ID NO: 615655 - RNA, 19 nt, Artificial Sequence
  Description of Artificial Sequence: Synthetic oligonucleotide
  Antisense strand to SEQ ID NO: 615654
ucuccuaagaaugguucuc

SEQ ID NO: 615656 - RNA, 19 nt, Artificial Sequence
  Description of Artificial Sequence: Synthetic oligonucleotide
  Sense strand starting at position 3530 of SEQ ID NO: 585130
guguguacgcaggugucaa

SEQ ID NO: 615657 - RNA, 19 nt, Artificial Sequence
  Description of Artificial Sequence: Synthetic oligonucleotide
  Antisense strand to SEQ ID NO: 615656
uugacaccugcguacacac

SEQ ID NO: 615658 - RNA, 19 nt, Artificial Sequence
  Description of Artificial Sequence: Synthetic oligonucleotide
  Sense strand starting at position 3545 of SEQ ID NO: 585130
ucaaauguguacgcacaga

SEQ ID NO: 615659 - RNA, 19 nt, Artificial Sequence
  Description of Artificial Sequence: Synthetic oligonucleotide
  Antisense strand to SEQ ID NO: 615658
ucugugcguacacauuuga

SEQ ID NO: 615660 - RNA, 19 nt, Artificial Sequence
  Description of Artificial Sequence: Synthetic oligonucleotide
  Sense strand starting at position 3617 of SEQ ID NO: 585130
guguguaugcacuugucau

SEQ ID NO: 615661 - RNA, 19 nt, Artificial Sequence
  Description of Artificial Sequence: Synthetic oligonucleotide
  Antisense strand to SEQ ID NO: 615660
augacaagugcauacacac

SEQ ID NO: 615662 - RNA, 19 nt, Artificial Sequence
  Description of Artificial Sequence: Synthetic oligonucleotide
  Sense strand starting at position 3672 of SEQ ID NO: 585130
ccaaacaugucucuguguu

SEQ ID NO: 615663 - RNA, 19 nt, Artificial Sequence
  Description of Artificial Sequence: Synthetic oligonucleotide
  Antisense strand to SEQ ID NO: 615662
aacacagagacauguuugg

SEQ ID NO: 615664 - RNA, 19 nt, Artificial Sequence
  Description of Artificial Sequence: Synthetic oligonucleotide
  Sense strand starting at position 3783 of SEQ ID NO: 585130
uacuguuugcgcuuuauau

SEQ ID NO: 615665 - RNA, 19 nt, Artificial Sequence
  Description of Artificial Sequence: Synthetic oligonucleotide
  Antisense strand to SEQ ID NO: 615664
auauaaagcgcaaacagua

SEQ ID NO: 615666 - RNA, 19 nt, Artificial Sequence
  Description of Artificial Sequence: Synthetic oligonucleotide
  Sense strand starting at position 3784 of SEQ ID NO: 585130
acuguuugcgcuuuauaug

SEQ ID NO: 615667 - RNA, 19 nt, Artificial Sequence
  Description of Artificial Sequence: Synthetic oligonucleotide
  Antisense strand to SEQ ID NO: 615666
cauauaaagcgcaaacagu

SEQ ID NO: 615668 - RNA, 19 nt, Artificial Sequence
  Description of Artificial Sequence: Synthetic oligonucleotide
  Sense strand starting at position 3795 of SEQ ID NO: 585130
uuuauauguguuugguuag

SEQ ID NO: 615669 - RNA, 19 nt, Artificial Sequence
  Description of Artificial Sequence: Synthetic oligonucleotide
  Antisense strand to SEQ ID NO: 615668
cuaaccaaacacauauaaa

SEQ ID NO: 615670 - RNA, 19 nt, Artificial Sequence
  Description of Artificial Sequence: Synthetic oligonucleotide
  Sense strand starting at position 3936 of SEQ ID NO: 585130
cuccaucucccugagauug

SEQ ID NO: 615671 - RNA, 19 nt, Artificial Sequence
  Description of Artificial Sequence: Synthetic oligonucleotide
  Antisense strand to SEQ ID NO: 615670
caaucucagggagauggag

SEQ ID NO: 615672 - RNA, 19 nt, Artificial Sequence
  Description of Artificial Sequence: Synthetic oligonucleotide
  Sense strand starting at position 20 of SEQ ID NO: 585131
agguaaauuugucagugag

SEQ ID NO: 615673 - RNA, 19 nt, Artificial Sequence
  Description of Artificial Sequence: Synthetic oligonucleotide
  Antisense strand to SEQ ID NO: 615672
cucacugacaaauuuaccu

SEQ ID NO: 615674 - RNA, 19 nt, Artificial Sequence
  Description of Artificial Sequence: Synthetic oligonucleotide
  Sense strand starting at position 22 of SEQ ID NO: 585131
guaaauuugucagugaggu

SEQ ID NO: 615675 - RNA, 19 nt, Artificial Sequence
  Description of Artificial Sequence: Synthetic oligonucleotide
  Antisense strand to SEQ ID NO: 615674
accucacugacaaauuuac

SEQ ID NO: 615676 - RNA, 19 nt, Artificial Sequence
  Description of Artificial Sequence: Synthetic oligonucleotide
  Sense strand starting at position 80 of SEQ ID NO: 585131
guagaacagucccagauuu

SEQ ID NO: 615677 - RNA, 19 nt, Artificial Sequence
  Description of Artificial Sequence: Synthetic oligonucleotide
  Antisense strand to SEQ ID NO: 615676
aaaucugggacuguucuac

SEQ ID NO: 615678 - RNA, 19 nt, Artificial Sequence
  Description of Artificial Sequence: Synthetic oligonucleotide
  Sense strand starting at position 177 of SEQ ID NO: 585131
uuuggauuauggcuuaaag

SEQ ID NO: 615679 - RNA, 19 nt, Artificial Sequence
  Description of Artificial Sequence: Synthetic oligonucleotide
  Antisense strand to SEQ ID NO: 615678
cuuuaagccauaauccaaa

SEQ ID NO: 615680 - RNA, 19 nt, Artificial Sequence
  Description of Artificial Sequence: Synthetic oligonucleotide
  Sense strand starting at position 179 of SEQ ID NO: 585131
uggauuauggcuuaaagca

SEQ ID NO: 615681 - RNA, 19 nt, Artificial Sequence
  Description of Artificial Sequence: Synthetic oligonucleotide
  Antisense strand to SEQ ID NO: 615680
ugcuuuaagccauaaucca

SEQ ID NO: 615682 - RNA, 19 nt, Artificial Sequence
  Description of Artificial Sequence: Synthetic oligonucleotide
  Sense strand starting at position 186 of SEQ ID NO: 585131
uggcuuaaagcauauauca

SEQ ID NO: 615683 - RNA, 19 nt, Artificial Sequence
  Description of Artificial Sequence: Synthetic oligonucleotide
  Antisense strand to SEQ ID NO: 615682
ugauauaugcuuuaagcca

SEQ ID NO: 615684 - RNA, 19 nt, Artificial Sequence
  Description of Artificial Sequence: Synthetic oligonucleotide
  Sense strand starting at position 233 of SEQ ID NO: 585131
ugauacauauguuugcaau

SEQ ID NO: 615685 - RNA, 19 nt, Artificial Sequence
  Description of Artificial Sequence: Synthetic oligonucleotide
  Antisense strand to SEQ ID NO: 615684
auugcaaacauauguauca

SEQ ID NO: 615686 - RNA, 19 nt, Artificial Sequence
  Description of Artificial Sequence: Synthetic oligonucleotide
  Sense strand starting at position 368 of SEQ ID NO: 585131
auguaugagagcuaugcau

SEQ ID NO: 615687 - RNA, 19 nt, Artificial Sequence
  Description of Artificial Sequence: Synthetic oligonucleotide
  Antisense strand to SEQ ID NO: 615686
augcauagcucucauacau

SEQ ID NO: 615688 - RNA, 19 nt, Artificial Sequence
  Description of Artificial Sequence: Synthetic oligonucleotide
  Sense strand starting at position 370 of SEQ ID NO: 585131
guaugagagcuaugcauuu

SEQ ID NO: 615689 - RNA, 19 nt, Artificial Sequence
  Description of Artificial Sequence: Synthetic oligonucleotide
  Antisense strand to SEQ ID NO: 615688
aaaugcauagcucucauac

SEQ ID NO: 615690 - RNA, 19 nt, Artificial Sequence
  Description of Artificial Sequence: Synthetic oligonucleotide
  Sense strand starting at position 569 of SEQ ID NO: 585131
gaaguagcacuuuagauug

SEQ ID NO: 615691 - RNA, 19 nt, Artificial Sequence
  Description of Artificial Sequence: Synthetic oligonucleotide
  Antisense strand to SEQ ID NO: 615690
caaucuaaagugcuacuuc

SEQ ID NO: 615692 - RNA, 19 nt, Artificial Sequence
  Description of Artificial Sequence: Synthetic oligonucleotide
  Sense strand starting at position 574 of SEQ ID NO: 585131
agcacuuuagauugauaua

SEQ ID NO: 615693 - RNA, 19 nt, Artificial Sequence
  Description of Artificial Sequence: Synthetic oligonucleotide
  Antisense strand to SEQ ID NO: 615692
uauaucaaucuaaagugcu

SEQ ID NO: 615694 - RNA, 19 nt, Artificial Sequence
  Description of Artificial Sequence: Synthetic oligonucleotide
  Sense strand starting at position 673 of SEQ ID NO: 585131
ugcccacuucuggaaagua

SEQ ID NO: 615695 - RNA, 19 nt, Artificial Sequence
  Description of Artificial Sequence: Synthetic oligonucleotide
  Antisense strand to SEQ ID NO: 615694
uacuuuccagaagugggca

SEQ ID NO: 615696 - RNA, 19 nt, Artificial Sequence
  Description of Artificial Sequence: Synthetic oligonucleotide
  Sense strand starting at position 713 of SEQ ID NO: 585131
gcaggaaucucauuaacuc

SEQ ID NO: 615697 - RNA, 19 nt, Artificial Sequence
  Description of Artificial Sequence: Synthetic oligonucleotide
  Antisense strand to SEQ ID NO: 615696
gaguuaaugagauuccugc

SEQ ID NO: 615698 - RNA, 19 nt, Artificial Sequence
  Description of Artificial Sequence: Synthetic oligonucleotide
  Sense strand starting at position 924 of SEQ ID NO: 585131
aggcaauuccaaggaguua

SEQ ID NO: 615699 - RNA, 19 nt, Artificial Sequence
  Description of Artificial Sequence: Synthetic oligonucleotide
  Antisense strand to SEQ ID NO: 615698
uaacuccuuggaauugccu

SEQ ID NO: 615700 - RNA, 19 nt, Artificial Sequence
  Description of Artificial Sequence: Synthetic oligonucleotide
  Sense strand starting at position 925 of SEQ ID NO: 585131
ggcaauuccaaggaguuau

SEQ ID NO: 615701 - RNA, 19 nt, Artificial Sequence
  Description of Artificial Sequence: Synthetic oligonucleotide
  Antisense strand to SEQ ID NO: 615700
auaacuccuuggaauugcc

SEQ ID NO: 615702 - RNA, 19 nt, Artificial Sequence
  Description of Artificial Sequence: Synthetic oligonucleotide
  Sense strand starting at position 1498 of SEQ ID NO: 585131
gaaauucugccaggauuag

SEQ ID NO: 615703 - RNA, 19 nt, Artificial Sequence
  Description of Artificial Sequence: Synthetic oligonucleotide
  Antisense strand to SEQ ID NO: 615702
cuaauccuggcagaauuuc

SEQ ID NO: 615704 - RNA, 19 nt, Artificial Sequence
  Description of Artificial Sequence: Synthetic oligonucleotide
  Sense strand starting at position 1509 of SEQ ID NO: 585131
aggauuagcauucgaagua

SEQ ID NO: 615705 - RNA, 19 nt, Artificial Sequence
  Description of Artificial Sequence: Synthetic oligonucleotide
  Antisense strand to SEQ ID NO: 615704
uacuucgaaugcuaauccu

SEQ ID NO: 615706 - RNA, 19 nt, Artificial Sequence
  Description of Artificial Sequence: Synthetic oligonucleotide
  Sense strand starting at position 1518 of SEQ ID NO: 585131
auucgaaguaucuggcuaa

SEQ ID NO: 615707 - RNA, 19 nt, Artificial Sequence
  Description of Artificial Sequence: Synthetic oligonucleotide
  Antisense strand to SEQ ID NO: 615706
uuagccagauacuucgaau

SEQ ID NO: 615708 - RNA, 19 nt, Artificial Sequence
  Description of Artificial Sequence: Synthetic oligonucleotide
  Sense strand starting at position 1522 of SEQ ID NO: 585131
gaaguaucuggcuaagcuc

SEQ ID NO: 615709 - RNA, 19 nt, Artificial Sequence
  Description of Artificial Sequence: Synthetic oligonucleotide
  Antisense strand to SEQ ID NO: 615708
gagcuuagccagauacuuc

SEQ ID NO: 615710 - RNA, 19 nt, Artificial Sequence
  Description of Artificial Sequence: Synthetic oligonucleotide
  Sense strand starting at position 1763 of SEQ ID NO: 585131
uggacauugucucuuagaa

SEQ ID NO: 615711 - RNA, 19 nt, Artificial Sequence
  Description of Artificial Sequence: Synthetic oligonucleotide
  Antisense strand to SEQ ID NO: 615710
uucuaagagacaaugucca

SEQ ID NO: 615712 - RNA, 19 nt, Artificial Sequence
  Description of Artificial Sequence: Synthetic oligonucleotide
  Sense strand starting at position 2001 of SEQ ID NO: 585131
uggugagcuggccacaauu

SEQ ID NO: 615713 - RNA, 19 nt, Artificial Sequence
  Description of Artificial Sequence: Synthetic oligonucleotide
  Antisense strand to SEQ ID NO: 615712
aauuguggccagcucacca

SEQ ID NO: 615714 - RNA, 19 nt, Artificial Sequence
  Description of Artificial Sequence: Synthetic oligonucleotide
  Sense strand starting at position 2054 of SEQ ID NO: 585131
agcauaaacucauugaguc

SEQ ID NO: 615715 - RNA, 19 nt, Artificial Sequence
  Description of Artificial Sequence: Synthetic oligonucleotide
  Antisense strand to SEQ ID NO: 615714
gacucaaugaguuuaugcu

SEQ ID NO: 615716 - RNA, 19 nt, Artificial Sequence
  Description of Artificial Sequence: Synthetic oligonucleotide
  Sense strand starting at position 2055 of SEQ ID NO: 585131
gcauaaacucauugagucu

SEQ ID NO: 615717 - RNA, 19 nt, Artificial Sequence
  Description of Artificial Sequence: Synthetic oligonucleotide
  Antisense strand to SEQ ID NO: 615716
agacucaaugaguuuaugc

SEQ ID NO: 615718 - RNA, 19 nt, Artificial Sequence
  Description of Artificial Sequence: Synthetic oligonucleotide
  Sense strand starting at position 2107 of SEQ ID NO: 585131
gaugucaagaguuggaucu

SEQ ID NO: 615719 - RNA, 19 nt, Artificial Sequence
  Description of Artificial Sequence: Synthetic oligonucleotide
  Antisense strand to SEQ ID NO: 615718
agauccaacucuugacauc

SEQ ID NO: 615720 - RNA, 19 nt, Artificial Sequence
  Description of Artificial Sequence: Synthetic oligonucleotide
  Sense strand starting at position 2342 of SEQ ID NO: 585131
aaggucaaacucggguaua

SEQ ID NO: 615721 - RNA, 19 nt, Artificial Sequence
  Description of Artificial Sequence: Synthetic oligonucleotide
  Antisense strand to SEQ ID NO: 615720
uauacccgaguuugaccuu

SEQ ID NO: 615722 - RNA, 19 nt, Artificial Sequence
  Description of Artificial Sequence: Synthetic oligonucleotide
  Sense strand starting at position 2345 of SEQ ID NO: 585131
gucaaacucggguauauac

SEQ ID NO: 615723 - RNA, 19 nt, Artificial Sequence
  Description of Artificial Sequence: Synthetic oligonucleotide
  Antisense strand to SEQ ID NO: 615722
guauauacccgaguuugac

SEQ ID NO: 615724 - RNA, 19 nt, Artificial Sequence
  Description of Artificial Sequence: Synthetic oligonucleotide
  Sense strand starting at position 2536 of SEQ ID NO: 585131
uuaggacaccauugcuaaa

SEQ ID NO: 615725 - RNA, 19 nt, Artificial Sequence
  Description of Artificial Sequence: Synthetic oligonucleotide
  Antisense strand to SEQ ID NO: 615724
uuuagcaaugguguccuaa

SEQ ID NO: 615726 - RNA, 19 nt, Artificial Sequence
  Description of Artificial Sequence: Synthetic oligonucleotide
  Sense strand starting at position 2554 of SEQ ID NO: 585131
acagguacugccuguauuu

SEQ ID NO: 615727 - RNA, 19 nt, Artificial Sequence
  Description of Artificial Sequence: Synthetic oligonucleotide
  Antisense strand to SEQ ID NO: 615726
aaauacaggcaguaccugu

SEQ ID NO: 615728 - RNA, 19 nt, Artificial Sequence
  Description of Artificial Sequence: Synthetic oligonucleotide
  Sense strand starting at position 2592 of SEQ ID NO: 585131
gaaagcaguccuugagaug

SEQ ID NO: 615729 - RNA, 19 nt, Artificial Sequence
  Description of Artificial Sequence: Synthetic oligonucleotide
  Antisense strand to SEQ ID NO: 615728
caucucaaggacugcuuuc

SEQ ID NO: 615730 - RNA, 19 nt, Artificial Sequence
  Description of Artificial Sequence: Synthetic oligonucleotide
  Sense strand starting at position 2593 of SEQ ID NO: 585131
aaagcaguccuugagaugu

SEQ ID NO: 615731 - RNA, 19 nt, Artificial Sequence
  Description of Artificial Sequence: Synthetic oligonucleotide
  Antisense strand to SEQ ID NO: 615730
acaucucaaggacugcuuu

SEQ ID NO: 615732 - RNA, 19 nt, Artificial Sequence
  Description of Artificial Sequence: Synthetic oligonucleotide
  Sense strand starting at position 2651 of SEQ ID NO: 585131
ugcuuccugagaggguaau

SEQ ID NO: 615733 - RNA, 19 nt, Artificial Sequence
  Description of Artificial Sequence: Synthetic oligonucleotide
  Antisense strand to SEQ ID NO: 615732
auuacccucucaggaagca

SEQ ID NO: 615734 - RNA, 19 nt, Artificial Sequence
  Description of Artificial Sequence: Synthetic oligonucleotide
  Sense strand starting at position 2657 of SEQ ID NO: 585131
cugagaggguaaucuacau

SEQ ID NO: 615735 - RNA, 19 nt, Artificial Sequence
  Description of Artificial Sequence: Synthetic oligonucleotide
  Antisense strand to SEQ ID NO: 615734
auguagauuacccucucag

SEQ ID NO: 615736 - RNA, 19 nt, Artificial Sequence
  Description of Artificial Sequence: Synthetic oligonucleotide
  Sense strand starting at position 3191 of SEQ ID NO: 585131
auuccaaacuuguuaguuu

SEQ ID NO: 615737 - RNA, 19 nt, Artificial Sequence
  Description of Artificial Sequence: Synthetic oligonucleotide
  Antisense strand to SEQ ID NO: 615736
aaacuaacaaguuuggaau

SEQ ID NO: 615738 - RNA, 19 nt, Artificial Sequence
  Description of Artificial Sequence: Synthetic oligonucleotide
  Sense strand starting at position 3254 of SEQ ID NO: 585131
auguuagaguauucccuuu

SEQ ID NO: 615739 - RNA, 19 nt, Artificial Sequence
  Description of Artificial Sequence: Synthetic oligonucleotide
  Antisense strand to SEQ ID NO: 615738
aaagggaauacucuaacau

SEQ ID NO: 615740 - RNA, 19 nt, Artificial Sequence
  Description of Artificial Sequence: Synthetic oligonucleotide
  Sense strand starting at position 3316 of SEQ ID NO: 585131
agguucuaguuuguuaaau

SEQ ID NO: 615741 - RNA, 19 nt, Artificial Sequence
  Description of Artificial Sequence: Synthetic oligonucleotide
  Antisense strand to SEQ ID NO: 615740
auuuaacaaacuagaaccu

SEQ ID NO: 615742 - RNA, 19 nt, Artificial Sequence
  Description of Artificial Sequence: Synthetic oligonucleotide
  Sense strand starting at position 3375 of SEQ ID NO: 585131
ucacaugucucacucagau

SEQ ID NO: 615743 - RNA, 19 nt, Artificial Sequence
  Description of Artificial Sequence: Synthetic oligonucleotide
  Antisense strand to SEQ ID NO: 615742
aucugagugagacauguga

SEQ ID NO: 615744 - RNA, 19 nt, Artificial Sequence
  Description of Artificial Sequence: Synthetic oligonucleotide
  Sense strand starting at position 3502 of SEQ ID NO: 585131
augcuucuugcagauaauc

SEQ ID NO: 615745 - RNA, 19 nt, Artificial Sequence
  Description of Artificial Sequence: Synthetic oligonucleotide
  Antisense strand to SEQ ID NO: 615744
gauuaucugcaagaagcau

SEQ ID NO: 615746 - RNA, 19 nt, Artificial Sequence
  Description of Artificial Sequence: Synthetic oligonucleotide
  Sense strand starting at position 3590 of SEQ ID NO: 585131
agaccaaaucuuuguguac

SEQ ID NO: 615747 - RNA, 19 nt, Artificial Sequence
  Description of Artificial Sequence: Synthetic oligonucleotide
  Antisense strand to SEQ ID NO: 615746
guacacaaagauuuggucu

SEQ ID NO: 615748 - RNA, 19 nt, Artificial Sequence
  Description of Artificial Sequence: Synthetic oligonucleotide
  Sense strand starting at position 3761 of SEQ ID NO: 585131
uuuccauuacuagguuuau

SEQ ID NO: 615749 - RNA, 19 nt, Artificial Sequence
  Description of Artificial Sequence: Synthetic oligonucleotide
  Antisense strand to SEQ ID NO: 615748
auaaaccuaguaauggaaa

SEQ ID NO: 615750 - RNA, 19 nt, Artificial Sequence
  Description of Artificial Sequence: Synthetic oligonucleotide
  Sense strand starting at position 3884 of SEQ ID NO: 585131
aagagauaaacguguguau

SEQ ID NO: 615751 - RNA, 19 nt, Artificial Sequence
  Description of Artificial Sequence: Synthetic oligonucleotide
  Antisense strand to SEQ ID NO: 615750
auacacacguuuaucucuu

SEQ ID NO: 615752 - RNA, 19 nt, Artificial Sequence
  Description of Artificial Sequence: Synthetic oligonucleotide
  Sense strand starting at position 133 of SEQ ID NO: 585132
gcagaagagcccuauaaua

SEQ ID NO: 615753 - RNA, 19 nt, Artificial Sequence
  Description of Artificial Sequence: Synthetic oligonucleotide
  Antisense strand to SEQ ID NO: 615752
uauuauagggcucuucugc

SEQ ID NO: 615754 - RNA, 19 nt, Artificial Sequence
  Description of Artificial Sequence: Synthetic oligonucleotide
  Sense strand starting at position 158 of SEQ ID NO: 585132
gugcuuucugaacacuaau

SEQ ID NO: 615755 - RNA, 19 nt, Artificial Sequence
  Description of Artificial Sequence: Synthetic oligonucleotide
  Antisense strand to SEQ ID NO: 615754
auuaguguucagaaagcac

SEQ ID NO: 615756 - RNA, 19 nt, Artificial Sequence
  Description of Artificial Sequence: Synthetic oligonucleotide
  Sense strand starting at position 213 of SEQ ID NO: 585132
ugggcugaaauuuguguuu

SEQ ID NO: 615757 - RNA, 19 nt, Artificial Sequence
  Description of Artificial Sequence: Synthetic oligonucleotide
  Antisense strand to SEQ ID NO: 615756
aaacacaaauuucagccca

SEQ ID NO: 615758 - RNA, 19 nt, Artificial Sequence
  Description of Artificial Sequence: Synthetic oligonucleotide
  Sense strand starting at position 370 of SEQ ID NO: 585132
gucacauuccuguaauccu

SEQ ID NO: 615759 - RNA, 19 nt, Artificial Sequence
  Description of Artificial Sequence: Synthetic oligonucleotide
  Antisense strand to SEQ ID NO: 615758
aggauuacaggaaugugac

SEQ ID NO: 615760 - RNA, 19 nt, Artificial Sequence
  Description of Artificial Sequence: Synthetic oligonucleotide
  Sense strand starting at position 535 of SEQ ID NO: 585132
guuucuaaugagggaaauu

SEQ ID NO: 615761 - RNA, 19 nt, Artificial Sequence
  Description of Artificial Sequence: Synthetic oligonucleotide
  Antisense strand to SEQ ID NO: 615760
aauuucccucauuagaaac

SEQ ID NO: 615762 - RNA, 19 nt, Artificial Sequence
  Description of Artificial Sequence: Synthetic oligonucleotide
  Sense strand starting at position 597 of SEQ ID NO: 585132
augauacuucuuuaugggu

SEQ ID NO: 615763 - RNA, 19 nt, Artificial Sequence
  Description of Artificial Sequence: Synthetic oligonucleotide
  Antisense strand to SEQ ID NO: 615762
acccauaaagaaguaucau

SEQ ID NO: 615764 - RNA, 19 nt, Artificial Sequence
  Description of Artificial Sequence: Synthetic oligonucleotide
  Sense strand starting at position 738 of SEQ ID NO: 585132
accugagggagagguuauu

SEQ ID NO: 615765 - RNA, 19 nt, Artificial Sequence
  Description of Artificial Sequence: Synthetic oligonucleotide
  Antisense strand to SEQ ID NO: 615764
aauaaccucucccucaggu

SEQ ID NO: 615766 - RNA, 19 nt, Artificial Sequence
  Description of Artificial Sequence: Synthetic oligonucleotide
  Sense strand starting at position 758 of SEQ ID NO: 585132
ugcuauuaggacuacguua

SEQ ID NO: 615767 - RNA, 19 nt, Artificial Sequence
  Description of Artificial Sequence: Synthetic oligonucleotide
  Antisense strand to SEQ ID NO: 615766
uaacguaguccuaauagca

SEQ ID NO: 615768 - RNA, 19 nt, Artificial Sequence
  Description of Artificial Sequence: Synthetic oligonucleotide
  Sense strand starting at position 760 of SEQ ID NO: 585132
cuauuaggacuacguuaua

SEQ ID NO: 615769 - RNA, 19 nt, Artificial Sequence
  Description of Artificial Sequence: Synthetic oligonucleotide
  Antisense strand to SEQ ID NO: 615768
uauaacguaguccuaauag

SEQ ID NO: 615770 - RNA, 19 nt, Artificial Sequence
  Description of Artificial Sequence: Synthetic oligonucleotide
  Sense strand starting at position 763 of SEQ ID NO: 585132
uuaggacuacguuauaacu

SEQ ID NO: 615771 - RNA, 19 nt, Artificial Sequence
  Description of Artificial Sequence: Synthetic oligonucleotide
  Antisense strand to SEQ ID NO: 615770
aguuauaacguaguccuaa

SEQ ID NO: 615772 - RNA, 19 nt, Artificial Sequence
  Description of Artificial Sequence: Synthetic oligonucleotide
  Sense strand starting at position 908 of SEQ ID NO: 585132
guuagcaugaaauggguaa

SEQ ID NO: 615773 - RNA, 19 nt, Artificial Sequence
  Description of Artificial Sequence: Synthetic oligonucleotide
  Antisense strand to SEQ ID NO: 615772
uuacccauuucaugcuaac

SEQ ID NO: 615774 - RNA, 19 nt, Artificial Sequence
  Description of Artificial Sequence: Synthetic oligonucleotide
  Sense strand starting at position 909 of SEQ ID NO: 585132
uuagcaugaaauggguaau

SEQ ID NO: 615775 - RNA, 19 nt, Artificial Sequence
  Description of Artificial Sequence: Synthetic oligonucleotide
  Antisense strand to SEQ ID NO: 615774
auuacccauuucaugcuaa

SEQ ID NO: 615776 - RNA, 19 nt, Artificial Sequence
  Description of Artificial Sequence: Synthetic oligonucleotide
  Sense strand starting at position 966 of SEQ ID NO: 585132
uuagaagagcuauacugua

SEQ ID NO: 615777 - RNA, 19 nt, Artificial Sequence
  Description of Artificial Sequence: Synthetic oligonucleotide
  Antisense strand to SEQ ID NO: 615776
uacaguauagcucuucuaa

SEQ ID NO: 615778 - RNA, 19 nt, Artificial Sequence
  Description of Artificial Sequence: Synthetic oligonucleotide
  Sense strand starting at position 1054 of SEQ ID NO: 585132
aggaacugguaaucgaaau

SEQ ID NO: 615779 - RNA, 19 nt, Artificial Sequence
  Description of Artificial Sequence: Synthetic oligonucleotide
  Antisense strand to SEQ ID NO: 615778
auuucgauuaccaguuccu

SEQ ID NO: 615780 - RNA, 19 nt, Artificial Sequence
  Description of Artificial Sequence: Synthetic oligonucleotide
  Sense strand starting at position 1055 of SEQ ID NO: 585132
ggaacugguaaucgaaaua

SEQ ID NO: 615781 - RNA, 19 nt, Artificial Sequence
  Description of Artificial Sequence: Synthetic oligonucleotide
  Antisense strand to SEQ ID NO: 615780
uauuucgauuaccaguucc

SEQ ID NO: 615782 - RNA, 19 nt, Artificial Sequence
  Description of Artificial Sequence: Synthetic oligonucleotide
  Sense strand starting at position 1165 of SEQ ID NO: 585132
gcaagauguuauccaaaca

SEQ ID NO: 615783 - RNA, 19 nt, Artificial Sequence
  Description of Artificial Sequence: Synthetic oligonucleotide
  Antisense strand to SEQ ID NO: 615782
uguuuggauaacaucuugc

SEQ ID NO: 615784 - RNA, 19 nt, Artificial Sequence
  Description of Artificial Sequence: Synthetic oligonucleotide
  Sense strand starting at position 1276 of SEQ ID NO: 585132
augaaucgcagugauggua

SEQ ID NO: 615785 - RNA, 19 nt, Artificial Sequence
  Description of Artificial Sequence: Synthetic oligonucleotide
  Antisense strand to SEQ ID NO: 615784
uaccaucacugcgauucau

SEQ ID NO: 615786 - RNA, 19 nt, Artificial Sequence
  Description of Artificial Sequence: Synthetic oligonucleotide
  Sense strand starting at position 1368 of SEQ ID NO: 585132
uugugaacucuagaacuuu

SEQ ID NO: 615787 - RNA, 19 nt, Artificial Sequence
  Description of Artificial Sequence: Synthetic oligonucleotide
  Antisense strand to SEQ ID NO: 615786
aaaguucuagaguucacaa

SEQ ID NO: 615788 - RNA, 19 nt, Artificial Sequence
  Description of Artificial Sequence: Synthetic oligonucleotide
  Sense strand starting at position 1416 of SEQ ID NO: 585132
caguaacucguacagagaa

SEQ ID NO: 615789 - RNA, 19 nt, Artificial Sequence
  Description of Artificial Sequence: Synthetic oligonucleotide
  Antisense strand to SEQ ID NO: 615788
uucucuguacgaguuacug

SEQ ID NO: 615790 - RNA, 19 nt, Artificial Sequence
  Description of Artificial Sequence: Synthetic oligonucleotide
  Sense strand starting at position 1440 of SEQ ID NO: 585132
ugaacaguuccugagguac

SEQ ID NO: 615791 - RNA, 19 nt, Artificial Sequence
  Description of Artificial Sequence: Synthetic oligonucleotide
  Antisense strand to SEQ ID NO: 615790
guaccucaggaacuguuca

SEQ ID NO: 615792 - RNA, 19 nt, Artificial Sequence
  Description of Artificial Sequence: Synthetic oligonucleotide
  Sense strand starting at position 1996 of SEQ ID NO: 585132
ggacguaucauagagaggu

SEQ ID NO: 615793 - RNA, 19 nt, Artificial Sequence
  Description of Artificial Sequence: Synthetic oligonucleotide
  Antisense strand to SEQ ID NO: 615792
accucucuaugauacgucc

SEQ ID NO: 615794 - RNA, 19 nt, Artificial Sequence
  Description of Artificial Sequence: Synthetic oligonucleotide
  Sense strand starting at position 2064 of SEQ ID NO: 585132
gcaccaucuuugguaagga

SEQ ID NO: 615795 - RNA, 19 nt, Artificial Sequence
  Description of Artificial Sequence: Synthetic oligonucleotide
  Antisense strand to SEQ ID NO: 615794
uccuuaccaaagauggugc

SEQ ID NO: 615796 - RNA, 19 nt, Artificial Sequence
  Description of Artificial Sequence: Synthetic oligonucleotide
  Sense strand starting at position 2115 of SEQ ID NO: 585132
cggauuaauugagucuauu

SEQ ID NO: 615797 - RNA, 19 nt, Artificial Sequence
  Description of Artificial Sequence: Synthetic oligonucleotide
  Antisense strand to SEQ ID NO: 615796
aauagacucaauuaauccg

SEQ ID NO: 615798 - RNA, 19 nt, Artificial Sequence
  Description of Artificial Sequence: Synthetic oligonucleotide
  Sense strand starting at position 2211 of SEQ ID NO: 585132
caggauagauccuuguguu

SEQ ID NO: 615799 - RNA, 19 nt, Artificial Sequence
  Description of Artificial Sequence: Synthetic oligonucleotide
  Antisense strand to SEQ ID NO: 615798
aacacaaggaucuauccug

SEQ ID NO: 615800 - RNA, 19 nt, Artificial Sequence
  Description of Artificial Sequence: Synthetic oligonucleotide
  Sense strand starting at position 2416 of SEQ ID NO: 585132
ugaaguugucgacagagac

SEQ ID NO: 615801 - RNA, 19 nt, Artificial Sequence
  Description of Artificial Sequence: Synthetic oligonucleotide
  Antisense strand to SEQ ID NO: 615800
gucucugucgacaacuuca

SEQ ID NO: 615802 - RNA, 19 nt, Artificial Sequence
  Description of Artificial Sequence: Synthetic oligonucleotide
  Sense strand starting at position 2976 of SEQ ID NO: 585132
gggagaggcagcuauccua

SEQ ID NO: 615803 - RNA, 19 nt, Artificial Sequence
  Description of Artificial Sequence: Synthetic oligonucleotide
  Antisense strand to SEQ ID NO: 615802
uaggauagcugccucuccc

SEQ ID NO: 615804 - RNA, 19 nt, Artificial Sequence
  Description of Artificial Sequence: Synthetic oligonucleotide
  Sense strand starting at position 3007 of SEQ ID NO: 585132
auucuagguuucccaggaa

SEQ ID NO: 615805 - RNA, 19 nt, Artificial Sequence
  Description of Artificial Sequence: Synthetic oligonucleotide
  Antisense strand to SEQ ID NO: 615804
uuccugggaaaccuagaau

SEQ ID NO: 615806 - RNA, 19 nt, Artificial Sequence
  Description of Artificial Sequence: Synthetic oligonucleotide
  Sense strand starting at position 3010 of SEQ ID NO: 585132
cuagguuucccaggaaacc

SEQ ID NO: 615807 - RNA, 19 nt, Artificial Sequence
  Description of Artificial Sequence: Synthetic oligonucleotide
  Antisense strand to SEQ ID NO: 615806
gguuuccugggaaaccuag

SEQ ID NO: 615808 - RNA, 19 nt, Artificial Sequence
  Description of Artificial Sequence: Synthetic oligonucleotide
  Sense strand starting at position 3036 of SEQ ID NO: 585132
cucagaaaccucugcuaga

SEQ ID NO: 615809 - RNA, 19 nt, Artificial Sequence
  Description of Artificial Sequence: Synthetic oligonucleotide
  Antisense strand to SEQ ID NO: 615808
ucuagcagagguuucugag

SEQ ID NO: 615810 - RNA, 19 nt, Artificial Sequence
  Description of Artificial Sequence: Synthetic oligonucleotide
  Sense strand starting at position 3037 of SEQ ID NO: 585132
ucagaaaccucugcuagag

SEQ ID NO: 615811 - RNA, 19 nt, Artificial Sequence
  Description of Artificial Sequence: Synthetic oligonucleotide
  Antisense strand to SEQ ID NO: 615810
cucuagcagagguuucuga

SEQ ID NO: 615812 - RNA, 19 nt, Artificial Sequence
  Description of Artificial Sequence: Synthetic oligonucleotide
  Sense strand starting at position 3064 of SEQ ID NO: 585132
aacugcuaaguguaaggaa

SEQ ID NO: 615813 - RNA, 19 nt, Artificial Sequence
  Description of Artificial Sequence: Synthetic oligonucleotide
  Antisense strand to SEQ ID NO: 615812
uuccuuacacuuagcaguu

SEQ ID NO: 615814 - RNA, 19 nt, Artificial Sequence
  Description of Artificial Sequence: Synthetic oligonucleotide
  Sense strand starting at position 3315 of SEQ ID NO: 585132
uaguuagcuguguucuguu

SEQ ID NO: 615815 - RNA, 19 nt, Artificial Sequence
  Description of Artificial Sequence: Synthetic oligonucleotide
  Antisense strand to SEQ ID NO: 615814
aacagaacacagcuaacua

SEQ ID NO: 615816 - RNA, 19 nt, Artificial Sequence
  Description of Artificial Sequence: Synthetic oligonucleotide
  Sense strand starting at position 3533 of SEQ ID NO: 585132
gacguaaucccaggaaaca

SEQ ID NO: 615817 - RNA, 19 nt, Artificial Sequence
  Description of Artificial Sequence: Synthetic oligonucleotide
  Antisense strand to SEQ ID NO: 615816
uguuuccugggauuacguc

SEQ ID NO: 615818 - RNA, 19 nt, Artificial Sequence
  Description of Artificial Sequence: Synthetic oligonucleotide
  Sense strand starting at position 3580 of SEQ ID NO: 585132
aggaaauauuaccagagaa

SEQ ID NO: 615819 - RNA, 19 nt, Artificial Sequence
  Description of Artificial Sequence: Synthetic oligonucleotide
  Antisense strand to SEQ ID NO: 615818
uucucugguaauauuuccu

SEQ ID NO: 615820 - RNA, 19 nt, Artificial Sequence
  Description of Artificial Sequence: Synthetic oligonucleotide
  Sense strand starting at position 3676 of SEQ ID NO: 585132
uggaguauuuauucgccaa

SEQ ID NO: 615821 - RNA, 19 nt, Artificial Sequence
  Description of Artificial Sequence: Synthetic oligonucleotide
  Antisense strand to SEQ ID NO: 615820
uuggcgaauaaauacucca

SEQ ID NO: 615822 - RNA, 19 nt, Artificial Sequence
  Description of Artificial Sequence: Synthetic oligonucleotide
  Sense strand starting at position 3677 of SEQ ID NO: 585132
ggaguauuuauucgccaac

SEQ ID NO: 615823 - RNA, 19 nt, Artificial Sequence
  Description of Artificial Sequence: Synthetic oligonucleotide
  Antisense strand to SEQ ID NO: 615822
guuggcgaauaaauacucc

SEQ ID NO: 615824 - RNA, 19 nt, Artificial Sequence
  Description of Artificial Sequence: Synthetic oligonucleotide
  Sense strand starting at position 3678 of SEQ ID NO: 585132
gaguauuuauucgccaacu

SEQ ID NO: 615825 - RNA, 19 nt, Artificial Sequence
  Description of Artificial Sequence: Synthetic oligonucleotide
  Antisense strand to SEQ ID NO: 615824
aguuggcgaauaaauacuc

SEQ ID NO: 615826 - RNA, 19 nt, Artificial Sequence
  Description of Artificial Sequence: Synthetic oligonucleotide
  Sense strand starting at position 3679 of SEQ ID NO: 585132
aguauuuauucgccaacuu

SEQ ID NO: 615827 - RNA, 19 nt, Artificial Sequence
  Description of Artificial Sequence: Synthetic oligonucleotide
  Antisense strand to SEQ ID NO: 615826
aaguuggcgaauaaauacu

SEQ ID NO: 615828 - RNA, 19 nt, Artificial Sequence
  Description of Artificial Sequence: Synthetic oligonucleotide
  Sense strand starting at position 3680 of SEQ ID NO: 585132
guauuuauucgccaacuuc

SEQ ID NO: 615829 - RNA, 19 nt, Artificial Sequence
  Description of Artificial Sequence: Synthetic oligonucleotide
  Antisense strand to SEQ ID NO: 615828
gaaguuggcgaauaaauac

SEQ ID NO: 615830 - RNA, 19 nt, Artificial Sequence
  Description of Artificial Sequence: Synthetic oligonucleotide
  Sense strand starting at position 3780 of SEQ ID NO: 585132
gguucuggcagccagagaa

SEQ ID NO: 615831 - RNA, 19 nt, Artificial Sequence
  Description of Artificial Sequence: Synthetic oligonucleotide
  Antisense strand to SEQ ID NO: 615830
uucucuggcugccagaacc

SEQ ID NO: 615832 - RNA, 19 nt, Artificial Sequence
  Description of Artificial Sequence: Synthetic oligonucleotide
  Sense strand starting at position 82 of SEQ ID NO: 585133
uagaaucaaugguagauuu

SEQ ID NO: 615833 - RNA, 19 nt, Artificial Sequence
  Description of Artificial Sequence: Synthetic oligonucleotide
  Antisense strand to SEQ ID NO: 615832
aaaucuaccauugauucua

SEQ ID NO: 615834 - RNA, 19 nt, Artificial Sequence
  Description of Artificial Sequence: Synthetic oligonucleotide
  Sense strand starting at position 131 of SEQ ID NO: 585133
augugacccuucuuaggau

SEQ ID NO: 615835 - RNA, 19 nt, Artificial Sequence
  Description of Artificial Sequence: Synthetic oligonucleotide
  Antisense strand to SEQ ID NO: 615834
auccuaagaagggucacau

SEQ ID NO: 615836 - RNA, 19 nt, Artificial Sequence
  Description of Artificial Sequence: Synthetic oligonucleotide
  Sense strand starting at position 250 of SEQ ID NO: 585133
auaguaaacuuaccagagu

SEQ ID NO: 615837 - RNA, 19 nt, Artificial Sequence
  Description of Artificial Sequence: Synthetic oligonucleotide
  Antisense strand to SEQ ID NO: 615836
acucugguaaguuuacuau

SEQ ID NO: 615838 - RNA, 19 nt, Artificial Sequence
  Description of Artificial Sequence: Synthetic oligonucleotide
  Sense strand starting at position 311 of SEQ ID NO: 585133
gcuuauguacuguauaaac

SEQ ID NO: 615839 - RNA, 19 nt, Artificial Sequence
  Description of Artificial Sequence: Synthetic oligonucleotide
  Antisense strand to SEQ ID NO: 615838
guuuauacaguacauaagc

SEQ ID NO: 615840 - RNA, 19 nt, Artificial Sequence
  Description of Artificial Sequence: Synthetic oligonucleotide
  Sense strand starting at position 359 of SEQ ID NO: 585133
uacugaaaugagugcccua

SEQ ID NO: 615841 - RNA, 19 nt, Artificial Sequence
  Description of Artificial Sequence: Synthetic oligonucleotide
  Antisense strand to SEQ ID NO: 615840
uagggcacucauuucagua

SEQ ID NO: 615842 - RNA, 19 nt, Artificial Sequence
  Description of Artificial Sequence: Synthetic oligonucleotide
  Sense strand starting at position 498 of SEQ ID NO: 585133
uggguaaauucuuucuuua

SEQ ID NO: 615843 - RNA, 19 nt, Artificial Sequence
  Description of Artificial Sequence: Synthetic oligonucleotide
  Antisense strand to SEQ ID NO: 615842
uaaagaaagaauuuaccca

SEQ ID NO: 615844 - RNA, 19 nt, Artificial Sequence
  Description of Artificial Sequence: Synthetic oligonucleotide
  Sense strand starting at position 719 of SEQ ID NO: 585133
acaugaaauugguuacuau

SEQ ID NO: 615845 - RNA, 19 nt, Artificial Sequence
  Description of Artificial Sequence: Synthetic oligonucleotide
  Antisense strand to SEQ ID NO: 615844
auaguaaccaauuucaugu

SEQ ID NO: 615846 - RNA, 19 nt, Artificial Sequence
  Description of Artificial Sequence: Synthetic oligonucleotide
  Sense strand starting at position 722 of SEQ ID NO: 585133
ugaaauugguuacuauaag

SEQ ID NO: 615847 - RNA, 19 nt, Artificial Sequence
  Description of Artificial Sequence: Synthetic oligonucleotide
  Antisense strand to SEQ ID NO: 615846
cuuauaguaaccaauuuca

SEQ ID NO: 615848 - RNA, 19 nt, Artificial Sequence
  Description of Artificial Sequence: Synthetic oligonucleotide
  Sense strand starting at position 1070 of SEQ ID NO: 585133
gguguaccaguguaaucag

SEQ ID NO: 615849 - RNA, 19 nt, Artificial Sequence
  Description of Artificial Sequence: Synthetic oligonucleotide
  Antisense strand to SEQ ID NO: 615848
cugauuacacugguacacc

SEQ ID NO: 615850 - RNA, 19 nt, Artificial Sequence
  Description of Artificial Sequence: Synthetic oligonucleotide
  Sense strand starting at position 1073 of SEQ ID NO: 585133
guaccaguguaaucagaga

SEQ ID NO: 615851 - RNA, 19 nt, Artificial Sequence
  Description of Artificial Sequence: Synthetic oligonucleotide
  Antisense strand to SEQ ID NO: 615850
ucucugauuacacugguac

SEQ ID NO: 615852 - RNA, 19 nt, Artificial Sequence
  Description of Artificial Sequence: Synthetic oligonucleotide
  Sense strand starting at position 1401 of SEQ ID NO: 585133
aagagaugauguuucugac

SEQ ID NO: 615853 - RNA, 19 nt, Artificial Sequence
  Description of Artificial Sequence: Synthetic oligonucleotide
  Antisense strand to SEQ ID NO: 615852
gucagaaacaucaucucuu

SEQ ID NO: 615854 - RNA, 19 nt, Artificial Sequence
  Description of Artificial Sequence: Synthetic oligonucleotide
  Sense strand starting at position 1461 of SEQ ID NO: 585133
guguuaucacaucauagaa

SEQ ID NO: 615855 - RNA, 19 nt, Artificial Sequence
  Description of Artificial Sequence: Synthetic oligonucleotide
  Antisense strand to SEQ ID NO: 615854
uucuaugaugugauaacac

SEQ ID NO: 615856 - RNA, 19 nt, Artificial Sequence
  Description of Artificial Sequence: Synthetic oligonucleotide
  Sense strand starting at position 1517 of SEQ ID NO: 585133
agagaacucucuucuugug

SEQ ID NO: 615857 - RNA, 19 nt, Artificial Sequence
  Description of Artificial Sequence: Synthetic oligonucleotide
  Antisense strand to SEQ ID NO: 615856
cacaagaagagaguucucu

SEQ ID NO: 615858 - RNA, 19 nt, Artificial Sequence
  Description of Artificial Sequence: Synthetic oligonucleotide
  Sense strand starting at position 1539 of SEQ ID NO: 585133
acagauauuucuuaagaga

SEQ ID NO: 615859 - RNA, 19 nt, Artificial Sequence
  Description of Artificial Sequence: Synthetic oligonucleotide
  Antisense strand to SEQ ID NO: 615858
ucucuuaagaaauaucugu

SEQ ID NO: 615860 - RNA, 19 nt, Artificial Sequence
  Description of Artificial Sequence: Synthetic oligonucleotide
  Sense strand starting at position 1542 of SEQ ID NO: 585133
gauauuucuuaagagagua

SEQ ID NO: 615861 - RNA, 19 nt, Artificial Sequence
  Description of Artificial Sequence: Synthetic oligonucleotide
  Antisense strand to SEQ ID NO: 615860
uacucucuuaagaaauauc

SEQ ID NO: 615862 - RNA, 19 nt, Artificial Sequence
  Description of Artificial Sequence: Synthetic oligonucleotide
  Sense strand starting at position 1608 of SEQ ID NO: 585133
agguauguccucuauguag

SEQ ID NO: 615863 - RNA, 19 nt, Artificial Sequence
  Description of Artificial Sequence: Synthetic oligonucleotide
  Antisense strand to SEQ ID NO: 615862
cuacauagaggacauaccu

SEQ ID NO: 615864 - RNA, 19 nt, Artificial Sequence
  Description of Artificial Sequence: Synthetic oligonucleotide
  Sense strand starting at position 1626 of SEQ ID NO: 585133
gguaguuuauccuuugaag

SEQ ID NO: 615865 - RNA, 19 nt, Artificial Sequence
  Description of Artificial Sequence: Synthetic oligonucleotide
  Antisense strand to SEQ ID NO: 615864
cuucaaaggauaaacuacc

SEQ ID NO: 615866 - RNA, 19 nt, Artificial Sequence
  Description of Artificial Sequence: Synthetic oligonucleotide
  Sense strand starting at position 1762 of SEQ ID NO: 585133
ugaagucaugcaggaaaca

SEQ ID NO: 615867 - RNA, 19 nt, Artificial Sequence
  Description of Artificial Sequence: Synthetic oligonucleotide
  Antisense strand to SEQ ID NO: 615866
uguuuccugcaugacuuca

SEQ ID NO: 615868 - RNA, 19 nt, Artificial Sequence
  Description of Artificial Sequence: Synthetic oligonucleotide
  Sense strand starting at position 1831 of SEQ ID NO: 585133
gaaauuggaaguuguugua

SEQ ID NO: 615869 - RNA, 19 nt, Artificial Sequence
  Description of Artificial Sequence: Synthetic oligonucleotide
  Antisense strand to SEQ ID NO: 615868
uacaacaacuuccaauuuc

SEQ ID NO: 615870 - RNA, 19 nt, Artificial Sequence
  Description of Artificial Sequence: Synthetic oligonucleotide
  Sense strand starting at position 1913 of SEQ ID NO: 585133
gagauuagguuucuccucu

SEQ ID NO: 615871 - RNA, 19 nt, Artificial Sequence
  Description of Artificial Sequence: Synthetic oligonucleotide
  Antisense strand to SEQ ID NO: 615870
agaggagaaaccuaaucuc

SEQ ID NO: 615872 - RNA, 19 nt, Artificial Sequence
  Description of Artificial Sequence: Synthetic oligonucleotide
  Sense strand starting at position 1991 of SEQ ID NO: 585133
ugcuauauuuaaccagugu

SEQ ID NO: 615873 - RNA, 19 nt, Artificial Sequence
  Description of Artificial Sequence: Synthetic oligonucleotide
  Antisense strand to SEQ ID NO: 615872
acacugguuaaauauagca

SEQ ID NO: 615874 - RNA, 19 nt, Artificial Sequence
  Description of Artificial Sequence: Synthetic oligonucleotide
  Sense strand starting at position 2076 of SEQ ID NO: 585133
cuggguuaucaguggauac

SEQ ID NO: 615875 - RNA, 19 nt, Artificial Sequence
  Description of Artificial Sequence: Synthetic oligonucleotide
  Antisense strand to SEQ ID NO: 615874
guauccacugauaacccag

SEQ ID NO: 615876 - RNA, 19 nt, Artificial Sequence
  Description of Artificial Sequence: Synthetic oligonucleotide
  Sense strand starting at position 2077 of SEQ ID NO: 585133
uggguuaucaguggauaca

SEQ ID NO: 615877 - RNA, 19 nt, Artificial Sequence
  Description of Artificial Sequence: Synthetic oligonucleotide
  Antisense strand to SEQ ID NO: 615876
uguauccacugauaaccca

SEQ ID NO: 615878 - RNA, 19 nt, Artificial Sequence
  Description of Artificial Sequence: Synthetic oligonucleotide
  Sense strand starting at position 2167 of SEQ ID NO: 585133
agguaauuauuguuugaag

SEQ ID NO: 615879 - RNA, 19 nt, Artificial Sequence
  Description of Artificial Sequence: Synthetic oligonucleotide
  Antisense strand to SEQ ID NO: 615878
cuucaaacaauaauuaccu

SEQ ID NO: 615880 - RNA, 19 nt, Artificial Sequence
  Description of Artificial Sequence: Synthetic oligonucleotide
  Sense strand starting at position 2181 of SEQ ID NO: 585133
ugaagcucuuaacuacaga

SEQ ID NO: 615881 - RNA, 19 nt, Artificial Sequence
  Description of Artificial Sequence: Synthetic oligonucleotide
  Antisense strand to SEQ ID NO: 615880
ucuguaguuaagagcuuca

SEQ ID NO: 615882 - RNA, 19 nt, Artificial Sequence
  Description of Artificial Sequence: Synthetic oligonucleotide
  Sense strand starting at position 2198 of SEQ ID NO: 585133
gacugagauuugggacuua

SEQ ID NO: 615883 - RNA, 19 nt, Artificial Sequence
  Description of Artificial Sequence: Synthetic oligonucleotide
  Antisense strand to SEQ ID NO: 615882
uaagucccaaaucucaguc

SEQ ID NO: 615884 - RNA, 19 nt, Artificial Sequence
  Description of Artificial Sequence: Synthetic oligonucleotide
  Sense strand starting at position 2243 of SEQ ID NO: 585133
gcagcaguugucuuaggca

SEQ ID NO: 615885 - RNA, 19 nt, Artificial Sequence
  Description of Artificial Sequence: Synthetic oligonucleotide
  Antisense strand to SEQ ID NO: 615884
ugccuaagacaacugcugc

SEQ ID NO: 615886 - RNA, 19 nt, Artificial Sequence
  Description of Artificial Sequence: Synthetic oligonucleotide
  Sense strand starting at position 2353 of SEQ ID NO: 585133
ugcauaaauggaggucuua

SEQ ID NO: 615887 - RNA, 19 nt, Artificial Sequence
  Description of Artificial Sequence: Synthetic oligonucleotide
  Antisense strand to SEQ ID NO: 615886
uaagaccuccauuuaugca

SEQ ID NO: 615888 - RNA, 19 nt, Artificial Sequence
  Description of Artificial Sequence: Synthetic oligonucleotide
  Sense strand starting at position 2494 of SEQ ID NO: 585133
agcuauguaccugaauguu

SEQ ID NO: 615889 - RNA, 19 nt, Artificial Sequence
  Description of Artificial Sequence: Synthetic oligonucleotide
  Antisense strand to SEQ ID NO: 615888
aacauucagguacauagcu

SEQ ID NO: 615890 - RNA, 19 nt, Artificial Sequence
  Description of Artificial Sequence: Synthetic oligonucleotide
  Sense strand starting at position 2766 of SEQ ID NO: 585133
uaugaaucugccgagauug

SEQ ID NO: 615891 - RNA, 19 nt, Artificial Sequence
  Description of Artificial Sequence: Synthetic oligonucleotide
  Antisense strand to SEQ ID NO: 615890
caaucucggcagauucaua

SEQ ID NO: 615892 - RNA, 19 nt, Artificial Sequence
  Description of Artificial Sequence: Synthetic oligonucleotide
  Sense strand starting at position 2768 of SEQ ID NO: 585133
ugaaucugccgagauugaa

SEQ ID NO: 615893 - RNA, 19 nt, Artificial Sequence
  Description of Artificial Sequence: Synthetic oligonucleotide
  Antisense strand to SEQ ID NO: 615892
uucaaucucggcagauuca

SEQ ID NO: 615894 - RNA, 19 nt, Artificial Sequence
  Description of Artificial Sequence: Synthetic oligonucleotide
  Sense strand starting at position 2981 of SEQ ID NO: 585133
agaauauggcccugacaaa

SEQ ID NO: 615895 - RNA, 19 nt, Artificial Sequence
  Description of Artificial Sequence: Synthetic oligonucleotide
  Antisense strand to SEQ ID NO: 615894
uuugucagggccauauucu

SEQ ID NO: 615896 - RNA, 19 nt, Artificial Sequence
  Description of Artificial Sequence: Synthetic oligonucleotide
  Sense strand starting at position 3107 of SEQ ID NO: 585133
uguaaagguguggauguaa

SEQ ID NO: 615897 - RNA, 19 nt, Artificial Sequence
  Description of Artificial Sequence: Synthetic oligonucleotide
  Antisense strand to SEQ ID NO: 615896
uuacauccacaccuuuaca

SEQ ID NO: 615898 - RNA, 19 nt, Artificial Sequence
  Description of Artificial Sequence: Synthetic oligonucleotide
  Sense strand starting at position 3173 of SEQ ID NO: 585133
acccuaugucucugagaaa

SEQ ID NO: 615899 - RNA, 19 nt, Artificial Sequence
  Description of Artificial Sequence: Synthetic oligonucleotide
  Antisense strand to SEQ ID NO: 615898
uuucucagagacauagggu

SEQ ID NO: 615900 - RNA, 19 nt, Artificial Sequence
  Description of Artificial Sequence: Synthetic oligonucleotide
  Sense strand starting at position 3461 of SEQ ID NO: 585133
cugacucuucucgagcuaa

SEQ ID NO: 615901 - RNA, 19 nt, Artificial Sequence
  Description of Artificial Sequence: Synthetic oligonucleotide
  Antisense strand to SEQ ID NO: 615900
uuagcucgagaagagucag

SEQ ID NO: 615902 - RNA, 19 nt, Artificial Sequence
  Description of Artificial Sequence: Synthetic oligonucleotide
  Sense strand starting at position 3465 of SEQ ID NO: 585133
cucuucucgagcuaaugga

SEQ ID NO: 615903 - RNA, 19 nt, Artificial Sequence
  Description of Artificial Sequence: Synthetic oligonucleotide
  Antisense strand to SEQ ID NO: 615902
uccauuagcucgagaagag

SEQ ID NO: 615904 - RNA, 19 nt, Artificial Sequence
  Description of Artificial Sequence: Synthetic oligonucleotide
  Sense strand starting at position 3523 of SEQ ID NO: 585133
gguucuaauagagguagaa

SEQ ID NO: 615905 - RNA, 19 nt, Artificial Sequence
  Description of Artificial Sequence: Synthetic oligonucleotide
  Antisense strand to SEQ ID NO: 615904
uucuaccucuauuagaacc

SEQ ID NO: 615906 - RNA, 19 nt, Artificial Sequence
  Description of Artificial Sequence: Synthetic oligonucleotide
  Sense strand starting at position 3539 of SEQ ID NO: 585133
gaaaguauauaagugaagu

SEQ ID NO: 615907 - RNA, 19 nt, Artificial Sequence
  Description of Artificial Sequence: Synthetic oligonucleotide
  Antisense strand to SEQ ID NO: 615906
acuucacuuauauacuuuc

SEQ ID NO: 615908 - RNA, 19 nt, Artificial Sequence
  Description of Artificial Sequence: Synthetic oligonucleotide
  Sense strand starting at position 3884 of SEQ ID NO: 585133
gggugagauguggguaaau

SEQ ID NO: 615909 - RNA, 19 nt, Artificial Sequence
  Description of Artificial Sequence: Synthetic oligonucleotide
  Antisense strand to SEQ ID NO: 615908
auuuacccacaucucaccc

SEQ ID NO: 615910 - RNA, 19 nt, Artificial Sequence
  Description of Artificial Sequence: Synthetic oligonucleotide
  Sense strand starting at position 3886 of SEQ ID NO: 585133
gugagauguggguaaauua

SEQ ID NO: 615911 - RNA, 19 nt, Artificial Sequence
  Description of Artificial Sequence: Synthetic oligonucleotide
  Antisense strand to SEQ ID NO: 615910
uaauuuacccacaucucac

SEQ ID NO: 615912 - RNA, 19 nt, Artificial Sequence
  Description of Artificial Sequence: Synthetic oligonucleotide
  Sense strand starting at position 19 of SEQ ID NO: 585134
cugggaucuuucucccaua

SEQ ID NO: 615913 - RNA, 19 nt, Artificial Sequence
  Description of Artificial Sequence: Synthetic oligonucleotide
  Antisense strand to SEQ ID NO: 615912
uaugggagaaagaucccag

SEQ ID NO: 615914 - RNA, 19 nt, Artificial Sequence
  Description of Artificial Sequence: Synthetic oligonucleotide
  Sense strand starting at position 20 of SEQ ID NO: 585134
ugggaucuuucucccauau

SEQ ID NO: 615915 - RNA, 19 nt, Artificial Sequence
  Description of Artificial Sequence: Synthetic oligonucleotide
  Antisense strand to SEQ ID NO: 615914
auaugggagaaagauccca

SEQ ID NO: 615916 - RNA, 19 nt, Artificial Sequence
  Description of Artificial Sequence: Synthetic oligonucleotide
  Sense strand starting at position 110 of SEQ ID NO: 585134
gcuggcuuggguuauuauu

SEQ ID NO: 615917 - RNA, 19 nt, Artificial Sequence
  Description of Artificial Sequence: Synthetic oligonucleotide
  Antisense strand to SEQ ID NO: 615916
aauaauaacccaagccagc

SEQ ID NO: 615918 - RNA, 19 nt, Artificial Sequence
  Description of Artificial Sequence: Synthetic oligonucleotide
  Sense strand starting at position 320 of SEQ ID NO: 585134
aggacuuucuaaucugguu

SEQ ID NO: 615919 - RNA, 19 nt, Artificial Sequence
  Description of Artificial Sequence: Synthetic oligonucleotide
  Antisense strand to SEQ ID NO: 615918
aaccagauuagaaaguccu

SEQ ID NO: 615920 - RNA, 19 nt, Artificial Sequence
  Description of Artificial Sequence: Synthetic oligonucleotide
  Sense strand starting at position 325 of SEQ ID NO: 585134
uuucuaaucugguuagaag

SEQ ID NO: 615921 - RNA, 19 nt, Artificial Sequence
  Description of Artificial Sequence: Synthetic oligonucleotide
  Antisense strand to SEQ ID NO: 615920
cuucuaaccagauuagaaa

SEQ ID NO: 615922 - RNA, 19 nt, Artificial Sequence
  Description of Artificial Sequence: Synthetic oligonucleotide
  Sense strand starting at position 352 of SEQ ID NO: 585134
uaguaaacagaucgcuaga

SEQ ID NO: 615923 - RNA, 19 nt, Artificial Sequence
  Description of Artificial Sequence: Synthetic oligonucleotide
  Antisense strand to SEQ ID NO: 615922
ucuagcgaucuguuuacua

SEQ ID NO: 615924 - RNA, 19 nt, Artificial Sequence
  Description of Artificial Sequence: Synthetic oligonucleotide
  Sense strand starting at position 354 of SEQ ID NO: 585134
guaaacagaucgcuagaau

SEQ ID NO: 615925 - RNA, 19 nt, Artificial Sequence
  Description of Artificial Sequence: Synthetic oligonucleotide
  Antisense strand to SEQ ID NO: 615924
auucuagcgaucuguuuac

SEQ ID NO: 615926 - RNA, 19 nt, Artificial Sequence
  Description of Artificial Sequence: Synthetic oligonucleotide
  Sense strand starting at position 520 of SEQ ID NO: 585134
gcacuccuggcaugagaaa

SEQ ID NO: 615927 - RNA, 19 nt, Artificial Sequence
  Description of Artificial Sequence: Synthetic oligonucleotide
  Antisense strand to SEQ ID NO: 615926
uuucucaugccaggagugc

SEQ ID NO: 615928 - RNA, 19 nt, Artificial Sequence
  Description of Artificial Sequence: Synthetic oligonucleotide
  Sense strand starting at position 607 of SEQ ID NO: 585134
uggugacauucuuuagcag

SEQ ID NO: 615929 - RNA, 19 nt, Artificial Sequence
  Description of Artificial Sequence: Synthetic oligonucleotide
  Antisense strand to SEQ ID NO: 615928
cugcuaaagaaugucacca

SEQ ID NO: 615930 - RNA, 19 nt, Artificial Sequence
  Description of Artificial Sequence: Synthetic oligonucleotide
  Sense strand starting at position 651 of SEQ ID NO: 585134
guaaacgugcgauauaaau

SEQ ID NO: 615931 - RNA, 19 nt, Artificial Sequence
  Description of Artificial Sequence: Synthetic oligonucleotide
  Antisense strand to SEQ ID NO: 615930
auuuauaucgcacguuuac

SEQ ID NO: 615932 - RNA, 19 nt, Artificial Sequence
  Description of Artificial Sequence: Synthetic oligonucleotide
  Sense strand starting at position 722 of SEQ ID NO: 585134
agugaugucuuuccacaga

SEQ ID NO: 615933 - RNA, 19 nt, Artificial Sequence
  Description of Artificial Sequence: Synthetic oligonucleotide
  Antisense strand to SEQ ID NO: 615932
ucuguggaaagacaucacu

SEQ ID NO: 615934 - RNA, 19 nt, Artificial Sequence
  Description of Artificial Sequence: Synthetic oligonucleotide
  Sense strand starting at position 907 of SEQ ID NO: 585134
cggcgucgugccagggauu

SEQ ID NO: 615935 - RNA, 19 nt, Artificial Sequence
  Description of Artificial Sequence: Synthetic oligonucleotide
  Antisense strand to SEQ ID NO: 615934
aaucccuggcacgacgccg

SEQ ID NO: 615936 - RNA, 19 nt, Artificial Sequence
  Description of Artificial Sequence: Synthetic oligonucleotide
  Sense strand starting at position 908 of SEQ ID NO: 585134
ggcgucgugccagggauuu

SEQ ID NO: 615937 - RNA, 19 nt, Artificial Sequence
  Description of Artificial Sequence: Synthetic oligonucleotide
  Antisense strand to SEQ ID NO: 615936
aaaucccuggcacgacgcc

SEQ ID NO: 615938 - RNA, 19 nt, Artificial Sequence
  Description of Artificial Sequence: Synthetic oligonucleotide
  Sense strand starting at position 966 of SEQ ID NO: 585134
ccgggaaucccuggagucu

SEQ ID NO: 615939 - RNA, 19 nt, Artificial Sequence
  Description of Artificial Sequence: Synthetic oligonucleotide
  Antisense strand to SEQ ID NO: 615938
agacuccagggauucccgg

SEQ ID NO: 615940 - RNA, 19 nt, Artificial Sequence
  Description of Artificial Sequence: Synthetic oligonucleotide
  Sense strand starting at position 1158 of SEQ ID NO: 585134
cggacugagcgcuggagaa

SEQ ID NO: 615941 - RNA, 19 nt, Artificial Sequence
  Description of Artificial Sequence: Synthetic oligonucleotide
  Antisense strand to SEQ ID NO: 615940
uucuccagcgcucaguccg

SEQ ID NO: 615942 - RNA, 19 nt, Artificial Sequence
  Description of Artificial Sequence: Synthetic oligonucleotide
  Sense strand starting at position 1573 of SEQ ID NO: 585134
gcgagaacagccugacuca

SEQ ID NO: 615943 - RNA, 19 nt, Artificial Sequence
  Description of Artificial Sequence: Synthetic oligonucleotide
  Antisense strand to SEQ ID NO: 615942
ugagucaggcuguucucgc

SEQ ID NO: 615944 - RNA, 19 nt, Artificial Sequence
  Description of Artificial Sequence: Synthetic oligonucleotide
  Sense strand starting at position 1961 of SEQ ID NO: 585134
auguaacucuuaguugcaa

SEQ ID NO: 615945 - RNA, 19 nt, Artificial Sequence
  Description of Artificial Sequence: Synthetic oligonucleotide
  Antisense strand to SEQ ID NO: 615944
uugcaacuaagaguuacau

SEQ ID NO: 615946 - RNA, 19 nt, Artificial Sequence
  Description of Artificial Sequence: Synthetic oligonucleotide
  Sense strand starting at position 1962 of SEQ ID NO: 585134
uguaacucuuaguugcaaa

SEQ ID NO: 615947 - RNA, 19 nt, Artificial Sequence
  Description of Artificial Sequence: Synthetic oligonucleotide
  Antisense strand to SEQ ID NO: 615946
uuugcaacuaagaguuaca

SEQ ID NO: 615948 - RNA, 19 nt, Artificial Sequence
  Description of Artificial Sequence: Synthetic oligonucleotide
  Sense strand starting at position 2336 of SEQ ID NO: 585134
gacuuaugcugucccuaug

SEQ ID NO: 615949 - RNA, 19 nt, Artificial Sequence
  Description of Artificial Sequence: Synthetic oligonucleotide
  Antisense strand to SEQ ID NO: 615948
cauagggacagcauaaguc

SEQ ID NO: 615950 - RNA, 19 nt, Artificial Sequence
  Description of Artificial Sequence: Synthetic oligonucleotide
  Sense strand starting at position 2478 of SEQ ID NO: 585134
gaugcuuugugccuggaga

SEQ ID NO: 615951 - RNA, 19 nt, Artificial Sequence
  Description of Artificial Sequence: Synthetic oligonucleotide
  Antisense strand to SEQ ID NO: 615950
ucuccaggcacaaagcauc

SEQ ID NO: 615952 - RNA, 19 nt, Artificial Sequence
  Description of Artificial Sequence: Synthetic oligonucleotide
  Sense strand starting at position 2479 of SEQ ID NO: 585134
augcuuugugccuggagag

SEQ ID NO: 615953 - RNA, 19 nt, Artificial Sequence
  Description of Artificial Sequence: Synthetic oligonucleotide
  Antisense strand to SEQ ID NO: 615952
cucuccaggcacaaagcau

SEQ ID NO: 615954 - RNA, 19 nt, Artificial Sequence
  Description of Artificial Sequence: Synthetic oligonucleotide
  Sense strand starting at position 2652 of SEQ ID NO: 585134
acccucuguggcuaaagau

SEQ ID NO: 615955 - RNA, 19 nt, Artificial Sequence
  Description of Artificial Sequence: Synthetic oligonucleotide
  Antisense strand to SEQ ID NO: 615954
aucuuuagccacagagggu

SEQ ID NO: 615956 - RNA, 19 nt, Artificial Sequence
  Description of Artificial Sequence: Synthetic oligonucleotide
  Sense strand starting at position 2801 of SEQ ID NO: 585134
ucuuccugaugcuugaaau

SEQ ID NO: 615957 - RNA, 19 nt, Artificial Sequence
  Description of Artificial Sequence: Synthetic oligonucleotide
  Antisense strand to SEQ ID NO: 615956
auuucaagcaucaggaaga

SEQ ID NO: 615958 - RNA, 19 nt, Artificial Sequence
  Description of Artificial Sequence: Synthetic oligonucleotide
  Sense strand starting at position 2802 of SEQ ID NO: 585134
cuuccugaugcuugaaauc

SEQ ID NO: 615959 - RNA, 19 nt, Artificial Sequence
  Description of Artificial Sequence: Synthetic oligonucleotide
  Antisense strand to SEQ ID NO: 615958
gauuucaagcaucaggaag

SEQ ID NO: 615960 - RNA, 19 nt, Artificial Sequence
  Description of Artificial Sequence: Synthetic oligonucleotide
  Sense strand starting at position 2812 of SEQ ID NO: 585134
cuugaaaucuguccgugau

SEQ ID NO: 615961 - RNA, 19 nt, Artificial Sequence
  Description of Artificial Sequence: Synthetic oligonucleotide
  Antisense strand to SEQ ID NO: 615960
aucacggacagauuucaag

SEQ ID NO: 615962 - RNA, 19 nt, Artificial Sequence
  Description of Artificial Sequence: Synthetic oligonucleotide
  Sense strand starting at position 2813 of SEQ ID NO: 585134
uugaaaucuguccgugauc

SEQ ID NO: 615963 - RNA, 19 nt, Artificial Sequence
  Description of Artificial Sequence: Synthetic oligonucleotide
  Antisense strand to SEQ ID NO: 615962
gaucacggacagauuucaa

SEQ ID NO: 615964 - RNA, 19 nt, Artificial Sequence
  Description of Artificial Sequence: Synthetic oligonucleotide
  Sense strand starting at position 2816 of SEQ ID NO: 585134
aaaucuguccgugauccca

SEQ ID NO: 615965 - RNA, 19 nt, Artificial Sequence
  Description of Artificial Sequence: Synthetic oligonucleotide
  Antisense strand to SEQ ID NO: 615964
ugggaucacggacagauuu

SEQ ID NO: 615966 - RNA, 19 nt, Artificial Sequence
  Description of Artificial Sequence: Synthetic oligonucleotide
  Sense strand starting at position 2838 of SEQ ID NO: 585134
cagugauugcucgaggcug

SEQ ID NO: 615967 - RNA, 19 nt, Artificial Sequence
  Description of Artificial Sequence: Synthetic oligonucleotide
  Antisense strand to SEQ ID NO: 615966
cagccucgagcaaucacug

SEQ ID NO: 615968 - RNA, 19 nt, Artificial Sequence
  Description of Artificial Sequence: Synthetic oligonucleotide
  Sense strand starting at position 2937 of SEQ ID NO: 585134
gcccuuacauggccuagaa

SEQ ID NO: 615969 - RNA, 19 nt, Artificial Sequence
  Description of Artificial Sequence: Synthetic oligonucleotide
  Antisense strand to SEQ ID NO: 615968
uucuaggccauguaagggc

SEQ ID NO: 615970 - RNA, 19 nt, Artificial Sequence
  Description of Artificial Sequence: Synthetic oligonucleotide
  Sense strand starting at position 2939 of SEQ ID NO: 585134
ccuuacauggccuagaagu

SEQ ID NO: 615971 - RNA, 19 nt, Artificial Sequence
  Description of Artificial Sequence: Synthetic oligonucleotide
  Antisense strand to SEQ ID NO: 615970
acuucuaggccauguaagg

SEQ ID NO: 615972 - RNA, 19 nt, Artificial Sequence
  Description of Artificial Sequence: Synthetic oligonucleotide
  Sense strand starting at position 2941 of SEQ ID NO: 585134
uuacauggccuagaaguga

SEQ ID NO: 615973 - RNA, 19 nt, Artificial Sequence
  Description of Artificial Sequence: Synthetic oligonucleotide
  Antisense strand to SEQ ID NO: 615972
ucacuucuaggccauguaa

SEQ ID NO: 615974 - RNA, 19 nt, Artificial Sequence
  Description of Artificial Sequence: Synthetic oligonucleotide
  Sense strand starting at position 3079 of SEQ ID NO: 585134
ccuuaugucugaucucuua

SEQ ID NO: 615975 - RNA, 19 nt, Artificial Sequence
  Description of Artificial Sequence: Synthetic oligonucleotide
  Antisense strand to SEQ ID NO: 615974
uaagagaucagacauaagg

SEQ ID NO: 615976 - RNA, 19 nt, Artificial Sequence
  Description of Artificial Sequence: Synthetic oligonucleotide
  Sense strand starting at position 3289 of SEQ ID NO: 585134
uuguguauguuaucaacuu

SEQ ID NO: 615977 - RNA, 19 nt, Artificial Sequence
  Description of Artificial Sequence: Synthetic oligonucleotide
  Antisense strand to SEQ ID NO: 615976
aaguugauaacauacacaa

SEQ ID NO: 615978 - RNA, 19 nt, Artificial Sequence
  Description of Artificial Sequence: Synthetic oligonucleotide
  Sense strand starting at position 3327 of SEQ ID NO: 585134
cagugaguacacuagcuaa

SEQ ID NO: 615979 - RNA, 19 nt, Artificial Sequence
  Description of Artificial Sequence: Synthetic oligonucleotide
  Antisense strand to SEQ ID NO: 615978
uuagcuaguguacucacug

SEQ ID NO: 615980 - RNA, 19 nt, Artificial Sequence
  Description of Artificial Sequence: Synthetic oligonucleotide
  Sense strand starting at position 3347 of SEQ ID NO: 585134
cuguguacucucugugaug

SEQ ID NO: 615981 - RNA, 19 nt, Artificial Sequence
  Description of Artificial Sequence: Synthetic oligonucleotide
  Antisense strand to SEQ ID NO: 615980
caucacagagaguacacag

SEQ ID NO: 615982 - RNA, 19 nt, Artificial Sequence
  Description of Artificial Sequence: Synthetic oligonucleotide
  Sense strand starting at position 3436 of SEQ ID NO: 585134
cagcaaauguuccucguga

SEQ ID NO: 615983 - RNA, 19 nt, Artificial Sequence
  Description of Artificial Sequence: Synthetic oligonucleotide
  Antisense strand to SEQ ID NO: 615982
ucacgaggaacauuugcug

SEQ ID NO: 615984 - RNA, 19 nt, Artificial Sequence
  Description of Artificial Sequence: Synthetic oligonucleotide
  Sense strand starting at position 3655 of SEQ ID NO: 585134
aguuaauaucagggagguu

SEQ ID NO: 615985 - RNA, 19 nt, Artificial Sequence
  Description of Artificial Sequence: Synthetic oligonucleotide
  Antisense strand to SEQ ID NO: 615984
aaccucccugauauuaacu

SEQ ID NO: 615986 - RNA, 19 nt, Artificial Sequence
  Description of Artificial Sequence: Synthetic oligonucleotide
  Sense strand starting at position 3743 of SEQ ID NO: 585134
augccugcucaguaagaga

SEQ ID NO: 615987 - RNA, 19 nt, Artificial Sequence
  Description of Artificial Sequence: Synthetic oligonucleotide
  Antisense strand to SEQ ID NO: 615986
ucucuuacugagcaggcau

SEQ ID NO: 615988 - RNA, 19 nt, Artificial Sequence
  Description of Artificial Sequence: Synthetic oligonucleotide
  Sense strand starting at position 3826 of SEQ ID NO: 585134
gccugugagcugccuuuaa

SEQ ID NO: 615989 - RNA, 19 nt, Artificial Sequence
  Description of Artificial Sequence: Synthetic oligonucleotide
  Antisense strand to SEQ ID NO: 615988
uuaaaggcagcucacaggc

SEQ ID NO: 615990 - RNA, 19 nt, Artificial Sequence
  Description of Artificial Sequence: Synthetic oligonucleotide
  Sense strand starting at position 3830 of SEQ ID NO: 585134
gugagcugccuuuaaucuu

SEQ ID NO: 615991 - RNA, 19 nt, Artificial Sequence
  Description of Artificial Sequence: Synthetic oligonucleotide
  Antisense strand to SEQ ID NO: 615990
aagauuaaaggcagcucac

SEQ ID NO: 615992 - RNA, 19 nt, Artificial Sequence
  Description of Artificial Sequence: Synthetic oligonucleotide
  Sense strand starting at position 8 of SEQ ID NO: 585135
ccucauagcuuguuaugga

SEQ ID NO: 615993 - RNA, 19 nt, Artificial Sequence
  Description of Artificial Sequence: Synthetic oligonucleotide
  Antisense strand to SEQ ID NO: 615992
uccauaacaagcuaugagg

SEQ ID NO: 615994 - RNA, 19 nt, Artificial Sequence
  Description of Artificial Sequence: Synthetic oligonucleotide
  Sense strand starting at position 12 of SEQ ID NO: 585135
auagcuuguuauggagaaa

SEQ ID NO: 615995 - RNA, 19 nt, Artificial Sequence
  Description of Artificial Sequence: Synthetic oligonucleotide
  Antisense strand to SEQ ID NO: 615994
uuucuccauaacaagcuau

SEQ ID NO: 615996 - RNA, 19 nt, Artificial Sequence
  Description of Artificial Sequence: Synthetic oligonucleotide
  Sense strand starting at position 73 of SEQ ID NO: 585135
ucacaauuauugguugaag

SEQ ID NO: 615997 - RNA, 19 nt, Artificial Sequence
  Description of Artificial Sequence: Synthetic oligonucleotide
  Antisense strand to SEQ ID NO: 615996
cuucaaccaauaauuguga

SEQ ID NO: 615998 - RNA, 19 nt, Artificial Sequence
  Description of Artificial Sequence: Synthetic oligonucleotide
  Sense strand starting at position 74 of SEQ ID NO: 585135
cacaauuauugguugaaga

SEQ ID NO: 615999 - RNA, 19 nt, Artificial Sequence
  Description of Artificial Sequence: Synthetic oligonucleotide
  Antisense strand to SEQ ID NO: 615998
ucuucaaccaauaauugug

SEQ ID NO: 616000 - RNA, 19 nt, Artificial Sequence
  Description of Artificial Sequence: Synthetic oligonucleotide
  Sense strand starting at position 84 of SEQ ID NO: 585135
gguugaagaguugaugguu

SEQ ID NO: 616001 - RNA, 19 nt, Artificial Sequence
  Description of Artificial Sequence: Synthetic oligonucleotide
  Antisense strand to SEQ ID NO: 616000
aaccaucaacucuucaacc

SEQ ID NO: 616002 - RNA, 19 nt, Artificial Sequence
  Description of Artificial Sequence: Synthetic oligonucleotide
  Sense strand starting at position 87 of SEQ ID NO: 585135
ugaagaguugaugguucaa

SEQ ID NO: 616003 - RNA, 19 nt, Artificial Sequence
  Description of Artificial Sequence: Synthetic oligonucleotide
  Antisense strand to SEQ ID NO: 616002
uugaaccaucaacucuuca

SEQ ID NO: 616004 - RNA, 19 nt, Artificial Sequence
  Description of Artificial Sequence: Synthetic oligonucleotide
  Sense strand starting at position 107 of SEQ ID NO: 585135
ggcgaacucuuaucagcua

SEQ ID NO: 616005 - RNA, 19 nt, Artificial Sequence
  Description of Artificial Sequence: Synthetic oligonucleotide
  Antisense strand to SEQ ID NO: 616004
uagcugauaagaguucgcc

SEQ ID NO: 616006 - RNA, 19 nt, Artificial Sequence
  Description of Artificial Sequence: Synthetic oligonucleotide
  Sense strand starting at position 122 of SEQ ID NO: 585135
gcuauuagcuaacuguaau

SEQ ID NO: 616007 - RNA, 19 nt, Artificial Sequence
  Description of Artificial Sequence: Synthetic oligonucleotide
  Antisense strand to SEQ ID NO: 616006
auuacaguuagcuaauagc

SEQ ID NO: 616008 - RNA, 19 nt, Artificial Sequence
  Description of Artificial Sequence: Synthetic oligonucleotide
  Sense strand starting at position 135 of SEQ ID NO: 585135
uguaauuaccuaggcaaau

SEQ ID NO: 616009 - RNA, 19 nt, Artificial Sequence
  Description of Artificial Sequence: Synthetic oligonucleotide
  Antisense strand to SEQ ID NO: 616008
auuugccuagguaauuaca

SEQ ID NO: 616010 - RNA, 19 nt, Artificial Sequence
  Description of Artificial Sequence: Synthetic oligonucleotide
  Sense strand starting at position 136 of SEQ ID NO: 585135
guaauuaccuaggcaaaua

SEQ ID NO: 616011 - RNA, 19 nt, Artificial Sequence
  Description of Artificial Sequence: Synthetic oligonucleotide
  Antisense strand to SEQ ID NO: 616010
uauuugccuagguaauuac

SEQ ID NO: 616012 - RNA, 19 nt, Artificial Sequence
  Description of Artificial Sequence: Synthetic oligonucleotide
  Sense strand starting at position 377 of SEQ ID NO: 585135
uaaauuggucagggccaua

SEQ ID NO: 616013 - RNA, 19 nt, Artificial Sequence
  Description of Artificial Sequence: Synthetic oligonucleotide
  Antisense strand to SEQ ID NO: 616012
uauggcccugaccaauuua

SEQ ID NO: 616014 - RNA, 19 nt, Artificial Sequence
  Description of Artificial Sequence: Synthetic oligonucleotide
  Sense strand starting at position 380 of SEQ ID NO: 585135
auuggucagggccauaauu

SEQ ID NO: 616015 - RNA, 19 nt, Artificial Sequence
  Description of Artificial Sequence: Synthetic oligonucleotide
  Antisense strand to SEQ ID NO: 616014
aauuauggcccugaccaau

SEQ ID NO: 616016 - RNA, 19 nt, Artificial Sequence
  Description of Artificial Sequence: Synthetic oligonucleotide
  Sense strand starting at position 450 of SEQ ID NO: 585135
aagugaaaguaugacaaua

SEQ ID NO: 616017 - RNA, 19 nt, Artificial Sequence
  Description of Artificial Sequence: Synthetic oligonucleotide
  Antisense strand to SEQ ID NO: 616016
uauugucauacuuucacuu

SEQ ID NO: 616018 - RNA, 19 nt, Artificial Sequence
  Description of Artificial Sequence: Synthetic oligonucleotide
  Sense strand starting at position 452 of SEQ ID NO: 585135
gugaaaguaugacaauaaa

SEQ ID NO: 616019 - RNA, 19 nt, Artificial Sequence
  Description of Artificial Sequence: Synthetic oligonucleotide
  Antisense strand to SEQ ID NO: 616018
uuuauugucauacuuucac

SEQ ID NO: 616020 - RNA, 19 nt, Artificial Sequence
  Description of Artificial Sequence: Synthetic oligonucleotide
  Sense strand starting at position 598 of SEQ ID NO: 585135
uggauagaaucccagacua

SEQ ID NO: 616021 - RNA, 19 nt, Artificial Sequence
  Description of Artificial Sequence: Synthetic oligonucleotide
  Antisense strand to SEQ ID NO: 616020
uagucugggauucuaucca

SEQ ID NO: 616022 - RNA, 19 nt, Artificial Sequence
  Description of Artificial Sequence: Synthetic oligonucleotide
  Sense strand starting at position 864 of SEQ ID NO: 585135
acugaaggguaucuacaau

SEQ ID NO: 616023 - RNA, 19 nt, Artificial Sequence
  Description of Artificial Sequence: Synthetic oligonucleotide
  Antisense strand to SEQ ID NO: 616022
auuguagauacccuucagu

SEQ ID NO: 616024 - RNA, 19 nt, Artificial Sequence
  Description of Artificial Sequence: Synthetic oligonucleotide
  Sense strand starting at position 893 of SEQ ID NO: 585135
cgcuuacaacuugaaacuu

SEQ ID NO: 616025 - RNA, 19 nt, Artificial Sequence
  Description of Artificial Sequence: Synthetic oligonucleotide
  Antisense strand to SEQ ID NO: 616024
aaguuucaaguuguaagcg

SEQ ID NO: 616026 - RNA, 19 nt, Artificial Sequence
  Description of Artificial Sequence: Synthetic oligonucleotide
  Sense strand starting at position 959 of SEQ ID NO: 585135
gguccugccgguucguuaa

SEQ ID NO: 616027 - RNA, 19 nt, Artificial Sequence
  Description of Artificial Sequence: Synthetic oligonucleotide
  Antisense strand to SEQ ID NO: 616026
uuaacgaaccggcaggacc

SEQ ID NO: 616028 - RNA, 19 nt, Artificial Sequence
  Description of Artificial Sequence: Synthetic oligonucleotide
  Sense strand starting at position 965 of SEQ ID NO: 585135
gccgguucguuaaucgaag

SEQ ID NO: 616029 - RNA, 19 nt, Artificial Sequence
  Description of Artificial Sequence: Synthetic oligonucleotide
  Antisense strand to SEQ ID NO: 616028
cuucgauuaacgaaccggc

SEQ ID NO: 616030 - RNA, 19 nt, Artificial Sequence
  Description of Artificial Sequence: Synthetic oligonucleotide
  Sense strand starting at position 966 of SEQ ID NO: 585135
ccgguucguuaaucgaaga

SEQ ID NO: 616031 - RNA, 19 nt, Artificial Sequence
  Description of Artificial Sequence: Synthetic oligonucleotide
  Antisense strand to SEQ ID NO: 616030
ucuucgauuaacgaaccgg

SEQ ID NO: 616032 - RNA, 19 nt, Artificial Sequence
  Description of Artificial Sequence: Synthetic oligonucleotide
  Sense strand starting at position 967 of SEQ ID NO: 585135
cgguucguuaaucgaagaa

SEQ ID NO: 616033 - RNA, 19 nt, Artificial Sequence
  Description of Artificial Sequence: Synthetic oligonucleotide
  Antisense strand to SEQ ID NO: 616032
uucuucgauuaacgaaccg

SEQ ID NO: 616034 - RNA, 19 nt, Artificial Sequence
  Description of Artificial Sequence: Synthetic oligonucleotide
  Sense strand starting at position 2292 of SEQ ID NO: 585135
cucuuaccucccgagaaau

SEQ ID NO: 616035 - RNA, 19 nt, Artificial Sequence
  Description of Artificial Sequence: Synthetic oligonucleotide
  Antisense strand to SEQ ID NO: 616034
auuucucgggagguaagag

SEQ ID NO: 616036 - RNA, 19 nt, Artificial Sequence
  Description of Artificial Sequence: Synthetic oligonucleotide
  Sense strand starting at position 2305 of SEQ ID NO: 585135
agaaauuaaugccuaagca

SEQ ID NO: 616037 - RNA, 19 nt, Artificial Sequence
  Description of Artificial Sequence: Synthetic oligonucleotide
  Antisense strand to SEQ ID NO: 616036
ugcuuaggcauuaauuucu

SEQ ID NO: 616038 - RNA, 19 nt, Artificial Sequence
  Description of Artificial Sequence: Synthetic oligonucleotide
  Sense strand starting at position 2341 of SEQ ID NO: 585135
ucuguaucgucucucugaa

SEQ ID NO: 616039 - RNA, 19 nt, Artificial Sequence
  Description of Artificial Sequence: Synthetic oligonucleotide
  Antisense strand to SEQ ID NO: 616038
uucagagagacgauacaga

SEQ ID NO: 616040 - RNA, 19 nt, Artificial Sequence
  Description of Artificial Sequence: Synthetic oligonucleotide
  Sense strand starting at position 2945 of SEQ ID NO: 585135
cugaguucuuccgccaacu

SEQ ID NO: 616041 - RNA, 19 nt, Artificial Sequence
  Description of Artificial Sequence: Synthetic oligonucleotide
  Antisense strand to SEQ ID NO: 616040
aguuggcggaagaacucag

SEQ ID NO: 616042 - RNA, 19 nt, Artificial Sequence
  Description of Artificial Sequence: Synthetic oligonucleotide
  Sense strand starting at position 2986 of SEQ ID NO: 585135
gauggcuaccucugaguua

SEQ ID NO: 616043 - RNA, 19 nt, Artificial Sequence
  Description of Artificial Sequence: Synthetic oligonucleotide
  Antisense strand to SEQ ID NO: 616042
uaacucagagguagccauc

SEQ ID NO: 616044 - RNA, 19 nt, Artificial Sequence
  Description of Artificial Sequence: Synthetic oligonucleotide
  Sense strand starting at position 2997 of SEQ ID NO: 585135
cugaguuacucccauagag

SEQ ID NO: 616045 - RNA, 19 nt, Artificial Sequence
  Description of Artificial Sequence: Synthetic oligonucleotide
  Antisense strand to SEQ ID NO: 616044
cucuaugggaguaacucag

SEQ ID NO: 616046 - RNA, 19 nt, Artificial Sequence
  Description of Artificial Sequence: Synthetic oligonucleotide
  Sense strand starting at position 3104 of SEQ ID NO: 585135
acacgugggaccuaauagu

SEQ ID NO: 616047 - RNA, 19 nt, Artificial Sequence
  Description of Artificial Sequence: Synthetic oligonucleotide
  Antisense strand to SEQ ID NO: 616046
acuauuaggucccacgugu

SEQ ID NO: 616048 - RNA, 19 nt, Artificial Sequence
  Description of Artificial Sequence: Synthetic oligonucleotide
  Sense strand starting at position 3110 of SEQ ID NO: 585135
gggaccuaauaguuaccua

SEQ ID NO: 616049 - RNA, 19 nt, Artificial Sequence
  Description of Artificial Sequence: Synthetic oligonucleotide
  Antisense strand to SEQ ID NO: 616048
uagguaacuauuagguccc

SEQ ID NO: 616050 - RNA, 19 nt, Artificial Sequence
  Description of Artificial Sequence: Synthetic oligonucleotide
  Sense strand starting at position 3114 of SEQ ID NO: 585135
ccuaauaguuaccuaugga

SEQ ID NO: 616051 - RNA, 19 nt, Artificial Sequence
  Description of Artificial Sequence: Synthetic oligonucleotide
  Antisense strand to SEQ ID NO: 616050
uccauagguaacuauuagg

SEQ ID NO: 616052 - RNA, 19 nt, Artificial Sequence
  Description of Artificial Sequence: Synthetic oligonucleotide
  Sense strand starting at position 3219 of SEQ ID NO: 585135
ugaagagccucguccagaa

SEQ ID NO: 616053 - RNA, 19 nt, Artificial Sequence
  Description of Artificial Sequence: Synthetic oligonucleotide
  Antisense strand to SEQ ID NO: 616052
uucuggacgaggcucuuca

SEQ ID NO: 616054 - RNA, 19 nt, Artificial Sequence
  Description of Artificial Sequence: Synthetic oligonucleotide
  Sense strand starting at position 3221 of SEQ ID NO: 585135
aagagccucguccagaaau

SEQ ID NO: 616055 - RNA, 19 nt, Artificial Sequence
  Description of Artificial Sequence: Synthetic oligonucleotide
  Antisense strand to SEQ ID NO: 616054
auuucuggacgaggcucuu

SEQ ID NO: 616056 - RNA, 19 nt, Artificial Sequence
  Description of Artificial Sequence: Synthetic oligonucleotide
  Sense strand starting at position 3564 of SEQ ID NO: 585135
gggugaugaugucugcaga

SEQ ID NO: 616057 - RNA, 19 nt, Artificial Sequence
  Description of Artificial Sequence: Synthetic oligonucleotide
  Antisense strand to SEQ ID NO: 616056
ucugcagacaucaucaccc

SEQ ID NO: 616058 - RNA, 19 nt, Artificial Sequence
  Description of Artificial Sequence: Synthetic oligonucleotide
  Sense strand starting at position 3565 of SEQ ID NO: 585135
ggugaugaugucugcagaa

SEQ ID NO: 616059 - RNA, 19 nt, Artificial Sequence
  Description of Artificial Sequence: Synthetic oligonucleotide
  Antisense strand to SEQ ID NO: 616058
uucugcagacaucaucacc

SEQ ID NO: 616060 - RNA, 19 nt, Artificial Sequence
  Description of Artificial Sequence: Synthetic oligonucleotide
  Sense strand starting at position 3625 of SEQ ID NO: 585135
gguucugucucagucauuu

SEQ ID NO: 616061 - RNA, 19 nt, Artificial Sequence
  Description of Artificial Sequence: Synthetic oligonucleotide
  Antisense strand to SEQ ID NO: 616060
aaaugacugagacagaacc

SEQ ID NO: 616062 - RNA, 19 nt, Artificial Sequence
  Description of Artificial Sequence: Synthetic oligonucleotide
  Sense strand starting at position 3631 of SEQ ID NO: 585135
gucucagucauuugucugu

SEQ ID NO: 616063 - RNA, 19 nt, Artificial Sequence
  Description of Artificial Sequence: Synthetic oligonucleotide
  Antisense strand to SEQ ID NO: 616062
acagacaaaugacugagac

SEQ ID NO: 616064 - RNA, 19 nt, Artificial Sequence
  Description of Artificial Sequence: Synthetic oligonucleotide
  Sense strand starting at position 3636 of SEQ ID NO: 585135
agucauuugucuguccuca

SEQ ID NO: 616065 - RNA, 19 nt, Artificial Sequence
  Description of Artificial Sequence: Synthetic oligonucleotide
  Antisense strand to SEQ ID NO: 616064
ugaggacagacaaaugacu

SEQ ID NO: 616066 - RNA, 19 nt, Artificial Sequence
  Description of Artificial Sequence: Synthetic oligonucleotide
  Sense strand starting at position 3638 of SEQ ID NO: 585135
ucauuugucuguccucagu

SEQ ID NO: 616067 - RNA, 19 nt, Artificial Sequence
  Description of Artificial Sequence: Synthetic oligonucleotide
  Antisense strand to SEQ ID NO: 616066
acugaggacagacaaauga

SEQ ID NO: 616068 - RNA, 19 nt, Artificial Sequence
  Description of Artificial Sequence: Synthetic oligonucleotide
  Sense strand starting at position 3658 of SEQ ID NO: 585135
ccuagaagcuucccuguuu

SEQ ID NO: 616069 - RNA, 19 nt, Artificial Sequence
  Description of Artificial Sequence: Synthetic oligonucleotide
  Antisense strand to SEQ ID NO: 616068
aaacagggaagcuucuagg

SEQ ID NO: 616070 - RNA, 19 nt, Artificial Sequence
  Description of Artificial Sequence: Synthetic oligonucleotide
  Sense strand starting at position 3659 of SEQ ID NO: 585135
cuagaagcuucccuguuua

SEQ ID NO: 616071 - RNA, 19 nt, Artificial Sequence
  Description of Artificial Sequence: Synthetic oligonucleotide
  Antisense strand to SEQ ID NO: 616070
uaaacagggaagcuucuag

SEQ ID NO: 616072 - RNA, 19 nt, Artificial Sequence
  Description of Artificial Sequence: Synthetic oligonucleotide
  Sense strand starting at position 46 of SEQ ID NO: 585136
ucacaauuauugguugaag

SEQ ID NO: 616073 - RNA, 19 nt, Artificial Sequence
  Description of Artificial Sequence: Synthetic oligonucleotide
  Antisense strand to SEQ ID NO: 616072
cuucaaccaauaauuguga

SEQ ID NO: 616074 - RNA, 19 nt, Artificial Sequence
  Description of Artificial Sequence: Synthetic oligonucleotide
  Sense strand starting at position 47 of SEQ ID NO: 585136
cacaauuauugguugaaga

SEQ ID NO: 616075 - RNA, 19 nt, Artificial Sequence
  Description of Artificial Sequence: Synthetic oligonucleotide
  Antisense strand to SEQ ID NO: 616074
ucuucaaccaauaauugug

SEQ ID NO: 616076 - RNA, 19 nt, Artificial Sequence
  Description of Artificial Sequence: Synthetic oligonucleotide
  Sense strand starting at position 57 of SEQ ID NO: 585136
gguugaagaguugaugguu

SEQ ID NO: 616077 - RNA, 19 nt, Artificial Sequence
  Description of Artificial Sequence: Synthetic oligonucleotide
  Antisense strand to SEQ ID NO: 616076
aaccaucaacucuucaacc

SEQ ID NO: 616078 - RNA, 19 nt, Artificial Sequence
  Description of Artificial Sequence: Synthetic oligonucleotide
  Sense strand starting at position 60 of SEQ ID NO: 585136
ugaagaguugaugguucaa

SEQ ID NO: 616079 - RNA, 19 nt, Artificial Sequence
  Description of Artificial Sequence: Synthetic oligonucleotide
  Antisense strand to SEQ ID NO: 616078
uugaaccaucaacucuuca

SEQ ID NO: 616080 - RNA, 19 nt, Artificial Sequence
  Description of Artificial Sequence: Synthetic oligonucleotide
  Sense strand starting at position 80 of SEQ ID NO: 585136
ggcgaacucuuaucagcua

SEQ ID NO: 616081 - RNA, 19 nt, Artificial Sequence
  Description of Artificial Sequence: Synthetic oligonucleotide
  Antisense strand to SEQ ID NO: 616080
uagcugauaagaguucgcc

SEQ ID NO: 616082 - RNA, 19 nt, Artificial Sequence
  Description of Artificial Sequence: Synthetic oligonucleotide
  Sense strand starting at position 95 of SEQ ID NO: 585136
gcuauuagcuaacuguaau

SEQ ID NO: 616083 - RNA, 19 nt, Artificial Sequence
  Description of Artificial Sequence: Synthetic oligonucleotide
  Antisense strand to SEQ ID NO: 616082
auuacaguuagcuaauagc

SEQ ID NO: 616084 - RNA, 19 nt, Artificial Sequence
  Description of Artificial Sequence: Synthetic oligonucleotide
  Sense strand starting at position 108 of SEQ ID NO: 585136
uguaauuaccuaggcaaau

SEQ ID NO: 616085 - RNA, 19 nt, Artificial Sequence
  Description of Artificial Sequence: Synthetic oligonucleotide
  Antisense strand to SEQ ID NO: 616084
auuugccuagguaauuaca

SEQ ID NO: 616086 - RNA, 19 nt, Artificial Sequence
  Description of Artificial Sequence: Synthetic oligonucleotide
  Sense strand starting at position 109 of SEQ ID NO: 585136
guaauuaccuaggcaaaua

SEQ ID NO: 616087 - RNA, 19 nt, Artificial Sequence
  Description of Artificial Sequence: Synthetic oligonucleotide
  Antisense strand to SEQ ID NO: 616086
uauuugccuagguaauuac

SEQ ID NO: 616088 - RNA, 19 nt, Artificial Sequence
  Description of Artificial Sequence: Synthetic oligonucleotide
  Sense strand starting at position 350 of SEQ ID NO: 585136
uaaauuggucagggccaua

SEQ ID NO: 616089 - RNA, 19 nt, Artificial Sequence
  Description of Artificial Sequence: Synthetic oligonucleotide
  Antisense strand to SEQ ID NO: 616088
uauggcccugaccaauuua

SEQ ID NO: 616090 - RNA, 19 nt, Artificial Sequence
  Description of Artificial Sequence: Synthetic oligonucleotide
  Sense strand starting at position 353 of SEQ ID NO: 585136
auuggucagggccauaauu

SEQ ID NO: 616091 - RNA, 19 nt, Artificial Sequence
  Description of Artificial Sequence: Synthetic oligonucleotide
  Antisense strand to SEQ ID NO: 616090
aauuauggcccugaccaau

SEQ ID NO: 616092 - RNA, 19 nt, Artificial Sequence
  Description of Artificial Sequence: Synthetic oligonucleotide
  Sense strand starting at position 423 of SEQ ID NO: 585136
aagugaaaguaugacaaua

SEQ ID NO: 616093 - RNA, 19 nt, Artificial Sequence
  Description of Artificial Sequence: Synthetic oligonucleotide
  Antisense strand to SEQ ID NO: 616092
uauugucauacuuucacuu

SEQ ID NO: 616094 - RNA, 19 nt, Artificial Sequence
  Description of Artificial Sequence: Synthetic oligonucleotide
  Sense strand starting at position 425 of SEQ ID NO: 585136
gugaaaguaugacaauaaa

SEQ ID NO: 616095 - RNA, 19 nt, Artificial Sequence
  Description of Artificial Sequence: Synthetic oligonucleotide
  Antisense strand to SEQ ID NO: 616094
uuuauugucauacuuucac

SEQ ID NO: 616096 - RNA, 19 nt, Artificial Sequence
  Description of Artificial Sequence: Synthetic oligonucleotide
  Sense strand starting at position 571 of SEQ ID NO: 585136
uggauagaaucccagacua

SEQ ID NO: 616097 - RNA, 19 nt, Artificial Sequence
  Description of Artificial Sequence: Synthetic oligonucleotide
  Antisense strand to SEQ ID NO: 616096
uagucugggauucuaucca

SEQ ID NO: 616098 - RNA, 19 nt, Artificial Sequence
  Description of Artificial Sequence: Synthetic oligonucleotide
  Sense strand starting at position 837 of SEQ ID NO: 585136
acugaaggguaucuacaau

SEQ ID NO: 616099 - RNA, 19 nt, Artificial Sequence
  Description of Artificial Sequence: Synthetic oligonucleotide
  Antisense strand to SEQ ID NO: 616098
auuguagauacccuucagu

SEQ ID NO: 616100 - RNA, 19 nt, Artificial Sequence
  Description of Artificial Sequence: Synthetic oligonucleotide
  Sense strand starting at position 866 of SEQ ID NO: 585136
cgcuuacaacuugaaacuu

SEQ ID NO: 616101 - RNA, 19 nt, Artificial Sequence
  Description of Artificial Sequence: Synthetic oligonucleotide
  Antisense strand to SEQ ID NO: 616100
aaguuucaaguuguaagcg

SEQ ID NO: 616102 - RNA, 19 nt, Artificial Sequence
  Description of Artificial Sequence: Synthetic oligonucleotide
  Sense strand starting at position 932 of SEQ ID NO: 585136
gguccugccgguucguuaa

SEQ ID NO: 616103 - RNA, 19 nt, Artificial Sequence
  Description of Artificial Sequence: Synthetic oligonucleotide
  Antisense strand to SEQ ID NO: 616102
uuaacgaaccggcaggacc

SEQ ID NO: 616104 - RNA, 19 nt, Artificial Sequence
  Description of Artificial Sequence: Synthetic oligonucleotide
  Sense strand starting at position 938 of SEQ ID NO: 585136
gccgguucguuaaucgaag

SEQ ID NO: 616105 - RNA, 19 nt, Artificial Sequence
  Description of Artificial Sequence: Synthetic oligonucleotide
  Antisense strand to SEQ ID NO: 616104
cuucgauuaacgaaccggc

SEQ ID NO: 616106 - RNA, 19 nt, Artificial Sequence
  Description of Artificial Sequence: Synthetic oligonucleotide
  Sense strand starting at position 939 of SEQ ID NO: 585136
ccgguucguuaaucgaaga

SEQ ID NO: 616107 - RNA, 19 nt, Artificial Sequence
  Description of Artificial Sequence: Synthetic oligonucleotide
  Antisense strand to SEQ ID NO: 616106
ucuucgauuaacgaaccgg

SEQ ID NO: 616108 - RNA, 19 nt, Artificial Sequence
  Description of Artificial Sequence: Synthetic oligonucleotide
  Sense strand starting at position 940 of SEQ ID NO: 585136
cgguucguuaaucgaagaa

SEQ ID NO: 616109 - RNA, 19 nt, Artificial Sequence
  Description of Artificial Sequence: Synthetic oligonucleotide
  Antisense strand to SEQ ID NO: 616108
uucuucgauuaacgaaccg

SEQ ID NO: 616110 - RNA, 19 nt, Artificial Sequence
  Description of Artificial Sequence: Synthetic oligonucleotide
  Sense strand starting at position 2264 of SEQ ID NO: 585136
ucucuuaccucccgagaaa

SEQ ID NO: 616111 - RNA, 19 nt, Artificial Sequence
  Description of Artificial Sequence: Synthetic oligonucleotide
  Antisense strand to SEQ ID NO: 616110
uuucucgggagguaagaga

SEQ ID NO: 616112 - RNA, 19 nt, Artificial Sequence
  Description of Artificial Sequence: Synthetic oligonucleotide
  Sense strand starting at position 2265 of SEQ ID NO: 585136
cucuuaccucccgagaaau

SEQ ID NO: 616113 - RNA, 19 nt, Artificial Sequence
  Description of Artificial Sequence: Synthetic oligonucleotide
  Antisense strand to SEQ ID NO: 616112
auuucucgggagguaagag

SEQ ID NO: 616114 - RNA, 19 nt, Artificial Sequence
  Description of Artificial Sequence: Synthetic oligonucleotide
  Sense strand starting at position 2275 of SEQ ID NO: 585136
ccgagaaauuaaugccuaa

SEQ ID NO: 616115 - RNA, 19 nt, Artificial Sequence
  Description of Artificial Sequence: Synthetic oligonucleotide
  Antisense strand to SEQ ID NO: 616114
uuaggcauuaauuucucgg

SEQ ID NO: 616116 - RNA, 19 nt, Artificial Sequence
  Description of Artificial Sequence: Synthetic oligonucleotide
  Sense strand starting at position 2278 of SEQ ID NO: 585136
agaaauuaaugccuaagca

SEQ ID NO: 616117 - RNA, 19 nt, Artificial Sequence
  Description of Artificial Sequence: Synthetic oligonucleotide
  Antisense strand to SEQ ID NO: 616116
ugcuuaggcauuaauuucu

SEQ ID NO: 616118 - RNA, 19 nt, Artificial Sequence
  Description of Artificial Sequence: Synthetic oligonucleotide
  Sense strand starting at position 2314 of SEQ ID NO: 585136
ucuguaucgucucucugaa

SEQ ID NO: 616119 - RNA, 19 nt, Artificial Sequence
  Description of Artificial Sequence: Synthetic oligonucleotide
  Antisense strand to SEQ ID NO: 616118
uucagagagacgauacaga

SEQ ID NO: 616120 - RNA, 19 nt, Artificial Sequence
  Description of Artificial Sequence: Synthetic oligonucleotide
  Sense strand starting at position 2918 of SEQ ID NO: 585136
cugaguucuuccgccaacu

SEQ ID NO: 616121 - RNA, 19 nt, Artificial Sequence
  Description of Artificial Sequence: Synthetic oligonucleotide
  Antisense strand to SEQ ID NO: 616120
aguuggcggaagaacucag

SEQ ID NO: 616122 - RNA, 19 nt, Artificial Sequence
  Description of Artificial Sequence: Synthetic oligonucleotide
  Sense strand starting at position 2959 of SEQ ID NO: 585136
gauggcuaccucugaguua

SEQ ID NO: 616123 - RNA, 19 nt, Artificial Sequence
  Description of Artificial Sequence: Synthetic oligonucleotide
  Antisense strand to SEQ ID NO: 616122
uaacucagagguagccauc

SEQ ID NO: 616124 - RNA, 19 nt, Artificial Sequence
  Description of Artificial Sequence: Synthetic oligonucleotide
  Sense strand starting at position 2970 of SEQ ID NO: 585136
cugaguuacucccauagag

SEQ ID NO: 616125 - RNA, 19 nt, Artificial Sequence
  Description of Artificial Sequence: Synthetic oligonucleotide
  Antisense strand to SEQ ID NO: 616124
cucuaugggaguaacucag

SEQ ID NO: 616126 - RNA, 19 nt, Artificial Sequence
  Description of Artificial Sequence: Synthetic oligonucleotide
  Sense strand starting at position 3077 of SEQ ID NO: 585136
acacgugggaccuaauagu

SEQ ID NO: 616127 - RNA, 19 nt, Artificial Sequence
  Description of Artificial Sequence: Synthetic oligonucleotide
  Antisense strand to SEQ ID NO: 616126
acuauuaggucccacgugu

SEQ ID NO: 616128 - RNA, 19 nt, Artificial Sequence
  Description of Artificial Sequence: Synthetic oligonucleotide
  Sense strand starting at position 3083 of SEQ ID NO: 585136
gggaccuaauaguuaccua

SEQ ID NO: 616129 - RNA, 19 nt, Artificial Sequence
  Description of Artificial Sequence: Synthetic oligonucleotide
  Antisense strand to SEQ ID NO: 616128
uagguaacuauuagguccc

SEQ ID NO: 616130 - RNA, 19 nt, Artificial Sequence
  Description of Artificial Sequence: Synthetic oligonucleotide
  Sense strand starting at position 3087 of SEQ ID NO: 585136
ccuaauaguuaccuaugga

SEQ ID NO: 616131 - RNA, 19 nt, Artificial Sequence
  Description of Artificial Sequence: Synthetic oligonucleotide
  Antisense strand to SEQ ID NO: 616130
uccauagguaacuauuagg

SEQ ID NO: 616132 - RNA, 19 nt, Artificial Sequence
  Description of Artificial Sequence: Synthetic oligonucleotide
  Sense strand starting at position 3192 of SEQ ID NO: 585136
ugaagagccucguccagaa

SEQ ID NO: 616133 - RNA, 19 nt, Artificial Sequence
  Description of Artificial Sequence: Synthetic oligonucleotide
  Antisense strand to SEQ ID NO: 616132
uucuggacgaggcucuuca

SEQ ID NO: 616134 - RNA, 19 nt, Artificial Sequence
  Description of Artificial Sequence: Synthetic oligonucleotide
  Sense strand starting at position 3194 of SEQ ID NO: 585136
aagagccucguccagaaau

SEQ ID NO: 616135 - RNA, 19 nt, Artificial Sequence
  Description of Artificial Sequence: Synthetic oligonucleotide
  Antisense strand to SEQ ID NO: 616134
auuucuggacgaggcucuu

SEQ ID NO: 616136 - RNA, 19 nt, Artificial Sequence
  Description of Artificial Sequence: Synthetic oligonucleotide
  Sense strand starting at position 3537 of SEQ ID NO: 585136
gggugaugaugucugcaga

SEQ ID NO: 616137 - RNA, 19 nt, Artificial Sequence
  Description of Artificial Sequence: Synthetic oligonucleotide
  Antisense strand to SEQ ID NO: 616136
ucugcagacaucaucaccc

SEQ ID NO: 616138 - RNA, 19 nt, Artificial Sequence
  Description of Artificial Sequence: Synthetic oligonucleotide
  Sense strand starting at position 3538 of SEQ ID NO: 585136
ggugaugaugucugcagaa

SEQ ID NO: 616139 - RNA, 19 nt, Artificial Sequence
  Description of Artificial Sequence: Synthetic oligonucleotide
  Antisense strand to SEQ ID NO: 616138
uucugcagacaucaucacc

SEQ ID NO: 616140 - RNA, 19 nt, Artificial Sequence
  Description of Artificial Sequence: Synthetic oligonucleotide
  Sense strand starting at position 3598 of SEQ ID NO: 585136
gguucugucucagucauuu

SEQ ID NO: 616141 - RNA, 19 nt, Artificial Sequence
  Description of Artificial Sequence: Synthetic oligonucleotide
  Antisense strand to SEQ ID NO: 616140
aaaugacugagacagaacc

SEQ ID NO: 616142 - RNA, 19 nt, Artificial Sequence
  Description of Artificial Sequence: Synthetic oligonucleotide
  Sense strand starting at position 3604 of SEQ ID NO: 585136
gucucagucauuugucugu

SEQ ID NO: 616143 - RNA, 19 nt, Artificial Sequence
  Description of Artificial Sequence: Synthetic oligonucleotide
  Antisense strand to SEQ ID NO: 616142
acagacaaaugacugagac

SEQ ID NO: 616144 - RNA, 19 nt, Artificial Sequence
  Description of Artificial Sequence: Synthetic oligonucleotide
  Sense strand starting at position 3609 of SEQ ID NO: 585136
agucauuugucuguccuca

SEQ ID NO: 616145 - RNA, 19 nt, Artificial Sequence
  Description of Artificial Sequence: Synthetic oligonucleotide
  Antisense strand to SEQ ID NO: 616144
ugaggacagacaaaugacu

SEQ ID NO: 616146 - RNA, 19 nt, Artificial Sequence
  Description of Artificial Sequence: Synthetic oligonucleotide
  Sense strand starting at position 3611 of SEQ ID NO: 585136
ucauuugucuguccucagu

SEQ ID NO: 616147 - RNA, 19 nt, Artificial Sequence
  Description of Artificial Sequence: Synthetic oligonucleotide
  Antisense strand to SEQ ID NO: 616146
acugaggacagacaaauga

SEQ ID NO: 616148 - RNA, 19 nt, Artificial Sequence
  Description of Artificial Sequence: Synthetic oligonucleotide
  Sense strand starting at position 3631 of SEQ ID NO: 585136
ccuagaagcuucccuguuu

SEQ ID NO: 616149 - RNA, 19 nt, Artificial Sequence
  Description of Artificial Sequence: Synthetic oligonucleotide
  Antisense strand to SEQ ID NO: 616148
aaacagggaagcuucuagg

SEQ ID NO: 616150 - RNA, 19 nt, Artificial Sequence
  Description of Artificial Sequence: Synthetic oligonucleotide
  Sense strand starting at position 3632 of SEQ ID NO: 585136
cuagaagcuucccuguuua

SEQ ID NO: 616151 - RNA, 19 nt, Artificial Sequence
  Description of Artificial Sequence: Synthetic oligonucleotide
  Antisense strand to SEQ ID NO: 616150
uaaacagggaagcuucuag

SEQ ID NO: 616152 - RNA, 19 nt, Artificial Sequence
  Description of Artificial Sequence: Synthetic oligonucleotide
  Sense strand starting at position 46 of SEQ ID NO: 585137
ugcugagcacgugaaucaa

SEQ ID NO: 616153 - RNA, 19 nt, Artificial Sequence
  Description of Artificial Sequence: Synthetic oligonucleotide
  Antisense strand to SEQ ID NO: 616152
uugauucacgugcucagca

SEQ ID NO: 616154 - RNA, 19 nt, Artificial Sequence
  Description of Artificial Sequence: Synthetic oligonucleotide
  Sense strand starting at position 112 of SEQ ID NO: 585137
ggaaguaacuuccagacag

SEQ ID NO: 616155 - RNA, 19 nt, Artificial Sequence
  Description of Artificial Sequence: Synthetic oligonucleotide
  Antisense strand to SEQ ID NO: 616154
cugucuggaaguuacuucc

SEQ ID NO: 616156 - RNA, 19 nt, Artificial Sequence
  Description of Artificial Sequence: Synthetic oligonucleotide
  Sense strand starting at position 170 of SEQ ID NO: 585137
gauaaagcgccugggagau

SEQ ID NO: 616157 - RNA, 19 nt, Artificial Sequence
  Description of Artificial Sequence: Synthetic oligonucleotide
  Antisense strand to SEQ ID NO: 616156
aucucccaggcgcuuuauc

SEQ ID NO: 616158 - RNA, 19 nt, Artificial Sequence
  Description of Artificial Sequence: Synthetic oligonucleotide
  Sense strand starting at position 185 of SEQ ID NO: 585137
agauguaguacccaguauu

SEQ ID NO: 616159 - RNA, 19 nt, Artificial Sequence
  Description of Artificial Sequence: Synthetic oligonucleotide
  Antisense strand to SEQ ID NO: 616158
aauacuggguacuacaucu

SEQ ID NO: 616160 - RNA, 19 nt, Artificial Sequence
  Description of Artificial Sequence: Synthetic oligonucleotide
  Sense strand starting at position 188 of SEQ ID NO: 585137
uguaguacccaguauuaag

SEQ ID NO: 616161 - RNA, 19 nt, Artificial Sequence
  Description of Artificial Sequence: Synthetic oligonucleotide
  Antisense strand to SEQ ID NO: 616160
cuuaauacuggguacuaca

SEQ ID NO: 616162 - RNA, 19 nt, Artificial Sequence
  Description of Artificial Sequence: Synthetic oligonucleotide
  Sense strand starting at position 228 of SEQ ID NO: 585137
cuacuaaguuuaguuuaga

SEQ ID NO: 616163 - RNA, 19 nt, Artificial Sequence
  Description of Artificial Sequence: Synthetic oligonucleotide
  Antisense strand to SEQ ID NO: 616162
ucuaaacuaaacuuaguag

SEQ ID NO: 616164 - RNA, 19 nt, Artificial Sequence
  Description of Artificial Sequence: Synthetic oligonucleotide
  Sense strand starting at position 251 of SEQ ID NO: 585137
uucuauguguccucggaga

SEQ ID NO: 616165 - RNA, 19 nt, Artificial Sequence
  Description of Artificial Sequence: Synthetic oligonucleotide
  Antisense strand to SEQ ID NO: 616164
ucuccgaggacacauagaa

SEQ ID NO: 616166 - RNA, 19 nt, Artificial Sequence
  Description of Artificial Sequence: Synthetic oligonucleotide
  Sense strand starting at position 253 of SEQ ID NO: 585137
cuauguguccucggagaua

SEQ ID NO: 616167 - RNA, 19 nt, Artificial Sequence
  Description of Artificial Sequence: Synthetic oligonucleotide
  Antisense strand to SEQ ID NO: 616166
uaucuccgaggacacauag

SEQ ID NO: 616168 - RNA, 19 nt, Artificial Sequence
  Description of Artificial Sequence: Synthetic oligonucleotide
  Sense strand starting at position 256 of SEQ ID NO: 585137
uguguccucggagauagau

SEQ ID NO: 616169 - RNA, 19 nt, Artificial Sequence
  Description of Artificial Sequence: Synthetic oligonucleotide
  Antisense strand to SEQ ID NO: 616168
aucuaucuccgaggacaca

SEQ ID NO: 616170 - RNA, 19 nt, Artificial Sequence
  Description of Artificial Sequence: Synthetic oligonucleotide
  Sense strand starting at position 715 of SEQ ID NO: 585137
gccagauuggcaugaagga

SEQ ID NO: 616171 - RNA, 19 nt, Artificial Sequence
  Description of Artificial Sequence: Synthetic oligonucleotide
  Antisense strand to SEQ ID NO: 616170
uccuucaugccaaucuggc

SEQ ID NO: 616172 - RNA, 19 nt, Artificial Sequence
  Description of Artificial Sequence: Synthetic oligonucleotide
  Sense strand starting at position 814 of SEQ ID NO: 585137
ggguucccagcucgaaaua

SEQ ID NO: 616173 - RNA, 19 nt, Artificial Sequence
  Description of Artificial Sequence: Synthetic oligonucleotide
  Antisense strand to SEQ ID NO: 616172
uauuucgagcugggaaccc

SEQ ID NO: 616174 - RNA, 19 nt, Artificial Sequence
  Description of Artificial Sequence: Synthetic oligonucleotide
  Sense strand starting at position 894 of SEQ ID NO: 585137
ccaggagucucggccuuga

SEQ ID NO: 616175 - RNA, 19 nt, Artificial Sequence
  Description of Artificial Sequence: Synthetic oligonucleotide
  Antisense strand to SEQ ID NO: 616174
ucaaggccgagacuccugg

SEQ ID NO: 616176 - RNA, 19 nt, Artificial Sequence
  Description of Artificial Sequence: Synthetic oligonucleotide
  Sense strand starting at position 1001 of SEQ ID NO: 585137
agcauuucucuaugagcuc

SEQ ID NO: 616177 - RNA, 19 nt, Artificial Sequence
  Description of Artificial Sequence: Synthetic oligonucleotide
  Antisense strand to SEQ ID NO: 616176
gagcucauagagaaaugcu

SEQ ID NO: 616178 - RNA, 19 nt, Artificial Sequence
  Description of Artificial Sequence: Synthetic oligonucleotide
  Sense strand starting at position 1130 of SEQ ID NO: 585137
cuaguuuggguuuguccaa

SEQ ID NO: 616179 - RNA, 19 nt, Artificial Sequence
  Description of Artificial Sequence: Synthetic oligonucleotide
  Antisense strand to SEQ ID NO: 616178
uuggacaaacccaaacuag

SEQ ID NO: 616180 - RNA, 19 nt, Artificial Sequence
  Description of Artificial Sequence: Synthetic oligonucleotide
  Sense strand starting at position 1147 of SEQ ID NO: 585137
aagccauggccacggauua

SEQ ID NO: 616181 - RNA, 19 nt, Artificial Sequence
  Description of Artificial Sequence: Synthetic oligonucleotide
  Antisense strand to SEQ ID NO: 616180
uaauccguggccauggcuu

SEQ ID NO: 616182 - RNA, 19 nt, Artificial Sequence
  Description of Artificial Sequence: Synthetic oligonucleotide
  Sense strand starting at position 1160 of SEQ ID NO: 585137
ggauuacgaucuucuugac

SEQ ID NO: 616183 - RNA, 19 nt, Artificial Sequence
  Description of Artificial Sequence: Synthetic oligonucleotide
  Antisense strand to SEQ ID NO: 616182
gucaagaagaucguaaucc

SEQ ID NO: 616184 - RNA, 19 nt, Artificial Sequence
  Description of Artificial Sequence: Synthetic oligonucleotide
  Sense strand starting at position 1226 of SEQ ID NO: 585137
cuggcaucugacugguuga

SEQ ID NO: 616185 - RNA, 19 nt, Artificial Sequence
  Description of Artificial Sequence: Synthetic oligonucleotide
  Antisense strand to SEQ ID NO: 616184
ucaaccagucagaugccag

SEQ ID NO: 616186 - RNA, 19 nt, Artificial Sequence
  Description of Artificial Sequence: Synthetic oligonucleotide
  Sense strand starting at position 1227 of SEQ ID NO: 585137
uggcaucugacugguugau

SEQ ID NO: 616187 - RNA, 19 nt, Artificial Sequence
  Description of Artificial Sequence: Synthetic oligonucleotide
  Antisense strand to SEQ ID NO: 616186
aucaaccagucagaugcca

SEQ ID NO: 616188 - RNA, 19 nt, Artificial Sequence
  Description of Artificial Sequence: Synthetic oligonucleotide
  Sense strand starting at position 1233 of SEQ ID NO: 585137
cugacugguugauccauga

SEQ ID NO: 616189 - RNA, 19 nt, Artificial Sequence
  Description of Artificial Sequence: Synthetic oligonucleotide
  Antisense strand to SEQ ID NO: 616188
ucauggaucaaccagucag

SEQ ID NO: 616190 - RNA, 19 nt, Artificial Sequence
  Description of Artificial Sequence: Synthetic oligonucleotide
  Sense strand starting at position 1237 of SEQ ID NO: 585137
cugguugauccaugagacu

SEQ ID NO: 616191 - RNA, 19 nt, Artificial Sequence
  Description of Artificial Sequence: Synthetic oligonucleotide
  Antisense strand to SEQ ID NO: 616190
agucucauggaucaaccag

SEQ ID NO: 616192 - RNA, 19 nt, Artificial Sequence
  Description of Artificial Sequence: Synthetic oligonucleotide
  Sense strand starting at position 1297 of SEQ ID NO: 585137
ccuugaguaugcucuagaa

SEQ ID NO: 616193 - RNA, 19 nt, Artificial Sequence
  Description of Artificial Sequence: Synthetic oligonucleotide
  Antisense strand to SEQ ID NO: 616192
uucuagagcauacucaagg

SEQ ID NO: 616194 - RNA, 19 nt, Artificial Sequence
  Description of Artificial Sequence: Synthetic oligonucleotide
  Sense strand starting at position 1299 of SEQ ID NO: 585137
uugaguaugcucuagaauu

SEQ ID NO: 616195 - RNA, 19 nt, Artificial Sequence
  Description of Artificial Sequence: Synthetic oligonucleotide
  Antisense strand to SEQ ID NO: 616194
aauucuagagcauacucaa

SEQ ID NO: 616196 - RNA, 19 nt, Artificial Sequence
  Description of Artificial Sequence: Synthetic oligonucleotide
  Sense strand starting at position 1399 of SEQ ID NO: 585137
gaaucaagguucucccgaa

SEQ ID NO: 616197 - RNA, 19 nt, Artificial Sequence
  Description of Artificial Sequence: Synthetic oligonucleotide
  Antisense strand to SEQ ID NO: 616196
uucgggagaaccuugauuc

SEQ ID NO: 616198 - RNA, 19 nt, Artificial Sequence
  Description of Artificial Sequence: Synthetic oligonucleotide
  Sense strand starting at position 1403 of SEQ ID NO: 585137
caagguucucccgaagguu

SEQ ID NO: 616199 - RNA, 19 nt, Artificial Sequence
  Description of Artificial Sequence: Synthetic oligonucleotide
  Antisense strand to SEQ ID NO: 616198
aaccuucgggagaaccuug

SEQ ID NO: 616200 - RNA, 19 nt, Artificial Sequence
  Description of Artificial Sequence: Synthetic oligonucleotide
  Sense strand starting at position 1742 of SEQ ID NO: 585137
cacaauucccugcgguuaa

SEQ ID NO: 616201 - RNA, 19 nt, Artificial Sequence
  Description of Artificial Sequence: Synthetic oligonucleotide
  Antisense strand to SEQ ID NO: 616200
uuaaccgcagggaauugug

SEQ ID NO: 616202 - RNA, 19 nt, Artificial Sequence
  Description of Artificial Sequence: Synthetic oligonucleotide
  Sense strand starting at position 1785 of SEQ ID NO: 585137
ccggucgggucaauaagua

SEQ ID NO: 616203 - RNA, 19 nt, Artificial Sequence
  Description of Artificial Sequence: Synthetic oligonucleotide
  Antisense strand to SEQ ID NO: 616202
uacuuauugacccgaccgg

SEQ ID NO: 616204 - RNA, 19 nt, Artificial Sequence
  Description of Artificial Sequence: Synthetic oligonucleotide
  Sense strand starting at position 1967 of SEQ ID NO: 585137
cggaacaacugggaaagau

SEQ ID NO: 616205 - RNA, 19 nt, Artificial Sequence
  Description of Artificial Sequence: Synthetic oligonucleotide
  Antisense strand to SEQ ID NO: 616204
aucuuucccaguuguuccg

SEQ ID NO: 616206 - RNA, 19 nt, Artificial Sequence
  Description of Artificial Sequence: Synthetic oligonucleotide
  Sense strand starting at position 2015 of SEQ ID NO: 585137
cuccgaaucuagucaaauu

SEQ ID NO: 616207 - RNA, 19 nt, Artificial Sequence
  Description of Artificial Sequence: Synthetic oligonucleotide
  Antisense strand to SEQ ID NO: 616206
aauuugacuagauucggag

SEQ ID NO: 616208 - RNA, 19 nt, Artificial Sequence
  Description of Artificial Sequence: Synthetic oligonucleotide
  Sense strand starting at position 2075 of SEQ ID NO: 585137
gccuauugaacgugacauc

SEQ ID NO: 616209 - RNA, 19 nt, Artificial Sequence
  Description of Artificial Sequence: Synthetic oligonucleotide
  Antisense strand to SEQ ID NO: 616208
gaugucacguucaauaggc

SEQ ID NO: 616210 - RNA, 19 nt, Artificial Sequence
  Description of Artificial Sequence: Synthetic oligonucleotide
  Sense strand starting at position 2076 of SEQ ID NO: 585137
ccuauugaacgugacauca

SEQ ID NO: 616211 - RNA, 19 nt, Artificial Sequence
  Description of Artificial Sequence: Synthetic oligonucleotide
  Antisense strand to SEQ ID NO: 616210
ugaugucacguucaauagg

SEQ ID NO: 616212 - RNA, 19 nt, Artificial Sequence
  Description of Artificial Sequence: Synthetic oligonucleotide
  Sense strand starting at position 2399 of SEQ ID NO: 585137
acuagagacuccgucucaa

SEQ ID NO: 616213 - RNA, 19 nt, Artificial Sequence
  Description of Artificial Sequence: Synthetic oligonucleotide
  Antisense strand to SEQ ID NO: 616212
uugagacggagucucuagu

SEQ ID NO: 616214 - RNA, 19 nt, Artificial Sequence
  Description of Artificial Sequence: Synthetic oligonucleotide
  Sense strand starting at position 3312 of SEQ ID NO: 585137
agucaaaguguagagaagu

SEQ ID NO: 616215 - RNA, 19 nt, Artificial Sequence
  Description of Artificial Sequence: Synthetic oligonucleotide
  Antisense strand to SEQ ID NO: 616214
acuucucuacacuuugacu

SEQ ID NO: 616216 - RNA, 19 nt, Artificial Sequence
  Description of Artificial Sequence: Synthetic oligonucleotide
  Sense strand starting at position 3374 of SEQ ID NO: 585137
ggcagaggucgugguaaau

SEQ ID NO: 616217 - RNA, 19 nt, Artificial Sequence
  Description of Artificial Sequence: Synthetic oligonucleotide
  Antisense strand to SEQ ID NO: 616216
auuuaccacgaccucugcc

SEQ ID NO: 616218 - RNA, 19 nt, Artificial Sequence
  Description of Artificial Sequence: Synthetic oligonucleotide
  Sense strand starting at position 3380 of SEQ ID NO: 585137
ggucgugguaaaugauagu

SEQ ID NO: 616219 - RNA, 19 nt, Artificial Sequence
  Description of Artificial Sequence: Synthetic oligonucleotide
  Antisense strand to SEQ ID NO: 616218
acuaucauuuaccacgacc

SEQ ID NO: 616220 - RNA, 19 nt, Artificial Sequence
  Description of Artificial Sequence: Synthetic oligonucleotide
  Sense strand starting at position 3472 of SEQ ID NO: 585137
caggguguucuccaggaua

SEQ ID NO: 616221 - RNA, 19 nt, Artificial Sequence
  Description of Artificial Sequence: Synthetic oligonucleotide
  Antisense strand to SEQ ID NO: 616220
uauccuggagaacacccug

SEQ ID NO: 616222 - RNA, 19 nt, Artificial Sequence
  Description of Artificial Sequence: Synthetic oligonucleotide
  Sense strand starting at position 3529 of SEQ ID NO: 585137
gggugacuaccugaggcuu

SEQ ID NO: 616223 - RNA, 19 nt, Artificial Sequence
  Description of Artificial Sequence: Synthetic oligonucleotide
  Antisense strand to SEQ ID NO: 616222
aagccucagguagucaccc

SEQ ID NO: 616224 - RNA, 19 nt, Artificial Sequence
  Description of Artificial Sequence: Synthetic oligonucleotide
  Sense strand starting at position 3540 of SEQ ID NO: 585137
ugaggcuucucuuuaccuu

SEQ ID NO: 616225 - RNA, 19 nt, Artificial Sequence
  Description of Artificial Sequence: Synthetic oligonucleotide
  Antisense strand to SEQ ID NO: 616224
aagguaaagagaagccuca

SEQ ID NO: 616226 - RNA, 19 nt, Artificial Sequence
  Description of Artificial Sequence: Synthetic oligonucleotide
  Sense strand starting at position 3655 of SEQ ID NO: 585137
uguuaaguugcagauuaug

SEQ ID NO: 616227 - RNA, 19 nt, Artificial Sequence
  Description of Artificial Sequence: Synthetic oligonucleotide
  Antisense strand to SEQ ID NO: 616226
cauaaucugcaacuuaaca

SEQ ID NO: 616228 - RNA, 19 nt, Artificial Sequence
  Description of Artificial Sequence: Synthetic oligonucleotide
  Sense strand starting at position 3658 of SEQ ID NO: 585137
uaaguugcagauuaugauu

SEQ ID NO: 616229 - RNA, 19 nt, Artificial Sequence
  Description of Artificial Sequence: Synthetic oligonucleotide
  Antisense strand to SEQ ID NO: 616228
aaucauaaucugcaacuua

SEQ ID NO: 616230 - RNA, 19 nt, Artificial Sequence
  Description of Artificial Sequence: Synthetic oligonucleotide
  Sense strand starting at position 3667 of SEQ ID NO: 585137
gauuaugauuuaggaaguc

SEQ ID NO: 616231 - RNA, 19 nt, Artificial Sequence
  Description of Artificial Sequence: Synthetic oligonucleotide
  Antisense strand to SEQ ID NO: 616230
gacuuccuaaaucauaauc

SEQ ID NO: 616232 - RNA, 19 nt, Artificial Sequence
  Description of Artificial Sequence: Synthetic oligonucleotide
  Sense strand starting at position 10 of SEQ ID NO: 585138
ucgugaauguccuucagag

SEQ ID NO: 616233 - RNA, 19 nt, Artificial Sequence
  Description of Artificial Sequence: Synthetic oligonucleotide
  Antisense strand to SEQ ID NO: 616232
cucugaaggacauucacga

SEQ ID NO: 616234 - RNA, 19 nt, Artificial Sequence
  Description of Artificial Sequence: Synthetic oligonucleotide
  Sense strand starting at position 12 of SEQ ID NO: 585138
gugaauguccuucagagug

SEQ ID NO: 616235 - RNA, 19 nt, Artificial Sequence
  Description of Artificial Sequence: Synthetic oligonucleotide
  Antisense strand to SEQ ID NO: 616234
cacucugaaggacauucac

SEQ ID NO: 616236 - RNA, 19 nt, Artificial Sequence
  Description of Artificial Sequence: Synthetic oligonucleotide
  Sense strand starting at position 92 of SEQ ID NO: 585138
cugagaauuucugccuguc

SEQ ID NO: 616237 - RNA, 19 nt, Artificial Sequence
  Description of Artificial Sequence: Synthetic oligonucleotide
  Antisense strand to SEQ ID NO: 616236
gacaggcagaaauucucag

SEQ ID NO: 616238 - RNA, 19 nt, Artificial Sequence
  Description of Artificial Sequence: Synthetic oligonucleotide
  Sense strand starting at position 94 of SEQ ID NO: 585138
gagaauuucugccuguccu

SEQ ID NO: 616239 - RNA, 19 nt, Artificial Sequence
  Description of Artificial Sequence: Synthetic oligonucleotide
  Antisense strand to SEQ ID NO: 616238
aggacaggcagaaauucuc

SEQ ID NO: 616240 - RNA, 19 nt, Artificial Sequence
  Description of Artificial Sequence: Synthetic oligonucleotide
  Sense strand starting at position 95 of SEQ ID NO: 585138
agaauuucugccuguccuu

SEQ ID NO: 616241 - RNA, 19 nt, Artificial Sequence
  Description of Artificial Sequence: Synthetic oligonucleotide
  Antisense strand to SEQ ID NO: 616240
aaggacaggcagaaauucu

SEQ ID NO: 616242 - RNA, 19 nt, Artificial Sequence
  Description of Artificial Sequence: Synthetic oligonucleotide
  Sense strand starting at position 98 of SEQ ID NO: 585138
auuucugccuguccuuaua

SEQ ID NO: 616243 - RNA, 19 nt, Artificial Sequence
  Description of Artificial Sequence: Synthetic oligonucleotide
  Antisense strand to SEQ ID NO: 616242
uauaaggacaggcagaaau

SEQ ID NO: 616244 - RNA, 19 nt, Artificial Sequence
  Description of Artificial Sequence: Synthetic oligonucleotide
  Sense strand starting at position 100 of SEQ ID NO: 585138
uucugccuguccuuauaga

SEQ ID NO: 616245 - RNA, 19 nt, Artificial Sequence
  Description of Artificial Sequence: Synthetic oligonucleotide
  Antisense strand to SEQ ID NO: 616244
ucuauaaggacaggcagaa

SEQ ID NO: 616246 - RNA, 19 nt, Artificial Sequence
  Description of Artificial Sequence: Synthetic oligonucleotide
  Sense strand starting at position 101 of SEQ ID NO: 585138
ucugccuguccuuauagau

SEQ ID NO: 616247 - RNA, 19 nt, Artificial Sequence
  Description of Artificial Sequence: Synthetic oligonucleotide
  Antisense strand to SEQ ID NO: 616246
aucuauaaggacaggcaga

SEQ ID NO: 616248 - RNA, 19 nt, Artificial Sequence
  Description of Artificial Sequence: Synthetic oligonucleotide
  Sense strand starting at position 110 of SEQ ID NO: 585138
ccuuauagaucuccuguga

SEQ ID NO: 616249 - RNA, 19 nt, Artificial Sequence
  Description of Artificial Sequence: Synthetic oligonucleotide
  Antisense strand to SEQ ID NO: 616248
ucacaggagaucuauaagg

SEQ ID NO: 616250 - RNA, 19 nt, Artificial Sequence
  Description of Artificial Sequence: Synthetic oligonucleotide
  Sense strand starting at position 114 of SEQ ID NO: 585138
auagaucuccugugauaac

SEQ ID NO: 616251 - RNA, 19 nt, Artificial Sequence
  Description of Artificial Sequence: Synthetic oligonucleotide
  Antisense strand to SEQ ID NO: 616250
guuaucacaggagaucuau

SEQ ID NO: 616252 - RNA, 19 nt, Artificial Sequence
  Description of Artificial Sequence: Synthetic oligonucleotide
  Sense strand starting at position 410 of SEQ ID NO: 585138
cgggauguaugcucuugga

SEQ ID NO: 616253 - RNA, 19 nt, Artificial Sequence
  Description of Artificial Sequence: Synthetic oligonucleotide
  Antisense strand to SEQ ID NO: 616252
uccaagagcauacaucccg

SEQ ID NO: 616254 - RNA, 19 nt, Artificial Sequence
  Description of Artificial Sequence: Synthetic oligonucleotide
  Sense strand starting at position 477 of SEQ ID NO: 585138
gacauccuuccagaugguu

SEQ ID NO: 616255 - RNA, 19 nt, Artificial Sequence
  Description of Artificial Sequence: Synthetic oligonucleotide
  Antisense strand to SEQ ID NO: 616254
aaccaucuggaaggauguc

SEQ ID NO: 616256 - RNA, 19 nt, Artificial Sequence
  Description of Artificial Sequence: Synthetic oligonucleotide
  Sense strand starting at position 825 of SEQ ID NO: 585138
ggaacuucucugcaggcaa

SEQ ID NO: 616257 - RNA, 19 nt, Artificial Sequence
  Description of Artificial Sequence: Synthetic oligonucleotide
  Antisense strand to SEQ ID NO: 616256
uugccugcagagaaguucc

SEQ ID NO: 616258 - RNA, 19 nt, Artificial Sequence
  Description of Artificial Sequence: Synthetic oligonucleotide
  Sense strand starting at position 858 of SEQ ID NO: 585138
guggccagaagaugucuua

SEQ ID NO: 616259 - RNA, 19 nt, Artificial Sequence
  Description of Artificial Sequence: Synthetic oligonucleotide
  Antisense strand to SEQ ID NO: 616258
uaagacaucuucuggccac

SEQ ID NO: 616260 - RNA, 19 nt, Artificial Sequence
  Description of Artificial Sequence: Synthetic oligonucleotide
  Sense strand starting at position 861 of SEQ ID NO: 585138
gccagaagaugucuuaaug

SEQ ID NO: 616261 - RNA, 19 nt, Artificial Sequence
  Description of Artificial Sequence: Synthetic oligonucleotide
  Antisense strand to SEQ ID NO: 616260
cauuaagacaucuucuggc

SEQ ID NO: 616262 - RNA, 19 nt, Artificial Sequence
  Description of Artificial Sequence: Synthetic oligonucleotide
  Sense strand starting at position 870 of SEQ ID NO: 585138
ugucuuaaugucugggaga

SEQ ID NO: 616263 - RNA, 19 nt, Artificial Sequence
  Description of Artificial Sequence: Synthetic oligonucleotide
  Antisense strand to SEQ ID NO: 616262
ucucccagacauuaagaca

SEQ ID NO: 616264 - RNA, 19 nt, Artificial Sequence
  Description of Artificial Sequence: Synthetic oligonucleotide
  Sense strand starting at position 872 of SEQ ID NO: 585138
ucuuaaugucugggagaga

SEQ ID NO: 616265 - RNA, 19 nt, Artificial Sequence
  Description of Artificial Sequence: Synthetic oligonucleotide
  Antisense strand to SEQ ID NO: 616264
ucucucccagacauuaaga

SEQ ID NO: 616266 - RNA, 19 nt, Artificial Sequence
  Description of Artificial Sequence: Synthetic oligonucleotide
  Sense strand starting at position 873 of SEQ ID NO: 585138
cuuaaugucugggagagag

SEQ ID NO: 616267 - RNA, 19 nt, Artificial Sequence
  Description of Artificial Sequence: Synthetic oligonucleotide
  Antisense strand to SEQ ID NO: 616266
cucucucccagacauuaag

SEQ ID NO: 616268 - RNA, 19 nt, Artificial Sequence
  Description of Artificial Sequence: Synthetic oligonucleotide
  Sense strand starting at position 940 of SEQ ID NO: 585138
gggcaaugccagugacuga

SEQ ID NO: 616269 - RNA, 19 nt, Artificial Sequence
  Description of Artificial Sequence: Synthetic oligonucleotide
  Antisense strand to SEQ ID NO: 616268
ucagucacuggcauugccc

SEQ ID NO: 616270 - RNA, 19 nt, Artificial Sequence
  Description of Artificial Sequence: Synthetic oligonucleotide
  Sense strand starting at position 1004 of SEQ ID NO: 585138
gagggucaguguguugaga

SEQ ID NO: 616271 - RNA, 19 nt, Artificial Sequence
  Description of Artificial Sequence: Synthetic oligonucleotide
  Antisense strand to SEQ ID NO: 616270
ucucaacacacugacccuc

SEQ ID NO: 616272 - RNA, 19 nt, Artificial Sequence
  Description of Artificial Sequence: Synthetic oligonucleotide
  Sense strand starting at position 1224 of SEQ ID NO: 585138
agagcuugaauguggaaga

SEQ ID NO: 616273 - RNA, 19 nt, Artificial Sequence
  Description of Artificial Sequence: Synthetic oligonucleotide
  Antisense strand to SEQ ID NO: 616272
ucuuccacauucaagcucu

SEQ ID NO: 616274 - RNA, 19 nt, Artificial Sequence
  Description of Artificial Sequence: Synthetic oligonucleotide
  Sense strand starting at position 1319 of SEQ ID NO: 585138
cuuggaauggugggaauca

SEQ ID NO: 616275 - RNA, 19 nt, Artificial Sequence
  Description of Artificial Sequence: Synthetic oligonucleotide
  Antisense strand to SEQ ID NO: 616274
ugauucccaccauuccaag

SEQ ID NO: 616276 - RNA, 19 nt, Artificial Sequence
  Description of Artificial Sequence: Synthetic oligonucleotide
  Sense strand starting at position 1320 of SEQ ID NO: 585138
uuggaauggugggaaucaa

SEQ ID NO: 616277 - RNA, 19 nt, Artificial Sequence
  Description of Artificial Sequence: Synthetic oligonucleotide
  Antisense strand to SEQ ID NO: 616276
uugauucccaccauuccaa

SEQ ID NO: 616278 - RNA, 19 nt, Artificial Sequence
  Description of Artificial Sequence: Synthetic oligonucleotide
  Sense strand starting at position 1343 of SEQ ID NO: 585138
ggcaguucguggccaucaa

SEQ ID NO: 616279 - RNA, 19 nt, Artificial Sequence
  Description of Artificial Sequence: Synthetic oligonucleotide
  Antisense strand to SEQ ID NO: 616278
uugauggccacgaacugcc

SEQ ID NO: 616280 - RNA, 19 nt, Artificial Sequence
  Description of Artificial Sequence: Synthetic oligonucleotide
  Sense strand starting at position 1541 of SEQ ID NO: 585138
agggaaagccuuugcggau

SEQ ID NO: 616281 - RNA, 19 nt, Artificial Sequence
  Description of Artificial Sequence: Synthetic oligonucleotide
  Antisense strand to SEQ ID NO: 616280
auccgcaaaggcuuucccu

SEQ ID NO: 616282 - RNA, 19 nt, Artificial Sequence
  Description of Artificial Sequence: Synthetic oligonucleotide
  Sense strand starting at position 1742 of SEQ ID NO: 585138
cucgccgcucccuuugaua

SEQ ID NO: 616283 - RNA, 19 nt, Artificial Sequence
  Description of Artificial Sequence: Synthetic oligonucleotide
  Antisense strand to SEQ ID NO: 616282
uaucaaagggagcggcgag

SEQ ID NO: 616284 - RNA, 19 nt, Artificial Sequence
  Description of Artificial Sequence: Synthetic oligonucleotide
  Sense strand starting at position 1744 of SEQ ID NO: 585138
cgccgcucccuuugauaaa

SEQ ID NO: 616285 - RNA, 19 nt, Artificial Sequence
  Description of Artificial Sequence: Synthetic oligonucleotide
  Antisense strand to SEQ ID NO: 616284
uuuaucaaagggagcggcg

SEQ ID NO: 616286 - RNA, 19 nt, Artificial Sequence
  Description of Artificial Sequence: Synthetic oligonucleotide
  Sense strand starting at position 2197 of SEQ ID NO: 585138
cccuucuugagccgggaau

SEQ ID NO: 616287 - RNA, 19 nt, Artificial Sequence
  Description of Artificial Sequence: Synthetic oligonucleotide
  Antisense strand to SEQ ID NO: 616286
auucccggcucaagaaggg

SEQ ID NO: 616288 - RNA, 19 nt, Artificial Sequence
  Description of Artificial Sequence: Synthetic oligonucleotide
  Sense strand starting at position 2490 of SEQ ID NO: 585138
gggagucggcgcuugcaaa

SEQ ID NO: 616289 - RNA, 19 nt, Artificial Sequence
  Description of Artificial Sequence: Synthetic oligonucleotide
  Antisense strand to SEQ ID NO: 616288
uuugcaagcgccgacuccc

SEQ ID NO: 616290 - RNA, 19 nt, Artificial Sequence
  Description of Artificial Sequence: Synthetic oligonucleotide
  Sense strand starting at position 2494 of SEQ ID NO: 585138
gucggcgcuugcaaagaua

SEQ ID NO: 616291 - RNA, 19 nt, Artificial Sequence
  Description of Artificial Sequence: Synthetic oligonucleotide
  Antisense strand to SEQ ID NO: 616290
uaucuuugcaagcgccgac

SEQ ID NO: 616292 - RNA, 19 nt, Artificial Sequence
  Description of Artificial Sequence: Synthetic oligonucleotide
  Sense strand starting at position 2650 of SEQ ID NO: 585138
auggaaggaucucacggau

SEQ ID NO: 616293 - RNA, 19 nt, Artificial Sequence
  Description of Artificial Sequence: Synthetic oligonucleotide
  Antisense strand to SEQ ID NO: 616292
auccgugagauccuuccau

SEQ ID NO: 616294 - RNA, 19 nt, Artificial Sequence
  Description of Artificial Sequence: Synthetic oligonucleotide
  Sense strand starting at position 2665 of SEQ ID NO: 585138
ggaucucauuccuaauggu

SEQ ID NO: 616295 - RNA, 19 nt, Artificial Sequence
  Description of Artificial Sequence: Synthetic oligonucleotide
  Antisense strand to SEQ ID NO: 616294
accauuaggaaugagaucc

SEQ ID NO: 616296 - RNA, 19 nt, Artificial Sequence
  Description of Artificial Sequence: Synthetic oligonucleotide
  Sense strand starting at position 2688 of SEQ ID NO: 585138
cgaagucucacacaguaga

SEQ ID NO: 616297 - RNA, 19 nt, Artificial Sequence
  Description of Artificial Sequence: Synthetic oligonucleotide
  Antisense strand to SEQ ID NO: 616296
ucuacugugugagacuucg

SEQ ID NO: 616298 - RNA, 19 nt, Artificial Sequence
  Description of Artificial Sequence: Synthetic oligonucleotide
  Sense strand starting at position 2714 of SEQ ID NO: 585138
aguugagaugcuggaggau

SEQ ID NO: 616299 - RNA, 19 nt, Artificial Sequence
  Description of Artificial Sequence: Synthetic oligonucleotide
  Antisense strand to SEQ ID NO: 616298
auccuccagcaucucaacu

SEQ ID NO: 616300 - RNA, 19 nt, Artificial Sequence
  Description of Artificial Sequence: Synthetic oligonucleotide
  Sense strand starting at position 3133 of SEQ ID NO: 585138
cgcuguaguguucugaguu

SEQ ID NO: 616301 - RNA, 19 nt, Artificial Sequence
  Description of Artificial Sequence: Synthetic oligonucleotide
  Antisense strand to SEQ ID NO: 616300
aacucagaacacuacagcg

SEQ ID NO: 616302 - RNA, 19 nt, Artificial Sequence
  Description of Artificial Sequence: Synthetic oligonucleotide
  Sense strand starting at position 3206 of SEQ ID NO: 585138
ugguguuucuuugugguuu

SEQ ID NO: 616303 - RNA, 19 nt, Artificial Sequence
  Description of Artificial Sequence: Synthetic oligonucleotide
  Antisense strand to SEQ ID NO: 616302
aaaccacaaagaaacacca

SEQ ID NO: 616304 - RNA, 19 nt, Artificial Sequence
  Description of Artificial Sequence: Synthetic oligonucleotide
  Sense strand starting at position 3271 of SEQ ID NO: 585138
ccggguguugcuggaggaa

SEQ ID NO: 616305 - RNA, 19 nt, Artificial Sequence
  Description of Artificial Sequence: Synthetic oligonucleotide
  Antisense strand to SEQ ID NO: 616304
uuccuccagcaacacccgg

SEQ ID NO: 616306 - RNA, 19 nt, Artificial Sequence
  Description of Artificial Sequence: Synthetic oligonucleotide
  Sense strand starting at position 3272 of SEQ ID NO: 585138
cggguguugcuggaggaaa

SEQ ID NO: 616307 - RNA, 19 nt, Artificial Sequence
  Description of Artificial Sequence: Synthetic oligonucleotide
  Antisense strand to SEQ ID NO: 616306
uuuccuccagcaacacccg

SEQ ID NO: 616308 - RNA, 19 nt, Artificial Sequence
  Description of Artificial Sequence: Synthetic oligonucleotide
  Sense strand starting at position 3273 of SEQ ID NO: 585138
ggguguugcuggaggaaag

SEQ ID NO: 616309 - RNA, 19 nt, Artificial Sequence
  Description of Artificial Sequence: Synthetic oligonucleotide
  Antisense strand to SEQ ID NO: 616308
cuuuccuccagcaacaccc

SEQ ID NO: 616310 - RNA, 19 nt, Artificial Sequence
  Description of Artificial Sequence: Synthetic oligonucleotide
  Sense strand starting at position 3974 of SEQ ID NO: 585138
uggaaauuccgacgauuaa

SEQ ID NO: 616311 - RNA, 19 nt, Artificial Sequence
  Description of Artificial Sequence: Synthetic oligonucleotide
  Antisense strand to SEQ ID NO: 616310
uuaaucgucggaauuucca

SEQ ID NO: 616312 - RNA, 19 nt, Artificial Sequence
  Description of Artificial Sequence: Synthetic oligonucleotide
  Sense strand starting at position 48 of SEQ ID NO: 585139
gucuguuucuauccuucua

SEQ ID NO: 616313 - RNA, 19 nt, Artificial Sequence
  Description of Artificial Sequence: Synthetic oligonucleotide
  Antisense strand to SEQ ID NO: 616312
uagaaggauagaaacagac

SEQ ID NO: 616314 - RNA, 19 nt, Artificial Sequence
  Description of Artificial Sequence: Synthetic oligonucleotide
  Sense strand starting at position 125 of SEQ ID NO: 585139
ccucuagucuggucaucau

SEQ ID NO: 616315 - RNA, 19 nt, Artificial Sequence
  Description of Artificial Sequence: Synthetic oligonucleotide
  Antisense strand to SEQ ID NO: 616314
augaugaccagacuagagg

SEQ ID NO: 616316 - RNA, 19 nt, Artificial Sequence
  Description of Artificial Sequence: Synthetic oligonucleotide
  Sense strand starting at position 134 of SEQ ID NO: 585139
uggucaucauuugacugua

SEQ ID NO: 616317 - RNA, 19 nt, Artificial Sequence
  Description of Artificial Sequence: Synthetic oligonucleotide
  Antisense strand to SEQ ID NO: 616316
uacagucaaaugaugacca

SEQ ID NO: 616318 - RNA, 19 nt, Artificial Sequence
  Description of Artificial Sequence: Synthetic oligonucleotide
  Sense strand starting at position 514 of SEQ ID NO: 585139
ucaaguacugugcaaagua

SEQ ID NO: 616319 - RNA, 19 nt, Artificial Sequence
  Description of Artificial Sequence: Synthetic oligonucleotide
  Antisense strand to SEQ ID NO: 616318
uacuuugcacaguacuuga

SEQ ID NO: 616320 - RNA, 19 nt, Artificial Sequence
  Description of Artificial Sequence: Synthetic oligonucleotide
  Sense strand starting at position 536 of SEQ ID NO: 585139
agugaauacuuuccuagag

SEQ ID NO: 616321 - RNA, 19 nt, Artificial Sequence
  Description of Artificial Sequence: Synthetic oligonucleotide
  Antisense strand to SEQ ID NO: 616320
cucuaggaaaguauucacu

SEQ ID NO: 616322 - RNA, 19 nt, Artificial Sequence
  Description of Artificial Sequence: Synthetic oligonucleotide
  Sense strand starting at position 537 of SEQ ID NO: 585139
gugaauacuuuccuagagu

SEQ ID NO: 616323 - RNA, 19 nt, Artificial Sequence
  Description of Artificial Sequence: Synthetic oligonucleotide
  Antisense strand to SEQ ID NO: 616322
acucuaggaaaguauucac

SEQ ID NO: 616324 - RNA, 19 nt, Artificial Sequence
  Description of Artificial Sequence: Synthetic oligonucleotide
  Sense strand starting at position 619 of SEQ ID NO: 585139
aucagaauaccucgcauaa

SEQ ID NO: 616325 - RNA, 19 nt, Artificial Sequence
  Description of Artificial Sequence: Synthetic oligonucleotide
  Antisense strand to SEQ ID NO: 616324
uuaugcgagguauucugau

SEQ ID NO: 616326 - RNA, 19 nt, Artificial Sequence
  Description of Artificial Sequence: Synthetic oligonucleotide
  Sense strand starting at position 646 of SEQ ID NO: 585139
caagcauugggaugaugua

SEQ ID NO: 616327 - RNA, 19 nt, Artificial Sequence
  Description of Artificial Sequence: Synthetic oligonucleotide
  Antisense strand to SEQ ID NO: 616326
uacaucaucccaaugcuug

SEQ ID NO: 616328 - RNA, 19 nt, Artificial Sequence
  Description of Artificial Sequence: Synthetic oligonucleotide
  Sense strand starting at position 760 of SEQ ID NO: 585139
cugguacccucguuggaau

SEQ ID NO: 616329 - RNA, 19 nt, Artificial Sequence
  Description of Artificial Sequence: Synthetic oligonucleotide
  Antisense strand to SEQ ID NO: 616328
auuccaacgaggguaccag

SEQ ID NO: 616330 - RNA, 19 nt, Artificial Sequence
  Description of Artificial Sequence: Synthetic oligonucleotide
  Sense strand starting at position 761 of SEQ ID NO: 585139
ugguacccucguuggaaua

SEQ ID NO: 616331 - RNA, 19 nt, Artificial Sequence
  Description of Artificial Sequence: Synthetic oligonucleotide
  Antisense strand to SEQ ID NO: 616330
uauuccaacgaggguacca

SEQ ID NO: 616332 - RNA, 19 nt, Artificial Sequence
  Description of Artificial Sequence: Synthetic oligonucleotide
  Sense strand starting at position 772 of SEQ ID NO: 585139
uuggaauaguaucugacga

SEQ ID NO: 616333 - RNA, 19 nt, Artificial Sequence
  Description of Artificial Sequence: Synthetic oligonucleotide
  Antisense strand to SEQ ID NO: 616332
ucgucagauacuauuccaa

SEQ ID NO: 616334 - RNA, 19 nt, Artificial Sequence
  Description of Artificial Sequence: Synthetic oligonucleotide
  Sense strand starting at position 773 of SEQ ID NO: 585139
uggaauaguaucugacgau

SEQ ID NO: 616335 - RNA, 19 nt, Artificial Sequence
  Description of Artificial Sequence: Synthetic oligonucleotide
  Antisense strand to SEQ ID NO: 616334
aucgucagauacuauucca

SEQ ID NO: 616336 - RNA, 19 nt, Artificial Sequence
  Description of Artificial Sequence: Synthetic oligonucleotide
  Sense strand starting at position 777 of SEQ ID NO: 585139
auaguaucugacgaucauu

SEQ ID NO: 616337 - RNA, 19 nt, Artificial Sequence
  Description of Artificial Sequence: Synthetic oligonucleotide
  Antisense strand to SEQ ID NO: 616336
aaugaucgucagauacuau

SEQ ID NO: 616338 - RNA, 19 nt, Artificial Sequence
  Description of Artificial Sequence: Synthetic oligonucleotide
  Sense strand starting at position 881 of SEQ ID NO: 585139
ccgccaaaggcuuaggaau

SEQ ID NO: 616339 - RNA, 19 nt, Artificial Sequence
  Description of Artificial Sequence: Synthetic oligonucleotide
  Antisense strand to SEQ ID NO: 616338
auuccuaagccuuuggcgg

SEQ ID NO: 616340 - RNA, 19 nt, Artificial Sequence
  Description of Artificial Sequence: Synthetic oligonucleotide
  Sense strand starting at position 933 of SEQ ID NO: 585139
ggaagcuugcaagaaaucu

SEQ ID NO: 616341 - RNA, 19 nt, Artificial Sequence
  Description of Artificial Sequence: Synthetic oligonucleotide
  Antisense strand to SEQ ID NO: 616340
agauuucuugcaagcuucc

SEQ ID NO: 616342 - RNA, 19 nt, Artificial Sequence
  Description of Artificial Sequence: Synthetic oligonucleotide
  Sense strand starting at position 1035 of SEQ ID NO: 585139
gggcgaguuucucuggaau

SEQ ID NO: 616343 - RNA, 19 nt, Artificial Sequence
  Description of Artificial Sequence: Synthetic oligonucleotide
  Antisense strand to SEQ ID NO: 616342
auuccagagaaacucgccc

SEQ ID NO: 616344 - RNA, 19 nt, Artificial Sequence
  Description of Artificial Sequence: Synthetic oligonucleotide
  Sense strand starting at position 1038 of SEQ ID NO: 585139
cgaguuucucuggaaucag

SEQ ID NO: 616345 - RNA, 19 nt, Artificial Sequence
  Description of Artificial Sequence: Synthetic oligonucleotide
  Antisense strand to SEQ ID NO: 616344
cugauuccagagaaacucg

SEQ ID NO: 616346 - RNA, 19 nt, Artificial Sequence
  Description of Artificial Sequence: Synthetic oligonucleotide
  Sense strand starting at position 1327 of SEQ ID NO: 585139
accuacgcucccgagaaau

SEQ ID NO: 616347 - RNA, 19 nt, Artificial Sequence
  Description of Artificial Sequence: Synthetic oligonucleotide
  Antisense strand to SEQ ID NO: 616346
auuucucgggagcguaggu

SEQ ID NO: 616348 - RNA, 19 nt, Artificial Sequence
  Description of Artificial Sequence: Synthetic oligonucleotide
  Sense strand starting at position 1329 of SEQ ID NO: 585139
cuacgcucccgagaaauuc

SEQ ID NO: 616349 - RNA, 19 nt, Artificial Sequence
  Description of Artificial Sequence: Synthetic oligonucleotide
  Antisense strand to SEQ ID NO: 616348
gaauuucucgggagcguag

SEQ ID NO: 616350 - RNA, 19 nt, Artificial Sequence
  Description of Artificial Sequence: Synthetic oligonucleotide
  Sense strand starting at position 1338 of SEQ ID NO: 585139
cgagaaauucugggcaaag

SEQ ID NO: 616351 - RNA, 19 nt, Artificial Sequence
  Description of Artificial Sequence: Synthetic oligonucleotide
  Antisense strand to SEQ ID NO: 616350
cuuugcccagaauuucucg

SEQ ID NO: 616352 - RNA, 19 nt, Artificial Sequence
  Description of Artificial Sequence: Synthetic oligonucleotide
  Sense strand starting at position 1380 of SEQ ID NO: 585139
gcugaaagucgccuuucuu

SEQ ID NO: 616353 - RNA, 19 nt, Artificial Sequence
  Description of Artificial Sequence: Synthetic oligonucleotide
  Antisense strand to SEQ ID NO: 616352
aagaaaggcgacuuucagc

SEQ ID NO: 616354 - RNA, 19 nt, Artificial Sequence
  Description of Artificial Sequence: Synthetic oligonucleotide
  Sense strand starting at position 2371 of SEQ ID NO: 585139
gcuguaguuccuguggcua

SEQ ID NO: 616355 - RNA, 19 nt, Artificial Sequence
  Description of Artificial Sequence: Synthetic oligonucleotide
  Antisense strand to SEQ ID NO: 616354
uagccacaggaacuacagc

SEQ ID NO: 616356 - RNA, 19 nt, Artificial Sequence
  Description of Artificial Sequence: Synthetic oligonucleotide
  Sense strand starting at position 2750 of SEQ ID NO: 585139
cgguguccucgcagagaua

SEQ ID NO: 616357 - RNA, 19 nt, Artificial Sequence
  Description of Artificial Sequence: Synthetic oligonucleotide
  Antisense strand to SEQ ID NO: 616356
uaucucugcgaggacaccg

SEQ ID NO: 616358 - RNA, 19 nt, Artificial Sequence
  Description of Artificial Sequence: Synthetic oligonucleotide
  Sense strand starting at position 2751 of SEQ ID NO: 585139
gguguccucgcagagauaa

SEQ ID NO: 616359 - RNA, 19 nt, Artificial Sequence
  Description of Artificial Sequence: Synthetic oligonucleotide
  Antisense strand to SEQ ID NO: 616358
uuaucucugcgaggacacc

SEQ ID NO: 616360 - RNA, 19 nt, Artificial Sequence
  Description of Artificial Sequence: Synthetic oligonucleotide
  Sense strand starting at position 2761 of SEQ ID NO: 585139
cagagauaaccuggcugaa

SEQ ID NO: 616361 - RNA, 19 nt, Artificial Sequence
  Description of Artificial Sequence: Synthetic oligonucleotide
  Antisense strand to SEQ ID NO: 616360
uucagccagguuaucucug

SEQ ID NO: 616362 - RNA, 19 nt, Artificial Sequence
  Description of Artificial Sequence: Synthetic oligonucleotide
  Sense strand starting at position 2763 of SEQ ID NO: 585139
gagauaaccuggcugaacu

SEQ ID NO: 616363 - RNA, 19 nt, Artificial Sequence
  Description of Artificial Sequence: Synthetic oligonucleotide
  Antisense strand to SEQ ID NO: 616362
aguucagccagguuaucuc

SEQ ID NO: 616364 - RNA, 19 nt, Artificial Sequence
  Description of Artificial Sequence: Synthetic oligonucleotide
  Sense strand starting at position 2799 of SEQ ID NO: 585139
ucaguucucccucaugaca

SEQ ID NO: 616365 - RNA, 19 nt, Artificial Sequence
  Description of Artificial Sequence: Synthetic oligonucleotide
  Antisense strand to SEQ ID NO: 616364
ugucaugagggagaacuga

SEQ ID NO: 616366 - RNA, 19 nt, Artificial Sequence
  Description of Artificial Sequence: Synthetic oligonucleotide
  Sense strand starting at position 2831 of SEQ ID NO: 585139
ccggauuuguguucugcag

SEQ ID NO: 616367 - RNA, 19 nt, Artificial Sequence
  Description of Artificial Sequence: Synthetic oligonucleotide
  Antisense strand to SEQ ID NO: 616366
cugcagaacacaaauccgg

SEQ ID NO: 616368 - RNA, 19 nt, Artificial Sequence
  Description of Artificial Sequence: Synthetic oligonucleotide
  Sense strand starting at position 2837 of SEQ ID NO: 585139
uuguguucugcagagagga

SEQ ID NO: 616369 - RNA, 19 nt, Artificial Sequence
  Description of Artificial Sequence: Synthetic oligonucleotide
  Antisense strand to SEQ ID NO: 616368
uccucucugcagaacacaa

SEQ ID NO: 616370 - RNA, 19 nt, Artificial Sequence
  Description of Artificial Sequence: Synthetic oligonucleotide
  Sense strand starting at position 2839 of SEQ ID NO: 585139
guguucugcagagaggaaa

SEQ ID NO: 616371 - RNA, 19 nt, Artificial Sequence
  Description of Artificial Sequence: Synthetic oligonucleotide
  Antisense strand to SEQ ID NO: 616370
uuuccucucugcagaacac

SEQ ID NO: 616372 - RNA, 19 nt, Artificial Sequence
  Description of Artificial Sequence: Synthetic oligonucleotide
  Sense strand starting at position 2864 of SEQ ID NO: 585139
agguaaaugaauugcaaag

SEQ ID NO: 616373 - RNA, 19 nt, Artificial Sequence
  Description of Artificial Sequence: Synthetic oligonucleotide
  Antisense strand to SEQ ID NO: 616372
cuuugcaauucauuuaccu

SEQ ID NO: 616374 - RNA, 19 nt, Artificial Sequence
  Description of Artificial Sequence: Synthetic oligonucleotide
  Sense strand starting at position 2957 of SEQ ID NO: 585139
ccaggaaacucuccugcuu

SEQ ID NO: 616375 - RNA, 19 nt, Artificial Sequence
  Description of Artificial Sequence: Synthetic oligonucleotide
  Antisense strand to SEQ ID NO: 616374
aagcaggagaguuuccugg

SEQ ID NO: 616376 - RNA, 19 nt, Artificial Sequence
  Description of Artificial Sequence: Synthetic oligonucleotide
  Sense strand starting at position 3324 of SEQ ID NO: 585139
cugcauuacucccuuaugu

SEQ ID NO: 616377 - RNA, 19 nt, Artificial Sequence
  Description of Artificial Sequence: Synthetic oligonucleotide
  Antisense strand to SEQ ID NO: 616376
acauaagggaguaaugcag

SEQ ID NO: 616378 - RNA, 19 nt, Artificial Sequence
  Description of Artificial Sequence: Synthetic oligonucleotide
  Sense strand starting at position 3326 of SEQ ID NO: 585139
gcauuacucccuuauguua

SEQ ID NO: 616379 - RNA, 19 nt, Artificial Sequence
  Description of Artificial Sequence: Synthetic oligonucleotide
  Antisense strand to SEQ ID NO: 616378
uaacauaagggaguaaugc

SEQ ID NO: 616380 - RNA, 19 nt, Artificial Sequence
  Description of Artificial Sequence: Synthetic oligonucleotide
  Sense strand starting at position 3333 of SEQ ID NO: 585139
ucccuuauguuaucauguu

SEQ ID NO: 616381 - RNA, 19 nt, Artificial Sequence
  Description of Artificial Sequence: Synthetic oligonucleotide
  Antisense strand to SEQ ID NO: 616380
aacaugauaacauaaggga

SEQ ID NO: 616382 - RNA, 19 nt, Artificial Sequence
  Description of Artificial Sequence: Synthetic oligonucleotide
  Sense strand starting at position 3575 of SEQ ID NO: 585139
guggaaaggucucuuucuc

SEQ ID NO: 616383 - RNA, 19 nt, Artificial Sequence
  Description of Artificial Sequence: Synthetic oligonucleotide
  Antisense strand to SEQ ID NO: 616382
gagaaagagaccuuuccac

SEQ ID NO: 616384 - RNA, 19 nt, Artificial Sequence
  Description of Artificial Sequence: Synthetic oligonucleotide
  Sense strand starting at position 3591 of SEQ ID NO: 585139
cucccaucauucguggauu

SEQ ID NO: 616385 - RNA, 19 nt, Artificial Sequence
  Description of Artificial Sequence: Synthetic oligonucleotide
  Antisense strand to SEQ ID NO: 616384
aauccacgaaugaugggag

SEQ ID NO: 616386 - RNA, 19 nt, Artificial Sequence
  Description of Artificial Sequence: Synthetic oligonucleotide
  Sense strand starting at position 3675 of SEQ ID NO: 585139
agucccugacccugugaau

SEQ ID NO: 616387 - RNA, 19 nt, Artificial Sequence
  Description of Artificial Sequence: Synthetic oligonucleotide
  Antisense strand to SEQ ID NO: 616386
auucacagggucagggacu

SEQ ID NO: 616388 - RNA, 19 nt, Artificial Sequence
  Description of Artificial Sequence: Synthetic oligonucleotide
  Sense strand starting at position 3686 of SEQ ID NO: 585139
cugugaaugucaccuuaca

SEQ ID NO: 616389 - RNA, 19 nt, Artificial Sequence
  Description of Artificial Sequence: Synthetic oligonucleotide
  Antisense strand to SEQ ID NO: 616388
uguaaggugacauucacag

SEQ ID NO: 616390 - RNA, 19 nt, Artificial Sequence
  Description of Artificial Sequence: Synthetic oligonucleotide
  Sense strand starting at position 3741 of SEQ ID NO: 585139
agagauuaucguggauuau

SEQ ID NO: 616391 - RNA, 19 nt, Artificial Sequence
  Description of Artificial Sequence: Synthetic oligonucleotide
  Antisense strand to SEQ ID NO: 616390
auaauccacgauaaucucu

SEQ ID NO: 616392 - RNA, 19 nt, Artificial Sequence
  Description of Artificial Sequence: Synthetic oligonucleotide
  Sense strand starting at position 3482 of SEQ ID NO: 585140
gcccguuucggcucagaug

SEQ ID NO: 616393 - RNA, 19 nt, Artificial Sequence
  Description of Artificial Sequence: Synthetic oligonucleotide
  Antisense strand to SEQ ID NO: 616392
caucugagccgaaacgggc

SEQ ID NO: 616394 - RNA, 19 nt, Artificial Sequence
  Description of Artificial Sequence: Synthetic oligonucleotide
  Sense strand starting at position 3483 of SEQ ID NO: 585140
cccguuucggcucagauga

SEQ ID NO: 616395 - RNA, 19 nt, Artificial Sequence
  Description of Artificial Sequence: Synthetic oligonucleotide
  Antisense strand to SEQ ID NO: 616394
ucaucugagccgaaacggg

SEQ ID NO: 616396 - RNA, 19 nt, Artificial Sequence
  Description of Artificial Sequence: Synthetic oligonucleotide
  Sense strand starting at position 3522 of SEQ ID NO: 585140
gugacauuagcagguguga

SEQ ID NO: 616397 - RNA, 19 nt, Artificial Sequence
  Description of Artificial Sequence: Synthetic oligonucleotide
  Antisense strand to SEQ ID NO: 616396
ucacaccugcuaaugucac

SEQ ID NO: 616398 - RNA, 19 nt, Artificial Sequence
  Description of Artificial Sequence: Synthetic oligonucleotide
  Sense strand starting at position 3524 of SEQ ID NO: 585140
gacauuagcaggugugaug

SEQ ID NO: 616399 - RNA, 19 nt, Artificial Sequence
  Description of Artificial Sequence: Synthetic oligonucleotide
  Antisense strand to SEQ ID NO: 616398
caucacaccugcuaauguc

SEQ ID NO: 616400 - RNA, 19 nt, Artificial Sequence
  Description of Artificial Sequence: Synthetic oligonucleotide
  Sense strand starting at position 3561 of SEQ ID NO: 585140
ugucuaagagcuuaacgcu

SEQ ID NO: 616401 - RNA, 19 nt, Artificial Sequence
  Description of Artificial Sequence: Synthetic oligonucleotide
  Antisense strand to SEQ ID NO: 616400
agcguuaagcucuuagaca

SEQ ID NO: 616402 - RNA, 19 nt, Artificial Sequence
  Description of Artificial Sequence: Synthetic oligonucleotide
  Sense strand starting at position 3723 of SEQ ID NO: 585140
ugugcacacgccugagauu

SEQ ID NO: 616403 - RNA, 19 nt, Artificial Sequence
  Description of Artificial Sequence: Synthetic oligonucleotide
  Antisense strand to SEQ ID NO: 616402
aaucucaggcgugugcaca

SEQ ID NO: 616404 - RNA, 19 nt, Artificial Sequence
  Description of Artificial Sequence: Synthetic oligonucleotide
  Sense strand starting at position 3944 of SEQ ID NO: 585140
gcgugcgugacgcauuuaa

SEQ ID NO: 616405 - RNA, 19 nt, Artificial Sequence
  Description of Artificial Sequence: Synthetic oligonucleotide
  Antisense strand to SEQ ID NO: 616404
uuaaaugcgucacgcacgc

SEQ ID NO: 616406 - RNA, 19 nt, Artificial Sequence
  Description of Artificial Sequence: Synthetic oligonucleotide
  Sense strand starting at position 57 of SEQ ID NO: 585141
ggaccuguaucaucaaugu

SEQ ID NO: 616407 - RNA, 19 nt, Artificial Sequence
  Description of Artificial Sequence: Synthetic oligonucleotide
  Antisense strand to SEQ ID NO: 616406
acauugaugauacaggucc

SEQ ID NO: 616408 - RNA, 19 nt, Artificial Sequence
  Description of Artificial Sequence: Synthetic oligonucleotide
  Sense strand starting at position 66 of SEQ ID NO: 585141
ucaucaauguggguccauu

SEQ ID NO: 616409 - RNA, 19 nt, Artificial Sequence
  Description of Artificial Sequence: Synthetic oligonucleotide
  Antisense strand to SEQ ID NO: 616408
aauggacccacauugauga

SEQ ID NO: 616410 - RNA, 19 nt, Artificial Sequence
  Description of Artificial Sequence: Synthetic oligonucleotide
  Sense strand starting at position 147 of SEQ ID NO: 585141
uggcaaaugucccuuuagu

SEQ ID NO: 616411 - RNA, 19 nt, Artificial Sequence
  Description of Artificial Sequence: Synthetic oligonucleotide
  Antisense strand to SEQ ID NO: 616410
acuaaagggacauuugcca

SEQ ID NO: 616412 - RNA, 19 nt, Artificial Sequence
  Description of Artificial Sequence: Synthetic oligonucleotide
  Sense strand starting at position 153 of SEQ ID NO: 585141
augucccuuuagugaaaga

SEQ ID NO: 616413 - RNA, 19 nt, Artificial Sequence
  Description of Artificial Sequence: Synthetic oligonucleotide
  Antisense strand to SEQ ID NO: 616412
ucuuucacuaaagggacau

SEQ ID NO: 616414 - RNA, 19 nt, Artificial Sequence
  Description of Artificial Sequence: Synthetic oligonucleotide
  Sense strand starting at position 163 of SEQ ID NO: 585141
agugaaagauccugggauc

SEQ ID NO: 616415 - RNA, 19 nt, Artificial Sequence
  Description of Artificial Sequence: Synthetic oligonucleotide
  Antisense strand to SEQ ID NO: 616414
gaucccaggaucuuucacu

SEQ ID NO: 616416 - RNA, 19 nt, Artificial Sequence
  Description of Artificial Sequence: Synthetic oligonucleotide
  Sense strand starting at position 166 of SEQ ID NO: 585141
gaaagauccugggauccag

SEQ ID NO: 616417 - RNA, 19 nt, Artificial Sequence
  Description of Artificial Sequence: Synthetic oligonucleotide
  Antisense strand to SEQ ID NO: 616416
cuggaucccaggaucuuuc

SEQ ID NO: 616418 - RNA, 19 nt, Artificial Sequence
  Description of Artificial Sequence: Synthetic oligonucleotide
  Sense strand starting at position 226 of SEQ ID NO: 585141
gcaaacaucucgcugcaga

SEQ ID NO: 616419 - RNA, 19 nt, Artificial Sequence
  Description of Artificial Sequence: Synthetic oligonucleotide
  Antisense strand to SEQ ID NO: 616418
ucugcagcgagauguuugc

SEQ ID NO: 616420 - RNA, 19 nt, Artificial Sequence
  Description of Artificial Sequence: Synthetic oligonucleotide
  Sense strand starting at position 275 of SEQ ID NO: 585141
gacauuuacuucgggacag

SEQ ID NO: 616421 - RNA, 19 nt, Artificial Sequence
  Description of Artificial Sequence: Synthetic oligonucleotide
  Antisense strand to SEQ ID NO: 616420
cugucccgaaguaaauguc

SEQ ID NO: 616422 - RNA, 19 nt, Artificial Sequence
  Description of Artificial Sequence: Synthetic oligonucleotide
  Sense strand starting at position 276 of SEQ ID NO: 585141
acauuuacuucgggacaga

SEQ ID NO: 616423 - RNA, 19 nt, Artificial Sequence
  Description of Artificial Sequence: Synthetic oligonucleotide
  Antisense strand to SEQ ID NO: 616422
ucugucccgaaguaaaugu

SEQ ID NO: 616424 - RNA, 19 nt, Artificial Sequence
  Description of Artificial Sequence: Synthetic oligonucleotide
  Sense strand starting at position 279 of SEQ ID NO: 585141
uuuacuucgggacagaagu

SEQ ID NO: 616425 - RNA, 19 nt, Artificial Sequence
  Description of Artificial Sequence: Synthetic oligonucleotide
  Antisense strand to SEQ ID NO: 616424
acuucugucccgaaguaaa

SEQ ID NO: 616426 - RNA, 19 nt, Artificial Sequence
  Description of Artificial Sequence: Synthetic oligonucleotide
  Sense strand starting at position 487 of SEQ ID NO: 585141
gccagacaauucugaagcu

SEQ ID NO: 616427 - RNA, 19 nt, Artificial Sequence
  Description of Artificial Sequence: Synthetic oligonucleotide
  Antisense strand to SEQ ID NO: 616426
agcuucagaauugucuggc

SEQ ID NO: 616428 - RNA, 19 nt, Artificial Sequence
  Description of Artificial Sequence: Synthetic oligonucleotide
  Sense strand starting at position 488 of SEQ ID NO: 585141
ccagacaauucugaagcuu

SEQ ID NO: 616429 - RNA, 19 nt, Artificial Sequence
  Description of Artificial Sequence: Synthetic oligonucleotide
  Antisense strand to SEQ ID NO: 616428
aagcuucagaauugucugg

SEQ ID NO: 616430 - RNA, 19 nt, Artificial Sequence
  Description of Artificial Sequence: Synthetic oligonucleotide
  Sense strand starting at position 561 of SEQ ID NO: 585141
cgaauaagaugccggcuuu

SEQ ID NO: 616431 - RNA, 19 nt, Artificial Sequence
  Description of Artificial Sequence: Synthetic oligonucleotide
  Antisense strand to SEQ ID NO: 616430
aaagccggcaucuuauucg

SEQ ID NO: 616432 - RNA, 19 nt, Artificial Sequence
  Description of Artificial Sequence: Synthetic oligonucleotide
  Sense strand starting at position 2754 of SEQ ID NO: 585141
ucugucaacuucguuuaga

SEQ ID NO: 616433 - RNA, 19 nt, Artificial Sequence
  Description of Artificial Sequence: Synthetic oligonucleotide
  Antisense strand to SEQ ID NO: 616432
ucuaaacgaaguugacaga

SEQ ID NO: 616434 - RNA, 19 nt, Artificial Sequence
  Description of Artificial Sequence: Synthetic oligonucleotide
  Sense strand starting at position 2755 of SEQ ID NO: 585141
cugucaacuucguuuagac

SEQ ID NO: 616435 - RNA, 19 nt, Artificial Sequence
  Description of Artificial Sequence: Synthetic oligonucleotide
  Antisense strand to SEQ ID NO: 616434
gucuaaacgaaguugacag

SEQ ID NO: 616436 - RNA, 19 nt, Artificial Sequence
  Description of Artificial Sequence: Synthetic oligonucleotide
  Sense strand starting at position 2757 of SEQ ID NO: 585141
gucaacuucguuuagacuu

SEQ ID NO: 616437 - RNA, 19 nt, Artificial Sequence
  Description of Artificial Sequence: Synthetic oligonucleotide
  Antisense strand to SEQ ID NO: 616436
aagucuaaacgaaguugac

SEQ ID NO: 616438 - RNA, 19 nt, Artificial Sequence
  Description of Artificial Sequence: Synthetic oligonucleotide
  Sense strand starting at position 2864 of SEQ ID NO: 585141
gacaauuguuagggcgacu

SEQ ID NO: 616439 - RNA, 19 nt, Artificial Sequence
  Description of Artificial Sequence: Synthetic oligonucleotide
  Antisense strand to SEQ ID NO: 616438
agucgcccuaacaauuguc

SEQ ID NO: 616440 - RNA, 19 nt, Artificial Sequence
  Description of Artificial Sequence: Synthetic oligonucleotide
  Sense strand starting at position 2992 of SEQ ID NO: 585141
ccuggaucucaugggacuu

SEQ ID NO: 616441 - RNA, 19 nt, Artificial Sequence
  Description of Artificial Sequence: Synthetic oligonucleotide
  Antisense strand to SEQ ID NO: 616440
aagucccaugagauccagg

SEQ ID NO: 616442 - RNA, 19 nt, Artificial Sequence
  Description of Artificial Sequence: Synthetic oligonucleotide
  Sense strand starting at position 2993 of SEQ ID NO: 585141
cuggaucucaugggacuua

SEQ ID NO: 616443 - RNA, 19 nt, Artificial Sequence
  Description of Artificial Sequence: Synthetic oligonucleotide
  Antisense strand to SEQ ID NO: 616442
uaagucccaugagauccag

SEQ ID NO: 616444 - RNA, 19 nt, Artificial Sequence
  Description of Artificial Sequence: Synthetic oligonucleotide
  Sense strand starting at position 3052 of SEQ ID NO: 585141
cccaguuaguguucuguaa

SEQ ID NO: 616445 - RNA, 19 nt, Artificial Sequence
  Description of Artificial Sequence: Synthetic oligonucleotide
  Antisense strand to SEQ ID NO: 616444
uuacagaacacuaacuggg

SEQ ID NO: 616446 - RNA, 19 nt, Artificial Sequence
  Description of Artificial Sequence: Synthetic oligonucleotide
  Sense strand starting at position 3054 of SEQ ID NO: 585141
caguuaguguucuguaaga

SEQ ID NO: 616447 - RNA, 19 nt, Artificial Sequence
  Description of Artificial Sequence: Synthetic oligonucleotide
  Antisense strand to SEQ ID NO: 616446
ucuuacagaacacuaacug

SEQ ID NO: 616448 - RNA, 19 nt, Artificial Sequence
  Description of Artificial Sequence: Synthetic oligonucleotide
  Sense strand starting at position 3056 of SEQ ID NO: 585141
guuaguguucuguaagaaa

SEQ ID NO: 616449 - RNA, 19 nt, Artificial Sequence
  Description of Artificial Sequence: Synthetic oligonucleotide
  Antisense strand to SEQ ID NO: 616448
uuucuuacagaacacuaac

SEQ ID NO: 616450 - RNA, 19 nt, Artificial Sequence
  Description of Artificial Sequence: Synthetic oligonucleotide
  Sense strand starting at position 3140 of SEQ ID NO: 585141
agauaagcgagauggcuau

SEQ ID NO: 616451 - RNA, 19 nt, Artificial Sequence
  Description of Artificial Sequence: Synthetic oligonucleotide
  Antisense strand to SEQ ID NO: 616450
auagccaucucgcuuaucu

SEQ ID NO: 616452 - RNA, 19 nt, Artificial Sequence
  Description of Artificial Sequence: Synthetic oligonucleotide
  Sense strand starting at position 3187 of SEQ ID NO: 585141
agcugucacuagguuuaca

SEQ ID NO: 616453 - RNA, 19 nt, Artificial Sequence
  Description of Artificial Sequence: Synthetic oligonucleotide
  Antisense strand to SEQ ID NO: 616452
uguaaaccuagugacagcu

SEQ ID NO: 616454 - RNA, 19 nt, Artificial Sequence
  Description of Artificial Sequence: Synthetic oligonucleotide
  Sense strand starting at position 3199 of SEQ ID NO: 585141
guuuacauccuccgucuua

SEQ ID NO: 616455 - RNA, 19 nt, Artificial Sequence
  Description of Artificial Sequence: Synthetic oligonucleotide
  Antisense strand to SEQ ID NO: 616454
uaagacggaggauguaaac

SEQ ID NO: 616456 - RNA, 19 nt, Artificial Sequence
  Description of Artificial Sequence: Synthetic oligonucleotide
  Sense strand starting at position 3250 of SEQ ID NO: 585141
gcuaacuccuguccgagaa

SEQ ID NO: 616457 - RNA, 19 nt, Artificial Sequence
  Description of Artificial Sequence: Synthetic oligonucleotide
  Antisense strand to SEQ ID NO: 616456
uucucggacaggaguuagc

SEQ ID NO: 616458 - RNA, 19 nt, Artificial Sequence
  Description of Artificial Sequence: Synthetic oligonucleotide
  Sense strand starting at position 3252 of SEQ ID NO: 585141
uaacuccuguccgagaaca

SEQ ID NO: 616459 - RNA, 19 nt, Artificial Sequence
  Description of Artificial Sequence: Synthetic oligonucleotide
  Antisense strand to SEQ ID NO: 616458
uguucucggacaggaguua

SEQ ID NO: 616460 - RNA, 19 nt, Artificial Sequence
  Description of Artificial Sequence: Synthetic oligonucleotide
  Sense strand starting at position 3254 of SEQ ID NO: 585141
acuccuguccgagaacacu

SEQ ID NO: 616461 - RNA, 19 nt, Artificial Sequence
  Description of Artificial Sequence: Synthetic oligonucleotide
  Antisense strand to SEQ ID NO: 616460
aguguucucggacaggagu

SEQ ID NO: 616462 - RNA, 19 nt, Artificial Sequence
  Description of Artificial Sequence: Synthetic oligonucleotide
  Sense strand starting at position 3284 of SEQ ID NO: 585141
guggcuaauuccucccuaa

SEQ ID NO: 616463 - RNA, 19 nt, Artificial Sequence
  Description of Artificial Sequence: Synthetic oligonucleotide
  Antisense strand to SEQ ID NO: 616462
uuagggaggaauuagccac

SEQ ID NO: 616464 - RNA, 19 nt, Artificial Sequence
  Description of Artificial Sequence: Synthetic oligonucleotide
  Sense strand starting at position 3306 of SEQ ID NO: 585141
agagucaggcucugagaga

SEQ ID NO: 616465 - RNA, 19 nt, Artificial Sequence
  Description of Artificial Sequence: Synthetic oligonucleotide
  Antisense strand to SEQ ID NO: 616464
ucucucagagccugacucu

SEQ ID NO: 616466 - RNA, 19 nt, Artificial Sequence
  Description of Artificial Sequence: Synthetic oligonucleotide
  Sense strand starting at position 3360 of SEQ ID NO: 585141
ccgacaguuaguuauugga

SEQ ID NO: 616467 - RNA, 19 nt, Artificial Sequence
  Description of Artificial Sequence: Synthetic oligonucleotide
  Antisense strand to SEQ ID NO: 616466
uccaauaacuaacugucgg

SEQ ID NO: 616468 - RNA, 19 nt, Artificial Sequence
  Description of Artificial Sequence: Synthetic oligonucleotide
  Sense strand starting at position 3362 of SEQ ID NO: 585141
gacaguuaguuauuggauu

SEQ ID NO: 616469 - RNA, 19 nt, Artificial Sequence
  Description of Artificial Sequence: Synthetic oligonucleotide
  Antisense strand to SEQ ID NO: 616468
aauccaauaacuaacuguc

SEQ ID NO: 616470 - RNA, 19 nt, Artificial Sequence
  Description of Artificial Sequence: Synthetic oligonucleotide
  Sense strand starting at position 3363 of SEQ ID NO: 585141
acaguuaguuauuggauua

SEQ ID NO: 616471 - RNA, 19 nt, Artificial Sequence
  Description of Artificial Sequence: Synthetic oligonucleotide
  Antisense strand to SEQ ID NO: 616470
uaauccaauaacuaacugu

SEQ ID NO: 616472 - RNA, 19 nt, Artificial Sequence
  Description of Artificial Sequence: Synthetic oligonucleotide
  Sense strand starting at position 3368 of SEQ ID NO: 585141
uaguuauuggauuacacgu

SEQ ID NO: 616473 - RNA, 19 nt, Artificial Sequence
  Description of Artificial Sequence: Synthetic oligonucleotide
  Antisense strand to SEQ ID NO: 616472
acguguaauccaauaacua

SEQ ID NO: 616474 - RNA, 19 nt, Artificial Sequence
  Description of Artificial Sequence: Synthetic oligonucleotide
  Sense strand starting at position 3376 of SEQ ID NO: 585141
ggauuacacgugcagggaa

SEQ ID NO: 616475 - RNA, 19 nt, Artificial Sequence
  Description of Artificial Sequence: Synthetic oligonucleotide
  Antisense strand to SEQ ID NO: 616474
uucccugcacguguaaucc

SEQ ID NO: 616476 - RNA, 19 nt, Artificial Sequence
  Description of Artificial Sequence: Synthetic oligonucleotide
  Sense strand starting at position 3625 of SEQ ID NO: 585141
gagguugugcaguaaucag

SEQ ID NO: 616477 - RNA, 19 nt, Artificial Sequence
  Description of Artificial Sequence: Synthetic oligonucleotide
  Antisense strand to SEQ ID NO: 616476
cugauuacugcacaaccuc

SEQ ID NO: 616478 - RNA, 19 nt, Artificial Sequence
  Description of Artificial Sequence: Synthetic oligonucleotide
  Sense strand starting at position 3837 of SEQ ID NO: 585141
cagacagugaccugagguu

SEQ ID NO: 616479 - RNA, 19 nt, Artificial Sequence
  Description of Artificial Sequence: Synthetic oligonucleotide
  Antisense strand to SEQ ID NO: 616478
aaccucaggucacugucug

SEQ ID NO: 616480 - RNA, 19 nt, Artificial Sequence
  Description of Artificial Sequence: Synthetic oligonucleotide
  Sense strand starting at position 3907 of SEQ ID NO: 585141
gaccgagugucaguuuacu

SEQ ID NO: 616481 - RNA, 19 nt, Artificial Sequence
  Description of Artificial Sequence: Synthetic oligonucleotide
  Antisense strand to SEQ ID NO: 616480
aguaaacugacacucgguc

SEQ ID NO: 616482 - RNA, 19 nt, Artificial Sequence
  Description of Artificial Sequence: Synthetic oligonucleotide
  Sense strand starting at position 3952 of SEQ ID NO: 585141
gcuccacaguaauuagaca

SEQ ID NO: 616483 - RNA, 19 nt, Artificial Sequence
  Description of Artificial Sequence: Synthetic oligonucleotide
  Antisense strand to SEQ ID NO: 616482
ugucuaauuacuguggagc

SEQ ID NO: 616484 - RNA, 19 nt, Artificial Sequence
  Description of Artificial Sequence: Synthetic oligonucleotide
  Sense strand starting at position 34 of SEQ ID NO: 585142
aggaguuaaucucuuugga

SEQ ID NO: 616485 - RNA, 19 nt, Artificial Sequence
  Description of Artificial Sequence: Synthetic oligonucleotide
  Antisense strand to SEQ ID NO: 616484
uccaaagagauuaacuccu

SEQ ID NO: 616486 - RNA, 19 nt, Artificial Sequence
  Description of Artificial Sequence: Synthetic oligonucleotide
  Sense strand starting at position 36 of SEQ ID NO: 585142
gaguuaaucucuuuggaua

SEQ ID NO: 616487 - RNA, 19 nt, Artificial Sequence
  Description of Artificial Sequence: Synthetic oligonucleotide
  Antisense strand to SEQ ID NO: 616486
uauccaaagagauuaacuc

SEQ ID NO: 616488 - RNA, 19 nt, Artificial Sequence
  Description of Artificial Sequence: Synthetic oligonucleotide
  Sense strand starting at position 37 of SEQ ID NO: 585142
aguuaaucucuuuggauac

SEQ ID NO: 616489 - RNA, 19 nt, Artificial Sequence
  Description of Artificial Sequence: Synthetic oligonucleotide
  Antisense strand to SEQ ID NO: 616488
guauccaaagagauuaacu

SEQ ID NO: 616490 - RNA, 19 nt, Artificial Sequence
  Description of Artificial Sequence: Synthetic oligonucleotide
  Sense strand starting at position 62 of SEQ ID NO: 585142
gcaggaagucauuacauca

SEQ ID NO: 616491 - RNA, 19 nt, Artificial Sequence
  Description of Artificial Sequence: Synthetic oligonucleotide
  Antisense strand to SEQ ID NO: 616490
ugauguaaugacuuccugc

SEQ ID NO: 616492 - RNA, 19 nt, Artificial Sequence
  Description of Artificial Sequence: Synthetic oligonucleotide
  Sense strand starting at position 147 of SEQ ID NO: 585142
gagagucucucuucggguu

SEQ ID NO: 616493 - RNA, 19 nt, Artificial Sequence
  Description of Artificial Sequence: Synthetic oligonucleotide
  Antisense strand to SEQ ID NO: 616492
aacccgaagagagacucuc

SEQ ID NO: 616494 - RNA, 19 nt, Artificial Sequence
  Description of Artificial Sequence: Synthetic oligonucleotide
  Sense strand starting at position 394 of SEQ ID NO: 585142
gguuuacuggagcgacauc

SEQ ID NO: 616495 - RNA, 19 nt, Artificial Sequence
  Description of Artificial Sequence: Synthetic oligonucleotide
  Antisense strand to SEQ ID NO: 616494
gaugucgcuccaguaaacc

SEQ ID NO: 616496 - RNA, 19 nt, Artificial Sequence
  Description of Artificial Sequence: Synthetic oligonucleotide
  Sense strand starting at position 403 of SEQ ID NO: 585142
gagcgacaucuccgagaag

SEQ ID NO: 616497 - RNA, 19 nt, Artificial Sequence
  Description of Artificial Sequence: Synthetic oligonucleotide
  Antisense strand to SEQ ID NO: 616496
cuucucggagaugucgcuc

SEQ ID NO: 616498 - RNA, 19 nt, Artificial Sequence
  Description of Artificial Sequence: Synthetic oligonucleotide
  Sense strand starting at position 404 of SEQ ID NO: 585142
agcgacaucuccgagaaga

SEQ ID NO: 616499 - RNA, 19 nt, Artificial Sequence
  Description of Artificial Sequence: Synthetic oligonucleotide
  Antisense strand to SEQ ID NO: 616498
ucuucucggagaugucgcu

SEQ ID NO: 616500 - RNA, 19 nt, Artificial Sequence
  Description of Artificial Sequence: Synthetic oligonucleotide
  Sense strand starting at position 494 of SEQ ID NO: 585142
gaucgaugugccuguaggu

SEQ ID NO: 616501 - RNA, 19 nt, Artificial Sequence
  Description of Artificial Sequence: Synthetic oligonucleotide
  Antisense strand to SEQ ID NO: 616500
accuacaggcacaucgauc

SEQ ID NO: 616502 - RNA, 19 nt, Artificial Sequence
  Description of Artificial Sequence: Synthetic oligonucleotide
  Sense strand starting at position 570 of SEQ ID NO: 585142
gcaacaugcuccugcgaca

SEQ ID NO: 616503 - RNA, 19 nt, Artificial Sequence
  Description of Artificial Sequence: Synthetic oligonucleotide
  Antisense strand to SEQ ID NO: 616502
ugucgcaggagcauguugc

SEQ ID NO: 616504 - RNA, 19 nt, Artificial Sequence
  Description of Artificial Sequence: Synthetic oligonucleotide
  Sense strand starting at position 689 of SEQ ID NO: 585142
gguaaacucuacuccaaag

SEQ ID NO: 616505 - RNA, 19 nt, Artificial Sequence
  Description of Artificial Sequence: Synthetic oligonucleotide
  Antisense strand to SEQ ID NO: 616504
cuuuggaguagaguuuacc

SEQ ID NO: 616506 - RNA, 19 nt, Artificial Sequence
  Description of Artificial Sequence: Synthetic oligonucleotide
  Sense strand starting at position 727 of SEQ ID NO: 585142
cucggugcuguccggagaa

SEQ ID NO: 616507 - RNA, 19 nt, Artificial Sequence
  Description of Artificial Sequence: Synthetic oligonucleotide
  Antisense strand to SEQ ID NO: 616506
uucuccggacagcaccgag

SEQ ID NO: 616508 - RNA, 19 nt, Artificial Sequence
  Description of Artificial Sequence: Synthetic oligonucleotide
  Sense strand starting at position 728 of SEQ ID NO: 585142
ucggugcuguccggagaau

SEQ ID NO: 616509 - RNA, 19 nt, Artificial Sequence
  Description of Artificial Sequence: Synthetic oligonucleotide
  Antisense strand to SEQ ID NO: 616508
auucuccggacagcaccga

SEQ ID NO: 616510 - RNA, 19 nt, Artificial Sequence
  Description of Artificial Sequence: Synthetic oligonucleotide
  Sense strand starting at position 739 of SEQ ID NO: 585142
cggagaauccagcaaaugu

SEQ ID NO: 616511 - RNA, 19 nt, Artificial Sequence
  Description of Artificial Sequence: Synthetic oligonucleotide
  Antisense strand to SEQ ID NO: 616510
acauuugcuggauucuccg

SEQ ID NO: 616512 - RNA, 19 nt, Artificial Sequence
  Description of Artificial Sequence: Synthetic oligonucleotide
  Sense strand starting at position 2165 of SEQ ID NO: 585142
gugugcgugcguuuguuua

SEQ ID NO: 616513 - RNA, 19 nt, Artificial Sequence
  Description of Artificial Sequence: Synthetic oligonucleotide
  Antisense strand to SEQ ID NO: 616512
uaaacaaacgcacgcacac

SEQ ID NO: 616514 - RNA, 19 nt, Artificial Sequence
  Description of Artificial Sequence: Synthetic oligonucleotide
  Sense strand starting at position 2169 of SEQ ID NO: 585142
gcgugcguuuguuuauguu

SEQ ID NO: 616515 - RNA, 19 nt, Artificial Sequence
  Description of Artificial Sequence: Synthetic oligonucleotide
  Antisense strand to SEQ ID NO: 616514
aacauaaacaaacgcacgc

SEQ ID NO: 616516 - RNA, 19 nt, Artificial Sequence
  Description of Artificial Sequence: Synthetic oligonucleotide
  Sense strand starting at position 2398 of SEQ ID NO: 585142
gggcccuugucacuuccaa

SEQ ID NO: 616517 - RNA, 19 nt, Artificial Sequence
  Description of Artificial Sequence: Synthetic oligonucleotide
  Antisense strand to SEQ ID NO: 616516
uuggaagugacaagggccc

SEQ ID NO: 616518 - RNA, 19 nt, Artificial Sequence
  Description of Artificial Sequence: Synthetic oligonucleotide
  Sense strand starting at position 2458 of SEQ ID NO: 585142
gcggguguucgcagagguu

SEQ ID NO: 616519 - RNA, 19 nt, Artificial Sequence
  Description of Artificial Sequence: Synthetic oligonucleotide
  Antisense strand to SEQ ID NO: 616518
aaccucugcgaacacccgc

SEQ ID NO: 616520 - RNA, 19 nt, Artificial Sequence
  Description of Artificial Sequence: Synthetic oligonucleotide
  Sense strand starting at position 2573 of SEQ ID NO: 585142
gggagcgagucggaacaua

SEQ ID NO: 616521 - RNA, 19 nt, Artificial Sequence
  Description of Artificial Sequence: Synthetic oligonucleotide
  Antisense strand to SEQ ID NO: 616520
uauguuccgacucgcuccc

SEQ ID NO: 616522 - RNA, 19 nt, Artificial Sequence
  Description of Artificial Sequence: Synthetic oligonucleotide
  Sense strand starting at position 3589 of SEQ ID NO: 585142
ccagguaacacccgagaua

SEQ ID NO: 616523 - RNA, 19 nt, Artificial Sequence
  Description of Artificial Sequence: Synthetic oligonucleotide
  Antisense strand to SEQ ID NO: 616522
uaucucggguguuaccugg

SEQ ID NO: 616524 - RNA, 19 nt, Artificial Sequence
  Description of Artificial Sequence: Synthetic oligonucleotide
  Sense strand starting at position 3619 of SEQ ID NO: 585142
gcaagaugggcaggguuau

SEQ ID NO: 616525 - RNA, 19 nt, Artificial Sequence
  Description of Artificial Sequence: Synthetic oligonucleotide
  Antisense strand to SEQ ID NO: 616524
auaacccugcccaucuugc

SEQ ID NO: 616526 - RNA, 19 nt, Artificial Sequence
  Description of Artificial Sequence: Synthetic oligonucleotide
  Sense strand starting at position 3631 of SEQ ID NO: 585142
ggguuaucgcgguguggaa

SEQ ID NO: 616527 - RNA, 19 nt, Artificial Sequence
  Description of Artificial Sequence: Synthetic oligonucleotide
  Antisense strand to SEQ ID NO: 616526
uuccacaccgcgauaaccc

SEQ ID NO: 616528 - RNA, 19 nt, Artificial Sequence
  Description of Artificial Sequence: Synthetic oligonucleotide
  Sense strand starting at position 3633 of SEQ ID NO: 585142
guuaucgcgguguggaaau

SEQ ID NO: 616529 - RNA, 19 nt, Artificial Sequence
  Description of Artificial Sequence: Synthetic oligonucleotide
  Antisense strand to SEQ ID NO: 616528
auuuccacaccgcgauaac

SEQ ID NO: 616530 - RNA, 19 nt, Artificial Sequence
  Description of Artificial Sequence: Synthetic oligonucleotide
  Sense strand starting at position 3665 of SEQ ID NO: 585142
gauguuggugccugcacaa

SEQ ID NO: 616531 - RNA, 19 nt, Artificial Sequence
  Description of Artificial Sequence: Synthetic oligonucleotide
  Antisense strand to SEQ ID NO: 616530
uugugcaggcaccaacauc

SEQ ID NO: 616532 - RNA, 19 nt, Artificial Sequence
  Description of Artificial Sequence: Synthetic oligonucleotide
  Sense strand starting at position 3692 of SEQ ID NO: 585142
agcugaugcucacagauuc

SEQ ID NO: 616533 - RNA, 19 nt, Artificial Sequence
  Description of Artificial Sequence: Synthetic oligonucleotide
  Antisense strand to SEQ ID NO: 616532
gaaucugugagcaucagcu

SEQ ID NO: 616534 - RNA, 19 nt, Artificial Sequence
  Description of Artificial Sequence: Synthetic oligonucleotide
  Sense strand starting at position 3723 of SEQ ID NO: 585142
aaagguuugcacugagucu

SEQ ID NO: 616535 - RNA, 19 nt, Artificial Sequence
  Description of Artificial Sequence: Synthetic oligonucleotide
  Antisense strand to SEQ ID NO: 616534
agacucagugcaaaccuuu

SEQ ID NO: 616536 - RNA, 19 nt, Artificial Sequence
  Description of Artificial Sequence: Synthetic oligonucleotide
  Sense strand starting at position 3757 of SEQ ID NO: 585142
ggaccacagucguguuuca

SEQ ID NO: 616537 - RNA, 19 nt, Artificial Sequence
  Description of Artificial Sequence: Synthetic oligonucleotide
  Antisense strand to SEQ ID NO: 616536
ugaaacacgacuguggucc

SEQ ID NO: 616538 - RNA, 19 nt, Artificial Sequence
  Description of Artificial Sequence: Synthetic oligonucleotide
  Sense strand starting at position 3811 of SEQ ID NO: 585142
guaacuaacuccggaagaa

SEQ ID NO: 616539 - RNA, 19 nt, Artificial Sequence
  Description of Artificial Sequence: Synthetic oligonucleotide
  Antisense strand to SEQ ID NO: 616538
uucuuccggaguuaguuac

SEQ ID NO: 616540 - RNA, 19 nt, Artificial Sequence
  Description of Artificial Sequence: Synthetic oligonucleotide
  Sense strand starting at position 3861 of SEQ ID NO: 585142
gcagauuccgaacaacuga

SEQ ID NO: 616541 - RNA, 19 nt, Artificial Sequence
  Description of Artificial Sequence: Synthetic oligonucleotide
  Antisense strand to SEQ ID NO: 616540
ucaguuguucggaaucugc

SEQ ID NO: 616542 - RNA, 19 nt, Artificial Sequence
  Description of Artificial Sequence: Synthetic oligonucleotide
  Sense strand starting at position 3903 of SEQ ID NO: 585142
auuuguaaaugacgacaaa

SEQ ID NO: 616543 - RNA, 19 nt, Artificial Sequence
  Description of Artificial Sequence: Synthetic oligonucleotide
  Antisense strand to SEQ ID NO: 616542
uuugucgucauuuacaaau

SEQ ID NO: 616544 - RNA, 19 nt, Artificial Sequence
  Description of Artificial Sequence: Synthetic oligonucleotide
  Sense strand starting at position 3953 of SEQ ID NO: 585142
aaagacguauccuuuaggu

SEQ ID NO: 616545 - RNA, 19 nt, Artificial Sequence
  Description of Artificial Sequence: Synthetic oligonucleotide
  Antisense strand to SEQ ID NO: 616544
accuaaaggauacgucuuu

SEQ ID NO: 616546 - RNA, 19 nt, Artificial Sequence
  Description of Artificial Sequence: Synthetic oligonucleotide
  Sense strand starting at position 3955 of SEQ ID NO: 585142
agacguauccuuuagguua

SEQ ID NO: 616547 - RNA, 19 nt, Artificial Sequence
  Description of Artificial Sequence: Synthetic oligonucleotide
  Antisense strand to SEQ ID NO: 616546
uaaccuaaaggauacgucu

SEQ ID NO: 616548 - RNA, 19 nt, Artificial Sequence
  Description of Artificial Sequence: Synthetic oligonucleotide
  Sense strand starting at position 3957 of SEQ ID NO: 585142
acguauccuuuagguuaaa

SEQ ID NO: 616549 - RNA, 19 nt, Artificial Sequence
  Description of Artificial Sequence: Synthetic oligonucleotide
  Antisense strand to SEQ ID NO: 616548
uuuaaccuaaaggauacgu

SEQ ID NO: 616550 - RNA, 19 nt, Artificial Sequence
  Description of Artificial Sequence: Synthetic oligonucleotide
  Sense strand starting at position 3960 of SEQ ID NO: 585142
uauccuuuagguuaaacga

SEQ ID NO: 616551 - RNA, 19 nt, Artificial Sequence
  Description of Artificial Sequence: Synthetic oligonucleotide
  Antisense strand to SEQ ID NO: 616550
ucguuuaaccuaaaggaua

SEQ ID NO: 616552 - RNA, 19 nt, Artificial Sequence
  Description of Artificial Sequence: Synthetic oligonucleotide
  Sense strand starting at position 1122 of SEQ ID NO: 585143
gugugcgugcguuuguuua

SEQ ID NO: 616553 - RNA, 19 nt, Artificial Sequence
  Description of Artificial Sequence: Synthetic oligonucleotide
  Antisense strand to SEQ ID NO: 616552
uaaacaaacgcacgcacac

SEQ ID NO: 616554 - RNA, 19 nt, Artificial Sequence
  Description of Artificial Sequence: Synthetic oligonucleotide
  Sense strand starting at position 1126 of SEQ ID NO: 585143
gcgugcguuuguuuauguu

SEQ ID NO: 616555 - RNA, 19 nt, Artificial Sequence
  Description of Artificial Sequence: Synthetic oligonucleotide
  Antisense strand to SEQ ID NO: 616554
aacauaaacaaacgcacgc

SEQ ID NO: 616556 - RNA, 19 nt, Artificial Sequence
  Description of Artificial Sequence: Synthetic oligonucleotide
  Sense strand starting at position 1355 of SEQ ID NO: 585143
gggcccuugucacuuccaa

SEQ ID NO: 616557 - RNA, 19 nt, Artificial Sequence
  Description of Artificial Sequence: Synthetic oligonucleotide
  Antisense strand to SEQ ID NO: 616556
uuggaagugacaagggccc

SEQ ID NO: 616558 - RNA, 19 nt, Artificial Sequence
  Description of Artificial Sequence: Synthetic oligonucleotide
  Sense strand starting at position 1415 of SEQ ID NO: 585143
gcggguguucgcagagguu

SEQ ID NO: 616559 - RNA, 19 nt, Artificial Sequence
  Description of Artificial Sequence: Synthetic oligonucleotide
  Antisense strand to SEQ ID NO: 616558
aaccucugcgaacacccgc

SEQ ID NO: 616560 - RNA, 19 nt, Artificial Sequence
  Description of Artificial Sequence: Synthetic oligonucleotide
  Sense strand starting at position 1530 of SEQ ID NO: 585143
gggagcgagucggaacaua

SEQ ID NO: 616561 - RNA, 19 nt, Artificial Sequence
  Description of Artificial Sequence: Synthetic oligonucleotide
  Antisense strand to SEQ ID NO: 616560
uauguuccgacucgcuccc

SEQ ID NO: 616562 - RNA, 19 nt, Artificial Sequence
  Description of Artificial Sequence: Synthetic oligonucleotide
  Sense strand starting at position 2546 of SEQ ID NO: 585143
ccagguaacacccgagaua

SEQ ID NO: 616563 - RNA, 19 nt, Artificial Sequence
  Description of Artificial Sequence: Synthetic oligonucleotide
  Antisense strand to SEQ ID NO: 616562
uaucucggguguuaccugg

SEQ ID NO: 616564 - RNA, 19 nt, Artificial Sequence
  Description of Artificial Sequence: Synthetic oligonucleotide
  Sense strand starting at position 2576 of SEQ ID NO: 585143
gcaagaugggcaggguuau

SEQ ID NO: 616565 - RNA, 19 nt, Artificial Sequence
  Description of Artificial Sequence: Synthetic oligonucleotide
  Antisense strand to SEQ ID NO: 616564
auaacccugcccaucuugc

SEQ ID NO: 616566 - RNA, 19 nt, Artificial Sequence
  Description of Artificial Sequence: Synthetic oligonucleotide
  Sense strand starting at position 2588 of SEQ ID NO: 585143
ggguuaucgcgguguggaa

SEQ ID NO: 616567 - RNA, 19 nt, Artificial Sequence
  Description of Artificial Sequence: Synthetic oligonucleotide
  Antisense strand to SEQ ID NO: 616566
uuccacaccgcgauaaccc

SEQ ID NO: 616568 - RNA, 19 nt, Artificial Sequence
  Description of Artificial Sequence: Synthetic oligonucleotide
  Sense strand starting at position 2590 of SEQ ID NO: 585143
guuaucgcgguguggaaau

SEQ ID NO: 616569 - RNA, 19 nt, Artificial Sequence
  Description of Artificial Sequence: Synthetic oligonucleotide
  Antisense strand to SEQ ID NO: 616568
auuuccacaccgcgauaac

SEQ ID NO: 616570 - RNA, 19 nt, Artificial Sequence
  Description of Artificial Sequence: Synthetic oligonucleotide
  Sense strand starting at position 2622 of SEQ ID NO: 585143
gauguuggugccugcacaa

SEQ ID NO: 616571 - RNA, 19 nt, Artificial Sequence
  Description of Artificial Sequence: Synthetic oligonucleotide
  Antisense strand to SEQ ID NO: 616570
uugugcaggcaccaacauc

SEQ ID NO: 616572 - RNA, 19 nt, Artificial Sequence
  Description of Artificial Sequence: Synthetic oligonucleotide
  Sense strand starting at position 2649 of SEQ ID NO: 585143
agcugaugcucacagauuc

SEQ ID NO: 616573 - RNA, 19 nt, Artificial Sequence
  Description of Artificial Sequence: Synthetic oligonucleotide
  Antisense strand to SEQ ID NO: 616572
gaaucugugagcaucagcu

SEQ ID NO: 616574 - RNA, 19 nt, Artificial Sequence
  Description of Artificial Sequence: Synthetic oligonucleotide
  Sense strand starting at position 2680 of SEQ ID NO: 585143
aaagguuugcacugagucu

SEQ ID NO: 616575 - RNA, 19 nt, Artificial Sequence
  Description of Artificial Sequence: Synthetic oligonucleotide
  Antisense strand to SEQ ID NO: 616574
agacucagugcaaaccuuu

SEQ ID NO: 616576 - RNA, 19 nt, Artificial Sequence
  Description of Artificial Sequence: Synthetic oligonucleotide
  Sense strand starting at position 2714 of SEQ ID NO: 585143
ggaccacagucguguuuca

SEQ ID NO: 616577 - RNA, 19 nt, Artificial Sequence
  Description of Artificial Sequence: Synthetic oligonucleotide
  Antisense strand to SEQ ID NO: 616576
ugaaacacgacuguggucc

SEQ ID NO: 616578 - RNA, 19 nt, Artificial Sequence
  Description of Artificial Sequence: Synthetic oligonucleotide
  Sense strand starting at position 2768 of SEQ ID NO: 585143
guaacuaacuccggaagaa

SEQ ID NO: 616579 - RNA, 19 nt, Artificial Sequence
  Description of Artificial Sequence: Synthetic oligonucleotide
  Antisense strand to SEQ ID NO: 616578
uucuuccggaguuaguuac

SEQ ID NO: 616580 - RNA, 19 nt, Artificial Sequence
  Description of Artificial Sequence: Synthetic oligonucleotide
  Sense strand starting at position 2818 of SEQ ID NO: 585143
gcagauuccgaacaacuga

SEQ ID NO: 616581 - RNA, 19 nt, Artificial Sequence
  Description of Artificial Sequence: Synthetic oligonucleotide
  Antisense strand to SEQ ID NO: 616580
ucaguuguucggaaucugc

SEQ ID NO: 616582 - RNA, 19 nt, Artificial Sequence
  Description of Artificial Sequence: Synthetic oligonucleotide
  Sense strand starting at position 2860 of SEQ ID NO: 585143
auuuguaaaugacgacaaa

SEQ ID NO: 616583 - RNA, 19 nt, Artificial Sequence
  Description of Artificial Sequence: Synthetic oligonucleotide
  Antisense strand to SEQ ID NO: 616582
uuugucgucauuuacaaau

SEQ ID NO: 616584 - RNA, 19 nt, Artificial Sequence
  Description of Artificial Sequence: Synthetic oligonucleotide
  Sense strand starting at position 2910 of SEQ ID NO: 585143
aaagacguauccuuuaggu

SEQ ID NO: 616585 - RNA, 19 nt, Artificial Sequence
  Description of Artificial Sequence: Synthetic oligonucleotide
  Antisense strand to SEQ ID NO: 616584
accuaaaggauacgucuuu

SEQ ID NO: 616586 - RNA, 19 nt, Artificial Sequence
  Description of Artificial Sequence: Synthetic oligonucleotide
  Sense strand starting at position 2912 of SEQ ID NO: 585143
agacguauccuuuagguua

SEQ ID NO: 616587 - RNA, 19 nt, Artificial Sequence
  Description of Artificial Sequence: Synthetic oligonucleotide
  Antisense strand to SEQ ID NO: 616586
uaaccuaaaggauacgucu

SEQ ID NO: 616588 - RNA, 19 nt, Artificial Sequence
  Description of Artificial Sequence: Synthetic oligonucleotide
  Sense strand starting at position 2914 of SEQ ID NO: 585143
acguauccuuuagguuaaa

SEQ ID NO: 616589 - RNA, 19 nt, Artificial Sequence
  Description of Artificial Sequence: Synthetic oligonucleotide
  Antisense strand to SEQ ID NO: 616588
uuuaaccuaaaggauacgu

SEQ ID NO: 616590 - RNA, 19 nt, Artificial Sequence
  Description of Artificial Sequence: Synthetic oligonucleotide
  Sense strand starting at position 2917 of SEQ ID NO: 585143
uauccuuuagguuaaacga

SEQ ID NO: 616591 - RNA, 19 nt, Artificial Sequence
  Description of Artificial Sequence: Synthetic oligonucleotide
  Antisense strand to SEQ ID NO: 616590
ucguuuaaccuaaaggaua

SEQ ID NO: 616592 - RNA, 19 nt, Artificial Sequence
  Description of Artificial Sequence: Synthetic oligonucleotide
  Sense strand starting at position 2978 of SEQ ID NO: 585143
aucguuuauuuguacucua

SEQ ID NO: 616593 - RNA, 19 nt, Artificial Sequence
  Description of Artificial Sequence: Synthetic oligonucleotide
  Antisense strand to SEQ ID NO: 616592
uagaguacaaauaaacgau

SEQ ID NO: 616594 - RNA, 19 nt, Artificial Sequence
  Description of Artificial Sequence: Synthetic oligonucleotide
  Sense strand starting at position 2981 of SEQ ID NO: 585143
guuuauuuguacucuacga

SEQ ID NO: 616595 - RNA, 19 nt, Artificial Sequence
  Description of Artificial Sequence: Synthetic oligonucleotide
  Antisense strand to SEQ ID NO: 616594
ucguagaguacaaauaaac

SEQ ID NO: 616596 - RNA, 19 nt, Artificial Sequence
  Description of Artificial Sequence: Synthetic oligonucleotide
  Sense strand starting at position 3067 of SEQ ID NO: 585143
ccuuguaagucaccggaga

SEQ ID NO: 616597 - RNA, 19 nt, Artificial Sequence
  Description of Artificial Sequence: Synthetic oligonucleotide
  Antisense strand to SEQ ID NO: 616596
ucuccggugacuuacaagg

SEQ ID NO: 616598 - RNA, 19 nt, Artificial Sequence
  Description of Artificial Sequence: Synthetic oligonucleotide
  Sense strand starting at position 3068 of SEQ ID NO: 585143
cuuguaagucaccggagau

SEQ ID NO: 616599 - RNA, 19 nt, Artificial Sequence
  Description of Artificial Sequence: Synthetic oligonucleotide
  Antisense strand to SEQ ID NO: 616598
aucuccggugacuuacaag

SEQ ID NO: 616600 - RNA, 19 nt, Artificial Sequence
  Description of Artificial Sequence: Synthetic oligonucleotide
  Sense strand starting at position 3069 of SEQ ID NO: 585143
uuguaagucaccggagaua

SEQ ID NO: 616601 - RNA, 19 nt, Artificial Sequence
  Description of Artificial Sequence: Synthetic oligonucleotide
  Antisense strand to SEQ ID NO: 616600
uaucuccggugacuuacaa

SEQ ID NO: 616602 - RNA, 19 nt, Artificial Sequence
  Description of Artificial Sequence: Synthetic oligonucleotide
  Sense strand starting at position 3081 of SEQ ID NO: 585143
ggagauagcucagagugua

SEQ ID NO: 616603 - RNA, 19 nt, Artificial Sequence
  Description of Artificial Sequence: Synthetic oligonucleotide
  Antisense strand to SEQ ID NO: 616602
uacacucugagcuaucucc

SEQ ID NO: 616604 - RNA, 19 nt, Artificial Sequence
  Description of Artificial Sequence: Synthetic oligonucleotide
  Sense strand starting at position 3084 of SEQ ID NO: 585143
gauagcucagaguguagaa

SEQ ID NO: 616605 - RNA, 19 nt, Artificial Sequence
  Description of Artificial Sequence: Synthetic oligonucleotide
  Antisense strand to SEQ ID NO: 616604
uucuacacucugagcuauc

SEQ ID NO: 616606 - RNA, 19 nt, Artificial Sequence
  Description of Artificial Sequence: Synthetic oligonucleotide
  Sense strand starting at position 3241 of SEQ ID NO: 585143
gcuaguucgacgcguacaa

SEQ ID NO: 616607 - RNA, 19 nt, Artificial Sequence
  Description of Artificial Sequence: Synthetic oligonucleotide
  Antisense strand to SEQ ID NO: 616606
uuguacgcgucgaacuagc

SEQ ID NO: 616608 - RNA, 19 nt, Artificial Sequence
  Description of Artificial Sequence: Synthetic oligonucleotide
  Sense strand starting at position 3242 of SEQ ID NO: 585143
cuaguucgacgcguacaaa

SEQ ID NO: 616609 - RNA, 19 nt, Artificial Sequence
  Description of Artificial Sequence: Synthetic oligonucleotide
  Antisense strand to SEQ ID NO: 616608
uuuguacgcgucgaacuag

SEQ ID NO: 616610 - RNA, 19 nt, Artificial Sequence
  Description of Artificial Sequence: Synthetic oligonucleotide
  Sense strand starting at position 3259 of SEQ ID NO: 585143
aacagaugaugucaucgua

SEQ ID NO: 616611 - RNA, 19 nt, Artificial Sequence
  Description of Artificial Sequence: Synthetic oligonucleotide
  Antisense strand to SEQ ID NO: 616610
uacgaugacaucaucuguu

SEQ ID NO: 616612 - RNA, 19 nt, Artificial Sequence
  Description of Artificial Sequence: Synthetic oligonucleotide
  Sense strand starting at position 3328 of SEQ ID NO: 585143
ccgcuuacucgucaaggca

SEQ ID NO: 616613 - RNA, 19 nt, Artificial Sequence
  Description of Artificial Sequence: Synthetic oligonucleotide
  Antisense strand to SEQ ID NO: 616612
ugccuugacgaguaagcgg

SEQ ID NO: 616614 - RNA, 19 nt, Artificial Sequence
  Description of Artificial Sequence: Synthetic oligonucleotide
  Sense strand starting at position 445 of SEQ ID NO: 585144
uccgcauuccgcgaaauua

SEQ ID NO: 616615 - RNA, 19 nt, Artificial Sequence
  Description of Artificial Sequence: Synthetic oligonucleotide
  Antisense strand to SEQ ID NO: 616614
uaauuucgcggaaugcgga

SEQ ID NO: 616616 - RNA, 19 nt, Artificial Sequence
  Description of Artificial Sequence: Synthetic oligonucleotide
  Sense strand starting at position 455 of SEQ ID NO: 585144
gcgaaauuacccgguccuu

SEQ ID NO: 616617 - RNA, 19 nt, Artificial Sequence
  Description of Artificial Sequence: Synthetic oligonucleotide
  Antisense strand to SEQ ID NO: 616616
aaggaccggguaauuucgc

SEQ ID NO: 616618 - RNA, 19 nt, Artificial Sequence
  Description of Artificial Sequence: Synthetic oligonucleotide
  Sense strand starting at position 540 of SEQ ID NO: 585144
gaaguuuguuuggcgugga

SEQ ID NO: 616619 - RNA, 19 nt, Artificial Sequence
  Description of Artificial Sequence: Synthetic oligonucleotide
  Antisense strand to SEQ ID NO: 616618
uccacgccaaacaaacuuc

SEQ ID NO: 616620 - RNA, 19 nt, Artificial Sequence
  Description of Artificial Sequence: Synthetic oligonucleotide
  Sense strand starting at position 543 of SEQ ID NO: 585144
guuuguuuggcguggauga

SEQ ID NO: 616621 - RNA, 19 nt, Artificial Sequence
  Description of Artificial Sequence: Synthetic oligonucleotide
  Antisense strand to SEQ ID NO: 616620
ucauccacgccaaacaaac

SEQ ID NO: 616622 - RNA, 19 nt, Artificial Sequence
  Description of Artificial Sequence: Synthetic oligonucleotide
  Sense strand starting at position 762 of SEQ ID NO: 585144
aggugucagccagaucguu

SEQ ID NO: 616623 - RNA, 19 nt, Artificial Sequence
  Description of Artificial Sequence: Synthetic oligonucleotide
  Antisense strand to SEQ ID NO: 616622
aacgaucuggcugacaccu

SEQ ID NO: 616624 - RNA, 19 nt, Artificial Sequence
  Description of Artificial Sequence: Synthetic oligonucleotide
  Sense strand starting at position 1091 of SEQ ID NO: 585144
cgggaaguauucuuugucu

SEQ ID NO: 616625 - RNA, 19 nt, Artificial Sequence
  Description of Artificial Sequence: Synthetic oligonucleotide
  Antisense strand to SEQ ID NO: 616624
agacaaagaauacuucccg

SEQ ID NO: 616626 - RNA, 19 nt, Artificial Sequence
  Description of Artificial Sequence: Synthetic oligonucleotide
  Sense strand starting at position 1093 of SEQ ID NO: 585144
ggaaguauucuuugucuga

SEQ ID NO: 616627 - RNA, 19 nt, Artificial Sequence
  Description of Artificial Sequence: Synthetic oligonucleotide
  Antisense strand to SEQ ID NO: 616626
ucagacaaagaauacuucc

SEQ ID NO: 616628 - RNA, 19 nt, Artificial Sequence
  Description of Artificial Sequence: Synthetic oligonucleotide
  Sense strand starting at position 1094 of SEQ ID NO: 585144
gaaguauucuuugucugac

SEQ ID NO: 616629 - RNA, 19 nt, Artificial Sequence
  Description of Artificial Sequence: Synthetic oligonucleotide
  Antisense strand to SEQ ID NO: 616628
gucagacaaagaauacuuc

SEQ ID NO: 616630 - RNA, 19 nt, Artificial Sequence
  Description of Artificial Sequence: Synthetic oligonucleotide
  Sense strand starting at position 2193 of SEQ ID NO: 585144
ccauaauucgccuaaagca

SEQ ID NO: 616631 - RNA, 19 nt, Artificial Sequence
  Description of Artificial Sequence: Synthetic oligonucleotide
  Antisense strand to SEQ ID NO: 616630
ugcuuuaggcgaauuaugg

SEQ ID NO: 616632 - RNA, 19 nt, Artificial Sequence
  Description of Artificial Sequence: Synthetic oligonucleotide
  Sense strand starting at position 2682 of SEQ ID NO: 585144
ccguaaagugcucugcgaa

SEQ ID NO: 616633 - RNA, 19 nt, Artificial Sequence
  Description of Artificial Sequence: Synthetic oligonucleotide
  Antisense strand to SEQ ID NO: 616632
uucgcagagcacuuuacgg

SEQ ID NO: 616634 - RNA, 19 nt, Artificial Sequence
  Description of Artificial Sequence: Synthetic oligonucleotide
  Sense strand starting at position 2685 of SEQ ID NO: 585144
uaaagugcucugcgaacca

SEQ ID NO: 616635 - RNA, 19 nt, Artificial Sequence
  Description of Artificial Sequence: Synthetic oligonucleotide
  Antisense strand to SEQ ID NO: 616634
ugguucgcagagcacuuua

SEQ ID NO: 616636 - RNA, 19 nt, Artificial Sequence
  Description of Artificial Sequence: Synthetic oligonucleotide
  Sense strand starting at position 2759 of SEQ ID NO: 585144
ggcaauuauccggacaaau

SEQ ID NO: 616637 - RNA, 19 nt, Artificial Sequence
  Description of Artificial Sequence: Synthetic oligonucleotide
  Antisense strand to SEQ ID NO: 616636
auuuguccggauaauugcc

SEQ ID NO: 616638 - RNA, 19 nt, Artificial Sequence
  Description of Artificial Sequence: Synthetic oligonucleotide
  Sense strand starting at position 2857 of SEQ ID NO: 585144
ugguguguuuggguuggga

SEQ ID NO: 616639 - RNA, 19 nt, Artificial Sequence
  Description of Artificial Sequence: Synthetic oligonucleotide
  Antisense strand to SEQ ID NO: 616638
ucccaacccaaacacacca

SEQ ID NO: 616640 - RNA, 19 nt, Artificial Sequence
  Description of Artificial Sequence: Synthetic oligonucleotide
  Sense strand starting at position 2878 of SEQ ID NO: 585144
gggaggucugggugaggaa

SEQ ID NO: 616641 - RNA, 19 nt, Artificial Sequence
  Description of Artificial Sequence: Synthetic oligonucleotide
  Antisense strand to SEQ ID NO: 616640
uuccucacccagaccuccc

SEQ ID NO: 616642 - RNA, 19 nt, Artificial Sequence
  Description of Artificial Sequence: Synthetic oligonucleotide
  Sense strand starting at position 2944 of SEQ ID NO: 585144
cucagagucccguggaaau

SEQ ID NO: 616643 - RNA, 19 nt, Artificial Sequence
  Description of Artificial Sequence: Synthetic oligonucleotide
  Antisense strand to SEQ ID NO: 616642
auuuccacgggacucugag

SEQ ID NO: 616644 - RNA, 19 nt, Artificial Sequence
  Description of Artificial Sequence: Synthetic oligonucleotide
  Sense strand starting at position 2956 of SEQ ID NO: 585144
uggaaaucucaauacccgu

SEQ ID NO: 616645 - RNA, 19 nt, Artificial Sequence
  Description of Artificial Sequence: Synthetic oligonucleotide
  Antisense strand to SEQ ID NO: 616644
acggguauugagauuucca

SEQ ID NO: 616646 - RNA, 19 nt, Artificial Sequence
  Description of Artificial Sequence: Synthetic oligonucleotide
  Sense strand starting at position 3299 of SEQ ID NO: 585144
ggauuucuuggccguucca

SEQ ID NO: 616647 - RNA, 19 nt, Artificial Sequence
  Description of Artificial Sequence: Synthetic oligonucleotide
  Antisense strand to SEQ ID NO: 616646
uggaacggccaagaaaucc

SEQ ID NO: 616648 - RNA, 19 nt, Artificial Sequence
  Description of Artificial Sequence: Synthetic oligonucleotide
  Sense strand starting at position 3314 of SEQ ID NO: 585144
uccagugguccuugaaaga

SEQ ID NO: 616649 - RNA, 19 nt, Artificial Sequence
  Description of Artificial Sequence: Synthetic oligonucleotide
  Antisense strand to SEQ ID NO: 616648
ucuuucaaggaccacugga

SEQ ID NO: 616650 - RNA, 19 nt, Artificial Sequence
  Description of Artificial Sequence: Synthetic oligonucleotide
  Sense strand starting at position 3500 of SEQ ID NO: 585144
gugugaaauugugcaggga

SEQ ID NO: 616651 - RNA, 19 nt, Artificial Sequence
  Description of Artificial Sequence: Synthetic oligonucleotide
  Antisense strand to SEQ ID NO: 616650
ucccugcacaauuucacac

SEQ ID NO: 616652 - RNA, 19 nt, Artificial Sequence
  Description of Artificial Sequence: Synthetic oligonucleotide
  Sense strand starting at position 3501 of SEQ ID NO: 585144
ugugaaauugugcagggaa

SEQ ID NO: 616653 - RNA, 19 nt, Artificial Sequence
  Description of Artificial Sequence: Synthetic oligonucleotide
  Antisense strand to SEQ ID NO: 616652
uucccugcacaauuucaca

SEQ ID NO: 616654 - RNA, 19 nt, Artificial Sequence
  Description of Artificial Sequence: Synthetic oligonucleotide
  Sense strand starting at position 3502 of SEQ ID NO: 585144
gugaaauugugcagggaag

SEQ ID NO: 616655 - RNA, 19 nt, Artificial Sequence
  Description of Artificial Sequence: Synthetic oligonucleotide
  Antisense strand to SEQ ID NO: 616654
cuucccugcacaauuucac

SEQ ID NO: 616656 - RNA, 19 nt, Artificial Sequence
  Description of Artificial Sequence: Synthetic oligonucleotide
  Sense strand starting at position 3503 of SEQ ID NO: 585144
ugaaauugugcagggaaga

SEQ ID NO: 616657 - RNA, 19 nt, Artificial Sequence
  Description of Artificial Sequence: Synthetic oligonucleotide
  Antisense strand to SEQ ID NO: 616656
ucuucccugcacaauuuca

SEQ ID NO: 616658 - RNA, 19 nt, Artificial Sequence
  Description of Artificial Sequence: Synthetic oligonucleotide
  Sense strand starting at position 3504 of SEQ ID NO: 585144
gaaauugugcagggaagac

SEQ ID NO: 616659 - RNA, 19 nt, Artificial Sequence
  Description of Artificial Sequence: Synthetic oligonucleotide
  Antisense strand to SEQ ID NO: 616658
gucuucccugcacaauuuc

SEQ ID NO: 616660 - RNA, 19 nt, Artificial Sequence
  Description of Artificial Sequence: Synthetic oligonucleotide
  Sense strand starting at position 3516 of SEQ ID NO: 585144
ggaagacucuaagugccau

SEQ ID NO: 616661 - RNA, 19 nt, Artificial Sequence
  Description of Artificial Sequence: Synthetic oligonucleotide
  Antisense strand to SEQ ID NO: 616660
auggcacuuagagucuucc

SEQ ID NO: 616662 - RNA, 19 nt, Artificial Sequence
  Description of Artificial Sequence: Synthetic oligonucleotide
  Sense strand starting at position 3528 of SEQ ID NO: 585144
gugccauuuauguggauau

SEQ ID NO: 616663 - RNA, 19 nt, Artificial Sequence
  Description of Artificial Sequence: Synthetic oligonucleotide
  Antisense strand to SEQ ID NO: 616662
auauccacauaaauggcac

SEQ ID NO: 616664 - RNA, 19 nt, Artificial Sequence
  Description of Artificial Sequence: Synthetic oligonucleotide
  Sense strand starting at position 3539 of SEQ ID NO: 585144
guggauaucucaguguccu

SEQ ID NO: 616665 - RNA, 19 nt, Artificial Sequence
  Description of Artificial Sequence: Synthetic oligonucleotide
  Antisense strand to SEQ ID NO: 616664
aggacacugagauauccac

SEQ ID NO: 616666 - RNA, 19 nt, Artificial Sequence
  Description of Artificial Sequence: Synthetic oligonucleotide
  Sense strand starting at position 3540 of SEQ ID NO: 585144
uggauaucucaguguccuu

SEQ ID NO: 616667 - RNA, 19 nt, Artificial Sequence
  Description of Artificial Sequence: Synthetic oligonucleotide
  Antisense strand to SEQ ID NO: 616666
aaggacacugagauaucca

SEQ ID NO: 616668 - RNA, 19 nt, Artificial Sequence
  Description of Artificial Sequence: Synthetic oligonucleotide
  Sense strand starting at position 3552 of SEQ ID NO: 585144
uguccuuuccaguguggca

SEQ ID NO: 616669 - RNA, 19 nt, Artificial Sequence
  Description of Artificial Sequence: Synthetic oligonucleotide
  Antisense strand to SEQ ID NO: 616668
ugccacacuggaaaggaca

SEQ ID NO: 616670 - RNA, 19 nt, Artificial Sequence
  Description of Artificial Sequence: Synthetic oligonucleotide
  Sense strand starting at position 3561 of SEQ ID NO: 585144
caguguggcaacugagaua

SEQ ID NO: 616671 - RNA, 19 nt, Artificial Sequence
  Description of Artificial Sequence: Synthetic oligonucleotide
  Antisense strand to SEQ ID NO: 616670
uaucucaguugccacacug

SEQ ID NO: 616672 - RNA, 19 nt, Artificial Sequence
  Description of Artificial Sequence: Synthetic oligonucleotide
  Sense strand starting at position 3663 of SEQ ID NO: 585144
gggagauauuuguauuauc

SEQ ID NO: 616673 - RNA, 19 nt, Artificial Sequence
  Description of Artificial Sequence: Synthetic oligonucleotide
  Antisense strand to SEQ ID NO: 616672
gauaauacaaauaucuccc

SEQ ID NO: 616674 - RNA, 19 nt, Artificial Sequence
  Description of Artificial Sequence: Synthetic oligonucleotide
  Sense strand starting at position 3755 of SEQ ID NO: 585144
agugaugagccagauucca

SEQ ID NO: 616675 - RNA, 19 nt, Artificial Sequence
  Description of Artificial Sequence: Synthetic oligonucleotide
  Antisense strand to SEQ ID NO: 616674
uggaaucuggcucaucacu

SEQ ID NO: 616676 - RNA, 19 nt, Artificial Sequence
  Description of Artificial Sequence: Synthetic oligonucleotide
  Sense strand starting at position 3812 of SEQ ID NO: 585144
gguggucucugaagcgaca

SEQ ID NO: 616677 - RNA, 19 nt, Artificial Sequence
  Description of Artificial Sequence: Synthetic oligonucleotide
  Antisense strand to SEQ ID NO: 616676
ugucgcuucagagaccacc

SEQ ID NO: 616678 - RNA, 19 nt, Artificial Sequence
  Description of Artificial Sequence: Synthetic oligonucleotide
  Sense strand starting at position 3857 of SEQ ID NO: 585144
gaaggauauucugggagaa

SEQ ID NO: 616679 - RNA, 19 nt, Artificial Sequence
  Description of Artificial Sequence: Synthetic oligonucleotide
  Antisense strand to SEQ ID NO: 616678
uucucccagaauauccuuc

SEQ ID NO: 616680 - RNA, 19 nt, Artificial Sequence
  Description of Artificial Sequence: Synthetic oligonucleotide
  Sense strand starting at position 3859 of SEQ ID NO: 585144
aggauauucugggagaaag

SEQ ID NO: 616681 - RNA, 19 nt, Artificial Sequence
  Description of Artificial Sequence: Synthetic oligonucleotide
  Antisense strand to SEQ ID NO: 616680
cuuucucccagaauauccu

SEQ ID NO: 616682 - RNA, 19 nt, Artificial Sequence
  Description of Artificial Sequence: Synthetic oligonucleotide
  Sense strand starting at position 3874 of SEQ ID NO: 585144
aaagaaagcccuugguagu

SEQ ID NO: 616683 - RNA, 19 nt, Artificial Sequence
  Description of Artificial Sequence: Synthetic oligonucleotide
  Antisense strand to SEQ ID NO: 616682
acuaccaagggcuuucuuu

SEQ ID NO: 616684 - RNA, 19 nt, Artificial Sequence
  Description of Artificial Sequence: Synthetic oligonucleotide
  Sense strand starting at position 3875 of SEQ ID NO: 585144
aagaaagcccuugguagua

SEQ ID NO: 616685 - RNA, 19 nt, Artificial Sequence
  Description of Artificial Sequence: Synthetic oligonucleotide
  Antisense strand to SEQ ID NO: 616684
uacuaccaagggcuuucuu

SEQ ID NO: 616686 - RNA, 19 nt, Artificial Sequence
  Description of Artificial Sequence: Synthetic oligonucleotide
  Sense strand starting at position 3888 of SEQ ID NO: 585144
guaguacuaucugauuuac

SEQ ID NO: 616687 - RNA, 19 nt, Artificial Sequence
  Description of Artificial Sequence: Synthetic oligonucleotide
  Antisense strand to SEQ ID NO: 616686
guaaaucagauaguacuac

SEQ ID NO: 616688 - RNA, 19 nt, Artificial Sequence
  Description of Artificial Sequence: Synthetic oligonucleotide
  Sense strand starting at position 3899 of SEQ ID NO: 585144
ugauuuaccuucuguugag

SEQ ID NO: 616689 - RNA, 19 nt, Artificial Sequence
  Description of Artificial Sequence: Synthetic oligonucleotide
  Antisense strand to SEQ ID NO: 616688
cucaacagaagguaaauca

SEQ ID NO: 616690 - RNA, 19 nt, Artificial Sequence
  Description of Artificial Sequence: Synthetic oligonucleotide
  Sense strand starting at position 3928 of SEQ ID NO: 585144
gguggaaaucauggugugu

SEQ ID NO: 616691 - RNA, 19 nt, Artificial Sequence
  Description of Artificial Sequence: Synthetic oligonucleotide
  Antisense strand to SEQ ID NO: 616690
acacaccaugauuuccacc

SEQ ID NO: 616692 - RNA, 19 nt, Artificial Sequence
  Description of Artificial Sequence: Synthetic oligonucleotide
  Sense strand starting at position 3933 of SEQ ID NO: 585144
aaaucaugguguguggaca

SEQ ID NO: 616693 - RNA, 19 nt, Artificial Sequence
  Description of Artificial Sequence: Synthetic oligonucleotide
  Antisense strand to SEQ ID NO: 616692
uguccacacaccaugauuu

SEQ ID NO: 616694 - RNA, 19 nt, Artificial Sequence
  Description of Artificial Sequence: Synthetic oligonucleotide
  Sense strand starting at position 2070 of SEQ ID NO: 585145
ggcuuuccugccggagaga

SEQ ID NO: 616695 - RNA, 19 nt, Artificial Sequence
  Description of Artificial Sequence: Synthetic oligonucleotide
  Antisense strand to SEQ ID NO: 616694
ucucuccggcaggaaagcc

SEQ ID NO: 616696 - RNA, 19 nt, Artificial Sequence
  Description of Artificial Sequence: Synthetic oligonucleotide
  Sense strand starting at position 2071 of SEQ ID NO: 585145
gcuuuccugccggagagaa

SEQ ID NO: 616697 - RNA, 19 nt, Artificial Sequence
  Description of Artificial Sequence: Synthetic oligonucleotide
  Antisense strand to SEQ ID NO: 616696
uucucuccggcaggaaagc

SEQ ID NO: 616698 - RNA, 19 nt, Artificial Sequence
  Description of Artificial Sequence: Synthetic oligonucleotide
  Sense strand starting at position 2098 of SEQ ID NO: 585145
cgcaucugcugcucguuaa

SEQ ID NO: 616699 - RNA, 19 nt, Artificial Sequence
  Description of Artificial Sequence: Synthetic oligonucleotide
  Antisense strand to SEQ ID NO: 616698
uuaacgagcagcagaugcg

SEQ ID NO: 616700 - RNA, 19 nt, Artificial Sequence
  Description of Artificial Sequence: Synthetic oligonucleotide
  Sense strand starting at position 2099 of SEQ ID NO: 585145
gcaucugcugcucguuaaa

SEQ ID NO: 616701 - RNA, 19 nt, Artificial Sequence
  Description of Artificial Sequence: Synthetic oligonucleotide
  Antisense strand to SEQ ID NO: 616700
uuuaacgagcagcagaugc

SEQ ID NO: 616702 - RNA, 19 nt, Artificial Sequence
  Description of Artificial Sequence: Synthetic oligonucleotide
  Sense strand starting at position 2101 of SEQ ID NO: 585145
aucugcugcucguuaaaga

SEQ ID NO: 616703 - RNA, 19 nt, Artificial Sequence
  Description of Artificial Sequence: Synthetic oligonucleotide
  Antisense strand to SEQ ID NO: 616702
ucuuuaacgagcagcagau

SEQ ID NO: 616704 - RNA, 19 nt, Artificial Sequence
  Description of Artificial Sequence: Synthetic oligonucleotide
  Sense strand starting at position 2177 of SEQ ID NO: 585145
cggaaauggugccggauga

SEQ ID NO: 616705 - RNA, 19 nt, Artificial Sequence
  Description of Artificial Sequence: Synthetic oligonucleotide
  Antisense strand to SEQ ID NO: 616704
ucauccggcaccauuuccg

SEQ ID NO: 616706 - RNA, 19 nt, Artificial Sequence
  Description of Artificial Sequence: Synthetic oligonucleotide
  Sense strand starting at position 2178 of SEQ ID NO: 585145
ggaaauggugccggaugau

SEQ ID NO: 616707 - RNA, 19 nt, Artificial Sequence
  Description of Artificial Sequence: Synthetic oligonucleotide
  Antisense strand to SEQ ID NO: 616706
aucauccggcaccauuucc

SEQ ID NO: 616708 - RNA, 19 nt, Artificial Sequence
  Description of Artificial Sequence: Synthetic oligonucleotide
  Sense strand starting at position 2819 of SEQ ID NO: 585145
gggacuuugcucgggccua

SEQ ID NO: 616709 - RNA, 19 nt, Artificial Sequence
  Description of Artificial Sequence: Synthetic oligonucleotide
  Antisense strand to SEQ ID NO: 616708
uaggcccgagcaaaguccc

SEQ ID NO: 616710 - RNA, 19 nt, Artificial Sequence
  Description of Artificial Sequence: Synthetic oligonucleotide
  Sense strand starting at position 2820 of SEQ ID NO: 585145
ggacuuugcucgggccuaa

SEQ ID NO: 616711 - RNA, 19 nt, Artificial Sequence
  Description of Artificial Sequence: Synthetic oligonucleotide
  Antisense strand to SEQ ID NO: 616710
uuaggcccgagcaaagucc

SEQ ID NO: 616712 - RNA, 19 nt, Artificial Sequence
  Description of Artificial Sequence: Synthetic oligonucleotide
  Sense strand starting at position 2847 of SEQ ID NO: 585145
cggcguaugugcuucugua

SEQ ID NO: 616713 - RNA, 19 nt, Artificial Sequence
  Description of Artificial Sequence: Synthetic oligonucleotide
  Antisense strand to SEQ ID NO: 616712
uacagaagcacauacgccg

SEQ ID NO: 616714 - RNA, 19 nt, Artificial Sequence
  Description of Artificial Sequence: Synthetic oligonucleotide
  Sense strand starting at position 2848 of SEQ ID NO: 585145
ggcguaugugcuucuguag

SEQ ID NO: 616715 - RNA, 19 nt, Artificial Sequence
  Description of Artificial Sequence: Synthetic oligonucleotide
  Antisense strand to SEQ ID NO: 616714
cuacagaagcacauacgcc

SEQ ID NO: 616716 - RNA, 19 nt, Artificial Sequence
  Description of Artificial Sequence: Synthetic oligonucleotide
  Sense strand starting at position 2849 of SEQ ID NO: 585145
gcguaugugcuucuguagu

SEQ ID NO: 616717 - RNA, 19 nt, Artificial Sequence
  Description of Artificial Sequence: Synthetic oligonucleotide
  Antisense strand to SEQ ID NO: 616716
acuacagaagcacauacgc

SEQ ID NO: 616718 - RNA, 19 nt, Artificial Sequence
  Description of Artificial Sequence: Synthetic oligonucleotide
  Sense strand starting at position 2855 of SEQ ID NO: 585145
gugcuucuguaguagugaa

SEQ ID NO: 616719 - RNA, 19 nt, Artificial Sequence
  Description of Artificial Sequence: Synthetic oligonucleotide
  Antisense strand to SEQ ID NO: 616718
uucacuacuacagaagcac

SEQ ID NO: 616720 - RNA, 19 nt, Artificial Sequence
  Description of Artificial Sequence: Synthetic oligonucleotide
  Sense strand starting at position 2873 of SEQ ID NO: 585145
aaacgaugcugcuuacgaa

SEQ ID NO: 616721 - RNA, 19 nt, Artificial Sequence
  Description of Artificial Sequence: Synthetic oligonucleotide
  Antisense strand to SEQ ID NO: 616720
uucguaagcagcaucguuu

SEQ ID NO: 616722 - RNA, 19 nt, Artificial Sequence
  Description of Artificial Sequence: Synthetic oligonucleotide
  Sense strand starting at position 2874 of SEQ ID NO: 585145
aacgaugcugcuuacgaaa

SEQ ID NO: 616723 - RNA, 19 nt, Artificial Sequence
  Description of Artificial Sequence: Synthetic oligonucleotide
  Antisense strand to SEQ ID NO: 616722
uuucguaagcagcaucguu

SEQ ID NO: 616724 - RNA, 19 nt, Artificial Sequence
  Description of Artificial Sequence: Synthetic oligonucleotide
  Sense strand starting at position 2925 of SEQ ID NO: 585145
acagaaauugcgcaggaca

SEQ ID NO: 616725 - RNA, 19 nt, Artificial Sequence
  Description of Artificial Sequence: Synthetic oligonucleotide
  Antisense strand to SEQ ID NO: 616724
uguccugcgcaauuucugu

SEQ ID NO: 616726 - RNA, 19 nt, Artificial Sequence
  Description of Artificial Sequence: Synthetic oligonucleotide
  Sense strand starting at position 2927 of SEQ ID NO: 585145
agaaauugcgcaggacacu

SEQ ID NO: 616727 - RNA, 19 nt, Artificial Sequence
  Description of Artificial Sequence: Synthetic oligonucleotide
  Antisense strand to SEQ ID NO: 616726
aguguccugcgcaauuucu

SEQ ID NO: 616728 - RNA, 19 nt, Artificial Sequence
  Description of Artificial Sequence: Synthetic oligonucleotide
  Sense strand starting at position 3281 of SEQ ID NO: 585145
cuugguucccgggaucuga

SEQ ID NO: 616729 - RNA, 19 nt, Artificial Sequence
  Description of Artificial Sequence: Synthetic oligonucleotide
  Antisense strand to SEQ ID NO: 616728
ucagaucccgggaaccaag

SEQ ID NO: 616730 - RNA, 19 nt, Artificial Sequence
  Description of Artificial Sequence: Synthetic oligonucleotide
  Sense strand starting at position 3362 of SEQ ID NO: 585145
acggccauuucuuuccaau

SEQ ID NO: 616731 - RNA, 19 nt, Artificial Sequence
  Description of Artificial Sequence: Synthetic oligonucleotide
  Antisense strand to SEQ ID NO: 616730
auuggaaagaaauggccgu

SEQ ID NO: 616732 - RNA, 19 nt, Artificial Sequence
  Description of Artificial Sequence: Synthetic oligonucleotide
  Sense strand starting at position 3374 of SEQ ID NO: 585145
uuccaauauuccuuuggga

SEQ ID NO: 616733 - RNA, 19 nt, Artificial Sequence
  Description of Artificial Sequence: Synthetic oligonucleotide
  Antisense strand to SEQ ID NO: 616732
ucccaaaggaauauuggaa

SEQ ID NO: 616734 - RNA, 19 nt, Artificial Sequence
  Description of Artificial Sequence: Synthetic oligonucleotide
  Sense strand starting at position 3376 of SEQ ID NO: 585145
ccaauauuccuuugggacu

SEQ ID NO: 616735 - RNA, 19 nt, Artificial Sequence
  Description of Artificial Sequence: Synthetic oligonucleotide
  Antisense strand to SEQ ID NO: 616734
agucccaaaggaauauugg

SEQ ID NO: 616736 - RNA, 19 nt, Artificial Sequence
  Description of Artificial Sequence: Synthetic oligonucleotide
  Sense strand starting at position 3618 of SEQ ID NO: 585145
ggagcucaccuuugauguu

SEQ ID NO: 616737 - RNA, 19 nt, Artificial Sequence
  Description of Artificial Sequence: Synthetic oligonucleotide
  Antisense strand to SEQ ID NO: 616736
aacaucaaaggugagcucc

SEQ ID NO: 616738 - RNA, 19 nt, Artificial Sequence
  Description of Artificial Sequence: Synthetic oligonucleotide
  Sense strand starting at position 3619 of SEQ ID NO: 585145
gagcucaccuuugauguuu

SEQ ID NO: 616739 - RNA, 19 nt, Artificial Sequence
  Description of Artificial Sequence: Synthetic oligonucleotide
  Antisense strand to SEQ ID NO: 616738
aaacaucaaaggugagcuc

SEQ ID NO: 616740 - RNA, 19 nt, Artificial Sequence
  Description of Artificial Sequence: Synthetic oligonucleotide
  Sense strand starting at position 3621 of SEQ ID NO: 585145
gcucaccuuugauguuuau

SEQ ID NO: 616741 - RNA, 19 nt, Artificial Sequence
  Description of Artificial Sequence: Synthetic oligonucleotide
  Antisense strand to SEQ ID NO: 616740
auaaacaucaaaggugagc

SEQ ID NO: 616742 - RNA, 19 nt, Artificial Sequence
  Description of Artificial Sequence: Synthetic oligonucleotide
  Sense strand starting at position 3746 of SEQ ID NO: 585145
agccacagcucuguuauuu

SEQ ID NO: 616743 - RNA, 19 nt, Artificial Sequence
  Description of Artificial Sequence: Synthetic oligonucleotide
  Antisense strand to SEQ ID NO: 616742
aaauaacagagcuguggcu

SEQ ID NO: 616744 - RNA, 19 nt, Artificial Sequence
  Description of Artificial Sequence: Synthetic oligonucleotide
  Sense strand starting at position 3779 of SEQ ID NO: 585145
ggaucgcguucggagauua

SEQ ID NO: 616745 - RNA, 19 nt, Artificial Sequence
  Description of Artificial Sequence: Synthetic oligonucleotide
  Antisense strand to SEQ ID NO: 616744
uaaucuccgaacgcgaucc

SEQ ID NO: 616746 - RNA, 19 nt, Artificial Sequence
  Description of Artificial Sequence: Synthetic oligonucleotide
  Sense strand starting at position 3789 of SEQ ID NO: 585145
cggagauuagacugacuuu

SEQ ID NO: 616747 - RNA, 19 nt, Artificial Sequence
  Description of Artificial Sequence: Synthetic oligonucleotide
  Antisense strand to SEQ ID NO: 616746
aaagucagucuaaucuccg

SEQ ID NO: 616748 - RNA, 19 nt, Artificial Sequence
  Description of Artificial Sequence: Synthetic oligonucleotide
  Sense strand starting at position 3883 of SEQ ID NO: 585145
cagcucuagccuuggaguu

SEQ ID NO: 616749 - RNA, 19 nt, Artificial Sequence
  Description of Artificial Sequence: Synthetic oligonucleotide
  Antisense strand to SEQ ID NO: 616748
aacuccaaggcuagagcug

SEQ ID NO: 616750 - RNA, 19 nt, Artificial Sequence
  Description of Artificial Sequence: Synthetic oligonucleotide
  Sense strand starting at position 3895 of SEQ ID NO: 585145
uggaguugaugguucacua

SEQ ID NO: 616751 - RNA, 19 nt, Artificial Sequence
  Description of Artificial Sequence: Synthetic oligonucleotide
  Antisense strand to SEQ ID NO: 616750
uagugaaccaucaacucca

SEQ ID NO: 616752 - RNA, 19 nt, Artificial Sequence
  Description of Artificial Sequence: Synthetic oligonucleotide
  Sense strand starting at position 229 of SEQ ID NO: 585146
caaugagaucagggccaau

SEQ ID NO: 616753 - RNA, 19 nt, Artificial Sequence
  Description of Artificial Sequence: Synthetic oligonucleotide
  Antisense strand to SEQ ID NO: 616752
auuggcccugaucucauug

SEQ ID NO: 616754 - RNA, 19 nt, Artificial Sequence
  Description of Artificial Sequence: Synthetic oligonucleotide
  Sense strand starting at position 282 of SEQ ID NO: 585146
ccaaguauccauugucaag

SEQ ID NO: 616755 - RNA, 19 nt, Artificial Sequence
  Description of Artificial Sequence: Synthetic oligonucleotide
  Antisense strand to SEQ ID NO: 616754
cuugacaauggauacuugg

SEQ ID NO: 616756 - RNA, 19 nt, Artificial Sequence
  Description of Artificial Sequence: Synthetic oligonucleotide
  Sense strand starting at position 434 of SEQ ID NO: 585146
augggugaauaaguacaua

SEQ ID NO: 616757 - RNA, 19 nt, Artificial Sequence
  Description of Artificial Sequence: Synthetic oligonucleotide
  Antisense strand to SEQ ID NO: 616756
uauguacuuauucacccau

SEQ ID NO: 616758 - RNA, 19 nt, Artificial Sequence
  Description of Artificial Sequence: Synthetic oligonucleotide
  Sense strand starting at position 502 of SEQ ID NO: 585146
aggauaaagucuuuaucuc

SEQ ID NO: 616759 - RNA, 19 nt, Artificial Sequence
  Description of Artificial Sequence: Synthetic oligonucleotide
  Antisense strand to SEQ ID NO: 616758
gagauaaagacuuuauccu

SEQ ID NO: 616760 - RNA, 19 nt, Artificial Sequence
  Description of Artificial Sequence: Synthetic oligonucleotide
  Sense strand starting at position 675 of SEQ ID NO: 585146
cugagaacauuaguaucuu

SEQ ID NO: 616761 - RNA, 19 nt, Artificial Sequence
  Description of Artificial Sequence: Synthetic oligonucleotide
  Antisense strand to SEQ ID NO: 616760
aagauacuaauguucucag

SEQ ID NO: 616762 - RNA, 19 nt, Artificial Sequence
  Description of Artificial Sequence: Synthetic oligonucleotide
  Sense strand starting at position 681 of SEQ ID NO: 585146
acauuaguaucuucuaagu

SEQ ID NO: 616763 - RNA, 19 nt, Artificial Sequence
  Description of Artificial Sequence: Synthetic oligonucleotide
  Antisense strand to SEQ ID NO: 616762
acuuagaagauacuaaugu

SEQ ID NO: 616764 - RNA, 19 nt, Artificial Sequence
  Description of Artificial Sequence: Synthetic oligonucleotide
  Sense strand starting at position 710 of SEQ ID NO: 585146
acauuagcccuguauauuc

SEQ ID NO: 616765 - RNA, 19 nt, Artificial Sequence
  Description of Artificial Sequence: Synthetic oligonucleotide
  Antisense strand to SEQ ID NO: 616764
gaauauacagggcuaaugu

SEQ ID NO: 616766 - RNA, 19 nt, Artificial Sequence
  Description of Artificial Sequence: Synthetic oligonucleotide
  Sense strand starting at position 774 of SEQ ID NO: 585146
auauauuacccuggaaugu

SEQ ID NO: 616767 - RNA, 19 nt, Artificial Sequence
  Description of Artificial Sequence: Synthetic oligonucleotide
  Antisense strand to SEQ ID NO: 616766
acauuccaggguaauauau

SEQ ID NO: 616768 - RNA, 19 nt, Artificial Sequence
  Description of Artificial Sequence: Synthetic oligonucleotide
  Sense strand starting at position 819 of SEQ ID NO: 585146
aucugaaguuuagauuuga

SEQ ID NO: 616769 - RNA, 19 nt, Artificial Sequence
  Description of Artificial Sequence: Synthetic oligonucleotide
  Antisense strand to SEQ ID NO: 616768
ucaaaucuaaacuucagau

SEQ ID NO: 616770 - RNA, 19 nt, Artificial Sequence
  Description of Artificial Sequence: Synthetic oligonucleotide
  Sense strand starting at position 849 of SEQ ID NO: 585146
agggaagucuuauaauuua

SEQ ID NO: 616771 - RNA, 19 nt, Artificial Sequence
  Description of Artificial Sequence: Synthetic oligonucleotide
  Antisense strand to SEQ ID NO: 616770
uaaauuauaagacuucccu

SEQ ID NO: 616772 - RNA, 19 nt, Artificial Sequence
  Description of Artificial Sequence: Synthetic oligonucleotide
  Sense strand starting at position 893 of SEQ ID NO: 585146
gcuaaagugaggcaugagu

SEQ ID NO: 616773 - RNA, 19 nt, Artificial Sequence
  Description of Artificial Sequence: Synthetic oligonucleotide
  Antisense strand to SEQ ID NO: 616772
acucaugccucacuuuagc

SEQ ID NO: 616774 - RNA, 19 nt, Artificial Sequence
  Description of Artificial Sequence: Synthetic oligonucleotide
  Sense strand starting at position 895 of SEQ ID NO: 585146
uaaagugaggcaugaguua

SEQ ID NO: 616775 - RNA, 19 nt, Artificial Sequence
  Description of Artificial Sequence: Synthetic oligonucleotide
  Antisense strand to SEQ ID NO: 616774
uaacucaugccucacuuua

SEQ ID NO: 616776 - RNA, 19 nt, Artificial Sequence
  Description of Artificial Sequence: Synthetic oligonucleotide
  Sense strand starting at position 988 of SEQ ID NO: 585146
auguacauacuguaauuga

SEQ ID NO: 616777 - RNA, 19 nt, Artificial Sequence
  Description of Artificial Sequence: Synthetic oligonucleotide
  Antisense strand to SEQ ID NO: 616776
ucaauuacaguauguacau

SEQ ID NO: 616778 - RNA, 19 nt, Artificial Sequence
  Description of Artificial Sequence: Synthetic oligonucleotide
  Sense strand starting at position 1104 of SEQ ID NO: 585146
uuaggcaacucuuuggaca

SEQ ID NO: 616779 - RNA, 19 nt, Artificial Sequence
  Description of Artificial Sequence: Synthetic oligonucleotide
  Antisense strand to SEQ ID NO: 616778
uguccaaagaguugccuaa

SEQ ID NO: 616780 - RNA, 19 nt, Artificial Sequence
  Description of Artificial Sequence: Synthetic oligonucleotide
  Sense strand starting at position 1249 of SEQ ID NO: 585146
gaaggaauauagccuugua

SEQ ID NO: 616781 - RNA, 19 nt, Artificial Sequence
  Description of Artificial Sequence: Synthetic oligonucleotide
  Antisense strand to SEQ ID NO: 616780
uacaaggcuauauuccuuc

SEQ ID NO: 616782 - RNA, 19 nt, Artificial Sequence
  Description of Artificial Sequence: Synthetic oligonucleotide
  Sense strand starting at position 1326 of SEQ ID NO: 585146
augcaaaguguccagaacu

SEQ ID NO: 616783 - RNA, 19 nt, Artificial Sequence
  Description of Artificial Sequence: Synthetic oligonucleotide
  Antisense strand to SEQ ID NO: 616782
aguucuggacacuuugcau

SEQ ID NO: 616784 - RNA, 19 nt, Artificial Sequence
  Description of Artificial Sequence: Synthetic oligonucleotide
  Sense strand starting at position 1334 of SEQ ID NO: 585146
uguccagaacuugaaguuu

SEQ ID NO: 616785 - RNA, 19 nt, Artificial Sequence
  Description of Artificial Sequence: Synthetic oligonucleotide
  Antisense strand to SEQ ID NO: 616784
aaacuucaaguucuggaca

SEQ ID NO: 616786 - RNA, 19 nt, Artificial Sequence
  Description of Artificial Sequence: Synthetic oligonucleotide
  Sense strand starting at position 1661 of SEQ ID NO: 585146
ccauacuucggagaguaug

SEQ ID NO: 616787 - RNA, 19 nt, Artificial Sequence
  Description of Artificial Sequence: Synthetic oligonucleotide
  Antisense strand to SEQ ID NO: 616786
cauacucuccgaaguaugg

SEQ ID NO: 616788 - RNA, 19 nt, Artificial Sequence
  Description of Artificial Sequence: Synthetic oligonucleotide
  Sense strand starting at position 1878 of SEQ ID NO: 585146
gggcuuuauuuagacaaau

SEQ ID NO: 616789 - RNA, 19 nt, Artificial Sequence
  Description of Artificial Sequence: Synthetic oligonucleotide
  Antisense strand to SEQ ID NO: 616788
auuugucuaaauaaagccc

SEQ ID NO: 616790 - RNA, 19 nt, Artificial Sequence
  Description of Artificial Sequence: Synthetic oligonucleotide
  Sense strand starting at position 1889 of SEQ ID NO: 585146
agacaaauaucugagaaca

SEQ ID NO: 616791 - RNA, 19 nt, Artificial Sequence
  Description of Artificial Sequence: Synthetic oligonucleotide
  Antisense strand to SEQ ID NO: 616790
uguucucagauauuugucu

SEQ ID NO: 616792 - RNA, 19 nt, Artificial Sequence
  Description of Artificial Sequence: Synthetic oligonucleotide
  Sense strand starting at position 1891 of SEQ ID NO: 585146
acaaauaucugagaacaga

SEQ ID NO: 616793 - RNA, 19 nt, Artificial Sequence
  Description of Artificial Sequence: Synthetic oligonucleotide
  Antisense strand to SEQ ID NO: 616792
ucuguucucagauauuugu

SEQ ID NO: 616794 - RNA, 19 nt, Artificial Sequence
  Description of Artificial Sequence: Synthetic oligonucleotide
  Sense strand starting at position 2106 of SEQ ID NO: 585146
uuaacauucugagcuauga

SEQ ID NO: 616795 - RNA, 19 nt, Artificial Sequence
  Description of Artificial Sequence: Synthetic oligonucleotide
  Antisense strand to SEQ ID NO: 616794
ucauagcucagaauguuaa

SEQ ID NO: 616796 - RNA, 19 nt, Artificial Sequence
  Description of Artificial Sequence: Synthetic oligonucleotide
  Sense strand starting at position 2326 of SEQ ID NO: 585146
uuauguucccagcacugaa

SEQ ID NO: 616797 - RNA, 19 nt, Artificial Sequence
  Description of Artificial Sequence: Synthetic oligonucleotide
  Antisense strand to SEQ ID NO: 616796
uucagugcugggaacauaa

SEQ ID NO: 616798 - RNA, 19 nt, Artificial Sequence
  Description of Artificial Sequence: Synthetic oligonucleotide
  Sense strand starting at position 2626 of SEQ ID NO: 585146
aaguacuauuugggaaaca

SEQ ID NO: 616799 - RNA, 19 nt, Artificial Sequence
  Description of Artificial Sequence: Synthetic oligonucleotide
  Antisense strand to SEQ ID NO: 616798
uguuucccaaauaguacuu

SEQ ID NO: 616800 - RNA, 19 nt, Artificial Sequence
  Description of Artificial Sequence: Synthetic oligonucleotide
  Sense strand starting at position 2627 of SEQ ID NO: 585146
aguacuauuugggaaacac

SEQ ID NO: 616801 - RNA, 19 nt, Artificial Sequence
  Description of Artificial Sequence: Synthetic oligonucleotide
  Antisense strand to SEQ ID NO: 616800
guguuucccaaauaguacu

SEQ ID NO: 616802 - RNA, 19 nt, Artificial Sequence
  Description of Artificial Sequence: Synthetic oligonucleotide
  Sense strand starting at position 2794 of SEQ ID NO: 585146
cuuacuaacuuggcaagaa

SEQ ID NO: 616803 - RNA, 19 nt, Artificial Sequence
  Description of Artificial Sequence: Synthetic oligonucleotide
  Antisense strand to SEQ ID NO: 616802
uucuugccaaguuaguaag

SEQ ID NO: 616804 - RNA, 19 nt, Artificial Sequence
  Description of Artificial Sequence: Synthetic oligonucleotide
  Sense strand starting at position 2937 of SEQ ID NO: 585146
augagucuggcagaucaac

SEQ ID NO: 616805 - RNA, 19 nt, Artificial Sequence
  Description of Artificial Sequence: Synthetic oligonucleotide
  Antisense strand to SEQ ID NO: 616804
guugaucugccagacucau

SEQ ID NO: 616806 - RNA, 19 nt, Artificial Sequence
  Description of Artificial Sequence: Synthetic oligonucleotide
  Sense strand starting at position 2953 of SEQ ID NO: 585146
aacguacggucauuuauac

SEQ ID NO: 616807 - RNA, 19 nt, Artificial Sequence
  Description of Artificial Sequence: Synthetic oligonucleotide
  Antisense strand to SEQ ID NO: 616806
guauaaaugaccguacguu

SEQ ID NO: 616808 - RNA, 19 nt, Artificial Sequence
  Description of Artificial Sequence: Synthetic oligonucleotide
  Sense strand starting at position 2983 of SEQ ID NO: 585146
auugcaaacuuguuuauga

SEQ ID NO: 616809 - RNA, 19 nt, Artificial Sequence
  Description of Artificial Sequence: Synthetic oligonucleotide
  Antisense strand to SEQ ID NO: 616808
ucauaaacaaguuugcaau

SEQ ID NO: 616810 - RNA, 19 nt, Artificial Sequence
  Description of Artificial Sequence: Synthetic oligonucleotide
  Sense strand starting at position 2984 of SEQ ID NO: 585146
uugcaaacuuguuuaugaa

SEQ ID NO: 616811 - RNA, 19 nt, Artificial Sequence
  Description of Artificial Sequence: Synthetic oligonucleotide
  Antisense strand to SEQ ID NO: 616810
uucauaaacaaguuugcaa

SEQ ID NO: 616812 - RNA, 19 nt, Artificial Sequence
  Description of Artificial Sequence: Synthetic oligonucleotide
  Sense strand starting at position 2985 of SEQ ID NO: 585146
ugcaaacuuguuuaugaag

SEQ ID NO: 616813 - RNA, 19 nt, Artificial Sequence
  Description of Artificial Sequence: Synthetic oligonucleotide
  Antisense strand to SEQ ID NO: 616812
cuucauaaacaaguuugca

SEQ ID NO: 616814 - RNA, 19 nt, Artificial Sequence
  Description of Artificial Sequence: Synthetic oligonucleotide
  Sense strand starting at position 2997 of SEQ ID NO: 585146
uaugaagugucacugaucu

SEQ ID NO: 616815 - RNA, 19 nt, Artificial Sequence
  Description of Artificial Sequence: Synthetic oligonucleotide
  Antisense strand to SEQ ID NO: 616814
agaucagugacacuucaua

SEQ ID NO: 616816 - RNA, 19 nt, Artificial Sequence
  Description of Artificial Sequence: Synthetic oligonucleotide
  Sense strand starting at position 3004 of SEQ ID NO: 585146
ugucacugaucucucuaua

SEQ ID NO: 616817 - RNA, 19 nt, Artificial Sequence
  Description of Artificial Sequence: Synthetic oligonucleotide
  Antisense strand to SEQ ID NO: 616816
uauagagagaucagugaca

SEQ ID NO: 616818 - RNA, 19 nt, Artificial Sequence
  Description of Artificial Sequence: Synthetic oligonucleotide
  Sense strand starting at position 3067 of SEQ ID NO: 585146
uugugagacccuugaaccu

SEQ ID NO: 616819 - RNA, 19 nt, Artificial Sequence
  Description of Artificial Sequence: Synthetic oligonucleotide
  Antisense strand to SEQ ID NO: 616818
agguucaagggucucacaa

SEQ ID NO: 616820 - RNA, 19 nt, Artificial Sequence
  Description of Artificial Sequence: Synthetic oligonucleotide
  Sense strand starting at position 3409 of SEQ ID NO: 585146
ugucuuuggagucagagua

SEQ ID NO: 616821 - RNA, 19 nt, Artificial Sequence
  Description of Artificial Sequence: Synthetic oligonucleotide
  Antisense strand to SEQ ID NO: 616820
uacucugacuccaaagaca

SEQ ID NO: 616822 - RNA, 19 nt, Artificial Sequence
  Description of Artificial Sequence: Synthetic oligonucleotide
  Sense strand starting at position 3667 of SEQ ID NO: 585146
ugaagucuucccugagaca

SEQ ID NO: 616823 - RNA, 19 nt, Artificial Sequence
  Description of Artificial Sequence: Synthetic oligonucleotide
  Antisense strand to SEQ ID NO: 616822
ugucucagggaagacuuca

SEQ ID NO: 616824 - RNA, 19 nt, Artificial Sequence
  Description of Artificial Sequence: Synthetic oligonucleotide
  Sense strand starting at position 3887 of SEQ ID NO: 585146
acagucauugagcaaguga

SEQ ID NO: 616825 - RNA, 19 nt, Artificial Sequence
  Description of Artificial Sequence: Synthetic oligonucleotide
  Antisense strand to SEQ ID NO: 616824
ucacuugcucaaugacugu

SEQ ID NO: 616826 - RNA, 19 nt, Artificial Sequence
  Description of Artificial Sequence: Synthetic oligonucleotide
  Sense strand starting at position 3894 of SEQ ID NO: 585146
uugagcaagugagugaaau

SEQ ID NO: 616827 - RNA, 19 nt, Artificial Sequence
  Description of Artificial Sequence: Synthetic oligonucleotide
  Antisense strand to SEQ ID NO: 616826
auuucacucacuugcucaa

SEQ ID NO: 616828 - RNA, 19 nt, Artificial Sequence
  Description of Artificial Sequence: Synthetic oligonucleotide
  Sense strand starting at position 3895 of SEQ ID NO: 585146
ugagcaagugagugaaauu

SEQ ID NO: 616829 - RNA, 19 nt, Artificial Sequence
  Description of Artificial Sequence: Synthetic oligonucleotide
  Antisense strand to SEQ ID NO: 616828
aauuucacucacuugcuca

SEQ ID NO: 616830 - RNA, 19 nt, Artificial Sequence
  Description of Artificial Sequence: Synthetic oligonucleotide
  Sense strand starting at position 3946 of SEQ ID NO: 585146
ugagcaauggccugagaac

SEQ ID NO: 616831 - RNA, 19 nt, Artificial Sequence
  Description of Artificial Sequence: Synthetic oligonucleotide
  Antisense strand to SEQ ID NO: 616830
guucucaggccauugcuca

SEQ ID NO: 616832 - RNA, 19 nt, Artificial Sequence
  Description of Artificial Sequence: Synthetic oligonucleotide
  Sense strand starting at position 221 of SEQ ID NO: 585147
cuuagugagacuggauaca

SEQ ID NO: 616833 - RNA, 19 nt, Artificial Sequence
  Description of Artificial Sequence: Synthetic oligonucleotide
  Antisense strand to SEQ ID NO: 616832
uguauccagucucacuaag

SEQ ID NO: 616834 - RNA, 19 nt, Artificial Sequence
  Description of Artificial Sequence: Synthetic oligonucleotide
  Sense strand starting at position 387 of SEQ ID NO: 585147
acuagaacuccagguacga

SEQ ID NO: 616835 - RNA, 19 nt, Artificial Sequence
  Description of Artificial Sequence: Synthetic oligonucleotide
  Antisense strand to SEQ ID NO: 616834
ucguaccuggaguucuagu

SEQ ID NO: 616836 - RNA, 19 nt, Artificial Sequence
  Description of Artificial Sequence: Synthetic oligonucleotide
  Sense strand starting at position 502 of SEQ ID NO: 585147
uguggugugugcauguuua

SEQ ID NO: 616837 - RNA, 19 nt, Artificial Sequence
  Description of Artificial Sequence: Synthetic oligonucleotide
  Antisense strand to SEQ ID NO: 616836
uaaacaugcacacaccaca

SEQ ID NO: 616838 - RNA, 19 nt, Artificial Sequence
  Description of Artificial Sequence: Synthetic oligonucleotide
  Sense strand starting at position 666 of SEQ ID NO: 585147
augugaguaguguguaauu

SEQ ID NO: 616839 - RNA, 19 nt, Artificial Sequence
  Description of Artificial Sequence: Synthetic oligonucleotide
  Antisense strand to SEQ ID NO: 616838
aauuacacacuacucacau

SEQ ID NO: 616840 - RNA, 19 nt, Artificial Sequence
  Description of Artificial Sequence: Synthetic oligonucleotide
  Sense strand starting at position 668 of SEQ ID NO: 585147
gugaguaguguguaauugu

SEQ ID NO: 616841 - RNA, 19 nt, Artificial Sequence
  Description of Artificial Sequence: Synthetic oligonucleotide
  Antisense strand to SEQ ID NO: 616840
acaauuacacacuacucac

SEQ ID NO: 616842 - RNA, 19 nt, Artificial Sequence
  Description of Artificial Sequence: Synthetic oligonucleotide
  Sense strand starting at position 858 of SEQ ID NO: 585147
augugacugguguguaacu

SEQ ID NO: 616843 - RNA, 19 nt, Artificial Sequence
  Description of Artificial Sequence: Synthetic oligonucleotide
  Antisense strand to SEQ ID NO: 616842
aguuacacaccagucacau

SEQ ID NO: 616844 - RNA, 19 nt, Artificial Sequence
  Description of Artificial Sequence: Synthetic oligonucleotide
  Sense strand starting at position 955 of SEQ ID NO: 585147
cgugugagugguguguaau

SEQ ID NO: 616845 - RNA, 19 nt, Artificial Sequence
  Description of Artificial Sequence: Synthetic oligonucleotide
  Antisense strand to SEQ ID NO: 616844
auuacacaccacucacacg

SEQ ID NO: 616846 - RNA, 19 nt, Artificial Sequence
  Description of Artificial Sequence: Synthetic oligonucleotide
  Sense strand starting at position 958 of SEQ ID NO: 585147
gugagugguguguaauugu

SEQ ID NO: 616847 - RNA, 19 nt, Artificial Sequence
  Description of Artificial Sequence: Synthetic oligonucleotide
  Antisense strand to SEQ ID NO: 616846
acaauuacacaccacucac

SEQ ID NO: 616848 - RNA, 19 nt, Artificial Sequence
  Description of Artificial Sequence: Synthetic oligonucleotide
  Sense strand starting at position 986 of SEQ ID NO: 585147
ugugguuugugcaugugua

SEQ ID NO: 616849 - RNA, 19 nt, Artificial Sequence
  Description of Artificial Sequence: Synthetic oligonucleotide
  Antisense strand to SEQ ID NO: 616848
uacacaugcacaaaccaca

SEQ ID NO: 616850 - RNA, 19 nt, Artificial Sequence
  Description of Artificial Sequence: Synthetic oligonucleotide
  Sense strand starting at position 1214 of SEQ ID NO: 585147
gugagugguguguaacugu

SEQ ID NO: 616851 - RNA, 19 nt, Artificial Sequence
  Description of Artificial Sequence: Synthetic oligonucleotide
  Antisense strand to SEQ ID NO: 616850
acaguuacacaccacucac

SEQ ID NO: 616852 - RNA, 19 nt, Artificial Sequence
  Description of Artificial Sequence: Synthetic oligonucleotide
  Sense strand starting at position 1258 of SEQ ID NO: 585147
uacauaugagaguggugua

SEQ ID NO: 616853 - RNA, 19 nt, Artificial Sequence
  Description of Artificial Sequence: Synthetic oligonucleotide
  Antisense strand to SEQ ID NO: 616852
uacaccacucucauaugua

SEQ ID NO: 616854 - RNA, 19 nt, Artificial Sequence
  Description of Artificial Sequence: Synthetic oligonucleotide
  Sense strand starting at position 1259 of SEQ ID NO: 585147
acauaugagagugguguau

SEQ ID NO: 616855 - RNA, 19 nt, Artificial Sequence
  Description of Artificial Sequence: Synthetic oligonucleotide
  Antisense strand to SEQ ID NO: 616854
auacaccacucucauaugu

SEQ ID NO: 616856 - RNA, 19 nt, Artificial Sequence
  Description of Artificial Sequence: Synthetic oligonucleotide
  Sense strand starting at position 1263 of SEQ ID NO: 585147
augagagugguguauaacu

SEQ ID NO: 616857 - RNA, 19 nt, Artificial Sequence
  Description of Artificial Sequence: Synthetic oligonucleotide
  Antisense strand to SEQ ID NO: 616856
aguuauacaccacucucau

SEQ ID NO: 616858 - RNA, 19 nt, Artificial Sequence
  Description of Artificial Sequence: Synthetic oligonucleotide
  Sense strand starting at position 1265 of SEQ ID NO: 585147
gagagugguguauaacugu

SEQ ID NO: 616859 - RNA, 19 nt, Artificial Sequence
  Description of Artificial Sequence: Synthetic oligonucleotide
  Antisense strand to SEQ ID NO: 616858
acaguuauacaccacucuc

SEQ ID NO: 616860 - RNA, 19 nt, Artificial Sequence
  Description of Artificial Sequence: Synthetic oligonucleotide
  Sense strand starting at position 1268 of SEQ ID NO: 585147
agugguguauaacugugua

SEQ ID NO: 616861 - RNA, 19 nt, Artificial Sequence
  Description of Artificial Sequence: Synthetic oligonucleotide
  Antisense strand to SEQ ID NO: 616860
uacacaguuauacaccacu

SEQ ID NO: 616862 - RNA, 19 nt, Artificial Sequence
  Description of Artificial Sequence: Synthetic oligonucleotide
  Sense strand starting at position 1271 of SEQ ID NO: 585147
gguguauaacuguguacau

SEQ ID NO: 616863 - RNA, 19 nt, Artificial Sequence
  Description of Artificial Sequence: Synthetic oligonucleotide
  Antisense strand to SEQ ID NO: 616862
auguacacaguuauacacc

SEQ ID NO: 616864 - RNA, 19 nt, Artificial Sequence
  Description of Artificial Sequence: Synthetic oligonucleotide
  Sense strand starting at position 1272 of SEQ ID NO: 585147
guguauaacuguguacauu

SEQ ID NO: 616865 - RNA, 19 nt, Artificial Sequence
  Description of Artificial Sequence: Synthetic oligonucleotide
  Antisense strand to SEQ ID NO: 616864
aauguacacaguuauacac

SEQ ID NO: 616866 - RNA, 19 nt, Artificial Sequence
  Description of Artificial Sequence: Synthetic oligonucleotide
  Sense strand starting at position 1273 of SEQ ID NO: 585147
uguauaacuguguacauua

SEQ ID NO: 616867 - RNA, 19 nt, Artificial Sequence
  Description of Artificial Sequence: Synthetic oligonucleotide
  Antisense strand to SEQ ID NO: 616866
uaauguacacaguuauaca

SEQ ID NO: 616868 - RNA, 19 nt, Artificial Sequence
  Description of Artificial Sequence: Synthetic oligonucleotide
  Sense strand starting at position 1278 of SEQ ID NO: 585147
aacuguguacauuauggau

SEQ ID NO: 616869 - RNA, 19 nt, Artificial Sequence
  Description of Artificial Sequence: Synthetic oligonucleotide
  Antisense strand to SEQ ID NO: 616868
auccauaauguacacaguu

SEQ ID NO: 616870 - RNA, 19 nt, Artificial Sequence
  Description of Artificial Sequence: Synthetic oligonucleotide
  Sense strand starting at position 1284 of SEQ ID NO: 585147
guacauuauggaugugugu

SEQ ID NO: 616871 - RNA, 19 nt, Artificial Sequence
  Description of Artificial Sequence: Synthetic oligonucleotide
  Antisense strand to SEQ ID NO: 616870
acacacauccauaauguac

SEQ ID NO: 616872 - RNA, 19 nt, Artificial Sequence
  Description of Artificial Sequence: Synthetic oligonucleotide
  Sense strand starting at position 1366 of SEQ ID NO: 585147
gagcgaugcuuacuucuga

SEQ ID NO: 616873 - RNA, 19 nt, Artificial Sequence
  Description of Artificial Sequence: Synthetic oligonucleotide
  Antisense strand to SEQ ID NO: 616872
ucagaaguaagcaucgcuc

SEQ ID NO: 616874 - RNA, 19 nt, Artificial Sequence
  Description of Artificial Sequence: Synthetic oligonucleotide
  Sense strand starting at position 1428 of SEQ ID NO: 585147
guugcacacuugcuggaaa

SEQ ID NO: 616875 - RNA, 19 nt, Artificial Sequence
  Description of Artificial Sequence: Synthetic oligonucleotide
  Antisense strand to SEQ ID NO: 616874
uuuccagcaagugugcaac

SEQ ID NO: 616876 - RNA, 19 nt, Artificial Sequence
  Description of Artificial Sequence: Synthetic oligonucleotide
  Sense strand starting at position 1732 of SEQ ID NO: 585147
cugucucuggugugaggau

SEQ ID NO: 616877 - RNA, 19 nt, Artificial Sequence
  Description of Artificial Sequence: Synthetic oligonucleotide
  Antisense strand to SEQ ID NO: 616876
auccucacaccagagacag

SEQ ID NO: 616878 - RNA, 19 nt, Artificial Sequence
  Description of Artificial Sequence: Synthetic oligonucleotide
  Sense strand starting at position 1896 of SEQ ID NO: 585147
gagugaucccaacaguguu

SEQ ID NO: 616879 - RNA, 19 nt, Artificial Sequence
  Description of Artificial Sequence: Synthetic oligonucleotide
  Antisense strand to SEQ ID NO: 616878
aacacuguugggaucacuc

SEQ ID NO: 616880 - RNA, 19 nt, Artificial Sequence
  Description of Artificial Sequence: Synthetic oligonucleotide
  Sense strand starting at position 2247 of SEQ ID NO: 585147
ggcagcguucucaggcaga

SEQ ID NO: 616881 - RNA, 19 nt, Artificial Sequence
  Description of Artificial Sequence: Synthetic oligonucleotide
  Antisense strand to SEQ ID NO: 616880
ucugccugagaacgcugcc

SEQ ID NO: 616882 - RNA, 19 nt, Artificial Sequence
  Description of Artificial Sequence: Synthetic oligonucleotide
  Sense strand starting at position 2250 of SEQ ID NO: 585147
agcguucucaggcagaauc

SEQ ID NO: 616883 - RNA, 19 nt, Artificial Sequence
  Description of Artificial Sequence: Synthetic oligonucleotide
  Antisense strand to SEQ ID NO: 616882
gauucugccugagaacgcu

SEQ ID NO: 616884 - RNA, 19 nt, Artificial Sequence
  Description of Artificial Sequence: Synthetic oligonucleotide
  Sense strand starting at position 2470 of SEQ ID NO: 585147
ugaguuaauccugaguuac

SEQ ID NO: 616885 - RNA, 19 nt, Artificial Sequence
  Description of Artificial Sequence: Synthetic oligonucleotide
  Antisense strand to SEQ ID NO: 616884
guaacucaggauuaacuca

SEQ ID NO: 616886 - RNA, 19 nt, Artificial Sequence
  Description of Artificial Sequence: Synthetic oligonucleotide
  Sense strand starting at position 2472 of SEQ ID NO: 585147
aguuaauccugaguuacug

SEQ ID NO: 616887 - RNA, 19 nt, Artificial Sequence
  Description of Artificial Sequence: Synthetic oligonucleotide
  Antisense strand to SEQ ID NO: 616886
caguaacucaggauuaacu

SEQ ID NO: 616888 - RNA, 19 nt, Artificial Sequence
  Description of Artificial Sequence: Synthetic oligonucleotide
  Sense strand starting at position 2488 of SEQ ID NO: 585147
cuguaagacugacuuccuu

SEQ ID NO: 616889 - RNA, 19 nt, Artificial Sequence
  Description of Artificial Sequence: Synthetic oligonucleotide
  Antisense strand to SEQ ID NO: 616888
aaggaagucagucuuacag

SEQ ID NO: 616890 - RNA, 19 nt, Artificial Sequence
  Description of Artificial Sequence: Synthetic oligonucleotide
  Sense strand starting at position 2563 of SEQ ID NO: 585147
uaaucuuccugugcuguga

SEQ ID NO: 616891 - RNA, 19 nt, Artificial Sequence
  Description of Artificial Sequence: Synthetic oligonucleotide
  Antisense strand to SEQ ID NO: 616890
ucacagcacaggaagauua

SEQ ID NO: 616892 - RNA, 19 nt, Artificial Sequence
  Description of Artificial Sequence: Synthetic oligonucleotide
  Sense strand starting at position 2866 of SEQ ID NO: 585147
auaugauuauugucugcuu

SEQ ID NO: 616893 - RNA, 19 nt, Artificial Sequence
  Description of Artificial Sequence: Synthetic oligonucleotide
  Antisense strand to SEQ ID NO: 616892
aagcagacaauaaucauau

SEQ ID NO: 616894 - RNA, 19 nt, Artificial Sequence
  Description of Artificial Sequence: Synthetic oligonucleotide
  Sense strand starting at position 2868 of SEQ ID NO: 585147
augauuauugucugcuuaa

SEQ ID NO: 616895 - RNA, 19 nt, Artificial Sequence
  Description of Artificial Sequence: Synthetic oligonucleotide
  Antisense strand to SEQ ID NO: 616894
uuaagcagacaauaaucau

SEQ ID NO: 616896 - RNA, 19 nt, Artificial Sequence
  Description of Artificial Sequence: Synthetic oligonucleotide
  Sense strand starting at position 2869 of SEQ ID NO: 585147
ugauuauugucugcuuaac

SEQ ID NO: 616897 - RNA, 19 nt, Artificial Sequence
  Description of Artificial Sequence: Synthetic oligonucleotide
  Antisense strand to SEQ ID NO: 616896
guuaagcagacaauaauca

SEQ ID NO: 616898 - RNA, 19 nt, Artificial Sequence
  Description of Artificial Sequence: Synthetic oligonucleotide
  Sense strand starting at position 2921 of SEQ ID NO: 585147
acagaucuucagugagggu

SEQ ID NO: 616899 - RNA, 19 nt, Artificial Sequence
  Description of Artificial Sequence: Synthetic oligonucleotide
  Antisense strand to SEQ ID NO: 616898
acccucacugaagaucugu

SEQ ID NO: 616900 - RNA, 19 nt, Artificial Sequence
  Description of Artificial Sequence: Synthetic oligonucleotide
  Sense strand starting at position 2973 of SEQ ID NO: 585147
ugacacauauuugguugaa

SEQ ID NO: 616901 - RNA, 19 nt, Artificial Sequence
  Description of Artificial Sequence: Synthetic oligonucleotide
  Antisense strand to SEQ ID NO: 616900
uucaaccaaauauguguca

SEQ ID NO: 616902 - RNA, 19 nt, Artificial Sequence
  Description of Artificial Sequence: Synthetic oligonucleotide
  Sense strand starting at position 3311 of SEQ ID NO: 585147
gcacaucugauagaggguu

SEQ ID NO: 616903 - RNA, 19 nt, Artificial Sequence
  Description of Artificial Sequence: Synthetic oligonucleotide
  Antisense strand to SEQ ID NO: 616902
aacccucuaucagaugugc

SEQ ID NO: 616904 - RNA, 19 nt, Artificial Sequence
  Description of Artificial Sequence: Synthetic oligonucleotide
  Sense strand starting at position 3424 of SEQ ID NO: 585147
guucuugucuaacugcaga

SEQ ID NO: 616905 - RNA, 19 nt, Artificial Sequence
  Description of Artificial Sequence: Synthetic oligonucleotide
  Antisense strand to SEQ ID NO: 616904
ucugcaguuagacaagaac

SEQ ID NO: 616906 - RNA, 19 nt, Artificial Sequence
  Description of Artificial Sequence: Synthetic oligonucleotide
  Sense strand starting at position 3427 of SEQ ID NO: 585147
cuugucuaacugcagacau

SEQ ID NO: 616907 - RNA, 19 nt, Artificial Sequence
  Description of Artificial Sequence: Synthetic oligonucleotide
  Antisense strand to SEQ ID NO: 616906
augucugcaguuagacaag

SEQ ID NO: 616908 - RNA, 19 nt, Artificial Sequence
  Description of Artificial Sequence: Synthetic oligonucleotide
  Sense strand starting at position 3856 of SEQ ID NO: 585147
aaaucuuaccgugaaguuc

SEQ ID NO: 616909 - RNA, 19 nt, Artificial Sequence
  Description of Artificial Sequence: Synthetic oligonucleotide
  Antisense strand to SEQ ID NO: 616908
gaacuucacgguaagauuu

SEQ ID NO: 616910 - RNA, 19 nt, Artificial Sequence
  Description of Artificial Sequence: Synthetic oligonucleotide
  Sense strand starting at position 3867 of SEQ ID NO: 585147
ugaaguuccgugcaagaaa

SEQ ID NO: 616911 - RNA, 19 nt, Artificial Sequence
  Description of Artificial Sequence: Synthetic oligonucleotide
  Antisense strand to SEQ ID NO: 616910
uuucuugcacggaacuuca

SEQ ID NO: 616912 - RNA, 19 nt, Artificial Sequence
  Description of Artificial Sequence: Synthetic oligonucleotide
  Sense strand starting at position 18 of SEQ ID NO: 585148
gcacaucugauagaggguu

SEQ ID NO: 616913 - RNA, 19 nt, Artificial Sequence
  Description of Artificial Sequence: Synthetic oligonucleotide
  Antisense strand to SEQ ID NO: 616912
aacccucuaucagaugugc

SEQ ID NO: 616914 - RNA, 19 nt, Artificial Sequence
  Description of Artificial Sequence: Synthetic oligonucleotide
  Sense strand starting at position 131 of SEQ ID NO: 585148
guucuugucuaacugcaga

SEQ ID NO: 616915 - RNA, 19 nt, Artificial Sequence
  Description of Artificial Sequence: Synthetic oligonucleotide
  Antisense strand to SEQ ID NO: 616914
ucugcaguuagacaagaac

SEQ ID NO: 616916 - RNA, 19 nt, Artificial Sequence
  Description of Artificial Sequence: Synthetic oligonucleotide
  Sense strand starting at position 134 of SEQ ID NO: 585148
cuugucuaacugcagacau

SEQ ID NO: 616917 - RNA, 19 nt, Artificial Sequence
  Description of Artificial Sequence: Synthetic oligonucleotide
  Antisense strand to SEQ ID NO: 616916
augucugcaguuagacaag

SEQ ID NO: 616918 - RNA, 19 nt, Artificial Sequence
  Description of Artificial Sequence: Synthetic oligonucleotide
  Sense strand starting at position 524 of SEQ ID NO: 585148
ggcgguucacuauguucua

SEQ ID NO: 616919 - RNA, 19 nt, Artificial Sequence
  Description of Artificial Sequence: Synthetic oligonucleotide
  Antisense strand to SEQ ID NO: 616918
uagaacauagugaaccgcc

SEQ ID NO: 616920 - RNA, 19 nt, Artificial Sequence
  Description of Artificial Sequence: Synthetic oligonucleotide
  Sense strand starting at position 543 of SEQ ID NO: 585148
gcugcaugaucccucaguu

SEQ ID NO: 616921 - RNA, 19 nt, Artificial Sequence
  Description of Artificial Sequence: Synthetic oligonucleotide
  Antisense strand to SEQ ID NO: 616920
aacugagggaucaugcagc

SEQ ID NO: 616922 - RNA, 19 nt, Artificial Sequence
  Description of Artificial Sequence: Synthetic oligonucleotide
  Sense strand starting at position 563 of SEQ ID NO: 585148
aaaucuuaccgugaaguuc

SEQ ID NO: 616923 - RNA, 19 nt, Artificial Sequence
  Description of Artificial Sequence: Synthetic oligonucleotide
  Antisense strand to SEQ ID NO: 616922
gaacuucacgguaagauuu

SEQ ID NO: 616924 - RNA, 19 nt, Artificial Sequence
  Description of Artificial Sequence: Synthetic oligonucleotide
  Sense strand starting at position 572 of SEQ ID NO: 585148
cgugaaguuccgugcaaga

SEQ ID NO: 616925 - RNA, 19 nt, Artificial Sequence
  Description of Artificial Sequence: Synthetic oligonucleotide
  Antisense strand to SEQ ID NO: 616924
ucuugcacggaacuucacg

SEQ ID NO: 616926 - RNA, 19 nt, Artificial Sequence
  Description of Artificial Sequence: Synthetic oligonucleotide
  Sense strand starting at position 574 of SEQ ID NO: 585148
ugaaguuccgugcaagaaa

SEQ ID NO: 616927 - RNA, 19 nt, Artificial Sequence
  Description of Artificial Sequence: Synthetic oligonucleotide
  Antisense strand to SEQ ID NO: 616926
uuucuugcacggaacuuca

SEQ ID NO: 616928 - RNA, 19 nt, Artificial Sequence
  Description of Artificial Sequence: Synthetic oligonucleotide
  Sense strand starting at position 794 of SEQ ID NO: 585148
agaugugggcguuuacgua

SEQ ID NO: 616929 - RNA, 19 nt, Artificial Sequence
  Description of Artificial Sequence: Synthetic oligonucleotide
  Antisense strand to SEQ ID NO: 616928
uacguaaacgcccacaucu

SEQ ID NO: 616930 - RNA, 19 nt, Artificial Sequence
  Description of Artificial Sequence: Synthetic oligonucleotide
  Sense strand starting at position 818 of SEQ ID NO: 585148
agaacucuaucccgaagca

SEQ ID NO: 616931 - RNA, 19 nt, Artificial Sequence
  Description of Artificial Sequence: Synthetic oligonucleotide
  Antisense strand to SEQ ID NO: 616930
ugcuucgggauagaguucu

SEQ ID NO: 616932 - RNA, 19 nt, Artificial Sequence
  Description of Artificial Sequence: Synthetic oligonucleotide
  Sense strand starting at position 871 of SEQ ID NO: 585148
ccaggauauuacuagcaag

SEQ ID NO: 616933 - RNA, 19 nt, Artificial Sequence
  Description of Artificial Sequence: Synthetic oligonucleotide
  Antisense strand to SEQ ID NO: 616932
cuugcuaguaauauccugg

SEQ ID NO: 616934 - RNA, 19 nt, Artificial Sequence
  Description of Artificial Sequence: Synthetic oligonucleotide
  Sense strand starting at position 874 of SEQ ID NO: 585148
ggauauuacuagcaaguca

SEQ ID NO: 616935 - RNA, 19 nt, Artificial Sequence
  Description of Artificial Sequence: Synthetic oligonucleotide
  Antisense strand to SEQ ID NO: 616934
ugacuugcuaguaauaucc

SEQ ID NO: 616936 - RNA, 19 nt, Artificial Sequence
  Description of Artificial Sequence: Synthetic oligonucleotide
  Sense strand starting at position 915 of SEQ ID NO: 585148
auacauuagcuaugcagaa

SEQ ID NO: 616937 - RNA, 19 nt, Artificial Sequence
  Description of Artificial Sequence: Synthetic oligonucleotide
  Antisense strand to SEQ ID NO: 616936
uucugcauagcuaauguau

SEQ ID NO: 616938 - RNA, 19 nt, Artificial Sequence
  Description of Artificial Sequence: Synthetic oligonucleotide
  Sense strand starting at position 927 of SEQ ID NO: 585148
ugcagaaagucaucguucu

SEQ ID NO: 616939 - RNA, 19 nt, Artificial Sequence
  Description of Artificial Sequence: Synthetic oligonucleotide
  Antisense strand to SEQ ID NO: 616938
agaacgaugacuuucugca

SEQ ID NO: 616940 - RNA, 19 nt, Artificial Sequence
  Description of Artificial Sequence: Synthetic oligonucleotide
  Sense strand starting at position 928 of SEQ ID NO: 585148
gcagaaagucaucguucuu

SEQ ID NO: 616941 - RNA, 19 nt, Artificial Sequence
  Description of Artificial Sequence: Synthetic oligonucleotide
  Antisense strand to SEQ ID NO: 616940
aagaacgaugacuuucugc

SEQ ID NO: 616942 - RNA, 19 nt, Artificial Sequence
  Description of Artificial Sequence: Synthetic oligonucleotide
  Sense strand starting at position 1098 of SEQ ID NO: 585148
uagagauggugacgucuga

SEQ ID NO: 616943 - RNA, 19 nt, Artificial Sequence
  Description of Artificial Sequence: Synthetic oligonucleotide
  Antisense strand to SEQ ID NO: 616942
ucagacgucaccaucucua

SEQ ID NO: 616944 - RNA, 19 nt, Artificial Sequence
  Description of Artificial Sequence: Synthetic oligonucleotide
  Sense strand starting at position 1102 of SEQ ID NO: 585148
gauggugacgucugaacac

SEQ ID NO: 616945 - RNA, 19 nt, Artificial Sequence
  Description of Artificial Sequence: Synthetic oligonucleotide
  Antisense strand to SEQ ID NO: 616944
guguucagacgucaccauc

SEQ ID NO: 616946 - RNA, 19 nt, Artificial Sequence
  Description of Artificial Sequence: Synthetic oligonucleotide
  Sense strand starting at position 1126 of SEQ ID NO: 585148
aggagcugcuccuuggaaa

SEQ ID NO: 616947 - RNA, 19 nt, Artificial Sequence
  Description of Artificial Sequence: Synthetic oligonucleotide
  Antisense strand to SEQ ID NO: 616946
uuuccaaggagcagcuccu

SEQ ID NO: 616948 - RNA, 19 nt, Artificial Sequence
  Description of Artificial Sequence: Synthetic oligonucleotide
  Sense strand starting at position 1127 of SEQ ID NO: 585148
ggagcugcuccuuggaaac

SEQ ID NO: 616949 - RNA, 19 nt, Artificial Sequence
  Description of Artificial Sequence: Synthetic oligonucleotide
  Antisense strand to SEQ ID NO: 616948
guuuccaaggagcagcucc

SEQ ID NO: 616950 - RNA, 19 nt, Artificial Sequence
  Description of Artificial Sequence: Synthetic oligonucleotide
  Sense strand starting at position 1190 of SEQ ID NO: 585148
ugugcugaaccauaaacuu

SEQ ID NO: 616951 - RNA, 19 nt, Artificial Sequence
  Description of Artificial Sequence: Synthetic oligonucleotide
  Antisense strand to SEQ ID NO: 616950
aaguuuaugguucagcaca

SEQ ID NO: 616952 - RNA, 19 nt, Artificial Sequence
  Description of Artificial Sequence: Synthetic oligonucleotide
  Sense strand starting at position 1221 of SEQ ID NO: 585148
aacgucuaucagggauguu

SEQ ID NO: 616953 - RNA, 19 nt, Artificial Sequence
  Description of Artificial Sequence: Synthetic oligonucleotide
  Antisense strand to SEQ ID NO: 616952
aacaucccugauagacguu

SEQ ID NO: 616954 - RNA, 19 nt, Artificial Sequence
  Description of Artificial Sequence: Synthetic oligonucleotide
  Sense strand starting at position 1222 of SEQ ID NO: 585148
acgucuaucagggauguuu

SEQ ID NO: 616955 - RNA, 19 nt, Artificial Sequence
  Description of Artificial Sequence: Synthetic oligonucleotide
  Antisense strand to SEQ ID NO: 616954
aaacaucccugauagacgu

SEQ ID NO: 616956 - RNA, 19 nt, Artificial Sequence
  Description of Artificial Sequence: Synthetic oligonucleotide
  Sense strand starting at position 1764 of SEQ ID NO: 585148
cgaggacaucccuguguuc

SEQ ID NO: 616957 - RNA, 19 nt, Artificial Sequence
  Description of Artificial Sequence: Synthetic oligonucleotide
  Antisense strand to SEQ ID NO: 616956
gaacacagggauguccucg

SEQ ID NO: 616958 - RNA, 19 nt, Artificial Sequence
  Description of Artificial Sequence: Synthetic oligonucleotide
  Sense strand starting at position 1840 of SEQ ID NO: 585148
aggacuggguuccauacau

SEQ ID NO: 616959 - RNA, 19 nt, Artificial Sequence
  Description of Artificial Sequence: Synthetic oligonucleotide
  Antisense strand to SEQ ID NO: 616958
auguauggaacccaguccu

SEQ ID NO: 616960 - RNA, 19 nt, Artificial Sequence
  Description of Artificial Sequence: Synthetic oligonucleotide
  Sense strand starting at position 1872 of SEQ ID NO: 585148
gagggaacgugucaggguu

SEQ ID NO: 616961 - RNA, 19 nt, Artificial Sequence
  Description of Artificial Sequence: Synthetic oligonucleotide
  Antisense strand to SEQ ID NO: 616960
aacccugacacguucccuc

SEQ ID NO: 616962 - RNA, 19 nt, Artificial Sequence
  Description of Artificial Sequence: Synthetic oligonucleotide
  Sense strand starting at position 2028 of SEQ ID NO: 585148
ccgagcuucucacugggaa

SEQ ID NO: 616963 - RNA, 19 nt, Artificial Sequence
  Description of Artificial Sequence: Synthetic oligonucleotide
  Antisense strand to SEQ ID NO: 616962
uucccagugagaagcucgg

SEQ ID NO: 616964 - RNA, 19 nt, Artificial Sequence
  Description of Artificial Sequence: Synthetic oligonucleotide
  Sense strand starting at position 2029 of SEQ ID NO: 585148
cgagcuucucacugggaag

SEQ ID NO: 616965 - RNA, 19 nt, Artificial Sequence
  Description of Artificial Sequence: Synthetic oligonucleotide
  Antisense strand to SEQ ID NO: 616964
cuucccagugagaagcucg

SEQ ID NO: 616966 - RNA, 19 nt, Artificial Sequence
  Description of Artificial Sequence: Synthetic oligonucleotide
  Sense strand starting at position 2728 of SEQ ID NO: 585148
cuucgagcucuuuggcaca

SEQ ID NO: 616967 - RNA, 19 nt, Artificial Sequence
  Description of Artificial Sequence: Synthetic oligonucleotide
  Antisense strand to SEQ ID NO: 616966
ugugccaaagagcucgaag

SEQ ID NO: 616968 - RNA, 19 nt, Artificial Sequence
  Description of Artificial Sequence: Synthetic oligonucleotide
  Sense strand starting at position 2909 of SEQ ID NO: 585148
cugggaccuuccucuagua

SEQ ID NO: 616969 - RNA, 19 nt, Artificial Sequence
  Description of Artificial Sequence: Synthetic oligonucleotide
  Antisense strand to SEQ ID NO: 616968
uacuagaggaaggucccag

SEQ ID NO: 616970 - RNA, 19 nt, Artificial Sequence
  Description of Artificial Sequence: Synthetic oligonucleotide
  Sense strand starting at position 2998 of SEQ ID NO: 585148
gcccgguggguuuaggaaa

SEQ ID NO: 616971 - RNA, 19 nt, Artificial Sequence
  Description of Artificial Sequence: Synthetic oligonucleotide
  Antisense strand to SEQ ID NO: 616970
uuuccuaaacccaccgggc

SEQ ID NO: 616972 - RNA, 19 nt, Artificial Sequence
  Description of Artificial Sequence: Synthetic oligonucleotide
  Sense strand starting at position 2999 of SEQ ID NO: 585148
cccgguggguuuaggaaau

SEQ ID NO: 616973 - RNA, 19 nt, Artificial Sequence
  Description of Artificial Sequence: Synthetic oligonucleotide
  Antisense strand to SEQ ID NO: 616972
auuuccuaaacccaccggg

SEQ ID NO: 616974 - RNA, 19 nt, Artificial Sequence
  Description of Artificial Sequence: Synthetic oligonucleotide
  Sense strand starting at position 3045 of SEQ ID NO: 585148
cccgguggguugagaagau

SEQ ID NO: 616975 - RNA, 19 nt, Artificial Sequence
  Description of Artificial Sequence: Synthetic oligonucleotide
  Antisense strand to SEQ ID NO: 616974
aucuucucaacccaccggg

SEQ ID NO: 616976 - RNA, 19 nt, Artificial Sequence
  Description of Artificial Sequence: Synthetic oligonucleotide
  Sense strand starting at position 3046 of SEQ ID NO: 585148
ccgguggguugagaagauu

SEQ ID NO: 616977 - RNA, 19 nt, Artificial Sequence
  Description of Artificial Sequence: Synthetic oligonucleotide
  Antisense strand to SEQ ID NO: 616976
aaucuucucaacccaccgg

SEQ ID NO: 616978 - RNA, 19 nt, Artificial Sequence
  Description of Artificial Sequence: Synthetic oligonucleotide
  Sense strand starting at position 3218 of SEQ ID NO: 585148
cguagagcuguucacuaug

SEQ ID NO: 616979 - RNA, 19 nt, Artificial Sequence
  Description of Artificial Sequence: Synthetic oligonucleotide
  Antisense strand to SEQ ID NO: 616978
cauagugaacagcucuacg

SEQ ID NO: 616980 - RNA, 19 nt, Artificial Sequence
  Description of Artificial Sequence: Synthetic oligonucleotide
  Sense strand starting at position 3590 of SEQ ID NO: 585148
gggaguugugcugggugca

SEQ ID NO: 616981 - RNA, 19 nt, Artificial Sequence
  Description of Artificial Sequence: Synthetic oligonucleotide
  Antisense strand to SEQ ID NO: 616980
ugcacccagcacaacuccc

SEQ ID NO: 616982 - RNA, 19 nt, Artificial Sequence
  Description of Artificial Sequence: Synthetic oligonucleotide
  Sense strand starting at position 3768 of SEQ ID NO: 585148
gccaaugagcuccaaacau

SEQ ID NO: 616983 - RNA, 19 nt, Artificial Sequence
  Description of Artificial Sequence: Synthetic oligonucleotide
  Antisense strand to SEQ ID NO: 616982
auguuuggagcucauuggc

SEQ ID NO: 616984 - RNA, 19 nt, Artificial Sequence
  Description of Artificial Sequence: Synthetic oligonucleotide
  Sense strand starting at position 3781 of SEQ ID NO: 585148
aaacaucauuagugagaag

SEQ ID NO: 616985 - RNA, 19 nt, Artificial Sequence
  Description of Artificial Sequence: Synthetic oligonucleotide
  Antisense strand to SEQ ID NO: 616984
cuucucacuaaugauguuu

SEQ ID NO: 616986 - RNA, 19 nt, Artificial Sequence
  Description of Artificial Sequence: Synthetic oligonucleotide
  Sense strand starting at position 3784 of SEQ ID NO: 585148
caucauuagugagaagaaa

SEQ ID NO: 616987 - RNA, 19 nt, Artificial Sequence
  Description of Artificial Sequence: Synthetic oligonucleotide
  Antisense strand to SEQ ID NO: 616986
uuucuucucacuaaugaug

SEQ ID NO: 616988 - RNA, 19 nt, Artificial Sequence
  Description of Artificial Sequence: Synthetic oligonucleotide
  Sense strand starting at position 3819 of SEQ ID NO: 585148
acuccacauuuguauugau

SEQ ID NO: 616989 - RNA, 19 nt, Artificial Sequence
  Description of Artificial Sequence: Synthetic oligonucleotide
  Antisense strand to SEQ ID NO: 616988
aucaauacaaauguggagu

SEQ ID NO: 616990 - RNA, 19 nt, Artificial Sequence
  Description of Artificial Sequence: Synthetic oligonucleotide
  Sense strand starting at position 3845 of SEQ ID NO: 585148
auaaauggauucuugucaa

SEQ ID NO: 616991 - RNA, 19 nt, Artificial Sequence
  Description of Artificial Sequence: Synthetic oligonucleotide
  Antisense strand to SEQ ID NO: 616990
uugacaagaauccauuuau

SEQ ID NO: 616992 - RNA, 19 nt, Artificial Sequence
  Description of Artificial Sequence: Synthetic oligonucleotide
  Sense strand starting at position 3 of SEQ ID NO: 585149
aggauuggcuauccuucua

SEQ ID NO: 616993 - RNA, 19 nt, Artificial Sequence
  Description of Artificial Sequence: Synthetic oligonucleotide
  Antisense strand to SEQ ID NO: 616992
uagaaggauagccaauccu

SEQ ID NO: 616994 - RNA, 19 nt, Artificial Sequence
  Description of Artificial Sequence: Synthetic oligonucleotide
  Sense strand starting at position 24 of SEQ ID NO: 585149
acuccugcugaaugguaaa

SEQ ID NO: 616995 - RNA, 19 nt, Artificial Sequence
  Description of Artificial Sequence: Synthetic oligonucleotide
  Antisense strand to SEQ ID NO: 616994
uuuaccauucagcaggagu

SEQ ID NO: 616996 - RNA, 19 nt, Artificial Sequence
  Description of Artificial Sequence: Synthetic oligonucleotide
  Sense strand starting at position 35 of SEQ ID NO: 585149
augguaaagcuuugaacaa

SEQ ID NO: 616997 - RNA, 19 nt, Artificial Sequence
  Description of Artificial Sequence: Synthetic oligonucleotide
  Antisense strand to SEQ ID NO: 616996
uuguucaaagcuuuaccau

SEQ ID NO: 616998 - RNA, 19 nt, Artificial Sequence
  Description of Artificial Sequence: Synthetic oligonucleotide
  Sense strand starting at position 216 of SEQ ID NO: 585149
gcaaacagucugcagagaa

SEQ ID NO: 616999 - RNA, 19 nt, Artificial Sequence
  Description of Artificial Sequence: Synthetic oligonucleotide
  Antisense strand to SEQ ID NO: 616998
uucucugcagacuguuugc

SEQ ID NO: 617000 - RNA, 19 nt, Artificial Sequence
  Description of Artificial Sequence: Synthetic oligonucleotide
  Sense strand starting at position 239 of SEQ ID NO: 585149
cccggaucccucugggaua

SEQ ID NO: 617001 - RNA, 19 nt, Artificial Sequence
  Description of Artificial Sequence: Synthetic oligonucleotide
  Antisense strand to SEQ ID NO: 617000
uaucccagagggauccggg

SEQ ID NO: 617002 - RNA, 19 nt, Artificial Sequence
  Description of Artificial Sequence: Synthetic oligonucleotide
  Sense strand starting at position 573 of SEQ ID NO: 585149
cuuaccuuugcagagaacu

SEQ ID NO: 617003 - RNA, 19 nt, Artificial Sequence
  Description of Artificial Sequence: Synthetic oligonucleotide
  Antisense strand to SEQ ID NO: 617002
aguucucugcaaagguaag

SEQ ID NO: 617004 - RNA, 19 nt, Artificial Sequence
  Description of Artificial Sequence: Synthetic oligonucleotide
  Sense strand starting at position 581 of SEQ ID NO: 585149
ugcagagaacuuuaacucu

SEQ ID NO: 617005 - RNA, 19 nt, Artificial Sequence
  Description of Artificial Sequence: Synthetic oligonucleotide
  Antisense strand to SEQ ID NO: 617004
agaguuaaaguucucugca

SEQ ID NO: 617006 - RNA, 19 nt, Artificial Sequence
  Description of Artificial Sequence: Synthetic oligonucleotide
  Sense strand starting at position 635 of SEQ ID NO: 585149
uagagacagcacugguuua

SEQ ID NO: 617007 - RNA, 19 nt, Artificial Sequence
  Description of Artificial Sequence: Synthetic oligonucleotide
  Antisense strand to SEQ ID NO: 617006
uaaaccagugcugucucua

SEQ ID NO: 617008 - RNA, 19 nt, Artificial Sequence
  Description of Artificial Sequence: Synthetic oligonucleotide
  Sense strand starting at position 636 of SEQ ID NO: 585149
agagacagcacugguuuaa

SEQ ID NO: 617009 - RNA, 19 nt, Artificial Sequence
  Description of Artificial Sequence: Synthetic oligonucleotide
  Antisense strand to SEQ ID NO: 617008
uuaaaccagugcugucucu

SEQ ID NO: 617010 - RNA, 19 nt, Artificial Sequence
  Description of Artificial Sequence: Synthetic oligonucleotide
  Sense strand starting at position 640 of SEQ ID NO: 585149
acagcacugguuuaagacu

SEQ ID NO: 617011 - RNA, 19 nt, Artificial Sequence
  Description of Artificial Sequence: Synthetic oligonucleotide
  Antisense strand to SEQ ID NO: 617010
agucuuaaaccagugcugu

SEQ ID NO: 617012 - RNA, 19 nt, Artificial Sequence
  Description of Artificial Sequence: Synthetic oligonucleotide
  Sense strand starting at position 690 of SEQ ID NO: 585149
cuacuaaguaucugggaga

SEQ ID NO: 617013 - RNA, 19 nt, Artificial Sequence
  Description of Artificial Sequence: Synthetic oligonucleotide
  Antisense strand to SEQ ID NO: 617012
ucucccagauacuuaguag

SEQ ID NO: 617014 - RNA, 19 nt, Artificial Sequence
  Description of Artificial Sequence: Synthetic oligonucleotide
  Sense strand starting at position 776 of SEQ ID NO: 585149
gggagcuucuagcuuaaau

SEQ ID NO: 617015 - RNA, 19 nt, Artificial Sequence
  Description of Artificial Sequence: Synthetic oligonucleotide
  Antisense strand to SEQ ID NO: 617014
auuuaagcuagaagcuccc

SEQ ID NO: 617016 - RNA, 19 nt, Artificial Sequence
  Description of Artificial Sequence: Synthetic oligonucleotide
  Sense strand starting at position 878 of SEQ ID NO: 585149
uuggaagcuugauagauuu

SEQ ID NO: 617017 - RNA, 19 nt, Artificial Sequence
  Description of Artificial Sequence: Synthetic oligonucleotide
  Antisense strand to SEQ ID NO: 617016
aaaucuaucaagcuuccaa

SEQ ID NO: 617018 - RNA, 19 nt, Artificial Sequence
  Description of Artificial Sequence: Synthetic oligonucleotide
  Sense strand starting at position 962 of SEQ ID NO: 585149
gauaucugagcccaaggua

SEQ ID NO: 617019 - RNA, 19 nt, Artificial Sequence
  Description of Artificial Sequence: Synthetic oligonucleotide
  Antisense strand to SEQ ID NO: 617018
uaccuugggcucagauauc

SEQ ID NO: 617020 - RNA, 19 nt, Artificial Sequence
  Description of Artificial Sequence: Synthetic oligonucleotide
  Sense strand starting at position 1023 of SEQ ID NO: 585149
acauuccugcucuggagaa

SEQ ID NO: 617021 - RNA, 19 nt, Artificial Sequence
  Description of Artificial Sequence: Synthetic oligonucleotide
  Antisense strand to SEQ ID NO: 617020
uucuccagagcaggaaugu

SEQ ID NO: 617022 - RNA, 19 nt, Artificial Sequence
  Description of Artificial Sequence: Synthetic oligonucleotide
  Sense strand starting at position 1025 of SEQ ID NO: 585149
auuccugcucuggagaaac

SEQ ID NO: 617023 - RNA, 19 nt, Artificial Sequence
  Description of Artificial Sequence: Synthetic oligonucleotide
  Antisense strand to SEQ ID NO: 617022
guuucuccagagcaggaau

SEQ ID NO: 617024 - RNA, 19 nt, Artificial Sequence
  Description of Artificial Sequence: Synthetic oligonucleotide
  Sense strand starting at position 1152 of SEQ ID NO: 585149
gugugcacagacuaaagau

SEQ ID NO: 617025 - RNA, 19 nt, Artificial Sequence
  Description of Artificial Sequence: Synthetic oligonucleotide
  Antisense strand to SEQ ID NO: 617024
aucuuuagucugugcacac

SEQ ID NO: 617026 - RNA, 19 nt, Artificial Sequence
  Description of Artificial Sequence: Synthetic oligonucleotide
  Sense strand starting at position 1235 of SEQ ID NO: 585149
agaacucuagggugcaaga

SEQ ID NO: 617027 - RNA, 19 nt, Artificial Sequence
  Description of Artificial Sequence: Synthetic oligonucleotide
  Antisense strand to SEQ ID NO: 617026
ucuugcacccuagaguucu

SEQ ID NO: 617028 - RNA, 19 nt, Artificial Sequence
  Description of Artificial Sequence: Synthetic oligonucleotide
  Sense strand starting at position 1305 of SEQ ID NO: 585149
ggauguaucagauagccca

SEQ ID NO: 617029 - RNA, 19 nt, Artificial Sequence
  Description of Artificial Sequence: Synthetic oligonucleotide
  Antisense strand to SEQ ID NO: 617028
ugggcuaucugauacaucc

SEQ ID NO: 617030 - RNA, 19 nt, Artificial Sequence
  Description of Artificial Sequence: Synthetic oligonucleotide
  Sense strand starting at position 1333 of SEQ ID NO: 585149
gacugcauugaguggaaau

SEQ ID NO: 617031 - RNA, 19 nt, Artificial Sequence
  Description of Artificial Sequence: Synthetic oligonucleotide
  Antisense strand to SEQ ID NO: 617030
auuuccacucaaugcaguc

SEQ ID NO: 617032 - RNA, 19 nt, Artificial Sequence
  Description of Artificial Sequence: Synthetic oligonucleotide
  Sense strand starting at position 1358 of SEQ ID NO: 585149
aggccucuggucugggaua

SEQ ID NO: 617033 - RNA, 19 nt, Artificial Sequence
  Description of Artificial Sequence: Synthetic oligonucleotide
  Antisense strand to SEQ ID NO: 617032
uaucccagaccagaggccu

SEQ ID NO: 617034 - RNA, 19 nt, Artificial Sequence
  Description of Artificial Sequence: Synthetic oligonucleotide
  Sense strand starting at position 1363 of SEQ ID NO: 585149
ucuggucugggauagguau

SEQ ID NO: 617035 - RNA, 19 nt, Artificial Sequence
  Description of Artificial Sequence: Synthetic oligonucleotide
  Antisense strand to SEQ ID NO: 617034
auaccuaucccagaccaga

SEQ ID NO: 617036 - RNA, 19 nt, Artificial Sequence
  Description of Artificial Sequence: Synthetic oligonucleotide
  Sense strand starting at position 1369 of SEQ ID NO: 585149
cugggauagguauggauca

SEQ ID NO: 617037 - RNA, 19 nt, Artificial Sequence
  Description of Artificial Sequence: Synthetic oligonucleotide
  Antisense strand to SEQ ID NO: 617036
ugauccauaccuaucccag

SEQ ID NO: 617038 - RNA, 19 nt, Artificial Sequence
  Description of Artificial Sequence: Synthetic oligonucleotide
  Sense strand starting at position 1476 of SEQ ID NO: 585149
uggauagugcaaggagaau

SEQ ID NO: 617039 - RNA, 19 nt, Artificial Sequence
  Description of Artificial Sequence: Synthetic oligonucleotide
  Antisense strand to SEQ ID NO: 617038
auucuccuugcacuaucca

SEQ ID NO: 617040 - RNA, 19 nt, Artificial Sequence
  Description of Artificial Sequence: Synthetic oligonucleotide
  Sense strand starting at position 1503 of SEQ ID NO: 585149
gagggauccuaggaauuuc

SEQ ID NO: 617041 - RNA, 19 nt, Artificial Sequence
  Description of Artificial Sequence: Synthetic oligonucleotide
  Antisense strand to SEQ ID NO: 617040
gaaauuccuaggaucccuc

SEQ ID NO: 617042 - RNA, 19 nt, Artificial Sequence
  Description of Artificial Sequence: Synthetic oligonucleotide
  Sense strand starting at position 1714 of SEQ ID NO: 585149
ucuacaugcccguaaggaa

SEQ ID NO: 617043 - RNA, 19 nt, Artificial Sequence
  Description of Artificial Sequence: Synthetic oligonucleotide
  Antisense strand to SEQ ID NO: 617042
uuccuuacgggcauguaga

SEQ ID NO: 617044 - RNA, 19 nt, Artificial Sequence
  Description of Artificial Sequence: Synthetic oligonucleotide
  Sense strand starting at position 2094 of SEQ ID NO: 585149
ccuagaaggucccuuugga

SEQ ID NO: 617045 - RNA, 19 nt, Artificial Sequence
  Description of Artificial Sequence: Synthetic oligonucleotide
  Antisense strand to SEQ ID NO: 617044
uccaaagggaccuucuagg

SEQ ID NO: 617046 - RNA, 19 nt, Artificial Sequence
  Description of Artificial Sequence: Synthetic oligonucleotide
  Sense strand starting at position 2280 of SEQ ID NO: 585149
cggaggguugggcgagaaa

SEQ ID NO: 617047 - RNA, 19 nt, Artificial Sequence
  Description of Artificial Sequence: Synthetic oligonucleotide
  Antisense strand to SEQ ID NO: 617046
uuucucgcccaacccuccg

SEQ ID NO: 617048 - RNA, 19 nt, Artificial Sequence
  Description of Artificial Sequence: Synthetic oligonucleotide
  Sense strand starting at position 2517 of SEQ ID NO: 585149
aggcguuuccauucagcga

SEQ ID NO: 617049 - RNA, 19 nt, Artificial Sequence
  Description of Artificial Sequence: Synthetic oligonucleotide
  Antisense strand to SEQ ID NO: 617048
ucgcugaauggaaacgccu

SEQ ID NO: 617050 - RNA, 19 nt, Artificial Sequence
  Description of Artificial Sequence: Synthetic oligonucleotide
  Sense strand starting at position 3053 of SEQ ID NO: 585149
gaucuaucgagagggcagu

SEQ ID NO: 617051 - RNA, 19 nt, Artificial Sequence
  Description of Artificial Sequence: Synthetic oligonucleotide
  Antisense strand to SEQ ID NO: 617050
acugcccucucgauagauc

SEQ ID NO: 617052 - RNA, 19 nt, Artificial Sequence
  Description of Artificial Sequence: Synthetic oligonucleotide
  Sense strand starting at position 3255 of SEQ ID NO: 585149
agcucugucccuuaucuga

SEQ ID NO: 617053 - RNA, 19 nt, Artificial Sequence
  Description of Artificial Sequence: Synthetic oligonucleotide
  Antisense strand to SEQ ID NO: 617052
ucagauaagggacagagcu

SEQ ID NO: 617054 - RNA, 19 nt, Artificial Sequence
  Description of Artificial Sequence: Synthetic oligonucleotide
  Sense strand starting at position 3396 of SEQ ID NO: 585149
ccugauuucugaguguugu

SEQ ID NO: 617055 - RNA, 19 nt, Artificial Sequence
  Description of Artificial Sequence: Synthetic oligonucleotide
  Antisense strand to SEQ ID NO: 617054
acaacacucagaaaucagg

SEQ ID NO: 617056 - RNA, 19 nt, Artificial Sequence
  Description of Artificial Sequence: Synthetic oligonucleotide
  Sense strand starting at position 3404 of SEQ ID NO: 585149
cugaguguuguuucugugu

SEQ ID NO: 617057 - RNA, 19 nt, Artificial Sequence
  Description of Artificial Sequence: Synthetic oligonucleotide
  Antisense strand to SEQ ID NO: 617056
acacagaaacaacacucag

SEQ ID NO: 617058 - RNA, 19 nt, Artificial Sequence
  Description of Artificial Sequence: Synthetic oligonucleotide
  Sense strand starting at position 3415 of SEQ ID NO: 585149
uucuguguuggacaauucu

SEQ ID NO: 617059 - RNA, 19 nt, Artificial Sequence
  Description of Artificial Sequence: Synthetic oligonucleotide
  Antisense strand to SEQ ID NO: 617058
agaauuguccaacacagaa

SEQ ID NO: 617060 - RNA, 19 nt, Artificial Sequence
  Description of Artificial Sequence: Synthetic oligonucleotide
  Sense strand starting at position 3423 of SEQ ID NO: 585149
uggacaauucuaugcaaac

SEQ ID NO: 617061 - RNA, 19 nt, Artificial Sequence
  Description of Artificial Sequence: Synthetic oligonucleotide
  Antisense strand to SEQ ID NO: 617060
guuugcauagaauugucca

SEQ ID NO: 617062 - RNA, 19 nt, Artificial Sequence
  Description of Artificial Sequence: Synthetic oligonucleotide
  Sense strand starting at position 3424 of SEQ ID NO: 585149
ggacaauucuaugcaaacu

SEQ ID NO: 617063 - RNA, 19 nt, Artificial Sequence
  Description of Artificial Sequence: Synthetic oligonucleotide
  Antisense strand to SEQ ID NO: 617062
aguuugcauagaauugucc

SEQ ID NO: 617064 - RNA, 19 nt, Artificial Sequence
  Description of Artificial Sequence: Synthetic oligonucleotide
  Sense strand starting at position 3697 of SEQ ID NO: 585149
agugcugggaagcaauauu

SEQ ID NO: 617065 - RNA, 19 nt, Artificial Sequence
  Description of Artificial Sequence: Synthetic oligonucleotide
  Antisense strand to SEQ ID NO: 617064
aauauugcuucccagcacu

SEQ ID NO: 617066 - RNA, 19 nt, Artificial Sequence
  Description of Artificial Sequence: Synthetic oligonucleotide
  Sense strand starting at position 3873 of SEQ ID NO: 585149
ugguaugaucuugggcaag

SEQ ID NO: 617067 - RNA, 19 nt, Artificial Sequence
  Description of Artificial Sequence: Synthetic oligonucleotide
  Antisense strand to SEQ ID NO: 617066
cuugcccaagaucauacca

SEQ ID NO: 617068 - RNA, 19 nt, Artificial Sequence
  Description of Artificial Sequence: Synthetic oligonucleotide
  Sense strand starting at position 3906 of SEQ ID NO: 585149
ucaacugucaaguggaaug

SEQ ID NO: 617069 - RNA, 19 nt, Artificial Sequence
  Description of Artificial Sequence: Synthetic oligonucleotide
  Antisense strand to SEQ ID NO: 617068
cauuccacuugacaguuga

SEQ ID NO: 617070 - RNA, 19 nt, Artificial Sequence
  Description of Artificial Sequence: Synthetic oligonucleotide
  Sense strand starting at position 3980 of SEQ ID NO: 585149
agaagaguccuuggcacag

SEQ ID NO: 617071 - RNA, 19 nt, Artificial Sequence
  Description of Artificial Sequence: Synthetic oligonucleotide
  Antisense strand to SEQ ID NO: 617070
cugugccaaggacucuucu

SEQ ID NO: 617072 - RNA, 19 nt, Artificial Sequence
  Description of Artificial Sequence: Synthetic oligonucleotide
  Sense strand starting at position 81 of SEQ ID NO: 585150
cccuuugugcuguuucuua

SEQ ID NO: 617073 - RNA, 19 nt, Artificial Sequence
  Description of Artificial Sequence: Synthetic oligonucleotide
  Antisense strand to SEQ ID NO: 617072
uaagaaacagcacaaaggg

SEQ ID NO: 617074 - RNA, 19 nt, Artificial Sequence
  Description of Artificial Sequence: Synthetic oligonucleotide
  Sense strand starting at position 237 of SEQ ID NO: 585150
gucacacaaugucaauuua

SEQ ID NO: 617075 - RNA, 19 nt, Artificial Sequence
  Description of Artificial Sequence: Synthetic oligonucleotide
  Antisense strand to SEQ ID NO: 617074
uaaauugacauugugugac

SEQ ID NO: 617076 - RNA, 19 nt, Artificial Sequence
  Description of Artificial Sequence: Synthetic oligonucleotide
  Sense strand starting at position 281 of SEQ ID NO: 585150
acagaauggagguguaauu

SEQ ID NO: 617077 - RNA, 19 nt, Artificial Sequence
  Description of Artificial Sequence: Synthetic oligonucleotide
  Antisense strand to SEQ ID NO: 617076
aauuacaccuccauucugu

SEQ ID NO: 617078 - RNA, 19 nt, Artificial Sequence
  Description of Artificial Sequence: Synthetic oligonucleotide
  Sense strand starting at position 327 of SEQ ID NO: 585150
ccauguauacuauguaaug

SEQ ID NO: 617079 - RNA, 19 nt, Artificial Sequence
  Description of Artificial Sequence: Synthetic oligonucleotide
  Antisense strand to SEQ ID NO: 617078
cauuacauaguauacaugg

SEQ ID NO: 617080 - RNA, 19 nt, Artificial Sequence
  Description of Artificial Sequence: Synthetic oligonucleotide
  Sense strand starting at position 857 of SEQ ID NO: 585150
agacaugugcaacaguuua

SEQ ID NO: 617081 - RNA, 19 nt, Artificial Sequence
  Description of Artificial Sequence: Synthetic oligonucleotide
  Antisense strand to SEQ ID NO: 617080
uaaacuguugcacaugucu

SEQ ID NO: 617082 - RNA, 19 nt, Artificial Sequence
  Description of Artificial Sequence: Synthetic oligonucleotide
  Sense strand starting at position 862 of SEQ ID NO: 585150
ugugcaacaguuuaagaaa

SEQ ID NO: 617083 - RNA, 19 nt, Artificial Sequence
  Description of Artificial Sequence: Synthetic oligonucleotide
  Antisense strand to SEQ ID NO: 617082
uuucuuaaacuguugcaca

SEQ ID NO: 617084 - RNA, 19 nt, Artificial Sequence
  Description of Artificial Sequence: Synthetic oligonucleotide
  Sense strand starting at position 954 of SEQ ID NO: 585150
gcaguaugauaacuggguu

SEQ ID NO: 617085 - RNA, 19 nt, Artificial Sequence
  Description of Artificial Sequence: Synthetic oligonucleotide
  Antisense strand to SEQ ID NO: 617084
aacccaguuaucauacugc

SEQ ID NO: 617086 - RNA, 19 nt, Artificial Sequence
  Description of Artificial Sequence: Synthetic oligonucleotide
  Sense strand starting at position 957 of SEQ ID NO: 585150
guaugauaacuggguugug

SEQ ID NO: 617087 - RNA, 19 nt, Artificial Sequence
  Description of Artificial Sequence: Synthetic oligonucleotide
  Antisense strand to SEQ ID NO: 617086
cacaacccaguuaucauac

SEQ ID NO: 617088 - RNA, 19 nt, Artificial Sequence
  Description of Artificial Sequence: Synthetic oligonucleotide
  Sense strand starting at position 958 of SEQ ID NO: 585150
uaugauaacuggguugugu

SEQ ID NO: 617089 - RNA, 19 nt, Artificial Sequence
  Description of Artificial Sequence: Synthetic oligonucleotide
  Antisense strand to SEQ ID NO: 617088
acacaacccaguuaucaua

SEQ ID NO: 617090 - RNA, 19 nt, Artificial Sequence
  Description of Artificial Sequence: Synthetic oligonucleotide
  Sense strand starting at position 960 of SEQ ID NO: 585150
ugauaacuggguuguguua

SEQ ID NO: 617091 - RNA, 19 nt, Artificial Sequence
  Description of Artificial Sequence: Synthetic oligonucleotide
  Antisense strand to SEQ ID NO: 617090
uaacacaacccaguuauca

SEQ ID NO: 617092 - RNA, 19 nt, Artificial Sequence
  Description of Artificial Sequence: Synthetic oligonucleotide
  Sense strand starting at position 971 of SEQ ID NO: 585150
uuguguuaagaguaccauu

SEQ ID NO: 617093 - RNA, 19 nt, Artificial Sequence
  Description of Artificial Sequence: Synthetic oligonucleotide
  Antisense strand to SEQ ID NO: 617092
aaugguacucuuaacacaa

SEQ ID NO: 617094 - RNA, 19 nt, Artificial Sequence
  Description of Artificial Sequence: Synthetic oligonucleotide
  Sense strand starting at position 1114 of SEQ ID NO: 585150
gcagaacgacuguaaauug

SEQ ID NO: 617095 - RNA, 19 nt, Artificial Sequence
  Description of Artificial Sequence: Synthetic oligonucleotide
  Antisense strand to SEQ ID NO: 617094
caauuuacagucguucugc

SEQ ID NO: 617096 - RNA, 19 nt, Artificial Sequence
  Description of Artificial Sequence: Synthetic oligonucleotide
  Sense strand starting at position 1121 of SEQ ID NO: 585150
gacuguaaauuggcaggua

SEQ ID NO: 617097 - RNA, 19 nt, Artificial Sequence
  Description of Artificial Sequence: Synthetic oligonucleotide
  Antisense strand to SEQ ID NO: 617096
uaccugccaauuuacaguc

SEQ ID NO: 617098 - RNA, 19 nt, Artificial Sequence
  Description of Artificial Sequence: Synthetic oligonucleotide
  Sense strand starting at position 1170 of SEQ ID NO: 585150
gagucaccgcucgugugau

SEQ ID NO: 617099 - RNA, 19 nt, Artificial Sequence
  Description of Artificial Sequence: Synthetic oligonucleotide
  Antisense strand to SEQ ID NO: 617098
aucacacgagcggugacuc

SEQ ID NO: 617100 - RNA, 19 nt, Artificial Sequence
  Description of Artificial Sequence: Synthetic oligonucleotide
  Sense strand starting at position 1203 of SEQ ID NO: 585150
ugaugaaugucuguaguag

SEQ ID NO: 617101 - RNA, 19 nt, Artificial Sequence
  Description of Artificial Sequence: Synthetic oligonucleotide
  Antisense strand to SEQ ID NO: 617100
cuacuacagacauucauca

SEQ ID NO: 617102 - RNA, 19 nt, Artificial Sequence
  Description of Artificial Sequence: Synthetic oligonucleotide
  Sense strand starting at position 1214 of SEQ ID NO: 585150
uguaguagcucgauguugu

SEQ ID NO: 617103 - RNA, 19 nt, Artificial Sequence
  Description of Artificial Sequence: Synthetic oligonucleotide
  Antisense strand to SEQ ID NO: 617102
acaacaucgagcuacuaca

SEQ ID NO: 617104 - RNA, 19 nt, Artificial Sequence
  Description of Artificial Sequence: Synthetic oligonucleotide
  Sense strand starting at position 1234 of SEQ ID NO: 585150
gugucauaacuacagcuua

SEQ ID NO: 617105 - RNA, 19 nt, Artificial Sequence
  Description of Artificial Sequence: Synthetic oligonucleotide
  Antisense strand to SEQ ID NO: 617104
uaagcuguaguuaugacac

SEQ ID NO: 617106 - RNA, 19 nt, Artificial Sequence
  Description of Artificial Sequence: Synthetic oligonucleotide
  Sense strand starting at position 1586 of SEQ ID NO: 585150
cgaacuuggccuggucaaa

SEQ ID NO: 617107 - RNA, 19 nt, Artificial Sequence
  Description of Artificial Sequence: Synthetic oligonucleotide
  Antisense strand to SEQ ID NO: 617106
uuugaccaggccaaguucg

SEQ ID NO: 617108 - RNA, 19 nt, Artificial Sequence
  Description of Artificial Sequence: Synthetic oligonucleotide
  Sense strand starting at position 2187 of SEQ ID NO: 585150
gggucucgccaugauggaa

SEQ ID NO: 617109 - RNA, 19 nt, Artificial Sequence
  Description of Artificial Sequence: Synthetic oligonucleotide
  Antisense strand to SEQ ID NO: 617108
uuccaucauggcgagaccc

SEQ ID NO: 617110 - RNA, 19 nt, Artificial Sequence
  Description of Artificial Sequence: Synthetic oligonucleotide
  Sense strand starting at position 2250 of SEQ ID NO: 585150
caagauccugcauguuaga

SEQ ID NO: 617111 - RNA, 19 nt, Artificial Sequence
  Description of Artificial Sequence: Synthetic oligonucleotide
  Antisense strand to SEQ ID NO: 617110
ucuaacaugcaggaucuug

SEQ ID NO: 617112 - RNA, 19 nt, Artificial Sequence
  Description of Artificial Sequence: Synthetic oligonucleotide
  Sense strand starting at position 2285 of SEQ ID NO: 585150
uugaauuuguaucagauga

SEQ ID NO: 617113 - RNA, 19 nt, Artificial Sequence
  Description of Artificial Sequence: Synthetic oligonucleotide
  Antisense strand to SEQ ID NO: 617112
ucaucugauacaaauucaa

SEQ ID NO: 617114 - RNA, 19 nt, Artificial Sequence
  Description of Artificial Sequence: Synthetic oligonucleotide
  Sense strand starting at position 2346 of SEQ ID NO: 585150
gaauuugcguuucuaccca

SEQ ID NO: 617115 - RNA, 19 nt, Artificial Sequence
  Description of Artificial Sequence: Synthetic oligonucleotide
  Antisense strand to SEQ ID NO: 617114
uggguagaaacgcaaauuc

SEQ ID NO: 617116 - RNA, 19 nt, Artificial Sequence
  Description of Artificial Sequence: Synthetic oligonucleotide
  Sense strand starting at position 2366 of SEQ ID NO: 585150
uuccuacuucuaggauguu

SEQ ID NO: 617117 - RNA, 19 nt, Artificial Sequence
  Description of Artificial Sequence: Synthetic oligonucleotide
  Antisense strand to SEQ ID NO: 617116
aacauccuagaaguaggaa

SEQ ID NO: 617118 - RNA, 19 nt, Artificial Sequence
  Description of Artificial Sequence: Synthetic oligonucleotide
  Sense strand starting at position 2604 of SEQ ID NO: 585150
ggcaguuacagugagcaga

SEQ ID NO: 617119 - RNA, 19 nt, Artificial Sequence
  Description of Artificial Sequence: Synthetic oligonucleotide
  Antisense strand to SEQ ID NO: 617118
ucugcucacuguaacugcc

SEQ ID NO: 617120 - RNA, 19 nt, Artificial Sequence
  Description of Artificial Sequence: Synthetic oligonucleotide
  Sense strand starting at position 2713 of SEQ ID NO: 585150
ucugauuggugguccaaac

SEQ ID NO: 617121 - RNA, 19 nt, Artificial Sequence
  Description of Artificial Sequence: Synthetic oligonucleotide
  Antisense strand to SEQ ID NO: 617120
guuuggaccaccaaucaga

SEQ ID NO: 617122 - RNA, 19 nt, Artificial Sequence
  Description of Artificial Sequence: Synthetic oligonucleotide
  Sense strand starting at position 2723 of SEQ ID NO: 585150
gguccaaacuuuccugaga

SEQ ID NO: 617123 - RNA, 19 nt, Artificial Sequence
  Description of Artificial Sequence: Synthetic oligonucleotide
  Antisense strand to SEQ ID NO: 617122
ucucaggaaaguuuggacc

SEQ ID NO: 617124 - RNA, 19 nt, Artificial Sequence
  Description of Artificial Sequence: Synthetic oligonucleotide
  Sense strand starting at position 2724 of SEQ ID NO: 585150
guccaaacuuuccugagaa

SEQ ID NO: 617125 - RNA, 19 nt, Artificial Sequence
  Description of Artificial Sequence: Synthetic oligonucleotide
  Antisense strand to SEQ ID NO: 617124
uucucaggaaaguuuggac

SEQ ID NO: 617126 - RNA, 19 nt, Artificial Sequence
  Description of Artificial Sequence: Synthetic oligonucleotide
  Sense strand starting at position 2775 of SEQ ID NO: 585150
aggugaaaccaguggaaug

SEQ ID NO: 617127 - RNA, 19 nt, Artificial Sequence
  Description of Artificial Sequence: Synthetic oligonucleotide
  Antisense strand to SEQ ID NO: 617126
cauuccacugguuucaccu

SEQ ID NO: 617128 - RNA, 19 nt, Artificial Sequence
  Description of Artificial Sequence: Synthetic oligonucleotide
  Sense strand starting at position 2776 of SEQ ID NO: 585150
ggugaaaccaguggaauga

SEQ ID NO: 617129 - RNA, 19 nt, Artificial Sequence
  Description of Artificial Sequence: Synthetic oligonucleotide
  Antisense strand to SEQ ID NO: 617128
ucauuccacugguuucacc

SEQ ID NO: 617130 - RNA, 19 nt, Artificial Sequence
  Description of Artificial Sequence: Synthetic oligonucleotide
  Sense strand starting at position 2799 of SEQ ID NO: 585150
uuaagaaaccugcaagcuu

SEQ ID NO: 617131 - RNA, 19 nt, Artificial Sequence
  Description of Artificial Sequence: Synthetic oligonucleotide
  Antisense strand to SEQ ID NO: 617130
aagcuugcagguuucuuaa

SEQ ID NO: 617132 - RNA, 19 nt, Artificial Sequence
  Description of Artificial Sequence: Synthetic oligonucleotide
  Sense strand starting at position 2853 of SEQ ID NO: 585150
aaaggauauuugggaagcu

SEQ ID NO: 617133 - RNA, 19 nt, Artificial Sequence
  Description of Artificial Sequence: Synthetic oligonucleotide
  Antisense strand to SEQ ID NO: 617132
agcuucccaaauauccuuu

SEQ ID NO: 617134 - RNA, 19 nt, Artificial Sequence
  Description of Artificial Sequence: Synthetic oligonucleotide
  Sense strand starting at position 2854 of SEQ ID NO: 585150
aaggauauuugggaagcuu

SEQ ID NO: 617135 - RNA, 19 nt, Artificial Sequence
  Description of Artificial Sequence: Synthetic oligonucleotide
  Antisense strand to SEQ ID NO: 617134
aagcuucccaaauauccuu

SEQ ID NO: 617136 - RNA, 19 nt, Artificial Sequence
  Description of Artificial Sequence: Synthetic oligonucleotide
  Sense strand starting at position 2963 of SEQ ID NO: 585150
gcuugagugcaguaacaug

SEQ ID NO: 617137 - RNA, 19 nt, Artificial Sequence
  Description of Artificial Sequence: Synthetic oligonucleotide
  Antisense strand to SEQ ID NO: 617136
cauguuacugcacucaagc

SEQ ID NO: 617138 - RNA, 19 nt, Artificial Sequence
  Description of Artificial Sequence: Synthetic oligonucleotide
  Sense strand starting at position 3450 of SEQ ID NO: 585150
gugguacaggucugauuuc

SEQ ID NO: 617139 - RNA, 19 nt, Artificial Sequence
  Description of Artificial Sequence: Synthetic oligonucleotide
  Antisense strand to SEQ ID NO: 617138
gaaaucagaccuguaccac

SEQ ID NO: 617140 - RNA, 19 nt, Artificial Sequence
  Description of Artificial Sequence: Synthetic oligonucleotide
  Sense strand starting at position 3514 of SEQ ID NO: 585150
uucuguagugccuacaauu

SEQ ID NO: 617141 - RNA, 19 nt, Artificial Sequence
  Description of Artificial Sequence: Synthetic oligonucleotide
  Antisense strand to SEQ ID NO: 617140
aauuguaggcacuacagaa

SEQ ID NO: 617142 - RNA, 19 nt, Artificial Sequence
  Description of Artificial Sequence: Synthetic oligonucleotide
  Sense strand starting at position 3562 of SEQ ID NO: 585150
guugaagcucuccagugaa

SEQ ID NO: 617143 - RNA, 19 nt, Artificial Sequence
  Description of Artificial Sequence: Synthetic oligonucleotide
  Antisense strand to SEQ ID NO: 617142
uucacuggagagcuucaac

SEQ ID NO: 617144 - RNA, 19 nt, Artificial Sequence
  Description of Artificial Sequence: Synthetic oligonucleotide
  Sense strand starting at position 3565 of SEQ ID NO: 585150
gaagcucuccagugaacug

SEQ ID NO: 617145 - RNA, 19 nt, Artificial Sequence
  Description of Artificial Sequence: Synthetic oligonucleotide
  Antisense strand to SEQ ID NO: 617144
caguucacuggagagcuuc

SEQ ID NO: 617146 - RNA, 19 nt, Artificial Sequence
  Description of Artificial Sequence: Synthetic oligonucleotide
  Sense strand starting at position 3588 of SEQ ID NO: 585150
ucuaauuauugagugaaga

SEQ ID NO: 617147 - RNA, 19 nt, Artificial Sequence
  Description of Artificial Sequence: Synthetic oligonucleotide
  Antisense strand to SEQ ID NO: 617146
ucuucacucaauaauuaga

SEQ ID NO: 617148 - RNA, 19 nt, Artificial Sequence
  Description of Artificial Sequence: Synthetic oligonucleotide
  Sense strand starting at position 3644 of SEQ ID NO: 585150
cccaucucugcagagagau

SEQ ID NO: 617149 - RNA, 19 nt, Artificial Sequence
  Description of Artificial Sequence: Synthetic oligonucleotide
  Antisense strand to SEQ ID NO: 617148
aucucucugcagagauggg

SEQ ID NO: 617150 - RNA, 19 nt, Artificial Sequence
  Description of Artificial Sequence: Synthetic oligonucleotide
  Sense strand starting at position 3743 of SEQ ID NO: 585150
acagcuccaccguaagagu

SEQ ID NO: 617151 - RNA, 19 nt, Artificial Sequence
  Description of Artificial Sequence: Synthetic oligonucleotide
  Antisense strand to SEQ ID NO: 617150
acucuuacgguggagcugu

SEQ ID NO: 617152 - RNA, 19 nt, Artificial Sequence
  Description of Artificial Sequence: Synthetic oligonucleotide
  Sense strand starting at position 40 of SEQ ID NO: 585151
guauuaaggcaauauuaac

SEQ ID NO: 617153 - RNA, 19 nt, Artificial Sequence
  Description of Artificial Sequence: Synthetic oligonucleotide
  Antisense strand to SEQ ID NO: 617152
guuaauauugccuuaauac

SEQ ID NO: 617154 - RNA, 19 nt, Artificial Sequence
  Description of Artificial Sequence: Synthetic oligonucleotide
  Sense strand starting at position 69 of SEQ ID NO: 585151
ccuagaugauggcucaacu

SEQ ID NO: 617155 - RNA, 19 nt, Artificial Sequence
  Description of Artificial Sequence: Synthetic oligonucleotide
  Antisense strand to SEQ ID NO: 617154
aguugagccaucaucuagg

SEQ ID NO: 617156 - RNA, 19 nt, Artificial Sequence
  Description of Artificial Sequence: Synthetic oligonucleotide
  Sense strand starting at position 114 of SEQ ID NO: 585151
gagacuugcuccuuuaagg

SEQ ID NO: 617157 - RNA, 19 nt, Artificial Sequence
  Description of Artificial Sequence: Synthetic oligonucleotide
  Antisense strand to SEQ ID NO: 617156
ccuuaaaggagcaagucuc

SEQ ID NO: 617158 - RNA, 19 nt, Artificial Sequence
  Description of Artificial Sequence: Synthetic oligonucleotide
  Sense strand starting at position 121 of SEQ ID NO: 585151
gcuccuuuaaggugaugaa

SEQ ID NO: 617159 - RNA, 19 nt, Artificial Sequence
  Description of Artificial Sequence: Synthetic oligonucleotide
  Antisense strand to SEQ ID NO: 617158
uucaucaccuuaaaggagc

SEQ ID NO: 617160 - RNA, 19 nt, Artificial Sequence
  Description of Artificial Sequence: Synthetic oligonucleotide
  Sense strand starting at position 131 of SEQ ID NO: 585151
ggugaugaagcauacaucu

SEQ ID NO: 617161 - RNA, 19 nt, Artificial Sequence
  Description of Artificial Sequence: Synthetic oligonucleotide
  Antisense strand to SEQ ID NO: 617160
agauguaugcuucaucacc

SEQ ID NO: 617162 - RNA, 19 nt, Artificial Sequence
  Description of Artificial Sequence: Synthetic oligonucleotide
  Sense strand starting at position 210 of SEQ ID NO: 585151
ugauaauaauaccaggaaa

SEQ ID NO: 617163 - RNA, 19 nt, Artificial Sequence
  Description of Artificial Sequence: Synthetic oligonucleotide
  Antisense strand to SEQ ID NO: 617162
uuuccugguauuauuauca

SEQ ID NO: 617164 - RNA, 19 nt, Artificial Sequence
  Description of Artificial Sequence: Synthetic oligonucleotide
  Sense strand starting at position 221 of SEQ ID NO: 585151
ccaggaaauuuauauugac

SEQ ID NO: 617165 - RNA, 19 nt, Artificial Sequence
  Description of Artificial Sequence: Synthetic oligonucleotide
  Antisense strand to SEQ ID NO: 617164
gucaauauaaauuuccugg

SEQ ID NO: 617166 - RNA, 19 nt, Artificial Sequence
  Description of Artificial Sequence: Synthetic oligonucleotide
  Sense strand starting at position 224 of SEQ ID NO: 585151
ggaaauuuauauugacaca

SEQ ID NO: 617167 - RNA, 19 nt, Artificial Sequence
  Description of Artificial Sequence: Synthetic oligonucleotide
  Antisense strand to SEQ ID NO: 617166
ugugucaauauaaauuucc

SEQ ID NO: 617168 - RNA, 19 nt, Artificial Sequence
  Description of Artificial Sequence: Synthetic oligonucleotide
  Sense strand starting at position 301 of SEQ ID NO: 585151
auccguauugcuuagaaca

SEQ ID NO: 617169 - RNA, 19 nt, Artificial Sequence
  Description of Artificial Sequence: Synthetic oligonucleotide
  Antisense strand to SEQ ID NO: 617168
uguucuaagcaauacggau

SEQ ID NO: 617170 - RNA, 19 nt, Artificial Sequence
  Description of Artificial Sequence: Synthetic oligonucleotide
  Sense strand starting at position 575 of SEQ ID NO: 585151
cgguaaacaugguuucaga

SEQ ID NO: 617171 - RNA, 19 nt, Artificial Sequence
  Description of Artificial Sequence: Synthetic oligonucleotide
  Antisense strand to SEQ ID NO: 617170
ucugaaaccauguuuaccg

SEQ ID NO: 617172 - RNA, 19 nt, Artificial Sequence
  Description of Artificial Sequence: Synthetic oligonucleotide
  Sense strand starting at position 597 of SEQ ID NO: 585151
aacgacuacuguucuaaga

SEQ ID NO: 617173 - RNA, 19 nt, Artificial Sequence
  Description of Artificial Sequence: Synthetic oligonucleotide
  Antisense strand to SEQ ID NO: 617172
ucuuagaacaguagucguu

SEQ ID NO: 617174 - RNA, 19 nt, Artificial Sequence
  Description of Artificial Sequence: Synthetic oligonucleotide
  Sense strand starting at position 682 of SEQ ID NO: 585151
aggagcuucuugguacaau

SEQ ID NO: 617175 - RNA, 19 nt, Artificial Sequence
  Description of Artificial Sequence: Synthetic oligonucleotide
  Antisense strand to SEQ ID NO: 617174
auuguaccaagaagcuccu

SEQ ID NO: 617176 - RNA, 19 nt, Artificial Sequence
  Description of Artificial Sequence: Synthetic oligonucleotide
  Sense strand starting at position 831 of SEQ ID NO: 585151
agcuucuuauccucaagag

SEQ ID NO: 617177 - RNA, 19 nt, Artificial Sequence
  Description of Artificial Sequence: Synthetic oligonucleotide
  Antisense strand to SEQ ID NO: 617176
cucuugaggauaagaagcu

SEQ ID NO: 617178 - RNA, 19 nt, Artificial Sequence
  Description of Artificial Sequence: Synthetic oligonucleotide
  Sense strand starting at position 832 of SEQ ID NO: 585151
gcuucuuauccucaagagu

SEQ ID NO: 617179 - RNA, 19 nt, Artificial Sequence
  Description of Artificial Sequence: Synthetic oligonucleotide
  Antisense strand to SEQ ID NO: 617178
acucuugaggauaagaagc

SEQ ID NO: 617180 - RNA, 19 nt, Artificial Sequence
  Description of Artificial Sequence: Synthetic oligonucleotide
  Sense strand starting at position 866 of SEQ ID NO: 585151
aguguuguugcugaaagag

SEQ ID NO: 617181 - RNA, 19 nt, Artificial Sequence
  Description of Artificial Sequence: Synthetic oligonucleotide
  Antisense strand to SEQ ID NO: 617180
cucuuucagcaacaacacu

SEQ ID NO: 617182 - RNA, 19 nt, Artificial Sequence
  Description of Artificial Sequence: Synthetic oligonucleotide
  Sense strand starting at position 909 of SEQ ID NO: 585151
guucuuaaccuggaaguaa

SEQ ID NO: 617183 - RNA, 19 nt, Artificial Sequence
  Description of Artificial Sequence: Synthetic oligonucleotide
  Antisense strand to SEQ ID NO: 617182
uuacuuccagguuaagaac

SEQ ID NO: 617184 - RNA, 19 nt, Artificial Sequence
  Description of Artificial Sequence: Synthetic oligonucleotide
  Sense strand starting at position 1353 of SEQ ID NO: 585151
ggcuuugucagcgcgagau

SEQ ID NO: 617185 - RNA, 19 nt, Artificial Sequence
  Description of Artificial Sequence: Synthetic oligonucleotide
  Antisense strand to SEQ ID NO: 617184
aucucgcgcugacaaagcc

SEQ ID NO: 617186 - RNA, 19 nt, Artificial Sequence
  Description of Artificial Sequence: Synthetic oligonucleotide
  Sense strand starting at position 2466 of SEQ ID NO: 585151
ccucuuucugggcagauua

SEQ ID NO: 617187 - RNA, 19 nt, Artificial Sequence
  Description of Artificial Sequence: Synthetic oligonucleotide
  Antisense strand to SEQ ID NO: 617186
uaaucugcccagaaagagg

SEQ ID NO: 617188 - RNA, 19 nt, Artificial Sequence
  Description of Artificial Sequence: Synthetic oligonucleotide
  Sense strand starting at position 2476 of SEQ ID NO: 585151
ggcagauuaugauccuaca

SEQ ID NO: 617189 - RNA, 19 nt, Artificial Sequence
  Description of Artificial Sequence: Synthetic oligonucleotide
  Antisense strand to SEQ ID NO: 617188
uguaggaucauaaucugcc

SEQ ID NO: 617190 - RNA, 19 nt, Artificial Sequence
  Description of Artificial Sequence: Synthetic oligonucleotide
  Sense strand starting at position 2502 of SEQ ID NO: 585151
ccaugacaucuguauaguc

SEQ ID NO: 617191 - RNA, 19 nt, Artificial Sequence
  Description of Artificial Sequence: Synthetic oligonucleotide
  Antisense strand to SEQ ID NO: 617190
gacuauacagaugucaugg

SEQ ID NO: 617192 - RNA, 19 nt, Artificial Sequence
  Description of Artificial Sequence: Synthetic oligonucleotide
  Sense strand starting at position 2734 of SEQ ID NO: 585151
cguguucucaaugaucuag

SEQ ID NO: 617193 - RNA, 19 nt, Artificial Sequence
  Description of Artificial Sequence: Synthetic oligonucleotide
  Antisense strand to SEQ ID NO: 617192
cuagaucauugagaacacg

SEQ ID NO: 617194 - RNA, 19 nt, Artificial Sequence
  Description of Artificial Sequence: Synthetic oligonucleotide
  Sense strand starting at position 2736 of SEQ ID NO: 585151
uguucucaaugaucuagga

SEQ ID NO: 617195 - RNA, 19 nt, Artificial Sequence
  Description of Artificial Sequence: Synthetic oligonucleotide
  Antisense strand to SEQ ID NO: 617194
uccuagaucauugagaaca

SEQ ID NO: 617196 - RNA, 19 nt, Artificial Sequence
  Description of Artificial Sequence: Synthetic oligonucleotide
  Sense strand starting at position 2740 of SEQ ID NO: 585151
cucaaugaucuaggaaggu

SEQ ID NO: 617197 - RNA, 19 nt, Artificial Sequence
  Description of Artificial Sequence: Synthetic oligonucleotide
  Antisense strand to SEQ ID NO: 617196
accuuccuagaucauugag

SEQ ID NO: 617198 - RNA, 19 nt, Artificial Sequence
  Description of Artificial Sequence: Synthetic oligonucleotide
  Sense strand starting at position 2753 of SEQ ID NO: 585151
gaagguuguaagugugaag

SEQ ID NO: 617199 - RNA, 19 nt, Artificial Sequence
  Description of Artificial Sequence: Synthetic oligonucleotide
  Antisense strand to SEQ ID NO: 617198
cuucacacuuacaaccuuc

SEQ ID NO: 617200 - RNA, 19 nt, Artificial Sequence
  Description of Artificial Sequence: Synthetic oligonucleotide
  Sense strand starting at position 2846 of SEQ ID NO: 585151
uugaaagaucucugaaucu

SEQ ID NO: 617201 - RNA, 19 nt, Artificial Sequence
  Description of Artificial Sequence: Synthetic oligonucleotide
  Antisense strand to SEQ ID NO: 617200
agauucagagaucuuucaa

SEQ ID NO: 617202 - RNA, 19 nt, Artificial Sequence
  Description of Artificial Sequence: Synthetic oligonucleotide
  Sense strand starting at position 2915 of SEQ ID NO: 585151
cgcuuucguaguguggauu

SEQ ID NO: 617203 - RNA, 19 nt, Artificial Sequence
  Description of Artificial Sequence: Synthetic oligonucleotide
  Antisense strand to SEQ ID NO: 617202
aauccacacuacgaaagcg

SEQ ID NO: 617204 - RNA, 19 nt, Artificial Sequence
  Description of Artificial Sequence: Synthetic oligonucleotide
  Sense strand starting at position 3095 of SEQ ID NO: 585151
ugauuucugugagccguaa

SEQ ID NO: 617205 - RNA, 19 nt, Artificial Sequence
  Description of Artificial Sequence: Synthetic oligonucleotide
  Antisense strand to SEQ ID NO: 617204
uuacggcucacagaaauca

SEQ ID NO: 617206 - RNA, 19 nt, Artificial Sequence
  Description of Artificial Sequence: Synthetic oligonucleotide
  Sense strand starting at position 3097 of SEQ ID NO: 585151
auuucugugagccguaauu

SEQ ID NO: 617207 - RNA, 19 nt, Artificial Sequence
  Description of Artificial Sequence: Synthetic oligonucleotide
  Antisense strand to SEQ ID NO: 617206
aauuacggcucacagaaau

SEQ ID NO: 617208 - RNA, 19 nt, Artificial Sequence
  Description of Artificial Sequence: Synthetic oligonucleotide
  Sense strand starting at position 3239 of SEQ ID NO: 585151
ugagcuaauuauucccaga

SEQ ID NO: 617209 - RNA, 19 nt, Artificial Sequence
  Description of Artificial Sequence: Synthetic oligonucleotide
  Antisense strand to SEQ ID NO: 617208
ucugggaauaauuagcuca

SEQ ID NO: 617210 - RNA, 19 nt, Artificial Sequence
  Description of Artificial Sequence: Synthetic oligonucleotide
  Sense strand starting at position 3298 of SEQ ID NO: 585151
gcugguuguguugcuuuaa

SEQ ID NO: 617211 - RNA, 19 nt, Artificial Sequence
  Description of Artificial Sequence: Synthetic oligonucleotide
  Antisense strand to SEQ ID NO: 617210
uuaaagcaacacaaccagc

SEQ ID NO: 617212 - RNA, 19 nt, Artificial Sequence
  Description of Artificial Sequence: Synthetic oligonucleotide
  Sense strand starting at position 3370 of SEQ ID NO: 585151
ggaucauagucucuagaau

SEQ ID NO: 617213 - RNA, 19 nt, Artificial Sequence
  Description of Artificial Sequence: Synthetic oligonucleotide
  Antisense strand to SEQ ID NO: 617212
auucuagagacuaugaucc

SEQ ID NO: 617214 - RNA, 19 nt, Artificial Sequence
  Description of Artificial Sequence: Synthetic oligonucleotide
  Sense strand starting at position 3468 of SEQ ID NO: 585151
cuguaaaugcaauguggaa

SEQ ID NO: 617215 - RNA, 19 nt, Artificial Sequence
  Description of Artificial Sequence: Synthetic oligonucleotide
  Antisense strand to SEQ ID NO: 617214
uuccacauugcauuuacag

SEQ ID NO: 617216 - RNA, 19 nt, Artificial Sequence
  Description of Artificial Sequence: Synthetic oligonucleotide
  Sense strand starting at position 3499 of SEQ ID NO: 585151
ugcaauaggccauaccuaa

SEQ ID NO: 617217 - RNA, 19 nt, Artificial Sequence
  Description of Artificial Sequence: Synthetic oligonucleotide
  Antisense strand to SEQ ID NO: 617216
uuagguauggccuauugca

SEQ ID NO: 617218 - RNA, 19 nt, Artificial Sequence
  Description of Artificial Sequence: Synthetic oligonucleotide
  Sense strand starting at position 3582 of SEQ ID NO: 585151
gauaaaguauuacuugaug

SEQ ID NO: 617219 - RNA, 19 nt, Artificial Sequence
  Description of Artificial Sequence: Synthetic oligonucleotide
  Antisense strand to SEQ ID NO: 617218
caucaaguaauacuuuauc

SEQ ID NO: 617220 - RNA, 19 nt, Artificial Sequence
  Description of Artificial Sequence: Synthetic oligonucleotide
  Sense strand starting at position 3609 of SEQ ID NO: 585151
gguaucaacuugcuagacu

SEQ ID NO: 617221 - RNA, 19 nt, Artificial Sequence
  Description of Artificial Sequence: Synthetic oligonucleotide
  Antisense strand to SEQ ID NO: 617220
agucuagcaaguugauacc

SEQ ID NO: 617222 - RNA, 19 nt, Artificial Sequence
  Description of Artificial Sequence: Synthetic oligonucleotide
  Sense strand starting at position 3636 of SEQ ID NO: 585151
uugaguauaucugcuaaug

SEQ ID NO: 617223 - RNA, 19 nt, Artificial Sequence
  Description of Artificial Sequence: Synthetic oligonucleotide
  Antisense strand to SEQ ID NO: 617222
cauuagcagauauacucaa

SEQ ID NO: 617224 - RNA, 19 nt, Artificial Sequence
  Description of Artificial Sequence: Synthetic oligonucleotide
  Sense strand starting at position 3773 of SEQ ID NO: 585151
uucagagauccagaggugu

SEQ ID NO: 617225 - RNA, 19 nt, Artificial Sequence
  Description of Artificial Sequence: Synthetic oligonucleotide
  Antisense strand to SEQ ID NO: 617224
acaccucuggaucucugaa

SEQ ID NO: 617226 - RNA, 19 nt, Artificial Sequence
  Description of Artificial Sequence: Synthetic oligonucleotide
  Sense strand starting at position 3775 of SEQ ID NO: 585151
cagagauccagagguguac

SEQ ID NO: 617227 - RNA, 19 nt, Artificial Sequence
  Description of Artificial Sequence: Synthetic oligonucleotide
  Antisense strand to SEQ ID NO: 617226
guacaccucuggaucucug

SEQ ID NO: 617228 - RNA, 19 nt, Artificial Sequence
  Description of Artificial Sequence: Synthetic oligonucleotide
  Sense strand starting at position 3784 of SEQ ID NO: 585151
agagguguaccaugcaaau

SEQ ID NO: 617229 - RNA, 19 nt, Artificial Sequence
  Description of Artificial Sequence: Synthetic oligonucleotide
  Antisense strand to SEQ ID NO: 617228
auuugcaugguacaccucu

SEQ ID NO: 617230 - RNA, 19 nt, Artificial Sequence
  Description of Artificial Sequence: Synthetic oligonucleotide
  Sense strand starting at position 3895 of SEQ ID NO: 585151
gccuauacuacagagguga

SEQ ID NO: 617231 - RNA, 19 nt, Artificial Sequence
  Description of Artificial Sequence: Synthetic oligonucleotide
  Antisense strand to SEQ ID NO: 617230
ucaccucuguaguauaggc

SEQ ID NO: 617232 - RNA, 19 nt, Artificial Sequence
  Description of Artificial Sequence: Synthetic oligonucleotide
  Sense strand starting at position 267 of SEQ ID NO: 585152
cuuaguacuuguucccaaa

SEQ ID NO: 617233 - RNA, 19 nt, Artificial Sequence
  Description of Artificial Sequence: Synthetic oligonucleotide
  Antisense strand to SEQ ID NO: 617232
uuugggaacaaguacuaag

SEQ ID NO: 617234 - RNA, 19 nt, Artificial Sequence
  Description of Artificial Sequence: Synthetic oligonucleotide
  Sense strand starting at position 341 of SEQ ID NO: 585152
uuaagacugcugggauaac

SEQ ID NO: 617235 - RNA, 19 nt, Artificial Sequence
  Description of Artificial Sequence: Synthetic oligonucleotide
  Antisense strand to SEQ ID NO: 617234
guuaucccagcagucuuaa

SEQ ID NO: 617236 - RNA, 19 nt, Artificial Sequence
  Description of Artificial Sequence: Synthetic oligonucleotide
  Sense strand starting at position 351 of SEQ ID NO: 585152
ugggauaacuguucccuua

SEQ ID NO: 617237 - RNA, 19 nt, Artificial Sequence
  Description of Artificial Sequence: Synthetic oligonucleotide
  Antisense strand to SEQ ID NO: 617236
uaagggaacaguuauccca

SEQ ID NO: 617238 - RNA, 19 nt, Artificial Sequence
  Description of Artificial Sequence: Synthetic oligonucleotide
  Sense strand starting at position 353 of SEQ ID NO: 585152
ggauaacuguucccuuaaa

SEQ ID NO: 617239 - RNA, 19 nt, Artificial Sequence
  Description of Artificial Sequence: Synthetic oligonucleotide
  Antisense strand to SEQ ID NO: 617238
uuuaagggaacaguuaucc

SEQ ID NO: 617240 - RNA, 19 nt, Artificial Sequence
  Description of Artificial Sequence: Synthetic oligonucleotide
  Sense strand starting at position 472 of SEQ ID NO: 585152
guaaauguggcaggaaaga

SEQ ID NO: 617241 - RNA, 19 nt, Artificial Sequence
  Description of Artificial Sequence: Synthetic oligonucleotide
  Antisense strand to SEQ ID NO: 617240
ucuuuccugccacauuuac

SEQ ID NO: 617242 - RNA, 19 nt, Artificial Sequence
  Description of Artificial Sequence: Synthetic oligonucleotide
  Sense strand starting at position 641 of SEQ ID NO: 585152
gagucugugugauuuauug

SEQ ID NO: 617243 - RNA, 19 nt, Artificial Sequence
  Description of Artificial Sequence: Synthetic oligonucleotide
  Antisense strand to SEQ ID NO: 617242
caauaaaucacacagacuc

SEQ ID NO: 617244 - RNA, 19 nt, Artificial Sequence
  Description of Artificial Sequence: Synthetic oligonucleotide
  Sense strand starting at position 769 of SEQ ID NO: 585152
gccuguggccgcagagaua

SEQ ID NO: 617245 - RNA, 19 nt, Artificial Sequence
  Description of Artificial Sequence: Synthetic oligonucleotide
  Antisense strand to SEQ ID NO: 617244
uaucucugcggccacaggc

SEQ ID NO: 617246 - RNA, 19 nt, Artificial Sequence
  Description of Artificial Sequence: Synthetic oligonucleotide
  Sense strand starting at position 1132 of SEQ ID NO: 585152
gugauuacaucaucccuga

SEQ ID NO: 617247 - RNA, 19 nt, Artificial Sequence
  Description of Artificial Sequence: Synthetic oligonucleotide
  Antisense strand to SEQ ID NO: 617246
ucagggaugauguaaucac

SEQ ID NO: 617248 - RNA, 19 nt, Artificial Sequence
  Description of Artificial Sequence: Synthetic oligonucleotide
  Sense strand starting at position 2154 of SEQ ID NO: 585152
guggguugagcguuacugu

SEQ ID NO: 617249 - RNA, 19 nt, Artificial Sequence
  Description of Artificial Sequence: Synthetic oligonucleotide
  Antisense strand to SEQ ID NO: 617248
acaguaacgcucaacccac

SEQ ID NO: 617250 - RNA, 19 nt, Artificial Sequence
  Description of Artificial Sequence: Synthetic oligonucleotide
  Sense strand starting at position 2231 of SEQ ID NO: 585152
aggaggaggucuguguguu

SEQ ID NO: 617251 - RNA, 19 nt, Artificial Sequence
  Description of Artificial Sequence: Synthetic oligonucleotide
  Antisense strand to SEQ ID NO: 617250
aacacacagaccuccuccu

SEQ ID NO: 617252 - RNA, 19 nt, Artificial Sequence
  Description of Artificial Sequence: Synthetic oligonucleotide
  Sense strand starting at position 2385 of SEQ ID NO: 585152
gggaaacugccucgagaca

SEQ ID NO: 617253 - RNA, 19 nt, Artificial Sequence
  Description of Artificial Sequence: Synthetic oligonucleotide
  Antisense strand to SEQ ID NO: 617252
ugucucgaggcaguuuccc

SEQ ID NO: 617254 - RNA, 19 nt, Artificial Sequence
  Description of Artificial Sequence: Synthetic oligonucleotide
  Sense strand starting at position 2517 of SEQ ID NO: 585152
guagaauccuguccugaaa

SEQ ID NO: 617255 - RNA, 19 nt, Artificial Sequence
  Description of Artificial Sequence: Synthetic oligonucleotide
  Antisense strand to SEQ ID NO: 617254
uuucaggacaggauucuac

SEQ ID NO: 617256 - RNA, 19 nt, Artificial Sequence
  Description of Artificial Sequence: Synthetic oligonucleotide
  Sense strand starting at position 2570 of SEQ ID NO: 585152
gaaggagauuaggaucauu

SEQ ID NO: 617257 - RNA, 19 nt, Artificial Sequence
  Description of Artificial Sequence: Synthetic oligonucleotide
  Antisense strand to SEQ ID NO: 617256
aaugauccuaaucuccuuc

SEQ ID NO: 617258 - RNA, 19 nt, Artificial Sequence
  Description of Artificial Sequence: Synthetic oligonucleotide
  Sense strand starting at position 2771 of SEQ ID NO: 585152
ugucuuugguuucucauaa

SEQ ID NO: 617259 - RNA, 19 nt, Artificial Sequence
  Description of Artificial Sequence: Synthetic oligonucleotide
  Antisense strand to SEQ ID NO: 617258
uuaugagaaaccaaagaca

SEQ ID NO: 617260 - RNA, 19 nt, Artificial Sequence
  Description of Artificial Sequence: Synthetic oligonucleotide
  Sense strand starting at position 2772 of SEQ ID NO: 585152
gucuuugguuucucauaac

SEQ ID NO: 617261 - RNA, 19 nt, Artificial Sequence
  Description of Artificial Sequence: Synthetic oligonucleotide
  Antisense strand to SEQ ID NO: 617260
guuaugagaaaccaaagac

SEQ ID NO: 617262 - RNA, 19 nt, Artificial Sequence
  Description of Artificial Sequence: Synthetic oligonucleotide
  Sense strand starting at position 2854 of SEQ ID NO: 585152
augaaauaauugccgguuu

SEQ ID NO: 617263 - RNA, 19 nt, Artificial Sequence
  Description of Artificial Sequence: Synthetic oligonucleotide
  Antisense strand to SEQ ID NO: 617262
aaaccggcaauuauuucau

SEQ ID NO: 617264 - RNA, 19 nt, Artificial Sequence
  Description of Artificial Sequence: Synthetic oligonucleotide
  Sense strand starting at position 2856 of SEQ ID NO: 585152
gaaauaauugccgguuuag

SEQ ID NO: 617265 - RNA, 19 nt, Artificial Sequence
  Description of Artificial Sequence: Synthetic oligonucleotide
  Antisense strand to SEQ ID NO: 617264
cuaaaccggcaauuauuuc

SEQ ID NO: 617266 - RNA, 19 nt, Artificial Sequence
  Description of Artificial Sequence: Synthetic oligonucleotide
  Sense strand starting at position 2871 of SEQ ID NO: 585152
uuaguauacaguugggagu

SEQ ID NO: 617267 - RNA, 19 nt, Artificial Sequence
  Description of Artificial Sequence: Synthetic oligonucleotide
  Antisense strand to SEQ ID NO: 617266
acucccaacuguauacuaa

SEQ ID NO: 617268 - RNA, 19 nt, Artificial Sequence
  Description of Artificial Sequence: Synthetic oligonucleotide
  Sense strand starting at position 2917 of SEQ ID NO: 585152
uuucuauggcaggauguaa

SEQ ID NO: 617269 - RNA, 19 nt, Artificial Sequence
  Description of Artificial Sequence: Synthetic oligonucleotide
  Antisense strand to SEQ ID NO: 617268
uuacauccugccauagaaa

SEQ ID NO: 617270 - RNA, 19 nt, Artificial Sequence
  Description of Artificial Sequence: Synthetic oligonucleotide
  Sense strand starting at position 2978 of SEQ ID NO: 585152
gguaauuccuguuuacuga

SEQ ID NO: 617271 - RNA, 19 nt, Artificial Sequence
  Description of Artificial Sequence: Synthetic oligonucleotide
  Antisense strand to SEQ ID NO: 617270
ucaguaaacaggaauuacc

SEQ ID NO: 617272 - RNA, 19 nt, Artificial Sequence
  Description of Artificial Sequence: Synthetic oligonucleotide
  Sense strand starting at position 2979 of SEQ ID NO: 585152
guaauuccuguuuacugaa

SEQ ID NO: 617273 - RNA, 19 nt, Artificial Sequence
  Description of Artificial Sequence: Synthetic oligonucleotide
  Antisense strand to SEQ ID NO: 617272
uucaguaaacaggaauuac

SEQ ID NO: 617274 - RNA, 19 nt, Artificial Sequence
  Description of Artificial Sequence: Synthetic oligonucleotide
  Sense strand starting at position 2992 of SEQ ID NO: 585152
acugaaaguucugcuuuaa

SEQ ID NO: 617275 - RNA, 19 nt, Artificial Sequence
  Description of Artificial Sequence: Synthetic oligonucleotide
  Antisense strand to SEQ ID NO: 617274
uuaaagcagaacuuucagu

SEQ ID NO: 617276 - RNA, 19 nt, Artificial Sequence
  Description of Artificial Sequence: Synthetic oligonucleotide
  Sense strand starting at position 3322 of SEQ ID NO: 585152
uacagagguuacuggauuu

SEQ ID NO: 617277 - RNA, 19 nt, Artificial Sequence
  Description of Artificial Sequence: Synthetic oligonucleotide
  Antisense strand to SEQ ID NO: 617276
aaauccaguaaccucugua

SEQ ID NO: 617278 - RNA, 19 nt, Artificial Sequence
  Description of Artificial Sequence: Synthetic oligonucleotide
  Sense strand starting at position 3378 of SEQ ID NO: 585152
uguuuaaauugugucugga

SEQ ID NO: 617279 - RNA, 19 nt, Artificial Sequence
  Description of Artificial Sequence: Synthetic oligonucleotide
  Antisense strand to SEQ ID NO: 617278
uccagacacaauuuaaaca

SEQ ID NO: 617280 - RNA, 19 nt, Artificial Sequence
  Description of Artificial Sequence: Synthetic oligonucleotide
  Sense strand starting at position 3380 of SEQ ID NO: 585152
uuuaaauugugucuggaaa

SEQ ID NO: 617281 - RNA, 19 nt, Artificial Sequence
  Description of Artificial Sequence: Synthetic oligonucleotide
  Antisense strand to SEQ ID NO: 617280
uuuccagacacaauuuaaa

SEQ ID NO: 617282 - RNA, 19 nt, Artificial Sequence
  Description of Artificial Sequence: Synthetic oligonucleotide
  Sense strand starting at position 3381 of SEQ ID NO: 585152
uuaaauugugucuggaaau

SEQ ID NO: 617283 - RNA, 19 nt, Artificial Sequence
  Description of Artificial Sequence: Synthetic oligonucleotide
  Antisense strand to SEQ ID NO: 617282
auuuccagacacaauuuaa

SEQ ID NO: 617284 - RNA, 19 nt, Artificial Sequence
  Description of Artificial Sequence: Synthetic oligonucleotide
  Sense strand starting at position 3425 of SEQ ID NO: 585152
uagcuaggacuaggauauu

SEQ ID NO: 617285 - RNA, 19 nt, Artificial Sequence
  Description of Artificial Sequence: Synthetic oligonucleotide
  Antisense strand to SEQ ID NO: 617284
aauauccuaguccuagcua

SEQ ID NO: 617286 - RNA, 19 nt, Artificial Sequence
  Description of Artificial Sequence: Synthetic oligonucleotide
  Sense strand starting at position 3477 of SEQ ID NO: 585152
agaauugcuuaucucaaga

SEQ ID NO: 617287 - RNA, 19 nt, Artificial Sequence
  Description of Artificial Sequence: Synthetic oligonucleotide
  Antisense strand to SEQ ID NO: 617286
ucuugagauaagcaauucu

SEQ ID NO: 617288 - RNA, 19 nt, Artificial Sequence
  Description of Artificial Sequence: Synthetic oligonucleotide
  Sense strand starting at position 3482 of SEQ ID NO: 585152
ugcuuaucucaagagcaga

SEQ ID NO: 617289 - RNA, 19 nt, Artificial Sequence
  Description of Artificial Sequence: Synthetic oligonucleotide
  Antisense strand to SEQ ID NO: 617288
ucugcucuugagauaagca

SEQ ID NO: 617290 - RNA, 19 nt, Artificial Sequence
  Description of Artificial Sequence: Synthetic oligonucleotide
  Sense strand starting at position 3565 of SEQ ID NO: 585152
ggcaguuggguagagcaau

SEQ ID NO: 617291 - RNA, 19 nt, Artificial Sequence
  Description of Artificial Sequence: Synthetic oligonucleotide
  Antisense strand to SEQ ID NO: 617290
auugcucuacccaacugcc

SEQ ID NO: 617292 - RNA, 19 nt, Artificial Sequence
  Description of Artificial Sequence: Synthetic oligonucleotide
  Sense strand starting at position 3656 of SEQ ID NO: 585152
accugagguucugauuuag

SEQ ID NO: 617293 - RNA, 19 nt, Artificial Sequence
  Description of Artificial Sequence: Synthetic oligonucleotide
  Antisense strand to SEQ ID NO: 617292
cuaaaucagaaccucaggu

SEQ ID NO: 617294 - RNA, 19 nt, Artificial Sequence
  Description of Artificial Sequence: Synthetic oligonucleotide
  Sense strand starting at position 3680 of SEQ ID NO: 585152
uugggauggugcccaagaa

SEQ ID NO: 617295 - RNA, 19 nt, Artificial Sequence
  Description of Artificial Sequence: Synthetic oligonucleotide
  Antisense strand to SEQ ID NO: 617294
uucuugggcaccaucccaa

SEQ ID NO: 617296 - RNA, 19 nt, Artificial Sequence
  Description of Artificial Sequence: Synthetic oligonucleotide
  Sense strand starting at position 3681 of SEQ ID NO: 585152
ugggauggugcccaagaau

SEQ ID NO: 617297 - RNA, 19 nt, Artificial Sequence
  Description of Artificial Sequence: Synthetic oligonucleotide
  Antisense strand to SEQ ID NO: 617296
auucuugggcaccauccca

SEQ ID NO: 617298 - RNA, 19 nt, Artificial Sequence
  Description of Artificial Sequence: Synthetic oligonucleotide
  Sense strand starting at position 3758 of SEQ ID NO: 585152
ugaggaccauaguucuaga

SEQ ID NO: 617299 - RNA, 19 nt, Artificial Sequence
  Description of Artificial Sequence: Synthetic oligonucleotide
  Antisense strand to SEQ ID NO: 617298
ucuagaacuaugguccuca

SEQ ID NO: 617300 - RNA, 19 nt, Artificial Sequence
  Description of Artificial Sequence: Synthetic oligonucleotide
  Sense strand starting at position 3772 of SEQ ID NO: 585152
cuagaauugggcuguccga

SEQ ID NO: 617301 - RNA, 19 nt, Artificial Sequence
  Description of Artificial Sequence: Synthetic oligonucleotide
  Antisense strand to SEQ ID NO: 617300
ucggacagcccaauucuag

SEQ ID NO: 617302 - RNA, 19 nt, Artificial Sequence
  Description of Artificial Sequence: Synthetic oligonucleotide
  Sense strand starting at position 3813 of SEQ ID NO: 585152
acuguuaaguacuugaaau

SEQ ID NO: 617303 - RNA, 19 nt, Artificial Sequence
  Description of Artificial Sequence: Synthetic oligonucleotide
  Antisense strand to SEQ ID NO: 617302
auuucaaguacuuaacagu

SEQ ID NO: 617304 - RNA, 19 nt, Artificial Sequence
  Description of Artificial Sequence: Synthetic oligonucleotide
  Sense strand starting at position 3815 of SEQ ID NO: 585152
uguuaaguacuugaaaugu

SEQ ID NO: 617305 - RNA, 19 nt, Artificial Sequence
  Description of Artificial Sequence: Synthetic oligonucleotide
  Antisense strand to SEQ ID NO: 617304
acauuucaaguacuuaaca

SEQ ID NO: 617306 - RNA, 19 nt, Artificial Sequence
  Description of Artificial Sequence: Synthetic oligonucleotide
  Sense strand starting at position 3862 of SEQ ID NO: 585152
aaauuaggaugugcuguaa

SEQ ID NO: 617307 - RNA, 19 nt, Artificial Sequence
  Description of Artificial Sequence: Synthetic oligonucleotide
  Antisense strand to SEQ ID NO: 617306
uuacagcacauccuaauuu

SEQ ID NO: 617308 - RNA, 19 nt, Artificial Sequence
  Description of Artificial Sequence: Synthetic oligonucleotide
  Sense strand starting at position 3866 of SEQ ID NO: 585152
uaggaugugcuguaaaugu

SEQ ID NO: 617309 - RNA, 19 nt, Artificial Sequence
  Description of Artificial Sequence: Synthetic oligonucleotide
  Antisense strand to SEQ ID NO: 617308
acauuuacagcacauccua

SEQ ID NO: 617310 - RNA, 19 nt, Artificial Sequence
  Description of Artificial Sequence: Synthetic oligonucleotide
  Sense strand starting at position 3974 of SEQ ID NO: 585152
cuaaauguacugugcuaaa

SEQ ID NO: 617311 - RNA, 19 nt, Artificial Sequence
  Description of Artificial Sequence: Synthetic oligonucleotide
  Antisense strand to SEQ ID NO: 617310
uuuagcacaguacauuuag

SEQ ID NO: 617312 - RNA, 19 nt, Artificial Sequence
  Description of Artificial Sequence: Synthetic oligonucleotide
  Sense strand starting at position 97 of SEQ ID NO: 585153
cuugcaucagcugacaagu

SEQ ID NO: 617313 - RNA, 19 nt, Artificial Sequence
  Description of Artificial Sequence: Synthetic oligonucleotide
  Antisense strand to SEQ ID NO: 617312
acuugucagcugaugcaag

SEQ ID NO: 617314 - RNA, 19 nt, Artificial Sequence
  Description of Artificial Sequence: Synthetic oligonucleotide
  Sense strand starting at position 106 of SEQ ID NO: 585153
gcugacaaguucucacuga

SEQ ID NO: 617315 - RNA, 19 nt, Artificial Sequence
  Description of Artificial Sequence: Synthetic oligonucleotide
  Antisense strand to SEQ ID NO: 617314
ucagugagaacuugucagc

SEQ ID NO: 617316 - RNA, 19 nt, Artificial Sequence
  Description of Artificial Sequence: Synthetic oligonucleotide
  Sense strand starting at position 447 of SEQ ID NO: 585153
uccagcacucgugaaugaa

SEQ ID NO: 617317 - RNA, 19 nt, Artificial Sequence
  Description of Artificial Sequence: Synthetic oligonucleotide
  Antisense strand to SEQ ID NO: 617316
uucauucacgagugcugga

SEQ ID NO: 617318 - RNA, 19 nt, Artificial Sequence
  Description of Artificial Sequence: Synthetic oligonucleotide
  Sense strand starting at position 450 of SEQ ID NO: 585153
agcacucgugaaugaauga

SEQ ID NO: 617319 - RNA, 19 nt, Artificial Sequence
  Description of Artificial Sequence: Synthetic oligonucleotide
  Antisense strand to SEQ ID NO: 617318
ucauucauucacgagugcu

SEQ ID NO: 617320 - RNA, 19 nt, Artificial Sequence
  Description of Artificial Sequence: Synthetic oligonucleotide
  Sense strand starting at position 451 of SEQ ID NO: 585153
gcacucgugaaugaaugaa

SEQ ID NO: 617321 - RNA, 19 nt, Artificial Sequence
  Description of Artificial Sequence: Synthetic oligonucleotide
  Antisense strand to SEQ ID NO: 617320
uucauucauucacgagugc

SEQ ID NO: 617322 - RNA, 19 nt, Artificial Sequence
  Description of Artificial Sequence: Synthetic oligonucleotide
  Sense strand starting at position 924 of SEQ ID NO: 585153
gccagaugggcugagagau

SEQ ID NO: 617323 - RNA, 19 nt, Artificial Sequence
  Description of Artificial Sequence: Synthetic oligonucleotide
  Antisense strand to SEQ ID NO: 617322
aucucucagcccaucuggc

SEQ ID NO: 617324 - RNA, 19 nt, Artificial Sequence
  Description of Artificial Sequence: Synthetic oligonucleotide
  Sense strand starting at position 1150 of SEQ ID NO: 585153
gagaacguacgccagauau

SEQ ID NO: 617325 - RNA, 19 nt, Artificial Sequence
  Description of Artificial Sequence: Synthetic oligonucleotide
  Antisense strand to SEQ ID NO: 617324
auaucuggcguacguucuc

SEQ ID NO: 617326 - RNA, 19 nt, Artificial Sequence
  Description of Artificial Sequence: Synthetic oligonucleotide
  Sense strand starting at position 1180 of SEQ ID NO: 585153
uuagcuaagucagcaaaua

SEQ ID NO: 617327 - RNA, 19 nt, Artificial Sequence
  Description of Artificial Sequence: Synthetic oligonucleotide
  Antisense strand to SEQ ID NO: 617326
uauuugcugacuuagcuaa

SEQ ID NO: 617328 - RNA, 19 nt, Artificial Sequence
  Description of Artificial Sequence: Synthetic oligonucleotide
  Sense strand starting at position 1210 of SEQ ID NO: 585153
agaauauagccuuguggua

SEQ ID NO: 617329 - RNA, 19 nt, Artificial Sequence
  Description of Artificial Sequence: Synthetic oligonucleotide
  Antisense strand to SEQ ID NO: 617328
uaccacaaggcuauauucu

SEQ ID NO: 617330 - RNA, 19 nt, Artificial Sequence
  Description of Artificial Sequence: Synthetic oligonucleotide
  Sense strand starting at position 1217 of SEQ ID NO: 585153
agccuugugguaugaaaga

SEQ ID NO: 617331 - RNA, 19 nt, Artificial Sequence
  Description of Artificial Sequence: Synthetic oligonucleotide
  Antisense strand to SEQ ID NO: 617330
ucuuucauaccacaaggcu

SEQ ID NO: 617332 - RNA, 19 nt, Artificial Sequence
  Description of Artificial Sequence: Synthetic oligonucleotide
  Sense strand starting at position 1450 of SEQ ID NO: 585153
ggcugagagucauugaccu

SEQ ID NO: 617333 - RNA, 19 nt, Artificial Sequence
  Description of Artificial Sequence: Synthetic oligonucleotide
  Antisense strand to SEQ ID NO: 617332
aggucaaugacucucagcc

SEQ ID NO: 617334 - RNA, 19 nt, Artificial Sequence
  Description of Artificial Sequence: Synthetic oligonucleotide
  Sense strand starting at position 1454 of SEQ ID NO: 585153
gagagucauugaccuacag

SEQ ID NO: 617335 - RNA, 19 nt, Artificial Sequence
  Description of Artificial Sequence: Synthetic oligonucleotide
  Antisense strand to SEQ ID NO: 617334
cuguaggucaaugacucuc

SEQ ID NO: 617336 - RNA, 19 nt, Artificial Sequence
  Description of Artificial Sequence: Synthetic oligonucleotide
  Sense strand starting at position 1769 of SEQ ID NO: 585153
cccguaugagacgaagagu

SEQ ID NO: 617337 - RNA, 19 nt, Artificial Sequence
  Description of Artificial Sequence: Synthetic oligonucleotide
  Antisense strand to SEQ ID NO: 617336
acucuucgucucauacggg

SEQ ID NO: 617338 - RNA, 19 nt, Artificial Sequence
  Description of Artificial Sequence: Synthetic oligonucleotide
  Sense strand starting at position 1772 of SEQ ID NO: 585153
guaugagacgaagaguuca

SEQ ID NO: 617339 - RNA, 19 nt, Artificial Sequence
  Description of Artificial Sequence: Synthetic oligonucleotide
  Antisense strand to SEQ ID NO: 617338
ugaacucuucgucucauac

SEQ ID NO: 617340 - RNA, 19 nt, Artificial Sequence
  Description of Artificial Sequence: Synthetic oligonucleotide
  Sense strand starting at position 2051 of SEQ ID NO: 585153
uggguugcucuacaguaaa

SEQ ID NO: 617341 - RNA, 19 nt, Artificial Sequence
  Description of Artificial Sequence: Synthetic oligonucleotide
  Antisense strand to SEQ ID NO: 617340
uuuacuguagagcaaccca

SEQ ID NO: 617342 - RNA, 19 nt, Artificial Sequence
  Description of Artificial Sequence: Synthetic oligonucleotide
  Sense strand starting at position 2054 of SEQ ID NO: 585153
guugcucuacaguaaacga

SEQ ID NO: 617343 - RNA, 19 nt, Artificial Sequence
  Description of Artificial Sequence: Synthetic oligonucleotide
  Antisense strand to SEQ ID NO: 617342
ucguuuacuguagagcaac

SEQ ID NO: 617344 - RNA, 19 nt, Artificial Sequence
  Description of Artificial Sequence: Synthetic oligonucleotide
  Sense strand starting at position 2061 of SEQ ID NO: 585153
uacaguaaacgaggaguaa

SEQ ID NO: 617345 - RNA, 19 nt, Artificial Sequence
  Description of Artificial Sequence: Synthetic oligonucleotide
  Antisense strand to SEQ ID NO: 617344
uuacuccucguuuacugua

SEQ ID NO: 617346 - RNA, 19 nt, Artificial Sequence
  Description of Artificial Sequence: Synthetic oligonucleotide
  Sense strand starting at position 2155 of SEQ ID NO: 585153
ggaggaaguucaguuccuu

SEQ ID NO: 617347 - RNA, 19 nt, Artificial Sequence
  Description of Artificial Sequence: Synthetic oligonucleotide
  Antisense strand to SEQ ID NO: 617346
aaggaacugaacuuccucc

SEQ ID NO: 617348 - RNA, 19 nt, Artificial Sequence
  Description of Artificial Sequence: Synthetic oligonucleotide
  Sense strand starting at position 2247 of SEQ ID NO: 585153
agcaacuuuccucgaauaa

SEQ ID NO: 617349 - RNA, 19 nt, Artificial Sequence
  Description of Artificial Sequence: Synthetic oligonucleotide
  Antisense strand to SEQ ID NO: 617348
uuauucgaggaaaguugcu

SEQ ID NO: 617350 - RNA, 19 nt, Artificial Sequence
  Description of Artificial Sequence: Synthetic oligonucleotide
  Sense strand starting at position 2248 of SEQ ID NO: 585153
gcaacuuuccucgaauaag

SEQ ID NO: 617351 - RNA, 19 nt, Artificial Sequence
  Description of Artificial Sequence: Synthetic oligonucleotide
  Antisense strand to SEQ ID NO: 617350
cuuauucgaggaaaguugc

SEQ ID NO: 617352 - RNA, 19 nt, Artificial Sequence
  Description of Artificial Sequence: Synthetic oligonucleotide
  Sense strand starting at position 2362 of SEQ ID NO: 585153
auacaugcucuguagaaug

SEQ ID NO: 617353 - RNA, 19 nt, Artificial Sequence
  Description of Artificial Sequence: Synthetic oligonucleotide
  Antisense strand to SEQ ID NO: 617352
cauucuacagagcauguau

SEQ ID NO: 617354 - RNA, 19 nt, Artificial Sequence
  Description of Artificial Sequence: Synthetic oligonucleotide
  Sense strand starting at position 2373 of SEQ ID NO: 585153
guagaaugagucuaugcaa

SEQ ID NO: 617355 - RNA, 19 nt, Artificial Sequence
  Description of Artificial Sequence: Synthetic oligonucleotide
  Antisense strand to SEQ ID NO: 617354
uugcauagacucauucuac

SEQ ID NO: 617356 - RNA, 19 nt, Artificial Sequence
  Description of Artificial Sequence: Synthetic oligonucleotide
  Sense strand starting at position 2376 of SEQ ID NO: 585153
gaaugagucuaugcaacau

SEQ ID NO: 617357 - RNA, 19 nt, Artificial Sequence
  Description of Artificial Sequence: Synthetic oligonucleotide
  Antisense strand to SEQ ID NO: 617356
auguugcauagacucauuc

SEQ ID NO: 617358 - RNA, 19 nt, Artificial Sequence
  Description of Artificial Sequence: Synthetic oligonucleotide
  Sense strand starting at position 2380 of SEQ ID NO: 585153
gagucuaugcaacauuaga

SEQ ID NO: 617359 - RNA, 19 nt, Artificial Sequence
  Description of Artificial Sequence: Synthetic oligonucleotide
  Antisense strand to SEQ ID NO: 617358
ucuaauguugcauagacuc

SEQ ID NO: 617360 - RNA, 19 nt, Artificial Sequence
  Description of Artificial Sequence: Synthetic oligonucleotide
  Sense strand starting at position 2444 of SEQ ID NO: 585153
aggaguguuggauaagcca

SEQ ID NO: 617361 - RNA, 19 nt, Artificial Sequence
  Description of Artificial Sequence: Synthetic oligonucleotide
  Antisense strand to SEQ ID NO: 617360
uggcuuauccaacacuccu

SEQ ID NO: 617362 - RNA, 19 nt, Artificial Sequence
  Description of Artificial Sequence: Synthetic oligonucleotide
  Sense strand starting at position 2549 of SEQ ID NO: 585153
agaugaugcuaaguaucaa

SEQ ID NO: 617363 - RNA, 19 nt, Artificial Sequence
  Description of Artificial Sequence: Synthetic oligonucleotide
  Antisense strand to SEQ ID NO: 617362
uugauacuuagcaucaucu

SEQ ID NO: 617364 - RNA, 19 nt, Artificial Sequence
  Description of Artificial Sequence: Synthetic oligonucleotide
  Sense strand starting at position 2621 of SEQ ID NO: 585153
agaguauauuugcaggaug

SEQ ID NO: 617365 - RNA, 19 nt, Artificial Sequence
  Description of Artificial Sequence: Synthetic oligonucleotide
  Antisense strand to SEQ ID NO: 617364
cauccugcaaauauacucu

SEQ ID NO: 617366 - RNA, 19 nt, Artificial Sequence
  Description of Artificial Sequence: Synthetic oligonucleotide
  Sense strand starting at position 2632 of SEQ ID NO: 585153
gcaggaugucaugauaguc

SEQ ID NO: 617367 - RNA, 19 nt, Artificial Sequence
  Description of Artificial Sequence: Synthetic oligonucleotide
  Antisense strand to SEQ ID NO: 617366
gacuaucaugacauccugc

SEQ ID NO: 617368 - RNA, 19 nt, Artificial Sequence
  Description of Artificial Sequence: Synthetic oligonucleotide
  Sense strand starting at position 2753 of SEQ ID NO: 585153
gaguuaguggcggauuaaa

SEQ ID NO: 617369 - RNA, 19 nt, Artificial Sequence
  Description of Artificial Sequence: Synthetic oligonucleotide
  Antisense strand to SEQ ID NO: 617368
uuuaauccgccacuaacuc

SEQ ID NO: 617370 - RNA, 19 nt, Artificial Sequence
  Description of Artificial Sequence: Synthetic oligonucleotide
  Sense strand starting at position 3036 of SEQ ID NO: 585153
ugauaugugacguauccau

SEQ ID NO: 617371 - RNA, 19 nt, Artificial Sequence
  Description of Artificial Sequence: Synthetic oligonucleotide
  Antisense strand to SEQ ID NO: 617370
auggauacgucacauauca

SEQ ID NO: 617372 - RNA, 19 nt, Artificial Sequence
  Description of Artificial Sequence: Synthetic oligonucleotide
  Sense strand starting at position 3198 of SEQ ID NO: 585153
gccuguuuauuugucucau

SEQ ID NO: 617373 - RNA, 19 nt, Artificial Sequence
  Description of Artificial Sequence: Synthetic oligonucleotide
  Antisense strand to SEQ ID NO: 617372
augagacaaauaaacaggc

SEQ ID NO: 617374 - RNA, 19 nt, Artificial Sequence
  Description of Artificial Sequence: Synthetic oligonucleotide
  Sense strand starting at position 3199 of SEQ ID NO: 585153
ccuguuuauuugucucauu

SEQ ID NO: 617375 - RNA, 19 nt, Artificial Sequence
  Description of Artificial Sequence: Synthetic oligonucleotide
  Antisense strand to SEQ ID NO: 617374
aaugagacaaauaaacagg

SEQ ID NO: 617376 - RNA, 19 nt, Artificial Sequence
  Description of Artificial Sequence: Synthetic oligonucleotide
  Sense strand starting at position 3204 of SEQ ID NO: 585153
uuauuugucucauugccca

SEQ ID NO: 617377 - RNA, 19 nt, Artificial Sequence
  Description of Artificial Sequence: Synthetic oligonucleotide
  Antisense strand to SEQ ID NO: 617376
ugggcaaugagacaaauaa

SEQ ID NO: 617378 - RNA, 19 nt, Artificial Sequence
  Description of Artificial Sequence: Synthetic oligonucleotide
  Sense strand starting at position 3209 of SEQ ID NO: 585153
ugucucauugcccaaugga

SEQ ID NO: 617379 - RNA, 19 nt, Artificial Sequence
  Description of Artificial Sequence: Synthetic oligonucleotide
  Antisense strand to SEQ ID NO: 617378
uccauugggcaaugagaca

SEQ ID NO: 617380 - RNA, 19 nt, Artificial Sequence
  Description of Artificial Sequence: Synthetic oligonucleotide
  Sense strand starting at position 3378 of SEQ ID NO: 585153
gugacuuugagauggaguc

SEQ ID NO: 617381 - RNA, 19 nt, Artificial Sequence
  Description of Artificial Sequence: Synthetic oligonucleotide
  Antisense strand to SEQ ID NO: 617380
gacuccaucucaaagucac

SEQ ID NO: 617382 - RNA, 19 nt, Artificial Sequence
  Description of Artificial Sequence: Synthetic oligonucleotide
  Sense strand starting at position 3661 of SEQ ID NO: 585153
agcaguguaccuugcauuu

SEQ ID NO: 617383 - RNA, 19 nt, Artificial Sequence
  Description of Artificial Sequence: Synthetic oligonucleotide
  Antisense strand to SEQ ID NO: 617382
aaaugcaagguacacugcu

SEQ ID NO: 617384 - RNA, 19 nt, Artificial Sequence
  Description of Artificial Sequence: Synthetic oligonucleotide
  Sense strand starting at position 3696 of SEQ ID NO: 585153
gugugugagaagugaagaa

SEQ ID NO: 617385 - RNA, 19 nt, Artificial Sequence
  Description of Artificial Sequence: Synthetic oligonucleotide
  Antisense strand to SEQ ID NO: 617384
uucuucacuucucacacac

SEQ ID NO: 617386 - RNA, 19 nt, Artificial Sequence
  Description of Artificial Sequence: Synthetic oligonucleotide
  Sense strand starting at position 3721 of SEQ ID NO: 585153
gaaauacaaguugguuaaa

SEQ ID NO: 617387 - RNA, 19 nt, Artificial Sequence
  Description of Artificial Sequence: Synthetic oligonucleotide
  Antisense strand to SEQ ID NO: 617386
uuuaaccaacuuguauuuc

SEQ ID NO: 617388 - RNA, 19 nt, Artificial Sequence
  Description of Artificial Sequence: Synthetic oligonucleotide
  Sense strand starting at position 3723 of SEQ ID NO: 585153
aauacaaguugguuaaaug

SEQ ID NO: 617389 - RNA, 19 nt, Artificial Sequence
  Description of Artificial Sequence: Synthetic oligonucleotide
  Antisense strand to SEQ ID NO: 617388
cauuuaaccaacuuguauu

SEQ ID NO: 617390 - RNA, 19 nt, Artificial Sequence
  Description of Artificial Sequence: Synthetic oligonucleotide
  Sense strand starting at position 3866 of SEQ ID NO: 585153
ugccaucauguguaauaac

SEQ ID NO: 617391 - RNA, 19 nt, Artificial Sequence
  Description of Artificial Sequence: Synthetic oligonucleotide
  Antisense strand to SEQ ID NO: 617390
guuauuacacaugauggca

SEQ ID NO: 617392 - RNA, 19 nt, Artificial Sequence
  Description of Artificial Sequence: Synthetic oligonucleotide
  Sense strand starting at position 12 of SEQ ID NO: 585154
ucagcaaacggcuaaguau

SEQ ID NO: 617393 - RNA, 19 nt, Artificial Sequence
  Description of Artificial Sequence: Synthetic oligonucleotide
  Antisense strand to SEQ ID NO: 617392
auacuuagccguuugcuga

SEQ ID NO: 617394 - RNA, 19 nt, Artificial Sequence
  Description of Artificial Sequence: Synthetic oligonucleotide
  Sense strand starting at position 21 of SEQ ID NO: 585154
ggcuaaguauuaguuuaau

SEQ ID NO: 617395 - RNA, 19 nt, Artificial Sequence
  Description of Artificial Sequence: Synthetic oligonucleotide
  Antisense strand to SEQ ID NO: 617394
auuaaacuaauacuuagcc

SEQ ID NO: 617396 - RNA, 19 nt, Artificial Sequence
  Description of Artificial Sequence: Synthetic oligonucleotide
  Sense strand starting at position 94 of SEQ ID NO: 585154
aauugagcacugugcuuau

SEQ ID NO: 617397 - RNA, 19 nt, Artificial Sequence
  Description of Artificial Sequence: Synthetic oligonucleotide
  Antisense strand to SEQ ID NO: 617396
auaagcacagugcucaauu

SEQ ID NO: 617398 - RNA, 19 nt, Artificial Sequence
  Description of Artificial Sequence: Synthetic oligonucleotide
  Sense strand starting at position 325 of SEQ ID NO: 585154
uacuuugaacuguggugaa

SEQ ID NO: 617399 - RNA, 19 nt, Artificial Sequence
  Description of Artificial Sequence: Synthetic oligonucleotide
  Antisense strand to SEQ ID NO: 617398
uucaccacaguucaaagua

SEQ ID NO: 617400 - RNA, 19 nt, Artificial Sequence
  Description of Artificial Sequence: Synthetic oligonucleotide
  Sense strand starting at position 379 of SEQ ID NO: 585154
aguccaggccucugcaaau

SEQ ID NO: 617401 - RNA, 19 nt, Artificial Sequence
  Description of Artificial Sequence: Synthetic oligonucleotide
  Antisense strand to SEQ ID NO: 617400
auuugcagaggccuggacu

SEQ ID NO: 617402 - RNA, 19 nt, Artificial Sequence
  Description of Artificial Sequence: Synthetic oligonucleotide
  Sense strand starting at position 504 of SEQ ID NO: 585154
ggagauggaugcuaugaag

SEQ ID NO: 617403 - RNA, 19 nt, Artificial Sequence
  Description of Artificial Sequence: Synthetic oligonucleotide
  Antisense strand to SEQ ID NO: 617402
cuucauagcauccaucucc

SEQ ID NO: 617404 - RNA, 19 nt, Artificial Sequence
  Description of Artificial Sequence: Synthetic oligonucleotide
  Sense strand starting at position 507 of SEQ ID NO: 585154
gauggaugcuaugaaggga

SEQ ID NO: 617405 - RNA, 19 nt, Artificial Sequence
  Description of Artificial Sequence: Synthetic oligonucleotide
  Antisense strand to SEQ ID NO: 617404
ucccuucauagcauccauc

SEQ ID NO: 617406 - RNA, 19 nt, Artificial Sequence
  Description of Artificial Sequence: Synthetic oligonucleotide
  Sense strand starting at position 605 of SEQ ID NO: 585154
agaguuacuucuguugaaa

SEQ ID NO: 617407 - RNA, 19 nt, Artificial Sequence
  Description of Artificial Sequence: Synthetic oligonucleotide
  Antisense strand to SEQ ID NO: 617406
uuucaacagaaguaacucu

SEQ ID NO: 617408 - RNA, 19 nt, Artificial Sequence
  Description of Artificial Sequence: Synthetic oligonucleotide
  Sense strand starting at position 688 of SEQ ID NO: 585154
ccuguacucuuacuguaua

SEQ ID NO: 617409 - RNA, 19 nt, Artificial Sequence
  Description of Artificial Sequence: Synthetic oligonucleotide
  Antisense strand to SEQ ID NO: 617408
uauacaguaagaguacagg

SEQ ID NO: 617410 - RNA, 19 nt, Artificial Sequence
  Description of Artificial Sequence: Synthetic oligonucleotide
  Sense strand starting at position 699 of SEQ ID NO: 585154
acuguauauccagguaugu

SEQ ID NO: 617411 - RNA, 19 nt, Artificial Sequence
  Description of Artificial Sequence: Synthetic oligonucleotide
  Antisense strand to SEQ ID NO: 617410
acauaccuggauauacagu

SEQ ID NO: 617412 - RNA, 19 nt, Artificial Sequence
  Description of Artificial Sequence: Synthetic oligonucleotide
  Sense strand starting at position 855 of SEQ ID NO: 585154
aaggguagagaauguucua

SEQ ID NO: 617413 - RNA, 19 nt, Artificial Sequence
  Description of Artificial Sequence: Synthetic oligonucleotide
  Antisense strand to SEQ ID NO: 617412
uagaacauucucuacccuu

SEQ ID NO: 617414 - RNA, 19 nt, Artificial Sequence
  Description of Artificial Sequence: Synthetic oligonucleotide
  Sense strand starting at position 858 of SEQ ID NO: 585154
gguagagaauguucuauau

SEQ ID NO: 617415 - RNA, 19 nt, Artificial Sequence
  Description of Artificial Sequence: Synthetic oligonucleotide
  Antisense strand to SEQ ID NO: 617414
auauagaacauucucuacc

SEQ ID NO: 617416 - RNA, 19 nt, Artificial Sequence
  Description of Artificial Sequence: Synthetic oligonucleotide
  Sense strand starting at position 882 of SEQ ID NO: 585154
uggaucuugcuggacaacu

SEQ ID NO: 617417 - RNA, 19 nt, Artificial Sequence
  Description of Artificial Sequence: Synthetic oligonucleotide
  Antisense strand to SEQ ID NO: 617416
aguuguccagcaagaucca

SEQ ID NO: 617418 - RNA, 19 nt, Artificial Sequence
  Description of Artificial Sequence: Synthetic oligonucleotide
  Sense strand starting at position 1218 of SEQ ID NO: 585154
auacuaaugaugugcguga

SEQ ID NO: 617419 - RNA, 19 nt, Artificial Sequence
  Description of Artificial Sequence: Synthetic oligonucleotide
  Antisense strand to SEQ ID NO: 617418
ucacgcacaucauuaguau

SEQ ID NO: 617420 - RNA, 19 nt, Artificial Sequence
  Description of Artificial Sequence: Synthetic oligonucleotide
  Sense strand starting at position 1233 of SEQ ID NO: 585154
gugacuaucucugugugau

SEQ ID NO: 617421 - RNA, 19 nt, Artificial Sequence
  Description of Artificial Sequence: Synthetic oligonucleotide
  Antisense strand to SEQ ID NO: 617420
aucacacagagauagucac

SEQ ID NO: 617422 - RNA, 19 nt, Artificial Sequence
  Description of Artificial Sequence: Synthetic oligonucleotide
  Sense strand starting at position 1234 of SEQ ID NO: 585154
ugacuaucucugugugaug

SEQ ID NO: 617423 - RNA, 19 nt, Artificial Sequence
  Description of Artificial Sequence: Synthetic oligonucleotide
  Antisense strand to SEQ ID NO: 617422
caucacacagagauaguca

SEQ ID NO: 617424 - RNA, 19 nt, Artificial Sequence
  Description of Artificial Sequence: Synthetic oligonucleotide
  Sense strand starting at position 1241 of SEQ ID NO: 585154
cucugugugauggguuaau

SEQ ID NO: 617425 - RNA, 19 nt, Artificial Sequence
  Description of Artificial Sequence: Synthetic oligonucleotide
  Antisense strand to SEQ ID NO: 617424
auuaacccaucacacagag

SEQ ID NO: 617426 - RNA, 19 nt, Artificial Sequence
  Description of Artificial Sequence: Synthetic oligonucleotide
  Sense strand starting at position 1251 of SEQ ID NO: 585154
uggguuaauaggugacuuu

SEQ ID NO: 617427 - RNA, 19 nt, Artificial Sequence
  Description of Artificial Sequence: Synthetic oligonucleotide
  Antisense strand to SEQ ID NO: 617426
aaagucaccuauuaaccca

SEQ ID NO: 617428 - RNA, 19 nt, Artificial Sequence
  Description of Artificial Sequence: Synthetic oligonucleotide
  Sense strand starting at position 1275 of SEQ ID NO: 585154
uguucuguaucuuuaagua

SEQ ID NO: 617429 - RNA, 19 nt, Artificial Sequence
  Description of Artificial Sequence: Synthetic oligonucleotide
  Antisense strand to SEQ ID NO: 617428
uacuuaaagauacagaaca

SEQ ID NO: 617430 - RNA, 19 nt, Artificial Sequence
  Description of Artificial Sequence: Synthetic oligonucleotide
  Sense strand starting at position 1310 of SEQ ID NO: 585154
uauauuaauguggacguua

SEQ ID NO: 617431 - RNA, 19 nt, Artificial Sequence
  Description of Artificial Sequence: Synthetic oligonucleotide
  Antisense strand to SEQ ID NO: 617430
uaacguccacauuaauaua

SEQ ID NO: 617432 - RNA, 19 nt, Artificial Sequence
  Description of Artificial Sequence: Synthetic oligonucleotide
  Sense strand starting at position 1455 of SEQ ID NO: 585154
uccugcugauuguuagacu

SEQ ID NO: 617433 - RNA, 19 nt, Artificial Sequence
  Description of Artificial Sequence: Synthetic oligonucleotide
  Antisense strand to SEQ ID NO: 617432
agucuaacaaucagcagga

SEQ ID NO: 617434 - RNA, 19 nt, Artificial Sequence
  Description of Artificial Sequence: Synthetic oligonucleotide
  Sense strand starting at position 1555 of SEQ ID NO: 585154
ugaaauggcucagugccau

SEQ ID NO: 617435 - RNA, 19 nt, Artificial Sequence
  Description of Artificial Sequence: Synthetic oligonucleotide
  Antisense strand to SEQ ID NO: 617434
auggcacugagccauuuca

SEQ ID NO: 617436 - RNA, 19 nt, Artificial Sequence
  Description of Artificial Sequence: Synthetic oligonucleotide
  Sense strand starting at position 2010 of SEQ ID NO: 585154
acagucacauuguuuaacu

SEQ ID NO: 617437 - RNA, 19 nt, Artificial Sequence
  Description of Artificial Sequence: Synthetic oligonucleotide
  Antisense strand to SEQ ID NO: 617436
aguuaaacaaugugacugu

SEQ ID NO: 617438 - RNA, 19 nt, Artificial Sequence
  Description of Artificial Sequence: Synthetic oligonucleotide
  Sense strand starting at position 2064 of SEQ ID NO: 585154
ggccaagaaucucuuugau

SEQ ID NO: 617439 - RNA, 19 nt, Artificial Sequence
  Description of Artificial Sequence: Synthetic oligonucleotide
  Antisense strand to SEQ ID NO: 617438
aucaaagagauucuuggcc

SEQ ID NO: 617440 - RNA, 19 nt, Artificial Sequence
  Description of Artificial Sequence: Synthetic oligonucleotide
  Sense strand starting at position 2108 of SEQ ID NO: 585154
cuggcacaggucuacaaua

SEQ ID NO: 617441 - RNA, 19 nt, Artificial Sequence
  Description of Artificial Sequence: Synthetic oligonucleotide
  Antisense strand to SEQ ID NO: 617440
uauuguagaccugugccag

SEQ ID NO: 617442 - RNA, 19 nt, Artificial Sequence
  Description of Artificial Sequence: Synthetic oligonucleotide
  Sense strand starting at position 2110 of SEQ ID NO: 585154
ggcacaggucuacaauaua

SEQ ID NO: 617443 - RNA, 19 nt, Artificial Sequence
  Description of Artificial Sequence: Synthetic oligonucleotide
  Antisense strand to SEQ ID NO: 617442
uauauuguagaccugugcc

SEQ ID NO: 617444 - RNA, 19 nt, Artificial Sequence
  Description of Artificial Sequence: Synthetic oligonucleotide
  Sense strand starting at position 2252 of SEQ ID NO: 585154
cuugucucauccuuaagag

SEQ ID NO: 617445 - RNA, 19 nt, Artificial Sequence
  Description of Artificial Sequence: Synthetic oligonucleotide
  Antisense strand to SEQ ID NO: 617444
cucuuaaggaugagacaag

SEQ ID NO: 617446 - RNA, 19 nt, Artificial Sequence
  Description of Artificial Sequence: Synthetic oligonucleotide
  Sense strand starting at position 2428 of SEQ ID NO: 585154
ugcccauucucaucaagga

SEQ ID NO: 617447 - RNA, 19 nt, Artificial Sequence
  Description of Artificial Sequence: Synthetic oligonucleotide
  Antisense strand to SEQ ID NO: 617446
uccuugaugagaaugggca

SEQ ID NO: 617448 - RNA, 19 nt, Artificial Sequence
  Description of Artificial Sequence: Synthetic oligonucleotide
  Sense strand starting at position 2580 of SEQ ID NO: 585154
auguaaacucacuguugua

SEQ ID NO: 617449 - RNA, 19 nt, Artificial Sequence
  Description of Artificial Sequence: Synthetic oligonucleotide
  Antisense strand to SEQ ID NO: 617448
uacaacagugaguuuacau

SEQ ID NO: 617450 - RNA, 19 nt, Artificial Sequence
  Description of Artificial Sequence: Synthetic oligonucleotide
  Sense strand starting at position 2638 of SEQ ID NO: 585154
caacgauuaucugcuacga

SEQ ID NO: 617451 - RNA, 19 nt, Artificial Sequence
  Description of Artificial Sequence: Synthetic oligonucleotide
  Antisense strand to SEQ ID NO: 617450
ucguagcagauaaucguug

SEQ ID NO: 617452 - RNA, 19 nt, Artificial Sequence
  Description of Artificial Sequence: Synthetic oligonucleotide
  Sense strand starting at position 2642 of SEQ ID NO: 585154
gauuaucugcuacgauuau

SEQ ID NO: 617453 - RNA, 19 nt, Artificial Sequence
  Description of Artificial Sequence: Synthetic oligonucleotide
  Antisense strand to SEQ ID NO: 617452
auaaucguagcagauaauc

SEQ ID NO: 617454 - RNA, 19 nt, Artificial Sequence
  Description of Artificial Sequence: Synthetic oligonucleotide
  Sense strand starting at position 2872 of SEQ ID NO: 585154
ggccucuguccagaccaaa

SEQ ID NO: 617455 - RNA, 19 nt, Artificial Sequence
  Description of Artificial Sequence: Synthetic oligonucleotide
  Antisense strand to SEQ ID NO: 617454
uuuggucuggacagaggcc

SEQ ID NO: 617456 - RNA, 19 nt, Artificial Sequence
  Description of Artificial Sequence: Synthetic oligonucleotide
  Sense strand starting at position 2892 of SEQ ID NO: 585154
gagacagugacguauguga

SEQ ID NO: 617457 - RNA, 19 nt, Artificial Sequence
  Description of Artificial Sequence: Synthetic oligonucleotide
  Antisense strand to SEQ ID NO: 617456
ucacauacgucacugucuc

SEQ ID NO: 617458 - RNA, 19 nt, Artificial Sequence
  Description of Artificial Sequence: Synthetic oligonucleotide
  Sense strand starting at position 2894 of SEQ ID NO: 585154
gacagugacguaugugaaa

SEQ ID NO: 617459 - RNA, 19 nt, Artificial Sequence
  Description of Artificial Sequence: Synthetic oligonucleotide
  Antisense strand to SEQ ID NO: 617458
uuucacauacgucacuguc

SEQ ID NO: 617460 - RNA, 19 nt, Artificial Sequence
  Description of Artificial Sequence: Synthetic oligonucleotide
  Sense strand starting at position 2914 of SEQ ID NO: 585154
cauucuuuacguugcagaa

SEQ ID NO: 617461 - RNA, 19 nt, Artificial Sequence
  Description of Artificial Sequence: Synthetic oligonucleotide
  Antisense strand to SEQ ID NO: 617460
uucugcaacguaaagaaug

SEQ ID NO: 617462 - RNA, 19 nt, Artificial Sequence
  Description of Artificial Sequence: Synthetic oligonucleotide
  Sense strand starting at position 2918 of SEQ ID NO: 585154
cuuuacguugcagaauauu

SEQ ID NO: 617463 - RNA, 19 nt, Artificial Sequence
  Description of Artificial Sequence: Synthetic oligonucleotide
  Antisense strand to SEQ ID NO: 617462
aauauucugcaacguaaag

SEQ ID NO: 617464 - RNA, 19 nt, Artificial Sequence
  Description of Artificial Sequence: Synthetic oligonucleotide
  Sense strand starting at position 2963 of SEQ ID NO: 585154
cacgauaugcgucacccau

SEQ ID NO: 617465 - RNA, 19 nt, Artificial Sequence
  Description of Artificial Sequence: Synthetic oligonucleotide
  Antisense strand to SEQ ID NO: 617464
augggugacgcauaucgug

SEQ ID NO: 617466 - RNA, 19 nt, Artificial Sequence
  Description of Artificial Sequence: Synthetic oligonucleotide
  Sense strand starting at position 3620 of SEQ ID NO: 585154
cuaaaucgccuuuggcaaa

SEQ ID NO: 617467 - RNA, 19 nt, Artificial Sequence
  Description of Artificial Sequence: Synthetic oligonucleotide
  Antisense strand to SEQ ID NO: 617466
uuugccaaaggcgauuuag

SEQ ID NO: 617468 - RNA, 19 nt, Artificial Sequence
  Description of Artificial Sequence: Synthetic oligonucleotide
  Sense strand starting at position 3813 of SEQ ID NO: 585154
ccuccauaaucagagggau

SEQ ID NO: 617469 - RNA, 19 nt, Artificial Sequence
  Description of Artificial Sequence: Synthetic oligonucleotide
  Antisense strand to SEQ ID NO: 617468
aucccucugauuauggagg

SEQ ID NO: 617470 - RNA, 19 nt, Artificial Sequence
  Description of Artificial Sequence: Synthetic oligonucleotide
  Sense strand starting at position 3908 of SEQ ID NO: 585154
gaaacuguggugcagagau

SEQ ID NO: 617471 - RNA, 19 nt, Artificial Sequence
  Description of Artificial Sequence: Synthetic oligonucleotide
  Antisense strand to SEQ ID NO: 617470
aucucugcaccacaguuuc

SEQ ID NO: 617472 - RNA, 19 nt, Artificial Sequence
  Description of Artificial Sequence: Synthetic oligonucleotide
  Sense strand starting at position 118 of SEQ ID NO: 585155
gauuuaaagugcugacuug

SEQ ID NO: 617473 - RNA, 19 nt, Artificial Sequence
  Description of Artificial Sequence: Synthetic oligonucleotide
  Antisense strand to SEQ ID NO: 617472
caagucagcacuuuaaauc

SEQ ID NO: 617474 - RNA, 19 nt, Artificial Sequence
  Description of Artificial Sequence: Synthetic oligonucleotide
  Sense strand starting at position 149 of SEQ ID NO: 585155
cuaaguuugcggcaggaaa

SEQ ID NO: 617475 - RNA, 19 nt, Artificial Sequence
  Description of Artificial Sequence: Synthetic oligonucleotide
  Antisense strand to SEQ ID NO: 617474
uuuccugccgcaaacuuag

SEQ ID NO: 617476 - RNA, 19 nt, Artificial Sequence
  Description of Artificial Sequence: Synthetic oligonucleotide
  Sense strand starting at position 167 of SEQ ID NO: 585155
aaggaauagucuugaagag

SEQ ID NO: 617477 - RNA, 19 nt, Artificial Sequence
  Description of Artificial Sequence: Synthetic oligonucleotide
  Antisense strand to SEQ ID NO: 617476
cucuucaagacuauuccuu

SEQ ID NO: 617478 - RNA, 19 nt, Artificial Sequence
  Description of Artificial Sequence: Synthetic oligonucleotide
  Sense strand starting at position 396 of SEQ ID NO: 585155
ggguguaugaucuggcaac

SEQ ID NO: 617479 - RNA, 19 nt, Artificial Sequence
  Description of Artificial Sequence: Synthetic oligonucleotide
  Antisense strand to SEQ ID NO: 617478
guugccagaucauacaccc

SEQ ID NO: 617480 - RNA, 19 nt, Artificial Sequence
  Description of Artificial Sequence: Synthetic oligonucleotide
  Sense strand starting at position 736 of SEQ ID NO: 585155
aaggcuaaaugaggauauu

SEQ ID NO: 617481 - RNA, 19 nt, Artificial Sequence
  Description of Artificial Sequence: Synthetic oligonucleotide
  Antisense strand to SEQ ID NO: 617480
aauauccucauuuagccuu

SEQ ID NO: 617482 - RNA, 19 nt, Artificial Sequence
  Description of Artificial Sequence: Synthetic oligonucleotide
  Sense strand starting at position 742 of SEQ ID NO: 585155
aaaugaggauauucgaguu

SEQ ID NO: 617483 - RNA, 19 nt, Artificial Sequence
  Description of Artificial Sequence: Synthetic oligonucleotide
  Antisense strand to SEQ ID NO: 617482
aacucgaauauccucauuu

SEQ ID NO: 617484 - RNA, 19 nt, Artificial Sequence
  Description of Artificial Sequence: Synthetic oligonucleotide
  Sense strand starting at position 748 of SEQ ID NO: 585155
ggauauucgaguugaauua

SEQ ID NO: 617485 - RNA, 19 nt, Artificial Sequence
  Description of Artificial Sequence: Synthetic oligonucleotide
  Antisense strand to SEQ ID NO: 617484
uaauucaacucgaauaucc

SEQ ID NO: 617486 - RNA, 19 nt, Artificial Sequence
  Description of Artificial Sequence: Synthetic oligonucleotide
  Sense strand starting at position 761 of SEQ ID NO: 585155
gaauuaggauaggaggaua

SEQ ID NO: 617487 - RNA, 19 nt, Artificial Sequence
  Description of Artificial Sequence: Synthetic oligonucleotide
  Antisense strand to SEQ ID NO: 617486
uauccuccuauccuaauuc

SEQ ID NO: 617488 - RNA, 19 nt, Artificial Sequence
  Description of Artificial Sequence: Synthetic oligonucleotide
  Sense strand starting at position 830 of SEQ ID NO: 585155
gaguaauugagguaguaau

SEQ ID NO: 617489 - RNA, 19 nt, Artificial Sequence
  Description of Artificial Sequence: Synthetic oligonucleotide
  Antisense strand to SEQ ID NO: 617488
auuacuaccucaauuacuc

SEQ ID NO: 617490 - RNA, 19 nt, Artificial Sequence
  Description of Artificial Sequence: Synthetic oligonucleotide
  Sense strand starting at position 893 of SEQ ID NO: 585155
ggugguauaguguagcaau

SEQ ID NO: 617491 - RNA, 19 nt, Artificial Sequence
  Description of Artificial Sequence: Synthetic oligonucleotide
  Antisense strand to SEQ ID NO: 617490
auugcuacacuauaccacc

SEQ ID NO: 617492 - RNA, 19 nt, Artificial Sequence
  Description of Artificial Sequence: Synthetic oligonucleotide
  Sense strand starting at position 905 of SEQ ID NO: 585155
uagcaaugugggcagagaa

SEQ ID NO: 617493 - RNA, 19 nt, Artificial Sequence
  Description of Artificial Sequence: Synthetic oligonucleotide
  Antisense strand to SEQ ID NO: 617492
uucucugcccacauugcua

SEQ ID NO: 617494 - RNA, 19 nt, Artificial Sequence
  Description of Artificial Sequence: Synthetic oligonucleotide
  Sense strand starting at position 958 of SEQ ID NO: 585155
ggaggucagcaguaguaaa

SEQ ID NO: 617495 - RNA, 19 nt, Artificial Sequence
  Description of Artificial Sequence: Synthetic oligonucleotide
  Antisense strand to SEQ ID NO: 617494
uuuacuacugcugaccucc

SEQ ID NO: 617496 - RNA, 19 nt, Artificial Sequence
  Description of Artificial Sequence: Synthetic oligonucleotide
  Sense strand starting at position 997 of SEQ ID NO: 585155
uugccagaccgggaugaua

SEQ ID NO: 617497 - RNA, 19 nt, Artificial Sequence
  Description of Artificial Sequence: Synthetic oligonucleotide
  Antisense strand to SEQ ID NO: 617496
uaucaucccggucuggcaa

SEQ ID NO: 617498 - RNA, 19 nt, Artificial Sequence
  Description of Artificial Sequence: Synthetic oligonucleotide
  Sense strand starting at position 1006 of SEQ ID NO: 585155
cgggaugauaugugggacu

SEQ ID NO: 617499 - RNA, 19 nt, Artificial Sequence
  Description of Artificial Sequence: Synthetic oligonucleotide
  Antisense strand to SEQ ID NO: 617498
agucccacauaucaucccg

SEQ ID NO: 617500 - RNA, 19 nt, Artificial Sequence
  Description of Artificial Sequence: Synthetic oligonucleotide
  Sense strand starting at position 1009 of SEQ ID NO: 585155
gaugauaugugggacugau

SEQ ID NO: 617501 - RNA, 19 nt, Artificial Sequence
  Description of Artificial Sequence: Synthetic oligonucleotide
  Antisense strand to SEQ ID NO: 617500
aucagucccacauaucauc

SEQ ID NO: 617502 - RNA, 19 nt, Artificial Sequence
  Description of Artificial Sequence: Synthetic oligonucleotide
  Sense strand starting at position 1089 of SEQ ID NO: 585155
gccggaggucgucgaagaa

SEQ ID NO: 617503 - RNA, 19 nt, Artificial Sequence
  Description of Artificial Sequence: Synthetic oligonucleotide
  Antisense strand to SEQ ID NO: 617502
uucuucgacgaccuccggc

SEQ ID NO: 617504 - RNA, 19 nt, Artificial Sequence
  Description of Artificial Sequence: Synthetic oligonucleotide
  Sense strand starting at position 2315 of SEQ ID NO: 585155
gcccuagauccgggugaga

SEQ ID NO: 617505 - RNA, 19 nt, Artificial Sequence
  Description of Artificial Sequence: Synthetic oligonucleotide
  Antisense strand to SEQ ID NO: 617504
ucucacccggaucuagggc

SEQ ID NO: 617506 - RNA, 19 nt, Artificial Sequence
  Description of Artificial Sequence: Synthetic oligonucleotide
  Sense strand starting at position 2437 of SEQ ID NO: 585155
gcaagaaggguugggugua

SEQ ID NO: 617507 - RNA, 19 nt, Artificial Sequence
  Description of Artificial Sequence: Synthetic oligonucleotide
  Antisense strand to SEQ ID NO: 617506
uacacccaacccuucuugc

SEQ ID NO: 617508 - RNA, 19 nt, Artificial Sequence
  Description of Artificial Sequence: Synthetic oligonucleotide
  Sense strand starting at position 2440 of SEQ ID NO: 585155
agaaggguuggguguagaa

SEQ ID NO: 617509 - RNA, 19 nt, Artificial Sequence
  Description of Artificial Sequence: Synthetic oligonucleotide
  Antisense strand to SEQ ID NO: 617508
uucuacacccaacccuucu

SEQ ID NO: 617510 - RNA, 19 nt, Artificial Sequence
  Description of Artificial Sequence: Synthetic oligonucleotide
  Sense strand starting at position 2455 of SEQ ID NO: 585155
agaagagauuucugggaga

SEQ ID NO: 617511 - RNA, 19 nt, Artificial Sequence
  Description of Artificial Sequence: Synthetic oligonucleotide
  Antisense strand to SEQ ID NO: 617510
ucucccagaaaucucuucu

SEQ ID NO: 617512 - RNA, 19 nt, Artificial Sequence
  Description of Artificial Sequence: Synthetic oligonucleotide
  Sense strand starting at position 2458 of SEQ ID NO: 585155
agagauuucugggagacua

SEQ ID NO: 617513 - RNA, 19 nt, Artificial Sequence
  Description of Artificial Sequence: Synthetic oligonucleotide
  Antisense strand to SEQ ID NO: 617512
uagucucccagaaaucucu

SEQ ID NO: 617514 - RNA, 19 nt, Artificial Sequence
  Description of Artificial Sequence: Synthetic oligonucleotide
  Sense strand starting at position 2623 of SEQ ID NO: 585155
accucagggugguuuagaa

SEQ ID NO: 617515 - RNA, 19 nt, Artificial Sequence
  Description of Artificial Sequence: Synthetic oligonucleotide
  Antisense strand to SEQ ID NO: 617514
uucuaaaccacccugaggu

SEQ ID NO: 617516 - RNA, 19 nt, Artificial Sequence
  Description of Artificial Sequence: Synthetic oligonucleotide
  Sense strand starting at position 2632 of SEQ ID NO: 585155
ugguuuagaagccaguauu

SEQ ID NO: 617517 - RNA, 19 nt, Artificial Sequence
  Description of Artificial Sequence: Synthetic oligonucleotide
  Antisense strand to SEQ ID NO: 617516
aauacuggcuucuaaacca

SEQ ID NO: 617518 - RNA, 19 nt, Artificial Sequence
  Description of Artificial Sequence: Synthetic oligonucleotide
  Sense strand starting at position 2643 of SEQ ID NO: 585155
ccaguauuaccugauguac

SEQ ID NO: 617519 - RNA, 19 nt, Artificial Sequence
  Description of Artificial Sequence: Synthetic oligonucleotide
  Antisense strand to SEQ ID NO: 617518
guacaucagguaauacugg

SEQ ID NO: 617520 - RNA, 19 nt, Artificial Sequence
  Description of Artificial Sequence: Synthetic oligonucleotide
  Sense strand starting at position 2652 of SEQ ID NO: 585155
ccugauguacuccagcaga

SEQ ID NO: 617521 - RNA, 19 nt, Artificial Sequence
  Description of Artificial Sequence: Synthetic oligonucleotide
  Antisense strand to SEQ ID NO: 617520
ucugcuggaguacaucagg

SEQ ID NO: 617522 - RNA, 19 nt, Artificial Sequence
  Description of Artificial Sequence: Synthetic oligonucleotide
  Sense strand starting at position 2748 of SEQ ID NO: 585155
ccagaagcucuuggcuaua

SEQ ID NO: 617523 - RNA, 19 nt, Artificial Sequence
  Description of Artificial Sequence: Synthetic oligonucleotide
  Antisense strand to SEQ ID NO: 617522
uauagccaagagcuucugg

SEQ ID NO: 617524 - RNA, 19 nt, Artificial Sequence
  Description of Artificial Sequence: Synthetic oligonucleotide
  Sense strand starting at position 2854 of SEQ ID NO: 585155
cugaguuugggcugggaga

SEQ ID NO: 617525 - RNA, 19 nt, Artificial Sequence
  Description of Artificial Sequence: Synthetic oligonucleotide
  Antisense strand to SEQ ID NO: 617524
ucucccagcccaaacucag

SEQ ID NO: 617526 - RNA, 19 nt, Artificial Sequence
  Description of Artificial Sequence: Synthetic oligonucleotide
  Sense strand starting at position 3351 of SEQ ID NO: 585155
gagagaaagucauagauga

SEQ ID NO: 617527 - RNA, 19 nt, Artificial Sequence
  Description of Artificial Sequence: Synthetic oligonucleotide
  Antisense strand to SEQ ID NO: 617526
ucaucuaugacuuucucuc

SEQ ID NO: 617528 - RNA, 19 nt, Artificial Sequence
  Description of Artificial Sequence: Synthetic oligonucleotide
  Sense strand starting at position 3413 of SEQ ID NO: 585155
cuucccuuucuguaacgua

SEQ ID NO: 617529 - RNA, 19 nt, Artificial Sequence
  Description of Artificial Sequence: Synthetic oligonucleotide
  Antisense strand to SEQ ID NO: 617528
uacguuacagaaagggaag

SEQ ID NO: 617530 - RNA, 19 nt, Artificial Sequence
  Description of Artificial Sequence: Synthetic oligonucleotide
  Sense strand starting at position 3482 of SEQ ID NO: 585155
uuuaaugugugagugccaa

SEQ ID NO: 617531 - RNA, 19 nt, Artificial Sequence
  Description of Artificial Sequence: Synthetic oligonucleotide
  Antisense strand to SEQ ID NO: 617530
uuggcacucacacauuaaa

SEQ ID NO: 617532 - RNA, 19 nt, Artificial Sequence
  Description of Artificial Sequence: Synthetic oligonucleotide
  Sense strand starting at position 3502 of SEQ ID NO: 585155
gcccgacuacccuagaagu

SEQ ID NO: 617533 - RNA, 19 nt, Artificial Sequence
  Description of Artificial Sequence: Synthetic oligonucleotide
  Antisense strand to SEQ ID NO: 617532
acuucuaggguagucgggc

SEQ ID NO: 617534 - RNA, 19 nt, Artificial Sequence
  Description of Artificial Sequence: Synthetic oligonucleotide
  Sense strand starting at position 3515 of SEQ ID NO: 585155
agaaguccugauggaguaa

SEQ ID NO: 617535 - RNA, 19 nt, Artificial Sequence
  Description of Artificial Sequence: Synthetic oligonucleotide
  Antisense strand to SEQ ID NO: 617534
uuacuccaucaggacuucu

SEQ ID NO: 617536 - RNA, 19 nt, Artificial Sequence
  Description of Artificial Sequence: Synthetic oligonucleotide
  Sense strand starting at position 3566 of SEQ ID NO: 585155
ggaugaaacugcuaccaac

SEQ ID NO: 617537 - RNA, 19 nt, Artificial Sequence
  Description of Artificial Sequence: Synthetic oligonucleotide
  Antisense strand to SEQ ID NO: 617536
guugguagcaguuucaucc

SEQ ID NO: 617538 - RNA, 19 nt, Artificial Sequence
  Description of Artificial Sequence: Synthetic oligonucleotide
  Sense strand starting at position 3600 of SEQ ID NO: 585155
ugcugaguuggugacucaa

SEQ ID NO: 617539 - RNA, 19 nt, Artificial Sequence
  Description of Artificial Sequence: Synthetic oligonucleotide
  Antisense strand to SEQ ID NO: 617538
uugagucaccaacucagca

SEQ ID NO: 617540 - RNA, 19 nt, Artificial Sequence
  Description of Artificial Sequence: Synthetic oligonucleotide
  Sense strand starting at position 3602 of SEQ ID NO: 585155
cugaguuggugacucaacu

SEQ ID NO: 617541 - RNA, 19 nt, Artificial Sequence
  Description of Artificial Sequence: Synthetic oligonucleotide
  Antisense strand to SEQ ID NO: 617540
aguugagucaccaacucag

SEQ ID NO: 617542 - RNA, 19 nt, Artificial Sequence
  Description of Artificial Sequence: Synthetic oligonucleotide
  Sense strand starting at position 3664 of SEQ ID NO: 585155
ugaacaacucuugguagca

SEQ ID NO: 617543 - RNA, 19 nt, Artificial Sequence
  Description of Artificial Sequence: Synthetic oligonucleotide
  Antisense strand to SEQ ID NO: 617542
ugcuaccaagaguuguuca

SEQ ID NO: 617544 - RNA, 19 nt, Artificial Sequence
  Description of Artificial Sequence: Synthetic oligonucleotide
  Sense strand starting at position 3717 of SEQ ID NO: 585155
auugcauuccuagaaaguu

SEQ ID NO: 617545 - RNA, 19 nt, Artificial Sequence
  Description of Artificial Sequence: Synthetic oligonucleotide
  Antisense strand to SEQ ID NO: 617544
aacuuucuaggaaugcaau

SEQ ID NO: 617546 - RNA, 19 nt, Artificial Sequence
  Description of Artificial Sequence: Synthetic oligonucleotide
  Sense strand starting at position 3867 of SEQ ID NO: 585155
uagguagugcuuugaagaa

SEQ ID NO: 617547 - RNA, 19 nt, Artificial Sequence
  Description of Artificial Sequence: Synthetic oligonucleotide
  Antisense strand to SEQ ID NO: 617546
uucuucaaagcacuaccua

SEQ ID NO: 617548 - RNA, 19 nt, Artificial Sequence
  Description of Artificial Sequence: Synthetic oligonucleotide
  Sense strand starting at position 3871 of SEQ ID NO: 585155
uagugcuuugaagaauauc

SEQ ID NO: 617549 - RNA, 19 nt, Artificial Sequence
  Description of Artificial Sequence: Synthetic oligonucleotide
  Antisense strand to SEQ ID NO: 617548
gauauucuucaaagcacua

SEQ ID NO: 617550 - RNA, 19 nt, Artificial Sequence
  Description of Artificial Sequence: Synthetic oligonucleotide
  Sense strand starting at position 3874 of SEQ ID NO: 585155
ugcuuugaagaauaucuua

SEQ ID NO: 617551 - RNA, 19 nt, Artificial Sequence
  Description of Artificial Sequence: Synthetic oligonucleotide
  Antisense strand to SEQ ID NO: 617550
uaagauauucuucaaagca

SEQ ID NO: 617552 - RNA, 19 nt, Artificial Sequence
  Description of Artificial Sequence: Synthetic oligonucleotide
  Sense strand starting at position 44 of SEQ ID NO: 585156
uuucuagguguauagugau

SEQ ID NO: 617553 - RNA, 19 nt, Artificial Sequence
  Description of Artificial Sequence: Synthetic oligonucleotide
  Antisense strand to SEQ ID NO: 617552
aucacuauacaccuagaaa

SEQ ID NO: 617554 - RNA, 19 nt, Artificial Sequence
  Description of Artificial Sequence: Synthetic oligonucleotide
  Sense strand starting at position 101 of SEQ ID NO: 585156
guugauauuugguaagauc

SEQ ID NO: 617555 - RNA, 19 nt, Artificial Sequence
  Description of Artificial Sequence: Synthetic oligonucleotide
  Antisense strand to SEQ ID NO: 617554
gaucuuaccaaauaucaac

SEQ ID NO: 617556 - RNA, 19 nt, Artificial Sequence
  Description of Artificial Sequence: Synthetic oligonucleotide
  Sense strand starting at position 109 of SEQ ID NO: 585156
uugguaagaucaccaaauu

SEQ ID NO: 617557 - RNA, 19 nt, Artificial Sequence
  Description of Artificial Sequence: Synthetic oligonucleotide
  Antisense strand to SEQ ID NO: 617556
aauuuggugaucuuaccaa

SEQ ID NO: 617558 - RNA, 19 nt, Artificial Sequence
  Description of Artificial Sequence: Synthetic oligonucleotide
  Sense strand starting at position 178 of SEQ ID NO: 585156
ggccacaugucagugaaga

SEQ ID NO: 617559 - RNA, 19 nt, Artificial Sequence
  Description of Artificial Sequence: Synthetic oligonucleotide
  Antisense strand to SEQ ID NO: 617558
ucuucacugacauguggcc

SEQ ID NO: 617560 - RNA, 19 nt, Artificial Sequence
  Description of Artificial Sequence: Synthetic oligonucleotide
  Sense strand starting at position 179 of SEQ ID NO: 585156
gccacaugucagugaagau

SEQ ID NO: 617561 - RNA, 19 nt, Artificial Sequence
  Description of Artificial Sequence: Synthetic oligonucleotide
  Antisense strand to SEQ ID NO: 617560
aucuucacugacauguggc

SEQ ID NO: 617562 - RNA, 19 nt, Artificial Sequence
  Description of Artificial Sequence: Synthetic oligonucleotide
  Sense strand starting at position 401 of SEQ ID NO: 585156
gccacaaugcuauaaggga

SEQ ID NO: 617563 - RNA, 19 nt, Artificial Sequence
  Description of Artificial Sequence: Synthetic oligonucleotide
  Antisense strand to SEQ ID NO: 617562
ucccuuauagcauuguggc

SEQ ID NO: 617564 - RNA, 19 nt, Artificial Sequence
  Description of Artificial Sequence: Synthetic oligonucleotide
  Sense strand starting at position 672 of SEQ ID NO: 585156
gggaaugcucaacaggguu

SEQ ID NO: 617565 - RNA, 19 nt, Artificial Sequence
  Description of Artificial Sequence: Synthetic oligonucleotide
  Antisense strand to SEQ ID NO: 617564
aacccuguugagcauuccc

SEQ ID NO: 617566 - RNA, 19 nt, Artificial Sequence
  Description of Artificial Sequence: Synthetic oligonucleotide
  Sense strand starting at position 838 of SEQ ID NO: 585156
ccuuguuaccaugguaaau

SEQ ID NO: 617567 - RNA, 19 nt, Artificial Sequence
  Description of Artificial Sequence: Synthetic oligonucleotide
  Antisense strand to SEQ ID NO: 617566
auuuaccaugguaacaagg

SEQ ID NO: 617568 - RNA, 19 nt, Artificial Sequence
  Description of Artificial Sequence: Synthetic oligonucleotide
  Sense strand starting at position 904 of SEQ ID NO: 585156
aacccauuccaggguuagu

SEQ ID NO: 617569 - RNA, 19 nt, Artificial Sequence
  Description of Artificial Sequence: Synthetic oligonucleotide
  Antisense strand to SEQ ID NO: 617568
acuaacccuggaauggguu

SEQ ID NO: 617570 - RNA, 19 nt, Artificial Sequence
  Description of Artificial Sequence: Synthetic oligonucleotide
  Sense strand starting at position 915 of SEQ ID NO: 585156
ggguuaguuuacucccuca

SEQ ID NO: 617571 - RNA, 19 nt, Artificial Sequence
  Description of Artificial Sequence: Synthetic oligonucleotide
  Antisense strand to SEQ ID NO: 617570
ugagggaguaaacuaaccc

SEQ ID NO: 617572 - RNA, 19 nt, Artificial Sequence
  Description of Artificial Sequence: Synthetic oligonucleotide
  Sense strand starting at position 918 of SEQ ID NO: 585156
uuaguuuacucccucagag

SEQ ID NO: 617573 - RNA, 19 nt, Artificial Sequence
  Description of Artificial Sequence: Synthetic oligonucleotide
  Antisense strand to SEQ ID NO: 617572
cucugagggaguaaacuaa

SEQ ID NO: 617574 - RNA, 19 nt, Artificial Sequence
  Description of Artificial Sequence: Synthetic oligonucleotide
  Sense strand starting at position 985 of SEQ ID NO: 585156
ccgacacuucugcgagacu

SEQ ID NO: 617575 - RNA, 19 nt, Artificial Sequence
  Description of Artificial Sequence: Synthetic oligonucleotide
  Antisense strand to SEQ ID NO: 617574
agucucgcagaagugucgg

SEQ ID NO: 617576 - RNA, 19 nt, Artificial Sequence
  Description of Artificial Sequence: Synthetic oligonucleotide
  Sense strand starting at position 1165 of SEQ ID NO: 585156
agagacgacucagacagau

SEQ ID NO: 617577 - RNA, 19 nt, Artificial Sequence
  Description of Artificial Sequence: Synthetic oligonucleotide
  Antisense strand to SEQ ID NO: 617576
aucugucugagucgucucu

SEQ ID NO: 617578 - RNA, 19 nt, Artificial Sequence
  Description of Artificial Sequence: Synthetic oligonucleotide
  Sense strand starting at position 1272 of SEQ ID NO: 585156
ggaugagcuugagcucaua

SEQ ID NO: 617579 - RNA, 19 nt, Artificial Sequence
  Description of Artificial Sequence: Synthetic oligonucleotide
  Antisense strand to SEQ ID NO: 617578
uaugagcucaagcucaucc

SEQ ID NO: 617580 - RNA, 19 nt, Artificial Sequence
  Description of Artificial Sequence: Synthetic oligonucleotide
  Sense strand starting at position 2184 of SEQ ID NO: 585156
gugggaguaugagucgaua

SEQ ID NO: 617581 - RNA, 19 nt, Artificial Sequence
  Description of Artificial Sequence: Synthetic oligonucleotide
  Antisense strand to SEQ ID NO: 617580
uaucgacucauacucccac

SEQ ID NO: 617582 - RNA, 19 nt, Artificial Sequence
  Description of Artificial Sequence: Synthetic oligonucleotide
  Sense strand starting at position 2186 of SEQ ID NO: 585156
gggaguaugagucgauaca

SEQ ID NO: 617583 - RNA, 19 nt, Artificial Sequence
  Description of Artificial Sequence: Synthetic oligonucleotide
  Antisense strand to SEQ ID NO: 617582
uguaucgacucauacuccc

SEQ ID NO: 617584 - RNA, 19 nt, Artificial Sequence
  Description of Artificial Sequence: Synthetic oligonucleotide
  Sense strand starting at position 2187 of SEQ ID NO: 585156
ggaguaugagucgauacag

SEQ ID NO: 617585 - RNA, 19 nt, Artificial Sequence
  Description of Artificial Sequence: Synthetic oligonucleotide
  Antisense strand to SEQ ID NO: 617584
cuguaucgacucauacucc

SEQ ID NO: 617586 - RNA, 19 nt, Artificial Sequence
  Description of Artificial Sequence: Synthetic oligonucleotide
  Sense strand starting at position 2248 of SEQ ID NO: 585156
gaacgaguuggguacggaa

SEQ ID NO: 617587 - RNA, 19 nt, Artificial Sequence
  Description of Artificial Sequence: Synthetic oligonucleotide
  Antisense strand to SEQ ID NO: 617586
uuccguacccaacucguuc

SEQ ID NO: 617588 - RNA, 19 nt, Artificial Sequence
  Description of Artificial Sequence: Synthetic oligonucleotide
  Sense strand starting at position 2453 of SEQ ID NO: 585156
aaaguccauuaggugaaau

SEQ ID NO: 617589 - RNA, 19 nt, Artificial Sequence
  Description of Artificial Sequence: Synthetic oligonucleotide
  Antisense strand to SEQ ID NO: 617588
auuucaccuaauggacuuu

SEQ ID NO: 617590 - RNA, 19 nt, Artificial Sequence
  Description of Artificial Sequence: Synthetic oligonucleotide
  Sense strand starting at position 2464 of SEQ ID NO: 585156
ggugaaauccuaggaggca

SEQ ID NO: 617591 - RNA, 19 nt, Artificial Sequence
  Description of Artificial Sequence: Synthetic oligonucleotide
  Antisense strand to SEQ ID NO: 617590
ugccuccuaggauuucacc

SEQ ID NO: 617592 - RNA, 19 nt, Artificial Sequence
  Description of Artificial Sequence: Synthetic oligonucleotide
  Sense strand starting at position 2834 of SEQ ID NO: 585156
gcgcgguaaggguuucuca

SEQ ID NO: 617593 - RNA, 19 nt, Artificial Sequence
  Description of Artificial Sequence: Synthetic oligonucleotide
  Antisense strand to SEQ ID NO: 617592
ugagaaacccuuaccgcgc

SEQ ID NO: 617594 - RNA, 19 nt, Artificial Sequence
  Description of Artificial Sequence: Synthetic oligonucleotide
  Sense strand starting at position 2859 of SEQ ID NO: 585156
cugaguguggcguucgauu

SEQ ID NO: 617595 - RNA, 19 nt, Artificial Sequence
  Description of Artificial Sequence: Synthetic oligonucleotide
  Antisense strand to SEQ ID NO: 617594
aaucgaacgccacacucag

SEQ ID NO: 617596 - RNA, 19 nt, Artificial Sequence
  Description of Artificial Sequence: Synthetic oligonucleotide
  Sense strand starting at position 3108 of SEQ ID NO: 585156
cgggaaugccaauagcuaa

SEQ ID NO: 617597 - RNA, 19 nt, Artificial Sequence
  Description of Artificial Sequence: Synthetic oligonucleotide
  Antisense strand to SEQ ID NO: 617596
uuagcuauuggcauucccg

SEQ ID NO: 617598 - RNA, 19 nt, Artificial Sequence
  Description of Artificial Sequence: Synthetic oligonucleotide
  Sense strand starting at position 3145 of SEQ ID NO: 585156
uucuguggugccugaauau

SEQ ID NO: 617599 - RNA, 19 nt, Artificial Sequence
  Description of Artificial Sequence: Synthetic oligonucleotide
  Antisense strand to SEQ ID NO: 617598
auauucaggcaccacagaa

SEQ ID NO: 617600 - RNA, 19 nt, Artificial Sequence
  Description of Artificial Sequence: Synthetic oligonucleotide
  Sense strand starting at position 3284 of SEQ ID NO: 585156
ucgagcccucuauauuauu

SEQ ID NO: 617601 - RNA, 19 nt, Artificial Sequence
  Description of Artificial Sequence: Synthetic oligonucleotide
  Antisense strand to SEQ ID NO: 617600
aauaauauagagggcucga

SEQ ID NO: 617602 - RNA, 19 nt, Artificial Sequence
  Description of Artificial Sequence: Synthetic oligonucleotide
  Sense strand starting at position 3420 of SEQ ID NO: 585156
cagaauaacugaguuaugu

SEQ ID NO: 617603 - RNA, 19 nt, Artificial Sequence
  Description of Artificial Sequence: Synthetic oligonucleotide
  Antisense strand to SEQ ID NO: 617602
acauaacucaguuauucug

SEQ ID NO: 617604 - RNA, 19 nt, Artificial Sequence
  Description of Artificial Sequence: Synthetic oligonucleotide
  Sense strand starting at position 3464 of SEQ ID NO: 585156
gaaagaaucuaccagggua

SEQ ID NO: 617605 - RNA, 19 nt, Artificial Sequence
  Description of Artificial Sequence: Synthetic oligonucleotide
  Antisense strand to SEQ ID NO: 617604
uacccugguagauucuuuc

SEQ ID NO: 617606 - RNA, 19 nt, Artificial Sequence
  Description of Artificial Sequence: Synthetic oligonucleotide
  Sense strand starting at position 3511 of SEQ ID NO: 585156
gacugcaucccaggagaga

SEQ ID NO: 617607 - RNA, 19 nt, Artificial Sequence
  Description of Artificial Sequence: Synthetic oligonucleotide
  Antisense strand to SEQ ID NO: 617606
ucucuccugggaugcaguc

SEQ ID NO: 617608 - RNA, 19 nt, Artificial Sequence
  Description of Artificial Sequence: Synthetic oligonucleotide
  Sense strand starting at position 3540 of SEQ ID NO: 585156
gaguucgggugccuagaaa

SEQ ID NO: 617609 - RNA, 19 nt, Artificial Sequence
  Description of Artificial Sequence: Synthetic oligonucleotide
  Antisense strand to SEQ ID NO: 617608
uuucuaggcacccgaacuc

SEQ ID NO: 617610 - RNA, 19 nt, Artificial Sequence
  Description of Artificial Sequence: Synthetic oligonucleotide
  Sense strand starting at position 3619 of SEQ ID NO: 585156
cugauucccuuagggaaua

SEQ ID NO: 617611 - RNA, 19 nt, Artificial Sequence
  Description of Artificial Sequence: Synthetic oligonucleotide
  Antisense strand to SEQ ID NO: 617610
uauucccuaagggaaucag

SEQ ID NO: 617612 - RNA, 19 nt, Artificial Sequence
  Description of Artificial Sequence: Synthetic oligonucleotide
  Sense strand starting at position 3620 of SEQ ID NO: 585156
ugauucccuuagggaauaa

SEQ ID NO: 617613 - RNA, 19 nt, Artificial Sequence
  Description of Artificial Sequence: Synthetic oligonucleotide
  Antisense strand to SEQ ID NO: 617612
uuauucccuaagggaauca

SEQ ID NO: 617614 - RNA, 19 nt, Artificial Sequence
  Description of Artificial Sequence: Synthetic oligonucleotide
  Sense strand starting at position 3637 of SEQ ID NO: 585156
aauggagguugucuaggaa

SEQ ID NO: 617615 - RNA, 19 nt, Artificial Sequence
  Description of Artificial Sequence: Synthetic oligonucleotide
  Antisense strand to SEQ ID NO: 617614
uuccuagacaaccuccauu

SEQ ID NO: 617616 - RNA, 19 nt, Artificial Sequence
  Description of Artificial Sequence: Synthetic oligonucleotide
  Sense strand starting at position 3640 of SEQ ID NO: 585156
ggagguugucuaggaagua

SEQ ID NO: 617617 - RNA, 19 nt, Artificial Sequence
  Description of Artificial Sequence: Synthetic oligonucleotide
  Antisense strand to SEQ ID NO: 617616
uacuuccuagacaaccucc

SEQ ID NO: 617618 - RNA, 19 nt, Artificial Sequence
  Description of Artificial Sequence: Synthetic oligonucleotide
  Sense strand starting at position 3712 of SEQ ID NO: 585156
ugauaaugcugccuccaau

SEQ ID NO: 617619 - RNA, 19 nt, Artificial Sequence
  Description of Artificial Sequence: Synthetic oligonucleotide
  Antisense strand to SEQ ID NO: 617618
auuggaggcagcauuauca

SEQ ID NO: 617620 - RNA, 19 nt, Artificial Sequence
  Description of Artificial Sequence: Synthetic oligonucleotide
  Sense strand starting at position 3800 of SEQ ID NO: 585156
uugauuuauuucugagucu

SEQ ID NO: 617621 - RNA, 19 nt, Artificial Sequence
  Description of Artificial Sequence: Synthetic oligonucleotide
  Antisense strand to SEQ ID NO: 617620
agacucagaaauaaaucaa

SEQ ID NO: 617622 - RNA, 19 nt, Artificial Sequence
  Description of Artificial Sequence: Synthetic oligonucleotide
  Sense strand starting at position 3801 of SEQ ID NO: 585156
ugauuuauuucugagucuu

SEQ ID NO: 617623 - RNA, 19 nt, Artificial Sequence
  Description of Artificial Sequence: Synthetic oligonucleotide
  Antisense strand to SEQ ID NO: 617622
aagacucagaaauaaauca

SEQ ID NO: 617624 - RNA, 19 nt, Artificial Sequence
  Description of Artificial Sequence: Synthetic oligonucleotide
  Sense strand starting at position 3850 of SEQ ID NO: 585156
agggaugaauucuagaaga

SEQ ID NO: 617625 - RNA, 19 nt, Artificial Sequence
  Description of Artificial Sequence: Synthetic oligonucleotide
  Antisense strand to SEQ ID NO: 617624
ucuucuagaauucaucccu

SEQ ID NO: 617626 - RNA, 19 nt, Artificial Sequence
  Description of Artificial Sequence: Synthetic oligonucleotide
  Sense strand starting at position 3867 of SEQ ID NO: 585156
gagggugaugcauggaaau

SEQ ID NO: 617627 - RNA, 19 nt, Artificial Sequence
  Description of Artificial Sequence: Synthetic oligonucleotide
  Antisense strand to SEQ ID NO: 617626
auuuccaugcaucacccuc

SEQ ID NO: 617628 - RNA, 19 nt, Artificial Sequence
  Description of Artificial Sequence: Synthetic oligonucleotide
  Sense strand starting at position 3885 of SEQ ID NO: 585156
uuucuaaguuuagagaaag

SEQ ID NO: 617629 - RNA, 19 nt, Artificial Sequence
  Description of Artificial Sequence: Synthetic oligonucleotide
  Antisense strand to SEQ ID NO: 617628
cuuucucuaaacuuagaaa

SEQ ID NO: 617630 - RNA, 19 nt, Artificial Sequence
  Description of Artificial Sequence: Synthetic oligonucleotide
  Sense strand starting at position 3941 of SEQ ID NO: 585156
aggugagauucauaaagga

SEQ ID NO: 617631 - RNA, 19 nt, Artificial Sequence
  Description of Artificial Sequence: Synthetic oligonucleotide
  Antisense strand to SEQ ID NO: 617630
uccuuuaugaaucucaccu

SEQ ID NO: 617632 - RNA, 19 nt, Artificial Sequence
  Description of Artificial Sequence: Synthetic oligonucleotide
  Sense strand starting at position 130 of SEQ ID NO: 585157
cuaacucuggcuugggaaa

SEQ ID NO: 617633 - RNA, 19 nt, Artificial Sequence
  Description of Artificial Sequence: Synthetic oligonucleotide
  Antisense strand to SEQ ID NO: 617632
uuucccaagccagaguuag

SEQ ID NO: 617634 - RNA, 19 nt, Artificial Sequence
  Description of Artificial Sequence: Synthetic oligonucleotide
  Sense strand starting at position 276 of SEQ ID NO: 585157
ucugacucugaugguaaua

SEQ ID NO: 617635 - RNA, 19 nt, Artificial Sequence
  Description of Artificial Sequence: Synthetic oligonucleotide
  Antisense strand to SEQ ID NO: 617634
uauuaccaucagagucaga

SEQ ID NO: 617636 - RNA, 19 nt, Artificial Sequence
  Description of Artificial Sequence: Synthetic oligonucleotide
  Sense strand starting at position 651 of SEQ ID NO: 585157
uacagagagcacuggauua

SEQ ID NO: 617637 - RNA, 19 nt, Artificial Sequence
  Description of Artificial Sequence: Synthetic oligonucleotide
  Antisense strand to SEQ ID NO: 617636
uaauccagugcucucugua

SEQ ID NO: 617638 - RNA, 19 nt, Artificial Sequence
  Description of Artificial Sequence: Synthetic oligonucleotide
  Sense strand starting at position 664 of SEQ ID NO: 585157
ggauuagguugucuccaag

SEQ ID NO: 617639 - RNA, 19 nt, Artificial Sequence
  Description of Artificial Sequence: Synthetic oligonucleotide
  Antisense strand to SEQ ID NO: 617638
cuuggagacaaccuaaucc

SEQ ID NO: 617640 - RNA, 19 nt, Artificial Sequence
  Description of Artificial Sequence: Synthetic oligonucleotide
  Sense strand starting at position 739 of SEQ ID NO: 585157
gccagugcugccgucagaa

SEQ ID NO: 617641 - RNA, 19 nt, Artificial Sequence
  Description of Artificial Sequence: Synthetic oligonucleotide
  Antisense strand to SEQ ID NO: 617640
uucugacggcagcacuggc

SEQ ID NO: 617642 - RNA, 19 nt, Artificial Sequence
  Description of Artificial Sequence: Synthetic oligonucleotide
  Sense strand starting at position 941 of SEQ ID NO: 585157
ugauccuucuagucacaca

SEQ ID NO: 617643 - RNA, 19 nt, Artificial Sequence
  Description of Artificial Sequence: Synthetic oligonucleotide
  Antisense strand to SEQ ID NO: 617642
ugugugacuagaaggauca

SEQ ID NO: 617644 - RNA, 19 nt, Artificial Sequence
  Description of Artificial Sequence: Synthetic oligonucleotide
  Sense strand starting at position 952 of SEQ ID NO: 585157
gucacacagcuuggagaaa

SEQ ID NO: 617645 - RNA, 19 nt, Artificial Sequence
  Description of Artificial Sequence: Synthetic oligonucleotide
  Antisense strand to SEQ ID NO: 617644
uuucuccaagcugugugac

SEQ ID NO: 617646 - RNA, 19 nt, Artificial Sequence
  Description of Artificial Sequence: Synthetic oligonucleotide
  Sense strand starting at position 1025 of SEQ ID NO: 585157
agagcagaaucauucucau

SEQ ID NO: 617647 - RNA, 19 nt, Artificial Sequence
  Description of Artificial Sequence: Synthetic oligonucleotide
  Antisense strand to SEQ ID NO: 617646
augagaaugauucugcucu

SEQ ID NO: 617648 - RNA, 19 nt, Artificial Sequence
  Description of Artificial Sequence: Synthetic oligonucleotide
  Sense strand starting at position 1028 of SEQ ID NO: 585157
gcagaaucauucucaugaa

SEQ ID NO: 617649 - RNA, 19 nt, Artificial Sequence
  Description of Artificial Sequence: Synthetic oligonucleotide
  Antisense strand to SEQ ID NO: 617648
uucaugagaaugauucugc

SEQ ID NO: 617650 - RNA, 19 nt, Artificial Sequence
  Description of Artificial Sequence: Synthetic oligonucleotide
  Sense strand starting at position 1083 of SEQ ID NO: 585157
uuguucuaacccuaggaca

SEQ ID NO: 617651 - RNA, 19 nt, Artificial Sequence
  Description of Artificial Sequence: Synthetic oligonucleotide
  Antisense strand to SEQ ID NO: 617650
uguccuaggguuagaacaa

SEQ ID NO: 617652 - RNA, 19 nt, Artificial Sequence
  Description of Artificial Sequence: Synthetic oligonucleotide
  Sense strand starting at position 1085 of SEQ ID NO: 585157
guucuaacccuaggacaca

SEQ ID NO: 617653 - RNA, 19 nt, Artificial Sequence
  Description of Artificial Sequence: Synthetic oligonucleotide
  Antisense strand to SEQ ID NO: 617652
uguguccuaggguuagaac

SEQ ID NO: 617654 - RNA, 19 nt, Artificial Sequence
  Description of Artificial Sequence: Synthetic oligonucleotide
  Sense strand starting at position 1323 of SEQ ID NO: 585157
caccauacgcuggaaauga

SEQ ID NO: 617655 - RNA, 19 nt, Artificial Sequence
  Description of Artificial Sequence: Synthetic oligonucleotide
  Antisense strand to SEQ ID NO: 617654
ucauuuccagcguauggug

SEQ ID NO: 617656 - RNA, 19 nt, Artificial Sequence
  Description of Artificial Sequence: Synthetic oligonucleotide
  Sense strand starting at position 1334 of SEQ ID NO: 585157
ggaaaugaugcucaguuuc

SEQ ID NO: 617657 - RNA, 19 nt, Artificial Sequence
  Description of Artificial Sequence: Synthetic oligonucleotide
  Antisense strand to SEQ ID NO: 617656
gaaacugagcaucauuucc

SEQ ID NO: 617658 - RNA, 19 nt, Artificial Sequence
  Description of Artificial Sequence: Synthetic oligonucleotide
  Sense strand starting at position 1609 of SEQ ID NO: 585157
cucuuaagacauuauuggu

SEQ ID NO: 617659 - RNA, 19 nt, Artificial Sequence
  Description of Artificial Sequence: Synthetic oligonucleotide
  Antisense strand to SEQ ID NO: 617658
accaauaaugucuuaagag

SEQ ID NO: 617660 - RNA, 19 nt, Artificial Sequence
  Description of Artificial Sequence: Synthetic oligonucleotide
  Sense strand starting at position 1632 of SEQ ID NO: 585157
ucauuauuagaaggauguu

SEQ ID NO: 617661 - RNA, 19 nt, Artificial Sequence
  Description of Artificial Sequence: Synthetic oligonucleotide
  Antisense strand to SEQ ID NO: 617660
aacauccuucuaauaauga

SEQ ID NO: 617662 - RNA, 19 nt, Artificial Sequence
  Description of Artificial Sequence: Synthetic oligonucleotide
  Sense strand starting at position 1635 of SEQ ID NO: 585157
uuauuagaaggauguuuac

SEQ ID NO: 617663 - RNA, 19 nt, Artificial Sequence
  Description of Artificial Sequence: Synthetic oligonucleotide
  Antisense strand to SEQ ID NO: 617662
guaaacauccuucuaauaa

SEQ ID NO: 617664 - RNA, 19 nt, Artificial Sequence
  Description of Artificial Sequence: Synthetic oligonucleotide
  Sense strand starting at position 1638 of SEQ ID NO: 585157
uuagaaggauguuuacuca

SEQ ID NO: 617665 - RNA, 19 nt, Artificial Sequence
  Description of Artificial Sequence: Synthetic oligonucleotide
  Antisense strand to SEQ ID NO: 617664
ugaguaaacauccuucuaa

SEQ ID NO: 617666 - RNA, 19 nt, Artificial Sequence
  Description of Artificial Sequence: Synthetic oligonucleotide
  Sense strand starting at position 1680 of SEQ ID NO: 585157
ggaugcaaucuggagagca

SEQ ID NO: 617667 - RNA, 19 nt, Artificial Sequence
  Description of Artificial Sequence: Synthetic oligonucleotide
  Antisense strand to SEQ ID NO: 617666
ugcucuccagauugcaucc

SEQ ID NO: 617668 - RNA, 19 nt, Artificial Sequence
  Description of Artificial Sequence: Synthetic oligonucleotide
  Sense strand starting at position 2085 of SEQ ID NO: 585157
cugcgugggcugucuauau

SEQ ID NO: 617669 - RNA, 19 nt, Artificial Sequence
  Description of Artificial Sequence: Synthetic oligonucleotide
  Antisense strand to SEQ ID NO: 617668
auauagacagcccacgcag

SEQ ID NO: 617670 - RNA, 19 nt, Artificial Sequence
  Description of Artificial Sequence: Synthetic oligonucleotide
  Sense strand starting at position 2096 of SEQ ID NO: 585157
gucuauauggcugagauug

SEQ ID NO: 617671 - RNA, 19 nt, Artificial Sequence
  Description of Artificial Sequence: Synthetic oligonucleotide
  Antisense strand to SEQ ID NO: 617670
caaucucagccauauagac

SEQ ID NO: 617672 - RNA, 19 nt, Artificial Sequence
  Description of Artificial Sequence: Synthetic oligonucleotide
  Sense strand starting at position 2255 of SEQ ID NO: 585157
ccucaagucuguguuauuu

SEQ ID NO: 617673 - RNA, 19 nt, Artificial Sequence
  Description of Artificial Sequence: Synthetic oligonucleotide
  Antisense strand to SEQ ID NO: 617672
aaauaacacagacuugagg

SEQ ID NO: 617674 - RNA, 19 nt, Artificial Sequence
  Description of Artificial Sequence: Synthetic oligonucleotide
  Sense strand starting at position 2261 of SEQ ID NO: 585157
gucuguguuauuuguagac

SEQ ID NO: 617675 - RNA, 19 nt, Artificial Sequence
  Description of Artificial Sequence: Synthetic oligonucleotide
  Antisense strand to SEQ ID NO: 617674
gucuacaaauaacacagac

SEQ ID NO: 617676 - RNA, 19 nt, Artificial Sequence
  Description of Artificial Sequence: Synthetic oligonucleotide
  Sense strand starting at position 2294 of SEQ ID NO: 585157
uuugaugcuuacuuuaaga

SEQ ID NO: 617677 - RNA, 19 nt, Artificial Sequence
  Description of Artificial Sequence: Synthetic oligonucleotide
  Antisense strand to SEQ ID NO: 617676
ucuuaaaguaagcaucaaa

SEQ ID NO: 617678 - RNA, 19 nt, Artificial Sequence
  Description of Artificial Sequence: Synthetic oligonucleotide
  Sense strand starting at position 2296 of SEQ ID NO: 585157
ugaugcuuacuuuaagacu

SEQ ID NO: 617679 - RNA, 19 nt, Artificial Sequence
  Description of Artificial Sequence: Synthetic oligonucleotide
  Antisense strand to SEQ ID NO: 617678
agucuuaaaguaagcauca

SEQ ID NO: 617680 - RNA, 19 nt, Artificial Sequence
  Description of Artificial Sequence: Synthetic oligonucleotide
  Sense strand starting at position 2465 of SEQ ID NO: 585157
gagucaggauucccauaac

SEQ ID NO: 617681 - RNA, 19 nt, Artificial Sequence
  Description of Artificial Sequence: Synthetic oligonucleotide
  Antisense strand to SEQ ID NO: 617680
guuaugggaauccugacuc

SEQ ID NO: 617682 - RNA, 19 nt, Artificial Sequence
  Description of Artificial Sequence: Synthetic oligonucleotide
  Sense strand starting at position 2871 of SEQ ID NO: 585157
ucaauuaugcaaugaaagc

SEQ ID NO: 617683 - RNA, 19 nt, Artificial Sequence
  Description of Artificial Sequence: Synthetic oligonucleotide
  Antisense strand to SEQ ID NO: 617682
gcuuucauugcauaauuga

SEQ ID NO: 617684 - RNA, 19 nt, Artificial Sequence
  Description of Artificial Sequence: Synthetic oligonucleotide
  Sense strand starting at position 2966 of SEQ ID NO: 585157
gcuguacuuacggaaccaa

SEQ ID NO: 617685 - RNA, 19 nt, Artificial Sequence
  Description of Artificial Sequence: Synthetic oligonucleotide
  Antisense strand to SEQ ID NO: 617684
uugguuccguaaguacagc

SEQ ID NO: 617686 - RNA, 19 nt, Artificial Sequence
  Description of Artificial Sequence: Synthetic oligonucleotide
  Sense strand starting at position 3172 of SEQ ID NO: 585157
cuccuaaucuuagcaggau

SEQ ID NO: 617687 - RNA, 19 nt, Artificial Sequence
  Description of Artificial Sequence: Synthetic oligonucleotide
  Antisense strand to SEQ ID NO: 617686
auccugcuaagauuaggag

SEQ ID NO: 617688 - RNA, 19 nt, Artificial Sequence
  Description of Artificial Sequence: Synthetic oligonucleotide
  Sense strand starting at position 3175 of SEQ ID NO: 585157
cuaaucuuagcaggauaga

SEQ ID NO: 617689 - RNA, 19 nt, Artificial Sequence
  Description of Artificial Sequence: Synthetic oligonucleotide
  Antisense strand to SEQ ID NO: 617688
ucuauccugcuaagauuag

SEQ ID NO: 617690 - RNA, 19 nt, Artificial Sequence
  Description of Artificial Sequence: Synthetic oligonucleotide
  Sense strand starting at position 3531 of SEQ ID NO: 585157
agcuaagauuccuuaugau

SEQ ID NO: 617691 - RNA, 19 nt, Artificial Sequence
  Description of Artificial Sequence: Synthetic oligonucleotide
  Antisense strand to SEQ ID NO: 617690
aucauaaggaaucuuagcu

SEQ ID NO: 617692 - RNA, 19 nt, Artificial Sequence
  Description of Artificial Sequence: Synthetic oligonucleotide
  Sense strand starting at position 3632 of SEQ ID NO: 585157
uaugaugcacuguagaagu

SEQ ID NO: 617693 - RNA, 19 nt, Artificial Sequence
  Description of Artificial Sequence: Synthetic oligonucleotide
  Antisense strand to SEQ ID NO: 617692
acuucuacagugcaucaua

SEQ ID NO: 617694 - RNA, 19 nt, Artificial Sequence
  Description of Artificial Sequence: Synthetic oligonucleotide
  Sense strand starting at position 3634 of SEQ ID NO: 585157
ugaugcacuguagaaguaa

SEQ ID NO: 617695 - RNA, 19 nt, Artificial Sequence
  Description of Artificial Sequence: Synthetic oligonucleotide
  Antisense strand to SEQ ID NO: 617694
uuacuucuacagugcauca

SEQ ID NO: 617696 - RNA, 19 nt, Artificial Sequence
  Description of Artificial Sequence: Synthetic oligonucleotide
  Sense strand starting at position 3748 of SEQ ID NO: 585157
aucgucaaacuuugaaaug

SEQ ID NO: 617697 - RNA, 19 nt, Artificial Sequence
  Description of Artificial Sequence: Synthetic oligonucleotide
  Antisense strand to SEQ ID NO: 617696
cauuucaaaguuugacgau

SEQ ID NO: 617698 - RNA, 19 nt, Artificial Sequence
  Description of Artificial Sequence: Synthetic oligonucleotide
  Sense strand starting at position 3772 of SEQ ID NO: 585157
aauagauuacuggguguuc

SEQ ID NO: 617699 - RNA, 19 nt, Artificial Sequence
  Description of Artificial Sequence: Synthetic oligonucleotide
  Antisense strand to SEQ ID NO: 617698
gaacacccaguaaucuauu

SEQ ID NO: 617700 - RNA, 19 nt, Artificial Sequence
  Description of Artificial Sequence: Synthetic oligonucleotide
  Sense strand starting at position 3830 of SEQ ID NO: 585157
gggauugucugauccuaua

SEQ ID NO: 617701 - RNA, 19 nt, Artificial Sequence
  Description of Artificial Sequence: Synthetic oligonucleotide
  Antisense strand to SEQ ID NO: 617700
uauaggaucagacaauccc

SEQ ID NO: 617702 - RNA, 19 nt, Artificial Sequence
  Description of Artificial Sequence: Synthetic oligonucleotide
  Sense strand starting at position 3841 of SEQ ID NO: 585157
auccuauagggauguauga

SEQ ID NO: 617703 - RNA, 19 nt, Artificial Sequence
  Description of Artificial Sequence: Synthetic oligonucleotide
  Antisense strand to SEQ ID NO: 617702
ucauacaucccuauaggau

SEQ ID NO: 617704 - RNA, 19 nt, Artificial Sequence
  Description of Artificial Sequence: Synthetic oligonucleotide
  Sense strand starting at position 3848 of SEQ ID NO: 585157
agggauguaugacuuugau

SEQ ID NO: 617705 - RNA, 19 nt, Artificial Sequence
  Description of Artificial Sequence: Synthetic oligonucleotide
  Antisense strand to SEQ ID NO: 617704
aucaaagucauacaucccu

SEQ ID NO: 617706 - RNA, 19 nt, Artificial Sequence
  Description of Artificial Sequence: Synthetic oligonucleotide
  Sense strand starting at position 3864 of SEQ ID NO: 585157
gauugucuuuaggcuauuu

SEQ ID NO: 617707 - RNA, 19 nt, Artificial Sequence
  Description of Artificial Sequence: Synthetic oligonucleotide
  Antisense strand to SEQ ID NO: 617706
aaauagccuaaagacaauc

SEQ ID NO: 617708 - RNA, 19 nt, Artificial Sequence
  Description of Artificial Sequence: Synthetic oligonucleotide
  Sense strand starting at position 3889 of SEQ ID NO: 585157
ucuguaauaguagauguua

SEQ ID NO: 617709 - RNA, 19 nt, Artificial Sequence
  Description of Artificial Sequence: Synthetic oligonucleotide
  Antisense strand to SEQ ID NO: 617708
uaacaucuacuauuacaga

SEQ ID NO: 617710 - RNA, 19 nt, Artificial Sequence
  Description of Artificial Sequence: Synthetic oligonucleotide
  Sense strand starting at position 3973 of SEQ ID NO: 585157
ugcuguggagaguauaaau

SEQ ID NO: 617711 - RNA, 19 nt, Artificial Sequence
  Description of Artificial Sequence: Synthetic oligonucleotide
  Antisense strand to SEQ ID NO: 617710
auuuauacucuccacagca

SEQ ID NO: 617712 - RNA, 19 nt, Artificial Sequence
  Description of Artificial Sequence: Synthetic oligonucleotide
  Sense strand starting at position 2364 of SEQ ID NO: 585158
caaugagcauggguuguau

SEQ ID NO: 617713 - RNA, 19 nt, Artificial Sequence
  Description of Artificial Sequence: Synthetic oligonucleotide
  Antisense strand to SEQ ID NO: 617712
auacaacccaugcucauug

SEQ ID NO: 617714 - RNA, 19 nt, Artificial Sequence
  Description of Artificial Sequence: Synthetic oligonucleotide
  Sense strand starting at position 2366 of SEQ ID NO: 585158
augagcauggguuguauuu

SEQ ID NO: 617715 - RNA, 19 nt, Artificial Sequence
  Description of Artificial Sequence: Synthetic oligonucleotide
  Antisense strand to SEQ ID NO: 617714
aaauacaacccaugcucau

SEQ ID NO: 617716 - RNA, 19 nt, Artificial Sequence
  Description of Artificial Sequence: Synthetic oligonucleotide
  Sense strand starting at position 2375 of SEQ ID NO: 585158
gguuguauuuccguuuguu

SEQ ID NO: 617717 - RNA, 19 nt, Artificial Sequence
  Description of Artificial Sequence: Synthetic oligonucleotide
  Antisense strand to SEQ ID NO: 617716
aacaaacggaaauacaacc

SEQ ID NO: 617718 - RNA, 19 nt, Artificial Sequence
  Description of Artificial Sequence: Synthetic oligonucleotide
  Sense strand starting at position 2379 of SEQ ID NO: 585158
guauuuccguuuguuugua

SEQ ID NO: 617719 - RNA, 19 nt, Artificial Sequence
  Description of Artificial Sequence: Synthetic oligonucleotide
  Antisense strand to SEQ ID NO: 617718
uacaaacaaacggaaauac

SEQ ID NO: 617720 - RNA, 19 nt, Artificial Sequence
  Description of Artificial Sequence: Synthetic oligonucleotide
  Sense strand starting at position 2865 of SEQ ID NO: 585158
uuauguuagcuauggguuu

SEQ ID NO: 617721 - RNA, 19 nt, Artificial Sequence
  Description of Artificial Sequence: Synthetic oligonucleotide
  Antisense strand to SEQ ID NO: 617720
aaacccauagcuaacauaa

SEQ ID NO: 617722 - RNA, 19 nt, Artificial Sequence
  Description of Artificial Sequence: Synthetic oligonucleotide
  Sense strand starting at position 3087 of SEQ ID NO: 585158
ccacuuguuuaugguggau

SEQ ID NO: 617723 - RNA, 19 nt, Artificial Sequence
  Description of Artificial Sequence: Synthetic oligonucleotide
  Antisense strand to SEQ ID NO: 617722
auccaccauaaacaagugg

SEQ ID NO: 617724 - RNA, 19 nt, Artificial Sequence
  Description of Artificial Sequence: Synthetic oligonucleotide
  Sense strand starting at position 3089 of SEQ ID NO: 585158
acuuguuuaugguggauua

SEQ ID NO: 617725 - RNA, 19 nt, Artificial Sequence
  Description of Artificial Sequence: Synthetic oligonucleotide
  Antisense strand to SEQ ID NO: 617724
uaauccaccauaaacaagu

SEQ ID NO: 617726 - RNA, 19 nt, Artificial Sequence
  Description of Artificial Sequence: Synthetic oligonucleotide
  Sense strand starting at position 3175 of SEQ ID NO: 585158
cacggauauugguguguag

SEQ ID NO: 617727 - RNA, 19 nt, Artificial Sequence
  Description of Artificial Sequence: Synthetic oligonucleotide
  Antisense strand to SEQ ID NO: 617726
cuacacaccaauauccgug

SEQ ID NO: 617728 - RNA, 19 nt, Artificial Sequence
  Description of Artificial Sequence: Synthetic oligonucleotide
  Sense strand starting at position 3177 of SEQ ID NO: 585158
cggauauugguguguaguu

SEQ ID NO: 617729 - RNA, 19 nt, Artificial Sequence
  Description of Artificial Sequence: Synthetic oligonucleotide
  Antisense strand to SEQ ID NO: 617728
aacuacacaccaauauccg

SEQ ID NO: 617730 - RNA, 19 nt, Artificial Sequence
  Description of Artificial Sequence: Synthetic oligonucleotide
  Sense strand starting at position 3250 of SEQ ID NO: 585158
uagaaugauuuagggauua

SEQ ID NO: 617731 - RNA, 19 nt, Artificial Sequence
  Description of Artificial Sequence: Synthetic oligonucleotide
  Antisense strand to SEQ ID NO: 617730
uaaucccuaaaucauucua

SEQ ID NO: 617732 - RNA, 19 nt, Artificial Sequence
  Description of Artificial Sequence: Synthetic oligonucleotide
  Sense strand starting at position 3809 of SEQ ID NO: 585158
uuccuugaggugugauuaa

SEQ ID NO: 617733 - RNA, 19 nt, Artificial Sequence
  Description of Artificial Sequence: Synthetic oligonucleotide
  Antisense strand to SEQ ID NO: 617732
uuaaucacaccucaaggaa

SEQ ID NO: 617734 - RNA, 19 nt, Artificial Sequence
  Description of Artificial Sequence: Synthetic oligonucleotide
  Sense strand starting at position 3818 of SEQ ID NO: 585158
gugugauuaaauugucuau

SEQ ID NO: 617735 - RNA, 19 nt, Artificial Sequence
  Description of Artificial Sequence: Synthetic oligonucleotide
  Antisense strand to SEQ ID NO: 617734
auagacaauuuaaucacac

SEQ ID NO: 617736 - RNA, 19 nt, Artificial Sequence
  Description of Artificial Sequence: Synthetic oligonucleotide
  Sense strand starting at position 3875 of SEQ ID NO: 585158
cugugaaguuuccucuuac

SEQ ID NO: 617737 - RNA, 19 nt, Artificial Sequence
  Description of Artificial Sequence: Synthetic oligonucleotide
  Antisense strand to SEQ ID NO: 617736
guaagaggaaacuucacag

SEQ ID NO: 617738 - RNA, 19 nt, Artificial Sequence
  Description of Artificial Sequence: Synthetic oligonucleotide
  Sense strand starting at position 57 of SEQ ID NO: 585159
aaaguucugcuguagagac

SEQ ID NO: 617739 - RNA, 19 nt, Artificial Sequence
  Description of Artificial Sequence: Synthetic oligonucleotide
  Antisense strand to SEQ ID NO: 617738
gucucuacagcagaacuuu

SEQ ID NO: 617740 - RNA, 19 nt, Artificial Sequence
  Description of Artificial Sequence: Synthetic oligonucleotide
  Sense strand starting at position 59 of SEQ ID NO: 585159
aguucugcuguagagacau

SEQ ID NO: 617741 - RNA, 19 nt, Artificial Sequence
  Description of Artificial Sequence: Synthetic oligonucleotide
  Antisense strand to SEQ ID NO: 617740
augucucuacagcagaacu

SEQ ID NO: 617742 - RNA, 19 nt, Artificial Sequence
  Description of Artificial Sequence: Synthetic oligonucleotide
  Sense strand starting at position 67 of SEQ ID NO: 585159
uguagagacaucuguugaa

SEQ ID NO: 617743 - RNA, 19 nt, Artificial Sequence
  Description of Artificial Sequence: Synthetic oligonucleotide
  Antisense strand to SEQ ID NO: 617742
uucaacagaugucucuaca

SEQ ID NO: 617744 - RNA, 19 nt, Artificial Sequence
  Description of Artificial Sequence: Synthetic oligonucleotide
  Sense strand starting at position 289 of SEQ ID NO: 585159
guuugccuuccgcugagua

SEQ ID NO: 617745 - RNA, 19 nt, Artificial Sequence
  Description of Artificial Sequence: Synthetic oligonucleotide
  Antisense strand to SEQ ID NO: 617744
uacucagcggaaggcaaac

SEQ ID NO: 617746 - RNA, 19 nt, Artificial Sequence
  Description of Artificial Sequence: Synthetic oligonucleotide
  Sense strand starting at position 645 of SEQ ID NO: 585159
guaauaaccucucccagag

SEQ ID NO: 617747 - RNA, 19 nt, Artificial Sequence
  Description of Artificial Sequence: Synthetic oligonucleotide
  Antisense strand to SEQ ID NO: 617746
cucugggagagguuauuac

SEQ ID NO: 617748 - RNA, 19 nt, Artificial Sequence
  Description of Artificial Sequence: Synthetic oligonucleotide
  Sense strand starting at position 686 of SEQ ID NO: 585159
ggaaguagaggcuguaacu

SEQ ID NO: 617749 - RNA, 19 nt, Artificial Sequence
  Description of Artificial Sequence: Synthetic oligonucleotide
  Antisense strand to SEQ ID NO: 617748
aguuacagccucuacuucc

SEQ ID NO: 617750 - RNA, 19 nt, Artificial Sequence
  Description of Artificial Sequence: Synthetic oligonucleotide
  Sense strand starting at position 788 of SEQ ID NO: 585159
auguaugugauuuguaagu

SEQ ID NO: 617751 - RNA, 19 nt, Artificial Sequence
  Description of Artificial Sequence: Synthetic oligonucleotide
  Antisense strand to SEQ ID NO: 617750
acuuacaaaucacauacau

SEQ ID NO: 617752 - RNA, 19 nt, Artificial Sequence
  Description of Artificial Sequence: Synthetic oligonucleotide
  Sense strand starting at position 815 of SEQ ID NO: 585159
auguauuagagguacaguu

SEQ ID NO: 617753 - RNA, 19 nt, Artificial Sequence
  Description of Artificial Sequence: Synthetic oligonucleotide
  Antisense strand to SEQ ID NO: 617752
aacuguaccucuaauacau

SEQ ID NO: 617754 - RNA, 19 nt, Artificial Sequence
  Description of Artificial Sequence: Synthetic oligonucleotide
  Sense strand starting at position 934 of SEQ ID NO: 585159
uuaucugaugcuuaguaga

SEQ ID NO: 617755 - RNA, 19 nt, Artificial Sequence
  Description of Artificial Sequence: Synthetic oligonucleotide
  Antisense strand to SEQ ID NO: 617754
ucuacuaagcaucagauaa

SEQ ID NO: 617756 - RNA, 19 nt, Artificial Sequence
  Description of Artificial Sequence: Synthetic oligonucleotide
  Sense strand starting at position 936 of SEQ ID NO: 585159
aucugaugcuuaguagaau

SEQ ID NO: 617757 - RNA, 19 nt, Artificial Sequence
  Description of Artificial Sequence: Synthetic oligonucleotide
  Antisense strand to SEQ ID NO: 617756
auucuacuaagcaucagau

SEQ ID NO: 617758 - RNA, 19 nt, Artificial Sequence
  Description of Artificial Sequence: Synthetic oligonucleotide
  Sense strand starting at position 1133 of SEQ ID NO: 585159
cagauccugggcuauuauu

SEQ ID NO: 617759 - RNA, 19 nt, Artificial Sequence
  Description of Artificial Sequence: Synthetic oligonucleotide
  Antisense strand to SEQ ID NO: 617758
aauaauagcccaggaucug

SEQ ID NO: 617760 - RNA, 19 nt, Artificial Sequence
  Description of Artificial Sequence: Synthetic oligonucleotide
  Sense strand starting at position 1314 of SEQ ID NO: 585159
agacaacucccguaugcau

SEQ ID NO: 617761 - RNA, 19 nt, Artificial Sequence
  Description of Artificial Sequence: Synthetic oligonucleotide
  Antisense strand to SEQ ID NO: 617760
augcauacgggaguugucu

SEQ ID NO: 617762 - RNA, 19 nt, Artificial Sequence
  Description of Artificial Sequence: Synthetic oligonucleotide
  Sense strand starting at position 1571 of SEQ ID NO: 585159
augcuugugacacauagag

SEQ ID NO: 617763 - RNA, 19 nt, Artificial Sequence
  Description of Artificial Sequence: Synthetic oligonucleotide
  Antisense strand to SEQ ID NO: 617762
cucuaugugucacaagcau

SEQ ID NO: 617764 - RNA, 19 nt, Artificial Sequence
  Description of Artificial Sequence: Synthetic oligonucleotide
  Sense strand starting at position 1573 of SEQ ID NO: 585159
gcuugugacacauagagua

SEQ ID NO: 617765 - RNA, 19 nt, Artificial Sequence
  Description of Artificial Sequence: Synthetic oligonucleotide
  Antisense strand to SEQ ID NO: 617764
uacucuaugugucacaagc

SEQ ID NO: 617766 - RNA, 19 nt, Artificial Sequence
  Description of Artificial Sequence: Synthetic oligonucleotide
  Sense strand starting at position 1649 of SEQ ID NO: 585159
gcgauaucucaauaggacc

SEQ ID NO: 617767 - RNA, 19 nt, Artificial Sequence
  Description of Artificial Sequence: Synthetic oligonucleotide
  Antisense strand to SEQ ID NO: 617766
gguccuauugagauaucgc

SEQ ID NO: 617768 - RNA, 19 nt, Artificial Sequence
  Description of Artificial Sequence: Synthetic oligonucleotide
  Sense strand starting at position 1930 of SEQ ID NO: 585159
uggcuugaccauugaucca

SEQ ID NO: 617769 - RNA, 19 nt, Artificial Sequence
  Description of Artificial Sequence: Synthetic oligonucleotide
  Antisense strand to SEQ ID NO: 617768
uggaucaauggucaagcca

SEQ ID NO: 617770 - RNA, 19 nt, Artificial Sequence
  Description of Artificial Sequence: Synthetic oligonucleotide
  Sense strand starting at position 2003 of SEQ ID NO: 585159
gcuaguugucccgauuuac

SEQ ID NO: 617771 - RNA, 19 nt, Artificial Sequence
  Description of Artificial Sequence: Synthetic oligonucleotide
  Antisense strand to SEQ ID NO: 617770
guaaaucgggacaacuagc

SEQ ID NO: 617772 - RNA, 19 nt, Artificial Sequence
  Description of Artificial Sequence: Synthetic oligonucleotide
  Sense strand starting at position 2120 of SEQ ID NO: 585159
agaaguuuguccucaugaa

SEQ ID NO: 617773 - RNA, 19 nt, Artificial Sequence
  Description of Artificial Sequence: Synthetic oligonucleotide
  Antisense strand to SEQ ID NO: 617772
uucaugaggacaaacuucu

SEQ ID NO: 617774 - RNA, 19 nt, Artificial Sequence
  Description of Artificial Sequence: Synthetic oligonucleotide
  Sense strand starting at position 2121 of SEQ ID NO: 585159
gaaguuuguccucaugaaa

SEQ ID NO: 617775 - RNA, 19 nt, Artificial Sequence
  Description of Artificial Sequence: Synthetic oligonucleotide
  Antisense strand to SEQ ID NO: 617774
uuucaugaggacaaacuuc

SEQ ID NO: 617776 - RNA, 19 nt, Artificial Sequence
  Description of Artificial Sequence: Synthetic oligonucleotide
  Sense strand starting at position 2124 of SEQ ID NO: 585159
guuuguccucaugaaauuc

SEQ ID NO: 617777 - RNA, 19 nt, Artificial Sequence
  Description of Artificial Sequence: Synthetic oligonucleotide
  Antisense strand to SEQ ID NO: 617776
gaauuucaugaggacaaac

SEQ ID NO: 617778 - RNA, 19 nt, Artificial Sequence
  Description of Artificial Sequence: Synthetic oligonucleotide
  Sense strand starting at position 2160 of SEQ ID NO: 585159
agaauagcuuuggcuaaag

SEQ ID NO: 617779 - RNA, 19 nt, Artificial Sequence
  Description of Artificial Sequence: Synthetic oligonucleotide
  Antisense strand to SEQ ID NO: 617778
cuuuagccaaagcuauucu

SEQ ID NO: 617780 - RNA, 19 nt, Artificial Sequence
  Description of Artificial Sequence: Synthetic oligonucleotide
  Sense strand starting at position 2223 of SEQ ID NO: 585159
cugagauuauugguccauc

SEQ ID NO: 617781 - RNA, 19 nt, Artificial Sequence
  Description of Artificial Sequence: Synthetic oligonucleotide
  Antisense strand to SEQ ID NO: 617780
gauggaccaauaaucucag

SEQ ID NO: 617782 - RNA, 19 nt, Artificial Sequence
  Description of Artificial Sequence: Synthetic oligonucleotide
  Sense strand starting at position 2224 of SEQ ID NO: 585159
ugagauuauugguccaucu

SEQ ID NO: 617783 - RNA, 19 nt, Artificial Sequence
  Description of Artificial Sequence: Synthetic oligonucleotide
  Antisense strand to SEQ ID NO: 617782
agauggaccaauaaucuca

SEQ ID NO: 617784 - RNA, 19 nt, Artificial Sequence
  Description of Artificial Sequence: Synthetic oligonucleotide
  Sense strand starting at position 2311 of SEQ ID NO: 585159
agaggacuugguggacauu

SEQ ID NO: 617785 - RNA, 19 nt, Artificial Sequence
  Description of Artificial Sequence: Synthetic oligonucleotide
  Antisense strand to SEQ ID NO: 617784
aauguccaccaaguccucu

SEQ ID NO: 617786 - RNA, 19 nt, Artificial Sequence
  Description of Artificial Sequence: Synthetic oligonucleotide
  Sense strand starting at position 2353 of SEQ ID NO: 585159
aggaaaugcugaguaaaca

SEQ ID NO: 617787 - RNA, 19 nt, Artificial Sequence
  Description of Artificial Sequence: Synthetic oligonucleotide
  Antisense strand to SEQ ID NO: 617786
uguuuacucagcauuuccu

SEQ ID NO: 617788 - RNA, 19 nt, Artificial Sequence
  Description of Artificial Sequence: Synthetic oligonucleotide
  Sense strand starting at position 2394 of SEQ ID NO: 585159
uugauuuauuuauggagcu

SEQ ID NO: 617789 - RNA, 19 nt, Artificial Sequence
  Description of Artificial Sequence: Synthetic oligonucleotide
  Antisense strand to SEQ ID NO: 617788
agcuccauaaauaaaucaa

SEQ ID NO: 617790 - RNA, 19 nt, Artificial Sequence
  Description of Artificial Sequence: Synthetic oligonucleotide
  Sense strand starting at position 2395 of SEQ ID NO: 585159
ugauuuauuuauggagcua

SEQ ID NO: 617791 - RNA, 19 nt, Artificial Sequence
  Description of Artificial Sequence: Synthetic oligonucleotide
  Antisense strand to SEQ ID NO: 617790
uagcuccauaaauaaauca

SEQ ID NO: 617792 - RNA, 19 nt, Artificial Sequence
  Description of Artificial Sequence: Synthetic oligonucleotide
  Sense strand starting at position 2408 of SEQ ID NO: 585159
gagcuaagagaauaugcuu

SEQ ID NO: 617793 - RNA, 19 nt, Artificial Sequence
  Description of Artificial Sequence: Synthetic oligonucleotide
  Antisense strand to SEQ ID NO: 617792
aagcauauucucuuagcuc

SEQ ID NO: 617794 - RNA, 19 nt, Artificial Sequence
  Description of Artificial Sequence: Synthetic oligonucleotide
  Sense strand starting at position 2428 of SEQ ID NO: 585159
gccuaugagcaaggauacu

SEQ ID NO: 617795 - RNA, 19 nt, Artificial Sequence
  Description of Artificial Sequence: Synthetic oligonucleotide
  Antisense strand to SEQ ID NO: 617794
aguauccuugcucauaggc

SEQ ID NO: 617796 - RNA, 19 nt, Artificial Sequence
  Description of Artificial Sequence: Synthetic oligonucleotide
  Sense strand starting at position 2631 of SEQ ID NO: 585159
cuuuauuccuauccuggga

SEQ ID NO: 617797 - RNA, 19 nt, Artificial Sequence
  Description of Artificial Sequence: Synthetic oligonucleotide
  Antisense strand to SEQ ID NO: 617796
ucccaggauaggaauaaag

SEQ ID NO: 617798 - RNA, 19 nt, Artificial Sequence
  Description of Artificial Sequence: Synthetic oligonucleotide
  Sense strand starting at position 2635 of SEQ ID NO: 585159
auuccuauccugggauaug

SEQ ID NO: 617799 - RNA, 19 nt, Artificial Sequence
  Description of Artificial Sequence: Synthetic oligonucleotide
  Antisense strand to SEQ ID NO: 617798
cauaucccaggauaggaau

SEQ ID NO: 617800 - RNA, 19 nt, Artificial Sequence
  Description of Artificial Sequence: Synthetic oligonucleotide
  Sense strand starting at position 2661 of SEQ ID NO: 585159
gcacauuagaauuguagag

SEQ ID NO: 617801 - RNA, 19 nt, Artificial Sequence
  Description of Artificial Sequence: Synthetic oligonucleotide
  Antisense strand to SEQ ID NO: 617800
cucuacaauucuaaugugc

SEQ ID NO: 617802 - RNA, 19 nt, Artificial Sequence
  Description of Artificial Sequence: Synthetic oligonucleotide
  Sense strand starting at position 2679 of SEQ ID NO: 585159
gauacaugugguuaugucu

SEQ ID NO: 617803 - RNA, 19 nt, Artificial Sequence
  Description of Artificial Sequence: Synthetic oligonucleotide
  Antisense strand to SEQ ID NO: 617802
agacauaaccacauguauc

SEQ ID NO: 617804 - RNA, 19 nt, Artificial Sequence
  Description of Artificial Sequence: Synthetic oligonucleotide
  Sense strand starting at position 2740 of SEQ ID NO: 585159
gcuugcuauguccuggcaa

SEQ ID NO: 617805 - RNA, 19 nt, Artificial Sequence
  Description of Artificial Sequence: Synthetic oligonucleotide
  Antisense strand to SEQ ID NO: 617804
uugccaggacauagcaagc

SEQ ID NO: 617806 - RNA, 19 nt, Artificial Sequence
  Description of Artificial Sequence: Synthetic oligonucleotide
  Sense strand starting at position 2818 of SEQ ID NO: 585159
ccguaagugaaacagaauu

SEQ ID NO: 617807 - RNA, 19 nt, Artificial Sequence
  Description of Artificial Sequence: Synthetic oligonucleotide
  Antisense strand to SEQ ID NO: 617806
aauucuguuucacuuacgg

SEQ ID NO: 617808 - RNA, 19 nt, Artificial Sequence
  Description of Artificial Sequence: Synthetic oligonucleotide
  Sense strand starting at position 2897 of SEQ ID NO: 585159
gugagauggcaugaucuac

SEQ ID NO: 617809 - RNA, 19 nt, Artificial Sequence
  Description of Artificial Sequence: Synthetic oligonucleotide
  Antisense strand to SEQ ID NO: 617808
guagaucaugccaucucac

SEQ ID NO: 617810 - RNA, 19 nt, Artificial Sequence
  Description of Artificial Sequence: Synthetic oligonucleotide
  Sense strand starting at position 3050 of SEQ ID NO: 585159
guuaguucugcgguagcau

SEQ ID NO: 617811 - RNA, 19 nt, Artificial Sequence
  Description of Artificial Sequence: Synthetic oligonucleotide
  Antisense strand to SEQ ID NO: 617810
augcuaccgcagaacuaac

SEQ ID NO: 617812 - RNA, 19 nt, Artificial Sequence
  Description of Artificial Sequence: Synthetic oligonucleotide
  Sense strand starting at position 3460 of SEQ ID NO: 585159
gagaaagucuaguucuauu

SEQ ID NO: 617813 - RNA, 19 nt, Artificial Sequence
  Description of Artificial Sequence: Synthetic oligonucleotide
  Antisense strand to SEQ ID NO: 617812
aauagaacuagacuuucuc

SEQ ID NO: 617814 - RNA, 19 nt, Artificial Sequence
  Description of Artificial Sequence: Synthetic oligonucleotide
  Sense strand starting at position 3641 of SEQ ID NO: 585159
ccaauuacccagcauggua

SEQ ID NO: 617815 - RNA, 19 nt, Artificial Sequence
  Description of Artificial Sequence: Synthetic oligonucleotide
  Antisense strand to SEQ ID NO: 617814
uaccaugcuggguaauugg

SEQ ID NO: 617816 - RNA, 19 nt, Artificial Sequence
  Description of Artificial Sequence: Synthetic oligonucleotide
  Sense strand starting at position 3928 of SEQ ID NO: 585159
uugugagaucccuagguag

SEQ ID NO: 617817 - RNA, 19 nt, Artificial Sequence
  Description of Artificial Sequence: Synthetic oligonucleotide
  Antisense strand to SEQ ID NO: 617816
cuaccuagggaucucacaa

SEQ ID NO: 617818 - RNA, 19 nt, Artificial Sequence
  Description of Artificial Sequence: Synthetic oligonucleotide
  Sense strand starting at position 18 of SEQ ID NO: 585160
aaggcugggcucuaggaaa

SEQ ID NO: 617819 - RNA, 19 nt, Artificial Sequence
  Description of Artificial Sequence: Synthetic oligonucleotide
  Antisense strand to SEQ ID NO: 617818
uuuccuagagcccagccuu

SEQ ID NO: 617820 - RNA, 19 nt, Artificial Sequence
  Description of Artificial Sequence: Synthetic oligonucleotide
  Sense strand starting at position 63 of SEQ ID NO: 585160
ugcccaauuucgucuuaca

SEQ ID NO: 617821 - RNA, 19 nt, Artificial Sequence
  Description of Artificial Sequence: Synthetic oligonucleotide
  Antisense strand to SEQ ID NO: 617820
uguaagacgaaauugggca

SEQ ID NO: 617822 - RNA, 19 nt, Artificial Sequence
  Description of Artificial Sequence: Synthetic oligonucleotide
  Sense strand starting at position 237 of SEQ ID NO: 585160
gugaauuacuagucaucau

SEQ ID NO: 617823 - RNA, 19 nt, Artificial Sequence
  Description of Artificial Sequence: Synthetic oligonucleotide
  Antisense strand to SEQ ID NO: 617822
augaugacuaguaauucac

SEQ ID NO: 617824 - RNA, 19 nt, Artificial Sequence
  Description of Artificial Sequence: Synthetic oligonucleotide
  Sense strand starting at position 345 of SEQ ID NO: 585160
ggagauauucugcacuggu

SEQ ID NO: 617825 - RNA, 19 nt, Artificial Sequence
  Description of Artificial Sequence: Synthetic oligonucleotide
  Antisense strand to SEQ ID NO: 617824
accagugcagaauaucucc

SEQ ID NO: 617826 - RNA, 19 nt, Artificial Sequence
  Description of Artificial Sequence: Synthetic oligonucleotide
  Sense strand starting at position 590 of SEQ ID NO: 585160
ugcugcauuccagaucauu

SEQ ID NO: 617827 - RNA, 19 nt, Artificial Sequence
  Description of Artificial Sequence: Synthetic oligonucleotide
  Antisense strand to SEQ ID NO: 617826
aaugaucuggaaugcagca

SEQ ID NO: 617828 - RNA, 19 nt, Artificial Sequence
  Description of Artificial Sequence: Synthetic oligonucleotide
  Sense strand starting at position 661 of SEQ ID NO: 585160
gcagaacacugguuuguaa

SEQ ID NO: 617829 - RNA, 19 nt, Artificial Sequence
  Description of Artificial Sequence: Synthetic oligonucleotide
  Antisense strand to SEQ ID NO: 617828
uuacaaaccaguguucugc

SEQ ID NO: 617830 - RNA, 19 nt, Artificial Sequence
  Description of Artificial Sequence: Synthetic oligonucleotide
  Sense strand starting at position 663 of SEQ ID NO: 585160
agaacacugguuuguaaag

SEQ ID NO: 617831 - RNA, 19 nt, Artificial Sequence
  Description of Artificial Sequence: Synthetic oligonucleotide
  Antisense strand to SEQ ID NO: 617830
cuuuacaaaccaguguucu

SEQ ID NO: 617832 - RNA, 19 nt, Artificial Sequence
  Description of Artificial Sequence: Synthetic oligonucleotide
  Sense strand starting at position 664 of SEQ ID NO: 585160
gaacacugguuuguaaagu

SEQ ID NO: 617833 - RNA, 19 nt, Artificial Sequence
  Description of Artificial Sequence: Synthetic oligonucleotide
  Antisense strand to SEQ ID NO: 617832
acuuuacaaaccaguguuc

SEQ ID NO: 617834 - RNA, 19 nt, Artificial Sequence
  Description of Artificial Sequence: Synthetic oligonucleotide
  Sense strand starting at position 793 of SEQ ID NO: 585160
aggaaacugagccguaauu

SEQ ID NO: 617835 - RNA, 19 nt, Artificial Sequence
  Description of Artificial Sequence: Synthetic oligonucleotide
  Antisense strand to SEQ ID NO: 617834
aauuacggcucaguuuccu

SEQ ID NO: 617836 - RNA, 19 nt, Artificial Sequence
  Description of Artificial Sequence: Synthetic oligonucleotide
  Sense strand starting at position 865 of SEQ ID NO: 585160
augagaaguuggagagguu

SEQ ID NO: 617837 - RNA, 19 nt, Artificial Sequence
  Description of Artificial Sequence: Synthetic oligonucleotide
  Antisense strand to SEQ ID NO: 617836
aaccucuccaacuucucau

SEQ ID NO: 617838 - RNA, 19 nt, Artificial Sequence
  Description of Artificial Sequence: Synthetic oligonucleotide
  Sense strand starting at position 868 of SEQ ID NO: 585160
agaaguuggagagguuuaa

SEQ ID NO: 617839 - RNA, 19 nt, Artificial Sequence
  Description of Artificial Sequence: Synthetic oligonucleotide
  Antisense strand to SEQ ID NO: 617838
uuaaaccucuccaacuucu

SEQ ID NO: 617840 - RNA, 19 nt, Artificial Sequence
  Description of Artificial Sequence: Synthetic oligonucleotide
  Sense strand starting at position 1042 of SEQ ID NO: 585160
gcagauacacuagguugaa

SEQ ID NO: 617841 - RNA, 19 nt, Artificial Sequence
  Description of Artificial Sequence: Synthetic oligonucleotide
  Antisense strand to SEQ ID NO: 617840
uucaaccuaguguaucugc

SEQ ID NO: 617842 - RNA, 19 nt, Artificial Sequence
  Description of Artificial Sequence: Synthetic oligonucleotide
  Sense strand starting at position 1107 of SEQ ID NO: 585160
cgcccaauccguguuuaug

SEQ ID NO: 617843 - RNA, 19 nt, Artificial Sequence
  Description of Artificial Sequence: Synthetic oligonucleotide
  Antisense strand to SEQ ID NO: 617842
cauaaacacggauugggcg

SEQ ID NO: 617844 - RNA, 19 nt, Artificial Sequence
  Description of Artificial Sequence: Synthetic oligonucleotide
  Sense strand starting at position 1110 of SEQ ID NO: 585160
ccaauccguguuuauggaa

SEQ ID NO: 617845 - RNA, 19 nt, Artificial Sequence
  Description of Artificial Sequence: Synthetic oligonucleotide
  Antisense strand to SEQ ID NO: 617844
uuccauaaacacggauugg

SEQ ID NO: 617846 - RNA, 19 nt, Artificial Sequence
  Description of Artificial Sequence: Synthetic oligonucleotide
  Sense strand starting at position 1941 of SEQ ID NO: 585160
ccagucuuugcguccgcua

SEQ ID NO: 617847 - RNA, 19 nt, Artificial Sequence
  Description of Artificial Sequence: Synthetic oligonucleotide
  Antisense strand to SEQ ID NO: 617846
uagcggacgcaaagacugg

SEQ ID NO: 617848 - RNA, 19 nt, Artificial Sequence
  Description of Artificial Sequence: Synthetic oligonucleotide
  Sense strand starting at position 2224 of SEQ ID NO: 585160
cgggaagaaaguugauuau

SEQ ID NO: 617849 - RNA, 19 nt, Artificial Sequence
  Description of Artificial Sequence: Synthetic oligonucleotide
  Antisense strand to SEQ ID NO: 617848
auaaucaacuuucuucccg

SEQ ID NO: 617850 - RNA, 19 nt, Artificial Sequence
  Description of Artificial Sequence: Synthetic oligonucleotide
  Sense strand starting at position 2338 of SEQ ID NO: 585160
augguagugaagugaaaca

SEQ ID NO: 617851 - RNA, 19 nt, Artificial Sequence
  Description of Artificial Sequence: Synthetic oligonucleotide
  Antisense strand to SEQ ID NO: 617850
uguuucacuucacuaccau

SEQ ID NO: 617852 - RNA, 19 nt, Artificial Sequence
  Description of Artificial Sequence: Synthetic oligonucleotide
  Sense strand starting at position 2375 of SEQ ID NO: 585160
ucacuuacugacugugaga

SEQ ID NO: 617853 - RNA, 19 nt, Artificial Sequence
  Description of Artificial Sequence: Synthetic oligonucleotide
  Antisense strand to SEQ ID NO: 617852
ucucacagucaguaaguga

SEQ ID NO: 617854 - RNA, 19 nt, Artificial Sequence
  Description of Artificial Sequence: Synthetic oligonucleotide
  Sense strand starting at position 2377 of SEQ ID NO: 585160
acuuacugacugugagacu

SEQ ID NO: 617855 - RNA, 19 nt, Artificial Sequence
  Description of Artificial Sequence: Synthetic oligonucleotide
  Antisense strand to SEQ ID NO: 617854
agucucacagucaguaagu

SEQ ID NO: 617856 - RNA, 19 nt, Artificial Sequence
  Description of Artificial Sequence: Synthetic oligonucleotide
  Sense strand starting at position 2559 of SEQ ID NO: 585160
ugucuugauuaacugguga

SEQ ID NO: 617857 - RNA, 19 nt, Artificial Sequence
  Description of Artificial Sequence: Synthetic oligonucleotide
  Antisense strand to SEQ ID NO: 617856
ucaccaguuaaucaagaca

SEQ ID NO: 617858 - RNA, 19 nt, Artificial Sequence
  Description of Artificial Sequence: Synthetic oligonucleotide
  Sense strand starting at position 2575 of SEQ ID NO: 585160
ugaccuauguucucuggau

SEQ ID NO: 617859 - RNA, 19 nt, Artificial Sequence
  Description of Artificial Sequence: Synthetic oligonucleotide
  Antisense strand to SEQ ID NO: 617858
auccagagaacauagguca

SEQ ID NO: 617860 - RNA, 19 nt, Artificial Sequence
  Description of Artificial Sequence: Synthetic oligonucleotide
  Sense strand starting at position 2576 of SEQ ID NO: 585160
gaccuauguucucuggaug

SEQ ID NO: 617861 - RNA, 19 nt, Artificial Sequence
  Description of Artificial Sequence: Synthetic oligonucleotide
  Antisense strand to SEQ ID NO: 617860
cauccagagaacauagguc

SEQ ID NO: 617862 - RNA, 19 nt, Artificial Sequence
  Description of Artificial Sequence: Synthetic oligonucleotide
  Sense strand starting at position 2579 of SEQ ID NO: 585160
cuauguucucuggauggca

SEQ ID NO: 617863 - RNA, 19 nt, Artificial Sequence
  Description of Artificial Sequence: Synthetic oligonucleotide
  Antisense strand to SEQ ID NO: 617862
ugccauccagagaacauag

SEQ ID NO: 617864 - RNA, 19 nt, Artificial Sequence
  Description of Artificial Sequence: Synthetic oligonucleotide
  Sense strand starting at position 2762 of SEQ ID NO: 585160
uggccuuaucucggaggga

SEQ ID NO: 617865 - RNA, 19 nt, Artificial Sequence
  Description of Artificial Sequence: Synthetic oligonucleotide
  Antisense strand to SEQ ID NO: 617864
ucccuccgagauaaggcca

SEQ ID NO: 617866 - RNA, 19 nt, Artificial Sequence
  Description of Artificial Sequence: Synthetic oligonucleotide
  Sense strand starting at position 2765 of SEQ ID NO: 585160
ccuuaucucggagggaaag

SEQ ID NO: 617867 - RNA, 19 nt, Artificial Sequence
  Description of Artificial Sequence: Synthetic oligonucleotide
  Antisense strand to SEQ ID NO: 617866
cuuucccuccgagauaagg

SEQ ID NO: 617868 - RNA, 19 nt, Artificial Sequence
  Description of Artificial Sequence: Synthetic oligonucleotide
  Sense strand starting at position 2807 of SEQ ID NO: 585160
ccaagugauuguuuaauaa

SEQ ID NO: 617869 - RNA, 19 nt, Artificial Sequence
  Description of Artificial Sequence: Synthetic oligonucleotide
  Antisense strand to SEQ ID NO: 617868
uuauuaaacaaucacuugg

SEQ ID NO: 617870 - RNA, 19 nt, Artificial Sequence
  Description of Artificial Sequence: Synthetic oligonucleotide
  Sense strand starting at position 2964 of SEQ ID NO: 585160
auugcuaaaugagugagua

SEQ ID NO: 617871 - RNA, 19 nt, Artificial Sequence
  Description of Artificial Sequence: Synthetic oligonucleotide
  Antisense strand to SEQ ID NO: 617870
uacucacucauuuagcaau

SEQ ID NO: 617872 - RNA, 19 nt, Artificial Sequence
  Description of Artificial Sequence: Synthetic oligonucleotide
  Sense strand starting at position 2966 of SEQ ID NO: 585160
ugcuaaaugagugaguaca

SEQ ID NO: 617873 - RNA, 19 nt, Artificial Sequence
  Description of Artificial Sequence: Synthetic oligonucleotide
  Antisense strand to SEQ ID NO: 617872
uguacucacucauuuagca

SEQ ID NO: 617874 - RNA, 19 nt, Artificial Sequence
  Description of Artificial Sequence: Synthetic oligonucleotide
  Sense strand starting at position 2974 of SEQ ID NO: 585160
gagugaguacaugauagca

SEQ ID NO: 617875 - RNA, 19 nt, Artificial Sequence
  Description of Artificial Sequence: Synthetic oligonucleotide
  Antisense strand to SEQ ID NO: 617874
ugcuaucauguacucacuc

SEQ ID NO: 617876 - RNA, 19 nt, Artificial Sequence
  Description of Artificial Sequence: Synthetic oligonucleotide
  Sense strand starting at position 3170 of SEQ ID NO: 585160
ucaucacacaggugggaua

SEQ ID NO: 617877 - RNA, 19 nt, Artificial Sequence
  Description of Artificial Sequence: Synthetic oligonucleotide
  Antisense strand to SEQ ID NO: 617876
uaucccaccugugugauga

SEQ ID NO: 617878 - RNA, 19 nt, Artificial Sequence
  Description of Artificial Sequence: Synthetic oligonucleotide
  Sense strand starting at position 3257 of SEQ ID NO: 585160
accagaucuguauaugguu

SEQ ID NO: 617879 - RNA, 19 nt, Artificial Sequence
  Description of Artificial Sequence: Synthetic oligonucleotide
  Antisense strand to SEQ ID NO: 617878
aaccauauacagaucuggu

SEQ ID NO: 617880 - RNA, 19 nt, Artificial Sequence
  Description of Artificial Sequence: Synthetic oligonucleotide
  Sense strand starting at position 3298 of SEQ ID NO: 585160
gcuugaaauucuccaucug

SEQ ID NO: 617881 - RNA, 19 nt, Artificial Sequence
  Description of Artificial Sequence: Synthetic oligonucleotide
  Antisense strand to SEQ ID NO: 617880
cagauggagaauuucaagc

SEQ ID NO: 617882 - RNA, 19 nt, Artificial Sequence
  Description of Artificial Sequence: Synthetic oligonucleotide
  Sense strand starting at position 3370 of SEQ ID NO: 585160
gcauucguacauuaaugau

SEQ ID NO: 617883 - RNA, 19 nt, Artificial Sequence
  Description of Artificial Sequence: Synthetic oligonucleotide
  Antisense strand to SEQ ID NO: 617882
aucauuaauguacgaaugc

SEQ ID NO: 617884 - RNA, 19 nt, Artificial Sequence
  Description of Artificial Sequence: Synthetic oligonucleotide
  Sense strand starting at position 3584 of SEQ ID NO: 585160
ggaucauuggguuauucuc

SEQ ID NO: 617885 - RNA, 19 nt, Artificial Sequence
  Description of Artificial Sequence: Synthetic oligonucleotide
  Antisense strand to SEQ ID NO: 617884
gagaauaacccaaugaucc

SEQ ID NO: 617886 - RNA, 19 nt, Artificial Sequence
  Description of Artificial Sequence: Synthetic oligonucleotide
  Sense strand starting at position 3621 of SEQ ID NO: 585160
cucauagaccugcauuguu

SEQ ID NO: 617887 - RNA, 19 nt, Artificial Sequence
  Description of Artificial Sequence: Synthetic oligonucleotide
  Antisense strand to SEQ ID NO: 617886
aacaaugcaggucuaugag

SEQ ID NO: 617888 - RNA, 19 nt, Artificial Sequence
  Description of Artificial Sequence: Synthetic oligonucleotide
  Sense strand starting at position 3677 of SEQ ID NO: 585160
uuugaaauguggcuaacau

SEQ ID NO: 617889 - RNA, 19 nt, Artificial Sequence
  Description of Artificial Sequence: Synthetic oligonucleotide
  Antisense strand to SEQ ID NO: 617888
auguuagccacauuucaaa

SEQ ID NO: 617890 - RNA, 19 nt, Artificial Sequence
  Description of Artificial Sequence: Synthetic oligonucleotide
  Sense strand starting at position 3687 of SEQ ID NO: 585160
ggcuaacaugaccgagaaa

SEQ ID NO: 617891 - RNA, 19 nt, Artificial Sequence
  Description of Artificial Sequence: Synthetic oligonucleotide
  Antisense strand to SEQ ID NO: 617890
uuucucggucauguuagcc

SEQ ID NO: 617892 - RNA, 19 nt, Artificial Sequence
  Description of Artificial Sequence: Synthetic oligonucleotide
  Sense strand starting at position 3797 of SEQ ID NO: 585160
acaaguuggaaaugugaau

SEQ ID NO: 617893 - RNA, 19 nt, Artificial Sequence
  Description of Artificial Sequence: Synthetic oligonucleotide
  Antisense strand to SEQ ID NO: 617892
auucacauuuccaacuugu

SEQ ID NO: 617894 - RNA, 19 nt, Artificial Sequence
  Description of Artificial Sequence: Synthetic oligonucleotide
  Sense strand starting at position 3970 of SEQ ID NO: 585160
ugauuacauagcgauauag

SEQ ID NO: 617895 - RNA, 19 nt, Artificial Sequence
  Description of Artificial Sequence: Synthetic oligonucleotide
  Antisense strand to SEQ ID NO: 617894
cuauaucgcuauguaauca

SEQ ID NO: 617896 - RNA, 19 nt, Artificial Sequence
  Description of Artificial Sequence: Synthetic oligonucleotide
  Sense strand starting at position 3972 of SEQ ID NO: 585160
auuacauagcgauauagca

SEQ ID NO: 617897 - RNA, 19 nt, Artificial Sequence
  Description of Artificial Sequence: Synthetic oligonucleotide
  Antisense strand to SEQ ID NO: 617896
ugcuauaucgcuauguaau

SEQ ID NO: 617898 - RNA, 19 nt, Artificial Sequence
  Description of Artificial Sequence: Synthetic oligonucleotide
  Sense strand starting at position 27 of SEQ ID NO: 585161
agaaaccguguuuauacaa

SEQ ID NO: 617899 - RNA, 19 nt, Artificial Sequence
  Description of Artificial Sequence: Synthetic oligonucleotide
  Antisense strand to SEQ ID NO: 617898
uuguauaaacacgguuucu

SEQ ID NO: 617900 - RNA, 19 nt, Artificial Sequence
  Description of Artificial Sequence: Synthetic oligonucleotide
  Sense strand starting at position 34 of SEQ ID NO: 585161
guguuuauacaagaaguac

SEQ ID NO: 617901 - RNA, 19 nt, Artificial Sequence
  Description of Artificial Sequence: Synthetic oligonucleotide
  Antisense strand to SEQ ID NO: 617900
guacuucuuguauaaacac

SEQ ID NO: 617902 - RNA, 19 nt, Artificial Sequence
  Description of Artificial Sequence: Synthetic oligonucleotide
  Sense strand starting at position 275 of SEQ ID NO: 585161
ggcauuucuucccucacga

SEQ ID NO: 617903 - RNA, 19 nt, Artificial Sequence
  Description of Artificial Sequence: Synthetic oligonucleotide
  Antisense strand to SEQ ID NO: 617902
ucgugagggaagaaaugcc

SEQ ID NO: 617904 - RNA, 19 nt, Artificial Sequence
  Description of Artificial Sequence: Synthetic oligonucleotide
  Sense strand starting at position 280 of SEQ ID NO: 585161
uucuucccucacgagaaau

SEQ ID NO: 617905 - RNA, 19 nt, Artificial Sequence
  Description of Artificial Sequence: Synthetic oligonucleotide
  Antisense strand to SEQ ID NO: 617904
auuucucgugagggaagaa

SEQ ID NO: 617906 - RNA, 19 nt, Artificial Sequence
  Description of Artificial Sequence: Synthetic oligonucleotide
  Sense strand starting at position 292 of SEQ ID NO: 585161
gagaaauagugcucuaauu

SEQ ID NO: 617907 - RNA, 19 nt, Artificial Sequence
  Description of Artificial Sequence: Synthetic oligonucleotide
  Antisense strand to SEQ ID NO: 617906
aauuagagcacuauuucuc

SEQ ID NO: 617908 - RNA, 19 nt, Artificial Sequence
  Description of Artificial Sequence: Synthetic oligonucleotide
  Sense strand starting at position 366 of SEQ ID NO: 585161
aguguucuacccugaggaa

SEQ ID NO: 617909 - RNA, 19 nt, Artificial Sequence
  Description of Artificial Sequence: Synthetic oligonucleotide
  Antisense strand to SEQ ID NO: 617908
uuccucaggguagaacacu

SEQ ID NO: 617910 - RNA, 19 nt, Artificial Sequence
  Description of Artificial Sequence: Synthetic oligonucleotide
  Sense strand starting at position 367 of SEQ ID NO: 585161
guguucuacccugaggaaa

SEQ ID NO: 617911 - RNA, 19 nt, Artificial Sequence
  Description of Artificial Sequence: Synthetic oligonucleotide
  Antisense strand to SEQ ID NO: 617910
uuuccucaggguagaacac

SEQ ID NO: 617912 - RNA, 19 nt, Artificial Sequence
  Description of Artificial Sequence: Synthetic oligonucleotide
  Sense strand starting at position 404 of SEQ ID NO: 585161
gaugaaagcuacuuguuag

SEQ ID NO: 617913 - RNA, 19 nt, Artificial Sequence
  Description of Artificial Sequence: Synthetic oligonucleotide
  Antisense strand to SEQ ID NO: 617912
cuaacaaguagcuuucauc

SEQ ID NO: 617914 - RNA, 19 nt, Artificial Sequence
  Description of Artificial Sequence: Synthetic oligonucleotide
  Sense strand starting at position 416 of SEQ ID NO: 585161
uuguuaguacgauaugaag

SEQ ID NO: 617915 - RNA, 19 nt, Artificial Sequence
  Description of Artificial Sequence: Synthetic oligonucleotide
  Antisense strand to SEQ ID NO: 617914
cuucauaucguacuaacaa

SEQ ID NO: 617916 - RNA, 19 nt, Artificial Sequence
  Description of Artificial Sequence: Synthetic oligonucleotide
  Sense strand starting at position 543 of SEQ ID NO: 585161
agauuaauagucuaagcuu

SEQ ID NO: 617917 - RNA, 19 nt, Artificial Sequence
  Description of Artificial Sequence: Synthetic oligonucleotide
  Antisense strand to SEQ ID NO: 617916
aagcuuagacuauuaaucu

SEQ ID NO: 617918 - RNA, 19 nt, Artificial Sequence
  Description of Artificial Sequence: Synthetic oligonucleotide
  Sense strand starting at position 900 of SEQ ID NO: 585161
gccuguucuuuaguuauuu

SEQ ID NO: 617919 - RNA, 19 nt, Artificial Sequence
  Description of Artificial Sequence: Synthetic oligonucleotide
  Antisense strand to SEQ ID NO: 617918
aaauaacuaaagaacaggc

SEQ ID NO: 617920 - RNA, 19 nt, Artificial Sequence
  Description of Artificial Sequence: Synthetic oligonucleotide
  Sense strand starting at position 901 of SEQ ID NO: 585161
ccuguucuuuaguuauuua

SEQ ID NO: 617921 - RNA, 19 nt, Artificial Sequence
  Description of Artificial Sequence: Synthetic oligonucleotide
  Antisense strand to SEQ ID NO: 617920
uaaauaacuaaagaacagg

SEQ ID NO: 617922 - RNA, 19 nt, Artificial Sequence
  Description of Artificial Sequence: Synthetic oligonucleotide
  Sense strand starting at position 904 of SEQ ID NO: 585161
guucuuuaguuauuuagug

SEQ ID NO: 617923 - RNA, 19 nt, Artificial Sequence
  Description of Artificial Sequence: Synthetic oligonucleotide
  Antisense strand to SEQ ID NO: 617922
cacuaaauaacuaaagaac

SEQ ID NO: 617924 - RNA, 19 nt, Artificial Sequence
  Description of Artificial Sequence: Synthetic oligonucleotide
  Sense strand starting at position 963 of SEQ ID NO: 585161
agggaaaguguauguauau

SEQ ID NO: 617925 - RNA, 19 nt, Artificial Sequence
  Description of Artificial Sequence: Synthetic oligonucleotide
  Antisense strand to SEQ ID NO: 617924
auauacauacacuuucccu

SEQ ID NO: 617926 - RNA, 19 nt, Artificial Sequence
  Description of Artificial Sequence: Synthetic oligonucleotide
  Sense strand starting at position 964 of SEQ ID NO: 585161
gggaaaguguauguauaua

SEQ ID NO: 617927 - RNA, 19 nt, Artificial Sequence
  Description of Artificial Sequence: Synthetic oligonucleotide
  Antisense strand to SEQ ID NO: 617926
uauauacauacacuuuccc

SEQ ID NO: 617928 - RNA, 19 nt, Artificial Sequence
  Description of Artificial Sequence: Synthetic oligonucleotide
  Sense strand starting at position 986 of SEQ ID NO: 585161
gaccguugaccugaacaua

SEQ ID NO: 617929 - RNA, 19 nt, Artificial Sequence
  Description of Artificial Sequence: Synthetic oligonucleotide
  Antisense strand to SEQ ID NO: 617928
uauguucaggucaacgguc

SEQ ID NO: 617930 - RNA, 19 nt, Artificial Sequence
  Description of Artificial Sequence: Synthetic oligonucleotide
  Sense strand starting at position 1036 of SEQ ID NO: 585161
ugcucuagauguccagaga

SEQ ID NO: 617931 - RNA, 19 nt, Artificial Sequence
  Description of Artificial Sequence: Synthetic oligonucleotide
  Antisense strand to SEQ ID NO: 617930
ucucuggacaucuagagca

SEQ ID NO: 617932 - RNA, 19 nt, Artificial Sequence
  Description of Artificial Sequence: Synthetic oligonucleotide
  Sense strand starting at position 1037 of SEQ ID NO: 585161
gcucuagauguccagagaa

SEQ ID NO: 617933 - RNA, 19 nt, Artificial Sequence
  Description of Artificial Sequence: Synthetic oligonucleotide
  Antisense strand to SEQ ID NO: 617932
uucucuggacaucuagagc

SEQ ID NO: 617934 - RNA, 19 nt, Artificial Sequence
  Description of Artificial Sequence: Synthetic oligonucleotide
  Sense strand starting at position 1129 of SEQ ID NO: 585161
augacaagcuaaucagagu

SEQ ID NO: 617935 - RNA, 19 nt, Artificial Sequence
  Description of Artificial Sequence: Synthetic oligonucleotide
  Antisense strand to SEQ ID NO: 617934
acucugauuagcuugucau

SEQ ID NO: 617936 - RNA, 19 nt, Artificial Sequence
  Description of Artificial Sequence: Synthetic oligonucleotide
  Sense strand starting at position 1289 of SEQ ID NO: 585161
aacauuguguuacugaaga

SEQ ID NO: 617937 - RNA, 19 nt, Artificial Sequence
  Description of Artificial Sequence: Synthetic oligonucleotide
  Antisense strand to SEQ ID NO: 617936
ucuucaguaacacaauguu

SEQ ID NO: 617938 - RNA, 19 nt, Artificial Sequence
  Description of Artificial Sequence: Synthetic oligonucleotide
  Sense strand starting at position 1386 of SEQ ID NO: 585161
guguacuuacccugaacag

SEQ ID NO: 617939 - RNA, 19 nt, Artificial Sequence
  Description of Artificial Sequence: Synthetic oligonucleotide
  Antisense strand to SEQ ID NO: 617938
cuguucaggguaaguacac

SEQ ID NO: 617940 - RNA, 19 nt, Artificial Sequence
  Description of Artificial Sequence: Synthetic oligonucleotide
  Sense strand starting at position 1387 of SEQ ID NO: 585161
uguacuuacccugaacagu

SEQ ID NO: 617941 - RNA, 19 nt, Artificial Sequence
  Description of Artificial Sequence: Synthetic oligonucleotide
  Antisense strand to SEQ ID NO: 617940
acuguucaggguaaguaca

SEQ ID NO: 617942 - RNA, 19 nt, Artificial Sequence
  Description of Artificial Sequence: Synthetic oligonucleotide
  Sense strand starting at position 1513 of SEQ ID NO: 585161
uguuauaaagccuaggcaa

SEQ ID NO: 617943 - RNA, 19 nt, Artificial Sequence
  Description of Artificial Sequence: Synthetic oligonucleotide
  Antisense strand to SEQ ID NO: 617942
uugccuaggcuuuauaaca

SEQ ID NO: 617944 - RNA, 19 nt, Artificial Sequence
  Description of Artificial Sequence: Synthetic oligonucleotide
  Sense strand starting at position 1515 of SEQ ID NO: 585161
uuauaaagccuaggcaaua

SEQ ID NO: 617945 - RNA, 19 nt, Artificial Sequence
  Description of Artificial Sequence: Synthetic oligonucleotide
  Antisense strand to SEQ ID NO: 617944
uauugccuaggcuuuauaa

SEQ ID NO: 617946 - RNA, 19 nt, Artificial Sequence
  Description of Artificial Sequence: Synthetic oligonucleotide
  Sense strand starting at position 1907 of SEQ ID NO: 585161
cgggauuucuggcuuucuu

SEQ ID NO: 617947 - RNA, 19 nt, Artificial Sequence
  Description of Artificial Sequence: Synthetic oligonucleotide
  Antisense strand to SEQ ID NO: 617946
aagaaagccagaaaucccg

SEQ ID NO: 617948 - RNA, 19 nt, Artificial Sequence
  Description of Artificial Sequence: Synthetic oligonucleotide
  Sense strand starting at position 1927 of SEQ ID NO: 585161
ccuucuaacuucuuacgga

SEQ ID NO: 617949 - RNA, 19 nt, Artificial Sequence
  Description of Artificial Sequence: Synthetic oligonucleotide
  Antisense strand to SEQ ID NO: 617948
uccguaagaaguuagaagg

SEQ ID NO: 617950 - RNA, 19 nt, Artificial Sequence
  Description of Artificial Sequence: Synthetic oligonucleotide
  Sense strand starting at position 2043 of SEQ ID NO: 585161
caggguacacuaugcuaau

SEQ ID NO: 617951 - RNA, 19 nt, Artificial Sequence
  Description of Artificial Sequence: Synthetic oligonucleotide
  Antisense strand to SEQ ID NO: 617950
auuagcauaguguacccug

SEQ ID NO: 617952 - RNA, 19 nt, Artificial Sequence
  Description of Artificial Sequence: Synthetic oligonucleotide
  Sense strand starting at position 2067 of SEQ ID NO: 585161
cuggcaaugguccaaucaa

SEQ ID NO: 617953 - RNA, 19 nt, Artificial Sequence
  Description of Artificial Sequence: Synthetic oligonucleotide
  Antisense strand to SEQ ID NO: 617952
uugauuggaccauugccag

SEQ ID NO: 617954 - RNA, 19 nt, Artificial Sequence
  Description of Artificial Sequence: Synthetic oligonucleotide
  Sense strand starting at position 2098 of SEQ ID NO: 585161
cuaggcucuggauagguaa

SEQ ID NO: 617955 - RNA, 19 nt, Artificial Sequence
  Description of Artificial Sequence: Synthetic oligonucleotide
  Antisense strand to SEQ ID NO: 617954
uuaccuauccagagccuag

SEQ ID NO: 617956 - RNA, 19 nt, Artificial Sequence
  Description of Artificial Sequence: Synthetic oligonucleotide
  Sense strand starting at position 2142 of SEQ ID NO: 585161
gccugauucuucccagaau

SEQ ID NO: 617957 - RNA, 19 nt, Artificial Sequence
  Description of Artificial Sequence: Synthetic oligonucleotide
  Antisense strand to SEQ ID NO: 617956
auucugggaagaaucaggc

SEQ ID NO: 617958 - RNA, 19 nt, Artificial Sequence
  Description of Artificial Sequence: Synthetic oligonucleotide
  Sense strand starting at position 2163 of SEQ ID NO: 585161
cagcaaugugaugaauauu

SEQ ID NO: 617959 - RNA, 19 nt, Artificial Sequence
  Description of Artificial Sequence: Synthetic oligonucleotide
  Antisense strand to SEQ ID NO: 617958
aauauucaucacauugcug

SEQ ID NO: 617960 - RNA, 19 nt, Artificial Sequence
  Description of Artificial Sequence: Synthetic oligonucleotide
  Sense strand starting at position 2169 of SEQ ID NO: 585161
ugugaugaauauucuauga

SEQ ID NO: 617961 - RNA, 19 nt, Artificial Sequence
  Description of Artificial Sequence: Synthetic oligonucleotide
  Antisense strand to SEQ ID NO: 617960
ucauagaauauucaucaca

SEQ ID NO: 617962 - RNA, 19 nt, Artificial Sequence
  Description of Artificial Sequence: Synthetic oligonucleotide
  Sense strand starting at position 2173 of SEQ ID NO: 585161
augaauauucuaugaugug

SEQ ID NO: 617963 - RNA, 19 nt, Artificial Sequence
  Description of Artificial Sequence: Synthetic oligonucleotide
  Antisense strand to SEQ ID NO: 617962
cacaucauagaauauucau

SEQ ID NO: 617964 - RNA, 19 nt, Artificial Sequence
  Description of Artificial Sequence: Synthetic oligonucleotide
  Sense strand starting at position 2372 of SEQ ID NO: 585161
cucucaugugugcaagaga

SEQ ID NO: 617965 - RNA, 19 nt, Artificial Sequence
  Description of Artificial Sequence: Synthetic oligonucleotide
  Antisense strand to SEQ ID NO: 617964
ucucuugcacacaugagag

SEQ ID NO: 617966 - RNA, 19 nt, Artificial Sequence
  Description of Artificial Sequence: Synthetic oligonucleotide
  Sense strand starting at position 2429 of SEQ ID NO: 585161
gaggaaauuuacuggaaua

SEQ ID NO: 617967 - RNA, 19 nt, Artificial Sequence
  Description of Artificial Sequence: Synthetic oligonucleotide
  Antisense strand to SEQ ID NO: 617966
uauuccaguaaauuuccuc

SEQ ID NO: 617968 - RNA, 19 nt, Artificial Sequence
  Description of Artificial Sequence: Synthetic oligonucleotide
  Sense strand starting at position 2909 of SEQ ID NO: 585161
uagagauacccucagugcu

SEQ ID NO: 617969 - RNA, 19 nt, Artificial Sequence
  Description of Artificial Sequence: Synthetic oligonucleotide
  Antisense strand to SEQ ID NO: 617968
agcacugaggguaucucua

SEQ ID NO: 617970 - RNA, 19 nt, Artificial Sequence
  Description of Artificial Sequence: Synthetic oligonucleotide
  Sense strand starting at position 2939 of SEQ ID NO: 585161
uagagacauccgcaguaca

SEQ ID NO: 617971 - RNA, 19 nt, Artificial Sequence
  Description of Artificial Sequence: Synthetic oligonucleotide
  Antisense strand to SEQ ID NO: 617970
uguacugcggaugucucua

SEQ ID NO: 617972 - RNA, 19 nt, Artificial Sequence
  Description of Artificial Sequence: Synthetic oligonucleotide
  Sense strand starting at position 3085 of SEQ ID NO: 585161
ccgauuuaauuugauguau

SEQ ID NO: 617973 - RNA, 19 nt, Artificial Sequence
  Description of Artificial Sequence: Synthetic oligonucleotide
  Antisense strand to SEQ ID NO: 617972
auacaucaaauuaaaucgg

SEQ ID NO: 617974 - RNA, 19 nt, Artificial Sequence
  Description of Artificial Sequence: Synthetic oligonucleotide
  Sense strand starting at position 3129 of SEQ ID NO: 585161
ggcuauuaagcuggaggga

SEQ ID NO: 617975 - RNA, 19 nt, Artificial Sequence
  Description of Artificial Sequence: Synthetic oligonucleotide
  Antisense strand to SEQ ID NO: 617974
ucccuccagcuuaauagcc

SEQ ID NO: 617976 - RNA, 19 nt, Artificial Sequence
  Description of Artificial Sequence: Synthetic oligonucleotide
  Sense strand starting at position 3360 of SEQ ID NO: 585161
cuuggaaagccucauaguu

SEQ ID NO: 617977 - RNA, 19 nt, Artificial Sequence
  Description of Artificial Sequence: Synthetic oligonucleotide
  Antisense strand to SEQ ID NO: 617976
aacuaugaggcuuuccaag

SEQ ID NO: 617978 - RNA, 19 nt, Artificial Sequence
  Description of Artificial Sequence: Synthetic oligonucleotide
  Sense strand starting at position 21 of SEQ ID NO: 585162
augagaugcacuugcugua

SEQ ID NO: 617979 - RNA, 19 nt, Artificial Sequence
  Description of Artificial Sequence: Synthetic oligonucleotide
  Antisense strand to SEQ ID NO: 617978
uacagcaagugcaucucau

SEQ ID NO: 617980 - RNA, 19 nt, Artificial Sequence
  Description of Artificial Sequence: Synthetic oligonucleotide
  Sense strand starting at position 63 of SEQ ID NO: 585162
gguaccaugugacucuaaa

SEQ ID NO: 617981 - RNA, 19 nt, Artificial Sequence
  Description of Artificial Sequence: Synthetic oligonucleotide
  Antisense strand to SEQ ID NO: 617980
uuuagagucacaugguacc

SEQ ID NO: 617982 - RNA, 19 nt, Artificial Sequence
  Description of Artificial Sequence: Synthetic oligonucleotide
  Sense strand starting at position 487 of SEQ ID NO: 585162
agugcugaccucuaugaga

SEQ ID NO: 617983 - RNA, 19 nt, Artificial Sequence
  Description of Artificial Sequence: Synthetic oligonucleotide
  Antisense strand to SEQ ID NO: 617982
ucucauagaggucagcacu

SEQ ID NO: 617984 - RNA, 19 nt, Artificial Sequence
  Description of Artificial Sequence: Synthetic oligonucleotide
  Sense strand starting at position 639 of SEQ ID NO: 585162
ggaagcaacucucauucua

SEQ ID NO: 617985 - RNA, 19 nt, Artificial Sequence
  Description of Artificial Sequence: Synthetic oligonucleotide
  Antisense strand to SEQ ID NO: 617984
uagaaugagaguugcuucc

SEQ ID NO: 617986 - RNA, 19 nt, Artificial Sequence
  Description of Artificial Sequence: Synthetic oligonucleotide
  Sense strand starting at position 703 of SEQ ID NO: 585162
ggcccuaaccagugugacu

SEQ ID NO: 617987 - RNA, 19 nt, Artificial Sequence
  Description of Artificial Sequence: Synthetic oligonucleotide
  Antisense strand to SEQ ID NO: 617986
agucacacugguuagggcc

SEQ ID NO: 617988 - RNA, 19 nt, Artificial Sequence
  Description of Artificial Sequence: Synthetic oligonucleotide
  Sense strand starting at position 705 of SEQ ID NO: 585162
cccuaaccagugugacuaa

SEQ ID NO: 617989 - RNA, 19 nt, Artificial Sequence
  Description of Artificial Sequence: Synthetic oligonucleotide
  Antisense strand to SEQ ID NO: 617988
uuagucacacugguuaggg

SEQ ID NO: 617990 - RNA, 19 nt, Artificial Sequence
  Description of Artificial Sequence: Synthetic oligonucleotide
  Sense strand starting at position 708 of SEQ ID NO: 585162
uaaccagugugacuaauga

SEQ ID NO: 617991 - RNA, 19 nt, Artificial Sequence
  Description of Artificial Sequence: Synthetic oligonucleotide
  Antisense strand to SEQ ID NO: 617990
ucauuagucacacugguua

SEQ ID NO: 617992 - RNA, 19 nt, Artificial Sequence
  Description of Artificial Sequence: Synthetic oligonucleotide
  Sense strand starting at position 712 of SEQ ID NO: 585162
cagugugacuaaugauaau

SEQ ID NO: 617993 - RNA, 19 nt, Artificial Sequence
  Description of Artificial Sequence: Synthetic oligonucleotide
  Antisense strand to SEQ ID NO: 617992
auuaucauuagucacacug

SEQ ID NO: 617994 - RNA, 19 nt, Artificial Sequence
  Description of Artificial Sequence: Synthetic oligonucleotide
  Sense strand starting at position 718 of SEQ ID NO: 585162
gacuaaugauaauugguca

SEQ ID NO: 617995 - RNA, 19 nt, Artificial Sequence
  Description of Artificial Sequence: Synthetic oligonucleotide
  Antisense strand to SEQ ID NO: 617994
ugaccaauuaucauuaguc

SEQ ID NO: 617996 - RNA, 19 nt, Artificial Sequence
  Description of Artificial Sequence: Synthetic oligonucleotide
  Sense strand starting at position 730 of SEQ ID NO: 585162
uuggucauucucuggaacu

SEQ ID NO: 617997 - RNA, 19 nt, Artificial Sequence
  Description of Artificial Sequence: Synthetic oligonucleotide
  Antisense strand to SEQ ID NO: 617996
aguuccagagaaugaccaa

SEQ ID NO: 617998 - RNA, 19 nt, Artificial Sequence
  Description of Artificial Sequence: Synthetic oligonucleotide
  Sense strand starting at position 731 of SEQ ID NO: 585162
uggucauucucuggaacug

SEQ ID NO: 617999 - RNA, 19 nt, Artificial Sequence
  Description of Artificial Sequence: Synthetic oligonucleotide
  Antisense strand to SEQ ID NO: 617998
caguuccagagaaugacca

SEQ ID NO: 618000 - RNA, 19 nt, Artificial Sequence
  Description of Artificial Sequence: Synthetic oligonucleotide
  Sense strand starting at position 787 of SEQ ID NO: 585162
cccagucauucuuuggacu

SEQ ID NO: 618001 - RNA, 19 nt, Artificial Sequence
  Description of Artificial Sequence: Synthetic oligonucleotide
  Antisense strand to SEQ ID NO: 618000
aguccaaagaaugacuggg

SEQ ID NO: 618002 - RNA, 19 nt, Artificial Sequence
  Description of Artificial Sequence: Synthetic oligonucleotide
  Sense strand starting at position 788 of SEQ ID NO: 585162
ccagucauucuuuggacuu

SEQ ID NO: 618003 - RNA, 19 nt, Artificial Sequence
  Description of Artificial Sequence: Synthetic oligonucleotide
  Antisense strand to SEQ ID NO: 618002
aaguccaaagaaugacugg

SEQ ID NO: 618004 - RNA, 19 nt, Artificial Sequence
  Description of Artificial Sequence: Synthetic oligonucleotide
  Sense strand starting at position 789 of SEQ ID NO: 585162
cagucauucuuuggacuug

SEQ ID NO: 618005 - RNA, 19 nt, Artificial Sequence
  Description of Artificial Sequence: Synthetic oligonucleotide
  Antisense strand to SEQ ID NO: 618004
caaguccaaagaaugacug

SEQ ID NO: 618006 - RNA, 19 nt, Artificial Sequence
  Description of Artificial Sequence: Synthetic oligonucleotide
  Sense strand starting at position 870 of SEQ ID NO: 585162
ugaugauuugcuugucauu

SEQ ID NO: 618007 - RNA, 19 nt, Artificial Sequence
  Description of Artificial Sequence: Synthetic oligonucleotide
  Antisense strand to SEQ ID NO: 618006
aaugacaagcaaaucauca

SEQ ID NO: 618008 - RNA, 19 nt, Artificial Sequence
  Description of Artificial Sequence: Synthetic oligonucleotide
  Sense strand starting at position 873 of SEQ ID NO: 585162
ugauuugcuugucauuaga

SEQ ID NO: 618009 - RNA, 19 nt, Artificial Sequence
  Description of Artificial Sequence: Synthetic oligonucleotide
  Antisense strand to SEQ ID NO: 618008
ucuaaugacaagcaaauca

SEQ ID NO: 618010 - RNA, 19 nt, Artificial Sequence
  Description of Artificial Sequence: Synthetic oligonucleotide
  Sense strand starting at position 876 of SEQ ID NO: 585162
uuugcuugucauuagagaa

SEQ ID NO: 618011 - RNA, 19 nt, Artificial Sequence
  Description of Artificial Sequence: Synthetic oligonucleotide
  Antisense strand to SEQ ID NO: 618010
uucucuaaugacaagcaaa

SEQ ID NO: 618012 - RNA, 19 nt, Artificial Sequence
  Description of Artificial Sequence: Synthetic oligonucleotide
  Sense strand starting at position 1092 of SEQ ID NO: 585162
uuagcuuccucauggauuu

SEQ ID NO: 618013 - RNA, 19 nt, Artificial Sequence
  Description of Artificial Sequence: Synthetic oligonucleotide
  Antisense strand to SEQ ID NO: 618012
aaauccaugaggaagcuaa

SEQ ID NO: 618014 - RNA, 19 nt, Artificial Sequence
  Description of Artificial Sequence: Synthetic oligonucleotide
  Sense strand starting at position 1226 of SEQ ID NO: 585162
ugcugcuuugcuugugauu

SEQ ID NO: 618015 - RNA, 19 nt, Artificial Sequence
  Description of Artificial Sequence: Synthetic oligonucleotide
  Antisense strand to SEQ ID NO: 618014
aaucacaagcaaagcagca

SEQ ID NO: 618016 - RNA, 19 nt, Artificial Sequence
  Description of Artificial Sequence: Synthetic oligonucleotide
  Sense strand starting at position 1228 of SEQ ID NO: 585162
cugcuuugcuugugauuuc

SEQ ID NO: 618017 - RNA, 19 nt, Artificial Sequence
  Description of Artificial Sequence: Synthetic oligonucleotide
  Antisense strand to SEQ ID NO: 618016
gaaaucacaagcaaagcag

SEQ ID NO: 618018 - RNA, 19 nt, Artificial Sequence
  Description of Artificial Sequence: Synthetic oligonucleotide
  Sense strand starting at position 1259 of SEQ ID NO: 585162
ggaaauugcugggagaaga

SEQ ID NO: 618019 - RNA, 19 nt, Artificial Sequence
  Description of Artificial Sequence: Synthetic oligonucleotide
  Antisense strand to SEQ ID NO: 618018
ucuucucccagcaauuucc

SEQ ID NO: 618020 - RNA, 19 nt, Artificial Sequence
  Description of Artificial Sequence: Synthetic oligonucleotide
  Sense strand starting at position 1417 of SEQ ID NO: 585162
ccgaguagcugcgacuuua

SEQ ID NO: 618021 - RNA, 19 nt, Artificial Sequence
  Description of Artificial Sequence: Synthetic oligonucleotide
  Antisense strand to SEQ ID NO: 618020
uaaagucgcagcuacucgg

SEQ ID NO: 618022 - RNA, 19 nt, Artificial Sequence
  Description of Artificial Sequence: Synthetic oligonucleotide
  Sense strand starting at position 1841 of SEQ ID NO: 585162
gaggcaucugcggaucguu

SEQ ID NO: 618023 - RNA, 19 nt, Artificial Sequence
  Description of Artificial Sequence: Synthetic oligonucleotide
  Antisense strand to SEQ ID NO: 618022
aacgauccgcagaugccuc

SEQ ID NO: 618024 - RNA, 19 nt, Artificial Sequence
  Description of Artificial Sequence: Synthetic oligonucleotide
  Sense strand starting at position 2069 of SEQ ID NO: 585162
gagagaggcuguuuagaua

SEQ ID NO: 618025 - RNA, 19 nt, Artificial Sequence
  Description of Artificial Sequence: Synthetic oligonucleotide
  Antisense strand to SEQ ID NO: 618024
uaucuaaacagccucucuc

SEQ ID NO: 618026 - RNA, 19 nt, Artificial Sequence
  Description of Artificial Sequence: Synthetic oligonucleotide
  Sense strand starting at position 2077 of SEQ ID NO: 585162
cuguuuagauaucuggaag

SEQ ID NO: 618027 - RNA, 19 nt, Artificial Sequence
  Description of Artificial Sequence: Synthetic oligonucleotide
  Antisense strand to SEQ ID NO: 618026
cuuccagauaucuaaacag

SEQ ID NO: 618028 - RNA, 19 nt, Artificial Sequence
  Description of Artificial Sequence: Synthetic oligonucleotide
  Sense strand starting at position 2366 of SEQ ID NO: 585162
gaggguaaguaggaaugua

SEQ ID NO: 618029 - RNA, 19 nt, Artificial Sequence
  Description of Artificial Sequence: Synthetic oligonucleotide
  Antisense strand to SEQ ID NO: 618028
uacauuccuacuuacccuc

SEQ ID NO: 618030 - RNA, 19 nt, Artificial Sequence
  Description of Artificial Sequence: Synthetic oligonucleotide
  Sense strand starting at position 2374 of SEQ ID NO: 585162
guaggaauguauccuuuaa

SEQ ID NO: 618031 - RNA, 19 nt, Artificial Sequence
  Description of Artificial Sequence: Synthetic oligonucleotide
  Antisense strand to SEQ ID NO: 618030
uuaaaggauacauuccuac

SEQ ID NO: 618032 - RNA, 19 nt, Artificial Sequence
  Description of Artificial Sequence: Synthetic oligonucleotide
  Sense strand starting at position 2376 of SEQ ID NO: 585162
aggaauguauccuuuaagu

SEQ ID NO: 618033 - RNA, 19 nt, Artificial Sequence
  Description of Artificial Sequence: Synthetic oligonucleotide
  Antisense strand to SEQ ID NO: 618032
acuuaaaggauacauuccu

SEQ ID NO: 618034 - RNA, 19 nt, Artificial Sequence
  Description of Artificial Sequence: Synthetic oligonucleotide
  Sense strand starting at position 2733 of SEQ ID NO: 585162
cguccagcuucccugauuu

SEQ ID NO: 618035 - RNA, 19 nt, Artificial Sequence
  Description of Artificial Sequence: Synthetic oligonucleotide
  Antisense strand to SEQ ID NO: 618034
aaaucagggaagcuggacg

SEQ ID NO: 618036 - RNA, 19 nt, Artificial Sequence
  Description of Artificial Sequence: Synthetic oligonucleotide
  Sense strand starting at position 2770 of SEQ ID NO: 585162
gaggcuuuccagcaaaguc

SEQ ID NO: 618037 - RNA, 19 nt, Artificial Sequence
  Description of Artificial Sequence: Synthetic oligonucleotide
  Antisense strand to SEQ ID NO: 618036
gacuuugcuggaaagccuc

SEQ ID NO: 618038 - RNA, 19 nt, Artificial Sequence
  Description of Artificial Sequence: Synthetic oligonucleotide
  Sense strand starting at position 2935 of SEQ ID NO: 585162
cccuaacuauugugagugu

SEQ ID NO: 618039 - RNA, 19 nt, Artificial Sequence
  Description of Artificial Sequence: Synthetic oligonucleotide
  Antisense strand to SEQ ID NO: 618038
acacucacaauaguuaggg

SEQ ID NO: 618040 - RNA, 19 nt, Artificial Sequence
  Description of Artificial Sequence: Synthetic oligonucleotide
  Sense strand starting at position 2946 of SEQ ID NO: 585162
gugagugucucgcagucuu

SEQ ID NO: 618041 - RNA, 19 nt, Artificial Sequence
  Description of Artificial Sequence: Synthetic oligonucleotide
  Antisense strand to SEQ ID NO: 618040
aagacugcgagacacucac

SEQ ID NO: 618042 - RNA, 19 nt, Artificial Sequence
  Description of Artificial Sequence: Synthetic oligonucleotide
  Sense strand starting at position 3242 of SEQ ID NO: 585162
cuuaucuguuuaucuguua

SEQ ID NO: 618043 - RNA, 19 nt, Artificial Sequence
  Description of Artificial Sequence: Synthetic oligonucleotide
  Antisense strand to SEQ ID NO: 618042
uaacagauaaacagauaag

SEQ ID NO: 618044 - RNA, 19 nt, Artificial Sequence
  Description of Artificial Sequence: Synthetic oligonucleotide
  Sense strand starting at position 3259 of SEQ ID NO: 585162
uaaauaagagguugugguu

SEQ ID NO: 618045 - RNA, 19 nt, Artificial Sequence
  Description of Artificial Sequence: Synthetic oligonucleotide
  Antisense strand to SEQ ID NO: 618044
aaccacaaccucuuauuua

SEQ ID NO: 618046 - RNA, 19 nt, Artificial Sequence
  Description of Artificial Sequence: Synthetic oligonucleotide
  Sense strand starting at position 3638 of SEQ ID NO: 585162
cugauauagucuuggaaau

SEQ ID NO: 618047 - RNA, 19 nt, Artificial Sequence
  Description of Artificial Sequence: Synthetic oligonucleotide
  Antisense strand to SEQ ID NO: 618046
auuuccaagacuauaucag

SEQ ID NO: 618048 - RNA, 19 nt, Artificial Sequence
  Description of Artificial Sequence: Synthetic oligonucleotide
  Sense strand starting at position 3639 of SEQ ID NO: 585162
ugauauagucuuggaaaua

SEQ ID NO: 618049 - RNA, 19 nt, Artificial Sequence
  Description of Artificial Sequence: Synthetic oligonucleotide
  Antisense strand to SEQ ID NO: 618048
uauuuccaagacuauauca

SEQ ID NO: 618050 - RNA, 19 nt, Artificial Sequence
  Description of Artificial Sequence: Synthetic oligonucleotide
  Sense strand starting at position 3640 of SEQ ID NO: 585162
gauauagucuuggaaauau

SEQ ID NO: 618051 - RNA, 19 nt, Artificial Sequence
  Description of Artificial Sequence: Synthetic oligonucleotide
  Antisense strand to SEQ ID NO: 618050
auauuuccaagacuauauc

SEQ ID NO: 618052 - RNA, 19 nt, Artificial Sequence
  Description of Artificial Sequence: Synthetic oligonucleotide
  Sense strand starting at position 3649 of SEQ ID NO: 585162
uuggaaauaucacgacgaa

SEQ ID NO: 618053 - RNA, 19 nt, Artificial Sequence
  Description of Artificial Sequence: Synthetic oligonucleotide
  Antisense strand to SEQ ID NO: 618052
uucgucgugauauuuccaa

SEQ ID NO: 618054 - RNA, 19 nt, Artificial Sequence
  Description of Artificial Sequence: Synthetic oligonucleotide
  Sense strand starting at position 3652 of SEQ ID NO: 585162
gaaauaucacgacgaaauu

SEQ ID NO: 618055 - RNA, 19 nt, Artificial Sequence
  Description of Artificial Sequence: Synthetic oligonucleotide
  Antisense strand to SEQ ID NO: 618054
aauuucgucgugauauuuc

SEQ ID NO: 618056 - RNA, 19 nt, Artificial Sequence
  Description of Artificial Sequence: Synthetic oligonucleotide
  Sense strand starting at position 3819 of SEQ ID NO: 585162
uggagacccucaguauaua

SEQ ID NO: 618057 - RNA, 19 nt, Artificial Sequence
  Description of Artificial Sequence: Synthetic oligonucleotide
  Antisense strand to SEQ ID NO: 618056
uauauacugagggucucca

SEQ ID NO: 618058 - RNA, 19 nt, Artificial Sequence
  Description of Artificial Sequence: Synthetic oligonucleotide
  Sense strand starting at position 247 of SEQ ID NO: 585163
ggacuagggugagaacuau

SEQ ID NO: 618059 - RNA, 19 nt, Artificial Sequence
  Description of Artificial Sequence: Synthetic oligonucleotide
  Antisense strand to SEQ ID NO: 618058
auaguucucacccuagucc

SEQ ID NO: 618060 - RNA, 19 nt, Artificial Sequence
  Description of Artificial Sequence: Synthetic oligonucleotide
  Sense strand starting at position 303 of SEQ ID NO: 585163
aguggcugguuauucuaaa

SEQ ID NO: 618061 - RNA, 19 nt, Artificial Sequence
  Description of Artificial Sequence: Synthetic oligonucleotide
  Antisense strand to SEQ ID NO: 618060
uuuagaauaaccagccacu

SEQ ID NO: 618062 - RNA, 19 nt, Artificial Sequence
  Description of Artificial Sequence: Synthetic oligonucleotide
  Sense strand starting at position 304 of SEQ ID NO: 585163
guggcugguuauucuaaag

SEQ ID NO: 618063 - RNA, 19 nt, Artificial Sequence
  Description of Artificial Sequence: Synthetic oligonucleotide
  Antisense strand to SEQ ID NO: 618062
cuuuagaauaaccagccac

SEQ ID NO: 618064 - RNA, 19 nt, Artificial Sequence
  Description of Artificial Sequence: Synthetic oligonucleotide
  Sense strand starting at position 2100 of SEQ ID NO: 585163
ugugguguuugucuuagaa

SEQ ID NO: 618065 - RNA, 19 nt, Artificial Sequence
  Description of Artificial Sequence: Synthetic oligonucleotide
  Antisense strand to SEQ ID NO: 618064
uucuaagacaaacaccaca

SEQ ID NO: 618066 - RNA, 19 nt, Artificial Sequence
  Description of Artificial Sequence: Synthetic oligonucleotide
  Sense strand starting at position 2132 of SEQ ID NO: 585163
agaagaagucgugagcuac

SEQ ID NO: 618067 - RNA, 19 nt, Artificial Sequence
  Description of Artificial Sequence: Synthetic oligonucleotide
  Antisense strand to SEQ ID NO: 618066
guagcucacgacuucuucu

SEQ ID NO: 618068 - RNA, 19 nt, Artificial Sequence
  Description of Artificial Sequence: Synthetic oligonucleotide
  Sense strand starting at position 2145 of SEQ ID NO: 585163
agcuacauccacugaguua

SEQ ID NO: 618069 - RNA, 19 nt, Artificial Sequence
  Description of Artificial Sequence: Synthetic oligonucleotide
  Antisense strand to SEQ ID NO: 618068
uaacucaguggauguagcu

SEQ ID NO: 618070 - RNA, 19 nt, Artificial Sequence
  Description of Artificial Sequence: Synthetic oligonucleotide
  Sense strand starting at position 2185 of SEQ ID NO: 585163
gggaaauaauuugaaucuu

SEQ ID NO: 618071 - RNA, 19 nt, Artificial Sequence
  Description of Artificial Sequence: Synthetic oligonucleotide
  Antisense strand to SEQ ID NO: 618070
aagauucaaauuauuuccc

SEQ ID NO: 618072 - RNA, 19 nt, Artificial Sequence
  Description of Artificial Sequence: Synthetic oligonucleotide
  Sense strand starting at position 2194 of SEQ ID NO: 585163
uuugaaucuuggucacaaa

SEQ ID NO: 618073 - RNA, 19 nt, Artificial Sequence
  Description of Artificial Sequence: Synthetic oligonucleotide
  Antisense strand to SEQ ID NO: 618072
uuugugaccaagauucaaa

SEQ ID NO: 618074 - RNA, 19 nt, Artificial Sequence
  Description of Artificial Sequence: Synthetic oligonucleotide
  Sense strand starting at position 2287 of SEQ ID NO: 585163
ugucauaugccugcccagu

SEQ ID NO: 618075 - RNA, 19 nt, Artificial Sequence
  Description of Artificial Sequence: Synthetic oligonucleotide
  Antisense strand to SEQ ID NO: 618074
acugggcaggcauaugaca

SEQ ID NO: 618076 - RNA, 19 nt, Artificial Sequence
  Description of Artificial Sequence: Synthetic oligonucleotide
  Sense strand starting at position 2288 of SEQ ID NO: 585163
gucauaugccugcccaguu

SEQ ID NO: 618077 - RNA, 19 nt, Artificial Sequence
  Description of Artificial Sequence: Synthetic oligonucleotide
  Antisense strand to SEQ ID NO: 618076
aacugggcaggcauaugac

SEQ ID NO: 618078 - RNA, 19 nt, Artificial Sequence
  Description of Artificial Sequence: Synthetic oligonucleotide
  Sense strand starting at position 2365 of SEQ ID NO: 585163
uguucuggccaaggaguau

SEQ ID NO: 618079 - RNA, 19 nt, Artificial Sequence
  Description of Artificial Sequence: Synthetic oligonucleotide
  Antisense strand to SEQ ID NO: 618078
auacuccuuggccagaaca

SEQ ID NO: 618080 - RNA, 19 nt, Artificial Sequence
  Description of Artificial Sequence: Synthetic oligonucleotide
  Sense strand starting at position 2396 of SEQ ID NO: 585163
cuuggaaaguucucaucuu

SEQ ID NO: 618081 - RNA, 19 nt, Artificial Sequence
  Description of Artificial Sequence: Synthetic oligonucleotide
  Antisense strand to SEQ ID NO: 618080
aagaugagaacuuuccaag

SEQ ID NO: 618082 - RNA, 19 nt, Artificial Sequence
  Description of Artificial Sequence: Synthetic oligonucleotide
  Sense strand starting at position 2666 of SEQ ID NO: 585163
uggaauugauaggacaaca

SEQ ID NO: 618083 - RNA, 19 nt, Artificial Sequence
  Description of Artificial Sequence: Synthetic oligonucleotide
  Antisense strand to SEQ ID NO: 618082
uguuguccuaucaauucca

SEQ ID NO: 618084 - RNA, 19 nt, Artificial Sequence
  Description of Artificial Sequence: Synthetic oligonucleotide
  Sense strand starting at position 2685 of SEQ ID NO: 585163
cgcggauuccuugccuuca

SEQ ID NO: 618085 - RNA, 19 nt, Artificial Sequence
  Description of Artificial Sequence: Synthetic oligonucleotide
  Antisense strand to SEQ ID NO: 618084
ugaaggcaaggaauccgcg

SEQ ID NO: 618086 - RNA, 19 nt, Artificial Sequence
  Description of Artificial Sequence: Synthetic oligonucleotide
  Sense strand starting at position 2833 of SEQ ID NO: 585163
ugcguuuccagcuuguaca

SEQ ID NO: 618087 - RNA, 19 nt, Artificial Sequence
  Description of Artificial Sequence: Synthetic oligonucleotide
  Antisense strand to SEQ ID NO: 618086
uguacaagcuggaaacgca

SEQ ID NO: 618088 - RNA, 19 nt, Artificial Sequence
  Description of Artificial Sequence: Synthetic oligonucleotide
  Sense strand starting at position 2958 of SEQ ID NO: 585163
gucuaauucuuagugucuu

SEQ ID NO: 618089 - RNA, 19 nt, Artificial Sequence
  Description of Artificial Sequence: Synthetic oligonucleotide
  Antisense strand to SEQ ID NO: 618088
aagacacuaagaauuagac

SEQ ID NO: 618090 - RNA, 19 nt, Artificial Sequence
  Description of Artificial Sequence: Synthetic oligonucleotide
  Sense strand starting at position 2968 of SEQ ID NO: 585163
uagugucuucuauggaauc

SEQ ID NO: 618091 - RNA, 19 nt, Artificial Sequence
  Description of Artificial Sequence: Synthetic oligonucleotide
  Antisense strand to SEQ ID NO: 618090
gauuccauagaagacacua

SEQ ID NO: 618092 - RNA, 19 nt, Artificial Sequence
  Description of Artificial Sequence: Synthetic oligonucleotide
  Sense strand starting at position 2970 of SEQ ID NO: 585163
gugucuucuauggaaucga

SEQ ID NO: 618093 - RNA, 19 nt, Artificial Sequence
  Description of Artificial Sequence: Synthetic oligonucleotide
  Antisense strand to SEQ ID NO: 618092
ucgauuccauagaagacac

SEQ ID NO: 618094 - RNA, 19 nt, Artificial Sequence
  Description of Artificial Sequence: Synthetic oligonucleotide
  Sense strand starting at position 3070 of SEQ ID NO: 585163
uagguuauuguguauucua

SEQ ID NO: 618095 - RNA, 19 nt, Artificial Sequence
  Description of Artificial Sequence: Synthetic oligonucleotide
  Antisense strand to SEQ ID NO: 618094
uagaauacacaauaaccua

SEQ ID NO: 618096 - RNA, 19 nt, Artificial Sequence
  Description of Artificial Sequence: Synthetic oligonucleotide
  Sense strand starting at position 3073 of SEQ ID NO: 585163
guuauuguguauucuacuc

SEQ ID NO: 618097 - RNA, 19 nt, Artificial Sequence
  Description of Artificial Sequence: Synthetic oligonucleotide
  Antisense strand to SEQ ID NO: 618096
gaguagaauacacaauaac

SEQ ID NO: 618098 - RNA, 19 nt, Artificial Sequence
  Description of Artificial Sequence: Synthetic oligonucleotide
  Sense strand starting at position 3078 of SEQ ID NO: 585163
uguguauucuacuccuaaa

SEQ ID NO: 618099 - RNA, 19 nt, Artificial Sequence
  Description of Artificial Sequence: Synthetic oligonucleotide
  Antisense strand to SEQ ID NO: 618098
uuuaggaguagaauacaca

SEQ ID NO: 618100 - RNA, 19 nt, Artificial Sequence
  Description of Artificial Sequence: Synthetic oligonucleotide
  Sense strand starting at position 3114 of SEQ ID NO: 585163
guaucuucuuuggcaaaga

SEQ ID NO: 618101 - RNA, 19 nt, Artificial Sequence
  Description of Artificial Sequence: Synthetic oligonucleotide
  Antisense strand to SEQ ID NO: 618100
ucuuugccaaagaagauac

SEQ ID NO: 618102 - RNA, 19 nt, Artificial Sequence
  Description of Artificial Sequence: Synthetic oligonucleotide
  Sense strand starting at position 3132 of SEQ ID NO: 585163
auuuguggcuuagaaugaa

SEQ ID NO: 618103 - RNA, 19 nt, Artificial Sequence
  Description of Artificial Sequence: Synthetic oligonucleotide
  Antisense strand to SEQ ID NO: 618102
uucauucuaagccacaaau

SEQ ID NO: 618104 - RNA, 19 nt, Artificial Sequence
  Description of Artificial Sequence: Synthetic oligonucleotide
  Sense strand starting at position 3135 of SEQ ID NO: 585163
uguggcuuagaaugaacau

SEQ ID NO: 618105 - RNA, 19 nt, Artificial Sequence
  Description of Artificial Sequence: Synthetic oligonucleotide
  Antisense strand to SEQ ID NO: 618104
auguucauucuaagccaca

SEQ ID NO: 618106 - RNA, 19 nt, Artificial Sequence
  Description of Artificial Sequence: Synthetic oligonucleotide
  Sense strand starting at position 3136 of SEQ ID NO: 585163
guggcuuagaaugaacauu

SEQ ID NO: 618107 - RNA, 19 nt, Artificial Sequence
  Description of Artificial Sequence: Synthetic oligonucleotide
  Antisense strand to SEQ ID NO: 618106
aauguucauucuaagccac

SEQ ID NO: 618108 - RNA, 19 nt, Artificial Sequence
  Description of Artificial Sequence: Synthetic oligonucleotide
  Sense strand starting at position 3158 of SEQ ID NO: 585163
auaguuacaguuugacaaa

SEQ ID NO: 618109 - RNA, 19 nt, Artificial Sequence
  Description of Artificial Sequence: Synthetic oligonucleotide
  Antisense strand to SEQ ID NO: 618108
uuugucaaacuguaacuau

SEQ ID NO: 618110 - RNA, 19 nt, Artificial Sequence
  Description of Artificial Sequence: Synthetic oligonucleotide
  Sense strand starting at position 3175 of SEQ ID NO: 585163
aagcauucggugcacauaa

SEQ ID NO: 618111 - RNA, 19 nt, Artificial Sequence
  Description of Artificial Sequence: Synthetic oligonucleotide
  Antisense strand to SEQ ID NO: 618110
uuaugugcaccgaaugcuu

SEQ ID NO: 618112 - RNA, 19 nt, Artificial Sequence
  Description of Artificial Sequence: Synthetic oligonucleotide
  Sense strand starting at position 3204 of SEQ ID NO: 585163
gcaacagagucuguuuaca

SEQ ID NO: 618113 - RNA, 19 nt, Artificial Sequence
  Description of Artificial Sequence: Synthetic oligonucleotide
  Antisense strand to SEQ ID NO: 618112
uguaaacagacucuguugc

SEQ ID NO: 618114 - RNA, 19 nt, Artificial Sequence
  Description of Artificial Sequence: Synthetic oligonucleotide
  Sense strand starting at position 3212 of SEQ ID NO: 585163
gucuguuuacauuauuguu

SEQ ID NO: 618115 - RNA, 19 nt, Artificial Sequence
  Description of Artificial Sequence: Synthetic oligonucleotide
  Antisense strand to SEQ ID NO: 618114
aacaauaauguaaacagac

SEQ ID NO: 618116 - RNA, 19 nt, Artificial Sequence
  Description of Artificial Sequence: Synthetic oligonucleotide
  Sense strand starting at position 3328 of SEQ ID NO: 585163
uuaggaauguucguaauac

SEQ ID NO: 618117 - RNA, 19 nt, Artificial Sequence
  Description of Artificial Sequence: Synthetic oligonucleotide
  Antisense strand to SEQ ID NO: 618116
guauuacgaacauuccuaa

SEQ ID NO: 618118 - RNA, 19 nt, Artificial Sequence
  Description of Artificial Sequence: Synthetic oligonucleotide
  Sense strand starting at position 3340 of SEQ ID NO: 585163
guaauacuuccguacucaa

SEQ ID NO: 618119 - RNA, 19 nt, Artificial Sequence
  Description of Artificial Sequence: Synthetic oligonucleotide
  Antisense strand to SEQ ID NO: 618118
uugaguacggaaguauuac

SEQ ID NO: 618120 - RNA, 19 nt, Artificial Sequence
  Description of Artificial Sequence: Synthetic oligonucleotide
  Sense strand starting at position 3371 of SEQ ID NO: 585163
aauggcauuguguguugaa

SEQ ID NO: 618121 - RNA, 19 nt, Artificial Sequence
  Description of Artificial Sequence: Synthetic oligonucleotide
  Antisense strand to SEQ ID NO: 618120
uucaacacacaaugccauu

SEQ ID NO: 618122 - RNA, 19 nt, Artificial Sequence
  Description of Artificial Sequence: Synthetic oligonucleotide
  Sense strand starting at position 3372 of SEQ ID NO: 585163
auggcauuguguguugaaa

SEQ ID NO: 618123 - RNA, 19 nt, Artificial Sequence
  Description of Artificial Sequence: Synthetic oligonucleotide
  Antisense strand to SEQ ID NO: 618122
uuucaacacacaaugccau

SEQ ID NO: 618124 - RNA, 19 nt, Artificial Sequence
  Description of Artificial Sequence: Synthetic oligonucleotide
  Sense strand starting at position 3498 of SEQ ID NO: 585163
cccuuauugcauuagagga

SEQ ID NO: 618125 - RNA, 19 nt, Artificial Sequence
  Description of Artificial Sequence: Synthetic oligonucleotide
  Antisense strand to SEQ ID NO: 618124
uccucuaaugcaauaaggg

SEQ ID NO: 618126 - RNA, 19 nt, Artificial Sequence
  Description of Artificial Sequence: Synthetic oligonucleotide
  Sense strand starting at position 3533 of SEQ ID NO: 585163
uuucuaauaggcuguacaa

SEQ ID NO: 618127 - RNA, 19 nt, Artificial Sequence
  Description of Artificial Sequence: Synthetic oligonucleotide
  Antisense strand to SEQ ID NO: 618126
uuguacagccuauuagaaa

SEQ ID NO: 618128 - RNA, 19 nt, Artificial Sequence
  Description of Artificial Sequence: Synthetic oligonucleotide
  Sense strand starting at position 3616 of SEQ ID NO: 585163
ugccuuuaacuauagcuga

SEQ ID NO: 618129 - RNA, 19 nt, Artificial Sequence
  Description of Artificial Sequence: Synthetic oligonucleotide
  Antisense strand to SEQ ID NO: 618128
ucagcuauaguuaaaggca

SEQ ID NO: 618130 - RNA, 19 nt, Artificial Sequence
  Description of Artificial Sequence: Synthetic oligonucleotide
  Sense strand starting at position 3667 of SEQ ID NO: 585163
ucacucacuuuggauagaa

SEQ ID NO: 618131 - RNA, 19 nt, Artificial Sequence
  Description of Artificial Sequence: Synthetic oligonucleotide
  Antisense strand to SEQ ID NO: 618130
uucuauccaaagugaguga

SEQ ID NO: 618132 - RNA, 19 nt, Artificial Sequence
  Description of Artificial Sequence: Synthetic oligonucleotide
  Sense strand starting at position 3744 of SEQ ID NO: 585163
cuuagaggcuuucuccaua

SEQ ID NO: 618133 - RNA, 19 nt, Artificial Sequence
  Description of Artificial Sequence: Synthetic oligonucleotide
  Antisense strand to SEQ ID NO: 618132
uauggagaaagccucuaag

SEQ ID NO: 618134 - RNA, 19 nt, Artificial Sequence
  Description of Artificial Sequence: Synthetic oligonucleotide
  Sense strand starting at position 3787 of SEQ ID NO: 585163
cagacauuauuugagguau

SEQ ID NO: 618135 - RNA, 19 nt, Artificial Sequence
  Description of Artificial Sequence: Synthetic oligonucleotide
  Antisense strand to SEQ ID NO: 618134
auaccucaaauaaugucug

SEQ ID NO: 618136 - RNA, 19 nt, Artificial Sequence
  Description of Artificial Sequence: Synthetic oligonucleotide
  Sense strand starting at position 3789 of SEQ ID NO: 585163
gacauuauuugagguaugu

SEQ ID NO: 618137 - RNA, 19 nt, Artificial Sequence
  Description of Artificial Sequence: Synthetic oligonucleotide
  Antisense strand to SEQ ID NO: 618136
acauaccucaaauaauguc

SEQ ID NO: 618138 - RNA, 19 nt, Artificial Sequence
  Description of Artificial Sequence: Synthetic oligonucleotide
  Sense strand starting at position 222 of SEQ ID NO: 585164
gucaaauaacuuugaggca

SEQ ID NO: 618139 - RNA, 19 nt, Artificial Sequence
  Description of Artificial Sequence: Synthetic oligonucleotide
  Antisense strand to SEQ ID NO: 618138
ugccucaaaguuauuugac

SEQ ID NO: 618140 - RNA, 19 nt, Artificial Sequence
  Description of Artificial Sequence: Synthetic oligonucleotide
  Sense strand starting at position 386 of SEQ ID NO: 585164
uggagaaccucauucguuu

SEQ ID NO: 618141 - RNA, 19 nt, Artificial Sequence
  Description of Artificial Sequence: Synthetic oligonucleotide
  Antisense strand to SEQ ID NO: 618140
aaacgaaugagguucucca

SEQ ID NO: 618142 - RNA, 19 nt, Artificial Sequence
  Description of Artificial Sequence: Synthetic oligonucleotide
  Sense strand starting at position 415 of SEQ ID NO: 585164
uuuacuguugcagaaaguu

SEQ ID NO: 618143 - RNA, 19 nt, Artificial Sequence
  Description of Artificial Sequence: Synthetic oligonucleotide
  Antisense strand to SEQ ID NO: 618142
aacuuucugcaacaguaaa

SEQ ID NO: 618144 - RNA, 19 nt, Artificial Sequence
  Description of Artificial Sequence: Synthetic oligonucleotide
  Sense strand starting at position 427 of SEQ ID NO: 585164
gaaaguuacccuggaguug

SEQ ID NO: 618145 - RNA, 19 nt, Artificial Sequence
  Description of Artificial Sequence: Synthetic oligonucleotide
  Antisense strand to SEQ ID NO: 618144
caacuccaggguaacuuuc

SEQ ID NO: 618146 - RNA, 19 nt, Artificial Sequence
  Description of Artificial Sequence: Synthetic oligonucleotide
  Sense strand starting at position 439 of SEQ ID NO: 585164
ggaguugaggauugagugu

SEQ ID NO: 618147 - RNA, 19 nt, Artificial Sequence
  Description of Artificial Sequence: Synthetic oligonucleotide
  Antisense strand to SEQ ID NO: 618146
acacucaauccucaacucc

SEQ ID NO: 618148 - RNA, 19 nt, Artificial Sequence
  Description of Artificial Sequence: Synthetic oligonucleotide
  Sense strand starting at position 445 of SEQ ID NO: 585164
gaggauugaguguauucua

SEQ ID NO: 618149 - RNA, 19 nt, Artificial Sequence
  Description of Artificial Sequence: Synthetic oligonucleotide
  Antisense strand to SEQ ID NO: 618148
uagaauacacucaauccuc

SEQ ID NO: 618150 - RNA, 19 nt, Artificial Sequence
  Description of Artificial Sequence: Synthetic oligonucleotide
  Sense strand starting at position 448 of SEQ ID NO: 585164
gauugaguguauucuauaa

SEQ ID NO: 618151 - RNA, 19 nt, Artificial Sequence
  Description of Artificial Sequence: Synthetic oligonucleotide
  Antisense strand to SEQ ID NO: 618150
uuauagaauacacucaauc

SEQ ID NO: 618152 - RNA, 19 nt, Artificial Sequence
  Description of Artificial Sequence: Synthetic oligonucleotide
  Sense strand starting at position 533 of SEQ ID NO: 585164
caccuuucuggauggaguu

SEQ ID NO: 618153 - RNA, 19 nt, Artificial Sequence
  Description of Artificial Sequence: Synthetic oligonucleotide
  Antisense strand to SEQ ID NO: 618152
aacuccauccagaaaggug

SEQ ID NO: 618154 - RNA, 19 nt, Artificial Sequence
  Description of Artificial Sequence: Synthetic oligonucleotide
  Sense strand starting at position 567 of SEQ ID NO: 585164
cgaccucuaucgcucagaa

SEQ ID NO: 618155 - RNA, 19 nt, Artificial Sequence
  Description of Artificial Sequence: Synthetic oligonucleotide
  Antisense strand to SEQ ID NO: 618154
uucugagcgauagaggucg

SEQ ID NO: 618156 - RNA, 19 nt, Artificial Sequence
  Description of Artificial Sequence: Synthetic oligonucleotide
  Sense strand starting at position 569 of SEQ ID NO: 585164
accucuaucgcucagaaag

SEQ ID NO: 618157 - RNA, 19 nt, Artificial Sequence
  Description of Artificial Sequence: Synthetic oligonucleotide
  Antisense strand to SEQ ID NO: 618156
cuuucugagcgauagaggu

SEQ ID NO: 618158 - RNA, 19 nt, Artificial Sequence
  Description of Artificial Sequence: Synthetic oligonucleotide
  Sense strand starting at position 579 of SEQ ID NO: 585164
cucagaaaguccuugauag

SEQ ID NO: 618159 - RNA, 19 nt, Artificial Sequence
  Description of Artificial Sequence: Synthetic oligonucleotide
  Antisense strand to SEQ ID NO: 618158
cuaucaaggacuuucugag

SEQ ID NO: 618160 - RNA, 19 nt, Artificial Sequence
  Description of Artificial Sequence: Synthetic oligonucleotide
  Sense strand starting at position 580 of SEQ ID NO: 585164
ucagaaaguccuugauagg

SEQ ID NO: 618161 - RNA, 19 nt, Artificial Sequence
  Description of Artificial Sequence: Synthetic oligonucleotide
  Antisense strand to SEQ ID NO: 618160
ccuaucaaggacuuucuga

SEQ ID NO: 618162 - RNA, 19 nt, Artificial Sequence
  Description of Artificial Sequence: Synthetic oligonucleotide
  Sense strand starting at position 627 of SEQ ID NO: 585164
cugccauagguagaauacu

SEQ ID NO: 618163 - RNA, 19 nt, Artificial Sequence
  Description of Artificial Sequence: Synthetic oligonucleotide
  Antisense strand to SEQ ID NO: 618162
aguauucuaccuauggcag

SEQ ID NO: 618164 - RNA, 19 nt, Artificial Sequence
  Description of Artificial Sequence: Synthetic oligonucleotide
  Sense strand starting at position 664 of SEQ ID NO: 585164
agcuucugaucacuaagaa

SEQ ID NO: 618165 - RNA, 19 nt, Artificial Sequence
  Description of Artificial Sequence: Synthetic oligonucleotide
  Antisense strand to SEQ ID NO: 618164
uucuuagugaucagaagcu

SEQ ID NO: 618166 - RNA, 19 nt, Artificial Sequence
  Description of Artificial Sequence: Synthetic oligonucleotide
  Sense strand starting at position 665 of SEQ ID NO: 585164
gcuucugaucacuaagaau

SEQ ID NO: 618167 - RNA, 19 nt, Artificial Sequence
  Description of Artificial Sequence: Synthetic oligonucleotide
  Antisense strand to SEQ ID NO: 618166
auucuuagugaucagaagc

SEQ ID NO: 618168 - RNA, 19 nt, Artificial Sequence
  Description of Artificial Sequence: Synthetic oligonucleotide
  Sense strand starting at position 795 of SEQ ID NO: 585164
ggauuacagucucccuauu

SEQ ID NO: 618169 - RNA, 19 nt, Artificial Sequence
  Description of Artificial Sequence: Synthetic oligonucleotide
  Antisense strand to SEQ ID NO: 618168
aauagggagacuguaaucc

SEQ ID NO: 618170 - RNA, 19 nt, Artificial Sequence
  Description of Artificial Sequence: Synthetic oligonucleotide
  Sense strand starting at position 942 of SEQ ID NO: 585164
uagcuuugaguuuggcaaa

SEQ ID NO: 618171 - RNA, 19 nt, Artificial Sequence
  Description of Artificial Sequence: Synthetic oligonucleotide
  Antisense strand to SEQ ID NO: 618170
uuugccaaacucaaagcua

SEQ ID NO: 618172 - RNA, 19 nt, Artificial Sequence
  Description of Artificial Sequence: Synthetic oligonucleotide
  Sense strand starting at position 976 of SEQ ID NO: 585164
guagaccugucuuuaauau

SEQ ID NO: 618173 - RNA, 19 nt, Artificial Sequence
  Description of Artificial Sequence: Synthetic oligonucleotide
  Antisense strand to SEQ ID NO: 618172
auauuaaagacaggucuac

SEQ ID NO: 618174 - RNA, 19 nt, Artificial Sequence
  Description of Artificial Sequence: Synthetic oligonucleotide
  Sense strand starting at position 1402 of SEQ ID NO: 585164
gagugagacuaugucugga

SEQ ID NO: 618175 - RNA, 19 nt, Artificial Sequence
  Description of Artificial Sequence: Synthetic oligonucleotide
  Antisense strand to SEQ ID NO: 618174
uccagacauagucucacuc

SEQ ID NO: 618176 - RNA, 19 nt, Artificial Sequence
  Description of Artificial Sequence: Synthetic oligonucleotide
  Sense strand starting at position 1537 of SEQ ID NO: 585164
uguucuuuccuacaaaguu

SEQ ID NO: 618177 - RNA, 19 nt, Artificial Sequence
  Description of Artificial Sequence: Synthetic oligonucleotide
  Antisense strand to SEQ ID NO: 618176
aacuuuguaggaaagaaca

SEQ ID NO: 618178 - RNA, 19 nt, Artificial Sequence
  Description of Artificial Sequence: Synthetic oligonucleotide
  Sense strand starting at position 1574 of SEQ ID NO: 585164
acagaaggauacuaaugau

SEQ ID NO: 618179 - RNA, 19 nt, Artificial Sequence
  Description of Artificial Sequence: Synthetic oligonucleotide
  Antisense strand to SEQ ID NO: 618178
aucauuaguauccuucugu

SEQ ID NO: 618180 - RNA, 19 nt, Artificial Sequence
  Description of Artificial Sequence: Synthetic oligonucleotide
  Sense strand starting at position 1822 of SEQ ID NO: 585164
aacugcugucagcgauuua

SEQ ID NO: 618181 - RNA, 19 nt, Artificial Sequence
  Description of Artificial Sequence: Synthetic oligonucleotide
  Antisense strand to SEQ ID NO: 618180
uaaaucgcugacagcaguu

SEQ ID NO: 618182 - RNA, 19 nt, Artificial Sequence
  Description of Artificial Sequence: Synthetic oligonucleotide
  Sense strand starting at position 1823 of SEQ ID NO: 585164
acugcugucagcgauuuaa

SEQ ID NO: 618183 - RNA, 19 nt, Artificial Sequence
  Description of Artificial Sequence: Synthetic oligonucleotide
  Antisense strand to SEQ ID NO: 618182
uuaaaucgcugacagcagu

SEQ ID NO: 618184 - RNA, 19 nt, Artificial Sequence
  Description of Artificial Sequence: Synthetic oligonucleotide
  Sense strand starting at position 2087 of SEQ ID NO: 585164
gcccuaagagucugagaca

SEQ ID NO: 618185 - RNA, 19 nt, Artificial Sequence
  Description of Artificial Sequence: Synthetic oligonucleotide
  Antisense strand to SEQ ID NO: 618184
ugucucagacucuuagggc

SEQ ID NO: 618186 - RNA, 19 nt, Artificial Sequence
  Description of Artificial Sequence: Synthetic oligonucleotide
  Sense strand starting at position 2213 of SEQ ID NO: 585164
gggcuuugaguugaucacu

SEQ ID NO: 618187 - RNA, 19 nt, Artificial Sequence
  Description of Artificial Sequence: Synthetic oligonucleotide
  Antisense strand to SEQ ID NO: 618186
agugaucaacucaaagccc

SEQ ID NO: 618188 - RNA, 19 nt, Artificial Sequence
  Description of Artificial Sequence: Synthetic oligonucleotide
  Sense strand starting at position 2218 of SEQ ID NO: 585164
uugaguugaucacuuucca

SEQ ID NO: 618189 - RNA, 19 nt, Artificial Sequence
  Description of Artificial Sequence: Synthetic oligonucleotide
  Antisense strand to SEQ ID NO: 618188
uggaaagugaucaacucaa

SEQ ID NO: 618190 - RNA, 19 nt, Artificial Sequence
  Description of Artificial Sequence: Synthetic oligonucleotide
  Sense strand starting at position 2234 of SEQ ID NO: 585164
ccacuccaggaauguuaua

SEQ ID NO: 618191 - RNA, 19 nt, Artificial Sequence
  Description of Artificial Sequence: Synthetic oligonucleotide
  Antisense strand to SEQ ID NO: 618190
uauaacauuccuggagugg

SEQ ID NO: 618192 - RNA, 19 nt, Artificial Sequence
  Description of Artificial Sequence: Synthetic oligonucleotide
  Sense strand starting at position 2239 of SEQ ID NO: 585164
ccaggaauguuauaagaaa

SEQ ID NO: 618193 - RNA, 19 nt, Artificial Sequence
  Description of Artificial Sequence: Synthetic oligonucleotide
  Antisense strand to SEQ ID NO: 618192
uuucuuauaacauuccugg

SEQ ID NO: 618194 - RNA, 19 nt, Artificial Sequence
  Description of Artificial Sequence: Synthetic oligonucleotide
  Sense strand starting at position 2439 of SEQ ID NO: 585164
ccacucuuauguuuaguua

SEQ ID NO: 618195 - RNA, 19 nt, Artificial Sequence
  Description of Artificial Sequence: Synthetic oligonucleotide
  Antisense strand to SEQ ID NO: 618194
uaacuaaacauaagagugg

SEQ ID NO: 618196 - RNA, 19 nt, Artificial Sequence
  Description of Artificial Sequence: Synthetic oligonucleotide
  Sense strand starting at position 2448 of SEQ ID NO: 585164
uguuuaguuauugguagga

SEQ ID NO: 618197 - RNA, 19 nt, Artificial Sequence
  Description of Artificial Sequence: Synthetic oligonucleotide
  Antisense strand to SEQ ID NO: 618196
uccuaccaauaacuaaaca

SEQ ID NO: 618198 - RNA, 19 nt, Artificial Sequence
  Description of Artificial Sequence: Synthetic oligonucleotide
  Sense strand starting at position 2452 of SEQ ID NO: 585164
uaguuauugguaggaaauc

SEQ ID NO: 618199 - RNA, 19 nt, Artificial Sequence
  Description of Artificial Sequence: Synthetic oligonucleotide
  Antisense strand to SEQ ID NO: 618198
gauuuccuaccaauaacua

SEQ ID NO: 618200 - RNA, 19 nt, Artificial Sequence
  Description of Artificial Sequence: Synthetic oligonucleotide
  Sense strand starting at position 2489 of SEQ ID NO: 585164
gguaaccucuaacagauuu

SEQ ID NO: 618201 - RNA, 19 nt, Artificial Sequence
  Description of Artificial Sequence: Synthetic oligonucleotide
  Antisense strand to SEQ ID NO: 618200
aaaucuguuagagguuacc

SEQ ID NO: 618202 - RNA, 19 nt, Artificial Sequence
  Description of Artificial Sequence: Synthetic oligonucleotide
  Sense strand starting at position 2497 of SEQ ID NO: 585164
cuaacagauuuagauaugu

SEQ ID NO: 618203 - RNA, 19 nt, Artificial Sequence
  Description of Artificial Sequence: Synthetic oligonucleotide
  Antisense strand to SEQ ID NO: 618202
acauaucuaaaucuguuag

SEQ ID NO: 618204 - RNA, 19 nt, Artificial Sequence
  Description of Artificial Sequence: Synthetic oligonucleotide
  Sense strand starting at position 2630 of SEQ ID NO: 585164
gcuguauaucuugagcaag

SEQ ID NO: 618205 - RNA, 19 nt, Artificial Sequence
  Description of Artificial Sequence: Synthetic oligonucleotide
  Antisense strand to SEQ ID NO: 618204
cuugcucaagauauacagc

SEQ ID NO: 618206 - RNA, 19 nt, Artificial Sequence
  Description of Artificial Sequence: Synthetic oligonucleotide
  Sense strand starting at position 2724 of SEQ ID NO: 585164
acugauuccugucccagga

SEQ ID NO: 618207 - RNA, 19 nt, Artificial Sequence
  Description of Artificial Sequence: Synthetic oligonucleotide
  Antisense strand to SEQ ID NO: 618206
uccugggacaggaaucagu

SEQ ID NO: 618208 - RNA, 19 nt, Artificial Sequence
  Description of Artificial Sequence: Synthetic oligonucleotide
  Sense strand starting at position 2728 of SEQ ID NO: 585164
auuccugucccaggaaaca

SEQ ID NO: 618209 - RNA, 19 nt, Artificial Sequence
  Description of Artificial Sequence: Synthetic oligonucleotide
  Antisense strand to SEQ ID NO: 618208
uguuuccugggacaggaau

SEQ ID NO: 618210 - RNA, 19 nt, Artificial Sequence
  Description of Artificial Sequence: Synthetic oligonucleotide
  Sense strand starting at position 2748 of SEQ ID NO: 585164
gcuagucauaccgugcauu

SEQ ID NO: 618211 - RNA, 19 nt, Artificial Sequence
  Description of Artificial Sequence: Synthetic oligonucleotide
  Antisense strand to SEQ ID NO: 618210
aaugcacgguaugacuagc

SEQ ID NO: 618212 - RNA, 19 nt, Artificial Sequence
  Description of Artificial Sequence: Synthetic oligonucleotide
  Sense strand starting at position 2749 of SEQ ID NO: 585164
cuagucauaccgugcauuu

SEQ ID NO: 618213 - RNA, 19 nt, Artificial Sequence
  Description of Artificial Sequence: Synthetic oligonucleotide
  Antisense strand to SEQ ID NO: 618212
aaaugcacgguaugacuag

SEQ ID NO: 618214 - RNA, 19 nt, Artificial Sequence
  Description of Artificial Sequence: Synthetic oligonucleotide
  Sense strand starting at position 3009 of SEQ ID NO: 585164
gucauaaagccaggauaaa

SEQ ID NO: 618215 - RNA, 19 nt, Artificial Sequence
  Description of Artificial Sequence: Synthetic oligonucleotide
  Antisense strand to SEQ ID NO: 618214
uuuauccuggcuuuaugac

SEQ ID NO: 618216 - RNA, 19 nt, Artificial Sequence
  Description of Artificial Sequence: Synthetic oligonucleotide
  Sense strand starting at position 3343 of SEQ ID NO: 585164
ggcccaaaucaaugauuau

SEQ ID NO: 618217 - RNA, 19 nt, Artificial Sequence
  Description of Artificial Sequence: Synthetic oligonucleotide
  Antisense strand to SEQ ID NO: 618216
auaaucauugauuugggcc

SEQ ID NO: 618218 - RNA, 19 nt, Artificial Sequence
  Description of Artificial Sequence: Synthetic oligonucleotide
  Sense strand starting at position 87 of SEQ ID NO: 585165
cuuggacgcuuucccaaau

SEQ ID NO: 618219 - RNA, 19 nt, Artificial Sequence
  Description of Artificial Sequence: Synthetic oligonucleotide
  Antisense strand to SEQ ID NO: 618218
auuugggaaagcguccaag

SEQ ID NO: 618220 - RNA, 19 nt, Artificial Sequence
  Description of Artificial Sequence: Synthetic oligonucleotide
  Sense strand starting at position 88 of SEQ ID NO: 585165
uuggacgcuuucccaaauu

SEQ ID NO: 618221 - RNA, 19 nt, Artificial Sequence
  Description of Artificial Sequence: Synthetic oligonucleotide
  Antisense strand to SEQ ID NO: 618220
aauuugggaaagcguccaa

SEQ ID NO: 618222 - RNA, 19 nt, Artificial Sequence
  Description of Artificial Sequence: Synthetic oligonucleotide
  Sense strand starting at position 151 of SEQ ID NO: 585165
ugcaaauuggaauguccaa

SEQ ID NO: 618223 - RNA, 19 nt, Artificial Sequence
  Description of Artificial Sequence: Synthetic oligonucleotide
  Antisense strand to SEQ ID NO: 618222
uuggacauuccaauuugca

SEQ ID NO: 618224 - RNA, 19 nt, Artificial Sequence
  Description of Artificial Sequence: Synthetic oligonucleotide
  Sense strand starting at position 192 of SEQ ID NO: 585165
ugagaauucucuuuggauc

SEQ ID NO: 618225 - RNA, 19 nt, Artificial Sequence
  Description of Artificial Sequence: Synthetic oligonucleotide
  Antisense strand to SEQ ID NO: 618224
gauccaaagagaauucuca

SEQ ID NO: 618226 - RNA, 19 nt, Artificial Sequence
  Description of Artificial Sequence: Synthetic oligonucleotide
  Sense strand starting at position 203 of SEQ ID NO: 585165
uuuggaucaucuguagcua

SEQ ID NO: 618227 - RNA, 19 nt, Artificial Sequence
  Description of Artificial Sequence: Synthetic oligonucleotide
  Antisense strand to SEQ ID NO: 618226
uagcuacagaugauccaaa

SEQ ID NO: 618228 - RNA, 19 nt, Artificial Sequence
  Description of Artificial Sequence: Synthetic oligonucleotide
  Sense strand starting at position 207 of SEQ ID NO: 585165
gaucaucuguagcuagauu

SEQ ID NO: 618229 - RNA, 19 nt, Artificial Sequence
  Description of Artificial Sequence: Synthetic oligonucleotide
  Antisense strand to SEQ ID NO: 618228
aaucuagcuacagaugauc

SEQ ID NO: 618230 - RNA, 19 nt, Artificial Sequence
  Description of Artificial Sequence: Synthetic oligonucleotide
  Sense strand starting at position 279 of SEQ ID NO: 585165
agguuagauuuguagaaac

SEQ ID NO: 618231 - RNA, 19 nt, Artificial Sequence
  Description of Artificial Sequence: Synthetic oligonucleotide
  Antisense strand to SEQ ID NO: 618230
guuucuacaaaucuaaccu

SEQ ID NO: 618232 - RNA, 19 nt, Artificial Sequence
  Description of Artificial Sequence: Synthetic oligonucleotide
  Sense strand starting at position 379 of SEQ ID NO: 585165
agcagcuuccaagauucua

SEQ ID NO: 618233 - RNA, 19 nt, Artificial Sequence
  Description of Artificial Sequence: Synthetic oligonucleotide
  Antisense strand to SEQ ID NO: 618232
uagaaucuuggaagcugcu

SEQ ID NO: 618234 - RNA, 19 nt, Artificial Sequence
  Description of Artificial Sequence: Synthetic oligonucleotide
  Sense strand starting at position 416 of SEQ ID NO: 585165
guaacagcuccaugaacuu

SEQ ID NO: 618235 - RNA, 19 nt, Artificial Sequence
  Description of Artificial Sequence: Synthetic oligonucleotide
  Antisense strand to SEQ ID NO: 618234
aaguucauggagcuguuac

SEQ ID NO: 618236 - RNA, 19 nt, Artificial Sequence
  Description of Artificial Sequence: Synthetic oligonucleotide
  Sense strand starting at position 423 of SEQ ID NO: 585165
cuccaugaacuuugagcaa

SEQ ID NO: 618237 - RNA, 19 nt, Artificial Sequence
  Description of Artificial Sequence: Synthetic oligonucleotide
  Antisense strand to SEQ ID NO: 618236
uugcucaaaguucauggag

SEQ ID NO: 618238 - RNA, 19 nt, Artificial Sequence
  Description of Artificial Sequence: Synthetic oligonucleotide
  Sense strand starting at position 436 of SEQ ID NO: 585165
gagcaaugagacugcauca

SEQ ID NO: 618239 - RNA, 19 nt, Artificial Sequence
  Description of Artificial Sequence: Synthetic oligonucleotide
  Antisense strand to SEQ ID NO: 618238
ugaugcagucucauugcuc

SEQ ID NO: 618240 - RNA, 19 nt, Artificial Sequence
  Description of Artificial Sequence: Synthetic oligonucleotide
  Sense strand starting at position 453 of SEQ ID NO: 585165
caaugaaagcgaugucuaa

SEQ ID NO: 618241 - RNA, 19 nt, Artificial Sequence
  Description of Artificial Sequence: Synthetic oligonucleotide
  Antisense strand to SEQ ID NO: 618240
uuagacaucgcuuucauug

SEQ ID NO: 618242 - RNA, 19 nt, Artificial Sequence
  Description of Artificial Sequence: Synthetic oligonucleotide
  Sense strand starting at position 457 of SEQ ID NO: 585165
gaaagcgaugucuaacauc

SEQ ID NO: 618243 - RNA, 19 nt, Artificial Sequence
  Description of Artificial Sequence: Synthetic oligonucleotide
  Antisense strand to SEQ ID NO: 618242
gauguuagacaucgcuuuc

SEQ ID NO: 618244 - RNA, 19 nt, Artificial Sequence
  Description of Artificial Sequence: Synthetic oligonucleotide
  Sense strand starting at position 468 of SEQ ID NO: 585165
cuaacauccguccgaaaga

SEQ ID NO: 618245 - RNA, 19 nt, Artificial Sequence
  Description of Artificial Sequence: Synthetic oligonucleotide
  Antisense strand to SEQ ID NO: 618244
ucuuucggacggauguuag

SEQ ID NO: 618246 - RNA, 19 nt, Artificial Sequence
  Description of Artificial Sequence: Synthetic oligonucleotide
  Sense strand starting at position 555 of SEQ ID NO: 585165
uguguuuaucaaggacuac

SEQ ID NO: 618247 - RNA, 19 nt, Artificial Sequence
  Description of Artificial Sequence: Synthetic oligonucleotide
  Antisense strand to SEQ ID NO: 618246
guaguccuugauaaacaca

SEQ ID NO: 618248 - RNA, 19 nt, Artificial Sequence
  Description of Artificial Sequence: Synthetic oligonucleotide
  Sense strand starting at position 608 of SEQ ID NO: 585165
gcaacuauguaaucaaagu

SEQ ID NO: 618249 - RNA, 19 nt, Artificial Sequence
  Description of Artificial Sequence: Synthetic oligonucleotide
  Antisense strand to SEQ ID NO: 618248
acuuugauuacauaguugc

SEQ ID NO: 618250 - RNA, 19 nt, Artificial Sequence
  Description of Artificial Sequence: Synthetic oligonucleotide
  Sense strand starting at position 776 of SEQ ID NO: 585165
gagucaguucucuaggcga

SEQ ID NO: 618251 - RNA, 19 nt, Artificial Sequence
  Description of Artificial Sequence: Synthetic oligonucleotide
  Antisense strand to SEQ ID NO: 618250
ucgccuagagaacugacuc

SEQ ID NO: 618252 - RNA, 19 nt, Artificial Sequence
  Description of Artificial Sequence: Synthetic oligonucleotide
  Sense strand starting at position 794 of SEQ ID NO: 585165
agcagaauguuagcaaacu

SEQ ID NO: 618253 - RNA, 19 nt, Artificial Sequence
  Description of Artificial Sequence: Synthetic oligonucleotide
  Antisense strand to SEQ ID NO: 618252
aguuugcuaacauucugcu

SEQ ID NO: 618254 - RNA, 19 nt, Artificial Sequence
  Description of Artificial Sequence: Synthetic oligonucleotide
  Sense strand starting at position 815 of SEQ ID NO: 585165
aucuaucaaucagaaugga

SEQ ID NO: 618255 - RNA, 19 nt, Artificial Sequence
  Description of Artificial Sequence: Synthetic oligonucleotide
  Antisense strand to SEQ ID NO: 618254
uccauucugauugauagau

SEQ ID NO: 618256 - RNA, 19 nt, Artificial Sequence
  Description of Artificial Sequence: Synthetic oligonucleotide
  Sense strand starting at position 2361 of SEQ ID NO: 585165
uaguguuaucuguaccucu

SEQ ID NO: 618257 - RNA, 19 nt, Artificial Sequence
  Description of Artificial Sequence: Synthetic oligonucleotide
  Antisense strand to SEQ ID NO: 618256
agagguacagauaacacua

SEQ ID NO: 618258 - RNA, 19 nt, Artificial Sequence
  Description of Artificial Sequence: Synthetic oligonucleotide
  Sense strand starting at position 2588 of SEQ ID NO: 585165
uuuguaacaugacuaagua

SEQ ID NO: 618259 - RNA, 19 nt, Artificial Sequence
  Description of Artificial Sequence: Synthetic oligonucleotide
  Antisense strand to SEQ ID NO: 618258
uacuuagucauguuacaaa

SEQ ID NO: 618260 - RNA, 19 nt, Artificial Sequence
  Description of Artificial Sequence: Synthetic oligonucleotide
  Sense strand starting at position 2606 of SEQ ID NO: 585165
agaagauuaucaguggcag

SEQ ID NO: 618261 - RNA, 19 nt, Artificial Sequence
  Description of Artificial Sequence: Synthetic oligonucleotide
  Antisense strand to SEQ ID NO: 618260
cugccacugauaaucuucu

SEQ ID NO: 618262 - RNA, 19 nt, Artificial Sequence
  Description of Artificial Sequence: Synthetic oligonucleotide
  Sense strand starting at position 2607 of SEQ ID NO: 585165
gaagauuaucaguggcaga

SEQ ID NO: 618263 - RNA, 19 nt, Artificial Sequence
  Description of Artificial Sequence: Synthetic oligonucleotide
  Antisense strand to SEQ ID NO: 618262
ucugccacugauaaucuuc

SEQ ID NO: 618264 - RNA, 19 nt, Artificial Sequence
  Description of Artificial Sequence: Synthetic oligonucleotide
  Sense strand starting at position 2654 of SEQ ID NO: 585165
uucuaaugaugugucagaa

SEQ ID NO: 618265 - RNA, 19 nt, Artificial Sequence
  Description of Artificial Sequence: Synthetic oligonucleotide
  Antisense strand to SEQ ID NO: 618264
uucugacacaucauuagaa

SEQ ID NO: 618266 - RNA, 19 nt, Artificial Sequence
  Description of Artificial Sequence: Synthetic oligonucleotide
  Sense strand starting at position 2815 of SEQ ID NO: 585165
acaugaaagagucaguguu

SEQ ID NO: 618267 - RNA, 19 nt, Artificial Sequence
  Description of Artificial Sequence: Synthetic oligonucleotide
  Antisense strand to SEQ ID NO: 618266
aacacugacucuuucaugu

SEQ ID NO: 618268 - RNA, 19 nt, Artificial Sequence
  Description of Artificial Sequence: Synthetic oligonucleotide
  Sense strand starting at position 2817 of SEQ ID NO: 585165
augaaagagucaguguuga

SEQ ID NO: 618269 - RNA, 19 nt, Artificial Sequence
  Description of Artificial Sequence: Synthetic oligonucleotide
  Antisense strand to SEQ ID NO: 618268
ucaacacugacucuuucau

SEQ ID NO: 618270 - RNA, 19 nt, Artificial Sequence
  Description of Artificial Sequence: Synthetic oligonucleotide
  Sense strand starting at position 2822 of SEQ ID NO: 585165
agagucaguguugauauca

SEQ ID NO: 618271 - RNA, 19 nt, Artificial Sequence
  Description of Artificial Sequence: Synthetic oligonucleotide
  Antisense strand to SEQ ID NO: 618270
ugauaucaacacugacucu

SEQ ID NO: 618272 - RNA, 19 nt, Artificial Sequence
  Description of Artificial Sequence: Synthetic oligonucleotide
  Sense strand starting at position 2832 of SEQ ID NO: 585165
uugauaucauaugaugaag

SEQ ID NO: 618273 - RNA, 19 nt, Artificial Sequence
  Description of Artificial Sequence: Synthetic oligonucleotide
  Antisense strand to SEQ ID NO: 618272
cuucaucauaugauaucaa

SEQ ID NO: 618274 - RNA, 19 nt, Artificial Sequence
  Description of Artificial Sequence: Synthetic oligonucleotide
  Sense strand starting at position 2927 of SEQ ID NO: 585165
uuuguucugcuuugagaug

SEQ ID NO: 618275 - RNA, 19 nt, Artificial Sequence
  Description of Artificial Sequence: Synthetic oligonucleotide
  Antisense strand to SEQ ID NO: 618274
caucucaaagcagaacaaa

SEQ ID NO: 618276 - RNA, 19 nt, Artificial Sequence
  Description of Artificial Sequence: Synthetic oligonucleotide
  Sense strand starting at position 3060 of SEQ ID NO: 585165
gcaggcaguaugcuuugua

SEQ ID NO: 618277 - RNA, 19 nt, Artificial Sequence
  Description of Artificial Sequence: Synthetic oligonucleotide
  Antisense strand to SEQ ID NO: 618276
uacaaagcauacugccugc

SEQ ID NO: 618278 - RNA, 19 nt, Artificial Sequence
  Description of Artificial Sequence: Synthetic oligonucleotide
  Sense strand starting at position 3295 of SEQ ID NO: 585165
ccucaaugcgguugagaua

SEQ ID NO: 618279 - RNA, 19 nt, Artificial Sequence
  Description of Artificial Sequence: Synthetic oligonucleotide
  Antisense strand to SEQ ID NO: 618278
uaucucaaccgcauugagg

SEQ ID NO: 618280 - RNA, 19 nt, Artificial Sequence
  Description of Artificial Sequence: Synthetic oligonucleotide
  Sense strand starting at position 3296 of SEQ ID NO: 585165
cucaaugcgguugagauaa

SEQ ID NO: 618281 - RNA, 19 nt, Artificial Sequence
  Description of Artificial Sequence: Synthetic oligonucleotide
  Antisense strand to SEQ ID NO: 618280
uuaucucaaccgcauugag

SEQ ID NO: 618282 - RNA, 19 nt, Artificial Sequence
  Description of Artificial Sequence: Synthetic oligonucleotide
  Sense strand starting at position 3400 of SEQ ID NO: 585165
gccuuauggauacagguga

SEQ ID NO: 618283 - RNA, 19 nt, Artificial Sequence
  Description of Artificial Sequence: Synthetic oligonucleotide
  Antisense strand to SEQ ID NO: 618282
ucaccuguauccauaaggc

SEQ ID NO: 618284 - RNA, 19 nt, Artificial Sequence
  Description of Artificial Sequence: Synthetic oligonucleotide
  Sense strand starting at position 3420 of SEQ ID NO: 585165
acaucauggcagcaauacu

SEQ ID NO: 618285 - RNA, 19 nt, Artificial Sequence
  Description of Artificial Sequence: Synthetic oligonucleotide
  Antisense strand to SEQ ID NO: 618284
aguauugcugccaugaugu

SEQ ID NO: 618286 - RNA, 19 nt, Artificial Sequence
  Description of Artificial Sequence: Synthetic oligonucleotide
  Sense strand starting at position 3475 of SEQ ID NO: 585165
auauaaaucuagccuacgu

SEQ ID NO: 618287 - RNA, 19 nt, Artificial Sequence
  Description of Artificial Sequence: Synthetic oligonucleotide
  Antisense strand to SEQ ID NO: 618286
acguaggcuagauuuauau

SEQ ID NO: 618288 - RNA, 19 nt, Artificial Sequence
  Description of Artificial Sequence: Synthetic oligonucleotide
  Sense strand starting at position 3842 of SEQ ID NO: 585165
guuugcaugccagagagaa

SEQ ID NO: 618289 - RNA, 19 nt, Artificial Sequence
  Description of Artificial Sequence: Synthetic oligonucleotide
  Antisense strand to SEQ ID NO: 618288
uucucucuggcaugcaaac

SEQ ID NO: 618290 - RNA, 19 nt, Artificial Sequence
  Description of Artificial Sequence: Synthetic oligonucleotide
  Sense strand starting at position 3844 of SEQ ID NO: 585165
uugcaugccagagagaaau

SEQ ID NO: 618291 - RNA, 19 nt, Artificial Sequence
  Description of Artificial Sequence: Synthetic oligonucleotide
  Antisense strand to SEQ ID NO: 618290
auuucucucuggcaugcaa

SEQ ID NO: 618292 - RNA, 19 nt, Artificial Sequence
  Description of Artificial Sequence: Synthetic oligonucleotide
  Sense strand starting at position 3850 of SEQ ID NO: 585165
gccagagagaaaugugaua

SEQ ID NO: 618293 - RNA, 19 nt, Artificial Sequence
  Description of Artificial Sequence: Synthetic oligonucleotide
  Antisense strand to SEQ ID NO: 618292
uaucacauuucucucuggc

SEQ ID NO: 618294 - RNA, 19 nt, Artificial Sequence
  Description of Artificial Sequence: Synthetic oligonucleotide
  Sense strand starting at position 3861 of SEQ ID NO: 585165
augugauaguguucccaga

SEQ ID NO: 618295 - RNA, 19 nt, Artificial Sequence
  Description of Artificial Sequence: Synthetic oligonucleotide
  Antisense strand to SEQ ID NO: 618294
ucugggaacacuaucacau

SEQ ID NO: 618296 - RNA, 19 nt, Artificial Sequence
  Description of Artificial Sequence: Synthetic oligonucleotide
  Sense strand starting at position 3863 of SEQ ID NO: 585165
gugauaguguucccagaga

SEQ ID NO: 618297 - RNA, 19 nt, Artificial Sequence
  Description of Artificial Sequence: Synthetic oligonucleotide
  Antisense strand to SEQ ID NO: 618296
ucucugggaacacuaucac

SEQ ID NO: 618298 - RNA, 19 nt, Artificial Sequence
  Description of Artificial Sequence: Synthetic oligonucleotide
  Sense strand starting at position 16 of SEQ ID NO: 585166
accaguuaugaguguggau

SEQ ID NO: 618299 - RNA, 19 nt, Artificial Sequence
  Description of Artificial Sequence: Synthetic oligonucleotide
  Antisense strand to SEQ ID NO: 618298
auccacacucauaacuggu

SEQ ID NO: 618300 - RNA, 19 nt, Artificial Sequence
  Description of Artificial Sequence: Synthetic oligonucleotide
  Sense strand starting at position 78 of SEQ ID NO: 585166
aguccaggccuuugcuaaa

SEQ ID NO: 618301 - RNA, 19 nt, Artificial Sequence
  Description of Artificial Sequence: Synthetic oligonucleotide
  Antisense strand to SEQ ID NO: 618300
uuuagcaaaggccuggacu

SEQ ID NO: 618302 - RNA, 19 nt, Artificial Sequence
  Description of Artificial Sequence: Synthetic oligonucleotide
  Sense strand starting at position 173 of SEQ ID NO: 585166
gccagaucagccugauaac

SEQ ID NO: 618303 - RNA, 19 nt, Artificial Sequence
  Description of Artificial Sequence: Synthetic oligonucleotide
  Antisense strand to SEQ ID NO: 618302
guuaucaggcugaucuggc

SEQ ID NO: 618304 - RNA, 19 nt, Artificial Sequence
  Description of Artificial Sequence: Synthetic oligonucleotide
  Sense strand starting at position 174 of SEQ ID NO: 585166
ccagaucagccugauaacu

SEQ ID NO: 618305 - RNA, 19 nt, Artificial Sequence
  Description of Artificial Sequence: Synthetic oligonucleotide
  Antisense strand to SEQ ID NO: 618304
aguuaucaggcugaucugg

SEQ ID NO: 618306 - RNA, 19 nt, Artificial Sequence
  Description of Artificial Sequence: Synthetic oligonucleotide
  Sense strand starting at position 216 of SEQ ID NO: 585166
guucuauguguugaaccuu

SEQ ID NO: 618307 - RNA, 19 nt, Artificial Sequence
  Description of Artificial Sequence: Synthetic oligonucleotide
  Antisense strand to SEQ ID NO: 618306
aagguucaacacauagaac

SEQ ID NO: 618308 - RNA, 19 nt, Artificial Sequence
  Description of Artificial Sequence: Synthetic oligonucleotide
  Sense strand starting at position 394 of SEQ ID NO: 585166
ggucuauuaugccucuuau

SEQ ID NO: 618309 - RNA, 19 nt, Artificial Sequence
  Description of Artificial Sequence: Synthetic oligonucleotide
  Antisense strand to SEQ ID NO: 618308
auaagaggcauaauagacc

SEQ ID NO: 618310 - RNA, 19 nt, Artificial Sequence
  Description of Artificial Sequence: Synthetic oligonucleotide
  Sense strand starting at position 434 of SEQ ID NO: 585166
agacaugucuuguuaauua

SEQ ID NO: 618311 - RNA, 19 nt, Artificial Sequence
  Description of Artificial Sequence: Synthetic oligonucleotide
  Antisense strand to SEQ ID NO: 618310
uaauuaacaagacaugucu

SEQ ID NO: 618312 - RNA, 19 nt, Artificial Sequence
  Description of Artificial Sequence: Synthetic oligonucleotide
  Sense strand starting at position 501 of SEQ ID NO: 585166
ugucuaauuugugucacau

SEQ ID NO: 618313 - RNA, 19 nt, Artificial Sequence
  Description of Artificial Sequence: Synthetic oligonucleotide
  Antisense strand to SEQ ID NO: 618312
augugacacaaauuagaca

SEQ ID NO: 618314 - RNA, 19 nt, Artificial Sequence
  Description of Artificial Sequence: Synthetic oligonucleotide
  Sense strand starting at position 510 of SEQ ID NO: 585166
ugugucacaucucuugaaa

SEQ ID NO: 618315 - RNA, 19 nt, Artificial Sequence
  Description of Artificial Sequence: Synthetic oligonucleotide
  Antisense strand to SEQ ID NO: 618314
uuucaagagaugugacaca

SEQ ID NO: 618316 - RNA, 19 nt, Artificial Sequence
  Description of Artificial Sequence: Synthetic oligonucleotide
  Sense strand starting at position 660 of SEQ ID NO: 585166
caucuuuaugguggagaaa

SEQ ID NO: 618317 - RNA, 19 nt, Artificial Sequence
  Description of Artificial Sequence: Synthetic oligonucleotide
  Antisense strand to SEQ ID NO: 618316
uuucuccaccauaaagaug

SEQ ID NO: 618318 - RNA, 19 nt, Artificial Sequence
  Description of Artificial Sequence: Synthetic oligonucleotide
  Sense strand starting at position 782 of SEQ ID NO: 585166
auaccauaagaucguuaua

SEQ ID NO: 618319 - RNA, 19 nt, Artificial Sequence
  Description of Artificial Sequence: Synthetic oligonucleotide
  Antisense strand to SEQ ID NO: 618318
uauaacgaucuuaugguau

SEQ ID NO: 618320 - RNA, 19 nt, Artificial Sequence
  Description of Artificial Sequence: Synthetic oligonucleotide
  Sense strand starting at position 784 of SEQ ID NO: 585166
accauaagaucguuauaag

SEQ ID NO: 618321 - RNA, 19 nt, Artificial Sequence
  Description of Artificial Sequence: Synthetic oligonucleotide
  Antisense strand to SEQ ID NO: 618320
cuuauaacgaucuuauggu

SEQ ID NO: 618322 - RNA, 19 nt, Artificial Sequence
  Description of Artificial Sequence: Synthetic oligonucleotide
  Sense strand starting at position 1007 of SEQ ID NO: 585166
agauguugcaucugaguca

SEQ ID NO: 618323 - RNA, 19 nt, Artificial Sequence
  Description of Artificial Sequence: Synthetic oligonucleotide
  Antisense strand to SEQ ID NO: 618322
ugacucagaugcaacaucu

SEQ ID NO: 618324 - RNA, 19 nt, Artificial Sequence
  Description of Artificial Sequence: Synthetic oligonucleotide
  Sense strand starting at position 1010 of SEQ ID NO: 585166
uguugcaucugagucaaua

SEQ ID NO: 618325 - RNA, 19 nt, Artificial Sequence
  Description of Artificial Sequence: Synthetic oligonucleotide
  Antisense strand to SEQ ID NO: 618324
uauugacucagaugcaaca

SEQ ID NO: 618326 - RNA, 19 nt, Artificial Sequence
  Description of Artificial Sequence: Synthetic oligonucleotide
  Sense strand starting at position 1028 of SEQ ID NO: 585166
agccaaauggccugaugaa

SEQ ID NO: 618327 - RNA, 19 nt, Artificial Sequence
  Description of Artificial Sequence: Synthetic oligonucleotide
  Antisense strand to SEQ ID NO: 618326
uucaucaggccauuuggcu

SEQ ID NO: 618328 - RNA, 19 nt, Artificial Sequence
  Description of Artificial Sequence: Synthetic oligonucleotide
  Sense strand starting at position 1029 of SEQ ID NO: 585166
gccaaauggccugaugaaa

SEQ ID NO: 618329 - RNA, 19 nt, Artificial Sequence
  Description of Artificial Sequence: Synthetic oligonucleotide
  Antisense strand to SEQ ID NO: 618328
uuucaucaggccauuuggc

SEQ ID NO: 618330 - RNA, 19 nt, Artificial Sequence
  Description of Artificial Sequence: Synthetic oligonucleotide
  Sense strand starting at position 1086 of SEQ ID NO: 585166
uagcucuucgaagacagaa

SEQ ID NO: 618331 - RNA, 19 nt, Artificial Sequence
  Description of Artificial Sequence: Synthetic oligonucleotide
  Antisense strand to SEQ ID NO: 618330
uucugucuucgaagagcua

SEQ ID NO: 618332 - RNA, 19 nt, Artificial Sequence
  Description of Artificial Sequence: Synthetic oligonucleotide
  Sense strand starting at position 1368 of SEQ ID NO: 585166
gcaaccuuccugggauugu

SEQ ID NO: 618333 - RNA, 19 nt, Artificial Sequence
  Description of Artificial Sequence: Synthetic oligonucleotide
  Antisense strand to SEQ ID NO: 618332
acaaucccaggaagguugc

SEQ ID NO: 618334 - RNA, 19 nt, Artificial Sequence
  Description of Artificial Sequence: Synthetic oligonucleotide
  Sense strand starting at position 1388 of SEQ ID NO: 585166
uuagguuacgugcaagaac

SEQ ID NO: 618335 - RNA, 19 nt, Artificial Sequence
  Description of Artificial Sequence: Synthetic oligonucleotide
  Antisense strand to SEQ ID NO: 618334
guucuugcacguaaccuaa

SEQ ID NO: 618336 - RNA, 19 nt, Artificial Sequence
  Description of Artificial Sequence: Synthetic oligonucleotide
  Sense strand starting at position 1395 of SEQ ID NO: 585166
acgugcaagaacugaugau

SEQ ID NO: 618337 - RNA, 19 nt, Artificial Sequence
  Description of Artificial Sequence: Synthetic oligonucleotide
  Antisense strand to SEQ ID NO: 618336
aucaucaguucuugcacgu

SEQ ID NO: 618338 - RNA, 19 nt, Artificial Sequence
  Description of Artificial Sequence: Synthetic oligonucleotide
  Sense strand starting at position 1461 of SEQ ID NO: 585166
gcuacucuguccucagaga

SEQ ID NO: 618339 - RNA, 19 nt, Artificial Sequence
  Description of Artificial Sequence: Synthetic oligonucleotide
  Antisense strand to SEQ ID NO: 618338
ucucugaggacagaguagc

SEQ ID NO: 618340 - RNA, 19 nt, Artificial Sequence
  Description of Artificial Sequence: Synthetic oligonucleotide
  Sense strand starting at position 1462 of SEQ ID NO: 585166
cuacucuguccucagagau

SEQ ID NO: 618341 - RNA, 19 nt, Artificial Sequence
  Description of Artificial Sequence: Synthetic oligonucleotide
  Antisense strand to SEQ ID NO: 618340
aucucugaggacagaguag

SEQ ID NO: 618342 - RNA, 19 nt, Artificial Sequence
  Description of Artificial Sequence: Synthetic oligonucleotide
  Sense strand starting at position 1570 of SEQ ID NO: 585166
uuccgaaacuauuccugaa

SEQ ID NO: 618343 - RNA, 19 nt, Artificial Sequence
  Description of Artificial Sequence: Synthetic oligonucleotide
  Antisense strand to SEQ ID NO: 618342
uucaggaauaguuucggaa

SEQ ID NO: 618344 - RNA, 19 nt, Artificial Sequence
  Description of Artificial Sequence: Synthetic oligonucleotide
  Sense strand starting at position 1577 of SEQ ID NO: 585166
acuauuccugaaggcgauu

SEQ ID NO: 618345 - RNA, 19 nt, Artificial Sequence
  Description of Artificial Sequence: Synthetic oligonucleotide
  Antisense strand to SEQ ID NO: 618344
aaucgccuucaggaauagu

SEQ ID NO: 618346 - RNA, 19 nt, Artificial Sequence
  Description of Artificial Sequence: Synthetic oligonucleotide
  Sense strand starting at position 1857 of SEQ ID NO: 585166
augguaacaucugcaaucu

SEQ ID NO: 618347 - RNA, 19 nt, Artificial Sequence
  Description of Artificial Sequence: Synthetic oligonucleotide
  Antisense strand to SEQ ID NO: 618346
agauugcagauguuaccau

SEQ ID NO: 618348 - RNA, 19 nt, Artificial Sequence
  Description of Artificial Sequence: Synthetic oligonucleotide
  Sense strand starting at position 1869 of SEQ ID NO: 585166
gcaaucucacgcuaaacua

SEQ ID NO: 618349 - RNA, 19 nt, Artificial Sequence
  Description of Artificial Sequence: Synthetic oligonucleotide
  Antisense strand to SEQ ID NO: 618348
uaguuuagcgugagauugc

SEQ ID NO: 618350 - RNA, 19 nt, Artificial Sequence
  Description of Artificial Sequence: Synthetic oligonucleotide
  Sense strand starting at position 2111 of SEQ ID NO: 585166
ggaguaacuuuccucuucu

SEQ ID NO: 618351 - RNA, 19 nt, Artificial Sequence
  Description of Artificial Sequence: Synthetic oligonucleotide
  Antisense strand to SEQ ID NO: 618350
agaagaggaaaguuacucc

SEQ ID NO: 618352 - RNA, 19 nt, Artificial Sequence
  Description of Artificial Sequence: Synthetic oligonucleotide
  Sense strand starting at position 2146 of SEQ ID NO: 585166
cccuauuaucggcaucuga

SEQ ID NO: 618353 - RNA, 19 nt, Artificial Sequence
  Description of Artificial Sequence: Synthetic oligonucleotide
  Antisense strand to SEQ ID NO: 618352
ucagaugccgauaauaggg

SEQ ID NO: 618354 - RNA, 19 nt, Artificial Sequence
  Description of Artificial Sequence: Synthetic oligonucleotide
  Sense strand starting at position 2156 of SEQ ID NO: 585166
ggcaucugaucuuccuagu

SEQ ID NO: 618355 - RNA, 19 nt, Artificial Sequence
  Description of Artificial Sequence: Synthetic oligonucleotide
  Antisense strand to SEQ ID NO: 618354
acuaggaagaucagaugcc

SEQ ID NO: 618356 - RNA, 19 nt, Artificial Sequence
  Description of Artificial Sequence: Synthetic oligonucleotide
  Sense strand starting at position 2162 of SEQ ID NO: 585166
ugaucuuccuaguucggau

SEQ ID NO: 618357 - RNA, 19 nt, Artificial Sequence
  Description of Artificial Sequence: Synthetic oligonucleotide
  Antisense strand to SEQ ID NO: 618356
auccgaacuaggaagauca

SEQ ID NO: 618358 - RNA, 19 nt, Artificial Sequence
  Description of Artificial Sequence: Synthetic oligonucleotide
  Sense strand starting at position 2527 of SEQ ID NO: 585166
gcagcagcaccucaucaau

SEQ ID NO: 618359 - RNA, 19 nt, Artificial Sequence
  Description of Artificial Sequence: Synthetic oligonucleotide
  Antisense strand to SEQ ID NO: 618358
auugaugaggugcugcugc

SEQ ID NO: 618360 - RNA, 19 nt, Artificial Sequence
  Description of Artificial Sequence: Synthetic oligonucleotide
  Sense strand starting at position 3144 of SEQ ID NO: 585166
cggcgaaucgcacagacaa

SEQ ID NO: 618361 - RNA, 19 nt, Artificial Sequence
  Description of Artificial Sequence: Synthetic oligonucleotide
  Antisense strand to SEQ ID NO: 618360
uugucugugcgauucgccg

SEQ ID NO: 618362 - RNA, 19 nt, Artificial Sequence
  Description of Artificial Sequence: Synthetic oligonucleotide
  Sense strand starting at position 3202 of SEQ ID NO: 585166
ggagucuccuuucuuccua

SEQ ID NO: 618363 - RNA, 19 nt, Artificial Sequence
  Description of Artificial Sequence: Synthetic oligonucleotide
  Antisense strand to SEQ ID NO: 618362
uaggaagaaaggagacucc

SEQ ID NO: 618364 - RNA, 19 nt, Artificial Sequence
  Description of Artificial Sequence: Synthetic oligonucleotide
  Sense strand starting at position 3224 of SEQ ID NO: 585166
cuccguugggaaugaaaua

SEQ ID NO: 618365 - RNA, 19 nt, Artificial Sequence
  Description of Artificial Sequence: Synthetic oligonucleotide
  Antisense strand to SEQ ID NO: 618364
uauuucauucccaacggag

SEQ ID NO: 618366 - RNA, 19 nt, Artificial Sequence
  Description of Artificial Sequence: Synthetic oligonucleotide
  Sense strand starting at position 3816 of SEQ ID NO: 585166
gugcgaacagccgauaaua

SEQ ID NO: 618367 - RNA, 19 nt, Artificial Sequence
  Description of Artificial Sequence: Synthetic oligonucleotide
  Antisense strand to SEQ ID NO: 618366
uauuaucggcuguucgcac

SEQ ID NO: 618368 - RNA, 19 nt, Artificial Sequence
  Description of Artificial Sequence: Synthetic oligonucleotide
  Sense strand starting at position 3818 of SEQ ID NO: 585166
gcgaacagccgauaauaau

SEQ ID NO: 618369 - RNA, 19 nt, Artificial Sequence
  Description of Artificial Sequence: Synthetic oligonucleotide
  Antisense strand to SEQ ID NO: 618368
auuauuaucggcuguucgc

SEQ ID NO: 618370 - RNA, 19 nt, Artificial Sequence
  Description of Artificial Sequence: Synthetic oligonucleotide
  Sense strand starting at position 3862 of SEQ ID NO: 585166
gcgugcugagcaucauacu

SEQ ID NO: 618371 - RNA, 19 nt, Artificial Sequence
  Description of Artificial Sequence: Synthetic oligonucleotide
  Antisense strand to SEQ ID NO: 618370
aguaugaugcucagcacgc

SEQ ID NO: 618372 - RNA, 19 nt, Artificial Sequence
  Description of Artificial Sequence: Synthetic oligonucleotide
  Sense strand starting at position 3863 of SEQ ID NO: 585166
cgugcugagcaucauacua

SEQ ID NO: 618373 - RNA, 19 nt, Artificial Sequence
  Description of Artificial Sequence: Synthetic oligonucleotide
  Antisense strand to SEQ ID NO: 618372
uaguaugaugcucagcacg

SEQ ID NO: 618374 - RNA, 19 nt, Artificial Sequence
  Description of Artificial Sequence: Synthetic oligonucleotide
  Sense strand starting at position 3945 of SEQ ID NO: 585166
uuaccagugaugugaauga

SEQ ID NO: 618375 - RNA, 19 nt, Artificial Sequence
  Description of Artificial Sequence: Synthetic oligonucleotide
  Antisense strand to SEQ ID NO: 618374
ucauucacaucacugguaa

SEQ ID NO: 618376 - RNA, 19 nt, Artificial Sequence
  Description of Artificial Sequence: Synthetic oligonucleotide
  Sense strand starting at position 3956 of SEQ ID NO: 585166
gugaaugagccgcaaugaa

SEQ ID NO: 618377 - RNA, 19 nt, Artificial Sequence
  Description of Artificial Sequence: Synthetic oligonucleotide
  Antisense strand to SEQ ID NO: 618376
uucauugcggcucauucac

SEQ ID NO: 618378 - RNA, 19 nt, Artificial Sequence
  Description of Artificial Sequence: Synthetic oligonucleotide
  Sense strand starting at position 7 of SEQ ID NO: 585167
gcuacucuguccucagaga

SEQ ID NO: 618379 - RNA, 19 nt, Artificial Sequence
  Description of Artificial Sequence: Synthetic oligonucleotide
  Antisense strand to SEQ ID NO: 618378
ucucugaggacagaguagc

SEQ ID NO: 618380 - RNA, 19 nt, Artificial Sequence
  Description of Artificial Sequence: Synthetic oligonucleotide
  Sense strand starting at position 8 of SEQ ID NO: 585167
cuacucuguccucagagau

SEQ ID NO: 618381 - RNA, 19 nt, Artificial Sequence
  Description of Artificial Sequence: Synthetic oligonucleotide
  Antisense strand to SEQ ID NO: 618380
aucucugaggacagaguag

SEQ ID NO: 618382 - RNA, 19 nt, Artificial Sequence
  Description of Artificial Sequence: Synthetic oligonucleotide
  Sense strand starting at position 116 of SEQ ID NO: 585167
uuccgaaacuauuccugaa

SEQ ID NO: 618383 - RNA, 19 nt, Artificial Sequence
  Description of Artificial Sequence: Synthetic oligonucleotide
  Antisense strand to SEQ ID NO: 618382
uucaggaauaguuucggaa

SEQ ID NO: 618384 - RNA, 19 nt, Artificial Sequence
  Description of Artificial Sequence: Synthetic oligonucleotide
  Sense strand starting at position 123 of SEQ ID NO: 585167
acuauuccugaaggcgauu

SEQ ID NO: 618385 - RNA, 19 nt, Artificial Sequence
  Description of Artificial Sequence: Synthetic oligonucleotide
  Antisense strand to SEQ ID NO: 618384
aaucgccuucaggaauagu

SEQ ID NO: 618386 - RNA, 19 nt, Artificial Sequence
  Description of Artificial Sequence: Synthetic oligonucleotide
  Sense strand starting at position 403 of SEQ ID NO: 585167
augguaacaucugcaaucu

SEQ ID NO: 618387 - RNA, 19 nt, Artificial Sequence
  Description of Artificial Sequence: Synthetic oligonucleotide
  Antisense strand to SEQ ID NO: 618386
agauugcagauguuaccau

SEQ ID NO: 618388 - RNA, 19 nt, Artificial Sequence
  Description of Artificial Sequence: Synthetic oligonucleotide
  Sense strand starting at position 415 of SEQ ID NO: 585167
gcaaucucacgcuaaacua

SEQ ID NO: 618389 - RNA, 19 nt, Artificial Sequence
  Description of Artificial Sequence: Synthetic oligonucleotide
  Antisense strand to SEQ ID NO: 618388
uaguuuagcgugagauugc

SEQ ID NO: 618390 - RNA, 19 nt, Artificial Sequence
  Description of Artificial Sequence: Synthetic oligonucleotide
  Sense strand starting at position 657 of SEQ ID NO: 585167
ggaguaacuuuccucuucu

SEQ ID NO: 618391 - RNA, 19 nt, Artificial Sequence
  Description of Artificial Sequence: Synthetic oligonucleotide
  Antisense strand to SEQ ID NO: 618390
agaagaggaaaguuacucc

SEQ ID NO: 618392 - RNA, 19 nt, Artificial Sequence
  Description of Artificial Sequence: Synthetic oligonucleotide
  Sense strand starting at position 692 of SEQ ID NO: 585167
cccuauuaucggcaucuga

SEQ ID NO: 618393 - RNA, 19 nt, Artificial Sequence
  Description of Artificial Sequence: Synthetic oligonucleotide
  Antisense strand to SEQ ID NO: 618392
ucagaugccgauaauaggg

SEQ ID NO: 618394 - RNA, 19 nt, Artificial Sequence
  Description of Artificial Sequence: Synthetic oligonucleotide
  Sense strand starting at position 702 of SEQ ID NO: 585167
ggcaucugaucuuccuagu

SEQ ID NO: 618395 - RNA, 19 nt, Artificial Sequence
  Description of Artificial Sequence: Synthetic oligonucleotide
  Antisense strand to SEQ ID NO: 618394
acuaggaagaucagaugcc

SEQ ID NO: 618396 - RNA, 19 nt, Artificial Sequence
  Description of Artificial Sequence: Synthetic oligonucleotide
  Sense strand starting at position 708 of SEQ ID NO: 585167
ugaucuuccuaguucggau

SEQ ID NO: 618397 - RNA, 19 nt, Artificial Sequence
  Description of Artificial Sequence: Synthetic oligonucleotide
  Antisense strand to SEQ ID NO: 618396
auccgaacuaggaagauca

SEQ ID NO: 618398 - RNA, 19 nt, Artificial Sequence
  Description of Artificial Sequence: Synthetic oligonucleotide
  Sense strand starting at position 1073 of SEQ ID NO: 585167
gcagcagcaccucaucaau

SEQ ID NO: 618399 - RNA, 19 nt, Artificial Sequence
  Description of Artificial Sequence: Synthetic oligonucleotide
  Antisense strand to SEQ ID NO: 618398
auugaugaggugcugcugc

SEQ ID NO: 618400 - RNA, 19 nt, Artificial Sequence
  Description of Artificial Sequence: Synthetic oligonucleotide
  Sense strand starting at position 1085 of SEQ ID NO: 585167
caucaaugcggcuagugua

SEQ ID NO: 618401 - RNA, 19 nt, Artificial Sequence
  Description of Artificial Sequence: Synthetic oligonucleotide
  Antisense strand to SEQ ID NO: 618400
uacacuagccgcauugaug

SEQ ID NO: 618402 - RNA, 19 nt, Artificial Sequence
  Description of Artificial Sequence: Synthetic oligonucleotide
  Sense strand starting at position 1690 of SEQ ID NO: 585167
cggcgaaucgcacagacaa

SEQ ID NO: 618403 - RNA, 19 nt, Artificial Sequence
  Description of Artificial Sequence: Synthetic oligonucleotide
  Antisense strand to SEQ ID NO: 618402
uugucugugcgauucgccg

SEQ ID NO: 618404 - RNA, 19 nt, Artificial Sequence
  Description of Artificial Sequence: Synthetic oligonucleotide
  Sense strand starting at position 1748 of SEQ ID NO: 585167
ggagucuccuuucuuccua

SEQ ID NO: 618405 - RNA, 19 nt, Artificial Sequence
  Description of Artificial Sequence: Synthetic oligonucleotide
  Antisense strand to SEQ ID NO: 618404
uaggaagaaaggagacucc

SEQ ID NO: 618406 - RNA, 19 nt, Artificial Sequence
  Description of Artificial Sequence: Synthetic oligonucleotide
  Sense strand starting at position 1764 of SEQ ID NO: 585167
cuagcucuccguugggaau

SEQ ID NO: 618407 - RNA, 19 nt, Artificial Sequence
  Description of Artificial Sequence: Synthetic oligonucleotide
  Antisense strand to SEQ ID NO: 618406
auucccaacggagagcuag

SEQ ID NO: 618408 - RNA, 19 nt, Artificial Sequence
  Description of Artificial Sequence: Synthetic oligonucleotide
  Sense strand starting at position 1770 of SEQ ID NO: 585167
cuccguugggaaugaaaua

SEQ ID NO: 618409 - RNA, 19 nt, Artificial Sequence
  Description of Artificial Sequence: Synthetic oligonucleotide
  Antisense strand to SEQ ID NO: 618408
uauuucauucccaacggag

SEQ ID NO: 618410 - RNA, 19 nt, Artificial Sequence
  Description of Artificial Sequence: Synthetic oligonucleotide
  Sense strand starting at position 2297 of SEQ ID NO: 585167
ucgccugucccuuggaaga

SEQ ID NO: 618411 - RNA, 19 nt, Artificial Sequence
  Description of Artificial Sequence: Synthetic oligonucleotide
  Antisense strand to SEQ ID NO: 618410
ucuuccaagggacaggcga

SEQ ID NO: 618412 - RNA, 19 nt, Artificial Sequence
  Description of Artificial Sequence: Synthetic oligonucleotide
  Sense strand starting at position 2362 of SEQ ID NO: 585167
gugcgaacagccgauaaua

SEQ ID NO: 618413 - RNA, 19 nt, Artificial Sequence
  Description of Artificial Sequence: Synthetic oligonucleotide
  Antisense strand to SEQ ID NO: 618412
uauuaucggcuguucgcac

SEQ ID NO: 618414 - RNA, 19 nt, Artificial Sequence
  Description of Artificial Sequence: Synthetic oligonucleotide
  Sense strand starting at position 2364 of SEQ ID NO: 585167
gcgaacagccgauaauaau

SEQ ID NO: 618415 - RNA, 19 nt, Artificial Sequence
  Description of Artificial Sequence: Synthetic oligonucleotide
  Antisense strand to SEQ ID NO: 618414
auuauuaucggcuguucgc

SEQ ID NO: 618416 - RNA, 19 nt, Artificial Sequence
  Description of Artificial Sequence: Synthetic oligonucleotide
  Sense strand starting at position 2408 of SEQ ID NO: 585167
gcgugcugagcaucauacu

SEQ ID NO: 618417 - RNA, 19 nt, Artificial Sequence
  Description of Artificial Sequence: Synthetic oligonucleotide
  Antisense strand to SEQ ID NO: 618416
aguaugaugcucagcacgc

SEQ ID NO: 618418 - RNA, 19 nt, Artificial Sequence
  Description of Artificial Sequence: Synthetic oligonucleotide
  Sense strand starting at position 2409 of SEQ ID NO: 585167
cgugcugagcaucauacua

SEQ ID NO: 618419 - RNA, 19 nt, Artificial Sequence
  Description of Artificial Sequence: Synthetic oligonucleotide
  Antisense strand to SEQ ID NO: 618418
uaguaugaugcucagcacg

SEQ ID NO: 618420 - RNA, 19 nt, Artificial Sequence
  Description of Artificial Sequence: Synthetic oligonucleotide
  Sense strand starting at position 2491 of SEQ ID NO: 585167
uuaccagugaugugaauga

SEQ ID NO: 618421 - RNA, 19 nt, Artificial Sequence
  Description of Artificial Sequence: Synthetic oligonucleotide
  Antisense strand to SEQ ID NO: 618420
ucauucacaucacugguaa

SEQ ID NO: 618422 - RNA, 19 nt, Artificial Sequence
  Description of Artificial Sequence: Synthetic oligonucleotide
  Sense strand starting at position 2502 of SEQ ID NO: 585167
gugaaugagccgcaaugaa

SEQ ID NO: 618423 - RNA, 19 nt, Artificial Sequence
  Description of Artificial Sequence: Synthetic oligonucleotide
  Antisense strand to SEQ ID NO: 618422
uucauugcggcucauucac

SEQ ID NO: 618424 - RNA, 19 nt, Artificial Sequence
  Description of Artificial Sequence: Synthetic oligonucleotide
  Sense strand starting at position 2828 of SEQ ID NO: 585167
gugcgucucgugucuaguu

SEQ ID NO: 618425 - RNA, 19 nt, Artificial Sequence
  Description of Artificial Sequence: Synthetic oligonucleotide
  Antisense strand to SEQ ID NO: 618424
aacuagacacgagacgcac

SEQ ID NO: 618426 - RNA, 19 nt, Artificial Sequence
  Description of Artificial Sequence: Synthetic oligonucleotide
  Sense strand starting at position 2841 of SEQ ID NO: 585167
cuaguuucgagacggauac

SEQ ID NO: 618427 - RNA, 19 nt, Artificial Sequence
  Description of Artificial Sequence: Synthetic oligonucleotide
  Antisense strand to SEQ ID NO: 618426
guauccgucucgaaacuag

SEQ ID NO: 618428 - RNA, 19 nt, Artificial Sequence
  Description of Artificial Sequence: Synthetic oligonucleotide
  Sense strand starting at position 3108 of SEQ ID NO: 585167
guaggcgcucaauaaacau

SEQ ID NO: 618429 - RNA, 19 nt, Artificial Sequence
  Description of Artificial Sequence: Synthetic oligonucleotide
  Antisense strand to SEQ ID NO: 618428
auguuuauugagcgccuac

SEQ ID NO: 618430 - RNA, 19 nt, Artificial Sequence
  Description of Artificial Sequence: Synthetic oligonucleotide
  Sense strand starting at position 3220 of SEQ ID NO: 585167
agcugaaggucucuggaga

SEQ ID NO: 618431 - RNA, 19 nt, Artificial Sequence
  Description of Artificial Sequence: Synthetic oligonucleotide
  Antisense strand to SEQ ID NO: 618430
ucuccagagaccuucagcu

SEQ ID NO: 618432 - RNA, 19 nt, Artificial Sequence
  Description of Artificial Sequence: Synthetic oligonucleotide
  Sense strand starting at position 3325 of SEQ ID NO: 585167
ugauacuugcaagaguuua

SEQ ID NO: 618433 - RNA, 19 nt, Artificial Sequence
  Description of Artificial Sequence: Synthetic oligonucleotide
  Antisense strand to SEQ ID NO: 618432
uaaacucuugcaaguauca

SEQ ID NO: 618434 - RNA, 19 nt, Artificial Sequence
  Description of Artificial Sequence: Synthetic oligonucleotide
  Sense strand starting at position 3517 of SEQ ID NO: 585167
ggguguugcccucaauacu

SEQ ID NO: 618435 - RNA, 19 nt, Artificial Sequence
  Description of Artificial Sequence: Synthetic oligonucleotide
  Antisense strand to SEQ ID NO: 618434
aguauugagggcaacaccc

SEQ ID NO: 618436 - RNA, 19 nt, Artificial Sequence
  Description of Artificial Sequence: Synthetic oligonucleotide
  Sense strand starting at position 3641 of SEQ ID NO: 585167
aggcuugucacaugucaga

SEQ ID NO: 618437 - RNA, 19 nt, Artificial Sequence
  Description of Artificial Sequence: Synthetic oligonucleotide
  Antisense strand to SEQ ID NO: 618436
ucugacaugugacaagccu

SEQ ID NO: 618438 - RNA, 19 nt, Artificial Sequence
  Description of Artificial Sequence: Synthetic oligonucleotide
  Sense strand starting at position 3729 of SEQ ID NO: 585167
gacuucuggcucugccauu

SEQ ID NO: 618439 - RNA, 19 nt, Artificial Sequence
  Description of Artificial Sequence: Synthetic oligonucleotide
  Antisense strand to SEQ ID NO: 618438
aauggcagagccagaaguc

SEQ ID NO: 618440 - RNA, 19 nt, Artificial Sequence
  Description of Artificial Sequence: Synthetic oligonucleotide
  Sense strand starting at position 3809 of SEQ ID NO: 585167
guggguaauaaugguauau

SEQ ID NO: 618441 - RNA, 19 nt, Artificial Sequence
  Description of Artificial Sequence: Synthetic oligonucleotide
  Antisense strand to SEQ ID NO: 618440
auauaccauuauuacccac

SEQ ID NO: 618442 - RNA, 19 nt, Artificial Sequence
  Description of Artificial Sequence: Synthetic oligonucleotide
  Sense strand starting at position 3877 of SEQ ID NO: 585167
gagaauaaggcauggugca

SEQ ID NO: 618443 - RNA, 19 nt, Artificial Sequence
  Description of Artificial Sequence: Synthetic oligonucleotide
  Antisense strand to SEQ ID NO: 618442
ugcaccaugccuuauucuc

SEQ ID NO: 618444 - RNA, 19 nt, Artificial Sequence
  Description of Artificial Sequence: Synthetic oligonucleotide
  Sense strand starting at position 3878 of SEQ ID NO: 585167
agaauaaggcauggugcau

SEQ ID NO: 618445 - RNA, 19 nt, Artificial Sequence
  Description of Artificial Sequence: Synthetic oligonucleotide
  Antisense strand to SEQ ID NO: 618444
augcaccaugccuuauucu

SEQ ID NO: 618446 - RNA, 19 nt, Artificial Sequence
  Description of Artificial Sequence: Synthetic oligonucleotide
  Sense strand starting at position 3890 of SEQ ID NO: 585167
ggugcauaguaaguucuau

SEQ ID NO: 618447 - RNA, 19 nt, Artificial Sequence
  Description of Artificial Sequence: Synthetic oligonucleotide
  Antisense strand to SEQ ID NO: 618446
auagaacuuacuaugcacc

SEQ ID NO: 618448 - RNA, 19 nt, Artificial Sequence
  Description of Artificial Sequence: Synthetic oligonucleotide
  Sense strand starting at position 3933 of SEQ ID NO: 585167
gagaaugggucuguuacca

SEQ ID NO: 618449 - RNA, 19 nt, Artificial Sequence
  Description of Artificial Sequence: Synthetic oligonucleotide
  Antisense strand to SEQ ID NO: 618448
ugguaacagacccauucuc

SEQ ID NO: 618450 - RNA, 19 nt, Artificial Sequence
  Description of Artificial Sequence: Synthetic oligonucleotide
  Sense strand starting at position 3941 of SEQ ID NO: 585167
gucuguuaccaaugucauu

SEQ ID NO: 618451 - RNA, 19 nt, Artificial Sequence
  Description of Artificial Sequence: Synthetic oligonucleotide
  Antisense strand to SEQ ID NO: 618450
aaugacauugguaacagac

SEQ ID NO: 618452 - RNA, 19 nt, Artificial Sequence
  Description of Artificial Sequence: Synthetic oligonucleotide
  Sense strand starting at position 3951 of SEQ ID NO: 585167
aaugucauuucuugaugag

SEQ ID NO: 618453 - RNA, 19 nt, Artificial Sequence
  Description of Artificial Sequence: Synthetic oligonucleotide
  Antisense strand to SEQ ID NO: 618452
cucaucaagaaaugacauu

SEQ ID NO: 618454 - RNA, 19 nt, Artificial Sequence
  Description of Artificial Sequence: Synthetic oligonucleotide
  Sense strand starting at position 3954 of SEQ ID NO: 585167
gucauuucuugaugagaga

SEQ ID NO: 618455 - RNA, 19 nt, Artificial Sequence
  Description of Artificial Sequence: Synthetic oligonucleotide
  Antisense strand to SEQ ID NO: 618454
ucucucaucaagaaaugac

SEQ ID NO: 618456 - RNA, 19 nt, Artificial Sequence
  Description of Artificial Sequence: Synthetic oligonucleotide
  Sense strand starting at position 3974 of SEQ ID NO: 585167
accauuguacagugaagca

SEQ ID NO: 618457 - RNA, 19 nt, Artificial Sequence
  Description of Artificial Sequence: Synthetic oligonucleotide
  Antisense strand to SEQ ID NO: 618456
ugcuucacuguacaauggu

SEQ ID NO: 618458 - RNA, 19 nt, Artificial Sequence
  Description of Artificial Sequence: Synthetic oligonucleotide
  Sense strand starting at position 5 of SEQ ID NO: 585168
ccacaaauguucucggaac

SEQ ID NO: 618459 - RNA, 19 nt, Artificial Sequence
  Description of Artificial Sequence: Synthetic oligonucleotide
  Antisense strand to SEQ ID NO: 618458
guuccgagaacauuugugg

SEQ ID NO: 618460 - RNA, 19 nt, Artificial Sequence
  Description of Artificial Sequence: Synthetic oligonucleotide
  Sense strand starting at position 7 of SEQ ID NO: 585168
acaaauguucucggaacaa

SEQ ID NO: 618461 - RNA, 19 nt, Artificial Sequence
  Description of Artificial Sequence: Synthetic oligonucleotide
  Antisense strand to SEQ ID NO: 618460
uuguuccgagaacauuugu

SEQ ID NO: 618462 - RNA, 19 nt, Artificial Sequence
  Description of Artificial Sequence: Synthetic oligonucleotide
  Sense strand starting at position 272 of SEQ ID NO: 585168
gccugcaagcgcucuacaa

SEQ ID NO: 618463 - RNA, 19 nt, Artificial Sequence
  Description of Artificial Sequence: Synthetic oligonucleotide
  Antisense strand to SEQ ID NO: 618462
uuguagagcgcuugcaggc

SEQ ID NO: 618464 - RNA, 19 nt, Artificial Sequence
  Description of Artificial Sequence: Synthetic oligonucleotide
  Sense strand starting at position 328 of SEQ ID NO: 585168
ucacguuaggacuguacaa

SEQ ID NO: 618465 - RNA, 19 nt, Artificial Sequence
  Description of Artificial Sequence: Synthetic oligonucleotide
  Antisense strand to SEQ ID NO: 618464
uuguacaguccuaacguga

SEQ ID NO: 618466 - RNA, 19 nt, Artificial Sequence
  Description of Artificial Sequence: Synthetic oligonucleotide
  Sense strand starting at position 442 of SEQ ID NO: 585168
ucaugcuuccaggaauauu

SEQ ID NO: 618467 - RNA, 19 nt, Artificial Sequence
  Description of Artificial Sequence: Synthetic oligonucleotide
  Antisense strand to SEQ ID NO: 618466
aauauuccuggaagcauga

SEQ ID NO: 618468 - RNA, 19 nt, Artificial Sequence
  Description of Artificial Sequence: Synthetic oligonucleotide
  Sense strand starting at position 473 of SEQ ID NO: 585168
acuugaugcuaagugcaaa

SEQ ID NO: 618469 - RNA, 19 nt, Artificial Sequence
  Description of Artificial Sequence: Synthetic oligonucleotide
  Antisense strand to SEQ ID NO: 618468
uuugcacuuagcaucaagu

SEQ ID NO: 618470 - RNA, 19 nt, Artificial Sequence
  Description of Artificial Sequence: Synthetic oligonucleotide
  Sense strand starting at position 476 of SEQ ID NO: 585168
ugaugcuaagugcaaagau

SEQ ID NO: 618471 - RNA, 19 nt, Artificial Sequence
  Description of Artificial Sequence: Synthetic oligonucleotide
  Antisense strand to SEQ ID NO: 618470
aucuuugcacuuagcauca

SEQ ID NO: 618472 - RNA, 19 nt, Artificial Sequence
  Description of Artificial Sequence: Synthetic oligonucleotide
  Sense strand starting at position 484 of SEQ ID NO: 585168
agugcaaagaucuagagua

SEQ ID NO: 618473 - RNA, 19 nt, Artificial Sequence
  Description of Artificial Sequence: Synthetic oligonucleotide
  Antisense strand to SEQ ID NO: 618472
uacucuagaucuuugcacu

SEQ ID NO: 618474 - RNA, 19 nt, Artificial Sequence
  Description of Artificial Sequence: Synthetic oligonucleotide
  Sense strand starting at position 494 of SEQ ID NO: 585168
ucuagaguagcucaucaaa

SEQ ID NO: 618475 - RNA, 19 nt, Artificial Sequence
  Description of Artificial Sequence: Synthetic oligonucleotide
  Antisense strand to SEQ ID NO: 618474
uuugaugagcuacucuaga

SEQ ID NO: 618476 - RNA, 19 nt, Artificial Sequence
  Description of Artificial Sequence: Synthetic oligonucleotide
  Sense strand starting at position 497 of SEQ ID NO: 585168
agaguagcucaucaaaccu

SEQ ID NO: 618477 - RNA, 19 nt, Artificial Sequence
  Description of Artificial Sequence: Synthetic oligonucleotide
  Antisense strand to SEQ ID NO: 618476
agguuugaugagcuacucu

SEQ ID NO: 618478 - RNA, 19 nt, Artificial Sequence
  Description of Artificial Sequence: Synthetic oligonucleotide
  Sense strand starting at position 799 of SEQ ID NO: 585168
gacccaugguugccaagaa

SEQ ID NO: 618479 - RNA, 19 nt, Artificial Sequence
  Description of Artificial Sequence: Synthetic oligonucleotide
  Antisense strand to SEQ ID NO: 618478
uucuuggcaaccauggguc

SEQ ID NO: 618480 - RNA, 19 nt, Artificial Sequence
  Description of Artificial Sequence: Synthetic oligonucleotide
  Sense strand starting at position 893 of SEQ ID NO: 585168
auggaagagcuguguaaac

SEQ ID NO: 618481 - RNA, 19 nt, Artificial Sequence
  Description of Artificial Sequence: Synthetic oligonucleotide
  Antisense strand to SEQ ID NO: 618480
guuuacacagcucuuccau

SEQ ID NO: 618482 - RNA, 19 nt, Artificial Sequence
  Description of Artificial Sequence: Synthetic oligonucleotide
  Sense strand starting at position 959 of SEQ ID NO: 585168
aggcuauauugggccauga

SEQ ID NO: 618483 - RNA, 19 nt, Artificial Sequence
  Description of Artificial Sequence: Synthetic oligonucleotide
  Antisense strand to SEQ ID NO: 618482
ucauggcccaauauagccu

SEQ ID NO: 618484 - RNA, 19 nt, Artificial Sequence
  Description of Artificial Sequence: Synthetic oligonucleotide
  Sense strand starting at position 961 of SEQ ID NO: 585168
gcuauauugggccaugaag

SEQ ID NO: 618485 - RNA, 19 nt, Artificial Sequence
  Description of Artificial Sequence: Synthetic oligonucleotide
  Antisense strand to SEQ ID NO: 618484
cuucauggcccaauauagc

SEQ ID NO: 618486 - RNA, 19 nt, Artificial Sequence
  Description of Artificial Sequence: Synthetic oligonucleotide
  Sense strand starting at position 1046 of SEQ ID NO: 585168
cugccagacugcuuacaga

SEQ ID NO: 618487 - RNA, 19 nt, Artificial Sequence
  Description of Artificial Sequence: Synthetic oligonucleotide
  Antisense strand to SEQ ID NO: 618486
ucuguaagcagucuggcag

SEQ ID NO: 618488 - RNA, 19 nt, Artificial Sequence
  Description of Artificial Sequence: Synthetic oligonucleotide
  Sense strand starting at position 1118 of SEQ ID NO: 585168
gaaauuguaugcuugggau

SEQ ID NO: 618489 - RNA, 19 nt, Artificial Sequence
  Description of Artificial Sequence: Synthetic oligonucleotide
  Antisense strand to SEQ ID NO: 618488
aucccaagcauacaauuuc

SEQ ID NO: 618490 - RNA, 19 nt, Artificial Sequence
  Description of Artificial Sequence: Synthetic oligonucleotide
  Sense strand starting at position 1120 of SEQ ID NO: 585168
aauuguaugcuugggaucu

SEQ ID NO: 618491 - RNA, 19 nt, Artificial Sequence
  Description of Artificial Sequence: Synthetic oligonucleotide
  Antisense strand to SEQ ID NO: 618490
agaucccaagcauacaauu

SEQ ID NO: 618492 - RNA, 19 nt, Artificial Sequence
  Description of Artificial Sequence: Synthetic oligonucleotide
  Sense strand starting at position 1356 of SEQ ID NO: 585168
gcagcacuccuugaccaga

SEQ ID NO: 618493 - RNA, 19 nt, Artificial Sequence
  Description of Artificial Sequence: Synthetic oligonucleotide
  Antisense strand to SEQ ID NO: 618492
ucuggucaaggagugcugc

SEQ ID NO: 618494 - RNA, 19 nt, Artificial Sequence
  Description of Artificial Sequence: Synthetic oligonucleotide
  Sense strand starting at position 1358 of SEQ ID NO: 585168
agcacuccuugaccagaau

SEQ ID NO: 618495 - RNA, 19 nt, Artificial Sequence
  Description of Artificial Sequence: Synthetic oligonucleotide
  Antisense strand to SEQ ID NO: 618494
auucuggucaaggagugcu

SEQ ID NO: 618496 - RNA, 19 nt, Artificial Sequence
  Description of Artificial Sequence: Synthetic oligonucleotide
  Sense strand starting at position 1377 of SEQ ID NO: 585168
ggcccagacaguuggaaua

SEQ ID NO: 618497 - RNA, 19 nt, Artificial Sequence
  Description of Artificial Sequence: Synthetic oligonucleotide
  Antisense strand to SEQ ID NO: 618496
uauuccaacugucugggcc

SEQ ID NO: 618498 - RNA, 19 nt, Artificial Sequence
  Description of Artificial Sequence: Synthetic oligonucleotide
  Sense strand starting at position 1410 of SEQ ID NO: 585168
aauagagcccuuuguuaug

SEQ ID NO: 618499 - RNA, 19 nt, Artificial Sequence
  Description of Artificial Sequence: Synthetic oligonucleotide
  Antisense strand to SEQ ID NO: 618498
cauaacaaagggcucuauu

SEQ ID NO: 618500 - RNA, 19 nt, Artificial Sequence
  Description of Artificial Sequence: Synthetic oligonucleotide
  Sense strand starting at position 1420 of SEQ ID NO: 585168
uuuguuaugucucuaggga

SEQ ID NO: 618501 - RNA, 19 nt, Artificial Sequence
  Description of Artificial Sequence: Synthetic oligonucleotide
  Antisense strand to SEQ ID NO: 618500
ucccuagagacauaacaaa

SEQ ID NO: 618502 - RNA, 19 nt, Artificial Sequence
  Description of Artificial Sequence: Synthetic oligonucleotide
  Sense strand starting at position 1421 of SEQ ID NO: 585168
uuguuaugucucuagggag

SEQ ID NO: 618503 - RNA, 19 nt, Artificial Sequence
  Description of Artificial Sequence: Synthetic oligonucleotide
  Antisense strand to SEQ ID NO: 618502
cucccuagagacauaacaa

SEQ ID NO: 618504 - RNA, 19 nt, Artificial Sequence
  Description of Artificial Sequence: Synthetic oligonucleotide
  Sense strand starting at position 1456 of SEQ ID NO: 585168
uguuacaauggccgagaaa

SEQ ID NO: 618505 - RNA, 19 nt, Artificial Sequence
  Description of Artificial Sequence: Synthetic oligonucleotide
  Antisense strand to SEQ ID NO: 618504
uuucucggccauuguaaca

SEQ ID NO: 618506 - RNA, 19 nt, Artificial Sequence
  Description of Artificial Sequence: Synthetic oligonucleotide
  Sense strand starting at position 1499 of SEQ ID NO: 585168
agggcuuaucuuugaauca

SEQ ID NO: 618507 - RNA, 19 nt, Artificial Sequence
  Description of Artificial Sequence: Synthetic oligonucleotide
  Antisense strand to SEQ ID NO: 618506
ugauucaaagauaagcccu

SEQ ID NO: 618508 - RNA, 19 nt, Artificial Sequence
  Description of Artificial Sequence: Synthetic oligonucleotide
  Sense strand starting at position 1574 of SEQ ID NO: 585168
uguagcaaacuuggaguaa

SEQ ID NO: 618509 - RNA, 19 nt, Artificial Sequence
  Description of Artificial Sequence: Synthetic oligonucleotide
  Antisense strand to SEQ ID NO: 618508
uuacuccaaguuugcuaca

SEQ ID NO: 618510 - RNA, 19 nt, Artificial Sequence
  Description of Artificial Sequence: Synthetic oligonucleotide
  Sense strand starting at position 1611 of SEQ ID NO: 585168
cucagaggaucagcuauua

SEQ ID NO: 618511 - RNA, 19 nt, Artificial Sequence
  Description of Artificial Sequence: Synthetic oligonucleotide
  Antisense strand to SEQ ID NO: 618510
uaauagcugauccucugag

SEQ ID NO: 618512 - RNA, 19 nt, Artificial Sequence
  Description of Artificial Sequence: Synthetic oligonucleotide
  Sense strand starting at position 1708 of SEQ ID NO: 585168
uaauguagacggugaugaa

SEQ ID NO: 618513 - RNA, 19 nt, Artificial Sequence
  Description of Artificial Sequence: Synthetic oligonucleotide
  Antisense strand to SEQ ID NO: 618512
uucaucaccgucuacauua

SEQ ID NO: 618514 - RNA, 19 nt, Artificial Sequence
  Description of Artificial Sequence: Synthetic oligonucleotide
  Sense strand starting at position 1883 of SEQ ID NO: 585168
cuauaaucuggugaaggca

SEQ ID NO: 618515 - RNA, 19 nt, Artificial Sequence
  Description of Artificial Sequence: Synthetic oligonucleotide
  Antisense strand to SEQ ID NO: 618514
ugccuucaccagauuauag

SEQ ID NO: 618516 - RNA, 19 nt, Artificial Sequence
  Description of Artificial Sequence: Synthetic oligonucleotide
  Sense strand starting at position 1892 of SEQ ID NO: 585168
ggugaaggcaugugagaaa

SEQ ID NO: 618517 - RNA, 19 nt, Artificial Sequence
  Description of Artificial Sequence: Synthetic oligonucleotide
  Antisense strand to SEQ ID NO: 618516
uuucucacaugccuucacc

SEQ ID NO: 618518 - RNA, 19 nt, Artificial Sequence
  Description of Artificial Sequence: Synthetic oligonucleotide
  Sense strand starting at position 2028 of SEQ ID NO: 585168
uagccucugccugaucaga

SEQ ID NO: 618519 - RNA, 19 nt, Artificial Sequence
  Description of Artificial Sequence: Synthetic oligonucleotide
  Antisense strand to SEQ ID NO: 618518
ucugaucaggcagaggcua

SEQ ID NO: 618520 - RNA, 19 nt, Artificial Sequence
  Description of Artificial Sequence: Synthetic oligonucleotide
  Sense strand starting at position 2221 of SEQ ID NO: 585168
augguuuccaguggaacuu

SEQ ID NO: 618521 - RNA, 19 nt, Artificial Sequence
  Description of Artificial Sequence: Synthetic oligonucleotide
  Antisense strand to SEQ ID NO: 618520
aaguuccacuggaaaccau

SEQ ID NO: 618522 - RNA, 19 nt, Artificial Sequence
  Description of Artificial Sequence: Synthetic oligonucleotide
  Sense strand starting at position 2273 of SEQ ID NO: 585168
uuaauugugaagcgagaau

SEQ ID NO: 618523 - RNA, 19 nt, Artificial Sequence
  Description of Artificial Sequence: Synthetic oligonucleotide
  Antisense strand to SEQ ID NO: 618522
auucucgcuucacaauuaa

SEQ ID NO: 618524 - RNA, 19 nt, Artificial Sequence
  Description of Artificial Sequence: Synthetic oligonucleotide
  Sense strand starting at position 2508 of SEQ ID NO: 585168
cgauuucauguccgaaggu

SEQ ID NO: 618525 - RNA, 19 nt, Artificial Sequence
  Description of Artificial Sequence: Synthetic oligonucleotide
  Antisense strand to SEQ ID NO: 618524
accuucggacaugaaaucg

SEQ ID NO: 618526 - RNA, 19 nt, Artificial Sequence
  Description of Artificial Sequence: Synthetic oligonucleotide
  Sense strand starting at position 2609 of SEQ ID NO: 585168
uuggaauuacuccauuguu

SEQ ID NO: 618527 - RNA, 19 nt, Artificial Sequence
  Description of Artificial Sequence: Synthetic oligonucleotide
  Antisense strand to SEQ ID NO: 618526
aacaauggaguaauuccaa

SEQ ID NO: 618528 - RNA, 19 nt, Artificial Sequence
  Description of Artificial Sequence: Synthetic oligonucleotide
  Sense strand starting at position 3275 of SEQ ID NO: 585168
agagacaaauccuaagaag

SEQ ID NO: 618529 - RNA, 19 nt, Artificial Sequence
  Description of Artificial Sequence: Synthetic oligonucleotide
  Antisense strand to SEQ ID NO: 618528
cuucuuaggauuugucucu

SEQ ID NO: 618530 - RNA, 19 nt, Artificial Sequence
  Description of Artificial Sequence: Synthetic oligonucleotide
  Sense strand starting at position 3313 of SEQ ID NO: 585168
cccaccauccgucaaguaa

SEQ ID NO: 618531 - RNA, 19 nt, Artificial Sequence
  Description of Artificial Sequence: Synthetic oligonucleotide
  Antisense strand to SEQ ID NO: 618530
uuacuugacggaugguggg

SEQ ID NO: 618532 - RNA, 19 nt, Artificial Sequence
  Description of Artificial Sequence: Synthetic oligonucleotide
  Sense strand starting at position 3366 of SEQ ID NO: 585168
cgucuuuaugcacagagag

SEQ ID NO: 618533 - RNA, 19 nt, Artificial Sequence
  Description of Artificial Sequence: Synthetic oligonucleotide
  Antisense strand to SEQ ID NO: 618532
cucucugugcauaaagacg

SEQ ID NO: 618534 - RNA, 19 nt, Artificial Sequence
  Description of Artificial Sequence: Synthetic oligonucleotide
  Sense strand starting at position 3380 of SEQ ID NO: 585168
gagagauaguaggaaggau

SEQ ID NO: 618535 - RNA, 19 nt, Artificial Sequence
  Description of Artificial Sequence: Synthetic oligonucleotide
  Antisense strand to SEQ ID NO: 618534
auccuuccuacuaucucuc

SEQ ID NO: 618536 - RNA, 19 nt, Artificial Sequence
  Description of Artificial Sequence: Synthetic oligonucleotide
  Sense strand starting at position 3941 of SEQ ID NO: 585168
gcagguaacauagggaaau

SEQ ID NO: 618537 - RNA, 19 nt, Artificial Sequence
  Description of Artificial Sequence: Synthetic oligonucleotide
  Antisense strand to SEQ ID NO: 618536
auuucccuauguuaccugc

SEQ ID NO: 618538 - RNA, 19 nt, Artificial Sequence
  Description of Artificial Sequence: Synthetic oligonucleotide
  Sense strand starting at position 188 of SEQ ID NO: 585169
ugaacaagcuucuuaauag

SEQ ID NO: 618539 - RNA, 19 nt, Artificial Sequence
  Description of Artificial Sequence: Synthetic oligonucleotide
  Antisense strand to SEQ ID NO: 618538
cuauuaagaagcuuguuca

SEQ ID NO: 618540 - RNA, 19 nt, Artificial Sequence
  Description of Artificial Sequence: Synthetic oligonucleotide
  Sense strand starting at position 433 of SEQ ID NO: 585169
uggauaaugcugcaaauua

SEQ ID NO: 618541 - RNA, 19 nt, Artificial Sequence
  Description of Artificial Sequence: Synthetic oligonucleotide
  Antisense strand to SEQ ID NO: 618540
uaauuugcagcauuaucca

SEQ ID NO: 618542 - RNA, 19 nt, Artificial Sequence
  Description of Artificial Sequence: Synthetic oligonucleotide
  Sense strand starting at position 486 of SEQ ID NO: 585169
ccuacuaaauguucugaga

SEQ ID NO: 618543 - RNA, 19 nt, Artificial Sequence
  Description of Artificial Sequence: Synthetic oligonucleotide
  Antisense strand to SEQ ID NO: 618542
ucucagaacauuuaguagg

SEQ ID NO: 618544 - RNA, 19 nt, Artificial Sequence
  Description of Artificial Sequence: Synthetic oligonucleotide
  Sense strand starting at position 606 of SEQ ID NO: 585169
augggaaauguugguacaa

SEQ ID NO: 618545 - RNA, 19 nt, Artificial Sequence
  Description of Artificial Sequence: Synthetic oligonucleotide
  Antisense strand to SEQ ID NO: 618544
uuguaccaacauuucccau

SEQ ID NO: 618546 - RNA, 19 nt, Artificial Sequence
  Description of Artificial Sequence: Synthetic oligonucleotide
  Sense strand starting at position 607 of SEQ ID NO: 585169
ugggaaauguugguacaac

SEQ ID NO: 618547 - RNA, 19 nt, Artificial Sequence
  Description of Artificial Sequence: Synthetic oligonucleotide
  Antisense strand to SEQ ID NO: 618546
guuguaccaacauuuccca

SEQ ID NO: 618548 - RNA, 19 nt, Artificial Sequence
  Description of Artificial Sequence: Synthetic oligonucleotide
  Sense strand starting at position 753 of SEQ ID NO: 585169
ucauaaugagucuguaaug

SEQ ID NO: 618549 - RNA, 19 nt, Artificial Sequence
  Description of Artificial Sequence: Synthetic oligonucleotide
  Antisense strand to SEQ ID NO: 618548
cauuacagacucauuauga

SEQ ID NO: 618550 - RNA, 19 nt, Artificial Sequence
  Description of Artificial Sequence: Synthetic oligonucleotide
  Sense strand starting at position 991 of SEQ ID NO: 585169
acuuguuuccuugacuuga

SEQ ID NO: 618551 - RNA, 19 nt, Artificial Sequence
  Description of Artificial Sequence: Synthetic oligonucleotide
  Antisense strand to SEQ ID NO: 618550
ucaagucaaggaaacaagu

SEQ ID NO: 618552 - RNA, 19 nt, Artificial Sequence
  Description of Artificial Sequence: Synthetic oligonucleotide
  Sense strand starting at position 1429 of SEQ ID NO: 585169
uuaacacuguagguaaauu

SEQ ID NO: 618553 - RNA, 19 nt, Artificial Sequence
  Description of Artificial Sequence: Synthetic oligonucleotide
  Antisense strand to SEQ ID NO: 618552
aauuuaccuacaguguuaa

SEQ ID NO: 618554 - RNA, 19 nt, Artificial Sequence
  Description of Artificial Sequence: Synthetic oligonucleotide
  Sense strand starting at position 1580 of SEQ ID NO: 585169
cuaacacaugugugaauuc

SEQ ID NO: 618555 - RNA, 19 nt, Artificial Sequence
  Description of Artificial Sequence: Synthetic oligonucleotide
  Antisense strand to SEQ ID NO: 618554
gaauucacacauguguuag

SEQ ID NO: 618556 - RNA, 19 nt, Artificial Sequence
  Description of Artificial Sequence: Synthetic oligonucleotide
  Sense strand starting at position 1617 of SEQ ID NO: 585169
acucaaagucauuggguca

SEQ ID NO: 618557 - RNA, 19 nt, Artificial Sequence
  Description of Artificial Sequence: Synthetic oligonucleotide
  Antisense strand to SEQ ID NO: 618556
ugacccaaugacuuugagu

SEQ ID NO: 618558 - RNA, 19 nt, Artificial Sequence
  Description of Artificial Sequence: Synthetic oligonucleotide
  Sense strand starting at position 1622 of SEQ ID NO: 585169
aagucauugggucauucua

SEQ ID NO: 618559 - RNA, 19 nt, Artificial Sequence
  Description of Artificial Sequence: Synthetic oligonucleotide
  Antisense strand to SEQ ID NO: 618558
uagaaugacccaaugacuu

SEQ ID NO: 618560 - RNA, 19 nt, Artificial Sequence
  Description of Artificial Sequence: Synthetic oligonucleotide
  Sense strand starting at position 1688 of SEQ ID NO: 585169
cugcauuaucuauagaguu

SEQ ID NO: 618561 - RNA, 19 nt, Artificial Sequence
  Description of Artificial Sequence: Synthetic oligonucleotide
  Antisense strand to SEQ ID NO: 618560
aacucuauagauaaugcag

SEQ ID NO: 618562 - RNA, 19 nt, Artificial Sequence
  Description of Artificial Sequence: Synthetic oligonucleotide
  Sense strand starting at position 1704 of SEQ ID NO: 585169
guuagaaauaagugaguaa

SEQ ID NO: 618563 - RNA, 19 nt, Artificial Sequence
  Description of Artificial Sequence: Synthetic oligonucleotide
  Antisense strand to SEQ ID NO: 618562
uuacucacuuauuucuaac

SEQ ID NO: 618564 - RNA, 19 nt, Artificial Sequence
  Description of Artificial Sequence: Synthetic oligonucleotide
  Sense strand starting at position 2120 of SEQ ID NO: 585169
gauuauucuccugagggug

SEQ ID NO: 618565 - RNA, 19 nt, Artificial Sequence
  Description of Artificial Sequence: Synthetic oligonucleotide
  Antisense strand to SEQ ID NO: 618564
cacccucaggagaauaauc

SEQ ID NO: 618566 - RNA, 19 nt, Artificial Sequence
  Description of Artificial Sequence: Synthetic oligonucleotide
  Sense strand starting at position 2152 of SEQ ID NO: 585169
uuaggauauuaugccucua

SEQ ID NO: 618567 - RNA, 19 nt, Artificial Sequence
  Description of Artificial Sequence: Synthetic oligonucleotide
  Antisense strand to SEQ ID NO: 618566
uagaggcauaauauccuaa

SEQ ID NO: 618568 - RNA, 19 nt, Artificial Sequence
  Description of Artificial Sequence: Synthetic oligonucleotide
  Sense strand starting at position 2154 of SEQ ID NO: 585169
aggauauuaugccucuaag

SEQ ID NO: 618569 - RNA, 19 nt, Artificial Sequence
  Description of Artificial Sequence: Synthetic oligonucleotide
  Antisense strand to SEQ ID NO: 618568
cuuagaggcauaauauccu

SEQ ID NO: 618570 - RNA, 19 nt, Artificial Sequence
  Description of Artificial Sequence: Synthetic oligonucleotide
  Sense strand starting at position 2426 of SEQ ID NO: 585169
cuacuagaauuagccugau

SEQ ID NO: 618571 - RNA, 19 nt, Artificial Sequence
  Description of Artificial Sequence: Synthetic oligonucleotide
  Antisense strand to SEQ ID NO: 618570
aucaggcuaauucuaguag

SEQ ID NO: 618572 - RNA, 19 nt, Artificial Sequence
  Description of Artificial Sequence: Synthetic oligonucleotide
  Sense strand starting at position 2429 of SEQ ID NO: 585169
cuagaauuagccugauaua

SEQ ID NO: 618573 - RNA, 19 nt, Artificial Sequence
  Description of Artificial Sequence: Synthetic oligonucleotide
  Antisense strand to SEQ ID NO: 618572
uauaucaggcuaauucuag

SEQ ID NO: 618574 - RNA, 19 nt, Artificial Sequence
  Description of Artificial Sequence: Synthetic oligonucleotide
  Sense strand starting at position 2594 of SEQ ID NO: 585169
cucagugaugcagaaauuc

SEQ ID NO: 618575 - RNA, 19 nt, Artificial Sequence
  Description of Artificial Sequence: Synthetic oligonucleotide
  Antisense strand to SEQ ID NO: 618574
gaauuucugcaucacugag

SEQ ID NO: 618576 - RNA, 19 nt, Artificial Sequence
  Description of Artificial Sequence: Synthetic oligonucleotide
  Sense strand starting at position 2637 of SEQ ID NO: 585169
ucuacauuugugugcauca

SEQ ID NO: 618577 - RNA, 19 nt, Artificial Sequence
  Description of Artificial Sequence: Synthetic oligonucleotide
  Antisense strand to SEQ ID NO: 618576
ugaugcacacaaauguaga

SEQ ID NO: 618578 - RNA, 19 nt, Artificial Sequence
  Description of Artificial Sequence: Synthetic oligonucleotide
  Sense strand starting at position 2647 of SEQ ID NO: 585169
ugugcaucacuugacaacu

SEQ ID NO: 618579 - RNA, 19 nt, Artificial Sequence
  Description of Artificial Sequence: Synthetic oligonucleotide
  Antisense strand to SEQ ID NO: 618578
aguugucaagugaugcaca

SEQ ID NO: 618580 - RNA, 19 nt, Artificial Sequence
  Description of Artificial Sequence: Synthetic oligonucleotide
  Sense strand starting at position 2835 of SEQ ID NO: 585169
cugcuuuggcaagaaauua

SEQ ID NO: 618581 - RNA, 19 nt, Artificial Sequence
  Description of Artificial Sequence: Synthetic oligonucleotide
  Antisense strand to SEQ ID NO: 618580
uaauuucuugccaaagcag

SEQ ID NO: 618582 - RNA, 19 nt, Artificial Sequence
  Description of Artificial Sequence: Synthetic oligonucleotide
  Sense strand starting at position 2874 of SEQ ID NO: 585169
agaaguauuugugcaguua

SEQ ID NO: 618583 - RNA, 19 nt, Artificial Sequence
  Description of Artificial Sequence: Synthetic oligonucleotide
  Antisense strand to SEQ ID NO: 618582
uaacugcacaaauacuucu

SEQ ID NO: 618584 - RNA, 19 nt, Artificial Sequence
  Description of Artificial Sequence: Synthetic oligonucleotide
  Sense strand starting at position 3039 of SEQ ID NO: 585169
agaucuagaugagugacuu

SEQ ID NO: 618585 - RNA, 19 nt, Artificial Sequence
  Description of Artificial Sequence: Synthetic oligonucleotide
  Antisense strand to SEQ ID NO: 618584
aagucacucaucuagaucu

SEQ ID NO: 618586 - RNA, 19 nt, Artificial Sequence
  Description of Artificial Sequence: Synthetic oligonucleotide
  Sense strand starting at position 3040 of SEQ ID NO: 585169
gaucuagaugagugacuua

SEQ ID NO: 618587 - RNA, 19 nt, Artificial Sequence
  Description of Artificial Sequence: Synthetic oligonucleotide
  Antisense strand to SEQ ID NO: 618586
uaagucacucaucuagauc

SEQ ID NO: 618588 - RNA, 19 nt, Artificial Sequence
  Description of Artificial Sequence: Synthetic oligonucleotide
  Sense strand starting at position 3043 of SEQ ID NO: 585169
cuagaugagugacuuagca

SEQ ID NO: 618589 - RNA, 19 nt, Artificial Sequence
  Description of Artificial Sequence: Synthetic oligonucleotide
  Antisense strand to SEQ ID NO: 618588
ugcuaagucacucaucuag

SEQ ID NO: 618590 - RNA, 19 nt, Artificial Sequence
  Description of Artificial Sequence: Synthetic oligonucleotide
  Sense strand starting at position 3045 of SEQ ID NO: 585169
agaugagugacuuagcauu

SEQ ID NO: 618591 - RNA, 19 nt, Artificial Sequence
  Description of Artificial Sequence: Synthetic oligonucleotide
  Antisense strand to SEQ ID NO: 618590
aaugcuaagucacucaucu

SEQ ID NO: 618592 - RNA, 19 nt, Artificial Sequence
  Description of Artificial Sequence: Synthetic oligonucleotide
  Sense strand starting at position 3244 of SEQ ID NO: 585169
gggauugagucacuaaacu

SEQ ID NO: 618593 - RNA, 19 nt, Artificial Sequence
  Description of Artificial Sequence: Synthetic oligonucleotide
  Antisense strand to SEQ ID NO: 618592
aguuuagugacucaauccc

SEQ ID NO: 618594 - RNA, 19 nt, Artificial Sequence
  Description of Artificial Sequence: Synthetic oligonucleotide
  Sense strand starting at position 3323 of SEQ ID NO: 585169
aggacagaguugguuacua

SEQ ID NO: 618595 - RNA, 19 nt, Artificial Sequence
  Description of Artificial Sequence: Synthetic oligonucleotide
  Antisense strand to SEQ ID NO: 618594
uaguaaccaacucuguccu

SEQ ID NO: 618596 - RNA, 19 nt, Artificial Sequence
  Description of Artificial Sequence: Synthetic oligonucleotide
  Sense strand starting at position 3333 of SEQ ID NO: 585169
ugguuacuaccauaguuga

SEQ ID NO: 618597 - RNA, 19 nt, Artificial Sequence
  Description of Artificial Sequence: Synthetic oligonucleotide
  Antisense strand to SEQ ID NO: 618596
ucaacuaugguaguaacca

SEQ ID NO: 618598 - RNA, 19 nt, Artificial Sequence
  Description of Artificial Sequence: Synthetic oligonucleotide
  Sense strand starting at position 3336 of SEQ ID NO: 585169
uuacuaccauaguugaaga

SEQ ID NO: 618599 - RNA, 19 nt, Artificial Sequence
  Description of Artificial Sequence: Synthetic oligonucleotide
  Antisense strand to SEQ ID NO: 618598
ucuucaacuaugguaguaa

SEQ ID NO: 618600 - RNA, 19 nt, Artificial Sequence
  Description of Artificial Sequence: Synthetic oligonucleotide
  Sense strand starting at position 3349 of SEQ ID NO: 585169
ugaagaguccgugggaaga

SEQ ID NO: 618601 - RNA, 19 nt, Artificial Sequence
  Description of Artificial Sequence: Synthetic oligonucleotide
  Antisense strand to SEQ ID NO: 618600
ucuucccacggacucuuca

SEQ ID NO: 618602 - RNA, 19 nt, Artificial Sequence
  Description of Artificial Sequence: Synthetic oligonucleotide
  Sense strand starting at position 3454 of SEQ ID NO: 585169
guucuauucccagaaaggc

SEQ ID NO: 618603 - RNA, 19 nt, Artificial Sequence
  Description of Artificial Sequence: Synthetic oligonucleotide
  Antisense strand to SEQ ID NO: 618602
gccuuucugggaauagaac

SEQ ID NO: 618604 - RNA, 19 nt, Artificial Sequence
  Description of Artificial Sequence: Synthetic oligonucleotide
  Sense strand starting at position 3475 of SEQ ID NO: 585169
uuuccuucuggugggaaga

SEQ ID NO: 618605 - RNA, 19 nt, Artificial Sequence
  Description of Artificial Sequence: Synthetic oligonucleotide
  Antisense strand to SEQ ID NO: 618604
ucuucccaccagaaggaaa

SEQ ID NO: 618606 - RNA, 19 nt, Artificial Sequence
  Description of Artificial Sequence: Synthetic oligonucleotide
  Sense strand starting at position 3476 of SEQ ID NO: 585169
uuccuucuggugggaagau

SEQ ID NO: 618607 - RNA, 19 nt, Artificial Sequence
  Description of Artificial Sequence: Synthetic oligonucleotide
  Antisense strand to SEQ ID NO: 618606
aucuucccaccagaaggaa

SEQ ID NO: 618608 - RNA, 19 nt, Artificial Sequence
  Description of Artificial Sequence: Synthetic oligonucleotide
  Sense strand starting at position 3536 of SEQ ID NO: 585169
caggguagaaagugucauu

SEQ ID NO: 618609 - RNA, 19 nt, Artificial Sequence
  Description of Artificial Sequence: Synthetic oligonucleotide
  Antisense strand to SEQ ID NO: 618608
aaugacacuuucuacccug

SEQ ID NO: 618610 - RNA, 19 nt, Artificial Sequence
  Description of Artificial Sequence: Synthetic oligonucleotide
  Sense strand starting at position 3585 of SEQ ID NO: 585169
acaucaguucuagaugugu

SEQ ID NO: 618611 - RNA, 19 nt, Artificial Sequence
  Description of Artificial Sequence: Synthetic oligonucleotide
  Antisense strand to SEQ ID NO: 618610
acacaucuagaacugaugu

SEQ ID NO: 618612 - RNA, 19 nt, Artificial Sequence
  Description of Artificial Sequence: Synthetic oligonucleotide
  Sense strand starting at position 3882 of SEQ ID NO: 585169
caaggaaggcgauauaguu

SEQ ID NO: 618613 - RNA, 19 nt, Artificial Sequence
  Description of Artificial Sequence: Synthetic oligonucleotide
  Antisense strand to SEQ ID NO: 618612
aacuauaucgccuuccuug

SEQ ID NO: 618614 - RNA, 19 nt, Artificial Sequence
  Description of Artificial Sequence: Synthetic oligonucleotide
  Sense strand starting at position 3888 of SEQ ID NO: 585169
aggcgauauaguuaugacu

SEQ ID NO: 618615 - RNA, 19 nt, Artificial Sequence
  Description of Artificial Sequence: Synthetic oligonucleotide
  Antisense strand to SEQ ID NO: 618614
agucauaacuauaucgccu

SEQ ID NO: 618616 - RNA, 19 nt, Artificial Sequence
  Description of Artificial Sequence: Synthetic oligonucleotide
  Sense strand starting at position 3913 of SEQ ID NO: 585169
agugcagugauccacagaa

SEQ ID NO: 618617 - RNA, 19 nt, Artificial Sequence
  Description of Artificial Sequence: Synthetic oligonucleotide
  Antisense strand to SEQ ID NO: 618616
uucuguggaucacugcacu

SEQ ID NO: 618618 - RNA, 19 nt, Artificial Sequence
  Description of Artificial Sequence: Synthetic oligonucleotide
  Sense strand starting at position 34 of SEQ ID NO: 585170
ugagaagacuuagaucaag

SEQ ID NO: 618619 - RNA, 19 nt, Artificial Sequence
  Description of Artificial Sequence: Synthetic oligonucleotide
  Antisense strand to SEQ ID NO: 618618
cuugaucuaagucuucuca

SEQ ID NO: 618620 - RNA, 19 nt, Artificial Sequence
  Description of Artificial Sequence: Synthetic oligonucleotide
  Sense strand starting at position 86 of SEQ ID NO: 585170
augagauucucuuucuagu

SEQ ID NO: 618621 - RNA, 19 nt, Artificial Sequence
  Description of Artificial Sequence: Synthetic oligonucleotide
  Antisense strand to SEQ ID NO: 618620
acuagaaagagaaucucau

SEQ ID NO: 618622 - RNA, 19 nt, Artificial Sequence
  Description of Artificial Sequence: Synthetic oligonucleotide
  Sense strand starting at position 88 of SEQ ID NO: 585170
gagauucucuuucuaguug

SEQ ID NO: 618623 - RNA, 19 nt, Artificial Sequence
  Description of Artificial Sequence: Synthetic oligonucleotide
  Antisense strand to SEQ ID NO: 618622
caacuagaaagagaaucuc

SEQ ID NO: 618624 - RNA, 19 nt, Artificial Sequence
  Description of Artificial Sequence: Synthetic oligonucleotide
  Sense strand starting at position 282 of SEQ ID NO: 585170
cgaguuuagaucuggacuu

SEQ ID NO: 618625 - RNA, 19 nt, Artificial Sequence
  Description of Artificial Sequence: Synthetic oligonucleotide
  Antisense strand to SEQ ID NO: 618624
aaguccagaucuaaacucg

SEQ ID NO: 618626 - RNA, 19 nt, Artificial Sequence
  Description of Artificial Sequence: Synthetic oligonucleotide
  Sense strand starting at position 366 of SEQ ID NO: 585170
ccgacaaugcaguguauuu

SEQ ID NO: 618627 - RNA, 19 nt, Artificial Sequence
  Description of Artificial Sequence: Synthetic oligonucleotide
  Antisense strand to SEQ ID NO: 618626
aaauacacugcauugucgg

SEQ ID NO: 618628 - RNA, 19 nt, Artificial Sequence
  Description of Artificial Sequence: Synthetic oligonucleotide
  Sense strand starting at position 412 of SEQ ID NO: 585170
gcagauuauauagacguaa

SEQ ID NO: 618629 - RNA, 19 nt, Artificial Sequence
  Description of Artificial Sequence: Synthetic oligonucleotide
  Antisense strand to SEQ ID NO: 618628
uuacgucuauauaaucugc

SEQ ID NO: 618630 - RNA, 19 nt, Artificial Sequence
  Description of Artificial Sequence: Synthetic oligonucleotide
  Sense strand starting at position 490 of SEQ ID NO: 585170
uaauguccguauuuccaga

SEQ ID NO: 618631 - RNA, 19 nt, Artificial Sequence
  Description of Artificial Sequence: Synthetic oligonucleotide
  Antisense strand to SEQ ID NO: 618630
ucuggaaauacggacauua

SEQ ID NO: 618632 - RNA, 19 nt, Artificial Sequence
  Description of Artificial Sequence: Synthetic oligonucleotide
  Sense strand starting at position 564 of SEQ ID NO: 585170
ccuauuguuuaaccagaug

SEQ ID NO: 618633 - RNA, 19 nt, Artificial Sequence
  Description of Artificial Sequence: Synthetic oligonucleotide
  Antisense strand to SEQ ID NO: 618632
caucugguuaaacaauagg

SEQ ID NO: 618634 - RNA, 19 nt, Artificial Sequence
  Description of Artificial Sequence: Synthetic oligonucleotide
  Sense strand starting at position 567 of SEQ ID NO: 585170
auuguuuaaccagaugcaa

SEQ ID NO: 618635 - RNA, 19 nt, Artificial Sequence
  Description of Artificial Sequence: Synthetic oligonucleotide
  Antisense strand to SEQ ID NO: 618634
uugcaucugguuaaacaau

SEQ ID NO: 618636 - RNA, 19 nt, Artificial Sequence
  Description of Artificial Sequence: Synthetic oligonucleotide
  Sense strand starting at position 582 of SEQ ID NO: 585170
gcaacugugguccacauau

SEQ ID NO: 618637 - RNA, 19 nt, Artificial Sequence
  Description of Artificial Sequence: Synthetic oligonucleotide
  Antisense strand to SEQ ID NO: 618636
auauguggaccacaguugc

SEQ ID NO: 618638 - RNA, 19 nt, Artificial Sequence
  Description of Artificial Sequence: Synthetic oligonucleotide
  Sense strand starting at position 607 of SEQ ID NO: 585170
agauauaggugguucuuau

SEQ ID NO: 618639 - RNA, 19 nt, Artificial Sequence
  Description of Artificial Sequence: Synthetic oligonucleotide
  Antisense strand to SEQ ID NO: 618638
auaagaaccaccuauaucu

SEQ ID NO: 618640 - RNA, 19 nt, Artificial Sequence
  Description of Artificial Sequence: Synthetic oligonucleotide
  Sense strand starting at position 646 of SEQ ID NO: 585170
cuuggaaugcccugcagaa

SEQ ID NO: 618641 - RNA, 19 nt, Artificial Sequence
  Description of Artificial Sequence: Synthetic oligonucleotide
  Antisense strand to SEQ ID NO: 618640
uucugcagggcauuccaag

SEQ ID NO: 618642 - RNA, 19 nt, Artificial Sequence
  Description of Artificial Sequence: Synthetic oligonucleotide
  Sense strand starting at position 665 of SEQ ID NO: 585170
cugagacaugcucaucauu

SEQ ID NO: 618643 - RNA, 19 nt, Artificial Sequence
  Description of Artificial Sequence: Synthetic oligonucleotide
  Antisense strand to SEQ ID NO: 618642
aaugaugagcaugucucag

SEQ ID NO: 618644 - RNA, 19 nt, Artificial Sequence
  Description of Artificial Sequence: Synthetic oligonucleotide
  Sense strand starting at position 698 of SEQ ID NO: 585170
ggguaaugucauuauccua

SEQ ID NO: 618645 - RNA, 19 nt, Artificial Sequence
  Description of Artificial Sequence: Synthetic oligonucleotide
  Antisense strand to SEQ ID NO: 618644
uaggauaaugacauuaccc

SEQ ID NO: 618646 - RNA, 19 nt, Artificial Sequence
  Description of Artificial Sequence: Synthetic oligonucleotide
  Sense strand starting at position 960 of SEQ ID NO: 585170
ugcccuucgccuuuguauu

SEQ ID NO: 618647 - RNA, 19 nt, Artificial Sequence
  Description of Artificial Sequence: Synthetic oligonucleotide
  Antisense strand to SEQ ID NO: 618646
aauacaaaggcgaagggca

SEQ ID NO: 618648 - RNA, 19 nt, Artificial Sequence
  Description of Artificial Sequence: Synthetic oligonucleotide
  Sense strand starting at position 966 of SEQ ID NO: 585170
ucgccuuuguauuuagagu

SEQ ID NO: 618649 - RNA, 19 nt, Artificial Sequence
  Description of Artificial Sequence: Synthetic oligonucleotide
  Antisense strand to SEQ ID NO: 618648
acucuaaauacaaaggcga

SEQ ID NO: 618650 - RNA, 19 nt, Artificial Sequence
  Description of Artificial Sequence: Synthetic oligonucleotide
  Sense strand starting at position 1302 of SEQ ID NO: 585170
gugagaacuucuccuccaa

SEQ ID NO: 618651 - RNA, 19 nt, Artificial Sequence
  Description of Artificial Sequence: Synthetic oligonucleotide
  Antisense strand to SEQ ID NO: 618650
uuggaggagaaguucucac

SEQ ID NO: 618652 - RNA, 19 nt, Artificial Sequence
  Description of Artificial Sequence: Synthetic oligonucleotide
  Sense strand starting at position 1436 of SEQ ID NO: 585170
gcacaaguggccuggaaau

SEQ ID NO: 618653 - RNA, 19 nt, Artificial Sequence
  Description of Artificial Sequence: Synthetic oligonucleotide
  Antisense strand to SEQ ID NO: 618652
auuuccaggccacuugugc

SEQ ID NO: 618654 - RNA, 19 nt, Artificial Sequence
  Description of Artificial Sequence: Synthetic oligonucleotide
  Sense strand starting at position 2212 of SEQ ID NO: 585170
gagugaaaucuuggaaggu

SEQ ID NO: 618655 - RNA, 19 nt, Artificial Sequence
  Description of Artificial Sequence: Synthetic oligonucleotide
  Antisense strand to SEQ ID NO: 618654
accuuccaagauuucacuc

SEQ ID NO: 618656 - RNA, 19 nt, Artificial Sequence
  Description of Artificial Sequence: Synthetic oligonucleotide
  Sense strand starting at position 2275 of SEQ ID NO: 585170
acuggagcgauguaaaugu

SEQ ID NO: 618657 - RNA, 19 nt, Artificial Sequence
  Description of Artificial Sequence: Synthetic oligonucleotide
  Antisense strand to SEQ ID NO: 618656
acauuuacaucgcuccagu

SEQ ID NO: 618658 - RNA, 19 nt, Artificial Sequence
  Description of Artificial Sequence: Synthetic oligonucleotide
  Sense strand starting at position 2722 of SEQ ID NO: 585170
ucaguaucguaacucuaaa

SEQ ID NO: 618659 - RNA, 19 nt, Artificial Sequence
  Description of Artificial Sequence: Synthetic oligonucleotide
  Antisense strand to SEQ ID NO: 618658
uuuagaguuacgauacuga

SEQ ID NO: 618660 - RNA, 19 nt, Artificial Sequence
  Description of Artificial Sequence: Synthetic oligonucleotide
  Sense strand starting at position 2849 of SEQ ID NO: 585170
auugcauguugauugagaa

SEQ ID NO: 618661 - RNA, 19 nt, Artificial Sequence
  Description of Artificial Sequence: Synthetic oligonucleotide
  Antisense strand to SEQ ID NO: 618660
uucucaaucaacaugcaau

SEQ ID NO: 618662 - RNA, 19 nt, Artificial Sequence
  Description of Artificial Sequence: Synthetic oligonucleotide
  Sense strand starting at position 2850 of SEQ ID NO: 585170
uugcauguugauugagaaa

SEQ ID NO: 618663 - RNA, 19 nt, Artificial Sequence
  Description of Artificial Sequence: Synthetic oligonucleotide
  Antisense strand to SEQ ID NO: 618662
uuucucaaucaacaugcaa

SEQ ID NO: 618664 - RNA, 19 nt, Artificial Sequence
  Description of Artificial Sequence: Synthetic oligonucleotide
  Sense strand starting at position 3145 of SEQ ID NO: 585170
auuguuaagcuacaaguga

SEQ ID NO: 618665 - RNA, 19 nt, Artificial Sequence
  Description of Artificial Sequence: Synthetic oligonucleotide
  Antisense strand to SEQ ID NO: 618664
ucacuuguagcuuaacaau

SEQ ID NO: 618666 - RNA, 19 nt, Artificial Sequence
  Description of Artificial Sequence: Synthetic oligonucleotide
  Sense strand starting at position 3191 of SEQ ID NO: 585170
ggguuccaucugcaaacuu

SEQ ID NO: 618667 - RNA, 19 nt, Artificial Sequence
  Description of Artificial Sequence: Synthetic oligonucleotide
  Antisense strand to SEQ ID NO: 618666
aaguuugcagauggaaccc

SEQ ID NO: 618668 - RNA, 19 nt, Artificial Sequence
  Description of Artificial Sequence: Synthetic oligonucleotide
  Sense strand starting at position 3224 of SEQ ID NO: 585170
uuuccuacugcuggaauua

SEQ ID NO: 618669 - RNA, 19 nt, Artificial Sequence
  Description of Artificial Sequence: Synthetic oligonucleotide
  Antisense strand to SEQ ID NO: 618668
uaauuccagcaguaggaaa

SEQ ID NO: 618670 - RNA, 19 nt, Artificial Sequence
  Description of Artificial Sequence: Synthetic oligonucleotide
  Sense strand starting at position 3225 of SEQ ID NO: 585170
uuccuacugcuggaauuaa

SEQ ID NO: 618671 - RNA, 19 nt, Artificial Sequence
  Description of Artificial Sequence: Synthetic oligonucleotide
  Antisense strand to SEQ ID NO: 618670
uuaauuccagcaguaggaa

SEQ ID NO: 618672 - RNA, 19 nt, Artificial Sequence
  Description of Artificial Sequence: Synthetic oligonucleotide
  Sense strand starting at position 3266 of SEQ ID NO: 585170
ggucauuugugccuguacu

SEQ ID NO: 618673 - RNA, 19 nt, Artificial Sequence
  Description of Artificial Sequence: Synthetic oligonucleotide
  Antisense strand to SEQ ID NO: 618672
aguacaggcacaaaugacc

SEQ ID NO: 618674 - RNA, 19 nt, Artificial Sequence
  Description of Artificial Sequence: Synthetic oligonucleotide
  Sense strand starting at position 3267 of SEQ ID NO: 585170
gucauuugugccuguacuc

SEQ ID NO: 618675 - RNA, 19 nt, Artificial Sequence
  Description of Artificial Sequence: Synthetic oligonucleotide
  Antisense strand to SEQ ID NO: 618674
gaguacaggcacaaaugac

SEQ ID NO: 618676 - RNA, 19 nt, Artificial Sequence
  Description of Artificial Sequence: Synthetic oligonucleotide
  Sense strand starting at position 3315 of SEQ ID NO: 585170
aucgccugagucuauuaaa

SEQ ID NO: 618677 - RNA, 19 nt, Artificial Sequence
  Description of Artificial Sequence: Synthetic oligonucleotide
  Antisense strand to SEQ ID NO: 618676
uuuaauagacucaggcgau

SEQ ID NO: 618678 - RNA, 19 nt, Artificial Sequence
  Description of Artificial Sequence: Synthetic oligonucleotide
  Sense strand starting at position 3680 of SEQ ID NO: 585170
acauguggaucuguauaau

SEQ ID NO: 618679 - RNA, 19 nt, Artificial Sequence
  Description of Artificial Sequence: Synthetic oligonucleotide
  Antisense strand to SEQ ID NO: 618678
auuauacagauccacaugu

SEQ ID NO: 618680 - RNA, 19 nt, Artificial Sequence
  Description of Artificial Sequence: Synthetic oligonucleotide
  Sense strand starting at position 3722 of SEQ ID NO: 585170
aaaguacgucuauaugaaa

SEQ ID NO: 618681 - RNA, 19 nt, Artificial Sequence
  Description of Artificial Sequence: Synthetic oligonucleotide
  Antisense strand to SEQ ID NO: 618680
uuucauauagacguacuuu

SEQ ID NO: 618682 - RNA, 19 nt, Artificial Sequence
  Description of Artificial Sequence: Synthetic oligonucleotide
  Sense strand starting at position 3791 of SEQ ID NO: 585170
uggucuaacuguccauuau

SEQ ID NO: 618683 - RNA, 19 nt, Artificial Sequence
  Description of Artificial Sequence: Synthetic oligonucleotide
  Antisense strand to SEQ ID NO: 618682
auaauggacaguuagacca

SEQ ID NO: 618684 - RNA, 19 nt, Artificial Sequence
  Description of Artificial Sequence: Synthetic oligonucleotide
  Sense strand starting at position 3792 of SEQ ID NO: 585170
ggucuaacuguccauuauu

SEQ ID NO: 618685 - RNA, 19 nt, Artificial Sequence
  Description of Artificial Sequence: Synthetic oligonucleotide
  Antisense strand to SEQ ID NO: 618684
aauaauggacaguuagacc

SEQ ID NO: 618686 - RNA, 19 nt, Artificial Sequence
  Description of Artificial Sequence: Synthetic oligonucleotide
  Sense strand starting at position 3825 of SEQ ID NO: 585170
ugucucgucagauagaugu

SEQ ID NO: 618687 - RNA, 19 nt, Artificial Sequence
  Description of Artificial Sequence: Synthetic oligonucleotide
  Antisense strand to SEQ ID NO: 618686
acaucuaucugacgagaca

SEQ ID NO: 618688 - RNA, 19 nt, Artificial Sequence
  Description of Artificial Sequence: Synthetic oligonucleotide
  Sense strand starting at position 3827 of SEQ ID NO: 585170
ucucgucagauagauguga

SEQ ID NO: 618689 - RNA, 19 nt, Artificial Sequence
  Description of Artificial Sequence: Synthetic oligonucleotide
  Antisense strand to SEQ ID NO: 618688
ucacaucuaucugacgaga

SEQ ID NO: 618690 - RNA, 19 nt, Artificial Sequence
  Description of Artificial Sequence: Synthetic oligonucleotide
  Sense strand starting at position 3918 of SEQ ID NO: 585170
gacaaauaaugucuaagug

SEQ ID NO: 618691 - RNA, 19 nt, Artificial Sequence
  Description of Artificial Sequence: Synthetic oligonucleotide
  Antisense strand to SEQ ID NO: 618690
cacuuagacauuauuuguc

SEQ ID NO: 618692 - RNA, 19 nt, Artificial Sequence
  Description of Artificial Sequence: Synthetic oligonucleotide
  Sense strand starting at position 3928 of SEQ ID NO: 585170
gucuaagugguugacagua

SEQ ID NO: 618693 - RNA, 19 nt, Artificial Sequence
  Description of Artificial Sequence: Synthetic oligonucleotide
  Antisense strand to SEQ ID NO: 618692
uacugucaaccacuuagac

SEQ ID NO: 618694 - RNA, 19 nt, Artificial Sequence
  Description of Artificial Sequence: Synthetic oligonucleotide
  Sense strand starting at position 3933 of SEQ ID NO: 585170
agugguugacaguauuauu

SEQ ID NO: 618695 - RNA, 19 nt, Artificial Sequence
  Description of Artificial Sequence: Synthetic oligonucleotide
  Antisense strand to SEQ ID NO: 618694
aauaauacugucaaccacu

SEQ ID NO: 618696 - RNA, 19 nt, Artificial Sequence
  Description of Artificial Sequence: Synthetic oligonucleotide
  Sense strand starting at position 3979 of SEQ ID NO: 585170
augaaaugguucucuuuag

SEQ ID NO: 618697 - RNA, 19 nt, Artificial Sequence
  Description of Artificial Sequence: Synthetic oligonucleotide
  Antisense strand to SEQ ID NO: 618696
cuaaagagaaccauuucau

SEQ ID NO: 618698 - RNA, 19 nt, Artificial Sequence
  Description of Artificial Sequence: Synthetic oligonucleotide
  Sense strand starting at position 77 of SEQ ID NO: 585171
ccucauucucgggaaguuu

SEQ ID NO: 618699 - RNA, 19 nt, Artificial Sequence
  Description of Artificial Sequence: Synthetic oligonucleotide
  Antisense strand to SEQ ID NO: 618698
aaacuucccgagaaugagg

SEQ ID NO: 618700 - RNA, 19 nt, Artificial Sequence
  Description of Artificial Sequence: Synthetic oligonucleotide
  Sense strand starting at position 363 of SEQ ID NO: 585171
ggaccugaguucgauuuga

SEQ ID NO: 618701 - RNA, 19 nt, Artificial Sequence
  Description of Artificial Sequence: Synthetic oligonucleotide
  Antisense strand to SEQ ID NO: 618700
ucaaaucgaacucaggucc

SEQ ID NO: 618702 - RNA, 19 nt, Artificial Sequence
  Description of Artificial Sequence: Synthetic oligonucleotide
  Sense strand starting at position 565 of SEQ ID NO: 585171
gggucacgucaagaaucua

SEQ ID NO: 618703 - RNA, 19 nt, Artificial Sequence
  Description of Artificial Sequence: Synthetic oligonucleotide
  Antisense strand to SEQ ID NO: 618702
uagauucuugacgugaccc

SEQ ID NO: 618704 - RNA, 19 nt, Artificial Sequence
  Description of Artificial Sequence: Synthetic oligonucleotide
  Sense strand starting at position 599 of SEQ ID NO: 585171
uuuguagauuuacacagaa

SEQ ID NO: 618705 - RNA, 19 nt, Artificial Sequence
  Description of Artificial Sequence: Synthetic oligonucleotide
  Antisense strand to SEQ ID NO: 618704
uucuguguaaaucuacaaa

SEQ ID NO: 618706 - RNA, 19 nt, Artificial Sequence
  Description of Artificial Sequence: Synthetic oligonucleotide
  Sense strand starting at position 718 of SEQ ID NO: 585171
aacgcauuagcguuaucuu

SEQ ID NO: 618707 - RNA, 19 nt, Artificial Sequence
  Description of Artificial Sequence: Synthetic oligonucleotide
  Antisense strand to SEQ ID NO: 618706
aagauaacgcuaaugcguu

SEQ ID NO: 618708 - RNA, 19 nt, Artificial Sequence
  Description of Artificial Sequence: Synthetic oligonucleotide
  Sense strand starting at position 844 of SEQ ID NO: 585171
caaagcgcuguuuaagaaa

SEQ ID NO: 618709 - RNA, 19 nt, Artificial Sequence
  Description of Artificial Sequence: Synthetic oligonucleotide
  Antisense strand to SEQ ID NO: 618708
uuucuuaaacagcgcuuug

SEQ ID NO: 618710 - RNA, 19 nt, Artificial Sequence
  Description of Artificial Sequence: Synthetic oligonucleotide
  Sense strand starting at position 939 of SEQ ID NO: 585171
uuaaacgucugaucucuaa

SEQ ID NO: 618711 - RNA, 19 nt, Artificial Sequence
  Description of Artificial Sequence: Synthetic oligonucleotide
  Antisense strand to SEQ ID NO: 618710
uuagagaucagacguuuaa

SEQ ID NO: 618712 - RNA, 19 nt, Artificial Sequence
  Description of Artificial Sequence: Synthetic oligonucleotide
  Sense strand starting at position 943 of SEQ ID NO: 585171
acgucugaucucuaaugcu

SEQ ID NO: 618713 - RNA, 19 nt, Artificial Sequence
  Description of Artificial Sequence: Synthetic oligonucleotide
  Antisense strand to SEQ ID NO: 618712
agcauuagagaucagacgu

SEQ ID NO: 618714 - RNA, 19 nt, Artificial Sequence
  Description of Artificial Sequence: Synthetic oligonucleotide
  Sense strand starting at position 953 of SEQ ID NO: 585171
ucuaaugcucuguaacuag

SEQ ID NO: 618715 - RNA, 19 nt, Artificial Sequence
  Description of Artificial Sequence: Synthetic oligonucleotide
  Antisense strand to SEQ ID NO: 618714
cuaguuacagagcauuaga

SEQ ID NO: 618716 - RNA, 19 nt, Artificial Sequence
  Description of Artificial Sequence: Synthetic oligonucleotide
  Sense strand starting at position 1179 of SEQ ID NO: 585171
ucaaguaaccacgauguuu

SEQ ID NO: 618717 - RNA, 19 nt, Artificial Sequence
  Description of Artificial Sequence: Synthetic oligonucleotide
  Antisense strand to SEQ ID NO: 618716
aaacaucgugguuacuuga

SEQ ID NO: 618718 - RNA, 19 nt, Artificial Sequence
  Description of Artificial Sequence: Synthetic oligonucleotide
  Sense strand starting at position 1220 of SEQ ID NO: 585171
agaaguuggcuuugcaaag

SEQ ID NO: 618719 - RNA, 19 nt, Artificial Sequence
  Description of Artificial Sequence: Synthetic oligonucleotide
  Antisense strand to SEQ ID NO: 618718
cuuugcaaagccaacuucu

SEQ ID NO: 618720 - RNA, 19 nt, Artificial Sequence
  Description of Artificial Sequence: Synthetic oligonucleotide
  Sense strand starting at position 1230 of SEQ ID NO: 585171
uuugcaaagcuauagaaca

SEQ ID NO: 618721 - RNA, 19 nt, Artificial Sequence
  Description of Artificial Sequence: Synthetic oligonucleotide
  Antisense strand to SEQ ID NO: 618720
uguucuauagcuuugcaaa

SEQ ID NO: 618722 - RNA, 19 nt, Artificial Sequence
  Description of Artificial Sequence: Synthetic oligonucleotide
  Sense strand starting at position 1340 of SEQ ID NO: 585171
uuccgauguagucagucaa

SEQ ID NO: 618723 - RNA, 19 nt, Artificial Sequence
  Description of Artificial Sequence: Synthetic oligonucleotide
  Antisense strand to SEQ ID NO: 618722
uugacugacuacaucggaa

SEQ ID NO: 618724 - RNA, 19 nt, Artificial Sequence
  Description of Artificial Sequence: Synthetic oligonucleotide
  Sense strand starting at position 1493 of SEQ ID NO: 585171
ccuuuauucuaaucggaaa

SEQ ID NO: 618725 - RNA, 19 nt, Artificial Sequence
  Description of Artificial Sequence: Synthetic oligonucleotide
  Antisense strand to SEQ ID NO: 618724
uuuccgauuagaauaaagg

SEQ ID NO: 618726 - RNA, 19 nt, Artificial Sequence
  Description of Artificial Sequence: Synthetic oligonucleotide
  Sense strand starting at position 2099 of SEQ ID NO: 585171
ucaggauaaaguuguaguu

SEQ ID NO: 618727 - RNA, 19 nt, Artificial Sequence
  Description of Artificial Sequence: Synthetic oligonucleotide
  Antisense strand to SEQ ID NO: 618726
aacuacaacuuuauccuga

SEQ ID NO: 618728 - RNA, 19 nt, Artificial Sequence
  Description of Artificial Sequence: Synthetic oligonucleotide
  Sense strand starting at position 2118 of SEQ ID NO: 585171
uaaauuugcugaugaggaa

SEQ ID NO: 618729 - RNA, 19 nt, Artificial Sequence
  Description of Artificial Sequence: Synthetic oligonucleotide
  Antisense strand to SEQ ID NO: 618728
uuccucaucagcaaauuua

SEQ ID NO: 618730 - RNA, 19 nt, Artificial Sequence
  Description of Artificial Sequence: Synthetic oligonucleotide
  Sense strand starting at position 2173 of SEQ ID NO: 585171
uggaguugcuccucacaca

SEQ ID NO: 618731 - RNA, 19 nt, Artificial Sequence
  Description of Artificial Sequence: Synthetic oligonucleotide
  Antisense strand to SEQ ID NO: 618730
ugugugaggagcaacucca

SEQ ID NO: 618732 - RNA, 19 nt, Artificial Sequence
  Description of Artificial Sequence: Synthetic oligonucleotide
  Sense strand starting at position 2174 of SEQ ID NO: 585171
ggaguugcuccucacacau

SEQ ID NO: 618733 - RNA, 19 nt, Artificial Sequence
  Description of Artificial Sequence: Synthetic oligonucleotide
  Antisense strand to SEQ ID NO: 618732
augugugaggagcaacucc

SEQ ID NO: 618734 - RNA, 19 nt, Artificial Sequence
  Description of Artificial Sequence: Synthetic oligonucleotide
  Sense strand starting at position 2353 of SEQ ID NO: 585171
gaccaaggugugugaaguu

SEQ ID NO: 618735 - RNA, 19 nt, Artificial Sequence
  Description of Artificial Sequence: Synthetic oligonucleotide
  Antisense strand to SEQ ID NO: 618734
aacuucacacaccuugguc

SEQ ID NO: 618736 - RNA, 19 nt, Artificial Sequence
  Description of Artificial Sequence: Synthetic oligonucleotide
  Sense strand starting at position 2384 of SEQ ID NO: 585171
gagugaccuguuugaugau

SEQ ID NO: 618737 - RNA, 19 nt, Artificial Sequence
  Description of Artificial Sequence: Synthetic oligonucleotide
  Antisense strand to SEQ ID NO: 618736
aucaucaaacaggucacuc

SEQ ID NO: 618738 - RNA, 19 nt, Artificial Sequence
  Description of Artificial Sequence: Synthetic oligonucleotide
  Sense strand starting at position 2390 of SEQ ID NO: 585171
ccuguuugaugaucuaauu

SEQ ID NO: 618739 - RNA, 19 nt, Artificial Sequence
  Description of Artificial Sequence: Synthetic oligonucleotide
  Antisense strand to SEQ ID NO: 618738
aauuagaucaucaaacagg

SEQ ID NO: 618740 - RNA, 19 nt, Artificial Sequence
  Description of Artificial Sequence: Synthetic oligonucleotide
  Sense strand starting at position 2711 of SEQ ID NO: 585171
uguagugaaaugugaggau

SEQ ID NO: 618741 - RNA, 19 nt, Artificial Sequence
  Description of Artificial Sequence: Synthetic oligonucleotide
  Antisense strand to SEQ ID NO: 618740
auccucacauuucacuaca

SEQ ID NO: 618742 - RNA, 19 nt, Artificial Sequence
  Description of Artificial Sequence: Synthetic oligonucleotide
  Sense strand starting at position 2738 of SEQ ID NO: 585171
uacagacuaugguugcauu

SEQ ID NO: 618743 - RNA, 19 nt, Artificial Sequence
  Description of Artificial Sequence: Synthetic oligonucleotide
  Antisense strand to SEQ ID NO: 618742
aaugcaaccauagucugua

SEQ ID NO: 618744 - RNA, 19 nt, Artificial Sequence
  Description of Artificial Sequence: Synthetic oligonucleotide
  Sense strand starting at position 2739 of SEQ ID NO: 585171
acagacuaugguugcauua

SEQ ID NO: 618745 - RNA, 19 nt, Artificial Sequence
  Description of Artificial Sequence: Synthetic oligonucleotide
  Antisense strand to SEQ ID NO: 618744
uaaugcaaccauagucugu

SEQ ID NO: 618746 - RNA, 19 nt, Artificial Sequence
  Description of Artificial Sequence: Synthetic oligonucleotide
  Sense strand starting at position 2755 of SEQ ID NO: 585171
uuaaguagguucccaaacu

SEQ ID NO: 618747 - RNA, 19 nt, Artificial Sequence
  Description of Artificial Sequence: Synthetic oligonucleotide
  Antisense strand to SEQ ID NO: 618746
aguuugggaaccuacuuaa

SEQ ID NO: 618748 - RNA, 19 nt, Artificial Sequence
  Description of Artificial Sequence: Synthetic oligonucleotide
  Sense strand starting at position 2835 of SEQ ID NO: 585171
gacaguaaagcugagcaua

SEQ ID NO: 618749 - RNA, 19 nt, Artificial Sequence
  Description of Artificial Sequence: Synthetic oligonucleotide
  Antisense strand to SEQ ID NO: 618748
uaugcucagcuuuacuguc

SEQ ID NO: 618750 - RNA, 19 nt, Artificial Sequence
  Description of Artificial Sequence: Synthetic oligonucleotide
  Sense strand starting at position 2908 of SEQ ID NO: 585171
ugcauuaggguuuauaaug

SEQ ID NO: 618751 - RNA, 19 nt, Artificial Sequence
  Description of Artificial Sequence: Synthetic oligonucleotide
  Antisense strand to SEQ ID NO: 618750
cauuauaaacccuaaugca

SEQ ID NO: 618752 - RNA, 19 nt, Artificial Sequence
  Description of Artificial Sequence: Synthetic oligonucleotide
  Sense strand starting at position 2916 of SEQ ID NO: 585171
gguuuauaauggccugagu

SEQ ID NO: 618753 - RNA, 19 nt, Artificial Sequence
  Description of Artificial Sequence: Synthetic oligonucleotide
  Antisense strand to SEQ ID NO: 618752
acucaggccauuauaaacc

SEQ ID NO: 618754 - RNA, 19 nt, Artificial Sequence
  Description of Artificial Sequence: Synthetic oligonucleotide
  Sense strand starting at position 2918 of SEQ ID NO: 585171
uuuauaauggccugaguca

SEQ ID NO: 618755 - RNA, 19 nt, Artificial Sequence
  Description of Artificial Sequence: Synthetic oligonucleotide
  Antisense strand to SEQ ID NO: 618754
ugacucaggccauuauaaa

SEQ ID NO: 618756 - RNA, 19 nt, Artificial Sequence
  Description of Artificial Sequence: Synthetic oligonucleotide
  Sense strand starting at position 2919 of SEQ ID NO: 585171
uuauaauggccugagucau

SEQ ID NO: 618757 - RNA, 19 nt, Artificial Sequence
  Description of Artificial Sequence: Synthetic oligonucleotide
  Antisense strand to SEQ ID NO: 618756
augacucaggccauuauaa

SEQ ID NO: 618758 - RNA, 19 nt, Artificial Sequence
  Description of Artificial Sequence: Synthetic oligonucleotide
  Sense strand starting at position 2930 of SEQ ID NO: 585171
ugagucauguggccucaau

SEQ ID NO: 618759 - RNA, 19 nt, Artificial Sequence
  Description of Artificial Sequence: Synthetic oligonucleotide
  Antisense strand to SEQ ID NO: 618758
auugaggccacaugacuca

SEQ ID NO: 618760 - RNA, 19 nt, Artificial Sequence
  Description of Artificial Sequence: Synthetic oligonucleotide
  Sense strand starting at position 3004 of SEQ ID NO: 585171
guaggacaauuccucauaa

SEQ ID NO: 618761 - RNA, 19 nt, Artificial Sequence
  Description of Artificial Sequence: Synthetic oligonucleotide
  Antisense strand to SEQ ID NO: 618760
uuaugaggaauuguccuac

SEQ ID NO: 618762 - RNA, 19 nt, Artificial Sequence
  Description of Artificial Sequence: Synthetic oligonucleotide
  Sense strand starting at position 3053 of SEQ ID NO: 585171
caggaaauuucuuggccag

SEQ ID NO: 618763 - RNA, 19 nt, Artificial Sequence
  Description of Artificial Sequence: Synthetic oligonucleotide
  Antisense strand to SEQ ID NO: 618762
cuggccaagaaauuuccug

SEQ ID NO: 618764 - RNA, 19 nt, Artificial Sequence
  Description of Artificial Sequence: Synthetic oligonucleotide
  Sense strand starting at position 3071 of SEQ ID NO: 585171
guauucucuggagggaaag

SEQ ID NO: 618765 - RNA, 19 nt, Artificial Sequence
  Description of Artificial Sequence: Synthetic oligonucleotide
  Antisense strand to SEQ ID NO: 618764
cuuucccuccagagaauac

SEQ ID NO: 618766 - RNA, 19 nt, Artificial Sequence
  Description of Artificial Sequence: Synthetic oligonucleotide
  Sense strand starting at position 3157 of SEQ ID NO: 585171
ugccaaauauauucuggua

SEQ ID NO: 618767 - RNA, 19 nt, Artificial Sequence
  Description of Artificial Sequence: Synthetic oligonucleotide
  Antisense strand to SEQ ID NO: 618766
uaccagaauauauuuggca

SEQ ID NO: 618768 - RNA, 19 nt, Artificial Sequence
  Description of Artificial Sequence: Synthetic oligonucleotide
  Sense strand starting at position 3175 of SEQ ID NO: 585171
agacaccguucccuaauua

SEQ ID NO: 618769 - RNA, 19 nt, Artificial Sequence
  Description of Artificial Sequence: Synthetic oligonucleotide
  Antisense strand to SEQ ID NO: 618768
uaauuagggaacggugucu

SEQ ID NO: 618770 - RNA, 19 nt, Artificial Sequence
  Description of Artificial Sequence: Synthetic oligonucleotide
  Sense strand starting at position 3471 of SEQ ID NO: 585171
uuacuuguuggcuauccua

SEQ ID NO: 618771 - RNA, 19 nt, Artificial Sequence
  Description of Artificial Sequence: Synthetic oligonucleotide
  Antisense strand to SEQ ID NO: 618770
uaggauagccaacaaguaa

SEQ ID NO: 618772 - RNA, 19 nt, Artificial Sequence
  Description of Artificial Sequence: Synthetic oligonucleotide
  Sense strand starting at position 3903 of SEQ ID NO: 585171
guguuuauuucuguuaugu

SEQ ID NO: 618773 - RNA, 19 nt, Artificial Sequence
  Description of Artificial Sequence: Synthetic oligonucleotide
  Antisense strand to SEQ ID NO: 618772
acauaacagaaauaaacac

SEQ ID NO: 618774 - RNA, 19 nt, Artificial Sequence
  Description of Artificial Sequence: Synthetic oligonucleotide
  Sense strand starting at position 3923 of SEQ ID NO: 585171
uuguuaggucuauagauga

SEQ ID NO: 618775 - RNA, 19 nt, Artificial Sequence
  Description of Artificial Sequence: Synthetic oligonucleotide
  Antisense strand to SEQ ID NO: 618774
ucaucuauagaccuaacaa

SEQ ID NO: 618776 - RNA, 19 nt, Artificial Sequence
  Description of Artificial Sequence: Synthetic oligonucleotide
  Sense strand starting at position 3931 of SEQ ID NO: 585171
ucuauagaugaauguugau

SEQ ID NO: 618777 - RNA, 19 nt, Artificial Sequence
  Description of Artificial Sequence: Synthetic oligonucleotide
  Antisense strand to SEQ ID NO: 618776
aucaacauucaucuauaga

SEQ ID NO: 618778 - RNA, 19 nt, Artificial Sequence
  Description of Artificial Sequence: Synthetic oligonucleotide
  Sense strand starting at position 29 of SEQ ID NO: 585172
gucucacucuuaggcuuua

SEQ ID NO: 618779 - RNA, 19 nt, Artificial Sequence
  Description of Artificial Sequence: Synthetic oligonucleotide
  Antisense strand to SEQ ID NO: 618778
uaaagccuaagagugagac

SEQ ID NO: 618780 - RNA, 19 nt, Artificial Sequence
  Description of Artificial Sequence: Synthetic oligonucleotide
  Sense strand starting at position 222 of SEQ ID NO: 585172
cgccuuacacuugauauau

SEQ ID NO: 618781 - RNA, 19 nt, Artificial Sequence
  Description of Artificial Sequence: Synthetic oligonucleotide
  Antisense strand to SEQ ID NO: 618780
auauaucaaguguaaggcg

SEQ ID NO: 618782 - RNA, 19 nt, Artificial Sequence
  Description of Artificial Sequence: Synthetic oligonucleotide
  Sense strand starting at position 272 of SEQ ID NO: 585172
cauccugaguccuuugaug

SEQ ID NO: 618783 - RNA, 19 nt, Artificial Sequence
  Description of Artificial Sequence: Synthetic oligonucleotide
  Antisense strand to SEQ ID NO: 618782
caucaaaggacucaggaug

SEQ ID NO: 618784 - RNA, 19 nt, Artificial Sequence
  Description of Artificial Sequence: Synthetic oligonucleotide
  Sense strand starting at position 274 of SEQ ID NO: 585172
uccugaguccuuugauguc

SEQ ID NO: 618785 - RNA, 19 nt, Artificial Sequence
  Description of Artificial Sequence: Synthetic oligonucleotide
  Antisense strand to SEQ ID NO: 618784
gacaucaaaggacucagga

SEQ ID NO: 618786 - RNA, 19 nt, Artificial Sequence
  Description of Artificial Sequence: Synthetic oligonucleotide
  Sense strand starting at position 277 of SEQ ID NO: 585172
ugaguccuuugaugucaga

SEQ ID NO: 618787 - RNA, 19 nt, Artificial Sequence
  Description of Artificial Sequence: Synthetic oligonucleotide
  Antisense strand to SEQ ID NO: 618786
ucugacaucaaaggacuca

SEQ ID NO: 618788 - RNA, 19 nt, Artificial Sequence
  Description of Artificial Sequence: Synthetic oligonucleotide
  Sense strand starting at position 280 of SEQ ID NO: 585172
guccuuugaugucagagac

SEQ ID NO: 618789 - RNA, 19 nt, Artificial Sequence
  Description of Artificial Sequence: Synthetic oligonucleotide
  Antisense strand to SEQ ID NO: 618788
gucucugacaucaaaggac

SEQ ID NO: 618790 - RNA, 19 nt, Artificial Sequence
  Description of Artificial Sequence: Synthetic oligonucleotide
  Sense strand starting at position 284 of SEQ ID NO: 585172
uuugaugucagagacugua

SEQ ID NO: 618791 - RNA, 19 nt, Artificial Sequence
  Description of Artificial Sequence: Synthetic oligonucleotide
  Antisense strand to SEQ ID NO: 618790
uacagucucugacaucaaa

SEQ ID NO: 618792 - RNA, 19 nt, Artificial Sequence
  Description of Artificial Sequence: Synthetic oligonucleotide
  Sense strand starting at position 325 of SEQ ID NO: 585172
cacuuauaagagcgauuga

SEQ ID NO: 618793 - RNA, 19 nt, Artificial Sequence
  Description of Artificial Sequence: Synthetic oligonucleotide
  Antisense strand to SEQ ID NO: 618792
ucaaucgcucuuauaagug

SEQ ID NO: 618794 - RNA, 19 nt, Artificial Sequence
  Description of Artificial Sequence: Synthetic oligonucleotide
  Sense strand starting at position 326 of SEQ ID NO: 585172
acuuauaagagcgauugau

SEQ ID NO: 618795 - RNA, 19 nt, Artificial Sequence
  Description of Artificial Sequence: Synthetic oligonucleotide
  Antisense strand to SEQ ID NO: 618794
aucaaucgcucuuauaagu

SEQ ID NO: 618796 - RNA, 19 nt, Artificial Sequence
  Description of Artificial Sequence: Synthetic oligonucleotide
  Sense strand starting at position 332 of SEQ ID NO: 585172
aagagcgauugauauaaua

SEQ ID NO: 618797 - RNA, 19 nt, Artificial Sequence
  Description of Artificial Sequence: Synthetic oligonucleotide
  Antisense strand to SEQ ID NO: 618796
uauuauaucaaucgcucuu

SEQ ID NO: 618798 - RNA, 19 nt, Artificial Sequence
  Description of Artificial Sequence: Synthetic oligonucleotide
  Sense strand starting at position 2003 of SEQ ID NO: 585172
guuaaagacuaaugucuga

SEQ ID NO: 618799 - RNA, 19 nt, Artificial Sequence
  Description of Artificial Sequence: Synthetic oligonucleotide
  Antisense strand to SEQ ID NO: 618798
ucagacauuagucuuuaac

SEQ ID NO: 618800 - RNA, 19 nt, Artificial Sequence
  Description of Artificial Sequence: Synthetic oligonucleotide
  Sense strand starting at position 2008 of SEQ ID NO: 585172
agacuaaugucugaaauau

SEQ ID NO: 618801 - RNA, 19 nt, Artificial Sequence
  Description of Artificial Sequence: Synthetic oligonucleotide
  Antisense strand to SEQ ID NO: 618800
auauuucagacauuagucu

SEQ ID NO: 618802 - RNA, 19 nt, Artificial Sequence
  Description of Artificial Sequence: Synthetic oligonucleotide
  Sense strand starting at position 2050 of SEQ ID NO: 585172
cacccauggugguaauaua

SEQ ID NO: 618803 - RNA, 19 nt, Artificial Sequence
  Description of Artificial Sequence: Synthetic oligonucleotide
  Antisense strand to SEQ ID NO: 618802
uauauuaccaccaugggug

SEQ ID NO: 618804 - RNA, 19 nt, Artificial Sequence
  Description of Artificial Sequence: Synthetic oligonucleotide
  Sense strand starting at position 2222 of SEQ ID NO: 585172
gcaguuuacuucuuccuau

SEQ ID NO: 618805 - RNA, 19 nt, Artificial Sequence
  Description of Artificial Sequence: Synthetic oligonucleotide
  Antisense strand to SEQ ID NO: 618804
auaggaagaaguaaacugc

SEQ ID NO: 618806 - RNA, 19 nt, Artificial Sequence
  Description of Artificial Sequence: Synthetic oligonucleotide
  Sense strand starting at position 2257 of SEQ ID NO: 585172
ccacaaagcugccuguuau

SEQ ID NO: 618807 - RNA, 19 nt, Artificial Sequence
  Description of Artificial Sequence: Synthetic oligonucleotide
  Antisense strand to SEQ ID NO: 618806
auaacaggcagcuuugugg

SEQ ID NO: 618808 - RNA, 19 nt, Artificial Sequence
  Description of Artificial Sequence: Synthetic oligonucleotide
  Sense strand starting at position 2264 of SEQ ID NO: 585172
gcugccuguuauucuagua

SEQ ID NO: 618809 - RNA, 19 nt, Artificial Sequence
  Description of Artificial Sequence: Synthetic oligonucleotide
  Antisense strand to SEQ ID NO: 618808
uacuagaauaacaggcagc

SEQ ID NO: 618810 - RNA, 19 nt, Artificial Sequence
  Description of Artificial Sequence: Synthetic oligonucleotide
  Sense strand starting at position 2269 of SEQ ID NO: 585172
cuguuauucuaguauacaa

SEQ ID NO: 618811 - RNA, 19 nt, Artificial Sequence
  Description of Artificial Sequence: Synthetic oligonucleotide
  Antisense strand to SEQ ID NO: 618810
uuguauacuagaauaacag

SEQ ID NO: 618812 - RNA, 19 nt, Artificial Sequence
  Description of Artificial Sequence: Synthetic oligonucleotide
  Sense strand starting at position 2352 of SEQ ID NO: 585172
gagauacgcuacuuaccau

SEQ ID NO: 618813 - RNA, 19 nt, Artificial Sequence
  Description of Artificial Sequence: Synthetic oligonucleotide
  Antisense strand to SEQ ID NO: 618812
augguaaguagcguaucuc

SEQ ID NO: 618814 - RNA, 19 nt, Artificial Sequence
  Description of Artificial Sequence: Synthetic oligonucleotide
  Sense strand starting at position 2370 of SEQ ID NO: 585172
uacaucugacaugaucgua

SEQ ID NO: 618815 - RNA, 19 nt, Artificial Sequence
  Description of Artificial Sequence: Synthetic oligonucleotide
  Antisense strand to SEQ ID NO: 618814
uacgaucaugucagaugua

SEQ ID NO: 618816 - RNA, 19 nt, Artificial Sequence
  Description of Artificial Sequence: Synthetic oligonucleotide
  Sense strand starting at position 2373 of SEQ ID NO: 585172
aucugacaugaucguaaag

SEQ ID NO: 618817 - RNA, 19 nt, Artificial Sequence
  Description of Artificial Sequence: Synthetic oligonucleotide
  Antisense strand to SEQ ID NO: 618816
cuuuacgaucaugucagau

SEQ ID NO: 618818 - RNA, 19 nt, Artificial Sequence
  Description of Artificial Sequence: Synthetic oligonucleotide
  Sense strand starting at position 2375 of SEQ ID NO: 585172
cugacaugaucguaaagga

SEQ ID NO: 618819 - RNA, 19 nt, Artificial Sequence
  Description of Artificial Sequence: Synthetic oligonucleotide
  Antisense strand to SEQ ID NO: 618818
uccuuuacgaucaugucag

SEQ ID NO: 618820 - RNA, 19 nt, Artificial Sequence
  Description of Artificial Sequence: Synthetic oligonucleotide
  Sense strand starting at position 2393 of SEQ ID NO: 585172
agucucaauuccucaggaa

SEQ ID NO: 618821 - RNA, 19 nt, Artificial Sequence
  Description of Artificial Sequence: Synthetic oligonucleotide
  Antisense strand to SEQ ID NO: 618820
uuccugaggaauugagacu

SEQ ID NO: 618822 - RNA, 19 nt, Artificial Sequence
  Description of Artificial Sequence: Synthetic oligonucleotide
  Sense strand starting at position 2397 of SEQ ID NO: 585172
ucaauuccucaggaagugu

SEQ ID NO: 618823 - RNA, 19 nt, Artificial Sequence
  Description of Artificial Sequence: Synthetic oligonucleotide
  Antisense strand to SEQ ID NO: 618822
acacuuccugaggaauuga

SEQ ID NO: 618824 - RNA, 19 nt, Artificial Sequence
  Description of Artificial Sequence: Synthetic oligonucleotide
  Sense strand starting at position 2408 of SEQ ID NO: 585172
ggaaguguucccuacccau

SEQ ID NO: 618825 - RNA, 19 nt, Artificial Sequence
  Description of Artificial Sequence: Synthetic oligonucleotide
  Antisense strand to SEQ ID NO: 618824
auggguagggaacacuucc

SEQ ID NO: 618826 - RNA, 19 nt, Artificial Sequence
  Description of Artificial Sequence: Synthetic oligonucleotide
  Sense strand starting at position 2491 of SEQ ID NO: 585172
ugggacugugccuaaauga

SEQ ID NO: 618827 - RNA, 19 nt, Artificial Sequence
  Description of Artificial Sequence: Synthetic oligonucleotide
  Antisense strand to SEQ ID NO: 618826
ucauuuaggcacaguccca

SEQ ID NO: 618828 - RNA, 19 nt, Artificial Sequence
  Description of Artificial Sequence: Synthetic oligonucleotide
  Sense strand starting at position 2577 of SEQ ID NO: 585172
gcauguuggucaucgcaca

SEQ ID NO: 618829 - RNA, 19 nt, Artificial Sequence
  Description of Artificial Sequence: Synthetic oligonucleotide
  Antisense strand to SEQ ID NO: 618828
ugugcgaugaccaacaugc

SEQ ID NO: 618830 - RNA, 19 nt, Artificial Sequence
  Description of Artificial Sequence: Synthetic oligonucleotide
  Sense strand starting at position 2594 of SEQ ID NO: 585172
cacacaaggcgucaauaua

SEQ ID NO: 618831 - RNA, 19 nt, Artificial Sequence
  Description of Artificial Sequence: Synthetic oligonucleotide
  Antisense strand to SEQ ID NO: 618830
uauauugacgccuugugug

SEQ ID NO: 618832 - RNA, 19 nt, Artificial Sequence
  Description of Artificial Sequence: Synthetic oligonucleotide
  Sense strand starting at position 2601 of SEQ ID NO: 585172
ggcgucaauauauaauagu

SEQ ID NO: 618833 - RNA, 19 nt, Artificial Sequence
  Description of Artificial Sequence: Synthetic oligonucleotide
  Antisense strand to SEQ ID NO: 618832
acuauuauauauugacgcc

SEQ ID NO: 618834 - RNA, 19 nt, Artificial Sequence
  Description of Artificial Sequence: Synthetic oligonucleotide
  Sense strand starting at position 2696 of SEQ ID NO: 585172
aguagauccucaugauaua

SEQ ID NO: 618835 - RNA, 19 nt, Artificial Sequence
  Description of Artificial Sequence: Synthetic oligonucleotide
  Antisense strand to SEQ ID NO: 618834
uauaucaugaggaucuacu

SEQ ID NO: 618836 - RNA, 19 nt, Artificial Sequence
  Description of Artificial Sequence: Synthetic oligonucleotide
  Sense strand starting at position 2786 of SEQ ID NO: 585172
ggcucauaucaggguagca

SEQ ID NO: 618837 - RNA, 19 nt, Artificial Sequence
  Description of Artificial Sequence: Synthetic oligonucleotide
  Antisense strand to SEQ ID NO: 618836
ugcuacccugauaugagcc

SEQ ID NO: 618838 - RNA, 19 nt, Artificial Sequence
  Description of Artificial Sequence: Synthetic oligonucleotide
  Sense strand starting at position 2897 of SEQ ID NO: 585172
uuugcuaacuuagaagaaa

SEQ ID NO: 618839 - RNA, 19 nt, Artificial Sequence
  Description of Artificial Sequence: Synthetic oligonucleotide
  Antisense strand to SEQ ID NO: 618838
uuucuucuaaguuagcaaa

SEQ ID NO: 618840 - RNA, 19 nt, Artificial Sequence
  Description of Artificial Sequence: Synthetic oligonucleotide
  Sense strand starting at position 2966 of SEQ ID NO: 585172
agguauagcugacaugaac

SEQ ID NO: 618841 - RNA, 19 nt, Artificial Sequence
  Description of Artificial Sequence: Synthetic oligonucleotide
  Antisense strand to SEQ ID NO: 618840
guucaugucagcuauaccu

SEQ ID NO: 618842 - RNA, 19 nt, Artificial Sequence
  Description of Artificial Sequence: Synthetic oligonucleotide
  Sense strand starting at position 2988 of SEQ ID NO: 585172
uuacuugguuuauccugaa

SEQ ID NO: 618843 - RNA, 19 nt, Artificial Sequence
  Description of Artificial Sequence: Synthetic oligonucleotide
  Antisense strand to SEQ ID NO: 618842
uucaggauaaaccaaguaa

SEQ ID NO: 618844 - RNA, 19 nt, Artificial Sequence
  Description of Artificial Sequence: Synthetic oligonucleotide
  Sense strand starting at position 3051 of SEQ ID NO: 585172
gguuaaagcuuucuaagau

SEQ ID NO: 618845 - RNA, 19 nt, Artificial Sequence
  Description of Artificial Sequence: Synthetic oligonucleotide
  Antisense strand to SEQ ID NO: 618844
aucuuagaaagcuuuaacc

SEQ ID NO: 618846 - RNA, 19 nt, Artificial Sequence
  Description of Artificial Sequence: Synthetic oligonucleotide
  Sense strand starting at position 3052 of SEQ ID NO: 585172
guuaaagcuuucuaagaua

SEQ ID NO: 618847 - RNA, 19 nt, Artificial Sequence
  Description of Artificial Sequence: Synthetic oligonucleotide
  Antisense strand to SEQ ID NO: 618846
uaucuuagaaagcuuuaac

SEQ ID NO: 618848 - RNA, 19 nt, Artificial Sequence
  Description of Artificial Sequence: Synthetic oligonucleotide
  Sense strand starting at position 3070 of SEQ ID NO: 585172
auggaagacuuccagauaa

SEQ ID NO: 618849 - RNA, 19 nt, Artificial Sequence
  Description of Artificial Sequence: Synthetic oligonucleotide
  Antisense strand to SEQ ID NO: 618848
uuaucuggaagucuuccau

SEQ ID NO: 618850 - RNA, 19 nt, Artificial Sequence
  Description of Artificial Sequence: Synthetic oligonucleotide
  Sense strand starting at position 3816 of SEQ ID NO: 585172
ccuugcuaucgcuuaggca

SEQ ID NO: 618851 - RNA, 19 nt, Artificial Sequence
  Description of Artificial Sequence: Synthetic oligonucleotide
  Antisense strand to SEQ ID NO: 618850
ugccuaagcgauagcaagg

SEQ ID NO: 618852 - RNA, 19 nt, Artificial Sequence
  Description of Artificial Sequence: Synthetic oligonucleotide
  Sense strand starting at position 3817 of SEQ ID NO: 585172
cuugcuaucgcuuaggcau

SEQ ID NO: 618853 - RNA, 19 nt, Artificial Sequence
  Description of Artificial Sequence: Synthetic oligonucleotide
  Antisense strand to SEQ ID NO: 618852
augccuaagcgauagcaag

SEQ ID NO: 618854 - RNA, 19 nt, Artificial Sequence
  Description of Artificial Sequence: Synthetic oligonucleotide
  Sense strand starting at position 3889 of SEQ ID NO: 585172
aguacuugaucacuaagga

SEQ ID NO: 618855 - RNA, 19 nt, Artificial Sequence
  Description of Artificial Sequence: Synthetic oligonucleotide
  Antisense strand to SEQ ID NO: 618854
uccuuagugaucaaguacu

SEQ ID NO: 618856 - RNA, 19 nt, Artificial Sequence
  Description of Artificial Sequence: Synthetic oligonucleotide
  Sense strand starting at position 942 of SEQ ID NO: 585173
auaauuugaucgugugaag

SEQ ID NO: 618857 - RNA, 19 nt, Artificial Sequence
  Description of Artificial Sequence: Synthetic oligonucleotide
  Antisense strand to SEQ ID NO: 618856
cuucacacgaucaaauuau

SEQ ID NO: 618858 - RNA, 19 nt, Artificial Sequence
  Description of Artificial Sequence: Synthetic oligonucleotide
  Sense strand starting at position 1898 of SEQ ID NO: 585173
cgguaccucgacuggaaau

SEQ ID NO: 618859 - RNA, 19 nt, Artificial Sequence
  Description of Artificial Sequence: Synthetic oligonucleotide
  Antisense strand to SEQ ID NO: 618858
auuuccagucgagguaccg

SEQ ID NO: 618860 - RNA, 19 nt, Artificial Sequence
  Description of Artificial Sequence: Synthetic oligonucleotide
  Sense strand starting at position 2088 of SEQ ID NO: 585173
cuggguucaggcgauuauu

SEQ ID NO: 618861 - RNA, 19 nt, Artificial Sequence
  Description of Artificial Sequence: Synthetic oligonucleotide
  Antisense strand to SEQ ID NO: 618860
aauaaucgccugaacccag

SEQ ID NO: 618862 - RNA, 19 nt, Artificial Sequence
  Description of Artificial Sequence: Synthetic oligonucleotide
  Sense strand starting at position 2231 of SEQ ID NO: 585173
aagugauccugaccucaag

SEQ ID NO: 618863 - RNA, 19 nt, Artificial Sequence
  Description of Artificial Sequence: Synthetic oligonucleotide
  Antisense strand to SEQ ID NO: 618862
cuugaggucaggaucacuu

SEQ ID NO: 618864 - RNA, 19 nt, Artificial Sequence
  Description of Artificial Sequence: Synthetic oligonucleotide
  Sense strand starting at position 2457 of SEQ ID NO: 585173
gggugagguggugaaauau

SEQ ID NO: 618865 - RNA, 19 nt, Artificial Sequence
  Description of Artificial Sequence: Synthetic oligonucleotide
  Antisense strand to SEQ ID NO: 618864
auauuucaccaccucaccc

SEQ ID NO: 618866 - RNA, 19 nt, Artificial Sequence
  Description of Artificial Sequence: Synthetic oligonucleotide
  Sense strand starting at position 2536 of SEQ ID NO: 585173
gggucuggguuucucagaa

SEQ ID NO: 618867 - RNA, 19 nt, Artificial Sequence
  Description of Artificial Sequence: Synthetic oligonucleotide
  Antisense strand to SEQ ID NO: 618866
uucugagaaacccagaccc

SEQ ID NO: 618868 - RNA, 19 nt, Artificial Sequence
  Description of Artificial Sequence: Synthetic oligonucleotide
  Sense strand starting at position 2578 of SEQ ID NO: 585173
acuaaauggugaguaugaa

SEQ ID NO: 618869 - RNA, 19 nt, Artificial Sequence
  Description of Artificial Sequence: Synthetic oligonucleotide
  Antisense strand to SEQ ID NO: 618868
uucauacucaccauuuagu

SEQ ID NO: 618870 - RNA, 19 nt, Artificial Sequence
  Description of Artificial Sequence: Synthetic oligonucleotide
  Sense strand starting at position 2590 of SEQ ID NO: 585173
guaugaaaguagcuaccau

SEQ ID NO: 618871 - RNA, 19 nt, Artificial Sequence
  Description of Artificial Sequence: Synthetic oligonucleotide
  Antisense strand to SEQ ID NO: 618870
augguagcuacuuucauac

SEQ ID NO: 618872 - RNA, 19 nt, Artificial Sequence
  Description of Artificial Sequence: Synthetic oligonucleotide
  Sense strand starting at position 2636 of SEQ ID NO: 585173
gugucaucuuaauuaaugc

SEQ ID NO: 618873 - RNA, 19 nt, Artificial Sequence
  Description of Artificial Sequence: Synthetic oligonucleotide
  Antisense strand to SEQ ID NO: 618872
gcauuaauuaagaugacac

SEQ ID NO: 618874 - RNA, 19 nt, Artificial Sequence
  Description of Artificial Sequence: Synthetic oligonucleotide
  Sense strand starting at position 2664 of SEQ ID NO: 585173
guaccuaucuaugcaauag

SEQ ID NO: 618875 - RNA, 19 nt, Artificial Sequence
  Description of Artificial Sequence: Synthetic oligonucleotide
  Antisense strand to SEQ ID NO: 618874
cuauugcauagauagguac

SEQ ID NO: 618876 - RNA, 19 nt, Artificial Sequence
  Description of Artificial Sequence: Synthetic oligonucleotide
  Sense strand starting at position 2717 of SEQ ID NO: 585173
gaaucagaguugucacuua

SEQ ID NO: 618877 - RNA, 19 nt, Artificial Sequence
  Description of Artificial Sequence: Synthetic oligonucleotide
  Antisense strand to SEQ ID NO: 618876
uaagugacaacucugauuc

SEQ ID NO: 618878 - RNA, 19 nt, Artificial Sequence
  Description of Artificial Sequence: Synthetic oligonucleotide
  Sense strand starting at position 2765 of SEQ ID NO: 585173
agaaucugagguuaugcua

SEQ ID NO: 618879 - RNA, 19 nt, Artificial Sequence
  Description of Artificial Sequence: Synthetic oligonucleotide
  Antisense strand to SEQ ID NO: 618878
uagcauaaccucagauucu

SEQ ID NO: 618880 - RNA, 19 nt, Artificial Sequence
  Description of Artificial Sequence: Synthetic oligonucleotide
  Sense strand starting at position 2898 of SEQ ID NO: 585173
gauaauguggcaugugaaa

SEQ ID NO: 618881 - RNA, 19 nt, Artificial Sequence
  Description of Artificial Sequence: Synthetic oligonucleotide
  Antisense strand to SEQ ID NO: 618880
uuucacaugccacauuauc

SEQ ID NO: 618882 - RNA, 19 nt, Artificial Sequence
  Description of Artificial Sequence: Synthetic oligonucleotide
  Sense strand starting at position 3008 of SEQ ID NO: 585173
guuccugcucguuaacauu

SEQ ID NO: 618883 - RNA, 19 nt, Artificial Sequence
  Description of Artificial Sequence: Synthetic oligonucleotide
  Antisense strand to SEQ ID NO: 618882
aauguuaacgagcaggaac

SEQ ID NO: 618884 - RNA, 19 nt, Artificial Sequence
  Description of Artificial Sequence: Synthetic oligonucleotide
  Sense strand starting at position 3094 of SEQ ID NO: 585173
uuaaguguuucccucaaag

SEQ ID NO: 618885 - RNA, 19 nt, Artificial Sequence
  Description of Artificial Sequence: Synthetic oligonucleotide
  Antisense strand to SEQ ID NO: 618884
cuuugagggaaacacuuaa

SEQ ID NO: 618886 - RNA, 19 nt, Artificial Sequence
  Description of Artificial Sequence: Synthetic oligonucleotide
  Sense strand starting at position 3138 of SEQ ID NO: 585173
gucuaauuugcauguacaa

SEQ ID NO: 618887 - RNA, 19 nt, Artificial Sequence
  Description of Artificial Sequence: Synthetic oligonucleotide
  Antisense strand to SEQ ID NO: 618886
uuguacaugcaaauuagac

SEQ ID NO: 618888 - RNA, 19 nt, Artificial Sequence
  Description of Artificial Sequence: Synthetic oligonucleotide
  Sense strand starting at position 3160 of SEQ ID NO: 585173
auuaauagguagucaagua

SEQ ID NO: 618889 - RNA, 19 nt, Artificial Sequence
  Description of Artificial Sequence: Synthetic oligonucleotide
  Antisense strand to SEQ ID NO: 618888
uacuugacuaccuauuaau

SEQ ID NO: 618890 - RNA, 19 nt, Artificial Sequence
  Description of Artificial Sequence: Synthetic oligonucleotide
  Sense strand starting at position 3168 of SEQ ID NO: 585173
guagucaaguauucuggaa

SEQ ID NO: 618891 - RNA, 19 nt, Artificial Sequence
  Description of Artificial Sequence: Synthetic oligonucleotide
  Antisense strand to SEQ ID NO: 618890
uuccagaauacuugacuac

SEQ ID NO: 618892 - RNA, 19 nt, Artificial Sequence
  Description of Artificial Sequence: Synthetic oligonucleotide
  Sense strand starting at position 3182 of SEQ ID NO: 585173
uggaauaacucccugagca

SEQ ID NO: 618893 - RNA, 19 nt, Artificial Sequence
  Description of Artificial Sequence: Synthetic oligonucleotide
  Antisense strand to SEQ ID NO: 618892
ugcucagggaguuauucca

SEQ ID NO: 618894 - RNA, 19 nt, Artificial Sequence
  Description of Artificial Sequence: Synthetic oligonucleotide
  Sense strand starting at position 3183 of SEQ ID NO: 585173
ggaauaacucccugagcaa

SEQ ID NO: 618895 - RNA, 19 nt, Artificial Sequence
  Description of Artificial Sequence: Synthetic oligonucleotide
  Antisense strand to SEQ ID NO: 618894
uugcucagggaguuauucc

SEQ ID NO: 618896 - RNA, 19 nt, Artificial Sequence
  Description of Artificial Sequence: Synthetic oligonucleotide
  Sense strand starting at position 3186 of SEQ ID NO: 585173
auaacucccugagcaagaa

SEQ ID NO: 618897 - RNA, 19 nt, Artificial Sequence
  Description of Artificial Sequence: Synthetic oligonucleotide
  Antisense strand to SEQ ID NO: 618896
uucuugcucagggaguuau

SEQ ID NO: 618898 - RNA, 19 nt, Artificial Sequence
  Description of Artificial Sequence: Synthetic oligonucleotide
  Sense strand starting at position 3276 of SEQ ID NO: 585173
cucucacauuguguguuau

SEQ ID NO: 618899 - RNA, 19 nt, Artificial Sequence
  Description of Artificial Sequence: Synthetic oligonucleotide
  Antisense strand to SEQ ID NO: 618898
auaacacacaaugugagag

SEQ ID NO: 618900 - RNA, 19 nt, Artificial Sequence
  Description of Artificial Sequence: Synthetic oligonucleotide
  Sense strand starting at position 3277 of SEQ ID NO: 585173
ucucacauuguguguuauu

SEQ ID NO: 618901 - RNA, 19 nt, Artificial Sequence
  Description of Artificial Sequence: Synthetic oligonucleotide
  Antisense strand to SEQ ID NO: 618900
aauaacacacaaugugaga

SEQ ID NO: 618902 - RNA, 19 nt, Artificial Sequence
  Description of Artificial Sequence: Synthetic oligonucleotide
  Sense strand starting at position 3278 of SEQ ID NO: 585173
cucacauuguguguuauua

SEQ ID NO: 618903 - RNA, 19 nt, Artificial Sequence
  Description of Artificial Sequence: Synthetic oligonucleotide
  Antisense strand to SEQ ID NO: 618902
uaauaacacacaaugugag

SEQ ID NO: 618904 - RNA, 19 nt, Artificial Sequence
  Description of Artificial Sequence: Synthetic oligonucleotide
  Sense strand starting at position 3313 of SEQ ID NO: 585173
auucuuacacuuugagaug

SEQ ID NO: 618905 - RNA, 19 nt, Artificial Sequence
  Description of Artificial Sequence: Synthetic oligonucleotide
  Antisense strand to SEQ ID NO: 618904
caucucaaaguguaagaau

SEQ ID NO: 618906 - RNA, 19 nt, Artificial Sequence
  Description of Artificial Sequence: Synthetic oligonucleotide
  Sense strand starting at position 3327 of SEQ ID NO: 585173
agauguaaaugacucucau

SEQ ID NO: 618907 - RNA, 19 nt, Artificial Sequence
  Description of Artificial Sequence: Synthetic oligonucleotide
  Antisense strand to SEQ ID NO: 618906
augagagucauuuacaucu

SEQ ID NO: 618908 - RNA, 19 nt, Artificial Sequence
  Description of Artificial Sequence: Synthetic oligonucleotide
  Sense strand starting at position 3331 of SEQ ID NO: 585173
guaaaugacucucauggag

SEQ ID NO: 618909 - RNA, 19 nt, Artificial Sequence
  Description of Artificial Sequence: Synthetic oligonucleotide
  Antisense strand to SEQ ID NO: 618908
cuccaugagagucauuuac

SEQ ID NO: 618910 - RNA, 19 nt, Artificial Sequence
  Description of Artificial Sequence: Synthetic oligonucleotide
  Sense strand starting at position 3339 of SEQ ID NO: 585173
cucucauggaguuggguaa

SEQ ID NO: 618911 - RNA, 19 nt, Artificial Sequence
  Description of Artificial Sequence: Synthetic oligonucleotide
  Antisense strand to SEQ ID NO: 618910
uuacccaacuccaugagag

SEQ ID NO: 618912 - RNA, 19 nt, Artificial Sequence
  Description of Artificial Sequence: Synthetic oligonucleotide
  Sense strand starting at position 3340 of SEQ ID NO: 585173
ucucauggaguuggguaaa

SEQ ID NO: 618913 - RNA, 19 nt, Artificial Sequence
  Description of Artificial Sequence: Synthetic oligonucleotide
  Antisense strand to SEQ ID NO: 618912
uuuacccaacuccaugaga

SEQ ID NO: 618914 - RNA, 19 nt, Artificial Sequence
  Description of Artificial Sequence: Synthetic oligonucleotide
  Sense strand starting at position 3359 of SEQ ID NO: 585173
cgggcaguccuuuaucuuu

SEQ ID NO: 618915 - RNA, 19 nt, Artificial Sequence
  Description of Artificial Sequence: Synthetic oligonucleotide
  Antisense strand to SEQ ID NO: 618914
aaagauaaaggacugcccg

SEQ ID NO: 618916 - RNA, 19 nt, Artificial Sequence
  Description of Artificial Sequence: Synthetic oligonucleotide
  Sense strand starting at position 3708 of SEQ ID NO: 585173
agccaagagcaguguaaug

SEQ ID NO: 618917 - RNA, 19 nt, Artificial Sequence
  Description of Artificial Sequence: Synthetic oligonucleotide
  Antisense strand to SEQ ID NO: 618916
cauuacacugcucuuggcu

SEQ ID NO: 618918 - RNA, 19 nt, Artificial Sequence
  Description of Artificial Sequence: Synthetic oligonucleotide
  Sense strand starting at position 3743 of SEQ ID NO: 585173
cuugcuaaucuauguguau

SEQ ID NO: 618919 - RNA, 19 nt, Artificial Sequence
  Description of Artificial Sequence: Synthetic oligonucleotide
  Antisense strand to SEQ ID NO: 618918
auacacauagauuagcaag

SEQ ID NO: 618920 - RNA, 19 nt, Artificial Sequence
  Description of Artificial Sequence: Synthetic oligonucleotide
  Sense strand starting at position 3744 of SEQ ID NO: 585173
uugcuaaucuauguguaug

SEQ ID NO: 618921 - RNA, 19 nt, Artificial Sequence
  Description of Artificial Sequence: Synthetic oligonucleotide
  Antisense strand to SEQ ID NO: 618920
cauacacauagauuagcaa

SEQ ID NO: 618922 - RNA, 19 nt, Artificial Sequence
  Description of Artificial Sequence: Synthetic oligonucleotide
  Sense strand starting at position 3746 of SEQ ID NO: 585173
gcuaaucuauguguaugua

SEQ ID NO: 618923 - RNA, 19 nt, Artificial Sequence
  Description of Artificial Sequence: Synthetic oligonucleotide
  Antisense strand to SEQ ID NO: 618922
uacauacacauagauuagc

SEQ ID NO: 618924 - RNA, 19 nt, Artificial Sequence
  Description of Artificial Sequence: Synthetic oligonucleotide
  Sense strand starting at position 3747 of SEQ ID NO: 585173
cuaaucuauguguauguau

SEQ ID NO: 618925 - RNA, 19 nt, Artificial Sequence
  Description of Artificial Sequence: Synthetic oligonucleotide
  Antisense strand to SEQ ID NO: 618924
auacauacacauagauuag

SEQ ID NO: 618926 - RNA, 19 nt, Artificial Sequence
  Description of Artificial Sequence: Synthetic oligonucleotide
  Sense strand starting at position 3849 of SEQ ID NO: 585173
acuagagauuggucaauau

SEQ ID NO: 618927 - RNA, 19 nt, Artificial Sequence
  Description of Artificial Sequence: Synthetic oligonucleotide
  Antisense strand to SEQ ID NO: 618926
auauugaccaaucucuagu

SEQ ID NO: 618928 - RNA, 19 nt, Artificial Sequence
  Description of Artificial Sequence: Synthetic oligonucleotide
  Sense strand starting at position 3936 of SEQ ID NO: 585173
ugggaagacuaagaaaguu

SEQ ID NO: 618929 - RNA, 19 nt, Artificial Sequence
  Description of Artificial Sequence: Synthetic oligonucleotide
  Antisense strand to SEQ ID NO: 618928
aacuuucuuagucuuccca

SEQ ID NO: 618930 - RNA, 19 nt, Artificial Sequence
  Description of Artificial Sequence: Synthetic oligonucleotide
  Sense strand starting at position 3945 of SEQ ID NO: 585173
uaagaaaguucugauggaa

SEQ ID NO: 618931 - RNA, 19 nt, Artificial Sequence
  Description of Artificial Sequence: Synthetic oligonucleotide
  Antisense strand to SEQ ID NO: 618930
uuccaucagaacuuucuua

SEQ ID NO: 618932 - RNA, 19 nt, Artificial Sequence
  Description of Artificial Sequence: Synthetic oligonucleotide
  Sense strand starting at position 3948 of SEQ ID NO: 585173
gaaaguucugauggaagug

SEQ ID NO: 618933 - RNA, 19 nt, Artificial Sequence
  Description of Artificial Sequence: Synthetic oligonucleotide
  Antisense strand to SEQ ID NO: 618932
cacuuccaucagaacuuuc

SEQ ID NO: 618934 - RNA, 19 nt, Artificial Sequence
  Description of Artificial Sequence: Synthetic oligonucleotide
  Sense strand starting at position 3960 of SEQ ID NO: 585173
ggaagugugcuggacauua

SEQ ID NO: 618935 - RNA, 19 nt, Artificial Sequence
  Description of Artificial Sequence: Synthetic oligonucleotide
  Antisense strand to SEQ ID NO: 618934
uaauguccagcacacuucc

SEQ ID NO: 618936 - RNA, 19 nt, Artificial Sequence
  Description of Artificial Sequence: Synthetic oligonucleotide
  Sense strand starting at position 245 of SEQ ID NO: 585174
aaauuuagauacuguggaa

SEQ ID NO: 618937 - RNA, 19 nt, Artificial Sequence
  Description of Artificial Sequence: Synthetic oligonucleotide
  Antisense strand to SEQ ID NO: 618936
uuccacaguaucuaaauuu

SEQ ID NO: 618938 - RNA, 19 nt, Artificial Sequence
  Description of Artificial Sequence: Synthetic oligonucleotide
  Sense strand starting at position 252 of SEQ ID NO: 585174
gauacuguggaauguaaau

SEQ ID NO: 618939 - RNA, 19 nt, Artificial Sequence
  Description of Artificial Sequence: Synthetic oligonucleotide
  Antisense strand to SEQ ID NO: 618938
auuuacauuccacaguauc

SEQ ID NO: 618940 - RNA, 19 nt, Artificial Sequence
  Description of Artificial Sequence: Synthetic oligonucleotide
  Sense strand starting at position 540 of SEQ ID NO: 585174
agcaaugagaugugucuga

SEQ ID NO: 618941 - RNA, 19 nt, Artificial Sequence
  Description of Artificial Sequence: Synthetic oligonucleotide
  Antisense strand to SEQ ID NO: 618940
ucagacacaucucauugcu

SEQ ID NO: 618942 - RNA, 19 nt, Artificial Sequence
  Description of Artificial Sequence: Synthetic oligonucleotide
  Sense strand starting at position 544 of SEQ ID NO: 585174
augagaugugucugacucu

SEQ ID NO: 618943 - RNA, 19 nt, Artificial Sequence
  Description of Artificial Sequence: Synthetic oligonucleotide
  Antisense strand to SEQ ID NO: 618942
agagucagacacaucucau

SEQ ID NO: 618944 - RNA, 19 nt, Artificial Sequence
  Description of Artificial Sequence: Synthetic oligonucleotide
  Sense strand starting at position 690 of SEQ ID NO: 585174
auacaaagguguuuacaga

SEQ ID NO: 618945 - RNA, 19 nt, Artificial Sequence
  Description of Artificial Sequence: Synthetic oligonucleotide
  Antisense strand to SEQ ID NO: 618944
ucuguaaacaccuuuguau

SEQ ID NO: 618946 - RNA, 19 nt, Artificial Sequence
  Description of Artificial Sequence: Synthetic oligonucleotide
  Sense strand starting at position 697 of SEQ ID NO: 585174
gguguuuacagacacugau

SEQ ID NO: 618947 - RNA, 19 nt, Artificial Sequence
  Description of Artificial Sequence: Synthetic oligonucleotide
  Antisense strand to SEQ ID NO: 618946
aucagugucuguaaacacc

SEQ ID NO: 618948 - RNA, 19 nt, Artificial Sequence
  Description of Artificial Sequence: Synthetic oligonucleotide
  Sense strand starting at position 725 of SEQ ID NO: 585174
ggaauaaacagcgguuacu

SEQ ID NO: 618949 - RNA, 19 nt, Artificial Sequence
  Description of Artificial Sequence: Synthetic oligonucleotide
  Antisense strand to SEQ ID NO: 618948
aguaaccgcuguuuauucc

SEQ ID NO: 618950 - RNA, 19 nt, Artificial Sequence
  Description of Artificial Sequence: Synthetic oligonucleotide
  Sense strand starting at position 735 of SEQ ID NO: 585174
gcgguuacugugccugaau

SEQ ID NO: 618951 - RNA, 19 nt, Artificial Sequence
  Description of Artificial Sequence: Synthetic oligonucleotide
  Antisense strand to SEQ ID NO: 618950
auucaggcacaguaaccgc

SEQ ID NO: 618952 - RNA, 19 nt, Artificial Sequence
  Description of Artificial Sequence: Synthetic oligonucleotide
  Sense strand starting at position 737 of SEQ ID NO: 585174
gguuacugugccugaauuu

SEQ ID NO: 618953 - RNA, 19 nt, Artificial Sequence
  Description of Artificial Sequence: Synthetic oligonucleotide
  Antisense strand to SEQ ID NO: 618952
aaauucaggcacaguaacc

SEQ ID NO: 618954 - RNA, 19 nt, Artificial Sequence
  Description of Artificial Sequence: Synthetic oligonucleotide
  Sense strand starting at position 1083 of SEQ ID NO: 585174
accacaccugagugaguua

SEQ ID NO: 618955 - RNA, 19 nt, Artificial Sequence
  Description of Artificial Sequence: Synthetic oligonucleotide
  Antisense strand to SEQ ID NO: 618954
uaacucacucagguguggu

SEQ ID NO: 618956 - RNA, 19 nt, Artificial Sequence
  Description of Artificial Sequence: Synthetic oligonucleotide
  Sense strand starting at position 1119 of SEQ ID NO: 585174
uaaagacauguucgguaag

SEQ ID NO: 618957 - RNA, 19 nt, Artificial Sequence
  Description of Artificial Sequence: Synthetic oligonucleotide
  Antisense strand to SEQ ID NO: 618956
cuuaccgaacaugucuuua

SEQ ID NO: 618958 - RNA, 19 nt, Artificial Sequence
  Description of Artificial Sequence: Synthetic oligonucleotide
  Sense strand starting at position 1121 of SEQ ID NO: 585174
aagacauguucgguaagug

SEQ ID NO: 618959 - RNA, 19 nt, Artificial Sequence
  Description of Artificial Sequence: Synthetic oligonucleotide
  Antisense strand to SEQ ID NO: 618958
cacuuaccgaacaugucuu

SEQ ID NO: 618960 - RNA, 19 nt, Artificial Sequence
  Description of Artificial Sequence: Synthetic oligonucleotide
  Sense strand starting at position 1122 of SEQ ID NO: 585174
agacauguucgguaaguga

SEQ ID NO: 618961 - RNA, 19 nt, Artificial Sequence
  Description of Artificial Sequence: Synthetic oligonucleotide
  Antisense strand to SEQ ID NO: 618960
ucacuuaccgaacaugucu

SEQ ID NO: 618962 - RNA, 19 nt, Artificial Sequence
  Description of Artificial Sequence: Synthetic oligonucleotide
  Sense strand starting at position 1165 of SEQ ID NO: 585174
uucucuuacugggucauua

SEQ ID NO: 618963 - RNA, 19 nt, Artificial Sequence
  Description of Artificial Sequence: Synthetic oligonucleotide
  Antisense strand to SEQ ID NO: 618962
uaaugacccaguaagagaa

SEQ ID NO: 618964 - RNA, 19 nt, Artificial Sequence
  Description of Artificial Sequence: Synthetic oligonucleotide
  Sense strand starting at position 1167 of SEQ ID NO: 585174
cucuuacugggucauuacu

SEQ ID NO: 618965 - RNA, 19 nt, Artificial Sequence
  Description of Artificial Sequence: Synthetic oligonucleotide
  Antisense strand to SEQ ID NO: 618964
aguaaugacccaguaagag

SEQ ID NO: 618966 - RNA, 19 nt, Artificial Sequence
  Description of Artificial Sequence: Synthetic oligonucleotide
  Sense strand starting at position 1295 of SEQ ID NO: 585174
uguugugacccacagcaaa

SEQ ID NO: 618967 - RNA, 19 nt, Artificial Sequence
  Description of Artificial Sequence: Synthetic oligonucleotide
  Antisense strand to SEQ ID NO: 618966
uuugcugugggucacaaca

SEQ ID NO: 618968 - RNA, 19 nt, Artificial Sequence
  Description of Artificial Sequence: Synthetic oligonucleotide
  Sense strand starting at position 1344 of SEQ ID NO: 585174
gcgguuaaacuuagagcga

SEQ ID NO: 618969 - RNA, 19 nt, Artificial Sequence
  Description of Artificial Sequence: Synthetic oligonucleotide
  Antisense strand to SEQ ID NO: 618968
ucgcucuaaguuuaaccgc

SEQ ID NO: 618970 - RNA, 19 nt, Artificial Sequence
  Description of Artificial Sequence: Synthetic oligonucleotide
  Sense strand starting at position 1348 of SEQ ID NO: 585174
uuaaacuuagagcgaucaa

SEQ ID NO: 618971 - RNA, 19 nt, Artificial Sequence
  Description of Artificial Sequence: Synthetic oligonucleotide
  Antisense strand to SEQ ID NO: 618970
uugaucgcucuaaguuuaa

SEQ ID NO: 618972 - RNA, 19 nt, Artificial Sequence
  Description of Artificial Sequence: Synthetic oligonucleotide
  Sense strand starting at position 1367 of SEQ ID NO: 585174
auuaguuugcaggaguuaa

SEQ ID NO: 618973 - RNA, 19 nt, Artificial Sequence
  Description of Artificial Sequence: Synthetic oligonucleotide
  Antisense strand to SEQ ID NO: 618972
uuaacuccugcaaacuaau

SEQ ID NO: 618974 - RNA, 19 nt, Artificial Sequence
  Description of Artificial Sequence: Synthetic oligonucleotide
  Sense strand starting at position 1371 of SEQ ID NO: 585174
guuugcaggaguuaagacu

SEQ ID NO: 618975 - RNA, 19 nt, Artificial Sequence
  Description of Artificial Sequence: Synthetic oligonucleotide
  Antisense strand to SEQ ID NO: 618974
agucuuaacuccugcaaac

SEQ ID NO: 618976 - RNA, 19 nt, Artificial Sequence
  Description of Artificial Sequence: Synthetic oligonucleotide
  Sense strand starting at position 1946 of SEQ ID NO: 585174
cccugugccgccuuaacua

SEQ ID NO: 618977 - RNA, 19 nt, Artificial Sequence
  Description of Artificial Sequence: Synthetic oligonucleotide
  Antisense strand to SEQ ID NO: 618976
uaguuaaggcggcacaggg

SEQ ID NO: 618978 - RNA, 19 nt, Artificial Sequence
  Description of Artificial Sequence: Synthetic oligonucleotide
  Sense strand starting at position 2110 of SEQ ID NO: 585174
gagccuugcgcauaaagga

SEQ ID NO: 618979 - RNA, 19 nt, Artificial Sequence
  Description of Artificial Sequence: Synthetic oligonucleotide
  Antisense strand to SEQ ID NO: 618978
uccuuuaugcgcaaggcuc

SEQ ID NO: 618980 - RNA, 19 nt, Artificial Sequence
  Description of Artificial Sequence: Synthetic oligonucleotide
  Sense strand starting at position 2358 of SEQ ID NO: 585174
aacaauuguugagucgaaa

SEQ ID NO: 618981 - RNA, 19 nt, Artificial Sequence
  Description of Artificial Sequence: Synthetic oligonucleotide
  Antisense strand to SEQ ID NO: 618980
uuucgacucaacaauuguu

SEQ ID NO: 618982 - RNA, 19 nt, Artificial Sequence
  Description of Artificial Sequence: Synthetic oligonucleotide
  Sense strand starting at position 2392 of SEQ ID NO: 585174
uugguuccgcuauauauua

SEQ ID NO: 618983 - RNA, 19 nt, Artificial Sequence
  Description of Artificial Sequence: Synthetic oligonucleotide
  Antisense strand to SEQ ID NO: 618982
uaauauauagcggaaccaa

SEQ ID NO: 618984 - RNA, 19 nt, Artificial Sequence
  Description of Artificial Sequence: Synthetic oligonucleotide
  Sense strand starting at position 2403 of SEQ ID NO: 585174
auauauuagcgcuagaaac

SEQ ID NO: 618985 - RNA, 19 nt, Artificial Sequence
  Description of Artificial Sequence: Synthetic oligonucleotide
  Antisense strand to SEQ ID NO: 618984
guuucuagcgcuaauauau

SEQ ID NO: 618986 - RNA, 19 nt, Artificial Sequence
  Description of Artificial Sequence: Synthetic oligonucleotide
  Sense strand starting at position 2405 of SEQ ID NO: 585174
auauuagcgcuagaaacuu

SEQ ID NO: 618987 - RNA, 19 nt, Artificial Sequence
  Description of Artificial Sequence: Synthetic oligonucleotide
  Antisense strand to SEQ ID NO: 618986
aaguuucuagcgcuaauau

SEQ ID NO: 618988 - RNA, 19 nt, Artificial Sequence
  Description of Artificial Sequence: Synthetic oligonucleotide
  Sense strand starting at position 2458 of SEQ ID NO: 585174
aggauuuguugagaauuaa

SEQ ID NO: 618989 - RNA, 19 nt, Artificial Sequence
  Description of Artificial Sequence: Synthetic oligonucleotide
  Antisense strand to SEQ ID NO: 618988
uuaauucucaacaaauccu

SEQ ID NO: 618990 - RNA, 19 nt, Artificial Sequence
  Description of Artificial Sequence: Synthetic oligonucleotide
  Sense strand starting at position 2970 of SEQ ID NO: 585174
guagaugcucauuaaauac

SEQ ID NO: 618991 - RNA, 19 nt, Artificial Sequence
  Description of Artificial Sequence: Synthetic oligonucleotide
  Antisense strand to SEQ ID NO: 618990
guauuuaaugagcaucuac

SEQ ID NO: 618992 - RNA, 19 nt, Artificial Sequence
  Description of Artificial Sequence: Synthetic oligonucleotide
  Sense strand starting at position 3016 of SEQ ID NO: 585174
augacuggugcucaccuaa

SEQ ID NO: 618993 - RNA, 19 nt, Artificial Sequence
  Description of Artificial Sequence: Synthetic oligonucleotide
  Antisense strand to SEQ ID NO: 618992
uuaggugagcaccagucau

SEQ ID NO: 618994 - RNA, 19 nt, Artificial Sequence
  Description of Artificial Sequence: Synthetic oligonucleotide
  Sense strand starting at position 3177 of SEQ ID NO: 585174
cuguucucucacuaggagu

SEQ ID NO: 618995 - RNA, 19 nt, Artificial Sequence
  Description of Artificial Sequence: Synthetic oligonucleotide
  Antisense strand to SEQ ID NO: 618994
acuccuagugagagaacag

SEQ ID NO: 618996 - RNA, 19 nt, Artificial Sequence
  Description of Artificial Sequence: Synthetic oligonucleotide
  Sense strand starting at position 3257 of SEQ ID NO: 585174
ccaagaaggagcugugauu

SEQ ID NO: 618997 - RNA, 19 nt, Artificial Sequence
  Description of Artificial Sequence: Synthetic oligonucleotide
  Antisense strand to SEQ ID NO: 618996
aaucacagcuccuucuugg

SEQ ID NO: 618998 - RNA, 19 nt, Artificial Sequence
  Description of Artificial Sequence: Synthetic oligonucleotide
  Sense strand starting at position 3298 of SEQ ID NO: 585174
uacuccugugauugaagca

SEQ ID NO: 618999 - RNA, 19 nt, Artificial Sequence
  Description of Artificial Sequence: Synthetic oligonucleotide
  Antisense strand to SEQ ID NO: 618998
ugcuucaaucacaggagua

SEQ ID NO: 619000 - RNA, 19 nt, Artificial Sequence
  Description of Artificial Sequence: Synthetic oligonucleotide
  Sense strand starting at position 3363 of SEQ ID NO: 585174
aggaucuguuaguucccua

SEQ ID NO: 619001 - RNA, 19 nt, Artificial Sequence
  Description of Artificial Sequence: Synthetic oligonucleotide
  Antisense strand to SEQ ID NO: 619000
uagggaacuaacagauccu

SEQ ID NO: 619002 - RNA, 19 nt, Artificial Sequence
  Description of Artificial Sequence: Synthetic oligonucleotide
  Sense strand starting at position 3382 of SEQ ID NO: 585174
aaagaagagcgaugauguu

SEQ ID NO: 619003 - RNA, 19 nt, Artificial Sequence
  Description of Artificial Sequence: Synthetic oligonucleotide
  Antisense strand to SEQ ID NO: 619002
aacaucaucgcucuucuuu

SEQ ID NO: 619004 - RNA, 19 nt, Artificial Sequence
  Description of Artificial Sequence: Synthetic oligonucleotide
  Sense strand starting at position 3412 of SEQ ID NO: 585174
ggaggauugccaggcaaac

SEQ ID NO: 619005 - RNA, 19 nt, Artificial Sequence
  Description of Artificial Sequence: Synthetic oligonucleotide
  Antisense strand to SEQ ID NO: 619004
guuugccuggcaauccucc

SEQ ID NO: 619006 - RNA, 19 nt, Artificial Sequence
  Description of Artificial Sequence: Synthetic oligonucleotide
  Sense strand starting at position 3481 of SEQ ID NO: 585174
agaaauguugugcauaccu

SEQ ID NO: 619007 - RNA, 19 nt, Artificial Sequence
  Description of Artificial Sequence: Synthetic oligonucleotide
  Antisense strand to SEQ ID NO: 619006
agguaugcacaacauuucu

SEQ ID NO: 619008 - RNA, 19 nt, Artificial Sequence
  Description of Artificial Sequence: Synthetic oligonucleotide
  Sense strand starting at position 3488 of SEQ ID NO: 585174
uugugcauaccucauacua

SEQ ID NO: 619009 - RNA, 19 nt, Artificial Sequence
  Description of Artificial Sequence: Synthetic oligonucleotide
  Antisense strand to SEQ ID NO: 619008
uaguaugagguaugcacaa

SEQ ID NO: 619010 - RNA, 19 nt, Artificial Sequence
  Description of Artificial Sequence: Synthetic oligonucleotide
  Sense strand starting at position 3536 of SEQ ID NO: 585174
gucuauuagaacugcagga

SEQ ID NO: 619011 - RNA, 19 nt, Artificial Sequence
  Description of Artificial Sequence: Synthetic oligonucleotide
  Antisense strand to SEQ ID NO: 619010
uccugcaguucuaauagac

SEQ ID NO: 619012 - RNA, 19 nt, Artificial Sequence
  Description of Artificial Sequence: Synthetic oligonucleotide
  Sense strand starting at position 3627 of SEQ ID NO: 585174
guguguuaccacugaauua

SEQ ID NO: 619013 - RNA, 19 nt, Artificial Sequence
  Description of Artificial Sequence: Synthetic oligonucleotide
  Antisense strand to SEQ ID NO: 619012
uaauucagugguaacacac

SEQ ID NO: 619014 - RNA, 19 nt, Artificial Sequence
  Description of Artificial Sequence: Synthetic oligonucleotide
  Sense strand starting at position 3978 of SEQ ID NO: 585174
gcacuaaucuuucugguga

SEQ ID NO: 619015 - RNA, 19 nt, Artificial Sequence
  Description of Artificial Sequence: Synthetic oligonucleotide
  Antisense strand to SEQ ID NO: 619014
ucaccagaaagauuagugc

SEQ ID NO: 619016 - RNA, 19 nt, Artificial Sequence
  Description of Artificial Sequence: Synthetic oligonucleotide
  Sense strand starting at position 68 of SEQ ID NO: 585175
gucuuauaagcacgcauga

SEQ ID NO: 619017 - RNA, 19 nt, Artificial Sequence
  Description of Artificial Sequence: Synthetic oligonucleotide
  Antisense strand to SEQ ID NO: 619016
ucaugcgugcuuauaagac

SEQ ID NO: 619018 - RNA, 19 nt, Artificial Sequence
  Description of Artificial Sequence: Synthetic oligonucleotide
  Sense strand starting at position 81 of SEQ ID NO: 585175
gcaugauguugugucauaa

SEQ ID NO: 619019 - RNA, 19 nt, Artificial Sequence
  Description of Artificial Sequence: Synthetic oligonucleotide
  Antisense strand to SEQ ID NO: 619018
uuaugacacaacaucaugc

SEQ ID NO: 619020 - RNA, 19 nt, Artificial Sequence
  Description of Artificial Sequence: Synthetic oligonucleotide
  Sense strand starting at position 89 of SEQ ID NO: 585175
uugugucauaauuguugca

SEQ ID NO: 619021 - RNA, 19 nt, Artificial Sequence
  Description of Artificial Sequence: Synthetic oligonucleotide
  Antisense strand to SEQ ID NO: 619020
ugcaacaauuaugacacaa

SEQ ID NO: 619022 - RNA, 19 nt, Artificial Sequence
  Description of Artificial Sequence: Synthetic oligonucleotide
  Sense strand starting at position 91 of SEQ ID NO: 585175
gugucauaauuguugcaau

SEQ ID NO: 619023 - RNA, 19 nt, Artificial Sequence
  Description of Artificial Sequence: Synthetic oligonucleotide
  Antisense strand to SEQ ID NO: 619022
auugcaacaauuaugacac

SEQ ID NO: 619024 - RNA, 19 nt, Artificial Sequence
  Description of Artificial Sequence: Synthetic oligonucleotide
  Sense strand starting at position 130 of SEQ ID NO: 585175
gacucagaucucuguggca

SEQ ID NO: 619025 - RNA, 19 nt, Artificial Sequence
  Description of Artificial Sequence: Synthetic oligonucleotide
  Antisense strand to SEQ ID NO: 619024
ugccacagagaucugaguc

SEQ ID NO: 619026 - RNA, 19 nt, Artificial Sequence
  Description of Artificial Sequence: Synthetic oligonucleotide
  Sense strand starting at position 150 of SEQ ID NO: 585175
cucaguuucccaugacaag

SEQ ID NO: 619027 - RNA, 19 nt, Artificial Sequence
  Description of Artificial Sequence: Synthetic oligonucleotide
  Antisense strand to SEQ ID NO: 619026
cuugucaugggaaacugag

SEQ ID NO: 619028 - RNA, 19 nt, Artificial Sequence
  Description of Artificial Sequence: Synthetic oligonucleotide
  Sense strand starting at position 326 of SEQ ID NO: 585175
ugacacuucugggaauaag

SEQ ID NO: 619029 - RNA, 19 nt, Artificial Sequence
  Description of Artificial Sequence: Synthetic oligonucleotide
  Antisense strand to SEQ ID NO: 619028
cuuauucccagaaguguca

SEQ ID NO: 619030 - RNA, 19 nt, Artificial Sequence
  Description of Artificial Sequence: Synthetic oligonucleotide
  Sense strand starting at position 338 of SEQ ID NO: 585175
gaauaaggccucugggaag

SEQ ID NO: 619031 - RNA, 19 nt, Artificial Sequence
  Description of Artificial Sequence: Synthetic oligonucleotide
  Antisense strand to SEQ ID NO: 619030
cuucccagaggccuuauuc

SEQ ID NO: 619032 - RNA, 19 nt, Artificial Sequence
  Description of Artificial Sequence: Synthetic oligonucleotide
  Sense strand starting at position 588 of SEQ ID NO: 585175
ugaggaaggugucuuggaa

SEQ ID NO: 619033 - RNA, 19 nt, Artificial Sequence
  Description of Artificial Sequence: Synthetic oligonucleotide
  Antisense strand to SEQ ID NO: 619032
uuccaagacaccuuccuca

SEQ ID NO: 619034 - RNA, 19 nt, Artificial Sequence
  Description of Artificial Sequence: Synthetic oligonucleotide
  Sense strand starting at position 706 of SEQ ID NO: 585175
gcuggcaucuuagcugaga

SEQ ID NO: 619035 - RNA, 19 nt, Artificial Sequence
  Description of Artificial Sequence: Synthetic oligonucleotide
  Antisense strand to SEQ ID NO: 619034
ucucagcuaagaugccagc

SEQ ID NO: 619036 - RNA, 19 nt, Artificial Sequence
  Description of Artificial Sequence: Synthetic oligonucleotide
  Sense strand starting at position 722 of SEQ ID NO: 585175
agagguaugucuguccaca

SEQ ID NO: 619037 - RNA, 19 nt, Artificial Sequence
  Description of Artificial Sequence: Synthetic oligonucleotide
  Antisense strand to SEQ ID NO: 619036
uguggacagacauaccucu

SEQ ID NO: 619038 - RNA, 19 nt, Artificial Sequence
  Description of Artificial Sequence: Synthetic oligonucleotide
  Sense strand starting at position 724 of SEQ ID NO: 585175
agguaugucuguccacauc

SEQ ID NO: 619039 - RNA, 19 nt, Artificial Sequence
  Description of Artificial Sequence: Synthetic oligonucleotide
  Antisense strand to SEQ ID NO: 619038
gauguggacagacauaccu

SEQ ID NO: 619040 - RNA, 19 nt, Artificial Sequence
  Description of Artificial Sequence: Synthetic oligonucleotide
  Sense strand starting at position 854 of SEQ ID NO: 585175
guagcagugggaggugaua

SEQ ID NO: 619041 - RNA, 19 nt, Artificial Sequence
  Description of Artificial Sequence: Synthetic oligonucleotide
  Antisense strand to SEQ ID NO: 619040
uaucaccucccacugcuac

SEQ ID NO: 619042 - RNA, 19 nt, Artificial Sequence
  Description of Artificial Sequence: Synthetic oligonucleotide
  Sense strand starting at position 873 of SEQ ID NO: 585175
ggaagaaccuguuuccuga

SEQ ID NO: 619043 - RNA, 19 nt, Artificial Sequence
  Description of Artificial Sequence: Synthetic oligonucleotide
  Antisense strand to SEQ ID NO: 619042
ucaggaaacagguucuucc

SEQ ID NO: 619044 - RNA, 19 nt, Artificial Sequence
  Description of Artificial Sequence: Synthetic oligonucleotide
  Sense strand starting at position 1132 of SEQ ID NO: 585175
gucagugcaggaugagaau

SEQ ID NO: 619045 - RNA, 19 nt, Artificial Sequence
  Description of Artificial Sequence: Synthetic oligonucleotide
  Antisense strand to SEQ ID NO: 619044
auucucauccugcacugac

SEQ ID NO: 619046 - RNA, 19 nt, Artificial Sequence
  Description of Artificial Sequence: Synthetic oligonucleotide
  Sense strand starting at position 1208 of SEQ ID NO: 585175
gccuucugccuguuugcua

SEQ ID NO: 619047 - RNA, 19 nt, Artificial Sequence
  Description of Artificial Sequence: Synthetic oligonucleotide
  Antisense strand to SEQ ID NO: 619046
uagcaaacaggcagaaggc

SEQ ID NO: 619048 - RNA, 19 nt, Artificial Sequence
  Description of Artificial Sequence: Synthetic oligonucleotide
  Sense strand starting at position 1405 of SEQ ID NO: 585175
ggucuuugagcagguggau

SEQ ID NO: 619049 - RNA, 19 nt, Artificial Sequence
  Description of Artificial Sequence: Synthetic oligonucleotide
  Antisense strand to SEQ ID NO: 619048
auccaccugcucaaagacc

SEQ ID NO: 619050 - RNA, 19 nt, Artificial Sequence
  Description of Artificial Sequence: Synthetic oligonucleotide
  Sense strand starting at position 2296 of SEQ ID NO: 585175
gggucucccagcugaggaa

SEQ ID NO: 619051 - RNA, 19 nt, Artificial Sequence
  Description of Artificial Sequence: Synthetic oligonucleotide
  Antisense strand to SEQ ID NO: 619050
uuccucagcugggagaccc

SEQ ID NO: 619052 - RNA, 19 nt, Artificial Sequence
  Description of Artificial Sequence: Synthetic oligonucleotide
  Sense strand starting at position 2406 of SEQ ID NO: 585175
aggccacuccuggaaagua

SEQ ID NO: 619053 - RNA, 19 nt, Artificial Sequence
  Description of Artificial Sequence: Synthetic oligonucleotide
  Antisense strand to SEQ ID NO: 619052
uacuuuccaggaguggccu

SEQ ID NO: 619054 - RNA, 19 nt, Artificial Sequence
  Description of Artificial Sequence: Synthetic oligonucleotide
  Sense strand starting at position 2414 of SEQ ID NO: 585175
ccuggaaaguauccucaga

SEQ ID NO: 619055 - RNA, 19 nt, Artificial Sequence
  Description of Artificial Sequence: Synthetic oligonucleotide
  Antisense strand to SEQ ID NO: 619054
ucugaggauacuuuccagg

SEQ ID NO: 619056 - RNA, 19 nt, Artificial Sequence
  Description of Artificial Sequence: Synthetic oligonucleotide
  Sense strand starting at position 2416 of SEQ ID NO: 585175
uggaaaguauccucagagc

SEQ ID NO: 619057 - RNA, 19 nt, Artificial Sequence
  Description of Artificial Sequence: Synthetic oligonucleotide
  Antisense strand to SEQ ID NO: 619056
gcucugaggauacuuucca

SEQ ID NO: 619058 - RNA, 19 nt, Artificial Sequence
  Description of Artificial Sequence: Synthetic oligonucleotide
  Sense strand starting at position 2439 of SEQ ID NO: 585175
ggugacuaauaagaacuuu

SEQ ID NO: 619059 - RNA, 19 nt, Artificial Sequence
  Description of Artificial Sequence: Synthetic oligonucleotide
  Antisense strand to SEQ ID NO: 619058
aaaguucuuauuagucacc

SEQ ID NO: 619060 - RNA, 19 nt, Artificial Sequence
  Description of Artificial Sequence: Synthetic oligonucleotide
  Sense strand starting at position 2501 of SEQ ID NO: 585175
auguucuguccugaaggca

SEQ ID NO: 619061 - RNA, 19 nt, Artificial Sequence
  Description of Artificial Sequence: Synthetic oligonucleotide
  Antisense strand to SEQ ID NO: 619060
ugccuucaggacagaacau

SEQ ID NO: 619062 - RNA, 19 nt, Artificial Sequence
  Description of Artificial Sequence: Synthetic oligonucleotide
  Sense strand starting at position 2565 of SEQ ID NO: 585175
uccacagaacucugacagu

SEQ ID NO: 619063 - RNA, 19 nt, Artificial Sequence
  Description of Artificial Sequence: Synthetic oligonucleotide
  Antisense strand to SEQ ID NO: 619062
acugucagaguucugugga

SEQ ID NO: 619064 - RNA, 19 nt, Artificial Sequence
  Description of Artificial Sequence: Synthetic oligonucleotide
  Sense strand starting at position 2706 of SEQ ID NO: 585175
ucuuguaaccuguguaugu

SEQ ID NO: 619065 - RNA, 19 nt, Artificial Sequence
  Description of Artificial Sequence: Synthetic oligonucleotide
  Antisense strand to SEQ ID NO: 619064
acauacacagguuacaaga

SEQ ID NO: 619066 - RNA, 19 nt, Artificial Sequence
  Description of Artificial Sequence: Synthetic oligonucleotide
  Sense strand starting at position 2713 of SEQ ID NO: 585175
accuguguaugugugauaa

SEQ ID NO: 619067 - RNA, 19 nt, Artificial Sequence
  Description of Artificial Sequence: Synthetic oligonucleotide
  Antisense strand to SEQ ID NO: 619066
uuaucacacauacacaggu

SEQ ID NO: 619068 - RNA, 19 nt, Artificial Sequence
  Description of Artificial Sequence: Synthetic oligonucleotide
  Sense strand starting at position 2723 of SEQ ID NO: 585175
gugugauaaugugugucca

SEQ ID NO: 619069 - RNA, 19 nt, Artificial Sequence
  Description of Artificial Sequence: Synthetic oligonucleotide
  Antisense strand to SEQ ID NO: 619068
uggacacacauuaucacac

SEQ ID NO: 619070 - RNA, 19 nt, Artificial Sequence
  Description of Artificial Sequence: Synthetic oligonucleotide
  Sense strand starting at position 2724 of SEQ ID NO: 585175
ugugauaauguguguccau

SEQ ID NO: 619071 - RNA, 19 nt, Artificial Sequence
  Description of Artificial Sequence: Synthetic oligonucleotide
  Antisense strand to SEQ ID NO: 619070
auggacacacauuaucaca

SEQ ID NO: 619072 - RNA, 19 nt, Artificial Sequence
  Description of Artificial Sequence: Synthetic oligonucleotide
  Sense strand starting at position 2725 of SEQ ID NO: 585175
gugauaauguguguccaug

SEQ ID NO: 619073 - RNA, 19 nt, Artificial Sequence
  Description of Artificial Sequence: Synthetic oligonucleotide
  Antisense strand to SEQ ID NO: 619072
cauggacacacauuaucac

SEQ ID NO: 619074 - RNA, 19 nt, Artificial Sequence
  Description of Artificial Sequence: Synthetic oligonucleotide
  Sense strand starting at position 2727 of SEQ ID NO: 585175
gauaauguguguccauggu

SEQ ID NO: 619075 - RNA, 19 nt, Artificial Sequence
  Description of Artificial Sequence: Synthetic oligonucleotide
  Antisense strand to SEQ ID NO: 619074
accauggacacacauuauc

SEQ ID NO: 619076 - RNA, 19 nt, Artificial Sequence
  Description of Artificial Sequence: Synthetic oligonucleotide
  Sense strand starting at position 2909 of SEQ ID NO: 585175
ccuaaugcucuugagaagu

SEQ ID NO: 619077 - RNA, 19 nt, Artificial Sequence
  Description of Artificial Sequence: Synthetic oligonucleotide
  Antisense strand to SEQ ID NO: 619076
acuucucaagagcauuagg

SEQ ID NO: 619078 - RNA, 19 nt, Artificial Sequence
  Description of Artificial Sequence: Synthetic oligonucleotide
  Sense strand starting at position 2964 of SEQ ID NO: 585175
ugaugccacucuuaggaaa

SEQ ID NO: 619079 - RNA, 19 nt, Artificial Sequence
  Description of Artificial Sequence: Synthetic oligonucleotide
  Antisense strand to SEQ ID NO: 619078
uuuccuaagaguggcauca

SEQ ID NO: 619080 - RNA, 19 nt, Artificial Sequence
  Description of Artificial Sequence: Synthetic oligonucleotide
  Sense strand starting at position 3208 of SEQ ID NO: 585175
accugagacucguuuauuc

SEQ ID NO: 619081 - RNA, 19 nt, Artificial Sequence
  Description of Artificial Sequence: Synthetic oligonucleotide
  Antisense strand to SEQ ID NO: 619080
gaauaaacgagucucaggu

SEQ ID NO: 619082 - RNA, 19 nt, Artificial Sequence
  Description of Artificial Sequence: Synthetic oligonucleotide
  Sense strand starting at position 3284 of SEQ ID NO: 585175
guuguucaccugggaguga

SEQ ID NO: 619083 - RNA, 19 nt, Artificial Sequence
  Description of Artificial Sequence: Synthetic oligonucleotide
  Antisense strand to SEQ ID NO: 619082
ucacucccaggugaacaac

SEQ ID NO: 619084 - RNA, 19 nt, Artificial Sequence
  Description of Artificial Sequence: Synthetic oligonucleotide
  Sense strand starting at position 3387 of SEQ ID NO: 585175
guggcugcucccugaucau

SEQ ID NO: 619085 - RNA, 19 nt, Artificial Sequence
  Description of Artificial Sequence: Synthetic oligonucleotide
  Antisense strand to SEQ ID NO: 619084
augaucagggagcagccac

SEQ ID NO: 619086 - RNA, 19 nt, Artificial Sequence
  Description of Artificial Sequence: Synthetic oligonucleotide
  Sense strand starting at position 3676 of SEQ ID NO: 585175
agguuaaauacugggcuuu

SEQ ID NO: 619087 - RNA, 19 nt, Artificial Sequence
  Description of Artificial Sequence: Synthetic oligonucleotide
  Antisense strand to SEQ ID NO: 619086
aaagcccaguauuuaaccu

SEQ ID NO: 619088 - RNA, 19 nt, Artificial Sequence
  Description of Artificial Sequence: Synthetic oligonucleotide
  Sense strand starting at position 3725 of SEQ ID NO: 585175
agauacuggaagugaguuu

SEQ ID NO: 619089 - RNA, 19 nt, Artificial Sequence
  Description of Artificial Sequence: Synthetic oligonucleotide
  Antisense strand to SEQ ID NO: 619088
aaacucacuuccaguaucu

SEQ ID NO: 619090 - RNA, 19 nt, Artificial Sequence
  Description of Artificial Sequence: Synthetic oligonucleotide
  Sense strand starting at position 3759 of SEQ ID NO: 585175
caaguuuaggguggagaga

SEQ ID NO: 619091 - RNA, 19 nt, Artificial Sequence
  Description of Artificial Sequence: Synthetic oligonucleotide
  Antisense strand to SEQ ID NO: 619090
ucucuccacccuaaacuug

SEQ ID NO: 619092 - RNA, 19 nt, Artificial Sequence
  Description of Artificial Sequence: Synthetic oligonucleotide
  Sense strand starting at position 3818 of SEQ ID NO: 585175
gggucuuuaucaugaauuu

SEQ ID NO: 619093 - RNA, 19 nt, Artificial Sequence
  Description of Artificial Sequence: Synthetic oligonucleotide
  Antisense strand to SEQ ID NO: 619092
aaauucaugauaaagaccc

SEQ ID NO: 619094 - RNA, 19 nt, Artificial Sequence
  Description of Artificial Sequence: Synthetic oligonucleotide
  Sense strand starting at position 3834 of SEQ ID NO: 585175
uuugucagccuccagauua

SEQ ID NO: 619095 - RNA, 19 nt, Artificial Sequence
  Description of Artificial Sequence: Synthetic oligonucleotide
  Antisense strand to SEQ ID NO: 619094
uaaucuggaggcugacaaa

SEQ ID NO: 619096 - RNA, 19 nt, Artificial Sequence
  Description of Artificial Sequence: Synthetic oligonucleotide
  Sense strand starting at position 51 of SEQ ID NO: 585176
cacacuagaguuggcgaaa

SEQ ID NO: 619097 - RNA, 19 nt, Artificial Sequence
  Description of Artificial Sequence: Synthetic oligonucleotide
  Antisense strand to SEQ ID NO: 619096
uuucgccaacucuagugug

SEQ ID NO: 619098 - RNA, 19 nt, Artificial Sequence
  Description of Artificial Sequence: Synthetic oligonucleotide
  Sense strand starting at position 114 of SEQ ID NO: 585176
aucauugcucugcaaagau

SEQ ID NO: 619099 - RNA, 19 nt, Artificial Sequence
  Description of Artificial Sequence: Synthetic oligonucleotide
  Antisense strand to SEQ ID NO: 619098
aucuuugcagagcaaugau

SEQ ID NO: 619100 - RNA, 19 nt, Artificial Sequence
  Description of Artificial Sequence: Synthetic oligonucleotide
  Sense strand starting at position 145 of SEQ ID NO: 585176
ggugguuacuacuuuaacu

SEQ ID NO: 619101 - RNA, 19 nt, Artificial Sequence
  Description of Artificial Sequence: Synthetic oligonucleotide
  Antisense strand to SEQ ID NO: 619100
aguuaaaguaguaaccacc

SEQ ID NO: 619102 - RNA, 19 nt, Artificial Sequence
  Description of Artificial Sequence: Synthetic oligonucleotide
  Sense strand starting at position 179 of SEQ ID NO: 585176
aauagaugucugugguauu

SEQ ID NO: 619103 - RNA, 19 nt, Artificial Sequence
  Description of Artificial Sequence: Synthetic oligonucleotide
  Antisense strand to SEQ ID NO: 619102
aauaccacagacaucuauu

SEQ ID NO: 619104 - RNA, 19 nt, Artificial Sequence
  Description of Artificial Sequence: Synthetic oligonucleotide
  Sense strand starting at position 435 of SEQ ID NO: 585176
uugugccauuuccuauuau

SEQ ID NO: 619105 - RNA, 19 nt, Artificial Sequence
  Description of Artificial Sequence: Synthetic oligonucleotide
  Antisense strand to SEQ ID NO: 619104
auaauaggaaauggcacaa

SEQ ID NO: 619106 - RNA, 19 nt, Artificial Sequence
  Description of Artificial Sequence: Synthetic oligonucleotide
  Sense strand starting at position 471 of SEQ ID NO: 585176
ugggauuuauuaggaaaua

SEQ ID NO: 619107 - RNA, 19 nt, Artificial Sequence
  Description of Artificial Sequence: Synthetic oligonucleotide
  Antisense strand to SEQ ID NO: 619106
uauuuccuaauaaauccca

SEQ ID NO: 619108 - RNA, 19 nt, Artificial Sequence
  Description of Artificial Sequence: Synthetic oligonucleotide
  Sense strand starting at position 929 of SEQ ID NO: 585176
guugucuuaguguucagca

SEQ ID NO: 619109 - RNA, 19 nt, Artificial Sequence
  Description of Artificial Sequence: Synthetic oligonucleotide
  Antisense strand to SEQ ID NO: 619108
ugcugaacacuaagacaac

SEQ ID NO: 619110 - RNA, 19 nt, Artificial Sequence
  Description of Artificial Sequence: Synthetic oligonucleotide
  Sense strand starting at position 1078 of SEQ ID NO: 585176
gcagauuaaagacaguagu

SEQ ID NO: 619111 - RNA, 19 nt, Artificial Sequence
  Description of Artificial Sequence: Synthetic oligonucleotide
  Antisense strand to SEQ ID NO: 619110
acuacugucuuuaaucugc

SEQ ID NO: 619112 - RNA, 19 nt, Artificial Sequence
  Description of Artificial Sequence: Synthetic oligonucleotide
  Sense strand starting at position 1198 of SEQ ID NO: 585176
gaggucauuugagagauaa

SEQ ID NO: 619113 - RNA, 19 nt, Artificial Sequence
  Description of Artificial Sequence: Synthetic oligonucleotide
  Antisense strand to SEQ ID NO: 619112
uuaucucucaaaugaccuc

SEQ ID NO: 619114 - RNA, 19 nt, Artificial Sequence
  Description of Artificial Sequence: Synthetic oligonucleotide
  Sense strand starting at position 1287 of SEQ ID NO: 585176
caaagauaguuggcagcaa

SEQ ID NO: 619115 - RNA, 19 nt, Artificial Sequence
  Description of Artificial Sequence: Synthetic oligonucleotide
  Antisense strand to SEQ ID NO: 619114
uugcugccaacuaucuuug

SEQ ID NO: 619116 - RNA, 19 nt, Artificial Sequence
  Description of Artificial Sequence: Synthetic oligonucleotide
  Sense strand starting at position 1335 of SEQ ID NO: 585176
gcuauaaaccaugaacagu

SEQ ID NO: 619117 - RNA, 19 nt, Artificial Sequence
  Description of Artificial Sequence: Synthetic oligonucleotide
  Antisense strand to SEQ ID NO: 619116
acuguucaugguuuauagc

SEQ ID NO: 619118 - RNA, 19 nt, Artificial Sequence
  Description of Artificial Sequence: Synthetic oligonucleotide
  Sense strand starting at position 1442 of SEQ ID NO: 585176
gugacucaauguuccuaaa

SEQ ID NO: 619119 - RNA, 19 nt, Artificial Sequence
  Description of Artificial Sequence: Synthetic oligonucleotide
  Antisense strand to SEQ ID NO: 619118
uuuaggaacauugagucac

SEQ ID NO: 619120 - RNA, 19 nt, Artificial Sequence
  Description of Artificial Sequence: Synthetic oligonucleotide
  Sense strand starting at position 1751 of SEQ ID NO: 585176
aagcuuagccagugaaaug

SEQ ID NO: 619121 - RNA, 19 nt, Artificial Sequence
  Description of Artificial Sequence: Synthetic oligonucleotide
  Antisense strand to SEQ ID NO: 619120
cauuucacuggcuaagcuu

SEQ ID NO: 619122 - RNA, 19 nt, Artificial Sequence
  Description of Artificial Sequence: Synthetic oligonucleotide
  Sense strand starting at position 1752 of SEQ ID NO: 585176
agcuuagccagugaaauga

SEQ ID NO: 619123 - RNA, 19 nt, Artificial Sequence
  Description of Artificial Sequence: Synthetic oligonucleotide
  Antisense strand to SEQ ID NO: 619122
ucauuucacuggcuaagcu

SEQ ID NO: 619124 - RNA, 19 nt, Artificial Sequence
  Description of Artificial Sequence: Synthetic oligonucleotide
  Sense strand starting at position 1760 of SEQ ID NO: 585176
cagugaaaugacuaugcuu

SEQ ID NO: 619125 - RNA, 19 nt, Artificial Sequence
  Description of Artificial Sequence: Synthetic oligonucleotide
  Antisense strand to SEQ ID NO: 619124
aagcauagucauuucacug

SEQ ID NO: 619126 - RNA, 19 nt, Artificial Sequence
  Description of Artificial Sequence: Synthetic oligonucleotide
  Sense strand starting at position 1769 of SEQ ID NO: 585176
gacuaugcuugggcugaaa

SEQ ID NO: 619127 - RNA, 19 nt, Artificial Sequence
  Description of Artificial Sequence: Synthetic oligonucleotide
  Antisense strand to SEQ ID NO: 619126
uuucagcccaagcauaguc

SEQ ID NO: 619128 - RNA, 19 nt, Artificial Sequence
  Description of Artificial Sequence: Synthetic oligonucleotide
  Sense strand starting at position 1771 of SEQ ID NO: 585176
cuaugcuugggcugaaaca

SEQ ID NO: 619129 - RNA, 19 nt, Artificial Sequence
  Description of Artificial Sequence: Synthetic oligonucleotide
  Antisense strand to SEQ ID NO: 619128
uguuucagcccaagcauag

SEQ ID NO: 619130 - RNA, 19 nt, Artificial Sequence
  Description of Artificial Sequence: Synthetic oligonucleotide
  Sense strand starting at position 1772 of SEQ ID NO: 585176
uaugcuugggcugaaacaa

SEQ ID NO: 619131 - RNA, 19 nt, Artificial Sequence
  Description of Artificial Sequence: Synthetic oligonucleotide
  Antisense strand to SEQ ID NO: 619130
uuguuucagcccaagcaua

SEQ ID NO: 619132 - RNA, 19 nt, Artificial Sequence
  Description of Artificial Sequence: Synthetic oligonucleotide
  Sense strand starting at position 1840 of SEQ ID NO: 585176
uuacacuagugauccgaca

SEQ ID NO: 619133 - RNA, 19 nt, Artificial Sequence
  Description of Artificial Sequence: Synthetic oligonucleotide
  Antisense strand to SEQ ID NO: 619132
ugucggaucacuaguguaa

SEQ ID NO: 619134 - RNA, 19 nt, Artificial Sequence
  Description of Artificial Sequence: Synthetic oligonucleotide
  Sense strand starting at position 2028 of SEQ ID NO: 585176
aagggacagucucuacuaa

SEQ ID NO: 619135 - RNA, 19 nt, Artificial Sequence
  Description of Artificial Sequence: Synthetic oligonucleotide
  Antisense strand to SEQ ID NO: 619134
uuaguagagacugucccuu

SEQ ID NO: 619136 - RNA, 19 nt, Artificial Sequence
  Description of Artificial Sequence: Synthetic oligonucleotide
  Sense strand starting at position 2161 of SEQ ID NO: 585176
ugcuuuccucaggaagagu

SEQ ID NO: 619137 - RNA, 19 nt, Artificial Sequence
  Description of Artificial Sequence: Synthetic oligonucleotide
  Antisense strand to SEQ ID NO: 619136
acucuuccugaggaaagca

SEQ ID NO: 619138 - RNA, 19 nt, Artificial Sequence
  Description of Artificial Sequence: Synthetic oligonucleotide
  Sense strand starting at position 2204 of SEQ ID NO: 585176
gggaucugccagugaucuu

SEQ ID NO: 619139 - RNA, 19 nt, Artificial Sequence
  Description of Artificial Sequence: Synthetic oligonucleotide
  Antisense strand to SEQ ID NO: 619138
aagaucacuggcagauccc

SEQ ID NO: 619140 - RNA, 19 nt, Artificial Sequence
  Description of Artificial Sequence: Synthetic oligonucleotide
  Sense strand starting at position 2205 of SEQ ID NO: 585176
ggaucugccagugaucuuc

SEQ ID NO: 619141 - RNA, 19 nt, Artificial Sequence
  Description of Artificial Sequence: Synthetic oligonucleotide
  Antisense strand to SEQ ID NO: 619140
gaagaucacuggcagaucc

SEQ ID NO: 619142 - RNA, 19 nt, Artificial Sequence
  Description of Artificial Sequence: Synthetic oligonucleotide
  Sense strand starting at position 2247 of SEQ ID NO: 585176
gaugcugaaugaucuggga

SEQ ID NO: 619143 - RNA, 19 nt, Artificial Sequence
  Description of Artificial Sequence: Synthetic oligonucleotide
  Antisense strand to SEQ ID NO: 619142
ucccagaucauucagcauc

SEQ ID NO: 619144 - RNA, 19 nt, Artificial Sequence
  Description of Artificial Sequence: Synthetic oligonucleotide
  Sense strand starting at position 2249 of SEQ ID NO: 585176
ugcugaaugaucugggaga

SEQ ID NO: 619145 - RNA, 19 nt, Artificial Sequence
  Description of Artificial Sequence: Synthetic oligonucleotide
  Antisense strand to SEQ ID NO: 619144
ucucccagaucauucagca

SEQ ID NO: 619146 - RNA, 19 nt, Artificial Sequence
  Description of Artificial Sequence: Synthetic oligonucleotide
  Sense strand starting at position 2266 of SEQ ID NO: 585176
gauuacaaacccugugagu

SEQ ID NO: 619147 - RNA, 19 nt, Artificial Sequence
  Description of Artificial Sequence: Synthetic oligonucleotide
  Antisense strand to SEQ ID NO: 619146
acucacaggguuuguaauc

SEQ ID NO: 619148 - RNA, 19 nt, Artificial Sequence
  Description of Artificial Sequence: Synthetic oligonucleotide
  Sense strand starting at position 2271 of SEQ ID NO: 585176
caaacccugugaguagaau

SEQ ID NO: 619149 - RNA, 19 nt, Artificial Sequence
  Description of Artificial Sequence: Synthetic oligonucleotide
  Antisense strand to SEQ ID NO: 619148
auucuacucacaggguuug

SEQ ID NO: 619150 - RNA, 19 nt, Artificial Sequence
  Description of Artificial Sequence: Synthetic oligonucleotide
  Sense strand starting at position 2279 of SEQ ID NO: 585176
gugaguagaauccagugga

SEQ ID NO: 619151 - RNA, 19 nt, Artificial Sequence
  Description of Artificial Sequence: Synthetic oligonucleotide
  Antisense strand to SEQ ID NO: 619150
uccacuggauucuacucac

SEQ ID NO: 619152 - RNA, 19 nt, Artificial Sequence
  Description of Artificial Sequence: Synthetic oligonucleotide
  Sense strand starting at position 2282 of SEQ ID NO: 585176
aguagaauccaguggagag

SEQ ID NO: 619153 - RNA, 19 nt, Artificial Sequence
  Description of Artificial Sequence: Synthetic oligonucleotide
  Antisense strand to SEQ ID NO: 619152
cucuccacuggauucuacu

SEQ ID NO: 619154 - RNA, 19 nt, Artificial Sequence
  Description of Artificial Sequence: Synthetic oligonucleotide
  Sense strand starting at position 2449 of SEQ ID NO: 585176
acuauacuaguguaacaug

SEQ ID NO: 619155 - RNA, 19 nt, Artificial Sequence
  Description of Artificial Sequence: Synthetic oligonucleotide
  Antisense strand to SEQ ID NO: 619154
cauguuacacuaguauagu

SEQ ID NO: 619156 - RNA, 19 nt, Artificial Sequence
  Description of Artificial Sequence: Synthetic oligonucleotide
  Sense strand starting at position 2460 of SEQ ID NO: 585176
guaacaugacuguggagga

SEQ ID NO: 619157 - RNA, 19 nt, Artificial Sequence
  Description of Artificial Sequence: Synthetic oligonucleotide
  Antisense strand to SEQ ID NO: 619156
uccuccacagucauguuac

SEQ ID NO: 619158 - RNA, 19 nt, Artificial Sequence
  Description of Artificial Sequence: Synthetic oligonucleotide
  Sense strand starting at position 2600 of SEQ ID NO: 585176
ggcucaucagcauaccaua

SEQ ID NO: 619159 - RNA, 19 nt, Artificial Sequence
  Description of Artificial Sequence: Synthetic oligonucleotide
  Antisense strand to SEQ ID NO: 619158
uaugguaugcugaugagcc

SEQ ID NO: 619160 - RNA, 19 nt, Artificial Sequence
  Description of Artificial Sequence: Synthetic oligonucleotide
  Sense strand starting at position 2897 of SEQ ID NO: 585176
ugcccuaaggguuaaacaa

SEQ ID NO: 619161 - RNA, 19 nt, Artificial Sequence
  Description of Artificial Sequence: Synthetic oligonucleotide
  Antisense strand to SEQ ID NO: 619160
uuguuuaacccuuagggca

SEQ ID NO: 619162 - RNA, 19 nt, Artificial Sequence
  Description of Artificial Sequence: Synthetic oligonucleotide
  Sense strand starting at position 3002 of SEQ ID NO: 585176
cuaaguuuagagugacaaa

SEQ ID NO: 619163 - RNA, 19 nt, Artificial Sequence
  Description of Artificial Sequence: Synthetic oligonucleotide
  Antisense strand to SEQ ID NO: 619162
uuugucacucuaaacuuag

SEQ ID NO: 619164 - RNA, 19 nt, Artificial Sequence
  Description of Artificial Sequence: Synthetic oligonucleotide
  Sense strand starting at position 3013 of SEQ ID NO: 585176
gugacaaacuacuugagua

SEQ ID NO: 619165 - RNA, 19 nt, Artificial Sequence
  Description of Artificial Sequence: Synthetic oligonucleotide
  Antisense strand to SEQ ID NO: 619164
uacucaaguaguuugucac

SEQ ID NO: 619166 - RNA, 19 nt, Artificial Sequence
  Description of Artificial Sequence: Synthetic oligonucleotide
  Sense strand starting at position 3110 of SEQ ID NO: 585176
gucaaacacuuggcuugaa

SEQ ID NO: 619167 - RNA, 19 nt, Artificial Sequence
  Description of Artificial Sequence: Synthetic oligonucleotide
  Antisense strand to SEQ ID NO: 619166
uucaagccaaguguuugac

SEQ ID NO: 619168 - RNA, 19 nt, Artificial Sequence
  Description of Artificial Sequence: Synthetic oligonucleotide
  Sense strand starting at position 3111 of SEQ ID NO: 585176
ucaaacacuuggcuugaaa

SEQ ID NO: 619169 - RNA, 19 nt, Artificial Sequence
  Description of Artificial Sequence: Synthetic oligonucleotide
  Antisense strand to SEQ ID NO: 619168
uuucaagccaaguguuuga

SEQ ID NO: 619170 - RNA, 19 nt, Artificial Sequence
  Description of Artificial Sequence: Synthetic oligonucleotide
  Sense strand starting at position 3130 of SEQ ID NO: 585176
gaaggcucccugggaauau

SEQ ID NO: 619171 - RNA, 19 nt, Artificial Sequence
  Description of Artificial Sequence: Synthetic oligonucleotide
  Antisense strand to SEQ ID NO: 619170
auauucccagggagccuuc

SEQ ID NO: 619172 - RNA, 19 nt, Artificial Sequence
  Description of Artificial Sequence: Synthetic oligonucleotide
  Sense strand starting at position 3795 of SEQ ID NO: 585176
agaagauaaucugaagauc

SEQ ID NO: 619173 - RNA, 19 nt, Artificial Sequence
  Description of Artificial Sequence: Synthetic oligonucleotide
  Antisense strand to SEQ ID NO: 619172
gaucuucagauuaucuucu

SEQ ID NO: 619174 - RNA, 19 nt, Artificial Sequence
  Description of Artificial Sequence: Synthetic oligonucleotide
  Sense strand starting at position 3803 of SEQ ID NO: 585176
aucugaagaucagucacua

SEQ ID NO: 619175 - RNA, 19 nt, Artificial Sequence
  Description of Artificial Sequence: Synthetic oligonucleotide
  Antisense strand to SEQ ID NO: 619174
uagugacugaucuucagau

SEQ ID NO: 619176 - RNA, 19 nt, Artificial Sequence
  Description of Artificial Sequence: Synthetic oligonucleotide
  Sense strand starting at position 200 of SEQ ID NO: 585177
auauuuccuucugaggauu

SEQ ID NO: 619177 - RNA, 19 nt, Artificial Sequence
  Description of Artificial Sequence: Synthetic oligonucleotide
  Antisense strand to SEQ ID NO: 619176
aauccucagaaggaaauau

SEQ ID NO: 619178 - RNA, 19 nt, Artificial Sequence
  Description of Artificial Sequence: Synthetic oligonucleotide
  Sense strand starting at position 529 of SEQ ID NO: 585177
auaauaaaugcugguauag

SEQ ID NO: 619179 - RNA, 19 nt, Artificial Sequence
  Description of Artificial Sequence: Synthetic oligonucleotide
  Antisense strand to SEQ ID NO: 619178
cuauaccagcauuuauuau

SEQ ID NO: 619180 - RNA, 19 nt, Artificial Sequence
  Description of Artificial Sequence: Synthetic oligonucleotide
  Sense strand starting at position 588 of SEQ ID NO: 585177
uugugugagucucuuauuu

SEQ ID NO: 619181 - RNA, 19 nt, Artificial Sequence
  Description of Artificial Sequence: Synthetic oligonucleotide
  Antisense strand to SEQ ID NO: 619180
aaauaagagacucacacaa

SEQ ID NO: 619182 - RNA, 19 nt, Artificial Sequence
  Description of Artificial Sequence: Synthetic oligonucleotide
  Sense strand starting at position 916 of SEQ ID NO: 585177
caaauuacucagggugaca

SEQ ID NO: 619183 - RNA, 19 nt, Artificial Sequence
  Description of Artificial Sequence: Synthetic oligonucleotide
  Antisense strand to SEQ ID NO: 619182
ugucacccugaguaauuug

SEQ ID NO: 619184 - RNA, 19 nt, Artificial Sequence
  Description of Artificial Sequence: Synthetic oligonucleotide
  Sense strand starting at position 1084 of SEQ ID NO: 585177
agaaauucucauugaugca

SEQ ID NO: 619185 - RNA, 19 nt, Artificial Sequence
  Description of Artificial Sequence: Synthetic oligonucleotide
  Antisense strand to SEQ ID NO: 619184
ugcaucaaugagaauuucu

SEQ ID NO: 619186 - RNA, 19 nt, Artificial Sequence
  Description of Artificial Sequence: Synthetic oligonucleotide
  Sense strand starting at position 1149 of SEQ ID NO: 585177
gacgauuaacucugaaagc

SEQ ID NO: 619187 - RNA, 19 nt, Artificial Sequence
  Description of Artificial Sequence: Synthetic oligonucleotide
  Antisense strand to SEQ ID NO: 619186
gcuuucagaguuaaucguc

SEQ ID NO: 619188 - RNA, 19 nt, Artificial Sequence
  Description of Artificial Sequence: Synthetic oligonucleotide
  Sense strand starting at position 1169 of SEQ ID NO: 585177
acaagagcagaaugucaua

SEQ ID NO: 619189 - RNA, 19 nt, Artificial Sequence
  Description of Artificial Sequence: Synthetic oligonucleotide
  Antisense strand to SEQ ID NO: 619188
uaugacauucugcucuugu

SEQ ID NO: 619190 - RNA, 19 nt, Artificial Sequence
  Description of Artificial Sequence: Synthetic oligonucleotide
  Sense strand starting at position 1188 of SEQ ID NO: 585177
uccuuaccacuugauuagu

SEQ ID NO: 619191 - RNA, 19 nt, Artificial Sequence
  Description of Artificial Sequence: Synthetic oligonucleotide
  Antisense strand to SEQ ID NO: 619190
acuaaucaagugguaagga

SEQ ID NO: 619192 - RNA, 19 nt, Artificial Sequence
  Description of Artificial Sequence: Synthetic oligonucleotide
  Sense strand starting at position 1201 of SEQ ID NO: 585177
auuaguacuguccauaauc

SEQ ID NO: 619193 - RNA, 19 nt, Artificial Sequence
  Description of Artificial Sequence: Synthetic oligonucleotide
  Antisense strand to SEQ ID NO: 619192
gauuauggacaguacuaau

SEQ ID NO: 619194 - RNA, 19 nt, Artificial Sequence
  Description of Artificial Sequence: Synthetic oligonucleotide
  Sense strand starting at position 1210 of SEQ ID NO: 585177
guccauaaucaguauguuc

SEQ ID NO: 619195 - RNA, 19 nt, Artificial Sequence
  Description of Artificial Sequence: Synthetic oligonucleotide
  Antisense strand to SEQ ID NO: 619194
gaacauacugauuauggac

SEQ ID NO: 619196 - RNA, 19 nt, Artificial Sequence
  Description of Artificial Sequence: Synthetic oligonucleotide
  Sense strand starting at position 1215 of SEQ ID NO: 585177
uaaucaguauguucuggaa

SEQ ID NO: 619197 - RNA, 19 nt, Artificial Sequence
  Description of Artificial Sequence: Synthetic oligonucleotide
  Antisense strand to SEQ ID NO: 619196
uuccagaacauacugauua

SEQ ID NO: 619198 - RNA, 19 nt, Artificial Sequence
  Description of Artificial Sequence: Synthetic oligonucleotide
  Sense strand starting at position 1237 of SEQ ID NO: 585177
gaaguuaaagguugguaac

SEQ ID NO: 619199 - RNA, 19 nt, Artificial Sequence
  Description of Artificial Sequence: Synthetic oligonucleotide
  Antisense strand to SEQ ID NO: 619198
guuaccaaccuuuaacuuc

SEQ ID NO: 619200 - RNA, 19 nt, Artificial Sequence
  Description of Artificial Sequence: Synthetic oligonucleotide
  Sense strand starting at position 1238 of SEQ ID NO: 585177
aaguuaaagguugguaacu

SEQ ID NO: 619201 - RNA, 19 nt, Artificial Sequence
  Description of Artificial Sequence: Synthetic oligonucleotide
  Antisense strand to SEQ ID NO: 619200
aguuaccaaccuuuaacuu

SEQ ID NO: 619202 - RNA, 19 nt, Artificial Sequence
  Description of Artificial Sequence: Synthetic oligonucleotide
  Sense strand starting at position 1279 of SEQ ID NO: 585177
uagacucacuguuugaaag

SEQ ID NO: 619203 - RNA, 19 nt, Artificial Sequence
  Description of Artificial Sequence: Synthetic oligonucleotide
  Antisense strand to SEQ ID NO: 619202
cuuucaaacagugagucua

SEQ ID NO: 619204 - RNA, 19 nt, Artificial Sequence
  Description of Artificial Sequence: Synthetic oligonucleotide
  Sense strand starting at position 1280 of SEQ ID NO: 585177
agacucacuguuugaaagu

SEQ ID NO: 619205 - RNA, 19 nt, Artificial Sequence
  Description of Artificial Sequence: Synthetic oligonucleotide
  Antisense strand to SEQ ID NO: 619204
acuuucaaacagugagucu

SEQ ID NO: 619206 - RNA, 19 nt, Artificial Sequence
  Description of Artificial Sequence: Synthetic oligonucleotide
  Sense strand starting at position 1364 of SEQ ID NO: 585177
gaguguuuauaagcacaga

SEQ ID NO: 619207 - RNA, 19 nt, Artificial Sequence
  Description of Artificial Sequence: Synthetic oligonucleotide
  Antisense strand to SEQ ID NO: 619206
ucugugcuuauaaacacuc

SEQ ID NO: 619208 - RNA, 19 nt, Artificial Sequence
  Description of Artificial Sequence: Synthetic oligonucleotide
  Sense strand starting at position 1516 of SEQ ID NO: 585177
caauauaauggugggcauu

SEQ ID NO: 619209 - RNA, 19 nt, Artificial Sequence
  Description of Artificial Sequence: Synthetic oligonucleotide
  Antisense strand to SEQ ID NO: 619208
aaugcccaccauuauauug

SEQ ID NO: 619210 - RNA, 19 nt, Artificial Sequence
  Description of Artificial Sequence: Synthetic oligonucleotide
  Sense strand starting at position 1565 of SEQ ID NO: 585177
cuuggaauccaaugcuagu

SEQ ID NO: 619211 - RNA, 19 nt, Artificial Sequence
  Description of Artificial Sequence: Synthetic oligonucleotide
  Antisense strand to SEQ ID NO: 619210
acuagcauuggauuccaag

SEQ ID NO: 619212 - RNA, 19 nt, Artificial Sequence
  Description of Artificial Sequence: Synthetic oligonucleotide
  Sense strand starting at position 1624 of SEQ ID NO: 585177
gcucuaguugugcccauau

SEQ ID NO: 619213 - RNA, 19 nt, Artificial Sequence
  Description of Artificial Sequence: Synthetic oligonucleotide
  Antisense strand to SEQ ID NO: 619212
auaugggcacaacuagagc

SEQ ID NO: 619214 - RNA, 19 nt, Artificial Sequence
  Description of Artificial Sequence: Synthetic oligonucleotide
  Sense strand starting at position 2004 of SEQ ID NO: 585177
aggcuaccucucuaauuag

SEQ ID NO: 619215 - RNA, 19 nt, Artificial Sequence
  Description of Artificial Sequence: Synthetic oligonucleotide
  Antisense strand to SEQ ID NO: 619214
cuaauuagagagguagccu

SEQ ID NO: 619216 - RNA, 19 nt, Artificial Sequence
  Description of Artificial Sequence: Synthetic oligonucleotide
  Sense strand starting at position 2015 of SEQ ID NO: 585177
cuaauuagcccuuagugga

SEQ ID NO: 619217 - RNA, 19 nt, Artificial Sequence
  Description of Artificial Sequence: Synthetic oligonucleotide
  Antisense strand to SEQ ID NO: 619216
uccacuaagggcuaauuag

SEQ ID NO: 619218 - RNA, 19 nt, Artificial Sequence
  Description of Artificial Sequence: Synthetic oligonucleotide
  Sense strand starting at position 2083 of SEQ ID NO: 585177
ggaguuuaugauggugauc

SEQ ID NO: 619219 - RNA, 19 nt, Artificial Sequence
  Description of Artificial Sequence: Synthetic oligonucleotide
  Antisense strand to SEQ ID NO: 619218
gaucaccaucauaaacucc

SEQ ID NO: 619220 - RNA, 19 nt, Artificial Sequence
  Description of Artificial Sequence: Synthetic oligonucleotide
  Sense strand starting at position 2490 of SEQ ID NO: 585177
agaguuuacucacuucuuu

SEQ ID NO: 619221 - RNA, 19 nt, Artificial Sequence
  Description of Artificial Sequence: Synthetic oligonucleotide
  Antisense strand to SEQ ID NO: 619220
aaagaagugaguaaacucu

SEQ ID NO: 619222 - RNA, 19 nt, Artificial Sequence
  Description of Artificial Sequence: Synthetic oligonucleotide
  Sense strand starting at position 2538 of SEQ ID NO: 585177
aguauuuacuuggacaucu

SEQ ID NO: 619223 - RNA, 19 nt, Artificial Sequence
  Description of Artificial Sequence: Synthetic oligonucleotide
  Antisense strand to SEQ ID NO: 619222
agauguccaaguaaauacu

SEQ ID NO: 619224 - RNA, 19 nt, Artificial Sequence
  Description of Artificial Sequence: Synthetic oligonucleotide
  Sense strand starting at position 2548 of SEQ ID NO: 585177
uggacaucucagcacucaa

SEQ ID NO: 619225 - RNA, 19 nt, Artificial Sequence
  Description of Artificial Sequence: Synthetic oligonucleotide
  Antisense strand to SEQ ID NO: 619224
uugagugcugagaugucca

SEQ ID NO: 619226 - RNA, 19 nt, Artificial Sequence
  Description of Artificial Sequence: Synthetic oligonucleotide
  Sense strand starting at position 2628 of SEQ ID NO: 585177
guuugaaugugguuagaug

SEQ ID NO: 619227 - RNA, 19 nt, Artificial Sequence
  Description of Artificial Sequence: Synthetic oligonucleotide
  Antisense strand to SEQ ID NO: 619226
caucuaaccacauucaaac

SEQ ID NO: 619228 - RNA, 19 nt, Artificial Sequence
  Description of Artificial Sequence: Synthetic oligonucleotide
  Sense strand starting at position 2635 of SEQ ID NO: 585177
ugugguuagaugggaggau

SEQ ID NO: 619229 - RNA, 19 nt, Artificial Sequence
  Description of Artificial Sequence: Synthetic oligonucleotide
  Antisense strand to SEQ ID NO: 619228
auccucccaucuaaccaca

SEQ ID NO: 619230 - RNA, 19 nt, Artificial Sequence
  Description of Artificial Sequence: Synthetic oligonucleotide
  Sense strand starting at position 2650 of SEQ ID NO: 585177
ggauucuguuuaccacauu

SEQ ID NO: 619231 - RNA, 19 nt, Artificial Sequence
  Description of Artificial Sequence: Synthetic oligonucleotide
  Antisense strand to SEQ ID NO: 619230
aaugugguaaacagaaucc

SEQ ID NO: 619232 - RNA, 19 nt, Artificial Sequence
  Description of Artificial Sequence: Synthetic oligonucleotide
  Sense strand starting at position 2711 of SEQ ID NO: 585177
gacacugagcuuuguaaua

SEQ ID NO: 619233 - RNA, 19 nt, Artificial Sequence
  Description of Artificial Sequence: Synthetic oligonucleotide
  Antisense strand to SEQ ID NO: 619232
uauuacaaagcucaguguc

SEQ ID NO: 619234 - RNA, 19 nt, Artificial Sequence
  Description of Artificial Sequence: Synthetic oligonucleotide
  Sense strand starting at position 2773 of SEQ ID NO: 585177
agaugucaauuacuagaug

SEQ ID NO: 619235 - RNA, 19 nt, Artificial Sequence
  Description of Artificial Sequence: Synthetic oligonucleotide
  Antisense strand to SEQ ID NO: 619234
caucuaguaauugacaucu

SEQ ID NO: 619236 - RNA, 19 nt, Artificial Sequence
  Description of Artificial Sequence: Synthetic oligonucleotide
  Sense strand starting at position 2776 of SEQ ID NO: 585177
ugucaauuacuagauguca

SEQ ID NO: 619237 - RNA, 19 nt, Artificial Sequence
  Description of Artificial Sequence: Synthetic oligonucleotide
  Antisense strand to SEQ ID NO: 619236
ugacaucuaguaauugaca

SEQ ID NO: 619238 - RNA, 19 nt, Artificial Sequence
  Description of Artificial Sequence: Synthetic oligonucleotide
  Sense strand starting at position 2807 of SEQ ID NO: 585177
uugaucuugcuguauacau

SEQ ID NO: 619239 - RNA, 19 nt, Artificial Sequence
  Description of Artificial Sequence: Synthetic oligonucleotide
  Antisense strand to SEQ ID NO: 619238
auguauacagcaagaucaa

SEQ ID NO: 619240 - RNA, 19 nt, Artificial Sequence
  Description of Artificial Sequence: Synthetic oligonucleotide
  Sense strand starting at position 2814 of SEQ ID NO: 585177
ugcuguauacauugauaac

SEQ ID NO: 619241 - RNA, 19 nt, Artificial Sequence
  Description of Artificial Sequence: Synthetic oligonucleotide
  Antisense strand to SEQ ID NO: 619240
guuaucaauguauacagca

SEQ ID NO: 619242 - RNA, 19 nt, Artificial Sequence
  Description of Artificial Sequence: Synthetic oligonucleotide
  Sense strand starting at position 3113 of SEQ ID NO: 585177
auuugagcucuuuguucuu

SEQ ID NO: 619243 - RNA, 19 nt, Artificial Sequence
  Description of Artificial Sequence: Synthetic oligonucleotide
  Antisense strand to SEQ ID NO: 619242
aagaacaaagagcucaaau

SEQ ID NO: 619244 - RNA, 19 nt, Artificial Sequence
  Description of Artificial Sequence: Synthetic oligonucleotide
  Sense strand starting at position 3219 of SEQ ID NO: 585177
gguugaagguaauuaaauu

SEQ ID NO: 619245 - RNA, 19 nt, Artificial Sequence
  Description of Artificial Sequence: Synthetic oligonucleotide
  Antisense strand to SEQ ID NO: 619244
aauuuaauuaccuucaacc

SEQ ID NO: 619246 - RNA, 19 nt, Artificial Sequence
  Description of Artificial Sequence: Synthetic oligonucleotide
  Sense strand starting at position 3359 of SEQ ID NO: 585177
ggugaacaaauccgcaaua

SEQ ID NO: 619247 - RNA, 19 nt, Artificial Sequence
  Description of Artificial Sequence: Synthetic oligonucleotide
  Antisense strand to SEQ ID NO: 619246
uauugcggauuuguucacc

SEQ ID NO: 619248 - RNA, 19 nt, Artificial Sequence
  Description of Artificial Sequence: Synthetic oligonucleotide
  Sense strand starting at position 3460 of SEQ ID NO: 585177
cuacuuguaguuuaucaga

SEQ ID NO: 619249 - RNA, 19 nt, Artificial Sequence
  Description of Artificial Sequence: Synthetic oligonucleotide
  Antisense strand to SEQ ID NO: 619248
ucugauaaacuacaaguag

SEQ ID NO: 619250 - RNA, 19 nt, Artificial Sequence
  Description of Artificial Sequence: Synthetic oligonucleotide
  Sense strand starting at position 3462 of SEQ ID NO: 585177
acuuguaguuuaucagaaa

SEQ ID NO: 619251 - RNA, 19 nt, Artificial Sequence
  Description of Artificial Sequence: Synthetic oligonucleotide
  Antisense strand to SEQ ID NO: 619250
uuucugauaaacuacaagu

SEQ ID NO: 619252 - RNA, 19 nt, Artificial Sequence
  Description of Artificial Sequence: Synthetic oligonucleotide
  Sense strand starting at position 3617 of SEQ ID NO: 585177
guuuaauucccauaggguu

SEQ ID NO: 619253 - RNA, 19 nt, Artificial Sequence
  Description of Artificial Sequence: Synthetic oligonucleotide
  Antisense strand to SEQ ID NO: 619252
aacccuaugggaauuaaac

SEQ ID NO: 619254 - RNA, 19 nt, Artificial Sequence
  Description of Artificial Sequence: Synthetic oligonucleotide
  Sense strand starting at position 3625 of SEQ ID NO: 585177
cccauaggguuuccauuaa

SEQ ID NO: 619255 - RNA, 19 nt, Artificial Sequence
  Description of Artificial Sequence: Synthetic oligonucleotide
  Antisense strand to SEQ ID NO: 619254
uuaauggaaacccuauggg

SEQ ID NO: 619256 - RNA, 19 nt, Artificial Sequence
  Description of Artificial Sequence: Synthetic oligonucleotide
  Sense strand starting at position 162 of SEQ ID NO: 585178
aagguucugugcuuagaug

SEQ ID NO: 619257 - RNA, 19 nt, Artificial Sequence
  Description of Artificial Sequence: Synthetic oligonucleotide
  Antisense strand to SEQ ID NO: 619256
caucuaagcacagaaccuu

SEQ ID NO: 619258 - RNA, 19 nt, Artificial Sequence
  Description of Artificial Sequence: Synthetic oligonucleotide
  Sense strand starting at position 186 of SEQ ID NO: 585178
ggcucagaguuccugaauu

SEQ ID NO: 619259 - RNA, 19 nt, Artificial Sequence
  Description of Artificial Sequence: Synthetic oligonucleotide
  Antisense strand to SEQ ID NO: 619258
aauucaggaacucugagcc

SEQ ID NO: 619260 - RNA, 19 nt, Artificial Sequence
  Description of Artificial Sequence: Synthetic oligonucleotide
  Sense strand starting at position 353 of SEQ ID NO: 585178
aguuuagaacuccaugcuu

SEQ ID NO: 619261 - RNA, 19 nt, Artificial Sequence
  Description of Artificial Sequence: Synthetic oligonucleotide
  Antisense strand to SEQ ID NO: 619260
aagcauggaguucuaaacu

SEQ ID NO: 619262 - RNA, 19 nt, Artificial Sequence
  Description of Artificial Sequence: Synthetic oligonucleotide
  Sense strand starting at position 416 of SEQ ID NO: 585178
uuuaaacuaugcuugcaga

SEQ ID NO: 619263 - RNA, 19 nt, Artificial Sequence
  Description of Artificial Sequence: Synthetic oligonucleotide
  Antisense strand to SEQ ID NO: 619262
ucugcaagcauaguuuaaa

SEQ ID NO: 619264 - RNA, 19 nt, Artificial Sequence
  Description of Artificial Sequence: Synthetic oligonucleotide
  Sense strand starting at position 424 of SEQ ID NO: 585178
augcuugcagaguaucuaa

SEQ ID NO: 619265 - RNA, 19 nt, Artificial Sequence
  Description of Artificial Sequence: Synthetic oligonucleotide
  Antisense strand to SEQ ID NO: 619264
uuagauacucugcaagcau

SEQ ID NO: 619266 - RNA, 19 nt, Artificial Sequence
  Description of Artificial Sequence: Synthetic oligonucleotide
  Sense strand starting at position 427 of SEQ ID NO: 585178
cuugcagaguaucuaaauc

SEQ ID NO: 619267 - RNA, 19 nt, Artificial Sequence
  Description of Artificial Sequence: Synthetic oligonucleotide
  Antisense strand to SEQ ID NO: 619266
gauuuagauacucugcaag

SEQ ID NO: 619268 - RNA, 19 nt, Artificial Sequence
  Description of Artificial Sequence: Synthetic oligonucleotide
  Sense strand starting at position 490 of SEQ ID NO: 585178
ucuuaaguauuguugagac

SEQ ID NO: 619269 - RNA, 19 nt, Artificial Sequence
  Description of Artificial Sequence: Synthetic oligonucleotide
  Antisense strand to SEQ ID NO: 619268
gucucaacaauacuuaaga

SEQ ID NO: 619270 - RNA, 19 nt, Artificial Sequence
  Description of Artificial Sequence: Synthetic oligonucleotide
  Sense strand starting at position 539 of SEQ ID NO: 585178
auuuaauggugccuaguuu

SEQ ID NO: 619271 - RNA, 19 nt, Artificial Sequence
  Description of Artificial Sequence: Synthetic oligonucleotide
  Antisense strand to SEQ ID NO: 619270
aaacuaggcaccauuaaau

SEQ ID NO: 619272 - RNA, 19 nt, Artificial Sequence
  Description of Artificial Sequence: Synthetic oligonucleotide
  Sense strand starting at position 844 of SEQ ID NO: 585178
cuagcauuauaggcaugau

SEQ ID NO: 619273 - RNA, 19 nt, Artificial Sequence
  Description of Artificial Sequence: Synthetic oligonucleotide
  Antisense strand to SEQ ID NO: 619272
aucaugccuauaaugcuag

SEQ ID NO: 619274 - RNA, 19 nt, Artificial Sequence
  Description of Artificial Sequence: Synthetic oligonucleotide
  Sense strand starting at position 879 of SEQ ID NO: 585178
aauggugccuaguuucuaa

SEQ ID NO: 619275 - RNA, 19 nt, Artificial Sequence
  Description of Artificial Sequence: Synthetic oligonucleotide
  Antisense strand to SEQ ID NO: 619274
uuagaaacuaggcaccauu

SEQ ID NO: 619276 - RNA, 19 nt, Artificial Sequence
  Description of Artificial Sequence: Synthetic oligonucleotide
  Sense strand starting at position 1040 of SEQ ID NO: 585178
ggaacuaucucaucaucug

SEQ ID NO: 619277 - RNA, 19 nt, Artificial Sequence
  Description of Artificial Sequence: Synthetic oligonucleotide
  Antisense strand to SEQ ID NO: 619276
cagaugaugagauaguucc

SEQ ID NO: 619278 - RNA, 19 nt, Artificial Sequence
  Description of Artificial Sequence: Synthetic oligonucleotide
  Sense strand starting at position 1127 of SEQ ID NO: 585178
gaagucuuaugguuggaug

SEQ ID NO: 619279 - RNA, 19 nt, Artificial Sequence
  Description of Artificial Sequence: Synthetic oligonucleotide
  Antisense strand to SEQ ID NO: 619278
cauccaaccauaagacuuc

SEQ ID NO: 619280 - RNA, 19 nt, Artificial Sequence
  Description of Artificial Sequence: Synthetic oligonucleotide
  Sense strand starting at position 1128 of SEQ ID NO: 585178
aagucuuaugguuggauga

SEQ ID NO: 619281 - RNA, 19 nt, Artificial Sequence
  Description of Artificial Sequence: Synthetic oligonucleotide
  Antisense strand to SEQ ID NO: 619280
ucauccaaccauaagacuu

SEQ ID NO: 619282 - RNA, 19 nt, Artificial Sequence
  Description of Artificial Sequence: Synthetic oligonucleotide
  Sense strand starting at position 1129 of SEQ ID NO: 585178
agucuuaugguuggaugau

SEQ ID NO: 619283 - RNA, 19 nt, Artificial Sequence
  Description of Artificial Sequence: Synthetic oligonucleotide
  Antisense strand to SEQ ID NO: 619282
aucauccaaccauaagacu

SEQ ID NO: 619284 - RNA, 19 nt, Artificial Sequence
  Description of Artificial Sequence: Synthetic oligonucleotide
  Sense strand starting at position 1249 of SEQ ID NO: 585178
agcacauguuaugcaauau

SEQ ID NO: 619285 - RNA, 19 nt, Artificial Sequence
  Description of Artificial Sequence: Synthetic oligonucleotide
  Antisense strand to SEQ ID NO: 619284
auauugcauaacaugugcu

SEQ ID NO: 619286 - RNA, 19 nt, Artificial Sequence
  Description of Artificial Sequence: Synthetic oligonucleotide
  Sense strand starting at position 1369 of SEQ ID NO: 585178
ugucacuguugagcucaaa

SEQ ID NO: 619287 - RNA, 19 nt, Artificial Sequence
  Description of Artificial Sequence: Synthetic oligonucleotide
  Antisense strand to SEQ ID NO: 619286
uuugagcucaacagugaca

SEQ ID NO: 619288 - RNA, 19 nt, Artificial Sequence
  Description of Artificial Sequence: Synthetic oligonucleotide
  Sense strand starting at position 1372 of SEQ ID NO: 585178
cacuguugagcucaaagag

SEQ ID NO: 619289 - RNA, 19 nt, Artificial Sequence
  Description of Artificial Sequence: Synthetic oligonucleotide
  Antisense strand to SEQ ID NO: 619288
cucuuugagcucaacagug

SEQ ID NO: 619290 - RNA, 19 nt, Artificial Sequence
  Description of Artificial Sequence: Synthetic oligonucleotide
  Sense strand starting at position 1494 of SEQ ID NO: 585178
gauauuccugagggaguug

SEQ ID NO: 619291 - RNA, 19 nt, Artificial Sequence
  Description of Artificial Sequence: Synthetic oligonucleotide
  Antisense strand to SEQ ID NO: 619290
caacucccucaggaauauc

SEQ ID NO: 619292 - RNA, 19 nt, Artificial Sequence
  Description of Artificial Sequence: Synthetic oligonucleotide
  Sense strand starting at position 1502 of SEQ ID NO: 585178
ugagggaguugugucgaca

SEQ ID NO: 619293 - RNA, 19 nt, Artificial Sequence
  Description of Artificial Sequence: Synthetic oligonucleotide
  Antisense strand to SEQ ID NO: 619292
ugucgacacaacucccuca

SEQ ID NO: 619294 - RNA, 19 nt, Artificial Sequence
  Description of Artificial Sequence: Synthetic oligonucleotide
  Sense strand starting at position 1505 of SEQ ID NO: 585178
gggaguugugucgacagaa

SEQ ID NO: 619295 - RNA, 19 nt, Artificial Sequence
  Description of Artificial Sequence: Synthetic oligonucleotide
  Antisense strand to SEQ ID NO: 619294
uucugucgacacaacuccc

SEQ ID NO: 619296 - RNA, 19 nt, Artificial Sequence
  Description of Artificial Sequence: Synthetic oligonucleotide
  Sense strand starting at position 1666 of SEQ ID NO: 585178
gcuccugagaaaugagcau

SEQ ID NO: 619297 - RNA, 19 nt, Artificial Sequence
  Description of Artificial Sequence: Synthetic oligonucleotide
  Antisense strand to SEQ ID NO: 619296
augcucauuucucaggagc

SEQ ID NO: 619298 - RNA, 19 nt, Artificial Sequence
  Description of Artificial Sequence: Synthetic oligonucleotide
  Sense strand starting at position 1670 of SEQ ID NO: 585178
cugagaaaugagcaugcuu

SEQ ID NO: 619299 - RNA, 19 nt, Artificial Sequence
  Description of Artificial Sequence: Synthetic oligonucleotide
  Antisense strand to SEQ ID NO: 619298
aagcaugcucauuucucag

SEQ ID NO: 619300 - RNA, 19 nt, Artificial Sequence
  Description of Artificial Sequence: Synthetic oligonucleotide
  Sense strand starting at position 1672 of SEQ ID NO: 585178
gagaaaugagcaugcuuug

SEQ ID NO: 619301 - RNA, 19 nt, Artificial Sequence
  Description of Artificial Sequence: Synthetic oligonucleotide
  Antisense strand to SEQ ID NO: 619300
caaagcaugcucauuucuc

SEQ ID NO: 619302 - RNA, 19 nt, Artificial Sequence
  Description of Artificial Sequence: Synthetic oligonucleotide
  Sense strand starting at position 1827 of SEQ ID NO: 585178
uuguaagcaccuuaugcau

SEQ ID NO: 619303 - RNA, 19 nt, Artificial Sequence
  Description of Artificial Sequence: Synthetic oligonucleotide
  Antisense strand to SEQ ID NO: 619302
augcauaaggugcuuacaa

SEQ ID NO: 619304 - RNA, 19 nt, Artificial Sequence
  Description of Artificial Sequence: Synthetic oligonucleotide
  Sense strand starting at position 1983 of SEQ ID NO: 585178
acaaacugccuguguacaa

SEQ ID NO: 619305 - RNA, 19 nt, Artificial Sequence
  Description of Artificial Sequence: Synthetic oligonucleotide
  Antisense strand to SEQ ID NO: 619304
uuguacacaggcaguuugu

SEQ ID NO: 619306 - RNA, 19 nt, Artificial Sequence
  Description of Artificial Sequence: Synthetic oligonucleotide
  Sense strand starting at position 2031 of SEQ ID NO: 585178
acagaugcuuuacugucaa

SEQ ID NO: 619307 - RNA, 19 nt, Artificial Sequence
  Description of Artificial Sequence: Synthetic oligonucleotide
  Antisense strand to SEQ ID NO: 619306
uugacaguaaagcaucugu

SEQ ID NO: 619308 - RNA, 19 nt, Artificial Sequence
  Description of Artificial Sequence: Synthetic oligonucleotide
  Sense strand starting at position 2299 of SEQ ID NO: 585178
uuuaucucacuguggaaag

SEQ ID NO: 619309 - RNA, 19 nt, Artificial Sequence
  Description of Artificial Sequence: Synthetic oligonucleotide
  Antisense strand to SEQ ID NO: 619308
cuuuccacagugagauaaa

SEQ ID NO: 619310 - RNA, 19 nt, Artificial Sequence
  Description of Artificial Sequence: Synthetic oligonucleotide
  Sense strand starting at position 2443 of SEQ ID NO: 585178
caugaagucgagcaaagau

SEQ ID NO: 619311 - RNA, 19 nt, Artificial Sequence
  Description of Artificial Sequence: Synthetic oligonucleotide
  Antisense strand to SEQ ID NO: 619310
aucuuugcucgacuucaug

SEQ ID NO: 619312 - RNA, 19 nt, Artificial Sequence
  Description of Artificial Sequence: Synthetic oligonucleotide
  Sense strand starting at position 2478 of SEQ ID NO: 585178
uaacccagugucugguaaa

SEQ ID NO: 619313 - RNA, 19 nt, Artificial Sequence
  Description of Artificial Sequence: Synthetic oligonucleotide
  Antisense strand to SEQ ID NO: 619312
uuuaccagacacuggguua

SEQ ID NO: 619314 - RNA, 19 nt, Artificial Sequence
  Description of Artificial Sequence: Synthetic oligonucleotide
  Sense strand starting at position 2754 of SEQ ID NO: 585178
ugggaauuggcccagaagu

SEQ ID NO: 619315 - RNA, 19 nt, Artificial Sequence
  Description of Artificial Sequence: Synthetic oligonucleotide
  Antisense strand to SEQ ID NO: 619314
acuucugggccaauuccca

SEQ ID NO: 619316 - RNA, 19 nt, Artificial Sequence
  Description of Artificial Sequence: Synthetic oligonucleotide
  Sense strand starting at position 2778 of SEQ ID NO: 585178
cuuccuucccugcagaaga

SEQ ID NO: 619317 - RNA, 19 nt, Artificial Sequence
  Description of Artificial Sequence: Synthetic oligonucleotide
  Antisense strand to SEQ ID NO: 619316
ucuucugcagggaaggaag

SEQ ID NO: 619318 - RNA, 19 nt, Artificial Sequence
  Description of Artificial Sequence: Synthetic oligonucleotide
  Sense strand starting at position 3166 of SEQ ID NO: 585178
cagagagauuaugaaggga

SEQ ID NO: 619319 - RNA, 19 nt, Artificial Sequence
  Description of Artificial Sequence: Synthetic oligonucleotide
  Antisense strand to SEQ ID NO: 619318
ucccuucauaaucucucug

SEQ ID NO: 619320 - RNA, 19 nt, Artificial Sequence
  Description of Artificial Sequence: Synthetic oligonucleotide
  Sense strand starting at position 3209 of SEQ ID NO: 585178
acuuaaucucaaugaagug

SEQ ID NO: 619321 - RNA, 19 nt, Artificial Sequence
  Description of Artificial Sequence: Synthetic oligonucleotide
  Antisense strand to SEQ ID NO: 619320
cacuucauugagauuaagu

SEQ ID NO: 619322 - RNA, 19 nt, Artificial Sequence
  Description of Artificial Sequence: Synthetic oligonucleotide
  Sense strand starting at position 3262 of SEQ ID NO: 585178
guacguauaaucuggagag

SEQ ID NO: 619323 - RNA, 19 nt, Artificial Sequence
  Description of Artificial Sequence: Synthetic oligonucleotide
  Antisense strand to SEQ ID NO: 619322
cucuccagauuauacguac

SEQ ID NO: 619324 - RNA, 19 nt, Artificial Sequence
  Description of Artificial Sequence: Synthetic oligonucleotide
  Sense strand starting at position 3330 of SEQ ID NO: 585178
acuagacaaucagaugaau

SEQ ID NO: 619325 - RNA, 19 nt, Artificial Sequence
  Description of Artificial Sequence: Synthetic oligonucleotide
  Antisense strand to SEQ ID NO: 619324
auucaucugauugucuagu

SEQ ID NO: 619326 - RNA, 19 nt, Artificial Sequence
  Description of Artificial Sequence: Synthetic oligonucleotide
  Sense strand starting at position 3361 of SEQ ID NO: 585178
ggccgucauccugauauca

SEQ ID NO: 619327 - RNA, 19 nt, Artificial Sequence
  Description of Artificial Sequence: Synthetic oligonucleotide
  Antisense strand to SEQ ID NO: 619326
ugauaucaggaugacggcc

SEQ ID NO: 619328 - RNA, 19 nt, Artificial Sequence
  Description of Artificial Sequence: Synthetic oligonucleotide
  Sense strand starting at position 3524 of SEQ ID NO: 585178
ucugaaaugccagauuggu

SEQ ID NO: 619329 - RNA, 19 nt, Artificial Sequence
  Description of Artificial Sequence: Synthetic oligonucleotide
  Antisense strand to SEQ ID NO: 619328
accaaucuggcauuucaga

SEQ ID NO: 619330 - RNA, 19 nt, Artificial Sequence
  Description of Artificial Sequence: Synthetic oligonucleotide
  Sense strand starting at position 3715 of SEQ ID NO: 585178
aaccauguaugaucagaug

SEQ ID NO: 619331 - RNA, 19 nt, Artificial Sequence
  Description of Artificial Sequence: Synthetic oligonucleotide
  Antisense strand to SEQ ID NO: 619330
caucugaucauacaugguu

SEQ ID NO: 619332 - RNA, 19 nt, Artificial Sequence
  Description of Artificial Sequence: Synthetic oligonucleotide
  Sense strand starting at position 3831 of SEQ ID NO: 585178
agacaugcauacuugaaua

SEQ ID NO: 619333 - RNA, 19 nt, Artificial Sequence
  Description of Artificial Sequence: Synthetic oligonucleotide
  Antisense strand to SEQ ID NO: 619332
uauucaaguaugcaugucu

SEQ ID NO: 619334 - RNA, 19 nt, Artificial Sequence
  Description of Artificial Sequence: Synthetic oligonucleotide
  Sense strand starting at position 3893 of SEQ ID NO: 585178
gcaggugcucaucaacagu

SEQ ID NO: 619335 - RNA, 19 nt, Artificial Sequence
  Description of Artificial Sequence: Synthetic oligonucleotide
  Antisense strand to SEQ ID NO: 619334
acuguugaugagcaccugc

SEQ ID NO: 619336 - RNA, 19 nt, Artificial Sequence
  Description of Artificial Sequence: Synthetic oligonucleotide
  Sense strand starting at position 85 of SEQ ID NO: 585179
ugucuauuaugauuaccuu

SEQ ID NO: 619337 - RNA, 19 nt, Artificial Sequence
  Description of Artificial Sequence: Synthetic oligonucleotide
  Antisense strand to SEQ ID NO: 619336
aagguaaucauaauagaca

SEQ ID NO: 619338 - RNA, 19 nt, Artificial Sequence
  Description of Artificial Sequence: Synthetic oligonucleotide
  Sense strand starting at position 86 of SEQ ID NO: 585179
gucuauuaugauuaccuua

SEQ ID NO: 619339 - RNA, 19 nt, Artificial Sequence
  Description of Artificial Sequence: Synthetic oligonucleotide
  Antisense strand to SEQ ID NO: 619338
uaagguaaucauaauagac

SEQ ID NO: 619340 - RNA, 19 nt, Artificial Sequence
  Description of Artificial Sequence: Synthetic oligonucleotide
  Sense strand starting at position 560 of SEQ ID NO: 585179
gaacuuugagagugguuuc

SEQ ID NO: 619341 - RNA, 19 nt, Artificial Sequence
  Description of Artificial Sequence: Synthetic oligonucleotide
  Antisense strand to SEQ ID NO: 619340
gaaaccacucucaaaguuc

SEQ ID NO: 619342 - RNA, 19 nt, Artificial Sequence
  Description of Artificial Sequence: Synthetic oligonucleotide
  Sense strand starting at position 672 of SEQ ID NO: 585179
ccucaaagaguuuguuaug

SEQ ID NO: 619343 - RNA, 19 nt, Artificial Sequence
  Description of Artificial Sequence: Synthetic oligonucleotide
  Antisense strand to SEQ ID NO: 619342
cauaacaaacucuuugagg

SEQ ID NO: 619344 - RNA, 19 nt, Artificial Sequence
  Description of Artificial Sequence: Synthetic oligonucleotide
  Sense strand starting at position 673 of SEQ ID NO: 585179
cucaaagaguuuguuauga

SEQ ID NO: 619345 - RNA, 19 nt, Artificial Sequence
  Description of Artificial Sequence: Synthetic oligonucleotide
  Antisense strand to SEQ ID NO: 619344
ucauaacaaacucuuugag

SEQ ID NO: 619346 - RNA, 19 nt, Artificial Sequence
  Description of Artificial Sequence: Synthetic oligonucleotide
  Sense strand starting at position 718 of SEQ ID NO: 585179
gcgacuggaacaugauaga

SEQ ID NO: 619347 - RNA, 19 nt, Artificial Sequence
  Description of Artificial Sequence: Synthetic oligonucleotide
  Antisense strand to SEQ ID NO: 619346
ucuaucauguuccagucgc

SEQ ID NO: 619348 - RNA, 19 nt, Artificial Sequence
  Description of Artificial Sequence: Synthetic oligonucleotide
  Sense strand starting at position 832 of SEQ ID NO: 585179
gcaauaugugggcacgauu

SEQ ID NO: 619349 - RNA, 19 nt, Artificial Sequence
  Description of Artificial Sequence: Synthetic oligonucleotide
  Antisense strand to SEQ ID NO: 619348
aaucgugcccacauauugc

SEQ ID NO: 619350 - RNA, 19 nt, Artificial Sequence
  Description of Artificial Sequence: Synthetic oligonucleotide
  Sense strand starting at position 951 of SEQ ID NO: 585179
ccaugcuuagccugagaca

SEQ ID NO: 619351 - RNA, 19 nt, Artificial Sequence
  Description of Artificial Sequence: Synthetic oligonucleotide
  Antisense strand to SEQ ID NO: 619350
ugucucaggcuaagcaugg

SEQ ID NO: 619352 - RNA, 19 nt, Artificial Sequence
  Description of Artificial Sequence: Synthetic oligonucleotide
  Sense strand starting at position 952 of SEQ ID NO: 585179
caugcuuagccugagacau

SEQ ID NO: 619353 - RNA, 19 nt, Artificial Sequence
  Description of Artificial Sequence: Synthetic oligonucleotide
  Antisense strand to SEQ ID NO: 619352
augucucaggcuaagcaug

SEQ ID NO: 619354 - RNA, 19 nt, Artificial Sequence
  Description of Artificial Sequence: Synthetic oligonucleotide
  Sense strand starting at position 984 of SEQ ID NO: 585179
ucuugauuaccuuacucga

SEQ ID NO: 619355 - RNA, 19 nt, Artificial Sequence
  Description of Artificial Sequence: Synthetic oligonucleotide
  Antisense strand to SEQ ID NO: 619354
ucgaguaagguaaucaaga

SEQ ID NO: 619356 - RNA, 19 nt, Artificial Sequence
  Description of Artificial Sequence: Synthetic oligonucleotide
  Sense strand starting at position 992 of SEQ ID NO: 585179
accuuacucgacgaacuua

SEQ ID NO: 619357 - RNA, 19 nt, Artificial Sequence
  Description of Artificial Sequence: Synthetic oligonucleotide
  Antisense strand to SEQ ID NO: 619356
uaaguucgucgaguaaggu

SEQ ID NO: 619358 - RNA, 19 nt, Artificial Sequence
  Description of Artificial Sequence: Synthetic oligonucleotide
  Sense strand starting at position 1002 of SEQ ID NO: 585179
acgaacuuauuccuuugaa

SEQ ID NO: 619359 - RNA, 19 nt, Artificial Sequence
  Description of Artificial Sequence: Synthetic oligonucleotide
  Antisense strand to SEQ ID NO: 619358
uucaaaggaauaaguucgu

SEQ ID NO: 619360 - RNA, 19 nt, Artificial Sequence
  Description of Artificial Sequence: Synthetic oligonucleotide
  Sense strand starting at position 1003 of SEQ ID NO: 585179
cgaacuuauuccuuugaaa

SEQ ID NO: 619361 - RNA, 19 nt, Artificial Sequence
  Description of Artificial Sequence: Synthetic oligonucleotide
  Antisense strand to SEQ ID NO: 619360
uuucaaaggaauaaguucg

SEQ ID NO: 619362 - RNA, 19 nt, Artificial Sequence
  Description of Artificial Sequence: Synthetic oligonucleotide
  Sense strand starting at position 1130 of SEQ ID NO: 585179
uccuaaacauguccuagua

SEQ ID NO: 619363 - RNA, 19 nt, Artificial Sequence
  Description of Artificial Sequence: Synthetic oligonucleotide
  Antisense strand to SEQ ID NO: 619362
uacuaggacauguuuagga

SEQ ID NO: 619364 - RNA, 19 nt, Artificial Sequence
  Description of Artificial Sequence: Synthetic oligonucleotide
  Sense strand starting at position 1192 of SEQ ID NO: 585179
cuggaaauccggugauagg

SEQ ID NO: 619365 - RNA, 19 nt, Artificial Sequence
  Description of Artificial Sequence: Synthetic oligonucleotide
  Antisense strand to SEQ ID NO: 619364
ccuaucaccggauuuccag

SEQ ID NO: 619366 - RNA, 19 nt, Artificial Sequence
  Description of Artificial Sequence: Synthetic oligonucleotide
  Sense strand starting at position 1490 of SEQ ID NO: 585179
gcucgauguaucccgcaca

SEQ ID NO: 619367 - RNA, 19 nt, Artificial Sequence
  Description of Artificial Sequence: Synthetic oligonucleotide
  Antisense strand to SEQ ID NO: 619366
ugugcgggauacaucgagc

SEQ ID NO: 619368 - RNA, 19 nt, Artificial Sequence
  Description of Artificial Sequence: Synthetic oligonucleotide
  Sense strand starting at position 1585 of SEQ ID NO: 585179
agggcuguuccuggagaga

SEQ ID NO: 619369 - RNA, 19 nt, Artificial Sequence
  Description of Artificial Sequence: Synthetic oligonucleotide
  Antisense strand to SEQ ID NO: 619368
ucucuccaggaacagcccu

SEQ ID NO: 619370 - RNA, 19 nt, Artificial Sequence
  Description of Artificial Sequence: Synthetic oligonucleotide
  Sense strand starting at position 1681 of SEQ ID NO: 585179
acucaccuggccugugaua

SEQ ID NO: 619371 - RNA, 19 nt, Artificial Sequence
  Description of Artificial Sequence: Synthetic oligonucleotide
  Antisense strand to SEQ ID NO: 619370
uaucacaggccaggugagu

SEQ ID NO: 619372 - RNA, 19 nt, Artificial Sequence
  Description of Artificial Sequence: Synthetic oligonucleotide
  Sense strand starting at position 1692 of SEQ ID NO: 585179
cugugauaccggugaugag

SEQ ID NO: 619373 - RNA, 19 nt, Artificial Sequence
  Description of Artificial Sequence: Synthetic oligonucleotide
  Antisense strand to SEQ ID NO: 619372
cucaucaccgguaucacag

SEQ ID NO: 619374 - RNA, 19 nt, Artificial Sequence
  Description of Artificial Sequence: Synthetic oligonucleotide
  Sense strand starting at position 2332 of SEQ ID NO: 585179
ggucauggacuuugauaaa

SEQ ID NO: 619375 - RNA, 19 nt, Artificial Sequence
  Description of Artificial Sequence: Synthetic oligonucleotide
  Antisense strand to SEQ ID NO: 619374
uuuaucaaaguccaugacc

SEQ ID NO: 619376 - RNA, 19 nt, Artificial Sequence
  Description of Artificial Sequence: Synthetic oligonucleotide
  Sense strand starting at position 2512 of SEQ ID NO: 585179
cgagguuccaaauagcuga

SEQ ID NO: 619377 - RNA, 19 nt, Artificial Sequence
  Description of Artificial Sequence: Synthetic oligonucleotide
  Antisense strand to SEQ ID NO: 619376
ucagcuauuuggaaccucg

SEQ ID NO: 619378 - RNA, 19 nt, Artificial Sequence
  Description of Artificial Sequence: Synthetic oligonucleotide
  Sense strand starting at position 2613 of SEQ ID NO: 585179
aaagacugcccgggucaau

SEQ ID NO: 619379 - RNA, 19 nt, Artificial Sequence
  Description of Artificial Sequence: Synthetic oligonucleotide
  Antisense strand to SEQ ID NO: 619378
auugacccgggcagucuuu

SEQ ID NO: 619380 - RNA, 19 nt, Artificial Sequence
  Description of Artificial Sequence: Synthetic oligonucleotide
  Sense strand starting at position 2697 of SEQ ID NO: 585179
guuggauuuggcugccauu

SEQ ID NO: 619381 - RNA, 19 nt, Artificial Sequence
  Description of Artificial Sequence: Synthetic oligonucleotide
  Antisense strand to SEQ ID NO: 619380
aauggcagccaaauccaac

SEQ ID NO: 619382 - RNA, 19 nt, Artificial Sequence
  Description of Artificial Sequence: Synthetic oligonucleotide
  Sense strand starting at position 2912 of SEQ ID NO: 585179
uagggcugugcccaauaua

SEQ ID NO: 619383 - RNA, 19 nt, Artificial Sequence
  Description of Artificial Sequence: Synthetic oligonucleotide
  Antisense strand to SEQ ID NO: 619382
uauauugggcacagcccua

SEQ ID NO: 619384 - RNA, 19 nt, Artificial Sequence
  Description of Artificial Sequence: Synthetic oligonucleotide
  Sense strand starting at position 2924 of SEQ ID NO: 585179
caauauaacgugcaagagu

SEQ ID NO: 619385 - RNA, 19 nt, Artificial Sequence
  Description of Artificial Sequence: Synthetic oligonucleotide
  Antisense strand to SEQ ID NO: 619384
acucuugcacguuauauug

SEQ ID NO: 619386 - RNA, 19 nt, Artificial Sequence
  Description of Artificial Sequence: Synthetic oligonucleotide
  Sense strand starting at position 2977 of SEQ ID NO: 585179
agcucaggauuacauuuaa

SEQ ID NO: 619387 - RNA, 19 nt, Artificial Sequence
  Description of Artificial Sequence: Synthetic oligonucleotide
  Antisense strand to SEQ ID NO: 619386
uuaaauguaauccugagcu

SEQ ID NO: 619388 - RNA, 19 nt, Artificial Sequence
  Description of Artificial Sequence: Synthetic oligonucleotide
  Sense strand starting at position 3027 of SEQ ID NO: 585179
aggaauauuucuuagcuau

SEQ ID NO: 619389 - RNA, 19 nt, Artificial Sequence
  Description of Artificial Sequence: Synthetic oligonucleotide
  Antisense strand to SEQ ID NO: 619388
auagcuaagaaauauuccu

SEQ ID NO: 619390 - RNA, 19 nt, Artificial Sequence
  Description of Artificial Sequence: Synthetic oligonucleotide
  Sense strand starting at position 3045 of SEQ ID NO: 585179
uagauagacuggucugguu

SEQ ID NO: 619391 - RNA, 19 nt, Artificial Sequence
  Description of Artificial Sequence: Synthetic oligonucleotide
  Antisense strand to SEQ ID NO: 619390
aaccagaccagucuaucua

SEQ ID NO: 619392 - RNA, 19 nt, Artificial Sequence
  Description of Artificial Sequence: Synthetic oligonucleotide
  Sense strand starting at position 3084 of SEQ ID NO: 585179
gcguucuaugaggagaaug

SEQ ID NO: 619393 - RNA, 19 nt, Artificial Sequence
  Description of Artificial Sequence: Synthetic oligonucleotide
  Antisense strand to SEQ ID NO: 619392
cauucuccucauagaacgc

SEQ ID NO: 619394 - RNA, 19 nt, Artificial Sequence
  Description of Artificial Sequence: Synthetic oligonucleotide
  Sense strand starting at position 3121 of SEQ ID NO: 585179
ggugccucugagugaugaa

SEQ ID NO: 619395 - RNA, 19 nt, Artificial Sequence
  Description of Artificial Sequence: Synthetic oligonucleotide
  Antisense strand to SEQ ID NO: 619394
uucaucacucagaggcacc

SEQ ID NO: 619396 - RNA, 19 nt, Artificial Sequence
  Description of Artificial Sequence: Synthetic oligonucleotide
  Sense strand starting at position 3122 of SEQ ID NO: 585179
gugccucugagugaugaag

SEQ ID NO: 619397 - RNA, 19 nt, Artificial Sequence
  Description of Artificial Sequence: Synthetic oligonucleotide
  Antisense strand to SEQ ID NO: 619396
cuucaucacucagaggcac

SEQ ID NO: 619398 - RNA, 19 nt, Artificial Sequence
  Description of Artificial Sequence: Synthetic oligonucleotide
  Sense strand starting at position 3174 of SEQ ID NO: 585179
uugagaggaacaugcuaua

SEQ ID NO: 619399 - RNA, 19 nt, Artificial Sequence
  Description of Artificial Sequence: Synthetic oligonucleotide
  Antisense strand to SEQ ID NO: 619398
uauagcauguuccucucaa

SEQ ID NO: 619400 - RNA, 19 nt, Artificial Sequence
  Description of Artificial Sequence: Synthetic oligonucleotide
  Sense strand starting at position 3179 of SEQ ID NO: 585179
aggaacaugcuauaagcua

SEQ ID NO: 619401 - RNA, 19 nt, Artificial Sequence
  Description of Artificial Sequence: Synthetic oligonucleotide
  Antisense strand to SEQ ID NO: 619400
uagcuuauagcauguuccu

SEQ ID NO: 619402 - RNA, 19 nt, Artificial Sequence
  Description of Artificial Sequence: Synthetic oligonucleotide
  Sense strand starting at position 3186 of SEQ ID NO: 585179
ugcuauaagcuagaaaugu

SEQ ID NO: 619403 - RNA, 19 nt, Artificial Sequence
  Description of Artificial Sequence: Synthetic oligonucleotide
  Antisense strand to SEQ ID NO: 619402
acauuucuagcuuauagca

SEQ ID NO: 619404 - RNA, 19 nt, Artificial Sequence
  Description of Artificial Sequence: Synthetic oligonucleotide
  Sense strand starting at position 3194 of SEQ ID NO: 585179
gcuagaaaugucugugaaa

SEQ ID NO: 619405 - RNA, 19 nt, Artificial Sequence
  Description of Artificial Sequence: Synthetic oligonucleotide
  Antisense strand to SEQ ID NO: 619404
uuucacagacauuucuagc

SEQ ID NO: 619406 - RNA, 19 nt, Artificial Sequence
  Description of Artificial Sequence: Synthetic oligonucleotide
  Sense strand starting at position 3195 of SEQ ID NO: 585179
cuagaaaugucugugaaau

SEQ ID NO: 619407 - RNA, 19 nt, Artificial Sequence
  Description of Artificial Sequence: Synthetic oligonucleotide
  Antisense strand to SEQ ID NO: 619406
auuucacagacauuucuag

SEQ ID NO: 619408 - RNA, 19 nt, Artificial Sequence
  Description of Artificial Sequence: Synthetic oligonucleotide
  Sense strand starting at position 3205 of SEQ ID NO: 585179
cugugaaauauacgggaau

SEQ ID NO: 619409 - RNA, 19 nt, Artificial Sequence
  Description of Artificial Sequence: Synthetic oligonucleotide
  Antisense strand to SEQ ID NO: 619408
auucccguauauuucacag

SEQ ID NO: 619410 - RNA, 19 nt, Artificial Sequence
  Description of Artificial Sequence: Synthetic oligonucleotide
  Sense strand starting at position 3207 of SEQ ID NO: 585179
gugaaauauacgggaauau

SEQ ID NO: 619411 - RNA, 19 nt, Artificial Sequence
  Description of Artificial Sequence: Synthetic oligonucleotide
  Antisense strand to SEQ ID NO: 619410
auauucccguauauuucac

SEQ ID NO: 619412 - RNA, 19 nt, Artificial Sequence
  Description of Artificial Sequence: Synthetic oligonucleotide
  Sense strand starting at position 3820 of SEQ ID NO: 585179
ugggaaaugguaggucaga

SEQ ID NO: 619413 - RNA, 19 nt, Artificial Sequence
  Description of Artificial Sequence: Synthetic oligonucleotide
  Antisense strand to SEQ ID NO: 619412
ucugaccuaccauuuccca

SEQ ID NO: 619414 - RNA, 19 nt, Artificial Sequence
  Description of Artificial Sequence: Synthetic oligonucleotide
  Sense strand starting at position 3915 of SEQ ID NO: 585179
ccauccauagggugacaaa

SEQ ID NO: 619415 - RNA, 19 nt, Artificial Sequence
  Description of Artificial Sequence: Synthetic oligonucleotide
  Antisense strand to SEQ ID NO: 619414
uuugucacccuauggaugg

SEQ ID NO: 619416 - RNA, 19 nt, Artificial Sequence
  Description of Artificial Sequence: Synthetic oligonucleotide
  Sense strand starting at position 136 of SEQ ID NO: 585180
cuuaauaucuggucaaaug

SEQ ID NO: 619417 - RNA, 19 nt, Artificial Sequence
  Description of Artificial Sequence: Synthetic oligonucleotide
  Antisense strand to SEQ ID NO: 619416
cauuugaccagauauuaag

SEQ ID NO: 619418 - RNA, 19 nt, Artificial Sequence
  Description of Artificial Sequence: Synthetic oligonucleotide
  Sense strand starting at position 147 of SEQ ID NO: 585180
gucaaaugagaucaugcau

SEQ ID NO: 619419 - RNA, 19 nt, Artificial Sequence
  Description of Artificial Sequence: Synthetic oligonucleotide
  Antisense strand to SEQ ID NO: 619418
augcaugaucucauuugac

SEQ ID NO: 619420 - RNA, 19 nt, Artificial Sequence
  Description of Artificial Sequence: Synthetic oligonucleotide
  Sense strand starting at position 166 of SEQ ID NO: 585180
uuacauuuguaggaaaugu

SEQ ID NO: 619421 - RNA, 19 nt, Artificial Sequence
  Description of Artificial Sequence: Synthetic oligonucleotide
  Antisense strand to SEQ ID NO: 619420
acauuuccuacaaauguaa

SEQ ID NO: 619422 - RNA, 19 nt, Artificial Sequence
  Description of Artificial Sequence: Synthetic oligonucleotide
  Sense strand starting at position 177 of SEQ ID NO: 585180
ggaaauguuuaaccaguaa

SEQ ID NO: 619423 - RNA, 19 nt, Artificial Sequence
  Description of Artificial Sequence: Synthetic oligonucleotide
  Antisense strand to SEQ ID NO: 619422
uuacugguuaaacauuucc

SEQ ID NO: 619424 - RNA, 19 nt, Artificial Sequence
  Description of Artificial Sequence: Synthetic oligonucleotide
  Sense strand starting at position 181 of SEQ ID NO: 585180
auguuuaaccaguaacaug

SEQ ID NO: 619425 - RNA, 19 nt, Artificial Sequence
  Description of Artificial Sequence: Synthetic oligonucleotide
  Antisense strand to SEQ ID NO: 619424
cauguuacugguuaaacau

SEQ ID NO: 619426 - RNA, 19 nt, Artificial Sequence
  Description of Artificial Sequence: Synthetic oligonucleotide
  Sense strand starting at position 250 of SEQ ID NO: 585180
uguaaugcgguugacuaga

SEQ ID NO: 619427 - RNA, 19 nt, Artificial Sequence
  Description of Artificial Sequence: Synthetic oligonucleotide
  Antisense strand to SEQ ID NO: 619426
ucuagucaaccgcauuaca

SEQ ID NO: 619428 - RNA, 19 nt, Artificial Sequence
  Description of Artificial Sequence: Synthetic oligonucleotide
  Sense strand starting at position 357 of SEQ ID NO: 585180
ugugccucgucgauagaug

SEQ ID NO: 619429 - RNA, 19 nt, Artificial Sequence
  Description of Artificial Sequence: Synthetic oligonucleotide
  Antisense strand to SEQ ID NO: 619428
caucuaucgacgaggcaca

SEQ ID NO: 619430 - RNA, 19 nt, Artificial Sequence
  Description of Artificial Sequence: Synthetic oligonucleotide
  Sense strand starting at position 553 of SEQ ID NO: 585180
ccugcaugaucaccaaagu

SEQ ID NO: 619431 - RNA, 19 nt, Artificial Sequence
  Description of Artificial Sequence: Synthetic oligonucleotide
  Antisense strand to SEQ ID NO: 619430
acuuuggugaucaugcagg

SEQ ID NO: 619432 - RNA, 19 nt, Artificial Sequence
  Description of Artificial Sequence: Synthetic oligonucleotide
  Sense strand starting at position 847 of SEQ ID NO: 585180
aucuaauuugugcgggcau

SEQ ID NO: 619433 - RNA, 19 nt, Artificial Sequence
  Description of Artificial Sequence: Synthetic oligonucleotide
  Antisense strand to SEQ ID NO: 619432
augcccgcacaaauuagau

SEQ ID NO: 619434 - RNA, 19 nt, Artificial Sequence
  Description of Artificial Sequence: Synthetic oligonucleotide
  Sense strand starting at position 959 of SEQ ID NO: 585180
ggccgugaucucgaaauua

SEQ ID NO: 619435 - RNA, 19 nt, Artificial Sequence
  Description of Artificial Sequence: Synthetic oligonucleotide
  Antisense strand to SEQ ID NO: 619434
uaauuucgagaucacggcc

SEQ ID NO: 619436 - RNA, 19 nt, Artificial Sequence
  Description of Artificial Sequence: Synthetic oligonucleotide
  Sense strand starting at position 968 of SEQ ID NO: 585180
cucgaaauuagugagucau

SEQ ID NO: 619437 - RNA, 19 nt, Artificial Sequence
  Description of Artificial Sequence: Synthetic oligonucleotide
  Antisense strand to SEQ ID NO: 619436
augacucacuaauuucgag

SEQ ID NO: 619438 - RNA, 19 nt, Artificial Sequence
  Description of Artificial Sequence: Synthetic oligonucleotide
  Sense strand starting at position 970 of SEQ ID NO: 585180
cgaaauuagugagucauga

SEQ ID NO: 619439 - RNA, 19 nt, Artificial Sequence
  Description of Artificial Sequence: Synthetic oligonucleotide
  Antisense strand to SEQ ID NO: 619438
ucaugacucacuaauuucg

SEQ ID NO: 619440 - RNA, 19 nt, Artificial Sequence
  Description of Artificial Sequence: Synthetic oligonucleotide
  Sense strand starting at position 978 of SEQ ID NO: 585180
gugagucaugagcaacacu

SEQ ID NO: 619441 - RNA, 19 nt, Artificial Sequence
  Description of Artificial Sequence: Synthetic oligonucleotide
  Antisense strand to SEQ ID NO: 619440
aguguugcucaugacucac

SEQ ID NO: 619442 - RNA, 19 nt, Artificial Sequence
  Description of Artificial Sequence: Synthetic oligonucleotide
  Sense strand starting at position 1037 of SEQ ID NO: 585180
cgagaaacauugcuuccau

SEQ ID NO: 619443 - RNA, 19 nt, Artificial Sequence
  Description of Artificial Sequence: Synthetic oligonucleotide
  Antisense strand to SEQ ID NO: 619442
auggaagcaauguuucucg

SEQ ID NO: 619444 - RNA, 19 nt, Artificial Sequence
  Description of Artificial Sequence: Synthetic oligonucleotide
  Sense strand starting at position 1057 of SEQ ID NO: 585180
acgucucauuugguuagau

SEQ ID NO: 619445 - RNA, 19 nt, Artificial Sequence
  Description of Artificial Sequence: Synthetic oligonucleotide
  Antisense strand to SEQ ID NO: 619444
aucuaaccaaaugagacgu

SEQ ID NO: 619446 - RNA, 19 nt, Artificial Sequence
  Description of Artificial Sequence: Synthetic oligonucleotide
  Sense strand starting at position 1058 of SEQ ID NO: 585180
cgucucauuugguuagaua

SEQ ID NO: 619447 - RNA, 19 nt, Artificial Sequence
  Description of Artificial Sequence: Synthetic oligonucleotide
  Antisense strand to SEQ ID NO: 619446
uaucuaaccaaaugagacg

SEQ ID NO: 619448 - RNA, 19 nt, Artificial Sequence
  Description of Artificial Sequence: Synthetic oligonucleotide
  Sense strand starting at position 1252 of SEQ ID NO: 585180
augcgaaacccguaucaac

SEQ ID NO: 619449 - RNA, 19 nt, Artificial Sequence
  Description of Artificial Sequence: Synthetic oligonucleotide
  Antisense strand to SEQ ID NO: 619448
guugauacggguuucgcau

SEQ ID NO: 619450 - RNA, 19 nt, Artificial Sequence
  Description of Artificial Sequence: Synthetic oligonucleotide
  Sense strand starting at position 2223 of SEQ ID NO: 585180
agucguuagcaccagaaga

SEQ ID NO: 619451 - RNA, 19 nt, Artificial Sequence
  Description of Artificial Sequence: Synthetic oligonucleotide
  Antisense strand to SEQ ID NO: 619450
ucuucuggugcuaacgacu

SEQ ID NO: 619452 - RNA, 19 nt, Artificial Sequence
  Description of Artificial Sequence: Synthetic oligonucleotide
  Sense strand starting at position 2271 of SEQ ID NO: 585180
uauguaguacacgacauau

SEQ ID NO: 619453 - RNA, 19 nt, Artificial Sequence
  Description of Artificial Sequence: Synthetic oligonucleotide
  Antisense strand to SEQ ID NO: 619452
auaugucguguacuacaua

SEQ ID NO: 619454 - RNA, 19 nt, Artificial Sequence
  Description of Artificial Sequence: Synthetic oligonucleotide
  Sense strand starting at position 2273 of SEQ ID NO: 585180
uguaguacacgacauauau

SEQ ID NO: 619455 - RNA, 19 nt, Artificial Sequence
  Description of Artificial Sequence: Synthetic oligonucleotide
  Antisense strand to SEQ ID NO: 619454
auauaugucguguacuaca

SEQ ID NO: 619456 - RNA, 19 nt, Artificial Sequence
  Description of Artificial Sequence: Synthetic oligonucleotide
  Sense strand starting at position 2391 of SEQ ID NO: 585180
ucaggagacaaccgauuau

SEQ ID NO: 619457 - RNA, 19 nt, Artificial Sequence
  Description of Artificial Sequence: Synthetic oligonucleotide
  Antisense strand to SEQ ID NO: 619456
auaaucgguugucuccuga

SEQ ID NO: 619458 - RNA, 19 nt, Artificial Sequence
  Description of Artificial Sequence: Synthetic oligonucleotide
  Sense strand starting at position 2397 of SEQ ID NO: 585180
gacaaccgauuaucaguua

SEQ ID NO: 619459 - RNA, 19 nt, Artificial Sequence
  Description of Artificial Sequence: Synthetic oligonucleotide
  Antisense strand to SEQ ID NO: 619458
uaacugauaaucgguuguc

SEQ ID NO: 619460 - RNA, 19 nt, Artificial Sequence
  Description of Artificial Sequence: Synthetic oligonucleotide
  Sense strand starting at position 2437 of SEQ ID NO: 585180
cgccuuauacgugccaauu

SEQ ID NO: 619461 - RNA, 19 nt, Artificial Sequence
  Description of Artificial Sequence: Synthetic oligonucleotide
  Antisense strand to SEQ ID NO: 619460
aauuggcacguauaaggcg

SEQ ID NO: 619462 - RNA, 19 nt, Artificial Sequence
  Description of Artificial Sequence: Synthetic oligonucleotide
  Sense strand starting at position 2505 of SEQ ID NO: 585180
gcagaaacaccuugguaau

SEQ ID NO: 619463 - RNA, 19 nt, Artificial Sequence
  Description of Artificial Sequence: Synthetic oligonucleotide
  Antisense strand to SEQ ID NO: 619462
auuaccaagguguuucugc

SEQ ID NO: 619464 - RNA, 19 nt, Artificial Sequence
  Description of Artificial Sequence: Synthetic oligonucleotide
  Sense strand starting at position 2751 of SEQ ID NO: 585180
gaaggaaggcguuaucgag

SEQ ID NO: 619465 - RNA, 19 nt, Artificial Sequence
  Description of Artificial Sequence: Synthetic oligonucleotide
  Antisense strand to SEQ ID NO: 619464
cucgauaacgccuuccuuc

SEQ ID NO: 619466 - RNA, 19 nt, Artificial Sequence
  Description of Artificial Sequence: Synthetic oligonucleotide
  Sense strand starting at position 2760 of SEQ ID NO: 585180
cguuaucgaguacaaauaa

SEQ ID NO: 619467 - RNA, 19 nt, Artificial Sequence
  Description of Artificial Sequence: Synthetic oligonucleotide
  Antisense strand to SEQ ID NO: 619466
uuauuuguacucgauaacg

SEQ ID NO: 619468 - RNA, 19 nt, Artificial Sequence
  Description of Artificial Sequence: Synthetic oligonucleotide
  Sense strand starting at position 2803 of SEQ ID NO: 585180
auggaucucgucugaacua

SEQ ID NO: 619469 - RNA, 19 nt, Artificial Sequence
  Description of Artificial Sequence: Synthetic oligonucleotide
  Antisense strand to SEQ ID NO: 619468
uaguucagacgagauccau

SEQ ID NO: 619470 - RNA, 19 nt, Artificial Sequence
  Description of Artificial Sequence: Synthetic oligonucleotide
  Sense strand starting at position 2879 of SEQ ID NO: 585180
gaugguaagauaugaguug

SEQ ID NO: 619471 - RNA, 19 nt, Artificial Sequence
  Description of Artificial Sequence: Synthetic oligonucleotide
  Antisense strand to SEQ ID NO: 619470
caacucauaucuuaccauc

SEQ ID NO: 619472 - RNA, 19 nt, Artificial Sequence
  Description of Artificial Sequence: Synthetic oligonucleotide
  Sense strand starting at position 2886 of SEQ ID NO: 585180
agauaugaguuguuuaagg

SEQ ID NO: 619473 - RNA, 19 nt, Artificial Sequence
  Description of Artificial Sequence: Synthetic oligonucleotide
  Antisense strand to SEQ ID NO: 619472
ccuuaaacaacucauaucu

SEQ ID NO: 619474 - RNA, 19 nt, Artificial Sequence
  Description of Artificial Sequence: Synthetic oligonucleotide
  Sense strand starting at position 2888 of SEQ ID NO: 585180
auaugaguuguuuaagguu

SEQ ID NO: 619475 - RNA, 19 nt, Artificial Sequence
  Description of Artificial Sequence: Synthetic oligonucleotide
  Antisense strand to SEQ ID NO: 619474
aaccuuaaacaacucauau

SEQ ID NO: 619476 - RNA, 19 nt, Artificial Sequence
  Description of Artificial Sequence: Synthetic oligonucleotide
  Sense strand starting at position 2894 of SEQ ID NO: 585180
guuguuuaagguuaccuga

SEQ ID NO: 619477 - RNA, 19 nt, Artificial Sequence
  Description of Artificial Sequence: Synthetic oligonucleotide
  Antisense strand to SEQ ID NO: 619476
ucagguaaccuuaaacaac

SEQ ID NO: 619478 - RNA, 19 nt, Artificial Sequence
  Description of Artificial Sequence: Synthetic oligonucleotide
  Sense strand starting at position 2897 of SEQ ID NO: 585180
guuuaagguuaccugauga

SEQ ID NO: 619479 - RNA, 19 nt, Artificial Sequence
  Description of Artificial Sequence: Synthetic oligonucleotide
  Antisense strand to SEQ ID NO: 619478
ucaucagguaaccuuaaac

SEQ ID NO: 619480 - RNA, 19 nt, Artificial Sequence
  Description of Artificial Sequence: Synthetic oligonucleotide
  Sense strand starting at position 2902 of SEQ ID NO: 585180
agguuaccugaugagcaau

SEQ ID NO: 619481 - RNA, 19 nt, Artificial Sequence
  Description of Artificial Sequence: Synthetic oligonucleotide
  Antisense strand to SEQ ID NO: 619480
auugcucaucagguaaccu

SEQ ID NO: 619482 - RNA, 19 nt, Artificial Sequence
  Description of Artificial Sequence: Synthetic oligonucleotide
  Sense strand starting at position 2908 of SEQ ID NO: 585180
ccugaugagcaauggguua

SEQ ID NO: 619483 - RNA, 19 nt, Artificial Sequence
  Description of Artificial Sequence: Synthetic oligonucleotide
  Antisense strand to SEQ ID NO: 619482
uaacccauugcucaucagg

SEQ ID NO: 619484 - RNA, 19 nt, Artificial Sequence
  Description of Artificial Sequence: Synthetic oligonucleotide
  Sense strand starting at position 2910 of SEQ ID NO: 585180
ugaugagcaauggguuaaa

SEQ ID NO: 619485 - RNA, 19 nt, Artificial Sequence
  Description of Artificial Sequence: Synthetic oligonucleotide
  Antisense strand to SEQ ID NO: 619484
uuuaacccauugcucauca

SEQ ID NO: 619486 - RNA, 19 nt, Artificial Sequence
  Description of Artificial Sequence: Synthetic oligonucleotide
  Sense strand starting at position 3274 of SEQ ID NO: 585180
gaaccacuggugcgaauaa

SEQ ID NO: 619487 - RNA, 19 nt, Artificial Sequence
  Description of Artificial Sequence: Synthetic oligonucleotide
  Antisense strand to SEQ ID NO: 619486
uuauucgcaccagugguuc

SEQ ID NO: 619488 - RNA, 19 nt, Artificial Sequence
  Description of Artificial Sequence: Synthetic oligonucleotide
  Sense strand starting at position 3311 of SEQ ID NO: 585180
uugauaacugcugaggcua

SEQ ID NO: 619489 - RNA, 19 nt, Artificial Sequence
  Description of Artificial Sequence: Synthetic oligonucleotide
  Antisense strand to SEQ ID NO: 619488
uagccucagcaguuaucaa

SEQ ID NO: 619490 - RNA, 19 nt, Artificial Sequence
  Description of Artificial Sequence: Synthetic oligonucleotide
  Sense strand starting at position 3323 of SEQ ID NO: 585180
gaggcuaguauggaugagu

SEQ ID NO: 619491 - RNA, 19 nt, Artificial Sequence
  Description of Artificial Sequence: Synthetic oligonucleotide
  Antisense strand to SEQ ID NO: 619490
acucauccauacuagccuc

SEQ ID NO: 619492 - RNA, 19 nt, Artificial Sequence
  Description of Artificial Sequence: Synthetic oligonucleotide
  Sense strand starting at position 3326 of SEQ ID NO: 585180
gcuaguauggaugaguaca

SEQ ID NO: 619493 - RNA, 19 nt, Artificial Sequence
  Description of Artificial Sequence: Synthetic oligonucleotide
  Antisense strand to SEQ ID NO: 619492
uguacucauccauacuagc

SEQ ID NO: 619494 - RNA, 19 nt, Artificial Sequence
  Description of Artificial Sequence: Synthetic oligonucleotide
  Sense strand starting at position 3373 of SEQ ID NO: 585180
uuuauaucuguuugggauu

SEQ ID NO: 619495 - RNA, 19 nt, Artificial Sequence
  Description of Artificial Sequence: Synthetic oligonucleotide
  Antisense strand to SEQ ID NO: 619494
aaucccaaacagauauaaa

SEQ ID NO: 619496 - RNA, 19 nt, Artificial Sequence
  Description of Artificial Sequence: Synthetic oligonucleotide
  Sense strand starting at position 227 of SEQ ID NO: 585181
gaagguggagucuagguuu

SEQ ID NO: 619497 - RNA, 19 nt, Artificial Sequence
  Description of Artificial Sequence: Synthetic oligonucleotide
  Antisense strand to SEQ ID NO: 619496
aaaccuagacuccaccuuc

SEQ ID NO: 619498 - RNA, 19 nt, Artificial Sequence
  Description of Artificial Sequence: Synthetic oligonucleotide
  Sense strand starting at position 230 of SEQ ID NO: 585181
gguggagucuagguuuaaa

SEQ ID NO: 619499 - RNA, 19 nt, Artificial Sequence
  Description of Artificial Sequence: Synthetic oligonucleotide
  Antisense strand to SEQ ID NO: 619498
uuuaaaccuagacuccacc

SEQ ID NO: 619500 - RNA, 19 nt, Artificial Sequence
  Description of Artificial Sequence: Synthetic oligonucleotide
  Sense strand starting at position 272 of SEQ ID NO: 585181
acuauuguacaguagaacu

SEQ ID NO: 619501 - RNA, 19 nt, Artificial Sequence
  Description of Artificial Sequence: Synthetic oligonucleotide
  Antisense strand to SEQ ID NO: 619500
aguucuacuguacaauagu

SEQ ID NO: 619502 - RNA, 19 nt, Artificial Sequence
  Description of Artificial Sequence: Synthetic oligonucleotide
  Sense strand starting at position 330 of SEQ ID NO: 585181
ugacuaaggugacuaaagu

SEQ ID NO: 619503 - RNA, 19 nt, Artificial Sequence
  Description of Artificial Sequence: Synthetic oligonucleotide
  Antisense strand to SEQ ID NO: 619502
acuuuagucaccuuaguca

SEQ ID NO: 619504 - RNA, 19 nt, Artificial Sequence
  Description of Artificial Sequence: Synthetic oligonucleotide
  Sense strand starting at position 461 of SEQ ID NO: 585181
acauauuguccuggauuaa

SEQ ID NO: 619505 - RNA, 19 nt, Artificial Sequence
  Description of Artificial Sequence: Synthetic oligonucleotide
  Antisense strand to SEQ ID NO: 619504
uuaauccaggacaauaugu

SEQ ID NO: 619506 - RNA, 19 nt, Artificial Sequence
  Description of Artificial Sequence: Synthetic oligonucleotide
  Sense strand starting at position 618 of SEQ ID NO: 585181
cuuaauaucuggucaaaug

SEQ ID NO: 619507 - RNA, 19 nt, Artificial Sequence
  Description of Artificial Sequence: Synthetic oligonucleotide
  Antisense strand to SEQ ID NO: 619506
cauuugaccagauauuaag

SEQ ID NO: 619508 - RNA, 19 nt, Artificial Sequence
  Description of Artificial Sequence: Synthetic oligonucleotide
  Sense strand starting at position 629 of SEQ ID NO: 585181
gucaaaugagaucaugcau

SEQ ID NO: 619509 - RNA, 19 nt, Artificial Sequence
  Description of Artificial Sequence: Synthetic oligonucleotide
  Antisense strand to SEQ ID NO: 619508
augcaugaucucauuugac

SEQ ID NO: 619510 - RNA, 19 nt, Artificial Sequence
  Description of Artificial Sequence: Synthetic oligonucleotide
  Sense strand starting at position 659 of SEQ ID NO: 585181
ggaaauguuuaaccaguaa

SEQ ID NO: 619511 - RNA, 19 nt, Artificial Sequence
  Description of Artificial Sequence: Synthetic oligonucleotide
  Antisense strand to SEQ ID NO: 619510
uuacugguuaaacauuucc

SEQ ID NO: 619512 - RNA, 19 nt, Artificial Sequence
  Description of Artificial Sequence: Synthetic oligonucleotide
  Sense strand starting at position 663 of SEQ ID NO: 585181
auguuuaaccaguaacaug

SEQ ID NO: 619513 - RNA, 19 nt, Artificial Sequence
  Description of Artificial Sequence: Synthetic oligonucleotide
  Antisense strand to SEQ ID NO: 619512
cauguuacugguuaaacau

SEQ ID NO: 619514 - RNA, 19 nt, Artificial Sequence
  Description of Artificial Sequence: Synthetic oligonucleotide
  Sense strand starting at position 839 of SEQ ID NO: 585181
ugugccucgucgauagaug

SEQ ID NO: 619515 - RNA, 19 nt, Artificial Sequence
  Description of Artificial Sequence: Synthetic oligonucleotide
  Antisense strand to SEQ ID NO: 619514
caucuaucgacgaggcaca

SEQ ID NO: 619516 - RNA, 19 nt, Artificial Sequence
  Description of Artificial Sequence: Synthetic oligonucleotide
  Sense strand starting at position 1035 of SEQ ID NO: 585181
ccugcaugaucaccaaagu

SEQ ID NO: 619517 - RNA, 19 nt, Artificial Sequence
  Description of Artificial Sequence: Synthetic oligonucleotide
  Antisense strand to SEQ ID NO: 619516
acuuuggugaucaugcagg

SEQ ID NO: 619518 - RNA, 19 nt, Artificial Sequence
  Description of Artificial Sequence: Synthetic oligonucleotide
  Sense strand starting at position 1329 of SEQ ID NO: 585181
aucuaauuugugcgggcau

SEQ ID NO: 619519 - RNA, 19 nt, Artificial Sequence
  Description of Artificial Sequence: Synthetic oligonucleotide
  Antisense strand to SEQ ID NO: 619518
augcccgcacaaauuagau

SEQ ID NO: 619520 - RNA, 19 nt, Artificial Sequence
  Description of Artificial Sequence: Synthetic oligonucleotide
  Sense strand starting at position 1450 of SEQ ID NO: 585181
cucgaaauuagugagucau

SEQ ID NO: 619521 - RNA, 19 nt, Artificial Sequence
  Description of Artificial Sequence: Synthetic oligonucleotide
  Antisense strand to SEQ ID NO: 619520
augacucacuaauuucgag

SEQ ID NO: 619522 - RNA, 19 nt, Artificial Sequence
  Description of Artificial Sequence: Synthetic oligonucleotide
  Sense strand starting at position 1452 of SEQ ID NO: 585181
cgaaauuagugagucauga

SEQ ID NO: 619523 - RNA, 19 nt, Artificial Sequence
  Description of Artificial Sequence: Synthetic oligonucleotide
  Antisense strand to SEQ ID NO: 619522
ucaugacucacuaauuucg

SEQ ID NO: 619524 - RNA, 19 nt, Artificial Sequence
  Description of Artificial Sequence: Synthetic oligonucleotide
  Sense strand starting at position 1460 of SEQ ID NO: 585181
gugagucaugagcaacacu

SEQ ID NO: 619525 - RNA, 19 nt, Artificial Sequence
  Description of Artificial Sequence: Synthetic oligonucleotide
  Antisense strand to SEQ ID NO: 619524
aguguugcucaugacucac

SEQ ID NO: 619526 - RNA, 19 nt, Artificial Sequence
  Description of Artificial Sequence: Synthetic oligonucleotide
  Sense strand starting at position 1539 of SEQ ID NO: 585181
acgucucauuugguuagau

SEQ ID NO: 619527 - RNA, 19 nt, Artificial Sequence
  Description of Artificial Sequence: Synthetic oligonucleotide
  Antisense strand to SEQ ID NO: 619526
aucuaaccaaaugagacgu

SEQ ID NO: 619528 - RNA, 19 nt, Artificial Sequence
  Description of Artificial Sequence: Synthetic oligonucleotide
  Sense strand starting at position 1540 of SEQ ID NO: 585181
cgucucauuugguuagaua

SEQ ID NO: 619529 - RNA, 19 nt, Artificial Sequence
  Description of Artificial Sequence: Synthetic oligonucleotide
  Antisense strand to SEQ ID NO: 619528
uaucuaaccaaaugagacg

SEQ ID NO: 619530 - RNA, 19 nt, Artificial Sequence
  Description of Artificial Sequence: Synthetic oligonucleotide
  Sense strand starting at position 2705 of SEQ ID NO: 585181
agucguuagcaccagaaga

SEQ ID NO: 619531 - RNA, 19 nt, Artificial Sequence
  Description of Artificial Sequence: Synthetic oligonucleotide
  Antisense strand to SEQ ID NO: 619530
ucuucuggugcuaacgacu

SEQ ID NO: 619532 - RNA, 19 nt, Artificial Sequence
  Description of Artificial Sequence: Synthetic oligonucleotide
  Sense strand starting at position 2753 of SEQ ID NO: 585181
uauguaguacacgacauau

SEQ ID NO: 619533 - RNA, 19 nt, Artificial Sequence
  Description of Artificial Sequence: Synthetic oligonucleotide
  Antisense strand to SEQ ID NO: 619532
auaugucguguacuacaua

SEQ ID NO: 619534 - RNA, 19 nt, Artificial Sequence
  Description of Artificial Sequence: Synthetic oligonucleotide
  Sense strand starting at position 2755 of SEQ ID NO: 585181
uguaguacacgacauauau

SEQ ID NO: 619535 - RNA, 19 nt, Artificial Sequence
  Description of Artificial Sequence: Synthetic oligonucleotide
  Antisense strand to SEQ ID NO: 619534
auauaugucguguacuaca

SEQ ID NO: 619536 - RNA, 19 nt, Artificial Sequence
  Description of Artificial Sequence: Synthetic oligonucleotide
  Sense strand starting at position 2873 of SEQ ID NO: 585181
ucaggagacaaccgauuau

SEQ ID NO: 619537 - RNA, 19 nt, Artificial Sequence
  Description of Artificial Sequence: Synthetic oligonucleotide
  Antisense strand to SEQ ID NO: 619536
auaaucgguugucuccuga

SEQ ID NO: 619538 - RNA, 19 nt, Artificial Sequence
  Description of Artificial Sequence: Synthetic oligonucleotide
  Sense strand starting at position 2879 of SEQ ID NO: 585181
gacaaccgauuaucaguua

SEQ ID NO: 619539 - RNA, 19 nt, Artificial Sequence
  Description of Artificial Sequence: Synthetic oligonucleotide
  Antisense strand to SEQ ID NO: 619538
uaacugauaaucgguuguc

SEQ ID NO: 619540 - RNA, 19 nt, Artificial Sequence
  Description of Artificial Sequence: Synthetic oligonucleotide
  Sense strand starting at position 2919 of SEQ ID NO: 585181
cgccuuauacgugccaauu

SEQ ID NO: 619541 - RNA, 19 nt, Artificial Sequence
  Description of Artificial Sequence: Synthetic oligonucleotide
  Antisense strand to SEQ ID NO: 619540
aauuggcacguauaaggcg

SEQ ID NO: 619542 - RNA, 19 nt, Artificial Sequence
  Description of Artificial Sequence: Synthetic oligonucleotide
  Sense strand starting at position 2987 of SEQ ID NO: 585181
gcagaaacaccuugguaau

SEQ ID NO: 619543 - RNA, 19 nt, Artificial Sequence
  Description of Artificial Sequence: Synthetic oligonucleotide
  Antisense strand to SEQ ID NO: 619542
auuaccaagguguuucugc

SEQ ID NO: 619544 - RNA, 19 nt, Artificial Sequence
  Description of Artificial Sequence: Synthetic oligonucleotide
  Sense strand starting at position 3233 of SEQ ID NO: 585181
gaaggaaggcguuaucgag

SEQ ID NO: 619545 - RNA, 19 nt, Artificial Sequence
  Description of Artificial Sequence: Synthetic oligonucleotide
  Antisense strand to SEQ ID NO: 619544
cucgauaacgccuuccuuc

SEQ ID NO: 619546 - RNA, 19 nt, Artificial Sequence
  Description of Artificial Sequence: Synthetic oligonucleotide
  Sense strand starting at position 3242 of SEQ ID NO: 585181
cguuaucgaguacaaauaa

SEQ ID NO: 619547 - RNA, 19 nt, Artificial Sequence
  Description of Artificial Sequence: Synthetic oligonucleotide
  Antisense strand to SEQ ID NO: 619546
uuauuuguacucgauaacg

SEQ ID NO: 619548 - RNA, 19 nt, Artificial Sequence
  Description of Artificial Sequence: Synthetic oligonucleotide
  Sense strand starting at position 3285 of SEQ ID NO: 585181
auggaucucgucugaacua

SEQ ID NO: 619549 - RNA, 19 nt, Artificial Sequence
  Description of Artificial Sequence: Synthetic oligonucleotide
  Antisense strand to SEQ ID NO: 619548
uaguucagacgagauccau

SEQ ID NO: 619550 - RNA, 19 nt, Artificial Sequence
  Description of Artificial Sequence: Synthetic oligonucleotide
  Sense strand starting at position 3361 of SEQ ID NO: 585181
gaugguaagauaugaguug

SEQ ID NO: 619551 - RNA, 19 nt, Artificial Sequence
  Description of Artificial Sequence: Synthetic oligonucleotide
  Antisense strand to SEQ ID NO: 619550
caacucauaucuuaccauc

SEQ ID NO: 619552 - RNA, 19 nt, Artificial Sequence
  Description of Artificial Sequence: Synthetic oligonucleotide
  Sense strand starting at position 3368 of SEQ ID NO: 585181
agauaugaguuguuuaagg

SEQ ID NO: 619553 - RNA, 19 nt, Artificial Sequence
  Description of Artificial Sequence: Synthetic oligonucleotide
  Antisense strand to SEQ ID NO: 619552
ccuuaaacaacucauaucu

SEQ ID NO: 619554 - RNA, 19 nt, Artificial Sequence
  Description of Artificial Sequence: Synthetic oligonucleotide
  Sense strand starting at position 3370 of SEQ ID NO: 585181
auaugaguuguuuaagguu

SEQ ID NO: 619555 - RNA, 19 nt, Artificial Sequence
  Description of Artificial Sequence: Synthetic oligonucleotide
  Antisense strand to SEQ ID NO: 619554
aaccuuaaacaacucauau

SEQ ID NO: 619556 - RNA, 19 nt, Artificial Sequence
  Description of Artificial Sequence: Synthetic oligonucleotide
  Sense strand starting at position 3376 of SEQ ID NO: 585181
guuguuuaagguuaccuga

SEQ ID NO: 619557 - RNA, 19 nt, Artificial Sequence
  Description of Artificial Sequence: Synthetic oligonucleotide
  Antisense strand to SEQ ID NO: 619556
ucagguaaccuuaaacaac

SEQ ID NO: 619558 - RNA, 19 nt, Artificial Sequence
  Description of Artificial Sequence: Synthetic oligonucleotide
  Sense strand starting at position 3379 of SEQ ID NO: 585181
guuuaagguuaccugauga

SEQ ID NO: 619559 - RNA, 19 nt, Artificial Sequence
  Description of Artificial Sequence: Synthetic oligonucleotide
  Antisense strand to SEQ ID NO: 619558
ucaucagguaaccuuaaac

SEQ ID NO: 619560 - RNA, 19 nt, Artificial Sequence
  Description of Artificial Sequence: Synthetic oligonucleotide
  Sense strand starting at position 3384 of SEQ ID NO: 585181
agguuaccugaugagcaau

SEQ ID NO: 619561 - RNA, 19 nt, Artificial Sequence
  Description of Artificial Sequence: Synthetic oligonucleotide
  Antisense strand to SEQ ID NO: 619560
auugcucaucagguaaccu

SEQ ID NO: 619562 - RNA, 19 nt, Artificial Sequence
  Description of Artificial Sequence: Synthetic oligonucleotide
  Sense strand starting at position 3390 of SEQ ID NO: 585181
ccugaugagcaauggguua

SEQ ID NO: 619563 - RNA, 19 nt, Artificial Sequence
  Description of Artificial Sequence: Synthetic oligonucleotide
  Antisense strand to SEQ ID NO: 619562
uaacccauugcucaucagg

SEQ ID NO: 619564 - RNA, 19 nt, Artificial Sequence
  Description of Artificial Sequence: Synthetic oligonucleotide
  Sense strand starting at position 3392 of SEQ ID NO: 585181
ugaugagcaauggguuaaa

SEQ ID NO: 619565 - RNA, 19 nt, Artificial Sequence
  Description of Artificial Sequence: Synthetic oligonucleotide
  Antisense strand to SEQ ID NO: 619564
uuuaacccauugcucauca

SEQ ID NO: 619566 - RNA, 19 nt, Artificial Sequence
  Description of Artificial Sequence: Synthetic oligonucleotide
  Sense strand starting at position 3756 of SEQ ID NO: 585181
gaaccacuggugcgaauaa

SEQ ID NO: 619567 - RNA, 19 nt, Artificial Sequence
  Description of Artificial Sequence: Synthetic oligonucleotide
  Antisense strand to SEQ ID NO: 619566
uuauucgcaccagugguuc

SEQ ID NO: 619568 - RNA, 19 nt, Artificial Sequence
  Description of Artificial Sequence: Synthetic oligonucleotide
  Sense strand starting at position 3793 of SEQ ID NO: 585181
uugauaacugcugaggcua

SEQ ID NO: 619569 - RNA, 19 nt, Artificial Sequence
  Description of Artificial Sequence: Synthetic oligonucleotide
  Antisense strand to SEQ ID NO: 619568
uagccucagcaguuaucaa

SEQ ID NO: 619570 - RNA, 19 nt, Artificial Sequence
  Description of Artificial Sequence: Synthetic oligonucleotide
  Sense strand starting at position 3805 of SEQ ID NO: 585181
gaggcuaguauggaugagu

SEQ ID NO: 619571 - RNA, 19 nt, Artificial Sequence
  Description of Artificial Sequence: Synthetic oligonucleotide
  Antisense strand to SEQ ID NO: 619570
acucauccauacuagccuc

SEQ ID NO: 619572 - RNA, 19 nt, Artificial Sequence
  Description of Artificial Sequence: Synthetic oligonucleotide
  Sense strand starting at position 3808 of SEQ ID NO: 585181
gcuaguauggaugaguaca

SEQ ID NO: 619573 - RNA, 19 nt, Artificial Sequence
  Description of Artificial Sequence: Synthetic oligonucleotide
  Antisense strand to SEQ ID NO: 619572
uguacucauccauacuagc

SEQ ID NO: 619574 - RNA, 19 nt, Artificial Sequence
  Description of Artificial Sequence: Synthetic oligonucleotide
  Sense strand starting at position 3855 of SEQ ID NO: 585181
uuuauaucuguuugggauu

SEQ ID NO: 619575 - RNA, 19 nt, Artificial Sequence
  Description of Artificial Sequence: Synthetic oligonucleotide
  Antisense strand to SEQ ID NO: 619574
aaucccaaacagauauaaa

SEQ ID NO: 619576 - RNA, 19 nt, Artificial Sequence
  Description of Artificial Sequence: Synthetic oligonucleotide
  Sense strand starting at position 515 of SEQ ID NO: 585182
uuggucuugccuuaggaau

SEQ ID NO: 619577 - RNA, 19 nt, Artificial Sequence
  Description of Artificial Sequence: Synthetic oligonucleotide
  Antisense strand to SEQ ID NO: 619576
auuccuaaggcaagaccaa

SEQ ID NO: 619578 - RNA, 19 nt, Artificial Sequence
  Description of Artificial Sequence: Synthetic oligonucleotide
  Sense strand starting at position 604 of SEQ ID NO: 585182
ucuuuagcaccugaaaggu

SEQ ID NO: 619579 - RNA, 19 nt, Artificial Sequence
  Description of Artificial Sequence: Synthetic oligonucleotide
  Antisense strand to SEQ ID NO: 619578
accuuucaggugcuaaaga

SEQ ID NO: 619580 - RNA, 19 nt, Artificial Sequence
  Description of Artificial Sequence: Synthetic oligonucleotide
  Sense strand starting at position 737 of SEQ ID NO: 585182
ggccacuugguuuagucau

SEQ ID NO: 619581 - RNA, 19 nt, Artificial Sequence
  Description of Artificial Sequence: Synthetic oligonucleotide
  Antisense strand to SEQ ID NO: 619580
augacuaaaccaaguggcc

SEQ ID NO: 619582 - RNA, 19 nt, Artificial Sequence
  Description of Artificial Sequence: Synthetic oligonucleotide
  Sense strand starting at position 744 of SEQ ID NO: 585182
ugguuuagucauuggcuaa

SEQ ID NO: 619583 - RNA, 19 nt, Artificial Sequence
  Description of Artificial Sequence: Synthetic oligonucleotide
  Antisense strand to SEQ ID NO: 619582
uuagccaaugacuaaacca

SEQ ID NO: 619584 - RNA, 19 nt, Artificial Sequence
  Description of Artificial Sequence: Synthetic oligonucleotide
  Sense strand starting at position 745 of SEQ ID NO: 585182
gguuuagucauuggcuaac

SEQ ID NO: 619585 - RNA, 19 nt, Artificial Sequence
  Description of Artificial Sequence: Synthetic oligonucleotide
  Antisense strand to SEQ ID NO: 619584
guuagccaaugacuaaacc

SEQ ID NO: 619586 - RNA, 19 nt, Artificial Sequence
  Description of Artificial Sequence: Synthetic oligonucleotide
  Sense strand starting at position 861 of SEQ ID NO: 585182
gggauuuauuuauggucuu

SEQ ID NO: 619587 - RNA, 19 nt, Artificial Sequence
  Description of Artificial Sequence: Synthetic oligonucleotide
  Antisense strand to SEQ ID NO: 619586
aagaccauaaauaaauccc

SEQ ID NO: 619588 - RNA, 19 nt, Artificial Sequence
  Description of Artificial Sequence: Synthetic oligonucleotide
  Sense strand starting at position 1110 of SEQ ID NO: 585182
uccaccuguuccuuaggau

SEQ ID NO: 619589 - RNA, 19 nt, Artificial Sequence
  Description of Artificial Sequence: Synthetic oligonucleotide
  Antisense strand to SEQ ID NO: 619588
auccuaaggaacaggugga

SEQ ID NO: 619590 - RNA, 19 nt, Artificial Sequence
  Description of Artificial Sequence: Synthetic oligonucleotide
  Sense strand starting at position 1111 of SEQ ID NO: 585182
ccaccuguuccuuaggauu

SEQ ID NO: 619591 - RNA, 19 nt, Artificial Sequence
  Description of Artificial Sequence: Synthetic oligonucleotide
  Antisense strand to SEQ ID NO: 619590
aauccuaaggaacaggugg

SEQ ID NO: 619592 - RNA, 19 nt, Artificial Sequence
  Description of Artificial Sequence: Synthetic oligonucleotide
  Sense strand starting at position 1114 of SEQ ID NO: 585182
ccuguuccuuaggauuuga

SEQ ID NO: 619593 - RNA, 19 nt, Artificial Sequence
  Description of Artificial Sequence: Synthetic oligonucleotide
  Antisense strand to SEQ ID NO: 619592
ucaaauccuaaggaacagg

SEQ ID NO: 619594 - RNA, 19 nt, Artificial Sequence
  Description of Artificial Sequence: Synthetic oligonucleotide
  Sense strand starting at position 1151 of SEQ ID NO: 585182
agggaaaugcccgaggcuu

SEQ ID NO: 619595 - RNA, 19 nt, Artificial Sequence
  Description of Artificial Sequence: Synthetic oligonucleotide
  Antisense strand to SEQ ID NO: 619594
aagccucgggcauuucccu

SEQ ID NO: 619596 - RNA, 19 nt, Artificial Sequence
  Description of Artificial Sequence: Synthetic oligonucleotide
  Sense strand starting at position 1532 of SEQ ID NO: 585182
cgcucaucuguggucgagu

SEQ ID NO: 619597 - RNA, 19 nt, Artificial Sequence
  Description of Artificial Sequence: Synthetic oligonucleotide
  Antisense strand to SEQ ID NO: 619596
acucgaccacagaugagcg

SEQ ID NO: 619598 - RNA, 19 nt, Artificial Sequence
  Description of Artificial Sequence: Synthetic oligonucleotide
  Sense strand starting at position 1543 of SEQ ID NO: 585182
ggucgaguuucacugugaa

SEQ ID NO: 619599 - RNA, 19 nt, Artificial Sequence
  Description of Artificial Sequence: Synthetic oligonucleotide
  Antisense strand to SEQ ID NO: 619598
uucacagugaaacucgacc

SEQ ID NO: 619600 - RNA, 19 nt, Artificial Sequence
  Description of Artificial Sequence: Synthetic oligonucleotide
  Sense strand starting at position 1584 of SEQ ID NO: 585182
gaccgacguguagagaauu

SEQ ID NO: 619601 - RNA, 19 nt, Artificial Sequence
  Description of Artificial Sequence: Synthetic oligonucleotide
  Antisense strand to SEQ ID NO: 619600
aauucucuacacgucgguc

SEQ ID NO: 619602 - RNA, 19 nt, Artificial Sequence
  Description of Artificial Sequence: Synthetic oligonucleotide
  Sense strand starting at position 2656 of SEQ ID NO: 585182
gucucucacuugccaaaga

SEQ ID NO: 619603 - RNA, 19 nt, Artificial Sequence
  Description of Artificial Sequence: Synthetic oligonucleotide
  Antisense strand to SEQ ID NO: 619602
ucuuuggcaagugagagac

SEQ ID NO: 619604 - RNA, 19 nt, Artificial Sequence
  Description of Artificial Sequence: Synthetic oligonucleotide
  Sense strand starting at position 2747 of SEQ ID NO: 585182
gauuguggaggccaugauu

SEQ ID NO: 619605 - RNA, 19 nt, Artificial Sequence
  Description of Artificial Sequence: Synthetic oligonucleotide
  Antisense strand to SEQ ID NO: 619604
aaucauggccuccacaauc

SEQ ID NO: 619606 - RNA, 19 nt, Artificial Sequence
  Description of Artificial Sequence: Synthetic oligonucleotide
  Sense strand starting at position 2756 of SEQ ID NO: 585182
ggccaugauucccuuugga

SEQ ID NO: 619607 - RNA, 19 nt, Artificial Sequence
  Description of Artificial Sequence: Synthetic oligonucleotide
  Antisense strand to SEQ ID NO: 619606
uccaaagggaaucauggcc

SEQ ID NO: 619608 - RNA, 19 nt, Artificial Sequence
  Description of Artificial Sequence: Synthetic oligonucleotide
  Sense strand starting at position 2929 of SEQ ID NO: 585182
cagugaggucuguagucga

SEQ ID NO: 619609 - RNA, 19 nt, Artificial Sequence
  Description of Artificial Sequence: Synthetic oligonucleotide
  Antisense strand to SEQ ID NO: 619608
ucgacuacagaccucacug

SEQ ID NO: 619610 - RNA, 19 nt, Artificial Sequence
  Description of Artificial Sequence: Synthetic oligonucleotide
  Sense strand starting at position 2948 of SEQ ID NO: 585182
cgcagauccugagauuuga

SEQ ID NO: 619611 - RNA, 19 nt, Artificial Sequence
  Description of Artificial Sequence: Synthetic oligonucleotide
  Antisense strand to SEQ ID NO: 619610
ucaaaucucaggaucugcg

SEQ ID NO: 619612 - RNA, 19 nt, Artificial Sequence
  Description of Artificial Sequence: Synthetic oligonucleotide
  Sense strand starting at position 2985 of SEQ ID NO: 585182
gaggguuaccagugaugug

SEQ ID NO: 619613 - RNA, 19 nt, Artificial Sequence
  Description of Artificial Sequence: Synthetic oligonucleotide
  Antisense strand to SEQ ID NO: 619612
cacaucacugguaacccuc

SEQ ID NO: 619614 - RNA, 19 nt, Artificial Sequence
  Description of Artificial Sequence: Synthetic oligonucleotide
  Sense strand starting at position 2986 of SEQ ID NO: 585182
aggguuaccagugauguga

SEQ ID NO: 619615 - RNA, 19 nt, Artificial Sequence
  Description of Artificial Sequence: Synthetic oligonucleotide
  Antisense strand to SEQ ID NO: 619614
ucacaucacugguaacccu

SEQ ID NO: 619616 - RNA, 19 nt, Artificial Sequence
  Description of Artificial Sequence: Synthetic oligonucleotide
  Sense strand starting at position 2990 of SEQ ID NO: 585182
uuaccagugaugugaguuc

SEQ ID NO: 619617 - RNA, 19 nt, Artificial Sequence
  Description of Artificial Sequence: Synthetic oligonucleotide
  Antisense strand to SEQ ID NO: 619616
gaacucacaucacugguaa

SEQ ID NO: 619618 - RNA, 19 nt, Artificial Sequence
  Description of Artificial Sequence: Synthetic oligonucleotide
  Sense strand starting at position 3274 of SEQ ID NO: 585182
gaacaucucugccugaguu

SEQ ID NO: 619619 - RNA, 19 nt, Artificial Sequence
  Description of Artificial Sequence: Synthetic oligonucleotide
  Antisense strand to SEQ ID NO: 619618
aacucaggcagagauguuc

SEQ ID NO: 619620 - RNA, 19 nt, Artificial Sequence
  Description of Artificial Sequence: Synthetic oligonucleotide
  Sense strand starting at position 3448 of SEQ ID NO: 585182
agcacaaugucugucccau

SEQ ID NO: 619621 - RNA, 19 nt, Artificial Sequence
  Description of Artificial Sequence: Synthetic oligonucleotide
  Antisense strand to SEQ ID NO: 619620
augggacagacauugugcu

SEQ ID NO: 619622 - RNA, 19 nt, Artificial Sequence
  Description of Artificial Sequence: Synthetic oligonucleotide
  Sense strand starting at position 3454 of SEQ ID NO: 585182
augucugucccauaguagu

SEQ ID NO: 619623 - RNA, 19 nt, Artificial Sequence
  Description of Artificial Sequence: Synthetic oligonucleotide
  Antisense strand to SEQ ID NO: 619622
acuacuaugggacagacau

SEQ ID NO: 619624 - RNA, 19 nt, Artificial Sequence
  Description of Artificial Sequence: Synthetic oligonucleotide
  Sense strand starting at position 3465 of SEQ ID NO: 585182
auaguaguugcucaaugca

SEQ ID NO: 619625 - RNA, 19 nt, Artificial Sequence
  Description of Artificial Sequence: Synthetic oligonucleotide
  Antisense strand to SEQ ID NO: 619624
ugcauugagcaacuacuau

SEQ ID NO: 619626 - RNA, 19 nt, Artificial Sequence
  Description of Artificial Sequence: Synthetic oligonucleotide
  Sense strand starting at position 3478 of SEQ ID NO: 585182
aaugcaugguaguuacaga

SEQ ID NO: 619627 - RNA, 19 nt, Artificial Sequence
  Description of Artificial Sequence: Synthetic oligonucleotide
  Antisense strand to SEQ ID NO: 619626
ucuguaacuaccaugcauu

SEQ ID NO: 619628 - RNA, 19 nt, Artificial Sequence
  Description of Artificial Sequence: Synthetic oligonucleotide
  Sense strand starting at position 3518 of SEQ ID NO: 585182
augugcauuguguuuguau

SEQ ID NO: 619629 - RNA, 19 nt, Artificial Sequence
  Description of Artificial Sequence: Synthetic oligonucleotide
  Antisense strand to SEQ ID NO: 619628
auacaaacacaaugcacau

SEQ ID NO: 619630 - RNA, 19 nt, Artificial Sequence
  Description of Artificial Sequence: Synthetic oligonucleotide
  Sense strand starting at position 3520 of SEQ ID NO: 585182
gugcauuguguuuguauuu

SEQ ID NO: 619631 - RNA, 19 nt, Artificial Sequence
  Description of Artificial Sequence: Synthetic oligonucleotide
  Antisense strand to SEQ ID NO: 619630
aaauacaaacacaaugcac

SEQ ID NO: 619632 - RNA, 19 nt, Artificial Sequence
  Description of Artificial Sequence: Synthetic oligonucleotide
  Sense strand starting at position 3544 of SEQ ID NO: 585182
cuagaaugcuaacugcaca

SEQ ID NO: 619633 - RNA, 19 nt, Artificial Sequence
  Description of Artificial Sequence: Synthetic oligonucleotide
  Antisense strand to SEQ ID NO: 619632
ugugcaguuagcauucuag

SEQ ID NO: 619634 - RNA, 19 nt, Artificial Sequence
  Description of Artificial Sequence: Synthetic oligonucleotide
  Sense strand starting at position 3633 of SEQ ID NO: 585182
ugagcuagcaugugauaag

SEQ ID NO: 619635 - RNA, 19 nt, Artificial Sequence
  Description of Artificial Sequence: Synthetic oligonucleotide
  Antisense strand to SEQ ID NO: 619634
cuuaucacaugcuagcuca

SEQ ID NO: 619636 - RNA, 19 nt, Artificial Sequence
  Description of Artificial Sequence: Synthetic oligonucleotide
  Sense strand starting at position 3642 of SEQ ID NO: 585182
augugauaaggcugaccau

SEQ ID NO: 619637 - RNA, 19 nt, Artificial Sequence
  Description of Artificial Sequence: Synthetic oligonucleotide
  Antisense strand to SEQ ID NO: 619636
auggucagccuuaucacau

SEQ ID NO: 619638 - RNA, 19 nt, Artificial Sequence
  Description of Artificial Sequence: Synthetic oligonucleotide
  Sense strand starting at position 3643 of SEQ ID NO: 585182
ugugauaaggcugaccaua

SEQ ID NO: 619639 - RNA, 19 nt, Artificial Sequence
  Description of Artificial Sequence: Synthetic oligonucleotide
  Antisense strand to SEQ ID NO: 619638
uauggucagccuuaucaca

SEQ ID NO: 619640 - RNA, 19 nt, Artificial Sequence
  Description of Artificial Sequence: Synthetic oligonucleotide
  Sense strand starting at position 3784 of SEQ ID NO: 585182
ugaaacuuaucagagagaa

SEQ ID NO: 619641 - RNA, 19 nt, Artificial Sequence
  Description of Artificial Sequence: Synthetic oligonucleotide
  Antisense strand to SEQ ID NO: 619640
uucucucugauaaguuuca

SEQ ID NO: 619642 - RNA, 19 nt, Artificial Sequence
  Description of Artificial Sequence: Synthetic oligonucleotide
  Sense strand starting at position 3837 of SEQ ID NO: 585182
guuuauaacccuugacgaa

SEQ ID NO: 619643 - RNA, 19 nt, Artificial Sequence
  Description of Artificial Sequence: Synthetic oligonucleotide
  Antisense strand to SEQ ID NO: 619642
uucgucaaggguuauaaac

SEQ ID NO: 619644 - RNA, 19 nt, Artificial Sequence
  Description of Artificial Sequence: Synthetic oligonucleotide
  Sense strand starting at position 3849 of SEQ ID NO: 585182
ugacgaauucuugggagcu

SEQ ID NO: 619645 - RNA, 19 nt, Artificial Sequence
  Description of Artificial Sequence: Synthetic oligonucleotide
  Antisense strand to SEQ ID NO: 619644
agcucccaagaauucguca

SEQ ID NO: 619646 - RNA, 19 nt, Artificial Sequence
  Description of Artificial Sequence: Synthetic oligonucleotide
  Sense strand starting at position 3869 of SEQ ID NO: 585182
gccagaugugcugcuuauu

SEQ ID NO: 619647 - RNA, 19 nt, Artificial Sequence
  Description of Artificial Sequence: Synthetic oligonucleotide
  Antisense strand to SEQ ID NO: 619646
aauaagcagcacaucuggc

SEQ ID NO: 619648 - RNA, 19 nt, Artificial Sequence
  Description of Artificial Sequence: Synthetic oligonucleotide
  Sense strand starting at position 3874 of SEQ ID NO: 585182
augugcugcuuauuuguga

SEQ ID NO: 619649 - RNA, 19 nt, Artificial Sequence
  Description of Artificial Sequence: Synthetic oligonucleotide
  Antisense strand to SEQ ID NO: 619648
ucacaaauaagcagcacau

SEQ ID NO: 619650 - RNA, 19 nt, Artificial Sequence
  Description of Artificial Sequence: Synthetic oligonucleotide
  Sense strand starting at position 3875 of SEQ ID NO: 585182
ugugcugcuuauuugugaa

SEQ ID NO: 619651 - RNA, 19 nt, Artificial Sequence
  Description of Artificial Sequence: Synthetic oligonucleotide
  Antisense strand to SEQ ID NO: 619650
uucacaaauaagcagcaca

SEQ ID NO: 619652 - RNA, 19 nt, Artificial Sequence
  Description of Artificial Sequence: Synthetic oligonucleotide
  Sense strand starting at position 3877 of SEQ ID NO: 585182
ugcugcuuauuugugaagu

SEQ ID NO: 619653 - RNA, 19 nt, Artificial Sequence
  Description of Artificial Sequence: Synthetic oligonucleotide
  Antisense strand to SEQ ID NO: 619652
acuucacaaauaagcagca

SEQ ID NO: 619654 - RNA, 19 nt, Artificial Sequence
  Description of Artificial Sequence: Synthetic oligonucleotide
  Sense strand starting at position 3948 of SEQ ID NO: 585182
uaauuacuagaugguauga

SEQ ID NO: 619655 - RNA, 19 nt, Artificial Sequence
  Description of Artificial Sequence: Synthetic oligonucleotide
  Antisense strand to SEQ ID NO: 619654
ucauaccaucuaguaauua

SEQ ID NO: 619656 - RNA, 19 nt, Artificial Sequence
  Description of Artificial Sequence: Synthetic oligonucleotide
  Sense strand starting at position 4 of SEQ ID NO: 585183
gcugguuaagccugcggau

SEQ ID NO: 619657 - RNA, 19 nt, Artificial Sequence
  Description of Artificial Sequence: Synthetic oligonucleotide
  Antisense strand to SEQ ID NO: 619656
auccgcaggcuuaaccagc

SEQ ID NO: 619658 - RNA, 19 nt, Artificial Sequence
  Description of Artificial Sequence: Synthetic oligonucleotide
  Sense strand starting at position 6 of SEQ ID NO: 585183
ugguuaagccugcggauau

SEQ ID NO: 619659 - RNA, 19 nt, Artificial Sequence
  Description of Artificial Sequence: Synthetic oligonucleotide
  Antisense strand to SEQ ID NO: 619658
auauccgcaggcuuaacca

SEQ ID NO: 619660 - RNA, 19 nt, Artificial Sequence
  Description of Artificial Sequence: Synthetic oligonucleotide
  Sense strand starting at position 7 of SEQ ID NO: 585183
gguuaagccugcggauaug

SEQ ID NO: 619661 - RNA, 19 nt, Artificial Sequence
  Description of Artificial Sequence: Synthetic oligonucleotide
  Antisense strand to SEQ ID NO: 619660
cauauccgcaggcuuaacc

SEQ ID NO: 619662 - RNA, 19 nt, Artificial Sequence
  Description of Artificial Sequence: Synthetic oligonucleotide
  Sense strand starting at position 17 of SEQ ID NO: 585183
gcggauaugaugggucaca

SEQ ID NO: 619663 - RNA, 19 nt, Artificial Sequence
  Description of Artificial Sequence: Synthetic oligonucleotide
  Antisense strand to SEQ ID NO: 619662
ugugacccaucauauccgc

SEQ ID NO: 619664 - RNA, 19 nt, Artificial Sequence
  Description of Artificial Sequence: Synthetic oligonucleotide
  Sense strand starting at position 321 of SEQ ID NO: 585183
cgugcuagcuggagggauu

SEQ ID NO: 619665 - RNA, 19 nt, Artificial Sequence
  Description of Artificial Sequence: Synthetic oligonucleotide
  Antisense strand to SEQ ID NO: 619664
aaucccuccagcuagcacg

SEQ ID NO: 619666 - RNA, 19 nt, Artificial Sequence
  Description of Artificial Sequence: Synthetic oligonucleotide
  Sense strand starting at position 1100 of SEQ ID NO: 585183
gcuugaccuuaguggaaag

SEQ ID NO: 619667 - RNA, 19 nt, Artificial Sequence
  Description of Artificial Sequence: Synthetic oligonucleotide
  Antisense strand to SEQ ID NO: 619666
cuuuccacuaaggucaagc

SEQ ID NO: 619668 - RNA, 19 nt, Artificial Sequence
  Description of Artificial Sequence: Synthetic oligonucleotide
  Sense strand starting at position 2018 of SEQ ID NO: 585183
ggaguucucuuacuggaac

SEQ ID NO: 619669 - RNA, 19 nt, Artificial Sequence
  Description of Artificial Sequence: Synthetic oligonucleotide
  Antisense strand to SEQ ID NO: 619668
guuccaguaagagaacucc

SEQ ID NO: 619670 - RNA, 19 nt, Artificial Sequence
  Description of Artificial Sequence: Synthetic oligonucleotide
  Sense strand starting at position 2021 of SEQ ID NO: 585183
guucucuuacuggaaccau

SEQ ID NO: 619671 - RNA, 19 nt, Artificial Sequence
  Description of Artificial Sequence: Synthetic oligonucleotide
  Antisense strand to SEQ ID NO: 619670
augguuccaguaagagaac

SEQ ID NO: 619672 - RNA, 19 nt, Artificial Sequence
  Description of Artificial Sequence: Synthetic oligonucleotide
  Sense strand starting at position 2055 of SEQ ID NO: 585183
cccagaccuuucuggagaa

SEQ ID NO: 619673 - RNA, 19 nt, Artificial Sequence
  Description of Artificial Sequence: Synthetic oligonucleotide
  Antisense strand to SEQ ID NO: 619672
uucuccagaaaggucuggg

SEQ ID NO: 619674 - RNA, 19 nt, Artificial Sequence
  Description of Artificial Sequence: Synthetic oligonucleotide
  Sense strand starting at position 2145 of SEQ ID NO: 585183
guugcagauugcgaugacu

SEQ ID NO: 619675 - RNA, 19 nt, Artificial Sequence
  Description of Artificial Sequence: Synthetic oligonucleotide
  Antisense strand to SEQ ID NO: 619674
agucaucgcaaucugcaac

SEQ ID NO: 619676 - RNA, 19 nt, Artificial Sequence
  Description of Artificial Sequence: Synthetic oligonucleotide
  Sense strand starting at position 2154 of SEQ ID NO: 585183
ugcgaugacugggaugaca

SEQ ID NO: 619677 - RNA, 19 nt, Artificial Sequence
  Description of Artificial Sequence: Synthetic oligonucleotide
  Antisense strand to SEQ ID NO: 619676
ugucaucccagucaucgca

SEQ ID NO: 619678 - RNA, 19 nt, Artificial Sequence
  Description of Artificial Sequence: Synthetic oligonucleotide
  Sense strand starting at position 2156 of SEQ ID NO: 585183
cgaugacugggaugacagu

SEQ ID NO: 619679 - RNA, 19 nt, Artificial Sequence
  Description of Artificial Sequence: Synthetic oligonucleotide
  Antisense strand to SEQ ID NO: 619678
acugucaucccagucaucg

SEQ ID NO: 619680 - RNA, 19 nt, Artificial Sequence
  Description of Artificial Sequence: Synthetic oligonucleotide
  Sense strand starting at position 2165 of SEQ ID NO: 585183
ggaugacaguuuguaucca

SEQ ID NO: 619681 - RNA, 19 nt, Artificial Sequence
  Description of Artificial Sequence: Synthetic oligonucleotide
  Antisense strand to SEQ ID NO: 619680
uggauacaaacugucaucc

SEQ ID NO: 619682 - RNA, 19 nt, Artificial Sequence
  Description of Artificial Sequence: Synthetic oligonucleotide
  Sense strand starting at position 2169 of SEQ ID NO: 585183
gacaguuuguauccagacu

SEQ ID NO: 619683 - RNA, 19 nt, Artificial Sequence
  Description of Artificial Sequence: Synthetic oligonucleotide
  Antisense strand to SEQ ID NO: 619682
agucuggauacaaacuguc

SEQ ID NO: 619684 - RNA, 19 nt, Artificial Sequence
  Description of Artificial Sequence: Synthetic oligonucleotide
  Sense strand starting at position 2177 of SEQ ID NO: 585183
guauccagacuuugacuga

SEQ ID NO: 619685 - RNA, 19 nt, Artificial Sequence
  Description of Artificial Sequence: Synthetic oligonucleotide
  Antisense strand to SEQ ID NO: 619684
ucagucaaagucuggauac

SEQ ID NO: 619686 - RNA, 19 nt, Artificial Sequence
  Description of Artificial Sequence: Synthetic oligonucleotide
  Sense strand starting at position 2205 of SEQ ID NO: 585183
ggugcagcuuucucuaaac

SEQ ID NO: 619687 - RNA, 19 nt, Artificial Sequence
  Description of Artificial Sequence: Synthetic oligonucleotide
  Antisense strand to SEQ ID NO: 619686
guuuagagaaagcugcacc

SEQ ID NO: 619688 - RNA, 19 nt, Artificial Sequence
  Description of Artificial Sequence: Synthetic oligonucleotide
  Sense strand starting at position 2245 of SEQ ID NO: 585183
aggugagggauugguucau

SEQ ID NO: 619689 - RNA, 19 nt, Artificial Sequence
  Description of Artificial Sequence: Synthetic oligonucleotide
  Antisense strand to SEQ ID NO: 619688
augaaccaaucccucaccu

SEQ ID NO: 619690 - RNA, 19 nt, Artificial Sequence
  Description of Artificial Sequence: Synthetic oligonucleotide
  Sense strand starting at position 2254 of SEQ ID NO: 585183
auugguucaugucuggaga

SEQ ID NO: 619691 - RNA, 19 nt, Artificial Sequence
  Description of Artificial Sequence: Synthetic oligonucleotide
  Antisense strand to SEQ ID NO: 619690
ucuccagacaugaaccaau

SEQ ID NO: 619692 - RNA, 19 nt, Artificial Sequence
  Description of Artificial Sequence: Synthetic oligonucleotide
  Sense strand starting at position 2256 of SEQ ID NO: 585183
ugguucaugucuggagaca

SEQ ID NO: 619693 - RNA, 19 nt, Artificial Sequence
  Description of Artificial Sequence: Synthetic oligonucleotide
  Antisense strand to SEQ ID NO: 619692
ugucuccagacaugaacca

SEQ ID NO: 619694 - RNA, 19 nt, Artificial Sequence
  Description of Artificial Sequence: Synthetic oligonucleotide
  Sense strand starting at position 2257 of SEQ ID NO: 585183
gguucaugucuggagacac

SEQ ID NO: 619695 - RNA, 19 nt, Artificial Sequence
  Description of Artificial Sequence: Synthetic oligonucleotide
  Antisense strand to SEQ ID NO: 619694
gugucuccagacaugaacc

SEQ ID NO: 619696 - RNA, 19 nt, Artificial Sequence
  Description of Artificial Sequence: Synthetic oligonucleotide
  Sense strand starting at position 2376 of SEQ ID NO: 585183
cugaaacagcuuugcagaa

SEQ ID NO: 619697 - RNA, 19 nt, Artificial Sequence
  Description of Artificial Sequence: Synthetic oligonucleotide
  Antisense strand to SEQ ID NO: 619696
uucugcaaagcuguuucag

SEQ ID NO: 619698 - RNA, 19 nt, Artificial Sequence
  Description of Artificial Sequence: Synthetic oligonucleotide
  Sense strand starting at position 2377 of SEQ ID NO: 585183
ugaaacagcuuugcagaaa

SEQ ID NO: 619699 - RNA, 19 nt, Artificial Sequence
  Description of Artificial Sequence: Synthetic oligonucleotide
  Antisense strand to SEQ ID NO: 619698
uuucugcaaagcuguuuca

SEQ ID NO: 619700 - RNA, 19 nt, Artificial Sequence
  Description of Artificial Sequence: Synthetic oligonucleotide
  Sense strand starting at position 2443 of SEQ ID NO: 585183
accugacuuuacugguuga

SEQ ID NO: 619701 - RNA, 19 nt, Artificial Sequence
  Description of Artificial Sequence: Synthetic oligonucleotide
  Antisense strand to SEQ ID NO: 619700
ucaaccaguaaagucaggu

SEQ ID NO: 619702 - RNA, 19 nt, Artificial Sequence
  Description of Artificial Sequence: Synthetic oligonucleotide
  Sense strand starting at position 2447 of SEQ ID NO: 585183
gacuuuacugguugaauua

SEQ ID NO: 619703 - RNA, 19 nt, Artificial Sequence
  Description of Artificial Sequence: Synthetic oligonucleotide
  Antisense strand to SEQ ID NO: 619702
uaauucaaccaguaaaguc

SEQ ID NO: 619704 - RNA, 19 nt, Artificial Sequence
  Description of Artificial Sequence: Synthetic oligonucleotide
  Sense strand starting at position 2631 of SEQ ID NO: 585183
gggcccugauccuuguauu

SEQ ID NO: 619705 - RNA, 19 nt, Artificial Sequence
  Description of Artificial Sequence: Synthetic oligonucleotide
  Antisense strand to SEQ ID NO: 619704
aauacaaggaucagggccc

SEQ ID NO: 619706 - RNA, 19 nt, Artificial Sequence
  Description of Artificial Sequence: Synthetic oligonucleotide
  Sense strand starting at position 2632 of SEQ ID NO: 585183
ggcccugauccuuguauua

SEQ ID NO: 619707 - RNA, 19 nt, Artificial Sequence
  Description of Artificial Sequence: Synthetic oligonucleotide
  Antisense strand to SEQ ID NO: 619706
uaauacaaggaucagggcc

SEQ ID NO: 619708 - RNA, 19 nt, Artificial Sequence
  Description of Artificial Sequence: Synthetic oligonucleotide
  Sense strand starting at position 2642 of SEQ ID NO: 585183
cuuguauuaggucguagag

SEQ ID NO: 619709 - RNA, 19 nt, Artificial Sequence
  Description of Artificial Sequence: Synthetic oligonucleotide
  Antisense strand to SEQ ID NO: 619708
cucuacgaccuaauacaag

SEQ ID NO: 619710 - RNA, 19 nt, Artificial Sequence
  Description of Artificial Sequence: Synthetic oligonucleotide
  Sense strand starting at position 2644 of SEQ ID NO: 585183
uguauuaggucguagagaa

SEQ ID NO: 619711 - RNA, 19 nt, Artificial Sequence
  Description of Artificial Sequence: Synthetic oligonucleotide
  Antisense strand to SEQ ID NO: 619710
uucucuacgaccuaauaca

SEQ ID NO: 619712 - RNA, 19 nt, Artificial Sequence
  Description of Artificial Sequence: Synthetic oligonucleotide
  Sense strand starting at position 2714 of SEQ ID NO: 585183
gggauuccaucccuaaaug

SEQ ID NO: 619713 - RNA, 19 nt, Artificial Sequence
  Description of Artificial Sequence: Synthetic oligonucleotide
  Antisense strand to SEQ ID NO: 619712
cauuuagggauggaauccc

SEQ ID NO: 619714 - RNA, 19 nt, Artificial Sequence
  Description of Artificial Sequence: Synthetic oligonucleotide
  Sense strand starting at position 2861 of SEQ ID NO: 585183
acauuauuauagggaaaug

SEQ ID NO: 619715 - RNA, 19 nt, Artificial Sequence
  Description of Artificial Sequence: Synthetic oligonucleotide
  Antisense strand to SEQ ID NO: 619714
cauuucccuauaauaaugu

SEQ ID NO: 619716 - RNA, 19 nt, Artificial Sequence
  Description of Artificial Sequence: Synthetic oligonucleotide
  Sense strand starting at position 2899 of SEQ ID NO: 585183
ucaagacaaucuugaagug

SEQ ID NO: 619717 - RNA, 19 nt, Artificial Sequence
  Description of Artificial Sequence: Synthetic oligonucleotide
  Antisense strand to SEQ ID NO: 619716
cacuucaagauugucuuga

SEQ ID NO: 619718 - RNA, 19 nt, Artificial Sequence
  Description of Artificial Sequence: Synthetic oligonucleotide
  Sense strand starting at position 2919 of SEQ ID NO: 585183
gagggcuuacuaugaauau

SEQ ID NO: 619719 - RNA, 19 nt, Artificial Sequence
  Description of Artificial Sequence: Synthetic oligonucleotide
  Antisense strand to SEQ ID NO: 619718
auauucauaguaagcccuc

SEQ ID NO: 619720 - RNA, 19 nt, Artificial Sequence
  Description of Artificial Sequence: Synthetic oligonucleotide
  Sense strand starting at position 2920 of SEQ ID NO: 585183
agggcuuacuaugaauauc

SEQ ID NO: 619721 - RNA, 19 nt, Artificial Sequence
  Description of Artificial Sequence: Synthetic oligonucleotide
  Antisense strand to SEQ ID NO: 619720
gauauucauaguaagcccu

SEQ ID NO: 619722 - RNA, 19 nt, Artificial Sequence
  Description of Artificial Sequence: Synthetic oligonucleotide
  Sense strand starting at position 3101 of SEQ ID NO: 585183
cuacaauaguuacaacgau

SEQ ID NO: 619723 - RNA, 19 nt, Artificial Sequence
  Description of Artificial Sequence: Synthetic oligonucleotide
  Antisense strand to SEQ ID NO: 619722
aucguuguaacuauuguag

SEQ ID NO: 619724 - RNA, 19 nt, Artificial Sequence
  Description of Artificial Sequence: Synthetic oligonucleotide
  Sense strand starting at position 3116 of SEQ ID NO: 585183
cgaugcaguuuggaaacaa

SEQ ID NO: 619725 - RNA, 19 nt, Artificial Sequence
  Description of Artificial Sequence: Synthetic oligonucleotide
  Antisense strand to SEQ ID NO: 619724
uuguuuccaaacugcaucg

SEQ ID NO: 619726 - RNA, 19 nt, Artificial Sequence
  Description of Artificial Sequence: Synthetic oligonucleotide
  Sense strand starting at position 3154 of SEQ ID NO: 585183
ggacuuaugucccgaagag

SEQ ID NO: 619727 - RNA, 19 nt, Artificial Sequence
  Description of Artificial Sequence: Synthetic oligonucleotide
  Antisense strand to SEQ ID NO: 619726
cucuucgggacauaagucc

SEQ ID NO: 619728 - RNA, 19 nt, Artificial Sequence
  Description of Artificial Sequence: Synthetic oligonucleotide
  Sense strand starting at position 3155 of SEQ ID NO: 585183
gacuuaugucccgaagagu

SEQ ID NO: 619729 - RNA, 19 nt, Artificial Sequence
  Description of Artificial Sequence: Synthetic oligonucleotide
  Antisense strand to SEQ ID NO: 619728
acucuucgggacauaaguc

SEQ ID NO: 619730 - RNA, 19 nt, Artificial Sequence
  Description of Artificial Sequence: Synthetic oligonucleotide
  Sense strand starting at position 3405 of SEQ ID NO: 585183
agcuaagaguucuuaaaca

SEQ ID NO: 619731 - RNA, 19 nt, Artificial Sequence
  Description of Artificial Sequence: Synthetic oligonucleotide
  Antisense strand to SEQ ID NO: 619730
uguuuaagaacucuuagcu

SEQ ID NO: 619732 - RNA, 19 nt, Artificial Sequence
  Description of Artificial Sequence: Synthetic oligonucleotide
  Sense strand starting at position 3425 of SEQ ID NO: 585183
acaagaaaugcacguauac

SEQ ID NO: 619733 - RNA, 19 nt, Artificial Sequence
  Description of Artificial Sequence: Synthetic oligonucleotide
  Antisense strand to SEQ ID NO: 619732
guauacgugcauuucuugu

SEQ ID NO: 619734 - RNA, 19 nt, Artificial Sequence
  Description of Artificial Sequence: Synthetic oligonucleotide
  Sense strand starting at position 3469 of SEQ ID NO: 585183
uaaauugaacuccguuaga

SEQ ID NO: 619735 - RNA, 19 nt, Artificial Sequence
  Description of Artificial Sequence: Synthetic oligonucleotide
  Antisense strand to SEQ ID NO: 619734
ucuaacggaguucaauuua

SEQ ID NO: 619736 - RNA, 19 nt, Artificial Sequence
  Description of Artificial Sequence: Synthetic oligonucleotide
  Sense strand starting at position 82 of SEQ ID NO: 585184
cuggguuucuucuuaagac

SEQ ID NO: 619737 - RNA, 19 nt, Artificial Sequence
  Description of Artificial Sequence: Synthetic oligonucleotide
  Antisense strand to SEQ ID NO: 619736
gucuuaagaagaaacccag

SEQ ID NO: 619738 - RNA, 19 nt, Artificial Sequence
  Description of Artificial Sequence: Synthetic oligonucleotide
  Sense strand starting at position 83 of SEQ ID NO: 585184
uggguuucuucuuaagaca

SEQ ID NO: 619739 - RNA, 19 nt, Artificial Sequence
  Description of Artificial Sequence: Synthetic oligonucleotide
  Antisense strand to SEQ ID NO: 619738
ugucuuaagaagaaaccca

SEQ ID NO: 619740 - RNA, 19 nt, Artificial Sequence
  Description of Artificial Sequence: Synthetic oligonucleotide
  Sense strand starting at position 168 of SEQ ID NO: 585184
gaaggagggcucugugcuu

SEQ ID NO: 619741 - RNA, 19 nt, Artificial Sequence
  Description of Artificial Sequence: Synthetic oligonucleotide
  Antisense strand to SEQ ID NO: 619740
aagcacagagcccuccuuc

SEQ ID NO: 619742 - RNA, 19 nt, Artificial Sequence
  Description of Artificial Sequence: Synthetic oligonucleotide
  Sense strand starting at position 254 of SEQ ID NO: 585184
gugucucauucuggagcuu

SEQ ID NO: 619743 - RNA, 19 nt, Artificial Sequence
  Description of Artificial Sequence: Synthetic oligonucleotide
  Antisense strand to SEQ ID NO: 619742
aagcuccagaaugagacac

SEQ ID NO: 619744 - RNA, 19 nt, Artificial Sequence
  Description of Artificial Sequence: Synthetic oligonucleotide
  Sense strand starting at position 255 of SEQ ID NO: 585184
ugucucauucuggagcuua

SEQ ID NO: 619745 - RNA, 19 nt, Artificial Sequence
  Description of Artificial Sequence: Synthetic oligonucleotide
  Antisense strand to SEQ ID NO: 619744
uaagcuccagaaugagaca

SEQ ID NO: 619746 - RNA, 19 nt, Artificial Sequence
  Description of Artificial Sequence: Synthetic oligonucleotide
  Sense strand starting at position 372 of SEQ ID NO: 585184
ugaacaguguuccugguga

SEQ ID NO: 619747 - RNA, 19 nt, Artificial Sequence
  Description of Artificial Sequence: Synthetic oligonucleotide
  Antisense strand to SEQ ID NO: 619746
ucaccaggaacacuguuca

SEQ ID NO: 619748 - RNA, 19 nt, Artificial Sequence
  Description of Artificial Sequence: Synthetic oligonucleotide
  Sense strand starting at position 374 of SEQ ID NO: 585184
aacaguguuccuggugacu

SEQ ID NO: 619749 - RNA, 19 nt, Artificial Sequence
  Description of Artificial Sequence: Synthetic oligonucleotide
  Antisense strand to SEQ ID NO: 619748
agucaccaggaacacuguu

SEQ ID NO: 619750 - RNA, 19 nt, Artificial Sequence
  Description of Artificial Sequence: Synthetic oligonucleotide
  Sense strand starting at position 637 of SEQ ID NO: 585184
ugucucuacuucucagagu

SEQ ID NO: 619751 - RNA, 19 nt, Artificial Sequence
  Description of Artificial Sequence: Synthetic oligonucleotide
  Antisense strand to SEQ ID NO: 619750
acucugagaaguagagaca

SEQ ID NO: 619752 - RNA, 19 nt, Artificial Sequence
  Description of Artificial Sequence: Synthetic oligonucleotide
  Sense strand starting at position 774 of SEQ ID NO: 585184
ugcauuaauucucauggca

SEQ ID NO: 619753 - RNA, 19 nt, Artificial Sequence
  Description of Artificial Sequence: Synthetic oligonucleotide
  Antisense strand to SEQ ID NO: 619752
ugccaugagaauuaaugca

SEQ ID NO: 619754 - RNA, 19 nt, Artificial Sequence
  Description of Artificial Sequence: Synthetic oligonucleotide
  Sense strand starting at position 788 of SEQ ID NO: 585184
uggcaauccugagagguaa

SEQ ID NO: 619755 - RNA, 19 nt, Artificial Sequence
  Description of Artificial Sequence: Synthetic oligonucleotide
  Antisense strand to SEQ ID NO: 619754
uuaccucucaggauugcca

SEQ ID NO: 619756 - RNA, 19 nt, Artificial Sequence
  Description of Artificial Sequence: Synthetic oligonucleotide
  Sense strand starting at position 790 of SEQ ID NO: 585184
gcaauccugagagguaaau

SEQ ID NO: 619757 - RNA, 19 nt, Artificial Sequence
  Description of Artificial Sequence: Synthetic oligonucleotide
  Antisense strand to SEQ ID NO: 619756
auuuaccucucaggauugc

SEQ ID NO: 619758 - RNA, 19 nt, Artificial Sequence
  Description of Artificial Sequence: Synthetic oligonucleotide
  Sense strand starting at position 799 of SEQ ID NO: 585184
agagguaaauagugucauu

SEQ ID NO: 619759 - RNA, 19 nt, Artificial Sequence
  Description of Artificial Sequence: Synthetic oligonucleotide
  Antisense strand to SEQ ID NO: 619758
aaugacacuauuuaccucu

SEQ ID NO: 619760 - RNA, 19 nt, Artificial Sequence
  Description of Artificial Sequence: Synthetic oligonucleotide
  Sense strand starting at position 837 of SEQ ID NO: 585184
agcugaggcuccuugaagu

SEQ ID NO: 619761 - RNA, 19 nt, Artificial Sequence
  Description of Artificial Sequence: Synthetic oligonucleotide
  Antisense strand to SEQ ID NO: 619760
acuucaaggagccucagcu

SEQ ID NO: 619762 - RNA, 19 nt, Artificial Sequence
  Description of Artificial Sequence: Synthetic oligonucleotide
  Sense strand starting at position 879 of SEQ ID NO: 585184
aguagaacauggugguuua

SEQ ID NO: 619763 - RNA, 19 nt, Artificial Sequence
  Description of Artificial Sequence: Synthetic oligonucleotide
  Antisense strand to SEQ ID NO: 619762
uaaaccaccauguucuacu

SEQ ID NO: 619764 - RNA, 19 nt, Artificial Sequence
  Description of Artificial Sequence: Synthetic oligonucleotide
  Sense strand starting at position 1274 of SEQ ID NO: 585184
gaugauguaugagggaauu

SEQ ID NO: 619765 - RNA, 19 nt, Artificial Sequence
  Description of Artificial Sequence: Synthetic oligonucleotide
  Antisense strand to SEQ ID NO: 619764
aauucccucauacaucauc

SEQ ID NO: 619766 - RNA, 19 nt, Artificial Sequence
  Description of Artificial Sequence: Synthetic oligonucleotide
  Sense strand starting at position 1316 of SEQ ID NO: 585184
cccaguaguaaaugagaga

SEQ ID NO: 619767 - RNA, 19 nt, Artificial Sequence
  Description of Artificial Sequence: Synthetic oligonucleotide
  Antisense strand to SEQ ID NO: 619766
ucucucauuuacuacuggg

SEQ ID NO: 619768 - RNA, 19 nt, Artificial Sequence
  Description of Artificial Sequence: Synthetic oligonucleotide
  Sense strand starting at position 1319 of SEQ ID NO: 585184
aguaguaaaugagagaaua

SEQ ID NO: 619769 - RNA, 19 nt, Artificial Sequence
  Description of Artificial Sequence: Synthetic oligonucleotide
  Antisense strand to SEQ ID NO: 619768
uauucucucauuuacuacu

SEQ ID NO: 619770 - RNA, 19 nt, Artificial Sequence
  Description of Artificial Sequence: Synthetic oligonucleotide
  Sense strand starting at position 1330 of SEQ ID NO: 585184
agagaauaucacugcuuaa

SEQ ID NO: 619771 - RNA, 19 nt, Artificial Sequence
  Description of Artificial Sequence: Synthetic oligonucleotide
  Antisense strand to SEQ ID NO: 619770
uuaagcagugauauucucu

SEQ ID NO: 619772 - RNA, 19 nt, Artificial Sequence
  Description of Artificial Sequence: Synthetic oligonucleotide
  Sense strand starting at position 1405 of SEQ ID NO: 585184
gggcuuggcaggugcaaau

SEQ ID NO: 619773 - RNA, 19 nt, Artificial Sequence
  Description of Artificial Sequence: Synthetic oligonucleotide
  Antisense strand to SEQ ID NO: 619772
auuugcaccugccaagccc

SEQ ID NO: 619774 - RNA, 19 nt, Artificial Sequence
  Description of Artificial Sequence: Synthetic oligonucleotide
  Sense strand starting at position 1415 of SEQ ID NO: 585184
ggugcaaauguugagcaau

SEQ ID NO: 619775 - RNA, 19 nt, Artificial Sequence
  Description of Artificial Sequence: Synthetic oligonucleotide
  Antisense strand to SEQ ID NO: 619774
auugcucaacauuugcacc

SEQ ID NO: 619776 - RNA, 19 nt, Artificial Sequence
  Description of Artificial Sequence: Synthetic oligonucleotide
  Sense strand starting at position 1421 of SEQ ID NO: 585184
aauguugagcaauguuaac

SEQ ID NO: 619777 - RNA, 19 nt, Artificial Sequence
  Description of Artificial Sequence: Synthetic oligonucleotide
  Antisense strand to SEQ ID NO: 619776
guuaacauugcucaacauu

SEQ ID NO: 619778 - RNA, 19 nt, Artificial Sequence
  Description of Artificial Sequence: Synthetic oligonucleotide
  Sense strand starting at position 1427 of SEQ ID NO: 585184
gagcaauguuaacuguuaa

SEQ ID NO: 619779 - RNA, 19 nt, Artificial Sequence
  Description of Artificial Sequence: Synthetic oligonucleotide
  Antisense strand to SEQ ID NO: 619778
uuaacaguuaacauugcuc

SEQ ID NO: 619780 - RNA, 19 nt, Artificial Sequence
  Description of Artificial Sequence: Synthetic oligonucleotide
  Sense strand starting at position 1457 of SEQ ID NO: 585184
gccaucacaggaggaauau

SEQ ID NO: 619781 - RNA, 19 nt, Artificial Sequence
  Description of Artificial Sequence: Synthetic oligonucleotide
  Antisense strand to SEQ ID NO: 619780
auauuccuccugugauggc

SEQ ID NO: 619782 - RNA, 19 nt, Artificial Sequence
  Description of Artificial Sequence: Synthetic oligonucleotide
  Sense strand starting at position 1467 of SEQ ID NO: 585184
gaggaauauuugcaaucug

SEQ ID NO: 619783 - RNA, 19 nt, Artificial Sequence
  Description of Artificial Sequence: Synthetic oligonucleotide
  Antisense strand to SEQ ID NO: 619782
cagauugcaaauauuccuc

SEQ ID NO: 619784 - RNA, 19 nt, Artificial Sequence
  Description of Artificial Sequence: Synthetic oligonucleotide
  Sense strand starting at position 2303 of SEQ ID NO: 585184
gagcaaugagauugccacu

SEQ ID NO: 619785 - RNA, 19 nt, Artificial Sequence
  Description of Artificial Sequence: Synthetic oligonucleotide
  Antisense strand to SEQ ID NO: 619784
aguggcaaucucauugcuc

SEQ ID NO: 619786 - RNA, 19 nt, Artificial Sequence
  Description of Artificial Sequence: Synthetic oligonucleotide
  Sense strand starting at position 2368 of SEQ ID NO: 585184
gaccguucccagcgaagga

SEQ ID NO: 619787 - RNA, 19 nt, Artificial Sequence
  Description of Artificial Sequence: Synthetic oligonucleotide
  Antisense strand to SEQ ID NO: 619786
uccuucgcugggaacgguc

SEQ ID NO: 619788 - RNA, 19 nt, Artificial Sequence
  Description of Artificial Sequence: Synthetic oligonucleotide
  Sense strand starting at position 2406 of SEQ ID NO: 585184
caaagauugugccaccgaa

SEQ ID NO: 619789 - RNA, 19 nt, Artificial Sequence
  Description of Artificial Sequence: Synthetic oligonucleotide
  Antisense strand to SEQ ID NO: 619788
uucgguggcacaaucuuug

SEQ ID NO: 619790 - RNA, 19 nt, Artificial Sequence
  Description of Artificial Sequence: Synthetic oligonucleotide
  Sense strand starting at position 2418 of SEQ ID NO: 585184
caccgaaguguguagguau

SEQ ID NO: 619791 - RNA, 19 nt, Artificial Sequence
  Description of Artificial Sequence: Synthetic oligonucleotide
  Antisense strand to SEQ ID NO: 619790
auaccuacacacuucggug

SEQ ID NO: 619792 - RNA, 19 nt, Artificial Sequence
  Description of Artificial Sequence: Synthetic oligonucleotide
  Sense strand starting at position 2419 of SEQ ID NO: 585184
accgaaguguguagguaua

SEQ ID NO: 619793 - RNA, 19 nt, Artificial Sequence
  Description of Artificial Sequence: Synthetic oligonucleotide
  Antisense strand to SEQ ID NO: 619792
uauaccuacacacuucggu

SEQ ID NO: 619794 - RNA, 19 nt, Artificial Sequence
  Description of Artificial Sequence: Synthetic oligonucleotide
  Sense strand starting at position 2421 of SEQ ID NO: 585184
cgaaguguguagguauagu

SEQ ID NO: 619795 - RNA, 19 nt, Artificial Sequence
  Description of Artificial Sequence: Synthetic oligonucleotide
  Antisense strand to SEQ ID NO: 619794
acuauaccuacacacuucg

SEQ ID NO: 619796 - RNA, 19 nt, Artificial Sequence
  Description of Artificial Sequence: Synthetic oligonucleotide
  Sense strand starting at position 2462 of SEQ ID NO: 585184
gggagucucuggagguaaa

SEQ ID NO: 619797 - RNA, 19 nt, Artificial Sequence
  Description of Artificial Sequence: Synthetic oligonucleotide
  Antisense strand to SEQ ID NO: 619796
uuuaccuccagagacuccc

SEQ ID NO: 619798 - RNA, 19 nt, Artificial Sequence
  Description of Artificial Sequence: Synthetic oligonucleotide
  Sense strand starting at position 2542 of SEQ ID NO: 585184
ggugaaaccuggcuaacac

SEQ ID NO: 619799 - RNA, 19 nt, Artificial Sequence
  Description of Artificial Sequence: Synthetic oligonucleotide
  Antisense strand to SEQ ID NO: 619798
guguuagccagguuucacc

SEQ ID NO: 619800 - RNA, 19 nt, Artificial Sequence
  Description of Artificial Sequence: Synthetic oligonucleotide
  Sense strand starting at position 2830 of SEQ ID NO: 585184
ucaguuauaacgggaaaua

SEQ ID NO: 619801 - RNA, 19 nt, Artificial Sequence
  Description of Artificial Sequence: Synthetic oligonucleotide
  Antisense strand to SEQ ID NO: 619800
uauuucccguuauaacuga

SEQ ID NO: 619802 - RNA, 19 nt, Artificial Sequence
  Description of Artificial Sequence: Synthetic oligonucleotide
  Sense strand starting at position 2840 of SEQ ID NO: 585184
cgggaaauauccucuccau

SEQ ID NO: 619803 - RNA, 19 nt, Artificial Sequence
  Description of Artificial Sequence: Synthetic oligonucleotide
  Antisense strand to SEQ ID NO: 619802
auggagaggauauuucccg

SEQ ID NO: 619804 - RNA, 19 nt, Artificial Sequence
  Description of Artificial Sequence: Synthetic oligonucleotide
  Sense strand starting at position 2860 of SEQ ID NO: 585184
gggcguaugcccgccauua

SEQ ID NO: 619805 - RNA, 19 nt, Artificial Sequence
  Description of Artificial Sequence: Synthetic oligonucleotide
  Antisense strand to SEQ ID NO: 619804
uaauggcgggcauacgccc

SEQ ID NO: 619806 - RNA, 19 nt, Artificial Sequence
  Description of Artificial Sequence: Synthetic oligonucleotide
  Sense strand starting at position 2861 of SEQ ID NO: 585184
ggcguaugcccgccauuaa

SEQ ID NO: 619807 - RNA, 19 nt, Artificial Sequence
  Description of Artificial Sequence: Synthetic oligonucleotide
  Antisense strand to SEQ ID NO: 619806
uuaauggcgggcauacgcc

SEQ ID NO: 619808 - RNA, 19 nt, Artificial Sequence
  Description of Artificial Sequence: Synthetic oligonucleotide
  Sense strand starting at position 2862 of SEQ ID NO: 585184
gcguaugcccgccauuaau

SEQ ID NO: 619809 - RNA, 19 nt, Artificial Sequence
  Description of Artificial Sequence: Synthetic oligonucleotide
  Antisense strand to SEQ ID NO: 619808
auuaauggcgggcauacgc

SEQ ID NO: 619810 - RNA, 19 nt, Artificial Sequence
  Description of Artificial Sequence: Synthetic oligonucleotide
  Sense strand starting at position 2871 of SEQ ID NO: 585184
cgccauuaauaacuuugua

SEQ ID NO: 619811 - RNA, 19 nt, Artificial Sequence
  Description of Artificial Sequence: Synthetic oligonucleotide
  Antisense strand to SEQ ID NO: 619810
uacaaaguuauuaauggcg

SEQ ID NO: 619812 - RNA, 19 nt, Artificial Sequence
  Description of Artificial Sequence: Synthetic oligonucleotide
  Sense strand starting at position 191 of SEQ ID NO: 585185
agcuuucuuguggaaauua

SEQ ID NO: 619813 - RNA, 19 nt, Artificial Sequence
  Description of Artificial Sequence: Synthetic oligonucleotide
  Antisense strand to SEQ ID NO: 619812
uaauuuccacaagaaagcu

SEQ ID NO: 619814 - RNA, 19 nt, Artificial Sequence
  Description of Artificial Sequence: Synthetic oligonucleotide
  Sense strand starting at position 251 of SEQ ID NO: 585185
guaagaagugauuaccuuc

SEQ ID NO: 619815 - RNA, 19 nt, Artificial Sequence
  Description of Artificial Sequence: Synthetic oligonucleotide
  Antisense strand to SEQ ID NO: 619814
gaagguaaucacuucuuac

SEQ ID NO: 619816 - RNA, 19 nt, Artificial Sequence
  Description of Artificial Sequence: Synthetic oligonucleotide
  Sense strand starting at position 336 of SEQ ID NO: 585185
gccacaauucuuggauaug

SEQ ID NO: 619817 - RNA, 19 nt, Artificial Sequence
  Description of Artificial Sequence: Synthetic oligonucleotide
  Antisense strand to SEQ ID NO: 619816
cauauccaagaauuguggc

SEQ ID NO: 619818 - RNA, 19 nt, Artificial Sequence
  Description of Artificial Sequence: Synthetic oligonucleotide
  Sense strand starting at position 438 of SEQ ID NO: 585185
gaggauguuuaacugacau

SEQ ID NO: 619819 - RNA, 19 nt, Artificial Sequence
  Description of Artificial Sequence: Synthetic oligonucleotide
  Antisense strand to SEQ ID NO: 619818
augucaguuaaacauccuc

SEQ ID NO: 619820 - RNA, 19 nt, Artificial Sequence
  Description of Artificial Sequence: Synthetic oligonucleotide
  Sense strand starting at position 484 of SEQ ID NO: 585185
ugucaaugacaacgaguaa

SEQ ID NO: 619821 - RNA, 19 nt, Artificial Sequence
  Description of Artificial Sequence: Synthetic oligonucleotide
  Antisense strand to SEQ ID NO: 619820
uuacucguugucauugaca

SEQ ID NO: 619822 - RNA, 19 nt, Artificial Sequence
  Description of Artificial Sequence: Synthetic oligonucleotide
  Sense strand starting at position 485 of SEQ ID NO: 585185
gucaaugacaacgaguaau

SEQ ID NO: 619823 - RNA, 19 nt, Artificial Sequence
  Description of Artificial Sequence: Synthetic oligonucleotide
  Antisense strand to SEQ ID NO: 619822
auuacucguugucauugac

SEQ ID NO: 619824 - RNA, 19 nt, Artificial Sequence
  Description of Artificial Sequence: Synthetic oligonucleotide
  Sense strand starting at position 505 of SEQ ID NO: 585185
augauuucuuaggaaagca

SEQ ID NO: 619825 - RNA, 19 nt, Artificial Sequence
  Description of Artificial Sequence: Synthetic oligonucleotide
  Antisense strand to SEQ ID NO: 619824
ugcuuuccuaagaaaucau

SEQ ID NO: 619826 - RNA, 19 nt, Artificial Sequence
  Description of Artificial Sequence: Synthetic oligonucleotide
  Sense strand starting at position 515 of SEQ ID NO: 585185
aggaaagcauguucagagu

SEQ ID NO: 619827 - RNA, 19 nt, Artificial Sequence
  Description of Artificial Sequence: Synthetic oligonucleotide
  Antisense strand to SEQ ID NO: 619826
acucugaacaugcuuuccu

SEQ ID NO: 619828 - RNA, 19 nt, Artificial Sequence
  Description of Artificial Sequence: Synthetic oligonucleotide
  Sense strand starting at position 596 of SEQ ID NO: 585185
ucuuaaauugccuaguuag

SEQ ID NO: 619829 - RNA, 19 nt, Artificial Sequence
  Description of Artificial Sequence: Synthetic oligonucleotide
  Antisense strand to SEQ ID NO: 619828
cuaacuaggcaauuuaaga

SEQ ID NO: 619830 - RNA, 19 nt, Artificial Sequence
  Description of Artificial Sequence: Synthetic oligonucleotide
  Sense strand starting at position 610 of SEQ ID NO: 585185
guuagaaaguacucuuuau

SEQ ID NO: 619831 - RNA, 19 nt, Artificial Sequence
  Description of Artificial Sequence: Synthetic oligonucleotide
  Antisense strand to SEQ ID NO: 619830
auaaagaguacuuucuaac

SEQ ID NO: 619832 - RNA, 19 nt, Artificial Sequence
  Description of Artificial Sequence: Synthetic oligonucleotide
  Sense strand starting at position 873 of SEQ ID NO: 585185
gggagcucucuggagguau

SEQ ID NO: 619833 - RNA, 19 nt, Artificial Sequence
  Description of Artificial Sequence: Synthetic oligonucleotide
  Antisense strand to SEQ ID NO: 619832
auaccuccagagagcuccc

SEQ ID NO: 619834 - RNA, 19 nt, Artificial Sequence
  Description of Artificial Sequence: Synthetic oligonucleotide
  Sense strand starting at position 965 of SEQ ID NO: 585185
uccuaagagcuuugaucag

SEQ ID NO: 619835 - RNA, 19 nt, Artificial Sequence
  Description of Artificial Sequence: Synthetic oligonucleotide
  Antisense strand to SEQ ID NO: 619834
cugaucaaagcucuuagga

SEQ ID NO: 619836 - RNA, 19 nt, Artificial Sequence
  Description of Artificial Sequence: Synthetic oligonucleotide
  Sense strand starting at position 1085 of SEQ ID NO: 585185
acaaauucgguuuaucaau

SEQ ID NO: 619837 - RNA, 19 nt, Artificial Sequence
  Description of Artificial Sequence: Synthetic oligonucleotide
  Antisense strand to SEQ ID NO: 619836
auugauaaaccgaauuugu

SEQ ID NO: 619838 - RNA, 19 nt, Artificial Sequence
  Description of Artificial Sequence: Synthetic oligonucleotide
  Sense strand starting at position 1159 of SEQ ID NO: 585185
gacagagaaucuuuguuag

SEQ ID NO: 619839 - RNA, 19 nt, Artificial Sequence
  Description of Artificial Sequence: Synthetic oligonucleotide
  Antisense strand to SEQ ID NO: 619838
cuaacaaagauucucuguc

SEQ ID NO: 619840 - RNA, 19 nt, Artificial Sequence
  Description of Artificial Sequence: Synthetic oligonucleotide
  Sense strand starting at position 1161 of SEQ ID NO: 585185
cagagaaucuuuguuaggu

SEQ ID NO: 619841 - RNA, 19 nt, Artificial Sequence
  Description of Artificial Sequence: Synthetic oligonucleotide
  Antisense strand to SEQ ID NO: 619840
accuaacaaagauucucug

SEQ ID NO: 619842 - RNA, 19 nt, Artificial Sequence
  Description of Artificial Sequence: Synthetic oligonucleotide
  Sense strand starting at position 1162 of SEQ ID NO: 585185
agagaaucuuuguuagguu

SEQ ID NO: 619843 - RNA, 19 nt, Artificial Sequence
  Description of Artificial Sequence: Synthetic oligonucleotide
  Antisense strand to SEQ ID NO: 619842
aaccuaacaaagauucucu

SEQ ID NO: 619844 - RNA, 19 nt, Artificial Sequence
  Description of Artificial Sequence: Synthetic oligonucleotide
  Sense strand starting at position 1221 of SEQ ID NO: 585185
uaguuuccuccucagagag

SEQ ID NO: 619845 - RNA, 19 nt, Artificial Sequence
  Description of Artificial Sequence: Synthetic oligonucleotide
  Antisense strand to SEQ ID NO: 619844
cucucugaggaggaaacua

SEQ ID NO: 619846 - RNA, 19 nt, Artificial Sequence
  Description of Artificial Sequence: Synthetic oligonucleotide
  Sense strand starting at position 1463 of SEQ ID NO: 585185
uccagcuugugguugauuu

SEQ ID NO: 619847 - RNA, 19 nt, Artificial Sequence
  Description of Artificial Sequence: Synthetic oligonucleotide
  Antisense strand to SEQ ID NO: 619846
aaaucaaccacaagcugga

SEQ ID NO: 619848 - RNA, 19 nt, Artificial Sequence
  Description of Artificial Sequence: Synthetic oligonucleotide
  Sense strand starting at position 1467 of SEQ ID NO: 585185
gcuugugguugauuugaga

SEQ ID NO: 619849 - RNA, 19 nt, Artificial Sequence
  Description of Artificial Sequence: Synthetic oligonucleotide
  Antisense strand to SEQ ID NO: 619848
ucucaaaucaaccacaagc

SEQ ID NO: 619850 - RNA, 19 nt, Artificial Sequence
  Description of Artificial Sequence: Synthetic oligonucleotide
  Sense strand starting at position 2057 of SEQ ID NO: 585185
gaucuuggccuaugaaagg

SEQ ID NO: 619851 - RNA, 19 nt, Artificial Sequence
  Description of Artificial Sequence: Synthetic oligonucleotide
  Antisense strand to SEQ ID NO: 619850
ccuuucauaggccaagauc

SEQ ID NO: 619852 - RNA, 19 nt, Artificial Sequence
  Description of Artificial Sequence: Synthetic oligonucleotide
  Sense strand starting at position 2220 of SEQ ID NO: 585185
aggauuuccgccgguuuga

SEQ ID NO: 619853 - RNA, 19 nt, Artificial Sequence
  Description of Artificial Sequence: Synthetic oligonucleotide
  Antisense strand to SEQ ID NO: 619852
ucaaaccggcggaaauccu

SEQ ID NO: 619854 - RNA, 19 nt, Artificial Sequence
  Description of Artificial Sequence: Synthetic oligonucleotide
  Sense strand starting at position 2514 of SEQ ID NO: 585185
gugauuaagagucagguag

SEQ ID NO: 619855 - RNA, 19 nt, Artificial Sequence
  Description of Artificial Sequence: Synthetic oligonucleotide
  Antisense strand to SEQ ID NO: 619854
cuaccugacucuuaaucac

SEQ ID NO: 619856 - RNA, 19 nt, Artificial Sequence
  Description of Artificial Sequence: Synthetic oligonucleotide
  Sense strand starting at position 2569 of SEQ ID NO: 585185
cugugucgccuuucaugua

SEQ ID NO: 619857 - RNA, 19 nt, Artificial Sequence
  Description of Artificial Sequence: Synthetic oligonucleotide
  Antisense strand to SEQ ID NO: 619856
uacaugaaaggcgacacag

SEQ ID NO: 619858 - RNA, 19 nt, Artificial Sequence
  Description of Artificial Sequence: Synthetic oligonucleotide
  Sense strand starting at position 2583 of SEQ ID NO: 585185
auguauuaaccucgaaacc

SEQ ID NO: 619859 - RNA, 19 nt, Artificial Sequence
  Description of Artificial Sequence: Synthetic oligonucleotide
  Antisense strand to SEQ ID NO: 619858
gguuucgagguuaauacau

SEQ ID NO: 619860 - RNA, 19 nt, Artificial Sequence
  Description of Artificial Sequence: Synthetic oligonucleotide
  Sense strand starting at position 2584 of SEQ ID NO: 585185
uguauuaaccucgaaacca

SEQ ID NO: 619861 - RNA, 19 nt, Artificial Sequence
  Description of Artificial Sequence: Synthetic oligonucleotide
  Antisense strand to SEQ ID NO: 619860
ugguuucgagguuaauaca

SEQ ID NO: 619862 - RNA, 19 nt, Artificial Sequence
  Description of Artificial Sequence: Synthetic oligonucleotide
  Sense strand starting at position 2903 of SEQ ID NO: 585185
acgguaggcgauuauaaca

SEQ ID NO: 619863 - RNA, 19 nt, Artificial Sequence
  Description of Artificial Sequence: Synthetic oligonucleotide
  Antisense strand to SEQ ID NO: 619862
uguuauaaucgccuaccgu

SEQ ID NO: 619864 - RNA, 19 nt, Artificial Sequence
  Description of Artificial Sequence: Synthetic oligonucleotide
  Sense strand starting at position 2924 of SEQ ID NO: 585185
gugguaacuauuuguguac

SEQ ID NO: 619865 - RNA, 19 nt, Artificial Sequence
  Description of Artificial Sequence: Synthetic oligonucleotide
  Antisense strand to SEQ ID NO: 619864
guacacaaauaguuaccac

SEQ ID NO: 619866 - RNA, 19 nt, Artificial Sequence
  Description of Artificial Sequence: Synthetic oligonucleotide
  Sense strand starting at position 2927 of SEQ ID NO: 585185
guaacuauuuguguacuua

SEQ ID NO: 619867 - RNA, 19 nt, Artificial Sequence
  Description of Artificial Sequence: Synthetic oligonucleotide
  Antisense strand to SEQ ID NO: 619866
uaaguacacaaauaguuac

SEQ ID NO: 619868 - RNA, 19 nt, Artificial Sequence
  Description of Artificial Sequence: Synthetic oligonucleotide
  Sense strand starting at position 3020 of SEQ ID NO: 585185
gcugaagccuuguuauuug

SEQ ID NO: 619869 - RNA, 19 nt, Artificial Sequence
  Description of Artificial Sequence: Synthetic oligonucleotide
  Antisense strand to SEQ ID NO: 619868
caaauaacaaggcuucagc

SEQ ID NO: 619870 - RNA, 19 nt, Artificial Sequence
  Description of Artificial Sequence: Synthetic oligonucleotide
  Sense strand starting at position 3027 of SEQ ID NO: 585185
ccuuguuauuuggcacaua

SEQ ID NO: 619871 - RNA, 19 nt, Artificial Sequence
  Description of Artificial Sequence: Synthetic oligonucleotide
  Antisense strand to SEQ ID NO: 619870
uaugugccaaauaacaagg

SEQ ID NO: 619872 - RNA, 19 nt, Artificial Sequence
  Description of Artificial Sequence: Synthetic oligonucleotide
  Sense strand starting at position 3038 of SEQ ID NO: 585185
ggcacauaacuguacuuua

SEQ ID NO: 619873 - RNA, 19 nt, Artificial Sequence
  Description of Artificial Sequence: Synthetic oligonucleotide
  Antisense strand to SEQ ID NO: 619872
uaaaguacaguuaugugcc

SEQ ID NO: 619874 - RNA, 19 nt, Artificial Sequence
  Description of Artificial Sequence: Synthetic oligonucleotide
  Sense strand starting at position 3345 of SEQ ID NO: 585185
aagagaaaccugugugauu

SEQ ID NO: 619875 - RNA, 19 nt, Artificial Sequence
  Description of Artificial Sequence: Synthetic oligonucleotide
  Antisense strand to SEQ ID NO: 619874
aaucacacagguuucucuu

SEQ ID NO: 619876 - RNA, 19 nt, Artificial Sequence
  Description of Artificial Sequence: Synthetic oligonucleotide
  Sense strand starting at position 3346 of SEQ ID NO: 585185
agagaaaccugugugauua

SEQ ID NO: 619877 - RNA, 19 nt, Artificial Sequence
  Description of Artificial Sequence: Synthetic oligonucleotide
  Antisense strand to SEQ ID NO: 619876
uaaucacacagguuucucu

SEQ ID NO: 619878 - RNA, 19 nt, Artificial Sequence
  Description of Artificial Sequence: Synthetic oligonucleotide
  Sense strand starting at position 3347 of SEQ ID NO: 585185
gagaaaccugugugauuag

SEQ ID NO: 619879 - RNA, 19 nt, Artificial Sequence
  Description of Artificial Sequence: Synthetic oligonucleotide
  Antisense strand to SEQ ID NO: 619878
cuaaucacacagguuucuc

SEQ ID NO: 619880 - RNA, 19 nt, Artificial Sequence
  Description of Artificial Sequence: Synthetic oligonucleotide
  Sense strand starting at position 3385 of SEQ ID NO: 585185
cugcauuaccuagaagcau

SEQ ID NO: 619881 - RNA, 19 nt, Artificial Sequence
  Description of Artificial Sequence: Synthetic oligonucleotide
  Antisense strand to SEQ ID NO: 619880
augcuucuagguaaugcag

SEQ ID NO: 619882 - RNA, 19 nt, Artificial Sequence
  Description of Artificial Sequence: Synthetic oligonucleotide
  Sense strand starting at position 3400 of SEQ ID NO: 585185
gcauauuuagcugagugca

SEQ ID NO: 619883 - RNA, 19 nt, Artificial Sequence
  Description of Artificial Sequence: Synthetic oligonucleotide
  Antisense strand to SEQ ID NO: 619882
ugcacucagcuaaauaugc

SEQ ID NO: 619884 - RNA, 19 nt, Artificial Sequence
  Description of Artificial Sequence: Synthetic oligonucleotide
  Sense strand starting at position 3412 of SEQ ID NO: 585185
gagugcagucugcuguuau

SEQ ID NO: 619885 - RNA, 19 nt, Artificial Sequence
  Description of Artificial Sequence: Synthetic oligonucleotide
  Antisense strand to SEQ ID NO: 619884
auaacagcagacugcacuc

SEQ ID NO: 619886 - RNA, 19 nt, Artificial Sequence
  Description of Artificial Sequence: Synthetic oligonucleotide
  Sense strand starting at position 3561 of SEQ ID NO: 585185
acugguuagcaugaagcaa

SEQ ID NO: 619887 - RNA, 19 nt, Artificial Sequence
  Description of Artificial Sequence: Synthetic oligonucleotide
  Antisense strand to SEQ ID NO: 619886
uugcuucaugcuaaccagu

SEQ ID NO: 619888 - RNA, 19 nt, Artificial Sequence
  Description of Artificial Sequence: Synthetic oligonucleotide
  Sense strand starting at position 3905 of SEQ ID NO: 585185
auuauugaguccuuacuau

SEQ ID NO: 619889 - RNA, 19 nt, Artificial Sequence
  Description of Artificial Sequence: Synthetic oligonucleotide
  Antisense strand to SEQ ID NO: 619888
auaguaaggacucaauaau

SEQ ID NO: 619890 - RNA, 19 nt, Artificial Sequence
  Description of Artificial Sequence: Synthetic oligonucleotide
  Sense strand starting at position 3973 of SEQ ID NO: 585185
cuaugagguagguaugauc

SEQ ID NO: 619891 - RNA, 19 nt, Artificial Sequence
  Description of Artificial Sequence: Synthetic oligonucleotide
  Antisense strand to SEQ ID NO: 619890
gaucauaccuaccucauag

SEQ ID NO: 619892 - RNA, 19 nt, Artificial Sequence
  Description of Artificial Sequence: Synthetic oligonucleotide
  Sense strand starting at position 2 of SEQ ID NO: 585186
gcagguucagucugagauc

SEQ ID NO: 619893 - RNA, 19 nt, Artificial Sequence
  Description of Artificial Sequence: Synthetic oligonucleotide
  Antisense strand to SEQ ID NO: 619892
gaucucagacugaaccugc

SEQ ID NO: 619894 - RNA, 19 nt, Artificial Sequence
  Description of Artificial Sequence: Synthetic oligonucleotide
  Sense strand starting at position 11 of SEQ ID NO: 585186
gucugagaucucugggagu

SEQ ID NO: 619895 - RNA, 19 nt, Artificial Sequence
  Description of Artificial Sequence: Synthetic oligonucleotide
  Antisense strand to SEQ ID NO: 619894
acucccagagaucucagac

SEQ ID NO: 619896 - RNA, 19 nt, Artificial Sequence
  Description of Artificial Sequence: Synthetic oligonucleotide
  Sense strand starting at position 13 of SEQ ID NO: 585186
cugagaucucugggaguca

SEQ ID NO: 619897 - RNA, 19 nt, Artificial Sequence
  Description of Artificial Sequence: Synthetic oligonucleotide
  Antisense strand to SEQ ID NO: 619896
ugacucccagagaucucag

SEQ ID NO: 619898 - RNA, 19 nt, Artificial Sequence
  Description of Artificial Sequence: Synthetic oligonucleotide
  Sense strand starting at position 420 of SEQ ID NO: 585186
cuuugcuccuuaguaaaga

SEQ ID NO: 619899 - RNA, 19 nt, Artificial Sequence
  Description of Artificial Sequence: Synthetic oligonucleotide
  Antisense strand to SEQ ID NO: 619898
ucuuuacuaaggagcaaag

SEQ ID NO: 619900 - RNA, 19 nt, Artificial Sequence
  Description of Artificial Sequence: Synthetic oligonucleotide
  Sense strand starting at position 454 of SEQ ID NO: 585186
gagacuguuguccagaggu

SEQ ID NO: 619901 - RNA, 19 nt, Artificial Sequence
  Description of Artificial Sequence: Synthetic oligonucleotide
  Antisense strand to SEQ ID NO: 619900
accucuggacaacagucuc

SEQ ID NO: 619902 - RNA, 19 nt, Artificial Sequence
  Description of Artificial Sequence: Synthetic oligonucleotide
  Sense strand starting at position 611 of SEQ ID NO: 585186
ggaguuuccucuucccaaa

SEQ ID NO: 619903 - RNA, 19 nt, Artificial Sequence
  Description of Artificial Sequence: Synthetic oligonucleotide
  Antisense strand to SEQ ID NO: 619902
uuugggaagaggaaacucc

SEQ ID NO: 619904 - RNA, 19 nt, Artificial Sequence
  Description of Artificial Sequence: Synthetic oligonucleotide
  Sense strand starting at position 666 of SEQ ID NO: 585186
gagagucuccuauacgugu

SEQ ID NO: 619905 - RNA, 19 nt, Artificial Sequence
  Description of Artificial Sequence: Synthetic oligonucleotide
  Antisense strand to SEQ ID NO: 619904
acacguauaggagacucuc

SEQ ID NO: 619906 - RNA, 19 nt, Artificial Sequence
  Description of Artificial Sequence: Synthetic oligonucleotide
  Sense strand starting at position 691 of SEQ ID NO: 585186
guagcuuccguaccgcaaa

SEQ ID NO: 619907 - RNA, 19 nt, Artificial Sequence
  Description of Artificial Sequence: Synthetic oligonucleotide
  Antisense strand to SEQ ID NO: 619906
uuugcgguacggaagcuac

SEQ ID NO: 619908 - RNA, 19 nt, Artificial Sequence
  Description of Artificial Sequence: Synthetic oligonucleotide
  Sense strand starting at position 713 of SEQ ID NO: 585186
gcgccauucuaaucagaag

SEQ ID NO: 619909 - RNA, 19 nt, Artificial Sequence
  Description of Artificial Sequence: Synthetic oligonucleotide
  Antisense strand to SEQ ID NO: 619908
cuucugauuagaauggcgc

SEQ ID NO: 619910 - RNA, 19 nt, Artificial Sequence
  Description of Artificial Sequence: Synthetic oligonucleotide
  Sense strand starting at position 1016 of SEQ ID NO: 585186
gaauccacucuguggguua

SEQ ID NO: 619911 - RNA, 19 nt, Artificial Sequence
  Description of Artificial Sequence: Synthetic oligonucleotide
  Antisense strand to SEQ ID NO: 619910
uaacccacagaguggauuc

SEQ ID NO: 619912 - RNA, 19 nt, Artificial Sequence
  Description of Artificial Sequence: Synthetic oligonucleotide
  Sense strand starting at position 1021 of SEQ ID NO: 585186
cacucuguggguuaggaaa

SEQ ID NO: 619913 - RNA, 19 nt, Artificial Sequence
  Description of Artificial Sequence: Synthetic oligonucleotide
  Antisense strand to SEQ ID NO: 619912
uuuccuaacccacagagug

SEQ ID NO: 619914 - RNA, 19 nt, Artificial Sequence
  Description of Artificial Sequence: Synthetic oligonucleotide
  Sense strand starting at position 1072 of SEQ ID NO: 585186
ugccgagaagccguguaau

SEQ ID NO: 619915 - RNA, 19 nt, Artificial Sequence
  Description of Artificial Sequence: Synthetic oligonucleotide
  Antisense strand to SEQ ID NO: 619914
auuacacggcuucucggca

SEQ ID NO: 619916 - RNA, 19 nt, Artificial Sequence
  Description of Artificial Sequence: Synthetic oligonucleotide
  Sense strand starting at position 1075 of SEQ ID NO: 585186
cgagaagccguguaaugaa

SEQ ID NO: 619917 - RNA, 19 nt, Artificial Sequence
  Description of Artificial Sequence: Synthetic oligonucleotide
  Antisense strand to SEQ ID NO: 619916
uucauuacacggcuucucg

SEQ ID NO: 619918 - RNA, 19 nt, Artificial Sequence
  Description of Artificial Sequence: Synthetic oligonucleotide
  Sense strand starting at position 1320 of SEQ ID NO: 585186
gaaacaguaugcccgucaa

SEQ ID NO: 619919 - RNA, 19 nt, Artificial Sequence
  Description of Artificial Sequence: Synthetic oligonucleotide
  Antisense strand to SEQ ID NO: 619918
uugacgggcauacuguuuc

SEQ ID NO: 619920 - RNA, 19 nt, Artificial Sequence
  Description of Artificial Sequence: Synthetic oligonucleotide
  Sense strand starting at position 1392 of SEQ ID NO: 585186
agcggauuggccgaggaua

SEQ ID NO: 619921 - RNA, 19 nt, Artificial Sequence
  Description of Artificial Sequence: Synthetic oligonucleotide
  Antisense strand to SEQ ID NO: 619920
uauccucggccaauccgcu

SEQ ID NO: 619922 - RNA, 19 nt, Artificial Sequence
  Description of Artificial Sequence: Synthetic oligonucleotide
  Sense strand starting at position 2072 of SEQ ID NO: 585186
uguggauuccggugaaagg

SEQ ID NO: 619923 - RNA, 19 nt, Artificial Sequence
  Description of Artificial Sequence: Synthetic oligonucleotide
  Antisense strand to SEQ ID NO: 619922
ccuuucaccggaauccaca

SEQ ID NO: 619924 - RNA, 19 nt, Artificial Sequence
  Description of Artificial Sequence: Synthetic oligonucleotide
  Sense strand starting at position 2130 of SEQ ID NO: 585186
cccaguucuugcuugagaa

SEQ ID NO: 619925 - RNA, 19 nt, Artificial Sequence
  Description of Artificial Sequence: Synthetic oligonucleotide
  Antisense strand to SEQ ID NO: 619924
uucucaagcaagaacuggg

SEQ ID NO: 619926 - RNA, 19 nt, Artificial Sequence
  Description of Artificial Sequence: Synthetic oligonucleotide
  Sense strand starting at position 2131 of SEQ ID NO: 585186
ccaguucuugcuugagaau

SEQ ID NO: 619927 - RNA, 19 nt, Artificial Sequence
  Description of Artificial Sequence: Synthetic oligonucleotide
  Antisense strand to SEQ ID NO: 619926
auucucaagcaagaacugg

SEQ ID NO: 619928 - RNA, 19 nt, Artificial Sequence
  Description of Artificial Sequence: Synthetic oligonucleotide
  Sense strand starting at position 2132 of SEQ ID NO: 585186
caguucuugcuugagaaug

SEQ ID NO: 619929 - RNA, 19 nt, Artificial Sequence
  Description of Artificial Sequence: Synthetic oligonucleotide
  Antisense strand to SEQ ID NO: 619928
cauucucaagcaagaacug

SEQ ID NO: 619930 - RNA, 19 nt, Artificial Sequence
  Description of Artificial Sequence: Synthetic oligonucleotide
  Sense strand starting at position 2137 of SEQ ID NO: 585186
cuugcuugagaaugauaaa

SEQ ID NO: 619931 - RNA, 19 nt, Artificial Sequence
  Description of Artificial Sequence: Synthetic oligonucleotide
  Antisense strand to SEQ ID NO: 619930
uuuaucauucucaagcaag

SEQ ID NO: 619932 - RNA, 19 nt, Artificial Sequence
  Description of Artificial Sequence: Synthetic oligonucleotide
  Sense strand starting at position 2182 of SEQ ID NO: 585186
gggucaugcagagacuugu

SEQ ID NO: 619933 - RNA, 19 nt, Artificial Sequence
  Description of Artificial Sequence: Synthetic oligonucleotide
  Antisense strand to SEQ ID NO: 619932
acaagucucugcaugaccc

SEQ ID NO: 619934 - RNA, 19 nt, Artificial Sequence
  Description of Artificial Sequence: Synthetic oligonucleotide
  Sense strand starting at position 2193 of SEQ ID NO: 585186
agacuuguauugguaggga

SEQ ID NO: 619935 - RNA, 19 nt, Artificial Sequence
  Description of Artificial Sequence: Synthetic oligonucleotide
  Antisense strand to SEQ ID NO: 619934
ucccuaccaauacaagucu

SEQ ID NO: 619936 - RNA, 19 nt, Artificial Sequence
  Description of Artificial Sequence: Synthetic oligonucleotide
  Sense strand starting at position 2290 of SEQ ID NO: 585186
gggcuggugggucaaagua

SEQ ID NO: 619937 - RNA, 19 nt, Artificial Sequence
  Description of Artificial Sequence: Synthetic oligonucleotide
  Antisense strand to SEQ ID NO: 619936
uacuuugacccaccagccc

SEQ ID NO: 619938 - RNA, 19 nt, Artificial Sequence
  Description of Artificial Sequence: Synthetic oligonucleotide
  Sense strand starting at position 2394 of SEQ ID NO: 585186
agaggagugcuucagaguu

SEQ ID NO: 619939 - RNA, 19 nt, Artificial Sequence
  Description of Artificial Sequence: Synthetic oligonucleotide
  Antisense strand to SEQ ID NO: 619938
aacucugaagcacuccucu

SEQ ID NO: 619940 - RNA, 19 nt, Artificial Sequence
  Description of Artificial Sequence: Synthetic oligonucleotide
  Sense strand starting at position 2406 of SEQ ID NO: 585186
cagaguuuggguugcuuua

SEQ ID NO: 619941 - RNA, 19 nt, Artificial Sequence
  Description of Artificial Sequence: Synthetic oligonucleotide
  Antisense strand to SEQ ID NO: 619940
uaaagcaacccaaacucug

SEQ ID NO: 619942 - RNA, 19 nt, Artificial Sequence
  Description of Artificial Sequence: Synthetic oligonucleotide
  Sense strand starting at position 2419 of SEQ ID NO: 585186
gcuuuaagaaagggugguu

SEQ ID NO: 619943 - RNA, 19 nt, Artificial Sequence
  Description of Artificial Sequence: Synthetic oligonucleotide
  Antisense strand to SEQ ID NO: 619942
aaccacccuuucuuaaagc

SEQ ID NO: 619944 - RNA, 19 nt, Artificial Sequence
  Description of Artificial Sequence: Synthetic oligonucleotide
  Sense strand starting at position 2440 of SEQ ID NO: 585186
gaauucucccgugguugga

SEQ ID NO: 619945 - RNA, 19 nt, Artificial Sequence
  Description of Artificial Sequence: Synthetic oligonucleotide
  Antisense strand to SEQ ID NO: 619944
uccaaccacgggagaauuc

SEQ ID NO: 619946 - RNA, 19 nt, Artificial Sequence
  Description of Artificial Sequence: Synthetic oligonucleotide
  Sense strand starting at position 2810 of SEQ ID NO: 585186
gccaccguccagcaauaua

SEQ ID NO: 619947 - RNA, 19 nt, Artificial Sequence
  Description of Artificial Sequence: Synthetic oligonucleotide
  Antisense strand to SEQ ID NO: 619946
uauauugcuggacgguggc

SEQ ID NO: 619948 - RNA, 19 nt, Artificial Sequence
  Description of Artificial Sequence: Synthetic oligonucleotide
  Sense strand starting at position 3189 of SEQ ID NO: 585186
ucagguggccuuuaggaaa

SEQ ID NO: 619949 - RNA, 19 nt, Artificial Sequence
  Description of Artificial Sequence: Synthetic oligonucleotide
  Antisense strand to SEQ ID NO: 619948
uuuccuaaaggccaccuga

SEQ ID NO: 619950 - RNA, 19 nt, Artificial Sequence
  Description of Artificial Sequence: Synthetic oligonucleotide
  Sense strand starting at position 3294 of SEQ ID NO: 585186
gguuccuagagacgggaua

SEQ ID NO: 619951 - RNA, 19 nt, Artificial Sequence
  Description of Artificial Sequence: Synthetic oligonucleotide
  Antisense strand to SEQ ID NO: 619950
uaucccgucucuaggaacc

SEQ ID NO: 619952 - RNA, 19 nt, Artificial Sequence
  Description of Artificial Sequence: Synthetic oligonucleotide
  Sense strand starting at position 3368 of SEQ ID NO: 585186
guaucuacuuauccuuaga

SEQ ID NO: 619953 - RNA, 19 nt, Artificial Sequence
  Description of Artificial Sequence: Synthetic oligonucleotide
  Antisense strand to SEQ ID NO: 619952
ucuaaggauaaguagauac

SEQ ID NO: 619954 - RNA, 19 nt, Artificial Sequence
  Description of Artificial Sequence: Synthetic oligonucleotide
  Sense strand starting at position 3440 of SEQ ID NO: 585186
acaaguacuucugcugagu

SEQ ID NO: 619955 - RNA, 19 nt, Artificial Sequence
  Description of Artificial Sequence: Synthetic oligonucleotide
  Antisense strand to SEQ ID NO: 619954
acucagcagaaguacuugu

SEQ ID NO: 619956 - RNA, 19 nt, Artificial Sequence
  Description of Artificial Sequence: Synthetic oligonucleotide
  Sense strand starting at position 3453 of SEQ ID NO: 585186
cugaguugggagugagaaa

SEQ ID NO: 619957 - RNA, 19 nt, Artificial Sequence
  Description of Artificial Sequence: Synthetic oligonucleotide
  Antisense strand to SEQ ID NO: 619956
uuucucacucccaacucag

SEQ ID NO: 619958 - RNA, 19 nt, Artificial Sequence
  Description of Artificial Sequence: Synthetic oligonucleotide
  Sense strand starting at position 3485 of SEQ ID NO: 585186
ugcaguuguguugaugaua

SEQ ID NO: 619959 - RNA, 19 nt, Artificial Sequence
  Description of Artificial Sequence: Synthetic oligonucleotide
  Antisense strand to SEQ ID NO: 619958
uaucaucaacacaacugca

SEQ ID NO: 619960 - RNA, 19 nt, Artificial Sequence
  Description of Artificial Sequence: Synthetic oligonucleotide
  Sense strand starting at position 3714 of SEQ ID NO: 585186
gugugugcgugcacuauuu

SEQ ID NO: 619961 - RNA, 19 nt, Artificial Sequence
  Description of Artificial Sequence: Synthetic oligonucleotide
  Antisense strand to SEQ ID NO: 619960
aaauagugcacgcacacac

SEQ ID NO: 619962 - RNA, 19 nt, Artificial Sequence
  Description of Artificial Sequence: Synthetic oligonucleotide
  Sense strand starting at position 3773 of SEQ ID NO: 585186
uuccuuugguucucugauu

SEQ ID NO: 619963 - RNA, 19 nt, Artificial Sequence
  Description of Artificial Sequence: Synthetic oligonucleotide
  Antisense strand to SEQ ID NO: 619962
aaucagagaaccaaaggaa

SEQ ID NO: 619964 - RNA, 19 nt, Artificial Sequence
  Description of Artificial Sequence: Synthetic oligonucleotide
  Sense strand starting at position 3774 of SEQ ID NO: 585186
uccuuugguucucugauuu

SEQ ID NO: 619965 - RNA, 19 nt, Artificial Sequence
  Description of Artificial Sequence: Synthetic oligonucleotide
  Antisense strand to SEQ ID NO: 619964
aaaucagagaaccaaagga

SEQ ID NO: 619966 - RNA, 19 nt, Artificial Sequence
  Description of Artificial Sequence: Synthetic oligonucleotide
  Sense strand starting at position 3778 of SEQ ID NO: 585186
uugguucucugauuucuuu

SEQ ID NO: 619967 - RNA, 19 nt, Artificial Sequence
  Description of Artificial Sequence: Synthetic oligonucleotide
  Antisense strand to SEQ ID NO: 619966
aaagaaaucagagaaccaa

SEQ ID NO: 619968 - RNA, 19 nt, Artificial Sequence
  Description of Artificial Sequence: Synthetic oligonucleotide
  Sense strand starting at position 3829 of SEQ ID NO: 585186
accugacucuugucuaguu

SEQ ID NO: 619969 - RNA, 19 nt, Artificial Sequence
  Description of Artificial Sequence: Synthetic oligonucleotide
  Antisense strand to SEQ ID NO: 619968
aacuagacaagagucaggu

SEQ ID NO: 619970 - RNA, 19 nt, Artificial Sequence
  Description of Artificial Sequence: Synthetic oligonucleotide
  Sense strand starting at position 3855 of SEQ ID NO: 585186
guauaucacuuguucucau

SEQ ID NO: 619971 - RNA, 19 nt, Artificial Sequence
  Description of Artificial Sequence: Synthetic oligonucleotide
  Antisense strand to SEQ ID NO: 619970
augagaacaagugauauac

SEQ ID NO: 619972 - RNA, 19 nt, Artificial Sequence
  Description of Artificial Sequence: Synthetic oligonucleotide
  Sense strand starting at position 289 of SEQ ID NO: 585187
ucaguauccggugagucau

SEQ ID NO: 619973 - RNA, 19 nt, Artificial Sequence
  Description of Artificial Sequence: Synthetic oligonucleotide
  Antisense strand to SEQ ID NO: 619972
augacucaccggauacuga

SEQ ID NO: 619974 - RNA, 19 nt, Artificial Sequence
  Description of Artificial Sequence: Synthetic oligonucleotide
  Sense strand starting at position 295 of SEQ ID NO: 585187
uccggugagucaucuuauc

SEQ ID NO: 619975 - RNA, 19 nt, Artificial Sequence
  Description of Artificial Sequence: Synthetic oligonucleotide
  Antisense strand to SEQ ID NO: 619974
gauaagaugacucaccgga

SEQ ID NO: 619976 - RNA, 19 nt, Artificial Sequence
  Description of Artificial Sequence: Synthetic oligonucleotide
  Sense strand starting at position 324 of SEQ ID NO: 585187
agggaucucccuuguccau

SEQ ID NO: 619977 - RNA, 19 nt, Artificial Sequence
  Description of Artificial Sequence: Synthetic oligonucleotide
  Antisense strand to SEQ ID NO: 619976
auggacaagggagaucccu

SEQ ID NO: 619978 - RNA, 19 nt, Artificial Sequence
  Description of Artificial Sequence: Synthetic oligonucleotide
  Sense strand starting at position 423 of SEQ ID NO: 585187
gcagguucagucugagauc

SEQ ID NO: 619979 - RNA, 19 nt, Artificial Sequence
  Description of Artificial Sequence: Synthetic oligonucleotide
  Antisense strand to SEQ ID NO: 619978
gaucucagacugaaccugc

SEQ ID NO: 619980 - RNA, 19 nt, Artificial Sequence
  Description of Artificial Sequence: Synthetic oligonucleotide
  Sense strand starting at position 432 of SEQ ID NO: 585187
gucugagaucucugggagu

SEQ ID NO: 619981 - RNA, 19 nt, Artificial Sequence
  Description of Artificial Sequence: Synthetic oligonucleotide
  Antisense strand to SEQ ID NO: 619980
acucccagagaucucagac

SEQ ID NO: 619982 - RNA, 19 nt, Artificial Sequence
  Description of Artificial Sequence: Synthetic oligonucleotide
  Sense strand starting at position 434 of SEQ ID NO: 585187
cugagaucucugggaguca

SEQ ID NO: 619983 - RNA, 19 nt, Artificial Sequence
  Description of Artificial Sequence: Synthetic oligonucleotide
  Antisense strand to SEQ ID NO: 619982
ugacucccagagaucucag

SEQ ID NO: 619984 - RNA, 19 nt, Artificial Sequence
  Description of Artificial Sequence: Synthetic oligonucleotide
  Sense strand starting at position 841 of SEQ ID NO: 585187
cuuugcuccuuaguaaaga

SEQ ID NO: 619985 - RNA, 19 nt, Artificial Sequence
  Description of Artificial Sequence: Synthetic oligonucleotide
  Antisense strand to SEQ ID NO: 619984
ucuuuacuaaggagcaaag

SEQ ID NO: 619986 - RNA, 19 nt, Artificial Sequence
  Description of Artificial Sequence: Synthetic oligonucleotide
  Sense strand starting at position 875 of SEQ ID NO: 585187
gagacuguuguccagaggu

SEQ ID NO: 619987 - RNA, 19 nt, Artificial Sequence
  Description of Artificial Sequence: Synthetic oligonucleotide
  Antisense strand to SEQ ID NO: 619986
accucuggacaacagucuc

SEQ ID NO: 619988 - RNA, 19 nt, Artificial Sequence
  Description of Artificial Sequence: Synthetic oligonucleotide
  Sense strand starting at position 1032 of SEQ ID NO: 585187
ggaguuuccucuucccaaa

SEQ ID NO: 619989 - RNA, 19 nt, Artificial Sequence
  Description of Artificial Sequence: Synthetic oligonucleotide
  Antisense strand to SEQ ID NO: 619988
uuugggaagaggaaacucc

SEQ ID NO: 619990 - RNA, 19 nt, Artificial Sequence
  Description of Artificial Sequence: Synthetic oligonucleotide
  Sense strand starting at position 1087 of SEQ ID NO: 585187
gagagucuccuauacgugu

SEQ ID NO: 619991 - RNA, 19 nt, Artificial Sequence
  Description of Artificial Sequence: Synthetic oligonucleotide
  Antisense strand to SEQ ID NO: 619990
acacguauaggagacucuc

SEQ ID NO: 619992 - RNA, 19 nt, Artificial Sequence
  Description of Artificial Sequence: Synthetic oligonucleotide
  Sense strand starting at position 1112 of SEQ ID NO: 585187
guagcuuccguaccgcaaa

SEQ ID NO: 619993 - RNA, 19 nt, Artificial Sequence
  Description of Artificial Sequence: Synthetic oligonucleotide
  Antisense strand to SEQ ID NO: 619992
uuugcgguacggaagcuac

SEQ ID NO: 619994 - RNA, 19 nt, Artificial Sequence
  Description of Artificial Sequence: Synthetic oligonucleotide
  Sense strand starting at position 1134 of SEQ ID NO: 585187
gcgccauucuaaucagaag

SEQ ID NO: 619995 - RNA, 19 nt, Artificial Sequence
  Description of Artificial Sequence: Synthetic oligonucleotide
  Antisense strand to SEQ ID NO: 619994
cuucugauuagaauggcgc

SEQ ID NO: 619996 - RNA, 19 nt, Artificial Sequence
  Description of Artificial Sequence: Synthetic oligonucleotide
  Sense strand starting at position 1437 of SEQ ID NO: 585187
gaauccacucuguggguua

SEQ ID NO: 619997 - RNA, 19 nt, Artificial Sequence
  Description of Artificial Sequence: Synthetic oligonucleotide
  Antisense strand to SEQ ID NO: 619996
uaacccacagaguggauuc

SEQ ID NO: 619998 - RNA, 19 nt, Artificial Sequence
  Description of Artificial Sequence: Synthetic oligonucleotide
  Sense strand starting at position 1442 of SEQ ID NO: 585187
cacucuguggguuaggaaa

SEQ ID NO: 619999 - RNA, 19 nt, Artificial Sequence
  Description of Artificial Sequence: Synthetic oligonucleotide
  Antisense strand to SEQ ID NO: 619998
uuuccuaacccacagagug

SEQ ID NO: 620000 - RNA, 19 nt, Artificial Sequence
  Description of Artificial Sequence: Synthetic oligonucleotide
  Sense strand starting at position 1493 of SEQ ID NO: 585187
ugccgagaagccguguaau

SEQ ID NO: 620001 - RNA, 19 nt, Artificial Sequence
  Description of Artificial Sequence: Synthetic oligonucleotide
  Antisense strand to SEQ ID NO: 620000
auuacacggcuucucggca

SEQ ID NO: 620002 - RNA, 19 nt, Artificial Sequence
  Description of Artificial Sequence: Synthetic oligonucleotide
  Sense strand starting at position 1496 of SEQ ID NO: 585187
cgagaagccguguaaugaa

SEQ ID NO: 620003 - RNA, 19 nt, Artificial Sequence
  Description of Artificial Sequence: Synthetic oligonucleotide
  Antisense strand to SEQ ID NO: 620002
uucauuacacggcuucucg

SEQ ID NO: 620004 - RNA, 19 nt, Artificial Sequence
  Description of Artificial Sequence: Synthetic oligonucleotide
  Sense strand starting at position 1741 of SEQ ID NO: 585187
gaaacaguaugcccgucaa

SEQ ID NO: 620005 - RNA, 19 nt, Artificial Sequence
  Description of Artificial Sequence: Synthetic oligonucleotide
  Antisense strand to SEQ ID NO: 620004
uugacgggcauacuguuuc

SEQ ID NO: 620006 - RNA, 19 nt, Artificial Sequence
  Description of Artificial Sequence: Synthetic oligonucleotide
  Sense strand starting at position 1813 of SEQ ID NO: 585187
agcggauuggccgaggaua

SEQ ID NO: 620007 - RNA, 19 nt, Artificial Sequence
  Description of Artificial Sequence: Synthetic oligonucleotide
  Antisense strand to SEQ ID NO: 620006
uauccucggccaauccgcu

SEQ ID NO: 620008 - RNA, 19 nt, Artificial Sequence
  Description of Artificial Sequence: Synthetic oligonucleotide
  Sense strand starting at position 2493 of SEQ ID NO: 585187
uguggauuccggugaaagg

SEQ ID NO: 620009 - RNA, 19 nt, Artificial Sequence
  Description of Artificial Sequence: Synthetic oligonucleotide
  Antisense strand to SEQ ID NO: 620008
ccuuucaccggaauccaca

SEQ ID NO: 620010 - RNA, 19 nt, Artificial Sequence
  Description of Artificial Sequence: Synthetic oligonucleotide
  Sense strand starting at position 2551 of SEQ ID NO: 585187
cccaguucuugcuugagaa

SEQ ID NO: 620011 - RNA, 19 nt, Artificial Sequence
  Description of Artificial Sequence: Synthetic oligonucleotide
  Antisense strand to SEQ ID NO: 620010
uucucaagcaagaacuggg

SEQ ID NO: 620012 - RNA, 19 nt, Artificial Sequence
  Description of Artificial Sequence: Synthetic oligonucleotide
  Sense strand starting at position 2552 of SEQ ID NO: 585187
ccaguucuugcuugagaau

SEQ ID NO: 620013 - RNA, 19 nt, Artificial Sequence
  Description of Artificial Sequence: Synthetic oligonucleotide
  Antisense strand to SEQ ID NO: 620012
auucucaagcaagaacugg

SEQ ID NO: 620014 - RNA, 19 nt, Artificial Sequence
  Description of Artificial Sequence: Synthetic oligonucleotide
  Sense strand starting at position 2553 of SEQ ID NO: 585187
caguucuugcuugagaaug

SEQ ID NO: 620015 - RNA, 19 nt, Artificial Sequence
  Description of Artificial Sequence: Synthetic oligonucleotide
  Antisense strand to SEQ ID NO: 620014
cauucucaagcaagaacug

SEQ ID NO: 620016 - RNA, 19 nt, Artificial Sequence
  Description of Artificial Sequence: Synthetic oligonucleotide
  Sense strand starting at position 2558 of SEQ ID NO: 585187
cuugcuugagaaugauaaa

SEQ ID NO: 620017 - RNA, 19 nt, Artificial Sequence
  Description of Artificial Sequence: Synthetic oligonucleotide
  Antisense strand to SEQ ID NO: 620016
uuuaucauucucaagcaag

SEQ ID NO: 620018 - RNA, 19 nt, Artificial Sequence
  Description of Artificial Sequence: Synthetic oligonucleotide
  Sense strand starting at position 2603 of SEQ ID NO: 585187
gggucaugcagagacuugu

SEQ ID NO: 620019 - RNA, 19 nt, Artificial Sequence
  Description of Artificial Sequence: Synthetic oligonucleotide
  Antisense strand to SEQ ID NO: 620018
acaagucucugcaugaccc

SEQ ID NO: 620020 - RNA, 19 nt, Artificial Sequence
  Description of Artificial Sequence: Synthetic oligonucleotide
  Sense strand starting at position 2614 of SEQ ID NO: 585187
agacuuguauugguaggga

SEQ ID NO: 620021 - RNA, 19 nt, Artificial Sequence
  Description of Artificial Sequence: Synthetic oligonucleotide
  Antisense strand to SEQ ID NO: 620020
ucccuaccaauacaagucu

SEQ ID NO: 620022 - RNA, 19 nt, Artificial Sequence
  Description of Artificial Sequence: Synthetic oligonucleotide
  Sense strand starting at position 2711 of SEQ ID NO: 585187
gggcuggugggucaaagua

SEQ ID NO: 620023 - RNA, 19 nt, Artificial Sequence
  Description of Artificial Sequence: Synthetic oligonucleotide
  Antisense strand to SEQ ID NO: 620022
uacuuugacccaccagccc

SEQ ID NO: 620024 - RNA, 19 nt, Artificial Sequence
  Description of Artificial Sequence: Synthetic oligonucleotide
  Sense strand starting at position 2815 of SEQ ID NO: 585187
agaggagugcuucagaguu

SEQ ID NO: 620025 - RNA, 19 nt, Artificial Sequence
  Description of Artificial Sequence: Synthetic oligonucleotide
  Antisense strand to SEQ ID NO: 620024
aacucugaagcacuccucu

SEQ ID NO: 620026 - RNA, 19 nt, Artificial Sequence
  Description of Artificial Sequence: Synthetic oligonucleotide
  Sense strand starting at position 2827 of SEQ ID NO: 585187
cagaguuuggguugcuuua

SEQ ID NO: 620027 - RNA, 19 nt, Artificial Sequence
  Description of Artificial Sequence: Synthetic oligonucleotide
  Antisense strand to SEQ ID NO: 620026
uaaagcaacccaaacucug

SEQ ID NO: 620028 - RNA, 19 nt, Artificial Sequence
  Description of Artificial Sequence: Synthetic oligonucleotide
  Sense strand starting at position 2840 of SEQ ID NO: 585187
gcuuuaagaaagggugguu

SEQ ID NO: 620029 - RNA, 19 nt, Artificial Sequence
  Description of Artificial Sequence: Synthetic oligonucleotide
  Antisense strand to SEQ ID NO: 620028
aaccacccuuucuuaaagc

SEQ ID NO: 620030 - RNA, 19 nt, Artificial Sequence
  Description of Artificial Sequence: Synthetic oligonucleotide
  Sense strand starting at position 2861 of SEQ ID NO: 585187
gaauucucccgugguugga

SEQ ID NO: 620031 - RNA, 19 nt, Artificial Sequence
  Description of Artificial Sequence: Synthetic oligonucleotide
  Antisense strand to SEQ ID NO: 620030
uccaaccacgggagaauuc

SEQ ID NO: 620032 - RNA, 19 nt, Artificial Sequence
  Description of Artificial Sequence: Synthetic oligonucleotide
  Sense strand starting at position 3117 of SEQ ID NO: 585187
cugcacuguucucuuacau

SEQ ID NO: 620033 - RNA, 19 nt, Artificial Sequence
  Description of Artificial Sequence: Synthetic oligonucleotide
  Antisense strand to SEQ ID NO: 620032
auguaagagaacagugcag

SEQ ID NO: 620034 - RNA, 19 nt, Artificial Sequence
  Description of Artificial Sequence: Synthetic oligonucleotide
  Sense strand starting at position 3231 of SEQ ID NO: 585187
gccaccguccagcaauaua

SEQ ID NO: 620035 - RNA, 19 nt, Artificial Sequence
  Description of Artificial Sequence: Synthetic oligonucleotide
  Antisense strand to SEQ ID NO: 620034
uauauugcuggacgguggc

SEQ ID NO: 620036 - RNA, 19 nt, Artificial Sequence
  Description of Artificial Sequence: Synthetic oligonucleotide
  Sense strand starting at position 3242 of SEQ ID NO: 585187
gcaauauaacguugggcua

SEQ ID NO: 620037 - RNA, 19 nt, Artificial Sequence
  Description of Artificial Sequence: Synthetic oligonucleotide
  Antisense strand to SEQ ID NO: 620036
uagcccaacguuauauugc

SEQ ID NO: 620038 - RNA, 19 nt, Artificial Sequence
  Description of Artificial Sequence: Synthetic oligonucleotide
  Sense strand starting at position 3610 of SEQ ID NO: 585187
ucagguggccuuuaggaaa

SEQ ID NO: 620039 - RNA, 19 nt, Artificial Sequence
  Description of Artificial Sequence: Synthetic oligonucleotide
  Antisense strand to SEQ ID NO: 620038
uuuccuaaaggccaccuga

SEQ ID NO: 620040 - RNA, 19 nt, Artificial Sequence
  Description of Artificial Sequence: Synthetic oligonucleotide
  Sense strand starting at position 3715 of SEQ ID NO: 585187
gguuccuagagacgggaua

SEQ ID NO: 620041 - RNA, 19 nt, Artificial Sequence
  Description of Artificial Sequence: Synthetic oligonucleotide
  Antisense strand to SEQ ID NO: 620040
uaucccgucucuaggaacc

SEQ ID NO: 620042 - RNA, 19 nt, Artificial Sequence
  Description of Artificial Sequence: Synthetic oligonucleotide
  Sense strand starting at position 3785 of SEQ ID NO: 585187
ugcuguaucuacuuauccu

SEQ ID NO: 620043 - RNA, 19 nt, Artificial Sequence
  Description of Artificial Sequence: Synthetic oligonucleotide
  Antisense strand to SEQ ID NO: 620042
aggauaaguagauacagca

SEQ ID NO: 620044 - RNA, 19 nt, Artificial Sequence
  Description of Artificial Sequence: Synthetic oligonucleotide
  Sense strand starting at position 3789 of SEQ ID NO: 585187
guaucuacuuauccuuaga

SEQ ID NO: 620045 - RNA, 19 nt, Artificial Sequence
  Description of Artificial Sequence: Synthetic oligonucleotide
  Antisense strand to SEQ ID NO: 620044
ucuaaggauaaguagauac

SEQ ID NO: 620046 - RNA, 19 nt, Artificial Sequence
  Description of Artificial Sequence: Synthetic oligonucleotide
  Sense strand starting at position 3861 of SEQ ID NO: 585187
acaaguacuucugcugagu

SEQ ID NO: 620047 - RNA, 19 nt, Artificial Sequence
  Description of Artificial Sequence: Synthetic oligonucleotide
  Antisense strand to SEQ ID NO: 620046
acucagcagaaguacuugu

SEQ ID NO: 620048 - RNA, 19 nt, Artificial Sequence
  Description of Artificial Sequence: Synthetic oligonucleotide
  Sense strand starting at position 3874 of SEQ ID NO: 585187
cugaguugggagugagaaa

SEQ ID NO: 620049 - RNA, 19 nt, Artificial Sequence
  Description of Artificial Sequence: Synthetic oligonucleotide
  Antisense strand to SEQ ID NO: 620048
uuucucacucccaacucag

SEQ ID NO: 620050 - RNA, 19 nt, Artificial Sequence
  Description of Artificial Sequence: Synthetic oligonucleotide
  Sense strand starting at position 3906 of SEQ ID NO: 585187
ugcaguuguguugaugaua

SEQ ID NO: 620051 - RNA, 19 nt, Artificial Sequence
  Description of Artificial Sequence: Synthetic oligonucleotide
  Antisense strand to SEQ ID NO: 620050
uaucaucaacacaacugca

SEQ ID NO: 620052 - RNA, 19 nt, Artificial Sequence
  Description of Artificial Sequence: Synthetic oligonucleotide
  Sense strand starting at position 51 of SEQ ID NO: 585188
gcuuuaaauccagggagcu

SEQ ID NO: 620053 - RNA, 19 nt, Artificial Sequence
  Description of Artificial Sequence: Synthetic oligonucleotide
  Antisense strand to SEQ ID NO: 620052
agcucccuggauuuaaagc

SEQ ID NO: 620054 - RNA, 19 nt, Artificial Sequence
  Description of Artificial Sequence: Synthetic oligonucleotide
  Sense strand starting at position 63 of SEQ ID NO: 585188
gggagcucauguuuauaac

SEQ ID NO: 620055 - RNA, 19 nt, Artificial Sequence
  Description of Artificial Sequence: Synthetic oligonucleotide
  Antisense strand to SEQ ID NO: 620054
guuauaaacaugagcuccc

SEQ ID NO: 620056 - RNA, 19 nt, Artificial Sequence
  Description of Artificial Sequence: Synthetic oligonucleotide
  Sense strand starting at position 190 of SEQ ID NO: 585188
gagacaugggucugagcua

SEQ ID NO: 620057 - RNA, 19 nt, Artificial Sequence
  Description of Artificial Sequence: Synthetic oligonucleotide
  Antisense strand to SEQ ID NO: 620056
uagcucagacccaugucuc

SEQ ID NO: 620058 - RNA, 19 nt, Artificial Sequence
  Description of Artificial Sequence: Synthetic oligonucleotide
  Sense strand starting at position 195 of SEQ ID NO: 585188
augggucugagcuaaaguu

SEQ ID NO: 620059 - RNA, 19 nt, Artificial Sequence
  Description of Artificial Sequence: Synthetic oligonucleotide
  Antisense strand to SEQ ID NO: 620058
aacuuuagcucagacccau

SEQ ID NO: 620060 - RNA, 19 nt, Artificial Sequence
  Description of Artificial Sequence: Synthetic oligonucleotide
  Sense strand starting at position 521 of SEQ ID NO: 585188
ucaguauccggugagucau

SEQ ID NO: 620061 - RNA, 19 nt, Artificial Sequence
  Description of Artificial Sequence: Synthetic oligonucleotide
  Antisense strand to SEQ ID NO: 620060
augacucaccggauacuga

SEQ ID NO: 620062 - RNA, 19 nt, Artificial Sequence
  Description of Artificial Sequence: Synthetic oligonucleotide
  Sense strand starting at position 527 of SEQ ID NO: 585188
uccggugagucaucuuauc

SEQ ID NO: 620063 - RNA, 19 nt, Artificial Sequence
  Description of Artificial Sequence: Synthetic oligonucleotide
  Antisense strand to SEQ ID NO: 620062
gauaagaugacucaccgga

SEQ ID NO: 620064 - RNA, 19 nt, Artificial Sequence
  Description of Artificial Sequence: Synthetic oligonucleotide
  Sense strand starting at position 556 of SEQ ID NO: 585188
agggaucucccuuguccau

SEQ ID NO: 620065 - RNA, 19 nt, Artificial Sequence
  Description of Artificial Sequence: Synthetic oligonucleotide
  Antisense strand to SEQ ID NO: 620064
auggacaagggagaucccu

SEQ ID NO: 620066 - RNA, 19 nt, Artificial Sequence
  Description of Artificial Sequence: Synthetic oligonucleotide
  Sense strand starting at position 655 of SEQ ID NO: 585188
gcagguucagucugagauc

SEQ ID NO: 620067 - RNA, 19 nt, Artificial Sequence
  Description of Artificial Sequence: Synthetic oligonucleotide
  Antisense strand to SEQ ID NO: 620066
gaucucagacugaaccugc

SEQ ID NO: 620068 - RNA, 19 nt, Artificial Sequence
  Description of Artificial Sequence: Synthetic oligonucleotide
  Sense strand starting at position 664 of SEQ ID NO: 585188
gucugagaucucugggagu

SEQ ID NO: 620069 - RNA, 19 nt, Artificial Sequence
  Description of Artificial Sequence: Synthetic oligonucleotide
  Antisense strand to SEQ ID NO: 620068
acucccagagaucucagac

SEQ ID NO: 620070 - RNA, 19 nt, Artificial Sequence
  Description of Artificial Sequence: Synthetic oligonucleotide
  Sense strand starting at position 666 of SEQ ID NO: 585188
cugagaucucugggaguca

SEQ ID NO: 620071 - RNA, 19 nt, Artificial Sequence
  Description of Artificial Sequence: Synthetic oligonucleotide
  Antisense strand to SEQ ID NO: 620070
ugacucccagagaucucag

SEQ ID NO: 620072 - RNA, 19 nt, Artificial Sequence
  Description of Artificial Sequence: Synthetic oligonucleotide
  Sense strand starting at position 1070 of SEQ ID NO: 585188
cgacuuugcuccuuaguaa

SEQ ID NO: 620073 - RNA, 19 nt, Artificial Sequence
  Description of Artificial Sequence: Synthetic oligonucleotide
  Antisense strand to SEQ ID NO: 620072
uuacuaaggagcaaagucg

SEQ ID NO: 620074 - RNA, 19 nt, Artificial Sequence
  Description of Artificial Sequence: Synthetic oligonucleotide
  Sense strand starting at position 1073 of SEQ ID NO: 585188
cuuugcuccuuaguaaaga

SEQ ID NO: 620075 - RNA, 19 nt, Artificial Sequence
  Description of Artificial Sequence: Synthetic oligonucleotide
  Antisense strand to SEQ ID NO: 620074
ucuuuacuaaggagcaaag

SEQ ID NO: 620076 - RNA, 19 nt, Artificial Sequence
  Description of Artificial Sequence: Synthetic oligonucleotide
  Sense strand starting at position 1107 of SEQ ID NO: 585188
gagacuguuguccagaggu

SEQ ID NO: 620077 - RNA, 19 nt, Artificial Sequence
  Description of Artificial Sequence: Synthetic oligonucleotide
  Antisense strand to SEQ ID NO: 620076
accucuggacaacagucuc

SEQ ID NO: 620078 - RNA, 19 nt, Artificial Sequence
  Description of Artificial Sequence: Synthetic oligonucleotide
  Sense strand starting at position 1264 of SEQ ID NO: 585188
ggaguuuccucuucccaaa

SEQ ID NO: 620079 - RNA, 19 nt, Artificial Sequence
  Description of Artificial Sequence: Synthetic oligonucleotide
  Antisense strand to SEQ ID NO: 620078
uuugggaagaggaaacucc

SEQ ID NO: 620080 - RNA, 19 nt, Artificial Sequence
  Description of Artificial Sequence: Synthetic oligonucleotide
  Sense strand starting at position 1319 of SEQ ID NO: 585188
gagagucuccuauacgugu

SEQ ID NO: 620081 - RNA, 19 nt, Artificial Sequence
  Description of Artificial Sequence: Synthetic oligonucleotide
  Antisense strand to SEQ ID NO: 620080
acacguauaggagacucuc

SEQ ID NO: 620082 - RNA, 19 nt, Artificial Sequence
  Description of Artificial Sequence: Synthetic oligonucleotide
  Sense strand starting at position 1344 of SEQ ID NO: 585188
guagcuuccguaccgcaaa

SEQ ID NO: 620083 - RNA, 19 nt, Artificial Sequence
  Description of Artificial Sequence: Synthetic oligonucleotide
  Antisense strand to SEQ ID NO: 620082
uuugcgguacggaagcuac

SEQ ID NO: 620084 - RNA, 19 nt, Artificial Sequence
  Description of Artificial Sequence: Synthetic oligonucleotide
  Sense strand starting at position 1366 of SEQ ID NO: 585188
gcgccauucuaaucagaag

SEQ ID NO: 620085 - RNA, 19 nt, Artificial Sequence
  Description of Artificial Sequence: Synthetic oligonucleotide
  Antisense strand to SEQ ID NO: 620084
cuucugauuagaauggcgc

SEQ ID NO: 620086 - RNA, 19 nt, Artificial Sequence
  Description of Artificial Sequence: Synthetic oligonucleotide
  Sense strand starting at position 1669 of SEQ ID NO: 585188
gaauccacucuguggguua

SEQ ID NO: 620087 - RNA, 19 nt, Artificial Sequence
  Description of Artificial Sequence: Synthetic oligonucleotide
  Antisense strand to SEQ ID NO: 620086
uaacccacagaguggauuc

SEQ ID NO: 620088 - RNA, 19 nt, Artificial Sequence
  Description of Artificial Sequence: Synthetic oligonucleotide
  Sense strand starting at position 1674 of SEQ ID NO: 585188
cacucuguggguuaggaaa

SEQ ID NO: 620089 - RNA, 19 nt, Artificial Sequence
  Description of Artificial Sequence: Synthetic oligonucleotide
  Antisense strand to SEQ ID NO: 620088
uuuccuaacccacagagug

SEQ ID NO: 620090 - RNA, 19 nt, Artificial Sequence
  Description of Artificial Sequence: Synthetic oligonucleotide
  Sense strand starting at position 1725 of SEQ ID NO: 585188
ugccgagaagccguguaau

SEQ ID NO: 620091 - RNA, 19 nt, Artificial Sequence
  Description of Artificial Sequence: Synthetic oligonucleotide
  Antisense strand to SEQ ID NO: 620090
auuacacggcuucucggca

SEQ ID NO: 620092 - RNA, 19 nt, Artificial Sequence
  Description of Artificial Sequence: Synthetic oligonucleotide
  Sense strand starting at position 1728 of SEQ ID NO: 585188
cgagaagccguguaaugaa

SEQ ID NO: 620093 - RNA, 19 nt, Artificial Sequence
  Description of Artificial Sequence: Synthetic oligonucleotide
  Antisense strand to SEQ ID NO: 620092
uucauuacacggcuucucg

SEQ ID NO: 620094 - RNA, 19 nt, Artificial Sequence
  Description of Artificial Sequence: Synthetic oligonucleotide
  Sense strand starting at position 1973 of SEQ ID NO: 585188
gaaacaguaugcccgucaa

SEQ ID NO: 620095 - RNA, 19 nt, Artificial Sequence
  Description of Artificial Sequence: Synthetic oligonucleotide
  Antisense strand to SEQ ID NO: 620094
uugacgggcauacuguuuc

SEQ ID NO: 620096 - RNA, 19 nt, Artificial Sequence
  Description of Artificial Sequence: Synthetic oligonucleotide
  Sense strand starting at position 2045 of SEQ ID NO: 585188
agcggauuggccgaggaua

SEQ ID NO: 620097 - RNA, 19 nt, Artificial Sequence
  Description of Artificial Sequence: Synthetic oligonucleotide
  Antisense strand to SEQ ID NO: 620096
uauccucggccaauccgcu

SEQ ID NO: 620098 - RNA, 19 nt, Artificial Sequence
  Description of Artificial Sequence: Synthetic oligonucleotide
  Sense strand starting at position 2725 of SEQ ID NO: 585188
uguggauuccggugaaagg

SEQ ID NO: 620099 - RNA, 19 nt, Artificial Sequence
  Description of Artificial Sequence: Synthetic oligonucleotide
  Antisense strand to SEQ ID NO: 620098
ccuuucaccggaauccaca

SEQ ID NO: 620100 - RNA, 19 nt, Artificial Sequence
  Description of Artificial Sequence: Synthetic oligonucleotide
  Sense strand starting at position 2783 of SEQ ID NO: 585188
cccaguucuugcuugagaa

SEQ ID NO: 620101 - RNA, 19 nt, Artificial Sequence
  Description of Artificial Sequence: Synthetic oligonucleotide
  Antisense strand to SEQ ID NO: 620100
uucucaagcaagaacuggg

SEQ ID NO: 620102 - RNA, 19 nt, Artificial Sequence
  Description of Artificial Sequence: Synthetic oligonucleotide
  Sense strand starting at position 2784 of SEQ ID NO: 585188
ccaguucuugcuugagaau

SEQ ID NO: 620103 - RNA, 19 nt, Artificial Sequence
  Description of Artificial Sequence: Synthetic oligonucleotide
  Antisense strand to SEQ ID NO: 620102
auucucaagcaagaacugg

SEQ ID NO: 620104 - RNA, 19 nt, Artificial Sequence
  Description of Artificial Sequence: Synthetic oligonucleotide
  Sense strand starting at position 2785 of SEQ ID NO: 585188
caguucuugcuugagaaug

SEQ ID NO: 620105 - RNA, 19 nt, Artificial Sequence
  Description of Artificial Sequence: Synthetic oligonucleotide
  Antisense strand to SEQ ID NO: 620104
cauucucaagcaagaacug

SEQ ID NO: 620106 - RNA, 19 nt, Artificial Sequence
  Description of Artificial Sequence: Synthetic oligonucleotide
  Sense strand starting at position 2790 of SEQ ID NO: 585188
cuugcuugagaaugauaaa

SEQ ID NO: 620107 - RNA, 19 nt, Artificial Sequence
  Description of Artificial Sequence: Synthetic oligonucleotide
  Antisense strand to SEQ ID NO: 620106
uuuaucauucucaagcaag

SEQ ID NO: 620108 - RNA, 19 nt, Artificial Sequence
  Description of Artificial Sequence: Synthetic oligonucleotide
  Sense strand starting at position 2835 of SEQ ID NO: 585188
gggucaugcagagacuugu

SEQ ID NO: 620109 - RNA, 19 nt, Artificial Sequence
  Description of Artificial Sequence: Synthetic oligonucleotide
  Antisense strand to SEQ ID NO: 620108
acaagucucugcaugaccc

SEQ ID NO: 620110 - RNA, 19 nt, Artificial Sequence
  Description of Artificial Sequence: Synthetic oligonucleotide
  Sense strand starting at position 2846 of SEQ ID NO: 585188
agacuuguauugguaggga

SEQ ID NO: 620111 - RNA, 19 nt, Artificial Sequence
  Description of Artificial Sequence: Synthetic oligonucleotide
  Antisense strand to SEQ ID NO: 620110
ucccuaccaauacaagucu

SEQ ID NO: 620112 - RNA, 19 nt, Artificial Sequence
  Description of Artificial Sequence: Synthetic oligonucleotide
  Sense strand starting at position 2943 of SEQ ID NO: 585188
gggcuggugggucaaagua

SEQ ID NO: 620113 - RNA, 19 nt, Artificial Sequence
  Description of Artificial Sequence: Synthetic oligonucleotide
  Antisense strand to SEQ ID NO: 620112
uacuuugacccaccagccc

SEQ ID NO: 620114 - RNA, 19 nt, Artificial Sequence
  Description of Artificial Sequence: Synthetic oligonucleotide
  Sense strand starting at position 3047 of SEQ ID NO: 585188
agaggagugcuucagaguu

SEQ ID NO: 620115 - RNA, 19 nt, Artificial Sequence
  Description of Artificial Sequence: Synthetic oligonucleotide
  Antisense strand to SEQ ID NO: 620114
aacucugaagcacuccucu

SEQ ID NO: 620116 - RNA, 19 nt, Artificial Sequence
  Description of Artificial Sequence: Synthetic oligonucleotide
  Sense strand starting at position 3059 of SEQ ID NO: 585188
cagaguuuggguugcuuua

SEQ ID NO: 620117 - RNA, 19 nt, Artificial Sequence
  Description of Artificial Sequence: Synthetic oligonucleotide
  Antisense strand to SEQ ID NO: 620116
uaaagcaacccaaacucug

SEQ ID NO: 620118 - RNA, 19 nt, Artificial Sequence
  Description of Artificial Sequence: Synthetic oligonucleotide
  Sense strand starting at position 3072 of SEQ ID NO: 585188
gcuuuaagaaagggugguu

SEQ ID NO: 620119 - RNA, 19 nt, Artificial Sequence
  Description of Artificial Sequence: Synthetic oligonucleotide
  Antisense strand to SEQ ID NO: 620118
aaccacccuuucuuaaagc

SEQ ID NO: 620120 - RNA, 19 nt, Artificial Sequence
  Description of Artificial Sequence: Synthetic oligonucleotide
  Sense strand starting at position 3093 of SEQ ID NO: 585188
gaauucucccgugguugga

SEQ ID NO: 620121 - RNA, 19 nt, Artificial Sequence
  Description of Artificial Sequence: Synthetic oligonucleotide
  Antisense strand to SEQ ID NO: 620120
uccaaccacgggagaauuc

SEQ ID NO: 620122 - RNA, 19 nt, Artificial Sequence
  Description of Artificial Sequence: Synthetic oligonucleotide
  Sense strand starting at position 3349 of SEQ ID NO: 585188
cugcacuguucucuuacau

SEQ ID NO: 620123 - RNA, 19 nt, Artificial Sequence
  Description of Artificial Sequence: Synthetic oligonucleotide
  Antisense strand to SEQ ID NO: 620122
auguaagagaacagugcag

SEQ ID NO: 620124 - RNA, 19 nt, Artificial Sequence
  Description of Artificial Sequence: Synthetic oligonucleotide
  Sense strand starting at position 3463 of SEQ ID NO: 585188
gccaccguccagcaauaua

SEQ ID NO: 620125 - RNA, 19 nt, Artificial Sequence
  Description of Artificial Sequence: Synthetic oligonucleotide
  Antisense strand to SEQ ID NO: 620124
uauauugcuggacgguggc

SEQ ID NO: 620126 - RNA, 19 nt, Artificial Sequence
  Description of Artificial Sequence: Synthetic oligonucleotide
  Sense strand starting at position 3474 of SEQ ID NO: 585188
gcaauauaacguugggcua

SEQ ID NO: 620127 - RNA, 19 nt, Artificial Sequence
  Description of Artificial Sequence: Synthetic oligonucleotide
  Antisense strand to SEQ ID NO: 620126
uagcccaacguuauauugc

SEQ ID NO: 620128 - RNA, 19 nt, Artificial Sequence
  Description of Artificial Sequence: Synthetic oligonucleotide
  Sense strand starting at position 3842 of SEQ ID NO: 585188
ucagguggccuuuaggaaa

SEQ ID NO: 620129 - RNA, 19 nt, Artificial Sequence
  Description of Artificial Sequence: Synthetic oligonucleotide
  Antisense strand to SEQ ID NO: 620128
uuuccuaaaggccaccuga

SEQ ID NO: 620130 - RNA, 19 nt, Artificial Sequence
  Description of Artificial Sequence: Synthetic oligonucleotide
  Sense strand starting at position 3947 of SEQ ID NO: 585188
gguuccuagagacgggaua

SEQ ID NO: 620131 - RNA, 19 nt, Artificial Sequence
  Description of Artificial Sequence: Synthetic oligonucleotide
  Antisense strand to SEQ ID NO: 620130
uaucccgucucuaggaacc

SEQ ID NO: 620132 - RNA, 19 nt, Artificial Sequence
  Description of Artificial Sequence: Synthetic oligonucleotide
  Sense strand starting at position 9 of SEQ ID NO: 585189
ucuuuaaaccauuguggga

SEQ ID NO: 620133 - RNA, 19 nt, Artificial Sequence
  Description of Artificial Sequence: Synthetic oligonucleotide
  Antisense strand to SEQ ID NO: 620132
ucccacaaugguuuaaaga

SEQ ID NO: 620134 - RNA, 19 nt, Artificial Sequence
  Description of Artificial Sequence: Synthetic oligonucleotide
  Sense strand starting at position 101 of SEQ ID NO: 585189
agucauaaugacuauagcu

SEQ ID NO: 620135 - RNA, 19 nt, Artificial Sequence
  Description of Artificial Sequence: Synthetic oligonucleotide
  Antisense strand to SEQ ID NO: 620134
agcuauagucauuaugacu

SEQ ID NO: 620136 - RNA, 19 nt, Artificial Sequence
  Description of Artificial Sequence: Synthetic oligonucleotide
  Sense strand starting at position 125 of SEQ ID NO: 585189
ucauguauugcauacuaug

SEQ ID NO: 620137 - RNA, 19 nt, Artificial Sequence
  Description of Artificial Sequence: Synthetic oligonucleotide
  Antisense strand to SEQ ID NO: 620136
cauaguaugcaauacauga

SEQ ID NO: 620138 - RNA, 19 nt, Artificial Sequence
  Description of Artificial Sequence: Synthetic oligonucleotide
  Sense strand starting at position 279 of SEQ ID NO: 585189
gcuuuaaauccagggagcu

SEQ ID NO: 620139 - RNA, 19 nt, Artificial Sequence
  Description of Artificial Sequence: Synthetic oligonucleotide
  Antisense strand to SEQ ID NO: 620138
agcucccuggauuuaaagc

SEQ ID NO: 620140 - RNA, 19 nt, Artificial Sequence
  Description of Artificial Sequence: Synthetic oligonucleotide
  Sense strand starting at position 291 of SEQ ID NO: 585189
gggagcucauguuuauaac

SEQ ID NO: 620141 - RNA, 19 nt, Artificial Sequence
  Description of Artificial Sequence: Synthetic oligonucleotide
  Antisense strand to SEQ ID NO: 620140
guuauaaacaugagcuccc

SEQ ID NO: 620142 - RNA, 19 nt, Artificial Sequence
  Description of Artificial Sequence: Synthetic oligonucleotide
  Sense strand starting at position 418 of SEQ ID NO: 585189
gagacaugggucugagcua

SEQ ID NO: 620143 - RNA, 19 nt, Artificial Sequence
  Description of Artificial Sequence: Synthetic oligonucleotide
  Antisense strand to SEQ ID NO: 620142
uagcucagacccaugucuc

SEQ ID NO: 620144 - RNA, 19 nt, Artificial Sequence
  Description of Artificial Sequence: Synthetic oligonucleotide
  Sense strand starting at position 423 of SEQ ID NO: 585189
augggucugagcuaaaguu

SEQ ID NO: 620145 - RNA, 19 nt, Artificial Sequence
  Description of Artificial Sequence: Synthetic oligonucleotide
  Antisense strand to SEQ ID NO: 620144
aacuuuagcucagacccau

SEQ ID NO: 620146 - RNA, 19 nt, Artificial Sequence
  Description of Artificial Sequence: Synthetic oligonucleotide
  Sense strand starting at position 749 of SEQ ID NO: 585189
ucaguauccggugagucau

SEQ ID NO: 620147 - RNA, 19 nt, Artificial Sequence
  Description of Artificial Sequence: Synthetic oligonucleotide
  Antisense strand to SEQ ID NO: 620146
augacucaccggauacuga

SEQ ID NO: 620148 - RNA, 19 nt, Artificial Sequence
  Description of Artificial Sequence: Synthetic oligonucleotide
  Sense strand starting at position 755 of SEQ ID NO: 585189
uccggugagucaucuuauc

SEQ ID NO: 620149 - RNA, 19 nt, Artificial Sequence
  Description of Artificial Sequence: Synthetic oligonucleotide
  Antisense strand to SEQ ID NO: 620148
gauaagaugacucaccgga

SEQ ID NO: 620150 - RNA, 19 nt, Artificial Sequence
  Description of Artificial Sequence: Synthetic oligonucleotide
  Sense strand starting at position 784 of SEQ ID NO: 585189
agggaucucccuuguccau

SEQ ID NO: 620151 - RNA, 19 nt, Artificial Sequence
  Description of Artificial Sequence: Synthetic oligonucleotide
  Antisense strand to SEQ ID NO: 620150
auggacaagggagaucccu

SEQ ID NO: 620152 - RNA, 19 nt, Artificial Sequence
  Description of Artificial Sequence: Synthetic oligonucleotide
  Sense strand starting at position 883 of SEQ ID NO: 585189
gcagguucagucugagauc

SEQ ID NO: 620153 - RNA, 19 nt, Artificial Sequence
  Description of Artificial Sequence: Synthetic oligonucleotide
  Antisense strand to SEQ ID NO: 620152
gaucucagacugaaccugc

SEQ ID NO: 620154 - RNA, 19 nt, Artificial Sequence
  Description of Artificial Sequence: Synthetic oligonucleotide
  Sense strand starting at position 892 of SEQ ID NO: 585189
gucugagaucucugggagu

SEQ ID NO: 620155 - RNA, 19 nt, Artificial Sequence
  Description of Artificial Sequence: Synthetic oligonucleotide
  Antisense strand to SEQ ID NO: 620154
acucccagagaucucagac

SEQ ID NO: 620156 - RNA, 19 nt, Artificial Sequence
  Description of Artificial Sequence: Synthetic oligonucleotide
  Sense strand starting at position 894 of SEQ ID NO: 585189
cugagaucucugggaguca

SEQ ID NO: 620157 - RNA, 19 nt, Artificial Sequence
  Description of Artificial Sequence: Synthetic oligonucleotide
  Antisense strand to SEQ ID NO: 620156
ugacucccagagaucucag

SEQ ID NO: 620158 - RNA, 19 nt, Artificial Sequence
  Description of Artificial Sequence: Synthetic oligonucleotide
  Sense strand starting at position 1301 of SEQ ID NO: 585189
cuuugcuccuuaguaaaga

SEQ ID NO: 620159 - RNA, 19 nt, Artificial Sequence
  Description of Artificial Sequence: Synthetic oligonucleotide
  Antisense strand to SEQ ID NO: 620158
ucuuuacuaaggagcaaag

SEQ ID NO: 620160 - RNA, 19 nt, Artificial Sequence
  Description of Artificial Sequence: Synthetic oligonucleotide
  Sense strand starting at position 1335 of SEQ ID NO: 585189
gagacuguuguccagaggu

SEQ ID NO: 620161 - RNA, 19 nt, Artificial Sequence
  Description of Artificial Sequence: Synthetic oligonucleotide
  Antisense strand to SEQ ID NO: 620160
accucuggacaacagucuc

SEQ ID NO: 620162 - RNA, 19 nt, Artificial Sequence
  Description of Artificial Sequence: Synthetic oligonucleotide
  Sense strand starting at position 1492 of SEQ ID NO: 585189
ggaguuuccucuucccaaa

SEQ ID NO: 620163 - RNA, 19 nt, Artificial Sequence
  Description of Artificial Sequence: Synthetic oligonucleotide
  Antisense strand to SEQ ID NO: 620162
uuugggaagaggaaacucc

SEQ ID NO: 620164 - RNA, 19 nt, Artificial Sequence
  Description of Artificial Sequence: Synthetic oligonucleotide
  Sense strand starting at position 1547 of SEQ ID NO: 585189
gagagucuccuauacgugu

SEQ ID NO: 620165 - RNA, 19 nt, Artificial Sequence
  Description of Artificial Sequence: Synthetic oligonucleotide
  Antisense strand to SEQ ID NO: 620164
acacguauaggagacucuc

SEQ ID NO: 620166 - RNA, 19 nt, Artificial Sequence
  Description of Artificial Sequence: Synthetic oligonucleotide
  Sense strand starting at position 1572 of SEQ ID NO: 585189
guagcuuccguaccgcaaa

SEQ ID NO: 620167 - RNA, 19 nt, Artificial Sequence
  Description of Artificial Sequence: Synthetic oligonucleotide
  Antisense strand to SEQ ID NO: 620166
uuugcgguacggaagcuac

SEQ ID NO: 620168 - RNA, 19 nt, Artificial Sequence
  Description of Artificial Sequence: Synthetic oligonucleotide
  Sense strand starting at position 1594 of SEQ ID NO: 585189
gcgccauucuaaucagaag

SEQ ID NO: 620169 - RNA, 19 nt, Artificial Sequence
  Description of Artificial Sequence: Synthetic oligonucleotide
  Antisense strand to SEQ ID NO: 620168
cuucugauuagaauggcgc

SEQ ID NO: 620170 - RNA, 19 nt, Artificial Sequence
  Description of Artificial Sequence: Synthetic oligonucleotide
  Sense strand starting at position 1897 of SEQ ID NO: 585189
gaauccacucuguggguua

SEQ ID NO: 620171 - RNA, 19 nt, Artificial Sequence
  Description of Artificial Sequence: Synthetic oligonucleotide
  Antisense strand to SEQ ID NO: 620170
uaacccacagaguggauuc

SEQ ID NO: 620172 - RNA, 19 nt, Artificial Sequence
  Description of Artificial Sequence: Synthetic oligonucleotide
  Sense strand starting at position 1902 of SEQ ID NO: 585189
cacucuguggguuaggaaa

SEQ ID NO: 620173 - RNA, 19 nt, Artificial Sequence
  Description of Artificial Sequence: Synthetic oligonucleotide
  Antisense strand to SEQ ID NO: 620172
uuuccuaacccacagagug

SEQ ID NO: 620174 - RNA, 19 nt, Artificial Sequence
  Description of Artificial Sequence: Synthetic oligonucleotide
  Sense strand starting at position 1953 of SEQ ID NO: 585189
ugccgagaagccguguaau

SEQ ID NO: 620175 - RNA, 19 nt, Artificial Sequence
  Description of Artificial Sequence: Synthetic oligonucleotide
  Antisense strand to SEQ ID NO: 620174
auuacacggcuucucggca

SEQ ID NO: 620176 - RNA, 19 nt, Artificial Sequence
  Description of Artificial Sequence: Synthetic oligonucleotide
  Sense strand starting at position 1956 of SEQ ID NO: 585189
cgagaagccguguaaugaa

SEQ ID NO: 620177 - RNA, 19 nt, Artificial Sequence
  Description of Artificial Sequence: Synthetic oligonucleotide
  Antisense strand to SEQ ID NO: 620176
uucauuacacggcuucucg

SEQ ID NO: 620178 - RNA, 19 nt, Artificial Sequence
  Description of Artificial Sequence: Synthetic oligonucleotide
  Sense strand starting at position 2201 of SEQ ID NO: 585189
gaaacaguaugcccgucaa

SEQ ID NO: 620179 - RNA, 19 nt, Artificial Sequence
  Description of Artificial Sequence: Synthetic oligonucleotide
  Antisense strand to SEQ ID NO: 620178
uugacgggcauacuguuuc

SEQ ID NO: 620180 - RNA, 19 nt, Artificial Sequence
  Description of Artificial Sequence: Synthetic oligonucleotide
  Sense strand starting at position 2273 of SEQ ID NO: 585189
agcggauuggccgaggaua

SEQ ID NO: 620181 - RNA, 19 nt, Artificial Sequence
  Description of Artificial Sequence: Synthetic oligonucleotide
  Antisense strand to SEQ ID NO: 620180
uauccucggccaauccgcu

SEQ ID NO: 620182 - RNA, 19 nt, Artificial Sequence
  Description of Artificial Sequence: Synthetic oligonucleotide
  Sense strand starting at position 2953 of SEQ ID NO: 585189
uguggauuccggugaaagg

SEQ ID NO: 620183 - RNA, 19 nt, Artificial Sequence
  Description of Artificial Sequence: Synthetic oligonucleotide
  Antisense strand to SEQ ID NO: 620182
ccuuucaccggaauccaca

SEQ ID NO: 620184 - RNA, 19 nt, Artificial Sequence
  Description of Artificial Sequence: Synthetic oligonucleotide
  Sense strand starting at position 3011 of SEQ ID NO: 585189
cccaguucuugcuugagaa

SEQ ID NO: 620185 - RNA, 19 nt, Artificial Sequence
  Description of Artificial Sequence: Synthetic oligonucleotide
  Antisense strand to SEQ ID NO: 620184
uucucaagcaagaacuggg

SEQ ID NO: 620186 - RNA, 19 nt, Artificial Sequence
  Description of Artificial Sequence: Synthetic oligonucleotide
  Sense strand starting at position 3012 of SEQ ID NO: 585189
ccaguucuugcuugagaau

SEQ ID NO: 620187 - RNA, 19 nt, Artificial Sequence
  Description of Artificial Sequence: Synthetic oligonucleotide
  Antisense strand to SEQ ID NO: 620186
auucucaagcaagaacugg

SEQ ID NO: 620188 - RNA, 19 nt, Artificial Sequence
  Description of Artificial Sequence: Synthetic oligonucleotide
  Sense strand starting at position 3013 of SEQ ID NO: 585189
caguucuugcuugagaaug

SEQ ID NO: 620189 - RNA, 19 nt, Artificial Sequence
  Description of Artificial Sequence: Synthetic oligonucleotide
  Antisense strand to SEQ ID NO: 620188
cauucucaagcaagaacug

SEQ ID NO: 620190 - RNA, 19 nt, Artificial Sequence
  Description of Artificial Sequence: Synthetic oligonucleotide
  Sense strand starting at position 3018 of SEQ ID NO: 585189
cuugcuugagaaugauaaa

SEQ ID NO: 620191 - RNA, 19 nt, Artificial Sequence
  Description of Artificial Sequence: Synthetic oligonucleotide
  Antisense strand to SEQ ID NO: 620190
uuuaucauucucaagcaag

SEQ ID NO: 620192 - RNA, 19 nt, Artificial Sequence
  Description of Artificial Sequence: Synthetic oligonucleotide
  Sense strand starting at position 3063 of SEQ ID NO: 585189
gggucaugcagagacuugu

SEQ ID NO: 620193 - RNA, 19 nt, Artificial Sequence
  Description of Artificial Sequence: Synthetic oligonucleotide
  Antisense strand to SEQ ID NO: 620192
acaagucucugcaugaccc

SEQ ID NO: 620194 - RNA, 19 nt, Artificial Sequence
  Description of Artificial Sequence: Synthetic oligonucleotide
  Sense strand starting at position 3074 of SEQ ID NO: 585189
agacuuguauugguaggga

SEQ ID NO: 620195 - RNA, 19 nt, Artificial Sequence
  Description of Artificial Sequence: Synthetic oligonucleotide
  Antisense strand to SEQ ID NO: 620194
ucccuaccaauacaagucu

SEQ ID NO: 620196 - RNA, 19 nt, Artificial Sequence
  Description of Artificial Sequence: Synthetic oligonucleotide
  Sense strand starting at position 3171 of SEQ ID NO: 585189
gggcuggugggucaaagua

SEQ ID NO: 620197 - RNA, 19 nt, Artificial Sequence
  Description of Artificial Sequence: Synthetic oligonucleotide
  Antisense strand to SEQ ID NO: 620196
uacuuugacccaccagccc

SEQ ID NO: 620198 - RNA, 19 nt, Artificial Sequence
  Description of Artificial Sequence: Synthetic oligonucleotide
  Sense strand starting at position 3275 of SEQ ID NO: 585189
agaggagugcuucagaguu

SEQ ID NO: 620199 - RNA, 19 nt, Artificial Sequence
  Description of Artificial Sequence: Synthetic oligonucleotide
  Antisense strand to SEQ ID NO: 620198
aacucugaagcacuccucu

SEQ ID NO: 620200 - RNA, 19 nt, Artificial Sequence
  Description of Artificial Sequence: Synthetic oligonucleotide
  Sense strand starting at position 3287 of SEQ ID NO: 585189
cagaguuuggguugcuuua

SEQ ID NO: 620201 - RNA, 19 nt, Artificial Sequence
  Description of Artificial Sequence: Synthetic oligonucleotide
  Antisense strand to SEQ ID NO: 620200
uaaagcaacccaaacucug

SEQ ID NO: 620202 - RNA, 19 nt, Artificial Sequence
  Description of Artificial Sequence: Synthetic oligonucleotide
  Sense strand starting at position 3300 of SEQ ID NO: 585189
gcuuuaagaaagggugguu

SEQ ID NO: 620203 - RNA, 19 nt, Artificial Sequence
  Description of Artificial Sequence: Synthetic oligonucleotide
  Antisense strand to SEQ ID NO: 620202
aaccacccuuucuuaaagc

SEQ ID NO: 620204 - RNA, 19 nt, Artificial Sequence
  Description of Artificial Sequence: Synthetic oligonucleotide
  Sense strand starting at position 3321 of SEQ ID NO: 585189
gaauucucccgugguugga

SEQ ID NO: 620205 - RNA, 19 nt, Artificial Sequence
  Description of Artificial Sequence: Synthetic oligonucleotide
  Antisense strand to SEQ ID NO: 620204
uccaaccacgggagaauuc

SEQ ID NO: 620206 - RNA, 19 nt, Artificial Sequence
  Description of Artificial Sequence: Synthetic oligonucleotide
  Sense strand starting at position 3577 of SEQ ID NO: 585189
cugcacuguucucuuacau

SEQ ID NO: 620207 - RNA, 19 nt, Artificial Sequence
  Description of Artificial Sequence: Synthetic oligonucleotide
  Antisense strand to SEQ ID NO: 620206
auguaagagaacagugcag

SEQ ID NO: 620208 - RNA, 19 nt, Artificial Sequence
  Description of Artificial Sequence: Synthetic oligonucleotide
  Sense strand starting at position 3691 of SEQ ID NO: 585189
gccaccguccagcaauaua

SEQ ID NO: 620209 - RNA, 19 nt, Artificial Sequence
  Description of Artificial Sequence: Synthetic oligonucleotide
  Antisense strand to SEQ ID NO: 620208
uauauugcuggacgguggc

SEQ ID NO: 620210 - RNA, 19 nt, Artificial Sequence
  Description of Artificial Sequence: Synthetic oligonucleotide
  Sense strand starting at position 3702 of SEQ ID NO: 585189
gcaauauaacguugggcua

SEQ ID NO: 620211 - RNA, 19 nt, Artificial Sequence
  Description of Artificial Sequence: Synthetic oligonucleotide
  Antisense strand to SEQ ID NO: 620210
uagcccaacguuauauugc

SEQ ID NO: 620212 - RNA, 19 nt, Artificial Sequence
  Description of Artificial Sequence: Synthetic oligonucleotide
  Sense strand starting at position 56 of SEQ ID NO: 585190
auagaauugagagguaggu

SEQ ID NO: 620213 - RNA, 19 nt, Artificial Sequence
  Description of Artificial Sequence: Synthetic oligonucleotide
  Antisense strand to SEQ ID NO: 620212
accuaccucucaauucuau

SEQ ID NO: 620214 - RNA, 19 nt, Artificial Sequence
  Description of Artificial Sequence: Synthetic oligonucleotide
  Sense strand starting at position 124 of SEQ ID NO: 585190
acuagaaccuaagucugau

SEQ ID NO: 620215 - RNA, 19 nt, Artificial Sequence
  Description of Artificial Sequence: Synthetic oligonucleotide
  Antisense strand to SEQ ID NO: 620214
aucagacuuagguucuagu

SEQ ID NO: 620216 - RNA, 19 nt, Artificial Sequence
  Description of Artificial Sequence: Synthetic oligonucleotide
  Sense strand starting at position 333 of SEQ ID NO: 585190
agucaaauucugugauaac

SEQ ID NO: 620217 - RNA, 19 nt, Artificial Sequence
  Description of Artificial Sequence: Synthetic oligonucleotide
  Antisense strand to SEQ ID NO: 620216
guuaucacagaauuugacu

SEQ ID NO: 620218 - RNA, 19 nt, Artificial Sequence
  Description of Artificial Sequence: Synthetic oligonucleotide
  Sense strand starting at position 364 of SEQ ID NO: 585190
aucguagcucaguauauau

SEQ ID NO: 620219 - RNA, 19 nt, Artificial Sequence
  Description of Artificial Sequence: Synthetic oligonucleotide
  Antisense strand to SEQ ID NO: 620218
auauauacugagcuacgau

SEQ ID NO: 620220 - RNA, 19 nt, Artificial Sequence
  Description of Artificial Sequence: Synthetic oligonucleotide
  Sense strand starting at position 371 of SEQ ID NO: 585190
cucaguauauaugucuauu

SEQ ID NO: 620221 - RNA, 19 nt, Artificial Sequence
  Description of Artificial Sequence: Synthetic oligonucleotide
  Antisense strand to SEQ ID NO: 620220
aauagacauauauacugag

SEQ ID NO: 620222 - RNA, 19 nt, Artificial Sequence
  Description of Artificial Sequence: Synthetic oligonucleotide
  Sense strand starting at position 437 of SEQ ID NO: 585190
gaaacuucuggagguggua

SEQ ID NO: 620223 - RNA, 19 nt, Artificial Sequence
  Description of Artificial Sequence: Synthetic oligonucleotide
  Antisense strand to SEQ ID NO: 620222
uaccaccuccagaaguuuc

SEQ ID NO: 620224 - RNA, 19 nt, Artificial Sequence
  Description of Artificial Sequence: Synthetic oligonucleotide
  Sense strand starting at position 956 of SEQ ID NO: 585190
gaaagaucuuaaguguucu

SEQ ID NO: 620225 - RNA, 19 nt, Artificial Sequence
  Description of Artificial Sequence: Synthetic oligonucleotide
  Antisense strand to SEQ ID NO: 620224
agaacacuuaagaucuuuc

SEQ ID NO: 620226 - RNA, 19 nt, Artificial Sequence
  Description of Artificial Sequence: Synthetic oligonucleotide
  Sense strand starting at position 970 of SEQ ID NO: 585190
guucucagcccauaugcaa

SEQ ID NO: 620227 - RNA, 19 nt, Artificial Sequence
  Description of Artificial Sequence: Synthetic oligonucleotide
  Antisense strand to SEQ ID NO: 620226
uugcauaugggcugagaac

SEQ ID NO: 620228 - RNA, 19 nt, Artificial Sequence
  Description of Artificial Sequence: Synthetic oligonucleotide
  Sense strand starting at position 1147 of SEQ ID NO: 585190
uuaaauaacucuuuguggu

SEQ ID NO: 620229 - RNA, 19 nt, Artificial Sequence
  Description of Artificial Sequence: Synthetic oligonucleotide
  Antisense strand to SEQ ID NO: 620228
accacaaagaguuauuuaa

SEQ ID NO: 620230 - RNA, 19 nt, Artificial Sequence
  Description of Artificial Sequence: Synthetic oligonucleotide
  Sense strand starting at position 1269 of SEQ ID NO: 585190
cgugcauguggauaacuaa

SEQ ID NO: 620231 - RNA, 19 nt, Artificial Sequence
  Description of Artificial Sequence: Synthetic oligonucleotide
  Antisense strand to SEQ ID NO: 620230
uuaguuauccacaugcacg

SEQ ID NO: 620232 - RNA, 19 nt, Artificial Sequence
  Description of Artificial Sequence: Synthetic oligonucleotide
  Sense strand starting at position 1395 of SEQ ID NO: 585190
ccuguccuuggacauguaa

SEQ ID NO: 620233 - RNA, 19 nt, Artificial Sequence
  Description of Artificial Sequence: Synthetic oligonucleotide
  Antisense strand to SEQ ID NO: 620232
uuacauguccaaggacagg

SEQ ID NO: 620234 - RNA, 19 nt, Artificial Sequence
  Description of Artificial Sequence: Synthetic oligonucleotide
  Sense strand starting at position 1620 of SEQ ID NO: 585190
ucccuaucccuggaugacu

SEQ ID NO: 620235 - RNA, 19 nt, Artificial Sequence
  Description of Artificial Sequence: Synthetic oligonucleotide
  Antisense strand to SEQ ID NO: 620234
agucauccagggauaggga

SEQ ID NO: 620236 - RNA, 19 nt, Artificial Sequence
  Description of Artificial Sequence: Synthetic oligonucleotide
  Sense strand starting at position 1731 of SEQ ID NO: 585190
uccuuaaugucuuugacag

SEQ ID NO: 620237 - RNA, 19 nt, Artificial Sequence
  Description of Artificial Sequence: Synthetic oligonucleotide
  Antisense strand to SEQ ID NO: 620236
cugucaaagacauuaagga

SEQ ID NO: 620238 - RNA, 19 nt, Artificial Sequence
  Description of Artificial Sequence: Synthetic oligonucleotide
  Sense strand starting at position 1732 of SEQ ID NO: 585190
ccuuaaugucuuugacaga

SEQ ID NO: 620239 - RNA, 19 nt, Artificial Sequence
  Description of Artificial Sequence: Synthetic oligonucleotide
  Antisense strand to SEQ ID NO: 620238
ucugucaaagacauuaagg

SEQ ID NO: 620240 - RNA, 19 nt, Artificial Sequence
  Description of Artificial Sequence: Synthetic oligonucleotide
  Sense strand starting at position 1739 of SEQ ID NO: 585190
gucuuugacagauguauug

SEQ ID NO: 620241 - RNA, 19 nt, Artificial Sequence
  Description of Artificial Sequence: Synthetic oligonucleotide
  Antisense strand to SEQ ID NO: 620240
caauacaucugucaaagac

SEQ ID NO: 620242 - RNA, 19 nt, Artificial Sequence
  Description of Artificial Sequence: Synthetic oligonucleotide
  Sense strand starting at position 1790 of SEQ ID NO: 585190
uaccuauuucuacgugugu

SEQ ID NO: 620243 - RNA, 19 nt, Artificial Sequence
  Description of Artificial Sequence: Synthetic oligonucleotide
  Antisense strand to SEQ ID NO: 620242
acacacguagaaauaggua

SEQ ID NO: 620244 - RNA, 19 nt, Artificial Sequence
  Description of Artificial Sequence: Synthetic oligonucleotide
  Sense strand starting at position 1791 of SEQ ID NO: 585190
accuauuucuacguguguu

SEQ ID NO: 620245 - RNA, 19 nt, Artificial Sequence
  Description of Artificial Sequence: Synthetic oligonucleotide
  Antisense strand to SEQ ID NO: 620244
aacacacguagaaauaggu

SEQ ID NO: 620246 - RNA, 19 nt, Artificial Sequence
  Description of Artificial Sequence: Synthetic oligonucleotide
  Sense strand starting at position 1792 of SEQ ID NO: 585190
ccuauuucuacguguguug

SEQ ID NO: 620247 - RNA, 19 nt, Artificial Sequence
  Description of Artificial Sequence: Synthetic oligonucleotide
  Antisense strand to SEQ ID NO: 620246
caacacacguagaaauagg

SEQ ID NO: 620248 - RNA, 19 nt, Artificial Sequence
  Description of Artificial Sequence: Synthetic oligonucleotide
  Sense strand starting at position 1794 of SEQ ID NO: 585190
uauuucuacguguguugaa

SEQ ID NO: 620249 - RNA, 19 nt, Artificial Sequence
  Description of Artificial Sequence: Synthetic oligonucleotide
  Antisense strand to SEQ ID NO: 620248
uucaacacacguagaaaua

SEQ ID NO: 620250 - RNA, 19 nt, Artificial Sequence
  Description of Artificial Sequence: Synthetic oligonucleotide
  Sense strand starting at position 1795 of SEQ ID NO: 585190
auuucuacguguguugaaa

SEQ ID NO: 620251 - RNA, 19 nt, Artificial Sequence
  Description of Artificial Sequence: Synthetic oligonucleotide
  Antisense strand to SEQ ID NO: 620250
uuucaacacacguagaaau

SEQ ID NO: 620252 - RNA, 19 nt, Artificial Sequence
  Description of Artificial Sequence: Synthetic oligonucleotide
  Sense strand starting at position 1822 of SEQ ID NO: 585190
ggugaaccucuauggcaga

SEQ ID NO: 620253 - RNA, 19 nt, Artificial Sequence
  Description of Artificial Sequence: Synthetic oligonucleotide
  Antisense strand to SEQ ID NO: 620252
ucugccauagagguucacc

SEQ ID NO: 620254 - RNA, 19 nt, Artificial Sequence
  Description of Artificial Sequence: Synthetic oligonucleotide
  Sense strand starting at position 2227 of SEQ ID NO: 585190
aagcaaaguugucuccaga

SEQ ID NO: 620255 - RNA, 19 nt, Artificial Sequence
  Description of Artificial Sequence: Synthetic oligonucleotide
  Antisense strand to SEQ ID NO: 620254
ucuggagacaacuuugcuu

SEQ ID NO: 620256 - RNA, 19 nt, Artificial Sequence
  Description of Artificial Sequence: Synthetic oligonucleotide
  Sense strand starting at position 2279 of SEQ ID NO: 585190
gcagauagucaacauauua

SEQ ID NO: 620257 - RNA, 19 nt, Artificial Sequence
  Description of Artificial Sequence: Synthetic oligonucleotide
  Antisense strand to SEQ ID NO: 620256
uaauauguugacuaucugc

SEQ ID NO: 620258 - RNA, 19 nt, Artificial Sequence
  Description of Artificial Sequence: Synthetic oligonucleotide
  Sense strand starting at position 2382 of SEQ ID NO: 585190
ccacaagugcugggaaagu

SEQ ID NO: 620259 - RNA, 19 nt, Artificial Sequence
  Description of Artificial Sequence: Synthetic oligonucleotide
  Antisense strand to SEQ ID NO: 620258
acuuucccagcacuugugg

SEQ ID NO: 620260 - RNA, 19 nt, Artificial Sequence
  Description of Artificial Sequence: Synthetic oligonucleotide
  Sense strand starting at position 2404 of SEQ ID NO: 585190
augguaaucagcuggaacu

SEQ ID NO: 620261 - RNA, 19 nt, Artificial Sequence
  Description of Artificial Sequence: Synthetic oligonucleotide
  Antisense strand to SEQ ID NO: 620260
aguuccagcugauuaccau

SEQ ID NO: 620262 - RNA, 19 nt, Artificial Sequence
  Description of Artificial Sequence: Synthetic oligonucleotide
  Sense strand starting at position 2453 of SEQ ID NO: 585190
cugacacuuguaugggauu

SEQ ID NO: 620263 - RNA, 19 nt, Artificial Sequence
  Description of Artificial Sequence: Synthetic oligonucleotide
  Antisense strand to SEQ ID NO: 620262
aaucccauacaagugucag

SEQ ID NO: 620264 - RNA, 19 nt, Artificial Sequence
  Description of Artificial Sequence: Synthetic oligonucleotide
  Sense strand starting at position 2636 of SEQ ID NO: 585190
aaauguuaagcucacgaua

SEQ ID NO: 620265 - RNA, 19 nt, Artificial Sequence
  Description of Artificial Sequence: Synthetic oligonucleotide
  Antisense strand to SEQ ID NO: 620264
uaucgugagcuuaacauuu

SEQ ID NO: 620266 - RNA, 19 nt, Artificial Sequence
  Description of Artificial Sequence: Synthetic oligonucleotide
  Sense strand starting at position 2639 of SEQ ID NO: 585190
uguuaagcucacgauauau

SEQ ID NO: 620267 - RNA, 19 nt, Artificial Sequence
  Description of Artificial Sequence: Synthetic oligonucleotide
  Antisense strand to SEQ ID NO: 620266
auauaucgugagcuuaaca

SEQ ID NO: 620268 - RNA, 19 nt, Artificial Sequence
  Description of Artificial Sequence: Synthetic oligonucleotide
  Sense strand starting at position 2641 of SEQ ID NO: 585190
uuaagcucacgauauauua

SEQ ID NO: 620269 - RNA, 19 nt, Artificial Sequence
  Description of Artificial Sequence: Synthetic oligonucleotide
  Antisense strand to SEQ ID NO: 620268
uaauauaucgugagcuuaa

SEQ ID NO: 620270 - RNA, 19 nt, Artificial Sequence
  Description of Artificial Sequence: Synthetic oligonucleotide
  Sense strand starting at position 2648 of SEQ ID NO: 585190
cacgauauauuaucaggua

SEQ ID NO: 620271 - RNA, 19 nt, Artificial Sequence
  Description of Artificial Sequence: Synthetic oligonucleotide
  Antisense strand to SEQ ID NO: 620270
uaccugauaauauaucgug

SEQ ID NO: 620272 - RNA, 19 nt, Artificial Sequence
  Description of Artificial Sequence: Synthetic oligonucleotide
  Sense strand starting at position 2705 of SEQ ID NO: 585190
caugaaacugaugguaauc

SEQ ID NO: 620273 - RNA, 19 nt, Artificial Sequence
  Description of Artificial Sequence: Synthetic oligonucleotide
  Antisense strand to SEQ ID NO: 620272
gauuaccaucaguuucaug

SEQ ID NO: 620274 - RNA, 19 nt, Artificial Sequence
  Description of Artificial Sequence: Synthetic oligonucleotide
  Sense strand starting at position 2838 of SEQ ID NO: 585190
ggaugauuuggcugggcgu

SEQ ID NO: 620275 - RNA, 19 nt, Artificial Sequence
  Description of Artificial Sequence: Synthetic oligonucleotide
  Antisense strand to SEQ ID NO: 620274
acgcccagccaaaucaucc

SEQ ID NO: 620276 - RNA, 19 nt, Artificial Sequence
  Description of Artificial Sequence: Synthetic oligonucleotide
  Sense strand starting at position 2934 of SEQ ID NO: 585190
gcgugaucaacauagugaa

SEQ ID NO: 620277 - RNA, 19 nt, Artificial Sequence
  Description of Artificial Sequence: Synthetic oligonucleotide
  Antisense strand to SEQ ID NO: 620276
uucacuauguugaucacgc

SEQ ID NO: 620278 - RNA, 19 nt, Artificial Sequence
  Description of Artificial Sequence: Synthetic oligonucleotide
  Sense strand starting at position 3160 of SEQ ID NO: 585190
guggaaugauuugacaaca

SEQ ID NO: 620279 - RNA, 19 nt, Artificial Sequence
  Description of Artificial Sequence: Synthetic oligonucleotide
  Antisense strand to SEQ ID NO: 620278
uguugucaaaucauuccac

SEQ ID NO: 620280 - RNA, 19 nt, Artificial Sequence
  Description of Artificial Sequence: Synthetic oligonucleotide
  Sense strand starting at position 3281 of SEQ ID NO: 585190
ccagcuacuccugauuagu

SEQ ID NO: 620281 - RNA, 19 nt, Artificial Sequence
  Description of Artificial Sequence: Synthetic oligonucleotide
  Antisense strand to SEQ ID NO: 620280
acuaaucaggaguagcugg

SEQ ID NO: 620282 - RNA, 19 nt, Artificial Sequence
  Description of Artificial Sequence: Synthetic oligonucleotide
  Sense strand starting at position 3291 of SEQ ID NO: 585190
cugauuaguccagaggcca

SEQ ID NO: 620283 - RNA, 19 nt, Artificial Sequence
  Description of Artificial Sequence: Synthetic oligonucleotide
  Antisense strand to SEQ ID NO: 620282
uggccucuggacuaaucag

SEQ ID NO: 620284 - RNA, 19 nt, Artificial Sequence
  Description of Artificial Sequence: Synthetic oligonucleotide
  Sense strand starting at position 3403 of SEQ ID NO: 585190
cuagauuucuggcucucuu

SEQ ID NO: 620285 - RNA, 19 nt, Artificial Sequence
  Description of Artificial Sequence: Synthetic oligonucleotide
  Antisense strand to SEQ ID NO: 620284
aagagagccagaaaucuag

SEQ ID NO: 620286 - RNA, 19 nt, Artificial Sequence
  Description of Artificial Sequence: Synthetic oligonucleotide
  Sense strand starting at position 3577 of SEQ ID NO: 585190
accagaggccuuugaguuu

SEQ ID NO: 620287 - RNA, 19 nt, Artificial Sequence
  Description of Artificial Sequence: Synthetic oligonucleotide
  Antisense strand to SEQ ID NO: 620286
aaacucaaaggccucuggu

SEQ ID NO: 620288 - RNA, 19 nt, Artificial Sequence
  Description of Artificial Sequence: Synthetic oligonucleotide
  Sense strand starting at position 3630 of SEQ ID NO: 585190
gcgugagggagucacaauu

SEQ ID NO: 620289 - RNA, 19 nt, Artificial Sequence
  Description of Artificial Sequence: Synthetic oligonucleotide
  Antisense strand to SEQ ID NO: 620288
aauugugacucccucacgc

SEQ ID NO: 620290 - RNA, 19 nt, Artificial Sequence
  Description of Artificial Sequence: Synthetic oligonucleotide
  Sense strand starting at position 3663 of SEQ ID NO: 585190
uggauauugucucucagaa

SEQ ID NO: 620291 - RNA, 19 nt, Artificial Sequence
  Description of Artificial Sequence: Synthetic oligonucleotide
  Antisense strand to SEQ ID NO: 620290
uucugagagacaauaucca

SEQ ID NO: 620292 - RNA, 19 nt, Artificial Sequence
  Description of Artificial Sequence: Synthetic oligonucleotide
  Sense strand starting at position 190 of SEQ ID NO: 585191
uuagauuagguagguuaca

SEQ ID NO: 620293 - RNA, 19 nt, Artificial Sequence
  Description of Artificial Sequence: Synthetic oligonucleotide
  Antisense strand to SEQ ID NO: 620292
uguaaccuaccuaaucuaa

SEQ ID NO: 620294 - RNA, 19 nt, Artificial Sequence
  Description of Artificial Sequence: Synthetic oligonucleotide
  Sense strand starting at position 452 of SEQ ID NO: 585191
uaaagagauguuugcauuc

SEQ ID NO: 620295 - RNA, 19 nt, Artificial Sequence
  Description of Artificial Sequence: Synthetic oligonucleotide
  Antisense strand to SEQ ID NO: 620294
gaaugcaaacaucucuuua

SEQ ID NO: 620296 - RNA, 19 nt, Artificial Sequence
  Description of Artificial Sequence: Synthetic oligonucleotide
  Sense strand starting at position 470 of SEQ ID NO: 585191
ccuuuaguuguguaaugaa

SEQ ID NO: 620297 - RNA, 19 nt, Artificial Sequence
  Description of Artificial Sequence: Synthetic oligonucleotide
  Antisense strand to SEQ ID NO: 620296
uucauuacacaacuaaagg

SEQ ID NO: 620298 - RNA, 19 nt, Artificial Sequence
  Description of Artificial Sequence: Synthetic oligonucleotide
  Sense strand starting at position 497 of SEQ ID NO: 585191
gaaggcacauuguugugaa

SEQ ID NO: 620299 - RNA, 19 nt, Artificial Sequence
  Description of Artificial Sequence: Synthetic oligonucleotide
  Antisense strand to SEQ ID NO: 620298
uucacaacaaugugccuuc

SEQ ID NO: 620300 - RNA, 19 nt, Artificial Sequence
  Description of Artificial Sequence: Synthetic oligonucleotide
  Sense strand starting at position 548 of SEQ ID NO: 585191
acagacagacccuguuauu

SEQ ID NO: 620301 - RNA, 19 nt, Artificial Sequence
  Description of Artificial Sequence: Synthetic oligonucleotide
  Antisense strand to SEQ ID NO: 620300
aauaacagggucugucugu

SEQ ID NO: 620302 - RNA, 19 nt, Artificial Sequence
  Description of Artificial Sequence: Synthetic oligonucleotide
  Sense strand starting at position 806 of SEQ ID NO: 585191
cuugucaaagguugaauaa

SEQ ID NO: 620303 - RNA, 19 nt, Artificial Sequence
  Description of Artificial Sequence: Synthetic oligonucleotide
  Antisense strand to SEQ ID NO: 620302
uuauucaaccuuugacaag

SEQ ID NO: 620304 - RNA, 19 nt, Artificial Sequence
  Description of Artificial Sequence: Synthetic oligonucleotide
  Sense strand starting at position 862 of SEQ ID NO: 585191
uuggguuaugguuagauaa

SEQ ID NO: 620305 - RNA, 19 nt, Artificial Sequence
  Description of Artificial Sequence: Synthetic oligonucleotide
  Antisense strand to SEQ ID NO: 620304
uuaucuaaccauaacccaa

SEQ ID NO: 620306 - RNA, 19 nt, Artificial Sequence
  Description of Artificial Sequence: Synthetic oligonucleotide
  Sense strand starting at position 979 of SEQ ID NO: 585191
uugccucuguuuguaauuu

SEQ ID NO: 620307 - RNA, 19 nt, Artificial Sequence
  Description of Artificial Sequence: Synthetic oligonucleotide
  Antisense strand to SEQ ID NO: 620306
aaauuacaaacagaggcaa

SEQ ID NO: 620308 - RNA, 19 nt, Artificial Sequence
  Description of Artificial Sequence: Synthetic oligonucleotide
  Sense strand starting at position 1015 of SEQ ID NO: 585191
uuaucaaguugagcuuaau

SEQ ID NO: 620309 - RNA, 19 nt, Artificial Sequence
  Description of Artificial Sequence: Synthetic oligonucleotide
  Antisense strand to SEQ ID NO: 620308
auuaagcucaacuugauaa

SEQ ID NO: 620310 - RNA, 19 nt, Artificial Sequence
  Description of Artificial Sequence: Synthetic oligonucleotide
  Sense strand starting at position 1018 of SEQ ID NO: 585191
ucaaguugagcuuaaugga

SEQ ID NO: 620311 - RNA, 19 nt, Artificial Sequence
  Description of Artificial Sequence: Synthetic oligonucleotide
  Antisense strand to SEQ ID NO: 620310
uccauuaagcucaacuuga

SEQ ID NO: 620312 - RNA, 19 nt, Artificial Sequence
  Description of Artificial Sequence: Synthetic oligonucleotide
  Sense strand starting at position 1154 of SEQ ID NO: 585191
ggcuaucagguuuacauaa

SEQ ID NO: 620313 - RNA, 19 nt, Artificial Sequence
  Description of Artificial Sequence: Synthetic oligonucleotide
  Antisense strand to SEQ ID NO: 620312
uuauguaaaccugauagcc

SEQ ID NO: 620314 - RNA, 19 nt, Artificial Sequence
  Description of Artificial Sequence: Synthetic oligonucleotide
  Sense strand starting at position 1283 of SEQ ID NO: 585191
gagaaaugguuagucaauu

SEQ ID NO: 620315 - RNA, 19 nt, Artificial Sequence
  Description of Artificial Sequence: Synthetic oligonucleotide
  Antisense strand to SEQ ID NO: 620314
aauugacuaaccauuucuc

SEQ ID NO: 620316 - RNA, 19 nt, Artificial Sequence
  Description of Artificial Sequence: Synthetic oligonucleotide
  Sense strand starting at position 1284 of SEQ ID NO: 585191
agaaaugguuagucaauuc

SEQ ID NO: 620317 - RNA, 19 nt, Artificial Sequence
  Description of Artificial Sequence: Synthetic oligonucleotide
  Antisense strand to SEQ ID NO: 620316
gaauugacuaaccauuucu

SEQ ID NO: 620318 - RNA, 19 nt, Artificial Sequence
  Description of Artificial Sequence: Synthetic oligonucleotide
  Sense strand starting at position 1311 of SEQ ID NO: 585191
uuuggaguccugggaagga

SEQ ID NO: 620319 - RNA, 19 nt, Artificial Sequence
  Description of Artificial Sequence: Synthetic oligonucleotide
  Antisense strand to SEQ ID NO: 620318
uccuucccaggacuccaaa

SEQ ID NO: 620320 - RNA, 19 nt, Artificial Sequence
  Description of Artificial Sequence: Synthetic oligonucleotide
  Sense strand starting at position 1315 of SEQ ID NO: 585191
gaguccugggaaggaguua

SEQ ID NO: 620321 - RNA, 19 nt, Artificial Sequence
  Description of Artificial Sequence: Synthetic oligonucleotide
  Antisense strand to SEQ ID NO: 620320
uaacuccuucccaggacuc

SEQ ID NO: 620322 - RNA, 19 nt, Artificial Sequence
  Description of Artificial Sequence: Synthetic oligonucleotide
  Sense strand starting at position 1340 of SEQ ID NO: 585191
gaaguacuuccuggauaua

SEQ ID NO: 620323 - RNA, 19 nt, Artificial Sequence
  Description of Artificial Sequence: Synthetic oligonucleotide
  Antisense strand to SEQ ID NO: 620322
uauauccaggaaguacuuc

SEQ ID NO: 620324 - RNA, 19 nt, Artificial Sequence
  Description of Artificial Sequence: Synthetic oligonucleotide
  Sense strand starting at position 1437 of SEQ ID NO: 585191
aagagauugcaaggguuaa

SEQ ID NO: 620325 - RNA, 19 nt, Artificial Sequence
  Description of Artificial Sequence: Synthetic oligonucleotide
  Antisense strand to SEQ ID NO: 620324
uuaacccuugcaaucucuu

SEQ ID NO: 620326 - RNA, 19 nt, Artificial Sequence
  Description of Artificial Sequence: Synthetic oligonucleotide
  Sense strand starting at position 1438 of SEQ ID NO: 585191
agagauugcaaggguuaac

SEQ ID NO: 620327 - RNA, 19 nt, Artificial Sequence
  Description of Artificial Sequence: Synthetic oligonucleotide
  Antisense strand to SEQ ID NO: 620326
guuaacccuugcaaucucu

SEQ ID NO: 620328 - RNA, 19 nt, Artificial Sequence
  Description of Artificial Sequence: Synthetic oligonucleotide
  Sense strand starting at position 1441 of SEQ ID NO: 585191
gauugcaaggguuaacgua

SEQ ID NO: 620329 - RNA, 19 nt, Artificial Sequence
  Description of Artificial Sequence: Synthetic oligonucleotide
  Antisense strand to SEQ ID NO: 620328
uacguuaacccuugcaauc

SEQ ID NO: 620330 - RNA, 19 nt, Artificial Sequence
  Description of Artificial Sequence: Synthetic oligonucleotide
  Sense strand starting at position 1456 of SEQ ID NO: 585191
cguauuaugaauuagugaa

SEQ ID NO: 620331 - RNA, 19 nt, Artificial Sequence
  Description of Artificial Sequence: Synthetic oligonucleotide
  Antisense strand to SEQ ID NO: 620330
uucacuaauucauaauacg

SEQ ID NO: 620332 - RNA, 19 nt, Artificial Sequence
  Description of Artificial Sequence: Synthetic oligonucleotide
  Sense strand starting at position 1635 of SEQ ID NO: 585191
accucauuauaguuaguaa

SEQ ID NO: 620333 - RNA, 19 nt, Artificial Sequence
  Description of Artificial Sequence: Synthetic oligonucleotide
  Antisense strand to SEQ ID NO: 620332
uuacuaacuauaaugaggu

SEQ ID NO: 620334 - RNA, 19 nt, Artificial Sequence
  Description of Artificial Sequence: Synthetic oligonucleotide
  Sense strand starting at position 1921 of SEQ ID NO: 585191
gcuguuuggaaagaaagua

SEQ ID NO: 620335 - RNA, 19 nt, Artificial Sequence
  Description of Artificial Sequence: Synthetic oligonucleotide
  Antisense strand to SEQ ID NO: 620334
uacuuucuuuccaaacagc

SEQ ID NO: 620336 - RNA, 19 nt, Artificial Sequence
  Description of Artificial Sequence: Synthetic oligonucleotide
  Sense strand starting at position 2166 of SEQ ID NO: 585191
gacauaaaugggugucuga

SEQ ID NO: 620337 - RNA, 19 nt, Artificial Sequence
  Description of Artificial Sequence: Synthetic oligonucleotide
  Antisense strand to SEQ ID NO: 620336
ucagacacccauuuauguc

SEQ ID NO: 620338 - RNA, 19 nt, Artificial Sequence
  Description of Artificial Sequence: Synthetic oligonucleotide
  Sense strand starting at position 2169 of SEQ ID NO: 585191
auaaaugggugucugaaau

SEQ ID NO: 620339 - RNA, 19 nt, Artificial Sequence
  Description of Artificial Sequence: Synthetic oligonucleotide
  Antisense strand to SEQ ID NO: 620338
auuucagacacccauuuau

SEQ ID NO: 620340 - RNA, 19 nt, Artificial Sequence
  Description of Artificial Sequence: Synthetic oligonucleotide
  Sense strand starting at position 2241 of SEQ ID NO: 585191
ccuagaucgguuuacuaca

SEQ ID NO: 620341 - RNA, 19 nt, Artificial Sequence
  Description of Artificial Sequence: Synthetic oligonucleotide
  Antisense strand to SEQ ID NO: 620340
uguaguaaaccgaucuagg

SEQ ID NO: 620342 - RNA, 19 nt, Artificial Sequence
  Description of Artificial Sequence: Synthetic oligonucleotide
  Sense strand starting at position 2243 of SEQ ID NO: 585191
uagaucgguuuacuacaaa

SEQ ID NO: 620343 - RNA, 19 nt, Artificial Sequence
  Description of Artificial Sequence: Synthetic oligonucleotide
  Antisense strand to SEQ ID NO: 620342
uuuguaguaaaccgaucua

SEQ ID NO: 620344 - RNA, 19 nt, Artificial Sequence
  Description of Artificial Sequence: Synthetic oligonucleotide
  Sense strand starting at position 2306 of SEQ ID NO: 585191
ggucauacccuauaaagcu

SEQ ID NO: 620345 - RNA, 19 nt, Artificial Sequence
  Description of Artificial Sequence: Synthetic oligonucleotide
  Antisense strand to SEQ ID NO: 620344
agcuuuauaggguaugacc

SEQ ID NO: 620346 - RNA, 19 nt, Artificial Sequence
  Description of Artificial Sequence: Synthetic oligonucleotide
  Sense strand starting at position 2345 of SEQ ID NO: 585191
gcauaauuccaaugaggag

SEQ ID NO: 620347 - RNA, 19 nt, Artificial Sequence
  Description of Artificial Sequence: Synthetic oligonucleotide
  Antisense strand to SEQ ID NO: 620346
cuccucauuggaauuaugc

SEQ ID NO: 620348 - RNA, 19 nt, Artificial Sequence
  Description of Artificial Sequence: Synthetic oligonucleotide
  Sense strand starting at position 2357 of SEQ ID NO: 585191
ugaggagagguggguaauu

SEQ ID NO: 620349 - RNA, 19 nt, Artificial Sequence
  Description of Artificial Sequence: Synthetic oligonucleotide
  Antisense strand to SEQ ID NO: 620348
aauuacccaccucuccuca

SEQ ID NO: 620350 - RNA, 19 nt, Artificial Sequence
  Description of Artificial Sequence: Synthetic oligonucleotide
  Sense strand starting at position 2583 of SEQ ID NO: 585191
agugaaaccugauuaacuu

SEQ ID NO: 620351 - RNA, 19 nt, Artificial Sequence
  Description of Artificial Sequence: Synthetic oligonucleotide
  Antisense strand to SEQ ID NO: 620350
aaguuaaucagguuucacu

SEQ ID NO: 620352 - RNA, 19 nt, Artificial Sequence
  Description of Artificial Sequence: Synthetic oligonucleotide
  Sense strand starting at position 2687 of SEQ ID NO: 585191
gccacauuggcucauaaau

SEQ ID NO: 620353 - RNA, 19 nt, Artificial Sequence
  Description of Artificial Sequence: Synthetic oligonucleotide
  Antisense strand to SEQ ID NO: 620352
auuuaugagccaauguggc

SEQ ID NO: 620354 - RNA, 19 nt, Artificial Sequence
  Description of Artificial Sequence: Synthetic oligonucleotide
  Sense strand starting at position 2751 of SEQ ID NO: 585191
agcaauuuguaauucuguu

SEQ ID NO: 620355 - RNA, 19 nt, Artificial Sequence
  Description of Artificial Sequence: Synthetic oligonucleotide
  Antisense strand to SEQ ID NO: 620354
aacagaauuacaaauugcu

SEQ ID NO: 620356 - RNA, 19 nt, Artificial Sequence
  Description of Artificial Sequence: Synthetic oligonucleotide
  Sense strand starting at position 2827 of SEQ ID NO: 585191
agcaaaggaugucucugaa

SEQ ID NO: 620357 - RNA, 19 nt, Artificial Sequence
  Description of Artificial Sequence: Synthetic oligonucleotide
  Antisense strand to SEQ ID NO: 620356
uucagagacauccuuugcu

SEQ ID NO: 620358 - RNA, 19 nt, Artificial Sequence
  Description of Artificial Sequence: Synthetic oligonucleotide
  Sense strand starting at position 2830 of SEQ ID NO: 585191
aaaggaugucucugaauuc

SEQ ID NO: 620359 - RNA, 19 nt, Artificial Sequence
  Description of Artificial Sequence: Synthetic oligonucleotide
  Antisense strand to SEQ ID NO: 620358
gaauucagagacauccuuu

SEQ ID NO: 620360 - RNA, 19 nt, Artificial Sequence
  Description of Artificial Sequence: Synthetic oligonucleotide
  Sense strand starting at position 3217 of SEQ ID NO: 585191
ugaacaauauucccgucaa

SEQ ID NO: 620361 - RNA, 19 nt, Artificial Sequence
  Description of Artificial Sequence: Synthetic oligonucleotide
  Antisense strand to SEQ ID NO: 620360
uugacgggaauauuguuca

SEQ ID NO: 620362 - RNA, 19 nt, Artificial Sequence
  Description of Artificial Sequence: Synthetic oligonucleotide
  Sense strand starting at position 3490 of SEQ ID NO: 585191
cauaaucuagucgaguuaa

SEQ ID NO: 620363 - RNA, 19 nt, Artificial Sequence
  Description of Artificial Sequence: Synthetic oligonucleotide
  Antisense strand to SEQ ID NO: 620362
uuaacucgacuagauuaug

SEQ ID NO: 620364 - RNA, 19 nt, Artificial Sequence
  Description of Artificial Sequence: Synthetic oligonucleotide
  Sense strand starting at position 3635 of SEQ ID NO: 585191
agguccaaugucuaaaguu

SEQ ID NO: 620365 - RNA, 19 nt, Artificial Sequence
  Description of Artificial Sequence: Synthetic oligonucleotide
  Antisense strand to SEQ ID NO: 620364
aacuuuagacauuggaccu

SEQ ID NO: 620366 - RNA, 19 nt, Artificial Sequence
  Description of Artificial Sequence: Synthetic oligonucleotide
  Sense strand starting at position 3814 of SEQ ID NO: 585191
ggaauuggguggaaacagu

SEQ ID NO: 620367 - RNA, 19 nt, Artificial Sequence
  Description of Artificial Sequence: Synthetic oligonucleotide
  Antisense strand to SEQ ID NO: 620366
acuguuuccacccaauucc

SEQ ID NO: 620368 - RNA, 19 nt, Artificial Sequence
  Description of Artificial Sequence: Synthetic oligonucleotide
  Sense strand starting at position 3821 of SEQ ID NO: 585191
gguggaaacaguugaaaug

SEQ ID NO: 620369 - RNA, 19 nt, Artificial Sequence
  Description of Artificial Sequence: Synthetic oligonucleotide
  Antisense strand to SEQ ID NO: 620368
cauuucaacuguuuccacc

SEQ ID NO: 620370 - RNA, 19 nt, Artificial Sequence
  Description of Artificial Sequence: Synthetic oligonucleotide
  Sense strand starting at position 3841 of SEQ ID NO: 585191
ccaacuaguguggaguuua

SEQ ID NO: 620371 - RNA, 19 nt, Artificial Sequence
  Description of Artificial Sequence: Synthetic oligonucleotide
  Antisense strand to SEQ ID NO: 620370
uaaacuccacacuaguugg

SEQ ID NO: 620372 - RNA, 19 nt, Artificial Sequence
  Description of Artificial Sequence: Synthetic oligonucleotide
  Sense strand starting at position 59 of SEQ ID NO: 585192
cuaugagaucuccgaguau

SEQ ID NO: 620373 - RNA, 19 nt, Artificial Sequence
  Description of Artificial Sequence: Synthetic oligonucleotide
  Antisense strand to SEQ ID NO: 620372
auacucggagaucucauag

SEQ ID NO: 620374 - RNA, 19 nt, Artificial Sequence
  Description of Artificial Sequence: Synthetic oligonucleotide
  Sense strand starting at position 63 of SEQ ID NO: 585192
gagaucuccgaguauuacu

SEQ ID NO: 620375 - RNA, 19 nt, Artificial Sequence
  Description of Artificial Sequence: Synthetic oligonucleotide
  Antisense strand to SEQ ID NO: 620374
aguaauacucggagaucuc

SEQ ID NO: 620376 - RNA, 19 nt, Artificial Sequence
  Description of Artificial Sequence: Synthetic oligonucleotide
  Sense strand starting at position 244 of SEQ ID NO: 585192
cugagagauggcuguuaug

SEQ ID NO: 620377 - RNA, 19 nt, Artificial Sequence
  Description of Artificial Sequence: Synthetic oligonucleotide
  Antisense strand to SEQ ID NO: 620376
cauaacagccaucucucag

SEQ ID NO: 620378 - RNA, 19 nt, Artificial Sequence
  Description of Artificial Sequence: Synthetic oligonucleotide
  Sense strand starting at position 321 of SEQ ID NO: 585192
acugauagaucauugcuaa

SEQ ID NO: 620379 - RNA, 19 nt, Artificial Sequence
  Description of Artificial Sequence: Synthetic oligonucleotide
  Antisense strand to SEQ ID NO: 620378
uuagcaaugaucuaucagu

SEQ ID NO: 620380 - RNA, 19 nt, Artificial Sequence
  Description of Artificial Sequence: Synthetic oligonucleotide
  Sense strand starting at position 322 of SEQ ID NO: 585192
cugauagaucauugcuaaa

SEQ ID NO: 620381 - RNA, 19 nt, Artificial Sequence
  Description of Artificial Sequence: Synthetic oligonucleotide
  Antisense strand to SEQ ID NO: 620380
uuuagcaaugaucuaucag

SEQ ID NO: 620382 - RNA, 19 nt, Artificial Sequence
  Description of Artificial Sequence: Synthetic oligonucleotide
  Sense strand starting at position 380 of SEQ ID NO: 585192
acuguuucccacuagugaa

SEQ ID NO: 620383 - RNA, 19 nt, Artificial Sequence
  Description of Artificial Sequence: Synthetic oligonucleotide
  Antisense strand to SEQ ID NO: 620382
uucacuagugggaaacagu

SEQ ID NO: 620384 - RNA, 19 nt, Artificial Sequence
  Description of Artificial Sequence: Synthetic oligonucleotide
  Sense strand starting at position 481 of SEQ ID NO: 585192
augucacugacauggguua

SEQ ID NO: 620385 - RNA, 19 nt, Artificial Sequence
  Description of Artificial Sequence: Synthetic oligonucleotide
  Antisense strand to SEQ ID NO: 620384
uaacccaugucagugacau

SEQ ID NO: 620386 - RNA, 19 nt, Artificial Sequence
  Description of Artificial Sequence: Synthetic oligonucleotide
  Sense strand starting at position 483 of SEQ ID NO: 585192
gucacugacauggguuaga

SEQ ID NO: 620387 - RNA, 19 nt, Artificial Sequence
  Description of Artificial Sequence: Synthetic oligonucleotide
  Antisense strand to SEQ ID NO: 620386
ucuaacccaugucagugac

SEQ ID NO: 620388 - RNA, 19 nt, Artificial Sequence
  Description of Artificial Sequence: Synthetic oligonucleotide
  Sense strand starting at position 625 of SEQ ID NO: 585192
ggugacuuccacugacaac

SEQ ID NO: 620389 - RNA, 19 nt, Artificial Sequence
  Description of Artificial Sequence: Synthetic oligonucleotide
  Antisense strand to SEQ ID NO: 620388
guugucaguggaagucacc

SEQ ID NO: 620390 - RNA, 19 nt, Artificial Sequence
  Description of Artificial Sequence: Synthetic oligonucleotide
  Sense strand starting at position 711 of SEQ ID NO: 585192
cccugaucucauuaucugu

SEQ ID NO: 620391 - RNA, 19 nt, Artificial Sequence
  Description of Artificial Sequence: Synthetic oligonucleotide
  Antisense strand to SEQ ID NO: 620390
acagauaaugagaucaggg

SEQ ID NO: 620392 - RNA, 19 nt, Artificial Sequence
  Description of Artificial Sequence: Synthetic oligonucleotide
  Sense strand starting at position 713 of SEQ ID NO: 585192
cugaucucauuaucuguga

SEQ ID NO: 620393 - RNA, 19 nt, Artificial Sequence
  Description of Artificial Sequence: Synthetic oligonucleotide
  Antisense strand to SEQ ID NO: 620392
ucacagauaaugagaucag

SEQ ID NO: 620394 - RNA, 19 nt, Artificial Sequence
  Description of Artificial Sequence: Synthetic oligonucleotide
  Sense strand starting at position 714 of SEQ ID NO: 585192
ugaucucauuaucugugaa

SEQ ID NO: 620395 - RNA, 19 nt, Artificial Sequence
  Description of Artificial Sequence: Synthetic oligonucleotide
  Antisense strand to SEQ ID NO: 620394
uucacagauaaugagauca

SEQ ID NO: 620396 - RNA, 19 nt, Artificial Sequence
  Description of Artificial Sequence: Synthetic oligonucleotide
  Sense strand starting at position 726 of SEQ ID NO: 585192
cugugaauaagaggucuga

SEQ ID NO: 620397 - RNA, 19 nt, Artificial Sequence
  Description of Artificial Sequence: Synthetic oligonucleotide
  Antisense strand to SEQ ID NO: 620396
ucagaccucuuauucacag

SEQ ID NO: 620398 - RNA, 19 nt, Artificial Sequence
  Description of Artificial Sequence: Synthetic oligonucleotide
  Sense strand starting at position 790 of SEQ ID NO: 585192
guuguaacucuauauuaug

SEQ ID NO: 620399 - RNA, 19 nt, Artificial Sequence
  Description of Artificial Sequence: Synthetic oligonucleotide
  Antisense strand to SEQ ID NO: 620398
cauaauauagaguuacaac

SEQ ID NO: 620400 - RNA, 19 nt, Artificial Sequence
  Description of Artificial Sequence: Synthetic oligonucleotide
  Sense strand starting at position 823 of SEQ ID NO: 585192
acagaauuguggcuauauu

SEQ ID NO: 620401 - RNA, 19 nt, Artificial Sequence
  Description of Artificial Sequence: Synthetic oligonucleotide
  Antisense strand to SEQ ID NO: 620400
aauauagccacaauucugu

SEQ ID NO: 620402 - RNA, 19 nt, Artificial Sequence
  Description of Artificial Sequence: Synthetic oligonucleotide
  Sense strand starting at position 824 of SEQ ID NO: 585192
cagaauuguggcuauauua

SEQ ID NO: 620403 - RNA, 19 nt, Artificial Sequence
  Description of Artificial Sequence: Synthetic oligonucleotide
  Antisense strand to SEQ ID NO: 620402
uaauauagccacaauucug

SEQ ID NO: 620404 - RNA, 19 nt, Artificial Sequence
  Description of Artificial Sequence: Synthetic oligonucleotide
  Sense strand starting at position 1304 of SEQ ID NO: 585192
ugccuuccucuugagaaag

SEQ ID NO: 620405 - RNA, 19 nt, Artificial Sequence
  Description of Artificial Sequence: Synthetic oligonucleotide
  Antisense strand to SEQ ID NO: 620404
cuuucucaagaggaaggca

SEQ ID NO: 620406 - RNA, 19 nt, Artificial Sequence
  Description of Artificial Sequence: Synthetic oligonucleotide
  Sense strand starting at position 1431 of SEQ ID NO: 585192
aggguuugaggcuagugau

SEQ ID NO: 620407 - RNA, 19 nt, Artificial Sequence
  Description of Artificial Sequence: Synthetic oligonucleotide
  Antisense strand to SEQ ID NO: 620406
aucacuagccucaaacccu

SEQ ID NO: 620408 - RNA, 19 nt, Artificial Sequence
  Description of Artificial Sequence: Synthetic oligonucleotide
  Sense strand starting at position 1541 of SEQ ID NO: 585192
caccuaguaccuuggagau

SEQ ID NO: 620409 - RNA, 19 nt, Artificial Sequence
  Description of Artificial Sequence: Synthetic oligonucleotide
  Antisense strand to SEQ ID NO: 620408
aucuccaagguacuaggug

SEQ ID NO: 620410 - RNA, 19 nt, Artificial Sequence
  Description of Artificial Sequence: Synthetic oligonucleotide
  Sense strand starting at position 1598 of SEQ ID NO: 585192
guauucugaucuuuggaua

SEQ ID NO: 620411 - RNA, 19 nt, Artificial Sequence
  Description of Artificial Sequence: Synthetic oligonucleotide
  Antisense strand to SEQ ID NO: 620410
uauccaaagaucagaauac

SEQ ID NO: 620412 - RNA, 19 nt, Artificial Sequence
  Description of Artificial Sequence: Synthetic oligonucleotide
  Sense strand starting at position 2018 of SEQ ID NO: 585192
ggcucuuguauggaugaga

SEQ ID NO: 620413 - RNA, 19 nt, Artificial Sequence
  Description of Artificial Sequence: Synthetic oligonucleotide
  Antisense strand to SEQ ID NO: 620412
ucucauccauacaagagcc

SEQ ID NO: 620414 - RNA, 19 nt, Artificial Sequence
  Description of Artificial Sequence: Synthetic oligonucleotide
  Sense strand starting at position 2166 of SEQ ID NO: 585192
gggcaaugcacuggagaau

SEQ ID NO: 620415 - RNA, 19 nt, Artificial Sequence
  Description of Artificial Sequence: Synthetic oligonucleotide
  Antisense strand to SEQ ID NO: 620414
auucuccagugcauugccc

SEQ ID NO: 620416 - RNA, 19 nt, Artificial Sequence
  Description of Artificial Sequence: Synthetic oligonucleotide
  Sense strand starting at position 2318 of SEQ ID NO: 585192
ucagccugagccuaaagau

SEQ ID NO: 620417 - RNA, 19 nt, Artificial Sequence
  Description of Artificial Sequence: Synthetic oligonucleotide
  Antisense strand to SEQ ID NO: 620416
aucuuuaggcucaggcuga

SEQ ID NO: 620418 - RNA, 19 nt, Artificial Sequence
  Description of Artificial Sequence: Synthetic oligonucleotide
  Sense strand starting at position 2501 of SEQ ID NO: 585192
gcauuuaaguaauucugca

SEQ ID NO: 620419 - RNA, 19 nt, Artificial Sequence
  Description of Artificial Sequence: Synthetic oligonucleotide
  Antisense strand to SEQ ID NO: 620418
ugcagaauuacuuaaaugc

SEQ ID NO: 620420 - RNA, 19 nt, Artificial Sequence
  Description of Artificial Sequence: Synthetic oligonucleotide
  Sense strand starting at position 2506 of SEQ ID NO: 585192
uaaguaauucugcauggug

SEQ ID NO: 620421 - RNA, 19 nt, Artificial Sequence
  Description of Artificial Sequence: Synthetic oligonucleotide
  Antisense strand to SEQ ID NO: 620420
caccaugcagaauuacuua

SEQ ID NO: 620422 - RNA, 19 nt, Artificial Sequence
  Description of Artificial Sequence: Synthetic oligonucleotide
  Sense strand starting at position 2541 of SEQ ID NO: 585192
guaguuacuccaugagacu

SEQ ID NO: 620423 - RNA, 19 nt, Artificial Sequence
  Description of Artificial Sequence: Synthetic oligonucleotide
  Antisense strand to SEQ ID NO: 620422
agucucauggaguaacuac

SEQ ID NO: 620424 - RNA, 19 nt, Artificial Sequence
  Description of Artificial Sequence: Synthetic oligonucleotide
  Sense strand starting at position 2582 of SEQ ID NO: 585192
agaagaggucccugcuaac

SEQ ID NO: 620425 - RNA, 19 nt, Artificial Sequence
  Description of Artificial Sequence: Synthetic oligonucleotide
  Antisense strand to SEQ ID NO: 620424
guuagcagggaccucuucu

SEQ ID NO: 620426 - RNA, 19 nt, Artificial Sequence
  Description of Artificial Sequence: Synthetic oligonucleotide
  Sense strand starting at position 2861 of SEQ ID NO: 585192
ucacgaaguucuccuaaua

SEQ ID NO: 620427 - RNA, 19 nt, Artificial Sequence
  Description of Artificial Sequence: Synthetic oligonucleotide
  Antisense strand to SEQ ID NO: 620426
uauuaggagaacuucguga

SEQ ID NO: 620428 - RNA, 19 nt, Artificial Sequence
  Description of Artificial Sequence: Synthetic oligonucleotide
  Sense strand starting at position 2943 of SEQ ID NO: 585192
uagucuugaucuucuagga

SEQ ID NO: 620429 - RNA, 19 nt, Artificial Sequence
  Description of Artificial Sequence: Synthetic oligonucleotide
  Antisense strand to SEQ ID NO: 620428
uccuagaagaucaagacua

SEQ ID NO: 620430 - RNA, 19 nt, Artificial Sequence
  Description of Artificial Sequence: Synthetic oligonucleotide
  Sense strand starting at position 2998 of SEQ ID NO: 585192
gugagugcugugcugcuau

SEQ ID NO: 620431 - RNA, 19 nt, Artificial Sequence
  Description of Artificial Sequence: Synthetic oligonucleotide
  Antisense strand to SEQ ID NO: 620430
auagcagcacagcacucac

SEQ ID NO: 620432 - RNA, 19 nt, Artificial Sequence
  Description of Artificial Sequence: Synthetic oligonucleotide
  Sense strand starting at position 3024 of SEQ ID NO: 585192
uaauucuaggucugugaau

SEQ ID NO: 620433 - RNA, 19 nt, Artificial Sequence
  Description of Artificial Sequence: Synthetic oligonucleotide
  Antisense strand to SEQ ID NO: 620432
auucacagaccuagaauua

SEQ ID NO: 620434 - RNA, 19 nt, Artificial Sequence
  Description of Artificial Sequence: Synthetic oligonucleotide
  Sense strand starting at position 3025 of SEQ ID NO: 585192
aauucuaggucugugaauc

SEQ ID NO: 620435 - RNA, 19 nt, Artificial Sequence
  Description of Artificial Sequence: Synthetic oligonucleotide
  Antisense strand to SEQ ID NO: 620434
gauucacagaccuagaauu

SEQ ID NO: 620436 - RNA, 19 nt, Artificial Sequence
  Description of Artificial Sequence: Synthetic oligonucleotide
  Sense strand starting at position 3086 of SEQ ID NO: 585192
cugcuccucagaugggaaa

SEQ ID NO: 620437 - RNA, 19 nt, Artificial Sequence
  Description of Artificial Sequence: Synthetic oligonucleotide
  Antisense strand to SEQ ID NO: 620436
uuucccaucugaggagcag

SEQ ID NO: 620438 - RNA, 19 nt, Artificial Sequence
  Description of Artificial Sequence: Synthetic oligonucleotide
  Sense strand starting at position 3710 of SEQ ID NO: 585192
gucacaacuggugagucua

SEQ ID NO: 620439 - RNA, 19 nt, Artificial Sequence
  Description of Artificial Sequence: Synthetic oligonucleotide
  Antisense strand to SEQ ID NO: 620438
uagacucaccaguugugac

SEQ ID NO: 620440 - RNA, 19 nt, Artificial Sequence
  Description of Artificial Sequence: Synthetic oligonucleotide
  Sense strand starting at position 3720 of SEQ ID NO: 585192
gugagucuacacuaacaug

SEQ ID NO: 620441 - RNA, 19 nt, Artificial Sequence
  Description of Artificial Sequence: Synthetic oligonucleotide
  Antisense strand to SEQ ID NO: 620440
cauguuaguguagacucac

SEQ ID NO: 620442 - RNA, 19 nt, Artificial Sequence
  Description of Artificial Sequence: Synthetic oligonucleotide
  Sense strand starting at position 3748 of SEQ ID NO: 585192
gucgcauugucauuauuua

SEQ ID NO: 620443 - RNA, 19 nt, Artificial Sequence
  Description of Artificial Sequence: Synthetic oligonucleotide
  Antisense strand to SEQ ID NO: 620442
uaaauaaugacaaugcgac

SEQ ID NO: 620444 - RNA, 19 nt, Artificial Sequence
  Description of Artificial Sequence: Synthetic oligonucleotide
  Sense strand starting at position 3749 of SEQ ID NO: 585192
ucgcauugucauuauuuau

SEQ ID NO: 620445 - RNA, 19 nt, Artificial Sequence
  Description of Artificial Sequence: Synthetic oligonucleotide
  Antisense strand to SEQ ID NO: 620444
auaaauaaugacaaugcga

SEQ ID NO: 620446 - RNA, 19 nt, Artificial Sequence
  Description of Artificial Sequence: Synthetic oligonucleotide
  Sense strand starting at position 3788 of SEQ ID NO: 585192
caugcaucuguggauauau

SEQ ID NO: 620447 - RNA, 19 nt, Artificial Sequence
  Description of Artificial Sequence: Synthetic oligonucleotide
  Antisense strand to SEQ ID NO: 620446
auauauccacagaugcaug

SEQ ID NO: 620448 - RNA, 19 nt, Artificial Sequence
  Description of Artificial Sequence: Synthetic oligonucleotide
  Sense strand starting at position 3790 of SEQ ID NO: 585192
ugcaucuguggauauauca

SEQ ID NO: 620449 - RNA, 19 nt, Artificial Sequence
  Description of Artificial Sequence: Synthetic oligonucleotide
  Antisense strand to SEQ ID NO: 620448
ugauauauccacagaugca

SEQ ID NO: 620450 - RNA, 19 nt, Artificial Sequence
  Description of Artificial Sequence: Synthetic oligonucleotide
  Sense strand starting at position 3846 of SEQ ID NO: 585192
acacuucuaguuggaagaa

SEQ ID NO: 620451 - RNA, 19 nt, Artificial Sequence
  Description of Artificial Sequence: Synthetic oligonucleotide
  Antisense strand to SEQ ID NO: 620450
uucuuccaacuagaagugu

SEQ ID NO: 620452 - RNA, 19 nt, Artificial Sequence
  Description of Artificial Sequence: Synthetic oligonucleotide
  Sense strand starting at position 117 of SEQ ID NO: 585193
uucugaaugaguuggaauu

SEQ ID NO: 620453 - RNA, 19 nt, Artificial Sequence
  Description of Artificial Sequence: Synthetic oligonucleotide
  Antisense strand to SEQ ID NO: 620452
aauuccaacucauucagaa

SEQ ID NO: 620454 - RNA, 19 nt, Artificial Sequence
  Description of Artificial Sequence: Synthetic oligonucleotide
  Sense strand starting at position 119 of SEQ ID NO: 585193
cugaaugaguuggaauuua

SEQ ID NO: 620455 - RNA, 19 nt, Artificial Sequence
  Description of Artificial Sequence: Synthetic oligonucleotide
  Antisense strand to SEQ ID NO: 620454
uaaauuccaacucauucag

SEQ ID NO: 620456 - RNA, 19 nt, Artificial Sequence
  Description of Artificial Sequence: Synthetic oligonucleotide
  Sense strand starting at position 162 of SEQ ID NO: 585193
acuggagcuucuuucugaa

SEQ ID NO: 620457 - RNA, 19 nt, Artificial Sequence
  Description of Artificial Sequence: Synthetic oligonucleotide
  Antisense strand to SEQ ID NO: 620456
uucagaaagaagcuccagu

SEQ ID NO: 620458 - RNA, 19 nt, Artificial Sequence
  Description of Artificial Sequence: Synthetic oligonucleotide
  Sense strand starting at position 164 of SEQ ID NO: 585193
uggagcuucuuucugaaac

SEQ ID NO: 620459 - RNA, 19 nt, Artificial Sequence
  Description of Artificial Sequence: Synthetic oligonucleotide
  Antisense strand to SEQ ID NO: 620458
guuucagaaagaagcucca

SEQ ID NO: 620460 - RNA, 19 nt, Artificial Sequence
  Description of Artificial Sequence: Synthetic oligonucleotide
  Sense strand starting at position 309 of SEQ ID NO: 585193
aguguagucagucaggaag

SEQ ID NO: 620461 - RNA, 19 nt, Artificial Sequence
  Description of Artificial Sequence: Synthetic oligonucleotide
  Antisense strand to SEQ ID NO: 620460
cuuccugacugacuacacu

SEQ ID NO: 620462 - RNA, 19 nt, Artificial Sequence
  Description of Artificial Sequence: Synthetic oligonucleotide
  Sense strand starting at position 588 of SEQ ID NO: 585193
agaguuaagugacccacau

SEQ ID NO: 620463 - RNA, 19 nt, Artificial Sequence
  Description of Artificial Sequence: Synthetic oligonucleotide
  Antisense strand to SEQ ID NO: 620462
augugggucacuuaacucu

SEQ ID NO: 620464 - RNA, 19 nt, Artificial Sequence
  Description of Artificial Sequence: Synthetic oligonucleotide
  Sense strand starting at position 706 of SEQ ID NO: 585193
ccaguaguauaauuagaac

SEQ ID NO: 620465 - RNA, 19 nt, Artificial Sequence
  Description of Artificial Sequence: Synthetic oligonucleotide
  Antisense strand to SEQ ID NO: 620464
guucuaauuauacuacugg

SEQ ID NO: 620466 - RNA, 19 nt, Artificial Sequence
  Description of Artificial Sequence: Synthetic oligonucleotide
  Sense strand starting at position 744 of SEQ ID NO: 585193
ggauaaacgaguuguuuau

SEQ ID NO: 620467 - RNA, 19 nt, Artificial Sequence
  Description of Artificial Sequence: Synthetic oligonucleotide
  Antisense strand to SEQ ID NO: 620466
auaaacaacucguuuaucc

SEQ ID NO: 620468 - RNA, 19 nt, Artificial Sequence
  Description of Artificial Sequence: Synthetic oligonucleotide
  Sense strand starting at position 756 of SEQ ID NO: 585193
uguuuauguguuuaagacc

SEQ ID NO: 620469 - RNA, 19 nt, Artificial Sequence
  Description of Artificial Sequence: Synthetic oligonucleotide
  Antisense strand to SEQ ID NO: 620468
ggucuuaaacacauaaaca

SEQ ID NO: 620470 - RNA, 19 nt, Artificial Sequence
  Description of Artificial Sequence: Synthetic oligonucleotide
  Sense strand starting at position 763 of SEQ ID NO: 585193
guguuuaagacccaguauc

SEQ ID NO: 620471 - RNA, 19 nt, Artificial Sequence
  Description of Artificial Sequence: Synthetic oligonucleotide
  Antisense strand to SEQ ID NO: 620470
gauacugggucuuaaacac

SEQ ID NO: 620472 - RNA, 19 nt, Artificial Sequence
  Description of Artificial Sequence: Synthetic oligonucleotide
  Sense strand starting at position 786 of SEQ ID NO: 585193
gcccucauagcagaaucua

SEQ ID NO: 620473 - RNA, 19 nt, Artificial Sequence
  Description of Artificial Sequence: Synthetic oligonucleotide
  Antisense strand to SEQ ID NO: 620472
uagauucugcuaugagggc

SEQ ID NO: 620474 - RNA, 19 nt, Artificial Sequence
  Description of Artificial Sequence: Synthetic oligonucleotide
  Sense strand starting at position 805 of SEQ ID NO: 585193
uuuaguuacccuuagaguu

SEQ ID NO: 620475 - RNA, 19 nt, Artificial Sequence
  Description of Artificial Sequence: Synthetic oligonucleotide
  Antisense strand to SEQ ID NO: 620474
aacucuaaggguaacuaaa

SEQ ID NO: 620476 - RNA, 19 nt, Artificial Sequence
  Description of Artificial Sequence: Synthetic oligonucleotide
  Sense strand starting at position 823 of SEQ ID NO: 585193
ucucccuugccauggaaga

SEQ ID NO: 620477 - RNA, 19 nt, Artificial Sequence
  Description of Artificial Sequence: Synthetic oligonucleotide
  Antisense strand to SEQ ID NO: 620476
ucuuccauggcaagggaga

SEQ ID NO: 620478 - RNA, 19 nt, Artificial Sequence
  Description of Artificial Sequence: Synthetic oligonucleotide
  Sense strand starting at position 824 of SEQ ID NO: 585193
cucccuugccauggaagaa

SEQ ID NO: 620479 - RNA, 19 nt, Artificial Sequence
  Description of Artificial Sequence: Synthetic oligonucleotide
  Antisense strand to SEQ ID NO: 620478
uucuuccauggcaagggag

SEQ ID NO: 620480 - RNA, 19 nt, Artificial Sequence
  Description of Artificial Sequence: Synthetic oligonucleotide
  Sense strand starting at position 1119 of SEQ ID NO: 585193
gccucugguccaugaagaa

SEQ ID NO: 620481 - RNA, 19 nt, Artificial Sequence
  Description of Artificial Sequence: Synthetic oligonucleotide
  Antisense strand to SEQ ID NO: 620480
uucuucauggaccagaggc

SEQ ID NO: 620482 - RNA, 19 nt, Artificial Sequence
  Description of Artificial Sequence: Synthetic oligonucleotide
  Sense strand starting at position 1310 of SEQ ID NO: 585193
uuggcaguaacuggagaaa

SEQ ID NO: 620483 - RNA, 19 nt, Artificial Sequence
  Description of Artificial Sequence: Synthetic oligonucleotide
  Antisense strand to SEQ ID NO: 620482
uuucuccaguuacugccaa

SEQ ID NO: 620484 - RNA, 19 nt, Artificial Sequence
  Description of Artificial Sequence: Synthetic oligonucleotide
  Sense strand starting at position 1313 of SEQ ID NO: 585193
gcaguaacuggagaaaugu

SEQ ID NO: 620485 - RNA, 19 nt, Artificial Sequence
  Description of Artificial Sequence: Synthetic oligonucleotide
  Antisense strand to SEQ ID NO: 620484
acauuucuccaguuacugc

SEQ ID NO: 620486 - RNA, 19 nt, Artificial Sequence
  Description of Artificial Sequence: Synthetic oligonucleotide
  Sense strand starting at position 1470 of SEQ ID NO: 585193
cagggacagugaguuuauu

SEQ ID NO: 620487 - RNA, 19 nt, Artificial Sequence
  Description of Artificial Sequence: Synthetic oligonucleotide
  Antisense strand to SEQ ID NO: 620486
aauaaacucacugucccug

SEQ ID NO: 620488 - RNA, 19 nt, Artificial Sequence
  Description of Artificial Sequence: Synthetic oligonucleotide
  Sense strand starting at position 1484 of SEQ ID NO: 585193
uuauuugccugacaggaua

SEQ ID NO: 620489 - RNA, 19 nt, Artificial Sequence
  Description of Artificial Sequence: Synthetic oligonucleotide
  Antisense strand to SEQ ID NO: 620488
uauccugucaggcaaauaa

SEQ ID NO: 620490 - RNA, 19 nt, Artificial Sequence
  Description of Artificial Sequence: Synthetic oligonucleotide
  Sense strand starting at position 1529 of SEQ ID NO: 585193
gccauuaaagccugacaaa

SEQ ID NO: 620491 - RNA, 19 nt, Artificial Sequence
  Description of Artificial Sequence: Synthetic oligonucleotide
  Antisense strand to SEQ ID NO: 620490
uuugucaggcuuuaauggc

SEQ ID NO: 620492 - RNA, 19 nt, Artificial Sequence
  Description of Artificial Sequence: Synthetic oligonucleotide
  Sense strand starting at position 1996 of SEQ ID NO: 585193
gcuugugcaagucugugau

SEQ ID NO: 620493 - RNA, 19 nt, Artificial Sequence
  Description of Artificial Sequence: Synthetic oligonucleotide
  Antisense strand to SEQ ID NO: 620492
aucacagacuugcacaagc

SEQ ID NO: 620494 - RNA, 19 nt, Artificial Sequence
  Description of Artificial Sequence: Synthetic oligonucleotide
  Sense strand starting at position 2082 of SEQ ID NO: 585193
ccauuaaagugagucacuu

SEQ ID NO: 620495 - RNA, 19 nt, Artificial Sequence
  Description of Artificial Sequence: Synthetic oligonucleotide
  Antisense strand to SEQ ID NO: 620494
aagugacucacuuuaaugg

SEQ ID NO: 620496 - RNA, 19 nt, Artificial Sequence
  Description of Artificial Sequence: Synthetic oligonucleotide
  Sense strand starting at position 2126 of SEQ ID NO: 585193
aucucagaugauugcauga

SEQ ID NO: 620497 - RNA, 19 nt, Artificial Sequence
  Description of Artificial Sequence: Synthetic oligonucleotide
  Antisense strand to SEQ ID NO: 620496
ucaugcaaucaucugagau

SEQ ID NO: 620498 - RNA, 19 nt, Artificial Sequence
  Description of Artificial Sequence: Synthetic oligonucleotide
  Sense strand starting at position 2200 of SEQ ID NO: 585193
agguuaugccacuauuguu

SEQ ID NO: 620499 - RNA, 19 nt, Artificial Sequence
  Description of Artificial Sequence: Synthetic oligonucleotide
  Antisense strand to SEQ ID NO: 620498
aacaauaguggcauaaccu

SEQ ID NO: 620500 - RNA, 19 nt, Artificial Sequence
  Description of Artificial Sequence: Synthetic oligonucleotide
  Sense strand starting at position 2207 of SEQ ID NO: 585193
gccacuauuguugaugauu

SEQ ID NO: 620501 - RNA, 19 nt, Artificial Sequence
  Description of Artificial Sequence: Synthetic oligonucleotide
  Antisense strand to SEQ ID NO: 620500
aaucaucaacaauaguggc

SEQ ID NO: 620502 - RNA, 19 nt, Artificial Sequence
  Description of Artificial Sequence: Synthetic oligonucleotide
  Sense strand starting at position 2260 of SEQ ID NO: 585193
ugauguugaacuuggagga

SEQ ID NO: 620503 - RNA, 19 nt, Artificial Sequence
  Description of Artificial Sequence: Synthetic oligonucleotide
  Antisense strand to SEQ ID NO: 620502
uccuccaaguucaacauca

SEQ ID NO: 620504 - RNA, 19 nt, Artificial Sequence
  Description of Artificial Sequence: Synthetic oligonucleotide
  Sense strand starting at position 2287 of SEQ ID NO: 585193
gauaaacuggugcaucaau

SEQ ID NO: 620505 - RNA, 19 nt, Artificial Sequence
  Description of Artificial Sequence: Synthetic oligonucleotide
  Antisense strand to SEQ ID NO: 620504
auugaugcaccaguuuauc

SEQ ID NO: 620506 - RNA, 19 nt, Artificial Sequence
  Description of Artificial Sequence: Synthetic oligonucleotide
  Sense strand starting at position 2352 of SEQ ID NO: 585193
uuuguaaugaccgggacaa

SEQ ID NO: 620507 - RNA, 19 nt, Artificial Sequence
  Description of Artificial Sequence: Synthetic oligonucleotide
  Antisense strand to SEQ ID NO: 620506
uugucccggucauuacaaa

SEQ ID NO: 620508 - RNA, 19 nt, Artificial Sequence
  Description of Artificial Sequence: Synthetic oligonucleotide
  Sense strand starting at position 2353 of SEQ ID NO: 585193
uuguaaugaccgggacaag

SEQ ID NO: 620509 - RNA, 19 nt, Artificial Sequence
  Description of Artificial Sequence: Synthetic oligonucleotide
  Antisense strand to SEQ ID NO: 620508
cuugucccggucauuacaa

SEQ ID NO: 620510 - RNA, 19 nt, Artificial Sequence
  Description of Artificial Sequence: Synthetic oligonucleotide
  Sense strand starting at position 2370 of SEQ ID NO: 585193
aggaguucucacugagcca

SEQ ID NO: 620511 - RNA, 19 nt, Artificial Sequence
  Description of Artificial Sequence: Synthetic oligonucleotide
  Antisense strand to SEQ ID NO: 620510
uggcucagugagaacuccu

SEQ ID NO: 620512 - RNA, 19 nt, Artificial Sequence
  Description of Artificial Sequence: Synthetic oligonucleotide
  Sense strand starting at position 2371 of SEQ ID NO: 585193
ggaguucucacugagccac

SEQ ID NO: 620513 - RNA, 19 nt, Artificial Sequence
  Description of Artificial Sequence: Synthetic oligonucleotide
  Antisense strand to SEQ ID NO: 620512
guggcucagugagaacucc

SEQ ID NO: 620514 - RNA, 19 nt, Artificial Sequence
  Description of Artificial Sequence: Synthetic oligonucleotide
  Sense strand starting at position 2388 of SEQ ID NO: 585193
acuacaugacugugguaau

SEQ ID NO: 620515 - RNA, 19 nt, Artificial Sequence
  Description of Artificial Sequence: Synthetic oligonucleotide
  Antisense strand to SEQ ID NO: 620514
auuaccacagucauguagu

SEQ ID NO: 620516 - RNA, 19 nt, Artificial Sequence
  Description of Artificial Sequence: Synthetic oligonucleotide
  Sense strand starting at position 2475 of SEQ ID NO: 585193
guuugcauuguucugcuaa

SEQ ID NO: 620517 - RNA, 19 nt, Artificial Sequence
  Description of Artificial Sequence: Synthetic oligonucleotide
  Antisense strand to SEQ ID NO: 620516
uuagcagaacaaugcaaac

SEQ ID NO: 620518 - RNA, 19 nt, Artificial Sequence
  Description of Artificial Sequence: Synthetic oligonucleotide
  Sense strand starting at position 2665 of SEQ ID NO: 585193
ggaggugcuguuuauggaa

SEQ ID NO: 620519 - RNA, 19 nt, Artificial Sequence
  Description of Artificial Sequence: Synthetic oligonucleotide
  Antisense strand to SEQ ID NO: 620518
uuccauaaacagcaccucc

SEQ ID NO: 620520 - RNA, 19 nt, Artificial Sequence
  Description of Artificial Sequence: Synthetic oligonucleotide
  Sense strand starting at position 2673 of SEQ ID NO: 585193
uguuuauggaaauggguca

SEQ ID NO: 620521 - RNA, 19 nt, Artificial Sequence
  Description of Artificial Sequence: Synthetic oligonucleotide
  Antisense strand to SEQ ID NO: 620520
ugacccauuuccauaaaca

SEQ ID NO: 620522 - RNA, 19 nt, Artificial Sequence
  Description of Artificial Sequence: Synthetic oligonucleotide
  Sense strand starting at position 2680 of SEQ ID NO: 585193
ggaaaugggucagcuccau

SEQ ID NO: 620523 - RNA, 19 nt, Artificial Sequence
  Description of Artificial Sequence: Synthetic oligonucleotide
  Antisense strand to SEQ ID NO: 620522
auggagcugacccauuucc

SEQ ID NO: 620524 - RNA, 19 nt, Artificial Sequence
  Description of Artificial Sequence: Synthetic oligonucleotide
  Sense strand starting at position 2699 of SEQ ID NO: 585193
uuaggucaguaguuaagaa

SEQ ID NO: 620525 - RNA, 19 nt, Artificial Sequence
  Description of Artificial Sequence: Synthetic oligonucleotide
  Antisense strand to SEQ ID NO: 620524
uucuuaacuacugaccuaa

SEQ ID NO: 620526 - RNA, 19 nt, Artificial Sequence
  Description of Artificial Sequence: Synthetic oligonucleotide
  Sense strand starting at position 2707 of SEQ ID NO: 585193
guaguuaagaaauggcuca

SEQ ID NO: 620527 - RNA, 19 nt, Artificial Sequence
  Description of Artificial Sequence: Synthetic oligonucleotide
  Antisense strand to SEQ ID NO: 620526
ugagccauuucuuaacuac

SEQ ID NO: 620528 - RNA, 19 nt, Artificial Sequence
  Description of Artificial Sequence: Synthetic oligonucleotide
  Sense strand starting at position 2746 of SEQ ID NO: 585193
auaucaagccauuguguaa

SEQ ID NO: 620529 - RNA, 19 nt, Artificial Sequence
  Description of Artificial Sequence: Synthetic oligonucleotide
  Antisense strand to SEQ ID NO: 620528
uuacacaauggcuugauau

SEQ ID NO: 620530 - RNA, 19 nt, Artificial Sequence
  Description of Artificial Sequence: Synthetic oligonucleotide
  Sense strand starting at position 2753 of SEQ ID NO: 585193
gccauuguguaaucaaagg

SEQ ID NO: 620531 - RNA, 19 nt, Artificial Sequence
  Description of Artificial Sequence: Synthetic oligonucleotide
  Antisense strand to SEQ ID NO: 620530
ccuuugauuacacaauggc

SEQ ID NO: 620532 - RNA, 19 nt, Artificial Sequence
  Description of Artificial Sequence: Synthetic oligonucleotide
  Sense strand starting at position 31 of SEQ ID NO: 585194
augaaccgaucuguuaaau

SEQ ID NO: 620533 - RNA, 19 nt, Artificial Sequence
  Description of Artificial Sequence: Synthetic oligonucleotide
  Antisense strand to SEQ ID NO: 620532
auuuaacagaucgguucau

SEQ ID NO: 620534 - RNA, 19 nt, Artificial Sequence
  Description of Artificial Sequence: Synthetic oligonucleotide
  Sense strand starting at position 108 of SEQ ID NO: 585194
gggccacuuuaucuaucaa

SEQ ID NO: 620535 - RNA, 19 nt, Artificial Sequence
  Description of Artificial Sequence: Synthetic oligonucleotide
  Antisense strand to SEQ ID NO: 620534
uugauagauaaaguggccc

SEQ ID NO: 620536 - RNA, 19 nt, Artificial Sequence
  Description of Artificial Sequence: Synthetic oligonucleotide
  Sense strand starting at position 131 of SEQ ID NO: 585194
gcuauuaucuaucuaguua

SEQ ID NO: 620537 - RNA, 19 nt, Artificial Sequence
  Description of Artificial Sequence: Synthetic oligonucleotide
  Antisense strand to SEQ ID NO: 620536
uaacuagauagauaauagc

SEQ ID NO: 620538 - RNA, 19 nt, Artificial Sequence
  Description of Artificial Sequence: Synthetic oligonucleotide
  Sense strand starting at position 433 of SEQ ID NO: 585194
acuugacaaugagaauuua

SEQ ID NO: 620539 - RNA, 19 nt, Artificial Sequence
  Description of Artificial Sequence: Synthetic oligonucleotide
  Antisense strand to SEQ ID NO: 620538
uaaauucucauugucaagu

SEQ ID NO: 620540 - RNA, 19 nt, Artificial Sequence
  Description of Artificial Sequence: Synthetic oligonucleotide
  Sense strand starting at position 996 of SEQ ID NO: 585194
acguuagcccuuuaugaaa

SEQ ID NO: 620541 - RNA, 19 nt, Artificial Sequence
  Description of Artificial Sequence: Synthetic oligonucleotide
  Antisense strand to SEQ ID NO: 620540
uuucauaaagggcuaacgu

SEQ ID NO: 620542 - RNA, 19 nt, Artificial Sequence
  Description of Artificial Sequence: Synthetic oligonucleotide
  Sense strand starting at position 1040 of SEQ ID NO: 585194
ugaccuggcuuucugaaau

SEQ ID NO: 620543 - RNA, 19 nt, Artificial Sequence
  Description of Artificial Sequence: Synthetic oligonucleotide
  Antisense strand to SEQ ID NO: 620542
auuucagaaagccagguca

SEQ ID NO: 620544 - RNA, 19 nt, Artificial Sequence
  Description of Artificial Sequence: Synthetic oligonucleotide
  Sense strand starting at position 1357 of SEQ ID NO: 585194
ugaaaugcucuuggcaaga

SEQ ID NO: 620545 - RNA, 19 nt, Artificial Sequence
  Description of Artificial Sequence: Synthetic oligonucleotide
  Antisense strand to SEQ ID NO: 620544
ucuugccaagagcauuuca

SEQ ID NO: 620546 - RNA, 19 nt, Artificial Sequence
  Description of Artificial Sequence: Synthetic oligonucleotide
  Sense strand starting at position 1381 of SEQ ID NO: 585194
agcucaguagcucaugaau

SEQ ID NO: 620547 - RNA, 19 nt, Artificial Sequence
  Description of Artificial Sequence: Synthetic oligonucleotide
  Antisense strand to SEQ ID NO: 620546
auucaugagcuacugagcu

SEQ ID NO: 620548 - RNA, 19 nt, Artificial Sequence
  Description of Artificial Sequence: Synthetic oligonucleotide
  Sense strand starting at position 1422 of SEQ ID NO: 585194
cugguuuaaggacgagaga

SEQ ID NO: 620549 - RNA, 19 nt, Artificial Sequence
  Description of Artificial Sequence: Synthetic oligonucleotide
  Antisense strand to SEQ ID NO: 620548
ucucucguccuuaaaccag

SEQ ID NO: 620550 - RNA, 19 nt, Artificial Sequence
  Description of Artificial Sequence: Synthetic oligonucleotide
  Sense strand starting at position 1628 of SEQ ID NO: 585194
gaggaucguaaguggaaga

SEQ ID NO: 620551 - RNA, 19 nt, Artificial Sequence
  Description of Artificial Sequence: Synthetic oligonucleotide
  Antisense strand to SEQ ID NO: 620550
ucuuccacuuacgauccuc

SEQ ID NO: 620552 - RNA, 19 nt, Artificial Sequence
  Description of Artificial Sequence: Synthetic oligonucleotide
  Sense strand starting at position 1635 of SEQ ID NO: 585194
guaaguggaagaugucuua

SEQ ID NO: 620553 - RNA, 19 nt, Artificial Sequence
  Description of Artificial Sequence: Synthetic oligonucleotide
  Antisense strand to SEQ ID NO: 620552
uaagacaucuuccacuuac

SEQ ID NO: 620554 - RNA, 19 nt, Artificial Sequence
  Description of Artificial Sequence: Synthetic oligonucleotide
  Sense strand starting at position 1638 of SEQ ID NO: 585194
aguggaagaugucuuaaga

SEQ ID NO: 620555 - RNA, 19 nt, Artificial Sequence
  Description of Artificial Sequence: Synthetic oligonucleotide
  Antisense strand to SEQ ID NO: 620554
ucuuaagacaucuuccacu

SEQ ID NO: 620556 - RNA, 19 nt, Artificial Sequence
  Description of Artificial Sequence: Synthetic oligonucleotide
  Sense strand starting at position 1718 of SEQ ID NO: 585194
aggagaaaugucuguuacc

SEQ ID NO: 620557 - RNA, 19 nt, Artificial Sequence
  Description of Artificial Sequence: Synthetic oligonucleotide
  Antisense strand to SEQ ID NO: 620556
gguaacagacauuucuccu

SEQ ID NO: 620558 - RNA, 19 nt, Artificial Sequence
  Description of Artificial Sequence: Synthetic oligonucleotide
  Sense strand starting at position 1719 of SEQ ID NO: 585194
ggagaaaugucuguuaccu

SEQ ID NO: 620559 - RNA, 19 nt, Artificial Sequence
  Description of Artificial Sequence: Synthetic oligonucleotide
  Antisense strand to SEQ ID NO: 620558
agguaacagacauuucucc

SEQ ID NO: 620560 - RNA, 19 nt, Artificial Sequence
  Description of Artificial Sequence: Synthetic oligonucleotide
  Sense strand starting at position 1955 of SEQ ID NO: 585194
cagagucaucccugagagc

SEQ ID NO: 620561 - RNA, 19 nt, Artificial Sequence
  Description of Artificial Sequence: Synthetic oligonucleotide
  Antisense strand to SEQ ID NO: 620560
gcucucagggaugacucug

SEQ ID NO: 620562 - RNA, 19 nt, Artificial Sequence
  Description of Artificial Sequence: Synthetic oligonucleotide
  Sense strand starting at position 1999 of SEQ ID NO: 585194
gugauuuccugguccucuu

SEQ ID NO: 620563 - RNA, 19 nt, Artificial Sequence
  Description of Artificial Sequence: Synthetic oligonucleotide
  Antisense strand to SEQ ID NO: 620562
aagaggaccaggaaaucac

SEQ ID NO: 620564 - RNA, 19 nt, Artificial Sequence
  Description of Artificial Sequence: Synthetic oligonucleotide
  Sense strand starting at position 2065 of SEQ ID NO: 585194
agauccuucuuaucuggaa

SEQ ID NO: 620565 - RNA, 19 nt, Artificial Sequence
  Description of Artificial Sequence: Synthetic oligonucleotide
  Antisense strand to SEQ ID NO: 620564
uuccagauaagaaggaucu

SEQ ID NO: 620566 - RNA, 19 nt, Artificial Sequence
  Description of Artificial Sequence: Synthetic oligonucleotide
  Sense strand starting at position 2100 of SEQ ID NO: 585194
gacagacuuguuuggccaa

SEQ ID NO: 620567 - RNA, 19 nt, Artificial Sequence
  Description of Artificial Sequence: Synthetic oligonucleotide
  Antisense strand to SEQ ID NO: 620566
uuggccaaacaagucuguc

SEQ ID NO: 620568 - RNA, 19 nt, Artificial Sequence
  Description of Artificial Sequence: Synthetic oligonucleotide
  Sense strand starting at position 2192 of SEQ ID NO: 585194
guuagagcuaaugagaagu

SEQ ID NO: 620569 - RNA, 19 nt, Artificial Sequence
  Description of Artificial Sequence: Synthetic oligonucleotide
  Antisense strand to SEQ ID NO: 620568
acuucucauuagcucuaac

SEQ ID NO: 620570 - RNA, 19 nt, Artificial Sequence
  Description of Artificial Sequence: Synthetic oligonucleotide
  Sense strand starting at position 2294 of SEQ ID NO: 585194
augaauucuuugucuuuag

SEQ ID NO: 620571 - RNA, 19 nt, Artificial Sequence
  Description of Artificial Sequence: Synthetic oligonucleotide
  Antisense strand to SEQ ID NO: 620570
cuaaagacaaagaauucau

SEQ ID NO: 620572 - RNA, 19 nt, Artificial Sequence
  Description of Artificial Sequence: Synthetic oligonucleotide
  Sense strand starting at position 2438 of SEQ ID NO: 585194
cuagguuuccagggaaacu

SEQ ID NO: 620573 - RNA, 19 nt, Artificial Sequence
  Description of Artificial Sequence: Synthetic oligonucleotide
  Antisense strand to SEQ ID NO: 620572
aguuucccuggaaaccuag

SEQ ID NO: 620574 - RNA, 19 nt, Artificial Sequence
  Description of Artificial Sequence: Synthetic oligonucleotide
  Sense strand starting at position 2447 of SEQ ID NO: 585194
cagggaaacucugugagua

SEQ ID NO: 620575 - RNA, 19 nt, Artificial Sequence
  Description of Artificial Sequence: Synthetic oligonucleotide
  Antisense strand to SEQ ID NO: 620574
uacucacagaguuucccug

SEQ ID NO: 620576 - RNA, 19 nt, Artificial Sequence
  Description of Artificial Sequence: Synthetic oligonucleotide
  Sense strand starting at position 2448 of SEQ ID NO: 585194
agggaaacucugugaguau

SEQ ID NO: 620577 - RNA, 19 nt, Artificial Sequence
  Description of Artificial Sequence: Synthetic oligonucleotide
  Antisense strand to SEQ ID NO: 620576
auacucacagaguuucccu

SEQ ID NO: 620578 - RNA, 19 nt, Artificial Sequence
  Description of Artificial Sequence: Synthetic oligonucleotide
  Sense strand starting at position 2455 of SEQ ID NO: 585194
cucugugaguauuugugua

SEQ ID NO: 620579 - RNA, 19 nt, Artificial Sequence
  Description of Artificial Sequence: Synthetic oligonucleotide
  Antisense strand to SEQ ID NO: 620578
uacacaaauacucacagag

SEQ ID NO: 620580 - RNA, 19 nt, Artificial Sequence
  Description of Artificial Sequence: Synthetic oligonucleotide
  Sense strand starting at position 2457 of SEQ ID NO: 585194
cugugaguauuuguguauc

SEQ ID NO: 620581 - RNA, 19 nt, Artificial Sequence
  Description of Artificial Sequence: Synthetic oligonucleotide
  Antisense strand to SEQ ID NO: 620580
gauacacaaauacucacag

SEQ ID NO: 620582 - RNA, 19 nt, Artificial Sequence
  Description of Artificial Sequence: Synthetic oligonucleotide
  Sense strand starting at position 2507 of SEQ ID NO: 585194
gcucaauagcauggauauu

SEQ ID NO: 620583 - RNA, 19 nt, Artificial Sequence
  Description of Artificial Sequence: Synthetic oligonucleotide
  Antisense strand to SEQ ID NO: 620582
aauauccaugcuauugagc

SEQ ID NO: 620584 - RNA, 19 nt, Artificial Sequence
  Description of Artificial Sequence: Synthetic oligonucleotide
  Sense strand starting at position 2572 of SEQ ID NO: 585194
ccagguugcuggguuuaaa

SEQ ID NO: 620585 - RNA, 19 nt, Artificial Sequence
  Description of Artificial Sequence: Synthetic oligonucleotide
  Antisense strand to SEQ ID NO: 620584
uuuaaacccagcaaccugg

SEQ ID NO: 620586 - RNA, 19 nt, Artificial Sequence
  Description of Artificial Sequence: Synthetic oligonucleotide
  Sense strand starting at position 2575 of SEQ ID NO: 585194
gguugcuggguuuaaagau

SEQ ID NO: 620587 - RNA, 19 nt, Artificial Sequence
  Description of Artificial Sequence: Synthetic oligonucleotide
  Antisense strand to SEQ ID NO: 620586
aucuuuaaacccagcaacc

SEQ ID NO: 620588 - RNA, 19 nt, Artificial Sequence
  Description of Artificial Sequence: Synthetic oligonucleotide
  Sense strand starting at position 2591 of SEQ ID NO: 585194
gaugaauuauagucagcuc

SEQ ID NO: 620589 - RNA, 19 nt, Artificial Sequence
  Description of Artificial Sequence: Synthetic oligonucleotide
  Antisense strand to SEQ ID NO: 620588
gagcugacuauaauucauc

SEQ ID NO: 620590 - RNA, 19 nt, Artificial Sequence
  Description of Artificial Sequence: Synthetic oligonucleotide
  Sense strand starting at position 2704 of SEQ ID NO: 585194
gggaaugcuguuugacucu

SEQ ID NO: 620591 - RNA, 19 nt, Artificial Sequence
  Description of Artificial Sequence: Synthetic oligonucleotide
  Antisense strand to SEQ ID NO: 620590
agagucaaacagcauuccc

SEQ ID NO: 620592 - RNA, 19 nt, Artificial Sequence
  Description of Artificial Sequence: Synthetic oligonucleotide
  Sense strand starting at position 2771 of SEQ ID NO: 585194
uggaaucggcauuggaaau

SEQ ID NO: 620593 - RNA, 19 nt, Artificial Sequence
  Description of Artificial Sequence: Synthetic oligonucleotide
  Antisense strand to SEQ ID NO: 620592
auuuccaaugccgauucca

SEQ ID NO: 620594 - RNA, 19 nt, Artificial Sequence
  Description of Artificial Sequence: Synthetic oligonucleotide
  Sense strand starting at position 2772 of SEQ ID NO: 585194
ggaaucggcauuggaaaua

SEQ ID NO: 620595 - RNA, 19 nt, Artificial Sequence
  Description of Artificial Sequence: Synthetic oligonucleotide
  Antisense strand to SEQ ID NO: 620594
uauuuccaaugccgauucc

SEQ ID NO: 620596 - RNA, 19 nt, Artificial Sequence
  Description of Artificial Sequence: Synthetic oligonucleotide
  Sense strand starting at position 3267 of SEQ ID NO: 585194
gugugugaaagugggauaa

SEQ ID NO: 620597 - RNA, 19 nt, Artificial Sequence
  Description of Artificial Sequence: Synthetic oligonucleotide
  Antisense strand to SEQ ID NO: 620596
uuaucccacuuucacacac

SEQ ID NO: 620598 - RNA, 19 nt, Artificial Sequence
  Description of Artificial Sequence: Synthetic oligonucleotide
  Sense strand starting at position 3298 of SEQ ID NO: 585194
guuuauagacucugcugaa

SEQ ID NO: 620599 - RNA, 19 nt, Artificial Sequence
  Description of Artificial Sequence: Synthetic oligonucleotide
  Antisense strand to SEQ ID NO: 620598
uucagcagagucuauaaac

SEQ ID NO: 620600 - RNA, 19 nt, Artificial Sequence
  Description of Artificial Sequence: Synthetic oligonucleotide
  Sense strand starting at position 3299 of SEQ ID NO: 585194
uuuauagacucugcugaaa

SEQ ID NO: 620601 - RNA, 19 nt, Artificial Sequence
  Description of Artificial Sequence: Synthetic oligonucleotide
  Antisense strand to SEQ ID NO: 620600
uuucagcagagucuauaaa

SEQ ID NO: 620602 - RNA, 19 nt, Artificial Sequence
  Description of Artificial Sequence: Synthetic oligonucleotide
  Sense strand starting at position 3544 of SEQ ID NO: 585194
aacuguagucuacacguua

SEQ ID NO: 620603 - RNA, 19 nt, Artificial Sequence
  Description of Artificial Sequence: Synthetic oligonucleotide
  Antisense strand to SEQ ID NO: 620602
uaacguguagacuacaguu

SEQ ID NO: 620604 - RNA, 19 nt, Artificial Sequence
  Description of Artificial Sequence: Synthetic oligonucleotide
  Sense strand starting at position 3555 of SEQ ID NO: 585194
acacguuagauuggauaca

SEQ ID NO: 620605 - RNA, 19 nt, Artificial Sequence
  Description of Artificial Sequence: Synthetic oligonucleotide
  Antisense strand to SEQ ID NO: 620604
uguauccaaucuaacgugu

SEQ ID NO: 620606 - RNA, 19 nt, Artificial Sequence
  Description of Artificial Sequence: Synthetic oligonucleotide
  Sense strand starting at position 3664 of SEQ ID NO: 585194
ggcugucuaacauggaaug

SEQ ID NO: 620607 - RNA, 19 nt, Artificial Sequence
  Description of Artificial Sequence: Synthetic oligonucleotide
  Antisense strand to SEQ ID NO: 620606
cauuccauguuagacagcc

SEQ ID NO: 620608 - RNA, 19 nt, Artificial Sequence
  Description of Artificial Sequence: Synthetic oligonucleotide
  Sense strand starting at position 3682 of SEQ ID NO: 585194
gggcguugucaaaguggcu

SEQ ID NO: 620609 - RNA, 19 nt, Artificial Sequence
  Description of Artificial Sequence: Synthetic oligonucleotide
  Antisense strand to SEQ ID NO: 620608
agccacuuugacaacgccc

SEQ ID NO: 620610 - RNA, 19 nt, Artificial Sequence
  Description of Artificial Sequence: Synthetic oligonucleotide
  Sense strand starting at position 3891 of SEQ ID NO: 585194
gcuggaauugacugucaca

SEQ ID NO: 620611 - RNA, 19 nt, Artificial Sequence
  Description of Artificial Sequence: Synthetic oligonucleotide
  Antisense strand to SEQ ID NO: 620610
ugugacagucaauuccagc

SEQ ID NO: 620612 - RNA, 19 nt, Artificial Sequence
  Description of Artificial Sequence: Synthetic oligonucleotide
  Sense strand starting at position 30 of SEQ ID NO: 585195
gaugaauagagguguccca

SEQ ID NO: 620613 - RNA, 19 nt, Artificial Sequence
  Description of Artificial Sequence: Synthetic oligonucleotide
  Antisense strand to SEQ ID NO: 620612
ugggacaccucuauucauc

SEQ ID NO: 620614 - RNA, 19 nt, Artificial Sequence
  Description of Artificial Sequence: Synthetic oligonucleotide
  Sense strand starting at position 69 of SEQ ID NO: 585195
cagaaauaggcaggcauua

SEQ ID NO: 620615 - RNA, 19 nt, Artificial Sequence
  Description of Artificial Sequence: Synthetic oligonucleotide
  Antisense strand to SEQ ID NO: 620614
uaaugccugccuauuucug

SEQ ID NO: 620616 - RNA, 19 nt, Artificial Sequence
  Description of Artificial Sequence: Synthetic oligonucleotide
  Sense strand starting at position 235 of SEQ ID NO: 585195
augcaucacccagggauua

SEQ ID NO: 620617 - RNA, 19 nt, Artificial Sequence
  Description of Artificial Sequence: Synthetic oligonucleotide
  Antisense strand to SEQ ID NO: 620616
uaaucccugggugaugcau

SEQ ID NO: 620618 - RNA, 19 nt, Artificial Sequence
  Description of Artificial Sequence: Synthetic oligonucleotide
  Sense strand starting at position 236 of SEQ ID NO: 585195
ugcaucacccagggauuaa

SEQ ID NO: 620619 - RNA, 19 nt, Artificial Sequence
  Description of Artificial Sequence: Synthetic oligonucleotide
  Antisense strand to SEQ ID NO: 620618
uuaaucccugggugaugca

SEQ ID NO: 620620 - RNA, 19 nt, Artificial Sequence
  Description of Artificial Sequence: Synthetic oligonucleotide
  Sense strand starting at position 918 of SEQ ID NO: 585195
auagguaugaauuguuuga

SEQ ID NO: 620621 - RNA, 19 nt, Artificial Sequence
  Description of Artificial Sequence: Synthetic oligonucleotide
  Antisense strand to SEQ ID NO: 620620
ucaaacaauucauaccuau

SEQ ID NO: 620622 - RNA, 19 nt, Artificial Sequence
  Description of Artificial Sequence: Synthetic oligonucleotide
  Sense strand starting at position 920 of SEQ ID NO: 585195
agguaugaauuguuugaua

SEQ ID NO: 620623 - RNA, 19 nt, Artificial Sequence
  Description of Artificial Sequence: Synthetic oligonucleotide
  Antisense strand to SEQ ID NO: 620622
uaucaaacaauucauaccu

SEQ ID NO: 620624 - RNA, 19 nt, Artificial Sequence
  Description of Artificial Sequence: Synthetic oligonucleotide
  Sense strand starting at position 928 of SEQ ID NO: 585195
auuguuugauauuccauga

SEQ ID NO: 620625 - RNA, 19 nt, Artificial Sequence
  Description of Artificial Sequence: Synthetic oligonucleotide
  Antisense strand to SEQ ID NO: 620624
ucauggaauaucaaacaau

SEQ ID NO: 620626 - RNA, 19 nt, Artificial Sequence
  Description of Artificial Sequence: Synthetic oligonucleotide
  Sense strand starting at position 932 of SEQ ID NO: 585195
uuugauauuccaugaaguc

SEQ ID NO: 620627 - RNA, 19 nt, Artificial Sequence
  Description of Artificial Sequence: Synthetic oligonucleotide
  Antisense strand to SEQ ID NO: 620626
gacuucauggaauaucaaa

SEQ ID NO: 620628 - RNA, 19 nt, Artificial Sequence
  Description of Artificial Sequence: Synthetic oligonucleotide
  Sense strand starting at position 933 of SEQ ID NO: 585195
uugauauuccaugaagucu

SEQ ID NO: 620629 - RNA, 19 nt, Artificial Sequence
  Description of Artificial Sequence: Synthetic oligonucleotide
  Antisense strand to SEQ ID NO: 620628
agacuucauggaauaucaa

SEQ ID NO: 620630 - RNA, 19 nt, Artificial Sequence
  Description of Artificial Sequence: Synthetic oligonucleotide
  Sense strand starting at position 939 of SEQ ID NO: 585195
uuccaugaagucuguauaa

SEQ ID NO: 620631 - RNA, 19 nt, Artificial Sequence
  Description of Artificial Sequence: Synthetic oligonucleotide
  Antisense strand to SEQ ID NO: 620630
uuauacagacuucauggaa

SEQ ID NO: 620632 - RNA, 19 nt, Artificial Sequence
  Description of Artificial Sequence: Synthetic oligonucleotide
  Sense strand starting at position 941 of SEQ ID NO: 585195
ccaugaagucuguauaaau

SEQ ID NO: 620633 - RNA, 19 nt, Artificial Sequence
  Description of Artificial Sequence: Synthetic oligonucleotide
  Antisense strand to SEQ ID NO: 620632
auuuauacagacuucaugg

SEQ ID NO: 620634 - RNA, 19 nt, Artificial Sequence
  Description of Artificial Sequence: Synthetic oligonucleotide
  Sense strand starting at position 1032 of SEQ ID NO: 585195
cagagaaauuuauaguggu

SEQ ID NO: 620635 - RNA, 19 nt, Artificial Sequence
  Description of Artificial Sequence: Synthetic oligonucleotide
  Antisense strand to SEQ ID NO: 620634
accacuauaaauuucucug

SEQ ID NO: 620636 - RNA, 19 nt, Artificial Sequence
  Description of Artificial Sequence: Synthetic oligonucleotide
  Sense strand starting at position 1077 of SEQ ID NO: 585195
gagucucagugaccuauca

SEQ ID NO: 620637 - RNA, 19 nt, Artificial Sequence
  Description of Artificial Sequence: Synthetic oligonucleotide
  Antisense strand to SEQ ID NO: 620636
ugauaggucacugagacuc

SEQ ID NO: 620638 - RNA, 19 nt, Artificial Sequence
  Description of Artificial Sequence: Synthetic oligonucleotide
  Sense strand starting at position 1103 of SEQ ID NO: 585195
ccucaauggugaccaacaa

SEQ ID NO: 620639 - RNA, 19 nt, Artificial Sequence
  Description of Artificial Sequence: Synthetic oligonucleotide
  Antisense strand to SEQ ID NO: 620638
uuguuggucaccauugagg

SEQ ID NO: 620640 - RNA, 19 nt, Artificial Sequence
  Description of Artificial Sequence: Synthetic oligonucleotide
  Sense strand starting at position 1143 of SEQ ID NO: 585195
gcaccaucccugcagacaa

SEQ ID NO: 620641 - RNA, 19 nt, Artificial Sequence
  Description of Artificial Sequence: Synthetic oligonucleotide
  Antisense strand to SEQ ID NO: 620640
uugucugcagggauggugc

SEQ ID NO: 620642 - RNA, 19 nt, Artificial Sequence
  Description of Artificial Sequence: Synthetic oligonucleotide
  Sense strand starting at position 1178 of SEQ ID NO: 585195
ccgagacaucccuggauau

SEQ ID NO: 620643 - RNA, 19 nt, Artificial Sequence
  Description of Artificial Sequence: Synthetic oligonucleotide
  Antisense strand to SEQ ID NO: 620642
auauccagggaugucucgg

SEQ ID NO: 620644 - RNA, 19 nt, Artificial Sequence
  Description of Artificial Sequence: Synthetic oligonucleotide
  Sense strand starting at position 1179 of SEQ ID NO: 585195
cgagacaucccuggauauu

SEQ ID NO: 620645 - RNA, 19 nt, Artificial Sequence
  Description of Artificial Sequence: Synthetic oligonucleotide
  Antisense strand to SEQ ID NO: 620644
aauauccagggaugucucg

SEQ ID NO: 620646 - RNA, 19 nt, Artificial Sequence
  Description of Artificial Sequence: Synthetic oligonucleotide
  Sense strand starting at position 1354 of SEQ ID NO: 585195
guuccuauuucuguuagca

SEQ ID NO: 620647 - RNA, 19 nt, Artificial Sequence
  Description of Artificial Sequence: Synthetic oligonucleotide
  Antisense strand to SEQ ID NO: 620646
ugcuaacagaaauaggaac

SEQ ID NO: 620648 - RNA, 19 nt, Artificial Sequence
  Description of Artificial Sequence: Synthetic oligonucleotide
  Sense strand starting at position 1434 of SEQ ID NO: 585195
gguagaggucuauacuauu

SEQ ID NO: 620649 - RNA, 19 nt, Artificial Sequence
  Description of Artificial Sequence: Synthetic oligonucleotide
  Antisense strand to SEQ ID NO: 620648
aauaguauagaccucuacc

SEQ ID NO: 620650 - RNA, 19 nt, Artificial Sequence
  Description of Artificial Sequence: Synthetic oligonucleotide
  Sense strand starting at position 1552 of SEQ ID NO: 585195
ucgacaccaugaucuauau

SEQ ID NO: 620651 - RNA, 19 nt, Artificial Sequence
  Description of Artificial Sequence: Synthetic oligonucleotide
  Antisense strand to SEQ ID NO: 620650
auauagaucauggugucga

SEQ ID NO: 620652 - RNA, 19 nt, Artificial Sequence
  Description of Artificial Sequence: Synthetic oligonucleotide
  Sense strand starting at position 1577 of SEQ ID NO: 585195
uggcauucuuuauccaaag

SEQ ID NO: 620653 - RNA, 19 nt, Artificial Sequence
  Description of Artificial Sequence: Synthetic oligonucleotide
  Antisense strand to SEQ ID NO: 620652
cuuuggauaaagaaugcca

SEQ ID NO: 620654 - RNA, 19 nt, Artificial Sequence
  Description of Artificial Sequence: Synthetic oligonucleotide
  Sense strand starting at position 1578 of SEQ ID NO: 585195
ggcauucuuuauccaaaga

SEQ ID NO: 620655 - RNA, 19 nt, Artificial Sequence
  Description of Artificial Sequence: Synthetic oligonucleotide
  Antisense strand to SEQ ID NO: 620654
ucuuuggauaaagaaugcc

SEQ ID NO: 620656 - RNA, 19 nt, Artificial Sequence
  Description of Artificial Sequence: Synthetic oligonucleotide
  Sense strand starting at position 1654 of SEQ ID NO: 585195
ucuuguaaaucaguaaauc

SEQ ID NO: 620657 - RNA, 19 nt, Artificial Sequence
  Description of Artificial Sequence: Synthetic oligonucleotide
  Antisense strand to SEQ ID NO: 620656
gauuuacugauuuacaaga

SEQ ID NO: 620658 - RNA, 19 nt, Artificial Sequence
  Description of Artificial Sequence: Synthetic oligonucleotide
  Sense strand starting at position 1655 of SEQ ID NO: 585195
cuuguaaaucaguaaaucu

SEQ ID NO: 620659 - RNA, 19 nt, Artificial Sequence
  Description of Artificial Sequence: Synthetic oligonucleotide
  Antisense strand to SEQ ID NO: 620658
agauuuacugauuuacaag

SEQ ID NO: 620660 - RNA, 19 nt, Artificial Sequence
  Description of Artificial Sequence: Synthetic oligonucleotide
  Sense strand starting at position 1720 of SEQ ID NO: 585195
cguggaaaugcacaucuau

SEQ ID NO: 620661 - RNA, 19 nt, Artificial Sequence
  Description of Artificial Sequence: Synthetic oligonucleotide
  Antisense strand to SEQ ID NO: 620660
auagaugugcauuuccacg

SEQ ID NO: 620662 - RNA, 19 nt, Artificial Sequence
  Description of Artificial Sequence: Synthetic oligonucleotide
  Sense strand starting at position 2302 of SEQ ID NO: 585195
ccucuaaguguuuaacucu

SEQ ID NO: 620663 - RNA, 19 nt, Artificial Sequence
  Description of Artificial Sequence: Synthetic oligonucleotide
  Antisense strand to SEQ ID NO: 620662
agaguuaaacacuuagagg

SEQ ID NO: 620664 - RNA, 19 nt, Artificial Sequence
  Description of Artificial Sequence: Synthetic oligonucleotide
  Sense strand starting at position 2481 of SEQ ID NO: 585195
uggaaagucugaucuuucu

SEQ ID NO: 620665 - RNA, 19 nt, Artificial Sequence
  Description of Artificial Sequence: Synthetic oligonucleotide
  Antisense strand to SEQ ID NO: 620664
agaaagaucagacuuucca

SEQ ID NO: 620666 - RNA, 19 nt, Artificial Sequence
  Description of Artificial Sequence: Synthetic oligonucleotide
  Sense strand starting at position 2495 of SEQ ID NO: 585195
uuucuuaaucuuggacuga

SEQ ID NO: 620667 - RNA, 19 nt, Artificial Sequence
  Description of Artificial Sequence: Synthetic oligonucleotide
  Antisense strand to SEQ ID NO: 620666
ucaguccaagauuaagaaa

SEQ ID NO: 620668 - RNA, 19 nt, Artificial Sequence
  Description of Artificial Sequence: Synthetic oligonucleotide
  Sense strand starting at position 2536 of SEQ ID NO: 585195
ugccuuagaguuuaaagaa

SEQ ID NO: 620669 - RNA, 19 nt, Artificial Sequence
  Description of Artificial Sequence: Synthetic oligonucleotide
  Antisense strand to SEQ ID NO: 620668
uucuuuaaacucuaaggca

SEQ ID NO: 620670 - RNA, 19 nt, Artificial Sequence
  Description of Artificial Sequence: Synthetic oligonucleotide
  Sense strand starting at position 2566 of SEQ ID NO: 585195
ccaccauccguggagugaa

SEQ ID NO: 620671 - RNA, 19 nt, Artificial Sequence
  Description of Artificial Sequence: Synthetic oligonucleotide
  Antisense strand to SEQ ID NO: 620670
uucacuccacggauggugg

SEQ ID NO: 620672 - RNA, 19 nt, Artificial Sequence
  Description of Artificial Sequence: Synthetic oligonucleotide
  Sense strand starting at position 2808 of SEQ ID NO: 585195
agcugaguuguugagagac

SEQ ID NO: 620673 - RNA, 19 nt, Artificial Sequence
  Description of Artificial Sequence: Synthetic oligonucleotide
  Antisense strand to SEQ ID NO: 620672
gucucucaacaacucagcu

SEQ ID NO: 620674 - RNA, 19 nt, Artificial Sequence
  Description of Artificial Sequence: Synthetic oligonucleotide
  Sense strand starting at position 2816 of SEQ ID NO: 585195
uguugagagaccuggacua

SEQ ID NO: 620675 - RNA, 19 nt, Artificial Sequence
  Description of Artificial Sequence: Synthetic oligonucleotide
  Antisense strand to SEQ ID NO: 620674
uaguccaggucucucaaca

SEQ ID NO: 620676 - RNA, 19 nt, Artificial Sequence
  Description of Artificial Sequence: Synthetic oligonucleotide
  Sense strand starting at position 3044 of SEQ ID NO: 585195
aggguaaugucucucaaau

SEQ ID NO: 620677 - RNA, 19 nt, Artificial Sequence
  Description of Artificial Sequence: Synthetic oligonucleotide
  Antisense strand to SEQ ID NO: 620676
auuugagagacauuacccu

SEQ ID NO: 620678 - RNA, 19 nt, Artificial Sequence
  Description of Artificial Sequence: Synthetic oligonucleotide
  Sense strand starting at position 3512 of SEQ ID NO: 585195
cgucaucaacuacaguuau

SEQ ID NO: 620679 - RNA, 19 nt, Artificial Sequence
  Description of Artificial Sequence: Synthetic oligonucleotide
  Antisense strand to SEQ ID NO: 620678
auaacuguaguugaugacg

SEQ ID NO: 620680 - RNA, 19 nt, Artificial Sequence
  Description of Artificial Sequence: Synthetic oligonucleotide
  Sense strand starting at position 3596 of SEQ ID NO: 585195
guuggaucccaggaguuug

SEQ ID NO: 620681 - RNA, 19 nt, Artificial Sequence
  Description of Artificial Sequence: Synthetic oligonucleotide
  Antisense strand to SEQ ID NO: 620680
caaacuccugggauccaac

SEQ ID NO: 620682 - RNA, 19 nt, Artificial Sequence
  Description of Artificial Sequence: Synthetic oligonucleotide
  Sense strand starting at position 3820 of SEQ ID NO: 585195
ggagcuauugcugaauauu

SEQ ID NO: 620683 - RNA, 19 nt, Artificial Sequence
  Description of Artificial Sequence: Synthetic oligonucleotide
  Antisense strand to SEQ ID NO: 620682
aauauucagcaauagcucc

SEQ ID NO: 620684 - RNA, 19 nt, Artificial Sequence
  Description of Artificial Sequence: Synthetic oligonucleotide
  Sense strand starting at position 3823 of SEQ ID NO: 585195
gcuauugcugaauauuaug

SEQ ID NO: 620685 - RNA, 19 nt, Artificial Sequence
  Description of Artificial Sequence: Synthetic oligonucleotide
  Antisense strand to SEQ ID NO: 620684
cauaauauucagcaauagc

SEQ ID NO: 620686 - RNA, 19 nt, Artificial Sequence
  Description of Artificial Sequence: Synthetic oligonucleotide
  Sense strand starting at position 3853 of SEQ ID NO: 585195
guuugucauaugcugugua

SEQ ID NO: 620687 - RNA, 19 nt, Artificial Sequence
  Description of Artificial Sequence: Synthetic oligonucleotide
  Antisense strand to SEQ ID NO: 620686
uacacagcauaugacaaac

SEQ ID NO: 620688 - RNA, 19 nt, Artificial Sequence
  Description of Artificial Sequence: Synthetic oligonucleotide
  Sense strand starting at position 3866 of SEQ ID NO: 585195
uguguauugcugccucaca

SEQ ID NO: 620689 - RNA, 19 nt, Artificial Sequence
  Description of Artificial Sequence: Synthetic oligonucleotide
  Antisense strand to SEQ ID NO: 620688
ugugaggcagcaauacaca

SEQ ID NO: 620690 - RNA, 19 nt, Artificial Sequence
  Description of Artificial Sequence: Synthetic oligonucleotide
  Sense strand starting at position 3958 of SEQ ID NO: 585195
uaaaguuagcaagggugaa

SEQ ID NO: 620691 - RNA, 19 nt, Artificial Sequence
  Description of Artificial Sequence: Synthetic oligonucleotide
  Antisense strand to SEQ ID NO: 620690
uucacccuugcuaacuuua

SEQ ID NO: 620692 - RNA, 19 nt, Artificial Sequence
  Description of Artificial Sequence: Synthetic oligonucleotide
  Sense strand starting at position 77 of SEQ ID NO: 585196
acauuaccuguugauaagu

SEQ ID NO: 620693 - RNA, 19 nt, Artificial Sequence
  Description of Artificial Sequence: Synthetic oligonucleotide
  Antisense strand to SEQ ID NO: 620692
acuuaucaacagguaaugu

SEQ ID NO: 620694 - RNA, 19 nt, Artificial Sequence
  Description of Artificial Sequence: Synthetic oligonucleotide
  Sense strand starting at position 85 of SEQ ID NO: 585196
uguugauaaguuuaacauc

SEQ ID NO: 620695 - RNA, 19 nt, Artificial Sequence
  Description of Artificial Sequence: Synthetic oligonucleotide
  Antisense strand to SEQ ID NO: 620694
gauguuaaacuuaucaaca

SEQ ID NO: 620696 - RNA, 19 nt, Artificial Sequence
  Description of Artificial Sequence: Synthetic oligonucleotide
  Sense strand starting at position 272 of SEQ ID NO: 585196
auguguagccuguauauga

SEQ ID NO: 620697 - RNA, 19 nt, Artificial Sequence
  Description of Artificial Sequence: Synthetic oligonucleotide
  Antisense strand to SEQ ID NO: 620696
ucauauacaggcuacacau

SEQ ID NO: 620698 - RNA, 19 nt, Artificial Sequence
  Description of Artificial Sequence: Synthetic oligonucleotide
  Sense strand starting at position 386 of SEQ ID NO: 585196
cucccagguguggaauuau

SEQ ID NO: 620699 - RNA, 19 nt, Artificial Sequence
  Description of Artificial Sequence: Synthetic oligonucleotide
  Antisense strand to SEQ ID NO: 620698
auaauuccacaccugggag

SEQ ID NO: 620700 - RNA, 19 nt, Artificial Sequence
  Description of Artificial Sequence: Synthetic oligonucleotide
  Sense strand starting at position 634 of SEQ ID NO: 585196
auguaagauccaggaguug

SEQ ID NO: 620701 - RNA, 19 nt, Artificial Sequence
  Description of Artificial Sequence: Synthetic oligonucleotide
  Antisense strand to SEQ ID NO: 620700
caacuccuggaucuuacau

SEQ ID NO: 620702 - RNA, 19 nt, Artificial Sequence
  Description of Artificial Sequence: Synthetic oligonucleotide
  Sense strand starting at position 675 of SEQ ID NO: 585196
aguucuagaaauuguugua

SEQ ID NO: 620703 - RNA, 19 nt, Artificial Sequence
  Description of Artificial Sequence: Synthetic oligonucleotide
  Antisense strand to SEQ ID NO: 620702
uacaacaauuucuagaacu

SEQ ID NO: 620704 - RNA, 19 nt, Artificial Sequence
  Description of Artificial Sequence: Synthetic oligonucleotide
  Sense strand starting at position 682 of SEQ ID NO: 585196
gaaauuguuguacaugagu

SEQ ID NO: 620705 - RNA, 19 nt, Artificial Sequence
  Description of Artificial Sequence: Synthetic oligonucleotide
  Antisense strand to SEQ ID NO: 620704
acucauguacaacaauuuc

SEQ ID NO: 620706 - RNA, 19 nt, Artificial Sequence
  Description of Artificial Sequence: Synthetic oligonucleotide
  Sense strand starting at position 730 of SEQ ID NO: 585196
guguccguccaagauuaac

SEQ ID NO: 620707 - RNA, 19 nt, Artificial Sequence
  Description of Artificial Sequence: Synthetic oligonucleotide
  Antisense strand to SEQ ID NO: 620706
guuaaucuuggacggacac

SEQ ID NO: 620708 - RNA, 19 nt, Artificial Sequence
  Description of Artificial Sequence: Synthetic oligonucleotide
  Sense strand starting at position 787 of SEQ ID NO: 585196
gaaacuucuuaguuggcca

SEQ ID NO: 620709 - RNA, 19 nt, Artificial Sequence
  Description of Artificial Sequence: Synthetic oligonucleotide
  Antisense strand to SEQ ID NO: 620708
uggccaacuaagaaguuuc

SEQ ID NO: 620710 - RNA, 19 nt, Artificial Sequence
  Description of Artificial Sequence: Synthetic oligonucleotide
  Sense strand starting at position 791 of SEQ ID NO: 585196
cuucuuaguuggccacaaa

SEQ ID NO: 620711 - RNA, 19 nt, Artificial Sequence
  Description of Artificial Sequence: Synthetic oligonucleotide
  Antisense strand to SEQ ID NO: 620710
uuuguggccaacuaagaag

SEQ ID NO: 620712 - RNA, 19 nt, Artificial Sequence
  Description of Artificial Sequence: Synthetic oligonucleotide
  Sense strand starting at position 915 of SEQ ID NO: 585196
ggaugacaauucuauggag

SEQ ID NO: 620713 - RNA, 19 nt, Artificial Sequence
  Description of Artificial Sequence: Synthetic oligonucleotide
  Antisense strand to SEQ ID NO: 620712
cuccauagaauugucaucc

SEQ ID NO: 620714 - RNA, 19 nt, Artificial Sequence
  Description of Artificial Sequence: Synthetic oligonucleotide
  Sense strand starting at position 983 of SEQ ID NO: 585196
cccauaagucuauggaagu

SEQ ID NO: 620715 - RNA, 19 nt, Artificial Sequence
  Description of Artificial Sequence: Synthetic oligonucleotide
  Antisense strand to SEQ ID NO: 620714
acuuccauagacuuauggg

SEQ ID NO: 620716 - RNA, 19 nt, Artificial Sequence
  Description of Artificial Sequence: Synthetic oligonucleotide
  Sense strand starting at position 1024 of SEQ ID NO: 585196
cguggcguaacccuuaauu

SEQ ID NO: 620717 - RNA, 19 nt, Artificial Sequence
  Description of Artificial Sequence: Synthetic oligonucleotide
  Antisense strand to SEQ ID NO: 620716
aauuaaggguuacgccacg

SEQ ID NO: 620718 - RNA, 19 nt, Artificial Sequence
  Description of Artificial Sequence: Synthetic oligonucleotide
  Sense strand starting at position 1026 of SEQ ID NO: 585196
uggcguaacccuuaauuac

SEQ ID NO: 620719 - RNA, 19 nt, Artificial Sequence
  Description of Artificial Sequence: Synthetic oligonucleotide
  Antisense strand to SEQ ID NO: 620718
guaauuaaggguuacgcca

SEQ ID NO: 620720 - RNA, 19 nt, Artificial Sequence
  Description of Artificial Sequence: Synthetic oligonucleotide
  Sense strand starting at position 1137 of SEQ ID NO: 585196
uggugacaauguguaaagu

SEQ ID NO: 620721 - RNA, 19 nt, Artificial Sequence
  Description of Artificial Sequence: Synthetic oligonucleotide
  Antisense strand to SEQ ID NO: 620720
acuuuacacauugucacca

SEQ ID NO: 620722 - RNA, 19 nt, Artificial Sequence
  Description of Artificial Sequence: Synthetic oligonucleotide
  Sense strand starting at position 1258 of SEQ ID NO: 585196
guuacuccuuguuuaauuu

SEQ ID NO: 620723 - RNA, 19 nt, Artificial Sequence
  Description of Artificial Sequence: Synthetic oligonucleotide
  Antisense strand to SEQ ID NO: 620722
aaauuaaacaaggaguaac

SEQ ID NO: 620724 - RNA, 19 nt, Artificial Sequence
  Description of Artificial Sequence: Synthetic oligonucleotide
  Sense strand starting at position 1443 of SEQ ID NO: 585196
ugaagacaaaccgguuuau

SEQ ID NO: 620725 - RNA, 19 nt, Artificial Sequence
  Description of Artificial Sequence: Synthetic oligonucleotide
  Antisense strand to SEQ ID NO: 620724
auaaaccgguuugucuuca

SEQ ID NO: 620726 - RNA, 19 nt, Artificial Sequence
  Description of Artificial Sequence: Synthetic oligonucleotide
  Sense strand starting at position 1455 of SEQ ID NO: 585196
gguuuauucccuccgugca

SEQ ID NO: 620727 - RNA, 19 nt, Artificial Sequence
  Description of Artificial Sequence: Synthetic oligonucleotide
  Antisense strand to SEQ ID NO: 620726
ugcacggagggaauaaacc

SEQ ID NO: 620728 - RNA, 19 nt, Artificial Sequence
  Description of Artificial Sequence: Synthetic oligonucleotide
  Sense strand starting at position 1578 of SEQ ID NO: 585196
gugagacuuacauguugac

SEQ ID NO: 620729 - RNA, 19 nt, Artificial Sequence
  Description of Artificial Sequence: Synthetic oligonucleotide
  Antisense strand to SEQ ID NO: 620728
gucaacauguaagucucac

SEQ ID NO: 620730 - RNA, 19 nt, Artificial Sequence
  Description of Artificial Sequence: Synthetic oligonucleotide
  Sense strand starting at position 2534 of SEQ ID NO: 585196
acuaguucgcuugcucgaa

SEQ ID NO: 620731 - RNA, 19 nt, Artificial Sequence
  Description of Artificial Sequence: Synthetic oligonucleotide
  Antisense strand to SEQ ID NO: 620730
uucgagcaagcgaacuagu

SEQ ID NO: 620732 - RNA, 19 nt, Artificial Sequence
  Description of Artificial Sequence: Synthetic oligonucleotide
  Sense strand starting at position 2615 of SEQ ID NO: 585196
uugauuugccaacguaaau

SEQ ID NO: 620733 - RNA, 19 nt, Artificial Sequence
  Description of Artificial Sequence: Synthetic oligonucleotide
  Antisense strand to SEQ ID NO: 620732
auuuacguuggcaaaucaa

SEQ ID NO: 620734 - RNA, 19 nt, Artificial Sequence
  Description of Artificial Sequence: Synthetic oligonucleotide
  Sense strand starting at position 2683 of SEQ ID NO: 585196
aaaguagcugucuggcaaa

SEQ ID NO: 620735 - RNA, 19 nt, Artificial Sequence
  Description of Artificial Sequence: Synthetic oligonucleotide
  Antisense strand to SEQ ID NO: 620734
uuugccagacagcuacuuu

SEQ ID NO: 620736 - RNA, 19 nt, Artificial Sequence
  Description of Artificial Sequence: Synthetic oligonucleotide
  Sense strand starting at position 2741 of SEQ ID NO: 585196
gggcucacacuuggaaaga

SEQ ID NO: 620737 - RNA, 19 nt, Artificial Sequence
  Description of Artificial Sequence: Synthetic oligonucleotide
  Antisense strand to SEQ ID NO: 620736
ucuuuccaagugugagccc

SEQ ID NO: 620738 - RNA, 19 nt, Artificial Sequence
  Description of Artificial Sequence: Synthetic oligonucleotide
  Sense strand starting at position 2774 of SEQ ID NO: 585196
uguguacugccagaguuag

SEQ ID NO: 620739 - RNA, 19 nt, Artificial Sequence
  Description of Artificial Sequence: Synthetic oligonucleotide
  Antisense strand to SEQ ID NO: 620738
cuaacucuggcaguacaca

SEQ ID NO: 620740 - RNA, 19 nt, Artificial Sequence
  Description of Artificial Sequence: Synthetic oligonucleotide
  Sense strand starting at position 2902 of SEQ ID NO: 585196
acagaagugcccuaacaau

SEQ ID NO: 620741 - RNA, 19 nt, Artificial Sequence
  Description of Artificial Sequence: Synthetic oligonucleotide
  Antisense strand to SEQ ID NO: 620740
auuguuagggcacuucugu

SEQ ID NO: 620742 - RNA, 19 nt, Artificial Sequence
  Description of Artificial Sequence: Synthetic oligonucleotide
  Sense strand starting at position 2928 of SEQ ID NO: 585196
agcugauuagcuuaugaua

SEQ ID NO: 620743 - RNA, 19 nt, Artificial Sequence
  Description of Artificial Sequence: Synthetic oligonucleotide
  Antisense strand to SEQ ID NO: 620742
uaucauaagcuaaucagcu

SEQ ID NO: 620744 - RNA, 19 nt, Artificial Sequence
  Description of Artificial Sequence: Synthetic oligonucleotide
  Sense strand starting at position 2978 of SEQ ID NO: 585196
ggagguaaagcaggacuua

SEQ ID NO: 620745 - RNA, 19 nt, Artificial Sequence
  Description of Artificial Sequence: Synthetic oligonucleotide
  Antisense strand to SEQ ID NO: 620744
uaaguccugcuuuaccucc

SEQ ID NO: 620746 - RNA, 19 nt, Artificial Sequence
  Description of Artificial Sequence: Synthetic oligonucleotide
  Sense strand starting at position 3039 of SEQ ID NO: 585196
auuccagaggccugaacau

SEQ ID NO: 620747 - RNA, 19 nt, Artificial Sequence
  Description of Artificial Sequence: Synthetic oligonucleotide
  Antisense strand to SEQ ID NO: 620746
auguucaggccucuggaau

SEQ ID NO: 620748 - RNA, 19 nt, Artificial Sequence
  Description of Artificial Sequence: Synthetic oligonucleotide
  Sense strand starting at position 3054 of SEQ ID NO: 585196
acaucuaggguguguucua

SEQ ID NO: 620749 - RNA, 19 nt, Artificial Sequence
  Description of Artificial Sequence: Synthetic oligonucleotide
  Antisense strand to SEQ ID NO: 620748
uagaacacacccuagaugu

SEQ ID NO: 620750 - RNA, 19 nt, Artificial Sequence
  Description of Artificial Sequence: Synthetic oligonucleotide
  Sense strand starting at position 3099 of SEQ ID NO: 585196
ugaugaauaaacgguauga

SEQ ID NO: 620751 - RNA, 19 nt, Artificial Sequence
  Description of Artificial Sequence: Synthetic oligonucleotide
  Antisense strand to SEQ ID NO: 620750
ucauaccguuuauucauca

SEQ ID NO: 620752 - RNA, 19 nt, Artificial Sequence
  Description of Artificial Sequence: Synthetic oligonucleotide
  Sense strand starting at position 3103 of SEQ ID NO: 585196
gaauaaacgguaugauuaa

SEQ ID NO: 620753 - RNA, 19 nt, Artificial Sequence
  Description of Artificial Sequence: Synthetic oligonucleotide
  Antisense strand to SEQ ID NO: 620752
uuaaucauaccguuuauuc

SEQ ID NO: 620754 - RNA, 19 nt, Artificial Sequence
  Description of Artificial Sequence: Synthetic oligonucleotide
  Sense strand starting at position 3179 of SEQ ID NO: 585196
cacguuaacagguagggaa

SEQ ID NO: 620755 - RNA, 19 nt, Artificial Sequence
  Description of Artificial Sequence: Synthetic oligonucleotide
  Antisense strand to SEQ ID NO: 620754
uucccuaccuguuaacgug

SEQ ID NO: 620756 - RNA, 19 nt, Artificial Sequence
  Description of Artificial Sequence: Synthetic oligonucleotide
  Sense strand starting at position 3249 of SEQ ID NO: 585196
ggcuaagauuagguuucca

SEQ ID NO: 620757 - RNA, 19 nt, Artificial Sequence
  Description of Artificial Sequence: Synthetic oligonucleotide
  Antisense strand to SEQ ID NO: 620756
uggaaaccuaaucuuagcc

SEQ ID NO: 620758 - RNA, 19 nt, Artificial Sequence
  Description of Artificial Sequence: Synthetic oligonucleotide
  Sense strand starting at position 3253 of SEQ ID NO: 585196
aagauuagguuuccagacu

SEQ ID NO: 620759 - RNA, 19 nt, Artificial Sequence
  Description of Artificial Sequence: Synthetic oligonucleotide
  Antisense strand to SEQ ID NO: 620758
agucuggaaaccuaaucuu

SEQ ID NO: 620760 - RNA, 19 nt, Artificial Sequence
  Description of Artificial Sequence: Synthetic oligonucleotide
  Sense strand starting at position 3279 of SEQ ID NO: 585196
ugagucagucgcuauuaca

SEQ ID NO: 620761 - RNA, 19 nt, Artificial Sequence
  Description of Artificial Sequence: Synthetic oligonucleotide
  Antisense strand to SEQ ID NO: 620760
uguaauagcgacugacuca

SEQ ID NO: 620762 - RNA, 19 nt, Artificial Sequence
  Description of Artificial Sequence: Synthetic oligonucleotide
  Sense strand starting at position 3289 of SEQ ID NO: 585196
gcuauuacacgguauaguc

SEQ ID NO: 620763 - RNA, 19 nt, Artificial Sequence
  Description of Artificial Sequence: Synthetic oligonucleotide
  Antisense strand to SEQ ID NO: 620762
gacuauaccguguaauagc

SEQ ID NO: 620764 - RNA, 19 nt, Artificial Sequence
  Description of Artificial Sequence: Synthetic oligonucleotide
  Sense strand starting at position 3360 of SEQ ID NO: 585196
cacaguuugugggucaaga

SEQ ID NO: 620765 - RNA, 19 nt, Artificial Sequence
  Description of Artificial Sequence: Synthetic oligonucleotide
  Antisense strand to SEQ ID NO: 620764
ucuugacccacaaacugug

SEQ ID NO: 620766 - RNA, 19 nt, Artificial Sequence
  Description of Artificial Sequence: Synthetic oligonucleotide
  Sense strand starting at position 3362 of SEQ ID NO: 585196
caguuugugggucaagaac

SEQ ID NO: 620767 - RNA, 19 nt, Artificial Sequence
  Description of Artificial Sequence: Synthetic oligonucleotide
  Antisense strand to SEQ ID NO: 620766
guucuugacccacaaacug

SEQ ID NO: 620768 - RNA, 19 nt, Artificial Sequence
  Description of Artificial Sequence: Synthetic oligonucleotide
  Sense strand starting at position 3906 of SEQ ID NO: 585196
agauguguguaugcacaua

SEQ ID NO: 620769 - RNA, 19 nt, Artificial Sequence
  Description of Artificial Sequence: Synthetic oligonucleotide
  Antisense strand to SEQ ID NO: 620768
uaugugcauacacacaucu

SEQ ID NO: 620770 - RNA, 19 nt, Artificial Sequence
  Description of Artificial Sequence: Synthetic oligonucleotide
  Sense strand starting at position 3946 of SEQ ID NO: 585196
agguauuguggagguacua

SEQ ID NO: 620771 - RNA, 19 nt, Artificial Sequence
  Description of Artificial Sequence: Synthetic oligonucleotide
  Antisense strand to SEQ ID NO: 620770
uaguaccuccacaauaccu

SEQ ID NO: 620772 - RNA, 19 nt, Artificial Sequence
  Description of Artificial Sequence: Synthetic oligonucleotide
  Sense strand starting at position 356 of SEQ ID NO: 585197
aggcaaauuccagaaacgu

SEQ ID NO: 620773 - RNA, 19 nt, Artificial Sequence
  Description of Artificial Sequence: Synthetic oligonucleotide
  Antisense strand to SEQ ID NO: 620772
acguuucuggaauuugccu

SEQ ID NO: 620774 - RNA, 19 nt, Artificial Sequence
  Description of Artificial Sequence: Synthetic oligonucleotide
  Sense strand starting at position 504 of SEQ ID NO: 585197
guacgacaguaccuuauau

SEQ ID NO: 620775 - RNA, 19 nt, Artificial Sequence
  Description of Artificial Sequence: Synthetic oligonucleotide
  Antisense strand to SEQ ID NO: 620774
auauaagguacugucguac

SEQ ID NO: 620776 - RNA, 19 nt, Artificial Sequence
  Description of Artificial Sequence: Synthetic oligonucleotide
  Sense strand starting at position 506 of SEQ ID NO: 585197
acgacaguaccuuauauac

SEQ ID NO: 620777 - RNA, 19 nt, Artificial Sequence
  Description of Artificial Sequence: Synthetic oligonucleotide
  Antisense strand to SEQ ID NO: 620776
guauauaagguacugucgu

SEQ ID NO: 620778 - RNA, 19 nt, Artificial Sequence
  Description of Artificial Sequence: Synthetic oligonucleotide
  Sense strand starting at position 775 of SEQ ID NO: 585197
gcaacugaaucugcaucau

SEQ ID NO: 620779 - RNA, 19 nt, Artificial Sequence
  Description of Artificial Sequence: Synthetic oligonucleotide
  Antisense strand to SEQ ID NO: 620778
augaugcagauucaguugc

SEQ ID NO: 620780 - RNA, 19 nt, Artificial Sequence
  Description of Artificial Sequence: Synthetic oligonucleotide
  Sense strand starting at position 779 of SEQ ID NO: 585197
cugaaucugcaucauaguu

SEQ ID NO: 620781 - RNA, 19 nt, Artificial Sequence
  Description of Artificial Sequence: Synthetic oligonucleotide
  Antisense strand to SEQ ID NO: 620780
aacuaugaugcagauucag

SEQ ID NO: 620782 - RNA, 19 nt, Artificial Sequence
  Description of Artificial Sequence: Synthetic oligonucleotide
  Sense strand starting at position 1033 of SEQ ID NO: 585197
ggcuguugucaggaauagg

SEQ ID NO: 620783 - RNA, 19 nt, Artificial Sequence
  Description of Artificial Sequence: Synthetic oligonucleotide
  Antisense strand to SEQ ID NO: 620782
ccuauuccugacaacagcc

SEQ ID NO: 620784 - RNA, 19 nt, Artificial Sequence
  Description of Artificial Sequence: Synthetic oligonucleotide
  Sense strand starting at position 1385 of SEQ ID NO: 585197
ucuggagagcccugaugau

SEQ ID NO: 620785 - RNA, 19 nt, Artificial Sequence
  Description of Artificial Sequence: Synthetic oligonucleotide
  Antisense strand to SEQ ID NO: 620784
aucaucagggcucuccaga

SEQ ID NO: 620786 - RNA, 19 nt, Artificial Sequence
  Description of Artificial Sequence: Synthetic oligonucleotide
  Sense strand starting at position 1397 of SEQ ID NO: 585197
ugaugaugccugcauugca

SEQ ID NO: 620787 - RNA, 19 nt, Artificial Sequence
  Description of Artificial Sequence: Synthetic oligonucleotide
  Antisense strand to SEQ ID NO: 620786
ugcaaugcaggcaucauca

SEQ ID NO: 620788 - RNA, 19 nt, Artificial Sequence
  Description of Artificial Sequence: Synthetic oligonucleotide
  Sense strand starting at position 1977 of SEQ ID NO: 585197
ggcugagcaguuugggaau

SEQ ID NO: 620789 - RNA, 19 nt, Artificial Sequence
  Description of Artificial Sequence: Synthetic oligonucleotide
  Antisense strand to SEQ ID NO: 620788
auucccaaacugcucagcc

SEQ ID NO: 620790 - RNA, 19 nt, Artificial Sequence
  Description of Artificial Sequence: Synthetic oligonucleotide
  Sense strand starting at position 2044 of SEQ ID NO: 585197
ggaggaacucugugcucuu

SEQ ID NO: 620791 - RNA, 19 nt, Artificial Sequence
  Description of Artificial Sequence: Synthetic oligonucleotide
  Antisense strand to SEQ ID NO: 620790
aagagcacagaguuccucc

SEQ ID NO: 620792 - RNA, 19 nt, Artificial Sequence
  Description of Artificial Sequence: Synthetic oligonucleotide
  Sense strand starting at position 2045 of SEQ ID NO: 585197
gaggaacucugugcucuuu

SEQ ID NO: 620793 - RNA, 19 nt, Artificial Sequence
  Description of Artificial Sequence: Synthetic oligonucleotide
  Antisense strand to SEQ ID NO: 620792
aaagagcacagaguuccuc

SEQ ID NO: 620794 - RNA, 19 nt, Artificial Sequence
  Description of Artificial Sequence: Synthetic oligonucleotide
  Sense strand starting at position 2132 of SEQ ID NO: 585197
acaguuccucagcagaaua

SEQ ID NO: 620795 - RNA, 19 nt, Artificial Sequence
  Description of Artificial Sequence: Synthetic oligonucleotide
  Antisense strand to SEQ ID NO: 620794
uauucugcugaggaacugu

SEQ ID NO: 620796 - RNA, 19 nt, Artificial Sequence
  Description of Artificial Sequence: Synthetic oligonucleotide
  Sense strand starting at position 2134 of SEQ ID NO: 585197
aguuccucagcagaauaga

SEQ ID NO: 620797 - RNA, 19 nt, Artificial Sequence
  Description of Artificial Sequence: Synthetic oligonucleotide
  Antisense strand to SEQ ID NO: 620796
ucuauucugcugaggaacu

SEQ ID NO: 620798 - RNA, 19 nt, Artificial Sequence
  Description of Artificial Sequence: Synthetic oligonucleotide
  Sense strand starting at position 2283 of SEQ ID NO: 585197
ugcaaagcugaggaguaau

SEQ ID NO: 620799 - RNA, 19 nt, Artificial Sequence
  Description of Artificial Sequence: Synthetic oligonucleotide
  Antisense strand to SEQ ID NO: 620798
auuacuccucagcuuugca

SEQ ID NO: 620800 - RNA, 19 nt, Artificial Sequence
  Description of Artificial Sequence: Synthetic oligonucleotide
  Sense strand starting at position 2296 of SEQ ID NO: 585197
aguaauguccuauaacguc

SEQ ID NO: 620801 - RNA, 19 nt, Artificial Sequence
  Description of Artificial Sequence: Synthetic oligonucleotide
  Antisense strand to SEQ ID NO: 620800
gacguuauaggacauuacu

SEQ ID NO: 620802 - RNA, 19 nt, Artificial Sequence
  Description of Artificial Sequence: Synthetic oligonucleotide
  Sense strand starting at position 2373 of SEQ ID NO: 585197
agacuccuaugucuguaua

SEQ ID NO: 620803 - RNA, 19 nt, Artificial Sequence
  Description of Artificial Sequence: Synthetic oligonucleotide
  Antisense strand to SEQ ID NO: 620802
uauacagacauaggagucu

SEQ ID NO: 620804 - RNA, 19 nt, Artificial Sequence
  Description of Artificial Sequence: Synthetic oligonucleotide
  Sense strand starting at position 2375 of SEQ ID NO: 585197
acuccuaugucuguauaca

SEQ ID NO: 620805 - RNA, 19 nt, Artificial Sequence
  Description of Artificial Sequence: Synthetic oligonucleotide
  Antisense strand to SEQ ID NO: 620804
uguauacagacauaggagu

SEQ ID NO: 620806 - RNA, 19 nt, Artificial Sequence
  Description of Artificial Sequence: Synthetic oligonucleotide
  Sense strand starting at position 2376 of SEQ ID NO: 585197
cuccuaugucuguauacaa

SEQ ID NO: 620807 - RNA, 19 nt, Artificial Sequence
  Description of Artificial Sequence: Synthetic oligonucleotide
  Antisense strand to SEQ ID NO: 620806
uuguauacagacauaggag

SEQ ID NO: 620808 - RNA, 19 nt, Artificial Sequence
  Description of Artificial Sequence: Synthetic oligonucleotide
  Sense strand starting at position 2576 of SEQ ID NO: 585197
cugcucauuccauagcuga

SEQ ID NO: 620809 - RNA, 19 nt, Artificial Sequence
  Description of Artificial Sequence: Synthetic oligonucleotide
  Antisense strand to SEQ ID NO: 620808
ucagcuauggaaugagcag

SEQ ID NO: 620810 - RNA, 19 nt, Artificial Sequence
  Description of Artificial Sequence: Synthetic oligonucleotide
  Sense strand starting at position 2749 of SEQ ID NO: 585197
augcguagaauccacuaga

SEQ ID NO: 620811 - RNA, 19 nt, Artificial Sequence
  Description of Artificial Sequence: Synthetic oligonucleotide
  Antisense strand to SEQ ID NO: 620810
ucuaguggauucuacgcau

SEQ ID NO: 620812 - RNA, 19 nt, Artificial Sequence
  Description of Artificial Sequence: Synthetic oligonucleotide
  Sense strand starting at position 2859 of SEQ ID NO: 585197
uucuuugaugaauaaacgu

SEQ ID NO: 620813 - RNA, 19 nt, Artificial Sequence
  Description of Artificial Sequence: Synthetic oligonucleotide
  Antisense strand to SEQ ID NO: 620812
acguuuauucaucaaagaa

SEQ ID NO: 620814 - RNA, 19 nt, Artificial Sequence
  Description of Artificial Sequence: Synthetic oligonucleotide
  Sense strand starting at position 2865 of SEQ ID NO: 585197
gaugaauaaacgugugcag

SEQ ID NO: 620815 - RNA, 19 nt, Artificial Sequence
  Description of Artificial Sequence: Synthetic oligonucleotide
  Antisense strand to SEQ ID NO: 620814
cugcacacguuuauucauc

SEQ ID NO: 620816 - RNA, 19 nt, Artificial Sequence
  Description of Artificial Sequence: Synthetic oligonucleotide
  Sense strand starting at position 2939 of SEQ ID NO: 585197
cuauuauacuugguucuca

SEQ ID NO: 620817 - RNA, 19 nt, Artificial Sequence
  Description of Artificial Sequence: Synthetic oligonucleotide
  Antisense strand to SEQ ID NO: 620816
ugagaaccaaguauaauag

SEQ ID NO: 620818 - RNA, 19 nt, Artificial Sequence
  Description of Artificial Sequence: Synthetic oligonucleotide
  Sense strand starting at position 3083 of SEQ ID NO: 585197
guucuuacccacugaugau

SEQ ID NO: 620819 - RNA, 19 nt, Artificial Sequence
  Description of Artificial Sequence: Synthetic oligonucleotide
  Antisense strand to SEQ ID NO: 620818
aucaucaguggguaagaac

SEQ ID NO: 620820 - RNA, 19 nt, Artificial Sequence
  Description of Artificial Sequence: Synthetic oligonucleotide
  Sense strand starting at position 3180 of SEQ ID NO: 585197
aggucuuacccauauugac

SEQ ID NO: 620821 - RNA, 19 nt, Artificial Sequence
  Description of Artificial Sequence: Synthetic oligonucleotide
  Antisense strand to SEQ ID NO: 620820
gucaauauggguaagaccu

SEQ ID NO: 620822 - RNA, 19 nt, Artificial Sequence
  Description of Artificial Sequence: Synthetic oligonucleotide
  Sense strand starting at position 3311 of SEQ ID NO: 585197
auuuauuagcagugugguu

SEQ ID NO: 620823 - RNA, 19 nt, Artificial Sequence
  Description of Artificial Sequence: Synthetic oligonucleotide
  Antisense strand to SEQ ID NO: 620822
aaccacacugcuaauaaau

SEQ ID NO: 620824 - RNA, 19 nt, Artificial Sequence
  Description of Artificial Sequence: Synthetic oligonucleotide
  Sense strand starting at position 3362 of SEQ ID NO: 585197
ggcucuucacuugagaggu

SEQ ID NO: 620825 - RNA, 19 nt, Artificial Sequence
  Description of Artificial Sequence: Synthetic oligonucleotide
  Antisense strand to SEQ ID NO: 620824
accucucaagugaagagcc

SEQ ID NO: 620826 - RNA, 19 nt, Artificial Sequence
  Description of Artificial Sequence: Synthetic oligonucleotide
  Sense strand starting at position 3387 of SEQ ID NO: 585197
gguaacaccuucuugaaga

SEQ ID NO: 620827 - RNA, 19 nt, Artificial Sequence
  Description of Artificial Sequence: Synthetic oligonucleotide
  Antisense strand to SEQ ID NO: 620826
ucuucaagaagguguuacc

SEQ ID NO: 620828 - RNA, 19 nt, Artificial Sequence
  Description of Artificial Sequence: Synthetic oligonucleotide
  Sense strand starting at position 3412 of SEQ ID NO: 585197
uugaguagucaagguacua

SEQ ID NO: 620829 - RNA, 19 nt, Artificial Sequence
  Description of Artificial Sequence: Synthetic oligonucleotide
  Antisense strand to SEQ ID NO: 620828
uaguaccuugacuacucaa

SEQ ID NO: 620830 - RNA, 19 nt, Artificial Sequence
  Description of Artificial Sequence: Synthetic oligonucleotide
  Sense strand starting at position 3424 of SEQ ID NO: 585197
gguacuauuacagguaaag

SEQ ID NO: 620831 - RNA, 19 nt, Artificial Sequence
  Description of Artificial Sequence: Synthetic oligonucleotide
  Antisense strand to SEQ ID NO: 620830
cuuuaccuguaauaguacc

SEQ ID NO: 620832 - RNA, 19 nt, Artificial Sequence
  Description of Artificial Sequence: Synthetic oligonucleotide
  Sense strand starting at position 3458 of SEQ ID NO: 585197
cuggguguugugagagcuu

SEQ ID NO: 620833 - RNA, 19 nt, Artificial Sequence
  Description of Artificial Sequence: Synthetic oligonucleotide
  Antisense strand to SEQ ID NO: 620832
aagcucucacaacacccag

SEQ ID NO: 620834 - RNA, 19 nt, Artificial Sequence
  Description of Artificial Sequence: Synthetic oligonucleotide
  Sense strand starting at position 3465 of SEQ ID NO: 585197
uugugagagcuugaugcuu

SEQ ID NO: 620835 - RNA, 19 nt, Artificial Sequence
  Description of Artificial Sequence: Synthetic oligonucleotide
  Antisense strand to SEQ ID NO: 620834
aagcaucaagcucucacaa

SEQ ID NO: 620836 - RNA, 19 nt, Artificial Sequence
  Description of Artificial Sequence: Synthetic oligonucleotide
  Sense strand starting at position 3660 of SEQ ID NO: 585197
guucauugcgugucaguca

SEQ ID NO: 620837 - RNA, 19 nt, Artificial Sequence
  Description of Artificial Sequence: Synthetic oligonucleotide
  Antisense strand to SEQ ID NO: 620836
ugacugacacgcaaugaac

SEQ ID NO: 620838 - RNA, 19 nt, Artificial Sequence
  Description of Artificial Sequence: Synthetic oligonucleotide
  Sense strand starting at position 3681 of SEQ ID NO: 585197
guuagugcuggccuaaguu

SEQ ID NO: 620839 - RNA, 19 nt, Artificial Sequence
  Description of Artificial Sequence: Synthetic oligonucleotide
  Antisense strand to SEQ ID NO: 620838
aacuuaggccagcacuaac

SEQ ID NO: 620840 - RNA, 19 nt, Artificial Sequence
  Description of Artificial Sequence: Synthetic oligonucleotide
  Sense strand starting at position 3704 of SEQ ID NO: 585197
caaugaaccguacaauagu

SEQ ID NO: 620841 - RNA, 19 nt, Artificial Sequence
  Description of Artificial Sequence: Synthetic oligonucleotide
  Antisense strand to SEQ ID NO: 620840
acuauuguacgguucauug

SEQ ID NO: 620842 - RNA, 19 nt, Artificial Sequence
  Description of Artificial Sequence: Synthetic oligonucleotide
  Sense strand starting at position 3735 of SEQ ID NO: 585197
guacaauguuaagcucuau

SEQ ID NO: 620843 - RNA, 19 nt, Artificial Sequence
  Description of Artificial Sequence: Synthetic oligonucleotide
  Antisense strand to SEQ ID NO: 620842
auagagcuuaacauuguac

SEQ ID NO: 620844 - RNA, 19 nt, Artificial Sequence
  Description of Artificial Sequence: Synthetic oligonucleotide
  Sense strand starting at position 3877 of SEQ ID NO: 585197
ccuauaguccuauggcuaa

SEQ ID NO: 620845 - RNA, 19 nt, Artificial Sequence
  Description of Artificial Sequence: Synthetic oligonucleotide
  Antisense strand to SEQ ID NO: 620844
uuagccauaggacuauagg

SEQ ID NO: 620846 - RNA, 19 nt, Artificial Sequence
  Description of Artificial Sequence: Synthetic oligonucleotide
  Sense strand starting at position 3932 of SEQ ID NO: 585197
ugugauuuguaugauauca

SEQ ID NO: 620847 - RNA, 19 nt, Artificial Sequence
  Description of Artificial Sequence: Synthetic oligonucleotide
  Antisense strand to SEQ ID NO: 620846
ugauaucauacaaaucaca

SEQ ID NO: 620848 - RNA, 19 nt, Artificial Sequence
  Description of Artificial Sequence: Synthetic oligonucleotide
  Sense strand starting at position 3934 of SEQ ID NO: 585197
ugauuuguaugauaucaag

SEQ ID NO: 620849 - RNA, 19 nt, Artificial Sequence
  Description of Artificial Sequence: Synthetic oligonucleotide
  Antisense strand to SEQ ID NO: 620848
cuugauaucauacaaauca

SEQ ID NO: 620850 - RNA, 19 nt, Artificial Sequence
  Description of Artificial Sequence: Synthetic oligonucleotide
  Sense strand starting at position 3940 of SEQ ID NO: 585197
guaugauaucaagguaauu

SEQ ID NO: 620851 - RNA, 19 nt, Artificial Sequence
  Description of Artificial Sequence: Synthetic oligonucleotide
  Antisense strand to SEQ ID NO: 620850
aauuaccuugauaucauac

SEQ ID NO: 620852 - RNA, 19 nt, Artificial Sequence
  Description of Artificial Sequence: Synthetic oligonucleotide
  Sense strand starting at position 1327 of SEQ ID NO: 585198
auaccuguugagugaguga

SEQ ID NO: 620853 - RNA, 19 nt, Artificial Sequence
  Description of Artificial Sequence: Synthetic oligonucleotide
  Antisense strand to SEQ ID NO: 620852
ucacucacucaacagguau

SEQ ID NO: 620854 - RNA, 19 nt, Artificial Sequence
  Description of Artificial Sequence: Synthetic oligonucleotide
  Sense strand starting at position 1334 of SEQ ID NO: 585198
uugagugagugagugaaau

SEQ ID NO: 620855 - RNA, 19 nt, Artificial Sequence
  Description of Artificial Sequence: Synthetic oligonucleotide
  Antisense strand to SEQ ID NO: 620854
auuucacucacucacucaa

SEQ ID NO: 620856 - RNA, 19 nt, Artificial Sequence
  Description of Artificial Sequence: Synthetic oligonucleotide
  Sense strand starting at position 1416 of SEQ ID NO: 585198
ggaucaauucuccaaggcu

SEQ ID NO: 620857 - RNA, 19 nt, Artificial Sequence
  Description of Artificial Sequence: Synthetic oligonucleotide
  Antisense strand to SEQ ID NO: 620856
agccuuggagaauugaucc

SEQ ID NO: 620858 - RNA, 19 nt, Artificial Sequence
  Description of Artificial Sequence: Synthetic oligonucleotide
  Sense strand starting at position 1758 of SEQ ID NO: 585198
ccucaaaguucccugggaa

SEQ ID NO: 620859 - RNA, 19 nt, Artificial Sequence
  Description of Artificial Sequence: Synthetic oligonucleotide
  Antisense strand to SEQ ID NO: 620858
uucccagggaacuuugagg

SEQ ID NO: 620860 - RNA, 19 nt, Artificial Sequence
  Description of Artificial Sequence: Synthetic oligonucleotide
  Sense strand starting at position 1759 of SEQ ID NO: 585198
cucaaaguucccugggaac

SEQ ID NO: 620861 - RNA, 19 nt, Artificial Sequence
  Description of Artificial Sequence: Synthetic oligonucleotide
  Antisense strand to SEQ ID NO: 620860
guucccagggaacuuugag

SEQ ID NO: 620862 - RNA, 19 nt, Artificial Sequence
  Description of Artificial Sequence: Synthetic oligonucleotide
  Sense strand starting at position 2112 of SEQ ID NO: 585198
acacuaucugaggguccua

SEQ ID NO: 620863 - RNA, 19 nt, Artificial Sequence
  Description of Artificial Sequence: Synthetic oligonucleotide
  Antisense strand to SEQ ID NO: 620862
uaggacccucagauagugu

SEQ ID NO: 620864 - RNA, 19 nt, Artificial Sequence
  Description of Artificial Sequence: Synthetic oligonucleotide
  Sense strand starting at position 2372 of SEQ ID NO: 585198
ggguguuugaugggaaagu

SEQ ID NO: 620865 - RNA, 19 nt, Artificial Sequence
  Description of Artificial Sequence: Synthetic oligonucleotide
  Antisense strand to SEQ ID NO: 620864
acuuucccaucaaacaccc

SEQ ID NO: 620866 - RNA, 19 nt, Artificial Sequence
  Description of Artificial Sequence: Synthetic oligonucleotide
  Sense strand starting at position 2373 of SEQ ID NO: 585198
gguguuugaugggaaagua

SEQ ID NO: 620867 - RNA, 19 nt, Artificial Sequence
  Description of Artificial Sequence: Synthetic oligonucleotide
  Antisense strand to SEQ ID NO: 620866
uacuuucccaucaaacacc

SEQ ID NO: 620868 - RNA, 19 nt, Artificial Sequence
  Description of Artificial Sequence: Synthetic oligonucleotide
  Sense strand starting at position 2512 of SEQ ID NO: 585198
gaguguagucgcccgaucu

SEQ ID NO: 620869 - RNA, 19 nt, Artificial Sequence
  Description of Artificial Sequence: Synthetic oligonucleotide
  Antisense strand to SEQ ID NO: 620868
agaucgggcgacuacacuc

SEQ ID NO: 620870 - RNA, 19 nt, Artificial Sequence
  Description of Artificial Sequence: Synthetic oligonucleotide
  Sense strand starting at position 2782 of SEQ ID NO: 585198
gugguacaugcucaguuga

SEQ ID NO: 620871 - RNA, 19 nt, Artificial Sequence
  Description of Artificial Sequence: Synthetic oligonucleotide
  Antisense strand to SEQ ID NO: 620870
ucaacugagcauguaccac

SEQ ID NO: 620872 - RNA, 19 nt, Artificial Sequence
  Description of Artificial Sequence: Synthetic oligonucleotide
  Sense strand starting at position 2784 of SEQ ID NO: 585198
gguacaugcucaguugagu

SEQ ID NO: 620873 - RNA, 19 nt, Artificial Sequence
  Description of Artificial Sequence: Synthetic oligonucleotide
  Antisense strand to SEQ ID NO: 620872
acucaacugagcauguacc

SEQ ID NO: 620874 - RNA, 19 nt, Artificial Sequence
  Description of Artificial Sequence: Synthetic oligonucleotide
  Sense strand starting at position 2798 of SEQ ID NO: 585198
ugaguagagucagggaaga

SEQ ID NO: 620875 - RNA, 19 nt, Artificial Sequence
  Description of Artificial Sequence: Synthetic oligonucleotide
  Antisense strand to SEQ ID NO: 620874
ucuucccugacucuacuca

SEQ ID NO: 620876 - RNA, 19 nt, Artificial Sequence
  Description of Artificial Sequence: Synthetic oligonucleotide
  Sense strand starting at position 2889 of SEQ ID NO: 585198
ggagguugccugugcaauu

SEQ ID NO: 620877 - RNA, 19 nt, Artificial Sequence
  Description of Artificial Sequence: Synthetic oligonucleotide
  Antisense strand to SEQ ID NO: 620876
aauugcacaggcaaccucc

SEQ ID NO: 620878 - RNA, 19 nt, Artificial Sequence
  Description of Artificial Sequence: Synthetic oligonucleotide
  Sense strand starting at position 2978 of SEQ ID NO: 585198
ucccgauuucgguagcuga

SEQ ID NO: 620879 - RNA, 19 nt, Artificial Sequence
  Description of Artificial Sequence: Synthetic oligonucleotide
  Antisense strand to SEQ ID NO: 620878
ucagcuaccgaaaucggga

SEQ ID NO: 620880 - RNA, 19 nt, Artificial Sequence
  Description of Artificial Sequence: Synthetic oligonucleotide
  Sense strand starting at position 2981 of SEQ ID NO: 585198
cgauuucgguagcugauau

SEQ ID NO: 620881 - RNA, 19 nt, Artificial Sequence
  Description of Artificial Sequence: Synthetic oligonucleotide
  Antisense strand to SEQ ID NO: 620880
auaucagcuaccgaaaucg

SEQ ID NO: 620882 - RNA, 19 nt, Artificial Sequence
  Description of Artificial Sequence: Synthetic oligonucleotide
  Sense strand starting at position 2994 of SEQ ID NO: 585198
ugauaucgcccuuggaacu

SEQ ID NO: 620883 - RNA, 19 nt, Artificial Sequence
  Description of Artificial Sequence: Synthetic oligonucleotide
  Antisense strand to SEQ ID NO: 620882
aguuccaagggcgauauca

SEQ ID NO: 620884 - RNA, 19 nt, Artificial Sequence
  Description of Artificial Sequence: Synthetic oligonucleotide
  Sense strand starting at position 3004 of SEQ ID NO: 585198
cuuggaacuugcgcuuuaa

SEQ ID NO: 620885 - RNA, 19 nt, Artificial Sequence
  Description of Artificial Sequence: Synthetic oligonucleotide
  Antisense strand to SEQ ID NO: 620884
uuaaagcgcaaguuccaag

SEQ ID NO: 620886 - RNA, 19 nt, Artificial Sequence
  Description of Artificial Sequence: Synthetic oligonucleotide
  Sense strand starting at position 3034 of SEQ ID NO: 585198
gucugcaucuugcuagaga

SEQ ID NO: 620887 - RNA, 19 nt, Artificial Sequence
  Description of Artificial Sequence: Synthetic oligonucleotide
  Antisense strand to SEQ ID NO: 620886
ucucuagcaagaugcagac

SEQ ID NO: 620888 - RNA, 19 nt, Artificial Sequence
  Description of Artificial Sequence: Synthetic oligonucleotide
  Sense strand starting at position 3101 of SEQ ID NO: 585198
ccuguuaauuaguacccua

SEQ ID NO: 620889 - RNA, 19 nt, Artificial Sequence
  Description of Artificial Sequence: Synthetic oligonucleotide
  Antisense strand to SEQ ID NO: 620888
uaggguacuaauuaacagg

SEQ ID NO: 620890 - RNA, 19 nt, Artificial Sequence
  Description of Artificial Sequence: Synthetic oligonucleotide
  Sense strand starting at position 3104 of SEQ ID NO: 585198
guuaauuaguacccuauaa

SEQ ID NO: 620891 - RNA, 19 nt, Artificial Sequence
  Description of Artificial Sequence: Synthetic oligonucleotide
  Antisense strand to SEQ ID NO: 620890
uuauaggguacuaauuaac

SEQ ID NO: 620892 - RNA, 19 nt, Artificial Sequence
  Description of Artificial Sequence: Synthetic oligonucleotide
  Sense strand starting at position 3234 of SEQ ID NO: 585198
uugucaguaagauacgaau

SEQ ID NO: 620893 - RNA, 19 nt, Artificial Sequence
  Description of Artificial Sequence: Synthetic oligonucleotide
  Antisense strand to SEQ ID NO: 620892
auucguaucuuacugacaa

SEQ ID NO: 620894 - RNA, 19 nt, Artificial Sequence
  Description of Artificial Sequence: Synthetic oligonucleotide
  Sense strand starting at position 3236 of SEQ ID NO: 585198
gucaguaagauacgaauau

SEQ ID NO: 620895 - RNA, 19 nt, Artificial Sequence
  Description of Artificial Sequence: Synthetic oligonucleotide
  Antisense strand to SEQ ID NO: 620894
auauucguaucuuacugac

SEQ ID NO: 620896 - RNA, 19 nt, Artificial Sequence
  Description of Artificial Sequence: Synthetic oligonucleotide
  Sense strand starting at position 3237 of SEQ ID NO: 585198
ucaguaagauacgaauauu

SEQ ID NO: 620897 - RNA, 19 nt, Artificial Sequence
  Description of Artificial Sequence: Synthetic oligonucleotide
  Antisense strand to SEQ ID NO: 620896
aauauucguaucuuacuga

SEQ ID NO: 620898 - RNA, 19 nt, Artificial Sequence
  Description of Artificial Sequence: Synthetic oligonucleotide
  Sense strand starting at position 3240 of SEQ ID NO: 585198
guaagauacgaauauuagu

SEQ ID NO: 620899 - RNA, 19 nt, Artificial Sequence
  Description of Artificial Sequence: Synthetic oligonucleotide
  Antisense strand to SEQ ID NO: 620898
acuaauauucguaucuuac

SEQ ID NO: 620900 - RNA, 19 nt, Artificial Sequence
  Description of Artificial Sequence: Synthetic oligonucleotide
  Sense strand starting at position 3317 of SEQ ID NO: 585198
aauaguugaugccaucuga

SEQ ID NO: 620901 - RNA, 19 nt, Artificial Sequence
  Description of Artificial Sequence: Synthetic oligonucleotide
  Antisense strand to SEQ ID NO: 620900
ucagauggcaucaacuauu

SEQ ID NO: 620902 - RNA, 19 nt, Artificial Sequence
  Description of Artificial Sequence: Synthetic oligonucleotide
  Sense strand starting at position 3321 of SEQ ID NO: 585198
guugaugccaucugagguu

SEQ ID NO: 620903 - RNA, 19 nt, Artificial Sequence
  Description of Artificial Sequence: Synthetic oligonucleotide
  Antisense strand to SEQ ID NO: 620902
aaccucagauggcaucaac

SEQ ID NO: 620904 - RNA, 19 nt, Artificial Sequence
  Description of Artificial Sequence: Synthetic oligonucleotide
  Sense strand starting at position 3536 of SEQ ID NO: 585198
guccauggguuggaggaua

SEQ ID NO: 620905 - RNA, 19 nt, Artificial Sequence
  Description of Artificial Sequence: Synthetic oligonucleotide
  Antisense strand to SEQ ID NO: 620904
uauccuccaacccauggac

SEQ ID NO: 620906 - RNA, 19 nt, Artificial Sequence
  Description of Artificial Sequence: Synthetic oligonucleotide
  Sense strand starting at position 3550 of SEQ ID NO: 585198
ggauaaguuuacccuaggu

SEQ ID NO: 620907 - RNA, 19 nt, Artificial Sequence
  Description of Artificial Sequence: Synthetic oligonucleotide
  Antisense strand to SEQ ID NO: 620906
accuaggguaaacuuaucc

SEQ ID NO: 620908 - RNA, 19 nt, Artificial Sequence
  Description of Artificial Sequence: Synthetic oligonucleotide
  Sense strand starting at position 3563 of SEQ ID NO: 585198
cuagguugcugccuuuaaa

SEQ ID NO: 620909 - RNA, 19 nt, Artificial Sequence
  Description of Artificial Sequence: Synthetic oligonucleotide
  Antisense strand to SEQ ID NO: 620908
uuuaaaggcagcaaccuag

SEQ ID NO: 620910 - RNA, 19 nt, Artificial Sequence
  Description of Artificial Sequence: Synthetic oligonucleotide
  Sense strand starting at position 3566 of SEQ ID NO: 585198
gguugcugccuuuaaacau

SEQ ID NO: 620911 - RNA, 19 nt, Artificial Sequence
  Description of Artificial Sequence: Synthetic oligonucleotide
  Antisense strand to SEQ ID NO: 620910
auguuuaaaggcagcaacc

SEQ ID NO: 620912 - RNA, 19 nt, Artificial Sequence
  Description of Artificial Sequence: Synthetic oligonucleotide
  Sense strand starting at position 3657 of SEQ ID NO: 585198
ucaauuauuuggugcaaua

SEQ ID NO: 620913 - RNA, 19 nt, Artificial Sequence
  Description of Artificial Sequence: Synthetic oligonucleotide
  Antisense strand to SEQ ID NO: 620912
uauugcaccaaauaauuga

SEQ ID NO: 620914 - RNA, 19 nt, Artificial Sequence
  Description of Artificial Sequence: Synthetic oligonucleotide
  Sense strand starting at position 3686 of SEQ ID NO: 585198
gacagaaagugaguuuaca

SEQ ID NO: 620915 - RNA, 19 nt, Artificial Sequence
  Description of Artificial Sequence: Synthetic oligonucleotide
  Antisense strand to SEQ ID NO: 620914
uguaaacucacuuucuguc

SEQ ID NO: 620916 - RNA, 19 nt, Artificial Sequence
  Description of Artificial Sequence: Synthetic oligonucleotide
  Sense strand starting at position 3805 of SEQ ID NO: 585198
uguguuucgguacaagauu

SEQ ID NO: 620917 - RNA, 19 nt, Artificial Sequence
  Description of Artificial Sequence: Synthetic oligonucleotide
  Antisense strand to SEQ ID NO: 620916
aaucuuguaccgaaacaca

SEQ ID NO: 620918 - RNA, 19 nt, Artificial Sequence
  Description of Artificial Sequence: Synthetic oligonucleotide
  Sense strand starting at position 3813 of SEQ ID NO: 585198
gguacaagauugucaucua

SEQ ID NO: 620919 - RNA, 19 nt, Artificial Sequence
  Description of Artificial Sequence: Synthetic oligonucleotide
  Antisense strand to SEQ ID NO: 620918
uagaugacaaucuuguacc

SEQ ID NO: 620920 - RNA, 19 nt, Artificial Sequence
  Description of Artificial Sequence: Synthetic oligonucleotide
  Sense strand starting at position 3814 of SEQ ID NO: 585198
guacaagauugucaucuaa

SEQ ID NO: 620921 - RNA, 19 nt, Artificial Sequence
  Description of Artificial Sequence: Synthetic oligonucleotide
  Antisense strand to SEQ ID NO: 620920
uuagaugacaaucuuguac

SEQ ID NO: 620922 - RNA, 19 nt, Artificial Sequence
  Description of Artificial Sequence: Synthetic oligonucleotide
  Sense strand starting at position 3821 of SEQ ID NO: 585198
auugucaucuaagagucaa

SEQ ID NO: 620923 - RNA, 19 nt, Artificial Sequence
  Description of Artificial Sequence: Synthetic oligonucleotide
  Antisense strand to SEQ ID NO: 620922
uugacucuuagaugacaau

SEQ ID NO: 620924 - RNA, 19 nt, Artificial Sequence
  Description of Artificial Sequence: Synthetic oligonucleotide
  Sense strand starting at position 3831 of SEQ ID NO: 585198
aagagucaagaauguuauu

SEQ ID NO: 620925 - RNA, 19 nt, Artificial Sequence
  Description of Artificial Sequence: Synthetic oligonucleotide
  Antisense strand to SEQ ID NO: 620924
aauaacauucuugacucuu

SEQ ID NO: 620926 - RNA, 19 nt, Artificial Sequence
  Description of Artificial Sequence: Synthetic oligonucleotide
  Sense strand starting at position 3857 of SEQ ID NO: 585198
ugucaagugagccgucaaa

SEQ ID NO: 620927 - RNA, 19 nt, Artificial Sequence
  Description of Artificial Sequence: Synthetic oligonucleotide
  Antisense strand to SEQ ID NO: 620926
uuugacggcucacuugaca

SEQ ID NO: 620928 - RNA, 19 nt, Artificial Sequence
  Description of Artificial Sequence: Synthetic oligonucleotide
  Sense strand starting at position 3868 of SEQ ID NO: 585198
ccgucaaaccacuguaaca

SEQ ID NO: 620929 - RNA, 19 nt, Artificial Sequence
  Description of Artificial Sequence: Synthetic oligonucleotide
  Antisense strand to SEQ ID NO: 620928
uguuacagugguuugacgg

SEQ ID NO: 620930 - RNA, 19 nt, Artificial Sequence
  Description of Artificial Sequence: Synthetic oligonucleotide
  Sense strand starting at position 3980 of SEQ ID NO: 585198
cacaauguagcagaaagua

SEQ ID NO: 620931 - RNA, 19 nt, Artificial Sequence
  Description of Artificial Sequence: Synthetic oligonucleotide
  Antisense strand to SEQ ID NO: 620930
uacuuucugcuacauugug

SEQ ID NO: 620932 - RNA, 19 nt, Artificial Sequence
  Description of Artificial Sequence: Synthetic oligonucleotide
  Sense strand starting at position 19 of SEQ ID NO: 585199
ucucaaggugcucaaguaa

SEQ ID NO: 620933 - RNA, 19 nt, Artificial Sequence
  Description of Artificial Sequence: Synthetic oligonucleotide
  Antisense strand to SEQ ID NO: 620932
uuacuugagcaccuugaga

SEQ ID NO: 620934 - RNA, 19 nt, Artificial Sequence
  Description of Artificial Sequence: Synthetic oligonucleotide
  Sense strand starting at position 210 of SEQ ID NO: 585199
uugagaugguggguucuuu

SEQ ID NO: 620935 - RNA, 19 nt, Artificial Sequence
  Description of Artificial Sequence: Synthetic oligonucleotide
  Antisense strand to SEQ ID NO: 620934
aaagaacccaccaucucaa

SEQ ID NO: 620936 - RNA, 19 nt, Artificial Sequence
  Description of Artificial Sequence: Synthetic oligonucleotide
  Sense strand starting at position 238 of SEQ ID NO: 585199
ucgguacugguauacuuua

SEQ ID NO: 620937 - RNA, 19 nt, Artificial Sequence
  Description of Artificial Sequence: Synthetic oligonucleotide
  Antisense strand to SEQ ID NO: 620936
uaaaguauaccaguaccga

SEQ ID NO: 620938 - RNA, 19 nt, Artificial Sequence
  Description of Artificial Sequence: Synthetic oligonucleotide
  Sense strand starting at position 311 of SEQ ID NO: 585199
uuuacaguauuacugguua

SEQ ID NO: 620939 - RNA, 19 nt, Artificial Sequence
  Description of Artificial Sequence: Synthetic oligonucleotide
  Antisense strand to SEQ ID NO: 620938
uaaccaguaauacuguaaa

SEQ ID NO: 620940 - RNA, 19 nt, Artificial Sequence
  Description of Artificial Sequence: Synthetic oligonucleotide
  Sense strand starting at position 323 of SEQ ID NO: 585199
cugguuauucugggaugau

SEQ ID NO: 620941 - RNA, 19 nt, Artificial Sequence
  Description of Artificial Sequence: Synthetic oligonucleotide
  Antisense strand to SEQ ID NO: 620940
aucaucccagaauaaccag

SEQ ID NO: 620942 - RNA, 19 nt, Artificial Sequence
  Description of Artificial Sequence: Synthetic oligonucleotide
  Sense strand starting at position 443 of SEQ ID NO: 585199
ccagaaauacgucaaggca

SEQ ID NO: 620943 - RNA, 19 nt, Artificial Sequence
  Description of Artificial Sequence: Synthetic oligonucleotide
  Antisense strand to SEQ ID NO: 620942
ugccuugacguauuucugg

SEQ ID NO: 620944 - RNA, 19 nt, Artificial Sequence
  Description of Artificial Sequence: Synthetic oligonucleotide
  Sense strand starting at position 509 of SEQ ID NO: 585199
ugaucugaaugcucauaau

SEQ ID NO: 620945 - RNA, 19 nt, Artificial Sequence
  Description of Artificial Sequence: Synthetic oligonucleotide
  Antisense strand to SEQ ID NO: 620944
auuaugagcauucagauca

SEQ ID NO: 620946 - RNA, 19 nt, Artificial Sequence
  Description of Artificial Sequence: Synthetic oligonucleotide
  Sense strand starting at position 515 of SEQ ID NO: 585199
gaaugcucauaauugaugu

SEQ ID NO: 620947 - RNA, 19 nt, Artificial Sequence
  Description of Artificial Sequence: Synthetic oligonucleotide
  Antisense strand to SEQ ID NO: 620946
acaucaauuaugagcauuc

SEQ ID NO: 620948 - RNA, 19 nt, Artificial Sequence
  Description of Artificial Sequence: Synthetic oligonucleotide
  Sense strand starting at position 532 of SEQ ID NO: 585199
guaaucaauuaugucacua

SEQ ID NO: 620949 - RNA, 19 nt, Artificial Sequence
  Description of Artificial Sequence: Synthetic oligonucleotide
  Antisense strand to SEQ ID NO: 620948
uagugacauaauugauuac

SEQ ID NO: 620950 - RNA, 19 nt, Artificial Sequence
  Description of Artificial Sequence: Synthetic oligonucleotide
  Sense strand starting at position 615 of SEQ ID NO: 585199
uuggcaaugugagugaaua

SEQ ID NO: 620951 - RNA, 19 nt, Artificial Sequence
  Description of Artificial Sequence: Synthetic oligonucleotide
  Antisense strand to SEQ ID NO: 620950
uauucacucacauugccaa

SEQ ID NO: 620952 - RNA, 19 nt, Artificial Sequence
  Description of Artificial Sequence: Synthetic oligonucleotide
  Sense strand starting at position 616 of SEQ ID NO: 585199
uggcaaugugagugaauaa

SEQ ID NO: 620953 - RNA, 19 nt, Artificial Sequence
  Description of Artificial Sequence: Synthetic oligonucleotide
  Antisense strand to SEQ ID NO: 620952
uuauucacucacauugcca

SEQ ID NO: 620954 - RNA, 19 nt, Artificial Sequence
  Description of Artificial Sequence: Synthetic oligonucleotide
  Sense strand starting at position 617 of SEQ ID NO: 585199
ggcaaugugagugaauaag

SEQ ID NO: 620955 - RNA, 19 nt, Artificial Sequence
  Description of Artificial Sequence: Synthetic oligonucleotide
  Antisense strand to SEQ ID NO: 620954
cuuauucacucacauugcc

SEQ ID NO: 620956 - RNA, 19 nt, Artificial Sequence
  Description of Artificial Sequence: Synthetic oligonucleotide
  Sense strand starting at position 643 of SEQ ID NO: 585199
ggaauagagguguggcaga

SEQ ID NO: 620957 - RNA, 19 nt, Artificial Sequence
  Description of Artificial Sequence: Synthetic oligonucleotide
  Antisense strand to SEQ ID NO: 620956
ucugccacaccucuauucc

SEQ ID NO: 620958 - RNA, 19 nt, Artificial Sequence
  Description of Artificial Sequence: Synthetic oligonucleotide
  Sense strand starting at position 784 of SEQ ID NO: 585199
auaccucgucaauggauua

SEQ ID NO: 620959 - RNA, 19 nt, Artificial Sequence
  Description of Artificial Sequence: Synthetic oligonucleotide
  Antisense strand to SEQ ID NO: 620958
uaauccauugacgagguau

SEQ ID NO: 620960 - RNA, 19 nt, Artificial Sequence
  Description of Artificial Sequence: Synthetic oligonucleotide
  Sense strand starting at position 827 of SEQ ID NO: 585199
augcaagaaacaugagguu

SEQ ID NO: 620961 - RNA, 19 nt, Artificial Sequence
  Description of Artificial Sequence: Synthetic oligonucleotide
  Antisense strand to SEQ ID NO: 620960
aaccucauguuucuugcau

SEQ ID NO: 620962 - RNA, 19 nt, Artificial Sequence
  Description of Artificial Sequence: Synthetic oligonucleotide
  Sense strand starting at position 1056 of SEQ ID NO: 585199
acuaaacgaucucuuugaa

SEQ ID NO: 620963 - RNA, 19 nt, Artificial Sequence
  Description of Artificial Sequence: Synthetic oligonucleotide
  Antisense strand to SEQ ID NO: 620962
uucaaagagaucguuuagu

SEQ ID NO: 620964 - RNA, 19 nt, Artificial Sequence
  Description of Artificial Sequence: Synthetic oligonucleotide
  Sense strand starting at position 1106 of SEQ ID NO: 585199
aaagauauguuguuggauu

SEQ ID NO: 620965 - RNA, 19 nt, Artificial Sequence
  Description of Artificial Sequence: Synthetic oligonucleotide
  Antisense strand to SEQ ID NO: 620964
aauccaacaacauaucuuu

SEQ ID NO: 620966 - RNA, 19 nt, Artificial Sequence
  Description of Artificial Sequence: Synthetic oligonucleotide
  Sense strand starting at position 1313 of SEQ ID NO: 585199
ggaccuuucgcucucgcaa

SEQ ID NO: 620967 - RNA, 19 nt, Artificial Sequence
  Description of Artificial Sequence: Synthetic oligonucleotide
  Antisense strand to SEQ ID NO: 620966
uugcgagagcgaaaggucc

SEQ ID NO: 620968 - RNA, 19 nt, Artificial Sequence
  Description of Artificial Sequence: Synthetic oligonucleotide
  Sense strand starting at position 1582 of SEQ ID NO: 585199
ccgaaauaacuccagucca

SEQ ID NO: 620969 - RNA, 19 nt, Artificial Sequence
  Description of Artificial Sequence: Synthetic oligonucleotide
  Antisense strand to SEQ ID NO: 620968
uggacuggaguuauuucgg

SEQ ID NO: 620970 - RNA, 19 nt, Artificial Sequence
  Description of Artificial Sequence: Synthetic oligonucleotide
  Sense strand starting at position 1858 of SEQ ID NO: 585199
cccggaacuuuccugacau

SEQ ID NO: 620971 - RNA, 19 nt, Artificial Sequence
  Description of Artificial Sequence: Synthetic oligonucleotide
  Antisense strand to SEQ ID NO: 620970
augucaggaaaguuccggg

SEQ ID NO: 620972 - RNA, 19 nt, Artificial Sequence
  Description of Artificial Sequence: Synthetic oligonucleotide
  Sense strand starting at position 2503 of SEQ ID NO: 585199
gcuacugcccaguggauuu

SEQ ID NO: 620973 - RNA, 19 nt, Artificial Sequence
  Description of Artificial Sequence: Synthetic oligonucleotide
  Antisense strand to SEQ ID NO: 620972
aaauccacugggcaguagc

SEQ ID NO: 620974 - RNA, 19 nt, Artificial Sequence
  Description of Artificial Sequence: Synthetic oligonucleotide
  Sense strand starting at position 2601 of SEQ ID NO: 585199
cguccagaagacugaaaua

SEQ ID NO: 620975 - RNA, 19 nt, Artificial Sequence
  Description of Artificial Sequence: Synthetic oligonucleotide
  Antisense strand to SEQ ID NO: 620974
uauuucagucuucuggacg

SEQ ID NO: 620976 - RNA, 19 nt, Artificial Sequence
  Description of Artificial Sequence: Synthetic oligonucleotide
  Sense strand starting at position 2655 of SEQ ID NO: 585199
gaaggugucccugaugugu

SEQ ID NO: 620977 - RNA, 19 nt, Artificial Sequence
  Description of Artificial Sequence: Synthetic oligonucleotide
  Antisense strand to SEQ ID NO: 620976
acacaucagggacaccuuc

SEQ ID NO: 620978 - RNA, 19 nt, Artificial Sequence
  Description of Artificial Sequence: Synthetic oligonucleotide
  Sense strand starting at position 2666 of SEQ ID NO: 585199
ugauguguggcaugggaga

SEQ ID NO: 620979 - RNA, 19 nt, Artificial Sequence
  Description of Artificial Sequence: Synthetic oligonucleotide
  Antisense strand to SEQ ID NO: 620978
ucucccaugccacacauca

SEQ ID NO: 620980 - RNA, 19 nt, Artificial Sequence
  Description of Artificial Sequence: Synthetic oligonucleotide
  Sense strand starting at position 2668 of SEQ ID NO: 585199
auguguggcaugggagaau

SEQ ID NO: 620981 - RNA, 19 nt, Artificial Sequence
  Description of Artificial Sequence: Synthetic oligonucleotide
  Antisense strand to SEQ ID NO: 620980
auucucccaugccacacau

SEQ ID NO: 620982 - RNA, 19 nt, Artificial Sequence
  Description of Artificial Sequence: Synthetic oligonucleotide
  Sense strand starting at position 2677 of SEQ ID NO: 585199
augggagaauugccaggua

SEQ ID NO: 620983 - RNA, 19 nt, Artificial Sequence
  Description of Artificial Sequence: Synthetic oligonucleotide
  Antisense strand to SEQ ID NO: 620982
uaccuggcaauucucccau

SEQ ID NO: 620984 - RNA, 19 nt, Artificial Sequence
  Description of Artificial Sequence: Synthetic oligonucleotide
  Sense strand starting at position 2680 of SEQ ID NO: 585199
ggagaauugccagguaucc

SEQ ID NO: 620985 - RNA, 19 nt, Artificial Sequence
  Description of Artificial Sequence: Synthetic oligonucleotide
  Antisense strand to SEQ ID NO: 620984
ggauaccuggcaauucucc

SEQ ID NO: 620986 - RNA, 19 nt, Artificial Sequence
  Description of Artificial Sequence: Synthetic oligonucleotide
  Sense strand starting at position 3069 of SEQ ID NO: 585199
gcuucuuggaccuauggga

SEQ ID NO: 620987 - RNA, 19 nt, Artificial Sequence
  Description of Artificial Sequence: Synthetic oligonucleotide
  Antisense strand to SEQ ID NO: 620986
ucccauagguccaagaagc

SEQ ID NO: 620988 - RNA, 19 nt, Artificial Sequence
  Description of Artificial Sequence: Synthetic oligonucleotide
  Sense strand starting at position 3082 of SEQ ID NO: 585199
augggacuucaguauagug

SEQ ID NO: 620989 - RNA, 19 nt, Artificial Sequence
  Description of Artificial Sequence: Synthetic oligonucleotide
  Antisense strand to SEQ ID NO: 620988
cacuauacugaagucccau

SEQ ID NO: 620990 - RNA, 19 nt, Artificial Sequence
  Description of Artificial Sequence: Synthetic oligonucleotide
  Sense strand starting at position 3084 of SEQ ID NO: 585199
gggacuucaguauaguguu

SEQ ID NO: 620991 - RNA, 19 nt, Artificial Sequence
  Description of Artificial Sequence: Synthetic oligonucleotide
  Antisense strand to SEQ ID NO: 620990
aacacuauacugaaguccc

SEQ ID NO: 620992 - RNA, 19 nt, Artificial Sequence
  Description of Artificial Sequence: Synthetic oligonucleotide
  Sense strand starting at position 3096 of SEQ ID NO: 585199
uaguguugugcaguuugua

SEQ ID NO: 620993 - RNA, 19 nt, Artificial Sequence
  Description of Artificial Sequence: Synthetic oligonucleotide
  Antisense strand to SEQ ID NO: 620992
uacaaacugcacaacacua

SEQ ID NO: 620994 - RNA, 19 nt, Artificial Sequence
  Description of Artificial Sequence: Synthetic oligonucleotide
  Sense strand starting at position 3247 of SEQ ID NO: 585199
gcauaucacuacccugaga

SEQ ID NO: 620995 - RNA, 19 nt, Artificial Sequence
  Description of Artificial Sequence: Synthetic oligonucleotide
  Antisense strand to SEQ ID NO: 620994
ucucaggguagugauaugc

SEQ ID NO: 620996 - RNA, 19 nt, Artificial Sequence
  Description of Artificial Sequence: Synthetic oligonucleotide
  Sense strand starting at position 3300 of SEQ ID NO: 585199
caccuacagcugugaaaga

SEQ ID NO: 620997 - RNA, 19 nt, Artificial Sequence
  Description of Artificial Sequence: Synthetic oligonucleotide
  Antisense strand to SEQ ID NO: 620996
ucuuucacagcuguaggug

SEQ ID NO: 620998 - RNA, 19 nt, Artificial Sequence
  Description of Artificial Sequence: Synthetic oligonucleotide
  Sense strand starting at position 3403 of SEQ ID NO: 585199
gaaauaagcccugggcuca

SEQ ID NO: 620999 - RNA, 19 nt, Artificial Sequence
  Description of Artificial Sequence: Synthetic oligonucleotide
  Antisense strand to SEQ ID NO: 620998
ugagcccagggcuuauuuc

SEQ ID NO: 621000 - RNA, 19 nt, Artificial Sequence
  Description of Artificial Sequence: Synthetic oligonucleotide
  Sense strand starting at position 3437 of SEQ ID NO: 585199
auggucuugccuggaccaa

SEQ ID NO: 621001 - RNA, 19 nt, Artificial Sequence
  Description of Artificial Sequence: Synthetic oligonucleotide
  Antisense strand to SEQ ID NO: 621000
uugguccaggcaagaccau

SEQ ID NO: 621002 - RNA, 19 nt, Artificial Sequence
  Description of Artificial Sequence: Synthetic oligonucleotide
  Sense strand starting at position 3438 of SEQ ID NO: 585199
uggucuugccuggaccaaa

SEQ ID NO: 621003 - RNA, 19 nt, Artificial Sequence
  Description of Artificial Sequence: Synthetic oligonucleotide
  Antisense strand to SEQ ID NO: 621002
uuugguccaggcaagacca

SEQ ID NO: 621004 - RNA, 19 nt, Artificial Sequence
  Description of Artificial Sequence: Synthetic oligonucleotide
  Sense strand starting at position 3472 of SEQ ID NO: 585199
aggagauuaucagcgagca

SEQ ID NO: 621005 - RNA, 19 nt, Artificial Sequence
  Description of Artificial Sequence: Synthetic oligonucleotide
  Antisense strand to SEQ ID NO: 621004
ugcucgcugauaaucuccu

SEQ ID NO: 621006 - RNA, 19 nt, Artificial Sequence
  Description of Artificial Sequence: Synthetic oligonucleotide
  Sense strand starting at position 3473 of SEQ ID NO: 585199
ggagauuaucagcgagcaa

SEQ ID NO: 621007 - RNA, 19 nt, Artificial Sequence
  Description of Artificial Sequence: Synthetic oligonucleotide
  Antisense strand to SEQ ID NO: 621006
uugcucgcugauaaucucc

SEQ ID NO: 621008 - RNA, 19 nt, Artificial Sequence
  Description of Artificial Sequence: Synthetic oligonucleotide
  Sense strand starting at position 3492 of SEQ ID NO: 585199
aagugaagucaggauaguu

SEQ ID NO: 621009 - RNA, 19 nt, Artificial Sequence
  Description of Artificial Sequence: Synthetic oligonucleotide
  Antisense strand to SEQ ID NO: 621008
aacuauccugacuucacuu

SEQ ID NO: 621010 - RNA, 19 nt, Artificial Sequence
  Description of Artificial Sequence: Synthetic oligonucleotide
  Sense strand starting at position 3555 of SEQ ID NO: 585199
agcaaagggcauuggaauu

SEQ ID NO: 621011 - RNA, 19 nt, Artificial Sequence
  Description of Artificial Sequence: Synthetic oligonucleotide
  Antisense strand to SEQ ID NO: 621010
aauuccaaugcccuuugcu

SEQ ID NO: 621012 - RNA, 19 nt, Artificial Sequence
  Description of Artificial Sequence: Synthetic oligonucleotide
  Sense strand starting at position 26 of SEQ ID NO: 585200
uagguuaguggguauaaac

SEQ ID NO: 621013 - RNA, 19 nt, Artificial Sequence
  Description of Artificial Sequence: Synthetic oligonucleotide
  Antisense strand to SEQ ID NO: 621012
guuuauacccacuaaccua

SEQ ID NO: 621014 - RNA, 19 nt, Artificial Sequence
  Description of Artificial Sequence: Synthetic oligonucleotide
  Sense strand starting at position 94 of SEQ ID NO: 585200
ucuaguuagcaacaaugua

SEQ ID NO: 621015 - RNA, 19 nt, Artificial Sequence
  Description of Artificial Sequence: Synthetic oligonucleotide
  Antisense strand to SEQ ID NO: 621014
uacauuguugcuaacuaga

SEQ ID NO: 621016 - RNA, 19 nt, Artificial Sequence
  Description of Artificial Sequence: Synthetic oligonucleotide
  Sense strand starting at position 328 of SEQ ID NO: 585200
guugucugacauuaaauug

SEQ ID NO: 621017 - RNA, 19 nt, Artificial Sequence
  Description of Artificial Sequence: Synthetic oligonucleotide
  Antisense strand to SEQ ID NO: 621016
caauuuaaugucagacaac

SEQ ID NO: 621018 - RNA, 19 nt, Artificial Sequence
  Description of Artificial Sequence: Synthetic oligonucleotide
  Sense strand starting at position 369 of SEQ ID NO: 585200
acauguaagcuccauuaga

SEQ ID NO: 621019 - RNA, 19 nt, Artificial Sequence
  Description of Artificial Sequence: Synthetic oligonucleotide
  Antisense strand to SEQ ID NO: 621018
ucuaauggagcuuacaugu

SEQ ID NO: 621020 - RNA, 19 nt, Artificial Sequence
  Description of Artificial Sequence: Synthetic oligonucleotide
  Sense strand starting at position 494 of SEQ ID NO: 585200
uucucuugaugagugacaa

SEQ ID NO: 621021 - RNA, 19 nt, Artificial Sequence
  Description of Artificial Sequence: Synthetic oligonucleotide
  Antisense strand to SEQ ID NO: 621020
uugucacucaucaagagaa

SEQ ID NO: 621022 - RNA, 19 nt, Artificial Sequence
  Description of Artificial Sequence: Synthetic oligonucleotide
  Sense strand starting at position 495 of SEQ ID NO: 585200
ucucuugaugagugacaaa

SEQ ID NO: 621023 - RNA, 19 nt, Artificial Sequence
  Description of Artificial Sequence: Synthetic oligonucleotide
  Antisense strand to SEQ ID NO: 621022
uuugucacucaucaagaga

SEQ ID NO: 621024 - RNA, 19 nt, Artificial Sequence
  Description of Artificial Sequence: Synthetic oligonucleotide
  Sense strand starting at position 775 of SEQ ID NO: 585200
caagaaaucuuagugugac

SEQ ID NO: 621025 - RNA, 19 nt, Artificial Sequence
  Description of Artificial Sequence: Synthetic oligonucleotide
  Antisense strand to SEQ ID NO: 621024
gucacacuaagauuucuug

SEQ ID NO: 621026 - RNA, 19 nt, Artificial Sequence
  Description of Artificial Sequence: Synthetic oligonucleotide
  Sense strand starting at position 822 of SEQ ID NO: 585200
cuuagaggccuugggaaau

SEQ ID NO: 621027 - RNA, 19 nt, Artificial Sequence
  Description of Artificial Sequence: Synthetic oligonucleotide
  Antisense strand to SEQ ID NO: 621026
auuucccaaggccucuaag

SEQ ID NO: 621028 - RNA, 19 nt, Artificial Sequence
  Description of Artificial Sequence: Synthetic oligonucleotide
  Sense strand starting at position 834 of SEQ ID NO: 585200
gggaaauacuucguugaua

SEQ ID NO: 621029 - RNA, 19 nt, Artificial Sequence
  Description of Artificial Sequence: Synthetic oligonucleotide
  Antisense strand to SEQ ID NO: 621028
uaucaacgaaguauuuccc

SEQ ID NO: 621030 - RNA, 19 nt, Artificial Sequence
  Description of Artificial Sequence: Synthetic oligonucleotide
  Sense strand starting at position 835 of SEQ ID NO: 585200
ggaaauacuucguugauaa

SEQ ID NO: 621031 - RNA, 19 nt, Artificial Sequence
  Description of Artificial Sequence: Synthetic oligonucleotide
  Antisense strand to SEQ ID NO: 621030
uuaucaacgaaguauuucc

SEQ ID NO: 621032 - RNA, 19 nt, Artificial Sequence
  Description of Artificial Sequence: Synthetic oligonucleotide
  Sense strand starting at position 836 of SEQ ID NO: 585200
gaaauacuucguugauaaa

SEQ ID NO: 621033 - RNA, 19 nt, Artificial Sequence
  Description of Artificial Sequence: Synthetic oligonucleotide
  Antisense strand to SEQ ID NO: 621032
uuuaucaacgaaguauuuc

SEQ ID NO: 621034 - RNA, 19 nt, Artificial Sequence
  Description of Artificial Sequence: Synthetic oligonucleotide
  Sense strand starting at position 1120 of SEQ ID NO: 585200
uccuguucuccuuaaggaa

SEQ ID NO: 621035 - RNA, 19 nt, Artificial Sequence
  Description of Artificial Sequence: Synthetic oligonucleotide
  Antisense strand to SEQ ID NO: 621034
uuccuuaaggagaacagga

SEQ ID NO: 621036 - RNA, 19 nt, Artificial Sequence
  Description of Artificial Sequence: Synthetic oligonucleotide
  Sense strand starting at position 1195 of SEQ ID NO: 585200
ugaaaugucuuucucauag

SEQ ID NO: 621037 - RNA, 19 nt, Artificial Sequence
  Description of Artificial Sequence: Synthetic oligonucleotide
  Antisense strand to SEQ ID NO: 621036
cuaugagaaagacauuuca

SEQ ID NO: 621038 - RNA, 19 nt, Artificial Sequence
  Description of Artificial Sequence: Synthetic oligonucleotide
  Sense strand starting at position 1214 of SEQ ID NO: 585200
guaagcucucacgacacaa

SEQ ID NO: 621039 - RNA, 19 nt, Artificial Sequence
  Description of Artificial Sequence: Synthetic oligonucleotide
  Antisense strand to SEQ ID NO: 621038
uugugucgugagagcuuac

SEQ ID NO: 621040 - RNA, 19 nt, Artificial Sequence
  Description of Artificial Sequence: Synthetic oligonucleotide
  Sense strand starting at position 1422 of SEQ ID NO: 585200
gugugauagaaauacaugu

SEQ ID NO: 621041 - RNA, 19 nt, Artificial Sequence
  Description of Artificial Sequence: Synthetic oligonucleotide
  Antisense strand to SEQ ID NO: 621040
acauguauuucuaucacac

SEQ ID NO: 621042 - RNA, 19 nt, Artificial Sequence
  Description of Artificial Sequence: Synthetic oligonucleotide
  Sense strand starting at position 1426 of SEQ ID NO: 585200
gauagaaauacaugugggu

SEQ ID NO: 621043 - RNA, 19 nt, Artificial Sequence
  Description of Artificial Sequence: Synthetic oligonucleotide
  Antisense strand to SEQ ID NO: 621042
acccacauguauuucuauc

SEQ ID NO: 621044 - RNA, 19 nt, Artificial Sequence
  Description of Artificial Sequence: Synthetic oligonucleotide
  Sense strand starting at position 1430 of SEQ ID NO: 585200
gaaauacauguggguuaug

SEQ ID NO: 621045 - RNA, 19 nt, Artificial Sequence
  Description of Artificial Sequence: Synthetic oligonucleotide
  Antisense strand to SEQ ID NO: 621044
cauaacccacauguauuuc

SEQ ID NO: 621046 - RNA, 19 nt, Artificial Sequence
  Description of Artificial Sequence: Synthetic oligonucleotide
  Sense strand starting at position 1433 of SEQ ID NO: 585200
auacauguggguuauguau

SEQ ID NO: 621047 - RNA, 19 nt, Artificial Sequence
  Description of Artificial Sequence: Synthetic oligonucleotide
  Antisense strand to SEQ ID NO: 621046
auacauaacccacauguau

SEQ ID NO: 621048 - RNA, 19 nt, Artificial Sequence
  Description of Artificial Sequence: Synthetic oligonucleotide
  Sense strand starting at position 1847 of SEQ ID NO: 585200
augauaugucccggagaag

SEQ ID NO: 621049 - RNA, 19 nt, Artificial Sequence
  Description of Artificial Sequence: Synthetic oligonucleotide
  Antisense strand to SEQ ID NO: 621048
cuucuccgggacauaucau

SEQ ID NO: 621050 - RNA, 19 nt, Artificial Sequence
  Description of Artificial Sequence: Synthetic oligonucleotide
  Sense strand starting at position 1848 of SEQ ID NO: 585200
ugauaugucccggagaagu

SEQ ID NO: 621051 - RNA, 19 nt, Artificial Sequence
  Description of Artificial Sequence: Synthetic oligonucleotide
  Antisense strand to SEQ ID NO: 621050
acuucuccgggacauauca

SEQ ID NO: 621052 - RNA, 19 nt, Artificial Sequence
  Description of Artificial Sequence: Synthetic oligonucleotide
  Sense strand starting at position 2055 of SEQ ID NO: 585200
gguauaggacagugucaaa

SEQ ID NO: 621053 - RNA, 19 nt, Artificial Sequence
  Description of Artificial Sequence: Synthetic oligonucleotide
  Antisense strand to SEQ ID NO: 621052
uuugacacuguccuauacc

SEQ ID NO: 621054 - RNA, 19 nt, Artificial Sequence
  Description of Artificial Sequence: Synthetic oligonucleotide
  Sense strand starting at position 2157 of SEQ ID NO: 585200
caguguuagagauaaugug

SEQ ID NO: 621055 - RNA, 19 nt, Artificial Sequence
  Description of Artificial Sequence: Synthetic oligonucleotide
  Antisense strand to SEQ ID NO: 621054
cacauuaucucuaacacug

SEQ ID NO: 621056 - RNA, 19 nt, Artificial Sequence
  Description of Artificial Sequence: Synthetic oligonucleotide
  Sense strand starting at position 2515 of SEQ ID NO: 585200
cuguguuagaaauauguag

SEQ ID NO: 621057 - RNA, 19 nt, Artificial Sequence
  Description of Artificial Sequence: Synthetic oligonucleotide
  Antisense strand to SEQ ID NO: 621056
cuacauauuucuaacacag

SEQ ID NO: 621058 - RNA, 19 nt, Artificial Sequence
  Description of Artificial Sequence: Synthetic oligonucleotide
  Sense strand starting at position 2564 of SEQ ID NO: 585200
agaugaaacuuguccgaua

SEQ ID NO: 621059 - RNA, 19 nt, Artificial Sequence
  Description of Artificial Sequence: Synthetic oligonucleotide
  Antisense strand to SEQ ID NO: 621058
uaucggacaaguuucaucu

SEQ ID NO: 621060 - RNA, 19 nt, Artificial Sequence
  Description of Artificial Sequence: Synthetic oligonucleotide
  Sense strand starting at position 2566 of SEQ ID NO: 585200
augaaacuuguccgauaca

SEQ ID NO: 621061 - RNA, 19 nt, Artificial Sequence
  Description of Artificial Sequence: Synthetic oligonucleotide
  Antisense strand to SEQ ID NO: 621060
uguaucggacaaguuucau

SEQ ID NO: 621062 - RNA, 19 nt, Artificial Sequence
  Description of Artificial Sequence: Synthetic oligonucleotide
  Sense strand starting at position 2569 of SEQ ID NO: 585200
aaacuuguccgauacagua

SEQ ID NO: 621063 - RNA, 19 nt, Artificial Sequence
  Description of Artificial Sequence: Synthetic oligonucleotide
  Antisense strand to SEQ ID NO: 621062
uacuguaucggacaaguuu

SEQ ID NO: 621064 - RNA, 19 nt, Artificial Sequence
  Description of Artificial Sequence: Synthetic oligonucleotide
  Sense strand starting at position 2687 of SEQ ID NO: 585200
auucuuaaguacuuaggau

SEQ ID NO: 621065 - RNA, 19 nt, Artificial Sequence
  Description of Artificial Sequence: Synthetic oligonucleotide
  Antisense strand to SEQ ID NO: 621064
auccuaaguacuuaagaau

SEQ ID NO: 621066 - RNA, 19 nt, Artificial Sequence
  Description of Artificial Sequence: Synthetic oligonucleotide
  Sense strand starting at position 2720 of SEQ ID NO: 585200
uaauuuguugggugucuuu

SEQ ID NO: 621067 - RNA, 19 nt, Artificial Sequence
  Description of Artificial Sequence: Synthetic oligonucleotide
  Antisense strand to SEQ ID NO: 621066
aaagacacccaacaaauua

SEQ ID NO: 621068 - RNA, 19 nt, Artificial Sequence
  Description of Artificial Sequence: Synthetic oligonucleotide
  Sense strand starting at position 2853 of SEQ ID NO: 585200
ugaauaucucaugggcaag

SEQ ID NO: 621069 - RNA, 19 nt, Artificial Sequence
  Description of Artificial Sequence: Synthetic oligonucleotide
  Antisense strand to SEQ ID NO: 621068
cuugcccaugagauauuca

SEQ ID NO: 621070 - RNA, 19 nt, Artificial Sequence
  Description of Artificial Sequence: Synthetic oligonucleotide
  Sense strand starting at position 3220 of SEQ ID NO: 585200
cauacaugagucugaagac

SEQ ID NO: 621071 - RNA, 19 nt, Artificial Sequence
  Description of Artificial Sequence: Synthetic oligonucleotide
  Antisense strand to SEQ ID NO: 621070
gucuucagacucauguaug

SEQ ID NO: 621072 - RNA, 19 nt, Artificial Sequence
  Description of Artificial Sequence: Synthetic oligonucleotide
  Sense strand starting at position 3235 of SEQ ID NO: 585200
agacucuugagauguuuag

SEQ ID NO: 621073 - RNA, 19 nt, Artificial Sequence
  Description of Artificial Sequence: Synthetic oligonucleotide
  Antisense strand to SEQ ID NO: 621072
cuaaacaucucaagagucu

SEQ ID NO: 621074 - RNA, 19 nt, Artificial Sequence
  Description of Artificial Sequence: Synthetic oligonucleotide
  Sense strand starting at position 3239 of SEQ ID NO: 585200
ucuugagauguuuagcaau

SEQ ID NO: 621075 - RNA, 19 nt, Artificial Sequence
  Description of Artificial Sequence: Synthetic oligonucleotide
  Antisense strand to SEQ ID NO: 621074
auugcuaaacaucucaaga

SEQ ID NO: 621076 - RNA, 19 nt, Artificial Sequence
  Description of Artificial Sequence: Synthetic oligonucleotide
  Sense strand starting at position 3368 of SEQ ID NO: 585200
ggucuuauguaauuacaag

SEQ ID NO: 621077 - RNA, 19 nt, Artificial Sequence
  Description of Artificial Sequence: Synthetic oligonucleotide
  Antisense strand to SEQ ID NO: 621076
cuuguaauuacauaagacc

SEQ ID NO: 621078 - RNA, 19 nt, Artificial Sequence
  Description of Artificial Sequence: Synthetic oligonucleotide
  Sense strand starting at position 3468 of SEQ ID NO: 585200
aacucagagugauucugaa

SEQ ID NO: 621079 - RNA, 19 nt, Artificial Sequence
  Description of Artificial Sequence: Synthetic oligonucleotide
  Antisense strand to SEQ ID NO: 621078
uucagaaucacucugaguu

SEQ ID NO: 621080 - RNA, 19 nt, Artificial Sequence
  Description of Artificial Sequence: Synthetic oligonucleotide
  Sense strand starting at position 3530 of SEQ ID NO: 585200
aagguaugccaauaauguc

SEQ ID NO: 621081 - RNA, 19 nt, Artificial Sequence
  Description of Artificial Sequence: Synthetic oligonucleotide
  Antisense strand to SEQ ID NO: 621080
gacauuauuggcauaccuu

SEQ ID NO: 621082 - RNA, 19 nt, Artificial Sequence
  Description of Artificial Sequence: Synthetic oligonucleotide
  Sense strand starting at position 3583 of SEQ ID NO: 585200
uuguaaucugaugaaaugu

SEQ ID NO: 621083 - RNA, 19 nt, Artificial Sequence
  Description of Artificial Sequence: Synthetic oligonucleotide
  Antisense strand to SEQ ID NO: 621082
acauuucaucagauuacaa

SEQ ID NO: 621084 - RNA, 19 nt, Artificial Sequence
  Description of Artificial Sequence: Synthetic oligonucleotide
  Sense strand starting at position 3649 of SEQ ID NO: 585200
agaacuaugucuuuaaagg

SEQ ID NO: 621085 - RNA, 19 nt, Artificial Sequence
  Description of Artificial Sequence: Synthetic oligonucleotide
  Antisense strand to SEQ ID NO: 621084
ccuuuaaagacauaguucu

SEQ ID NO: 621086 - RNA, 19 nt, Artificial Sequence
  Description of Artificial Sequence: Synthetic oligonucleotide
  Sense strand starting at position 3735 of SEQ ID NO: 585200
gcagaaagggcccaaacuu

SEQ ID NO: 621087 - RNA, 19 nt, Artificial Sequence
  Description of Artificial Sequence: Synthetic oligonucleotide
  Antisense strand to SEQ ID NO: 621086
aaguuugggcccuuucugc

SEQ ID NO: 621088 - RNA, 19 nt, Artificial Sequence
  Description of Artificial Sequence: Synthetic oligonucleotide
  Sense strand starting at position 3797 of SEQ ID NO: 585200
ugugacacugaaugaguua

SEQ ID NO: 621089 - RNA, 19 nt, Artificial Sequence
  Description of Artificial Sequence: Synthetic oligonucleotide
  Antisense strand to SEQ ID NO: 621088
uaacucauucagugucaca

SEQ ID NO: 621090 - RNA, 19 nt, Artificial Sequence
  Description of Artificial Sequence: Synthetic oligonucleotide
  Sense strand starting at position 3894 of SEQ ID NO: 585200
gcugguuugauuugcaaag

SEQ ID NO: 621091 - RNA, 19 nt, Artificial Sequence
  Description of Artificial Sequence: Synthetic oligonucleotide
  Antisense strand to SEQ ID NO: 621090
cuuugcaaaucaaaccagc

SEQ ID NO: 621092 - RNA, 19 nt, Artificial Sequence
  Description of Artificial Sequence: Synthetic oligonucleotide
  Sense strand starting at position 36 of SEQ ID NO: 585201
cccuucuuacugggaggaa

SEQ ID NO: 621093 - RNA, 19 nt, Artificial Sequence
  Description of Artificial Sequence: Synthetic oligonucleotide
  Antisense strand to SEQ ID NO: 621092
uuccucccaguaagaaggg

SEQ ID NO: 621094 - RNA, 19 nt, Artificial Sequence
  Description of Artificial Sequence: Synthetic oligonucleotide
  Sense strand starting at position 323 of SEQ ID NO: 585201
gaugaauauugagauuugu

SEQ ID NO: 621095 - RNA, 19 nt, Artificial Sequence
  Description of Artificial Sequence: Synthetic oligonucleotide
  Antisense strand to SEQ ID NO: 621094
acaaaucucaauauucauc

SEQ ID NO: 621096 - RNA, 19 nt, Artificial Sequence
  Description of Artificial Sequence: Synthetic oligonucleotide
  Sense strand starting at position 783 of SEQ ID NO: 585201
ggaugucuuaccuggugac

SEQ ID NO: 621097 - RNA, 19 nt, Artificial Sequence
  Description of Artificial Sequence: Synthetic oligonucleotide
  Antisense strand to SEQ ID NO: 621096
gucaccagguaagacaucc

SEQ ID NO: 621098 - RNA, 19 nt, Artificial Sequence
  Description of Artificial Sequence: Synthetic oligonucleotide
  Sense strand starting at position 784 of SEQ ID NO: 585201
gaugucuuaccuggugacu

SEQ ID NO: 621099 - RNA, 19 nt, Artificial Sequence
  Description of Artificial Sequence: Synthetic oligonucleotide
  Antisense strand to SEQ ID NO: 621098
agucaccagguaagacauc

SEQ ID NO: 621100 - RNA, 19 nt, Artificial Sequence
  Description of Artificial Sequence: Synthetic oligonucleotide
  Sense strand starting at position 804 of SEQ ID NO: 585201
aggauagugcuguaaagcu

SEQ ID NO: 621101 - RNA, 19 nt, Artificial Sequence
  Description of Artificial Sequence: Synthetic oligonucleotide
  Antisense strand to SEQ ID NO: 621100
agcuuuacagcacuauccu

SEQ ID NO: 621102 - RNA, 19 nt, Artificial Sequence
  Description of Artificial Sequence: Synthetic oligonucleotide
  Sense strand starting at position 824 of SEQ ID NO: 585201
uucucuguccucgagagga

SEQ ID NO: 621103 - RNA, 19 nt, Artificial Sequence
  Description of Artificial Sequence: Synthetic oligonucleotide
  Antisense strand to SEQ ID NO: 621102
uccucucgaggacagagaa

SEQ ID NO: 621104 - RNA, 19 nt, Artificial Sequence
  Description of Artificial Sequence: Synthetic oligonucleotide
  Sense strand starting at position 1083 of SEQ ID NO: 585201
gacuuuggaucagaggaga

SEQ ID NO: 621105 - RNA, 19 nt, Artificial Sequence
  Description of Artificial Sequence: Synthetic oligonucleotide
  Antisense strand to SEQ ID NO: 621104
ucuccucugauccaaaguc

SEQ ID NO: 621106 - RNA, 19 nt, Artificial Sequence
  Description of Artificial Sequence: Synthetic oligonucleotide
  Sense strand starting at position 1160 of SEQ ID NO: 585201
uggagugggccuugguaau

SEQ ID NO: 621107 - RNA, 19 nt, Artificial Sequence
  Description of Artificial Sequence: Synthetic oligonucleotide
  Antisense strand to SEQ ID NO: 621106
auuaccaaggcccacucca

SEQ ID NO: 621108 - RNA, 19 nt, Artificial Sequence
  Description of Artificial Sequence: Synthetic oligonucleotide
  Sense strand starting at position 2073 of SEQ ID NO: 585201
uaagauagacccuggugua

SEQ ID NO: 621109 - RNA, 19 nt, Artificial Sequence
  Description of Artificial Sequence: Synthetic oligonucleotide
  Antisense strand to SEQ ID NO: 621108
uacaccagggucuaucuua

SEQ ID NO: 621110 - RNA, 19 nt, Artificial Sequence
  Description of Artificial Sequence: Synthetic oligonucleotide
  Sense strand starting at position 2141 of SEQ ID NO: 585201
caugguuccagugggaagu

SEQ ID NO: 621111 - RNA, 19 nt, Artificial Sequence
  Description of Artificial Sequence: Synthetic oligonucleotide
  Antisense strand to SEQ ID NO: 621110
acuucccacuggaaccaug

SEQ ID NO: 621112 - RNA, 19 nt, Artificial Sequence
  Description of Artificial Sequence: Synthetic oligonucleotide
  Sense strand starting at position 2264 of SEQ ID NO: 585201
aucccugaccucuagguau

SEQ ID NO: 621113 - RNA, 19 nt, Artificial Sequence
  Description of Artificial Sequence: Synthetic oligonucleotide
  Antisense strand to SEQ ID NO: 621112
auaccuagaggucagggau

SEQ ID NO: 621114 - RNA, 19 nt, Artificial Sequence
  Description of Artificial Sequence: Synthetic oligonucleotide
  Sense strand starting at position 2621 of SEQ ID NO: 585201
gagacaagauguguaccaa

SEQ ID NO: 621115 - RNA, 19 nt, Artificial Sequence
  Description of Artificial Sequence: Synthetic oligonucleotide
  Antisense strand to SEQ ID NO: 621114
uugguacacaucuugucuc

SEQ ID NO: 621116 - RNA, 19 nt, Artificial Sequence
  Description of Artificial Sequence: Synthetic oligonucleotide
  Sense strand starting at position 2629 of SEQ ID NO: 585201
auguguaccaaauagagua

SEQ ID NO: 621117 - RNA, 19 nt, Artificial Sequence
  Description of Artificial Sequence: Synthetic oligonucleotide
  Antisense strand to SEQ ID NO: 621116
uacucuauuugguacacau

SEQ ID NO: 621118 - RNA, 19 nt, Artificial Sequence
  Description of Artificial Sequence: Synthetic oligonucleotide
  Sense strand starting at position 2669 of SEQ ID NO: 585201
acuuauaguuuagugcaga

SEQ ID NO: 621119 - RNA, 19 nt, Artificial Sequence
  Description of Artificial Sequence: Synthetic oligonucleotide
  Antisense strand to SEQ ID NO: 621118
ucugcacuaaacuauaagu

SEQ ID NO: 621120 - RNA, 19 nt, Artificial Sequence
  Description of Artificial Sequence: Synthetic oligonucleotide
  Sense strand starting at position 2672 of SEQ ID NO: 585201
uauaguuuagugcagacaa

SEQ ID NO: 621121 - RNA, 19 nt, Artificial Sequence
  Description of Artificial Sequence: Synthetic oligonucleotide
  Antisense strand to SEQ ID NO: 621120
uugucugcacuaaacuaua

SEQ ID NO: 621122 - RNA, 19 nt, Artificial Sequence
  Description of Artificial Sequence: Synthetic oligonucleotide
  Sense strand starting at position 2897 of SEQ ID NO: 585201
uggcuuggucuuugaucaa

SEQ ID NO: 621123 - RNA, 19 nt, Artificial Sequence
  Description of Artificial Sequence: Synthetic oligonucleotide
  Antisense strand to SEQ ID NO: 621122
uugaucaaagaccaagcca

SEQ ID NO: 621124 - RNA, 19 nt, Artificial Sequence
  Description of Artificial Sequence: Synthetic oligonucleotide
  Sense strand starting at position 2904 of SEQ ID NO: 585201
gucuuugaucaaugcuaau

SEQ ID NO: 621125 - RNA, 19 nt, Artificial Sequence
  Description of Artificial Sequence: Synthetic oligonucleotide
  Antisense strand to SEQ ID NO: 621124
auuagcauugaucaaagac

SEQ ID NO: 621126 - RNA, 19 nt, Artificial Sequence
  Description of Artificial Sequence: Synthetic oligonucleotide
  Sense strand starting at position 2926 of SEQ ID NO: 585201
gcugguuggcaucaaggaa

SEQ ID NO: 621127 - RNA, 19 nt, Artificial Sequence
  Description of Artificial Sequence: Synthetic oligonucleotide
  Antisense strand to SEQ ID NO: 621126
uuccuugaugccaaccagc

SEQ ID NO: 621128 - RNA, 19 nt, Artificial Sequence
  Description of Artificial Sequence: Synthetic oligonucleotide
  Sense strand starting at position 2987 of SEQ ID NO: 585201
ugucauguuagggaguuua

SEQ ID NO: 621129 - RNA, 19 nt, Artificial Sequence
  Description of Artificial Sequence: Synthetic oligonucleotide
  Antisense strand to SEQ ID NO: 621128
uaaacucccuaacaugaca

SEQ ID NO: 621130 - RNA, 19 nt, Artificial Sequence
  Description of Artificial Sequence: Synthetic oligonucleotide
  Sense strand starting at position 2999 of SEQ ID NO: 585201
gaguuuauagcugagugau

SEQ ID NO: 621131 - RNA, 19 nt, Artificial Sequence
  Description of Artificial Sequence: Synthetic oligonucleotide
  Antisense strand to SEQ ID NO: 621130
aucacucagcuauaaacuc

SEQ ID NO: 621132 - RNA, 19 nt, Artificial Sequence
  Description of Artificial Sequence: Synthetic oligonucleotide
  Sense strand starting at position 3063 of SEQ ID NO: 585201
ccuugcaaucuugggcaga

SEQ ID NO: 621133 - RNA, 19 nt, Artificial Sequence
  Description of Artificial Sequence: Synthetic oligonucleotide
  Antisense strand to SEQ ID NO: 621132
ucugcccaagauugcaagg

SEQ ID NO: 621134 - RNA, 19 nt, Artificial Sequence
  Description of Artificial Sequence: Synthetic oligonucleotide
  Sense strand starting at position 3065 of SEQ ID NO: 585201
uugcaaucuugggcagauc

SEQ ID NO: 621135 - RNA, 19 nt, Artificial Sequence
  Description of Artificial Sequence: Synthetic oligonucleotide
  Antisense strand to SEQ ID NO: 621134
gaucugcccaagauugcaa

SEQ ID NO: 621136 - RNA, 19 nt, Artificial Sequence
  Description of Artificial Sequence: Synthetic oligonucleotide
  Sense strand starting at position 3079 of SEQ ID NO: 585201
agaucucugugccucaauu

SEQ ID NO: 621137 - RNA, 19 nt, Artificial Sequence
  Description of Artificial Sequence: Synthetic oligonucleotide
  Antisense strand to SEQ ID NO: 621136
aauugaggcacagagaucu

SEQ ID NO: 621138 - RNA, 19 nt, Artificial Sequence
  Description of Artificial Sequence: Synthetic oligonucleotide
  Sense strand starting at position 3097 of SEQ ID NO: 585201
uucugagugaaauaggguu

SEQ ID NO: 621139 - RNA, 19 nt, Artificial Sequence
  Description of Artificial Sequence: Synthetic oligonucleotide
  Antisense strand to SEQ ID NO: 621138
aacccuauuucacucagaa

SEQ ID NO: 621140 - RNA, 19 nt, Artificial Sequence
  Description of Artificial Sequence: Synthetic oligonucleotide
  Sense strand starting at position 3163 of SEQ ID NO: 585201
gcacuugaugcauagugaa

SEQ ID NO: 621141 - RNA, 19 nt, Artificial Sequence
  Description of Artificial Sequence: Synthetic oligonucleotide
  Antisense strand to SEQ ID NO: 621140
uucacuaugcaucaagugc

SEQ ID NO: 621142 - RNA, 19 nt, Artificial Sequence
  Description of Artificial Sequence: Synthetic oligonucleotide
  Sense strand starting at position 3170 of SEQ ID NO: 585201
augcauagugaauacuuaa

SEQ ID NO: 621143 - RNA, 19 nt, Artificial Sequence
  Description of Artificial Sequence: Synthetic oligonucleotide
  Antisense strand to SEQ ID NO: 621142
uuaaguauucacuaugcau

SEQ ID NO: 621144 - RNA, 19 nt, Artificial Sequence
  Description of Artificial Sequence: Synthetic oligonucleotide
  Sense strand starting at position 3219 of SEQ ID NO: 585201
gccucaugacuccauguuu

SEQ ID NO: 621145 - RNA, 19 nt, Artificial Sequence
  Description of Artificial Sequence: Synthetic oligonucleotide
  Antisense strand to SEQ ID NO: 621144
aaacauggagucaugaggc

SEQ ID NO: 621146 - RNA, 19 nt, Artificial Sequence
  Description of Artificial Sequence: Synthetic oligonucleotide
  Sense strand starting at position 3319 of SEQ ID NO: 585201
cuccuaaguggccauaagu

SEQ ID NO: 621147 - RNA, 19 nt, Artificial Sequence
  Description of Artificial Sequence: Synthetic oligonucleotide
  Antisense strand to SEQ ID NO: 621146
acuuauggccacuuaggag

SEQ ID NO: 621148 - RNA, 19 nt, Artificial Sequence
  Description of Artificial Sequence: Synthetic oligonucleotide
  Sense strand starting at position 3355 of SEQ ID NO: 585201
ggacaaagugugugcauca

SEQ ID NO: 621149 - RNA, 19 nt, Artificial Sequence
  Description of Artificial Sequence: Synthetic oligonucleotide
  Antisense strand to SEQ ID NO: 621148
ugaugcacacacuuugucc

SEQ ID NO: 621150 - RNA, 19 nt, Artificial Sequence
  Description of Artificial Sequence: Synthetic oligonucleotide
  Sense strand starting at position 3411 of SEQ ID NO: 585201
aagaguuucguggaagaca

SEQ ID NO: 621151 - RNA, 19 nt, Artificial Sequence
  Description of Artificial Sequence: Synthetic oligonucleotide
  Antisense strand to SEQ ID NO: 621150
ugucuuccacgaaacucuu

SEQ ID NO: 621152 - RNA, 19 nt, Artificial Sequence
  Description of Artificial Sequence: Synthetic oligonucleotide
  Sense strand starting at position 3507 of SEQ ID NO: 585201
ucccguaagaagcgagaaa

SEQ ID NO: 621153 - RNA, 19 nt, Artificial Sequence
  Description of Artificial Sequence: Synthetic oligonucleotide
  Antisense strand to SEQ ID NO: 621152
uuucucgcuucuuacggga

SEQ ID NO: 621154 - RNA, 19 nt, Artificial Sequence
  Description of Artificial Sequence: Synthetic oligonucleotide
  Sense strand starting at position 3583 of SEQ ID NO: 585201
ugcuuaugcugaucugaca

SEQ ID NO: 621155 - RNA, 19 nt, Artificial Sequence
  Description of Artificial Sequence: Synthetic oligonucleotide
  Antisense strand to SEQ ID NO: 621154
ugucagaucagcauaagca

SEQ ID NO: 621156 - RNA, 19 nt, Artificial Sequence
  Description of Artificial Sequence: Synthetic oligonucleotide
  Sense strand starting at position 3721 of SEQ ID NO: 585201
gcgguuucucccuuggcua

SEQ ID NO: 621157 - RNA, 19 nt, Artificial Sequence
  Description of Artificial Sequence: Synthetic oligonucleotide
  Antisense strand to SEQ ID NO: 621156
uagccaagggagaaaccgc

SEQ ID NO: 621158 - RNA, 19 nt, Artificial Sequence
  Description of Artificial Sequence: Synthetic oligonucleotide
  Sense strand starting at position 3942 of SEQ ID NO: 585201
agcuuuauuaugggugaca

SEQ ID NO: 621159 - RNA, 19 nt, Artificial Sequence
  Description of Artificial Sequence: Synthetic oligonucleotide
  Antisense strand to SEQ ID NO: 621158
ugucacccauaauaaagcu

SEQ ID NO: 621160 - RNA, 19 nt, Artificial Sequence
  Description of Artificial Sequence: Synthetic oligonucleotide
  Sense strand starting at position 3943 of SEQ ID NO: 585201
gcuuuauuaugggugacag

SEQ ID NO: 621161 - RNA, 19 nt, Artificial Sequence
  Description of Artificial Sequence: Synthetic oligonucleotide
  Antisense strand to SEQ ID NO: 621160
cugucacccauaauaaagc

SEQ ID NO: 621162 - RNA, 19 nt, Artificial Sequence
  Description of Artificial Sequence: Synthetic oligonucleotide
  Sense strand starting at position 3944 of SEQ ID NO: 585201
cuuuauuaugggugacaga

SEQ ID NO: 621163 - RNA, 19 nt, Artificial Sequence
  Description of Artificial Sequence: Synthetic oligonucleotide
  Antisense strand to SEQ ID NO: 621162
ucugucacccauaauaaag

SEQ ID NO: 621164 - RNA, 19 nt, Artificial Sequence
  Description of Artificial Sequence: Synthetic oligonucleotide
  Sense strand starting at position 3947 of SEQ ID NO: 585201
uauuaugggugacagauuu

SEQ ID NO: 621165 - RNA, 19 nt, Artificial Sequence
  Description of Artificial Sequence: Synthetic oligonucleotide
  Antisense strand to SEQ ID NO: 621164
aaaucugucacccauaaua

SEQ ID NO: 621166 - RNA, 19 nt, Artificial Sequence
  Description of Artificial Sequence: Synthetic oligonucleotide
  Sense strand starting at position 3966 of SEQ ID NO: 585201
aggguucuuaaauagcgau

SEQ ID NO: 621167 - RNA, 19 nt, Artificial Sequence
  Description of Artificial Sequence: Synthetic oligonucleotide
  Antisense strand to SEQ ID NO: 621166
aucgcuauuuaagaacccu

SEQ ID NO: 621168 - RNA, 19 nt, Artificial Sequence
  Description of Artificial Sequence: Synthetic oligonucleotide
  Sense strand starting at position 3972 of SEQ ID NO: 585201
cuuaaauagcgauagcagu

SEQ ID NO: 621169 - RNA, 19 nt, Artificial Sequence
  Description of Artificial Sequence: Synthetic oligonucleotide
  Antisense strand to SEQ ID NO: 621168
acugcuaucgcuauuuaag

SEQ ID NO: 621170 - RNA, 19 nt, Artificial Sequence
  Description of Artificial Sequence: Synthetic oligonucleotide
  Sense strand starting at position 3982 of SEQ ID NO: 585201
gauagcaguggcuagaaga

SEQ ID NO: 621171 - RNA, 19 nt, Artificial Sequence
  Description of Artificial Sequence: Synthetic oligonucleotide
  Antisense strand to SEQ ID NO: 621170
ucuucuagccacugcuauc

SEQ ID NO: 621172 - RNA, 19 nt, Artificial Sequence
  Description of Artificial Sequence: Synthetic oligonucleotide
  Sense strand starting at position 13 of SEQ ID NO: 585202
gagacaagauguguaccaa

SEQ ID NO: 621173 - RNA, 19 nt, Artificial Sequence
  Description of Artificial Sequence: Synthetic oligonucleotide
  Antisense strand to SEQ ID NO: 621172
uugguacacaucuugucuc

SEQ ID NO: 621174 - RNA, 19 nt, Artificial Sequence
  Description of Artificial Sequence: Synthetic oligonucleotide
  Sense strand starting at position 21 of SEQ ID NO: 585202
auguguaccaaauagagua

SEQ ID NO: 621175 - RNA, 19 nt, Artificial Sequence
  Description of Artificial Sequence: Synthetic oligonucleotide
  Antisense strand to SEQ ID NO: 621174
uacucuauuugguacacau

SEQ ID NO: 621176 - RNA, 19 nt, Artificial Sequence
  Description of Artificial Sequence: Synthetic oligonucleotide
  Sense strand starting at position 61 of SEQ ID NO: 585202
acuuauaguuuagugcaga

SEQ ID NO: 621177 - RNA, 19 nt, Artificial Sequence
  Description of Artificial Sequence: Synthetic oligonucleotide
  Antisense strand to SEQ ID NO: 621176
ucugcacuaaacuauaagu

SEQ ID NO: 621178 - RNA, 19 nt, Artificial Sequence
  Description of Artificial Sequence: Synthetic oligonucleotide
  Sense strand starting at position 64 of SEQ ID NO: 585202
uauaguuuagugcagacaa

SEQ ID NO: 621179 - RNA, 19 nt, Artificial Sequence
  Description of Artificial Sequence: Synthetic oligonucleotide
  Antisense strand to SEQ ID NO: 621178
uugucugcacuaaacuaua

SEQ ID NO: 621180 - RNA, 19 nt, Artificial Sequence
  Description of Artificial Sequence: Synthetic oligonucleotide
  Sense strand starting at position 289 of SEQ ID NO: 585202
uggcuuggucuuugaucaa

SEQ ID NO: 621181 - RNA, 19 nt, Artificial Sequence
  Description of Artificial Sequence: Synthetic oligonucleotide
  Antisense strand to SEQ ID NO: 621180
uugaucaaagaccaagcca

SEQ ID NO: 621182 - RNA, 19 nt, Artificial Sequence
  Description of Artificial Sequence: Synthetic oligonucleotide
  Sense strand starting at position 296 of SEQ ID NO: 585202
gucuuugaucaaugcuaau

SEQ ID NO: 621183 - RNA, 19 nt, Artificial Sequence
  Description of Artificial Sequence: Synthetic oligonucleotide
  Antisense strand to SEQ ID NO: 621182
auuagcauugaucaaagac

SEQ ID NO: 621184 - RNA, 19 nt, Artificial Sequence
  Description of Artificial Sequence: Synthetic oligonucleotide
  Sense strand starting at position 318 of SEQ ID NO: 585202
gcugguuggcaucaaggaa

SEQ ID NO: 621185 - RNA, 19 nt, Artificial Sequence
  Description of Artificial Sequence: Synthetic oligonucleotide
  Antisense strand to SEQ ID NO: 621184
uuccuugaugccaaccagc

SEQ ID NO: 621186 - RNA, 19 nt, Artificial Sequence
  Description of Artificial Sequence: Synthetic oligonucleotide
  Sense strand starting at position 379 of SEQ ID NO: 585202
ugucauguuagggaguuua

SEQ ID NO: 621187 - RNA, 19 nt, Artificial Sequence
  Description of Artificial Sequence: Synthetic oligonucleotide
  Antisense strand to SEQ ID NO: 621186
uaaacucccuaacaugaca

SEQ ID NO: 621188 - RNA, 19 nt, Artificial Sequence
  Description of Artificial Sequence: Synthetic oligonucleotide
  Sense strand starting at position 391 of SEQ ID NO: 585202
gaguuuauagcugagugau

SEQ ID NO: 621189 - RNA, 19 nt, Artificial Sequence
  Description of Artificial Sequence: Synthetic oligonucleotide
  Antisense strand to SEQ ID NO: 621188
aucacucagcuauaaacuc

SEQ ID NO: 621190 - RNA, 19 nt, Artificial Sequence
  Description of Artificial Sequence: Synthetic oligonucleotide
  Sense strand starting at position 455 of SEQ ID NO: 585202
ccuugcaaucuugggcaga

SEQ ID NO: 621191 - RNA, 19 nt, Artificial Sequence
  Description of Artificial Sequence: Synthetic oligonucleotide
  Antisense strand to SEQ ID NO: 621190
ucugcccaagauugcaagg

SEQ ID NO: 621192 - RNA, 19 nt, Artificial Sequence
  Description of Artificial Sequence: Synthetic oligonucleotide
  Sense strand starting at position 457 of SEQ ID NO: 585202
uugcaaucuugggcagauc

SEQ ID NO: 621193 - RNA, 19 nt, Artificial Sequence
  Description of Artificial Sequence: Synthetic oligonucleotide
  Antisense strand to SEQ ID NO: 621192
gaucugcccaagauugcaa

SEQ ID NO: 621194 - RNA, 19 nt, Artificial Sequence
  Description of Artificial Sequence: Synthetic oligonucleotide
  Sense strand starting at position 471 of SEQ ID NO: 585202
agaucucugugccucaauu

SEQ ID NO: 621195 - RNA, 19 nt, Artificial Sequence
  Description of Artificial Sequence: Synthetic oligonucleotide
  Antisense strand to SEQ ID NO: 621194
aauugaggcacagagaucu

SEQ ID NO: 621196 - RNA, 19 nt, Artificial Sequence
  Description of Artificial Sequence: Synthetic oligonucleotide
  Sense strand starting at position 489 of SEQ ID NO: 585202
uucugagugaaauaggguu

SEQ ID NO: 621197 - RNA, 19 nt, Artificial Sequence
  Description of Artificial Sequence: Synthetic oligonucleotide
  Antisense strand to SEQ ID NO: 621196
aacccuauuucacucagaa

SEQ ID NO: 621198 - RNA, 19 nt, Artificial Sequence
  Description of Artificial Sequence: Synthetic oligonucleotide
  Sense strand starting at position 555 of SEQ ID NO: 585202
gcacuugaugcauagugaa

SEQ ID NO: 621199 - RNA, 19 nt, Artificial Sequence
  Description of Artificial Sequence: Synthetic oligonucleotide
  Antisense strand to SEQ ID NO: 621198
uucacuaugcaucaagugc

SEQ ID NO: 621200 - RNA, 19 nt, Artificial Sequence
  Description of Artificial Sequence: Synthetic oligonucleotide
  Sense strand starting at position 562 of SEQ ID NO: 585202
augcauagugaauacuuaa

SEQ ID NO: 621201 - RNA, 19 nt, Artificial Sequence
  Description of Artificial Sequence: Synthetic oligonucleotide
  Antisense strand to SEQ ID NO: 621200
uuaaguauucacuaugcau

SEQ ID NO: 621202 - RNA, 19 nt, Artificial Sequence
  Description of Artificial Sequence: Synthetic oligonucleotide
  Sense strand starting at position 611 of SEQ ID NO: 585202
gccucaugacuccauguuu

SEQ ID NO: 621203 - RNA, 19 nt, Artificial Sequence
  Description of Artificial Sequence: Synthetic oligonucleotide
  Antisense strand to SEQ ID NO: 621202
aaacauggagucaugaggc

SEQ ID NO: 621204 - RNA, 19 nt, Artificial Sequence
  Description of Artificial Sequence: Synthetic oligonucleotide
  Sense strand starting at position 711 of SEQ ID NO: 585202
cuccuaaguggccauaagu

SEQ ID NO: 621205 - RNA, 19 nt, Artificial Sequence
  Description of Artificial Sequence: Synthetic oligonucleotide
  Antisense strand to SEQ ID NO: 621204
acuuauggccacuuaggag

SEQ ID NO: 621206 - RNA, 19 nt, Artificial Sequence
  Description of Artificial Sequence: Synthetic oligonucleotide
  Sense strand starting at position 747 of SEQ ID NO: 585202
ggacaaagugugugcauca

SEQ ID NO: 621207 - RNA, 19 nt, Artificial Sequence
  Description of Artificial Sequence: Synthetic oligonucleotide
  Antisense strand to SEQ ID NO: 621206
ugaugcacacacuuugucc

SEQ ID NO: 621208 - RNA, 19 nt, Artificial Sequence
  Description of Artificial Sequence: Synthetic oligonucleotide
  Sense strand starting at position 803 of SEQ ID NO: 585202
aagaguuucguggaagaca

SEQ ID NO: 621209 - RNA, 19 nt, Artificial Sequence
  Description of Artificial Sequence: Synthetic oligonucleotide
  Antisense strand to SEQ ID NO: 621208
ugucuuccacgaaacucuu

SEQ ID NO: 621210 - RNA, 19 nt, Artificial Sequence
  Description of Artificial Sequence: Synthetic oligonucleotide
  Sense strand starting at position 899 of SEQ ID NO: 585202
ucccguaagaagcgagaaa

SEQ ID NO: 621211 - RNA, 19 nt, Artificial Sequence
  Description of Artificial Sequence: Synthetic oligonucleotide
  Antisense strand to SEQ ID NO: 621210
uuucucgcuucuuacggga

SEQ ID NO: 621212 - RNA, 19 nt, Artificial Sequence
  Description of Artificial Sequence: Synthetic oligonucleotide
  Sense strand starting at position 975 of SEQ ID NO: 585202
ugcuuaugcugaucugaca

SEQ ID NO: 621213 - RNA, 19 nt, Artificial Sequence
  Description of Artificial Sequence: Synthetic oligonucleotide
  Antisense strand to SEQ ID NO: 621212
ugucagaucagcauaagca

SEQ ID NO: 621214 - RNA, 19 nt, Artificial Sequence
  Description of Artificial Sequence: Synthetic oligonucleotide
  Sense strand starting at position 1113 of SEQ ID NO: 585202
gcgguuucucccuuggcua

SEQ ID NO: 621215 - RNA, 19 nt, Artificial Sequence
  Description of Artificial Sequence: Synthetic oligonucleotide
  Antisense strand to SEQ ID NO: 621214
uagccaagggagaaaccgc

SEQ ID NO: 621216 - RNA, 19 nt, Artificial Sequence
  Description of Artificial Sequence: Synthetic oligonucleotide
  Sense strand starting at position 1334 of SEQ ID NO: 585202
agcuuuauuaugggugaca

SEQ ID NO: 621217 - RNA, 19 nt, Artificial Sequence
  Description of Artificial Sequence: Synthetic oligonucleotide
  Antisense strand to SEQ ID NO: 621216
ugucacccauaauaaagcu

SEQ ID NO: 621218 - RNA, 19 nt, Artificial Sequence
  Description of Artificial Sequence: Synthetic oligonucleotide
  Sense strand starting at position 1335 of SEQ ID NO: 585202
gcuuuauuaugggugacag

SEQ ID NO: 621219 - RNA, 19 nt, Artificial Sequence
  Description of Artificial Sequence: Synthetic oligonucleotide
  Antisense strand to SEQ ID NO: 621218
cugucacccauaauaaagc

SEQ ID NO: 621220 - RNA, 19 nt, Artificial Sequence
  Description of Artificial Sequence: Synthetic oligonucleotide
  Sense strand starting at position 1336 of SEQ ID NO: 585202
cuuuauuaugggugacaga

SEQ ID NO: 621221 - RNA, 19 nt, Artificial Sequence
  Description of Artificial Sequence: Synthetic oligonucleotide
  Antisense strand to SEQ ID NO: 621220
ucugucacccauaauaaag

SEQ ID NO: 621222 - RNA, 19 nt, Artificial Sequence
  Description of Artificial Sequence: Synthetic oligonucleotide
  Sense strand starting at position 1339 of SEQ ID NO: 585202
uauuaugggugacagauuu

SEQ ID NO: 621223 - RNA, 19 nt, Artificial Sequence
  Description of Artificial Sequence: Synthetic oligonucleotide
  Antisense strand to SEQ ID NO: 621222
aaaucugucacccauaaua

SEQ ID NO: 621224 - RNA, 19 nt, Artificial Sequence
  Description of Artificial Sequence: Synthetic oligonucleotide
  Sense strand starting at position 1358 of SEQ ID NO: 585202
aggguucuuaaauagcgau

SEQ ID NO: 621225 - RNA, 19 nt, Artificial Sequence
  Description of Artificial Sequence: Synthetic oligonucleotide
  Antisense strand to SEQ ID NO: 621224
aucgcuauuuaagaacccu

SEQ ID NO: 621226 - RNA, 19 nt, Artificial Sequence
  Description of Artificial Sequence: Synthetic oligonucleotide
  Sense strand starting at position 1364 of SEQ ID NO: 585202
cuuaaauagcgauagcagu

SEQ ID NO: 621227 - RNA, 19 nt, Artificial Sequence
  Description of Artificial Sequence: Synthetic oligonucleotide
  Antisense strand to SEQ ID NO: 621226
acugcuaucgcuauuuaag

SEQ ID NO: 621228 - RNA, 19 nt, Artificial Sequence
  Description of Artificial Sequence: Synthetic oligonucleotide
  Sense strand starting at position 1374 of SEQ ID NO: 585202
gauagcaguggcuagaaga

SEQ ID NO: 621229 - RNA, 19 nt, Artificial Sequence
  Description of Artificial Sequence: Synthetic oligonucleotide
  Antisense strand to SEQ ID NO: 621228
ucuucuagccacugcuauc

SEQ ID NO: 621230 - RNA, 19 nt, Artificial Sequence
  Description of Artificial Sequence: Synthetic oligonucleotide
  Sense strand starting at position 1617 of SEQ ID NO: 585202
cugcaauucuugguuccaa

SEQ ID NO: 621231 - RNA, 19 nt, Artificial Sequence
  Description of Artificial Sequence: Synthetic oligonucleotide
  Antisense strand to SEQ ID NO: 621230
uuggaaccaagaauugcag

SEQ ID NO: 621232 - RNA, 19 nt, Artificial Sequence
  Description of Artificial Sequence: Synthetic oligonucleotide
  Sense strand starting at position 1744 of SEQ ID NO: 585202
agcuucuccacguggaaga

SEQ ID NO: 621233 - RNA, 19 nt, Artificial Sequence
  Description of Artificial Sequence: Synthetic oligonucleotide
  Antisense strand to SEQ ID NO: 621232
ucuuccacguggagaagcu

SEQ ID NO: 621234 - RNA, 19 nt, Artificial Sequence
  Description of Artificial Sequence: Synthetic oligonucleotide
  Sense strand starting at position 1758 of SEQ ID NO: 585202
gaagaugucugcucuggug

SEQ ID NO: 621235 - RNA, 19 nt, Artificial Sequence
  Description of Artificial Sequence: Synthetic oligonucleotide
  Antisense strand to SEQ ID NO: 621234
caccagagcagacaucuuc

SEQ ID NO: 621236 - RNA, 19 nt, Artificial Sequence
  Description of Artificial Sequence: Synthetic oligonucleotide
  Sense strand starting at position 2021 of SEQ ID NO: 585202
gcgggaucggaauguugga

SEQ ID NO: 621237 - RNA, 19 nt, Artificial Sequence
  Description of Artificial Sequence: Synthetic oligonucleotide
  Antisense strand to SEQ ID NO: 621236
uccaacauuccgaucccgc

SEQ ID NO: 621238 - RNA, 19 nt, Artificial Sequence
  Description of Artificial Sequence: Synthetic oligonucleotide
  Sense strand starting at position 2028 of SEQ ID NO: 585202
cggaauguuggaggcagaa

SEQ ID NO: 621239 - RNA, 19 nt, Artificial Sequence
  Description of Artificial Sequence: Synthetic oligonucleotide
  Antisense strand to SEQ ID NO: 621238
uucugccuccaacauuccg

SEQ ID NO: 621240 - RNA, 19 nt, Artificial Sequence
  Description of Artificial Sequence: Synthetic oligonucleotide
  Sense strand starting at position 2123 of SEQ ID NO: 585202
cguaucuuccucgcauuau

SEQ ID NO: 621241 - RNA, 19 nt, Artificial Sequence
  Description of Artificial Sequence: Synthetic oligonucleotide
  Antisense strand to SEQ ID NO: 621240
auaaugcgaggaagauacg

SEQ ID NO: 621242 - RNA, 19 nt, Artificial Sequence
  Description of Artificial Sequence: Synthetic oligonucleotide
  Sense strand starting at position 2479 of SEQ ID NO: 585202
agcagaucccagugguuac

SEQ ID NO: 621243 - RNA, 19 nt, Artificial Sequence
  Description of Artificial Sequence: Synthetic oligonucleotide
  Antisense strand to SEQ ID NO: 621242
guaaccacugggaucugcu

SEQ ID NO: 621244 - RNA, 19 nt, Artificial Sequence
  Description of Artificial Sequence: Synthetic oligonucleotide
  Sense strand starting at position 2618 of SEQ ID NO: 585202
gcgucugcuccuguacaga

SEQ ID NO: 621245 - RNA, 19 nt, Artificial Sequence
  Description of Artificial Sequence: Synthetic oligonucleotide
  Antisense strand to SEQ ID NO: 621244
ucuguacaggagcagacgc

SEQ ID NO: 621246 - RNA, 19 nt, Artificial Sequence
  Description of Artificial Sequence: Synthetic oligonucleotide
  Sense strand starting at position 3018 of SEQ ID NO: 585202
ggaagcguugcccaggaga

SEQ ID NO: 621247 - RNA, 19 nt, Artificial Sequence
  Description of Artificial Sequence: Synthetic oligonucleotide
  Antisense strand to SEQ ID NO: 621246
ucuccugggcaacgcuucc

SEQ ID NO: 621248 - RNA, 19 nt, Artificial Sequence
  Description of Artificial Sequence: Synthetic oligonucleotide
  Sense strand starting at position 3524 of SEQ ID NO: 585202
gcaguuugucugcuacgga

SEQ ID NO: 621249 - RNA, 19 nt, Artificial Sequence
  Description of Artificial Sequence: Synthetic oligonucleotide
  Antisense strand to SEQ ID NO: 621248
uccguagcagacaaacugc

SEQ ID NO: 621250 - RNA, 19 nt, Artificial Sequence
  Description of Artificial Sequence: Synthetic oligonucleotide
  Sense strand starting at position 3597 of SEQ ID NO: 585202
acucgaguuccuuacacua

SEQ ID NO: 621251 - RNA, 19 nt, Artificial Sequence
  Description of Artificial Sequence: Synthetic oligonucleotide
  Antisense strand to SEQ ID NO: 621250
uaguguaaggaacucgagu

SEQ ID NO: 621252 - RNA, 19 nt, Artificial Sequence
  Description of Artificial Sequence: Synthetic oligonucleotide
  Sense strand starting at position 21 of SEQ ID NO: 585203
agcagacuuccaugcaaca

SEQ ID NO: 621253 - RNA, 19 nt, Artificial Sequence
  Description of Artificial Sequence: Synthetic oligonucleotide
  Antisense strand to SEQ ID NO: 621252
uguugcauggaagucugcu

SEQ ID NO: 621254 - RNA, 19 nt, Artificial Sequence
  Description of Artificial Sequence: Synthetic oligonucleotide
  Sense strand starting at position 60 of SEQ ID NO: 585203
auaaauuagcccugccuga

SEQ ID NO: 621255 - RNA, 19 nt, Artificial Sequence
  Description of Artificial Sequence: Synthetic oligonucleotide
  Antisense strand to SEQ ID NO: 621254
ucaggcagggcuaauuuau

SEQ ID NO: 621256 - RNA, 19 nt, Artificial Sequence
  Description of Artificial Sequence: Synthetic oligonucleotide
  Sense strand starting at position 75 of SEQ ID NO: 585203
cugaaauucucauugcaug

SEQ ID NO: 621257 - RNA, 19 nt, Artificial Sequence
  Description of Artificial Sequence: Synthetic oligonucleotide
  Antisense strand to SEQ ID NO: 621256
caugcaaugagaauuucag

SEQ ID NO: 621258 - RNA, 19 nt, Artificial Sequence
  Description of Artificial Sequence: Synthetic oligonucleotide
  Sense strand starting at position 241 of SEQ ID NO: 585203
gccacaaauugcucaugga

SEQ ID NO: 621259 - RNA, 19 nt, Artificial Sequence
  Description of Artificial Sequence: Synthetic oligonucleotide
  Antisense strand to SEQ ID NO: 621258
uccaugagcaauuuguggc

SEQ ID NO: 621260 - RNA, 19 nt, Artificial Sequence
  Description of Artificial Sequence: Synthetic oligonucleotide
  Sense strand starting at position 305 of SEQ ID NO: 585203
caaaccauccggugagaaa

SEQ ID NO: 621261 - RNA, 19 nt, Artificial Sequence
  Description of Artificial Sequence: Synthetic oligonucleotide
  Antisense strand to SEQ ID NO: 621260
uuucucaccggaugguuug

SEQ ID NO: 621262 - RNA, 19 nt, Artificial Sequence
  Description of Artificial Sequence: Synthetic oligonucleotide
  Sense strand starting at position 411 of SEQ ID NO: 585203
cuggaaaugcaguagucua

SEQ ID NO: 621263 - RNA, 19 nt, Artificial Sequence
  Description of Artificial Sequence: Synthetic oligonucleotide
  Antisense strand to SEQ ID NO: 621262
uagacuacugcauuuccag

SEQ ID NO: 621264 - RNA, 19 nt, Artificial Sequence
  Description of Artificial Sequence: Synthetic oligonucleotide
  Sense strand starting at position 695 of SEQ ID NO: 585203
uguuucuaucuccauguua

SEQ ID NO: 621265 - RNA, 19 nt, Artificial Sequence
  Description of Artificial Sequence: Synthetic oligonucleotide
  Antisense strand to SEQ ID NO: 621264
uaacauggagauagaaaca

SEQ ID NO: 621266 - RNA, 19 nt, Artificial Sequence
  Description of Artificial Sequence: Synthetic oligonucleotide
  Sense strand starting at position 725 of SEQ ID NO: 585203
guuaaacauuugcaagaau

SEQ ID NO: 621267 - RNA, 19 nt, Artificial Sequence
  Description of Artificial Sequence: Synthetic oligonucleotide
  Antisense strand to SEQ ID NO: 621266
auucuugcaaauguuuaac

SEQ ID NO: 621268 - RNA, 19 nt, Artificial Sequence
  Description of Artificial Sequence: Synthetic oligonucleotide
  Sense strand starting at position 762 of SEQ ID NO: 585203
uugcuacugcaaugacaau

SEQ ID NO: 621269 - RNA, 19 nt, Artificial Sequence
  Description of Artificial Sequence: Synthetic oligonucleotide
  Antisense strand to SEQ ID NO: 621268
auugucauugcaguagcaa

SEQ ID NO: 621270 - RNA, 19 nt, Artificial Sequence
  Description of Artificial Sequence: Synthetic oligonucleotide
  Sense strand starting at position 833 of SEQ ID NO: 585203
uuugaagacuuccuuuagu

SEQ ID NO: 621271 - RNA, 19 nt, Artificial Sequence
  Description of Artificial Sequence: Synthetic oligonucleotide
  Antisense strand to SEQ ID NO: 621270
acuaaaggaagucuucaaa

SEQ ID NO: 621272 - RNA, 19 nt, Artificial Sequence
  Description of Artificial Sequence: Synthetic oligonucleotide
  Sense strand starting at position 841 of SEQ ID NO: 585203
cuuccuuuaguccaguuua

SEQ ID NO: 621273 - RNA, 19 nt, Artificial Sequence
  Description of Artificial Sequence: Synthetic oligonucleotide
  Antisense strand to SEQ ID NO: 621272
uaaacuggacuaaaggaag

SEQ ID NO: 621274 - RNA, 19 nt, Artificial Sequence
  Description of Artificial Sequence: Synthetic oligonucleotide
  Sense strand starting at position 849 of SEQ ID NO: 585203
aguccaguuuacuucugau

SEQ ID NO: 621275 - RNA, 19 nt, Artificial Sequence
  Description of Artificial Sequence: Synthetic oligonucleotide
  Antisense strand to SEQ ID NO: 621274
aucagaaguaaacuggacu

SEQ ID NO: 621276 - RNA, 19 nt, Artificial Sequence
  Description of Artificial Sequence: Synthetic oligonucleotide
  Sense strand starting at position 1028 of SEQ ID NO: 585203
ccaggauguuaucuaguua

SEQ ID NO: 621277 - RNA, 19 nt, Artificial Sequence
  Description of Artificial Sequence: Synthetic oligonucleotide
  Antisense strand to SEQ ID NO: 621276
uaacuagauaacauccugg

SEQ ID NO: 621278 - RNA, 19 nt, Artificial Sequence
  Description of Artificial Sequence: Synthetic oligonucleotide
  Sense strand starting at position 1141 of SEQ ID NO: 585203
aguuacuguuacccauaaa

SEQ ID NO: 621279 - RNA, 19 nt, Artificial Sequence
  Description of Artificial Sequence: Synthetic oligonucleotide
  Antisense strand to SEQ ID NO: 621278
uuuauggguaacaguaacu

SEQ ID NO: 621280 - RNA, 19 nt, Artificial Sequence
  Description of Artificial Sequence: Synthetic oligonucleotide
  Sense strand starting at position 1202 of SEQ ID NO: 585203
gugguaacccauuauguaa

SEQ ID NO: 621281 - RNA, 19 nt, Artificial Sequence
  Description of Artificial Sequence: Synthetic oligonucleotide
  Antisense strand to SEQ ID NO: 621280
uuacauaauggguuaccac

SEQ ID NO: 621282 - RNA, 19 nt, Artificial Sequence
  Description of Artificial Sequence: Synthetic oligonucleotide
  Sense strand starting at position 1316 of SEQ ID NO: 585203
agacacaugugucuuauca

SEQ ID NO: 621283 - RNA, 19 nt, Artificial Sequence
  Description of Artificial Sequence: Synthetic oligonucleotide
  Antisense strand to SEQ ID NO: 621282
ugauaagacacaugugucu

SEQ ID NO: 621284 - RNA, 19 nt, Artificial Sequence
  Description of Artificial Sequence: Synthetic oligonucleotide
  Sense strand starting at position 1320 of SEQ ID NO: 585203
acaugugucuuaucaauaa

SEQ ID NO: 621285 - RNA, 19 nt, Artificial Sequence
  Description of Artificial Sequence: Synthetic oligonucleotide
  Antisense strand to SEQ ID NO: 621284
uuauugauaagacacaugu

SEQ ID NO: 621286 - RNA, 19 nt, Artificial Sequence
  Description of Artificial Sequence: Synthetic oligonucleotide
  Sense strand starting at position 1324 of SEQ ID NO: 585203
gugucuuaucaauaaggua

SEQ ID NO: 621287 - RNA, 19 nt, Artificial Sequence
  Description of Artificial Sequence: Synthetic oligonucleotide
  Antisense strand to SEQ ID NO: 621286
uaccuuauugauaagacac

SEQ ID NO: 621288 - RNA, 19 nt, Artificial Sequence
  Description of Artificial Sequence: Synthetic oligonucleotide
  Sense strand starting at position 1339 of SEQ ID NO: 585203
gguaacgagccaugaauug

SEQ ID NO: 621289 - RNA, 19 nt, Artificial Sequence
  Description of Artificial Sequence: Synthetic oligonucleotide
  Antisense strand to SEQ ID NO: 621288
caauucauggcucguuacc

SEQ ID NO: 621290 - RNA, 19 nt, Artificial Sequence
  Description of Artificial Sequence: Synthetic oligonucleotide
  Sense strand starting at position 1687 of SEQ ID NO: 585203
uuucuucccuagucauaug

SEQ ID NO: 621291 - RNA, 19 nt, Artificial Sequence
  Description of Artificial Sequence: Synthetic oligonucleotide
  Antisense strand to SEQ ID NO: 621290
cauaugacuagggaagaaa

SEQ ID NO: 621292 - RNA, 19 nt, Artificial Sequence
  Description of Artificial Sequence: Synthetic oligonucleotide
  Sense strand starting at position 1988 of SEQ ID NO: 585203
cuguguagucaugacuagu

SEQ ID NO: 621293 - RNA, 19 nt, Artificial Sequence
  Description of Artificial Sequence: Synthetic oligonucleotide
  Antisense strand to SEQ ID NO: 621292
acuagucaugacuacacag

SEQ ID NO: 621294 - RNA, 19 nt, Artificial Sequence
  Description of Artificial Sequence: Synthetic oligonucleotide
  Sense strand starting at position 1991 of SEQ ID NO: 585203
uguagucaugacuaguguu

SEQ ID NO: 621295 - RNA, 19 nt, Artificial Sequence
  Description of Artificial Sequence: Synthetic oligonucleotide
  Antisense strand to SEQ ID NO: 621294
aacacuagucaugacuaca

SEQ ID NO: 621296 - RNA, 19 nt, Artificial Sequence
  Description of Artificial Sequence: Synthetic oligonucleotide
  Sense strand starting at position 1997 of SEQ ID NO: 585203
caugacuaguguuuguaga

SEQ ID NO: 621297 - RNA, 19 nt, Artificial Sequence
  Description of Artificial Sequence: Synthetic oligonucleotide
  Antisense strand to SEQ ID NO: 621296
ucuacaaacacuagucaug

SEQ ID NO: 621298 - RNA, 19 nt, Artificial Sequence
  Description of Artificial Sequence: Synthetic oligonucleotide
  Sense strand starting at position 1998 of SEQ ID NO: 585203
augacuaguguuuguagau

SEQ ID NO: 621299 - RNA, 19 nt, Artificial Sequence
  Description of Artificial Sequence: Synthetic oligonucleotide
  Antisense strand to SEQ ID NO: 621298
aucuacaaacacuagucau

SEQ ID NO: 621300 - RNA, 19 nt, Artificial Sequence
  Description of Artificial Sequence: Synthetic oligonucleotide
  Sense strand starting at position 2060 of SEQ ID NO: 585203
uuugguaucuuggcaggga

SEQ ID NO: 621301 - RNA, 19 nt, Artificial Sequence
  Description of Artificial Sequence: Synthetic oligonucleotide
  Antisense strand to SEQ ID NO: 621300
ucccugccaagauaccaaa

SEQ ID NO: 621302 - RNA, 19 nt, Artificial Sequence
  Description of Artificial Sequence: Synthetic oligonucleotide
  Sense strand starting at position 2063 of SEQ ID NO: 585203
gguaucuuggcagggacuu

SEQ ID NO: 621303 - RNA, 19 nt, Artificial Sequence
  Description of Artificial Sequence: Synthetic oligonucleotide
  Antisense strand to SEQ ID NO: 621302
aagucccugccaagauacc

SEQ ID NO: 621304 - RNA, 19 nt, Artificial Sequence
  Description of Artificial Sequence: Synthetic oligonucleotide
  Sense strand starting at position 2064 of SEQ ID NO: 585203
guaucuuggcagggacuua

SEQ ID NO: 621305 - RNA, 19 nt, Artificial Sequence
  Description of Artificial Sequence: Synthetic oligonucleotide
  Antisense strand to SEQ ID NO: 621304
uaagucccugccaagauac

SEQ ID NO: 621306 - RNA, 19 nt, Artificial Sequence
  Description of Artificial Sequence: Synthetic oligonucleotide
  Sense strand starting at position 2116 of SEQ ID NO: 585203
aaggauucccgacgcauga

SEQ ID NO: 621307 - RNA, 19 nt, Artificial Sequence
  Description of Artificial Sequence: Synthetic oligonucleotide
  Antisense strand to SEQ ID NO: 621306
ucaugcgucgggaauccuu

SEQ ID NO: 621308 - RNA, 19 nt, Artificial Sequence
  Description of Artificial Sequence: Synthetic oligonucleotide
  Sense strand starting at position 2271 of SEQ ID NO: 585203
cucugagguccuuaaacac

SEQ ID NO: 621309 - RNA, 19 nt, Artificial Sequence
  Description of Artificial Sequence: Synthetic oligonucleotide
  Antisense strand to SEQ ID NO: 621308
guguuuaaggaccucagag

SEQ ID NO: 621310 - RNA, 19 nt, Artificial Sequence
  Description of Artificial Sequence: Synthetic oligonucleotide
  Sense strand starting at position 2320 of SEQ ID NO: 585203
ugucuagaugcugaugcaa

SEQ ID NO: 621311 - RNA, 19 nt, Artificial Sequence
  Description of Artificial Sequence: Synthetic oligonucleotide
  Antisense strand to SEQ ID NO: 621310
uugcaucagcaucuagaca

SEQ ID NO: 621312 - RNA, 19 nt, Artificial Sequence
  Description of Artificial Sequence: Synthetic oligonucleotide
  Sense strand starting at position 2343 of SEQ ID NO: 585203
ccaguaaagucacugcaaa

SEQ ID NO: 621313 - RNA, 19 nt, Artificial Sequence
  Description of Artificial Sequence: Synthetic oligonucleotide
  Antisense strand to SEQ ID NO: 621312
uuugcagugacuuuacugg

SEQ ID NO: 621314 - RNA, 19 nt, Artificial Sequence
  Description of Artificial Sequence: Synthetic oligonucleotide
  Sense strand starting at position 2493 of SEQ ID NO: 585203
ucacaauguaugcgaagga

SEQ ID NO: 621315 - RNA, 19 nt, Artificial Sequence
  Description of Artificial Sequence: Synthetic oligonucleotide
  Antisense strand to SEQ ID NO: 621314
uccuucgcauacauuguga

SEQ ID NO: 621316 - RNA, 19 nt, Artificial Sequence
  Description of Artificial Sequence: Synthetic oligonucleotide
  Sense strand starting at position 2550 of SEQ ID NO: 585203
gcuuauauaucaguaagaa

SEQ ID NO: 621317 - RNA, 19 nt, Artificial Sequence
  Description of Artificial Sequence: Synthetic oligonucleotide
  Antisense strand to SEQ ID NO: 621316
uucuuacugauauauaagc

SEQ ID NO: 621318 - RNA, 19 nt, Artificial Sequence
  Description of Artificial Sequence: Synthetic oligonucleotide
  Sense strand starting at position 2620 of SEQ ID NO: 585203
gcaucugugguaggauaca

SEQ ID NO: 621319 - RNA, 19 nt, Artificial Sequence
  Description of Artificial Sequence: Synthetic oligonucleotide
  Antisense strand to SEQ ID NO: 621318
uguauccuaccacagaugc

SEQ ID NO: 621320 - RNA, 19 nt, Artificial Sequence
  Description of Artificial Sequence: Synthetic oligonucleotide
  Sense strand starting at position 2802 of SEQ ID NO: 585203
gccaacuuucuggacaaua

SEQ ID NO: 621321 - RNA, 19 nt, Artificial Sequence
  Description of Artificial Sequence: Synthetic oligonucleotide
  Antisense strand to SEQ ID NO: 621320
uauuguccagaaaguuggc

SEQ ID NO: 621322 - RNA, 19 nt, Artificial Sequence
  Description of Artificial Sequence: Synthetic oligonucleotide
  Sense strand starting at position 2987 of SEQ ID NO: 585203
ggguuuguucuacaaauua

SEQ ID NO: 621323 - RNA, 19 nt, Artificial Sequence
  Description of Artificial Sequence: Synthetic oligonucleotide
  Antisense strand to SEQ ID NO: 621322
uaauuuguagaacaaaccc

SEQ ID NO: 621324 - RNA, 19 nt, Artificial Sequence
  Description of Artificial Sequence: Synthetic oligonucleotide
  Sense strand starting at position 3347 of SEQ ID NO: 585203
ugcuauugugaauagauag

SEQ ID NO: 621325 - RNA, 19 nt, Artificial Sequence
  Description of Artificial Sequence: Synthetic oligonucleotide
  Antisense strand to SEQ ID NO: 621324
cuaucuauucacaauagca

SEQ ID NO: 621326 - RNA, 19 nt, Artificial Sequence
  Description of Artificial Sequence: Synthetic oligonucleotide
  Sense strand starting at position 3727 of SEQ ID NO: 585203
aucauuuguccuugcaagu

SEQ ID NO: 621327 - RNA, 19 nt, Artificial Sequence
  Description of Artificial Sequence: Synthetic oligonucleotide
  Antisense strand to SEQ ID NO: 621326
acuugcaaggacaaaugau

SEQ ID NO: 621328 - RNA, 19 nt, Artificial Sequence
  Description of Artificial Sequence: Synthetic oligonucleotide
  Sense strand starting at position 3808 of SEQ ID NO: 585203
ucacuaucauaaguguauu

SEQ ID NO: 621329 - RNA, 19 nt, Artificial Sequence
  Description of Artificial Sequence: Synthetic oligonucleotide
  Antisense strand to SEQ ID NO: 621328
aauacacuuaugauaguga

SEQ ID NO: 621330 - RNA, 19 nt, Artificial Sequence
  Description of Artificial Sequence: Synthetic oligonucleotide
  Sense strand starting at position 3982 of SEQ ID NO: 585203
uggcauuugucgucauuag

SEQ ID NO: 621331 - RNA, 19 nt, Artificial Sequence
  Description of Artificial Sequence: Synthetic oligonucleotide
  Antisense strand to SEQ ID NO: 621330
cuaaugacgacaaaugcca

SEQ ID NO: 621332 - RNA, 19 nt, Artificial Sequence
  Description of Artificial Sequence: Synthetic oligonucleotide
  Sense strand starting at position 79 of SEQ ID NO: 585204
gucuguuaccacgacacaa

SEQ ID NO: 621333 - RNA, 19 nt, Artificial Sequence
  Description of Artificial Sequence: Synthetic oligonucleotide
  Antisense strand to SEQ ID NO: 621332
uugugucgugguaacagac

SEQ ID NO: 621334 - RNA, 19 nt, Artificial Sequence
  Description of Artificial Sequence: Synthetic oligonucleotide
  Sense strand starting at position 211 of SEQ ID NO: 585204
ugggaacauuagccuaaga

SEQ ID NO: 621335 - RNA, 19 nt, Artificial Sequence
  Description of Artificial Sequence: Synthetic oligonucleotide
  Antisense strand to SEQ ID NO: 621334
ucuuaggcuaauguuccca

SEQ ID NO: 621336 - RNA, 19 nt, Artificial Sequence
  Description of Artificial Sequence: Synthetic oligonucleotide
  Sense strand starting at position 231 of SEQ ID NO: 585204
acccacuaugauggaguua

SEQ ID NO: 621337 - RNA, 19 nt, Artificial Sequence
  Description of Artificial Sequence: Synthetic oligonucleotide
  Antisense strand to SEQ ID NO: 621336
uaacuccaucauagugggu

SEQ ID NO: 621338 - RNA, 19 nt, Artificial Sequence
  Description of Artificial Sequence: Synthetic oligonucleotide
  Sense strand starting at position 372 of SEQ ID NO: 585204
ucauuuguaugccuccauu

SEQ ID NO: 621339 - RNA, 19 nt, Artificial Sequence
  Description of Artificial Sequence: Synthetic oligonucleotide
  Antisense strand to SEQ ID NO: 621338
aauggaggcauacaaauga

SEQ ID NO: 621340 - RNA, 19 nt, Artificial Sequence
  Description of Artificial Sequence: Synthetic oligonucleotide
  Sense strand starting at position 442 of SEQ ID NO: 585204
gguucucaugaggauguca

SEQ ID NO: 621341 - RNA, 19 nt, Artificial Sequence
  Description of Artificial Sequence: Synthetic oligonucleotide
  Antisense strand to SEQ ID NO: 621340
ugacauccucaugagaacc

SEQ ID NO: 621342 - RNA, 19 nt, Artificial Sequence
  Description of Artificial Sequence: Synthetic oligonucleotide
  Sense strand starting at position 453 of SEQ ID NO: 585204
ggaugucacucugugaaau

SEQ ID NO: 621343 - RNA, 19 nt, Artificial Sequence
  Description of Artificial Sequence: Synthetic oligonucleotide
  Antisense strand to SEQ ID NO: 621342
auuucacagagugacaucc

SEQ ID NO: 621344 - RNA, 19 nt, Artificial Sequence
  Description of Artificial Sequence: Synthetic oligonucleotide
  Sense strand starting at position 454 of SEQ ID NO: 585204
gaugucacucugugaaaug

SEQ ID NO: 621345 - RNA, 19 nt, Artificial Sequence
  Description of Artificial Sequence: Synthetic oligonucleotide
  Antisense strand to SEQ ID NO: 621344
cauuucacagagugacauc

SEQ ID NO: 621346 - RNA, 19 nt, Artificial Sequence
  Description of Artificial Sequence: Synthetic oligonucleotide
  Sense strand starting at position 464 of SEQ ID NO: 585204
ugugaaaugagaugcagaa

SEQ ID NO: 621347 - RNA, 19 nt, Artificial Sequence
  Description of Artificial Sequence: Synthetic oligonucleotide
  Antisense strand to SEQ ID NO: 621346
uucugcaucucauuucaca

SEQ ID NO: 621348 - RNA, 19 nt, Artificial Sequence
  Description of Artificial Sequence: Synthetic oligonucleotide
  Sense strand starting at position 551 of SEQ ID NO: 585204
cuuacaucuguuugaagaa

SEQ ID NO: 621349 - RNA, 19 nt, Artificial Sequence
  Description of Artificial Sequence: Synthetic oligonucleotide
  Antisense strand to SEQ ID NO: 621348
uucuucaaacagauguaag

SEQ ID NO: 621350 - RNA, 19 nt, Artificial Sequence
  Description of Artificial Sequence: Synthetic oligonucleotide
  Sense strand starting at position 697 of SEQ ID NO: 585204
ucuguuaccuuucuggaaa

SEQ ID NO: 621351 - RNA, 19 nt, Artificial Sequence
  Description of Artificial Sequence: Synthetic oligonucleotide
  Antisense strand to SEQ ID NO: 621350
uuuccagaaagguaacaga

SEQ ID NO: 621352 - RNA, 19 nt, Artificial Sequence
  Description of Artificial Sequence: Synthetic oligonucleotide
  Sense strand starting at position 700 of SEQ ID NO: 585204
guuaccuuucuggaaagua

SEQ ID NO: 621353 - RNA, 19 nt, Artificial Sequence
  Description of Artificial Sequence: Synthetic oligonucleotide
  Antisense strand to SEQ ID NO: 621352
uacuuuccagaaagguaac

SEQ ID NO: 621354 - RNA, 19 nt, Artificial Sequence
  Description of Artificial Sequence: Synthetic oligonucleotide
  Sense strand starting at position 742 of SEQ ID NO: 585204
uguaauaggcaccaucuua

SEQ ID NO: 621355 - RNA, 19 nt, Artificial Sequence
  Description of Artificial Sequence: Synthetic oligonucleotide
  Antisense strand to SEQ ID NO: 621354
uaagauggugccuauuaca

SEQ ID NO: 621356 - RNA, 19 nt, Artificial Sequence
  Description of Artificial Sequence: Synthetic oligonucleotide
  Sense strand starting at position 808 of SEQ ID NO: 585204
uguggagaccugcaugagu

SEQ ID NO: 621357 - RNA, 19 nt, Artificial Sequence
  Description of Artificial Sequence: Synthetic oligonucleotide
  Antisense strand to SEQ ID NO: 621356
acucaugcaggucuccaca

SEQ ID NO: 621358 - RNA, 19 nt, Artificial Sequence
  Description of Artificial Sequence: Synthetic oligonucleotide
  Sense strand starting at position 810 of SEQ ID NO: 585204
uggagaccugcaugaguau

SEQ ID NO: 621359 - RNA, 19 nt, Artificial Sequence
  Description of Artificial Sequence: Synthetic oligonucleotide
  Antisense strand to SEQ ID NO: 621358
auacucaugcaggucucca

SEQ ID NO: 621360 - RNA, 19 nt, Artificial Sequence
  Description of Artificial Sequence: Synthetic oligonucleotide
  Sense strand starting at position 813 of SEQ ID NO: 585204
agaccugcaugaguaucaa

SEQ ID NO: 621361 - RNA, 19 nt, Artificial Sequence
  Description of Artificial Sequence: Synthetic oligonucleotide
  Antisense strand to SEQ ID NO: 621360
uugauacucaugcaggucu

SEQ ID NO: 621362 - RNA, 19 nt, Artificial Sequence
  Description of Artificial Sequence: Synthetic oligonucleotide
  Sense strand starting at position 823 of SEQ ID NO: 585204
gaguaucaaccggaagcau

SEQ ID NO: 621363 - RNA, 19 nt, Artificial Sequence
  Description of Artificial Sequence: Synthetic oligonucleotide
  Antisense strand to SEQ ID NO: 621362
augcuuccgguugauacuc

SEQ ID NO: 621364 - RNA, 19 nt, Artificial Sequence
  Description of Artificial Sequence: Synthetic oligonucleotide
  Sense strand starting at position 940 of SEQ ID NO: 585204
uaagcucaagucugggaau

SEQ ID NO: 621365 - RNA, 19 nt, Artificial Sequence
  Description of Artificial Sequence: Synthetic oligonucleotide
  Antisense strand to SEQ ID NO: 621364
auucccagacuugagcuua

SEQ ID NO: 621366 - RNA, 19 nt, Artificial Sequence
  Description of Artificial Sequence: Synthetic oligonucleotide
  Sense strand starting at position 942 of SEQ ID NO: 585204
agcucaagucugggaauca

SEQ ID NO: 621367 - RNA, 19 nt, Artificial Sequence
  Description of Artificial Sequence: Synthetic oligonucleotide
  Antisense strand to SEQ ID NO: 621366
ugauucccagacuugagcu

SEQ ID NO: 621368 - RNA, 19 nt, Artificial Sequence
  Description of Artificial Sequence: Synthetic oligonucleotide
  Sense strand starting at position 1363 of SEQ ID NO: 585204
cucuuucugugaccuagaa

SEQ ID NO: 621369 - RNA, 19 nt, Artificial Sequence
  Description of Artificial Sequence: Synthetic oligonucleotide
  Antisense strand to SEQ ID NO: 621368
uucuaggucacagaaagag

SEQ ID NO: 621370 - RNA, 19 nt, Artificial Sequence
  Description of Artificial Sequence: Synthetic oligonucleotide
  Sense strand starting at position 1944 of SEQ ID NO: 585204
ggaacauggcuaggaguuu

SEQ ID NO: 621371 - RNA, 19 nt, Artificial Sequence
  Description of Artificial Sequence: Synthetic oligonucleotide
  Antisense strand to SEQ ID NO: 621370
aaacuccuagccauguucc

SEQ ID NO: 621372 - RNA, 19 nt, Artificial Sequence
  Description of Artificial Sequence: Synthetic oligonucleotide
  Sense strand starting at position 2619 of SEQ ID NO: 585204
auggccugacaaugguaaa

SEQ ID NO: 621373 - RNA, 19 nt, Artificial Sequence
  Description of Artificial Sequence: Synthetic oligonucleotide
  Antisense strand to SEQ ID NO: 621372
uuuaccauugucaggccau

SEQ ID NO: 621374 - RNA, 19 nt, Artificial Sequence
  Description of Artificial Sequence: Synthetic oligonucleotide
  Sense strand starting at position 2740 of SEQ ID NO: 585204
gcaacuucugcguccuacu

SEQ ID NO: 621375 - RNA, 19 nt, Artificial Sequence
  Description of Artificial Sequence: Synthetic oligonucleotide
  Antisense strand to SEQ ID NO: 621374
aguaggacgcagaaguugc

SEQ ID NO: 621376 - RNA, 19 nt, Artificial Sequence
  Description of Artificial Sequence: Synthetic oligonucleotide
  Sense strand starting at position 2785 of SEQ ID NO: 585204
ggaucauaauuacugugau

SEQ ID NO: 621377 - RNA, 19 nt, Artificial Sequence
  Description of Artificial Sequence: Synthetic oligonucleotide
  Antisense strand to SEQ ID NO: 621376
aucacaguaauuaugaucc

SEQ ID NO: 621378 - RNA, 19 nt, Artificial Sequence
  Description of Artificial Sequence: Synthetic oligonucleotide
  Sense strand starting at position 2788 of SEQ ID NO: 585204
ucauaauuacugugaugaa

SEQ ID NO: 621379 - RNA, 19 nt, Artificial Sequence
  Description of Artificial Sequence: Synthetic oligonucleotide
  Antisense strand to SEQ ID NO: 621378
uucaucacaguaauuauga

SEQ ID NO: 621380 - RNA, 19 nt, Artificial Sequence
  Description of Artificial Sequence: Synthetic oligonucleotide
  Sense strand starting at position 2809 of SEQ ID NO: 585204
cuuuacuaucugggacaau

SEQ ID NO: 621381 - RNA, 19 nt, Artificial Sequence
  Description of Artificial Sequence: Synthetic oligonucleotide
  Antisense strand to SEQ ID NO: 621380
auugucccagauaguaaag

SEQ ID NO: 621382 - RNA, 19 nt, Artificial Sequence
  Description of Artificial Sequence: Synthetic oligonucleotide
  Sense strand starting at position 2832 of SEQ ID NO: 585204
auuugcucaccuuguagua

SEQ ID NO: 621383 - RNA, 19 nt, Artificial Sequence
  Description of Artificial Sequence: Synthetic oligonucleotide
  Antisense strand to SEQ ID NO: 621382
uacuacaaggugagcaaau

SEQ ID NO: 621384 - RNA, 19 nt, Artificial Sequence
  Description of Artificial Sequence: Synthetic oligonucleotide
  Sense strand starting at position 2849 of SEQ ID NO: 585204
uaaugagcccuugagaggu

SEQ ID NO: 621385 - RNA, 19 nt, Artificial Sequence
  Description of Artificial Sequence: Synthetic oligonucleotide
  Antisense strand to SEQ ID NO: 621384
accucucaagggcucauua

SEQ ID NO: 621386 - RNA, 19 nt, Artificial Sequence
  Description of Artificial Sequence: Synthetic oligonucleotide
  Sense strand starting at position 2888 of SEQ ID NO: 585204
accucaucaguaggucaaa

SEQ ID NO: 621387 - RNA, 19 nt, Artificial Sequence
  Description of Artificial Sequence: Synthetic oligonucleotide
  Antisense strand to SEQ ID NO: 621386
uuugaccuacugaugaggu

SEQ ID NO: 621388 - RNA, 19 nt, Artificial Sequence
  Description of Artificial Sequence: Synthetic oligonucleotide
  Sense strand starting at position 2889 of SEQ ID NO: 585204
ccucaucaguaggucaaau

SEQ ID NO: 621389 - RNA, 19 nt, Artificial Sequence
  Description of Artificial Sequence: Synthetic oligonucleotide
  Antisense strand to SEQ ID NO: 621388
auuugaccuacugaugagg

SEQ ID NO: 621390 - RNA, 19 nt, Artificial Sequence
  Description of Artificial Sequence: Synthetic oligonucleotide
  Sense strand starting at position 3297 of SEQ ID NO: 585204
guuugaaauucucccauga

SEQ ID NO: 621391 - RNA, 19 nt, Artificial Sequence
  Description of Artificial Sequence: Synthetic oligonucleotide
  Antisense strand to SEQ ID NO: 621390
ucaugggagaauuucaaac

SEQ ID NO: 621392 - RNA, 19 nt, Artificial Sequence
  Description of Artificial Sequence: Synthetic oligonucleotide
  Sense strand starting at position 3446 of SEQ ID NO: 585204
agaucaaaucuuggcaagu

SEQ ID NO: 621393 - RNA, 19 nt, Artificial Sequence
  Description of Artificial Sequence: Synthetic oligonucleotide
  Antisense strand to SEQ ID NO: 621392
acuugccaagauuugaucu

SEQ ID NO: 621394 - RNA, 19 nt, Artificial Sequence
  Description of Artificial Sequence: Synthetic oligonucleotide
  Sense strand starting at position 3447 of SEQ ID NO: 585204
gaucaaaucuuggcaagua

SEQ ID NO: 621395 - RNA, 19 nt, Artificial Sequence
  Description of Artificial Sequence: Synthetic oligonucleotide
  Antisense strand to SEQ ID NO: 621394
uacuugccaagauuugauc

SEQ ID NO: 621396 - RNA, 19 nt, Artificial Sequence
  Description of Artificial Sequence: Synthetic oligonucleotide
  Sense strand starting at position 3468 of SEQ ID NO: 585204
uugggaucauuccugagau

SEQ ID NO: 621397 - RNA, 19 nt, Artificial Sequence
  Description of Artificial Sequence: Synthetic oligonucleotide
  Antisense strand to SEQ ID NO: 621396
aucucaggaaugaucccaa

SEQ ID NO: 621398 - RNA, 19 nt, Artificial Sequence
  Description of Artificial Sequence: Synthetic oligonucleotide
  Sense strand starting at position 3555 of SEQ ID NO: 585204
ugagguaacuuucugagac

SEQ ID NO: 621399 - RNA, 19 nt, Artificial Sequence
  Description of Artificial Sequence: Synthetic oligonucleotide
  Antisense strand to SEQ ID NO: 621398
gucucagaaaguuaccuca

SEQ ID NO: 621400 - RNA, 19 nt, Artificial Sequence
  Description of Artificial Sequence: Synthetic oligonucleotide
  Sense strand starting at position 3603 of SEQ ID NO: 585204
uugaccacgccuuaauaua

SEQ ID NO: 621401 - RNA, 19 nt, Artificial Sequence
  Description of Artificial Sequence: Synthetic oligonucleotide
  Antisense strand to SEQ ID NO: 621400
uauauuaaggcguggucaa

SEQ ID NO: 621402 - RNA, 19 nt, Artificial Sequence
  Description of Artificial Sequence: Synthetic oligonucleotide
  Sense strand starting at position 3693 of SEQ ID NO: 585204
accuauucuguccacagau

SEQ ID NO: 621403 - RNA, 19 nt, Artificial Sequence
  Description of Artificial Sequence: Synthetic oligonucleotide
  Antisense strand to SEQ ID NO: 621402
aucuguggacagaauaggu

SEQ ID NO: 621404 - RNA, 19 nt, Artificial Sequence
  Description of Artificial Sequence: Synthetic oligonucleotide
  Sense strand starting at position 3695 of SEQ ID NO: 585204
cuauucuguccacagauag

SEQ ID NO: 621405 - RNA, 19 nt, Artificial Sequence
  Description of Artificial Sequence: Synthetic oligonucleotide
  Antisense strand to SEQ ID NO: 621404
cuaucuguggacagaauag

SEQ ID NO: 621406 - RNA, 19 nt, Artificial Sequence
  Description of Artificial Sequence: Synthetic oligonucleotide
  Sense strand starting at position 3746 of SEQ ID NO: 585204
agagcauacucuuuagaua

SEQ ID NO: 621407 - RNA, 19 nt, Artificial Sequence
  Description of Artificial Sequence: Synthetic oligonucleotide
  Antisense strand to SEQ ID NO: 621406
uaucuaaagaguaugcucu

SEQ ID NO: 621408 - RNA, 19 nt, Artificial Sequence
  Description of Artificial Sequence: Synthetic oligonucleotide
  Sense strand starting at position 3757 of SEQ ID NO: 585204
uuuagauacuaaucaguag

SEQ ID NO: 621409 - RNA, 19 nt, Artificial Sequence
  Description of Artificial Sequence: Synthetic oligonucleotide
  Antisense strand to SEQ ID NO: 621408
cuacugauuaguaucuaaa

SEQ ID NO: 621410 - RNA, 19 nt, Artificial Sequence
  Description of Artificial Sequence: Synthetic oligonucleotide
  Sense strand starting at position 3760 of SEQ ID NO: 585204
agauacuaaucaguagagu

SEQ ID NO: 621411 - RNA, 19 nt, Artificial Sequence
  Description of Artificial Sequence: Synthetic oligonucleotide
  Antisense strand to SEQ ID NO: 621410
acucuacugauuaguaucu

SEQ ID NO: 621412 - RNA, 19 nt, Artificial Sequence
  Description of Artificial Sequence: Synthetic oligonucleotide
  Sense strand starting at position 18 of SEQ ID NO: 585205
gguauacggaccuguuuaa

SEQ ID NO: 621413 - RNA, 19 nt, Artificial Sequence
  Description of Artificial Sequence: Synthetic oligonucleotide
  Antisense strand to SEQ ID NO: 621412
uuaaacagguccguauacc

SEQ ID NO: 621414 - RNA, 19 nt, Artificial Sequence
  Description of Artificial Sequence: Synthetic oligonucleotide
  Sense strand starting at position 31 of SEQ ID NO: 585205
guuuaauccuguccacaga

SEQ ID NO: 621415 - RNA, 19 nt, Artificial Sequence
  Description of Artificial Sequence: Synthetic oligonucleotide
  Antisense strand to SEQ ID NO: 621414
ucuguggacaggauuaaac

SEQ ID NO: 621416 - RNA, 19 nt, Artificial Sequence
  Description of Artificial Sequence: Synthetic oligonucleotide
  Sense strand starting at position 344 of SEQ ID NO: 585205
ugcuguuggcaugauagaa

SEQ ID NO: 621417 - RNA, 19 nt, Artificial Sequence
  Description of Artificial Sequence: Synthetic oligonucleotide
  Antisense strand to SEQ ID NO: 621416
uucuaucaugccaacagca

SEQ ID NO: 621418 - RNA, 19 nt, Artificial Sequence
  Description of Artificial Sequence: Synthetic oligonucleotide
  Sense strand starting at position 394 of SEQ ID NO: 585205
gaccgagugacuuaaugug

SEQ ID NO: 621419 - RNA, 19 nt, Artificial Sequence
  Description of Artificial Sequence: Synthetic oligonucleotide
  Antisense strand to SEQ ID NO: 621418
cacauuaagucacucgguc

SEQ ID NO: 621420 - RNA, 19 nt, Artificial Sequence
  Description of Artificial Sequence: Synthetic oligonucleotide
  Sense strand starting at position 545 of SEQ ID NO: 585205
ucuuaucugcuuuagggaa

SEQ ID NO: 621421 - RNA, 19 nt, Artificial Sequence
  Description of Artificial Sequence: Synthetic oligonucleotide
  Antisense strand to SEQ ID NO: 621420
uucccuaaagcagauaaga

SEQ ID NO: 621422 - RNA, 19 nt, Artificial Sequence
  Description of Artificial Sequence: Synthetic oligonucleotide
  Sense strand starting at position 558 of SEQ ID NO: 585205
agggaacuuucccugacua

SEQ ID NO: 621423 - RNA, 19 nt, Artificial Sequence
  Description of Artificial Sequence: Synthetic oligonucleotide
  Antisense strand to SEQ ID NO: 621422
uagucagggaaaguucccu

SEQ ID NO: 621424 - RNA, 19 nt, Artificial Sequence
  Description of Artificial Sequence: Synthetic oligonucleotide
  Sense strand starting at position 559 of SEQ ID NO: 585205
gggaacuuucccugacuag

SEQ ID NO: 621425 - RNA, 19 nt, Artificial Sequence
  Description of Artificial Sequence: Synthetic oligonucleotide
  Antisense strand to SEQ ID NO: 621424
cuagucagggaaaguuccc

SEQ ID NO: 621426 - RNA, 19 nt, Artificial Sequence
  Description of Artificial Sequence: Synthetic oligonucleotide
  Sense strand starting at position 560 of SEQ ID NO: 585205
ggaacuuucccugacuagu

SEQ ID NO: 621427 - RNA, 19 nt, Artificial Sequence
  Description of Artificial Sequence: Synthetic oligonucleotide
  Antisense strand to SEQ ID NO: 621426
acuagucagggaaaguucc

SEQ ID NO: 621428 - RNA, 19 nt, Artificial Sequence
  Description of Artificial Sequence: Synthetic oligonucleotide
  Sense strand starting at position 670 of SEQ ID NO: 585205
caggguuuccacuggaauc

SEQ ID NO: 621429 - RNA, 19 nt, Artificial Sequence
  Description of Artificial Sequence: Synthetic oligonucleotide
  Antisense strand to SEQ ID NO: 621428
gauuccaguggaaacccug

SEQ ID NO: 621430 - RNA, 19 nt, Artificial Sequence
  Description of Artificial Sequence: Synthetic oligonucleotide
  Sense strand starting at position 774 of SEQ ID NO: 585205
acgucuuucgucuugccaa

SEQ ID NO: 621431 - RNA, 19 nt, Artificial Sequence
  Description of Artificial Sequence: Synthetic oligonucleotide
  Antisense strand to SEQ ID NO: 621430
uuggcaagacgaaagacgu

SEQ ID NO: 621432 - RNA, 19 nt, Artificial Sequence
  Description of Artificial Sequence: Synthetic oligonucleotide
  Sense strand starting at position 866 of SEQ ID NO: 585205
uuaauuaguccauaacguc

SEQ ID NO: 621433 - RNA, 19 nt, Artificial Sequence
  Description of Artificial Sequence: Synthetic oligonucleotide
  Antisense strand to SEQ ID NO: 621432
gacguuauggacuaauuaa

SEQ ID NO: 621434 - RNA, 19 nt, Artificial Sequence
  Description of Artificial Sequence: Synthetic oligonucleotide
  Sense strand starting at position 875 of SEQ ID NO: 585205
ccauaacguccagaaagcu

SEQ ID NO: 621435 - RNA, 19 nt, Artificial Sequence
  Description of Artificial Sequence: Synthetic oligonucleotide
  Antisense strand to SEQ ID NO: 621434
agcuuucuggacguuaugg

SEQ ID NO: 621436 - RNA, 19 nt, Artificial Sequence
  Description of Artificial Sequence: Synthetic oligonucleotide
  Sense strand starting at position 881 of SEQ ID NO: 585205
cguccagaaagcugugaga

SEQ ID NO: 621437 - RNA, 19 nt, Artificial Sequence
  Description of Artificial Sequence: Synthetic oligonucleotide
  Antisense strand to SEQ ID NO: 621436
ucucacagcuuucuggacg

SEQ ID NO: 621438 - RNA, 19 nt, Artificial Sequence
  Description of Artificial Sequence: Synthetic oligonucleotide
  Sense strand starting at position 1128 of SEQ ID NO: 585205
gagaacugcccuggucacu

SEQ ID NO: 621439 - RNA, 19 nt, Artificial Sequence
  Description of Artificial Sequence: Synthetic oligonucleotide
  Antisense strand to SEQ ID NO: 621438
agugaccagggcaguucuc

SEQ ID NO: 621440 - RNA, 19 nt, Artificial Sequence
  Description of Artificial Sequence: Synthetic oligonucleotide
  Sense strand starting at position 1176 of SEQ ID NO: 585205
agaguuaccagguguuaac

SEQ ID NO: 621441 - RNA, 19 nt, Artificial Sequence
  Description of Artificial Sequence: Synthetic oligonucleotide
  Antisense strand to SEQ ID NO: 621440
guuaacaccugguaacucu

SEQ ID NO: 621442 - RNA, 19 nt, Artificial Sequence
  Description of Artificial Sequence: Synthetic oligonucleotide
  Sense strand starting at position 1523 of SEQ ID NO: 585205
gcgaaccgccuguuuacau

SEQ ID NO: 621443 - RNA, 19 nt, Artificial Sequence
  Description of Artificial Sequence: Synthetic oligonucleotide
  Antisense strand to SEQ ID NO: 621442
auguaaacaggcgguucgc

SEQ ID NO: 621444 - RNA, 19 nt, Artificial Sequence
  Description of Artificial Sequence: Synthetic oligonucleotide
  Sense strand starting at position 2055 of SEQ ID NO: 585205
acgagaugucgauagcgag

SEQ ID NO: 621445 - RNA, 19 nt, Artificial Sequence
  Description of Artificial Sequence: Synthetic oligonucleotide
  Antisense strand to SEQ ID NO: 621444
cucgcuaucgacaucucgu

SEQ ID NO: 621446 - RNA, 19 nt, Artificial Sequence
  Description of Artificial Sequence: Synthetic oligonucleotide
  Sense strand starting at position 2153 of SEQ ID NO: 585205
acgugaagccaagauuaag

SEQ ID NO: 621447 - RNA, 19 nt, Artificial Sequence
  Description of Artificial Sequence: Synthetic oligonucleotide
  Antisense strand to SEQ ID NO: 621446
cuuaaucuuggcuucacgu

SEQ ID NO: 621448 - RNA, 19 nt, Artificial Sequence
  Description of Artificial Sequence: Synthetic oligonucleotide
  Sense strand starting at position 2159 of SEQ ID NO: 585205
agccaagauuaagugagaa

SEQ ID NO: 621449 - RNA, 19 nt, Artificial Sequence
  Description of Artificial Sequence: Synthetic oligonucleotide
  Antisense strand to SEQ ID NO: 621448
uucucacuuaaucuuggcu

SEQ ID NO: 621450 - RNA, 19 nt, Artificial Sequence
  Description of Artificial Sequence: Synthetic oligonucleotide
  Sense strand starting at position 2163 of SEQ ID NO: 585205
aagauuaagugagaaagac

SEQ ID NO: 621451 - RNA, 19 nt, Artificial Sequence
  Description of Artificial Sequence: Synthetic oligonucleotide
  Antisense strand to SEQ ID NO: 621450
gucuuucucacuuaaucuu

SEQ ID NO: 621452 - RNA, 19 nt, Artificial Sequence
  Description of Artificial Sequence: Synthetic oligonucleotide
  Sense strand starting at position 2323 of SEQ ID NO: 585205
aguauuugcugagagaaug

SEQ ID NO: 621453 - RNA, 19 nt, Artificial Sequence
  Description of Artificial Sequence: Synthetic oligonucleotide
  Antisense strand to SEQ ID NO: 621452
cauucucucagcaaauacu

SEQ ID NO: 621454 - RNA, 19 nt, Artificial Sequence
  Description of Artificial Sequence: Synthetic oligonucleotide
  Sense strand starting at position 2333 of SEQ ID NO: 585205
gagagaaugacugguguau

SEQ ID NO: 621455 - RNA, 19 nt, Artificial Sequence
  Description of Artificial Sequence: Synthetic oligonucleotide
  Antisense strand to SEQ ID NO: 621454
auacaccagucauucucuc

SEQ ID NO: 621456 - RNA, 19 nt, Artificial Sequence
  Description of Artificial Sequence: Synthetic oligonucleotide
  Sense strand starting at position 2337 of SEQ ID NO: 585205
gaaugacugguguauguaa

SEQ ID NO: 621457 - RNA, 19 nt, Artificial Sequence
  Description of Artificial Sequence: Synthetic oligonucleotide
  Antisense strand to SEQ ID NO: 621456
uuacauacaccagucauuc

SEQ ID NO: 621458 - RNA, 19 nt, Artificial Sequence
  Description of Artificial Sequence: Synthetic oligonucleotide
  Sense strand starting at position 2408 of SEQ ID NO: 585205
aagucaguuugucugggaa

SEQ ID NO: 621459 - RNA, 19 nt, Artificial Sequence
  Description of Artificial Sequence: Synthetic oligonucleotide
  Antisense strand to SEQ ID NO: 621458
uucccagacaaacugacuu

SEQ ID NO: 621460 - RNA, 19 nt, Artificial Sequence
  Description of Artificial Sequence: Synthetic oligonucleotide
  Sense strand starting at position 2411 of SEQ ID NO: 585205
ucaguuugucugggaacug

SEQ ID NO: 621461 - RNA, 19 nt, Artificial Sequence
  Description of Artificial Sequence: Synthetic oligonucleotide
  Antisense strand to SEQ ID NO: 621460
caguucccagacaaacuga

SEQ ID NO: 621462 - RNA, 19 nt, Artificial Sequence
  Description of Artificial Sequence: Synthetic oligonucleotide
  Sense strand starting at position 2453 of SEQ ID NO: 585205
ggaggaauuuacugcaaau

SEQ ID NO: 621463 - RNA, 19 nt, Artificial Sequence
  Description of Artificial Sequence: Synthetic oligonucleotide
  Antisense strand to SEQ ID NO: 621462
auuugcaguaaauuccucc

SEQ ID NO: 621464 - RNA, 19 nt, Artificial Sequence
  Description of Artificial Sequence: Synthetic oligonucleotide
  Sense strand starting at position 2471 of SEQ ID NO: 585205
ucuaacuugugguuagauu

SEQ ID NO: 621465 - RNA, 19 nt, Artificial Sequence
  Description of Artificial Sequence: Synthetic oligonucleotide
  Antisense strand to SEQ ID NO: 621464
aaucuaaccacaaguuaga

SEQ ID NO: 621466 - RNA, 19 nt, Artificial Sequence
  Description of Artificial Sequence: Synthetic oligonucleotide
  Sense strand starting at position 2592 of SEQ ID NO: 585205
cuugauugcuacccagaag

SEQ ID NO: 621467 - RNA, 19 nt, Artificial Sequence
  Description of Artificial Sequence: Synthetic oligonucleotide
  Antisense strand to SEQ ID NO: 621466
cuucuggguagcaaucaag

SEQ ID NO: 621468 - RNA, 19 nt, Artificial Sequence
  Description of Artificial Sequence: Synthetic oligonucleotide
  Sense strand starting at position 2595 of SEQ ID NO: 585205
gauugcuacccagaaguag

SEQ ID NO: 621469 - RNA, 19 nt, Artificial Sequence
  Description of Artificial Sequence: Synthetic oligonucleotide
  Antisense strand to SEQ ID NO: 621468
cuacuucuggguagcaauc

SEQ ID NO: 621470 - RNA, 19 nt, Artificial Sequence
  Description of Artificial Sequence: Synthetic oligonucleotide
  Sense strand starting at position 2774 of SEQ ID NO: 585205
ugcccaaauuucuucguau

SEQ ID NO: 621471 - RNA, 19 nt, Artificial Sequence
  Description of Artificial Sequence: Synthetic oligonucleotide
  Antisense strand to SEQ ID NO: 621470
auacgaagaaauuugggca

SEQ ID NO: 621472 - RNA, 19 nt, Artificial Sequence
  Description of Artificial Sequence: Synthetic oligonucleotide
  Sense strand starting at position 2775 of SEQ ID NO: 585205
gcccaaauuucuucguauu

SEQ ID NO: 621473 - RNA, 19 nt, Artificial Sequence
  Description of Artificial Sequence: Synthetic oligonucleotide
  Antisense strand to SEQ ID NO: 621472
aauacgaagaaauuugggc

SEQ ID NO: 621474 - RNA, 19 nt, Artificial Sequence
  Description of Artificial Sequence: Synthetic oligonucleotide
  Sense strand starting at position 2835 of SEQ ID NO: 585205
gagaucauagcaugagcga

SEQ ID NO: 621475 - RNA, 19 nt, Artificial Sequence
  Description of Artificial Sequence: Synthetic oligonucleotide
  Antisense strand to SEQ ID NO: 621474
ucgcucaugcuaugaucuc

SEQ ID NO: 621476 - RNA, 19 nt, Artificial Sequence
  Description of Artificial Sequence: Synthetic oligonucleotide
  Sense strand starting at position 2880 of SEQ ID NO: 585205
acugucuuaucauuugcua

SEQ ID NO: 621477 - RNA, 19 nt, Artificial Sequence
  Description of Artificial Sequence: Synthetic oligonucleotide
  Antisense strand to SEQ ID NO: 621476
uagcaaaugauaagacagu

SEQ ID NO: 621478 - RNA, 19 nt, Artificial Sequence
  Description of Artificial Sequence: Synthetic oligonucleotide
  Sense strand starting at position 2883 of SEQ ID NO: 585205
gucuuaucauuugcuaguu

SEQ ID NO: 621479 - RNA, 19 nt, Artificial Sequence
  Description of Artificial Sequence: Synthetic oligonucleotide
  Antisense strand to SEQ ID NO: 621478
aacuagcaaaugauaagac

SEQ ID NO: 621480 - RNA, 19 nt, Artificial Sequence
  Description of Artificial Sequence: Synthetic oligonucleotide
  Sense strand starting at position 3230 of SEQ ID NO: 585205
auccuaucugaaggcuaau

SEQ ID NO: 621481 - RNA, 19 nt, Artificial Sequence
  Description of Artificial Sequence: Synthetic oligonucleotide
  Antisense strand to SEQ ID NO: 621480
auuagccuucagauaggau

SEQ ID NO: 621482 - RNA, 19 nt, Artificial Sequence
  Description of Artificial Sequence: Synthetic oligonucleotide
  Sense strand starting at position 3256 of SEQ ID NO: 585205
uaaggagugauaugaguga

SEQ ID NO: 621483 - RNA, 19 nt, Artificial Sequence
  Description of Artificial Sequence: Synthetic oligonucleotide
  Antisense strand to SEQ ID NO: 621482
ucacucauaucacuccuua

SEQ ID NO: 621484 - RNA, 19 nt, Artificial Sequence
  Description of Artificial Sequence: Synthetic oligonucleotide
  Sense strand starting at position 3260 of SEQ ID NO: 585205
gagugauaugagugauaug

SEQ ID NO: 621485 - RNA, 19 nt, Artificial Sequence
  Description of Artificial Sequence: Synthetic oligonucleotide
  Antisense strand to SEQ ID NO: 621484
cauaucacucauaucacuc

SEQ ID NO: 621486 - RNA, 19 nt, Artificial Sequence
  Description of Artificial Sequence: Synthetic oligonucleotide
  Sense strand starting at position 3272 of SEQ ID NO: 585205
ugauaugaauauucgacuu

SEQ ID NO: 621487 - RNA, 19 nt, Artificial Sequence
  Description of Artificial Sequence: Synthetic oligonucleotide
  Antisense strand to SEQ ID NO: 621486
aagucgaauauucauauca

SEQ ID NO: 621488 - RNA, 19 nt, Artificial Sequence
  Description of Artificial Sequence: Synthetic oligonucleotide
  Sense strand starting at position 3522 of SEQ ID NO: 585205
aaauaauucgacuguucga

SEQ ID NO: 621489 - RNA, 19 nt, Artificial Sequence
  Description of Artificial Sequence: Synthetic oligonucleotide
  Antisense strand to SEQ ID NO: 621488
ucgaacagucgaauuauuu

SEQ ID NO: 621490 - RNA, 19 nt, Artificial Sequence
  Description of Artificial Sequence: Synthetic oligonucleotide
  Sense strand starting at position 3918 of SEQ ID NO: 585205
uuacauuaugguugcaacu

SEQ ID NO: 621491 - RNA, 19 nt, Artificial Sequence
  Description of Artificial Sequence: Synthetic oligonucleotide
  Antisense strand to SEQ ID NO: 621490
aguugcaaccauaauguaa

SEQ ID NO: 621492 - RNA, 19 nt, Artificial Sequence
  Description of Artificial Sequence: Synthetic oligonucleotide
  Sense strand starting at position 84 of SEQ ID NO: 585206
auccauaagucucuggaaa

SEQ ID NO: 621493 - RNA, 19 nt, Artificial Sequence
  Description of Artificial Sequence: Synthetic oligonucleotide
  Antisense strand to SEQ ID NO: 621492
uuuccagagacuuauggau

SEQ ID NO: 621494 - RNA, 19 nt, Artificial Sequence
  Description of Artificial Sequence: Synthetic oligonucleotide
  Sense strand starting at position 342 of SEQ ID NO: 585206
ccuauaaaguaagaagaaa

SEQ ID NO: 621495 - RNA, 19 nt, Artificial Sequence
  Description of Artificial Sequence: Synthetic oligonucleotide
  Antisense strand to SEQ ID NO: 621494
uuucuucuuacuuuauagg

SEQ ID NO: 621496 - RNA, 19 nt, Artificial Sequence
  Description of Artificial Sequence: Synthetic oligonucleotide
  Sense strand starting at position 438 of SEQ ID NO: 585206
gagggagaugacugcauua

SEQ ID NO: 621497 - RNA, 19 nt, Artificial Sequence
  Description of Artificial Sequence: Synthetic oligonucleotide
  Antisense strand to SEQ ID NO: 621496
uaaugcagucaucucccuc

SEQ ID NO: 621498 - RNA, 19 nt, Artificial Sequence
  Description of Artificial Sequence: Synthetic oligonucleotide
  Sense strand starting at position 443 of SEQ ID NO: 585206
agaugacugcauuaauccu

SEQ ID NO: 621499 - RNA, 19 nt, Artificial Sequence
  Description of Artificial Sequence: Synthetic oligonucleotide
  Antisense strand to SEQ ID NO: 621498
aggauuaaugcagucaucu

SEQ ID NO: 621500 - RNA, 19 nt, Artificial Sequence
  Description of Artificial Sequence: Synthetic oligonucleotide
  Sense strand starting at position 548 of SEQ ID NO: 585206
aaguccuauuuguggaaua

SEQ ID NO: 621501 - RNA, 19 nt, Artificial Sequence
  Description of Artificial Sequence: Synthetic oligonucleotide
  Antisense strand to SEQ ID NO: 621500
uauuccacaaauaggacuu

SEQ ID NO: 621502 - RNA, 19 nt, Artificial Sequence
  Description of Artificial Sequence: Synthetic oligonucleotide
  Sense strand starting at position 559 of SEQ ID NO: 585206
guggaauaguaacuucuuu

SEQ ID NO: 621503 - RNA, 19 nt, Artificial Sequence
  Description of Artificial Sequence: Synthetic oligonucleotide
  Antisense strand to SEQ ID NO: 621502
aaagaaguuacuauuccac

SEQ ID NO: 621504 - RNA, 19 nt, Artificial Sequence
  Description of Artificial Sequence: Synthetic oligonucleotide
  Sense strand starting at position 603 of SEQ ID NO: 585206
cucauuacaccuggaaagu

SEQ ID NO: 621505 - RNA, 19 nt, Artificial Sequence
  Description of Artificial Sequence: Synthetic oligonucleotide
  Antisense strand to SEQ ID NO: 621504
acuuuccagguguaaugag

SEQ ID NO: 621506 - RNA, 19 nt, Artificial Sequence
  Description of Artificial Sequence: Synthetic oligonucleotide
  Sense strand starting at position 727 of SEQ ID NO: 585206
ggacacuuugcauggaaag

SEQ ID NO: 621507 - RNA, 19 nt, Artificial Sequence
  Description of Artificial Sequence: Synthetic oligonucleotide
  Antisense strand to SEQ ID NO: 621506
cuuuccaugcaaagugucc

SEQ ID NO: 621508 - RNA, 19 nt, Artificial Sequence
  Description of Artificial Sequence: Synthetic oligonucleotide
  Sense strand starting at position 728 of SEQ ID NO: 585206
gacacuuugcauggaaagu

SEQ ID NO: 621509 - RNA, 19 nt, Artificial Sequence
  Description of Artificial Sequence: Synthetic oligonucleotide
  Antisense strand to SEQ ID NO: 621508
acuuuccaugcaaaguguc

SEQ ID NO: 621510 - RNA, 19 nt, Artificial Sequence
  Description of Artificial Sequence: Synthetic oligonucleotide
  Sense strand starting at position 803 of SEQ ID NO: 585206
acacuauaauuguaaggaa

SEQ ID NO: 621511 - RNA, 19 nt, Artificial Sequence
  Description of Artificial Sequence: Synthetic oligonucleotide
  Antisense strand to SEQ ID NO: 621510
uuccuuacaauuauagugu

SEQ ID NO: 621512 - RNA, 19 nt, Artificial Sequence
  Description of Artificial Sequence: Synthetic oligonucleotide
  Sense strand starting at position 878 of SEQ ID NO: 585206
cccacagugcuagaaauaa

SEQ ID NO: 621513 - RNA, 19 nt, Artificial Sequence
  Description of Artificial Sequence: Synthetic oligonucleotide
  Antisense strand to SEQ ID NO: 621512
uuauuucuagcacuguggg

SEQ ID NO: 621514 - RNA, 19 nt, Artificial Sequence
  Description of Artificial Sequence: Synthetic oligonucleotide
  Sense strand starting at position 936 of SEQ ID NO: 585206
ugcccugacuuucucagua

SEQ ID NO: 621515 - RNA, 19 nt, Artificial Sequence
  Description of Artificial Sequence: Synthetic oligonucleotide
  Antisense strand to SEQ ID NO: 621514
uacugagaaagucagggca

SEQ ID NO: 621516 - RNA, 19 nt, Artificial Sequence
  Description of Artificial Sequence: Synthetic oligonucleotide
  Sense strand starting at position 2112 of SEQ ID NO: 585206
ccugauaucggcugcagga

SEQ ID NO: 621517 - RNA, 19 nt, Artificial Sequence
  Description of Artificial Sequence: Synthetic oligonucleotide
  Antisense strand to SEQ ID NO: 621516
uccugcagccgauaucagg

SEQ ID NO: 621518 - RNA, 19 nt, Artificial Sequence
  Description of Artificial Sequence: Synthetic oligonucleotide
  Sense strand starting at position 2145 of SEQ ID NO: 585206
agcuguggucacugaggaa

SEQ ID NO: 621519 - RNA, 19 nt, Artificial Sequence
  Description of Artificial Sequence: Synthetic oligonucleotide
  Antisense strand to SEQ ID NO: 621518
uuccucagugaccacagcu

SEQ ID NO: 621520 - RNA, 19 nt, Artificial Sequence
  Description of Artificial Sequence: Synthetic oligonucleotide
  Sense strand starting at position 2391 of SEQ ID NO: 585206
uuuggaaacucauuguaaa

SEQ ID NO: 621521 - RNA, 19 nt, Artificial Sequence
  Description of Artificial Sequence: Synthetic oligonucleotide
  Antisense strand to SEQ ID NO: 621520
uuuacaaugaguuuccaaa

SEQ ID NO: 621522 - RNA, 19 nt, Artificial Sequence
  Description of Artificial Sequence: Synthetic oligonucleotide
  Sense strand starting at position 2392 of SEQ ID NO: 585206
uuggaaacucauuguaaag

SEQ ID NO: 621523 - RNA, 19 nt, Artificial Sequence
  Description of Artificial Sequence: Synthetic oligonucleotide
  Antisense strand to SEQ ID NO: 621522
cuuuacaaugaguuuccaa

SEQ ID NO: 621524 - RNA, 19 nt, Artificial Sequence
  Description of Artificial Sequence: Synthetic oligonucleotide
  Sense strand starting at position 2560 of SEQ ID NO: 585206
gguaaagucuccguaugga

SEQ ID NO: 621525 - RNA, 19 nt, Artificial Sequence
  Description of Artificial Sequence: Synthetic oligonucleotide
  Antisense strand to SEQ ID NO: 621524
uccauacggagacuuuacc

SEQ ID NO: 621526 - RNA, 19 nt, Artificial Sequence
  Description of Artificial Sequence: Synthetic oligonucleotide
  Sense strand starting at position 2619 of SEQ ID NO: 585206
guguauguucaagaagaag

SEQ ID NO: 621527 - RNA, 19 nt, Artificial Sequence
  Description of Artificial Sequence: Synthetic oligonucleotide
  Antisense strand to SEQ ID NO: 621526
cuucuucuugaacauacac

SEQ ID NO: 621528 - RNA, 19 nt, Artificial Sequence
  Description of Artificial Sequence: Synthetic oligonucleotide
  Sense strand starting at position 2643 of SEQ ID NO: 585206
cagauaagguaacuuguuu

SEQ ID NO: 621529 - RNA, 19 nt, Artificial Sequence
  Description of Artificial Sequence: Synthetic oligonucleotide
  Antisense strand to SEQ ID NO: 621528
aaacaaguuaccuuaucug

SEQ ID NO: 621530 - RNA, 19 nt, Artificial Sequence
  Description of Artificial Sequence: Synthetic oligonucleotide
  Sense strand starting at position 2710 of SEQ ID NO: 585206
uuugcauaguugcuagaaa

SEQ ID NO: 621531 - RNA, 19 nt, Artificial Sequence
  Description of Artificial Sequence: Synthetic oligonucleotide
  Antisense strand to SEQ ID NO: 621530
uuucuagcaacuaugcaaa

SEQ ID NO: 621532 - RNA, 19 nt, Artificial Sequence
  Description of Artificial Sequence: Synthetic oligonucleotide
  Sense strand starting at position 2851 of SEQ ID NO: 585206
ugaccagugaguugcaauu

SEQ ID NO: 621533 - RNA, 19 nt, Artificial Sequence
  Description of Artificial Sequence: Synthetic oligonucleotide
  Antisense strand to SEQ ID NO: 621532
aauugcaacucacugguca

SEQ ID NO: 621534 - RNA, 19 nt, Artificial Sequence
  Description of Artificial Sequence: Synthetic oligonucleotide
  Sense strand starting at position 2902 of SEQ ID NO: 585206
cucugaguucuuuacccau

SEQ ID NO: 621535 - RNA, 19 nt, Artificial Sequence
  Description of Artificial Sequence: Synthetic oligonucleotide
  Antisense strand to SEQ ID NO: 621534
auggguaaagaacucagag

SEQ ID NO: 621536 - RNA, 19 nt, Artificial Sequence
  Description of Artificial Sequence: Synthetic oligonucleotide
  Sense strand starting at position 2904 of SEQ ID NO: 585206
cugaguucuuuacccauac

SEQ ID NO: 621537 - RNA, 19 nt, Artificial Sequence
  Description of Artificial Sequence: Synthetic oligonucleotide
  Antisense strand to SEQ ID NO: 621536
guauggguaaagaacucag

SEQ ID NO: 621538 - RNA, 19 nt, Artificial Sequence
  Description of Artificial Sequence: Synthetic oligonucleotide
  Sense strand starting at position 2905 of SEQ ID NO: 585206
ugaguucuuuacccauaca

SEQ ID NO: 621539 - RNA, 19 nt, Artificial Sequence
  Description of Artificial Sequence: Synthetic oligonucleotide
  Antisense strand to SEQ ID NO: 621538
uguauggguaaagaacuca

SEQ ID NO: 621540 - RNA, 19 nt, Artificial Sequence
  Description of Artificial Sequence: Synthetic oligonucleotide
  Sense strand starting at position 3021 of SEQ ID NO: 585206
ccgcuugugcagguauaua

SEQ ID NO: 621541 - RNA, 19 nt, Artificial Sequence
  Description of Artificial Sequence: Synthetic oligonucleotide
  Antisense strand to SEQ ID NO: 621540
uauauaccugcacaagcgg

SEQ ID NO: 621542 - RNA, 19 nt, Artificial Sequence
  Description of Artificial Sequence: Synthetic oligonucleotide
  Sense strand starting at position 3236 of SEQ ID NO: 585206
ccgacucuuccugaggaua

SEQ ID NO: 621543 - RNA, 19 nt, Artificial Sequence
  Description of Artificial Sequence: Synthetic oligonucleotide
  Antisense strand to SEQ ID NO: 621542
uauccucaggaagagucgg

SEQ ID NO: 621544 - RNA, 19 nt, Artificial Sequence
  Description of Artificial Sequence: Synthetic oligonucleotide
  Sense strand starting at position 3340 of SEQ ID NO: 585206
guggguuucaccggaggaa

SEQ ID NO: 621545 - RNA, 19 nt, Artificial Sequence
  Description of Artificial Sequence: Synthetic oligonucleotide
  Antisense strand to SEQ ID NO: 621544
uuccuccggugaaacccac

SEQ ID NO: 621546 - RNA, 19 nt, Artificial Sequence
  Description of Artificial Sequence: Synthetic oligonucleotide
  Sense strand starting at position 3605 of SEQ ID NO: 585206
acccaaggcuugucuauua

SEQ ID NO: 621547 - RNA, 19 nt, Artificial Sequence
  Description of Artificial Sequence: Synthetic oligonucleotide
  Antisense strand to SEQ ID NO: 621546
uaauagacaagccuugggu

SEQ ID NO: 621548 - RNA, 19 nt, Artificial Sequence
  Description of Artificial Sequence: Synthetic oligonucleotide
  Sense strand starting at position 3636 of SEQ ID NO: 585206
aaaucagucguuugauaga

SEQ ID NO: 621549 - RNA, 19 nt, Artificial Sequence
  Description of Artificial Sequence: Synthetic oligonucleotide
  Antisense strand to SEQ ID NO: 621548
ucuaucaaacgacugauuu

SEQ ID NO: 621550 - RNA, 19 nt, Artificial Sequence
  Description of Artificial Sequence: Synthetic oligonucleotide
  Sense strand starting at position 3727 of SEQ ID NO: 585206
gcugccagauacgugaaua

SEQ ID NO: 621551 - RNA, 19 nt, Artificial Sequence
  Description of Artificial Sequence: Synthetic oligonucleotide
  Antisense strand to SEQ ID NO: 621550
uauucacguaucuggcagc

SEQ ID NO: 621552 - RNA, 19 nt, Artificial Sequence
  Description of Artificial Sequence: Synthetic oligonucleotide
  Sense strand starting at position 3728 of SEQ ID NO: 585206
cugccagauacgugaauag

SEQ ID NO: 621553 - RNA, 19 nt, Artificial Sequence
  Description of Artificial Sequence: Synthetic oligonucleotide
  Antisense strand to SEQ ID NO: 621552
cuauucacguaucuggcag

SEQ ID NO: 621554 - RNA, 19 nt, Artificial Sequence
  Description of Artificial Sequence: Synthetic oligonucleotide
  Sense strand starting at position 3735 of SEQ ID NO: 585206
auacgugaauagucagaca

SEQ ID NO: 621555 - RNA, 19 nt, Artificial Sequence
  Description of Artificial Sequence: Synthetic oligonucleotide
  Antisense strand to SEQ ID NO: 621554
ugucugacuauucacguau

SEQ ID NO: 621556 - RNA, 19 nt, Artificial Sequence
  Description of Artificial Sequence: Synthetic oligonucleotide
  Sense strand starting at position 3794 of SEQ ID NO: 585206
gguagauaucuuuguauau

SEQ ID NO: 621557 - RNA, 19 nt, Artificial Sequence
  Description of Artificial Sequence: Synthetic oligonucleotide
  Antisense strand to SEQ ID NO: 621556
auauacaaagauaucuacc

SEQ ID NO: 621558 - RNA, 19 nt, Artificial Sequence
  Description of Artificial Sequence: Synthetic oligonucleotide
  Sense strand starting at position 3840 of SEQ ID NO: 585206
ucuuucugcgaguaaaguc

SEQ ID NO: 621559 - RNA, 19 nt, Artificial Sequence
  Description of Artificial Sequence: Synthetic oligonucleotide
  Antisense strand to SEQ ID NO: 621558
gacuuuacucgcagaaaga

SEQ ID NO: 621560 - RNA, 19 nt, Artificial Sequence
  Description of Artificial Sequence: Synthetic oligonucleotide
  Sense strand starting at position 3848 of SEQ ID NO: 585206
cgaguaaagucccuacaga

SEQ ID NO: 621561 - RNA, 19 nt, Artificial Sequence
  Description of Artificial Sequence: Synthetic oligonucleotide
  Antisense strand to SEQ ID NO: 621560
ucuguagggacuuuacucg

SEQ ID NO: 621562 - RNA, 19 nt, Artificial Sequence
  Description of Artificial Sequence: Synthetic oligonucleotide
  Sense strand starting at position 3906 of SEQ ID NO: 585206
aaggcucuauuaguagauu

SEQ ID NO: 621563 - RNA, 19 nt, Artificial Sequence
  Description of Artificial Sequence: Synthetic oligonucleotide
  Antisense strand to SEQ ID NO: 621562
aaucuacuaauagagccuu

SEQ ID NO: 621564 - RNA, 19 nt, Artificial Sequence
  Description of Artificial Sequence: Synthetic oligonucleotide
  Sense strand starting at position 3909 of SEQ ID NO: 585206
gcucuauuaguagauugca

SEQ ID NO: 621565 - RNA, 19 nt, Artificial Sequence
  Description of Artificial Sequence: Synthetic oligonucleotide
  Antisense strand to SEQ ID NO: 621564
ugcaaucuacuaauagagc

SEQ ID NO: 621566 - RNA, 19 nt, Artificial Sequence
  Description of Artificial Sequence: Synthetic oligonucleotide
  Sense strand starting at position 3917 of SEQ ID NO: 585206
aguagauugcaagggaaau

SEQ ID NO: 621567 - RNA, 19 nt, Artificial Sequence
  Description of Artificial Sequence: Synthetic oligonucleotide
  Antisense strand to SEQ ID NO: 621566
auuucccuugcaaucuacu

SEQ ID NO: 621568 - RNA, 19 nt, Artificial Sequence
  Description of Artificial Sequence: Synthetic oligonucleotide
  Sense strand starting at position 3918 of SEQ ID NO: 585206
guagauugcaagggaaauc

SEQ ID NO: 621569 - RNA, 19 nt, Artificial Sequence
  Description of Artificial Sequence: Synthetic oligonucleotide
  Antisense strand to SEQ ID NO: 621568
gauuucccuugcaaucuac

SEQ ID NO: 621570 - RNA, 19 nt, Artificial Sequence
  Description of Artificial Sequence: Synthetic oligonucleotide
  Sense strand starting at position 3974 of SEQ ID NO: 585206
aggcaugcccauuaugaau

SEQ ID NO: 621571 - RNA, 19 nt, Artificial Sequence
  Description of Artificial Sequence: Synthetic oligonucleotide
  Antisense strand to SEQ ID NO: 621570
auucauaaugggcaugccu

SEQ ID NO: 621572 - RNA, 19 nt, Artificial Sequence
  Description of Artificial Sequence: Synthetic oligonucleotide
  Sense strand starting at position 975 of SEQ ID NO: 585207
uuuggaaacucauuguaaa

SEQ ID NO: 621573 - RNA, 19 nt, Artificial Sequence
  Description of Artificial Sequence: Synthetic oligonucleotide
  Antisense strand to SEQ ID NO: 621572
uuuacaaugaguuuccaaa

SEQ ID NO: 621574 - RNA, 19 nt, Artificial Sequence
  Description of Artificial Sequence: Synthetic oligonucleotide
  Sense strand starting at position 976 of SEQ ID NO: 585207
uuggaaacucauuguaaag

SEQ ID NO: 621575 - RNA, 19 nt, Artificial Sequence
  Description of Artificial Sequence: Synthetic oligonucleotide
  Antisense strand to SEQ ID NO: 621574
cuuuacaaugaguuuccaa

SEQ ID NO: 621576 - RNA, 19 nt, Artificial Sequence
  Description of Artificial Sequence: Synthetic oligonucleotide
  Sense strand starting at position 1203 of SEQ ID NO: 585207
guguauguucaagaagaag

SEQ ID NO: 621577 - RNA, 19 nt, Artificial Sequence
  Description of Artificial Sequence: Synthetic oligonucleotide
  Antisense strand to SEQ ID NO: 621576
cuucuucuugaacauacac

SEQ ID NO: 621578 - RNA, 19 nt, Artificial Sequence
  Description of Artificial Sequence: Synthetic oligonucleotide
  Sense strand starting at position 1227 of SEQ ID NO: 585207
cagauaagguaacuuguuu

SEQ ID NO: 621579 - RNA, 19 nt, Artificial Sequence
  Description of Artificial Sequence: Synthetic oligonucleotide
  Antisense strand to SEQ ID NO: 621578
aaacaaguuaccuuaucug

SEQ ID NO: 621580 - RNA, 19 nt, Artificial Sequence
  Description of Artificial Sequence: Synthetic oligonucleotide
  Sense strand starting at position 1486 of SEQ ID NO: 585207
cucugaguucuuuacccau

SEQ ID NO: 621581 - RNA, 19 nt, Artificial Sequence
  Description of Artificial Sequence: Synthetic oligonucleotide
  Antisense strand to SEQ ID NO: 621580
auggguaaagaacucagag

SEQ ID NO: 621582 - RNA, 19 nt, Artificial Sequence
  Description of Artificial Sequence: Synthetic oligonucleotide
  Sense strand starting at position 1489 of SEQ ID NO: 585207
ugaguucuuuacccauaca

SEQ ID NO: 621583 - RNA, 19 nt, Artificial Sequence
  Description of Artificial Sequence: Synthetic oligonucleotide
  Antisense strand to SEQ ID NO: 621582
uguauggguaaagaacuca

SEQ ID NO: 621584 - RNA, 19 nt, Artificial Sequence
  Description of Artificial Sequence: Synthetic oligonucleotide
  Sense strand starting at position 1605 of SEQ ID NO: 585207
ccgcuugugcagguauaua

SEQ ID NO: 621585 - RNA, 19 nt, Artificial Sequence
  Description of Artificial Sequence: Synthetic oligonucleotide
  Antisense strand to SEQ ID NO: 621584
uauauaccugcacaagcgg

SEQ ID NO: 621586 - RNA, 19 nt, Artificial Sequence
  Description of Artificial Sequence: Synthetic oligonucleotide
  Sense strand starting at position 1820 of SEQ ID NO: 585207
ccgacucuuccugaggaua

SEQ ID NO: 621587 - RNA, 19 nt, Artificial Sequence
  Description of Artificial Sequence: Synthetic oligonucleotide
  Antisense strand to SEQ ID NO: 621586
uauccucaggaagagucgg

SEQ ID NO: 621588 - RNA, 19 nt, Artificial Sequence
  Description of Artificial Sequence: Synthetic oligonucleotide
  Sense strand starting at position 2220 of SEQ ID NO: 585207
aaaucagucguuugauaga

SEQ ID NO: 621589 - RNA, 19 nt, Artificial Sequence
  Description of Artificial Sequence: Synthetic oligonucleotide
  Antisense strand to SEQ ID NO: 621588
ucuaucaaacgacugauuu

SEQ ID NO: 621590 - RNA, 19 nt, Artificial Sequence
  Description of Artificial Sequence: Synthetic oligonucleotide
  Sense strand starting at position 2319 of SEQ ID NO: 585207
auacgugaauagucagaca

SEQ ID NO: 621591 - RNA, 19 nt, Artificial Sequence
  Description of Artificial Sequence: Synthetic oligonucleotide
  Antisense strand to SEQ ID NO: 621590
ugucugacuauucacguau

SEQ ID NO: 621592 - RNA, 19 nt, Artificial Sequence
  Description of Artificial Sequence: Synthetic oligonucleotide
  Sense strand starting at position 2378 of SEQ ID NO: 585207
gguagauaucuuuguauau

SEQ ID NO: 621593 - RNA, 19 nt, Artificial Sequence
  Description of Artificial Sequence: Synthetic oligonucleotide
  Antisense strand to SEQ ID NO: 621592
auauacaaagauaucuacc

SEQ ID NO: 621594 - RNA, 19 nt, Artificial Sequence
  Description of Artificial Sequence: Synthetic oligonucleotide
  Sense strand starting at position 2432 of SEQ ID NO: 585207
cgaguaaagucccuacaga

SEQ ID NO: 621595 - RNA, 19 nt, Artificial Sequence
  Description of Artificial Sequence: Synthetic oligonucleotide
  Antisense strand to SEQ ID NO: 621594
ucuguagggacuuuacucg

SEQ ID NO: 621596 - RNA, 19 nt, Artificial Sequence
  Description of Artificial Sequence: Synthetic oligonucleotide
  Sense strand starting at position 2490 of SEQ ID NO: 585207
aaggcucuauuaguagauu

SEQ ID NO: 621597 - RNA, 19 nt, Artificial Sequence
  Description of Artificial Sequence: Synthetic oligonucleotide
  Antisense strand to SEQ ID NO: 621596
aaucuacuaauagagccuu

SEQ ID NO: 621598 - RNA, 19 nt, Artificial Sequence
  Description of Artificial Sequence: Synthetic oligonucleotide
  Sense strand starting at position 2501 of SEQ ID NO: 585207
aguagauugcaagggaaau

SEQ ID NO: 621599 - RNA, 19 nt, Artificial Sequence
  Description of Artificial Sequence: Synthetic oligonucleotide
  Antisense strand to SEQ ID NO: 621598
auuucccuugcaaucuacu

SEQ ID NO: 621600 - RNA, 19 nt, Artificial Sequence
  Description of Artificial Sequence: Synthetic oligonucleotide
  Sense strand starting at position 2502 of SEQ ID NO: 585207
guagauugcaagggaaauc

SEQ ID NO: 621601 - RNA, 19 nt, Artificial Sequence
  Description of Artificial Sequence: Synthetic oligonucleotide
  Antisense strand to SEQ ID NO: 621600
gauuucccuugcaaucuac

SEQ ID NO: 621602 - RNA, 19 nt, Artificial Sequence
  Description of Artificial Sequence: Synthetic oligonucleotide
  Sense strand starting at position 2558 of SEQ ID NO: 585207
aggcaugcccauuaugaau

SEQ ID NO: 621603 - RNA, 19 nt, Artificial Sequence
  Description of Artificial Sequence: Synthetic oligonucleotide
  Antisense strand to SEQ ID NO: 621602
auucauaaugggcaugccu

SEQ ID NO: 621604 - RNA, 19 nt, Artificial Sequence
  Description of Artificial Sequence: Synthetic oligonucleotide
  Sense strand starting at position 2572 of SEQ ID NO: 585207
ugaauuaagguaugccaaa

SEQ ID NO: 621605 - RNA, 19 nt, Artificial Sequence
  Description of Artificial Sequence: Synthetic oligonucleotide
  Antisense strand to SEQ ID NO: 621604
uuuggcauaccuuaauuca

SEQ ID NO: 621606 - RNA, 19 nt, Artificial Sequence
  Description of Artificial Sequence: Synthetic oligonucleotide
  Sense strand starting at position 2770 of SEQ ID NO: 585207
aucacauuccucugggaac

SEQ ID NO: 621607 - RNA, 19 nt, Artificial Sequence
  Description of Artificial Sequence: Synthetic oligonucleotide
  Antisense strand to SEQ ID NO: 621606
guucccagaggaaugugau

SEQ ID NO: 621608 - RNA, 19 nt, Artificial Sequence
  Description of Artificial Sequence: Synthetic oligonucleotide
  Sense strand starting at position 2867 of SEQ ID NO: 585207
agcuuucuauuugugucau

SEQ ID NO: 621609 - RNA, 19 nt, Artificial Sequence
  Description of Artificial Sequence: Synthetic oligonucleotide
  Antisense strand to SEQ ID NO: 621608
augacacaaauagaaagcu

SEQ ID NO: 621610 - RNA, 19 nt, Artificial Sequence
  Description of Artificial Sequence: Synthetic oligonucleotide
  Sense strand starting at position 2873 of SEQ ID NO: 585207
cuauuugugucaucugcag

SEQ ID NO: 621611 - RNA, 19 nt, Artificial Sequence
  Description of Artificial Sequence: Synthetic oligonucleotide
  Antisense strand to SEQ ID NO: 621610
cugcagaugacacaaauag

SEQ ID NO: 621612 - RNA, 19 nt, Artificial Sequence
  Description of Artificial Sequence: Synthetic oligonucleotide
  Sense strand starting at position 2875 of SEQ ID NO: 585207
auuugugucaucugcagag

SEQ ID NO: 621613 - RNA, 19 nt, Artificial Sequence
  Description of Artificial Sequence: Synthetic oligonucleotide
  Antisense strand to SEQ ID NO: 621612
cucugcagaugacacaaau

SEQ ID NO: 621614 - RNA, 19 nt, Artificial Sequence
  Description of Artificial Sequence: Synthetic oligonucleotide
  Sense strand starting at position 2896 of SEQ ID NO: 585207
gagagaucagcuuacguug

SEQ ID NO: 621615 - RNA, 19 nt, Artificial Sequence
  Description of Artificial Sequence: Synthetic oligonucleotide
  Antisense strand to SEQ ID NO: 621614
caacguaagcugaucucuc

SEQ ID NO: 621616 - RNA, 19 nt, Artificial Sequence
  Description of Artificial Sequence: Synthetic oligonucleotide
  Sense strand starting at position 2939 of SEQ ID NO: 585207
cgccuugcucaggucauua

SEQ ID NO: 621617 - RNA, 19 nt, Artificial Sequence
  Description of Artificial Sequence: Synthetic oligonucleotide
  Antisense strand to SEQ ID NO: 621616
uaaugaccugagcaaggcg

SEQ ID NO: 621618 - RNA, 19 nt, Artificial Sequence
  Description of Artificial Sequence: Synthetic oligonucleotide
  Sense strand starting at position 2944 of SEQ ID NO: 585207
ugcucaggucauuauuaua

SEQ ID NO: 621619 - RNA, 19 nt, Artificial Sequence
  Description of Artificial Sequence: Synthetic oligonucleotide
  Antisense strand to SEQ ID NO: 621618
uauaauaaugaccugagca

SEQ ID NO: 621620 - RNA, 19 nt, Artificial Sequence
  Description of Artificial Sequence: Synthetic oligonucleotide
  Sense strand starting at position 3280 of SEQ ID NO: 585207
guaaguucugaucaucaca

SEQ ID NO: 621621 - RNA, 19 nt, Artificial Sequence
  Description of Artificial Sequence: Synthetic oligonucleotide
  Antisense strand to SEQ ID NO: 621620
ugugaugaucagaacuuac

SEQ ID NO: 621622 - RNA, 19 nt, Artificial Sequence
  Description of Artificial Sequence: Synthetic oligonucleotide
  Sense strand starting at position 3318 of SEQ ID NO: 585207
cugcuucuacccuaggaau

SEQ ID NO: 621623 - RNA, 19 nt, Artificial Sequence
  Description of Artificial Sequence: Synthetic oligonucleotide
  Antisense strand to SEQ ID NO: 621622
auuccuaggguagaagcag

SEQ ID NO: 621624 - RNA, 19 nt, Artificial Sequence
  Description of Artificial Sequence: Synthetic oligonucleotide
  Sense strand starting at position 3320 of SEQ ID NO: 585207
gcuucuacccuaggaauau

SEQ ID NO: 621625 - RNA, 19 nt, Artificial Sequence
  Description of Artificial Sequence: Synthetic oligonucleotide
  Antisense strand to SEQ ID NO: 621624
auauuccuaggguagaagc

SEQ ID NO: 621626 - RNA, 19 nt, Artificial Sequence
  Description of Artificial Sequence: Synthetic oligonucleotide
  Sense strand starting at position 3331 of SEQ ID NO: 585207
aggaauaugucuguucgaa

SEQ ID NO: 621627 - RNA, 19 nt, Artificial Sequence
  Description of Artificial Sequence: Synthetic oligonucleotide
  Antisense strand to SEQ ID NO: 621626
uucgaacagacauauuccu

SEQ ID NO: 621628 - RNA, 19 nt, Artificial Sequence
  Description of Artificial Sequence: Synthetic oligonucleotide
  Sense strand starting at position 3333 of SEQ ID NO: 585207
gaauaugucuguucgaaga

SEQ ID NO: 621629 - RNA, 19 nt, Artificial Sequence
  Description of Artificial Sequence: Synthetic oligonucleotide
  Antisense strand to SEQ ID NO: 621628
ucuucgaacagacauauuc

SEQ ID NO: 621630 - RNA, 19 nt, Artificial Sequence
  Description of Artificial Sequence: Synthetic oligonucleotide
  Sense strand starting at position 3431 of SEQ ID NO: 585207
cccauuagagugugauaag

SEQ ID NO: 621631 - RNA, 19 nt, Artificial Sequence
  Description of Artificial Sequence: Synthetic oligonucleotide
  Antisense strand to SEQ ID NO: 621630
cuuaucacacucuaauggg

SEQ ID NO: 621632 - RNA, 19 nt, Artificial Sequence
  Description of Artificial Sequence: Synthetic oligonucleotide
  Sense strand starting at position 3441 of SEQ ID NO: 585207
ugugauaagcucuaaaugu

SEQ ID NO: 621633 - RNA, 19 nt, Artificial Sequence
  Description of Artificial Sequence: Synthetic oligonucleotide
  Antisense strand to SEQ ID NO: 621632
acauuuagagcuuaucaca

SEQ ID NO: 621634 - RNA, 19 nt, Artificial Sequence
  Description of Artificial Sequence: Synthetic oligonucleotide
  Sense strand starting at position 3481 of SEQ ID NO: 585207
agauauagugaaugugcaa

SEQ ID NO: 621635 - RNA, 19 nt, Artificial Sequence
  Description of Artificial Sequence: Synthetic oligonucleotide
  Antisense strand to SEQ ID NO: 621634
uugcacauucacuauaucu

SEQ ID NO: 621636 - RNA, 19 nt, Artificial Sequence
  Description of Artificial Sequence: Synthetic oligonucleotide
  Sense strand starting at position 3484 of SEQ ID NO: 585207
uauagugaaugugcaaaga

SEQ ID NO: 621637 - RNA, 19 nt, Artificial Sequence
  Description of Artificial Sequence: Synthetic oligonucleotide
  Antisense strand to SEQ ID NO: 621636
ucuuugcacauucacuaua

SEQ ID NO: 621638 - RNA, 19 nt, Artificial Sequence
  Description of Artificial Sequence: Synthetic oligonucleotide
  Sense strand starting at position 3494 of SEQ ID NO: 585207
gugcaaagauuucugugca

SEQ ID NO: 621639 - RNA, 19 nt, Artificial Sequence
  Description of Artificial Sequence: Synthetic oligonucleotide
  Antisense strand to SEQ ID NO: 621638
ugcacagaaaucuuugcac

SEQ ID NO: 621640 - RNA, 19 nt, Artificial Sequence
  Description of Artificial Sequence: Synthetic oligonucleotide
  Sense strand starting at position 3548 of SEQ ID NO: 585207
aaaguaaugucucugaagu

SEQ ID NO: 621641 - RNA, 19 nt, Artificial Sequence
  Description of Artificial Sequence: Synthetic oligonucleotide
  Antisense strand to SEQ ID NO: 621640
acuucagagacauuacuuu

SEQ ID NO: 621642 - RNA, 19 nt, Artificial Sequence
  Description of Artificial Sequence: Synthetic oligonucleotide
  Sense strand starting at position 3615 of SEQ ID NO: 585207
aucacauugcuguacugaa

SEQ ID NO: 621643 - RNA, 19 nt, Artificial Sequence
  Description of Artificial Sequence: Synthetic oligonucleotide
  Antisense strand to SEQ ID NO: 621642
uucaguacagcaaugugau

SEQ ID NO: 621644 - RNA, 19 nt, Artificial Sequence
  Description of Artificial Sequence: Synthetic oligonucleotide
  Sense strand starting at position 3622 of SEQ ID NO: 585207
ugcuguacugaaggaauaa

SEQ ID NO: 621645 - RNA, 19 nt, Artificial Sequence
  Description of Artificial Sequence: Synthetic oligonucleotide
  Antisense strand to SEQ ID NO: 621644
uuauuccuucaguacagca

SEQ ID NO: 621646 - RNA, 19 nt, Artificial Sequence
  Description of Artificial Sequence: Synthetic oligonucleotide
  Sense strand starting at position 3731 of SEQ ID NO: 585207
gacgaugaauuugaggauu

SEQ ID NO: 621647 - RNA, 19 nt, Artificial Sequence
  Description of Artificial Sequence: Synthetic oligonucleotide
  Antisense strand to SEQ ID NO: 621646
aauccucaaauucaucguc

SEQ ID NO: 621648 - RNA, 19 nt, Artificial Sequence
  Description of Artificial Sequence: Synthetic oligonucleotide
  Sense strand starting at position 3739 of SEQ ID NO: 585207
auuugaggauuauaacaug

SEQ ID NO: 621649 - RNA, 19 nt, Artificial Sequence
  Description of Artificial Sequence: Synthetic oligonucleotide
  Antisense strand to SEQ ID NO: 621648
cauguuauaauccucaaau

SEQ ID NO: 621650 - RNA, 19 nt, Artificial Sequence
  Description of Artificial Sequence: Synthetic oligonucleotide
  Sense strand starting at position 3977 of SEQ ID NO: 585207
auaauacaugugcagacau

SEQ ID NO: 621651 - RNA, 19 nt, Artificial Sequence
  Description of Artificial Sequence: Synthetic oligonucleotide
  Antisense strand to SEQ ID NO: 621650
augucugcacauguauuau

SEQ ID NO: 621652 - RNA, 19 nt, Artificial Sequence
  Description of Artificial Sequence: Synthetic oligonucleotide
  Sense strand starting at position 319 of SEQ ID NO: 585208
ucccgaguguccggagaga

SEQ ID NO: 621653 - RNA, 19 nt, Artificial Sequence
  Description of Artificial Sequence: Synthetic oligonucleotide
  Antisense strand to SEQ ID NO: 621652
ucucuccggacacucggga

SEQ ID NO: 621654 - RNA, 19 nt, Artificial Sequence
  Description of Artificial Sequence: Synthetic oligonucleotide
  Sense strand starting at position 1609 of SEQ ID NO: 585208
agaccaauccggcaaguuu

SEQ ID NO: 621655 - RNA, 19 nt, Artificial Sequence
  Description of Artificial Sequence: Synthetic oligonucleotide
  Antisense strand to SEQ ID NO: 621654
aaacuugccggauuggucu

SEQ ID NO: 621656 - RNA, 19 nt, Artificial Sequence
  Description of Artificial Sequence: Synthetic oligonucleotide
  Sense strand starting at position 1618 of SEQ ID NO: 585208
cggcaaguuugcgcugaaa

SEQ ID NO: 621657 - RNA, 19 nt, Artificial Sequence
  Description of Artificial Sequence: Synthetic oligonucleotide
  Antisense strand to SEQ ID NO: 621656
uuucagcgcaaacuugccg

SEQ ID NO: 621658 - RNA, 19 nt, Artificial Sequence
  Description of Artificial Sequence: Synthetic oligonucleotide
  Sense strand starting at position 1620 of SEQ ID NO: 585208
gcaaguuugcgcugaaagu

SEQ ID NO: 621659 - RNA, 19 nt, Artificial Sequence
  Description of Artificial Sequence: Synthetic oligonucleotide
  Antisense strand to SEQ ID NO: 621658
acuuucagcgcaaacuugc

SEQ ID NO: 621660 - RNA, 19 nt, Artificial Sequence
  Description of Artificial Sequence: Synthetic oligonucleotide
  Sense strand starting at position 1621 of SEQ ID NO: 585208
caaguuugcgcugaaagug

SEQ ID NO: 621661 - RNA, 19 nt, Artificial Sequence
  Description of Artificial Sequence: Synthetic oligonucleotide
  Antisense strand to SEQ ID NO: 621660
cacuuucagcgcaaacuug

SEQ ID NO: 621662 - RNA, 19 nt, Artificial Sequence
  Description of Artificial Sequence: Synthetic oligonucleotide
  Sense strand starting at position 2283 of SEQ ID NO: 585208
cagugagacucgggaagaa

SEQ ID NO: 621663 - RNA, 19 nt, Artificial Sequence
  Description of Artificial Sequence: Synthetic oligonucleotide
  Antisense strand to SEQ ID NO: 621662
uucuucccgagucucacug

SEQ ID NO: 621664 - RNA, 19 nt, Artificial Sequence
  Description of Artificial Sequence: Synthetic oligonucleotide
  Sense strand starting at position 2359 of SEQ ID NO: 585208
ucaggagaguguugcuaga

SEQ ID NO: 621665 - RNA, 19 nt, Artificial Sequence
  Description of Artificial Sequence: Synthetic oligonucleotide
  Antisense strand to SEQ ID NO: 621664
ucuagcaacacucuccuga

SEQ ID NO: 621666 - RNA, 19 nt, Artificial Sequence
  Description of Artificial Sequence: Synthetic oligonucleotide
  Sense strand starting at position 2411 of SEQ ID NO: 585208
cccucuuaggauugcaaga

SEQ ID NO: 621667 - RNA, 19 nt, Artificial Sequence
  Description of Artificial Sequence: Synthetic oligonucleotide
  Antisense strand to SEQ ID NO: 621666
ucuugcaauccuaagaggg

SEQ ID NO: 621668 - RNA, 19 nt, Artificial Sequence
  Description of Artificial Sequence: Synthetic oligonucleotide
  Sense strand starting at position 2460 of SEQ ID NO: 585208
caauuagagccgugaugug

SEQ ID NO: 621669 - RNA, 19 nt, Artificial Sequence
  Description of Artificial Sequence: Synthetic oligonucleotide
  Antisense strand to SEQ ID NO: 621668
cacaucacggcucuaauug

SEQ ID NO: 621670 - RNA, 19 nt, Artificial Sequence
  Description of Artificial Sequence: Synthetic oligonucleotide
  Sense strand starting at position 2620 of SEQ ID NO: 585208
cuaccuugugcuugacgau

SEQ ID NO: 621671 - RNA, 19 nt, Artificial Sequence
  Description of Artificial Sequence: Synthetic oligonucleotide
  Antisense strand to SEQ ID NO: 621670
aucgucaagcacaagguag

SEQ ID NO: 621672 - RNA, 19 nt, Artificial Sequence
  Description of Artificial Sequence: Synthetic oligonucleotide
  Sense strand starting at position 2912 of SEQ ID NO: 585208
gcguaagcucaaggaaugu

SEQ ID NO: 621673 - RNA, 19 nt, Artificial Sequence
  Description of Artificial Sequence: Synthetic oligonucleotide
  Antisense strand to SEQ ID NO: 621672
acauuccuugagcuuacgc

SEQ ID NO: 621674 - RNA, 19 nt, Artificial Sequence
  Description of Artificial Sequence: Synthetic oligonucleotide
  Sense strand starting at position 2921 of SEQ ID NO: 585208
caaggaauguuuggugagu

SEQ ID NO: 621675 - RNA, 19 nt, Artificial Sequence
  Description of Artificial Sequence: Synthetic oligonucleotide
  Antisense strand to SEQ ID NO: 621674
acucaccaaacauuccuug

SEQ ID NO: 621676 - RNA, 19 nt, Artificial Sequence
  Description of Artificial Sequence: Synthetic oligonucleotide
  Sense strand starting at position 2923 of SEQ ID NO: 585208
aggaauguuuggugaguga

SEQ ID NO: 621677 - RNA, 19 nt, Artificial Sequence
  Description of Artificial Sequence: Synthetic oligonucleotide
  Antisense strand to SEQ ID NO: 621676
ucacucaccaaacauuccu

SEQ ID NO: 621678 - RNA, 19 nt, Artificial Sequence
  Description of Artificial Sequence: Synthetic oligonucleotide
  Sense strand starting at position 2927 of SEQ ID NO: 585208
auguuuggugagugaauaa

SEQ ID NO: 621679 - RNA, 19 nt, Artificial Sequence
  Description of Artificial Sequence: Synthetic oligonucleotide
  Antisense strand to SEQ ID NO: 621678
uuauucacucaccaaacau

SEQ ID NO: 621680 - RNA, 19 nt, Artificial Sequence
  Description of Artificial Sequence: Synthetic oligonucleotide
  Sense strand starting at position 2938 of SEQ ID NO: 585208
gugaauaaauguuggcaaa

SEQ ID NO: 621681 - RNA, 19 nt, Artificial Sequence
  Description of Artificial Sequence: Synthetic oligonucleotide
  Antisense strand to SEQ ID NO: 621680
uuugccaacauuuauucac

SEQ ID NO: 621682 - RNA, 19 nt, Artificial Sequence
  Description of Artificial Sequence: Synthetic oligonucleotide
  Sense strand starting at position 2939 of SEQ ID NO: 585208
ugaauaaauguuggcaaag

SEQ ID NO: 621683 - RNA, 19 nt, Artificial Sequence
  Description of Artificial Sequence: Synthetic oligonucleotide
  Antisense strand to SEQ ID NO: 621682
cuuugccaacauuuauuca

SEQ ID NO: 621684 - RNA, 19 nt, Artificial Sequence
  Description of Artificial Sequence: Synthetic oligonucleotide
  Sense strand starting at position 3146 of SEQ ID NO: 585208
aguucugcccuugaggagu

SEQ ID NO: 621685 - RNA, 19 nt, Artificial Sequence
  Description of Artificial Sequence: Synthetic oligonucleotide
  Antisense strand to SEQ ID NO: 621684
acuccucaagggcagaacu

SEQ ID NO: 621686 - RNA, 19 nt, Artificial Sequence
  Description of Artificial Sequence: Synthetic oligonucleotide
  Sense strand starting at position 3215 of SEQ ID NO: 585208
agcaaaggccuugaaaguu

SEQ ID NO: 621687 - RNA, 19 nt, Artificial Sequence
  Description of Artificial Sequence: Synthetic oligonucleotide
  Antisense strand to SEQ ID NO: 621686
aacuuucaaggccuuugcu

SEQ ID NO: 621688 - RNA, 19 nt, Artificial Sequence
  Description of Artificial Sequence: Synthetic oligonucleotide
  Sense strand starting at position 3292 of SEQ ID NO: 585208
ucaaguuauuccuggagag

SEQ ID NO: 621689 - RNA, 19 nt, Artificial Sequence
  Description of Artificial Sequence: Synthetic oligonucleotide
  Antisense strand to SEQ ID NO: 621688
cucuccaggaauaacuuga

SEQ ID NO: 621690 - RNA, 19 nt, Artificial Sequence
  Description of Artificial Sequence: Synthetic oligonucleotide
  Sense strand starting at position 3293 of SEQ ID NO: 585208
caaguuauuccuggagagg

SEQ ID NO: 621691 - RNA, 19 nt, Artificial Sequence
  Description of Artificial Sequence: Synthetic oligonucleotide
  Antisense strand to SEQ ID NO: 621690
ccucuccaggaauaacuug

SEQ ID NO: 621692 - RNA, 19 nt, Artificial Sequence
  Description of Artificial Sequence: Synthetic oligonucleotide
  Sense strand starting at position 3308 of SEQ ID NO: 585208
gaggcaguguucuugggaa

SEQ ID NO: 621693 - RNA, 19 nt, Artificial Sequence
  Description of Artificial Sequence: Synthetic oligonucleotide
  Antisense strand to SEQ ID NO: 621692
uucccaagaacacugccuc

SEQ ID NO: 621694 - RNA, 19 nt, Artificial Sequence
  Description of Artificial Sequence: Synthetic oligonucleotide
  Sense strand starting at position 3310 of SEQ ID NO: 585208
ggcaguguucuugggaaca

SEQ ID NO: 621695 - RNA, 19 nt, Artificial Sequence
  Description of Artificial Sequence: Synthetic oligonucleotide
  Antisense strand to SEQ ID NO: 621694
uguucccaagaacacugcc

SEQ ID NO: 621696 - RNA, 19 nt, Artificial Sequence
  Description of Artificial Sequence: Synthetic oligonucleotide
  Sense strand starting at position 3361 of SEQ ID NO: 585208
ugugcaugucugggucaca

SEQ ID NO: 621697 - RNA, 19 nt, Artificial Sequence
  Description of Artificial Sequence: Synthetic oligonucleotide
  Antisense strand to SEQ ID NO: 621696
ugugacccagacaugcaca

SEQ ID NO: 621698 - RNA, 19 nt, Artificial Sequence
  Description of Artificial Sequence: Synthetic oligonucleotide
  Sense strand starting at position 3362 of SEQ ID NO: 585208
gugcaugucugggucacau

SEQ ID NO: 621699 - RNA, 19 nt, Artificial Sequence
  Description of Artificial Sequence: Synthetic oligonucleotide
  Antisense strand to SEQ ID NO: 621698
augugacccagacaugcac

SEQ ID NO: 621700 - RNA, 19 nt, Artificial Sequence
  Description of Artificial Sequence: Synthetic oligonucleotide
  Sense strand starting at position 3372 of SEQ ID NO: 585208
gggucacauugcucaaggu

SEQ ID NO: 621701 - RNA, 19 nt, Artificial Sequence
  Description of Artificial Sequence: Synthetic oligonucleotide
  Antisense strand to SEQ ID NO: 621700
accuugagcaaugugaccc

SEQ ID NO: 621702 - RNA, 19 nt, Artificial Sequence
  Description of Artificial Sequence: Synthetic oligonucleotide
  Sense strand starting at position 3381 of SEQ ID NO: 585208
ugcucaagguccucaguuu

SEQ ID NO: 621703 - RNA, 19 nt, Artificial Sequence
  Description of Artificial Sequence: Synthetic oligonucleotide
  Antisense strand to SEQ ID NO: 621702
aaacugaggaccuugagca

SEQ ID NO: 621704 - RNA, 19 nt, Artificial Sequence
  Description of Artificial Sequence: Synthetic oligonucleotide
  Sense strand starting at position 3396 of SEQ ID NO: 585208
guuuccuaucuguagaaca

SEQ ID NO: 621705 - RNA, 19 nt, Artificial Sequence
  Description of Artificial Sequence: Synthetic oligonucleotide
  Antisense strand to SEQ ID NO: 621704
uguucuacagauaggaaac

SEQ ID NO: 621706 - RNA, 19 nt, Artificial Sequence
  Description of Artificial Sequence: Synthetic oligonucleotide
  Sense strand starting at position 3422 of SEQ ID NO: 585208
cgacacuaaucucaaagca

SEQ ID NO: 621707 - RNA, 19 nt, Artificial Sequence
  Description of Artificial Sequence: Synthetic oligonucleotide
  Antisense strand to SEQ ID NO: 621706
ugcuuugagauuagugucg

SEQ ID NO: 621708 - RNA, 19 nt, Artificial Sequence
  Description of Artificial Sequence: Synthetic oligonucleotide
  Sense strand starting at position 3521 of SEQ ID NO: 585208
cugccuuggucuugacaag

SEQ ID NO: 621709 - RNA, 19 nt, Artificial Sequence
  Description of Artificial Sequence: Synthetic oligonucleotide
  Antisense strand to SEQ ID NO: 621708
cuugucaagaccaaggcag

SEQ ID NO: 621710 - RNA, 19 nt, Artificial Sequence
  Description of Artificial Sequence: Synthetic oligonucleotide
  Sense strand starting at position 3522 of SEQ ID NO: 585208
ugccuuggucuugacaagu

SEQ ID NO: 621711 - RNA, 19 nt, Artificial Sequence
  Description of Artificial Sequence: Synthetic oligonucleotide
  Antisense strand to SEQ ID NO: 621710
acuugucaagaccaaggca

SEQ ID NO: 621712 - RNA, 19 nt, Artificial Sequence
  Description of Artificial Sequence: Synthetic oligonucleotide
  Sense strand starting at position 3539 of SEQ ID NO: 585208
gugacacauccugacuugu

SEQ ID NO: 621713 - RNA, 19 nt, Artificial Sequence
  Description of Artificial Sequence: Synthetic oligonucleotide
  Antisense strand to SEQ ID NO: 621712
acaagucaggaugugucac

SEQ ID NO: 621714 - RNA, 19 nt, Artificial Sequence
  Description of Artificial Sequence: Synthetic oligonucleotide
  Sense strand starting at position 3556 of SEQ ID NO: 585208
guggcugugucugcccaaa

SEQ ID NO: 621715 - RNA, 19 nt, Artificial Sequence
  Description of Artificial Sequence: Synthetic oligonucleotide
  Antisense strand to SEQ ID NO: 621714
uuugggcagacacagccac

SEQ ID NO: 621716 - RNA, 19 nt, Artificial Sequence
  Description of Artificial Sequence: Synthetic oligonucleotide
  Sense strand starting at position 3590 of SEQ ID NO: 585208
uucugaucuucucagaggu

SEQ ID NO: 621717 - RNA, 19 nt, Artificial Sequence
  Description of Artificial Sequence: Synthetic oligonucleotide
  Antisense strand to SEQ ID NO: 621716
accucugagaagaucagaa

SEQ ID NO: 621718 - RNA, 19 nt, Artificial Sequence
  Description of Artificial Sequence: Synthetic oligonucleotide
  Sense strand starting at position 3592 of SEQ ID NO: 585208
cugaucuucucagagguac

SEQ ID NO: 621719 - RNA, 19 nt, Artificial Sequence
  Description of Artificial Sequence: Synthetic oligonucleotide
  Antisense strand to SEQ ID NO: 621718
guaccucugagaagaucag

SEQ ID NO: 621720 - RNA, 19 nt, Artificial Sequence
  Description of Artificial Sequence: Synthetic oligonucleotide
  Sense strand starting at position 3812 of SEQ ID NO: 585208
uaacaugggccaugguuua

SEQ ID NO: 621721 - RNA, 19 nt, Artificial Sequence
  Description of Artificial Sequence: Synthetic oligonucleotide
  Antisense strand to SEQ ID NO: 621720
uaaaccauggcccauguua

SEQ ID NO: 621722 - RNA, 19 nt, Artificial Sequence
  Description of Artificial Sequence: Synthetic oligonucleotide
  Sense strand starting at position 3823 of SEQ ID NO: 585208
augguuuauugagagauaa

SEQ ID NO: 621723 - RNA, 19 nt, Artificial Sequence
  Description of Artificial Sequence: Synthetic oligonucleotide
  Antisense strand to SEQ ID NO: 621722
uuaucucucaauaaaccau

SEQ ID NO: 621724 - RNA, 19 nt, Artificial Sequence
  Description of Artificial Sequence: Synthetic oligonucleotide
  Sense strand starting at position 112 of SEQ ID NO: 585209
aaguuagccaggugugaac

SEQ ID NO: 621725 - RNA, 19 nt, Artificial Sequence
  Description of Artificial Sequence: Synthetic oligonucleotide
  Antisense strand to SEQ ID NO: 621724
guucacaccuggcuaacuu

SEQ ID NO: 621726 - RNA, 19 nt, Artificial Sequence
  Description of Artificial Sequence: Synthetic oligonucleotide
  Sense strand starting at position 438 of SEQ ID NO: 585209
gugucacgcucuguguuaa

SEQ ID NO: 621727 - RNA, 19 nt, Artificial Sequence
  Description of Artificial Sequence: Synthetic oligonucleotide
  Antisense strand to SEQ ID NO: 621726
uuaacacagagcgugacac

SEQ ID NO: 621728 - RNA, 19 nt, Artificial Sequence
  Description of Artificial Sequence: Synthetic oligonucleotide
  Sense strand starting at position 439 of SEQ ID NO: 585209
ugucacgcucuguguuaaa

SEQ ID NO: 621729 - RNA, 19 nt, Artificial Sequence
  Description of Artificial Sequence: Synthetic oligonucleotide
  Antisense strand to SEQ ID NO: 621728
uuuaacacagagcgugaca

SEQ ID NO: 621730 - RNA, 19 nt, Artificial Sequence
  Description of Artificial Sequence: Synthetic oligonucleotide
  Sense strand starting at position 545 of SEQ ID NO: 585209
cagguuuccucauugguaa

SEQ ID NO: 621731 - RNA, 19 nt, Artificial Sequence
  Description of Artificial Sequence: Synthetic oligonucleotide
  Antisense strand to SEQ ID NO: 621730
uuaccaaugaggaaaccug

SEQ ID NO: 621732 - RNA, 19 nt, Artificial Sequence
  Description of Artificial Sequence: Synthetic oligonucleotide
  Sense strand starting at position 548 of SEQ ID NO: 585209
guuuccucauugguaagga

SEQ ID NO: 621733 - RNA, 19 nt, Artificial Sequence
  Description of Artificial Sequence: Synthetic oligonucleotide
  Antisense strand to SEQ ID NO: 621732
uccuuaccaaugaggaaac

SEQ ID NO: 621734 - RNA, 19 nt, Artificial Sequence
  Description of Artificial Sequence: Synthetic oligonucleotide
  Sense strand starting at position 596 of SEQ ID NO: 585209
cugcgauggcccugugaga

SEQ ID NO: 621735 - RNA, 19 nt, Artificial Sequence
  Description of Artificial Sequence: Synthetic oligonucleotide
  Antisense strand to SEQ ID NO: 621734
ucucacagggccaucgcag

SEQ ID NO: 621736 - RNA, 19 nt, Artificial Sequence
  Description of Artificial Sequence: Synthetic oligonucleotide
  Sense strand starting at position 704 of SEQ ID NO: 585209
ucaccucuguggccaaauu

SEQ ID NO: 621737 - RNA, 19 nt, Artificial Sequence
  Description of Artificial Sequence: Synthetic oligonucleotide
  Antisense strand to SEQ ID NO: 621736
aauuuggccacagagguga

SEQ ID NO: 621738 - RNA, 19 nt, Artificial Sequence
  Description of Artificial Sequence: Synthetic oligonucleotide
  Sense strand starting at position 880 of SEQ ID NO: 585209
guuuacaguccuugggcaa

SEQ ID NO: 621739 - RNA, 19 nt, Artificial Sequence
  Description of Artificial Sequence: Synthetic oligonucleotide
  Antisense strand to SEQ ID NO: 621738
uugcccaaggacuguaaac

SEQ ID NO: 621740 - RNA, 19 nt, Artificial Sequence
  Description of Artificial Sequence: Synthetic oligonucleotide
  Sense strand starting at position 953 of SEQ ID NO: 585209
acggaugguccugacuaca

SEQ ID NO: 621741 - RNA, 19 nt, Artificial Sequence
  Description of Artificial Sequence: Synthetic oligonucleotide
  Antisense strand to SEQ ID NO: 621740
uguagucaggaccauccgu

SEQ ID NO: 621742 - RNA, 19 nt, Artificial Sequence
  Description of Artificial Sequence: Synthetic oligonucleotide
  Sense strand starting at position 1017 of SEQ ID NO: 585209
caggaagcucgugggaaau

SEQ ID NO: 621743 - RNA, 19 nt, Artificial Sequence
  Description of Artificial Sequence: Synthetic oligonucleotide
  Antisense strand to SEQ ID NO: 621742
auuucccacgagcuuccug

SEQ ID NO: 621744 - RNA, 19 nt, Artificial Sequence
  Description of Artificial Sequence: Synthetic oligonucleotide
  Sense strand starting at position 1027 of SEQ ID NO: 585209
gugggaaaugcgggacaaa

SEQ ID NO: 621745 - RNA, 19 nt, Artificial Sequence
  Description of Artificial Sequence: Synthetic oligonucleotide
  Antisense strand to SEQ ID NO: 621744
uuugucccgcauuucccac

SEQ ID NO: 621746 - RNA, 19 nt, Artificial Sequence
  Description of Artificial Sequence: Synthetic oligonucleotide
  Sense strand starting at position 1201 of SEQ ID NO: 585209
gcggcaagaucgcugagaa

SEQ ID NO: 621747 - RNA, 19 nt, Artificial Sequence
  Description of Artificial Sequence: Synthetic oligonucleotide
  Antisense strand to SEQ ID NO: 621746
uucucagcgaucuugccgc

SEQ ID NO: 621748 - RNA, 19 nt, Artificial Sequence
  Description of Artificial Sequence: Synthetic oligonucleotide
  Sense strand starting at position 1202 of SEQ ID NO: 585209
cggcaagaucgcugagaag

SEQ ID NO: 621749 - RNA, 19 nt, Artificial Sequence
  Description of Artificial Sequence: Synthetic oligonucleotide
  Antisense strand to SEQ ID NO: 621748
cuucucagcgaucuugccg

SEQ ID NO: 621750 - RNA, 19 nt, Artificial Sequence
  Description of Artificial Sequence: Synthetic oligonucleotide
  Sense strand starting at position 1645 of SEQ ID NO: 585209
ugagguuuccuugguggga

SEQ ID NO: 621751 - RNA, 19 nt, Artificial Sequence
  Description of Artificial Sequence: Synthetic oligonucleotide
  Antisense strand to SEQ ID NO: 621750
ucccaccaaggaaaccuca

SEQ ID NO: 621752 - RNA, 19 nt, Artificial Sequence
  Description of Artificial Sequence: Synthetic oligonucleotide
  Sense strand starting at position 1839 of SEQ ID NO: 585209
uggaguuaccuagagagcu

SEQ ID NO: 621753 - RNA, 19 nt, Artificial Sequence
  Description of Artificial Sequence: Synthetic oligonucleotide
  Antisense strand to SEQ ID NO: 621752
agcucucuagguaacucca

SEQ ID NO: 621754 - RNA, 19 nt, Artificial Sequence
  Description of Artificial Sequence: Synthetic oligonucleotide
  Sense strand starting at position 1982 of SEQ ID NO: 585209
ccagcaaagcgcugggauu

SEQ ID NO: 621755 - RNA, 19 nt, Artificial Sequence
  Description of Artificial Sequence: Synthetic oligonucleotide
  Antisense strand to SEQ ID NO: 621754
aaucccagcgcuuugcugg

SEQ ID NO: 621756 - RNA, 19 nt, Artificial Sequence
  Description of Artificial Sequence: Synthetic oligonucleotide
  Sense strand starting at position 1983 of SEQ ID NO: 585209
cagcaaagcgcugggauua

SEQ ID NO: 621757 - RNA, 19 nt, Artificial Sequence
  Description of Artificial Sequence: Synthetic oligonucleotide
  Antisense strand to SEQ ID NO: 621756
uaaucccagcgcuuugcug

SEQ ID NO: 621758 - RNA, 19 nt, Artificial Sequence
  Description of Artificial Sequence: Synthetic oligonucleotide
  Sense strand starting at position 2091 of SEQ ID NO: 585209
gccugagaccuccaugcca

SEQ ID NO: 621759 - RNA, 19 nt, Artificial Sequence
  Description of Artificial Sequence: Synthetic oligonucleotide
  Antisense strand to SEQ ID NO: 621758
uggcauggaggucucaggc

SEQ ID NO: 621760 - RNA, 19 nt, Artificial Sequence
  Description of Artificial Sequence: Synthetic oligonucleotide
  Sense strand starting at position 2119 of SEQ ID NO: 585209
ggcgcugccaggcauuaua

SEQ ID NO: 621761 - RNA, 19 nt, Artificial Sequence
  Description of Artificial Sequence: Synthetic oligonucleotide
  Antisense strand to SEQ ID NO: 621760
uauaaugccuggcagcgcc

SEQ ID NO: 621762 - RNA, 19 nt, Artificial Sequence
  Description of Artificial Sequence: Synthetic oligonucleotide
  Sense strand starting at position 2320 of SEQ ID NO: 585209
gagagauugucacuaacau

SEQ ID NO: 621763 - RNA, 19 nt, Artificial Sequence
  Description of Artificial Sequence: Synthetic oligonucleotide
  Antisense strand to SEQ ID NO: 621762
auguuagugacaaucucuc

SEQ ID NO: 621764 - RNA, 19 nt, Artificial Sequence
  Description of Artificial Sequence: Synthetic oligonucleotide
  Sense strand starting at position 2329 of SEQ ID NO: 585209
ucacuaacaugugucauua

SEQ ID NO: 621765 - RNA, 19 nt, Artificial Sequence
  Description of Artificial Sequence: Synthetic oligonucleotide
  Antisense strand to SEQ ID NO: 621764
uaaugacacauguuaguga

SEQ ID NO: 621766 - RNA, 19 nt, Artificial Sequence
  Description of Artificial Sequence: Synthetic oligonucleotide
  Sense strand starting at position 2338 of SEQ ID NO: 585209
ugugucauuaccugugcaa

SEQ ID NO: 621767 - RNA, 19 nt, Artificial Sequence
  Description of Artificial Sequence: Synthetic oligonucleotide
  Antisense strand to SEQ ID NO: 621766
uugcacagguaaugacaca

SEQ ID NO: 621768 - RNA, 19 nt, Artificial Sequence
  Description of Artificial Sequence: Synthetic oligonucleotide
  Sense strand starting at position 2341 of SEQ ID NO: 585209
gucauuaccugugcaauau

SEQ ID NO: 621769 - RNA, 19 nt, Artificial Sequence
  Description of Artificial Sequence: Synthetic oligonucleotide
  Antisense strand to SEQ ID NO: 621768
auauugcacagguaaugac

SEQ ID NO: 621770 - RNA, 19 nt, Artificial Sequence
  Description of Artificial Sequence: Synthetic oligonucleotide
  Sense strand starting at position 2647 of SEQ ID NO: 585209
gcaggagaaucgcuaaauc

SEQ ID NO: 621771 - RNA, 19 nt, Artificial Sequence
  Description of Artificial Sequence: Synthetic oligonucleotide
  Antisense strand to SEQ ID NO: 621770
gauuuagcgauucuccugc

SEQ ID NO: 621772 - RNA, 19 nt, Artificial Sequence
  Description of Artificial Sequence: Synthetic oligonucleotide
  Sense strand starting at position 2656 of SEQ ID NO: 585209
ucgcuaaauccaggagaug

SEQ ID NO: 621773 - RNA, 19 nt, Artificial Sequence
  Description of Artificial Sequence: Synthetic oligonucleotide
  Antisense strand to SEQ ID NO: 621772
caucuccuggauuuagcga

SEQ ID NO: 621774 - RNA, 19 nt, Artificial Sequence
  Description of Artificial Sequence: Synthetic oligonucleotide
  Sense strand starting at position 2827 of SEQ ID NO: 585209
ugcaaaugucaaggagugu

SEQ ID NO: 621775 - RNA, 19 nt, Artificial Sequence
  Description of Artificial Sequence: Synthetic oligonucleotide
  Antisense strand to SEQ ID NO: 621774
acacuccuugacauuugca

SEQ ID NO: 621776 - RNA, 19 nt, Artificial Sequence
  Description of Artificial Sequence: Synthetic oligonucleotide
  Sense strand starting at position 2853 of SEQ ID NO: 585209
gggagaggugugugaguuu

SEQ ID NO: 621777 - RNA, 19 nt, Artificial Sequence
  Description of Artificial Sequence: Synthetic oligonucleotide
  Antisense strand to SEQ ID NO: 621776
aaacucacacaccucuccc

SEQ ID NO: 621778 - RNA, 19 nt, Artificial Sequence
  Description of Artificial Sequence: Synthetic oligonucleotide
  Sense strand starting at position 3007 of SEQ ID NO: 585209
agcuguguauugucaccau

SEQ ID NO: 621779 - RNA, 19 nt, Artificial Sequence
  Description of Artificial Sequence: Synthetic oligonucleotide
  Antisense strand to SEQ ID NO: 621778
auggugacaauacacagcu

SEQ ID NO: 621780 - RNA, 19 nt, Artificial Sequence
  Description of Artificial Sequence: Synthetic oligonucleotide
  Sense strand starting at position 3010 of SEQ ID NO: 585209
uguguauugucaccaucug

SEQ ID NO: 621781 - RNA, 19 nt, Artificial Sequence
  Description of Artificial Sequence: Synthetic oligonucleotide
  Antisense strand to SEQ ID NO: 621780
cagauggugacaauacaca

SEQ ID NO: 621782 - RNA, 19 nt, Artificial Sequence
  Description of Artificial Sequence: Synthetic oligonucleotide
  Sense strand starting at position 3063 of SEQ ID NO: 585209
ugugaagugguuuguccaa

SEQ ID NO: 621783 - RNA, 19 nt, Artificial Sequence
  Description of Artificial Sequence: Synthetic oligonucleotide
  Antisense strand to SEQ ID NO: 621782
uuggacaaaccacuucaca

SEQ ID NO: 621784 - RNA, 19 nt, Artificial Sequence
  Description of Artificial Sequence: Synthetic oligonucleotide
  Sense strand starting at position 3206 of SEQ ID NO: 585209
gcacaaacucuaugugauu

SEQ ID NO: 621785 - RNA, 19 nt, Artificial Sequence
  Description of Artificial Sequence: Synthetic oligonucleotide
  Antisense strand to SEQ ID NO: 621784
aaucacauagaguuugugc

SEQ ID NO: 621786 - RNA, 19 nt, Artificial Sequence
  Description of Artificial Sequence: Synthetic oligonucleotide
  Sense strand starting at position 3249 of SEQ ID NO: 585209
ggccuauagugagagaagu

SEQ ID NO: 621787 - RNA, 19 nt, Artificial Sequence
  Description of Artificial Sequence: Synthetic oligonucleotide
  Antisense strand to SEQ ID NO: 621786
acuucucucacuauaggcc

SEQ ID NO: 621788 - RNA, 19 nt, Artificial Sequence
  Description of Artificial Sequence: Synthetic oligonucleotide
  Sense strand starting at position 3266 of SEQ ID NO: 585209
gucagaauauugguuaccu

SEQ ID NO: 621789 - RNA, 19 nt, Artificial Sequence
  Description of Artificial Sequence: Synthetic oligonucleotide
  Antisense strand to SEQ ID NO: 621788
agguaaccaauauucugac

SEQ ID NO: 621790 - RNA, 19 nt, Artificial Sequence
  Description of Artificial Sequence: Synthetic oligonucleotide
  Sense strand starting at position 3274 of SEQ ID NO: 585209
auugguuaccuuugaagug

SEQ ID NO: 621791 - RNA, 19 nt, Artificial Sequence
  Description of Artificial Sequence: Synthetic oligonucleotide
  Antisense strand to SEQ ID NO: 621790
cacuucaaagguaaccaau

SEQ ID NO: 621792 - RNA, 19 nt, Artificial Sequence
  Description of Artificial Sequence: Synthetic oligonucleotide
  Sense strand starting at position 3386 of SEQ ID NO: 585209
guguguucacucugaaagu

SEQ ID NO: 621793 - RNA, 19 nt, Artificial Sequence
  Description of Artificial Sequence: Synthetic oligonucleotide
  Antisense strand to SEQ ID NO: 621792
acuuucagagugaacacac

SEQ ID NO: 621794 - RNA, 19 nt, Artificial Sequence
  Description of Artificial Sequence: Synthetic oligonucleotide
  Sense strand starting at position 3703 of SEQ ID NO: 585209
ugagaccaugucuguaaau

SEQ ID NO: 621795 - RNA, 19 nt, Artificial Sequence
  Description of Artificial Sequence: Synthetic oligonucleotide
  Antisense strand to SEQ ID NO: 621794
auuuacagacauggucuca

SEQ ID NO: 621796 - RNA, 19 nt, Artificial Sequence
  Description of Artificial Sequence: Synthetic oligonucleotide
  Sense strand starting at position 3744 of SEQ ID NO: 585209
gguguccaguucccagaaa

SEQ ID NO: 621797 - RNA, 19 nt, Artificial Sequence
  Description of Artificial Sequence: Synthetic oligonucleotide
  Antisense strand to SEQ ID NO: 621796
uuucugggaacuggacacc

SEQ ID NO: 621798 - RNA, 19 nt, Artificial Sequence
  Description of Artificial Sequence: Synthetic oligonucleotide
  Sense strand starting at position 3875 of SEQ ID NO: 585209
cgcugcugcaucuaggauu

SEQ ID NO: 621799 - RNA, 19 nt, Artificial Sequence
  Description of Artificial Sequence: Synthetic oligonucleotide
  Antisense strand to SEQ ID NO: 621798
aauccuagaugcagcagcg

SEQ ID NO: 621800 - RNA, 19 nt, Artificial Sequence
  Description of Artificial Sequence: Synthetic oligonucleotide
  Sense strand starting at position 3909 of SEQ ID NO: 585209
gcaggaugccucuggccaa

SEQ ID NO: 621801 - RNA, 19 nt, Artificial Sequence
  Description of Artificial Sequence: Synthetic oligonucleotide
  Antisense strand to SEQ ID NO: 621800
uuggccagaggcauccugc

SEQ ID NO: 621802 - RNA, 19 nt, Artificial Sequence
  Description of Artificial Sequence: Synthetic oligonucleotide
  Sense strand starting at position 3912 of SEQ ID NO: 585209
ggaugccucuggccaauuu

SEQ ID NO: 621803 - RNA, 19 nt, Artificial Sequence
  Description of Artificial Sequence: Synthetic oligonucleotide
  Antisense strand to SEQ ID NO: 621802
aaauuggccagaggcaucc

SEQ ID NO: 621804 - RNA, 19 nt, Artificial Sequence
  Description of Artificial Sequence: Synthetic oligonucleotide
  Sense strand starting at position 184 of SEQ ID NO: 585210
cugugauagugcuuuccac

SEQ ID NO: 621805 - RNA, 19 nt, Artificial Sequence
  Description of Artificial Sequence: Synthetic oligonucleotide
  Antisense strand to SEQ ID NO: 621804
guggaaagcacuaucacag

SEQ ID NO: 621806 - RNA, 19 nt, Artificial Sequence
  Description of Artificial Sequence: Synthetic oligonucleotide
  Sense strand starting at position 233 of SEQ ID NO: 585210
agcccuucccaguaggaau

SEQ ID NO: 621807 - RNA, 19 nt, Artificial Sequence
  Description of Artificial Sequence: Synthetic oligonucleotide
  Antisense strand to SEQ ID NO: 621806
auuccuacugggaagggcu

SEQ ID NO: 621808 - RNA, 19 nt, Artificial Sequence
  Description of Artificial Sequence: Synthetic oligonucleotide
  Sense strand starting at position 334 of SEQ ID NO: 585210
gcccaucaaugccaaagau

SEQ ID NO: 621809 - RNA, 19 nt, Artificial Sequence
  Description of Artificial Sequence: Synthetic oligonucleotide
  Antisense strand to SEQ ID NO: 621808
aucuuuggcauugaugggc

SEQ ID NO: 621810 - RNA, 19 nt, Artificial Sequence
  Description of Artificial Sequence: Synthetic oligonucleotide
  Sense strand starting at position 417 of SEQ ID NO: 585210
cuggguccuguccagacaa

SEQ ID NO: 621811 - RNA, 19 nt, Artificial Sequence
  Description of Artificial Sequence: Synthetic oligonucleotide
  Antisense strand to SEQ ID NO: 621810
uugucuggacaggacccag

SEQ ID NO: 621812 - RNA, 19 nt, Artificial Sequence
  Description of Artificial Sequence: Synthetic oligonucleotide
  Sense strand starting at position 475 of SEQ ID NO: 585210
ccagguucgauguguccaa

SEQ ID NO: 621813 - RNA, 19 nt, Artificial Sequence
  Description of Artificial Sequence: Synthetic oligonucleotide
  Antisense strand to SEQ ID NO: 621812
uuggacacaucgaaccugg

SEQ ID NO: 621814 - RNA, 19 nt, Artificial Sequence
  Description of Artificial Sequence: Synthetic oligonucleotide
  Sense strand starting at position 476 of SEQ ID NO: 585210
cagguucgauguguccaau

SEQ ID NO: 621815 - RNA, 19 nt, Artificial Sequence
  Description of Artificial Sequence: Synthetic oligonucleotide
  Antisense strand to SEQ ID NO: 621814
auuggacacaucgaaccug

SEQ ID NO: 621816 - RNA, 19 nt, Artificial Sequence
  Description of Artificial Sequence: Synthetic oligonucleotide
  Sense strand starting at position 879 of SEQ ID NO: 585210
ggaggccuuuaaccauaga

SEQ ID NO: 621817 - RNA, 19 nt, Artificial Sequence
  Description of Artificial Sequence: Synthetic oligonucleotide
  Antisense strand to SEQ ID NO: 621816
ucuaugguuaaaggccucc

SEQ ID NO: 621818 - RNA, 19 nt, Artificial Sequence
  Description of Artificial Sequence: Synthetic oligonucleotide
  Sense strand starting at position 882 of SEQ ID NO: 585210
ggccuuuaaccauagacuc

SEQ ID NO: 621819 - RNA, 19 nt, Artificial Sequence
  Description of Artificial Sequence: Synthetic oligonucleotide
  Antisense strand to SEQ ID NO: 621818
gagucuaugguuaaaggcc

SEQ ID NO: 621820 - RNA, 19 nt, Artificial Sequence
  Description of Artificial Sequence: Synthetic oligonucleotide
  Sense strand starting at position 1036 of SEQ ID NO: 585210
ucaggauacugagcugaaa

SEQ ID NO: 621821 - RNA, 19 nt, Artificial Sequence
  Description of Artificial Sequence: Synthetic oligonucleotide
  Antisense strand to SEQ ID NO: 621820
uuucagcucaguauccuga

SEQ ID NO: 621822 - RNA, 19 nt, Artificial Sequence
  Description of Artificial Sequence: Synthetic oligonucleotide
  Sense strand starting at position 1038 of SEQ ID NO: 585210
aggauacugagcugaaauc

SEQ ID NO: 621823 - RNA, 19 nt, Artificial Sequence
  Description of Artificial Sequence: Synthetic oligonucleotide
  Antisense strand to SEQ ID NO: 621822
gauuucagcucaguauccu

SEQ ID NO: 621824 - RNA, 19 nt, Artificial Sequence
  Description of Artificial Sequence: Synthetic oligonucleotide
  Sense strand starting at position 1083 of SEQ ID NO: 585210
ccaaguucucuggagccau

SEQ ID NO: 621825 - RNA, 19 nt, Artificial Sequence
  Description of Artificial Sequence: Synthetic oligonucleotide
  Antisense strand to SEQ ID NO: 621824
auggcuccagagaacuugg

SEQ ID NO: 621826 - RNA, 19 nt, Artificial Sequence
  Description of Artificial Sequence: Synthetic oligonucleotide
  Sense strand starting at position 1203 of SEQ ID NO: 585210
ggucuagguccacacaugu

SEQ ID NO: 621827 - RNA, 19 nt, Artificial Sequence
  Description of Artificial Sequence: Synthetic oligonucleotide
  Antisense strand to SEQ ID NO: 621826
acauguguggaccuagacc

SEQ ID NO: 621828 - RNA, 19 nt, Artificial Sequence
  Description of Artificial Sequence: Synthetic oligonucleotide
  Sense strand starting at position 1791 of SEQ ID NO: 585210
ccacaucucugauugaaug

SEQ ID NO: 621829 - RNA, 19 nt, Artificial Sequence
  Description of Artificial Sequence: Synthetic oligonucleotide
  Antisense strand to SEQ ID NO: 621828
cauucaaucagagaugugg

SEQ ID NO: 621830 - RNA, 19 nt, Artificial Sequence
  Description of Artificial Sequence: Synthetic oligonucleotide
  Sense strand starting at position 1819 of SEQ ID NO: 585210
cagagagguuguugcugaa

SEQ ID NO: 621831 - RNA, 19 nt, Artificial Sequence
  Description of Artificial Sequence: Synthetic oligonucleotide
  Antisense strand to SEQ ID NO: 621830
uucagcaacaaccucucug

SEQ ID NO: 621832 - RNA, 19 nt, Artificial Sequence
  Description of Artificial Sequence: Synthetic oligonucleotide
  Sense strand starting at position 1822 of SEQ ID NO: 585210
agagguuguugcugaauau

SEQ ID NO: 621833 - RNA, 19 nt, Artificial Sequence
  Description of Artificial Sequence: Synthetic oligonucleotide
  Antisense strand to SEQ ID NO: 621832
auauucagcaacaaccucu

SEQ ID NO: 621834 - RNA, 19 nt, Artificial Sequence
  Description of Artificial Sequence: Synthetic oligonucleotide
  Sense strand starting at position 1823 of SEQ ID NO: 585210
gagguuguugcugaauauc

SEQ ID NO: 621835 - RNA, 19 nt, Artificial Sequence
  Description of Artificial Sequence: Synthetic oligonucleotide
  Antisense strand to SEQ ID NO: 621834
gauauucagcaacaaccuc

SEQ ID NO: 621836 - RNA, 19 nt, Artificial Sequence
  Description of Artificial Sequence: Synthetic oligonucleotide
  Sense strand starting at position 2271 of SEQ ID NO: 585210
uccagacaauccgucucau

SEQ ID NO: 621837 - RNA, 19 nt, Artificial Sequence
  Description of Artificial Sequence: Synthetic oligonucleotide
  Antisense strand to SEQ ID NO: 621836
augagacggauugucugga

SEQ ID NO: 621838 - RNA, 19 nt, Artificial Sequence
  Description of Artificial Sequence: Synthetic oligonucleotide
  Sense strand starting at position 2275 of SEQ ID NO: 585210
gacaauccgucucaugcau

SEQ ID NO: 621839 - RNA, 19 nt, Artificial Sequence
  Description of Artificial Sequence: Synthetic oligonucleotide
  Antisense strand to SEQ ID NO: 621838
augcaugagacggauuguc

SEQ ID NO: 621840 - RNA, 19 nt, Artificial Sequence
  Description of Artificial Sequence: Synthetic oligonucleotide
  Sense strand starting at position 2553 of SEQ ID NO: 585210
cuccuugagucccacacau

SEQ ID NO: 621841 - RNA, 19 nt, Artificial Sequence
  Description of Artificial Sequence: Synthetic oligonucleotide
  Antisense strand to SEQ ID NO: 621840
augugugggacucaaggag

SEQ ID NO: 621842 - RNA, 19 nt, Artificial Sequence
  Description of Artificial Sequence: Synthetic oligonucleotide
  Sense strand starting at position 3136 of SEQ ID NO: 585210
uguuccauuuccugauugu

SEQ ID NO: 621843 - RNA, 19 nt, Artificial Sequence
  Description of Artificial Sequence: Synthetic oligonucleotide
  Antisense strand to SEQ ID NO: 621842
acaaucaggaaauggaaca

SEQ ID NO: 621844 - RNA, 19 nt, Artificial Sequence
  Description of Artificial Sequence: Synthetic oligonucleotide
  Sense strand starting at position 3146 of SEQ ID NO: 585210
ccugauuguccagaucuua

SEQ ID NO: 621845 - RNA, 19 nt, Artificial Sequence
  Description of Artificial Sequence: Synthetic oligonucleotide
  Antisense strand to SEQ ID NO: 621844
uaagaucuggacaaucagg

SEQ ID NO: 621846 - RNA, 19 nt, Artificial Sequence
  Description of Artificial Sequence: Synthetic oligonucleotide
  Sense strand starting at position 3154 of SEQ ID NO: 585210
uccagaucuuauugagguu

SEQ ID NO: 621847 - RNA, 19 nt, Artificial Sequence
  Description of Artificial Sequence: Synthetic oligonucleotide
  Antisense strand to SEQ ID NO: 621846
aaccucaauaagaucugga

SEQ ID NO: 621848 - RNA, 19 nt, Artificial Sequence
  Description of Artificial Sequence: Synthetic oligonucleotide
  Sense strand starting at position 3157 of SEQ ID NO: 585210
agaucuuauugagguuucu

SEQ ID NO: 621849 - RNA, 19 nt, Artificial Sequence
  Description of Artificial Sequence: Synthetic oligonucleotide
  Antisense strand to SEQ ID NO: 621848
agaaaccucaauaagaucu

SEQ ID NO: 621850 - RNA, 19 nt, Artificial Sequence
  Description of Artificial Sequence: Synthetic oligonucleotide
  Sense strand starting at position 3186 of SEQ ID NO: 585210
aggagacuugccuggagau

SEQ ID NO: 621851 - RNA, 19 nt, Artificial Sequence
  Description of Artificial Sequence: Synthetic oligonucleotide
  Antisense strand to SEQ ID NO: 621850
aucuccaggcaagucuccu

SEQ ID NO: 621852 - RNA, 19 nt, Artificial Sequence
  Description of Artificial Sequence: Synthetic oligonucleotide
  Sense strand starting at position 3187 of SEQ ID NO: 585210
ggagacuugccuggagauu

SEQ ID NO: 621853 - RNA, 19 nt, Artificial Sequence
  Description of Artificial Sequence: Synthetic oligonucleotide
  Antisense strand to SEQ ID NO: 621852
aaucuccaggcaagucucc

SEQ ID NO: 621854 - RNA, 19 nt, Artificial Sequence
  Description of Artificial Sequence: Synthetic oligonucleotide
  Sense strand starting at position 3188 of SEQ ID NO: 585210
gagacuugccuggagauuc

SEQ ID NO: 621855 - RNA, 19 nt, Artificial Sequence
  Description of Artificial Sequence: Synthetic oligonucleotide
  Antisense strand to SEQ ID NO: 621854
gaaucuccaggcaagucuc

SEQ ID NO: 621856 - RNA, 19 nt, Artificial Sequence
  Description of Artificial Sequence: Synthetic oligonucleotide
  Sense strand starting at position 3313 of SEQ ID NO: 585210
gaaagcagugccuguaauu

SEQ ID NO: 621857 - RNA, 19 nt, Artificial Sequence
  Description of Artificial Sequence: Synthetic oligonucleotide
  Antisense strand to SEQ ID NO: 621856
aauuacaggcacugcuuuc

SEQ ID NO: 621858 - RNA, 19 nt, Artificial Sequence
  Description of Artificial Sequence: Synthetic oligonucleotide
  Sense strand starting at position 3422 of SEQ ID NO: 585210
cuuccaucuuaaugaaggu

SEQ ID NO: 621859 - RNA, 19 nt, Artificial Sequence
  Description of Artificial Sequence: Synthetic oligonucleotide
  Antisense strand to SEQ ID NO: 621858
accuucauuaagauggaag

SEQ ID NO: 621860 - RNA, 19 nt, Artificial Sequence
  Description of Artificial Sequence: Synthetic oligonucleotide
  Sense strand starting at position 3440 of SEQ ID NO: 585210
uuauuuauccaacgagcga

SEQ ID NO: 621861 - RNA, 19 nt, Artificial Sequence
  Description of Artificial Sequence: Synthetic oligonucleotide
  Antisense strand to SEQ ID NO: 621860
ucgcucguuggauaaauaa

SEQ ID NO: 621862 - RNA, 19 nt, Artificial Sequence
  Description of Artificial Sequence: Synthetic oligonucleotide
  Sense strand starting at position 3444 of SEQ ID NO: 585210
uuauccaacgagcgauaaa

SEQ ID NO: 621863 - RNA, 19 nt, Artificial Sequence
  Description of Artificial Sequence: Synthetic oligonucleotide
  Antisense strand to SEQ ID NO: 621862
uuuaucgcucguuggauaa

SEQ ID NO: 621864 - RNA, 19 nt, Artificial Sequence
  Description of Artificial Sequence: Synthetic oligonucleotide
  Sense strand starting at position 3519 of SEQ ID NO: 585210
ggcagcaucucccugcuua

SEQ ID NO: 621865 - RNA, 19 nt, Artificial Sequence
  Description of Artificial Sequence: Synthetic oligonucleotide
  Antisense strand to SEQ ID NO: 621864
uaagcagggagaugcugcc

SEQ ID NO: 621866 - RNA, 19 nt, Artificial Sequence
  Description of Artificial Sequence: Synthetic oligonucleotide
  Sense strand starting at position 3575 of SEQ ID NO: 585210
gacccaugauuccuggaca

SEQ ID NO: 621867 - RNA, 19 nt, Artificial Sequence
  Description of Artificial Sequence: Synthetic oligonucleotide
  Antisense strand to SEQ ID NO: 621866
uguccaggaaucauggguc

SEQ ID NO: 621868 - RNA, 19 nt, Artificial Sequence
  Description of Artificial Sequence: Synthetic oligonucleotide
  Sense strand starting at position 3655 of SEQ ID NO: 585210
cugccagcucucugccaaa

SEQ ID NO: 621869 - RNA, 19 nt, Artificial Sequence
  Description of Artificial Sequence: Synthetic oligonucleotide
  Antisense strand to SEQ ID NO: 621868
uuuggcagagagcuggcag

SEQ ID NO: 621870 - RNA, 19 nt, Artificial Sequence
  Description of Artificial Sequence: Synthetic oligonucleotide
  Sense strand starting at position 3718 of SEQ ID NO: 585210
gagggaggucccuguuguu

SEQ ID NO: 621871 - RNA, 19 nt, Artificial Sequence
  Description of Artificial Sequence: Synthetic oligonucleotide
  Antisense strand to SEQ ID NO: 621870
aacaacagggaccucccuc

SEQ ID NO: 621872 - RNA, 19 nt, Artificial Sequence
  Description of Artificial Sequence: Synthetic oligonucleotide
  Sense strand starting at position 3727 of SEQ ID NO: 585210
cccuguuguugggucuuau

SEQ ID NO: 621873 - RNA, 19 nt, Artificial Sequence
  Description of Artificial Sequence: Synthetic oligonucleotide
  Antisense strand to SEQ ID NO: 621872
auaagacccaacaacaggg

SEQ ID NO: 621874 - RNA, 19 nt, Artificial Sequence
  Description of Artificial Sequence: Synthetic oligonucleotide
  Sense strand starting at position 3731 of SEQ ID NO: 585210
guuguugggucuuaucuga

SEQ ID NO: 621875 - RNA, 19 nt, Artificial Sequence
  Description of Artificial Sequence: Synthetic oligonucleotide
  Antisense strand to SEQ ID NO: 621874
ucagauaagacccaacaac

SEQ ID NO: 621876 - RNA, 19 nt, Artificial Sequence
  Description of Artificial Sequence: Synthetic oligonucleotide
  Sense strand starting at position 3735 of SEQ ID NO: 585210
uugggucuuaucugaugca

SEQ ID NO: 621877 - RNA, 19 nt, Artificial Sequence
  Description of Artificial Sequence: Synthetic oligonucleotide
  Antisense strand to SEQ ID NO: 621876
ugcaucagauaagacccaa

SEQ ID NO: 621878 - RNA, 19 nt, Artificial Sequence
  Description of Artificial Sequence: Synthetic oligonucleotide
  Sense strand starting at position 3738 of SEQ ID NO: 585210
ggucuuaucugaugcagcu

SEQ ID NO: 621879 - RNA, 19 nt, Artificial Sequence
  Description of Artificial Sequence: Synthetic oligonucleotide
  Antisense strand to SEQ ID NO: 621878
agcugcaucagauaagacc

SEQ ID NO: 621880 - RNA, 19 nt, Artificial Sequence
  Description of Artificial Sequence: Synthetic oligonucleotide
  Sense strand starting at position 3857 of SEQ ID NO: 585210
gcagguuccagcuggaaac

SEQ ID NO: 621881 - RNA, 19 nt, Artificial Sequence
  Description of Artificial Sequence: Synthetic oligonucleotide
  Antisense strand to SEQ ID NO: 621880
guuuccagcuggaaccugc

SEQ ID NO: 621882 - RNA, 19 nt, Artificial Sequence
  Description of Artificial Sequence: Synthetic oligonucleotide
  Sense strand starting at position 3887 of SEQ ID NO: 585210
cccaacuucuuggugggaa

SEQ ID NO: 621883 - RNA, 19 nt, Artificial Sequence
  Description of Artificial Sequence: Synthetic oligonucleotide
  Antisense strand to SEQ ID NO: 621882
uucccaccaagaaguuggg

SEQ ID NO: 621884 - RNA, 19 nt, Artificial Sequence
  Description of Artificial Sequence: Synthetic oligonucleotide
  Sense strand starting at position 40 of SEQ ID NO: 585211
gagcccgauccucagaaga

SEQ ID NO: 621885 - RNA, 19 nt, Artificial Sequence
  Description of Artificial Sequence: Synthetic oligonucleotide
  Antisense strand to SEQ ID NO: 621884
ucuucugaggaucgggcuc

SEQ ID NO: 621886 - RNA, 19 nt, Artificial Sequence
  Description of Artificial Sequence: Synthetic oligonucleotide
  Sense strand starting at position 42 of SEQ ID NO: 585211
gcccgauccucagaagaga

SEQ ID NO: 621887 - RNA, 19 nt, Artificial Sequence
  Description of Artificial Sequence: Synthetic oligonucleotide
  Antisense strand to SEQ ID NO: 621886
ucucuucugaggaucgggc

SEQ ID NO: 621888 - RNA, 19 nt, Artificial Sequence
  Description of Artificial Sequence: Synthetic oligonucleotide
  Sense strand starting at position 367 of SEQ ID NO: 585211
acuggaguguucgugucau

SEQ ID NO: 621889 - RNA, 19 nt, Artificial Sequence
  Description of Artificial Sequence: Synthetic oligonucleotide
  Antisense strand to SEQ ID NO: 621888
augacacgaacacuccagu

SEQ ID NO: 621890 - RNA, 19 nt, Artificial Sequence
  Description of Artificial Sequence: Synthetic oligonucleotide
  Sense strand starting at position 373 of SEQ ID NO: 585211
guguucgugucaucauaac

SEQ ID NO: 621891 - RNA, 19 nt, Artificial Sequence
  Description of Artificial Sequence: Synthetic oligonucleotide
  Antisense strand to SEQ ID NO: 621890
guuaugaugacacgaacac

SEQ ID NO: 621892 - RNA, 19 nt, Artificial Sequence
  Description of Artificial Sequence: Synthetic oligonucleotide
  Sense strand starting at position 379 of SEQ ID NO: 585211
gugucaucauaacaggacu

SEQ ID NO: 621893 - RNA, 19 nt, Artificial Sequence
  Description of Artificial Sequence: Synthetic oligonucleotide
  Antisense strand to SEQ ID NO: 621892
aguccuguuaugaugacac

SEQ ID NO: 621894 - RNA, 19 nt, Artificial Sequence
  Description of Artificial Sequence: Synthetic oligonucleotide
  Sense strand starting at position 433 of SEQ ID NO: 585211
aagcacuucguguggauua

SEQ ID NO: 621895 - RNA, 19 nt, Artificial Sequence
  Description of Artificial Sequence: Synthetic oligonucleotide
  Antisense strand to SEQ ID NO: 621894
uaauccacacgaagugcuu

SEQ ID NO: 621896 - RNA, 19 nt, Artificial Sequence
  Description of Artificial Sequence: Synthetic oligonucleotide
  Sense strand starting at position 435 of SEQ ID NO: 585211
gcacuucguguggauuauu

SEQ ID NO: 621897 - RNA, 19 nt, Artificial Sequence
  Description of Artificial Sequence: Synthetic oligonucleotide
  Antisense strand to SEQ ID NO: 621896
aauaauccacacgaagugc

SEQ ID NO: 621898 - RNA, 19 nt, Artificial Sequence
  Description of Artificial Sequence: Synthetic oligonucleotide
  Sense strand starting at position 564 of SEQ ID NO: 585211
guggcaaagugagauuuga

SEQ ID NO: 621899 - RNA, 19 nt, Artificial Sequence
  Description of Artificial Sequence: Synthetic oligonucleotide
  Antisense strand to SEQ ID NO: 621898
ucaaaucucacuuugccac

SEQ ID NO: 621900 - RNA, 19 nt, Artificial Sequence
  Description of Artificial Sequence: Synthetic oligonucleotide
  Sense strand starting at position 726 of SEQ ID NO: 585211
gucccuguuccagguguuu

SEQ ID NO: 621901 - RNA, 19 nt, Artificial Sequence
  Description of Artificial Sequence: Synthetic oligonucleotide
  Antisense strand to SEQ ID NO: 621900
aaacaccuggaacagggac

SEQ ID NO: 621902 - RNA, 19 nt, Artificial Sequence
  Description of Artificial Sequence: Synthetic oligonucleotide
  Sense strand starting at position 1076 of SEQ ID NO: 585211
cagugcguucucgagucaa

SEQ ID NO: 621903 - RNA, 19 nt, Artificial Sequence
  Description of Artificial Sequence: Synthetic oligonucleotide
  Antisense strand to SEQ ID NO: 621902
uugacucgagaacgcacug

SEQ ID NO: 621904 - RNA, 19 nt, Artificial Sequence
  Description of Artificial Sequence: Synthetic oligonucleotide
  Sense strand starting at position 1078 of SEQ ID NO: 585211
gugcguucucgagucaagu

SEQ ID NO: 621905 - RNA, 19 nt, Artificial Sequence
  Description of Artificial Sequence: Synthetic oligonucleotide
  Antisense strand to SEQ ID NO: 621904
acuugacucgagaacgcac

SEQ ID NO: 621906 - RNA, 19 nt, Artificial Sequence
  Description of Artificial Sequence: Synthetic oligonucleotide
  Sense strand starting at position 1079 of SEQ ID NO: 585211
ugcguucucgagucaaguu

SEQ ID NO: 621907 - RNA, 19 nt, Artificial Sequence
  Description of Artificial Sequence: Synthetic oligonucleotide
  Antisense strand to SEQ ID NO: 621906
aacuugacucgagaacgca

SEQ ID NO: 621908 - RNA, 19 nt, Artificial Sequence
  Description of Artificial Sequence: Synthetic oligonucleotide
  Sense strand starting at position 1080 of SEQ ID NO: 585211
gcguucucgagucaaguua

SEQ ID NO: 621909 - RNA, 19 nt, Artificial Sequence
  Description of Artificial Sequence: Synthetic oligonucleotide
  Antisense strand to SEQ ID NO: 621908
uaacuugacucgagaacgc

SEQ ID NO: 621910 - RNA, 19 nt, Artificial Sequence
  Description of Artificial Sequence: Synthetic oligonucleotide
  Sense strand starting at position 1095 of SEQ ID NO: 585211
guuaaugugcagugcugua

SEQ ID NO: 621911 - RNA, 19 nt, Artificial Sequence
  Description of Artificial Sequence: Synthetic oligonucleotide
  Antisense strand to SEQ ID NO: 621910
uacagcacugcacauuaac

SEQ ID NO: 621912 - RNA, 19 nt, Artificial Sequence
  Description of Artificial Sequence: Synthetic oligonucleotide
  Sense strand starting at position 1099 of SEQ ID NO: 585211
augugcagugcuguaugua

SEQ ID NO: 621913 - RNA, 19 nt, Artificial Sequence
  Description of Artificial Sequence: Synthetic oligonucleotide
  Antisense strand to SEQ ID NO: 621912
uacauacagcacugcacau

SEQ ID NO: 621914 - RNA, 19 nt, Artificial Sequence
  Description of Artificial Sequence: Synthetic oligonucleotide
  Sense strand starting at position 1100 of SEQ ID NO: 585211
ugugcagugcuguauguaa

SEQ ID NO: 621915 - RNA, 19 nt, Artificial Sequence
  Description of Artificial Sequence: Synthetic oligonucleotide
  Antisense strand to SEQ ID NO: 621914
uuacauacagcacugcaca

SEQ ID NO: 621916 - RNA, 19 nt, Artificial Sequence
  Description of Artificial Sequence: Synthetic oligonucleotide
  Sense strand starting at position 1153 of SEQ ID NO: 585211
gggauauauuaccauuauu

SEQ ID NO: 621917 - RNA, 19 nt, Artificial Sequence
  Description of Artificial Sequence: Synthetic oligonucleotide
  Antisense strand to SEQ ID NO: 621916
aauaaugguaauauauccc

SEQ ID NO: 621918 - RNA, 19 nt, Artificial Sequence
  Description of Artificial Sequence: Synthetic oligonucleotide
  Sense strand starting at position 1435 of SEQ ID NO: 585211
gccaguccucauugcacuu

SEQ ID NO: 621919 - RNA, 19 nt, Artificial Sequence
  Description of Artificial Sequence: Synthetic oligonucleotide
  Antisense strand to SEQ ID NO: 621918
aagugcaaugaggacuggc

SEQ ID NO: 621920 - RNA, 19 nt, Artificial Sequence
  Description of Artificial Sequence: Synthetic oligonucleotide
  Sense strand starting at position 1462 of SEQ ID NO: 585211
ugcaguauuugacccggua

SEQ ID NO: 621921 - RNA, 19 nt, Artificial Sequence
  Description of Artificial Sequence: Synthetic oligonucleotide
  Antisense strand to SEQ ID NO: 621920
uaccgggucaaauacugca

SEQ ID NO: 621922 - RNA, 19 nt, Artificial Sequence
  Description of Artificial Sequence: Synthetic oligonucleotide
  Sense strand starting at position 1464 of SEQ ID NO: 585211
caguauuugacccgguagu

SEQ ID NO: 621923 - RNA, 19 nt, Artificial Sequence
  Description of Artificial Sequence: Synthetic oligonucleotide
  Antisense strand to SEQ ID NO: 621922
acuaccgggucaaauacug

SEQ ID NO: 621924 - RNA, 19 nt, Artificial Sequence
  Description of Artificial Sequence: Synthetic oligonucleotide
  Sense strand starting at position 1666 of SEQ ID NO: 585211
accagaucucaccauggca

SEQ ID NO: 621925 - RNA, 19 nt, Artificial Sequence
  Description of Artificial Sequence: Synthetic oligonucleotide
  Antisense strand to SEQ ID NO: 621924
ugccauggugagaucuggu

SEQ ID NO: 621926 - RNA, 19 nt, Artificial Sequence
  Description of Artificial Sequence: Synthetic oligonucleotide
  Sense strand starting at position 1817 of SEQ ID NO: 585211
uccaguuaugcaggccaga

SEQ ID NO: 621927 - RNA, 19 nt, Artificial Sequence
  Description of Artificial Sequence: Synthetic oligonucleotide
  Antisense strand to SEQ ID NO: 621926
ucuggccugcauaacugga

SEQ ID NO: 621928 - RNA, 19 nt, Artificial Sequence
  Description of Artificial Sequence: Synthetic oligonucleotide
  Sense strand starting at position 1841 of SEQ ID NO: 585211
gggcaaauccuugaguccu

SEQ ID NO: 621929 - RNA, 19 nt, Artificial Sequence
  Description of Artificial Sequence: Synthetic oligonucleotide
  Antisense strand to SEQ ID NO: 621928
aggacucaaggauuugccc

SEQ ID NO: 621930 - RNA, 19 nt, Artificial Sequence
  Description of Artificial Sequence: Synthetic oligonucleotide
  Sense strand starting at position 1843 of SEQ ID NO: 585211
gcaaauccuugaguccuuu

SEQ ID NO: 621931 - RNA, 19 nt, Artificial Sequence
  Description of Artificial Sequence: Synthetic oligonucleotide
  Antisense strand to SEQ ID NO: 621930
aaaggacucaaggauuugc

SEQ ID NO: 621932 - RNA, 19 nt, Artificial Sequence
  Description of Artificial Sequence: Synthetic oligonucleotide
  Sense strand starting at position 1890 of SEQ ID NO: 585211
gcaaauauuguuggcucua

SEQ ID NO: 621933 - RNA, 19 nt, Artificial Sequence
  Description of Artificial Sequence: Synthetic oligonucleotide
  Antisense strand to SEQ ID NO: 621932
uagagccaacaauauuugc

SEQ ID NO: 621934 - RNA, 19 nt, Artificial Sequence
  Description of Artificial Sequence: Synthetic oligonucleotide
  Sense strand starting at position 1895 of SEQ ID NO: 585211
uauuguuggcucuacuuga

SEQ ID NO: 621935 - RNA, 19 nt, Artificial Sequence
  Description of Artificial Sequence: Synthetic oligonucleotide
  Antisense strand to SEQ ID NO: 621934
ucaaguagagccaacaaua

SEQ ID NO: 621936 - RNA, 19 nt, Artificial Sequence
  Description of Artificial Sequence: Synthetic oligonucleotide
  Sense strand starting at position 2084 of SEQ ID NO: 585211
gcuagaggaacccgauuaa

SEQ ID NO: 621937 - RNA, 19 nt, Artificial Sequence
  Description of Artificial Sequence: Synthetic oligonucleotide
  Antisense strand to SEQ ID NO: 621936
uuaaucggguuccucuagc

SEQ ID NO: 621938 - RNA, 19 nt, Artificial Sequence
  Description of Artificial Sequence: Synthetic oligonucleotide
  Sense strand starting at position 2464 of SEQ ID NO: 585211
gaggcucccuucucauaga

SEQ ID NO: 621939 - RNA, 19 nt, Artificial Sequence
  Description of Artificial Sequence: Synthetic oligonucleotide
  Antisense strand to SEQ ID NO: 621938
ucuaugagaagggagccuc

SEQ ID NO: 621940 - RNA, 19 nt, Artificial Sequence
  Description of Artificial Sequence: Synthetic oligonucleotide
  Sense strand starting at position 2766 of SEQ ID NO: 585211
ggccuugcucacugcuaga

SEQ ID NO: 621941 - RNA, 19 nt, Artificial Sequence
  Description of Artificial Sequence: Synthetic oligonucleotide
  Antisense strand to SEQ ID NO: 621940
ucuagcagugagcaaggcc

SEQ ID NO: 621942 - RNA, 19 nt, Artificial Sequence
  Description of Artificial Sequence: Synthetic oligonucleotide
  Sense strand starting at position 2826 of SEQ ID NO: 585211
cuugcagguucugcaaaua

SEQ ID NO: 621943 - RNA, 19 nt, Artificial Sequence
  Description of Artificial Sequence: Synthetic oligonucleotide
  Antisense strand to SEQ ID NO: 621942
uauuugcagaaccugcaag

SEQ ID NO: 621944 - RNA, 19 nt, Artificial Sequence
  Description of Artificial Sequence: Synthetic oligonucleotide
  Sense strand starting at position 2935 of SEQ ID NO: 585211
gggaaacuuucuccuucca

SEQ ID NO: 621945 - RNA, 19 nt, Artificial Sequence
  Description of Artificial Sequence: Synthetic oligonucleotide
  Antisense strand to SEQ ID NO: 621944
uggaaggagaaaguuuccc

SEQ ID NO: 621946 - RNA, 19 nt, Artificial Sequence
  Description of Artificial Sequence: Synthetic oligonucleotide
  Sense strand starting at position 3165 of SEQ ID NO: 585211
ggaucuuugccugauuccu

SEQ ID NO: 621947 - RNA, 19 nt, Artificial Sequence
  Description of Artificial Sequence: Synthetic oligonucleotide
  Antisense strand to SEQ ID NO: 621946
aggaaucaggcaaagaucc

SEQ ID NO: 621948 - RNA, 19 nt, Artificial Sequence
  Description of Artificial Sequence: Synthetic oligonucleotide
  Sense strand starting at position 3445 of SEQ ID NO: 585211
gcucguauugcugagucca

SEQ ID NO: 621949 - RNA, 19 nt, Artificial Sequence
  Description of Artificial Sequence: Synthetic oligonucleotide
  Antisense strand to SEQ ID NO: 621948
uggacucagcaauacgagc

SEQ ID NO: 621950 - RNA, 19 nt, Artificial Sequence
  Description of Artificial Sequence: Synthetic oligonucleotide
  Sense strand starting at position 3447 of SEQ ID NO: 585211
ucguauugcugaguccaga

SEQ ID NO: 621951 - RNA, 19 nt, Artificial Sequence
  Description of Artificial Sequence: Synthetic oligonucleotide
  Antisense strand to SEQ ID NO: 621950
ucuggacucagcaauacga

SEQ ID NO: 621952 - RNA, 19 nt, Artificial Sequence
  Description of Artificial Sequence: Synthetic oligonucleotide
  Sense strand starting at position 3535 of SEQ ID NO: 585211
ggaugagagcccggaacaa

SEQ ID NO: 621953 - RNA, 19 nt, Artificial Sequence
  Description of Artificial Sequence: Synthetic oligonucleotide
  Antisense strand to SEQ ID NO: 621952
uuguuccgggcucucaucc

SEQ ID NO: 621954 - RNA, 19 nt, Artificial Sequence
  Description of Artificial Sequence: Synthetic oligonucleotide
  Sense strand starting at position 3548 of SEQ ID NO: 585211
gaacaagguccuggaucua

SEQ ID NO: 621955 - RNA, 19 nt, Artificial Sequence
  Description of Artificial Sequence: Synthetic oligonucleotide
  Antisense strand to SEQ ID NO: 621954
uagauccaggaccuuguuc

SEQ ID NO: 621956 - RNA, 19 nt, Artificial Sequence
  Description of Artificial Sequence: Synthetic oligonucleotide
  Sense strand starting at position 3807 of SEQ ID NO: 585211
ugcaaugguccaggugaga

SEQ ID NO: 621957 - RNA, 19 nt, Artificial Sequence
  Description of Artificial Sequence: Synthetic oligonucleotide
  Antisense strand to SEQ ID NO: 621956
ucucaccuggaccauugca

SEQ ID NO: 621958 - RNA, 19 nt, Artificial Sequence
  Description of Artificial Sequence: Synthetic oligonucleotide
  Sense strand starting at position 3846 of SEQ ID NO: 585211
gggugucuauggagaugga

SEQ ID NO: 621959 - RNA, 19 nt, Artificial Sequence
  Description of Artificial Sequence: Synthetic oligonucleotide
  Antisense strand to SEQ ID NO: 621958
uccaucuccauagacaccc

SEQ ID NO: 621960 - RNA, 19 nt, Artificial Sequence
  Description of Artificial Sequence: Synthetic oligonucleotide
  Sense strand starting at position 3903 of SEQ ID NO: 585211
gugucuccuccuugugaca

SEQ ID NO: 621961 - RNA, 19 nt, Artificial Sequence
  Description of Artificial Sequence: Synthetic oligonucleotide
  Antisense strand to SEQ ID NO: 621960
ugucacaaggaggagacac

SEQ ID NO: 621962 - RNA, 19 nt, Artificial Sequence
  Description of Artificial Sequence: Synthetic oligonucleotide
  Sense strand starting at position 3905 of SEQ ID NO: 585211
gucuccuccuugugacaaa

SEQ ID NO: 621963 - RNA, 19 nt, Artificial Sequence
  Description of Artificial Sequence: Synthetic oligonucleotide
  Antisense strand to SEQ ID NO: 621962
uuugucacaaggaggagac

SEQ ID NO: 621964 - RNA, 19 nt, Artificial Sequence
  Description of Artificial Sequence: Synthetic oligonucleotide
  Sense strand starting at position 23 of SEQ ID NO: 585212
aguguugggucagccuuaa

SEQ ID NO: 621965 - RNA, 19 nt, Artificial Sequence
  Description of Artificial Sequence: Synthetic oligonucleotide
  Antisense strand to SEQ ID NO: 621964
uuaaggcugacccaacacu

SEQ ID NO: 621966 - RNA, 19 nt, Artificial Sequence
  Description of Artificial Sequence: Synthetic oligonucleotide
  Sense strand starting at position 35 of SEQ ID NO: 585212
gccuuaacuucugauugca

SEQ ID NO: 621967 - RNA, 19 nt, Artificial Sequence
  Description of Artificial Sequence: Synthetic oligonucleotide
  Antisense strand to SEQ ID NO: 621966
ugcaaucagaaguuaaggc

SEQ ID NO: 621968 - RNA, 19 nt, Artificial Sequence
  Description of Artificial Sequence: Synthetic oligonucleotide
  Sense strand starting at position 251 of SEQ ID NO: 585212
gugacuuucucugauuuga

SEQ ID NO: 621969 - RNA, 19 nt, Artificial Sequence
  Description of Artificial Sequence: Synthetic oligonucleotide
  Antisense strand to SEQ ID NO: 621968
ucaaaucagagaaagucac

SEQ ID NO: 621970 - RNA, 19 nt, Artificial Sequence
  Description of Artificial Sequence: Synthetic oligonucleotide
  Sense strand starting at position 295 of SEQ ID NO: 585212
ggacuaguauaauuacuuu

SEQ ID NO: 621971 - RNA, 19 nt, Artificial Sequence
  Description of Artificial Sequence: Synthetic oligonucleotide
  Antisense strand to SEQ ID NO: 621970
aaaguaauuauacuagucc

SEQ ID NO: 621972 - RNA, 19 nt, Artificial Sequence
  Description of Artificial Sequence: Synthetic oligonucleotide
  Sense strand starting at position 372 of SEQ ID NO: 585212
cucucauaauuccaggagu

SEQ ID NO: 621973 - RNA, 19 nt, Artificial Sequence
  Description of Artificial Sequence: Synthetic oligonucleotide
  Antisense strand to SEQ ID NO: 621972
acuccuggaauuaugagag

SEQ ID NO: 621974 - RNA, 19 nt, Artificial Sequence
  Description of Artificial Sequence: Synthetic oligonucleotide
  Sense strand starting at position 374 of SEQ ID NO: 585212
cucauaauuccaggaguaa

SEQ ID NO: 621975 - RNA, 19 nt, Artificial Sequence
  Description of Artificial Sequence: Synthetic oligonucleotide
  Antisense strand to SEQ ID NO: 621974
uuacuccuggaauuaugag

SEQ ID NO: 621976 - RNA, 19 nt, Artificial Sequence
  Description of Artificial Sequence: Synthetic oligonucleotide
  Sense strand starting at position 670 of SEQ ID NO: 585212
gggugagucucuggacaua

SEQ ID NO: 621977 - RNA, 19 nt, Artificial Sequence
  Description of Artificial Sequence: Synthetic oligonucleotide
  Antisense strand to SEQ ID NO: 621976
uauguccagagacucaccc

SEQ ID NO: 621978 - RNA, 19 nt, Artificial Sequence
  Description of Artificial Sequence: Synthetic oligonucleotide
  Sense strand starting at position 682 of SEQ ID NO: 585212
ggacauauugaguagccca

SEQ ID NO: 621979 - RNA, 19 nt, Artificial Sequence
  Description of Artificial Sequence: Synthetic oligonucleotide
  Antisense strand to SEQ ID NO: 621978
ugggcuacucaauaugucc

SEQ ID NO: 621980 - RNA, 19 nt, Artificial Sequence
  Description of Artificial Sequence: Synthetic oligonucleotide
  Sense strand starting at position 687 of SEQ ID NO: 585212
uauugaguagcccauggau

SEQ ID NO: 621981 - RNA, 19 nt, Artificial Sequence
  Description of Artificial Sequence: Synthetic oligonucleotide
  Antisense strand to SEQ ID NO: 621980
auccaugggcuacucaaua

SEQ ID NO: 621982 - RNA, 19 nt, Artificial Sequence
  Description of Artificial Sequence: Synthetic oligonucleotide
  Sense strand starting at position 828 of SEQ ID NO: 585212
auguaucuaucucuuugua

SEQ ID NO: 621983 - RNA, 19 nt, Artificial Sequence
  Description of Artificial Sequence: Synthetic oligonucleotide
  Antisense strand to SEQ ID NO: 621982
uacaaagagauagauacau

SEQ ID NO: 621984 - RNA, 19 nt, Artificial Sequence
  Description of Artificial Sequence: Synthetic oligonucleotide
  Sense strand starting at position 830 of SEQ ID NO: 585212
guaucuaucucuuuguaau

SEQ ID NO: 621985 - RNA, 19 nt, Artificial Sequence
  Description of Artificial Sequence: Synthetic oligonucleotide
  Antisense strand to SEQ ID NO: 621984
auuacaaagagauagauac

SEQ ID NO: 621986 - RNA, 19 nt, Artificial Sequence
  Description of Artificial Sequence: Synthetic oligonucleotide
  Sense strand starting at position 863 of SEQ ID NO: 585212
ucuauuaucugucuuguau

SEQ ID NO: 621987 - RNA, 19 nt, Artificial Sequence
  Description of Artificial Sequence: Synthetic oligonucleotide
  Antisense strand to SEQ ID NO: 621986
auacaagacagauaauaga

SEQ ID NO: 621988 - RNA, 19 nt, Artificial Sequence
  Description of Artificial Sequence: Synthetic oligonucleotide
  Sense strand starting at position 867 of SEQ ID NO: 585212
uuaucugucuuguauccau

SEQ ID NO: 621989 - RNA, 19 nt, Artificial Sequence
  Description of Artificial Sequence: Synthetic oligonucleotide
  Antisense strand to SEQ ID NO: 621988
auggauacaagacagauaa

SEQ ID NO: 621990 - RNA, 19 nt, Artificial Sequence
  Description of Artificial Sequence: Synthetic oligonucleotide
  Sense strand starting at position 1238 of SEQ ID NO: 585212
gguuacaaaucagauaggu

SEQ ID NO: 621991 - RNA, 19 nt, Artificial Sequence
  Description of Artificial Sequence: Synthetic oligonucleotide
  Antisense strand to SEQ ID NO: 621990
accuaucugauuuguaacc

SEQ ID NO: 621992 - RNA, 19 nt, Artificial Sequence
  Description of Artificial Sequence: Synthetic oligonucleotide
  Sense strand starting at position 1272 of SEQ ID NO: 585212
cuagaaacauccuagagug

SEQ ID NO: 621993 - RNA, 19 nt, Artificial Sequence
  Description of Artificial Sequence: Synthetic oligonucleotide
  Antisense strand to SEQ ID NO: 621992
cacucuaggauguuucuag

SEQ ID NO: 621994 - RNA, 19 nt, Artificial Sequence
  Description of Artificial Sequence: Synthetic oligonucleotide
  Sense strand starting at position 1345 of SEQ ID NO: 585212
ggagccucuuucuuagcua

SEQ ID NO: 621995 - RNA, 19 nt, Artificial Sequence
  Description of Artificial Sequence: Synthetic oligonucleotide
  Antisense strand to SEQ ID NO: 621994
uagcuaagaaagaggcucc

SEQ ID NO: 621996 - RNA, 19 nt, Artificial Sequence
  Description of Artificial Sequence: Synthetic oligonucleotide
  Sense strand starting at position 1374 of SEQ ID NO: 585212
uggccaugaguugguagaa

SEQ ID NO: 621997 - RNA, 19 nt, Artificial Sequence
  Description of Artificial Sequence: Synthetic oligonucleotide
  Antisense strand to SEQ ID NO: 621996
uucuaccaacucauggcca

SEQ ID NO: 621998 - RNA, 19 nt, Artificial Sequence
  Description of Artificial Sequence: Synthetic oligonucleotide
  Sense strand starting at position 1375 of SEQ ID NO: 585212
ggccaugaguugguagaac

SEQ ID NO: 621999 - RNA, 19 nt, Artificial Sequence
  Description of Artificial Sequence: Synthetic oligonucleotide
  Antisense strand to SEQ ID NO: 621998
guucuaccaacucauggcc

SEQ ID NO: 622000 - RNA, 19 nt, Artificial Sequence
  Description of Artificial Sequence: Synthetic oligonucleotide
  Sense strand starting at position 1400 of SEQ ID NO: 585212
gacagaauaugacuugucu

SEQ ID NO: 622001 - RNA, 19 nt, Artificial Sequence
  Description of Artificial Sequence: Synthetic oligonucleotide
  Antisense strand to SEQ ID NO: 622000
agacaagucauauucuguc

SEQ ID NO: 622002 - RNA, 19 nt, Artificial Sequence
  Description of Artificial Sequence: Synthetic oligonucleotide
  Sense strand starting at position 1404 of SEQ ID NO: 585212
gaauaugacuugucuuuga

SEQ ID NO: 622003 - RNA, 19 nt, Artificial Sequence
  Description of Artificial Sequence: Synthetic oligonucleotide
  Antisense strand to SEQ ID NO: 622002
ucaaagacaagucauauuc

SEQ ID NO: 622004 - RNA, 19 nt, Artificial Sequence
  Description of Artificial Sequence: Synthetic oligonucleotide
  Sense strand starting at position 1407 of SEQ ID NO: 585212
uaugacuugucuuugagcu

SEQ ID NO: 622005 - RNA, 19 nt, Artificial Sequence
  Description of Artificial Sequence: Synthetic oligonucleotide
  Antisense strand to SEQ ID NO: 622004
agcucaaagacaagucaua

SEQ ID NO: 622006 - RNA, 19 nt, Artificial Sequence
  Description of Artificial Sequence: Synthetic oligonucleotide
  Sense strand starting at position 1408 of SEQ ID NO: 585212
augacuugucuuugagcua

SEQ ID NO: 622007 - RNA, 19 nt, Artificial Sequence
  Description of Artificial Sequence: Synthetic oligonucleotide
  Antisense strand to SEQ ID NO: 622006
uagcucaaagacaagucau

SEQ ID NO: 622008 - RNA, 19 nt, Artificial Sequence
  Description of Artificial Sequence: Synthetic oligonucleotide
  Sense strand starting at position 1409 of SEQ ID NO: 585212
ugacuugucuuugagcuaa

SEQ ID NO: 622009 - RNA, 19 nt, Artificial Sequence
  Description of Artificial Sequence: Synthetic oligonucleotide
  Antisense strand to SEQ ID NO: 622008
uuagcucaaagacaaguca

SEQ ID NO: 622010 - RNA, 19 nt, Artificial Sequence
  Description of Artificial Sequence: Synthetic oligonucleotide
  Sense strand starting at position 1411 of SEQ ID NO: 585212
acuugucuuugagcuaauu

SEQ ID NO: 622011 - RNA, 19 nt, Artificial Sequence
  Description of Artificial Sequence: Synthetic oligonucleotide
  Antisense strand to SEQ ID NO: 622010
aauuagcucaaagacaagu

SEQ ID NO: 622012 - RNA, 19 nt, Artificial Sequence
  Description of Artificial Sequence: Synthetic oligonucleotide
  Sense strand starting at position 1420 of SEQ ID NO: 585212
ugagcuaauuaguggcaaa

SEQ ID NO: 622013 - RNA, 19 nt, Artificial Sequence
  Description of Artificial Sequence: Synthetic oligonucleotide
  Antisense strand to SEQ ID NO: 622012
uuugccacuaauuagcuca

SEQ ID NO: 622014 - RNA, 19 nt, Artificial Sequence
  Description of Artificial Sequence: Synthetic oligonucleotide
  Sense strand starting at position 1452 of SEQ ID NO: 585212
ucuaguucuccugacauuc

SEQ ID NO: 622015 - RNA, 19 nt, Artificial Sequence
  Description of Artificial Sequence: Synthetic oligonucleotide
  Antisense strand to SEQ ID NO: 622014
gaaugucaggagaacuaga

SEQ ID NO: 622016 - RNA, 19 nt, Artificial Sequence
  Description of Artificial Sequence: Synthetic oligonucleotide
  Sense strand starting at position 1548 of SEQ ID NO: 585212
acaauuguguguugacuac

SEQ ID NO: 622017 - RNA, 19 nt, Artificial Sequence
  Description of Artificial Sequence: Synthetic oligonucleotide
  Antisense strand to SEQ ID NO: 622016
guagucaacacacaauugu

SEQ ID NO: 622018 - RNA, 19 nt, Artificial Sequence
  Description of Artificial Sequence: Synthetic oligonucleotide
  Sense strand starting at position 1555 of SEQ ID NO: 585212
uguguugacuacuuacaca

SEQ ID NO: 622019 - RNA, 19 nt, Artificial Sequence
  Description of Artificial Sequence: Synthetic oligonucleotide
  Antisense strand to SEQ ID NO: 622018
uguguaaguagucaacaca

SEQ ID NO: 622020 - RNA, 19 nt, Artificial Sequence
  Description of Artificial Sequence: Synthetic oligonucleotide
  Sense strand starting at position 1910 of SEQ ID NO: 585212
aguacuuacuuuguuaaac

SEQ ID NO: 622021 - RNA, 19 nt, Artificial Sequence
  Description of Artificial Sequence: Synthetic oligonucleotide
  Antisense strand to SEQ ID NO: 622020
guuuaacaaaguaaguacu

SEQ ID NO: 622022 - RNA, 19 nt, Artificial Sequence
  Description of Artificial Sequence: Synthetic oligonucleotide
  Sense strand starting at position 2114 of SEQ ID NO: 585212
agaagacacugguuaaugu

SEQ ID NO: 622023 - RNA, 19 nt, Artificial Sequence
  Description of Artificial Sequence: Synthetic oligonucleotide
  Antisense strand to SEQ ID NO: 622022
acauuaaccagugucuucu

SEQ ID NO: 622024 - RNA, 19 nt, Artificial Sequence
  Description of Artificial Sequence: Synthetic oligonucleotide
  Sense strand starting at position 2234 of SEQ ID NO: 585212
uuucaugaguugggugcaa

SEQ ID NO: 622025 - RNA, 19 nt, Artificial Sequence
  Description of Artificial Sequence: Synthetic oligonucleotide
  Antisense strand to SEQ ID NO: 622024
uugcacccaacucaugaaa

SEQ ID NO: 622026 - RNA, 19 nt, Artificial Sequence
  Description of Artificial Sequence: Synthetic oligonucleotide
  Sense strand starting at position 2236 of SEQ ID NO: 585212
ucaugaguugggugcaaag

SEQ ID NO: 622027 - RNA, 19 nt, Artificial Sequence
  Description of Artificial Sequence: Synthetic oligonucleotide
  Antisense strand to SEQ ID NO: 622026
cuuugcacccaacucauga

SEQ ID NO: 622028 - RNA, 19 nt, Artificial Sequence
  Description of Artificial Sequence: Synthetic oligonucleotide
  Sense strand starting at position 3024 of SEQ ID NO: 585212
gcauauaguuacuuauaug

SEQ ID NO: 622029 - RNA, 19 nt, Artificial Sequence
  Description of Artificial Sequence: Synthetic oligonucleotide
  Antisense strand to SEQ ID NO: 622028
cauauaaguaacuauaugc

SEQ ID NO: 622030 - RNA, 19 nt, Artificial Sequence
  Description of Artificial Sequence: Synthetic oligonucleotide
  Sense strand starting at position 3412 of SEQ ID NO: 585212
augacuuucugauaggcca

SEQ ID NO: 622031 - RNA, 19 nt, Artificial Sequence
  Description of Artificial Sequence: Synthetic oligonucleotide
  Antisense strand to SEQ ID NO: 622030
uggccuaucagaaagucau

SEQ ID NO: 622032 - RNA, 19 nt, Artificial Sequence
  Description of Artificial Sequence: Synthetic oligonucleotide
  Sense strand starting at position 3433 of SEQ ID NO: 585212
ugacaaauguugcaggaca

SEQ ID NO: 622033 - RNA, 19 nt, Artificial Sequence
  Description of Artificial Sequence: Synthetic oligonucleotide
  Antisense strand to SEQ ID NO: 622032
uguccugcaacauuuguca

SEQ ID NO: 622034 - RNA, 19 nt, Artificial Sequence
  Description of Artificial Sequence: Synthetic oligonucleotide
  Sense strand starting at position 3784 of SEQ ID NO: 585212
uucgcauuuaugggaagcu

SEQ ID NO: 622035 - RNA, 19 nt, Artificial Sequence
  Description of Artificial Sequence: Synthetic oligonucleotide
  Antisense strand to SEQ ID NO: 622034
agcuucccauaaaugcgaa

SEQ ID NO: 622036 - RNA, 19 nt, Artificial Sequence
  Description of Artificial Sequence: Synthetic oligonucleotide
  Sense strand starting at position 11 of SEQ ID NO: 585213
uacagaggucaaugauauu

SEQ ID NO: 622037 - RNA, 19 nt, Artificial Sequence
  Description of Artificial Sequence: Synthetic oligonucleotide
  Antisense strand to SEQ ID NO: 622036
aauaucauugaccucugua

SEQ ID NO: 622038 - RNA, 19 nt, Artificial Sequence
  Description of Artificial Sequence: Synthetic oligonucleotide
  Sense strand starting at position 207 of SEQ ID NO: 585213
guugcuauaucugcagaga

SEQ ID NO: 622039 - RNA, 19 nt, Artificial Sequence
  Description of Artificial Sequence: Synthetic oligonucleotide
  Antisense strand to SEQ ID NO: 622038
ucucugcagauauagcaac

SEQ ID NO: 622040 - RNA, 19 nt, Artificial Sequence
  Description of Artificial Sequence: Synthetic oligonucleotide
  Sense strand starting at position 208 of SEQ ID NO: 585213
uugcuauaucugcagagag

SEQ ID NO: 622041 - RNA, 19 nt, Artificial Sequence
  Description of Artificial Sequence: Synthetic oligonucleotide
  Antisense strand to SEQ ID NO: 622040
cucucugcagauauagcaa

SEQ ID NO: 622042 - RNA, 19 nt, Artificial Sequence
  Description of Artificial Sequence: Synthetic oligonucleotide
  Sense strand starting at position 464 of SEQ ID NO: 585213
gaggaugugcuuuguaaac

SEQ ID NO: 622043 - RNA, 19 nt, Artificial Sequence
  Description of Artificial Sequence: Synthetic oligonucleotide
  Antisense strand to SEQ ID NO: 622042
guuuacaaagcacauccuc

SEQ ID NO: 622044 - RNA, 19 nt, Artificial Sequence
  Description of Artificial Sequence: Synthetic oligonucleotide
  Sense strand starting at position 466 of SEQ ID NO: 585213
ggaugugcuuuguaaacaa

SEQ ID NO: 622045 - RNA, 19 nt, Artificial Sequence
  Description of Artificial Sequence: Synthetic oligonucleotide
  Antisense strand to SEQ ID NO: 622044
uuguuuacaaagcacaucc

SEQ ID NO: 622046 - RNA, 19 nt, Artificial Sequence
  Description of Artificial Sequence: Synthetic oligonucleotide
  Sense strand starting at position 752 of SEQ ID NO: 585213
gcaucugucucccgcuuau

SEQ ID NO: 622047 - RNA, 19 nt, Artificial Sequence
  Description of Artificial Sequence: Synthetic oligonucleotide
  Antisense strand to SEQ ID NO: 622046
auaagcgggagacagaugc

SEQ ID NO: 622048 - RNA, 19 nt, Artificial Sequence
  Description of Artificial Sequence: Synthetic oligonucleotide
  Sense strand starting at position 762 of SEQ ID NO: 585213
cccgcuuaucccugggcaa

SEQ ID NO: 622049 - RNA, 19 nt, Artificial Sequence
  Description of Artificial Sequence: Synthetic oligonucleotide
  Antisense strand to SEQ ID NO: 622048
uugcccagggauaagcggg

SEQ ID NO: 622050 - RNA, 19 nt, Artificial Sequence
  Description of Artificial Sequence: Synthetic oligonucleotide
  Sense strand starting at position 763 of SEQ ID NO: 585213
ccgcuuaucccugggcaau

SEQ ID NO: 622051 - RNA, 19 nt, Artificial Sequence
  Description of Artificial Sequence: Synthetic oligonucleotide
  Antisense strand to SEQ ID NO: 622050
auugcccagggauaagcgg

SEQ ID NO: 622052 - RNA, 19 nt, Artificial Sequence
  Description of Artificial Sequence: Synthetic oligonucleotide
  Sense strand starting at position 764 of SEQ ID NO: 585213
cgcuuaucccugggcaaug

SEQ ID NO: 622053 - RNA, 19 nt, Artificial Sequence
  Description of Artificial Sequence: Synthetic oligonucleotide
  Antisense strand to SEQ ID NO: 622052
cauugcccagggauaagcg

SEQ ID NO: 622054 - RNA, 19 nt, Artificial Sequence
  Description of Artificial Sequence: Synthetic oligonucleotide
  Sense strand starting at position 811 of SEQ ID NO: 585213
uguuccaucuacugacaua

SEQ ID NO: 622055 - RNA, 19 nt, Artificial Sequence
  Description of Artificial Sequence: Synthetic oligonucleotide
  Antisense strand to SEQ ID NO: 622054
uaugucaguagauggaaca

SEQ ID NO: 622056 - RNA, 19 nt, Artificial Sequence
  Description of Artificial Sequence: Synthetic oligonucleotide
  Sense strand starting at position 950 of SEQ ID NO: 585213
gacacagagacgugaguuu

SEQ ID NO: 622057 - RNA, 19 nt, Artificial Sequence
  Description of Artificial Sequence: Synthetic oligonucleotide
  Antisense strand to SEQ ID NO: 622056
aaacucacgucucuguguc

SEQ ID NO: 622058 - RNA, 19 nt, Artificial Sequence
  Description of Artificial Sequence: Synthetic oligonucleotide
  Sense strand starting at position 959 of SEQ ID NO: 585213
acgugaguuuguucacguu

SEQ ID NO: 622059 - RNA, 19 nt, Artificial Sequence
  Description of Artificial Sequence: Synthetic oligonucleotide
  Antisense strand to SEQ ID NO: 622058
aacgugaacaaacucacgu

SEQ ID NO: 622060 - RNA, 19 nt, Artificial Sequence
  Description of Artificial Sequence: Synthetic oligonucleotide
  Sense strand starting at position 1234 of SEQ ID NO: 585213
cagggaugcuuagaaauau

SEQ ID NO: 622061 - RNA, 19 nt, Artificial Sequence
  Description of Artificial Sequence: Synthetic oligonucleotide
  Antisense strand to SEQ ID NO: 622060
auauuucuaagcaucccug

SEQ ID NO: 622062 - RNA, 19 nt, Artificial Sequence
  Description of Artificial Sequence: Synthetic oligonucleotide
  Sense strand starting at position 1243 of SEQ ID NO: 585213
uuagaaauauccuagagug

SEQ ID NO: 622063 - RNA, 19 nt, Artificial Sequence
  Description of Artificial Sequence: Synthetic oligonucleotide
  Antisense strand to SEQ ID NO: 622062
cacucuaggauauuucuaa

SEQ ID NO: 622064 - RNA, 19 nt, Artificial Sequence
  Description of Artificial Sequence: Synthetic oligonucleotide
  Sense strand starting at position 1340 of SEQ ID NO: 585213
uggccaugaguugguagua

SEQ ID NO: 622065 - RNA, 19 nt, Artificial Sequence
  Description of Artificial Sequence: Synthetic oligonucleotide
  Antisense strand to SEQ ID NO: 622064
uacuaccaacucauggcca

SEQ ID NO: 622066 - RNA, 19 nt, Artificial Sequence
  Description of Artificial Sequence: Synthetic oligonucleotide
  Sense strand starting at position 1370 of SEQ ID NO: 585213
gaauaugacuugucgucga

SEQ ID NO: 622067 - RNA, 19 nt, Artificial Sequence
  Description of Artificial Sequence: Synthetic oligonucleotide
  Antisense strand to SEQ ID NO: 622066
ucgacgacaagucauauuc

SEQ ID NO: 622068 - RNA, 19 nt, Artificial Sequence
  Description of Artificial Sequence: Synthetic oligonucleotide
  Sense strand starting at position 1374 of SEQ ID NO: 585213
augacuugucgucgagcua

SEQ ID NO: 622069 - RNA, 19 nt, Artificial Sequence
  Description of Artificial Sequence: Synthetic oligonucleotide
  Antisense strand to SEQ ID NO: 622068
uagcucgacgacaagucau

SEQ ID NO: 622070 - RNA, 19 nt, Artificial Sequence
  Description of Artificial Sequence: Synthetic oligonucleotide
  Sense strand starting at position 1375 of SEQ ID NO: 585213
ugacuugucgucgagcuaa

SEQ ID NO: 622071 - RNA, 19 nt, Artificial Sequence
  Description of Artificial Sequence: Synthetic oligonucleotide
  Antisense strand to SEQ ID NO: 622070
uuagcucgacgacaaguca

SEQ ID NO: 622072 - RNA, 19 nt, Artificial Sequence
  Description of Artificial Sequence: Synthetic oligonucleotide
  Sense strand starting at position 1377 of SEQ ID NO: 585213
acuugucgucgagcuaauu

SEQ ID NO: 622073 - RNA, 19 nt, Artificial Sequence
  Description of Artificial Sequence: Synthetic oligonucleotide
  Antisense strand to SEQ ID NO: 622072
aauuagcucgacgacaagu

SEQ ID NO: 622074 - RNA, 19 nt, Artificial Sequence
  Description of Artificial Sequence: Synthetic oligonucleotide
  Sense strand starting at position 1378 of SEQ ID NO: 585213
cuugucgucgagcuaauua

SEQ ID NO: 622075 - RNA, 19 nt, Artificial Sequence
  Description of Artificial Sequence: Synthetic oligonucleotide
  Antisense strand to SEQ ID NO: 622074
uaauuagcucgacgacaag

SEQ ID NO: 622076 - RNA, 19 nt, Artificial Sequence
  Description of Artificial Sequence: Synthetic oligonucleotide
  Sense strand starting at position 1386 of SEQ ID NO: 585213
cgagcuaauuaguggcaga

SEQ ID NO: 622077 - RNA, 19 nt, Artificial Sequence
  Description of Artificial Sequence: Synthetic oligonucleotide
  Antisense strand to SEQ ID NO: 622076
ucugccacuaauuagcucg

SEQ ID NO: 622078 - RNA, 19 nt, Artificial Sequence
  Description of Artificial Sequence: Synthetic oligonucleotide
  Sense strand starting at position 1514 of SEQ ID NO: 585213
acaauuguguguugacuau

SEQ ID NO: 622079 - RNA, 19 nt, Artificial Sequence
  Description of Artificial Sequence: Synthetic oligonucleotide
  Antisense strand to SEQ ID NO: 622078
auagucaacacacaauugu

SEQ ID NO: 622080 - RNA, 19 nt, Artificial Sequence
  Description of Artificial Sequence: Synthetic oligonucleotide
  Sense strand starting at position 1518 of SEQ ID NO: 585213
uuguguguugacuauauau

SEQ ID NO: 622081 - RNA, 19 nt, Artificial Sequence
  Description of Artificial Sequence: Synthetic oligonucleotide
  Antisense strand to SEQ ID NO: 622080
auauauagucaacacacaa

SEQ ID NO: 622082 - RNA, 19 nt, Artificial Sequence
  Description of Artificial Sequence: Synthetic oligonucleotide
  Sense strand starting at position 1627 of SEQ ID NO: 585213
gucauuguuucccauaccu

SEQ ID NO: 622083 - RNA, 19 nt, Artificial Sequence
  Description of Artificial Sequence: Synthetic oligonucleotide
  Antisense strand to SEQ ID NO: 622082
agguaugggaaacaaugac

SEQ ID NO: 622084 - RNA, 19 nt, Artificial Sequence
  Description of Artificial Sequence: Synthetic oligonucleotide
  Sense strand starting at position 1749 of SEQ ID NO: 585213
acaccaagauggcaugaua

SEQ ID NO: 622085 - RNA, 19 nt, Artificial Sequence
  Description of Artificial Sequence: Synthetic oligonucleotide
  Antisense strand to SEQ ID NO: 622084
uaucaugccaucuuggugu

SEQ ID NO: 622086 - RNA, 19 nt, Artificial Sequence
  Description of Artificial Sequence: Synthetic oligonucleotide
  Sense strand starting at position 1757 of SEQ ID NO: 585213
auggcaugauaugaguaaa

SEQ ID NO: 622087 - RNA, 19 nt, Artificial Sequence
  Description of Artificial Sequence: Synthetic oligonucleotide
  Antisense strand to SEQ ID NO: 622086
uuuacucauaucaugccau

SEQ ID NO: 622088 - RNA, 19 nt, Artificial Sequence
  Description of Artificial Sequence: Synthetic oligonucleotide
  Sense strand starting at position 1798 of SEQ ID NO: 585213
ggacacauauuaguguauu

SEQ ID NO: 622089 - RNA, 19 nt, Artificial Sequence
  Description of Artificial Sequence: Synthetic oligonucleotide
  Antisense strand to SEQ ID NO: 622088
aauacacuaauaugugucc

SEQ ID NO: 622090 - RNA, 19 nt, Artificial Sequence
  Description of Artificial Sequence: Synthetic oligonucleotide
  Sense strand starting at position 1856 of SEQ ID NO: 585213
agagauuuauaagaucagu

SEQ ID NO: 622091 - RNA, 19 nt, Artificial Sequence
  Description of Artificial Sequence: Synthetic oligonucleotide
  Antisense strand to SEQ ID NO: 622090
acugaucuuauaaaucucu

SEQ ID NO: 622092 - RNA, 19 nt, Artificial Sequence
  Description of Artificial Sequence: Synthetic oligonucleotide
  Sense strand starting at position 1873 of SEQ ID NO: 585213
guacuuacuuuguuaaaug

SEQ ID NO: 622093 - RNA, 19 nt, Artificial Sequence
  Description of Artificial Sequence: Synthetic oligonucleotide
  Antisense strand to SEQ ID NO: 622092
cauuuaacaaaguaaguac

SEQ ID NO: 622094 - RNA, 19 nt, Artificial Sequence
  Description of Artificial Sequence: Synthetic oligonucleotide
  Sense strand starting at position 1884 of SEQ ID NO: 585213
guuaaaugcugucaccuuu

SEQ ID NO: 622095 - RNA, 19 nt, Artificial Sequence
  Description of Artificial Sequence: Synthetic oligonucleotide
  Antisense strand to SEQ ID NO: 622094
aaaggugacagcauuuaac

SEQ ID NO: 622096 - RNA, 19 nt, Artificial Sequence
  Description of Artificial Sequence: Synthetic oligonucleotide
  Sense strand starting at position 1913 of SEQ ID NO: 585213
aaccgaauuccagguccua

SEQ ID NO: 622097 - RNA, 19 nt, Artificial Sequence
  Description of Artificial Sequence: Synthetic oligonucleotide
  Antisense strand to SEQ ID NO: 622096
uaggaccuggaauucgguu

SEQ ID NO: 622098 - RNA, 19 nt, Artificial Sequence
  Description of Artificial Sequence: Synthetic oligonucleotide
  Sense strand starting at position 1964 of SEQ ID NO: 585213
guucccucccacugaaaga

SEQ ID NO: 622099 - RNA, 19 nt, Artificial Sequence
  Description of Artificial Sequence: Synthetic oligonucleotide
  Antisense strand to SEQ ID NO: 622098
ucuuucagugggagggaac

SEQ ID NO: 622100 - RNA, 19 nt, Artificial Sequence
  Description of Artificial Sequence: Synthetic oligonucleotide
  Sense strand starting at position 2104 of SEQ ID NO: 585213
caagguugguaaucaaagu

SEQ ID NO: 622101 - RNA, 19 nt, Artificial Sequence
  Description of Artificial Sequence: Synthetic oligonucleotide
  Antisense strand to SEQ ID NO: 622100
acuuugauuaccaaccuug

SEQ ID NO: 622102 - RNA, 19 nt, Artificial Sequence
  Description of Artificial Sequence: Synthetic oligonucleotide
  Sense strand starting at position 2198 of SEQ ID NO: 585213
ucaugaguuggaugcaaag

SEQ ID NO: 622103 - RNA, 19 nt, Artificial Sequence
  Description of Artificial Sequence: Synthetic oligonucleotide
  Antisense strand to SEQ ID NO: 622102
cuuugcauccaacucauga

SEQ ID NO: 622104 - RNA, 19 nt, Artificial Sequence
  Description of Artificial Sequence: Synthetic oligonucleotide
  Sense strand starting at position 2424 of SEQ ID NO: 585213
uuuaucguuuaccugaaau

SEQ ID NO: 622105 - RNA, 19 nt, Artificial Sequence
  Description of Artificial Sequence: Synthetic oligonucleotide
  Antisense strand to SEQ ID NO: 622104
auuucagguaaacgauaaa

SEQ ID NO: 622106 - RNA, 19 nt, Artificial Sequence
  Description of Artificial Sequence: Synthetic oligonucleotide
  Sense strand starting at position 3439 of SEQ ID NO: 585213
ccacauagucuacauugua

SEQ ID NO: 622107 - RNA, 19 nt, Artificial Sequence
  Description of Artificial Sequence: Synthetic oligonucleotide
  Antisense strand to SEQ ID NO: 622106
uacaauguagacuaugugg

SEQ ID NO: 622108 - RNA, 19 nt, Artificial Sequence
  Description of Artificial Sequence: Synthetic oligonucleotide
  Sense strand starting at position 3726 of SEQ ID NO: 585213
cuuuguugcuucuuguaaa

SEQ ID NO: 622109 - RNA, 19 nt, Artificial Sequence
  Description of Artificial Sequence: Synthetic oligonucleotide
  Antisense strand to SEQ ID NO: 622108
uuuacaagaagcaacaaag

SEQ ID NO: 622110 - RNA, 19 nt, Artificial Sequence
  Description of Artificial Sequence: Synthetic oligonucleotide
  Sense strand starting at position 3727 of SEQ ID NO: 585213
uuuguugcuucuuguaaac

SEQ ID NO: 622111 - RNA, 19 nt, Artificial Sequence
  Description of Artificial Sequence: Synthetic oligonucleotide
  Antisense strand to SEQ ID NO: 622110
guuuacaagaagcaacaaa

SEQ ID NO: 622112 - RNA, 19 nt, Artificial Sequence
  Description of Artificial Sequence: Synthetic oligonucleotide
  Sense strand starting at position 3729 of SEQ ID NO: 585213
uguugcuucuuguaaaccu

SEQ ID NO: 622113 - RNA, 19 nt, Artificial Sequence
  Description of Artificial Sequence: Synthetic oligonucleotide
  Antisense strand to SEQ ID NO: 622112
agguuuacaagaagcaaca

SEQ ID NO: 622114 - RNA, 19 nt, Artificial Sequence
  Description of Artificial Sequence: Synthetic oligonucleotide
  Sense strand starting at position 405 of SEQ ID NO: 585214
aguucaguccgugcuuuau

SEQ ID NO: 622115 - RNA, 19 nt, Artificial Sequence
  Description of Artificial Sequence: Synthetic oligonucleotide
  Antisense strand to SEQ ID NO: 622114
auaaagcacggacugaacu

SEQ ID NO: 622116 - RNA, 19 nt, Artificial Sequence
  Description of Artificial Sequence: Synthetic oligonucleotide
  Sense strand starting at position 434 of SEQ ID NO: 585214
auggcuagauaucucaaga

SEQ ID NO: 622117 - RNA, 19 nt, Artificial Sequence
  Description of Artificial Sequence: Synthetic oligonucleotide
  Antisense strand to SEQ ID NO: 622116
ucuugagauaucuagccau

SEQ ID NO: 622118 - RNA, 19 nt, Artificial Sequence
  Description of Artificial Sequence: Synthetic oligonucleotide
  Sense strand starting at position 511 of SEQ ID NO: 585214
aguagcauagaguaauuaa

SEQ ID NO: 622119 - RNA, 19 nt, Artificial Sequence
  Description of Artificial Sequence: Synthetic oligonucleotide
  Antisense strand to SEQ ID NO: 622118
uuaauuacucuaugcuacu

SEQ ID NO: 622120 - RNA, 19 nt, Artificial Sequence
  Description of Artificial Sequence: Synthetic oligonucleotide
  Sense strand starting at position 732 of SEQ ID NO: 585214
acuugagcccaagauguua

SEQ ID NO: 622121 - RNA, 19 nt, Artificial Sequence
  Description of Artificial Sequence: Synthetic oligonucleotide
  Antisense strand to SEQ ID NO: 622120
uaacaucuugggcucaagu

SEQ ID NO: 622122 - RNA, 19 nt, Artificial Sequence
  Description of Artificial Sequence: Synthetic oligonucleotide
  Sense strand starting at position 945 of SEQ ID NO: 585214
gaaacaucgugacuacaca

SEQ ID NO: 622123 - RNA, 19 nt, Artificial Sequence
  Description of Artificial Sequence: Synthetic oligonucleotide
  Antisense strand to SEQ ID NO: 622122
uguguagucacgauguuuc

SEQ ID NO: 622124 - RNA, 19 nt, Artificial Sequence
  Description of Artificial Sequence: Synthetic oligonucleotide
  Sense strand starting at position 1065 of SEQ ID NO: 585214
uguucuguuggacagggaa

SEQ ID NO: 622125 - RNA, 19 nt, Artificial Sequence
  Description of Artificial Sequence: Synthetic oligonucleotide
  Antisense strand to SEQ ID NO: 622124
uucccuguccaacagaaca

SEQ ID NO: 622126 - RNA, 19 nt, Artificial Sequence
  Description of Artificial Sequence: Synthetic oligonucleotide
  Sense strand starting at position 1067 of SEQ ID NO: 585214
uucuguuggacagggaaua

SEQ ID NO: 622127 - RNA, 19 nt, Artificial Sequence
  Description of Artificial Sequence: Synthetic oligonucleotide
  Antisense strand to SEQ ID NO: 622126
uauucccuguccaacagaa

SEQ ID NO: 622128 - RNA, 19 nt, Artificial Sequence
  Description of Artificial Sequence: Synthetic oligonucleotide
  Sense strand starting at position 1068 of SEQ ID NO: 585214
ucuguuggacagggaauau

SEQ ID NO: 622129 - RNA, 19 nt, Artificial Sequence
  Description of Artificial Sequence: Synthetic oligonucleotide
  Antisense strand to SEQ ID NO: 622128
auauucccuguccaacaga

SEQ ID NO: 622130 - RNA, 19 nt, Artificial Sequence
  Description of Artificial Sequence: Synthetic oligonucleotide
  Sense strand starting at position 1101 of SEQ ID NO: 585214
ggguuauuauuauucuuag

SEQ ID NO: 622131 - RNA, 19 nt, Artificial Sequence
  Description of Artificial Sequence: Synthetic oligonucleotide
  Antisense strand to SEQ ID NO: 622130
cuaagaauaauaauaaccc

SEQ ID NO: 622132 - RNA, 19 nt, Artificial Sequence
  Description of Artificial Sequence: Synthetic oligonucleotide
  Sense strand starting at position 1379 of SEQ ID NO: 585214
guaaacuaaucuguguaaa

SEQ ID NO: 622133 - RNA, 19 nt, Artificial Sequence
  Description of Artificial Sequence: Synthetic oligonucleotide
  Antisense strand to SEQ ID NO: 622132
uuuacacagauuaguuuac

SEQ ID NO: 622134 - RNA, 19 nt, Artificial Sequence
  Description of Artificial Sequence: Synthetic oligonucleotide
  Sense strand starting at position 1418 of SEQ ID NO: 585214
uuuagauccugauugucaa

SEQ ID NO: 622135 - RNA, 19 nt, Artificial Sequence
  Description of Artificial Sequence: Synthetic oligonucleotide
  Antisense strand to SEQ ID NO: 622134
uugacaaucaggaucuaaa

SEQ ID NO: 622136 - RNA, 19 nt, Artificial Sequence
  Description of Artificial Sequence: Synthetic oligonucleotide
  Sense strand starting at position 1483 of SEQ ID NO: 585214
uacgaccauccagauguau

SEQ ID NO: 622137 - RNA, 19 nt, Artificial Sequence
  Description of Artificial Sequence: Synthetic oligonucleotide
  Antisense strand to SEQ ID NO: 622136
auacaucuggauggucgua

SEQ ID NO: 622138 - RNA, 19 nt, Artificial Sequence
  Description of Artificial Sequence: Synthetic oligonucleotide
  Sense strand starting at position 1664 of SEQ ID NO: 585214
cacugaugugguuguauuu

SEQ ID NO: 622139 - RNA, 19 nt, Artificial Sequence
  Description of Artificial Sequence: Synthetic oligonucleotide
  Antisense strand to SEQ ID NO: 622138
aaauacaaccacaucagug

SEQ ID NO: 622140 - RNA, 19 nt, Artificial Sequence
  Description of Artificial Sequence: Synthetic oligonucleotide
  Sense strand starting at position 1683 of SEQ ID NO: 585214
ucagauugcccacaaugau

SEQ ID NO: 622141 - RNA, 19 nt, Artificial Sequence
  Description of Artificial Sequence: Synthetic oligonucleotide
  Antisense strand to SEQ ID NO: 622140
aucauugugggcaaucuga

SEQ ID NO: 622142 - RNA, 19 nt, Artificial Sequence
  Description of Artificial Sequence: Synthetic oligonucleotide
  Sense strand starting at position 1914 of SEQ ID NO: 585214
uuaugaagauguuuaaggu

SEQ ID NO: 622143 - RNA, 19 nt, Artificial Sequence
  Description of Artificial Sequence: Synthetic oligonucleotide
  Antisense strand to SEQ ID NO: 622142
accuuaaacaucuucauaa

SEQ ID NO: 622144 - RNA, 19 nt, Artificial Sequence
  Description of Artificial Sequence: Synthetic oligonucleotide
  Sense strand starting at position 1921 of SEQ ID NO: 585214
gauguuuaaggucaauacu

SEQ ID NO: 622145 - RNA, 19 nt, Artificial Sequence
  Description of Artificial Sequence: Synthetic oligonucleotide
  Antisense strand to SEQ ID NO: 622144
aguauugaccuuaaacauc

SEQ ID NO: 622146 - RNA, 19 nt, Artificial Sequence
  Description of Artificial Sequence: Synthetic oligonucleotide
  Sense strand starting at position 1924 of SEQ ID NO: 585214
guuuaaggucaauacuaac

SEQ ID NO: 622147 - RNA, 19 nt, Artificial Sequence
  Description of Artificial Sequence: Synthetic oligonucleotide
  Antisense strand to SEQ ID NO: 622146
guuaguauugaccuuaaac

SEQ ID NO: 622148 - RNA, 19 nt, Artificial Sequence
  Description of Artificial Sequence: Synthetic oligonucleotide
  Sense strand starting at position 1930 of SEQ ID NO: 585214
ggucaauacuaacuugagu

SEQ ID NO: 622149 - RNA, 19 nt, Artificial Sequence
  Description of Artificial Sequence: Synthetic oligonucleotide
  Antisense strand to SEQ ID NO: 622148
acucaaguuaguauugacc

SEQ ID NO: 622150 - RNA, 19 nt, Artificial Sequence
  Description of Artificial Sequence: Synthetic oligonucleotide
  Sense strand starting at position 1935 of SEQ ID NO: 585214
auacuaacuugaguaaagu

SEQ ID NO: 622151 - RNA, 19 nt, Artificial Sequence
  Description of Artificial Sequence: Synthetic oligonucleotide
  Antisense strand to SEQ ID NO: 622150
acuuuacucaaguuaguau

SEQ ID NO: 622152 - RNA, 19 nt, Artificial Sequence
  Description of Artificial Sequence: Synthetic oligonucleotide
  Sense strand starting at position 2088 of SEQ ID NO: 585214
uccagaguuccaugaucug

SEQ ID NO: 622153 - RNA, 19 nt, Artificial Sequence
  Description of Artificial Sequence: Synthetic oligonucleotide
  Antisense strand to SEQ ID NO: 622152
cagaucauggaacucugga

SEQ ID NO: 622154 - RNA, 19 nt, Artificial Sequence
  Description of Artificial Sequence: Synthetic oligonucleotide
  Sense strand starting at position 2098 of SEQ ID NO: 585214
caugaucugcuaggaagaa

SEQ ID NO: 622155 - RNA, 19 nt, Artificial Sequence
  Description of Artificial Sequence: Synthetic oligonucleotide
  Antisense strand to SEQ ID NO: 622154
uucuuccuagcagaucaug

SEQ ID NO: 622156 - RNA, 19 nt, Artificial Sequence
  Description of Artificial Sequence: Synthetic oligonucleotide
  Sense strand starting at position 2171 of SEQ ID NO: 585214
cuauuuggcugccucagaa

SEQ ID NO: 622157 - RNA, 19 nt, Artificial Sequence
  Description of Artificial Sequence: Synthetic oligonucleotide
  Antisense strand to SEQ ID NO: 622156
uucugaggcagccaaauag

SEQ ID NO: 622158 - RNA, 19 nt, Artificial Sequence
  Description of Artificial Sequence: Synthetic oligonucleotide
  Sense strand starting at position 2212 of SEQ ID NO: 585214
ugugaacacugcuuaagga

SEQ ID NO: 622159 - RNA, 19 nt, Artificial Sequence
  Description of Artificial Sequence: Synthetic oligonucleotide
  Antisense strand to SEQ ID NO: 622158
uccuuaagcaguguucaca

SEQ ID NO: 622160 - RNA, 19 nt, Artificial Sequence
  Description of Artificial Sequence: Synthetic oligonucleotide
  Sense strand starting at position 2250 of SEQ ID NO: 585214
gcagauuuaugacagauga

SEQ ID NO: 622161 - RNA, 19 nt, Artificial Sequence
  Description of Artificial Sequence: Synthetic oligonucleotide
  Antisense strand to SEQ ID NO: 622160
ucaucugucauaaaucugc

SEQ ID NO: 622162 - RNA, 19 nt, Artificial Sequence
  Description of Artificial Sequence: Synthetic oligonucleotide
  Sense strand starting at position 2291 of SEQ ID NO: 585214
gaaagugucauaggagagu

SEQ ID NO: 622163 - RNA, 19 nt, Artificial Sequence
  Description of Artificial Sequence: Synthetic oligonucleotide
  Antisense strand to SEQ ID NO: 622162
acucuccuaugacacuuuc

SEQ ID NO: 622164 - RNA, 19 nt, Artificial Sequence
  Description of Artificial Sequence: Synthetic oligonucleotide
  Sense strand starting at position 2294 of SEQ ID NO: 585214
agugucauaggagagucau

SEQ ID NO: 622165 - RNA, 19 nt, Artificial Sequence
  Description of Artificial Sequence: Synthetic oligonucleotide
  Antisense strand to SEQ ID NO: 622164
augacucuccuaugacacu

SEQ ID NO: 622166 - RNA, 19 nt, Artificial Sequence
  Description of Artificial Sequence: Synthetic oligonucleotide
  Sense strand starting at position 2348 of SEQ ID NO: 585214
uagggagauugccuucuaa

SEQ ID NO: 622167 - RNA, 19 nt, Artificial Sequence
  Description of Artificial Sequence: Synthetic oligonucleotide
  Antisense strand to SEQ ID NO: 622166
uuagaaggcaaucucccua

SEQ ID NO: 622168 - RNA, 19 nt, Artificial Sequence
  Description of Artificial Sequence: Synthetic oligonucleotide
  Sense strand starting at position 2418 of SEQ ID NO: 585214
caaagaaucuggcugaguu

SEQ ID NO: 622169 - RNA, 19 nt, Artificial Sequence
  Description of Artificial Sequence: Synthetic oligonucleotide
  Antisense strand to SEQ ID NO: 622168
aacucagccagauucuuug

SEQ ID NO: 622170 - RNA, 19 nt, Artificial Sequence
  Description of Artificial Sequence: Synthetic oligonucleotide
  Sense strand starting at position 2478 of SEQ ID NO: 585214
cgaggucauuugcagauuu

SEQ ID NO: 622171 - RNA, 19 nt, Artificial Sequence
  Description of Artificial Sequence: Synthetic oligonucleotide
  Antisense strand to SEQ ID NO: 622170
aaaucugcaaaugaccucg

SEQ ID NO: 622172 - RNA, 19 nt, Artificial Sequence
  Description of Artificial Sequence: Synthetic oligonucleotide
  Sense strand starting at position 2861 of SEQ ID NO: 585214
uugacaauauuugaagcaa

SEQ ID NO: 622173 - RNA, 19 nt, Artificial Sequence
  Description of Artificial Sequence: Synthetic oligonucleotide
  Antisense strand to SEQ ID NO: 622172
uugcuucaaauauugucaa

SEQ ID NO: 622174 - RNA, 19 nt, Artificial Sequence
  Description of Artificial Sequence: Synthetic oligonucleotide
  Sense strand starting at position 2975 of SEQ ID NO: 585214
aguacaaguuucccaaaua

SEQ ID NO: 622175 - RNA, 19 nt, Artificial Sequence
  Description of Artificial Sequence: Synthetic oligonucleotide
  Antisense strand to SEQ ID NO: 622174
uauuugggaaacuuguacu

SEQ ID NO: 622176 - RNA, 19 nt, Artificial Sequence
  Description of Artificial Sequence: Synthetic oligonucleotide
  Sense strand starting at position 3323 of SEQ ID NO: 585214
cucgauugacgacauacau

SEQ ID NO: 622177 - RNA, 19 nt, Artificial Sequence
  Description of Artificial Sequence: Synthetic oligonucleotide
  Antisense strand to SEQ ID NO: 622176
auguaugucgucaaucgag

SEQ ID NO: 622178 - RNA, 19 nt, Artificial Sequence
  Description of Artificial Sequence: Synthetic oligonucleotide
  Sense strand starting at position 3401 of SEQ ID NO: 585214
ucauauccgagacauggua

SEQ ID NO: 622179 - RNA, 19 nt, Artificial Sequence
  Description of Artificial Sequence: Synthetic oligonucleotide
  Antisense strand to SEQ ID NO: 622178
uaccaugucucggauauga

SEQ ID NO: 622180 - RNA, 19 nt, Artificial Sequence
  Description of Artificial Sequence: Synthetic oligonucleotide
  Sense strand starting at position 3409 of SEQ ID NO: 585214
gagacaugguaugucuuau

SEQ ID NO: 622181 - RNA, 19 nt, Artificial Sequence
  Description of Artificial Sequence: Synthetic oligonucleotide
  Antisense strand to SEQ ID NO: 622180
auaagacauaccaugucuc

SEQ ID NO: 622182 - RNA, 19 nt, Artificial Sequence
  Description of Artificial Sequence: Synthetic oligonucleotide
  Sense strand starting at position 3527 of SEQ ID NO: 585214
uguggaagauacuuuguga

SEQ ID NO: 622183 - RNA, 19 nt, Artificial Sequence
  Description of Artificial Sequence: Synthetic oligonucleotide
  Antisense strand to SEQ ID NO: 622182
ucacaaaguaucuuccaca

SEQ ID NO: 622184 - RNA, 19 nt, Artificial Sequence
  Description of Artificial Sequence: Synthetic oligonucleotide
  Sense strand starting at position 3530 of SEQ ID NO: 585214
ggaagauacuuugugacua

SEQ ID NO: 622185 - RNA, 19 nt, Artificial Sequence
  Description of Artificial Sequence: Synthetic oligonucleotide
  Antisense strand to SEQ ID NO: 622184
uagucacaaaguaucuucc

SEQ ID NO: 622186 - RNA, 19 nt, Artificial Sequence
  Description of Artificial Sequence: Synthetic oligonucleotide
  Sense strand starting at position 3589 of SEQ ID NO: 585214
uuuagcauccauuauggau

SEQ ID NO: 622187 - RNA, 19 nt, Artificial Sequence
  Description of Artificial Sequence: Synthetic oligonucleotide
  Antisense strand to SEQ ID NO: 622186
auccauaauggaugcuaaa

SEQ ID NO: 622188 - RNA, 19 nt, Artificial Sequence
  Description of Artificial Sequence: Synthetic oligonucleotide
  Sense strand starting at position 3687 of SEQ ID NO: 585214
ucgaauucuucuguaaaga

SEQ ID NO: 622189 - RNA, 19 nt, Artificial Sequence
  Description of Artificial Sequence: Synthetic oligonucleotide
  Antisense strand to SEQ ID NO: 622188
ucuuuacagaagaauucga

SEQ ID NO: 622190 - RNA, 19 nt, Artificial Sequence
  Description of Artificial Sequence: Synthetic oligonucleotide
  Sense strand starting at position 3688 of SEQ ID NO: 585214
cgaauucuucuguaaagaa

SEQ ID NO: 622191 - RNA, 19 nt, Artificial Sequence
  Description of Artificial Sequence: Synthetic oligonucleotide
  Antisense strand to SEQ ID NO: 622190
uucuuuacagaagaauucg

SEQ ID NO: 622192 - RNA, 19 nt, Artificial Sequence
  Description of Artificial Sequence: Synthetic oligonucleotide
  Sense strand starting at position 3897 of SEQ ID NO: 585214
cucuuauugugagcauuuc

SEQ ID NO: 622193 - RNA, 19 nt, Artificial Sequence
  Description of Artificial Sequence: Synthetic oligonucleotide
  Antisense strand to SEQ ID NO: 622192
gaaaugcucacaauaagag

SEQ ID NO: 622194 - RNA, 19 nt, Artificial Sequence
  Description of Artificial Sequence: Synthetic oligonucleotide
  Sense strand starting at position 48 of SEQ ID NO: 585215
gccuguuugagacaaucag

SEQ ID NO: 622195 - RNA, 19 nt, Artificial Sequence
  Description of Artificial Sequence: Synthetic oligonucleotide
  Antisense strand to SEQ ID NO: 622194
cugauugucucaaacaggc

SEQ ID NO: 622196 - RNA, 19 nt, Artificial Sequence
  Description of Artificial Sequence: Synthetic oligonucleotide
  Sense strand starting at position 247 of SEQ ID NO: 585215
acaagauuagcauagagcu

SEQ ID NO: 622197 - RNA, 19 nt, Artificial Sequence
  Description of Artificial Sequence: Synthetic oligonucleotide
  Antisense strand to SEQ ID NO: 622196
agcucuaugcuaaucuugu

SEQ ID NO: 622198 - RNA, 19 nt, Artificial Sequence
  Description of Artificial Sequence: Synthetic oligonucleotide
  Sense strand starting at position 253 of SEQ ID NO: 585215
uuagcauagagcugaugau

SEQ ID NO: 622199 - RNA, 19 nt, Artificial Sequence
  Description of Artificial Sequence: Synthetic oligonucleotide
  Antisense strand to SEQ ID NO: 622198
aucaucagcucuaugcuaa

SEQ ID NO: 622200 - RNA, 19 nt, Artificial Sequence
  Description of Artificial Sequence: Synthetic oligonucleotide
  Sense strand starting at position 254 of SEQ ID NO: 585215
uagcauagagcugaugauu

SEQ ID NO: 622201 - RNA, 19 nt, Artificial Sequence
  Description of Artificial Sequence: Synthetic oligonucleotide
  Antisense strand to SEQ ID NO: 622200
aaucaucagcucuaugcua

SEQ ID NO: 622202 - RNA, 19 nt, Artificial Sequence
  Description of Artificial Sequence: Synthetic oligonucleotide
  Sense strand starting at position 260 of SEQ ID NO: 585215
agagcugaugauugcugaa

SEQ ID NO: 622203 - RNA, 19 nt, Artificial Sequence
  Description of Artificial Sequence: Synthetic oligonucleotide
  Antisense strand to SEQ ID NO: 622202
uucagcaaucaucagcucu

SEQ ID NO: 622204 - RNA, 19 nt, Artificial Sequence
  Description of Artificial Sequence: Synthetic oligonucleotide
  Sense strand starting at position 274 of SEQ ID NO: 585215
cugaagucgggugaugagu

SEQ ID NO: 622205 - RNA, 19 nt, Artificial Sequence
  Description of Artificial Sequence: Synthetic oligonucleotide
  Antisense strand to SEQ ID NO: 622204
acucaucacccgacuucag

SEQ ID NO: 622206 - RNA, 19 nt, Artificial Sequence
  Description of Artificial Sequence: Synthetic oligonucleotide
  Sense strand starting at position 393 of SEQ ID NO: 585215
acacauauguaagcaagau

SEQ ID NO: 622207 - RNA, 19 nt, Artificial Sequence
  Description of Artificial Sequence: Synthetic oligonucleotide
  Antisense strand to SEQ ID NO: 622206
aucuugcuuacauaugugu

SEQ ID NO: 622208 - RNA, 19 nt, Artificial Sequence
  Description of Artificial Sequence: Synthetic oligonucleotide
  Sense strand starting at position 425 of SEQ ID NO: 585215
guuugaagccacugaagaa

SEQ ID NO: 622209 - RNA, 19 nt, Artificial Sequence
  Description of Artificial Sequence: Synthetic oligonucleotide
  Antisense strand to SEQ ID NO: 622208
uucuucaguggcuucaaac

SEQ ID NO: 622210 - RNA, 19 nt, Artificial Sequence
  Description of Artificial Sequence: Synthetic oligonucleotide
  Sense strand starting at position 454 of SEQ ID NO: 585215
uuacccugagaaugcauaa

SEQ ID NO: 622211 - RNA, 19 nt, Artificial Sequence
  Description of Artificial Sequence: Synthetic oligonucleotide
  Antisense strand to SEQ ID NO: 622210
uuaugcauucucaggguaa

SEQ ID NO: 622212 - RNA, 19 nt, Artificial Sequence
  Description of Artificial Sequence: Synthetic oligonucleotide
  Sense strand starting at position 634 of SEQ ID NO: 585215
agggaugguaucugacuca

SEQ ID NO: 622213 - RNA, 19 nt, Artificial Sequence
  Description of Artificial Sequence: Synthetic oligonucleotide
  Antisense strand to SEQ ID NO: 622212
ugagucagauaccaucccu

SEQ ID NO: 622214 - RNA, 19 nt, Artificial Sequence
  Description of Artificial Sequence: Synthetic oligonucleotide
  Sense strand starting at position 639 of SEQ ID NO: 585215
ugguaucugacucagugaa

SEQ ID NO: 622215 - RNA, 19 nt, Artificial Sequence
  Description of Artificial Sequence: Synthetic oligonucleotide
  Antisense strand to SEQ ID NO: 622214
uucacugagucagauacca

SEQ ID NO: 622216 - RNA, 19 nt, Artificial Sequence
  Description of Artificial Sequence: Synthetic oligonucleotide
  Sense strand starting at position 740 of SEQ ID NO: 585215
guaugacaaauccgugaag

SEQ ID NO: 622217 - RNA, 19 nt, Artificial Sequence
  Description of Artificial Sequence: Synthetic oligonucleotide
  Antisense strand to SEQ ID NO: 622216
cuucacggauuugucauac

SEQ ID NO: 622218 - RNA, 19 nt, Artificial Sequence
  Description of Artificial Sequence: Synthetic oligonucleotide
  Sense strand starting at position 741 of SEQ ID NO: 585215
uaugacaaauccgugaaga

SEQ ID NO: 622219 - RNA, 19 nt, Artificial Sequence
  Description of Artificial Sequence: Synthetic oligonucleotide
  Antisense strand to SEQ ID NO: 622218
ucuucacggauuugucaua

SEQ ID NO: 622220 - RNA, 19 nt, Artificial Sequence
  Description of Artificial Sequence: Synthetic oligonucleotide
  Sense strand starting at position 742 of SEQ ID NO: 585215
augacaaauccgugaagaa

SEQ ID NO: 622221 - RNA, 19 nt, Artificial Sequence
  Description of Artificial Sequence: Synthetic oligonucleotide
  Antisense strand to SEQ ID NO: 622220
uucuucacggauuugucau

SEQ ID NO: 622222 - RNA, 19 nt, Artificial Sequence
  Description of Artificial Sequence: Synthetic oligonucleotide
  Sense strand starting at position 980 of SEQ ID NO: 585215
acgggaaacuguucuuuau

SEQ ID NO: 622223 - RNA, 19 nt, Artificial Sequence
  Description of Artificial Sequence: Synthetic oligonucleotide
  Antisense strand to SEQ ID NO: 622222
auaaagaacaguuucccgu

SEQ ID NO: 622224 - RNA, 19 nt, Artificial Sequence
  Description of Artificial Sequence: Synthetic oligonucleotide
  Sense strand starting at position 1091 of SEQ ID NO: 585215
augacuucuuauccuggau

SEQ ID NO: 622225 - RNA, 19 nt, Artificial Sequence
  Description of Artificial Sequence: Synthetic oligonucleotide
  Antisense strand to SEQ ID NO: 622224
auccaggauaagaagucau

SEQ ID NO: 622226 - RNA, 19 nt, Artificial Sequence
  Description of Artificial Sequence: Synthetic oligonucleotide
  Sense strand starting at position 2103 of SEQ ID NO: 585215
ugauauuugcuaugcuggu

SEQ ID NO: 622227 - RNA, 19 nt, Artificial Sequence
  Description of Artificial Sequence: Synthetic oligonucleotide
  Antisense strand to SEQ ID NO: 622226
accagcauagcaaauauca

SEQ ID NO: 622228 - RNA, 19 nt, Artificial Sequence
  Description of Artificial Sequence: Synthetic oligonucleotide
  Sense strand starting at position 2104 of SEQ ID NO: 585215
gauauuugcuaugcugguu

SEQ ID NO: 622229 - RNA, 19 nt, Artificial Sequence
  Description of Artificial Sequence: Synthetic oligonucleotide
  Antisense strand to SEQ ID NO: 622228
aaccagcauagcaaauauc

SEQ ID NO: 622230 - RNA, 19 nt, Artificial Sequence
  Description of Artificial Sequence: Synthetic oligonucleotide
  Sense strand starting at position 2107 of SEQ ID NO: 585215
auuugcuaugcugguuaaa

SEQ ID NO: 622231 - RNA, 19 nt, Artificial Sequence
  Description of Artificial Sequence: Synthetic oligonucleotide
  Antisense strand to SEQ ID NO: 622230
uuuaaccagcauagcaaau

SEQ ID NO: 622232 - RNA, 19 nt, Artificial Sequence
  Description of Artificial Sequence: Synthetic oligonucleotide
  Sense strand starting at position 2174 of SEQ ID NO: 585215
uugaccuaaguguaaaguu

SEQ ID NO: 622233 - RNA, 19 nt, Artificial Sequence
  Description of Artificial Sequence: Synthetic oligonucleotide
  Antisense strand to SEQ ID NO: 622232
aacuuuacacuuaggucaa

SEQ ID NO: 622234 - RNA, 19 nt, Artificial Sequence
  Description of Artificial Sequence: Synthetic oligonucleotide
  Sense strand starting at position 2181 of SEQ ID NO: 585215
aaguguaaaguugagacuu

SEQ ID NO: 622235 - RNA, 19 nt, Artificial Sequence
  Description of Artificial Sequence: Synthetic oligonucleotide
  Antisense strand to SEQ ID NO: 622234
aagucucaacuuuacacuu

SEQ ID NO: 622236 - RNA, 19 nt, Artificial Sequence
  Description of Artificial Sequence: Synthetic oligonucleotide
  Sense strand starting at position 2941 of SEQ ID NO: 585215
ugucaaguccgucaggaaa

SEQ ID NO: 622237 - RNA, 19 nt, Artificial Sequence
  Description of Artificial Sequence: Synthetic oligonucleotide
  Antisense strand to SEQ ID NO: 622236
uuuccugacggacuugaca

SEQ ID NO: 622238 - RNA, 19 nt, Artificial Sequence
  Description of Artificial Sequence: Synthetic oligonucleotide
  Sense strand starting at position 3017 of SEQ ID NO: 585215
ugucaacgcuuauuuaauu

SEQ ID NO: 622239 - RNA, 19 nt, Artificial Sequence
  Description of Artificial Sequence: Synthetic oligonucleotide
  Antisense strand to SEQ ID NO: 622238
aauuaaauaagcguugaca

SEQ ID NO: 622240 - RNA, 19 nt, Artificial Sequence
  Description of Artificial Sequence: Synthetic oligonucleotide
  Sense strand starting at position 3138 of SEQ ID NO: 585215
gggacaucuugagauuucu

SEQ ID NO: 622241 - RNA, 19 nt, Artificial Sequence
  Description of Artificial Sequence: Synthetic oligonucleotide
  Antisense strand to SEQ ID NO: 622240
agaaaucucaagauguccc

SEQ ID NO: 622242 - RNA, 19 nt, Artificial Sequence
  Description of Artificial Sequence: Synthetic oligonucleotide
  Sense strand starting at position 3175 of SEQ ID NO: 585215
agagacaagugcucuauag

SEQ ID NO: 622243 - RNA, 19 nt, Artificial Sequence
  Description of Artificial Sequence: Synthetic oligonucleotide
  Antisense strand to SEQ ID NO: 622242
cuauagagcacuugucucu

SEQ ID NO: 622244 - RNA, 19 nt, Artificial Sequence
  Description of Artificial Sequence: Synthetic oligonucleotide
  Sense strand starting at position 3177 of SEQ ID NO: 585215
agacaagugcucuauaguc

SEQ ID NO: 622245 - RNA, 19 nt, Artificial Sequence
  Description of Artificial Sequence: Synthetic oligonucleotide
  Antisense strand to SEQ ID NO: 622244
gacuauagagcacuugucu

SEQ ID NO: 622246 - RNA, 19 nt, Artificial Sequence
  Description of Artificial Sequence: Synthetic oligonucleotide
  Sense strand starting at position 3304 of SEQ ID NO: 585215
cuaucagggcuauauuaug

SEQ ID NO: 622247 - RNA, 19 nt, Artificial Sequence
  Description of Artificial Sequence: Synthetic oligonucleotide
  Antisense strand to SEQ ID NO: 622246
cauaauauagcccugauag

SEQ ID NO: 622248 - RNA, 19 nt, Artificial Sequence
  Description of Artificial Sequence: Synthetic oligonucleotide
  Sense strand starting at position 3357 of SEQ ID NO: 585215
ugaaauauaugccuucgaa

SEQ ID NO: 622249 - RNA, 19 nt, Artificial Sequence
  Description of Artificial Sequence: Synthetic oligonucleotide
  Antisense strand to SEQ ID NO: 622248
uucgaaggcauauauuuca

SEQ ID NO: 622250 - RNA, 19 nt, Artificial Sequence
  Description of Artificial Sequence: Synthetic oligonucleotide
  Sense strand starting at position 3393 of SEQ ID NO: 585215
gaggcagcuucugcuauuu

SEQ ID NO: 622251 - RNA, 19 nt, Artificial Sequence
  Description of Artificial Sequence: Synthetic oligonucleotide
  Antisense strand to SEQ ID NO: 622250
aaauagcagaagcugccuc

SEQ ID NO: 622252 - RNA, 19 nt, Artificial Sequence
  Description of Artificial Sequence: Synthetic oligonucleotide
  Sense strand starting at position 3457 of SEQ ID NO: 585215
gagaguaccuugcuugaca

SEQ ID NO: 622253 - RNA, 19 nt, Artificial Sequence
  Description of Artificial Sequence: Synthetic oligonucleotide
  Antisense strand to SEQ ID NO: 622252
ugucaagcaagguacucuc

SEQ ID NO: 622254 - RNA, 19 nt, Artificial Sequence
  Description of Artificial Sequence: Synthetic oligonucleotide
  Sense strand starting at position 3458 of SEQ ID NO: 585215
agaguaccuugcuugacaa

SEQ ID NO: 622255 - RNA, 19 nt, Artificial Sequence
  Description of Artificial Sequence: Synthetic oligonucleotide
  Antisense strand to SEQ ID NO: 622254
uugucaagcaagguacucu

SEQ ID NO: 622256 - RNA, 19 nt, Artificial Sequence
  Description of Artificial Sequence: Synthetic oligonucleotide
  Sense strand starting at position 3615 of SEQ ID NO: 585215
gcaccaugaguuugaagaa

SEQ ID NO: 622257 - RNA, 19 nt, Artificial Sequence
  Description of Artificial Sequence: Synthetic oligonucleotide
  Antisense strand to SEQ ID NO: 622256
uucuucaaacucauggugc

SEQ ID NO: 622258 - RNA, 19 nt, Artificial Sequence
  Description of Artificial Sequence: Synthetic oligonucleotide
  Sense strand starting at position 3624 of SEQ ID NO: 585215
guuugaagaauaugaguaa

SEQ ID NO: 622259 - RNA, 19 nt, Artificial Sequence
  Description of Artificial Sequence: Synthetic oligonucleotide
  Antisense strand to SEQ ID NO: 622258
uuacucauauucuucaaac

SEQ ID NO: 622260 - RNA, 19 nt, Artificial Sequence
  Description of Artificial Sequence: Synthetic oligonucleotide
  Sense strand starting at position 3676 of SEQ ID NO: 585215
agcaauugcuaaucagauc

SEQ ID NO: 622261 - RNA, 19 nt, Artificial Sequence
  Description of Artificial Sequence: Synthetic oligonucleotide
  Antisense strand to SEQ ID NO: 622260
gaucugauuagcaauugcu

SEQ ID NO: 622262 - RNA, 19 nt, Artificial Sequence
  Description of Artificial Sequence: Synthetic oligonucleotide
  Sense strand starting at position 3855 of SEQ ID NO: 585215
gucuguagauuccuagaau

SEQ ID NO: 622263 - RNA, 19 nt, Artificial Sequence
  Description of Artificial Sequence: Synthetic oligonucleotide
  Antisense strand to SEQ ID NO: 622262
auucuaggaaucuacagac

SEQ ID NO: 622264 - RNA, 19 nt, Artificial Sequence
  Description of Artificial Sequence: Synthetic oligonucleotide
  Sense strand starting at position 3858 of SEQ ID NO: 585215
uguagauuccuagaaugua

SEQ ID NO: 622265 - RNA, 19 nt, Artificial Sequence
  Description of Artificial Sequence: Synthetic oligonucleotide
  Antisense strand to SEQ ID NO: 622264
uacauucuaggaaucuaca

SEQ ID NO: 622266 - RNA, 19 nt, Artificial Sequence
  Description of Artificial Sequence: Synthetic oligonucleotide
  Sense strand starting at position 3872 of SEQ ID NO: 585215
auguaaauuccacgagauc

SEQ ID NO: 622267 - RNA, 19 nt, Artificial Sequence
  Description of Artificial Sequence: Synthetic oligonucleotide
  Antisense strand to SEQ ID NO: 622266
gaucucguggaauuuacau

SEQ ID NO: 622268 - RNA, 19 nt, Artificial Sequence
  Description of Artificial Sequence: Synthetic oligonucleotide
  Sense strand starting at position 3921 of SEQ ID NO: 585215
guacauccugguuaguaua

SEQ ID NO: 622269 - RNA, 19 nt, Artificial Sequence
  Description of Artificial Sequence: Synthetic oligonucleotide
  Antisense strand to SEQ ID NO: 622268
uauacuaaccaggauguac

SEQ ID NO: 622270 - RNA, 19 nt, Artificial Sequence
  Description of Artificial Sequence: Synthetic oligonucleotide
  Sense strand starting at position 3923 of SEQ ID NO: 585215
acauccugguuaguauaga

SEQ ID NO: 622271 - RNA, 19 nt, Artificial Sequence
  Description of Artificial Sequence: Synthetic oligonucleotide
  Antisense strand to SEQ ID NO: 622270
ucuauacuaaccaggaugu

SEQ ID NO: 622272 - RNA, 19 nt, Artificial Sequence
  Description of Artificial Sequence: Synthetic oligonucleotide
  Sense strand starting at position 3931 of SEQ ID NO: 585215
guuaguauagaguagguau

SEQ ID NO: 622273 - RNA, 19 nt, Artificial Sequence
  Description of Artificial Sequence: Synthetic oligonucleotide
  Antisense strand to SEQ ID NO: 622272
auaccuacucuauacuaac

SEQ ID NO: 622274 - RNA, 19 nt, Artificial Sequence
  Description of Artificial Sequence: Synthetic oligonucleotide
  Sense strand starting at position 320 of SEQ ID NO: 585216
gucuuucucuacuuugaca

SEQ ID NO: 622275 - RNA, 19 nt, Artificial Sequence
  Description of Artificial Sequence: Synthetic oligonucleotide
  Antisense strand to SEQ ID NO: 622274
ugucaaaguagagaaagac

SEQ ID NO: 622276 - RNA, 19 nt, Artificial Sequence
  Description of Artificial Sequence: Synthetic oligonucleotide
  Sense strand starting at position 351 of SEQ ID NO: 585216
gagugaguugaagacuagu

SEQ ID NO: 622277 - RNA, 19 nt, Artificial Sequence
  Description of Artificial Sequence: Synthetic oligonucleotide
  Antisense strand to SEQ ID NO: 622276
acuagucuucaacucacuc

SEQ ID NO: 622278 - RNA, 19 nt, Artificial Sequence
  Description of Artificial Sequence: Synthetic oligonucleotide
  Sense strand starting at position 362 of SEQ ID NO: 585216
agacuaguauaacuguauu

SEQ ID NO: 622279 - RNA, 19 nt, Artificial Sequence
  Description of Artificial Sequence: Synthetic oligonucleotide
  Antisense strand to SEQ ID NO: 622278
aauacaguuauacuagucu

SEQ ID NO: 622280 - RNA, 19 nt, Artificial Sequence
  Description of Artificial Sequence: Synthetic oligonucleotide
  Sense strand starting at position 396 of SEQ ID NO: 585216
ugggcuuaauuugaaagga

SEQ ID NO: 622281 - RNA, 19 nt, Artificial Sequence
  Description of Artificial Sequence: Synthetic oligonucleotide
  Antisense strand to SEQ ID NO: 622280
uccuuucaaauuaagccca

SEQ ID NO: 622282 - RNA, 19 nt, Artificial Sequence
  Description of Artificial Sequence: Synthetic oligonucleotide
  Sense strand starting at position 424 of SEQ ID NO: 585216
augguaauuccaggaguaa

SEQ ID NO: 622283 - RNA, 19 nt, Artificial Sequence
  Description of Artificial Sequence: Synthetic oligonucleotide
  Antisense strand to SEQ ID NO: 622282
uuacuccuggaauuaccau

SEQ ID NO: 622284 - RNA, 19 nt, Artificial Sequence
  Description of Artificial Sequence: Synthetic oligonucleotide
  Sense strand starting at position 449 of SEQ ID NO: 585216
agaauuacaucucugaggu

SEQ ID NO: 622285 - RNA, 19 nt, Artificial Sequence
  Description of Artificial Sequence: Synthetic oligonucleotide
  Antisense strand to SEQ ID NO: 622284
accucagagauguaauucu

SEQ ID NO: 622286 - RNA, 19 nt, Artificial Sequence
  Description of Artificial Sequence: Synthetic oligonucleotide
  Sense strand starting at position 450 of SEQ ID NO: 585216
gaauuacaucucugaggug

SEQ ID NO: 622287 - RNA, 19 nt, Artificial Sequence
  Description of Artificial Sequence: Synthetic oligonucleotide
  Antisense strand to SEQ ID NO: 622286
caccucagagauguaauuc

SEQ ID NO: 622288 - RNA, 19 nt, Artificial Sequence
  Description of Artificial Sequence: Synthetic oligonucleotide
  Sense strand starting at position 479 of SEQ ID NO: 585216
cacuguuucuuaucggaga

SEQ ID NO: 622289 - RNA, 19 nt, Artificial Sequence
  Description of Artificial Sequence: Synthetic oligonucleotide
  Antisense strand to SEQ ID NO: 622288
ucuccgauaagaaacagug

SEQ ID NO: 622290 - RNA, 19 nt, Artificial Sequence
  Description of Artificial Sequence: Synthetic oligonucleotide
  Sense strand starting at position 481 of SEQ ID NO: 585216
cuguuucuuaucggagaga

SEQ ID NO: 622291 - RNA, 19 nt, Artificial Sequence
  Description of Artificial Sequence: Synthetic oligonucleotide
  Antisense strand to SEQ ID NO: 622290
ucucuccgauaagaaacag

SEQ ID NO: 622292 - RNA, 19 nt, Artificial Sequence
  Description of Artificial Sequence: Synthetic oligonucleotide
  Sense strand starting at position 865 of SEQ ID NO: 585216
ucaaucguucuaugcauuu

SEQ ID NO: 622293 - RNA, 19 nt, Artificial Sequence
  Description of Artificial Sequence: Synthetic oligonucleotide
  Antisense strand to SEQ ID NO: 622292
aaaugcauagaacgauuga

SEQ ID NO: 622294 - RNA, 19 nt, Artificial Sequence
  Description of Artificial Sequence: Synthetic oligonucleotide
  Sense strand starting at position 871 of SEQ ID NO: 585216
guucuaugcauuugucugu

SEQ ID NO: 622295 - RNA, 19 nt, Artificial Sequence
  Description of Artificial Sequence: Synthetic oligonucleotide
  Antisense strand to SEQ ID NO: 622294
acagacaaaugcauagaac

SEQ ID NO: 622296 - RNA, 19 nt, Artificial Sequence
  Description of Artificial Sequence: Synthetic oligonucleotide
  Sense strand starting at position 874 of SEQ ID NO: 585216
cuaugcauuugucuguaau

SEQ ID NO: 622297 - RNA, 19 nt, Artificial Sequence
  Description of Artificial Sequence: Synthetic oligonucleotide
  Antisense strand to SEQ ID NO: 622296
auuacagacaaaugcauag

SEQ ID NO: 622298 - RNA, 19 nt, Artificial Sequence
  Description of Artificial Sequence: Synthetic oligonucleotide
  Sense strand starting at position 876 of SEQ ID NO: 585216
augcauuugucuguaaucu

SEQ ID NO: 622299 - RNA, 19 nt, Artificial Sequence
  Description of Artificial Sequence: Synthetic oligonucleotide
  Antisense strand to SEQ ID NO: 622298
agauuacagacaaaugcau

SEQ ID NO: 622300 - RNA, 19 nt, Artificial Sequence
  Description of Artificial Sequence: Synthetic oligonucleotide
  Sense strand starting at position 1049 of SEQ ID NO: 585216
agcuucuguacagagguua

SEQ ID NO: 622301 - RNA, 19 nt, Artificial Sequence
  Description of Artificial Sequence: Synthetic oligonucleotide
  Antisense strand to SEQ ID NO: 622300
uaaccucuguacagaagcu

SEQ ID NO: 622302 - RNA, 19 nt, Artificial Sequence
  Description of Artificial Sequence: Synthetic oligonucleotide
  Sense strand starting at position 1102 of SEQ ID NO: 585216
ggaaguuuccagugaaugu

SEQ ID NO: 622303 - RNA, 19 nt, Artificial Sequence
  Description of Artificial Sequence: Synthetic oligonucleotide
  Antisense strand to SEQ ID NO: 622302
acauucacuggaaacuucc

SEQ ID NO: 622304 - RNA, 19 nt, Artificial Sequence
  Description of Artificial Sequence: Synthetic oligonucleotide
  Sense strand starting at position 1272 of SEQ ID NO: 585216
gggagagggcgcuacaaau

SEQ ID NO: 622305 - RNA, 19 nt, Artificial Sequence
  Description of Artificial Sequence: Synthetic oligonucleotide
  Antisense strand to SEQ ID NO: 622304
auuuguagcgcccucuccc

SEQ ID NO: 622306 - RNA, 19 nt, Artificial Sequence
  Description of Artificial Sequence: Synthetic oligonucleotide
  Sense strand starting at position 1400 of SEQ ID NO: 585216
uuagcuauccuguagauug

SEQ ID NO: 622307 - RNA, 19 nt, Artificial Sequence
  Description of Artificial Sequence: Synthetic oligonucleotide
  Antisense strand to SEQ ID NO: 622306
caaucuacaggauagcuaa

SEQ ID NO: 622308 - RNA, 19 nt, Artificial Sequence
  Description of Artificial Sequence: Synthetic oligonucleotide
  Sense strand starting at position 1420 of SEQ ID NO: 585216
ccgugaguugguaguacuc

SEQ ID NO: 622309 - RNA, 19 nt, Artificial Sequence
  Description of Artificial Sequence: Synthetic oligonucleotide
  Antisense strand to SEQ ID NO: 622308
gaguacuaccaacucacgg

SEQ ID NO: 622310 - RNA, 19 nt, Artificial Sequence
  Description of Artificial Sequence: Synthetic oligonucleotide
  Sense strand starting at position 1447 of SEQ ID NO: 585216
gaauaugacuugucgucaa

SEQ ID NO: 622311 - RNA, 19 nt, Artificial Sequence
  Description of Artificial Sequence: Synthetic oligonucleotide
  Antisense strand to SEQ ID NO: 622310
uugacgacaagucauauuc

SEQ ID NO: 622312 - RNA, 19 nt, Artificial Sequence
  Description of Artificial Sequence: Synthetic oligonucleotide
  Sense strand starting at position 1840 of SEQ ID NO: 585216
gauggcacgauaugaguaa

SEQ ID NO: 622313 - RNA, 19 nt, Artificial Sequence
  Description of Artificial Sequence: Synthetic oligonucleotide
  Antisense strand to SEQ ID NO: 622312
uuacucauaucgugccauc

SEQ ID NO: 622314 - RNA, 19 nt, Artificial Sequence
  Description of Artificial Sequence: Synthetic oligonucleotide
  Sense strand starting at position 1920 of SEQ ID NO: 585216
gagcaugugaggcaaugua

SEQ ID NO: 622315 - RNA, 19 nt, Artificial Sequence
  Description of Artificial Sequence: Synthetic oligonucleotide
  Antisense strand to SEQ ID NO: 622314
uacauugccucacaugcuc

SEQ ID NO: 622316 - RNA, 19 nt, Artificial Sequence
  Description of Artificial Sequence: Synthetic oligonucleotide
  Sense strand starting at position 1940 of SEQ ID NO: 585216
agggauuuauaagaucagu

SEQ ID NO: 622317 - RNA, 19 nt, Artificial Sequence
  Description of Artificial Sequence: Synthetic oligonucleotide
  Antisense strand to SEQ ID NO: 622316
acugaucuuauaaaucccu

SEQ ID NO: 622318 - RNA, 19 nt, Artificial Sequence
  Description of Artificial Sequence: Synthetic oligonucleotide
  Sense strand starting at position 1956 of SEQ ID NO: 585216
aguacuuaguuuguuaaac

SEQ ID NO: 622319 - RNA, 19 nt, Artificial Sequence
  Description of Artificial Sequence: Synthetic oligonucleotide
  Antisense strand to SEQ ID NO: 622318
guuuaacaaacuaaguacu

SEQ ID NO: 622320 - RNA, 19 nt, Artificial Sequence
  Description of Artificial Sequence: Synthetic oligonucleotide
  Sense strand starting at position 2065 of SEQ ID NO: 585216
ggagaaaggucaaguuagg

SEQ ID NO: 622321 - RNA, 19 nt, Artificial Sequence
  Description of Artificial Sequence: Synthetic oligonucleotide
  Antisense strand to SEQ ID NO: 622320
ccuaacuugaccuuucucc

SEQ ID NO: 622322 - RNA, 19 nt, Artificial Sequence
  Description of Artificial Sequence: Synthetic oligonucleotide
  Sense strand starting at position 2197 of SEQ ID NO: 585216
uggcaauuaguuuaaacaa

SEQ ID NO: 622323 - RNA, 19 nt, Artificial Sequence
  Description of Artificial Sequence: Synthetic oligonucleotide
  Antisense strand to SEQ ID NO: 622322
uuguuuaaacuaauugcca

SEQ ID NO: 622324 - RNA, 19 nt, Artificial Sequence
  Description of Artificial Sequence: Synthetic oligonucleotide
  Sense strand starting at position 2456 of SEQ ID NO: 585216
aguuauaccuauguuccaa

SEQ ID NO: 622325 - RNA, 19 nt, Artificial Sequence
  Description of Artificial Sequence: Synthetic oligonucleotide
  Antisense strand to SEQ ID NO: 622324
uuggaacauagguauaacu

SEQ ID NO: 622326 - RNA, 19 nt, Artificial Sequence
  Description of Artificial Sequence: Synthetic oligonucleotide
  Sense strand starting at position 2568 of SEQ ID NO: 585216
cgggaacccuaucugcaua

SEQ ID NO: 622327 - RNA, 19 nt, Artificial Sequence
  Description of Artificial Sequence: Synthetic oligonucleotide
  Antisense strand to SEQ ID NO: 622326
uaugcagauaggguucccg

SEQ ID NO: 622328 - RNA, 19 nt, Artificial Sequence
  Description of Artificial Sequence: Synthetic oligonucleotide
  Sense strand starting at position 2746 of SEQ ID NO: 585216
uccugugaacgugaucuua

SEQ ID NO: 622329 - RNA, 19 nt, Artificial Sequence
  Description of Artificial Sequence: Synthetic oligonucleotide
  Antisense strand to SEQ ID NO: 622328
uaagaucacguucacagga

SEQ ID NO: 622330 - RNA, 19 nt, Artificial Sequence
  Description of Artificial Sequence: Synthetic oligonucleotide
  Sense strand starting at position 2936 of SEQ ID NO: 585216
ugguguggucacgauccau

SEQ ID NO: 622331 - RNA, 19 nt, Artificial Sequence
  Description of Artificial Sequence: Synthetic oligonucleotide
  Antisense strand to SEQ ID NO: 622330
auggaucgugaccacacca

SEQ ID NO: 622332 - RNA, 19 nt, Artificial Sequence
  Description of Artificial Sequence: Synthetic oligonucleotide
  Sense strand starting at position 2940 of SEQ ID NO: 585216
guggucacgauccaugaaa

SEQ ID NO: 622333 - RNA, 19 nt, Artificial Sequence
  Description of Artificial Sequence: Synthetic oligonucleotide
  Antisense strand to SEQ ID NO: 622332
uuucauggaucgugaccac

SEQ ID NO: 622334 - RNA, 19 nt, Artificial Sequence
  Description of Artificial Sequence: Synthetic oligonucleotide
  Sense strand starting at position 2942 of SEQ ID NO: 585216
ggucacgauccaugaaagu

SEQ ID NO: 622335 - RNA, 19 nt, Artificial Sequence
  Description of Artificial Sequence: Synthetic oligonucleotide
  Antisense strand to SEQ ID NO: 622334
acuuucauggaucgugacc

SEQ ID NO: 622336 - RNA, 19 nt, Artificial Sequence
  Description of Artificial Sequence: Synthetic oligonucleotide
  Sense strand starting at position 3315 of SEQ ID NO: 585216
cagaaagaaugguugucuu

SEQ ID NO: 622337 - RNA, 19 nt, Artificial Sequence
  Description of Artificial Sequence: Synthetic oligonucleotide
  Antisense strand to SEQ ID NO: 622336
aagacaaccauucuuucug

SEQ ID NO: 622338 - RNA, 19 nt, Artificial Sequence
  Description of Artificial Sequence: Synthetic oligonucleotide
  Sense strand starting at position 3318 of SEQ ID NO: 585216
aaagaaugguugucuugua

SEQ ID NO: 622339 - RNA, 19 nt, Artificial Sequence
  Description of Artificial Sequence: Synthetic oligonucleotide
  Antisense strand to SEQ ID NO: 622338
uacaagacaaccauucuuu

SEQ ID NO: 622340 - RNA, 19 nt, Artificial Sequence
  Description of Artificial Sequence: Synthetic oligonucleotide
  Sense strand starting at position 3319 of SEQ ID NO: 585216
aagaaugguugucuuguaa

SEQ ID NO: 622341 - RNA, 19 nt, Artificial Sequence
  Description of Artificial Sequence: Synthetic oligonucleotide
  Antisense strand to SEQ ID NO: 622340
uuacaagacaaccauucuu

SEQ ID NO: 622342 - RNA, 19 nt, Artificial Sequence
  Description of Artificial Sequence: Synthetic oligonucleotide
  Sense strand starting at position 3328 of SEQ ID NO: 585216
ugucuuguaaauggauaag

SEQ ID NO: 622343 - RNA, 19 nt, Artificial Sequence
  Description of Artificial Sequence: Synthetic oligonucleotide
  Antisense strand to SEQ ID NO: 622342
cuuauccauuuacaagaca

SEQ ID NO: 622344 - RNA, 19 nt, Artificial Sequence
  Description of Artificial Sequence: Synthetic oligonucleotide
  Sense strand starting at position 3405 of SEQ ID NO: 585216
ugucauuacccagaauggu

SEQ ID NO: 622345 - RNA, 19 nt, Artificial Sequence
  Description of Artificial Sequence: Synthetic oligonucleotide
  Antisense strand to SEQ ID NO: 622344
accauucuggguaaugaca

SEQ ID NO: 622346 - RNA, 19 nt, Artificial Sequence
  Description of Artificial Sequence: Synthetic oligonucleotide
  Sense strand starting at position 3493 of SEQ ID NO: 585216
ugacaaauugaauguugca

SEQ ID NO: 622347 - RNA, 19 nt, Artificial Sequence
  Description of Artificial Sequence: Synthetic oligonucleotide
  Antisense strand to SEQ ID NO: 622346
ugcaacauucaauuuguca

SEQ ID NO: 622348 - RNA, 19 nt, Artificial Sequence
  Description of Artificial Sequence: Synthetic oligonucleotide
  Sense strand starting at position 3658 of SEQ ID NO: 585216
agucgacaaauaggagauu

SEQ ID NO: 622349 - RNA, 19 nt, Artificial Sequence
  Description of Artificial Sequence: Synthetic oligonucleotide
  Antisense strand to SEQ ID NO: 622348
aaucuccuauuugucgacu

SEQ ID NO: 622350 - RNA, 19 nt, Artificial Sequence
  Description of Artificial Sequence: Synthetic oligonucleotide
  Sense strand starting at position 3687 of SEQ ID NO: 585216
uuaguauguaauuggaaag

SEQ ID NO: 622351 - RNA, 19 nt, Artificial Sequence
  Description of Artificial Sequence: Synthetic oligonucleotide
  Antisense strand to SEQ ID NO: 622350
cuuuccaauuacauacuaa

SEQ ID NO: 622352 - RNA, 19 nt, Artificial Sequence
  Description of Artificial Sequence: Synthetic oligonucleotide
  Sense strand starting at position 3863 of SEQ ID NO: 585216
gagagacuuccuugggcug

SEQ ID NO: 622353 - RNA, 19 nt, Artificial Sequence
  Description of Artificial Sequence: Synthetic oligonucleotide
  Antisense strand to SEQ ID NO: 622352
cagcccaaggaagucucuc

SEQ ID NO: 622354 - RNA, 19 nt, Artificial Sequence
  Description of Artificial Sequence: Synthetic oligonucleotide
  Sense strand starting at position 285 of SEQ ID NO: 585217
agaggugaguaggguauuu

SEQ ID NO: 622355 - RNA, 19 nt, Artificial Sequence
  Description of Artificial Sequence: Synthetic oligonucleotide
  Antisense strand to SEQ ID NO: 622354
aaauacccuacucaccucu

SEQ ID NO: 622356 - RNA, 19 nt, Artificial Sequence
  Description of Artificial Sequence: Synthetic oligonucleotide
  Sense strand starting at position 374 of SEQ ID NO: 585217
uguuccacagagugaaauu

SEQ ID NO: 622357 - RNA, 19 nt, Artificial Sequence
  Description of Artificial Sequence: Synthetic oligonucleotide
  Antisense strand to SEQ ID NO: 622356
aauuucacucuguggaaca

SEQ ID NO: 622358 - RNA, 19 nt, Artificial Sequence
  Description of Artificial Sequence: Synthetic oligonucleotide
  Sense strand starting at position 430 of SEQ ID NO: 585217
aucagagccucauuacaga

SEQ ID NO: 622359 - RNA, 19 nt, Artificial Sequence
  Description of Artificial Sequence: Synthetic oligonucleotide
  Antisense strand to SEQ ID NO: 622358
ucuguaaugaggcucugau

SEQ ID NO: 622360 - RNA, 19 nt, Artificial Sequence
  Description of Artificial Sequence: Synthetic oligonucleotide
  Sense strand starting at position 433 of SEQ ID NO: 585217
agagccucauuacagauau

SEQ ID NO: 622361 - RNA, 19 nt, Artificial Sequence
  Description of Artificial Sequence: Synthetic oligonucleotide
  Antisense strand to SEQ ID NO: 622360
auaucuguaaugaggcucu

SEQ ID NO: 622362 - RNA, 19 nt, Artificial Sequence
  Description of Artificial Sequence: Synthetic oligonucleotide
  Sense strand starting at position 457 of SEQ ID NO: 585217
auaacucuuuaagagggaa

SEQ ID NO: 622363 - RNA, 19 nt, Artificial Sequence
  Description of Artificial Sequence: Synthetic oligonucleotide
  Antisense strand to SEQ ID NO: 622362
uucccucuuaaagaguuau

SEQ ID NO: 622364 - RNA, 19 nt, Artificial Sequence
  Description of Artificial Sequence: Synthetic oligonucleotide
  Sense strand starting at position 491 of SEQ ID NO: 585217
aagaucucagcugggaaau

SEQ ID NO: 622365 - RNA, 19 nt, Artificial Sequence
  Description of Artificial Sequence: Synthetic oligonucleotide
  Antisense strand to SEQ ID NO: 622364
auuucccagcugagaucuu

SEQ ID NO: 622366 - RNA, 19 nt, Artificial Sequence
  Description of Artificial Sequence: Synthetic oligonucleotide
  Sense strand starting at position 492 of SEQ ID NO: 585217
agaucucagcugggaaaua

SEQ ID NO: 622367 - RNA, 19 nt, Artificial Sequence
  Description of Artificial Sequence: Synthetic oligonucleotide
  Antisense strand to SEQ ID NO: 622366
uauuucccagcugagaucu

SEQ ID NO: 622368 - RNA, 19 nt, Artificial Sequence
  Description of Artificial Sequence: Synthetic oligonucleotide
  Sense strand starting at position 493 of SEQ ID NO: 585217
gaucucagcugggaaauaa

SEQ ID NO: 622369 - RNA, 19 nt, Artificial Sequence
  Description of Artificial Sequence: Synthetic oligonucleotide
  Antisense strand to SEQ ID NO: 622368
uuauuucccagcugagauc

SEQ ID NO: 622370 - RNA, 19 nt, Artificial Sequence
  Description of Artificial Sequence: Synthetic oligonucleotide
  Sense strand starting at position 605 of SEQ ID NO: 585217
ggaacagcaguuugggaaa

SEQ ID NO: 622371 - RNA, 19 nt, Artificial Sequence
  Description of Artificial Sequence: Synthetic oligonucleotide
  Antisense strand to SEQ ID NO: 622370
uuucccaaacugcuguucc

SEQ ID NO: 622372 - RNA, 19 nt, Artificial Sequence
  Description of Artificial Sequence: Synthetic oligonucleotide
  Sense strand starting at position 617 of SEQ ID NO: 585217
ugggaaauguagcuguuga

SEQ ID NO: 622373 - RNA, 19 nt, Artificial Sequence
  Description of Artificial Sequence: Synthetic oligonucleotide
  Antisense strand to SEQ ID NO: 622372
ucaacagcuacauuuccca

SEQ ID NO: 622374 - RNA, 19 nt, Artificial Sequence
  Description of Artificial Sequence: Synthetic oligonucleotide
  Sense strand starting at position 618 of SEQ ID NO: 585217
gggaaauguagcuguugag

SEQ ID NO: 622375 - RNA, 19 nt, Artificial Sequence
  Description of Artificial Sequence: Synthetic oligonucleotide
  Antisense strand to SEQ ID NO: 622374
cucaacagcuacauuuccc

SEQ ID NO: 622376 - RNA, 19 nt, Artificial Sequence
  Description of Artificial Sequence: Synthetic oligonucleotide
  Sense strand starting at position 622 of SEQ ID NO: 585217
aauguagcuguugagaaau

SEQ ID NO: 622377 - RNA, 19 nt, Artificial Sequence
  Description of Artificial Sequence: Synthetic oligonucleotide
  Antisense strand to SEQ ID NO: 622376
auuucucaacagcuacauu

SEQ ID NO: 622378 - RNA, 19 nt, Artificial Sequence
  Description of Artificial Sequence: Synthetic oligonucleotide
  Sense strand starting at position 624 of SEQ ID NO: 585217
uguagcuguugagaaauuu

SEQ ID NO: 622379 - RNA, 19 nt, Artificial Sequence
  Description of Artificial Sequence: Synthetic oligonucleotide
  Antisense strand to SEQ ID NO: 622378
aaauuucucaacagcuaca

SEQ ID NO: 622380 - RNA, 19 nt, Artificial Sequence
  Description of Artificial Sequence: Synthetic oligonucleotide
  Sense strand starting at position 640 of SEQ ID NO: 585217
uuuguaucuggcugagacu

SEQ ID NO: 622381 - RNA, 19 nt, Artificial Sequence
  Description of Artificial Sequence: Synthetic oligonucleotide
  Antisense strand to SEQ ID NO: 622380
agucucagccagauacaaa

SEQ ID NO: 622382 - RNA, 19 nt, Artificial Sequence
  Description of Artificial Sequence: Synthetic oligonucleotide
  Sense strand starting at position 641 of SEQ ID NO: 585217
uuguaucuggcugagacuu

SEQ ID NO: 622383 - RNA, 19 nt, Artificial Sequence
  Description of Artificial Sequence: Synthetic oligonucleotide
  Antisense strand to SEQ ID NO: 622382
aagucucagccagauacaa

SEQ ID NO: 622384 - RNA, 19 nt, Artificial Sequence
  Description of Artificial Sequence: Synthetic oligonucleotide
  Sense strand starting at position 1017 of SEQ ID NO: 585217
gggcuucucaccugaagac

SEQ ID NO: 622385 - RNA, 19 nt, Artificial Sequence
  Description of Artificial Sequence: Synthetic oligonucleotide
  Antisense strand to SEQ ID NO: 622384
gucuucaggugagaagccc

SEQ ID NO: 622386 - RNA, 19 nt, Artificial Sequence
  Description of Artificial Sequence: Synthetic oligonucleotide
  Sense strand starting at position 1018 of SEQ ID NO: 585217
ggcuucucaccugaagaca

SEQ ID NO: 622387 - RNA, 19 nt, Artificial Sequence
  Description of Artificial Sequence: Synthetic oligonucleotide
  Antisense strand to SEQ ID NO: 622386
ugucuucaggugagaagcc

SEQ ID NO: 622388 - RNA, 19 nt, Artificial Sequence
  Description of Artificial Sequence: Synthetic oligonucleotide
  Sense strand starting at position 1170 of SEQ ID NO: 585217
gaggaaugcaaacgucaga

SEQ ID NO: 622389 - RNA, 19 nt, Artificial Sequence
  Description of Artificial Sequence: Synthetic oligonucleotide
  Antisense strand to SEQ ID NO: 622388
ucugacguuugcauuccuc

SEQ ID NO: 622390 - RNA, 19 nt, Artificial Sequence
  Description of Artificial Sequence: Synthetic oligonucleotide
  Sense strand starting at position 1173 of SEQ ID NO: 585217
gaaugcaaacgucagaagu

SEQ ID NO: 622391 - RNA, 19 nt, Artificial Sequence
  Description of Artificial Sequence: Synthetic oligonucleotide
  Antisense strand to SEQ ID NO: 622390
acuucugacguuugcauuc

SEQ ID NO: 622392 - RNA, 19 nt, Artificial Sequence
  Description of Artificial Sequence: Synthetic oligonucleotide
  Sense strand starting at position 1394 of SEQ ID NO: 585217
auuaccaagugacagaauu

SEQ ID NO: 622393 - RNA, 19 nt, Artificial Sequence
  Description of Artificial Sequence: Synthetic oligonucleotide
  Antisense strand to SEQ ID NO: 622392
aauucugucacuugguaau

SEQ ID NO: 622394 - RNA, 19 nt, Artificial Sequence
  Description of Artificial Sequence: Synthetic oligonucleotide
  Sense strand starting at position 1418 of SEQ ID NO: 585217
cuguccaguguuugcaaga

SEQ ID NO: 622395 - RNA, 19 nt, Artificial Sequence
  Description of Artificial Sequence: Synthetic oligonucleotide
  Antisense strand to SEQ ID NO: 622394
ucuugcaaacacuggacag

SEQ ID NO: 622396 - RNA, 19 nt, Artificial Sequence
  Description of Artificial Sequence: Synthetic oligonucleotide
  Sense strand starting at position 1419 of SEQ ID NO: 585217
uguccaguguuugcaagau

SEQ ID NO: 622397 - RNA, 19 nt, Artificial Sequence
  Description of Artificial Sequence: Synthetic oligonucleotide
  Antisense strand to SEQ ID NO: 622396
aucuugcaaacacuggaca

SEQ ID NO: 622398 - RNA, 19 nt, Artificial Sequence
  Description of Artificial Sequence: Synthetic oligonucleotide
  Sense strand starting at position 1423 of SEQ ID NO: 585217
caguguuugcaagaucauu

SEQ ID NO: 622399 - RNA, 19 nt, Artificial Sequence
  Description of Artificial Sequence: Synthetic oligonucleotide
  Antisense strand to SEQ ID NO: 622398
aaugaucuugcaaacacug

SEQ ID NO: 622400 - RNA, 19 nt, Artificial Sequence
  Description of Artificial Sequence: Synthetic oligonucleotide
  Sense strand starting at position 1456 of SEQ ID NO: 585217
cuugucucaucuuuggcua

SEQ ID NO: 622401 - RNA, 19 nt, Artificial Sequence
  Description of Artificial Sequence: Synthetic oligonucleotide
  Antisense strand to SEQ ID NO: 622400
uagccaaagaugagacaag

SEQ ID NO: 622402 - RNA, 19 nt, Artificial Sequence
  Description of Artificial Sequence: Synthetic oligonucleotide
  Sense strand starting at position 1457 of SEQ ID NO: 585217
uugucucaucuuuggcuaa

SEQ ID NO: 622403 - RNA, 19 nt, Artificial Sequence
  Description of Artificial Sequence: Synthetic oligonucleotide
  Antisense strand to SEQ ID NO: 622402
uuagccaaagaugagacaa

SEQ ID NO: 622404 - RNA, 19 nt, Artificial Sequence
  Description of Artificial Sequence: Synthetic oligonucleotide
  Sense strand starting at position 1459 of SEQ ID NO: 585217
gucucaucuuuggcuaaac

SEQ ID NO: 622405 - RNA, 19 nt, Artificial Sequence
  Description of Artificial Sequence: Synthetic oligonucleotide
  Antisense strand to SEQ ID NO: 622404
guuuagccaaagaugagac

SEQ ID NO: 622406 - RNA, 19 nt, Artificial Sequence
  Description of Artificial Sequence: Synthetic oligonucleotide
  Sense strand starting at position 2064 of SEQ ID NO: 585217
ugccuuugcucuccuuaga

SEQ ID NO: 622407 - RNA, 19 nt, Artificial Sequence
  Description of Artificial Sequence: Synthetic oligonucleotide
  Antisense strand to SEQ ID NO: 622406
ucuaaggagagcaaaggca

SEQ ID NO: 622408 - RNA, 19 nt, Artificial Sequence
  Description of Artificial Sequence: Synthetic oligonucleotide
  Sense strand starting at position 2710 of SEQ ID NO: 585217
ggcgguuuccacgaguuaa

SEQ ID NO: 622409 - RNA, 19 nt, Artificial Sequence
  Description of Artificial Sequence: Synthetic oligonucleotide
  Antisense strand to SEQ ID NO: 622408
uuaacucguggaaaccgcc

SEQ ID NO: 622410 - RNA, 19 nt, Artificial Sequence
  Description of Artificial Sequence: Synthetic oligonucleotide
  Sense strand starting at position 2714 of SEQ ID NO: 585217
guuuccacgaguuaacgau

SEQ ID NO: 622411 - RNA, 19 nt, Artificial Sequence
  Description of Artificial Sequence: Synthetic oligonucleotide
  Antisense strand to SEQ ID NO: 622410
aucguuaacucguggaaac

SEQ ID NO: 622412 - RNA, 19 nt, Artificial Sequence
  Description of Artificial Sequence: Synthetic oligonucleotide
  Sense strand starting at position 2718 of SEQ ID NO: 585217
ccacgaguuaacgauuaac

SEQ ID NO: 622413 - RNA, 19 nt, Artificial Sequence
  Description of Artificial Sequence: Synthetic oligonucleotide
  Antisense strand to SEQ ID NO: 622412
guuaaucguuaacucgugg

SEQ ID NO: 622414 - RNA, 19 nt, Artificial Sequence
  Description of Artificial Sequence: Synthetic oligonucleotide
  Sense strand starting at position 2762 of SEQ ID NO: 585217
cuaaguacucaguaaaucu

SEQ ID NO: 622415 - RNA, 19 nt, Artificial Sequence
  Description of Artificial Sequence: Synthetic oligonucleotide
  Antisense strand to SEQ ID NO: 622414
agauuuacugaguacuuag

SEQ ID NO: 622416 - RNA, 19 nt, Artificial Sequence
  Description of Artificial Sequence: Synthetic oligonucleotide
  Sense strand starting at position 2853 of SEQ ID NO: 585217
acuauuugcucugauuuga

SEQ ID NO: 622417 - RNA, 19 nt, Artificial Sequence
  Description of Artificial Sequence: Synthetic oligonucleotide
  Antisense strand to SEQ ID NO: 622416
ucaaaucagagcaaauagu

SEQ ID NO: 622418 - RNA, 19 nt, Artificial Sequence
  Description of Artificial Sequence: Synthetic oligonucleotide
  Sense strand starting at position 2858 of SEQ ID NO: 585217
uugcucugauuugauuuau

SEQ ID NO: 622419 - RNA, 19 nt, Artificial Sequence
  Description of Artificial Sequence: Synthetic oligonucleotide
  Antisense strand to SEQ ID NO: 622418
auaaaucaaaucagagcaa

SEQ ID NO: 622420 - RNA, 19 nt, Artificial Sequence
  Description of Artificial Sequence: Synthetic oligonucleotide
  Sense strand starting at position 2979 of SEQ ID NO: 585217
acuggagcccggcaagauu

SEQ ID NO: 622421 - RNA, 19 nt, Artificial Sequence
  Description of Artificial Sequence: Synthetic oligonucleotide
  Antisense strand to SEQ ID NO: 622420
aaucuugccgggcuccagu

SEQ ID NO: 622422 - RNA, 19 nt, Artificial Sequence
  Description of Artificial Sequence: Synthetic oligonucleotide
  Sense strand starting at position 2988 of SEQ ID NO: 585217
cggcaagauuaagaaauuu

SEQ ID NO: 622423 - RNA, 19 nt, Artificial Sequence
  Description of Artificial Sequence: Synthetic oligonucleotide
  Antisense strand to SEQ ID NO: 622422
aaauuucuuaaucuugccg

SEQ ID NO: 622424 - RNA, 19 nt, Artificial Sequence
  Description of Artificial Sequence: Synthetic oligonucleotide
  Sense strand starting at position 3571 of SEQ ID NO: 585217
ugguaaugacuaugcaaga

SEQ ID NO: 622425 - RNA, 19 nt, Artificial Sequence
  Description of Artificial Sequence: Synthetic oligonucleotide
  Antisense strand to SEQ ID NO: 622424
ucuugcauagucauuacca

SEQ ID NO: 622426 - RNA, 19 nt, Artificial Sequence
  Description of Artificial Sequence: Synthetic oligonucleotide
  Sense strand starting at position 3572 of SEQ ID NO: 585217
gguaaugacuaugcaagac

SEQ ID NO: 622427 - RNA, 19 nt, Artificial Sequence
  Description of Artificial Sequence: Synthetic oligonucleotide
  Antisense strand to SEQ ID NO: 622426
gucuugcauagucauuacc

SEQ ID NO: 622428 - RNA, 19 nt, Artificial Sequence
  Description of Artificial Sequence: Synthetic oligonucleotide
  Sense strand starting at position 3699 of SEQ ID NO: 585217
gcaaacuuuagguaagguu

SEQ ID NO: 622429 - RNA, 19 nt, Artificial Sequence
  Description of Artificial Sequence: Synthetic oligonucleotide
  Antisense strand to SEQ ID NO: 622428
aaccuuaccuaaaguuugc

SEQ ID NO: 622430 - RNA, 19 nt, Artificial Sequence
  Description of Artificial Sequence: Synthetic oligonucleotide
  Sense strand starting at position 3727 of SEQ ID NO: 585217
uuuacaaucuaggaagaaa

SEQ ID NO: 622431 - RNA, 19 nt, Artificial Sequence
  Description of Artificial Sequence: Synthetic oligonucleotide
  Antisense strand to SEQ ID NO: 622430
uuucuuccuagauuguaaa

SEQ ID NO: 622432 - RNA, 19 nt, Artificial Sequence
  Description of Artificial Sequence: Synthetic oligonucleotide
  Sense strand starting at position 3807 of SEQ ID NO: 585217
auagaaagauugggacaga

SEQ ID NO: 622433 - RNA, 19 nt, Artificial Sequence
  Description of Artificial Sequence: Synthetic oligonucleotide
  Antisense strand to SEQ ID NO: 622432
ucugucccaaucuuucuau

SEQ ID NO: 622434 - RNA, 19 nt, Artificial Sequence
  Description of Artificial Sequence: Synthetic oligonucleotide
  Sense strand starting at position 49 of SEQ ID NO: 585218
aaaugagucuacuuggaau

SEQ ID NO: 622435 - RNA, 19 nt, Artificial Sequence
  Description of Artificial Sequence: Synthetic oligonucleotide
  Antisense strand to SEQ ID NO: 622434
auuccaaguagacucauuu

SEQ ID NO: 622436 - RNA, 19 nt, Artificial Sequence
  Description of Artificial Sequence: Synthetic oligonucleotide
  Sense strand starting at position 51 of SEQ ID NO: 585218
augagucuacuuggaauau

SEQ ID NO: 622437 - RNA, 19 nt, Artificial Sequence
  Description of Artificial Sequence: Synthetic oligonucleotide
  Antisense strand to SEQ ID NO: 622436
auauuccaaguagacucau

SEQ ID NO: 622438 - RNA, 19 nt, Artificial Sequence
  Description of Artificial Sequence: Synthetic oligonucleotide
  Sense strand starting at position 52 of SEQ ID NO: 585218
ugagucuacuuggaauauu

SEQ ID NO: 622439 - RNA, 19 nt, Artificial Sequence
  Description of Artificial Sequence: Synthetic oligonucleotide
  Antisense strand to SEQ ID NO: 622438
aauauuccaaguagacuca

SEQ ID NO: 622440 - RNA, 19 nt, Artificial Sequence
  Description of Artificial Sequence: Synthetic oligonucleotide
  Sense strand starting at position 108 of SEQ ID NO: 585218
gucaauuagcccuaauaga

SEQ ID NO: 622441 - RNA, 19 nt, Artificial Sequence
  Description of Artificial Sequence: Synthetic oligonucleotide
  Antisense strand to SEQ ID NO: 622440
ucuauuagggcuaauugac

SEQ ID NO: 622442 - RNA, 19 nt, Artificial Sequence
  Description of Artificial Sequence: Synthetic oligonucleotide
  Sense strand starting at position 166 of SEQ ID NO: 585218
guauaaaccguccauuauu

SEQ ID NO: 622443 - RNA, 19 nt, Artificial Sequence
  Description of Artificial Sequence: Synthetic oligonucleotide
  Antisense strand to SEQ ID NO: 622442
aauaauggacgguuuauac

SEQ ID NO: 622444 - RNA, 19 nt, Artificial Sequence
  Description of Artificial Sequence: Synthetic oligonucleotide
  Sense strand starting at position 249 of SEQ ID NO: 585218
agaagauaguucugaaagg

SEQ ID NO: 622445 - RNA, 19 nt, Artificial Sequence
  Description of Artificial Sequence: Synthetic oligonucleotide
  Antisense strand to SEQ ID NO: 622444
ccuuucagaacuaucuucu

SEQ ID NO: 622446 - RNA, 19 nt, Artificial Sequence
  Description of Artificial Sequence: Synthetic oligonucleotide
  Sense strand starting at position 250 of SEQ ID NO: 585218
gaagauaguucugaaaggu

SEQ ID NO: 622447 - RNA, 19 nt, Artificial Sequence
  Description of Artificial Sequence: Synthetic oligonucleotide
  Antisense strand to SEQ ID NO: 622446
accuuucagaacuaucuuc

SEQ ID NO: 622448 - RNA, 19 nt, Artificial Sequence
  Description of Artificial Sequence: Synthetic oligonucleotide
  Sense strand starting at position 1102 of SEQ ID NO: 585218
auauauacacuucgagaca

SEQ ID NO: 622449 - RNA, 19 nt, Artificial Sequence
  Description of Artificial Sequence: Synthetic oligonucleotide
  Antisense strand to SEQ ID NO: 622448
ugucucgaaguguauauau

SEQ ID NO: 622450 - RNA, 19 nt, Artificial Sequence
  Description of Artificial Sequence: Synthetic oligonucleotide
  Sense strand starting at position 1392 of SEQ ID NO: 585218
aggccaauuuauuguauuu

SEQ ID NO: 622451 - RNA, 19 nt, Artificial Sequence
  Description of Artificial Sequence: Synthetic oligonucleotide
  Antisense strand to SEQ ID NO: 622450
aaauacaauaaauuggccu

SEQ ID NO: 622452 - RNA, 19 nt, Artificial Sequence
  Description of Artificial Sequence: Synthetic oligonucleotide
  Sense strand starting at position 1582 of SEQ ID NO: 585218
guaguuccuggccaaagga

SEQ ID NO: 622453 - RNA, 19 nt, Artificial Sequence
  Description of Artificial Sequence: Synthetic oligonucleotide
  Antisense strand to SEQ ID NO: 622452
uccuuuggccaggaacuac

SEQ ID NO: 622454 - RNA, 19 nt, Artificial Sequence
  Description of Artificial Sequence: Synthetic oligonucleotide
  Sense strand starting at position 2480 of SEQ ID NO: 585218
cucgguagucacggagaga

SEQ ID NO: 622455 - RNA, 19 nt, Artificial Sequence
  Description of Artificial Sequence: Synthetic oligonucleotide
  Antisense strand to SEQ ID NO: 622454
ucucuccgugacuaccgag

SEQ ID NO: 622456 - RNA, 19 nt, Artificial Sequence
  Description of Artificial Sequence: Synthetic oligonucleotide
  Sense strand starting at position 2481 of SEQ ID NO: 585218
ucgguagucacggagagau

SEQ ID NO: 622457 - RNA, 19 nt, Artificial Sequence
  Description of Artificial Sequence: Synthetic oligonucleotide
  Antisense strand to SEQ ID NO: 622456
aucucuccgugacuaccga

SEQ ID NO: 622458 - RNA, 19 nt, Artificial Sequence
  Description of Artificial Sequence: Synthetic oligonucleotide
  Sense strand starting at position 2676 of SEQ ID NO: 585218
aagucuguucuguaagucu

SEQ ID NO: 622459 - RNA, 19 nt, Artificial Sequence
  Description of Artificial Sequence: Synthetic oligonucleotide
  Antisense strand to SEQ ID NO: 622458
agacuuacagaacagacuu

SEQ ID NO: 622460 - RNA, 19 nt, Artificial Sequence
  Description of Artificial Sequence: Synthetic oligonucleotide
  Sense strand starting at position 2679 of SEQ ID NO: 585218
ucuguucuguaagucuaaa

SEQ ID NO: 622461 - RNA, 19 nt, Artificial Sequence
  Description of Artificial Sequence: Synthetic oligonucleotide
  Antisense strand to SEQ ID NO: 622460
uuuagacuuacagaacaga

SEQ ID NO: 622462 - RNA, 19 nt, Artificial Sequence
  Description of Artificial Sequence: Synthetic oligonucleotide
  Sense strand starting at position 2715 of SEQ ID NO: 585218
uuuacuaguugagauauga

SEQ ID NO: 622463 - RNA, 19 nt, Artificial Sequence
  Description of Artificial Sequence: Synthetic oligonucleotide
  Antisense strand to SEQ ID NO: 622462
ucauaucucaacuaguaaa

SEQ ID NO: 622464 - RNA, 19 nt, Artificial Sequence
  Description of Artificial Sequence: Synthetic oligonucleotide
  Sense strand starting at position 2719 of SEQ ID NO: 585218
cuaguugagauaugagauu

SEQ ID NO: 622465 - RNA, 19 nt, Artificial Sequence
  Description of Artificial Sequence: Synthetic oligonucleotide
  Antisense strand to SEQ ID NO: 622464
aaucucauaucucaacuag

SEQ ID NO: 622466 - RNA, 19 nt, Artificial Sequence
  Description of Artificial Sequence: Synthetic oligonucleotide
  Sense strand starting at position 2745 of SEQ ID NO: 585218
ucuguuccuuagguuaaau

SEQ ID NO: 622467 - RNA, 19 nt, Artificial Sequence
  Description of Artificial Sequence: Synthetic oligonucleotide
  Antisense strand to SEQ ID NO: 622466
auuuaaccuaaggaacaga

SEQ ID NO: 622468 - RNA, 19 nt, Artificial Sequence
  Description of Artificial Sequence: Synthetic oligonucleotide
  Sense strand starting at position 3135 of SEQ ID NO: 585218
guguucaugugaucgcuaa

SEQ ID NO: 622469 - RNA, 19 nt, Artificial Sequence
  Description of Artificial Sequence: Synthetic oligonucleotide
  Antisense strand to SEQ ID NO: 622468
uuagcgaucacaugaacac

SEQ ID NO: 622470 - RNA, 19 nt, Artificial Sequence
  Description of Artificial Sequence: Synthetic oligonucleotide
  Sense strand starting at position 3136 of SEQ ID NO: 585218
uguucaugugaucgcuaag

SEQ ID NO: 622471 - RNA, 19 nt, Artificial Sequence
  Description of Artificial Sequence: Synthetic oligonucleotide
  Antisense strand to SEQ ID NO: 622470
cuuagcgaucacaugaaca

SEQ ID NO: 622472 - RNA, 19 nt, Artificial Sequence
  Description of Artificial Sequence: Synthetic oligonucleotide
  Sense strand starting at position 3139 of SEQ ID NO: 585218
ucaugugaucgcuaaggaa

SEQ ID NO: 622473 - RNA, 19 nt, Artificial Sequence
  Description of Artificial Sequence: Synthetic oligonucleotide
  Antisense strand to SEQ ID NO: 622472
uuccuuagcgaucacauga

SEQ ID NO: 622474 - RNA, 19 nt, Artificial Sequence
  Description of Artificial Sequence: Synthetic oligonucleotide
  Sense strand starting at position 3207 of SEQ ID NO: 585218
acuggugauuuccauauug

SEQ ID NO: 622475 - RNA, 19 nt, Artificial Sequence
  Description of Artificial Sequence: Synthetic oligonucleotide
  Antisense strand to SEQ ID NO: 622474
caauauggaaaucaccagu

SEQ ID NO: 622476 - RNA, 19 nt, Artificial Sequence
  Description of Artificial Sequence: Synthetic oligonucleotide
  Sense strand starting at position 3261 of SEQ ID NO: 585218
gucuucuucuucccaagua

SEQ ID NO: 622477 - RNA, 19 nt, Artificial Sequence
  Description of Artificial Sequence: Synthetic oligonucleotide
  Antisense strand to SEQ ID NO: 622476
uacuugggaagaagaagac

SEQ ID NO: 622478 - RNA, 19 nt, Artificial Sequence
  Description of Artificial Sequence: Synthetic oligonucleotide
  Sense strand starting at position 3351 of SEQ ID NO: 585218
ugaugugugucagcuauua

SEQ ID NO: 622479 - RNA, 19 nt, Artificial Sequence
  Description of Artificial Sequence: Synthetic oligonucleotide
  Antisense strand to SEQ ID NO: 622478
uaauagcugacacacauca

SEQ ID NO: 622480 - RNA, 19 nt, Artificial Sequence
  Description of Artificial Sequence: Synthetic oligonucleotide
  Sense strand starting at position 3353 of SEQ ID NO: 585218
augugugucagcuauuauu

SEQ ID NO: 622481 - RNA, 19 nt, Artificial Sequence
  Description of Artificial Sequence: Synthetic oligonucleotide
  Antisense strand to SEQ ID NO: 622480
aauaauagcugacacacau

SEQ ID NO: 622482 - RNA, 19 nt, Artificial Sequence
  Description of Artificial Sequence: Synthetic oligonucleotide
  Sense strand starting at position 3363 of SEQ ID NO: 585218
gcuauuauucuagacgcuu

SEQ ID NO: 622483 - RNA, 19 nt, Artificial Sequence
  Description of Artificial Sequence: Synthetic oligonucleotide
  Antisense strand to SEQ ID NO: 622482
aagcgucuagaauaauagc

SEQ ID NO: 622484 - RNA, 19 nt, Artificial Sequence
  Description of Artificial Sequence: Synthetic oligonucleotide
  Sense strand starting at position 3369 of SEQ ID NO: 585218
auucuagacgcuugggaua

SEQ ID NO: 622485 - RNA, 19 nt, Artificial Sequence
  Description of Artificial Sequence: Synthetic oligonucleotide
  Antisense strand to SEQ ID NO: 622484
uaucccaagcgucuagaau

SEQ ID NO: 622486 - RNA, 19 nt, Artificial Sequence
  Description of Artificial Sequence: Synthetic oligonucleotide
  Sense strand starting at position 3454 of SEQ ID NO: 585218
accauuuggugaugugaua

SEQ ID NO: 622487 - RNA, 19 nt, Artificial Sequence
  Description of Artificial Sequence: Synthetic oligonucleotide
  Antisense strand to SEQ ID NO: 622486
uaucacaucaccaaauggu

SEQ ID NO: 622488 - RNA, 19 nt, Artificial Sequence
  Description of Artificial Sequence: Synthetic oligonucleotide
  Sense strand starting at position 3505 of SEQ ID NO: 585218
ggaugucagaaauggccuu

SEQ ID NO: 622489 - RNA, 19 nt, Artificial Sequence
  Description of Artificial Sequence: Synthetic oligonucleotide
  Antisense strand to SEQ ID NO: 622488
aaggccauuucugacaucc

SEQ ID NO: 622490 - RNA, 19 nt, Artificial Sequence
  Description of Artificial Sequence: Synthetic oligonucleotide
  Sense strand starting at position 3517 of SEQ ID NO: 585218
uggccuuaauuucugcauu

SEQ ID NO: 622491 - RNA, 19 nt, Artificial Sequence
  Description of Artificial Sequence: Synthetic oligonucleotide
  Antisense strand to SEQ ID NO: 622490
aaugcagaaauuaaggcca

SEQ ID NO: 622492 - RNA, 19 nt, Artificial Sequence
  Description of Artificial Sequence: Synthetic oligonucleotide
  Sense strand starting at position 3518 of SEQ ID NO: 585218
ggccuuaauuucugcauuu

SEQ ID NO: 622493 - RNA, 19 nt, Artificial Sequence
  Description of Artificial Sequence: Synthetic oligonucleotide
  Antisense strand to SEQ ID NO: 622492
aaaugcagaaauuaaggcc

SEQ ID NO: 622494 - RNA, 19 nt, Artificial Sequence
  Description of Artificial Sequence: Synthetic oligonucleotide
  Sense strand starting at position 3544 of SEQ ID NO: 585218
ucuguauaccaguaacaau

SEQ ID NO: 622495 - RNA, 19 nt, Artificial Sequence
  Description of Artificial Sequence: Synthetic oligonucleotide
  Antisense strand to SEQ ID NO: 622494
auuguuacugguauacaga

SEQ ID NO: 622496 - RNA, 19 nt, Artificial Sequence
  Description of Artificial Sequence: Synthetic oligonucleotide
  Sense strand starting at position 3642 of SEQ ID NO: 585218
aaagcuguguaguccuuua

SEQ ID NO: 622497 - RNA, 19 nt, Artificial Sequence
  Description of Artificial Sequence: Synthetic oligonucleotide
  Antisense strand to SEQ ID NO: 622496
uaaaggacuacacagcuuu

SEQ ID NO: 622498 - RNA, 19 nt, Artificial Sequence
  Description of Artificial Sequence: Synthetic oligonucleotide
  Sense strand starting at position 3647 of SEQ ID NO: 585218
uguguaguccuuuagacag

SEQ ID NO: 622499 - RNA, 19 nt, Artificial Sequence
  Description of Artificial Sequence: Synthetic oligonucleotide
  Antisense strand to SEQ ID NO: 622498
cugucuaaaggacuacaca

SEQ ID NO: 622500 - RNA, 19 nt, Artificial Sequence
  Description of Artificial Sequence: Synthetic oligonucleotide
  Sense strand starting at position 3669 of SEQ ID NO: 585218
auuguaaggcucuguugga

SEQ ID NO: 622501 - RNA, 19 nt, Artificial Sequence
  Description of Artificial Sequence: Synthetic oligonucleotide
  Antisense strand to SEQ ID NO: 622500
uccaacagagccuuacaau

SEQ ID NO: 622502 - RNA, 19 nt, Artificial Sequence
  Description of Artificial Sequence: Synthetic oligonucleotide
  Sense strand starting at position 3670 of SEQ ID NO: 585218
uuguaaggcucuguuggaa

SEQ ID NO: 622503 - RNA, 19 nt, Artificial Sequence
  Description of Artificial Sequence: Synthetic oligonucleotide
  Antisense strand to SEQ ID NO: 622502
uuccaacagagccuuacaa

SEQ ID NO: 622504 - RNA, 19 nt, Artificial Sequence
  Description of Artificial Sequence: Synthetic oligonucleotide
  Sense strand starting at position 3705 of SEQ ID NO: 585218
aguaaauggugagauauac

SEQ ID NO: 622505 - RNA, 19 nt, Artificial Sequence
  Description of Artificial Sequence: Synthetic oligonucleotide
  Antisense strand to SEQ ID NO: 622504
guauaucucaccauuuacu

SEQ ID NO: 622506 - RNA, 19 nt, Artificial Sequence
  Description of Artificial Sequence: Synthetic oligonucleotide
  Sense strand starting at position 3709 of SEQ ID NO: 585218
aauggugagauauaccgua

SEQ ID NO: 622507 - RNA, 19 nt, Artificial Sequence
  Description of Artificial Sequence: Synthetic oligonucleotide
  Antisense strand to SEQ ID NO: 622506
uacgguauaucucaccauu

SEQ ID NO: 622508 - RNA, 19 nt, Artificial Sequence
  Description of Artificial Sequence: Synthetic oligonucleotide
  Sense strand starting at position 3714 of SEQ ID NO: 585218
ugagauauaccguauuaau

SEQ ID NO: 622509 - RNA, 19 nt, Artificial Sequence
  Description of Artificial Sequence: Synthetic oligonucleotide
  Antisense strand to SEQ ID NO: 622508
auuaauacgguauaucuca

SEQ ID NO: 622510 - RNA, 19 nt, Artificial Sequence
  Description of Artificial Sequence: Synthetic oligonucleotide
  Sense strand starting at position 3724 of SEQ ID NO: 585218
cguauuaauagauggaaag

SEQ ID NO: 622511 - RNA, 19 nt, Artificial Sequence
  Description of Artificial Sequence: Synthetic oligonucleotide
  Antisense strand to SEQ ID NO: 622510
cuuuccaucuauuaauacg

SEQ ID NO: 622512 - RNA, 19 nt, Artificial Sequence
  Description of Artificial Sequence: Synthetic oligonucleotide
  Sense strand starting at position 3766 of SEQ ID NO: 585218
uccucaguucuacgaauuc

SEQ ID NO: 622513 - RNA, 19 nt, Artificial Sequence
  Description of Artificial Sequence: Synthetic oligonucleotide
  Antisense strand to SEQ ID NO: 622512
gaauucguagaacugagga

SEQ ID NO: 622514 - RNA, 19 nt, Artificial Sequence
  Description of Artificial Sequence: Synthetic oligonucleotide
  Sense strand starting at position 4 of SEQ ID NO: 585219
aaaggcaaauuguugagaa

SEQ ID NO: 622515 - RNA, 19 nt, Artificial Sequence
  Description of Artificial Sequence: Synthetic oligonucleotide
  Antisense strand to SEQ ID NO: 622514
uucucaacaauuugccuuu

SEQ ID NO: 622516 - RNA, 19 nt, Artificial Sequence
  Description of Artificial Sequence: Synthetic oligonucleotide
  Sense strand starting at position 57 of SEQ ID NO: 585219
aguuccaucuaucugacau

SEQ ID NO: 622517 - RNA, 19 nt, Artificial Sequence
  Description of Artificial Sequence: Synthetic oligonucleotide
  Antisense strand to SEQ ID NO: 622516
augucagauagauggaacu

SEQ ID NO: 622518 - RNA, 19 nt, Artificial Sequence
  Description of Artificial Sequence: Synthetic oligonucleotide
  Sense strand starting at position 137 of SEQ ID NO: 585219
gugucaaugcccuacaaca

SEQ ID NO: 622519 - RNA, 19 nt, Artificial Sequence
  Description of Artificial Sequence: Synthetic oligonucleotide
  Antisense strand to SEQ ID NO: 622518
uguuguagggcauugacac

SEQ ID NO: 622520 - RNA, 19 nt, Artificial Sequence
  Description of Artificial Sequence: Synthetic oligonucleotide
  Sense strand starting at position 414 of SEQ ID NO: 585219
gugcaaagagucuaucugu

SEQ ID NO: 622521 - RNA, 19 nt, Artificial Sequence
  Description of Artificial Sequence: Synthetic oligonucleotide
  Antisense strand to SEQ ID NO: 622520
acagauagacucuuugcac

SEQ ID NO: 622522 - RNA, 19 nt, Artificial Sequence
  Description of Artificial Sequence: Synthetic oligonucleotide
  Sense strand starting at position 423 of SEQ ID NO: 585219
gucuaucugucaucuauuu

SEQ ID NO: 622523 - RNA, 19 nt, Artificial Sequence
  Description of Artificial Sequence: Synthetic oligonucleotide
  Antisense strand to SEQ ID NO: 622522
aaauagaugacagauagac

SEQ ID NO: 622524 - RNA, 19 nt, Artificial Sequence
  Description of Artificial Sequence: Synthetic oligonucleotide
  Sense strand starting at position 927 of SEQ ID NO: 585219
cuaggauggucuccaauuc

SEQ ID NO: 622525 - RNA, 19 nt, Artificial Sequence
  Description of Artificial Sequence: Synthetic oligonucleotide
  Antisense strand to SEQ ID NO: 622524
gaauuggagaccauccuag

SEQ ID NO: 622526 - RNA, 19 nt, Artificial Sequence
  Description of Artificial Sequence: Synthetic oligonucleotide
  Sense strand starting at position 995 of SEQ ID NO: 585219
caggaauauauguacgguu

SEQ ID NO: 622527 - RNA, 19 nt, Artificial Sequence
  Description of Artificial Sequence: Synthetic oligonucleotide
  Antisense strand to SEQ ID NO: 622526
aaccguacauauauuccug

SEQ ID NO: 622528 - RNA, 19 nt, Artificial Sequence
  Description of Artificial Sequence: Synthetic oligonucleotide
  Sense strand starting at position 1121 of SEQ ID NO: 585219
gcuguacuucuacauuaua

SEQ ID NO: 622529 - RNA, 19 nt, Artificial Sequence
  Description of Artificial Sequence: Synthetic oligonucleotide
  Antisense strand to SEQ ID NO: 622528
uauaauguagaaguacagc

SEQ ID NO: 622530 - RNA, 19 nt, Artificial Sequence
  Description of Artificial Sequence: Synthetic oligonucleotide
  Sense strand starting at position 1173 of SEQ ID NO: 585219
acuucuuauccuuagaguu

SEQ ID NO: 622531 - RNA, 19 nt, Artificial Sequence
  Description of Artificial Sequence: Synthetic oligonucleotide
  Antisense strand to SEQ ID NO: 622530
aacucuaaggauaagaagu

SEQ ID NO: 622532 - RNA, 19 nt, Artificial Sequence
  Description of Artificial Sequence: Synthetic oligonucleotide
  Sense strand starting at position 1220 of SEQ ID NO: 585219
ucaauacuugcggauaggu

SEQ ID NO: 622533 - RNA, 19 nt, Artificial Sequence
  Description of Artificial Sequence: Synthetic oligonucleotide
  Antisense strand to SEQ ID NO: 622532
accuauccgcaaguauuga

SEQ ID NO: 622534 - RNA, 19 nt, Artificial Sequence
  Description of Artificial Sequence: Synthetic oligonucleotide
  Sense strand starting at position 1222 of SEQ ID NO: 585219
aauacuugcggauagguau

SEQ ID NO: 622535 - RNA, 19 nt, Artificial Sequence
  Description of Artificial Sequence: Synthetic oligonucleotide
  Antisense strand to SEQ ID NO: 622534
auaccuauccgcaaguauu

SEQ ID NO: 622536 - RNA, 19 nt, Artificial Sequence
  Description of Artificial Sequence: Synthetic oligonucleotide
  Sense strand starting at position 1380 of SEQ ID NO: 585219
ccaacugcuccuggugaaa

SEQ ID NO: 622537 - RNA, 19 nt, Artificial Sequence
  Description of Artificial Sequence: Synthetic oligonucleotide
  Antisense strand to SEQ ID NO: 622536
uuucaccaggagcaguugg

SEQ ID NO: 622538 - RNA, 19 nt, Artificial Sequence
  Description of Artificial Sequence: Synthetic oligonucleotide
  Sense strand starting at position 1383 of SEQ ID NO: 585219
acugcuccuggugaaagaa

SEQ ID NO: 622539 - RNA, 19 nt, Artificial Sequence
  Description of Artificial Sequence: Synthetic oligonucleotide
  Antisense strand to SEQ ID NO: 622538
uucuuucaccaggagcagu

SEQ ID NO: 622540 - RNA, 19 nt, Artificial Sequence
  Description of Artificial Sequence: Synthetic oligonucleotide
  Sense strand starting at position 1522 of SEQ ID NO: 585219
agguaacuucccgguacuu

SEQ ID NO: 622541 - RNA, 19 nt, Artificial Sequence
  Description of Artificial Sequence: Synthetic oligonucleotide
  Antisense strand to SEQ ID NO: 622540
aaguaccgggaaguuaccu

SEQ ID NO: 622542 - RNA, 19 nt, Artificial Sequence
  Description of Artificial Sequence: Synthetic oligonucleotide
  Sense strand starting at position 2167 of SEQ ID NO: 585219
augguuucaggcggaucau

SEQ ID NO: 622543 - RNA, 19 nt, Artificial Sequence
  Description of Artificial Sequence: Synthetic oligonucleotide
  Antisense strand to SEQ ID NO: 622542
augauccgccugaaaccau

SEQ ID NO: 622544 - RNA, 19 nt, Artificial Sequence
  Description of Artificial Sequence: Synthetic oligonucleotide
  Sense strand starting at position 2188 of SEQ ID NO: 585219
acagaaaggccuuguguuu

SEQ ID NO: 622545 - RNA, 19 nt, Artificial Sequence
  Description of Artificial Sequence: Synthetic oligonucleotide
  Antisense strand to SEQ ID NO: 622544
aaacacaaggccuuucugu

SEQ ID NO: 622546 - RNA, 19 nt, Artificial Sequence
  Description of Artificial Sequence: Synthetic oligonucleotide
  Sense strand starting at position 2200 of SEQ ID NO: 585219
uguguuugacccgagcaca

SEQ ID NO: 622547 - RNA, 19 nt, Artificial Sequence
  Description of Artificial Sequence: Synthetic oligonucleotide
  Antisense strand to SEQ ID NO: 622546
ugugcucgggucaaacaca

SEQ ID NO: 622548 - RNA, 19 nt, Artificial Sequence
  Description of Artificial Sequence: Synthetic oligonucleotide
  Sense strand starting at position 2212 of SEQ ID NO: 585219
gagcacauuucuuggaaag

SEQ ID NO: 622549 - RNA, 19 nt, Artificial Sequence
  Description of Artificial Sequence: Synthetic oligonucleotide
  Antisense strand to SEQ ID NO: 622548
cuuuccaagaaaugugcuc

SEQ ID NO: 622550 - RNA, 19 nt, Artificial Sequence
  Description of Artificial Sequence: Synthetic oligonucleotide
  Sense strand starting at position 2338 of SEQ ID NO: 585219
ugcaccaggagcuaugaaa

SEQ ID NO: 622551 - RNA, 19 nt, Artificial Sequence
  Description of Artificial Sequence: Synthetic oligonucleotide
  Antisense strand to SEQ ID NO: 622550
uuucauagcuccuggugca

SEQ ID NO: 622552 - RNA, 19 nt, Artificial Sequence
  Description of Artificial Sequence: Synthetic oligonucleotide
  Sense strand starting at position 2391 of SEQ ID NO: 585219
agcauaagaucugugagag

SEQ ID NO: 622553 - RNA, 19 nt, Artificial Sequence
  Description of Artificial Sequence: Synthetic oligonucleotide
  Antisense strand to SEQ ID NO: 622552
cucucacagaucuuaugcu

SEQ ID NO: 622554 - RNA, 19 nt, Artificial Sequence
  Description of Artificial Sequence: Synthetic oligonucleotide
  Sense strand starting at position 2392 of SEQ ID NO: 585219
gcauaagaucugugagagg

SEQ ID NO: 622555 - RNA, 19 nt, Artificial Sequence
  Description of Artificial Sequence: Synthetic oligonucleotide
  Antisense strand to SEQ ID NO: 622554
ccucucacagaucuuaugc

SEQ ID NO: 622556 - RNA, 19 nt, Artificial Sequence
  Description of Artificial Sequence: Synthetic oligonucleotide
  Sense strand starting at position 2397 of SEQ ID NO: 585219
agaucugugagagguacau

SEQ ID NO: 622557 - RNA, 19 nt, Artificial Sequence
  Description of Artificial Sequence: Synthetic oligonucleotide
  Antisense strand to SEQ ID NO: 622556
auguaccucucacagaucu

SEQ ID NO: 622558 - RNA, 19 nt, Artificial Sequence
  Description of Artificial Sequence: Synthetic oligonucleotide
  Sense strand starting at position 2426 of SEQ ID NO: 585219
aagcaagugcuguaagaga

SEQ ID NO: 622559 - RNA, 19 nt, Artificial Sequence
  Description of Artificial Sequence: Synthetic oligonucleotide
  Antisense strand to SEQ ID NO: 622558
ucucuuacagcacuugcuu

SEQ ID NO: 622560 - RNA, 19 nt, Artificial Sequence
  Description of Artificial Sequence: Synthetic oligonucleotide
  Sense strand starting at position 2476 of SEQ ID NO: 585219
gcaagagaaguuugaacag

SEQ ID NO: 622561 - RNA, 19 nt, Artificial Sequence
  Description of Artificial Sequence: Synthetic oligonucleotide
  Antisense strand to SEQ ID NO: 622560
cuguucaaacuucucuugc

SEQ ID NO: 622562 - RNA, 19 nt, Artificial Sequence
  Description of Artificial Sequence: Synthetic oligonucleotide
  Sense strand starting at position 2509 of SEQ ID NO: 585219
ucccauagauguuugugau

SEQ ID NO: 622563 - RNA, 19 nt, Artificial Sequence
  Description of Artificial Sequence: Synthetic oligonucleotide
  Antisense strand to SEQ ID NO: 622562
aucacaaacaucuauggga

SEQ ID NO: 622564 - RNA, 19 nt, Artificial Sequence
  Description of Artificial Sequence: Synthetic oligonucleotide
  Sense strand starting at position 2510 of SEQ ID NO: 585219
cccauagauguuugugauu

SEQ ID NO: 622565 - RNA, 19 nt, Artificial Sequence
  Description of Artificial Sequence: Synthetic oligonucleotide
  Antisense strand to SEQ ID NO: 622564
aaucacaaacaucuauggg

SEQ ID NO: 622566 - RNA, 19 nt, Artificial Sequence
  Description of Artificial Sequence: Synthetic oligonucleotide
  Sense strand starting at position 2515 of SEQ ID NO: 585219
agauguuugugauugugaa

SEQ ID NO: 622567 - RNA, 19 nt, Artificial Sequence
  Description of Artificial Sequence: Synthetic oligonucleotide
  Antisense strand to SEQ ID NO: 622566
uucacaaucacaaacaucu

SEQ ID NO: 622568 - RNA, 19 nt, Artificial Sequence
  Description of Artificial Sequence: Synthetic oligonucleotide
  Sense strand starting at position 2516 of SEQ ID NO: 585219
gauguuugugauugugaaa

SEQ ID NO: 622569 - RNA, 19 nt, Artificial Sequence
  Description of Artificial Sequence: Synthetic oligonucleotide
  Antisense strand to SEQ ID NO: 622568
uuucacaaucacaaacauc

SEQ ID NO: 622570 - RNA, 19 nt, Artificial Sequence
  Description of Artificial Sequence: Synthetic oligonucleotide
  Sense strand starting at position 2533 of SEQ ID NO: 585219
aagaaacggucuucguacu

SEQ ID NO: 622571 - RNA, 19 nt, Artificial Sequence
  Description of Artificial Sequence: Synthetic oligonucleotide
  Antisense strand to SEQ ID NO: 622570
aguacgaagaccguuucuu

SEQ ID NO: 622572 - RNA, 19 nt, Artificial Sequence
  Description of Artificial Sequence: Synthetic oligonucleotide
  Sense strand starting at position 2561 of SEQ ID NO: 585219
gugaucuagugguuaagau

SEQ ID NO: 622573 - RNA, 19 nt, Artificial Sequence
  Description of Artificial Sequence: Synthetic oligonucleotide
  Antisense strand to SEQ ID NO: 622572
aucuuaaccacuagaucac

SEQ ID NO: 622574 - RNA, 19 nt, Artificial Sequence
  Description of Artificial Sequence: Synthetic oligonucleotide
  Sense strand starting at position 2562 of SEQ ID NO: 585219
ugaucuagugguuaagauc

SEQ ID NO: 622575 - RNA, 19 nt, Artificial Sequence
  Description of Artificial Sequence: Synthetic oligonucleotide
  Antisense strand to SEQ ID NO: 622574
gaucuuaaccacuagauca

SEQ ID NO: 622576 - RNA, 19 nt, Artificial Sequence
  Description of Artificial Sequence: Synthetic oligonucleotide
  Sense strand starting at position 2568 of SEQ ID NO: 585219
agugguuaagaucgugagu

SEQ ID NO: 622577 - RNA, 19 nt, Artificial Sequence
  Description of Artificial Sequence: Synthetic oligonucleotide
  Antisense strand to SEQ ID NO: 622576
acucacgaucuuaaccacu

SEQ ID NO: 622578 - RNA, 19 nt, Artificial Sequence
  Description of Artificial Sequence: Synthetic oligonucleotide
  Sense strand starting at position 2893 of SEQ ID NO: 585219
cagccugagcuuuggauuu

SEQ ID NO: 622579 - RNA, 19 nt, Artificial Sequence
  Description of Artificial Sequence: Synthetic oligonucleotide
  Antisense strand to SEQ ID NO: 622578
aaauccaaagcucaggcug

SEQ ID NO: 622580 - RNA, 19 nt, Artificial Sequence
  Description of Artificial Sequence: Synthetic oligonucleotide
  Sense strand starting at position 3081 of SEQ ID NO: 585219
uuaguaugaugcucuuucu

SEQ ID NO: 622581 - RNA, 19 nt, Artificial Sequence
  Description of Artificial Sequence: Synthetic oligonucleotide
  Antisense strand to SEQ ID NO: 622580
agaaagagcaucauacuaa

SEQ ID NO: 622582 - RNA, 19 nt, Artificial Sequence
  Description of Artificial Sequence: Synthetic oligonucleotide
  Sense strand starting at position 3295 of SEQ ID NO: 585219
agcgccugucuuuacauaa

SEQ ID NO: 622583 - RNA, 19 nt, Artificial Sequence
  Description of Artificial Sequence: Synthetic oligonucleotide
  Antisense strand to SEQ ID NO: 622582
uuauguaaagacaggcgcu

SEQ ID NO: 622584 - RNA, 19 nt, Artificial Sequence
  Description of Artificial Sequence: Synthetic oligonucleotide
  Sense strand starting at position 3306 of SEQ ID NO: 585219
uuacauaaugguuguauga

SEQ ID NO: 622585 - RNA, 19 nt, Artificial Sequence
  Description of Artificial Sequence: Synthetic oligonucleotide
  Antisense strand to SEQ ID NO: 622584
ucauacaaccauuauguaa

SEQ ID NO: 622586 - RNA, 19 nt, Artificial Sequence
  Description of Artificial Sequence: Synthetic oligonucleotide
  Sense strand starting at position 3317 of SEQ ID NO: 585219
uuguaugagugugccauaa

SEQ ID NO: 622587 - RNA, 19 nt, Artificial Sequence
  Description of Artificial Sequence: Synthetic oligonucleotide
  Antisense strand to SEQ ID NO: 622586
uuauggcacacucauacaa

SEQ ID NO: 622588 - RNA, 19 nt, Artificial Sequence
  Description of Artificial Sequence: Synthetic oligonucleotide
  Sense strand starting at position 3321 of SEQ ID NO: 585219
augagugugccauaacuug

SEQ ID NO: 622589 - RNA, 19 nt, Artificial Sequence
  Description of Artificial Sequence: Synthetic oligonucleotide
  Antisense strand to SEQ ID NO: 622588
caaguuauggcacacucau

SEQ ID NO: 622590 - RNA, 19 nt, Artificial Sequence
  Description of Artificial Sequence: Synthetic oligonucleotide
  Sense strand starting at position 3417 of SEQ ID NO: 585219
ccaguugccuaauuaaaug

SEQ ID NO: 622591 - RNA, 19 nt, Artificial Sequence
  Description of Artificial Sequence: Synthetic oligonucleotide
  Antisense strand to SEQ ID NO: 622590
cauuuaauuaggcaacugg

SEQ ID NO: 622592 - RNA, 19 nt, Artificial Sequence
  Description of Artificial Sequence: Synthetic oligonucleotide
  Sense strand starting at position 3502 of SEQ ID NO: 585219
agcucugaagcuuaauaau

SEQ ID NO: 622593 - RNA, 19 nt, Artificial Sequence
  Description of Artificial Sequence: Synthetic oligonucleotide
  Antisense strand to SEQ ID NO: 622592
auuauuaagcuucagagcu

SEQ ID NO: 622594 - RNA, 19 nt, Artificial Sequence
  Description of Artificial Sequence: Synthetic oligonucleotide
  Sense strand starting at position 53 of SEQ ID NO: 585220
gagguucggccagacugaa

SEQ ID NO: 622595 - RNA, 19 nt, Artificial Sequence
  Description of Artificial Sequence: Synthetic oligonucleotide
  Antisense strand to SEQ ID NO: 622594
uucagucuggccgaaccuc

SEQ ID NO: 622596 - RNA, 19 nt, Artificial Sequence
  Description of Artificial Sequence: Synthetic oligonucleotide
  Sense strand starting at position 152 of SEQ ID NO: 585220
agaguugacuucccagagu

SEQ ID NO: 622597 - RNA, 19 nt, Artificial Sequence
  Description of Artificial Sequence: Synthetic oligonucleotide
  Antisense strand to SEQ ID NO: 622596
acucugggaagucaacucu

SEQ ID NO: 622598 - RNA, 19 nt, Artificial Sequence
  Description of Artificial Sequence: Synthetic oligonucleotide
  Sense strand starting at position 210 of SEQ ID NO: 585220
guggaugaauugccagaga

SEQ ID NO: 622599 - RNA, 19 nt, Artificial Sequence
  Description of Artificial Sequence: Synthetic oligonucleotide
  Antisense strand to SEQ ID NO: 622598
ucucuggcaauucauccac

SEQ ID NO: 622600 - RNA, 19 nt, Artificial Sequence
  Description of Artificial Sequence: Synthetic oligonucleotide
  Sense strand starting at position 401 of SEQ ID NO: 585220
accuguugguugucaggga

SEQ ID NO: 622601 - RNA, 19 nt, Artificial Sequence
  Description of Artificial Sequence: Synthetic oligonucleotide
  Antisense strand to SEQ ID NO: 622600
ucccugacaaccaacaggu

SEQ ID NO: 622602 - RNA, 19 nt, Artificial Sequence
  Description of Artificial Sequence: Synthetic oligonucleotide
  Sense strand starting at position 426 of SEQ ID NO: 585220
guacuagcaccucggugau

SEQ ID NO: 622603 - RNA, 19 nt, Artificial Sequence
  Description of Artificial Sequence: Synthetic oligonucleotide
  Antisense strand to SEQ ID NO: 622602
aucaccgaggugcuaguac

SEQ ID NO: 622604 - RNA, 19 nt, Artificial Sequence
  Description of Artificial Sequence: Synthetic oligonucleotide
  Sense strand starting at position 429 of SEQ ID NO: 585220
cuagcaccucggugaucuu

SEQ ID NO: 622605 - RNA, 19 nt, Artificial Sequence
  Description of Artificial Sequence: Synthetic oligonucleotide
  Antisense strand to SEQ ID NO: 622604
aagaucaccgaggugcuag

SEQ ID NO: 622606 - RNA, 19 nt, Artificial Sequence
  Description of Artificial Sequence: Synthetic oligonucleotide
  Sense strand starting at position 1072 of SEQ ID NO: 585220
gguaucauaaggugaaauc

SEQ ID NO: 622607 - RNA, 19 nt, Artificial Sequence
  Description of Artificial Sequence: Synthetic oligonucleotide
  Antisense strand to SEQ ID NO: 622606
gauuucaccuuaugauacc

SEQ ID NO: 622608 - RNA, 19 nt, Artificial Sequence
  Description of Artificial Sequence: Synthetic oligonucleotide
  Sense strand starting at position 1084 of SEQ ID NO: 585220
ugaaaucagagguguuccu

SEQ ID NO: 622609 - RNA, 19 nt, Artificial Sequence
  Description of Artificial Sequence: Synthetic oligonucleotide
  Antisense strand to SEQ ID NO: 622608
aggaacaccucugauuuca

SEQ ID NO: 622610 - RNA, 19 nt, Artificial Sequence
  Description of Artificial Sequence: Synthetic oligonucleotide
  Sense strand starting at position 1249 of SEQ ID NO: 585220
uuggaaggcucucagagaa

SEQ ID NO: 622611 - RNA, 19 nt, Artificial Sequence
  Description of Artificial Sequence: Synthetic oligonucleotide
  Antisense strand to SEQ ID NO: 622610
uucucugagagccuuccaa

SEQ ID NO: 622612 - RNA, 19 nt, Artificial Sequence
  Description of Artificial Sequence: Synthetic oligonucleotide
  Sense strand starting at position 1265 of SEQ ID NO: 585220
gaacuuaucccaugcuggu

SEQ ID NO: 622613 - RNA, 19 nt, Artificial Sequence
  Description of Artificial Sequence: Synthetic oligonucleotide
  Antisense strand to SEQ ID NO: 622612
accagcaugggauaaguuc

SEQ ID NO: 622614 - RNA, 19 nt, Artificial Sequence
  Description of Artificial Sequence: Synthetic oligonucleotide
  Sense strand starting at position 1670 of SEQ ID NO: 585220
ccagguagcuaacuugaga

SEQ ID NO: 622615 - RNA, 19 nt, Artificial Sequence
  Description of Artificial Sequence: Synthetic oligonucleotide
  Antisense strand to SEQ ID NO: 622614
ucucaaguuagcuaccugg

SEQ ID NO: 622616 - RNA, 19 nt, Artificial Sequence
  Description of Artificial Sequence: Synthetic oligonucleotide
  Sense strand starting at position 1716 of SEQ ID NO: 585220
uaggcaagugccugucaaa

SEQ ID NO: 622617 - RNA, 19 nt, Artificial Sequence
  Description of Artificial Sequence: Synthetic oligonucleotide
  Antisense strand to SEQ ID NO: 622616
uuugacaggcacuugccua

SEQ ID NO: 622618 - RNA, 19 nt, Artificial Sequence
  Description of Artificial Sequence: Synthetic oligonucleotide
  Sense strand starting at position 1729 of SEQ ID NO: 585220
gucaaaggucaguggcaga

SEQ ID NO: 622619 - RNA, 19 nt, Artificial Sequence
  Description of Artificial Sequence: Synthetic oligonucleotide
  Antisense strand to SEQ ID NO: 622618
ucugccacugaccuuugac

SEQ ID NO: 622620 - RNA, 19 nt, Artificial Sequence
  Description of Artificial Sequence: Synthetic oligonucleotide
  Sense strand starting at position 1871 of SEQ ID NO: 585220
acguucuuccuagaugcaa

SEQ ID NO: 622621 - RNA, 19 nt, Artificial Sequence
  Description of Artificial Sequence: Synthetic oligonucleotide
  Antisense strand to SEQ ID NO: 622620
uugcaucuaggaagaacgu

SEQ ID NO: 622622 - RNA, 19 nt, Artificial Sequence
  Description of Artificial Sequence: Synthetic oligonucleotide
  Sense strand starting at position 1976 of SEQ ID NO: 585220
uuucuuugucacuggucua

SEQ ID NO: 622623 - RNA, 19 nt, Artificial Sequence
  Description of Artificial Sequence: Synthetic oligonucleotide
  Antisense strand to SEQ ID NO: 622622
uagaccagugacaaagaaa

SEQ ID NO: 622624 - RNA, 19 nt, Artificial Sequence
  Description of Artificial Sequence: Synthetic oligonucleotide
  Sense strand starting at position 1979 of SEQ ID NO: 585220
cuuugucacuggucuagga

SEQ ID NO: 622625 - RNA, 19 nt, Artificial Sequence
  Description of Artificial Sequence: Synthetic oligonucleotide
  Antisense strand to SEQ ID NO: 622624
uccuagaccagugacaaag

SEQ ID NO: 622626 - RNA, 19 nt, Artificial Sequence
  Description of Artificial Sequence: Synthetic oligonucleotide
  Sense strand starting at position 1981 of SEQ ID NO: 585220
uugucacuggucuaggaaa

SEQ ID NO: 622627 - RNA, 19 nt, Artificial Sequence
  Description of Artificial Sequence: Synthetic oligonucleotide
  Antisense strand to SEQ ID NO: 622626
uuuccuagaccagugacaa

SEQ ID NO: 622628 - RNA, 19 nt, Artificial Sequence
  Description of Artificial Sequence: Synthetic oligonucleotide
  Sense strand starting at position 1983 of SEQ ID NO: 585220
gucacuggucuaggaaaca

SEQ ID NO: 622629 - RNA, 19 nt, Artificial Sequence
  Description of Artificial Sequence: Synthetic oligonucleotide
  Antisense strand to SEQ ID NO: 622628
uguuuccuagaccagugac

SEQ ID NO: 622630 - RNA, 19 nt, Artificial Sequence
  Description of Artificial Sequence: Synthetic oligonucleotide
  Sense strand starting at position 2029 of SEQ ID NO: 585220
gcugaugucaucuagagua

SEQ ID NO: 622631 - RNA, 19 nt, Artificial Sequence
  Description of Artificial Sequence: Synthetic oligonucleotide
  Antisense strand to SEQ ID NO: 622630
uacucuagaugacaucagc

SEQ ID NO: 622632 - RNA, 19 nt, Artificial Sequence
  Description of Artificial Sequence: Synthetic oligonucleotide
  Sense strand starting at position 2081 of SEQ ID NO: 585220
gggugagcucagcaauggu

SEQ ID NO: 622633 - RNA, 19 nt, Artificial Sequence
  Description of Artificial Sequence: Synthetic oligonucleotide
  Antisense strand to SEQ ID NO: 622632
accauugcugagcucaccc

SEQ ID NO: 622634 - RNA, 19 nt, Artificial Sequence
  Description of Artificial Sequence: Synthetic oligonucleotide
  Sense strand starting at position 2090 of SEQ ID NO: 585220
cagcaauggucacuacaag

SEQ ID NO: 622635 - RNA, 19 nt, Artificial Sequence
  Description of Artificial Sequence: Synthetic oligonucleotide
  Antisense strand to SEQ ID NO: 622634
cuuguagugaccauugcug

SEQ ID NO: 622636 - RNA, 19 nt, Artificial Sequence
  Description of Artificial Sequence: Synthetic oligonucleotide
  Sense strand starting at position 2118 of SEQ ID NO: 585220
cgagaagaucuaggugaga

SEQ ID NO: 622637 - RNA, 19 nt, Artificial Sequence
  Description of Artificial Sequence: Synthetic oligonucleotide
  Antisense strand to SEQ ID NO: 622636
ucucaccuagaucuucucg

SEQ ID NO: 622638 - RNA, 19 nt, Artificial Sequence
  Description of Artificial Sequence: Synthetic oligonucleotide
  Sense strand starting at position 2188 of SEQ ID NO: 585220
auguaaugaagcggacaga

SEQ ID NO: 622639 - RNA, 19 nt, Artificial Sequence
  Description of Artificial Sequence: Synthetic oligonucleotide
  Antisense strand to SEQ ID NO: 622638
ucuguccgcuucauuacau

SEQ ID NO: 622640 - RNA, 19 nt, Artificial Sequence
  Description of Artificial Sequence: Synthetic oligonucleotide
  Sense strand starting at position 2499 of SEQ ID NO: 585220
ugguguguuaaggagauua

SEQ ID NO: 622641 - RNA, 19 nt, Artificial Sequence
  Description of Artificial Sequence: Synthetic oligonucleotide
  Antisense strand to SEQ ID NO: 622640
uaaucuccuuaacacacca

SEQ ID NO: 622642 - RNA, 19 nt, Artificial Sequence
  Description of Artificial Sequence: Synthetic oligonucleotide
  Sense strand starting at position 2501 of SEQ ID NO: 585220
guguguuaaggagauuauu

SEQ ID NO: 622643 - RNA, 19 nt, Artificial Sequence
  Description of Artificial Sequence: Synthetic oligonucleotide
  Antisense strand to SEQ ID NO: 622642
aauaaucuccuuaacacac

SEQ ID NO: 622644 - RNA, 19 nt, Artificial Sequence
  Description of Artificial Sequence: Synthetic oligonucleotide
  Sense strand starting at position 2611 of SEQ ID NO: 585220
gaccaaugguucccaaagu

SEQ ID NO: 622645 - RNA, 19 nt, Artificial Sequence
  Description of Artificial Sequence: Synthetic oligonucleotide
  Antisense strand to SEQ ID NO: 622644
acuuugggaaccauugguc

SEQ ID NO: 622646 - RNA, 19 nt, Artificial Sequence
  Description of Artificial Sequence: Synthetic oligonucleotide
  Sense strand starting at position 2650 of SEQ ID NO: 585220
auuaguaucacacgggaac

SEQ ID NO: 622647 - RNA, 19 nt, Artificial Sequence
  Description of Artificial Sequence: Synthetic oligonucleotide
  Antisense strand to SEQ ID NO: 622646
guucccgugugauacuaau

SEQ ID NO: 622648 - RNA, 19 nt, Artificial Sequence
  Description of Artificial Sequence: Synthetic oligonucleotide
  Sense strand starting at position 2651 of SEQ ID NO: 585220
uuaguaucacacgggaacu

SEQ ID NO: 622649 - RNA, 19 nt, Artificial Sequence
  Description of Artificial Sequence: Synthetic oligonucleotide
  Antisense strand to SEQ ID NO: 622648
aguucccgugugauacuaa

SEQ ID NO: 622650 - RNA, 19 nt, Artificial Sequence
  Description of Artificial Sequence: Synthetic oligonucleotide
  Sense strand starting at position 2691 of SEQ ID NO: 585220
ggcccauccucacuaguaa

SEQ ID NO: 622651 - RNA, 19 nt, Artificial Sequence
  Description of Artificial Sequence: Synthetic oligonucleotide
  Antisense strand to SEQ ID NO: 622650
uuacuagugaggaugggcc

SEQ ID NO: 622652 - RNA, 19 nt, Artificial Sequence
  Description of Artificial Sequence: Synthetic oligonucleotide
  Sense strand starting at position 2698 of SEQ ID NO: 585220
ccucacuaguaagaaagaa

SEQ ID NO: 622653 - RNA, 19 nt, Artificial Sequence
  Description of Artificial Sequence: Synthetic oligonucleotide
  Antisense strand to SEQ ID NO: 622652
uucuuucuuacuagugagg

SEQ ID NO: 622654 - RNA, 19 nt, Artificial Sequence
  Description of Artificial Sequence: Synthetic oligonucleotide
  Sense strand starting at position 2917 of SEQ ID NO: 585220
agaagaaucgcuugagaac

SEQ ID NO: 622655 - RNA, 19 nt, Artificial Sequence
  Description of Artificial Sequence: Synthetic oligonucleotide
  Antisense strand to SEQ ID NO: 622654
guucucaagcgauucuucu

SEQ ID NO: 622656 - RNA, 19 nt, Artificial Sequence
  Description of Artificial Sequence: Synthetic oligonucleotide
  Sense strand starting at position 2960 of SEQ ID NO: 585220
cugagauagcccuacagca

SEQ ID NO: 622657 - RNA, 19 nt, Artificial Sequence
  Description of Artificial Sequence: Synthetic oligonucleotide
  Antisense strand to SEQ ID NO: 622656
ugcuguagggcuaucucag

SEQ ID NO: 622658 - RNA, 19 nt, Artificial Sequence
  Description of Artificial Sequence: Synthetic oligonucleotide
  Sense strand starting at position 3062 of SEQ ID NO: 585220
gccagcaauccgggugauu

SEQ ID NO: 622659 - RNA, 19 nt, Artificial Sequence
  Description of Artificial Sequence: Synthetic oligonucleotide
  Antisense strand to SEQ ID NO: 622658
aaucacccggauugcuggc

SEQ ID NO: 622660 - RNA, 19 nt, Artificial Sequence
  Description of Artificial Sequence: Synthetic oligonucleotide
  Sense strand starting at position 3067 of SEQ ID NO: 585220
caauccgggugauucgaua

SEQ ID NO: 622661 - RNA, 19 nt, Artificial Sequence
  Description of Artificial Sequence: Synthetic oligonucleotide
  Antisense strand to SEQ ID NO: 622660
uaucgaaucacccggauug

SEQ ID NO: 622662 - RNA, 19 nt, Artificial Sequence
  Description of Artificial Sequence: Synthetic oligonucleotide
  Sense strand starting at position 3074 of SEQ ID NO: 585220
ggugauucgauacaugcca

SEQ ID NO: 622663 - RNA, 19 nt, Artificial Sequence
  Description of Artificial Sequence: Synthetic oligonucleotide
  Antisense strand to SEQ ID NO: 622662
uggcauguaucgaaucacc

SEQ ID NO: 622664 - RNA, 19 nt, Artificial Sequence
  Description of Artificial Sequence: Synthetic oligonucleotide
  Sense strand starting at position 3252 of SEQ ID NO: 585220
agaagaaguggugguuacu

SEQ ID NO: 622665 - RNA, 19 nt, Artificial Sequence
  Description of Artificial Sequence: Synthetic oligonucleotide
  Antisense strand to SEQ ID NO: 622664
aguaaccaccacuucuucu

SEQ ID NO: 622666 - RNA, 19 nt, Artificial Sequence
  Description of Artificial Sequence: Synthetic oligonucleotide
  Sense strand starting at position 3536 of SEQ ID NO: 585220
ggagauuaauuaucugggu

SEQ ID NO: 622667 - RNA, 19 nt, Artificial Sequence
  Description of Artificial Sequence: Synthetic oligonucleotide
  Antisense strand to SEQ ID NO: 622666
acccagauaauuaaucucc

SEQ ID NO: 622668 - RNA, 19 nt, Artificial Sequence
  Description of Artificial Sequence: Synthetic oligonucleotide
  Sense strand starting at position 3567 of SEQ ID NO: 585220
gaguccugggccggaaaga

SEQ ID NO: 622669 - RNA, 19 nt, Artificial Sequence
  Description of Artificial Sequence: Synthetic oligonucleotide
  Antisense strand to SEQ ID NO: 622668
ucuuuccggcccaggacuc

SEQ ID NO: 622670 - RNA, 19 nt, Artificial Sequence
  Description of Artificial Sequence: Synthetic oligonucleotide
  Sense strand starting at position 3954 of SEQ ID NO: 585220
cuccgggucgcgucagaaa

SEQ ID NO: 622671 - RNA, 19 nt, Artificial Sequence
  Description of Artificial Sequence: Synthetic oligonucleotide
  Antisense strand to SEQ ID NO: 622670
uuucugacgcgacccggag

SEQ ID NO: 622672 - RNA, 19 nt, Artificial Sequence
  Description of Artificial Sequence: Synthetic oligonucleotide
  Sense strand starting at position 3956 of SEQ ID NO: 585220
ccgggucgcgucagaaaca

SEQ ID NO: 622673 - RNA, 19 nt, Artificial Sequence
  Description of Artificial Sequence: Synthetic oligonucleotide
  Antisense strand to SEQ ID NO: 622672
uguuucugacgcgacccgg

SEQ ID NO: 622674 - RNA, 19 nt, Artificial Sequence
  Description of Artificial Sequence: Synthetic oligonucleotide
  Sense strand starting at position 83 of SEQ ID NO: 585221
uuucuuugucacuggucua

SEQ ID NO: 622675 - RNA, 19 nt, Artificial Sequence
  Description of Artificial Sequence: Synthetic oligonucleotide
  Antisense strand to SEQ ID NO: 622674
uagaccagugacaaagaaa

SEQ ID NO: 622676 - RNA, 19 nt, Artificial Sequence
  Description of Artificial Sequence: Synthetic oligonucleotide
  Sense strand starting at position 86 of SEQ ID NO: 585221
cuuugucacuggucuagga

SEQ ID NO: 622677 - RNA, 19 nt, Artificial Sequence
  Description of Artificial Sequence: Synthetic oligonucleotide
  Antisense strand to SEQ ID NO: 622676
uccuagaccagugacaaag

SEQ ID NO: 622678 - RNA, 19 nt, Artificial Sequence
  Description of Artificial Sequence: Synthetic oligonucleotide
  Sense strand starting at position 88 of SEQ ID NO: 585221
uugucacuggucuaggaaa

SEQ ID NO: 622679 - RNA, 19 nt, Artificial Sequence
  Description of Artificial Sequence: Synthetic oligonucleotide
  Antisense strand to SEQ ID NO: 622678
uuuccuagaccagugacaa

SEQ ID NO: 622680 - RNA, 19 nt, Artificial Sequence
  Description of Artificial Sequence: Synthetic oligonucleotide
  Sense strand starting at position 90 of SEQ ID NO: 585221
gucacuggucuaggaaaca

SEQ ID NO: 622681 - RNA, 19 nt, Artificial Sequence
  Description of Artificial Sequence: Synthetic oligonucleotide
  Antisense strand to SEQ ID NO: 622680
uguuuccuagaccagugac

SEQ ID NO: 622682 - RNA, 19 nt, Artificial Sequence
  Description of Artificial Sequence: Synthetic oligonucleotide
  Sense strand starting at position 136 of SEQ ID NO: 585221
gcugaugucaucuagagua

SEQ ID NO: 622683 - RNA, 19 nt, Artificial Sequence
  Description of Artificial Sequence: Synthetic oligonucleotide
  Antisense strand to SEQ ID NO: 622682
uacucuagaugacaucagc

SEQ ID NO: 622684 - RNA, 19 nt, Artificial Sequence
  Description of Artificial Sequence: Synthetic oligonucleotide
  Sense strand starting at position 188 of SEQ ID NO: 585221
gggugagcucagcaauggu

SEQ ID NO: 622685 - RNA, 19 nt, Artificial Sequence
  Description of Artificial Sequence: Synthetic oligonucleotide
  Antisense strand to SEQ ID NO: 622684
accauugcugagcucaccc

SEQ ID NO: 622686 - RNA, 19 nt, Artificial Sequence
  Description of Artificial Sequence: Synthetic oligonucleotide
  Sense strand starting at position 197 of SEQ ID NO: 585221
cagcaauggucacuacaag

SEQ ID NO: 622687 - RNA, 19 nt, Artificial Sequence
  Description of Artificial Sequence: Synthetic oligonucleotide
  Antisense strand to SEQ ID NO: 622686
cuuguagugaccauugcug

SEQ ID NO: 622688 - RNA, 19 nt, Artificial Sequence
  Description of Artificial Sequence: Synthetic oligonucleotide
  Sense strand starting at position 225 of SEQ ID NO: 585221
cgagaagaucuaggugaga

SEQ ID NO: 622689 - RNA, 19 nt, Artificial Sequence
  Description of Artificial Sequence: Synthetic oligonucleotide
  Antisense strand to SEQ ID NO: 622688
ucucaccuagaucuucucg

SEQ ID NO: 622690 - RNA, 19 nt, Artificial Sequence
  Description of Artificial Sequence: Synthetic oligonucleotide
  Sense strand starting at position 295 of SEQ ID NO: 585221
auguaaugaagcggacaga

SEQ ID NO: 622691 - RNA, 19 nt, Artificial Sequence
  Description of Artificial Sequence: Synthetic oligonucleotide
  Antisense strand to SEQ ID NO: 622690
ucuguccgcuucauuacau

SEQ ID NO: 622692 - RNA, 19 nt, Artificial Sequence
  Description of Artificial Sequence: Synthetic oligonucleotide
  Sense strand starting at position 606 of SEQ ID NO: 585221
ugguguguuaaggagauua

SEQ ID NO: 622693 - RNA, 19 nt, Artificial Sequence
  Description of Artificial Sequence: Synthetic oligonucleotide
  Antisense strand to SEQ ID NO: 622692
uaaucuccuuaacacacca

SEQ ID NO: 622694 - RNA, 19 nt, Artificial Sequence
  Description of Artificial Sequence: Synthetic oligonucleotide
  Sense strand starting at position 608 of SEQ ID NO: 585221
guguguuaaggagauuauu

SEQ ID NO: 622695 - RNA, 19 nt, Artificial Sequence
  Description of Artificial Sequence: Synthetic oligonucleotide
  Antisense strand to SEQ ID NO: 622694
aauaaucuccuuaacacac

SEQ ID NO: 622696 - RNA, 19 nt, Artificial Sequence
  Description of Artificial Sequence: Synthetic oligonucleotide
  Sense strand starting at position 718 of SEQ ID NO: 585221
gaccaaugguucccaaagu

SEQ ID NO: 622697 - RNA, 19 nt, Artificial Sequence
  Description of Artificial Sequence: Synthetic oligonucleotide
  Antisense strand to SEQ ID NO: 622696
acuuugggaaccauugguc

SEQ ID NO: 622698 - RNA, 19 nt, Artificial Sequence
  Description of Artificial Sequence: Synthetic oligonucleotide
  Sense strand starting at position 757 of SEQ ID NO: 585221
auuaguaucacacgggaac

SEQ ID NO: 622699 - RNA, 19 nt, Artificial Sequence
  Description of Artificial Sequence: Synthetic oligonucleotide
  Antisense strand to SEQ ID NO: 622698
guucccgugugauacuaau

SEQ ID NO: 622700 - RNA, 19 nt, Artificial Sequence
  Description of Artificial Sequence: Synthetic oligonucleotide
  Sense strand starting at position 758 of SEQ ID NO: 585221
uuaguaucacacgggaacu

SEQ ID NO: 622701 - RNA, 19 nt, Artificial Sequence
  Description of Artificial Sequence: Synthetic oligonucleotide
  Antisense strand to SEQ ID NO: 622700
aguucccgugugauacuaa

SEQ ID NO: 622702 - RNA, 19 nt, Artificial Sequence
  Description of Artificial Sequence: Synthetic oligonucleotide
  Sense strand starting at position 798 of SEQ ID NO: 585221
ggcccauccucacuaguaa

SEQ ID NO: 622703 - RNA, 19 nt, Artificial Sequence
  Description of Artificial Sequence: Synthetic oligonucleotide
  Antisense strand to SEQ ID NO: 622702
uuacuagugaggaugggcc

SEQ ID NO: 622704 - RNA, 19 nt, Artificial Sequence
  Description of Artificial Sequence: Synthetic oligonucleotide
  Sense strand starting at position 805 of SEQ ID NO: 585221
ccucacuaguaagaaagaa

SEQ ID NO: 622705 - RNA, 19 nt, Artificial Sequence
  Description of Artificial Sequence: Synthetic oligonucleotide
  Antisense strand to SEQ ID NO: 622704
uucuuucuuacuagugagg

SEQ ID NO: 622706 - RNA, 19 nt, Artificial Sequence
  Description of Artificial Sequence: Synthetic oligonucleotide
  Sense strand starting at position 1024 of SEQ ID NO: 585221
agaagaaucgcuugagaac

SEQ ID NO: 622707 - RNA, 19 nt, Artificial Sequence
  Description of Artificial Sequence: Synthetic oligonucleotide
  Antisense strand to SEQ ID NO: 622706
guucucaagcgauucuucu

SEQ ID NO: 622708 - RNA, 19 nt, Artificial Sequence
  Description of Artificial Sequence: Synthetic oligonucleotide
  Sense strand starting at position 1067 of SEQ ID NO: 585221
cugagauagcccuacagca

SEQ ID NO: 622709 - RNA, 19 nt, Artificial Sequence
  Description of Artificial Sequence: Synthetic oligonucleotide
  Antisense strand to SEQ ID NO: 622708
ugcuguagggcuaucucag

SEQ ID NO: 622710 - RNA, 19 nt, Artificial Sequence
  Description of Artificial Sequence: Synthetic oligonucleotide
  Sense strand starting at position 1174 of SEQ ID NO: 585221
caauccgggugauucgaua

SEQ ID NO: 622711 - RNA, 19 nt, Artificial Sequence
  Description of Artificial Sequence: Synthetic oligonucleotide
  Antisense strand to SEQ ID NO: 622710
uaucgaaucacccggauug

SEQ ID NO: 622712 - RNA, 19 nt, Artificial Sequence
  Description of Artificial Sequence: Synthetic oligonucleotide
  Sense strand starting at position 1181 of SEQ ID NO: 585221
ggugauucgauacaugcca

SEQ ID NO: 622713 - RNA, 19 nt, Artificial Sequence
  Description of Artificial Sequence: Synthetic oligonucleotide
  Antisense strand to SEQ ID NO: 622712
uggcauguaucgaaucacc

SEQ ID NO: 622714 - RNA, 19 nt, Artificial Sequence
  Description of Artificial Sequence: Synthetic oligonucleotide
  Sense strand starting at position 1359 of SEQ ID NO: 585221
agaagaaguggugguuacu

SEQ ID NO: 622715 - RNA, 19 nt, Artificial Sequence
  Description of Artificial Sequence: Synthetic oligonucleotide
  Antisense strand to SEQ ID NO: 622714
aguaaccaccacuucuucu

SEQ ID NO: 622716 - RNA, 19 nt, Artificial Sequence
  Description of Artificial Sequence: Synthetic oligonucleotide
  Sense strand starting at position 1643 of SEQ ID NO: 585221
ggagauuaauuaucugggu

SEQ ID NO: 622717 - RNA, 19 nt, Artificial Sequence
  Description of Artificial Sequence: Synthetic oligonucleotide
  Antisense strand to SEQ ID NO: 622716
acccagauaauuaaucucc

SEQ ID NO: 622718 - RNA, 19 nt, Artificial Sequence
  Description of Artificial Sequence: Synthetic oligonucleotide
  Sense strand starting at position 1674 of SEQ ID NO: 585221
gaguccugggccggaaaga

SEQ ID NO: 622719 - RNA, 19 nt, Artificial Sequence
  Description of Artificial Sequence: Synthetic oligonucleotide
  Antisense strand to SEQ ID NO: 622718
ucuuuccggcccaggacuc

SEQ ID NO: 622720 - RNA, 19 nt, Artificial Sequence
  Description of Artificial Sequence: Synthetic oligonucleotide
  Sense strand starting at position 2061 of SEQ ID NO: 585221
cuccgggucgcgucagaaa

SEQ ID NO: 622721 - RNA, 19 nt, Artificial Sequence
  Description of Artificial Sequence: Synthetic oligonucleotide
  Antisense strand to SEQ ID NO: 622720
uuucugacgcgacccggag

SEQ ID NO: 622722 - RNA, 19 nt, Artificial Sequence
  Description of Artificial Sequence: Synthetic oligonucleotide
  Sense strand starting at position 2063 of SEQ ID NO: 585221
ccgggucgcgucagaaaca

SEQ ID NO: 622723 - RNA, 19 nt, Artificial Sequence
  Description of Artificial Sequence: Synthetic oligonucleotide
  Antisense strand to SEQ ID NO: 622722
uguuucugacgcgacccgg

SEQ ID NO: 622724 - RNA, 19 nt, Artificial Sequence
  Description of Artificial Sequence: Synthetic oligonucleotide
  Sense strand starting at position 2259 of SEQ ID NO: 585221
ccaguccucgcgcuauguu

SEQ ID NO: 622725 - RNA, 19 nt, Artificial Sequence
  Description of Artificial Sequence: Synthetic oligonucleotide
  Antisense strand to SEQ ID NO: 622724
aacauagcgcgaggacugg

SEQ ID NO: 622726 - RNA, 19 nt, Artificial Sequence
  Description of Artificial Sequence: Synthetic oligonucleotide
  Sense strand starting at position 2555 of SEQ ID NO: 585221
gauggugauuagccaaauu

SEQ ID NO: 622727 - RNA, 19 nt, Artificial Sequence
  Description of Artificial Sequence: Synthetic oligonucleotide
  Antisense strand to SEQ ID NO: 622726
aauuuggcuaaucaccauc

SEQ ID NO: 622728 - RNA, 19 nt, Artificial Sequence
  Description of Artificial Sequence: Synthetic oligonucleotide
  Sense strand starting at position 2567 of SEQ ID NO: 585221
ccaaauuacggcuguuauu

SEQ ID NO: 622729 - RNA, 19 nt, Artificial Sequence
  Description of Artificial Sequence: Synthetic oligonucleotide
  Antisense strand to SEQ ID NO: 622728
aauaacagccguaauuugg

SEQ ID NO: 622730 - RNA, 19 nt, Artificial Sequence
  Description of Artificial Sequence: Synthetic oligonucleotide
  Sense strand starting at position 2577 of SEQ ID NO: 585221
gcuguuauuguugggauga

SEQ ID NO: 622731 - RNA, 19 nt, Artificial Sequence
  Description of Artificial Sequence: Synthetic oligonucleotide
  Antisense strand to SEQ ID NO: 622730
ucaucccaacaauaacagc

SEQ ID NO: 622732 - RNA, 19 nt, Artificial Sequence
  Description of Artificial Sequence: Synthetic oligonucleotide
  Sense strand starting at position 2613 of SEQ ID NO: 585221
aguagucacugcuuuauua

SEQ ID NO: 622733 - RNA, 19 nt, Artificial Sequence
  Description of Artificial Sequence: Synthetic oligonucleotide
  Antisense strand to SEQ ID NO: 622732
uaauaaagcagugacuacu

SEQ ID NO: 622734 - RNA, 19 nt, Artificial Sequence
  Description of Artificial Sequence: Synthetic oligonucleotide
  Sense strand starting at position 2895 of SEQ ID NO: 585221
ggcaguggccgggaauaga

SEQ ID NO: 622735 - RNA, 19 nt, Artificial Sequence
  Description of Artificial Sequence: Synthetic oligonucleotide
  Antisense strand to SEQ ID NO: 622734
ucuauucccggccacugcc

SEQ ID NO: 622736 - RNA, 19 nt, Artificial Sequence
  Description of Artificial Sequence: Synthetic oligonucleotide
  Sense strand starting at position 2986 of SEQ ID NO: 585221
uguugcacucuacagagua

SEQ ID NO: 622737 - RNA, 19 nt, Artificial Sequence
  Description of Artificial Sequence: Synthetic oligonucleotide
  Antisense strand to SEQ ID NO: 622736
uacucuguagagugcaaca

SEQ ID NO: 622738 - RNA, 19 nt, Artificial Sequence
  Description of Artificial Sequence: Synthetic oligonucleotide
  Sense strand starting at position 3225 of SEQ ID NO: 585221
gccucacgccuguaaauca

SEQ ID NO: 622739 - RNA, 19 nt, Artificial Sequence
  Description of Artificial Sequence: Synthetic oligonucleotide
  Antisense strand to SEQ ID NO: 622738
ugauuuacaggcgugaggc

SEQ ID NO: 622740 - RNA, 19 nt, Artificial Sequence
  Description of Artificial Sequence: Synthetic oligonucleotide
  Sense strand starting at position 3586 of SEQ ID NO: 585221
ucgggagguagagguuaua

SEQ ID NO: 622741 - RNA, 19 nt, Artificial Sequence
  Description of Artificial Sequence: Synthetic oligonucleotide
  Antisense strand to SEQ ID NO: 622740
uauaaccucuaccucccga

SEQ ID NO: 622742 - RNA, 19 nt, Artificial Sequence
  Description of Artificial Sequence: Synthetic oligonucleotide
  Sense strand starting at position 3757 of SEQ ID NO: 585221
augacuuaccucuggugau

SEQ ID NO: 622743 - RNA, 19 nt, Artificial Sequence
  Description of Artificial Sequence: Synthetic oligonucleotide
  Antisense strand to SEQ ID NO: 622742
aucaccagagguaagucau

SEQ ID NO: 622744 - RNA, 19 nt, Artificial Sequence
  Description of Artificial Sequence: Synthetic oligonucleotide
  Sense strand starting at position 3785 of SEQ ID NO: 585221
gguucagacuugguagagu

SEQ ID NO: 622745 - RNA, 19 nt, Artificial Sequence
  Description of Artificial Sequence: Synthetic oligonucleotide
  Antisense strand to SEQ ID NO: 622744
acucuaccaagucugaacc

SEQ ID NO: 622746 - RNA, 19 nt, Artificial Sequence
  Description of Artificial Sequence: Synthetic oligonucleotide
  Sense strand starting at position 3838 of SEQ ID NO: 585221
cagguuuacugaucaugcu

SEQ ID NO: 622747 - RNA, 19 nt, Artificial Sequence
  Description of Artificial Sequence: Synthetic oligonucleotide
  Antisense strand to SEQ ID NO: 622746
agcaugaucaguaaaccug

SEQ ID NO: 622748 - RNA, 19 nt, Artificial Sequence
  Description of Artificial Sequence: Synthetic oligonucleotide
  Sense strand starting at position 3847 of SEQ ID NO: 585221
ugaucaugcuguccacaua

SEQ ID NO: 622749 - RNA, 19 nt, Artificial Sequence
  Description of Artificial Sequence: Synthetic oligonucleotide
  Antisense strand to SEQ ID NO: 622748
uauguggacagcaugauca

SEQ ID NO: 622750 - RNA, 19 nt, Artificial Sequence
  Description of Artificial Sequence: Synthetic oligonucleotide
  Sense strand starting at position 3944 of SEQ ID NO: 585221
ggucuucagugguugaaag

SEQ ID NO: 622751 - RNA, 19 nt, Artificial Sequence
  Description of Artificial Sequence: Synthetic oligonucleotide
  Antisense strand to SEQ ID NO: 622750
cuuucaaccacugaagacc

SEQ ID NO: 622752 - RNA, 19 nt, Artificial Sequence
  Description of Artificial Sequence: Synthetic oligonucleotide
  Sense strand starting at position 3955 of SEQ ID NO: 585221
guugaaagcacaugugacu

SEQ ID NO: 622753 - RNA, 19 nt, Artificial Sequence
  Description of Artificial Sequence: Synthetic oligonucleotide
  Antisense strand to SEQ ID NO: 622752
agucacaugugcuuucaac

SEQ ID NO: 622754 - RNA, 19 nt, Artificial Sequence
  Description of Artificial Sequence: Synthetic oligonucleotide
  Sense strand starting at position 293 of SEQ ID NO: 585222
ugaggaagugcaugacuca

SEQ ID NO: 622755 - RNA, 19 nt, Artificial Sequence
  Description of Artificial Sequence: Synthetic oligonucleotide
  Antisense strand to SEQ ID NO: 622754
ugagucaugcacuuccuca

SEQ ID NO: 622756 - RNA, 19 nt, Artificial Sequence
  Description of Artificial Sequence: Synthetic oligonucleotide
  Sense strand starting at position 296 of SEQ ID NO: 585222
ggaagugcaugacucaaga

SEQ ID NO: 622757 - RNA, 19 nt, Artificial Sequence
  Description of Artificial Sequence: Synthetic oligonucleotide
  Antisense strand to SEQ ID NO: 622756
ucuugagucaugcacuucc

SEQ ID NO: 622758 - RNA, 19 nt, Artificial Sequence
  Description of Artificial Sequence: Synthetic oligonucleotide
  Sense strand starting at position 318 of SEQ ID NO: 585222
gggcuuucugaguagggca

SEQ ID NO: 622759 - RNA, 19 nt, Artificial Sequence
  Description of Artificial Sequence: Synthetic oligonucleotide
  Antisense strand to SEQ ID NO: 622758
ugcccuacucagaaagccc

SEQ ID NO: 622760 - RNA, 19 nt, Artificial Sequence
  Description of Artificial Sequence: Synthetic oligonucleotide
  Sense strand starting at position 340 of SEQ ID NO: 585222
agaucucaucugugauauu

SEQ ID NO: 622761 - RNA, 19 nt, Artificial Sequence
  Description of Artificial Sequence: Synthetic oligonucleotide
  Antisense strand to SEQ ID NO: 622760
aauaucacagaugagaucu

SEQ ID NO: 622762 - RNA, 19 nt, Artificial Sequence
  Description of Artificial Sequence: Synthetic oligonucleotide
  Sense strand starting at position 351 of SEQ ID NO: 585222
gugauauuacuacagguuu

SEQ ID NO: 622763 - RNA, 19 nt, Artificial Sequence
  Description of Artificial Sequence: Synthetic oligonucleotide
  Antisense strand to SEQ ID NO: 622762
aaaccuguaguaauaucac

SEQ ID NO: 622764 - RNA, 19 nt, Artificial Sequence
  Description of Artificial Sequence: Synthetic oligonucleotide
  Sense strand starting at position 718 of SEQ ID NO: 585222
gagugcugggaacgguaaa

SEQ ID NO: 622765 - RNA, 19 nt, Artificial Sequence
  Description of Artificial Sequence: Synthetic oligonucleotide
  Antisense strand to SEQ ID NO: 622764
uuuaccguucccagcacuc

SEQ ID NO: 622766 - RNA, 19 nt, Artificial Sequence
  Description of Artificial Sequence: Synthetic oligonucleotide
  Sense strand starting at position 1431 of SEQ ID NO: 585222
cugccugauccuuaggcaa

SEQ ID NO: 622767 - RNA, 19 nt, Artificial Sequence
  Description of Artificial Sequence: Synthetic oligonucleotide
  Antisense strand to SEQ ID NO: 622766
uugccuaaggaucaggcag

SEQ ID NO: 622768 - RNA, 19 nt, Artificial Sequence
  Description of Artificial Sequence: Synthetic oligonucleotide
  Sense strand starting at position 1434 of SEQ ID NO: 585222
ccugauccuuaggcaaauu

SEQ ID NO: 622769 - RNA, 19 nt, Artificial Sequence
  Description of Artificial Sequence: Synthetic oligonucleotide
  Antisense strand to SEQ ID NO: 622768
aauuugccuaaggaucagg

SEQ ID NO: 622770 - RNA, 19 nt, Artificial Sequence
  Description of Artificial Sequence: Synthetic oligonucleotide
  Sense strand starting at position 1445 of SEQ ID NO: 585222
ggcaaauuauaaucucugu

SEQ ID NO: 622771 - RNA, 19 nt, Artificial Sequence
  Description of Artificial Sequence: Synthetic oligonucleotide
  Antisense strand to SEQ ID NO: 622770
acagagauuauaauuugcc

SEQ ID NO: 622772 - RNA, 19 nt, Artificial Sequence
  Description of Artificial Sequence: Synthetic oligonucleotide
  Sense strand starting at position 1476 of SEQ ID NO: 585222
cgaaguauaaugugggaau

SEQ ID NO: 622773 - RNA, 19 nt, Artificial Sequence
  Description of Artificial Sequence: Synthetic oligonucleotide
  Antisense strand to SEQ ID NO: 622772
auucccacauuauacuucg

SEQ ID NO: 622774 - RNA, 19 nt, Artificial Sequence
  Description of Artificial Sequence: Synthetic oligonucleotide
  Sense strand starting at position 1516 of SEQ ID NO: 585222
gguucaugugaggacuuaa

SEQ ID NO: 622775 - RNA, 19 nt, Artificial Sequence
  Description of Artificial Sequence: Synthetic oligonucleotide
  Antisense strand to SEQ ID NO: 622774
uuaaguccucacaugaacc

SEQ ID NO: 622776 - RNA, 19 nt, Artificial Sequence
  Description of Artificial Sequence: Synthetic oligonucleotide
  Sense strand starting at position 1603 of SEQ ID NO: 585222
ucaaguuugccuuggagau

SEQ ID NO: 622777 - RNA, 19 nt, Artificial Sequence
  Description of Artificial Sequence: Synthetic oligonucleotide
  Antisense strand to SEQ ID NO: 622776
aucuccaaggcaaacuuga

SEQ ID NO: 622778 - RNA, 19 nt, Artificial Sequence
  Description of Artificial Sequence: Synthetic oligonucleotide
  Sense strand starting at position 1604 of SEQ ID NO: 585222
caaguuugccuuggagaug

SEQ ID NO: 622779 - RNA, 19 nt, Artificial Sequence
  Description of Artificial Sequence: Synthetic oligonucleotide
  Antisense strand to SEQ ID NO: 622778
caucuccaaggcaaacuug

SEQ ID NO: 622780 - RNA, 19 nt, Artificial Sequence
  Description of Artificial Sequence: Synthetic oligonucleotide
  Sense strand starting at position 2070 of SEQ ID NO: 585222
ccuucugucuucccaagga

SEQ ID NO: 622781 - RNA, 19 nt, Artificial Sequence
  Description of Artificial Sequence: Synthetic oligonucleotide
  Antisense strand to SEQ ID NO: 622780
uccuugggaagacagaagg

SEQ ID NO: 622782 - RNA, 19 nt, Artificial Sequence
  Description of Artificial Sequence: Synthetic oligonucleotide
  Sense strand starting at position 2074 of SEQ ID NO: 585222
cugucuucccaaggagaca

SEQ ID NO: 622783 - RNA, 19 nt, Artificial Sequence
  Description of Artificial Sequence: Synthetic oligonucleotide
  Antisense strand to SEQ ID NO: 622782
ugucuccuugggaagacag

SEQ ID NO: 622784 - RNA, 19 nt, Artificial Sequence
  Description of Artificial Sequence: Synthetic oligonucleotide
  Sense strand starting at position 2298 of SEQ ID NO: 585222
ggaaauguaccuuggcaac

SEQ ID NO: 622785 - RNA, 19 nt, Artificial Sequence
  Description of Artificial Sequence: Synthetic oligonucleotide
  Antisense strand to SEQ ID NO: 622784
guugccaagguacauuucc

SEQ ID NO: 622786 - RNA, 19 nt, Artificial Sequence
  Description of Artificial Sequence: Synthetic oligonucleotide
  Sense strand starting at position 2553 of SEQ ID NO: 585222
ugauuugagcccugcucau

SEQ ID NO: 622787 - RNA, 19 nt, Artificial Sequence
  Description of Artificial Sequence: Synthetic oligonucleotide
  Antisense strand to SEQ ID NO: 622786
augagcagggcucaaauca

SEQ ID NO: 622788 - RNA, 19 nt, Artificial Sequence
  Description of Artificial Sequence: Synthetic oligonucleotide
  Sense strand starting at position 2669 of SEQ ID NO: 585222
ugccauuccuucucaugga

SEQ ID NO: 622789 - RNA, 19 nt, Artificial Sequence
  Description of Artificial Sequence: Synthetic oligonucleotide
  Antisense strand to SEQ ID NO: 622788
uccaugagaaggaauggca

SEQ ID NO: 622790 - RNA, 19 nt, Artificial Sequence
  Description of Artificial Sequence: Synthetic oligonucleotide
  Sense strand starting at position 2679 of SEQ ID NO: 585222
ucucauggauugcuuugaa

SEQ ID NO: 622791 - RNA, 19 nt, Artificial Sequence
  Description of Artificial Sequence: Synthetic oligonucleotide
  Antisense strand to SEQ ID NO: 622790
uucaaagcaauccaugaga

SEQ ID NO: 622792 - RNA, 19 nt, Artificial Sequence
  Description of Artificial Sequence: Synthetic oligonucleotide
  Sense strand starting at position 2682 of SEQ ID NO: 585222
cauggauugcuuugaacag

SEQ ID NO: 622793 - RNA, 19 nt, Artificial Sequence
  Description of Artificial Sequence: Synthetic oligonucleotide
  Antisense strand to SEQ ID NO: 622792
cuguucaaagcaauccaug

SEQ ID NO: 622794 - RNA, 19 nt, Artificial Sequence
  Description of Artificial Sequence: Synthetic oligonucleotide
  Sense strand starting at position 2747 of SEQ ID NO: 585222
gcugaauaggagugaccau

SEQ ID NO: 622795 - RNA, 19 nt, Artificial Sequence
  Description of Artificial Sequence: Synthetic oligonucleotide
  Antisense strand to SEQ ID NO: 622794
auggucacuccuauucagc

SEQ ID NO: 622796 - RNA, 19 nt, Artificial Sequence
  Description of Artificial Sequence: Synthetic oligonucleotide
  Sense strand starting at position 2776 of SEQ ID NO: 585222
auggauggauggucaguaa

SEQ ID NO: 622797 - RNA, 19 nt, Artificial Sequence
  Description of Artificial Sequence: Synthetic oligonucleotide
  Antisense strand to SEQ ID NO: 622796
uuacugaccauccauccau

SEQ ID NO: 622798 - RNA, 19 nt, Artificial Sequence
  Description of Artificial Sequence: Synthetic oligonucleotide
  Sense strand starting at position 2779 of SEQ ID NO: 585222
gauggauggucaguaaaug

SEQ ID NO: 622799 - RNA, 19 nt, Artificial Sequence
  Description of Artificial Sequence: Synthetic oligonucleotide
  Antisense strand to SEQ ID NO: 622798
cauuuacugaccauccauc

SEQ ID NO: 622800 - RNA, 19 nt, Artificial Sequence
  Description of Artificial Sequence: Synthetic oligonucleotide
  Sense strand starting at position 2811 of SEQ ID NO: 585222
ggcugugguauagaggauu

SEQ ID NO: 622801 - RNA, 19 nt, Artificial Sequence
  Description of Artificial Sequence: Synthetic oligonucleotide
  Antisense strand to SEQ ID NO: 622800
aauccucuauaccacagcc

SEQ ID NO: 622802 - RNA, 19 nt, Artificial Sequence
  Description of Artificial Sequence: Synthetic oligonucleotide
  Sense strand starting at position 2844 of SEQ ID NO: 585222
uagaaugccugagcuugaa

SEQ ID NO: 622803 - RNA, 19 nt, Artificial Sequence
  Description of Artificial Sequence: Synthetic oligonucleotide
  Antisense strand to SEQ ID NO: 622802
uucaagcucaggcauucua

SEQ ID NO: 622804 - RNA, 19 nt, Artificial Sequence
  Description of Artificial Sequence: Synthetic oligonucleotide
  Sense strand starting at position 2860 of SEQ ID NO: 585222
gaauucuggcuguacuacu

SEQ ID NO: 622805 - RNA, 19 nt, Artificial Sequence
  Description of Artificial Sequence: Synthetic oligonucleotide
  Antisense strand to SEQ ID NO: 622804
aguaguacagccagaauuc

SEQ ID NO: 622806 - RNA, 19 nt, Artificial Sequence
  Description of Artificial Sequence: Synthetic oligonucleotide
  Sense strand starting at position 2878 of SEQ ID NO: 585222
uuuacuaguguguaacuuu

SEQ ID NO: 622807 - RNA, 19 nt, Artificial Sequence
  Description of Artificial Sequence: Synthetic oligonucleotide
  Antisense strand to SEQ ID NO: 622806
aaaguuacacacuaguaaa

SEQ ID NO: 622808 - RNA, 19 nt, Artificial Sequence
  Description of Artificial Sequence: Synthetic oligonucleotide
  Sense strand starting at position 2945 of SEQ ID NO: 585222
uggguaaagucccuaccua

SEQ ID NO: 622809 - RNA, 19 nt, Artificial Sequence
  Description of Artificial Sequence: Synthetic oligonucleotide
  Antisense strand to SEQ ID NO: 622808
uagguagggacuuuaccca

SEQ ID NO: 622810 - RNA, 19 nt, Artificial Sequence
  Description of Artificial Sequence: Synthetic oligonucleotide
  Sense strand starting at position 2946 of SEQ ID NO: 585222
ggguaaagucccuaccuaa

SEQ ID NO: 622811 - RNA, 19 nt, Artificial Sequence
  Description of Artificial Sequence: Synthetic oligonucleotide
  Antisense strand to SEQ ID NO: 622810
uuagguagggacuuuaccc

SEQ ID NO: 622812 - RNA, 19 nt, Artificial Sequence
  Description of Artificial Sequence: Synthetic oligonucleotide
  Sense strand starting at position 2959 of SEQ ID NO: 585222
accuaauagaguugggcaa

SEQ ID NO: 622813 - RNA, 19 nt, Artificial Sequence
  Description of Artificial Sequence: Synthetic oligonucleotide
  Antisense strand to SEQ ID NO: 622812
uugcccaacucuauuaggu

SEQ ID NO: 622814 - RNA, 19 nt, Artificial Sequence
  Description of Artificial Sequence: Synthetic oligonucleotide
  Sense strand starting at position 2960 of SEQ ID NO: 585222
ccuaauagaguugggcaaa

SEQ ID NO: 622815 - RNA, 19 nt, Artificial Sequence
  Description of Artificial Sequence: Synthetic oligonucleotide
  Antisense strand to SEQ ID NO: 622814
uuugcccaacucuauuagg

SEQ ID NO: 622816 - RNA, 19 nt, Artificial Sequence
  Description of Artificial Sequence: Synthetic oligonucleotide
  Sense strand starting at position 3005 of SEQ ID NO: 585222
guaagcauugaguaaacau

SEQ ID NO: 622817 - RNA, 19 nt, Artificial Sequence
  Description of Artificial Sequence: Synthetic oligonucleotide
  Antisense strand to SEQ ID NO: 622816
auguuuacucaaugcuuac

SEQ ID NO: 622818 - RNA, 19 nt, Artificial Sequence
  Description of Artificial Sequence: Synthetic oligonucleotide
  Sense strand starting at position 3014 of SEQ ID NO: 585222
gaguaaacaucagcuauga

SEQ ID NO: 622819 - RNA, 19 nt, Artificial Sequence
  Description of Artificial Sequence: Synthetic oligonucleotide
  Antisense strand to SEQ ID NO: 622818
ucauagcugauguuuacuc

SEQ ID NO: 622820 - RNA, 19 nt, Artificial Sequence
  Description of Artificial Sequence: Synthetic oligonucleotide
  Sense strand starting at position 3039 of SEQ ID NO: 585222
guggguggguaauuggauu

SEQ ID NO: 622821 - RNA, 19 nt, Artificial Sequence
  Description of Artificial Sequence: Synthetic oligonucleotide
  Antisense strand to SEQ ID NO: 622820
aauccaauuacccacccac

SEQ ID NO: 622822 - RNA, 19 nt, Artificial Sequence
  Description of Artificial Sequence: Synthetic oligonucleotide
  Sense strand starting at position 3155 of SEQ ID NO: 585222
ggcagcuuccaggaguaau

SEQ ID NO: 622823 - RNA, 19 nt, Artificial Sequence
  Description of Artificial Sequence: Synthetic oligonucleotide
  Antisense strand to SEQ ID NO: 622822
auuacuccuggaagcugcc

SEQ ID NO: 622824 - RNA, 19 nt, Artificial Sequence
  Description of Artificial Sequence: Synthetic oligonucleotide
  Sense strand starting at position 3190 of SEQ ID NO: 585222
guaggaaugacaugggcuu

SEQ ID NO: 622825 - RNA, 19 nt, Artificial Sequence
  Description of Artificial Sequence: Synthetic oligonucleotide
  Antisense strand to SEQ ID NO: 622824
aagcccaugucauuccuac

SEQ ID NO: 622826 - RNA, 19 nt, Artificial Sequence
  Description of Artificial Sequence: Synthetic oligonucleotide
  Sense strand starting at position 3325 of SEQ ID NO: 585222
ugagucaacgcugacaaga

SEQ ID NO: 622827 - RNA, 19 nt, Artificial Sequence
  Description of Artificial Sequence: Synthetic oligonucleotide
  Antisense strand to SEQ ID NO: 622826
ucuugucagcguugacuca

SEQ ID NO: 622828 - RNA, 19 nt, Artificial Sequence
  Description of Artificial Sequence: Synthetic oligonucleotide
  Sense strand starting at position 3548 of SEQ ID NO: 585222
gguggagucuuguuuggaa

SEQ ID NO: 622829 - RNA, 19 nt, Artificial Sequence
  Description of Artificial Sequence: Synthetic oligonucleotide
  Antisense strand to SEQ ID NO: 622828
uuccaaacaagacuccacc

SEQ ID NO: 622830 - RNA, 19 nt, Artificial Sequence
  Description of Artificial Sequence: Synthetic oligonucleotide
  Sense strand starting at position 3841 of SEQ ID NO: 585222
gauacuugauguccaaggu

SEQ ID NO: 622831 - RNA, 19 nt, Artificial Sequence
  Description of Artificial Sequence: Synthetic oligonucleotide
  Antisense strand to SEQ ID NO: 622830
accuuggacaucaaguauc

SEQ ID NO: 622832 - RNA, 19 nt, Artificial Sequence
  Description of Artificial Sequence: Synthetic oligonucleotide
  Sense strand starting at position 3980 of SEQ ID NO: 585222
ggagaucgccuuuaggaag

SEQ ID NO: 622833 - RNA, 19 nt, Artificial Sequence
  Description of Artificial Sequence: Synthetic oligonucleotide
  Antisense strand to SEQ ID NO: 622832
cuuccuaaaggcgaucucc

SEQ ID NO: 622834 - RNA, 19 nt, Artificial Sequence
  Description of Artificial Sequence: Synthetic oligonucleotide
  Sense strand starting at position 132 of SEQ ID NO: 585223
auaaauugcauaugggagu

SEQ ID NO: 622835 - RNA, 19 nt, Artificial Sequence
  Description of Artificial Sequence: Synthetic oligonucleotide
  Antisense strand to SEQ ID NO: 622834
acucccauaugcaauuuau

SEQ ID NO: 622836 - RNA, 19 nt, Artificial Sequence
  Description of Artificial Sequence: Synthetic oligonucleotide
  Sense strand starting at position 143 of SEQ ID NO: 585223
augggaguuacuuguauca

SEQ ID NO: 622837 - RNA, 19 nt, Artificial Sequence
  Description of Artificial Sequence: Synthetic oligonucleotide
  Antisense strand to SEQ ID NO: 622836
ugauacaaguaacucccau

SEQ ID NO: 622838 - RNA, 19 nt, Artificial Sequence
  Description of Artificial Sequence: Synthetic oligonucleotide
  Sense strand starting at position 246 of SEQ ID NO: 585223
gccgauuuauaagaagaga

SEQ ID NO: 622839 - RNA, 19 nt, Artificial Sequence
  Description of Artificial Sequence: Synthetic oligonucleotide
  Antisense strand to SEQ ID NO: 622838
ucucuucuuauaaaucggc

SEQ ID NO: 622840 - RNA, 19 nt, Artificial Sequence
  Description of Artificial Sequence: Synthetic oligonucleotide
  Sense strand starting at position 318 of SEQ ID NO: 585223
cuugaaucaugaucguauu

SEQ ID NO: 622841 - RNA, 19 nt, Artificial Sequence
  Description of Artificial Sequence: Synthetic oligonucleotide
  Antisense strand to SEQ ID NO: 622840
aauacgaucaugauucaag

SEQ ID NO: 622842 - RNA, 19 nt, Artificial Sequence
  Description of Artificial Sequence: Synthetic oligonucleotide
  Sense strand starting at position 367 of SEQ ID NO: 585223
ggacuuaaaugagucuuau

SEQ ID NO: 622843 - RNA, 19 nt, Artificial Sequence
  Description of Artificial Sequence: Synthetic oligonucleotide
  Antisense strand to SEQ ID NO: 622842
auaagacucauuuaagucc

SEQ ID NO: 622844 - RNA, 19 nt, Artificial Sequence
  Description of Artificial Sequence: Synthetic oligonucleotide
  Sense strand starting at position 494 of SEQ ID NO: 585223
acuuaagaccuugggcaaa

SEQ ID NO: 622845 - RNA, 19 nt, Artificial Sequence
  Description of Artificial Sequence: Synthetic oligonucleotide
  Antisense strand to SEQ ID NO: 622844
uuugcccaaggucuuaagu

SEQ ID NO: 622846 - RNA, 19 nt, Artificial Sequence
  Description of Artificial Sequence: Synthetic oligonucleotide
  Sense strand starting at position 625 of SEQ ID NO: 585223
cgcugagaaguccgaaacu

SEQ ID NO: 622847 - RNA, 19 nt, Artificial Sequence
  Description of Artificial Sequence: Synthetic oligonucleotide
  Antisense strand to SEQ ID NO: 622846
aguuucggacuucucagcg

SEQ ID NO: 622848 - RNA, 19 nt, Artificial Sequence
  Description of Artificial Sequence: Synthetic oligonucleotide
  Sense strand starting at position 683 of SEQ ID NO: 585223
uaaggagguucuguugaau

SEQ ID NO: 622849 - RNA, 19 nt, Artificial Sequence
  Description of Artificial Sequence: Synthetic oligonucleotide
  Antisense strand to SEQ ID NO: 622848
auucaacagaaccuccuua

SEQ ID NO: 622850 - RNA, 19 nt, Artificial Sequence
  Description of Artificial Sequence: Synthetic oligonucleotide
  Sense strand starting at position 686 of SEQ ID NO: 585223
ggagguucuguugaauuga

SEQ ID NO: 622851 - RNA, 19 nt, Artificial Sequence
  Description of Artificial Sequence: Synthetic oligonucleotide
  Antisense strand to SEQ ID NO: 622850
ucaauucaacagaaccucc

SEQ ID NO: 622852 - RNA, 19 nt, Artificial Sequence
  Description of Artificial Sequence: Synthetic oligonucleotide
  Sense strand starting at position 871 of SEQ ID NO: 585223
auugguauuugaggcaaau

SEQ ID NO: 622853 - RNA, 19 nt, Artificial Sequence
  Description of Artificial Sequence: Synthetic oligonucleotide
  Antisense strand to SEQ ID NO: 622852
auuugccucaaauaccaau

SEQ ID NO: 622854 - RNA, 19 nt, Artificial Sequence
  Description of Artificial Sequence: Synthetic oligonucleotide
  Sense strand starting at position 892 of SEQ ID NO: 585223
cagggcauuugagguauuu

SEQ ID NO: 622855 - RNA, 19 nt, Artificial Sequence
  Description of Artificial Sequence: Synthetic oligonucleotide
  Antisense strand to SEQ ID NO: 622854
aaauaccucaaaugcccug

SEQ ID NO: 622856 - RNA, 19 nt, Artificial Sequence
  Description of Artificial Sequence: Synthetic oligonucleotide
  Sense strand starting at position 901 of SEQ ID NO: 585223
ugagguauuugagguauuu

SEQ ID NO: 622857 - RNA, 19 nt, Artificial Sequence
  Description of Artificial Sequence: Synthetic oligonucleotide
  Antisense strand to SEQ ID NO: 622856
aaauaccucaaauaccuca

SEQ ID NO: 622858 - RNA, 19 nt, Artificial Sequence
  Description of Artificial Sequence: Synthetic oligonucleotide
  Sense strand starting at position 919 of SEQ ID NO: 585223
ugaggauugccagggcacu

SEQ ID NO: 622859 - RNA, 19 nt, Artificial Sequence
  Description of Artificial Sequence: Synthetic oligonucleotide
  Antisense strand to SEQ ID NO: 622858
agugcccuggcaauccuca

SEQ ID NO: 622860 - RNA, 19 nt, Artificial Sequence
  Description of Artificial Sequence: Synthetic oligonucleotide
  Sense strand starting at position 1009 of SEQ ID NO: 585223
uuuacaagauguguuaucu

SEQ ID NO: 622861 - RNA, 19 nt, Artificial Sequence
  Description of Artificial Sequence: Synthetic oligonucleotide
  Antisense strand to SEQ ID NO: 622860
agauaacacaucuuguaaa

SEQ ID NO: 622862 - RNA, 19 nt, Artificial Sequence
  Description of Artificial Sequence: Synthetic oligonucleotide
  Sense strand starting at position 1040 of SEQ ID NO: 585223
gugacauugugggcuuaga

SEQ ID NO: 622863 - RNA, 19 nt, Artificial Sequence
  Description of Artificial Sequence: Synthetic oligonucleotide
  Antisense strand to SEQ ID NO: 622862
ucuaagcccacaaugucac

SEQ ID NO: 622864 - RNA, 19 nt, Artificial Sequence
  Description of Artificial Sequence: Synthetic oligonucleotide
  Sense strand starting at position 1057 of SEQ ID NO: 585223
gagaaacucuagucugaau

SEQ ID NO: 622865 - RNA, 19 nt, Artificial Sequence
  Description of Artificial Sequence: Synthetic oligonucleotide
  Antisense strand to SEQ ID NO: 622864
auucagacuagaguuucuc

SEQ ID NO: 622866 - RNA, 19 nt, Artificial Sequence
  Description of Artificial Sequence: Synthetic oligonucleotide
  Sense strand starting at position 1059 of SEQ ID NO: 585223
gaaacucuagucugaauga

SEQ ID NO: 622867 - RNA, 19 nt, Artificial Sequence
  Description of Artificial Sequence: Synthetic oligonucleotide
  Antisense strand to SEQ ID NO: 622866
ucauucagacuagaguuuc

SEQ ID NO: 622868 - RNA, 19 nt, Artificial Sequence
  Description of Artificial Sequence: Synthetic oligonucleotide
  Sense strand starting at position 1122 of SEQ ID NO: 585223
gcagucauucgcccagucu

SEQ ID NO: 622869 - RNA, 19 nt, Artificial Sequence
  Description of Artificial Sequence: Synthetic oligonucleotide
  Antisense strand to SEQ ID NO: 622868
agacugggcgaaugacugc

SEQ ID NO: 622870 - RNA, 19 nt, Artificial Sequence
  Description of Artificial Sequence: Synthetic oligonucleotide
  Sense strand starting at position 1167 of SEQ ID NO: 585223
gcauucuugacagggagga

SEQ ID NO: 622871 - RNA, 19 nt, Artificial Sequence
  Description of Artificial Sequence: Synthetic oligonucleotide
  Antisense strand to SEQ ID NO: 622870
uccucccugucaagaaugc

SEQ ID NO: 622872 - RNA, 19 nt, Artificial Sequence
  Description of Artificial Sequence: Synthetic oligonucleotide
  Sense strand starting at position 1498 of SEQ ID NO: 585223
ggguuuggugagugagaca

SEQ ID NO: 622873 - RNA, 19 nt, Artificial Sequence
  Description of Artificial Sequence: Synthetic oligonucleotide
  Antisense strand to SEQ ID NO: 622872
ugucucacucaccaaaccc

SEQ ID NO: 622874 - RNA, 19 nt, Artificial Sequence
  Description of Artificial Sequence: Synthetic oligonucleotide
  Sense strand starting at position 1580 of SEQ ID NO: 585223
ggagcucucccugaggaca

SEQ ID NO: 622875 - RNA, 19 nt, Artificial Sequence
  Description of Artificial Sequence: Synthetic oligonucleotide
  Antisense strand to SEQ ID NO: 622874
uguccucagggagagcucc

SEQ ID NO: 622876 - RNA, 19 nt, Artificial Sequence
  Description of Artificial Sequence: Synthetic oligonucleotide
  Sense strand starting at position 1666 of SEQ ID NO: 585223
ugucgaaggcucggaacau

SEQ ID NO: 622877 - RNA, 19 nt, Artificial Sequence
  Description of Artificial Sequence: Synthetic oligonucleotide
  Antisense strand to SEQ ID NO: 622876
auguuccgagccuucgaca

SEQ ID NO: 622878 - RNA, 19 nt, Artificial Sequence
  Description of Artificial Sequence: Synthetic oligonucleotide
  Sense strand starting at position 1711 of SEQ ID NO: 585223
caucgucugugaccuugaa

SEQ ID NO: 622879 - RNA, 19 nt, Artificial Sequence
  Description of Artificial Sequence: Synthetic oligonucleotide
  Antisense strand to SEQ ID NO: 622878
uucaaggucacagacgaug

SEQ ID NO: 622880 - RNA, 19 nt, Artificial Sequence
  Description of Artificial Sequence: Synthetic oligonucleotide
  Sense strand starting at position 1715 of SEQ ID NO: 585223
gucugugaccuugaagaag

SEQ ID NO: 622881 - RNA, 19 nt, Artificial Sequence
  Description of Artificial Sequence: Synthetic oligonucleotide
  Antisense strand to SEQ ID NO: 622880
cuucuucaaggucacagac

SEQ ID NO: 622882 - RNA, 19 nt, Artificial Sequence
  Description of Artificial Sequence: Synthetic oligonucleotide
  Sense strand starting at position 1726 of SEQ ID NO: 585223
ugaagaagcgcuuaaacuc

SEQ ID NO: 622883 - RNA, 19 nt, Artificial Sequence
  Description of Artificial Sequence: Synthetic oligonucleotide
  Antisense strand to SEQ ID NO: 622882
gaguuuaagcgcuucuuca

SEQ ID NO: 622884 - RNA, 19 nt, Artificial Sequence
  Description of Artificial Sequence: Synthetic oligonucleotide
  Sense strand starting at position 1886 of SEQ ID NO: 585223
ggagcaagggucuguaucu

SEQ ID NO: 622885 - RNA, 19 nt, Artificial Sequence
  Description of Artificial Sequence: Synthetic oligonucleotide
  Antisense strand to SEQ ID NO: 622884
agauacagacccuugcucc

SEQ ID NO: 622886 - RNA, 19 nt, Artificial Sequence
  Description of Artificial Sequence: Synthetic oligonucleotide
  Sense strand starting at position 1910 of SEQ ID NO: 585223
cuggcuucugcugauggau

SEQ ID NO: 622887 - RNA, 19 nt, Artificial Sequence
  Description of Artificial Sequence: Synthetic oligonucleotide
  Antisense strand to SEQ ID NO: 622886
auccaucagcagaagccag

SEQ ID NO: 622888 - RNA, 19 nt, Artificial Sequence
  Description of Artificial Sequence: Synthetic oligonucleotide
  Sense strand starting at position 2061 of SEQ ID NO: 585223
cugcccuaagacuauuaga

SEQ ID NO: 622889 - RNA, 19 nt, Artificial Sequence
  Description of Artificial Sequence: Synthetic oligonucleotide
  Antisense strand to SEQ ID NO: 622888
ucuaauagucuuagggcag

SEQ ID NO: 622890 - RNA, 19 nt, Artificial Sequence
  Description of Artificial Sequence: Synthetic oligonucleotide
  Sense strand starting at position 2064 of SEQ ID NO: 585223
cccuaagacuauuagaaga

SEQ ID NO: 622891 - RNA, 19 nt, Artificial Sequence
  Description of Artificial Sequence: Synthetic oligonucleotide
  Antisense strand to SEQ ID NO: 622890
ucuucuaauagucuuaggg

SEQ ID NO: 622892 - RNA, 19 nt, Artificial Sequence
  Description of Artificial Sequence: Synthetic oligonucleotide
  Sense strand starting at position 2066 of SEQ ID NO: 585223
cuaagacuauuagaagauu

SEQ ID NO: 622893 - RNA, 19 nt, Artificial Sequence
  Description of Artificial Sequence: Synthetic oligonucleotide
  Antisense strand to SEQ ID NO: 622892
aaucuucuaauagucuuag

SEQ ID NO: 622894 - RNA, 19 nt, Artificial Sequence
  Description of Artificial Sequence: Synthetic oligonucleotide
  Sense strand starting at position 2515 of SEQ ID NO: 585223
ggaagaaacugagagguaa

SEQ ID NO: 622895 - RNA, 19 nt, Artificial Sequence
  Description of Artificial Sequence: Synthetic oligonucleotide
  Antisense strand to SEQ ID NO: 622894
uuaccucucaguuucuucc

SEQ ID NO: 622896 - RNA, 19 nt, Artificial Sequence
  Description of Artificial Sequence: Synthetic oligonucleotide
  Sense strand starting at position 2681 of SEQ ID NO: 585223
gaucaaguccuaggccaua

SEQ ID NO: 622897 - RNA, 19 nt, Artificial Sequence
  Description of Artificial Sequence: Synthetic oligonucleotide
  Antisense strand to SEQ ID NO: 622896
uauggccuaggacuugauc

SEQ ID NO: 622898 - RNA, 19 nt, Artificial Sequence
  Description of Artificial Sequence: Synthetic oligonucleotide
  Sense strand starting at position 2702 of SEQ ID NO: 585223
acagaaucugcuggugauc

SEQ ID NO: 622899 - RNA, 19 nt, Artificial Sequence
  Description of Artificial Sequence: Synthetic oligonucleotide
  Antisense strand to SEQ ID NO: 622898
gaucaccagcagauucugu

SEQ ID NO: 622900 - RNA, 19 nt, Artificial Sequence
  Description of Artificial Sequence: Synthetic oligonucleotide
  Sense strand starting at position 2818 of SEQ ID NO: 585223
ugaagcuccuuuccagauu

SEQ ID NO: 622901 - RNA, 19 nt, Artificial Sequence
  Description of Artificial Sequence: Synthetic oligonucleotide
  Antisense strand to SEQ ID NO: 622900
aaucuggaaaggagcuuca

SEQ ID NO: 622902 - RNA, 19 nt, Artificial Sequence
  Description of Artificial Sequence: Synthetic oligonucleotide
  Sense strand starting at position 2948 of SEQ ID NO: 585223
acuaacaugugagaaggau

SEQ ID NO: 622903 - RNA, 19 nt, Artificial Sequence
  Description of Artificial Sequence: Synthetic oligonucleotide
  Antisense strand to SEQ ID NO: 622902
auccuucucacauguuagu

SEQ ID NO: 622904 - RNA, 19 nt, Artificial Sequence
  Description of Artificial Sequence: Synthetic oligonucleotide
  Sense strand starting at position 3636 of SEQ ID NO: 585223
ggguguucagccugaauug

SEQ ID NO: 622905 - RNA, 19 nt, Artificial Sequence
  Description of Artificial Sequence: Synthetic oligonucleotide
  Antisense strand to SEQ ID NO: 622904
caauucaggcugaacaccc

SEQ ID NO: 622906 - RNA, 19 nt, Artificial Sequence
  Description of Artificial Sequence: Synthetic oligonucleotide
  Sense strand starting at position 3637 of SEQ ID NO: 585223
gguguucagccugaauugu

SEQ ID NO: 622907 - RNA, 19 nt, Artificial Sequence
  Description of Artificial Sequence: Synthetic oligonucleotide
  Antisense strand to SEQ ID NO: 622906
acaauucaggcugaacacc

SEQ ID NO: 622908 - RNA, 19 nt, Artificial Sequence
  Description of Artificial Sequence: Synthetic oligonucleotide
  Sense strand starting at position 3688 of SEQ ID NO: 585223
acuguucucugccuccaga

SEQ ID NO: 622909 - RNA, 19 nt, Artificial Sequence
  Description of Artificial Sequence: Synthetic oligonucleotide
  Antisense strand to SEQ ID NO: 622908
ucuggaggcagagaacagu

SEQ ID NO: 622910 - RNA, 19 nt, Artificial Sequence
  Description of Artificial Sequence: Synthetic oligonucleotide
  Sense strand starting at position 3739 of SEQ ID NO: 585223
cuugcuauuccugaaggag

SEQ ID NO: 622911 - RNA, 19 nt, Artificial Sequence
  Description of Artificial Sequence: Synthetic oligonucleotide
  Antisense strand to SEQ ID NO: 622910
cuccuucaggaauagcaag

SEQ ID NO: 622912 - RNA, 19 nt, Artificial Sequence
  Description of Artificial Sequence: Synthetic oligonucleotide
  Sense strand starting at position 3742 of SEQ ID NO: 585223
gcuauuccugaaggagaaa

SEQ ID NO: 622913 - RNA, 19 nt, Artificial Sequence
  Description of Artificial Sequence: Synthetic oligonucleotide
  Antisense strand to SEQ ID NO: 622912
uuucuccuucaggaauagc

SEQ ID NO: 622914 - RNA, 19 nt, Artificial Sequence
  Description of Artificial Sequence: Synthetic oligonucleotide
  Sense strand starting at position 134 of SEQ ID NO: 585224
ugguaacacuguuuauaac

SEQ ID NO: 622915 - RNA, 19 nt, Artificial Sequence
  Description of Artificial Sequence: Synthetic oligonucleotide
  Antisense strand to SEQ ID NO: 622914
guuauaaacaguguuacca

SEQ ID NO: 622916 - RNA, 19 nt, Artificial Sequence
  Description of Artificial Sequence: Synthetic oligonucleotide
  Sense strand starting at position 135 of SEQ ID NO: 585224
gguaacacuguuuauaacu

SEQ ID NO: 622917 - RNA, 19 nt, Artificial Sequence
  Description of Artificial Sequence: Synthetic oligonucleotide
  Antisense strand to SEQ ID NO: 622916
aguuauaaacaguguuacc

SEQ ID NO: 622918 - RNA, 19 nt, Artificial Sequence
  Description of Artificial Sequence: Synthetic oligonucleotide
  Sense strand starting at position 145 of SEQ ID NO: 585224
uuuauaacuggauggugaa

SEQ ID NO: 622919 - RNA, 19 nt, Artificial Sequence
  Description of Artificial Sequence: Synthetic oligonucleotide
  Antisense strand to SEQ ID NO: 622918
uucaccauccaguuauaaa

SEQ ID NO: 622920 - RNA, 19 nt, Artificial Sequence
  Description of Artificial Sequence: Synthetic oligonucleotide
  Sense strand starting at position 382 of SEQ ID NO: 585224
ggauucaaagguggaaguu

SEQ ID NO: 622921 - RNA, 19 nt, Artificial Sequence
  Description of Artificial Sequence: Synthetic oligonucleotide
  Antisense strand to SEQ ID NO: 622920
aacuuccaccuuugaaucc

SEQ ID NO: 622922 - RNA, 19 nt, Artificial Sequence
  Description of Artificial Sequence: Synthetic oligonucleotide
  Sense strand starting at position 427 of SEQ ID NO: 585224
gcuagaaucuaguuaccaa

SEQ ID NO: 622923 - RNA, 19 nt, Artificial Sequence
  Description of Artificial Sequence: Synthetic oligonucleotide
  Antisense strand to SEQ ID NO: 622922
uugguaacuagauucuagc

SEQ ID NO: 622924 - RNA, 19 nt, Artificial Sequence
  Description of Artificial Sequence: Synthetic oligonucleotide
  Sense strand starting at position 685 of SEQ ID NO: 585224
ggucuccuucccuauccua

SEQ ID NO: 622925 - RNA, 19 nt, Artificial Sequence
  Description of Artificial Sequence: Synthetic oligonucleotide
  Antisense strand to SEQ ID NO: 622924
uaggauagggaaggagacc

SEQ ID NO: 622926 - RNA, 19 nt, Artificial Sequence
  Description of Artificial Sequence: Synthetic oligonucleotide
  Sense strand starting at position 806 of SEQ ID NO: 585224
ucucucacuugggcauaaa

SEQ ID NO: 622927 - RNA, 19 nt, Artificial Sequence
  Description of Artificial Sequence: Synthetic oligonucleotide
  Antisense strand to SEQ ID NO: 622926
uuuaugcccaagugagaga

SEQ ID NO: 622928 - RNA, 19 nt, Artificial Sequence
  Description of Artificial Sequence: Synthetic oligonucleotide
  Sense strand starting at position 1013 of SEQ ID NO: 585224
ugcagaugcguccuaguua

SEQ ID NO: 622929 - RNA, 19 nt, Artificial Sequence
  Description of Artificial Sequence: Synthetic oligonucleotide
  Antisense strand to SEQ ID NO: 622928
uaacuaggacgcaucugca

SEQ ID NO: 622930 - RNA, 19 nt, Artificial Sequence
  Description of Artificial Sequence: Synthetic oligonucleotide
  Sense strand starting at position 1043 of SEQ ID NO: 585224
acucaauacuagucugaug

SEQ ID NO: 622931 - RNA, 19 nt, Artificial Sequence
  Description of Artificial Sequence: Synthetic oligonucleotide
  Antisense strand to SEQ ID NO: 622930
caucagacuaguauugagu

SEQ ID NO: 622932 - RNA, 19 nt, Artificial Sequence
  Description of Artificial Sequence: Synthetic oligonucleotide
  Sense strand starting at position 1045 of SEQ ID NO: 585224
ucaauacuagucugaugaa

SEQ ID NO: 622933 - RNA, 19 nt, Artificial Sequence
  Description of Artificial Sequence: Synthetic oligonucleotide
  Antisense strand to SEQ ID NO: 622932
uucaucagacuaguauuga

SEQ ID NO: 622934 - RNA, 19 nt, Artificial Sequence
  Description of Artificial Sequence: Synthetic oligonucleotide
  Sense strand starting at position 1103 of SEQ ID NO: 585224
auauauuguguuuacccau

SEQ ID NO: 622935 - RNA, 19 nt, Artificial Sequence
  Description of Artificial Sequence: Synthetic oligonucleotide
  Antisense strand to SEQ ID NO: 622934
auggguaaacacaauauau

SEQ ID NO: 622936 - RNA, 19 nt, Artificial Sequence
  Description of Artificial Sequence: Synthetic oligonucleotide
  Sense strand starting at position 1109 of SEQ ID NO: 585224
uguguuuacccauacagua

SEQ ID NO: 622937 - RNA, 19 nt, Artificial Sequence
  Description of Artificial Sequence: Synthetic oligonucleotide
  Antisense strand to SEQ ID NO: 622936
uacuguauggguaaacaca

SEQ ID NO: 622938 - RNA, 19 nt, Artificial Sequence
  Description of Artificial Sequence: Synthetic oligonucleotide
  Sense strand starting at position 1125 of SEQ ID NO: 585224
guacuuuaagaguaccugu

SEQ ID NO: 622939 - RNA, 19 nt, Artificial Sequence
  Description of Artificial Sequence: Synthetic oligonucleotide
  Antisense strand to SEQ ID NO: 622938
acagguacucuuaaaguac

SEQ ID NO: 622940 - RNA, 19 nt, Artificial Sequence
  Description of Artificial Sequence: Synthetic oligonucleotide
  Sense strand starting at position 1132 of SEQ ID NO: 585224
aagaguaccuguuugaugu

SEQ ID NO: 622941 - RNA, 19 nt, Artificial Sequence
  Description of Artificial Sequence: Synthetic oligonucleotide
  Antisense strand to SEQ ID NO: 622940
acaucaaacagguacucuu

SEQ ID NO: 622942 - RNA, 19 nt, Artificial Sequence
  Description of Artificial Sequence: Synthetic oligonucleotide
  Sense strand starting at position 1139 of SEQ ID NO: 585224
ccuguuugauguuugacaa

SEQ ID NO: 622943 - RNA, 19 nt, Artificial Sequence
  Description of Artificial Sequence: Synthetic oligonucleotide
  Antisense strand to SEQ ID NO: 622942
uugucaaacaucaaacagg

SEQ ID NO: 622944 - RNA, 19 nt, Artificial Sequence
  Description of Artificial Sequence: Synthetic oligonucleotide
  Sense strand starting at position 1140 of SEQ ID NO: 585224
cuguuugauguuugacaac

SEQ ID NO: 622945 - RNA, 19 nt, Artificial Sequence
  Description of Artificial Sequence: Synthetic oligonucleotide
  Antisense strand to SEQ ID NO: 622944
guugucaaacaucaaacag

SEQ ID NO: 622946 - RNA, 19 nt, Artificial Sequence
  Description of Artificial Sequence: Synthetic oligonucleotide
  Sense strand starting at position 1292 of SEQ ID NO: 585224
uuaaaugacccgcaauuau

SEQ ID NO: 622947 - RNA, 19 nt, Artificial Sequence
  Description of Artificial Sequence: Synthetic oligonucleotide
  Antisense strand to SEQ ID NO: 622946
auaauugcgggucauuuaa

SEQ ID NO: 622948 - RNA, 19 nt, Artificial Sequence
  Description of Artificial Sequence: Synthetic oligonucleotide
  Sense strand starting at position 2188 of SEQ ID NO: 585224
aggagcaguuuccuccaau

SEQ ID NO: 622949 - RNA, 19 nt, Artificial Sequence
  Description of Artificial Sequence: Synthetic oligonucleotide
  Antisense strand to SEQ ID NO: 622948
auuggaggaaacugcuccu

SEQ ID NO: 622950 - RNA, 19 nt, Artificial Sequence
  Description of Artificial Sequence: Synthetic oligonucleotide
  Sense strand starting at position 2232 of SEQ ID NO: 585224
uagaaauuggcacaauugu

SEQ ID NO: 622951 - RNA, 19 nt, Artificial Sequence
  Description of Artificial Sequence: Synthetic oligonucleotide
  Antisense strand to SEQ ID NO: 622950
acaauugugccaauuucua

SEQ ID NO: 622952 - RNA, 19 nt, Artificial Sequence
  Description of Artificial Sequence: Synthetic oligonucleotide
  Sense strand starting at position 2238 of SEQ ID NO: 585224
uuggcacaauuguucuuaa

SEQ ID NO: 622953 - RNA, 19 nt, Artificial Sequence
  Description of Artificial Sequence: Synthetic oligonucleotide
  Antisense strand to SEQ ID NO: 622952
uuaagaacaauugugccaa

SEQ ID NO: 622954 - RNA, 19 nt, Artificial Sequence
  Description of Artificial Sequence: Synthetic oligonucleotide
  Sense strand starting at position 2239 of SEQ ID NO: 585224
uggcacaauuguucuuaaa

SEQ ID NO: 622955 - RNA, 19 nt, Artificial Sequence
  Description of Artificial Sequence: Synthetic oligonucleotide
  Antisense strand to SEQ ID NO: 622954
uuuaagaacaauugugcca

SEQ ID NO: 622956 - RNA, 19 nt, Artificial Sequence
  Description of Artificial Sequence: Synthetic oligonucleotide
  Sense strand starting at position 2270 of SEQ ID NO: 585224
uuucuaguacuguauuagu

SEQ ID NO: 622957 - RNA, 19 nt, Artificial Sequence
  Description of Artificial Sequence: Synthetic oligonucleotide
  Antisense strand to SEQ ID NO: 622956
acuaauacaguacuagaaa

SEQ ID NO: 622958 - RNA, 19 nt, Artificial Sequence
  Description of Artificial Sequence: Synthetic oligonucleotide
  Sense strand starting at position 2280 of SEQ ID NO: 585224
uguauuagugccuuuguuu

SEQ ID NO: 622959 - RNA, 19 nt, Artificial Sequence
  Description of Artificial Sequence: Synthetic oligonucleotide
  Antisense strand to SEQ ID NO: 622958
aaacaaaggcacuaauaca

SEQ ID NO: 622960 - RNA, 19 nt, Artificial Sequence
  Description of Artificial Sequence: Synthetic oligonucleotide
  Sense strand starting at position 2281 of SEQ ID NO: 585224
guauuagugccuuuguuuc

SEQ ID NO: 622961 - RNA, 19 nt, Artificial Sequence
  Description of Artificial Sequence: Synthetic oligonucleotide
  Antisense strand to SEQ ID NO: 622960
gaaacaaaggcacuaauac

SEQ ID NO: 622962 - RNA, 19 nt, Artificial Sequence
  Description of Artificial Sequence: Synthetic oligonucleotide
  Sense strand starting at position 2488 of SEQ ID NO: 585224
guuguaucccuguacuuaa

SEQ ID NO: 622963 - RNA, 19 nt, Artificial Sequence
  Description of Artificial Sequence: Synthetic oligonucleotide
  Antisense strand to SEQ ID NO: 622962
uuaaguacagggauacaac

SEQ ID NO: 622964 - RNA, 19 nt, Artificial Sequence
  Description of Artificial Sequence: Synthetic oligonucleotide
  Sense strand starting at position 2591 of SEQ ID NO: 585224
ugcuaaagugucuauguga

SEQ ID NO: 622965 - RNA, 19 nt, Artificial Sequence
  Description of Artificial Sequence: Synthetic oligonucleotide
  Antisense strand to SEQ ID NO: 622964
ucacauagacacuuuagca

SEQ ID NO: 622966 - RNA, 19 nt, Artificial Sequence
  Description of Artificial Sequence: Synthetic oligonucleotide
  Sense strand starting at position 2594 of SEQ ID NO: 585224
uaaagugucuaugugauga

SEQ ID NO: 622967 - RNA, 19 nt, Artificial Sequence
  Description of Artificial Sequence: Synthetic oligonucleotide
  Antisense strand to SEQ ID NO: 622966
ucaucacauagacacuuua

SEQ ID NO: 622968 - RNA, 19 nt, Artificial Sequence
  Description of Artificial Sequence: Synthetic oligonucleotide
  Sense strand starting at position 2640 of SEQ ID NO: 585224
uugacuuuguaaguuacaa

SEQ ID NO: 622969 - RNA, 19 nt, Artificial Sequence
  Description of Artificial Sequence: Synthetic oligonucleotide
  Antisense strand to SEQ ID NO: 622968
uuguaacuuacaaagucaa

SEQ ID NO: 622970 - RNA, 19 nt, Artificial Sequence
  Description of Artificial Sequence: Synthetic oligonucleotide
  Sense strand starting at position 2666 of SEQ ID NO: 585224
ggauaccuacauuguggaa

SEQ ID NO: 622971 - RNA, 19 nt, Artificial Sequence
  Description of Artificial Sequence: Synthetic oligonucleotide
  Antisense strand to SEQ ID NO: 622970
uuccacaauguagguaucc

SEQ ID NO: 622972 - RNA, 19 nt, Artificial Sequence
  Description of Artificial Sequence: Synthetic oligonucleotide
  Sense strand starting at position 2686 of SEQ ID NO: 585224
aaaugaacucaguggcgaa

SEQ ID NO: 622973 - RNA, 19 nt, Artificial Sequence
  Description of Artificial Sequence: Synthetic oligonucleotide
  Antisense strand to SEQ ID NO: 622972
uucgccacugaguucauuu

SEQ ID NO: 622974 - RNA, 19 nt, Artificial Sequence
  Description of Artificial Sequence: Synthetic oligonucleotide
  Sense strand starting at position 2714 of SEQ ID NO: 585224
ucauaagcucugcacagaa

SEQ ID NO: 622975 - RNA, 19 nt, Artificial Sequence
  Description of Artificial Sequence: Synthetic oligonucleotide
  Antisense strand to SEQ ID NO: 622974
uucugugcagagcuuauga

SEQ ID NO: 622976 - RNA, 19 nt, Artificial Sequence
  Description of Artificial Sequence: Synthetic oligonucleotide
  Sense strand starting at position 2888 of SEQ ID NO: 585224
gcuucucuuccucaaagag

SEQ ID NO: 622977 - RNA, 19 nt, Artificial Sequence
  Description of Artificial Sequence: Synthetic oligonucleotide
  Antisense strand to SEQ ID NO: 622976
cucuuugaggaagagaagc

SEQ ID NO: 622978 - RNA, 19 nt, Artificial Sequence
  Description of Artificial Sequence: Synthetic oligonucleotide
  Sense strand starting at position 2905 of SEQ ID NO: 585224
agacaaagcuguuccugaa

SEQ ID NO: 622979 - RNA, 19 nt, Artificial Sequence
  Description of Artificial Sequence: Synthetic oligonucleotide
  Antisense strand to SEQ ID NO: 622978
uucaggaacagcuuugucu

SEQ ID NO: 622980 - RNA, 19 nt, Artificial Sequence
  Description of Artificial Sequence: Synthetic oligonucleotide
  Sense strand starting at position 2909 of SEQ ID NO: 585224
aaagcuguuccugaaauga

SEQ ID NO: 622981 - RNA, 19 nt, Artificial Sequence
  Description of Artificial Sequence: Synthetic oligonucleotide
  Antisense strand to SEQ ID NO: 622980
ucauuucaggaacagcuuu

SEQ ID NO: 622982 - RNA, 19 nt, Artificial Sequence
  Description of Artificial Sequence: Synthetic oligonucleotide
  Sense strand starting at position 3035 of SEQ ID NO: 585224
cugccagugccguccuaaa

SEQ ID NO: 622983 - RNA, 19 nt, Artificial Sequence
  Description of Artificial Sequence: Synthetic oligonucleotide
  Antisense strand to SEQ ID NO: 622982
uuuaggacggcacuggcag

SEQ ID NO: 622984 - RNA, 19 nt, Artificial Sequence
  Description of Artificial Sequence: Synthetic oligonucleotide
  Sense strand starting at position 3155 of SEQ ID NO: 585224
caaggugguagaggucaaa

SEQ ID NO: 622985 - RNA, 19 nt, Artificial Sequence
  Description of Artificial Sequence: Synthetic oligonucleotide
  Antisense strand to SEQ ID NO: 622984
uuugaccucuaccaccuug

SEQ ID NO: 622986 - RNA, 19 nt, Artificial Sequence
  Description of Artificial Sequence: Synthetic oligonucleotide
  Sense strand starting at position 3158 of SEQ ID NO: 585224
ggugguagaggucaaaguu

SEQ ID NO: 622987 - RNA, 19 nt, Artificial Sequence
  Description of Artificial Sequence: Synthetic oligonucleotide
  Antisense strand to SEQ ID NO: 622986
aacuuugaccucuaccacc

SEQ ID NO: 622988 - RNA, 19 nt, Artificial Sequence
  Description of Artificial Sequence: Synthetic oligonucleotide
  Sense strand starting at position 3504 of SEQ ID NO: 585224
agaaauaccagacguuaug

SEQ ID NO: 622989 - RNA, 19 nt, Artificial Sequence
  Description of Artificial Sequence: Synthetic oligonucleotide
  Antisense strand to SEQ ID NO: 622988
cauaacgucugguauuucu

SEQ ID NO: 622990 - RNA, 19 nt, Artificial Sequence
  Description of Artificial Sequence: Synthetic oligonucleotide
  Sense strand starting at position 3514 of SEQ ID NO: 585224
gacguuauggaccagucua

SEQ ID NO: 622991 - RNA, 19 nt, Artificial Sequence
  Description of Artificial Sequence: Synthetic oligonucleotide
  Antisense strand to SEQ ID NO: 622990
uagacugguccauaacguc

SEQ ID NO: 622992 - RNA, 19 nt, Artificial Sequence
  Description of Artificial Sequence: Synthetic oligonucleotide
  Sense strand starting at position 3833 of SEQ ID NO: 585224
acagguaaugcugauguga

SEQ ID NO: 622993 - RNA, 19 nt, Artificial Sequence
  Description of Artificial Sequence: Synthetic oligonucleotide
  Antisense strand to SEQ ID NO: 622992
ucacaucagcauuaccugu

SEQ ID NO: 622994 - RNA, 19 nt, Artificial Sequence
  Description of Artificial Sequence: Synthetic oligonucleotide
  Sense strand starting at position 17 of SEQ ID NO: 585225
gguuauauuucuuaacaga

SEQ ID NO: 622995 - RNA, 19 nt, Artificial Sequence
  Description of Artificial Sequence: Synthetic oligonucleotide
  Antisense strand to SEQ ID NO: 622994
ucuguuaagaaauauaacc

SEQ ID NO: 622996 - RNA, 19 nt, Artificial Sequence
  Description of Artificial Sequence: Synthetic oligonucleotide
  Sense strand starting at position 137 of SEQ ID NO: 585225
ggaugaaccuccuuaaugu

SEQ ID NO: 622997 - RNA, 19 nt, Artificial Sequence
  Description of Artificial Sequence: Synthetic oligonucleotide
  Antisense strand to SEQ ID NO: 622996
acauuaaggagguucaucc

SEQ ID NO: 622998 - RNA, 19 nt, Artificial Sequence
  Description of Artificial Sequence: Synthetic oligonucleotide
  Sense strand starting at position 157 of SEQ ID NO: 585225
acaggaacagcuugguuau

SEQ ID NO: 622999 - RNA, 19 nt, Artificial Sequence
  Description of Artificial Sequence: Synthetic oligonucleotide
  Antisense strand to SEQ ID NO: 622998
auaaccaagcuguuccugu

SEQ ID NO: 623000 - RNA, 19 nt, Artificial Sequence
  Description of Artificial Sequence: Synthetic oligonucleotide
  Sense strand starting at position 160 of SEQ ID NO: 585225
ggaacagcuugguuaugau

SEQ ID NO: 623001 - RNA, 19 nt, Artificial Sequence
  Description of Artificial Sequence: Synthetic oligonucleotide
  Antisense strand to SEQ ID NO: 623000
aucauaaccaagcuguucc

SEQ ID NO: 623002 - RNA, 19 nt, Artificial Sequence
  Description of Artificial Sequence: Synthetic oligonucleotide
  Sense strand starting at position 172 of SEQ ID NO: 585225
uuaugaugucaccaauugu

SEQ ID NO: 623003 - RNA, 19 nt, Artificial Sequence
  Description of Artificial Sequence: Synthetic oligonucleotide
  Antisense strand to SEQ ID NO: 623002
acaauuggugacaucauaa

SEQ ID NO: 623004 - RNA, 19 nt, Artificial Sequence
  Description of Artificial Sequence: Synthetic oligonucleotide
  Sense strand starting at position 268 of SEQ ID NO: 585225
ugaagcauuccuuaacgua

SEQ ID NO: 623005 - RNA, 19 nt, Artificial Sequence
  Description of Artificial Sequence: Synthetic oligonucleotide
  Antisense strand to SEQ ID NO: 623004
uacguuaaggaaugcuuca

SEQ ID NO: 623006 - RNA, 19 nt, Artificial Sequence
  Description of Artificial Sequence: Synthetic oligonucleotide
  Sense strand starting at position 454 of SEQ ID NO: 585225
guccucaaagcuuagaaca

SEQ ID NO: 623007 - RNA, 19 nt, Artificial Sequence
  Description of Artificial Sequence: Synthetic oligonucleotide
  Antisense strand to SEQ ID NO: 623006
uguucuaagcuuugaggac

SEQ ID NO: 623008 - RNA, 19 nt, Artificial Sequence
  Description of Artificial Sequence: Synthetic oligonucleotide
  Sense strand starting at position 462 of SEQ ID NO: 585225
agcuuagaacaguacucua

SEQ ID NO: 623009 - RNA, 19 nt, Artificial Sequence
  Description of Artificial Sequence: Synthetic oligonucleotide
  Antisense strand to SEQ ID NO: 623008
uagaguacuguucuaagcu

SEQ ID NO: 623010 - RNA, 19 nt, Artificial Sequence
  Description of Artificial Sequence: Synthetic oligonucleotide
  Sense strand starting at position 488 of SEQ ID NO: 585225
acuuaauggugguugagga

SEQ ID NO: 623011 - RNA, 19 nt, Artificial Sequence
  Description of Artificial Sequence: Synthetic oligonucleotide
  Antisense strand to SEQ ID NO: 623010
uccucaaccaccauuaagu

SEQ ID NO: 623012 - RNA, 19 nt, Artificial Sequence
  Description of Artificial Sequence: Synthetic oligonucleotide
  Sense strand starting at position 489 of SEQ ID NO: 585225
cuuaauggugguugaggaa

SEQ ID NO: 623013 - RNA, 19 nt, Artificial Sequence
  Description of Artificial Sequence: Synthetic oligonucleotide
  Antisense strand to SEQ ID NO: 623012
uuccucaaccaccauuaag

SEQ ID NO: 623014 - RNA, 19 nt, Artificial Sequence
  Description of Artificial Sequence: Synthetic oligonucleotide
  Sense strand starting at position 605 of SEQ ID NO: 585225
aggugacaaugguccacau

SEQ ID NO: 623015 - RNA, 19 nt, Artificial Sequence
  Description of Artificial Sequence: Synthetic oligonucleotide
  Antisense strand to SEQ ID NO: 623014
auguggaccauugucaccu

SEQ ID NO: 623016 - RNA, 19 nt, Artificial Sequence
  Description of Artificial Sequence: Synthetic oligonucleotide
  Sense strand starting at position 609 of SEQ ID NO: 585225
gacaaugguccacaugcaa

SEQ ID NO: 623017 - RNA, 19 nt, Artificial Sequence
  Description of Artificial Sequence: Synthetic oligonucleotide
  Antisense strand to SEQ ID NO: 623016
uugcauguggaccauuguc

SEQ ID NO: 623018 - RNA, 19 nt, Artificial Sequence
  Description of Artificial Sequence: Synthetic oligonucleotide
  Sense strand starting at position 755 of SEQ ID NO: 585225
cuaguuaaagcauacugau

SEQ ID NO: 623019 - RNA, 19 nt, Artificial Sequence
  Description of Artificial Sequence: Synthetic oligonucleotide
  Antisense strand to SEQ ID NO: 623018
aucaguaugcuuuaacuag

SEQ ID NO: 623020 - RNA, 19 nt, Artificial Sequence
  Description of Artificial Sequence: Synthetic oligonucleotide
  Sense strand starting at position 928 of SEQ ID NO: 585225
aguuaucuacugcaugaag

SEQ ID NO: 623021 - RNA, 19 nt, Artificial Sequence
  Description of Artificial Sequence: Synthetic oligonucleotide
  Antisense strand to SEQ ID NO: 623020
cuucaugcaguagauaacu

SEQ ID NO: 623022 - RNA, 19 nt, Artificial Sequence
  Description of Artificial Sequence: Synthetic oligonucleotide
  Sense strand starting at position 1143 of SEQ ID NO: 585225
gauccaucugaucgacuca

SEQ ID NO: 623023 - RNA, 19 nt, Artificial Sequence
  Description of Artificial Sequence: Synthetic oligonucleotide
  Antisense strand to SEQ ID NO: 623022
ugagucgaucagauggauc

SEQ ID NO: 623024 - RNA, 19 nt, Artificial Sequence
  Description of Artificial Sequence: Synthetic oligonucleotide
  Sense strand starting at position 1247 of SEQ ID NO: 585225
cugauucugcacuagguau

SEQ ID NO: 623025 - RNA, 19 nt, Artificial Sequence
  Description of Artificial Sequence: Synthetic oligonucleotide
  Antisense strand to SEQ ID NO: 623024
auaccuagugcagaaucag

SEQ ID NO: 623026 - RNA, 19 nt, Artificial Sequence
  Description of Artificial Sequence: Synthetic oligonucleotide
  Sense strand starting at position 1468 of SEQ ID NO: 585225
ccuaaauaucaccggaucu

SEQ ID NO: 623027 - RNA, 19 nt, Artificial Sequence
  Description of Artificial Sequence: Synthetic oligonucleotide
  Antisense strand to SEQ ID NO: 623026
agauccggugauauuuagg

SEQ ID NO: 623028 - RNA, 19 nt, Artificial Sequence
  Description of Artificial Sequence: Synthetic oligonucleotide
  Sense strand starting at position 1760 of SEQ ID NO: 585225
aguuauagccucgaacauu

SEQ ID NO: 623029 - RNA, 19 nt, Artificial Sequence
  Description of Artificial Sequence: Synthetic oligonucleotide
  Antisense strand to SEQ ID NO: 623028
aauguucgaggcuauaacu

SEQ ID NO: 623030 - RNA, 19 nt, Artificial Sequence
  Description of Artificial Sequence: Synthetic oligonucleotide
  Sense strand starting at position 2111 of SEQ ID NO: 585225
aauugacugguuuggacua

SEQ ID NO: 623031 - RNA, 19 nt, Artificial Sequence
  Description of Artificial Sequence: Synthetic oligonucleotide
  Antisense strand to SEQ ID NO: 623030
uaguccaaaccagucaauu

SEQ ID NO: 623032 - RNA, 19 nt, Artificial Sequence
  Description of Artificial Sequence: Synthetic oligonucleotide
  Sense strand starting at position 2116 of SEQ ID NO: 585225
acugguuuggacuaaaugu

SEQ ID NO: 623033 - RNA, 19 nt, Artificial Sequence
  Description of Artificial Sequence: Synthetic oligonucleotide
  Antisense strand to SEQ ID NO: 623032
acauuuaguccaaaccagu

SEQ ID NO: 623034 - RNA, 19 nt, Artificial Sequence
  Description of Artificial Sequence: Synthetic oligonucleotide
  Sense strand starting at position 2192 of SEQ ID NO: 585225
gguuccugauaaucugaga

SEQ ID NO: 623035 - RNA, 19 nt, Artificial Sequence
  Description of Artificial Sequence: Synthetic oligonucleotide
  Antisense strand to SEQ ID NO: 623034
ucucagauuaucaggaacc

SEQ ID NO: 623036 - RNA, 19 nt, Artificial Sequence
  Description of Artificial Sequence: Synthetic oligonucleotide
  Sense strand starting at position 2294 of SEQ ID NO: 585225
uuguguaaacuuggaauca

SEQ ID NO: 623037 - RNA, 19 nt, Artificial Sequence
  Description of Artificial Sequence: Synthetic oligonucleotide
  Antisense strand to SEQ ID NO: 623036
ugauuccaaguuuacacaa

SEQ ID NO: 623038 - RNA, 19 nt, Artificial Sequence
  Description of Artificial Sequence: Synthetic oligonucleotide
  Sense strand starting at position 2677 of SEQ ID NO: 585225
uugagacccuggcuauauu

SEQ ID NO: 623039 - RNA, 19 nt, Artificial Sequence
  Description of Artificial Sequence: Synthetic oligonucleotide
  Antisense strand to SEQ ID NO: 623038
aauauagccagggucucaa

SEQ ID NO: 623040 - RNA, 19 nt, Artificial Sequence
  Description of Artificial Sequence: Synthetic oligonucleotide
  Sense strand starting at position 2678 of SEQ ID NO: 585225
ugagacccuggcuauauua

SEQ ID NO: 623041 - RNA, 19 nt, Artificial Sequence
  Description of Artificial Sequence: Synthetic oligonucleotide
  Antisense strand to SEQ ID NO: 623040
uaauauagccagggucuca

SEQ ID NO: 623042 - RNA, 19 nt, Artificial Sequence
  Description of Artificial Sequence: Synthetic oligonucleotide
  Sense strand starting at position 2769 of SEQ ID NO: 585225
gcgauuugcccuuagcuau

SEQ ID NO: 623043 - RNA, 19 nt, Artificial Sequence
  Description of Artificial Sequence: Synthetic oligonucleotide
  Antisense strand to SEQ ID NO: 623042
auagcuaagggcaaaucgc

SEQ ID NO: 623044 - RNA, 19 nt, Artificial Sequence
  Description of Artificial Sequence: Synthetic oligonucleotide
  Sense strand starting at position 2858 of SEQ ID NO: 585225
agacauaauuguguguaac

SEQ ID NO: 623045 - RNA, 19 nt, Artificial Sequence
  Description of Artificial Sequence: Synthetic oligonucleotide
  Antisense strand to SEQ ID NO: 623044
guuacacacaauuaugucu

SEQ ID NO: 623046 - RNA, 19 nt, Artificial Sequence
  Description of Artificial Sequence: Synthetic oligonucleotide
  Sense strand starting at position 2859 of SEQ ID NO: 585225
gacauaauuguguguaaca

SEQ ID NO: 623047 - RNA, 19 nt, Artificial Sequence
  Description of Artificial Sequence: Synthetic oligonucleotide
  Antisense strand to SEQ ID NO: 623046
uguuacacacaauuauguc

SEQ ID NO: 623048 - RNA, 19 nt, Artificial Sequence
  Description of Artificial Sequence: Synthetic oligonucleotide
  Sense strand starting at position 2873 of SEQ ID NO: 585225
uaacauugcgaguauuaaa

SEQ ID NO: 623049 - RNA, 19 nt, Artificial Sequence
  Description of Artificial Sequence: Synthetic oligonucleotide
  Antisense strand to SEQ ID NO: 623048
uuuaauacucgcaauguua

SEQ ID NO: 623050 - RNA, 19 nt, Artificial Sequence
  Description of Artificial Sequence: Synthetic oligonucleotide
  Sense strand starting at position 3213 of SEQ ID NO: 585225
caugcauuugaauguguuu

SEQ ID NO: 623051 - RNA, 19 nt, Artificial Sequence
  Description of Artificial Sequence: Synthetic oligonucleotide
  Antisense strand to SEQ ID NO: 623050
aaacacauucaaaugcaug

SEQ ID NO: 623052 - RNA, 19 nt, Artificial Sequence
  Description of Artificial Sequence: Synthetic oligonucleotide
  Sense strand starting at position 3215 of SEQ ID NO: 585225
ugcauuugaauguguuuga

SEQ ID NO: 623053 - RNA, 19 nt, Artificial Sequence
  Description of Artificial Sequence: Synthetic oligonucleotide
  Antisense strand to SEQ ID NO: 623052
ucaaacacauucaaaugca

SEQ ID NO: 623054 - RNA, 19 nt, Artificial Sequence
  Description of Artificial Sequence: Synthetic oligonucleotide
  Sense strand starting at position 3222 of SEQ ID NO: 585225
gaauguguuugacuacaaa

SEQ ID NO: 623055 - RNA, 19 nt, Artificial Sequence
  Description of Artificial Sequence: Synthetic oligonucleotide
  Antisense strand to SEQ ID NO: 623054
uuuguagucaaacacauuc

SEQ ID NO: 623056 - RNA, 19 nt, Artificial Sequence
  Description of Artificial Sequence: Synthetic oligonucleotide
  Sense strand starting at position 3408 of SEQ ID NO: 585225
aauaauguauccguauaag

SEQ ID NO: 623057 - RNA, 19 nt, Artificial Sequence
  Description of Artificial Sequence: Synthetic oligonucleotide
  Antisense strand to SEQ ID NO: 623056
cuuauacggauacauuauu

SEQ ID NO: 623058 - RNA, 19 nt, Artificial Sequence
  Description of Artificial Sequence: Synthetic oligonucleotide
  Sense strand starting at position 3411 of SEQ ID NO: 585225
aauguauccguauaagagg

SEQ ID NO: 623059 - RNA, 19 nt, Artificial Sequence
  Description of Artificial Sequence: Synthetic oligonucleotide
  Antisense strand to SEQ ID NO: 623058
ccucuuauacggauacauu

SEQ ID NO: 623060 - RNA, 19 nt, Artificial Sequence
  Description of Artificial Sequence: Synthetic oligonucleotide
  Sense strand starting at position 3426 of SEQ ID NO: 585225
gaggauuuaucacagauca

SEQ ID NO: 623061 - RNA, 19 nt, Artificial Sequence
  Description of Artificial Sequence: Synthetic oligonucleotide
  Antisense strand to SEQ ID NO: 623060
ugaucugugauaaauccuc

SEQ ID NO: 623062 - RNA, 19 nt, Artificial Sequence
  Description of Artificial Sequence: Synthetic oligonucleotide
  Sense strand starting at position 3796 of SEQ ID NO: 585225
acuccacuguaauugucaa

SEQ ID NO: 623063 - RNA, 19 nt, Artificial Sequence
  Description of Artificial Sequence: Synthetic oligonucleotide
  Antisense strand to SEQ ID NO: 623062
uugacaauuacaguggagu

SEQ ID NO: 623064 - RNA, 19 nt, Artificial Sequence
  Description of Artificial Sequence: Synthetic oligonucleotide
  Sense strand starting at position 3826 of SEQ ID NO: 585225
acuacaacucacugaggua

SEQ ID NO: 623065 - RNA, 19 nt, Artificial Sequence
  Description of Artificial Sequence: Synthetic oligonucleotide
  Antisense strand to SEQ ID NO: 623064
uaccucagugaguuguagu

SEQ ID NO: 623066 - RNA, 19 nt, Artificial Sequence
  Description of Artificial Sequence: Synthetic oligonucleotide
  Sense strand starting at position 3838 of SEQ ID NO: 585225
ugagguaugaagugaauga

SEQ ID NO: 623067 - RNA, 19 nt, Artificial Sequence
  Description of Artificial Sequence: Synthetic oligonucleotide
  Antisense strand to SEQ ID NO: 623066
ucauucacuucauaccuca

SEQ ID NO: 623068 - RNA, 19 nt, Artificial Sequence
  Description of Artificial Sequence: Synthetic oligonucleotide
  Sense strand starting at position 3842 of SEQ ID NO: 585225
guaugaagugaaugaguua

SEQ ID NO: 623069 - RNA, 19 nt, Artificial Sequence
  Description of Artificial Sequence: Synthetic oligonucleotide
  Antisense strand to SEQ ID NO: 623068
uaacucauucacuucauac

SEQ ID NO: 623070 - RNA, 19 nt, Artificial Sequence
  Description of Artificial Sequence: Synthetic oligonucleotide
  Sense strand starting at position 3845 of SEQ ID NO: 585225
ugaagugaaugaguuauag

SEQ ID NO: 623071 - RNA, 19 nt, Artificial Sequence
  Description of Artificial Sequence: Synthetic oligonucleotide
  Antisense strand to SEQ ID NO: 623070
cuauaacucauucacuuca

SEQ ID NO: 623072 - RNA, 19 nt, Artificial Sequence
  Description of Artificial Sequence: Synthetic oligonucleotide
  Sense strand starting at position 3935 of SEQ ID NO: 585225
cccuuaggucgucaauaac

SEQ ID NO: 623073 - RNA, 19 nt, Artificial Sequence
  Description of Artificial Sequence: Synthetic oligonucleotide
  Antisense strand to SEQ ID NO: 623072
guuauugacgaccuaaggg

SEQ ID NO: 623074 - RNA, 19 nt, Artificial Sequence
  Description of Artificial Sequence: Synthetic oligonucleotide
  Sense strand starting at position 19 of SEQ ID NO: 585226
guacuaaaguucucagagg

SEQ ID NO: 623075 - RNA, 19 nt, Artificial Sequence
  Description of Artificial Sequence: Synthetic oligonucleotide
  Antisense strand to SEQ ID NO: 623074
ccucugagaacuuuaguac

SEQ ID NO: 623076 - RNA, 19 nt, Artificial Sequence
  Description of Artificial Sequence: Synthetic oligonucleotide
  Sense strand starting at position 125 of SEQ ID NO: 585226
gugagagacuacucgggau

SEQ ID NO: 623077 - RNA, 19 nt, Artificial Sequence
  Description of Artificial Sequence: Synthetic oligonucleotide
  Antisense strand to SEQ ID NO: 623076
aucccgaguagucucucac

SEQ ID NO: 623078 - RNA, 19 nt, Artificial Sequence
  Description of Artificial Sequence: Synthetic oligonucleotide
  Sense strand starting at position 183 of SEQ ID NO: 585226
aaaucagguuagucugaaa

SEQ ID NO: 623079 - RNA, 19 nt, Artificial Sequence
  Description of Artificial Sequence: Synthetic oligonucleotide
  Antisense strand to SEQ ID NO: 623078
uuucagacuaaccugauuu

SEQ ID NO: 623080 - RNA, 19 nt, Artificial Sequence
  Description of Artificial Sequence: Synthetic oligonucleotide
  Sense strand starting at position 194 of SEQ ID NO: 585226
gucugaaagccugauaauu

SEQ ID NO: 623081 - RNA, 19 nt, Artificial Sequence
  Description of Artificial Sequence: Synthetic oligonucleotide
  Antisense strand to SEQ ID NO: 623080
aauuaucaggcuuucagac

SEQ ID NO: 623082 - RNA, 19 nt, Artificial Sequence
  Description of Artificial Sequence: Synthetic oligonucleotide
  Sense strand starting at position 196 of SEQ ID NO: 585226
cugaaagccugauaauuuc

SEQ ID NO: 623083 - RNA, 19 nt, Artificial Sequence
  Description of Artificial Sequence: Synthetic oligonucleotide
  Antisense strand to SEQ ID NO: 623082
gaaauuaucaggcuuucag

SEQ ID NO: 623084 - RNA, 19 nt, Artificial Sequence
  Description of Artificial Sequence: Synthetic oligonucleotide
  Sense strand starting at position 427 of SEQ ID NO: 585226
gguacacucuccuuccauu

SEQ ID NO: 623085 - RNA, 19 nt, Artificial Sequence
  Description of Artificial Sequence: Synthetic oligonucleotide
  Antisense strand to SEQ ID NO: 623084
aauggaaggagaguguacc

SEQ ID NO: 623086 - RNA, 19 nt, Artificial Sequence
  Description of Artificial Sequence: Synthetic oligonucleotide
  Sense strand starting at position 638 of SEQ ID NO: 585226
ggacaaauagccuagcauu

SEQ ID NO: 623087 - RNA, 19 nt, Artificial Sequence
  Description of Artificial Sequence: Synthetic oligonucleotide
  Antisense strand to SEQ ID NO: 623086
aaugcuaggcuauuugucc

SEQ ID NO: 623088 - RNA, 19 nt, Artificial Sequence
  Description of Artificial Sequence: Synthetic oligonucleotide
  Sense strand starting at position 661 of SEQ ID NO: 585226
uuagucucaucuuuggaga

SEQ ID NO: 623089 - RNA, 19 nt, Artificial Sequence
  Description of Artificial Sequence: Synthetic oligonucleotide
  Antisense strand to SEQ ID NO: 623088
ucuccaaagaugagacuaa

SEQ ID NO: 623090 - RNA, 19 nt, Artificial Sequence
  Description of Artificial Sequence: Synthetic oligonucleotide
  Sense strand starting at position 662 of SEQ ID NO: 585226
uagucucaucuuuggagaa

SEQ ID NO: 623091 - RNA, 19 nt, Artificial Sequence
  Description of Artificial Sequence: Synthetic oligonucleotide
  Antisense strand to SEQ ID NO: 623090
uucuccaaagaugagacua

SEQ ID NO: 623092 - RNA, 19 nt, Artificial Sequence
  Description of Artificial Sequence: Synthetic oligonucleotide
  Sense strand starting at position 803 of SEQ ID NO: 585226
gauugagaucucuguggua

SEQ ID NO: 623093 - RNA, 19 nt, Artificial Sequence
  Description of Artificial Sequence: Synthetic oligonucleotide
  Antisense strand to SEQ ID NO: 623092
uaccacagagaucucaauc

SEQ ID NO: 623094 - RNA, 19 nt, Artificial Sequence
  Description of Artificial Sequence: Synthetic oligonucleotide
  Sense strand starting at position 1022 of SEQ ID NO: 585226
agagcuugcuccuuaggga

SEQ ID NO: 623095 - RNA, 19 nt, Artificial Sequence
  Description of Artificial Sequence: Synthetic oligonucleotide
  Antisense strand to SEQ ID NO: 623094
ucccuaaggagcaagcucu

SEQ ID NO: 623096 - RNA, 19 nt, Artificial Sequence
  Description of Artificial Sequence: Synthetic oligonucleotide
  Sense strand starting at position 1023 of SEQ ID NO: 585226
gagcuugcuccuuagggau

SEQ ID NO: 623097 - RNA, 19 nt, Artificial Sequence
  Description of Artificial Sequence: Synthetic oligonucleotide
  Antisense strand to SEQ ID NO: 623096
aucccuaaggagcaagcuc

SEQ ID NO: 623098 - RNA, 19 nt, Artificial Sequence
  Description of Artificial Sequence: Synthetic oligonucleotide
  Sense strand starting at position 2205 of SEQ ID NO: 585226
ucagucuguggauaugaca

SEQ ID NO: 623099 - RNA, 19 nt, Artificial Sequence
  Description of Artificial Sequence: Synthetic oligonucleotide
  Antisense strand to SEQ ID NO: 623098
ugucauauccacagacuga

SEQ ID NO: 623100 - RNA, 19 nt, Artificial Sequence
  Description of Artificial Sequence: Synthetic oligonucleotide
  Sense strand starting at position 2256 of SEQ ID NO: 585226
uugauacauuugucuuugu

SEQ ID NO: 623101 - RNA, 19 nt, Artificial Sequence
  Description of Artificial Sequence: Synthetic oligonucleotide
  Antisense strand to SEQ ID NO: 623100
acaaagacaaauguaucaa

SEQ ID NO: 623102 - RNA, 19 nt, Artificial Sequence
  Description of Artificial Sequence: Synthetic oligonucleotide
  Sense strand starting at position 2261 of SEQ ID NO: 585226
acauuugucuuuguaaagc

SEQ ID NO: 623103 - RNA, 19 nt, Artificial Sequence
  Description of Artificial Sequence: Synthetic oligonucleotide
  Antisense strand to SEQ ID NO: 623102
gcuuuacaaagacaaaugu

SEQ ID NO: 623104 - RNA, 19 nt, Artificial Sequence
  Description of Artificial Sequence: Synthetic oligonucleotide
  Sense strand starting at position 2309 of SEQ ID NO: 585226
guguuucucaagcaggaca

SEQ ID NO: 623105 - RNA, 19 nt, Artificial Sequence
  Description of Artificial Sequence: Synthetic oligonucleotide
  Antisense strand to SEQ ID NO: 623104
uguccugcuugagaaacac

SEQ ID NO: 623106 - RNA, 19 nt, Artificial Sequence
  Description of Artificial Sequence: Synthetic oligonucleotide
  Sense strand starting at position 2504 of SEQ ID NO: 585226
auuugcgauaguuaagugu

SEQ ID NO: 623107 - RNA, 19 nt, Artificial Sequence
  Description of Artificial Sequence: Synthetic oligonucleotide
  Antisense strand to SEQ ID NO: 623106
acacuuaacuaucgcaaau

SEQ ID NO: 623108 - RNA, 19 nt, Artificial Sequence
  Description of Artificial Sequence: Synthetic oligonucleotide
  Sense strand starting at position 2586 of SEQ ID NO: 585226
uguugucaagcaugacaga

SEQ ID NO: 623109 - RNA, 19 nt, Artificial Sequence
  Description of Artificial Sequence: Synthetic oligonucleotide
  Antisense strand to SEQ ID NO: 623108
ucugucaugcuugacaaca

SEQ ID NO: 623110 - RNA, 19 nt, Artificial Sequence
  Description of Artificial Sequence: Synthetic oligonucleotide
  Sense strand starting at position 2646 of SEQ ID NO: 585226
guagcaaucuaagcagaag

SEQ ID NO: 623111 - RNA, 19 nt, Artificial Sequence
  Description of Artificial Sequence: Synthetic oligonucleotide
  Antisense strand to SEQ ID NO: 623110
cuucugcuuagauugcuac

SEQ ID NO: 623112 - RNA, 19 nt, Artificial Sequence
  Description of Artificial Sequence: Synthetic oligonucleotide
  Sense strand starting at position 2855 of SEQ ID NO: 585226
aaucuugcacuugggaaga

SEQ ID NO: 623113 - RNA, 19 nt, Artificial Sequence
  Description of Artificial Sequence: Synthetic oligonucleotide
  Antisense strand to SEQ ID NO: 623112
ucuucccaagugcaagauu

SEQ ID NO: 623114 - RNA, 19 nt, Artificial Sequence
  Description of Artificial Sequence: Synthetic oligonucleotide
  Sense strand starting at position 2865 of SEQ ID NO: 585226
uugggaagagccuggaaau

SEQ ID NO: 623115 - RNA, 19 nt, Artificial Sequence
  Description of Artificial Sequence: Synthetic oligonucleotide
  Antisense strand to SEQ ID NO: 623114
auuuccaggcucuucccaa

SEQ ID NO: 623116 - RNA, 19 nt, Artificial Sequence
  Description of Artificial Sequence: Synthetic oligonucleotide
  Sense strand starting at position 2876 of SEQ ID NO: 585226
cuggaaaucuugucugaac

SEQ ID NO: 623117 - RNA, 19 nt, Artificial Sequence
  Description of Artificial Sequence: Synthetic oligonucleotide
  Antisense strand to SEQ ID NO: 623116
guucagacaagauuuccag

SEQ ID NO: 623118 - RNA, 19 nt, Artificial Sequence
  Description of Artificial Sequence: Synthetic oligonucleotide
  Sense strand starting at position 2877 of SEQ ID NO: 585226
uggaaaucuugucugaacu

SEQ ID NO: 623119 - RNA, 19 nt, Artificial Sequence
  Description of Artificial Sequence: Synthetic oligonucleotide
  Antisense strand to SEQ ID NO: 623118
aguucagacaagauuucca

SEQ ID NO: 623120 - RNA, 19 nt, Artificial Sequence
  Description of Artificial Sequence: Synthetic oligonucleotide
  Sense strand starting at position 2878 of SEQ ID NO: 585226
ggaaaucuugucugaacuu

SEQ ID NO: 623121 - RNA, 19 nt, Artificial Sequence
  Description of Artificial Sequence: Synthetic oligonucleotide
  Antisense strand to SEQ ID NO: 623120
aaguucagacaagauuucc

SEQ ID NO: 623122 - RNA, 19 nt, Artificial Sequence
  Description of Artificial Sequence: Synthetic oligonucleotide
  Sense strand starting at position 2918 of SEQ ID NO: 585226
cugauaacauugcugacau

SEQ ID NO: 623123 - RNA, 19 nt, Artificial Sequence
  Description of Artificial Sequence: Synthetic oligonucleotide
  Antisense strand to SEQ ID NO: 623122
augucagcaauguuaucag

SEQ ID NO: 623124 - RNA, 19 nt, Artificial Sequence
  Description of Artificial Sequence: Synthetic oligonucleotide
  Sense strand starting at position 2920 of SEQ ID NO: 585226
gauaacauugcugacaugu

SEQ ID NO: 623125 - RNA, 19 nt, Artificial Sequence
  Description of Artificial Sequence: Synthetic oligonucleotide
  Antisense strand to SEQ ID NO: 623124
acaugucagcaauguuauc

SEQ ID NO: 623126 - RNA, 19 nt, Artificial Sequence
  Description of Artificial Sequence: Synthetic oligonucleotide
  Sense strand starting at position 2987 of SEQ ID NO: 585226
augggagugcucuaagggu

SEQ ID NO: 623127 - RNA, 19 nt, Artificial Sequence
  Description of Artificial Sequence: Synthetic oligonucleotide
  Antisense strand to SEQ ID NO: 623126
acccuuagagcacucccau

SEQ ID NO: 623128 - RNA, 19 nt, Artificial Sequence
  Description of Artificial Sequence: Synthetic oligonucleotide
  Sense strand starting at position 2991 of SEQ ID NO: 585226
gagugcucuaagggugaga

SEQ ID NO: 623129 - RNA, 19 nt, Artificial Sequence
  Description of Artificial Sequence: Synthetic oligonucleotide
  Antisense strand to SEQ ID NO: 623128
ucucacccuuagagcacuc

SEQ ID NO: 623130 - RNA, 19 nt, Artificial Sequence
  Description of Artificial Sequence: Synthetic oligonucleotide
  Sense strand starting at position 2993 of SEQ ID NO: 585226
gugcucuaagggugagaaa

SEQ ID NO: 623131 - RNA, 19 nt, Artificial Sequence
  Description of Artificial Sequence: Synthetic oligonucleotide
  Antisense strand to SEQ ID NO: 623130
uuucucacccuuagagcac

SEQ ID NO: 623132 - RNA, 19 nt, Artificial Sequence
  Description of Artificial Sequence: Synthetic oligonucleotide
  Sense strand starting at position 3249 of SEQ ID NO: 585226
uuggucuuccuuuagacaa

SEQ ID NO: 623133 - RNA, 19 nt, Artificial Sequence
  Description of Artificial Sequence: Synthetic oligonucleotide
  Antisense strand to SEQ ID NO: 623132
uugucuaaaggaagaccaa

SEQ ID NO: 623134 - RNA, 19 nt, Artificial Sequence
  Description of Artificial Sequence: Synthetic oligonucleotide
  Sense strand starting at position 3307 of SEQ ID NO: 585226
acaauaauaugguuugagu

SEQ ID NO: 623135 - RNA, 19 nt, Artificial Sequence
  Description of Artificial Sequence: Synthetic oligonucleotide
  Antisense strand to SEQ ID NO: 623134
acucaaaccauauuauugu

SEQ ID NO: 623136 - RNA, 19 nt, Artificial Sequence
  Description of Artificial Sequence: Synthetic oligonucleotide
  Sense strand starting at position 3309 of SEQ ID NO: 585226
aauaauaugguuugagucu

SEQ ID NO: 623137 - RNA, 19 nt, Artificial Sequence
  Description of Artificial Sequence: Synthetic oligonucleotide
  Antisense strand to SEQ ID NO: 623136
agacucaaaccauauuauu

SEQ ID NO: 623138 - RNA, 19 nt, Artificial Sequence
  Description of Artificial Sequence: Synthetic oligonucleotide
  Sense strand starting at position 3341 of SEQ ID NO: 585226
aguacauuauucuuuggau

SEQ ID NO: 623139 - RNA, 19 nt, Artificial Sequence
  Description of Artificial Sequence: Synthetic oligonucleotide
  Antisense strand to SEQ ID NO: 623138
auccaaagaauaauguacu

SEQ ID NO: 623140 - RNA, 19 nt, Artificial Sequence
  Description of Artificial Sequence: Synthetic oligonucleotide
  Sense strand starting at position 3342 of SEQ ID NO: 585226
guacauuauucuuuggaug

SEQ ID NO: 623141 - RNA, 19 nt, Artificial Sequence
  Description of Artificial Sequence: Synthetic oligonucleotide
  Antisense strand to SEQ ID NO: 623140
cauccaaagaauaauguac

SEQ ID NO: 623142 - RNA, 19 nt, Artificial Sequence
  Description of Artificial Sequence: Synthetic oligonucleotide
  Sense strand starting at position 3408 of SEQ ID NO: 585226
ggugguuuacacugagauu

SEQ ID NO: 623143 - RNA, 19 nt, Artificial Sequence
  Description of Artificial Sequence: Synthetic oligonucleotide
  Antisense strand to SEQ ID NO: 623142
aaucucaguguaaaccacc

SEQ ID NO: 623144 - RNA, 19 nt, Artificial Sequence
  Description of Artificial Sequence: Synthetic oligonucleotide
  Sense strand starting at position 3411 of SEQ ID NO: 585226
gguuuacacugagauuuag

SEQ ID NO: 623145 - RNA, 19 nt, Artificial Sequence
  Description of Artificial Sequence: Synthetic oligonucleotide
  Antisense strand to SEQ ID NO: 623144
cuaaaucucaguguaaacc

SEQ ID NO: 623146 - RNA, 19 nt, Artificial Sequence
  Description of Artificial Sequence: Synthetic oligonucleotide
  Sense strand starting at position 3582 of SEQ ID NO: 585226
uuagaugauuuacgaaaga

SEQ ID NO: 623147 - RNA, 19 nt, Artificial Sequence
  Description of Artificial Sequence: Synthetic oligonucleotide
  Antisense strand to SEQ ID NO: 623146
ucuuucguaaaucaucuaa

SEQ ID NO: 623148 - RNA, 19 nt, Artificial Sequence
  Description of Artificial Sequence: Synthetic oligonucleotide
  Sense strand starting at position 3604 of SEQ ID NO: 585226
auggauuaaucagcagcaa

SEQ ID NO: 623149 - RNA, 19 nt, Artificial Sequence
  Description of Artificial Sequence: Synthetic oligonucleotide
  Antisense strand to SEQ ID NO: 623148
uugcugcugauuaauccau

SEQ ID NO: 623150 - RNA, 19 nt, Artificial Sequence
  Description of Artificial Sequence: Synthetic oligonucleotide
  Sense strand starting at position 3605 of SEQ ID NO: 585226
uggauuaaucagcagcaaa

SEQ ID NO: 623151 - RNA, 19 nt, Artificial Sequence
  Description of Artificial Sequence: Synthetic oligonucleotide
  Antisense strand to SEQ ID NO: 623150
uuugcugcugauuaaucca

SEQ ID NO: 623152 - RNA, 19 nt, Artificial Sequence
  Description of Artificial Sequence: Synthetic oligonucleotide
  Sense strand starting at position 3661 of SEQ ID NO: 585226
gggacauaguacuucuguu

SEQ ID NO: 623153 - RNA, 19 nt, Artificial Sequence
  Description of Artificial Sequence: Synthetic oligonucleotide
  Antisense strand to SEQ ID NO: 623152
aacagaaguacuauguccc

SEQ ID NO: 623154 - RNA, 19 nt, Artificial Sequence
  Description of Artificial Sequence: Synthetic oligonucleotide
  Sense strand starting at position 80 of SEQ ID NO: 585227
cuagcuaucgcagaucaau

SEQ ID NO: 623155 - RNA, 19 nt, Artificial Sequence
  Description of Artificial Sequence: Synthetic oligonucleotide
  Antisense strand to SEQ ID NO: 623154
auugaucugcgauagcuag

SEQ ID NO: 623156 - RNA, 19 nt, Artificial Sequence
  Description of Artificial Sequence: Synthetic oligonucleotide
  Sense strand starting at position 365 of SEQ ID NO: 585227
uaggauagauucucuguua

SEQ ID NO: 623157 - RNA, 19 nt, Artificial Sequence
  Description of Artificial Sequence: Synthetic oligonucleotide
  Antisense strand to SEQ ID NO: 623156
uaacagagaaucuauccua

SEQ ID NO: 623158 - RNA, 19 nt, Artificial Sequence
  Description of Artificial Sequence: Synthetic oligonucleotide
  Sense strand starting at position 366 of SEQ ID NO: 585227
aggauagauucucuguuaa

SEQ ID NO: 623159 - RNA, 19 nt, Artificial Sequence
  Description of Artificial Sequence: Synthetic oligonucleotide
  Antisense strand to SEQ ID NO: 623158
uuaacagagaaucuauccu

SEQ ID NO: 623160 - RNA, 19 nt, Artificial Sequence
  Description of Artificial Sequence: Synthetic oligonucleotide
  Sense strand starting at position 390 of SEQ ID NO: 585227
ggaaucccuucucucaaga

SEQ ID NO: 623161 - RNA, 19 nt, Artificial Sequence
  Description of Artificial Sequence: Synthetic oligonucleotide
  Antisense strand to SEQ ID NO: 623160
ucuugagagaagggauucc

SEQ ID NO: 623162 - RNA, 19 nt, Artificial Sequence
  Description of Artificial Sequence: Synthetic oligonucleotide
  Sense strand starting at position 428 of SEQ ID NO: 585227
uuaccaagccuuugugaaa

SEQ ID NO: 623163 - RNA, 19 nt, Artificial Sequence
  Description of Artificial Sequence: Synthetic oligonucleotide
  Antisense strand to SEQ ID NO: 623162
uuucacaaaggcuugguaa

SEQ ID NO: 623164 - RNA, 19 nt, Artificial Sequence
  Description of Artificial Sequence: Synthetic oligonucleotide
  Sense strand starting at position 439 of SEQ ID NO: 585227
uugugaaaucuguauaaca

SEQ ID NO: 623165 - RNA, 19 nt, Artificial Sequence
  Description of Artificial Sequence: Synthetic oligonucleotide
  Antisense strand to SEQ ID NO: 623164
uguuauacagauuucacaa

SEQ ID NO: 623166 - RNA, 19 nt, Artificial Sequence
  Description of Artificial Sequence: Synthetic oligonucleotide
  Sense strand starting at position 677 of SEQ ID NO: 585227
ggaacagccuuugcaagau

SEQ ID NO: 623167 - RNA, 19 nt, Artificial Sequence
  Description of Artificial Sequence: Synthetic oligonucleotide
  Antisense strand to SEQ ID NO: 623166
aucuugcaaaggcuguucc

SEQ ID NO: 623168 - RNA, 19 nt, Artificial Sequence
  Description of Artificial Sequence: Synthetic oligonucleotide
  Sense strand starting at position 689 of SEQ ID NO: 585227
gcaagauaccaaugcucuc

SEQ ID NO: 623169 - RNA, 19 nt, Artificial Sequence
  Description of Artificial Sequence: Synthetic oligonucleotide
  Antisense strand to SEQ ID NO: 623168
gagagcauugguaucuugc

SEQ ID NO: 623170 - RNA, 19 nt, Artificial Sequence
  Description of Artificial Sequence: Synthetic oligonucleotide
  Sense strand starting at position 794 of SEQ ID NO: 585227
acccauggagucugaucua

SEQ ID NO: 623171 - RNA, 19 nt, Artificial Sequence
  Description of Artificial Sequence: Synthetic oligonucleotide
  Antisense strand to SEQ ID NO: 623170
uagaucagacuccaugggu

SEQ ID NO: 623172 - RNA, 19 nt, Artificial Sequence
  Description of Artificial Sequence: Synthetic oligonucleotide
  Sense strand starting at position 797 of SEQ ID NO: 585227
cauggagucugaucuacaa

SEQ ID NO: 623173 - RNA, 19 nt, Artificial Sequence
  Description of Artificial Sequence: Synthetic oligonucleotide
  Antisense strand to SEQ ID NO: 623172
uuguagaucagacuccaug

SEQ ID NO: 623174 - RNA, 19 nt, Artificial Sequence
  Description of Artificial Sequence: Synthetic oligonucleotide
  Sense strand starting at position 851 of SEQ ID NO: 585227
ucuuauuuccuacgaaguc

SEQ ID NO: 623175 - RNA, 19 nt, Artificial Sequence
  Description of Artificial Sequence: Synthetic oligonucleotide
  Antisense strand to SEQ ID NO: 623174
gacuucguaggaaauaaga

SEQ ID NO: 623176 - RNA, 19 nt, Artificial Sequence
  Description of Artificial Sequence: Synthetic oligonucleotide
  Sense strand starting at position 922 of SEQ ID NO: 585227
ccauuugaauccugagaaa

SEQ ID NO: 623177 - RNA, 19 nt, Artificial Sequence
  Description of Artificial Sequence: Synthetic oligonucleotide
  Antisense strand to SEQ ID NO: 623176
uuucucaggauucaaaugg

SEQ ID NO: 623178 - RNA, 19 nt, Artificial Sequence
  Description of Artificial Sequence: Synthetic oligonucleotide
  Sense strand starting at position 937 of SEQ ID NO: 585227
gaaagacgcgcucaaagaa

SEQ ID NO: 623179 - RNA, 19 nt, Artificial Sequence
  Description of Artificial Sequence: Synthetic oligonucleotide
  Antisense strand to SEQ ID NO: 623178
uucuuugagcgcgucuuuc

SEQ ID NO: 623180 - RNA, 19 nt, Artificial Sequence
  Description of Artificial Sequence: Synthetic oligonucleotide
  Sense strand starting at position 1194 of SEQ ID NO: 585227
gggcuuuguguagagucaa

SEQ ID NO: 623181 - RNA, 19 nt, Artificial Sequence
  Description of Artificial Sequence: Synthetic oligonucleotide
  Antisense strand to SEQ ID NO: 623180
uugacucuacacaaagccc

SEQ ID NO: 623182 - RNA, 19 nt, Artificial Sequence
  Description of Artificial Sequence: Synthetic oligonucleotide
  Sense strand starting at position 1206 of SEQ ID NO: 585227
gagucaaggccgggauaga

SEQ ID NO: 623183 - RNA, 19 nt, Artificial Sequence
  Description of Artificial Sequence: Synthetic oligonucleotide
  Antisense strand to SEQ ID NO: 623182
ucuaucccggccuugacuc

SEQ ID NO: 623184 - RNA, 19 nt, Artificial Sequence
  Description of Artificial Sequence: Synthetic oligonucleotide
  Sense strand starting at position 1533 of SEQ ID NO: 585227
uuaagaugcggccaaaugu

SEQ ID NO: 623185 - RNA, 19 nt, Artificial Sequence
  Description of Artificial Sequence: Synthetic oligonucleotide
  Antisense strand to SEQ ID NO: 623184
acauuuggccgcaucuuaa

SEQ ID NO: 623186 - RNA, 19 nt, Artificial Sequence
  Description of Artificial Sequence: Synthetic oligonucleotide
  Sense strand starting at position 2434 of SEQ ID NO: 585227
cucguuugucguuuguuca

SEQ ID NO: 623187 - RNA, 19 nt, Artificial Sequence
  Description of Artificial Sequence: Synthetic oligonucleotide
  Antisense strand to SEQ ID NO: 623186
ugaacaaacgacaaacgag

SEQ ID NO: 623188 - RNA, 19 nt, Artificial Sequence
  Description of Artificial Sequence: Synthetic oligonucleotide
  Sense strand starting at position 2507 of SEQ ID NO: 585227
gggccuauuacggauguua

SEQ ID NO: 623189 - RNA, 19 nt, Artificial Sequence
  Description of Artificial Sequence: Synthetic oligonucleotide
  Antisense strand to SEQ ID NO: 623188
uaacauccguaauaggccc

SEQ ID NO: 623190 - RNA, 19 nt, Artificial Sequence
  Description of Artificial Sequence: Synthetic oligonucleotide
  Sense strand starting at position 2509 of SEQ ID NO: 585227
gccuauuacggauguuaag

SEQ ID NO: 623191 - RNA, 19 nt, Artificial Sequence
  Description of Artificial Sequence: Synthetic oligonucleotide
  Antisense strand to SEQ ID NO: 623190
cuuaacauccguaauaggc

SEQ ID NO: 623192 - RNA, 19 nt, Artificial Sequence
  Description of Artificial Sequence: Synthetic oligonucleotide
  Sense strand starting at position 2565 of SEQ ID NO: 585227
ggagcucauuuauaaggua

SEQ ID NO: 623193 - RNA, 19 nt, Artificial Sequence
  Description of Artificial Sequence: Synthetic oligonucleotide
  Antisense strand to SEQ ID NO: 623192
uaccuuauaaaugagcucc

SEQ ID NO: 623194 - RNA, 19 nt, Artificial Sequence
  Description of Artificial Sequence: Synthetic oligonucleotide
  Sense strand starting at position 2658 of SEQ ID NO: 585227
ucaacaacucuaggaggua

SEQ ID NO: 623195 - RNA, 19 nt, Artificial Sequence
  Description of Artificial Sequence: Synthetic oligonucleotide
  Antisense strand to SEQ ID NO: 623194
uaccuccuagaguuguuga

SEQ ID NO: 623196 - RNA, 19 nt, Artificial Sequence
  Description of Artificial Sequence: Synthetic oligonucleotide
  Sense strand starting at position 2738 of SEQ ID NO: 585227
aacugauaagucuggaggu

SEQ ID NO: 623197 - RNA, 19 nt, Artificial Sequence
  Description of Artificial Sequence: Synthetic oligonucleotide
  Antisense strand to SEQ ID NO: 623196
accuccagacuuaucaguu

SEQ ID NO: 623198 - RNA, 19 nt, Artificial Sequence
  Description of Artificial Sequence: Synthetic oligonucleotide
  Sense strand starting at position 2740 of SEQ ID NO: 585227
cugauaagucuggagguuu

SEQ ID NO: 623199 - RNA, 19 nt, Artificial Sequence
  Description of Artificial Sequence: Synthetic oligonucleotide
  Antisense strand to SEQ ID NO: 623198
aaaccuccagacuuaucag

SEQ ID NO: 623200 - RNA, 19 nt, Artificial Sequence
  Description of Artificial Sequence: Synthetic oligonucleotide
  Sense strand starting at position 2815 of SEQ ID NO: 585227
uggcuagacacuggaagau

SEQ ID NO: 623201 - RNA, 19 nt, Artificial Sequence
  Description of Artificial Sequence: Synthetic oligonucleotide
  Antisense strand to SEQ ID NO: 623200
aucuuccagugucuagcca

SEQ ID NO: 623202 - RNA, 19 nt, Artificial Sequence
  Description of Artificial Sequence: Synthetic oligonucleotide
  Sense strand starting at position 2849 of SEQ ID NO: 585227
uucgaaacucuuggagguu

SEQ ID NO: 623203 - RNA, 19 nt, Artificial Sequence
  Description of Artificial Sequence: Synthetic oligonucleotide
  Antisense strand to SEQ ID NO: 623202
aaccuccaagaguuucgaa

SEQ ID NO: 623204 - RNA, 19 nt, Artificial Sequence
  Description of Artificial Sequence: Synthetic oligonucleotide
  Sense strand starting at position 2863 of SEQ ID NO: 585227
agguuaugaauacaagugu

SEQ ID NO: 623205 - RNA, 19 nt, Artificial Sequence
  Description of Artificial Sequence: Synthetic oligonucleotide
  Antisense strand to SEQ ID NO: 623204
acacuuguauucauaaccu

SEQ ID NO: 623206 - RNA, 19 nt, Artificial Sequence
  Description of Artificial Sequence: Synthetic oligonucleotide
  Sense strand starting at position 3091 of SEQ ID NO: 585227
uuaauuugcuguuugacuu

SEQ ID NO: 623207 - RNA, 19 nt, Artificial Sequence
  Description of Artificial Sequence: Synthetic oligonucleotide
  Antisense strand to SEQ ID NO: 623206
aagucaaacagcaaauuaa

SEQ ID NO: 623208 - RNA, 19 nt, Artificial Sequence
  Description of Artificial Sequence: Synthetic oligonucleotide
  Sense strand starting at position 3265 of SEQ ID NO: 585227
gagaaauuacggugaguga

SEQ ID NO: 623209 - RNA, 19 nt, Artificial Sequence
  Description of Artificial Sequence: Synthetic oligonucleotide
  Antisense strand to SEQ ID NO: 623208
ucacucaccguaauuucuc

SEQ ID NO: 623210 - RNA, 19 nt, Artificial Sequence
  Description of Artificial Sequence: Synthetic oligonucleotide
  Sense strand starting at position 3288 of SEQ ID NO: 585227
cuggccuagagguaaaguu

SEQ ID NO: 623211 - RNA, 19 nt, Artificial Sequence
  Description of Artificial Sequence: Synthetic oligonucleotide
  Antisense strand to SEQ ID NO: 623210
aacuuuaccucuaggccag

SEQ ID NO: 623212 - RNA, 19 nt, Artificial Sequence
  Description of Artificial Sequence: Synthetic oligonucleotide
  Sense strand starting at position 3318 of SEQ ID NO: 585227
uaaguugugcucuaucaag

SEQ ID NO: 623213 - RNA, 19 nt, Artificial Sequence
  Description of Artificial Sequence: Synthetic oligonucleotide
  Antisense strand to SEQ ID NO: 623212
cuugauagagcacaacuua

SEQ ID NO: 623214 - RNA, 19 nt, Artificial Sequence
  Description of Artificial Sequence: Synthetic oligonucleotide
  Sense strand starting at position 3372 of SEQ ID NO: 585227
aagugaauuuaguagaagu

SEQ ID NO: 623215 - RNA, 19 nt, Artificial Sequence
  Description of Artificial Sequence: Synthetic oligonucleotide
  Antisense strand to SEQ ID NO: 623214
acuucuacuaaauucacuu

SEQ ID NO: 623216 - RNA, 19 nt, Artificial Sequence
  Description of Artificial Sequence: Synthetic oligonucleotide
  Sense strand starting at position 3382 of SEQ ID NO: 585227
aguagaagugaauguucuu

SEQ ID NO: 623217 - RNA, 19 nt, Artificial Sequence
  Description of Artificial Sequence: Synthetic oligonucleotide
  Antisense strand to SEQ ID NO: 623216
aagaacauucacuucuacu

SEQ ID NO: 623218 - RNA, 19 nt, Artificial Sequence
  Description of Artificial Sequence: Synthetic oligonucleotide
  Sense strand starting at position 3508 of SEQ ID NO: 585227
gcuguagcucaacacuuaa

SEQ ID NO: 623219 - RNA, 19 nt, Artificial Sequence
  Description of Artificial Sequence: Synthetic oligonucleotide
  Antisense strand to SEQ ID NO: 623218
uuaaguguugagcuacagc

SEQ ID NO: 623220 - RNA, 19 nt, Artificial Sequence
  Description of Artificial Sequence: Synthetic oligonucleotide
  Sense strand starting at position 3565 of SEQ ID NO: 585227
cuaugaauggagugucaua

SEQ ID NO: 623221 - RNA, 19 nt, Artificial Sequence
  Description of Artificial Sequence: Synthetic oligonucleotide
  Antisense strand to SEQ ID NO: 623220
uaugacacuccauucauag

SEQ ID NO: 623222 - RNA, 19 nt, Artificial Sequence
  Description of Artificial Sequence: Synthetic oligonucleotide
  Sense strand starting at position 3661 of SEQ ID NO: 585227
uuugaauugccuuaucugu

SEQ ID NO: 623223 - RNA, 19 nt, Artificial Sequence
  Description of Artificial Sequence: Synthetic oligonucleotide
  Antisense strand to SEQ ID NO: 623222
acagauaaggcaauucaaa

SEQ ID NO: 623224 - RNA, 19 nt, Artificial Sequence
  Description of Artificial Sequence: Synthetic oligonucleotide
  Sense strand starting at position 3663 of SEQ ID NO: 585227
ugaauugccuuaucuguaa

SEQ ID NO: 623225 - RNA, 19 nt, Artificial Sequence
  Description of Artificial Sequence: Synthetic oligonucleotide
  Antisense strand to SEQ ID NO: 623224
uuacagauaaggcaauuca

SEQ ID NO: 623226 - RNA, 19 nt, Artificial Sequence
  Description of Artificial Sequence: Synthetic oligonucleotide
  Sense strand starting at position 3687 of SEQ ID NO: 585227
ggcaguauuacuuggagag

SEQ ID NO: 623227 - RNA, 19 nt, Artificial Sequence
  Description of Artificial Sequence: Synthetic oligonucleotide
  Antisense strand to SEQ ID NO: 623226
cucuccaaguaauacugcc

SEQ ID NO: 623228 - RNA, 19 nt, Artificial Sequence
  Description of Artificial Sequence: Synthetic oligonucleotide
  Sense strand starting at position 3688 of SEQ ID NO: 585227
gcaguauuacuuggagagu

SEQ ID NO: 623229 - RNA, 19 nt, Artificial Sequence
  Description of Artificial Sequence: Synthetic oligonucleotide
  Antisense strand to SEQ ID NO: 623228
acucuccaaguaauacugc

SEQ ID NO: 623230 - RNA, 19 nt, Artificial Sequence
  Description of Artificial Sequence: Synthetic oligonucleotide
  Sense strand starting at position 3758 of SEQ ID NO: 585227
gaagaauuaugugaauaag

SEQ ID NO: 623231 - RNA, 19 nt, Artificial Sequence
  Description of Artificial Sequence: Synthetic oligonucleotide
  Antisense strand to SEQ ID NO: 623230
cuuauucacauaauucuuc

SEQ ID NO: 623232 - RNA, 19 nt, Artificial Sequence
  Description of Artificial Sequence: Synthetic oligonucleotide
  Sense strand starting at position 3854 of SEQ ID NO: 585227
gugagaagagccuggacau

SEQ ID NO: 623233 - RNA, 19 nt, Artificial Sequence
  Description of Artificial Sequence: Synthetic oligonucleotide
  Antisense strand to SEQ ID NO: 623232
auguccaggcucuucucac

SEQ ID NO: 623234 - RNA, 19 nt, Artificial Sequence
  Description of Artificial Sequence: Synthetic oligonucleotide
  Sense strand starting at position 100 of SEQ ID NO: 585228
guacuaauacaaugcuaga

SEQ ID NO: 623235 - RNA, 19 nt, Artificial Sequence
  Description of Artificial Sequence: Synthetic oligonucleotide
  Antisense strand to SEQ ID NO: 623234
ucuagcauuguauuaguac

SEQ ID NO: 623236 - RNA, 19 nt, Artificial Sequence
  Description of Artificial Sequence: Synthetic oligonucleotide
  Sense strand starting at position 367 of SEQ ID NO: 585228
aucucucacgagcaucaaa

SEQ ID NO: 623237 - RNA, 19 nt, Artificial Sequence
  Description of Artificial Sequence: Synthetic oligonucleotide
  Antisense strand to SEQ ID NO: 623236
uuugaugcucgugagagau

SEQ ID NO: 623238 - RNA, 19 nt, Artificial Sequence
  Description of Artificial Sequence: Synthetic oligonucleotide
  Sense strand starting at position 409 of SEQ ID NO: 585228
uguuaagacggucaucuuu

SEQ ID NO: 623239 - RNA, 19 nt, Artificial Sequence
  Description of Artificial Sequence: Synthetic oligonucleotide
  Antisense strand to SEQ ID NO: 623238
aaagaugaccgucuuaaca

SEQ ID NO: 623240 - RNA, 19 nt, Artificial Sequence
  Description of Artificial Sequence: Synthetic oligonucleotide
  Sense strand starting at position 411 of SEQ ID NO: 585228
uuaagacggucaucuuuga

SEQ ID NO: 623241 - RNA, 19 nt, Artificial Sequence
  Description of Artificial Sequence: Synthetic oligonucleotide
  Antisense strand to SEQ ID NO: 623240
ucaaagaugaccgucuuaa

SEQ ID NO: 623242 - RNA, 19 nt, Artificial Sequence
  Description of Artificial Sequence: Synthetic oligonucleotide
  Sense strand starting at position 418 of SEQ ID NO: 585228
ggucaucuuugaucaccau

SEQ ID NO: 623243 - RNA, 19 nt, Artificial Sequence
  Description of Artificial Sequence: Synthetic oligonucleotide
  Antisense strand to SEQ ID NO: 623242
auggugaucaaagaugacc

SEQ ID NO: 623244 - RNA, 19 nt, Artificial Sequence
  Description of Artificial Sequence: Synthetic oligonucleotide
  Sense strand starting at position 419 of SEQ ID NO: 585228
gucaucuuugaucaccaua

SEQ ID NO: 623245 - RNA, 19 nt, Artificial Sequence
  Description of Artificial Sequence: Synthetic oligonucleotide
  Antisense strand to SEQ ID NO: 623244
uauggugaucaaagaugac

SEQ ID NO: 623246 - RNA, 19 nt, Artificial Sequence
  Description of Artificial Sequence: Synthetic oligonucleotide
  Sense strand starting at position 453 of SEQ ID NO: 585228
cgguacaugugaucugaaa

SEQ ID NO: 623247 - RNA, 19 nt, Artificial Sequence
  Description of Artificial Sequence: Synthetic oligonucleotide
  Antisense strand to SEQ ID NO: 623246
uuucagaucacauguaccg

SEQ ID NO: 623248 - RNA, 19 nt, Artificial Sequence
  Description of Artificial Sequence: Synthetic oligonucleotide
  Sense strand starting at position 455 of SEQ ID NO: 585228
guacaugugaucugaaacg

SEQ ID NO: 623249 - RNA, 19 nt, Artificial Sequence
  Description of Artificial Sequence: Synthetic oligonucleotide
  Antisense strand to SEQ ID NO: 623248
cguuucagaucacauguac

SEQ ID NO: 623250 - RNA, 19 nt, Artificial Sequence
  Description of Artificial Sequence: Synthetic oligonucleotide
  Sense strand starting at position 889 of SEQ ID NO: 585228
acuguauugaagggucuga

SEQ ID NO: 623251 - RNA, 19 nt, Artificial Sequence
  Description of Artificial Sequence: Synthetic oligonucleotide
  Antisense strand to SEQ ID NO: 623250
ucagacccuucaauacagu

SEQ ID NO: 623252 - RNA, 19 nt, Artificial Sequence
  Description of Artificial Sequence: Synthetic oligonucleotide
  Sense strand starting at position 893 of SEQ ID NO: 585228
uauugaagggucugaacgu

SEQ ID NO: 623253 - RNA, 19 nt, Artificial Sequence
  Description of Artificial Sequence: Synthetic oligonucleotide
  Antisense strand to SEQ ID NO: 623252
acguucagacccuucaaua

SEQ ID NO: 623254 - RNA, 19 nt, Artificial Sequence
  Description of Artificial Sequence: Synthetic oligonucleotide
  Sense strand starting at position 1053 of SEQ ID NO: 585228
aucucuaaggaauguuaua

SEQ ID NO: 623255 - RNA, 19 nt, Artificial Sequence
  Description of Artificial Sequence: Synthetic oligonucleotide
  Antisense strand to SEQ ID NO: 623254
uauaacauuccuuagagau

SEQ ID NO: 623256 - RNA, 19 nt, Artificial Sequence
  Description of Artificial Sequence: Synthetic oligonucleotide
  Sense strand starting at position 1068 of SEQ ID NO: 585228
uauaaauaguagucagagu

SEQ ID NO: 623257 - RNA, 19 nt, Artificial Sequence
  Description of Artificial Sequence: Synthetic oligonucleotide
  Antisense strand to SEQ ID NO: 623256
acucugacuacuauuuaua

SEQ ID NO: 623258 - RNA, 19 nt, Artificial Sequence
  Description of Artificial Sequence: Synthetic oligonucleotide
  Sense strand starting at position 1085 of SEQ ID NO: 585228
guggcaugaaacggauaau

SEQ ID NO: 623259 - RNA, 19 nt, Artificial Sequence
  Description of Artificial Sequence: Synthetic oligonucleotide
  Antisense strand to SEQ ID NO: 623258
auuauccguuucaugccac

SEQ ID NO: 623260 - RNA, 19 nt, Artificial Sequence
  Description of Artificial Sequence: Synthetic oligonucleotide
  Sense strand starting at position 1130 of SEQ ID NO: 585228
ggaagacgcacaugaugaa

SEQ ID NO: 623261 - RNA, 19 nt, Artificial Sequence
  Description of Artificial Sequence: Synthetic oligonucleotide
  Antisense strand to SEQ ID NO: 623260
uucaucaugugcgucuucc

SEQ ID NO: 623262 - RNA, 19 nt, Artificial Sequence
  Description of Artificial Sequence: Synthetic oligonucleotide
  Sense strand starting at position 1146 of SEQ ID NO: 585228
gaaacucguguguauuaca

SEQ ID NO: 623263 - RNA, 19 nt, Artificial Sequence
  Description of Artificial Sequence: Synthetic oligonucleotide
  Antisense strand to SEQ ID NO: 623262
uguaauacacacgaguuuc

SEQ ID NO: 623264 - RNA, 19 nt, Artificial Sequence
  Description of Artificial Sequence: Synthetic oligonucleotide
  Sense strand starting at position 1206 of SEQ ID NO: 585228
ucuggaaguaacugugaga

SEQ ID NO: 623265 - RNA, 19 nt, Artificial Sequence
  Description of Artificial Sequence: Synthetic oligonucleotide
  Antisense strand to SEQ ID NO: 623264
ucucacaguuacuuccaga

SEQ ID NO: 623266 - RNA, 19 nt, Artificial Sequence
  Description of Artificial Sequence: Synthetic oligonucleotide
  Sense strand starting at position 2340 of SEQ ID NO: 585228
cuggcaagagggugugaau

SEQ ID NO: 623267 - RNA, 19 nt, Artificial Sequence
  Description of Artificial Sequence: Synthetic oligonucleotide
  Antisense strand to SEQ ID NO: 623266
auucacacccucuugccag

SEQ ID NO: 623268 - RNA, 19 nt, Artificial Sequence
  Description of Artificial Sequence: Synthetic oligonucleotide
  Sense strand starting at position 2440 of SEQ ID NO: 585228
gaggauuaguagguaggau

SEQ ID NO: 623269 - RNA, 19 nt, Artificial Sequence
  Description of Artificial Sequence: Synthetic oligonucleotide
  Antisense strand to SEQ ID NO: 623268
auccuaccuacuaauccuc

SEQ ID NO: 623270 - RNA, 19 nt, Artificial Sequence
  Description of Artificial Sequence: Synthetic oligonucleotide
  Sense strand starting at position 2538 of SEQ ID NO: 585228
guuugacuuccagacuuag

SEQ ID NO: 623271 - RNA, 19 nt, Artificial Sequence
  Description of Artificial Sequence: Synthetic oligonucleotide
  Antisense strand to SEQ ID NO: 623270
cuaagucuggaagucaaac

SEQ ID NO: 623272 - RNA, 19 nt, Artificial Sequence
  Description of Artificial Sequence: Synthetic oligonucleotide
  Sense strand starting at position 2567 of SEQ ID NO: 585228
auuauugguuacccugaca

SEQ ID NO: 623273 - RNA, 19 nt, Artificial Sequence
  Description of Artificial Sequence: Synthetic oligonucleotide
  Antisense strand to SEQ ID NO: 623272
ugucaggguaaccaauaau

SEQ ID NO: 623274 - RNA, 19 nt, Artificial Sequence
  Description of Artificial Sequence: Synthetic oligonucleotide
  Sense strand starting at position 2686 of SEQ ID NO: 585228
cuguuaacuaguggagaga

SEQ ID NO: 623275 - RNA, 19 nt, Artificial Sequence
  Description of Artificial Sequence: Synthetic oligonucleotide
  Antisense strand to SEQ ID NO: 623274
ucucuccacuaguuaacag

SEQ ID NO: 623276 - RNA, 19 nt, Artificial Sequence
  Description of Artificial Sequence: Synthetic oligonucleotide
  Sense strand starting at position 2717 of SEQ ID NO: 585228
aggagauauuauguauguu

SEQ ID NO: 623277 - RNA, 19 nt, Artificial Sequence
  Description of Artificial Sequence: Synthetic oligonucleotide
  Antisense strand to SEQ ID NO: 623276
aacauacauaauaucuccu

SEQ ID NO: 623278 - RNA, 19 nt, Artificial Sequence
  Description of Artificial Sequence: Synthetic oligonucleotide
  Sense strand starting at position 2718 of SEQ ID NO: 585228
ggagauauuauguauguuu

SEQ ID NO: 623279 - RNA, 19 nt, Artificial Sequence
  Description of Artificial Sequence: Synthetic oligonucleotide
  Antisense strand to SEQ ID NO: 623278
aaacauacauaauaucucc

SEQ ID NO: 623280 - RNA, 19 nt, Artificial Sequence
  Description of Artificial Sequence: Synthetic oligonucleotide
  Sense strand starting at position 2726 of SEQ ID NO: 585228
uauguauguuuacugauga

SEQ ID NO: 623281 - RNA, 19 nt, Artificial Sequence
  Description of Artificial Sequence: Synthetic oligonucleotide
  Antisense strand to SEQ ID NO: 623280
ucaucaguaaacauacaua

SEQ ID NO: 623282 - RNA, 19 nt, Artificial Sequence
  Description of Artificial Sequence: Synthetic oligonucleotide
  Sense strand starting at position 2800 of SEQ ID NO: 585228
auuugaaugucggccuuga

SEQ ID NO: 623283 - RNA, 19 nt, Artificial Sequence
  Description of Artificial Sequence: Synthetic oligonucleotide
  Antisense strand to SEQ ID NO: 623282
ucaaggccgacauucaaau

SEQ ID NO: 623284 - RNA, 19 nt, Artificial Sequence
  Description of Artificial Sequence: Synthetic oligonucleotide
  Sense strand starting at position 2833 of SEQ ID NO: 585228
ucccaucugguguacaaga

SEQ ID NO: 623285 - RNA, 19 nt, Artificial Sequence
  Description of Artificial Sequence: Synthetic oligonucleotide
  Antisense strand to SEQ ID NO: 623284
ucuuguacaccagauggga

SEQ ID NO: 623286 - RNA, 19 nt, Artificial Sequence
  Description of Artificial Sequence: Synthetic oligonucleotide
  Sense strand starting at position 2835 of SEQ ID NO: 585228
ccaucugguguacaagaua

SEQ ID NO: 623287 - RNA, 19 nt, Artificial Sequence
  Description of Artificial Sequence: Synthetic oligonucleotide
  Antisense strand to SEQ ID NO: 623286
uaucuuguacaccagaugg

SEQ ID NO: 623288 - RNA, 19 nt, Artificial Sequence
  Description of Artificial Sequence: Synthetic oligonucleotide
  Sense strand starting at position 2860 of SEQ ID NO: 585228
gggcuuuagauaggaauau

SEQ ID NO: 623289 - RNA, 19 nt, Artificial Sequence
  Description of Artificial Sequence: Synthetic oligonucleotide
  Antisense strand to SEQ ID NO: 623288
auauuccuaucuaaagccc

SEQ ID NO: 623290 - RNA, 19 nt, Artificial Sequence
  Description of Artificial Sequence: Synthetic oligonucleotide
  Sense strand starting at position 2908 of SEQ ID NO: 585228
cagaguauagggugacuaa

SEQ ID NO: 623291 - RNA, 19 nt, Artificial Sequence
  Description of Artificial Sequence: Synthetic oligonucleotide
  Antisense strand to SEQ ID NO: 623290
uuagucacccuauacucug

SEQ ID NO: 623292 - RNA, 19 nt, Artificial Sequence
  Description of Artificial Sequence: Synthetic oligonucleotide
  Sense strand starting at position 3227 of SEQ ID NO: 585228
ugucucuggaagugauaua

SEQ ID NO: 623293 - RNA, 19 nt, Artificial Sequence
  Description of Artificial Sequence: Synthetic oligonucleotide
  Antisense strand to SEQ ID NO: 623292
uauaucacuuccagagaca

SEQ ID NO: 623294 - RNA, 19 nt, Artificial Sequence
  Description of Artificial Sequence: Synthetic oligonucleotide
  Sense strand starting at position 3228 of SEQ ID NO: 585228
gucucuggaagugauauau

SEQ ID NO: 623295 - RNA, 19 nt, Artificial Sequence
  Description of Artificial Sequence: Synthetic oligonucleotide
  Antisense strand to SEQ ID NO: 623294
auauaucacuuccagagac

SEQ ID NO: 623296 - RNA, 19 nt, Artificial Sequence
  Description of Artificial Sequence: Synthetic oligonucleotide
  Sense strand starting at position 3234 of SEQ ID NO: 585228
ggaagugauauaugaccuu

SEQ ID NO: 623297 - RNA, 19 nt, Artificial Sequence
  Description of Artificial Sequence: Synthetic oligonucleotide
  Antisense strand to SEQ ID NO: 623296
aaggucauauaucacuucc

SEQ ID NO: 623298 - RNA, 19 nt, Artificial Sequence
  Description of Artificial Sequence: Synthetic oligonucleotide
  Sense strand starting at position 3260 of SEQ ID NO: 585228
cguaucauuggugaaauaa

SEQ ID NO: 623299 - RNA, 19 nt, Artificial Sequence
  Description of Artificial Sequence: Synthetic oligonucleotide
  Antisense strand to SEQ ID NO: 623298
uuauuucaccaaugauacg

SEQ ID NO: 623300 - RNA, 19 nt, Artificial Sequence
  Description of Artificial Sequence: Synthetic oligonucleotide
  Sense strand starting at position 3350 of SEQ ID NO: 585228
aggcuagaauguuugugaa

SEQ ID NO: 623301 - RNA, 19 nt, Artificial Sequence
  Description of Artificial Sequence: Synthetic oligonucleotide
  Antisense strand to SEQ ID NO: 623300
uucacaaacauucuagccu

SEQ ID NO: 623302 - RNA, 19 nt, Artificial Sequence
  Description of Artificial Sequence: Synthetic oligonucleotide
  Sense strand starting at position 3387 of SEQ ID NO: 585228
agguuuaaggagugauaua

SEQ ID NO: 623303 - RNA, 19 nt, Artificial Sequence
  Description of Artificial Sequence: Synthetic oligonucleotide
  Antisense strand to SEQ ID NO: 623302
uauaucacuccuuaaaccu

SEQ ID NO: 623304 - RNA, 19 nt, Artificial Sequence
  Description of Artificial Sequence: Synthetic oligonucleotide
  Sense strand starting at position 3538 of SEQ ID NO: 585228
ucucaugggaucugguuaa

SEQ ID NO: 623305 - RNA, 19 nt, Artificial Sequence
  Description of Artificial Sequence: Synthetic oligonucleotide
  Antisense strand to SEQ ID NO: 623304
uuaaccagaucccaugaga

SEQ ID NO: 623306 - RNA, 19 nt, Artificial Sequence
  Description of Artificial Sequence: Synthetic oligonucleotide
  Sense strand starting at position 3542 of SEQ ID NO: 585228
augggaucugguuaauggu

SEQ ID NO: 623307 - RNA, 19 nt, Artificial Sequence
  Description of Artificial Sequence: Synthetic oligonucleotide
  Antisense strand to SEQ ID NO: 623306
accauuaaccagaucccau

SEQ ID NO: 623308 - RNA, 19 nt, Artificial Sequence
  Description of Artificial Sequence: Synthetic oligonucleotide
  Sense strand starting at position 3672 of SEQ ID NO: 585228
cuguacagccaaugaaaua

SEQ ID NO: 623309 - RNA, 19 nt, Artificial Sequence
  Description of Artificial Sequence: Synthetic oligonucleotide
  Antisense strand to SEQ ID NO: 623308
uauuucauuggcuguacag

SEQ ID NO: 623310 - RNA, 19 nt, Artificial Sequence
  Description of Artificial Sequence: Synthetic oligonucleotide
  Sense strand starting at position 3856 of SEQ ID NO: 585228
uauuaaacgugguuaggau

SEQ ID NO: 623311 - RNA, 19 nt, Artificial Sequence
  Description of Artificial Sequence: Synthetic oligonucleotide
  Antisense strand to SEQ ID NO: 623310
auccuaaccacguuuaaua

SEQ ID NO: 623312 - RNA, 19 nt, Artificial Sequence
  Description of Artificial Sequence: Synthetic oligonucleotide
  Sense strand starting at position 3857 of SEQ ID NO: 585228
auuaaacgugguuaggaua

SEQ ID NO: 623313 - RNA, 19 nt, Artificial Sequence
  Description of Artificial Sequence: Synthetic oligonucleotide
  Antisense strand to SEQ ID NO: 623312
uauccuaaccacguuuaau

SEQ ID NO: 623314 - RNA, 19 nt, Artificial Sequence
  Description of Artificial Sequence: Synthetic oligonucleotide
  Sense strand starting at position 241 of SEQ ID NO: 585229
cuacgccugagugauauau

SEQ ID NO: 623315 - RNA, 19 nt, Artificial Sequence
  Description of Artificial Sequence: Synthetic oligonucleotide
  Antisense strand to SEQ ID NO: 623314
auauaucacucaggcguag

SEQ ID NO: 623316 - RNA, 19 nt, Artificial Sequence
  Description of Artificial Sequence: Synthetic oligonucleotide
  Sense strand starting at position 380 of SEQ ID NO: 585229
ccaggauauugggcaaagu

SEQ ID NO: 623317 - RNA, 19 nt, Artificial Sequence
  Description of Artificial Sequence: Synthetic oligonucleotide
  Antisense strand to SEQ ID NO: 623316
acuuugcccaauauccugg

SEQ ID NO: 623318 - RNA, 19 nt, Artificial Sequence
  Description of Artificial Sequence: Synthetic oligonucleotide
  Sense strand starting at position 2048 of SEQ ID NO: 585229
gcauuaucucccgaacacu

SEQ ID NO: 623319 - RNA, 19 nt, Artificial Sequence
  Description of Artificial Sequence: Synthetic oligonucleotide
  Antisense strand to SEQ ID NO: 623318
aguguucgggagauaaugc

SEQ ID NO: 623320 - RNA, 19 nt, Artificial Sequence
  Description of Artificial Sequence: Synthetic oligonucleotide
  Sense strand starting at position 2093 of SEQ ID NO: 585229
cgccaugaugucuagaaug

SEQ ID NO: 623321 - RNA, 19 nt, Artificial Sequence
  Description of Artificial Sequence: Synthetic oligonucleotide
  Antisense strand to SEQ ID NO: 623320
cauucuagacaucauggcg

SEQ ID NO: 623322 - RNA, 19 nt, Artificial Sequence
  Description of Artificial Sequence: Synthetic oligonucleotide
  Sense strand starting at position 2095 of SEQ ID NO: 585229
ccaugaugucuagaaugcu

SEQ ID NO: 623323 - RNA, 19 nt, Artificial Sequence
  Description of Artificial Sequence: Synthetic oligonucleotide
  Antisense strand to SEQ ID NO: 623322
agcauucuagacaucaugg

SEQ ID NO: 623324 - RNA, 19 nt, Artificial Sequence
  Description of Artificial Sequence: Synthetic oligonucleotide
  Sense strand starting at position 2201 of SEQ ID NO: 585229
gguugcacaguuuaaauaa

SEQ ID NO: 623325 - RNA, 19 nt, Artificial Sequence
  Description of Artificial Sequence: Synthetic oligonucleotide
  Antisense strand to SEQ ID NO: 623324
uuauuuaaacugugcaacc

SEQ ID NO: 623326 - RNA, 19 nt, Artificial Sequence
  Description of Artificial Sequence: Synthetic oligonucleotide
  Sense strand starting at position 2212 of SEQ ID NO: 585229
uuaaauaaacggugccaga

SEQ ID NO: 623327 - RNA, 19 nt, Artificial Sequence
  Description of Artificial Sequence: Synthetic oligonucleotide
  Antisense strand to SEQ ID NO: 623326
ucuggcaccguuuauuuaa

SEQ ID NO: 623328 - RNA, 19 nt, Artificial Sequence
  Description of Artificial Sequence: Synthetic oligonucleotide
  Sense strand starting at position 2268 of SEQ ID NO: 585229
gugacacaauuaguacaua

SEQ ID NO: 623329 - RNA, 19 nt, Artificial Sequence
  Description of Artificial Sequence: Synthetic oligonucleotide
  Antisense strand to SEQ ID NO: 623328
uauguacuaauugugucac

SEQ ID NO: 623330 - RNA, 19 nt, Artificial Sequence
  Description of Artificial Sequence: Synthetic oligonucleotide
  Sense strand starting at position 2386 of SEQ ID NO: 585229
uaaagagauggcuguguca

SEQ ID NO: 623331 - RNA, 19 nt, Artificial Sequence
  Description of Artificial Sequence: Synthetic oligonucleotide
  Antisense strand to SEQ ID NO: 623330
ugacacagccaucucuuua

SEQ ID NO: 623332 - RNA, 19 nt, Artificial Sequence
  Description of Artificial Sequence: Synthetic oligonucleotide
  Sense strand starting at position 2463 of SEQ ID NO: 585229
ucaagaacuacgugaaagu

SEQ ID NO: 623333 - RNA, 19 nt, Artificial Sequence
  Description of Artificial Sequence: Synthetic oligonucleotide
  Antisense strand to SEQ ID NO: 623332
acuuucacguaguucuuga

SEQ ID NO: 623334 - RNA, 19 nt, Artificial Sequence
  Description of Artificial Sequence: Synthetic oligonucleotide
  Sense strand starting at position 2479 of SEQ ID NO: 585229
agucuauuaaaggguuaga

SEQ ID NO: 623335 - RNA, 19 nt, Artificial Sequence
  Description of Artificial Sequence: Synthetic oligonucleotide
  Antisense strand to SEQ ID NO: 623334
ucuaacccuuuaauagacu

SEQ ID NO: 623336 - RNA, 19 nt, Artificial Sequence
  Description of Artificial Sequence: Synthetic oligonucleotide
  Sense strand starting at position 2516 of SEQ ID NO: 585229
augucuuaaguccacauua

SEQ ID NO: 623337 - RNA, 19 nt, Artificial Sequence
  Description of Artificial Sequence: Synthetic oligonucleotide
  Antisense strand to SEQ ID NO: 623336
uaauguggacuuaagacau

SEQ ID NO: 623338 - RNA, 19 nt, Artificial Sequence
  Description of Artificial Sequence: Synthetic oligonucleotide
  Sense strand starting at position 2518 of SEQ ID NO: 585229
gucuuaaguccacauuacu

SEQ ID NO: 623339 - RNA, 19 nt, Artificial Sequence
  Description of Artificial Sequence: Synthetic oligonucleotide
  Antisense strand to SEQ ID NO: 623338
aguaauguggacuuaagac

SEQ ID NO: 623340 - RNA, 19 nt, Artificial Sequence
  Description of Artificial Sequence: Synthetic oligonucleotide
  Sense strand starting at position 2558 of SEQ ID NO: 585229
uuauuauaucuuuaggguc

SEQ ID NO: 623341 - RNA, 19 nt, Artificial Sequence
  Description of Artificial Sequence: Synthetic oligonucleotide
  Antisense strand to SEQ ID NO: 623340
gacccuaaagauauaauaa

SEQ ID NO: 623342 - RNA, 19 nt, Artificial Sequence
  Description of Artificial Sequence: Synthetic oligonucleotide
  Sense strand starting at position 2657 of SEQ ID NO: 585229
ggaugccagacaugaaguu

SEQ ID NO: 623343 - RNA, 19 nt, Artificial Sequence
  Description of Artificial Sequence: Synthetic oligonucleotide
  Antisense strand to SEQ ID NO: 623342
aacuucaugucuggcaucc

SEQ ID NO: 623344 - RNA, 19 nt, Artificial Sequence
  Description of Artificial Sequence: Synthetic oligonucleotide
  Sense strand starting at position 2684 of SEQ ID NO: 585229
guuggugauuguaccguau

SEQ ID NO: 623345 - RNA, 19 nt, Artificial Sequence
  Description of Artificial Sequence: Synthetic oligonucleotide
  Antisense strand to SEQ ID NO: 623344
auacgguacaaucaccaac

SEQ ID NO: 623346 - RNA, 19 nt, Artificial Sequence
  Description of Artificial Sequence: Synthetic oligonucleotide
  Sense strand starting at position 2733 of SEQ ID NO: 585229
uugagaucacgacacaugu

SEQ ID NO: 623347 - RNA, 19 nt, Artificial Sequence
  Description of Artificial Sequence: Synthetic oligonucleotide
  Antisense strand to SEQ ID NO: 623346
acaugugucgugaucucaa

SEQ ID NO: 623348 - RNA, 19 nt, Artificial Sequence
  Description of Artificial Sequence: Synthetic oligonucleotide
  Sense strand starting at position 2844 of SEQ ID NO: 585229
uagaacuuccugugagcua

SEQ ID NO: 623349 - RNA, 19 nt, Artificial Sequence
  Description of Artificial Sequence: Synthetic oligonucleotide
  Antisense strand to SEQ ID NO: 623348
uagcucacaggaaguucua

SEQ ID NO: 623350 - RNA, 19 nt, Artificial Sequence
  Description of Artificial Sequence: Synthetic oligonucleotide
  Sense strand starting at position 2874 of SEQ ID NO: 585229
aguauaaucucagcugaga

SEQ ID NO: 623351 - RNA, 19 nt, Artificial Sequence
  Description of Artificial Sequence: Synthetic oligonucleotide
  Antisense strand to SEQ ID NO: 623350
ucucagcugagauuauacu

SEQ ID NO: 623352 - RNA, 19 nt, Artificial Sequence
  Description of Artificial Sequence: Synthetic oligonucleotide
  Sense strand starting at position 2954 of SEQ ID NO: 585229
agugcaauugcaguuguuu

SEQ ID NO: 623353 - RNA, 19 nt, Artificial Sequence
  Description of Artificial Sequence: Synthetic oligonucleotide
  Antisense strand to SEQ ID NO: 623352
aaacaacugcaauugcacu

SEQ ID NO: 623354 - RNA, 19 nt, Artificial Sequence
  Description of Artificial Sequence: Synthetic oligonucleotide
  Sense strand starting at position 2955 of SEQ ID NO: 585229
gugcaauugcaguuguuua

SEQ ID NO: 623355 - RNA, 19 nt, Artificial Sequence
  Description of Artificial Sequence: Synthetic oligonucleotide
  Antisense strand to SEQ ID NO: 623354
uaaacaacugcaauugcac

SEQ ID NO: 623356 - RNA, 19 nt, Artificial Sequence
  Description of Artificial Sequence: Synthetic oligonucleotide
  Sense strand starting at position 2960 of SEQ ID NO: 585229
auugcaguuguuuacacaa

SEQ ID NO: 623357 - RNA, 19 nt, Artificial Sequence
  Description of Artificial Sequence: Synthetic oligonucleotide
  Antisense strand to SEQ ID NO: 623356
uuguguaaacaacugcaau

SEQ ID NO: 623358 - RNA, 19 nt, Artificial Sequence
  Description of Artificial Sequence: Synthetic oligonucleotide
  Sense strand starting at position 3044 of SEQ ID NO: 585229
uuaucauaccgguacucuu

SEQ ID NO: 623359 - RNA, 19 nt, Artificial Sequence
  Description of Artificial Sequence: Synthetic oligonucleotide
  Antisense strand to SEQ ID NO: 623358
aagaguaccgguaugauaa

SEQ ID NO: 623360 - RNA, 19 nt, Artificial Sequence
  Description of Artificial Sequence: Synthetic oligonucleotide
  Sense strand starting at position 3051 of SEQ ID NO: 585229
accgguacucuugacuauu

SEQ ID NO: 623361 - RNA, 19 nt, Artificial Sequence
  Description of Artificial Sequence: Synthetic oligonucleotide
  Antisense strand to SEQ ID NO: 623360
aauagucaagaguaccggu

SEQ ID NO: 623362 - RNA, 19 nt, Artificial Sequence
  Description of Artificial Sequence: Synthetic oligonucleotide
  Sense strand starting at position 3054 of SEQ ID NO: 585229
gguacucuugacuauuaua

SEQ ID NO: 623363 - RNA, 19 nt, Artificial Sequence
  Description of Artificial Sequence: Synthetic oligonucleotide
  Antisense strand to SEQ ID NO: 623362
uauaauagucaagaguacc

SEQ ID NO: 623364 - RNA, 19 nt, Artificial Sequence
  Description of Artificial Sequence: Synthetic oligonucleotide
  Sense strand starting at position 3077 of SEQ ID NO: 585229
gacagauguuccuucccag

SEQ ID NO: 623365 - RNA, 19 nt, Artificial Sequence
  Description of Artificial Sequence: Synthetic oligonucleotide
  Antisense strand to SEQ ID NO: 623364
cugggaaggaacaucuguc

SEQ ID NO: 623366 - RNA, 19 nt, Artificial Sequence
  Description of Artificial Sequence: Synthetic oligonucleotide
  Sense strand starting at position 3198 of SEQ ID NO: 585229
augguugagacaugcucua

SEQ ID NO: 623367 - RNA, 19 nt, Artificial Sequence
  Description of Artificial Sequence: Synthetic oligonucleotide
  Antisense strand to SEQ ID NO: 623366
uagagcaugucucaaccau

SEQ ID NO: 623368 - RNA, 19 nt, Artificial Sequence
  Description of Artificial Sequence: Synthetic oligonucleotide
  Sense strand starting at position 3203 of SEQ ID NO: 585229
ugagacaugcucuaggcaa

SEQ ID NO: 623369 - RNA, 19 nt, Artificial Sequence
  Description of Artificial Sequence: Synthetic oligonucleotide
  Antisense strand to SEQ ID NO: 623368
uugccuagagcaugucuca

SEQ ID NO: 623370 - RNA, 19 nt, Artificial Sequence
  Description of Artificial Sequence: Synthetic oligonucleotide
  Sense strand starting at position 3512 of SEQ ID NO: 585229
aggaaauaauagguagcua

SEQ ID NO: 623371 - RNA, 19 nt, Artificial Sequence
  Description of Artificial Sequence: Synthetic oligonucleotide
  Antisense strand to SEQ ID NO: 623370
uagcuaccuauuauuuccu

SEQ ID NO: 623372 - RNA, 19 nt, Artificial Sequence
  Description of Artificial Sequence: Synthetic oligonucleotide
  Sense strand starting at position 3526 of SEQ ID NO: 585229
agcuauggagcccauaaua

SEQ ID NO: 623373 - RNA, 19 nt, Artificial Sequence
  Description of Artificial Sequence: Synthetic oligonucleotide
  Antisense strand to SEQ ID NO: 623372
uauuaugggcuccauagcu

SEQ ID NO: 623374 - RNA, 19 nt, Artificial Sequence
  Description of Artificial Sequence: Synthetic oligonucleotide
  Sense strand starting at position 3562 of SEQ ID NO: 585229
ucuguaagcagagauauug

SEQ ID NO: 623375 - RNA, 19 nt, Artificial Sequence
  Description of Artificial Sequence: Synthetic oligonucleotide
  Antisense strand to SEQ ID NO: 623374
caauaucucugcuuacaga

SEQ ID NO: 623376 - RNA, 19 nt, Artificial Sequence
  Description of Artificial Sequence: Synthetic oligonucleotide
  Sense strand starting at position 3572 of SEQ ID NO: 585229
gagauauugcuauaugugg

SEQ ID NO: 623377 - RNA, 19 nt, Artificial Sequence
  Description of Artificial Sequence: Synthetic oligonucleotide
  Antisense strand to SEQ ID NO: 623376
ccacauauagcaauaucuc

SEQ ID NO: 623378 - RNA, 19 nt, Artificial Sequence
  Description of Artificial Sequence: Synthetic oligonucleotide
  Sense strand starting at position 3626 of SEQ ID NO: 585229
acauaucauguaugaaggu

SEQ ID NO: 623379 - RNA, 19 nt, Artificial Sequence
  Description of Artificial Sequence: Synthetic oligonucleotide
  Antisense strand to SEQ ID NO: 623378
accuucauacaugauaugu

SEQ ID NO: 623380 - RNA, 19 nt, Artificial Sequence
  Description of Artificial Sequence: Synthetic oligonucleotide
  Sense strand starting at position 3633 of SEQ ID NO: 585229
auguaugaagguugcugaa

SEQ ID NO: 623381 - RNA, 19 nt, Artificial Sequence
  Description of Artificial Sequence: Synthetic oligonucleotide
  Antisense strand to SEQ ID NO: 623380
uucagcaaccuucauacau

SEQ ID NO: 623382 - RNA, 19 nt, Artificial Sequence
  Description of Artificial Sequence: Synthetic oligonucleotide
  Sense strand starting at position 3670 of SEQ ID NO: 585229
uagauagcaugucuagaag

SEQ ID NO: 623383 - RNA, 19 nt, Artificial Sequence
  Description of Artificial Sequence: Synthetic oligonucleotide
  Antisense strand to SEQ ID NO: 623382
cuucuagacaugcuaucua

SEQ ID NO: 623384 - RNA, 19 nt, Artificial Sequence
  Description of Artificial Sequence: Synthetic oligonucleotide
  Sense strand starting at position 3676 of SEQ ID NO: 585229
gcaugucuagaagagguau

SEQ ID NO: 623385 - RNA, 19 nt, Artificial Sequence
  Description of Artificial Sequence: Synthetic oligonucleotide
  Antisense strand to SEQ ID NO: 623384
auaccucuucuagacaugc

SEQ ID NO: 623386 - RNA, 19 nt, Artificial Sequence
  Description of Artificial Sequence: Synthetic oligonucleotide
  Sense strand starting at position 3766 of SEQ ID NO: 585229
aaaggugccucacuagaaa

SEQ ID NO: 623387 - RNA, 19 nt, Artificial Sequence
  Description of Artificial Sequence: Synthetic oligonucleotide
  Antisense strand to SEQ ID NO: 623386
uuucuagugaggcaccuuu

SEQ ID NO: 623388 - RNA, 19 nt, Artificial Sequence
  Description of Artificial Sequence: Synthetic oligonucleotide
  Sense strand starting at position 3794 of SEQ ID NO: 585229
ucaauaguugggugguuga

SEQ ID NO: 623389 - RNA, 19 nt, Artificial Sequence
  Description of Artificial Sequence: Synthetic oligonucleotide
  Antisense strand to SEQ ID NO: 623388
ucaaccacccaacuauuga

SEQ ID NO: 623390 - RNA, 19 nt, Artificial Sequence
  Description of Artificial Sequence: Synthetic oligonucleotide
  Sense strand starting at position 3828 of SEQ ID NO: 585229
caaguaugagggugugaag

SEQ ID NO: 623391 - RNA, 19 nt, Artificial Sequence
  Description of Artificial Sequence: Synthetic oligonucleotide
  Antisense strand to SEQ ID NO: 623390
cuucacacccucauacuug

SEQ ID NO: 623392 - RNA, 19 nt, Artificial Sequence
  Description of Artificial Sequence: Synthetic oligonucleotide
  Sense strand starting at position 3949 of SEQ ID NO: 585229
gaucuacgucugcaaacaa

SEQ ID NO: 623393 - RNA, 19 nt, Artificial Sequence
  Description of Artificial Sequence: Synthetic oligonucleotide
  Antisense strand to SEQ ID NO: 623392
uuguuugcagacguagauc

SEQ ID NO: 623394 - RNA, 19 nt, Artificial Sequence
  Description of Artificial Sequence: Synthetic oligonucleotide
  Sense strand starting at position 13 of SEQ ID NO: 585230
agcagucagcaaggcuaua

SEQ ID NO: 623395 - RNA, 19 nt, Artificial Sequence
  Description of Artificial Sequence: Synthetic oligonucleotide
  Antisense strand to SEQ ID NO: 623394
uauagccuugcugacugcu

SEQ ID NO: 623396 - RNA, 19 nt, Artificial Sequence
  Description of Artificial Sequence: Synthetic oligonucleotide
  Sense strand starting at position 18 of SEQ ID NO: 585230
ucagcaaggcuauaaauua

SEQ ID NO: 623397 - RNA, 19 nt, Artificial Sequence
  Description of Artificial Sequence: Synthetic oligonucleotide
  Antisense strand to SEQ ID NO: 623396
uaauuuauagccuugcuga

SEQ ID NO: 623398 - RNA, 19 nt, Artificial Sequence
  Description of Artificial Sequence: Synthetic oligonucleotide
  Sense strand starting at position 322 of SEQ ID NO: 585230
ucacauuguugacauauuu

SEQ ID NO: 623399 - RNA, 19 nt, Artificial Sequence
  Description of Artificial Sequence: Synthetic oligonucleotide
  Antisense strand to SEQ ID NO: 623398
aaauaugucaacaauguga

SEQ ID NO: 623400 - RNA, 19 nt, Artificial Sequence
  Description of Artificial Sequence: Synthetic oligonucleotide
  Sense strand starting at position 418 of SEQ ID NO: 585230
cuguaauacugauauucug

SEQ ID NO: 623401 - RNA, 19 nt, Artificial Sequence
  Description of Artificial Sequence: Synthetic oligonucleotide
  Antisense strand to SEQ ID NO: 623400
cagaauaucaguauuacag

SEQ ID NO: 623402 - RNA, 19 nt, Artificial Sequence
  Description of Artificial Sequence: Synthetic oligonucleotide
  Sense strand starting at position 424 of SEQ ID NO: 585230
uacugauauucuggguuaa

SEQ ID NO: 623403 - RNA, 19 nt, Artificial Sequence
  Description of Artificial Sequence: Synthetic oligonucleotide
  Antisense strand to SEQ ID NO: 623402
uuaacccagaauaucagua

SEQ ID NO: 623404 - RNA, 19 nt, Artificial Sequence
  Description of Artificial Sequence: Synthetic oligonucleotide
  Sense strand starting at position 425 of SEQ ID NO: 585230
acugauauucuggguuaau

SEQ ID NO: 623405 - RNA, 19 nt, Artificial Sequence
  Description of Artificial Sequence: Synthetic oligonucleotide
  Antisense strand to SEQ ID NO: 623404
auuaacccagaauaucagu

SEQ ID NO: 623406 - RNA, 19 nt, Artificial Sequence
  Description of Artificial Sequence: Synthetic oligonucleotide
  Sense strand starting at position 426 of SEQ ID NO: 585230
cugauauucuggguuaaua

SEQ ID NO: 623407 - RNA, 19 nt, Artificial Sequence
  Description of Artificial Sequence: Synthetic oligonucleotide
  Antisense strand to SEQ ID NO: 623406
uauuaacccagaauaucag

SEQ ID NO: 623408 - RNA, 19 nt, Artificial Sequence
  Description of Artificial Sequence: Synthetic oligonucleotide
  Sense strand starting at position 477 of SEQ ID NO: 585230
uagagauuacauggucagu

SEQ ID NO: 623409 - RNA, 19 nt, Artificial Sequence
  Description of Artificial Sequence: Synthetic oligonucleotide
  Antisense strand to SEQ ID NO: 623408
acugaccauguaaucucua

SEQ ID NO: 623410 - RNA, 19 nt, Artificial Sequence
  Description of Artificial Sequence: Synthetic oligonucleotide
  Sense strand starting at position 479 of SEQ ID NO: 585230
gagauuacauggucaguaa

SEQ ID NO: 623411 - RNA, 19 nt, Artificial Sequence
  Description of Artificial Sequence: Synthetic oligonucleotide
  Antisense strand to SEQ ID NO: 623410
uuacugaccauguaaucuc

SEQ ID NO: 623412 - RNA, 19 nt, Artificial Sequence
  Description of Artificial Sequence: Synthetic oligonucleotide
  Sense strand starting at position 482 of SEQ ID NO: 585230
auuacauggucaguaaauu

SEQ ID NO: 623413 - RNA, 19 nt, Artificial Sequence
  Description of Artificial Sequence: Synthetic oligonucleotide
  Antisense strand to SEQ ID NO: 623412
aauuuacugaccauguaau

SEQ ID NO: 623414 - RNA, 19 nt, Artificial Sequence
  Description of Artificial Sequence: Synthetic oligonucleotide
  Sense strand starting at position 483 of SEQ ID NO: 585230
uuacauggucaguaaauua

SEQ ID NO: 623415 - RNA, 19 nt, Artificial Sequence
  Description of Artificial Sequence: Synthetic oligonucleotide
  Antisense strand to SEQ ID NO: 623414
uaauuuacugaccauguaa

SEQ ID NO: 623416 - RNA, 19 nt, Artificial Sequence
  Description of Artificial Sequence: Synthetic oligonucleotide
  Sense strand starting at position 587 of SEQ ID NO: 585230
augacuugaugcuucuaau

SEQ ID NO: 623417 - RNA, 19 nt, Artificial Sequence
  Description of Artificial Sequence: Synthetic oligonucleotide
  Antisense strand to SEQ ID NO: 623416
auuagaagcaucaagucau

SEQ ID NO: 623418 - RNA, 19 nt, Artificial Sequence
  Description of Artificial Sequence: Synthetic oligonucleotide
  Sense strand starting at position 624 of SEQ ID NO: 585230
ccugacgucucugauccua

SEQ ID NO: 623419 - RNA, 19 nt, Artificial Sequence
  Description of Artificial Sequence: Synthetic oligonucleotide
  Antisense strand to SEQ ID NO: 623418
uaggaucagagacgucagg

SEQ ID NO: 623420 - RNA, 19 nt, Artificial Sequence
  Description of Artificial Sequence: Synthetic oligonucleotide
  Sense strand starting at position 649 of SEQ ID NO: 585230
accaaauuaucuugaggug

SEQ ID NO: 623421 - RNA, 19 nt, Artificial Sequence
  Description of Artificial Sequence: Synthetic oligonucleotide
  Antisense strand to SEQ ID NO: 623420
caccucaagauaauuuggu

SEQ ID NO: 623422 - RNA, 19 nt, Artificial Sequence
  Description of Artificial Sequence: Synthetic oligonucleotide
  Sense strand starting at position 650 of SEQ ID NO: 585230
ccaaauuaucuugaggugu

SEQ ID NO: 623423 - RNA, 19 nt, Artificial Sequence
  Description of Artificial Sequence: Synthetic oligonucleotide
  Antisense strand to SEQ ID NO: 623422
acaccucaagauaauuugg

SEQ ID NO: 623424 - RNA, 19 nt, Artificial Sequence
  Description of Artificial Sequence: Synthetic oligonucleotide
  Sense strand starting at position 652 of SEQ ID NO: 585230
aaauuaucuugagguguua

SEQ ID NO: 623425 - RNA, 19 nt, Artificial Sequence
  Description of Artificial Sequence: Synthetic oligonucleotide
  Antisense strand to SEQ ID NO: 623424
uaacaccucaagauaauuu

SEQ ID NO: 623426 - RNA, 19 nt, Artificial Sequence
  Description of Artificial Sequence: Synthetic oligonucleotide
  Sense strand starting at position 661 of SEQ ID NO: 585230
ugagguguuagccauagaa

SEQ ID NO: 623427 - RNA, 19 nt, Artificial Sequence
  Description of Artificial Sequence: Synthetic oligonucleotide
  Antisense strand to SEQ ID NO: 623426
uucuauggcuaacaccuca

SEQ ID NO: 623428 - RNA, 19 nt, Artificial Sequence
  Description of Artificial Sequence: Synthetic oligonucleotide
  Sense strand starting at position 680 of SEQ ID NO: 585230
aaggacuuaucacgaguua

SEQ ID NO: 623429 - RNA, 19 nt, Artificial Sequence
  Description of Artificial Sequence: Synthetic oligonucleotide
  Antisense strand to SEQ ID NO: 623428
uaacucgugauaaguccuu

SEQ ID NO: 623430 - RNA, 19 nt, Artificial Sequence
  Description of Artificial Sequence: Synthetic oligonucleotide
  Sense strand starting at position 681 of SEQ ID NO: 585230
aggacuuaucacgaguuac

SEQ ID NO: 623431 - RNA, 19 nt, Artificial Sequence
  Description of Artificial Sequence: Synthetic oligonucleotide
  Antisense strand to SEQ ID NO: 623430
guaacucgugauaaguccu

SEQ ID NO: 623432 - RNA, 19 nt, Artificial Sequence
  Description of Artificial Sequence: Synthetic oligonucleotide
  Sense strand starting at position 772 of SEQ ID NO: 585230
ugaggagucuugucugaaa

SEQ ID NO: 623433 - RNA, 19 nt, Artificial Sequence
  Description of Artificial Sequence: Synthetic oligonucleotide
  Antisense strand to SEQ ID NO: 623432
uuucagacaagacuccuca

SEQ ID NO: 623434 - RNA, 19 nt, Artificial Sequence
  Description of Artificial Sequence: Synthetic oligonucleotide
  Sense strand starting at position 792 of SEQ ID NO: 585230
caagacaagucuuugauga

SEQ ID NO: 623435 - RNA, 19 nt, Artificial Sequence
  Description of Artificial Sequence: Synthetic oligonucleotide
  Antisense strand to SEQ ID NO: 623434
ucaucaaagacuugucuug

SEQ ID NO: 623436 - RNA, 19 nt, Artificial Sequence
  Description of Artificial Sequence: Synthetic oligonucleotide
  Sense strand starting at position 793 of SEQ ID NO: 585230
aagacaagucuuugaugac

SEQ ID NO: 623437 - RNA, 19 nt, Artificial Sequence
  Description of Artificial Sequence: Synthetic oligonucleotide
  Antisense strand to SEQ ID NO: 623436
gucaucaaagacuugucuu

SEQ ID NO: 623438 - RNA, 19 nt, Artificial Sequence
  Description of Artificial Sequence: Synthetic oligonucleotide
  Sense strand starting at position 794 of SEQ ID NO: 585230
agacaagucuuugaugacu

SEQ ID NO: 623439 - RNA, 19 nt, Artificial Sequence
  Description of Artificial Sequence: Synthetic oligonucleotide
  Antisense strand to SEQ ID NO: 623438
agucaucaaagacuugucu

SEQ ID NO: 623440 - RNA, 19 nt, Artificial Sequence
  Description of Artificial Sequence: Synthetic oligonucleotide
  Sense strand starting at position 1041 of SEQ ID NO: 585230
cucauaacuuccgggcuaa

SEQ ID NO: 623441 - RNA, 19 nt, Artificial Sequence
  Description of Artificial Sequence: Synthetic oligonucleotide
  Antisense strand to SEQ ID NO: 623440
uuagcccggaaguuaugag

SEQ ID NO: 623442 - RNA, 19 nt, Artificial Sequence
  Description of Artificial Sequence: Synthetic oligonucleotide
  Sense strand starting at position 1042 of SEQ ID NO: 585230
ucauaacuuccgggcuaaa

SEQ ID NO: 623443 - RNA, 19 nt, Artificial Sequence
  Description of Artificial Sequence: Synthetic oligonucleotide
  Antisense strand to SEQ ID NO: 623442
uuuagcccggaaguuauga

SEQ ID NO: 623444 - RNA, 19 nt, Artificial Sequence
  Description of Artificial Sequence: Synthetic oligonucleotide
  Sense strand starting at position 1083 of SEQ ID NO: 585230
aagcaauucuaagagggua

SEQ ID NO: 623445 - RNA, 19 nt, Artificial Sequence
  Description of Artificial Sequence: Synthetic oligonucleotide
  Antisense strand to SEQ ID NO: 623444
uacccucuuagaauugcuu

SEQ ID NO: 623446 - RNA, 19 nt, Artificial Sequence
  Description of Artificial Sequence: Synthetic oligonucleotide
  Sense strand starting at position 1202 of SEQ ID NO: 585230
uccuuaggucugggagguu

SEQ ID NO: 623447 - RNA, 19 nt, Artificial Sequence
  Description of Artificial Sequence: Synthetic oligonucleotide
  Antisense strand to SEQ ID NO: 623446
aaccucccagaccuaagga

SEQ ID NO: 623448 - RNA, 19 nt, Artificial Sequence
  Description of Artificial Sequence: Synthetic oligonucleotide
  Sense strand starting at position 1396 of SEQ ID NO: 585230
acaagaaauugagauggga

SEQ ID NO: 623449 - RNA, 19 nt, Artificial Sequence
  Description of Artificial Sequence: Synthetic oligonucleotide
  Antisense strand to SEQ ID NO: 623448
ucccaucucaauuucuugu

SEQ ID NO: 623450 - RNA, 19 nt, Artificial Sequence
  Description of Artificial Sequence: Synthetic oligonucleotide
  Sense strand starting at position 2265 of SEQ ID NO: 585230
ggcgaauggccguacucau

SEQ ID NO: 623451 - RNA, 19 nt, Artificial Sequence
  Description of Artificial Sequence: Synthetic oligonucleotide
  Antisense strand to SEQ ID NO: 623450
augaguacggccauucgcc

SEQ ID NO: 623452 - RNA, 19 nt, Artificial Sequence
  Description of Artificial Sequence: Synthetic oligonucleotide
  Sense strand starting at position 2285 of SEQ ID NO: 585230
ccaagaaguuguccuaggu

SEQ ID NO: 623453 - RNA, 19 nt, Artificial Sequence
  Description of Artificial Sequence: Synthetic oligonucleotide
  Antisense strand to SEQ ID NO: 623452
accuaggacaacuucuugg

SEQ ID NO: 623454 - RNA, 19 nt, Artificial Sequence
  Description of Artificial Sequence: Synthetic oligonucleotide
  Sense strand starting at position 2374 of SEQ ID NO: 585230
uguucugguuucugaacuu

SEQ ID NO: 623455 - RNA, 19 nt, Artificial Sequence
  Description of Artificial Sequence: Synthetic oligonucleotide
  Antisense strand to SEQ ID NO: 623454
aaguucagaaaccagaaca

SEQ ID NO: 623456 - RNA, 19 nt, Artificial Sequence
  Description of Artificial Sequence: Synthetic oligonucleotide
  Sense strand starting at position 2407 of SEQ ID NO: 585230
cccagacccucugagucau

SEQ ID NO: 623457 - RNA, 19 nt, Artificial Sequence
  Description of Artificial Sequence: Synthetic oligonucleotide
  Antisense strand to SEQ ID NO: 623456
augacucagagggucuggg

SEQ ID NO: 623458 - RNA, 19 nt, Artificial Sequence
  Description of Artificial Sequence: Synthetic oligonucleotide
  Sense strand starting at position 2724 of SEQ ID NO: 585230
ggaggguggccacgugaaa

SEQ ID NO: 623459 - RNA, 19 nt, Artificial Sequence
  Description of Artificial Sequence: Synthetic oligonucleotide
  Antisense strand to SEQ ID NO: 623458
uuucacguggccacccucc

SEQ ID NO: 623460 - RNA, 19 nt, Artificial Sequence
  Description of Artificial Sequence: Synthetic oligonucleotide
  Sense strand starting at position 2881 of SEQ ID NO: 585230
caaggagacuuccaagaag

SEQ ID NO: 623461 - RNA, 19 nt, Artificial Sequence
  Description of Artificial Sequence: Synthetic oligonucleotide
  Antisense strand to SEQ ID NO: 623460
cuucuuggaagucuccuug

SEQ ID NO: 623462 - RNA, 19 nt, Artificial Sequence
  Description of Artificial Sequence: Synthetic oligonucleotide
  Sense strand starting at position 3511 of SEQ ID NO: 585230
gcaguacugccucagaaga

SEQ ID NO: 623463 - RNA, 19 nt, Artificial Sequence
  Description of Artificial Sequence: Synthetic oligonucleotide
  Antisense strand to SEQ ID NO: 623462
ucuucugaggcaguacugc

SEQ ID NO: 623464 - RNA, 19 nt, Artificial Sequence
  Description of Artificial Sequence: Synthetic oligonucleotide
  Sense strand starting at position 3513 of SEQ ID NO: 585230
aguacugccucagaagaag

SEQ ID NO: 623465 - RNA, 19 nt, Artificial Sequence
  Description of Artificial Sequence: Synthetic oligonucleotide
  Antisense strand to SEQ ID NO: 623464
cuucuucugaggcaguacu

SEQ ID NO: 623466 - RNA, 19 nt, Artificial Sequence
  Description of Artificial Sequence: Synthetic oligonucleotide
  Sense strand starting at position 3839 of SEQ ID NO: 585230
caaguuagauuagugauau

SEQ ID NO: 623467 - RNA, 19 nt, Artificial Sequence
  Description of Artificial Sequence: Synthetic oligonucleotide
  Antisense strand to SEQ ID NO: 623466
auaucacuaaucuaacuug

SEQ ID NO: 623468 - RNA, 19 nt, Artificial Sequence
  Description of Artificial Sequence: Synthetic oligonucleotide
  Sense strand starting at position 3840 of SEQ ID NO: 585230
aaguuagauuagugauaug

SEQ ID NO: 623469 - RNA, 19 nt, Artificial Sequence
  Description of Artificial Sequence: Synthetic oligonucleotide
  Antisense strand to SEQ ID NO: 623468
cauaucacuaaucuaacuu

SEQ ID NO: 623470 - RNA, 19 nt, Artificial Sequence
  Description of Artificial Sequence: Synthetic oligonucleotide
  Sense strand starting at position 3982 of SEQ ID NO: 585230
gccagaaguugggugcuua

SEQ ID NO: 623471 - RNA, 19 nt, Artificial Sequence
  Description of Artificial Sequence: Synthetic oligonucleotide
  Antisense strand to SEQ ID NO: 623470
uaagcacccaacuucuggc

SEQ ID NO: 623472 - RNA, 19 nt, Artificial Sequence
  Description of Artificial Sequence: Synthetic oligonucleotide
  Sense strand starting at position 3983 of SEQ ID NO: 585230
ccagaaguugggugcuuaa

SEQ ID NO: 623473 - RNA, 19 nt, Artificial Sequence
  Description of Artificial Sequence: Synthetic oligonucleotide
  Antisense strand to SEQ ID NO: 623472
uuaagcacccaacuucugg

SEQ ID NO: 623474 - RNA, 19 nt, Artificial Sequence
  Description of Artificial Sequence: Synthetic oligonucleotide
  Sense strand starting at position 13 of SEQ ID NO: 585231
ggguaaguuuguuucugaa

SEQ ID NO: 623475 - RNA, 19 nt, Artificial Sequence
  Description of Artificial Sequence: Synthetic oligonucleotide
  Antisense strand to SEQ ID NO: 623474
uucagaaacaaacuuaccc

SEQ ID NO: 623476 - RNA, 19 nt, Artificial Sequence
  Description of Artificial Sequence: Synthetic oligonucleotide
  Sense strand starting at position 90 of SEQ ID NO: 585231
aguucuaacaggcgacauu

SEQ ID NO: 623477 - RNA, 19 nt, Artificial Sequence
  Description of Artificial Sequence: Synthetic oligonucleotide
  Antisense strand to SEQ ID NO: 623476
aaugucgccuguuagaacu

SEQ ID NO: 623478 - RNA, 19 nt, Artificial Sequence
  Description of Artificial Sequence: Synthetic oligonucleotide
  Sense strand starting at position 128 of SEQ ID NO: 585231
cacuguacgcugcuuguaa

SEQ ID NO: 623479 - RNA, 19 nt, Artificial Sequence
  Description of Artificial Sequence: Synthetic oligonucleotide
  Antisense strand to SEQ ID NO: 623478
uuacaagcagcguacagug

SEQ ID NO: 623480 - RNA, 19 nt, Artificial Sequence
  Description of Artificial Sequence: Synthetic oligonucleotide
  Sense strand starting at position 443 of SEQ ID NO: 585231
auugcaaacuccgucuaaa

SEQ ID NO: 623481 - RNA, 19 nt, Artificial Sequence
  Description of Artificial Sequence: Synthetic oligonucleotide
  Antisense strand to SEQ ID NO: 623480
uuuagacggaguuugcaau

SEQ ID NO: 623482 - RNA, 19 nt, Artificial Sequence
  Description of Artificial Sequence: Synthetic oligonucleotide
  Sense strand starting at position 484 of SEQ ID NO: 585231
gugccugaucuacauaaag

SEQ ID NO: 623483 - RNA, 19 nt, Artificial Sequence
  Description of Artificial Sequence: Synthetic oligonucleotide
  Antisense strand to SEQ ID NO: 623482
cuuuauguagaucaggcac

SEQ ID NO: 623484 - RNA, 19 nt, Artificial Sequence
  Description of Artificial Sequence: Synthetic oligonucleotide
  Sense strand starting at position 576 of SEQ ID NO: 585231
uacguugucuuccuggaaa

SEQ ID NO: 623485 - RNA, 19 nt, Artificial Sequence
  Description of Artificial Sequence: Synthetic oligonucleotide
  Antisense strand to SEQ ID NO: 623484
uuuccaggaagacaacgua

SEQ ID NO: 623486 - RNA, 19 nt, Artificial Sequence
  Description of Artificial Sequence: Synthetic oligonucleotide
  Sense strand starting at position 664 of SEQ ID NO: 585231
aaaccauggcucuguaaug

SEQ ID NO: 623487 - RNA, 19 nt, Artificial Sequence
  Description of Artificial Sequence: Synthetic oligonucleotide
  Antisense strand to SEQ ID NO: 623486
cauuacagagccaugguuu

SEQ ID NO: 623488 - RNA, 19 nt, Artificial Sequence
  Description of Artificial Sequence: Synthetic oligonucleotide
  Sense strand starting at position 665 of SEQ ID NO: 585231
aaccauggcucuguaauga

SEQ ID NO: 623489 - RNA, 19 nt, Artificial Sequence
  Description of Artificial Sequence: Synthetic oligonucleotide
  Antisense strand to SEQ ID NO: 623488
ucauuacagagccaugguu

SEQ ID NO: 623490 - RNA, 19 nt, Artificial Sequence
  Description of Artificial Sequence: Synthetic oligonucleotide
  Sense strand starting at position 670 of SEQ ID NO: 585231
uggcucuguaaugagaaca

SEQ ID NO: 623491 - RNA, 19 nt, Artificial Sequence
  Description of Artificial Sequence: Synthetic oligonucleotide
  Antisense strand to SEQ ID NO: 623490
uguucucauuacagagcca

SEQ ID NO: 623492 - RNA, 19 nt, Artificial Sequence
  Description of Artificial Sequence: Synthetic oligonucleotide
  Sense strand starting at position 758 of SEQ ID NO: 585231
uuaugaggcuuccuucuga

SEQ ID NO: 623493 - RNA, 19 nt, Artificial Sequence
  Description of Artificial Sequence: Synthetic oligonucleotide
  Antisense strand to SEQ ID NO: 623492
ucagaaggaagccucauaa

SEQ ID NO: 623494 - RNA, 19 nt, Artificial Sequence
  Description of Artificial Sequence: Synthetic oligonucleotide
  Sense strand starting at position 780 of SEQ ID NO: 585231
uguuaagcacaaugacaua

SEQ ID NO: 623495 - RNA, 19 nt, Artificial Sequence
  Description of Artificial Sequence: Synthetic oligonucleotide
  Antisense strand to SEQ ID NO: 623494
uaugucauugugcuuaaca

SEQ ID NO: 623496 - RNA, 19 nt, Artificial Sequence
  Description of Artificial Sequence: Synthetic oligonucleotide
  Sense strand starting at position 1049 of SEQ ID NO: 585231
agaauuaaccggugccuaa

SEQ ID NO: 623497 - RNA, 19 nt, Artificial Sequence
  Description of Artificial Sequence: Synthetic oligonucleotide
  Antisense strand to SEQ ID NO: 623496
uuaggcaccgguuaauucu

SEQ ID NO: 623498 - RNA, 19 nt, Artificial Sequence
  Description of Artificial Sequence: Synthetic oligonucleotide
  Sense strand starting at position 1075 of SEQ ID NO: 585231
aucggaucauucuucucaa

SEQ ID NO: 623499 - RNA, 19 nt, Artificial Sequence
  Description of Artificial Sequence: Synthetic oligonucleotide
  Antisense strand to SEQ ID NO: 623498
uugagaagaaugauccgau

SEQ ID NO: 623500 - RNA, 19 nt, Artificial Sequence
  Description of Artificial Sequence: Synthetic oligonucleotide
  Sense strand starting at position 1076 of SEQ ID NO: 585231
ucggaucauucuucucaac

SEQ ID NO: 623501 - RNA, 19 nt, Artificial Sequence
  Description of Artificial Sequence: Synthetic oligonucleotide
  Antisense strand to SEQ ID NO: 623500
guugagaagaaugauccga

SEQ ID NO: 623502 - RNA, 19 nt, Artificial Sequence
  Description of Artificial Sequence: Synthetic oligonucleotide
  Sense strand starting at position 2278 of SEQ ID NO: 585231
gccuccuggccuuaaugua

SEQ ID NO: 623503 - RNA, 19 nt, Artificial Sequence
  Description of Artificial Sequence: Synthetic oligonucleotide
  Antisense strand to SEQ ID NO: 623502
uacauuaaggccaggaggc

SEQ ID NO: 623504 - RNA, 19 nt, Artificial Sequence
  Description of Artificial Sequence: Synthetic oligonucleotide
  Sense strand starting at position 2307 of SEQ ID NO: 585231
agaacaguauggucuggaa

SEQ ID NO: 623505 - RNA, 19 nt, Artificial Sequence
  Description of Artificial Sequence: Synthetic oligonucleotide
  Antisense strand to SEQ ID NO: 623504
uuccagaccauacuguucu

SEQ ID NO: 623506 - RNA, 19 nt, Artificial Sequence
  Description of Artificial Sequence: Synthetic oligonucleotide
  Sense strand starting at position 2824 of SEQ ID NO: 585231
cccaucauccagggaugua

SEQ ID NO: 623507 - RNA, 19 nt, Artificial Sequence
  Description of Artificial Sequence: Synthetic oligonucleotide
  Antisense strand to SEQ ID NO: 623506
uacaucccuggaugauggg

SEQ ID NO: 623508 - RNA, 19 nt, Artificial Sequence
  Description of Artificial Sequence: Synthetic oligonucleotide
  Sense strand starting at position 2843 of SEQ ID NO: 585231
acuagauguugccuggacu

SEQ ID NO: 623509 - RNA, 19 nt, Artificial Sequence
  Description of Artificial Sequence: Synthetic oligonucleotide
  Antisense strand to SEQ ID NO: 623508
aguccaggcaacaucuagu

SEQ ID NO: 623510 - RNA, 19 nt, Artificial Sequence
  Description of Artificial Sequence: Synthetic oligonucleotide
  Sense strand starting at position 2903 of SEQ ID NO: 585231
agggcugaguuguccugaa

SEQ ID NO: 623511 - RNA, 19 nt, Artificial Sequence
  Description of Artificial Sequence: Synthetic oligonucleotide
  Antisense strand to SEQ ID NO: 623510
uucaggacaacucagcccu

SEQ ID NO: 623512 - RNA, 19 nt, Artificial Sequence
  Description of Artificial Sequence: Synthetic oligonucleotide
  Sense strand starting at position 2907 of SEQ ID NO: 585231
cugaguuguccugaaagau

SEQ ID NO: 623513 - RNA, 19 nt, Artificial Sequence
  Description of Artificial Sequence: Synthetic oligonucleotide
  Antisense strand to SEQ ID NO: 623512
aucuuucaggacaacucag

SEQ ID NO: 623514 - RNA, 19 nt, Artificial Sequence
  Description of Artificial Sequence: Synthetic oligonucleotide
  Sense strand starting at position 2931 of SEQ ID NO: 585231
aagauagguagccagguua

SEQ ID NO: 623515 - RNA, 19 nt, Artificial Sequence
  Description of Artificial Sequence: Synthetic oligonucleotide
  Antisense strand to SEQ ID NO: 623514
uaaccuggcuaccuaucuu

SEQ ID NO: 623516 - RNA, 19 nt, Artificial Sequence
  Description of Artificial Sequence: Synthetic oligonucleotide
  Sense strand starting at position 2945 of SEQ ID NO: 585231
gguuaugagcaguaggaga

SEQ ID NO: 623517 - RNA, 19 nt, Artificial Sequence
  Description of Artificial Sequence: Synthetic oligonucleotide
  Antisense strand to SEQ ID NO: 623516
ucuccuacugcucauaacc

SEQ ID NO: 623518 - RNA, 19 nt, Artificial Sequence
  Description of Artificial Sequence: Synthetic oligonucleotide
  Sense strand starting at position 2947 of SEQ ID NO: 585231
uuaugagcaguaggagauu

SEQ ID NO: 623519 - RNA, 19 nt, Artificial Sequence
  Description of Artificial Sequence: Synthetic oligonucleotide
  Antisense strand to SEQ ID NO: 623518
aaucuccuacugcucauaa

SEQ ID NO: 623520 - RNA, 19 nt, Artificial Sequence
  Description of Artificial Sequence: Synthetic oligonucleotide
  Sense strand starting at position 3109 of SEQ ID NO: 585231
cagagaccuucccaggaga

SEQ ID NO: 623521 - RNA, 19 nt, Artificial Sequence
  Description of Artificial Sequence: Synthetic oligonucleotide
  Antisense strand to SEQ ID NO: 623520
ucuccugggaaggucucug

SEQ ID NO: 623522 - RNA, 19 nt, Artificial Sequence
  Description of Artificial Sequence: Synthetic oligonucleotide
  Sense strand starting at position 3168 of SEQ ID NO: 585231
cuaauuauguuggcaaugu

SEQ ID NO: 623523 - RNA, 19 nt, Artificial Sequence
  Description of Artificial Sequence: Synthetic oligonucleotide
  Antisense strand to SEQ ID NO: 623522
acauugccaacauaauuag

SEQ ID NO: 623524 - RNA, 19 nt, Artificial Sequence
  Description of Artificial Sequence: Synthetic oligonucleotide
  Sense strand starting at position 3181 of SEQ ID NO: 585231
caauguagguguuuacuua

SEQ ID NO: 623525 - RNA, 19 nt, Artificial Sequence
  Description of Artificial Sequence: Synthetic oligonucleotide
  Antisense strand to SEQ ID NO: 623524
uaaguaaacaccuacauug

SEQ ID NO: 623526 - RNA, 19 nt, Artificial Sequence
  Description of Artificial Sequence: Synthetic oligonucleotide
  Sense strand starting at position 3182 of SEQ ID NO: 585231
aauguagguguuuacuuau

SEQ ID NO: 623527 - RNA, 19 nt, Artificial Sequence
  Description of Artificial Sequence: Synthetic oligonucleotide
  Antisense strand to SEQ ID NO: 623526
auaaguaaacaccuacauu

SEQ ID NO: 623528 - RNA, 19 nt, Artificial Sequence
  Description of Artificial Sequence: Synthetic oligonucleotide
  Sense strand starting at position 3185 of SEQ ID NO: 585231
guagguguuuacuuauuuc

SEQ ID NO: 623529 - RNA, 19 nt, Artificial Sequence
  Description of Artificial Sequence: Synthetic oligonucleotide
  Antisense strand to SEQ ID NO: 623528
gaaauaaguaaacaccuac

SEQ ID NO: 623530 - RNA, 19 nt, Artificial Sequence
  Description of Artificial Sequence: Synthetic oligonucleotide
  Sense strand starting at position 3268 of SEQ ID NO: 585231
cagagaacagcuggcauaa

SEQ ID NO: 623531 - RNA, 19 nt, Artificial Sequence
  Description of Artificial Sequence: Synthetic oligonucleotide
  Antisense strand to SEQ ID NO: 623530
uuaugccagcuguucucug

SEQ ID NO: 623532 - RNA, 19 nt, Artificial Sequence
  Description of Artificial Sequence: Synthetic oligonucleotide
  Sense strand starting at position 3306 of SEQ ID NO: 585231
uagguuccuuccucacgaa

SEQ ID NO: 623533 - RNA, 19 nt, Artificial Sequence
  Description of Artificial Sequence: Synthetic oligonucleotide
  Antisense strand to SEQ ID NO: 623532
uucgugaggaaggaaccua

SEQ ID NO: 623534 - RNA, 19 nt, Artificial Sequence
  Description of Artificial Sequence: Synthetic oligonucleotide
  Sense strand starting at position 3331 of SEQ ID NO: 585231
aggaaagacuaguuuagcu

SEQ ID NO: 623535 - RNA, 19 nt, Artificial Sequence
  Description of Artificial Sequence: Synthetic oligonucleotide
  Antisense strand to SEQ ID NO: 623534
agcuaaacuagucuuuccu

SEQ ID NO: 623536 - RNA, 19 nt, Artificial Sequence
  Description of Artificial Sequence: Synthetic oligonucleotide
  Sense strand starting at position 3335 of SEQ ID NO: 585231
aagacuaguuuagcugaca

SEQ ID NO: 623537 - RNA, 19 nt, Artificial Sequence
  Description of Artificial Sequence: Synthetic oligonucleotide
  Antisense strand to SEQ ID NO: 623536
ugucagcuaaacuagucuu

SEQ ID NO: 623538 - RNA, 19 nt, Artificial Sequence
  Description of Artificial Sequence: Synthetic oligonucleotide
  Sense strand starting at position 3586 of SEQ ID NO: 585231
caagguuccggaugcagaa

SEQ ID NO: 623539 - RNA, 19 nt, Artificial Sequence
  Description of Artificial Sequence: Synthetic oligonucleotide
  Antisense strand to SEQ ID NO: 623538
uucugcauccggaaccuug

SEQ ID NO: 623540 - RNA, 19 nt, Artificial Sequence
  Description of Artificial Sequence: Synthetic oligonucleotide
  Sense strand starting at position 3626 of SEQ ID NO: 585231
ccuggagguuucucaugua

SEQ ID NO: 623541 - RNA, 19 nt, Artificial Sequence
  Description of Artificial Sequence: Synthetic oligonucleotide
  Antisense strand to SEQ ID NO: 623540
uacaugagaaaccuccagg

SEQ ID NO: 623542 - RNA, 19 nt, Artificial Sequence
  Description of Artificial Sequence: Synthetic oligonucleotide
  Sense strand starting at position 3657 of SEQ ID NO: 585231
acgcacaauuagucugauu

SEQ ID NO: 623543 - RNA, 19 nt, Artificial Sequence
  Description of Artificial Sequence: Synthetic oligonucleotide
  Antisense strand to SEQ ID NO: 623542
aaucagacuaauugugcgu

SEQ ID NO: 623544 - RNA, 19 nt, Artificial Sequence
  Description of Artificial Sequence: Synthetic oligonucleotide
  Sense strand starting at position 3676 of SEQ ID NO: 585231
gguugcuuucgucaaccaa

SEQ ID NO: 623545 - RNA, 19 nt, Artificial Sequence
  Description of Artificial Sequence: Synthetic oligonucleotide
  Antisense strand to SEQ ID NO: 623544
uugguugacgaaagcaacc

SEQ ID NO: 623546 - RNA, 19 nt, Artificial Sequence
  Description of Artificial Sequence: Synthetic oligonucleotide
  Sense strand starting at position 3709 of SEQ ID NO: 585231
ggaguuaacaaaggucaca

SEQ ID NO: 623547 - RNA, 19 nt, Artificial Sequence
  Description of Artificial Sequence: Synthetic oligonucleotide
  Antisense strand to SEQ ID NO: 623546
ugugaccuuuguuaacucc

SEQ ID NO: 623548 - RNA, 19 nt, Artificial Sequence
  Description of Artificial Sequence: Synthetic oligonucleotide
  Sense strand starting at position 3803 of SEQ ID NO: 585231
uugcacuucuaugcaaaga

SEQ ID NO: 623549 - RNA, 19 nt, Artificial Sequence
  Description of Artificial Sequence: Synthetic oligonucleotide
  Antisense strand to SEQ ID NO: 623548
ucuuugcauagaagugcaa

SEQ ID NO: 623550 - RNA, 19 nt, Artificial Sequence
  Description of Artificial Sequence: Synthetic oligonucleotide
  Sense strand starting at position 3920 of SEQ ID NO: 585231
uuguuacucagguguggaa

SEQ ID NO: 623551 - RNA, 19 nt, Artificial Sequence
  Description of Artificial Sequence: Synthetic oligonucleotide
  Antisense strand to SEQ ID NO: 623550
uuccacaccugaguaacaa

SEQ ID NO: 623552 - RNA, 19 nt, Artificial Sequence
  Description of Artificial Sequence: Synthetic oligonucleotide
  Sense strand starting at position 3924 of SEQ ID NO: 585231
uacucagguguggaaaguu

SEQ ID NO: 623553 - RNA, 19 nt, Artificial Sequence
  Description of Artificial Sequence: Synthetic oligonucleotide
  Antisense strand to SEQ ID NO: 623552
aacuuuccacaccugagua

SEQ ID NO: 623554 - RNA, 19 nt, Artificial Sequence
  Description of Artificial Sequence: Synthetic oligonucleotide
  Sense strand starting at position 62 of SEQ ID NO: 585232
ggcaguugggcugagaagu

SEQ ID NO: 623555 - RNA, 19 nt, Artificial Sequence
  Description of Artificial Sequence: Synthetic oligonucleotide
  Antisense strand to SEQ ID NO: 623554
acuucucagcccaacugcc

SEQ ID NO: 623556 - RNA, 19 nt, Artificial Sequence
  Description of Artificial Sequence: Synthetic oligonucleotide
  Sense strand starting at position 190 of SEQ ID NO: 585232
ucaaaucaggguuauguua

SEQ ID NO: 623557 - RNA, 19 nt, Artificial Sequence
  Description of Artificial Sequence: Synthetic oligonucleotide
  Antisense strand to SEQ ID NO: 623556
uaacauaacccugauuuga

SEQ ID NO: 623558 - RNA, 19 nt, Artificial Sequence
  Description of Artificial Sequence: Synthetic oligonucleotide
  Sense strand starting at position 251 of SEQ ID NO: 585232
ucuugucucuaggugcaaa

SEQ ID NO: 623559 - RNA, 19 nt, Artificial Sequence
  Description of Artificial Sequence: Synthetic oligonucleotide
  Antisense strand to SEQ ID NO: 623558
uuugcaccuagagacaaga

SEQ ID NO: 623560 - RNA, 19 nt, Artificial Sequence
  Description of Artificial Sequence: Synthetic oligonucleotide
  Sense strand starting at position 421 of SEQ ID NO: 585232
uuauuacuaggugaauguu

SEQ ID NO: 623561 - RNA, 19 nt, Artificial Sequence
  Description of Artificial Sequence: Synthetic oligonucleotide
  Antisense strand to SEQ ID NO: 623560
aacauucaccuaguaauaa

SEQ ID NO: 623562 - RNA, 19 nt, Artificial Sequence
  Description of Artificial Sequence: Synthetic oligonucleotide
  Sense strand starting at position 474 of SEQ ID NO: 585232
acuuuaggcuaagcuuaaa

SEQ ID NO: 623563 - RNA, 19 nt, Artificial Sequence
  Description of Artificial Sequence: Synthetic oligonucleotide
  Antisense strand to SEQ ID NO: 623562
uuuaagcuuagccuaaagu

SEQ ID NO: 623564 - RNA, 19 nt, Artificial Sequence
  Description of Artificial Sequence: Synthetic oligonucleotide
  Sense strand starting at position 487 of SEQ ID NO: 585232
cuuaaaucuccagaagcug

SEQ ID NO: 623565 - RNA, 19 nt, Artificial Sequence
  Description of Artificial Sequence: Synthetic oligonucleotide
  Antisense strand to SEQ ID NO: 623564
cagcuucuggagauuuaag

SEQ ID NO: 623566 - RNA, 19 nt, Artificial Sequence
  Description of Artificial Sequence: Synthetic oligonucleotide
  Sense strand starting at position 640 of SEQ ID NO: 585232
uucuuuguguucucaaauu

SEQ ID NO: 623567 - RNA, 19 nt, Artificial Sequence
  Description of Artificial Sequence: Synthetic oligonucleotide
  Antisense strand to SEQ ID NO: 623566
aauuugagaacacaaagaa

SEQ ID NO: 623568 - RNA, 19 nt, Artificial Sequence
  Description of Artificial Sequence: Synthetic oligonucleotide
  Sense strand starting at position 668 of SEQ ID NO: 585232
ccuguuauuuguucucuuu

SEQ ID NO: 623569 - RNA, 19 nt, Artificial Sequence
  Description of Artificial Sequence: Synthetic oligonucleotide
  Antisense strand to SEQ ID NO: 623568
aaagagaacaaauaacagg

SEQ ID NO: 623570 - RNA, 19 nt, Artificial Sequence
  Description of Artificial Sequence: Synthetic oligonucleotide
  Sense strand starting at position 881 of SEQ ID NO: 585232
uuugcuuucguguaaauau

SEQ ID NO: 623571 - RNA, 19 nt, Artificial Sequence
  Description of Artificial Sequence: Synthetic oligonucleotide
  Antisense strand to SEQ ID NO: 623570
auauuuacacgaaagcaaa

SEQ ID NO: 623572 - RNA, 19 nt, Artificial Sequence
  Description of Artificial Sequence: Synthetic oligonucleotide
  Sense strand starting at position 968 of SEQ ID NO: 585232
uuccaaagguaggaagaau

SEQ ID NO: 623573 - RNA, 19 nt, Artificial Sequence
  Description of Artificial Sequence: Synthetic oligonucleotide
  Antisense strand to SEQ ID NO: 623572
auucuuccuaccuuuggaa

SEQ ID NO: 623574 - RNA, 19 nt, Artificial Sequence
  Description of Artificial Sequence: Synthetic oligonucleotide
  Sense strand starting at position 997 of SEQ ID NO: 585232
gagugacagcugcagauaa

SEQ ID NO: 623575 - RNA, 19 nt, Artificial Sequence
  Description of Artificial Sequence: Synthetic oligonucleotide
  Antisense strand to SEQ ID NO: 623574
uuaucugcagcugucacuc

SEQ ID NO: 623576 - RNA, 19 nt, Artificial Sequence
  Description of Artificial Sequence: Synthetic oligonucleotide
  Sense strand starting at position 999 of SEQ ID NO: 585232
gugacagcugcagauaaau

SEQ ID NO: 623577 - RNA, 19 nt, Artificial Sequence
  Description of Artificial Sequence: Synthetic oligonucleotide
  Antisense strand to SEQ ID NO: 623576
auuuaucugcagcugucac

SEQ ID NO: 623578 - RNA, 19 nt, Artificial Sequence
  Description of Artificial Sequence: Synthetic oligonucleotide
  Sense strand starting at position 1008 of SEQ ID NO: 585232
gcagauaaauaauuaaggu

SEQ ID NO: 623579 - RNA, 19 nt, Artificial Sequence
  Description of Artificial Sequence: Synthetic oligonucleotide
  Antisense strand to SEQ ID NO: 623578
accuuaauuauuuaucugc

SEQ ID NO: 623580 - RNA, 19 nt, Artificial Sequence
  Description of Artificial Sequence: Synthetic oligonucleotide
  Sense strand starting at position 1046 of SEQ ID NO: 585232
agaagcaauuaucauuuga

SEQ ID NO: 623581 - RNA, 19 nt, Artificial Sequence
  Description of Artificial Sequence: Synthetic oligonucleotide
  Antisense strand to SEQ ID NO: 623580
ucaaaugauaauugcuucu

SEQ ID NO: 623582 - RNA, 19 nt, Artificial Sequence
  Description of Artificial Sequence: Synthetic oligonucleotide
  Sense strand starting at position 1090 of SEQ ID NO: 585232
guaaucucccucugucaca

SEQ ID NO: 623583 - RNA, 19 nt, Artificial Sequence
  Description of Artificial Sequence: Synthetic oligonucleotide
  Antisense strand to SEQ ID NO: 623582
ugugacagagggagauuac

SEQ ID NO: 623584 - RNA, 19 nt, Artificial Sequence
  Description of Artificial Sequence: Synthetic oligonucleotide
  Sense strand starting at position 1144 of SEQ ID NO: 585232
cgaucucuuccagacuuga

SEQ ID NO: 623585 - RNA, 19 nt, Artificial Sequence
  Description of Artificial Sequence: Synthetic oligonucleotide
  Antisense strand to SEQ ID NO: 623584
ucaagucuggaagagaucg

SEQ ID NO: 623586 - RNA, 19 nt, Artificial Sequence
  Description of Artificial Sequence: Synthetic oligonucleotide
  Sense strand starting at position 1394 of SEQ ID NO: 585232
guuucaguggcugggacau

SEQ ID NO: 623587 - RNA, 19 nt, Artificial Sequence
  Description of Artificial Sequence: Synthetic oligonucleotide
  Antisense strand to SEQ ID NO: 623586
augucccagccacugaaac

SEQ ID NO: 623588 - RNA, 19 nt, Artificial Sequence
  Description of Artificial Sequence: Synthetic oligonucleotide
  Sense strand starting at position 2223 of SEQ ID NO: 585232
cgagaaugagcgcaaucuu

SEQ ID NO: 623589 - RNA, 19 nt, Artificial Sequence
  Description of Artificial Sequence: Synthetic oligonucleotide
  Antisense strand to SEQ ID NO: 623588
aagauugcgcucauucucg

SEQ ID NO: 623590 - RNA, 19 nt, Artificial Sequence
  Description of Artificial Sequence: Synthetic oligonucleotide
  Sense strand starting at position 2349 of SEQ ID NO: 585232
ggcgaaguuucaguccuga

SEQ ID NO: 623591 - RNA, 19 nt, Artificial Sequence
  Description of Artificial Sequence: Synthetic oligonucleotide
  Antisense strand to SEQ ID NO: 623590
ucaggacugaaacuucgcc

SEQ ID NO: 623592 - RNA, 19 nt, Artificial Sequence
  Description of Artificial Sequence: Synthetic oligonucleotide
  Sense strand starting at position 2354 of SEQ ID NO: 585232
aguuucaguccugagugua

SEQ ID NO: 623593 - RNA, 19 nt, Artificial Sequence
  Description of Artificial Sequence: Synthetic oligonucleotide
  Antisense strand to SEQ ID NO: 623592
uacacucaggacugaaacu

SEQ ID NO: 623594 - RNA, 19 nt, Artificial Sequence
  Description of Artificial Sequence: Synthetic oligonucleotide
  Sense strand starting at position 2359 of SEQ ID NO: 585232
caguccugaguguaaagaa

SEQ ID NO: 623595 - RNA, 19 nt, Artificial Sequence
  Description of Artificial Sequence: Synthetic oligonucleotide
  Antisense strand to SEQ ID NO: 623594
uucuuuacacucaggacug

SEQ ID NO: 623596 - RNA, 19 nt, Artificial Sequence
  Description of Artificial Sequence: Synthetic oligonucleotide
  Sense strand starting at position 2492 of SEQ ID NO: 585232
ugacccgaguggucacauu

SEQ ID NO: 623597 - RNA, 19 nt, Artificial Sequence
  Description of Artificial Sequence: Synthetic oligonucleotide
  Antisense strand to SEQ ID NO: 623596
aaugugaccacucggguca

SEQ ID NO: 623598 - RNA, 19 nt, Artificial Sequence
  Description of Artificial Sequence: Synthetic oligonucleotide
  Sense strand starting at position 2558 of SEQ ID NO: 585232
cugacaacuccugaggcua

SEQ ID NO: 623599 - RNA, 19 nt, Artificial Sequence
  Description of Artificial Sequence: Synthetic oligonucleotide
  Antisense strand to SEQ ID NO: 623598
uagccucaggaguugucag

SEQ ID NO: 623600 - RNA, 19 nt, Artificial Sequence
  Description of Artificial Sequence: Synthetic oligonucleotide
  Sense strand starting at position 2600 of SEQ ID NO: 585232
cauauaaggacgcgaguuu

SEQ ID NO: 623601 - RNA, 19 nt, Artificial Sequence
  Description of Artificial Sequence: Synthetic oligonucleotide
  Antisense strand to SEQ ID NO: 623600
aaacucgcguccuuauaug

SEQ ID NO: 623602 - RNA, 19 nt, Artificial Sequence
  Description of Artificial Sequence: Synthetic oligonucleotide
  Sense strand starting at position 2794 of SEQ ID NO: 585232
aggacauaaucguauauuu

SEQ ID NO: 623603 - RNA, 19 nt, Artificial Sequence
  Description of Artificial Sequence: Synthetic oligonucleotide
  Antisense strand to SEQ ID NO: 623602
aaauauacgauuauguccu

SEQ ID NO: 623604 - RNA, 19 nt, Artificial Sequence
  Description of Artificial Sequence: Synthetic oligonucleotide
  Sense strand starting at position 2830 of SEQ ID NO: 585232
gggcuuggauuauccagau

SEQ ID NO: 623605 - RNA, 19 nt, Artificial Sequence
  Description of Artificial Sequence: Synthetic oligonucleotide
  Antisense strand to SEQ ID NO: 623604
aucuggauaauccaagccc

SEQ ID NO: 623606 - RNA, 19 nt, Artificial Sequence
  Description of Artificial Sequence: Synthetic oligonucleotide
  Sense strand starting at position 2843 of SEQ ID NO: 585232
ccagauaauugccuccagu

SEQ ID NO: 623607 - RNA, 19 nt, Artificial Sequence
  Description of Artificial Sequence: Synthetic oligonucleotide
  Antisense strand to SEQ ID NO: 623606
acuggaggcaauuaucugg

SEQ ID NO: 623608 - RNA, 19 nt, Artificial Sequence
  Description of Artificial Sequence: Synthetic oligonucleotide
  Sense strand starting at position 2920 of SEQ ID NO: 585232
aagauuggcgcuuggaaau

SEQ ID NO: 623609 - RNA, 19 nt, Artificial Sequence
  Description of Artificial Sequence: Synthetic oligonucleotide
  Antisense strand to SEQ ID NO: 623608
auuuccaagcgccaaucuu

SEQ ID NO: 623610 - RNA, 19 nt, Artificial Sequence
  Description of Artificial Sequence: Synthetic oligonucleotide
  Sense strand starting at position 2934 of SEQ ID NO: 585232
gaaauuagauuugguuucu

SEQ ID NO: 623611 - RNA, 19 nt, Artificial Sequence
  Description of Artificial Sequence: Synthetic oligonucleotide
  Antisense strand to SEQ ID NO: 623610
agaaaccaaaucuaauuuc

SEQ ID NO: 623612 - RNA, 19 nt, Artificial Sequence
  Description of Artificial Sequence: Synthetic oligonucleotide
  Sense strand starting at position 2940 of SEQ ID NO: 585232
agauuugguuucuaaagua

SEQ ID NO: 623613 - RNA, 19 nt, Artificial Sequence
  Description of Artificial Sequence: Synthetic oligonucleotide
  Antisense strand to SEQ ID NO: 623612
uacuuuagaaaccaaaucu

SEQ ID NO: 623614 - RNA, 19 nt, Artificial Sequence
  Description of Artificial Sequence: Synthetic oligonucleotide
  Sense strand starting at position 2958 of SEQ ID NO: 585232
augaauucguguccaacag

SEQ ID NO: 623615 - RNA, 19 nt, Artificial Sequence
  Description of Artificial Sequence: Synthetic oligonucleotide
  Antisense strand to SEQ ID NO: 623614
cuguuggacacgaauucau

SEQ ID NO: 623616 - RNA, 19 nt, Artificial Sequence
  Description of Artificial Sequence: Synthetic oligonucleotide
  Sense strand starting at position 2959 of SEQ ID NO: 585232
ugaauucguguccaacagu

SEQ ID NO: 623617 - RNA, 19 nt, Artificial Sequence
  Description of Artificial Sequence: Synthetic oligonucleotide
  Antisense strand to SEQ ID NO: 623616
acuguuggacacgaauuca

SEQ ID NO: 623618 - RNA, 19 nt, Artificial Sequence
  Description of Artificial Sequence: Synthetic oligonucleotide
  Sense strand starting at position 2988 of SEQ ID NO: 585232
gacaacguggguuguauaa

SEQ ID NO: 623619 - RNA, 19 nt, Artificial Sequence
  Description of Artificial Sequence: Synthetic oligonucleotide
  Antisense strand to SEQ ID NO: 623618
uuauacaacccacguuguc

SEQ ID NO: 623620 - RNA, 19 nt, Artificial Sequence
  Description of Artificial Sequence: Synthetic oligonucleotide
  Sense strand starting at position 3043 of SEQ ID NO: 585232
gcugguucucuccaaguua

SEQ ID NO: 623621 - RNA, 19 nt, Artificial Sequence
  Description of Artificial Sequence: Synthetic oligonucleotide
  Antisense strand to SEQ ID NO: 623620
uaacuuggagagaaccagc

SEQ ID NO: 623622 - RNA, 19 nt, Artificial Sequence
  Description of Artificial Sequence: Synthetic oligonucleotide
  Sense strand starting at position 3054 of SEQ ID NO: 585232
ccaaguuauguaggacuuu

SEQ ID NO: 623623 - RNA, 19 nt, Artificial Sequence
  Description of Artificial Sequence: Synthetic oligonucleotide
  Antisense strand to SEQ ID NO: 623622
aaaguccuacauaacuugg

SEQ ID NO: 623624 - RNA, 19 nt, Artificial Sequence
  Description of Artificial Sequence: Synthetic oligonucleotide
  Sense strand starting at position 3210 of SEQ ID NO: 585232
gagagagccucugagaaag

SEQ ID NO: 623625 - RNA, 19 nt, Artificial Sequence
  Description of Artificial Sequence: Synthetic oligonucleotide
  Antisense strand to SEQ ID NO: 623624
cuuucucagaggcucucuc

SEQ ID NO: 623626 - RNA, 19 nt, Artificial Sequence
  Description of Artificial Sequence: Synthetic oligonucleotide
  Sense strand starting at position 3220 of SEQ ID NO: 585232
cugagaaagggccgucuau

SEQ ID NO: 623627 - RNA, 19 nt, Artificial Sequence
  Description of Artificial Sequence: Synthetic oligonucleotide
  Antisense strand to SEQ ID NO: 623626
auagacggcccuuucucag

SEQ ID NO: 623628 - RNA, 19 nt, Artificial Sequence
  Description of Artificial Sequence: Synthetic oligonucleotide
  Sense strand starting at position 3450 of SEQ ID NO: 585232
gcgugcuaagcccuuauua

SEQ ID NO: 623629 - RNA, 19 nt, Artificial Sequence
  Description of Artificial Sequence: Synthetic oligonucleotide
  Antisense strand to SEQ ID NO: 623628
uaauaagggcuuagcacgc

SEQ ID NO: 623630 - RNA, 19 nt, Artificial Sequence
  Description of Artificial Sequence: Synthetic oligonucleotide
  Sense strand starting at position 3452 of SEQ ID NO: 585232
gugcuaagcccuuauuaga

SEQ ID NO: 623631 - RNA, 19 nt, Artificial Sequence
  Description of Artificial Sequence: Synthetic oligonucleotide
  Antisense strand to SEQ ID NO: 623630
ucuaauaagggcuuagcac

SEQ ID NO: 623632 - RNA, 19 nt, Artificial Sequence
  Description of Artificial Sequence: Synthetic oligonucleotide
  Sense strand starting at position 3561 of SEQ ID NO: 585232
guuccaucuuggcuucuga

SEQ ID NO: 623633 - RNA, 19 nt, Artificial Sequence
  Description of Artificial Sequence: Synthetic oligonucleotide
  Antisense strand to SEQ ID NO: 623632
ucagaagccaagauggaac

SEQ ID NO: 623634 - RNA, 19 nt, Artificial Sequence
  Description of Artificial Sequence: Synthetic oligonucleotide
  Sense strand starting at position 4 of SEQ ID NO: 585233
ccaggaguuugucuacuag

SEQ ID NO: 623635 - RNA, 19 nt, Artificial Sequence
  Description of Artificial Sequence: Synthetic oligonucleotide
  Antisense strand to SEQ ID NO: 623634
cuaguagacaaacuccugg

SEQ ID NO: 623636 - RNA, 19 nt, Artificial Sequence
  Description of Artificial Sequence: Synthetic oligonucleotide
  Sense strand starting at position 11 of SEQ ID NO: 585233
uuugucuacuaggugacau

SEQ ID NO: 623637 - RNA, 19 nt, Artificial Sequence
  Description of Artificial Sequence: Synthetic oligonucleotide
  Antisense strand to SEQ ID NO: 623636
augucaccuaguagacaaa

SEQ ID NO: 623638 - RNA, 19 nt, Artificial Sequence
  Description of Artificial Sequence: Synthetic oligonucleotide
  Sense strand starting at position 19 of SEQ ID NO: 585233
cuaggugacauguggcaaa

SEQ ID NO: 623639 - RNA, 19 nt, Artificial Sequence
  Description of Artificial Sequence: Synthetic oligonucleotide
  Antisense strand to SEQ ID NO: 623638
uuugccacaugucaccuag

SEQ ID NO: 623640 - RNA, 19 nt, Artificial Sequence
  Description of Artificial Sequence: Synthetic oligonucleotide
  Sense strand starting at position 233 of SEQ ID NO: 585233
cacucaguuugccugggaa

SEQ ID NO: 623641 - RNA, 19 nt, Artificial Sequence
  Description of Artificial Sequence: Synthetic oligonucleotide
  Antisense strand to SEQ ID NO: 623640
uucccaggcaaacugagug

SEQ ID NO: 623642 - RNA, 19 nt, Artificial Sequence
  Description of Artificial Sequence: Synthetic oligonucleotide
  Sense strand starting at position 236 of SEQ ID NO: 585233
ucaguuugccugggaaaua

SEQ ID NO: 623643 - RNA, 19 nt, Artificial Sequence
  Description of Artificial Sequence: Synthetic oligonucleotide
  Antisense strand to SEQ ID NO: 623642
uauuucccaggcaaacuga

SEQ ID NO: 623644 - RNA, 19 nt, Artificial Sequence
  Description of Artificial Sequence: Synthetic oligonucleotide
  Sense strand starting at position 247 of SEQ ID NO: 585233
gggaaauacugcucccagu

SEQ ID NO: 623645 - RNA, 19 nt, Artificial Sequence
  Description of Artificial Sequence: Synthetic oligonucleotide
  Antisense strand to SEQ ID NO: 623644
acugggagcaguauuuccc

SEQ ID NO: 623646 - RNA, 19 nt, Artificial Sequence
  Description of Artificial Sequence: Synthetic oligonucleotide
  Sense strand starting at position 360 of SEQ ID NO: 585233
ccugauguuguauaucuuu

SEQ ID NO: 623647 - RNA, 19 nt, Artificial Sequence
  Description of Artificial Sequence: Synthetic oligonucleotide
  Antisense strand to SEQ ID NO: 623646
aaagauauacaacaucagg

SEQ ID NO: 623648 - RNA, 19 nt, Artificial Sequence
  Description of Artificial Sequence: Synthetic oligonucleotide
  Sense strand starting at position 382 of SEQ ID NO: 585233
cucauuugcuuauugucau

SEQ ID NO: 623649 - RNA, 19 nt, Artificial Sequence
  Description of Artificial Sequence: Synthetic oligonucleotide
  Antisense strand to SEQ ID NO: 623648
augacaauaagcaaaugag

SEQ ID NO: 623650 - RNA, 19 nt, Artificial Sequence
  Description of Artificial Sequence: Synthetic oligonucleotide
  Sense strand starting at position 430 of SEQ ID NO: 585233
gguaaagacuuguuucccu

SEQ ID NO: 623651 - RNA, 19 nt, Artificial Sequence
  Description of Artificial Sequence: Synthetic oligonucleotide
  Antisense strand to SEQ ID NO: 623650
agggaaacaagucuuuacc

SEQ ID NO: 623652 - RNA, 19 nt, Artificial Sequence
  Description of Artificial Sequence: Synthetic oligonucleotide
  Sense strand starting at position 559 of SEQ ID NO: 585233
cagugugauguuuaagaau

SEQ ID NO: 623653 - RNA, 19 nt, Artificial Sequence
  Description of Artificial Sequence: Synthetic oligonucleotide
  Antisense strand to SEQ ID NO: 623652
auucuuaaacaucacacug

SEQ ID NO: 623654 - RNA, 19 nt, Artificial Sequence
  Description of Artificial Sequence: Synthetic oligonucleotide
  Sense strand starting at position 574 of SEQ ID NO: 585233
gaaucauagcuaugaagug

SEQ ID NO: 623655 - RNA, 19 nt, Artificial Sequence
  Description of Artificial Sequence: Synthetic oligonucleotide
  Antisense strand to SEQ ID NO: 623654
cacuucauagcuaugauuc

SEQ ID NO: 623656 - RNA, 19 nt, Artificial Sequence
  Description of Artificial Sequence: Synthetic oligonucleotide
  Sense strand starting at position 631 of SEQ ID NO: 585233
gaauaaauuugccaggaag

SEQ ID NO: 623657 - RNA, 19 nt, Artificial Sequence
  Description of Artificial Sequence: Synthetic oligonucleotide
  Antisense strand to SEQ ID NO: 623656
cuuccuggcaaauuuauuc

SEQ ID NO: 623658 - RNA, 19 nt, Artificial Sequence
  Description of Artificial Sequence: Synthetic oligonucleotide
  Sense strand starting at position 733 of SEQ ID NO: 585233
gcgugugacccacagaaca

SEQ ID NO: 623659 - RNA, 19 nt, Artificial Sequence
  Description of Artificial Sequence: Synthetic oligonucleotide
  Antisense strand to SEQ ID NO: 623658
uguucugugggucacacgc

SEQ ID NO: 623660 - RNA, 19 nt, Artificial Sequence
  Description of Artificial Sequence: Synthetic oligonucleotide
  Sense strand starting at position 800 of SEQ ID NO: 585233
gcuguaguacuugaaauaa

SEQ ID NO: 623661 - RNA, 19 nt, Artificial Sequence
  Description of Artificial Sequence: Synthetic oligonucleotide
  Antisense strand to SEQ ID NO: 623660
uuauuucaaguacuacagc

SEQ ID NO: 623662 - RNA, 19 nt, Artificial Sequence
  Description of Artificial Sequence: Synthetic oligonucleotide
  Sense strand starting at position 841 of SEQ ID NO: 585233
uguucuuuguaaccugaaa

SEQ ID NO: 623663 - RNA, 19 nt, Artificial Sequence
  Description of Artificial Sequence: Synthetic oligonucleotide
  Antisense strand to SEQ ID NO: 623662
uuucagguuacaaagaaca

SEQ ID NO: 623664 - RNA, 19 nt, Artificial Sequence
  Description of Artificial Sequence: Synthetic oligonucleotide
  Sense strand starting at position 921 of SEQ ID NO: 585233
ccucccuaugccuagugaa

SEQ ID NO: 623665 - RNA, 19 nt, Artificial Sequence
  Description of Artificial Sequence: Synthetic oligonucleotide
  Antisense strand to SEQ ID NO: 623664
uucacuaggcauagggagg

SEQ ID NO: 623666 - RNA, 19 nt, Artificial Sequence
  Description of Artificial Sequence: Synthetic oligonucleotide
  Sense strand starting at position 999 of SEQ ID NO: 585233
uuaucaguacuuuguagag

SEQ ID NO: 623667 - RNA, 19 nt, Artificial Sequence
  Description of Artificial Sequence: Synthetic oligonucleotide
  Antisense strand to SEQ ID NO: 623666
cucuacaaaguacugauaa

SEQ ID NO: 623668 - RNA, 19 nt, Artificial Sequence
  Description of Artificial Sequence: Synthetic oligonucleotide
  Sense strand starting at position 1279 of SEQ ID NO: 585233
gcauucguucugaggugga

SEQ ID NO: 623669 - RNA, 19 nt, Artificial Sequence
  Description of Artificial Sequence: Synthetic oligonucleotide
  Antisense strand to SEQ ID NO: 623668
uccaccucagaacgaaugc

SEQ ID NO: 623670 - RNA, 19 nt, Artificial Sequence
  Description of Artificial Sequence: Synthetic oligonucleotide
  Sense strand starting at position 1355 of SEQ ID NO: 585233
agaacuuccuguuuggaga

SEQ ID NO: 623671 - RNA, 19 nt, Artificial Sequence
  Description of Artificial Sequence: Synthetic oligonucleotide
  Antisense strand to SEQ ID NO: 623670
ucuccaaacaggaaguucu

SEQ ID NO: 623672 - RNA, 19 nt, Artificial Sequence
  Description of Artificial Sequence: Synthetic oligonucleotide
  Sense strand starting at position 1356 of SEQ ID NO: 585233
gaacuuccuguuuggagau

SEQ ID NO: 623673 - RNA, 19 nt, Artificial Sequence
  Description of Artificial Sequence: Synthetic oligonucleotide
  Antisense strand to SEQ ID NO: 623672
aucuccaaacaggaaguuc

SEQ ID NO: 623674 - RNA, 19 nt, Artificial Sequence
  Description of Artificial Sequence: Synthetic oligonucleotide
  Sense strand starting at position 2434 of SEQ ID NO: 585233
guaauuguuagguaguuag

SEQ ID NO: 623675 - RNA, 19 nt, Artificial Sequence
  Description of Artificial Sequence: Synthetic oligonucleotide
  Antisense strand to SEQ ID NO: 623674
cuaacuaccuaacaauuac

SEQ ID NO: 623676 - RNA, 19 nt, Artificial Sequence
  Description of Artificial Sequence: Synthetic oligonucleotide
  Sense strand starting at position 2437 of SEQ ID NO: 585233
auuguuagguaguuagaca

SEQ ID NO: 623677 - RNA, 19 nt, Artificial Sequence
  Description of Artificial Sequence: Synthetic oligonucleotide
  Antisense strand to SEQ ID NO: 623676
ugucuaacuaccuaacaau

SEQ ID NO: 623678 - RNA, 19 nt, Artificial Sequence
  Description of Artificial Sequence: Synthetic oligonucleotide
  Sense strand starting at position 2438 of SEQ ID NO: 585233
uuguuagguaguuagacau

SEQ ID NO: 623679 - RNA, 19 nt, Artificial Sequence
  Description of Artificial Sequence: Synthetic oligonucleotide
  Antisense strand to SEQ ID NO: 623678
augucuaacuaccuaacaa

SEQ ID NO: 623680 - RNA, 19 nt, Artificial Sequence
  Description of Artificial Sequence: Synthetic oligonucleotide
  Sense strand starting at position 2445 of SEQ ID NO: 585233
guaguuagacauuagcagu

SEQ ID NO: 623681 - RNA, 19 nt, Artificial Sequence
  Description of Artificial Sequence: Synthetic oligonucleotide
  Antisense strand to SEQ ID NO: 623680
acugcuaaugucuaacuac

SEQ ID NO: 623682 - RNA, 19 nt, Artificial Sequence
  Description of Artificial Sequence: Synthetic oligonucleotide
  Sense strand starting at position 2614 of SEQ ID NO: 585233
gaggguacagguggaaauu

SEQ ID NO: 623683 - RNA, 19 nt, Artificial Sequence
  Description of Artificial Sequence: Synthetic oligonucleotide
  Antisense strand to SEQ ID NO: 623682
aauuuccaccuguacccuc

SEQ ID NO: 623684 - RNA, 19 nt, Artificial Sequence
  Description of Artificial Sequence: Synthetic oligonucleotide
  Sense strand starting at position 2623 of SEQ ID NO: 585233
gguggaaauucccuaaggu

SEQ ID NO: 623685 - RNA, 19 nt, Artificial Sequence
  Description of Artificial Sequence: Synthetic oligonucleotide
  Antisense strand to SEQ ID NO: 623684
accuuagggaauuuccacc

SEQ ID NO: 623686 - RNA, 19 nt, Artificial Sequence
  Description of Artificial Sequence: Synthetic oligonucleotide
  Sense strand starting at position 2624 of SEQ ID NO: 585233
guggaaauucccuaaggug

SEQ ID NO: 623687 - RNA, 19 nt, Artificial Sequence
  Description of Artificial Sequence: Synthetic oligonucleotide
  Antisense strand to SEQ ID NO: 623686
caccuuagggaauuuccac

SEQ ID NO: 623688 - RNA, 19 nt, Artificial Sequence
  Description of Artificial Sequence: Synthetic oligonucleotide
  Sense strand starting at position 2797 of SEQ ID NO: 585233
auuguauagcuauacacuu

SEQ ID NO: 623689 - RNA, 19 nt, Artificial Sequence
  Description of Artificial Sequence: Synthetic oligonucleotide
  Antisense strand to SEQ ID NO: 623688
aaguguauagcuauacaau

SEQ ID NO: 623690 - RNA, 19 nt, Artificial Sequence
  Description of Artificial Sequence: Synthetic oligonucleotide
  Sense strand starting at position 2888 of SEQ ID NO: 585233
caccuugagcucuguaaag

SEQ ID NO: 623691 - RNA, 19 nt, Artificial Sequence
  Description of Artificial Sequence: Synthetic oligonucleotide
  Antisense strand to SEQ ID NO: 623690
cuuuacagagcucaaggug

SEQ ID NO: 623692 - RNA, 19 nt, Artificial Sequence
  Description of Artificial Sequence: Synthetic oligonucleotide
  Sense strand starting at position 2890 of SEQ ID NO: 585233
ccuugagcucuguaaagaa

SEQ ID NO: 623693 - RNA, 19 nt, Artificial Sequence
  Description of Artificial Sequence: Synthetic oligonucleotide
  Antisense strand to SEQ ID NO: 623692
uucuuuacagagcucaagg

SEQ ID NO: 623694 - RNA, 19 nt, Artificial Sequence
  Description of Artificial Sequence: Synthetic oligonucleotide
  Sense strand starting at position 2943 of SEQ ID NO: 585233
ucccucagaguguauuauu

SEQ ID NO: 623695 - RNA, 19 nt, Artificial Sequence
  Description of Artificial Sequence: Synthetic oligonucleotide
  Antisense strand to SEQ ID NO: 623694
aauaauacacucugaggga

SEQ ID NO: 623696 - RNA, 19 nt, Artificial Sequence
  Description of Artificial Sequence: Synthetic oligonucleotide
  Sense strand starting at position 2977 of SEQ ID NO: 585233
uugcuuuaagcuugcauuu

SEQ ID NO: 623697 - RNA, 19 nt, Artificial Sequence
  Description of Artificial Sequence: Synthetic oligonucleotide
  Antisense strand to SEQ ID NO: 623696
aaaugcaagcuuaaagcaa

SEQ ID NO: 623698 - RNA, 19 nt, Artificial Sequence
  Description of Artificial Sequence: Synthetic oligonucleotide
  Sense strand starting at position 3036 of SEQ ID NO: 585233
ugagauugcugguucagag

SEQ ID NO: 623699 - RNA, 19 nt, Artificial Sequence
  Description of Artificial Sequence: Synthetic oligonucleotide
  Antisense strand to SEQ ID NO: 623698
cucugaaccagcaaucuca

SEQ ID NO: 623700 - RNA, 19 nt, Artificial Sequence
  Description of Artificial Sequence: Synthetic oligonucleotide
  Sense strand starting at position 3050 of SEQ ID NO: 585233
cagagcuccggcuauaaua

SEQ ID NO: 623701 - RNA, 19 nt, Artificial Sequence
  Description of Artificial Sequence: Synthetic oligonucleotide
  Antisense strand to SEQ ID NO: 623700
uauuauagccggagcucug

SEQ ID NO: 623702 - RNA, 19 nt, Artificial Sequence
  Description of Artificial Sequence: Synthetic oligonucleotide
  Sense strand starting at position 3052 of SEQ ID NO: 585233
gagcuccggcuauaauaau

SEQ ID NO: 623703 - RNA, 19 nt, Artificial Sequence
  Description of Artificial Sequence: Synthetic oligonucleotide
  Antisense strand to SEQ ID NO: 623702
auuauuauagccggagcuc

SEQ ID NO: 623704 - RNA, 19 nt, Artificial Sequence
  Description of Artificial Sequence: Synthetic oligonucleotide
  Sense strand starting at position 3063 of SEQ ID NO: 585233
auaauaaucuccucgguua

SEQ ID NO: 623705 - RNA, 19 nt, Artificial Sequence
  Description of Artificial Sequence: Synthetic oligonucleotide
  Antisense strand to SEQ ID NO: 623704
uaaccgaggagauuauuau

SEQ ID NO: 623706 - RNA, 19 nt, Artificial Sequence
  Description of Artificial Sequence: Synthetic oligonucleotide
  Sense strand starting at position 3066 of SEQ ID NO: 585233
auaaucuccucgguuaaag

SEQ ID NO: 623707 - RNA, 19 nt, Artificial Sequence
  Description of Artificial Sequence: Synthetic oligonucleotide
  Antisense strand to SEQ ID NO: 623706
cuuuaaccgaggagauuau

SEQ ID NO: 623708 - RNA, 19 nt, Artificial Sequence
  Description of Artificial Sequence: Synthetic oligonucleotide
  Sense strand starting at position 3176 of SEQ ID NO: 585233
ugggaauuauugccuuaga

SEQ ID NO: 623709 - RNA, 19 nt, Artificial Sequence
  Description of Artificial Sequence: Synthetic oligonucleotide
  Antisense strand to SEQ ID NO: 623708
ucuaaggcaauaauuccca

SEQ ID NO: 623710 - RNA, 19 nt, Artificial Sequence
  Description of Artificial Sequence: Synthetic oligonucleotide
  Sense strand starting at position 3177 of SEQ ID NO: 585233
gggaauuauugccuuagac

SEQ ID NO: 623711 - RNA, 19 nt, Artificial Sequence
  Description of Artificial Sequence: Synthetic oligonucleotide
  Antisense strand to SEQ ID NO: 623710
gucuaaggcaauaauuccc

SEQ ID NO: 623712 - RNA, 19 nt, Artificial Sequence
  Description of Artificial Sequence: Synthetic oligonucleotide
  Sense strand starting at position 3381 of SEQ ID NO: 585233
uauugaugaugggcacauu

SEQ ID NO: 623713 - RNA, 19 nt, Artificial Sequence
  Description of Artificial Sequence: Synthetic oligonucleotide
  Antisense strand to SEQ ID NO: 623712
aaugugcccaucaucaaua

SEQ ID NO: 623714 - RNA, 19 nt, Artificial Sequence
  Description of Artificial Sequence: Synthetic oligonucleotide
  Sense strand starting at position 68 of SEQ ID NO: 585234
gcaccuuccggagggaauu

SEQ ID NO: 623715 - RNA, 19 nt, Artificial Sequence
  Description of Artificial Sequence: Synthetic oligonucleotide
  Antisense strand to SEQ ID NO: 623714
aauucccuccggaaggugc

SEQ ID NO: 623716 - RNA, 19 nt, Artificial Sequence
  Description of Artificial Sequence: Synthetic oligonucleotide
  Sense strand starting at position 80 of SEQ ID NO: 585234
gggaauuugucucagccuc

SEQ ID NO: 623717 - RNA, 19 nt, Artificial Sequence
  Description of Artificial Sequence: Synthetic oligonucleotide
  Antisense strand to SEQ ID NO: 623716
gaggcugagacaaauuccc

SEQ ID NO: 623718 - RNA, 19 nt, Artificial Sequence
  Description of Artificial Sequence: Synthetic oligonucleotide
  Sense strand starting at position 96 of SEQ ID NO: 585234
cucauauucuaagaggagu

SEQ ID NO: 623719 - RNA, 19 nt, Artificial Sequence
  Description of Artificial Sequence: Synthetic oligonucleotide
  Antisense strand to SEQ ID NO: 623718
acuccucuuagaauaugag

SEQ ID NO: 623720 - RNA, 19 nt, Artificial Sequence
  Description of Artificial Sequence: Synthetic oligonucleotide
  Sense strand starting at position 151 of SEQ ID NO: 585234
uucuuugcuccugaggaca

SEQ ID NO: 623721 - RNA, 19 nt, Artificial Sequence
  Description of Artificial Sequence: Synthetic oligonucleotide
  Antisense strand to SEQ ID NO: 623720
uguccucaggagcaaagaa

SEQ ID NO: 623722 - RNA, 19 nt, Artificial Sequence
  Description of Artificial Sequence: Synthetic oligonucleotide
  Sense strand starting at position 180 of SEQ ID NO: 585234
ggcugacuuguguacauac

SEQ ID NO: 623723 - RNA, 19 nt, Artificial Sequence
  Description of Artificial Sequence: Synthetic oligonucleotide
  Antisense strand to SEQ ID NO: 623722
guauguacacaagucagcc

SEQ ID NO: 623724 - RNA, 19 nt, Artificial Sequence
  Description of Artificial Sequence: Synthetic oligonucleotide
  Sense strand starting at position 229 of SEQ ID NO: 585234
acagauuugucacaccucu

SEQ ID NO: 623725 - RNA, 19 nt, Artificial Sequence
  Description of Artificial Sequence: Synthetic oligonucleotide
  Antisense strand to SEQ ID NO: 623724
agaggugugacaaaucugu

SEQ ID NO: 623726 - RNA, 19 nt, Artificial Sequence
  Description of Artificial Sequence: Synthetic oligonucleotide
  Sense strand starting at position 274 of SEQ ID NO: 585234
gagccagagucauuaaagu

SEQ ID NO: 623727 - RNA, 19 nt, Artificial Sequence
  Description of Artificial Sequence: Synthetic oligonucleotide
  Antisense strand to SEQ ID NO: 623726
acuuuaaugacucuggcuc

SEQ ID NO: 623728 - RNA, 19 nt, Artificial Sequence
  Description of Artificial Sequence: Synthetic oligonucleotide
  Sense strand starting at position 281 of SEQ ID NO: 585234
agucauuaaagugguaaag

SEQ ID NO: 623729 - RNA, 19 nt, Artificial Sequence
  Description of Artificial Sequence: Synthetic oligonucleotide
  Antisense strand to SEQ ID NO: 623728
cuuuaccacuuuaaugacu

SEQ ID NO: 623730 - RNA, 19 nt, Artificial Sequence
  Description of Artificial Sequence: Synthetic oligonucleotide
  Sense strand starting at position 356 of SEQ ID NO: 585234
ggacucaacucugcauaca

SEQ ID NO: 623731 - RNA, 19 nt, Artificial Sequence
  Description of Artificial Sequence: Synthetic oligonucleotide
  Antisense strand to SEQ ID NO: 623730
uguaugcagaguugagucc

SEQ ID NO: 623732 - RNA, 19 nt, Artificial Sequence
  Description of Artificial Sequence: Synthetic oligonucleotide
  Sense strand starting at position 471 of SEQ ID NO: 585234
cgcagaacugaucagaugu

SEQ ID NO: 623733 - RNA, 19 nt, Artificial Sequence
  Description of Artificial Sequence: Synthetic oligonucleotide
  Antisense strand to SEQ ID NO: 623732
acaucugaucaguucugcg

SEQ ID NO: 623734 - RNA, 19 nt, Artificial Sequence
  Description of Artificial Sequence: Synthetic oligonucleotide
  Sense strand starting at position 526 of SEQ ID NO: 585234
acuugaggcugaguugaaa

SEQ ID NO: 623735 - RNA, 19 nt, Artificial Sequence
  Description of Artificial Sequence: Synthetic oligonucleotide
  Antisense strand to SEQ ID NO: 623734
uuucaacucagccucaagu

SEQ ID NO: 623736 - RNA, 19 nt, Artificial Sequence
  Description of Artificial Sequence: Synthetic oligonucleotide
  Sense strand starting at position 742 of SEQ ID NO: 585234
aacagcugcuacguaaaua

SEQ ID NO: 623737 - RNA, 19 nt, Artificial Sequence
  Description of Artificial Sequence: Synthetic oligonucleotide
  Antisense strand to SEQ ID NO: 623736
uauuuacguagcagcuguu

SEQ ID NO: 623738 - RNA, 19 nt, Artificial Sequence
  Description of Artificial Sequence: Synthetic oligonucleotide
  Sense strand starting at position 753 of SEQ ID NO: 585234
cguaaauaagcuuggaaac

SEQ ID NO: 623739 - RNA, 19 nt, Artificial Sequence
  Description of Artificial Sequence: Synthetic oligonucleotide
  Antisense strand to SEQ ID NO: 623738
guuuccaagcuuauuuacg

SEQ ID NO: 623740 - RNA, 19 nt, Artificial Sequence
  Description of Artificial Sequence: Synthetic oligonucleotide
  Sense strand starting at position 754 of SEQ ID NO: 585234
guaaauaagcuuggaaaca

SEQ ID NO: 623741 - RNA, 19 nt, Artificial Sequence
  Description of Artificial Sequence: Synthetic oligonucleotide
  Antisense strand to SEQ ID NO: 623740
uguuuccaagcuuauuuac

SEQ ID NO: 623742 - RNA, 19 nt, Artificial Sequence
  Description of Artificial Sequence: Synthetic oligonucleotide
  Sense strand starting at position 775 of SEQ ID NO: 585234
gugauacggaccugaugua

SEQ ID NO: 623743 - RNA, 19 nt, Artificial Sequence
  Description of Artificial Sequence: Synthetic oligonucleotide
  Antisense strand to SEQ ID NO: 623742
uacaucagguccguaucac

SEQ ID NO: 623744 - RNA, 19 nt, Artificial Sequence
  Description of Artificial Sequence: Synthetic oligonucleotide
  Sense strand starting at position 967 of SEQ ID NO: 585234
aguagaaagagguguaaua

SEQ ID NO: 623745 - RNA, 19 nt, Artificial Sequence
  Description of Artificial Sequence: Synthetic oligonucleotide
  Antisense strand to SEQ ID NO: 623744
uauuacaccucuuucuacu

SEQ ID NO: 623746 - RNA, 19 nt, Artificial Sequence
  Description of Artificial Sequence: Synthetic oligonucleotide
  Sense strand starting at position 977 of SEQ ID NO: 585234
gguguaauaaauugugaua

SEQ ID NO: 623747 - RNA, 19 nt, Artificial Sequence
  Description of Artificial Sequence: Synthetic oligonucleotide
  Antisense strand to SEQ ID NO: 623746
uaucacaauuuauuacacc

SEQ ID NO: 623748 - RNA, 19 nt, Artificial Sequence
  Description of Artificial Sequence: Synthetic oligonucleotide
  Sense strand starting at position 1110 of SEQ ID NO: 585234
gucucauacccacagcauu

SEQ ID NO: 623749 - RNA, 19 nt, Artificial Sequence
  Description of Artificial Sequence: Synthetic oligonucleotide
  Antisense strand to SEQ ID NO: 623748
aaugcuguggguaugagac

SEQ ID NO: 623750 - RNA, 19 nt, Artificial Sequence
  Description of Artificial Sequence: Synthetic oligonucleotide
  Sense strand starting at position 1935 of SEQ ID NO: 585234
gggucuuccugcuauuucu

SEQ ID NO: 623751 - RNA, 19 nt, Artificial Sequence
  Description of Artificial Sequence: Synthetic oligonucleotide
  Antisense strand to SEQ ID NO: 623750
agaaauagcaggaagaccc

SEQ ID NO: 623752 - RNA, 19 nt, Artificial Sequence
  Description of Artificial Sequence: Synthetic oligonucleotide
  Sense strand starting at position 2170 of SEQ ID NO: 585234
cgcggaggccugggagaau

SEQ ID NO: 623753 - RNA, 19 nt, Artificial Sequence
  Description of Artificial Sequence: Synthetic oligonucleotide
  Antisense strand to SEQ ID NO: 623752
auucucccaggccuccgcg

SEQ ID NO: 623754 - RNA, 19 nt, Artificial Sequence
  Description of Artificial Sequence: Synthetic oligonucleotide
  Sense strand starting at position 2201 of SEQ ID NO: 585234
aggcuuucacuggauggua

SEQ ID NO: 623755 - RNA, 19 nt, Artificial Sequence
  Description of Artificial Sequence: Synthetic oligonucleotide
  Antisense strand to SEQ ID NO: 623754
uaccauccagugaaagccu

SEQ ID NO: 623756 - RNA, 19 nt, Artificial Sequence
  Description of Artificial Sequence: Synthetic oligonucleotide
  Sense strand starting at position 2313 of SEQ ID NO: 585234
ccuggacuucccuggugau

SEQ ID NO: 623757 - RNA, 19 nt, Artificial Sequence
  Description of Artificial Sequence: Synthetic oligonucleotide
  Antisense strand to SEQ ID NO: 623756
aucaccagggaaguccagg

SEQ ID NO: 623758 - RNA, 19 nt, Artificial Sequence
  Description of Artificial Sequence: Synthetic oligonucleotide
  Sense strand starting at position 3015 of SEQ ID NO: 585234
agauaaaguucuucuaguc

SEQ ID NO: 623759 - RNA, 19 nt, Artificial Sequence
  Description of Artificial Sequence: Synthetic oligonucleotide
  Antisense strand to SEQ ID NO: 623758
gacuagaagaacuuuaucu

SEQ ID NO: 623760 - RNA, 19 nt, Artificial Sequence
  Description of Artificial Sequence: Synthetic oligonucleotide
  Sense strand starting at position 3045 of SEQ ID NO: 585234
ggaguauaccguugaaucc

SEQ ID NO: 623761 - RNA, 19 nt, Artificial Sequence
  Description of Artificial Sequence: Synthetic oligonucleotide
  Antisense strand to SEQ ID NO: 623760
ggauucaacgguauacucc

SEQ ID NO: 623762 - RNA, 19 nt, Artificial Sequence
  Description of Artificial Sequence: Synthetic oligonucleotide
  Sense strand starting at position 3054 of SEQ ID NO: 585234
cguugaauccgggaaguag

SEQ ID NO: 623763 - RNA, 19 nt, Artificial Sequence
  Description of Artificial Sequence: Synthetic oligonucleotide
  Antisense strand to SEQ ID NO: 623762
cuacuucccggauucaacg

SEQ ID NO: 623764 - RNA, 19 nt, Artificial Sequence
  Description of Artificial Sequence: Synthetic oligonucleotide
  Sense strand starting at position 3131 of SEQ ID NO: 585234
guggucuuacccguguuua

SEQ ID NO: 623765 - RNA, 19 nt, Artificial Sequence
  Description of Artificial Sequence: Synthetic oligonucleotide
  Antisense strand to SEQ ID NO: 623764
uaaacacggguaagaccac

SEQ ID NO: 623766 - RNA, 19 nt, Artificial Sequence
  Description of Artificial Sequence: Synthetic oligonucleotide
  Sense strand starting at position 3132 of SEQ ID NO: 585234
uggucuuacccguguuuau

SEQ ID NO: 623767 - RNA, 19 nt, Artificial Sequence
  Description of Artificial Sequence: Synthetic oligonucleotide
  Antisense strand to SEQ ID NO: 623766
auaaacacggguaagacca

SEQ ID NO: 623768 - RNA, 19 nt, Artificial Sequence
  Description of Artificial Sequence: Synthetic oligonucleotide
  Sense strand starting at position 3135 of SEQ ID NO: 585234
ucuuacccguguuuauaau

SEQ ID NO: 623769 - RNA, 19 nt, Artificial Sequence
  Description of Artificial Sequence: Synthetic oligonucleotide
  Antisense strand to SEQ ID NO: 623768
auuauaaacacggguaaga

SEQ ID NO: 623770 - RNA, 19 nt, Artificial Sequence
  Description of Artificial Sequence: Synthetic oligonucleotide
  Sense strand starting at position 3136 of SEQ ID NO: 585234
cuuacccguguuuauaauu

SEQ ID NO: 623771 - RNA, 19 nt, Artificial Sequence
  Description of Artificial Sequence: Synthetic oligonucleotide
  Antisense strand to SEQ ID NO: 623770
aauuauaaacacggguaag

SEQ ID NO: 623772 - RNA, 19 nt, Artificial Sequence
  Description of Artificial Sequence: Synthetic oligonucleotide
  Sense strand starting at position 3159 of SEQ ID NO: 585234
cgucgccuaaccugagaaa

SEQ ID NO: 623773 - RNA, 19 nt, Artificial Sequence
  Description of Artificial Sequence: Synthetic oligonucleotide
  Antisense strand to SEQ ID NO: 623772
uuucucagguuaggcgacg

SEQ ID NO: 623774 - RNA, 19 nt, Artificial Sequence
  Description of Artificial Sequence: Synthetic oligonucleotide
  Sense strand starting at position 3160 of SEQ ID NO: 585234
gucgccuaaccugagaaau

SEQ ID NO: 623775 - RNA, 19 nt, Artificial Sequence
  Description of Artificial Sequence: Synthetic oligonucleotide
  Antisense strand to SEQ ID NO: 623774
auuucucagguuaggcgac

SEQ ID NO: 623776 - RNA, 19 nt, Artificial Sequence
  Description of Artificial Sequence: Synthetic oligonucleotide
  Sense strand starting at position 3162 of SEQ ID NO: 585234
cgccuaaccugagaaauca

SEQ ID NO: 623777 - RNA, 19 nt, Artificial Sequence
  Description of Artificial Sequence: Synthetic oligonucleotide
  Antisense strand to SEQ ID NO: 623776
ugauuucucagguuaggcg

SEQ ID NO: 623778 - RNA, 19 nt, Artificial Sequence
  Description of Artificial Sequence: Synthetic oligonucleotide
  Sense strand starting at position 3179 of SEQ ID NO: 585234
caaggauuucugcgucgug

SEQ ID NO: 623779 - RNA, 19 nt, Artificial Sequence
  Description of Artificial Sequence: Synthetic oligonucleotide
  Antisense strand to SEQ ID NO: 623778
cacgacgcagaaauccuug

SEQ ID NO: 623780 - RNA, 19 nt, Artificial Sequence
  Description of Artificial Sequence: Synthetic oligonucleotide
  Sense strand starting at position 3260 of SEQ ID NO: 585234
gcaggagcucucggugaga

SEQ ID NO: 623781 - RNA, 19 nt, Artificial Sequence
  Description of Artificial Sequence: Synthetic oligonucleotide
  Antisense strand to SEQ ID NO: 623780
ucucaccgagagcuccugc

SEQ ID NO: 623782 - RNA, 19 nt, Artificial Sequence
  Description of Artificial Sequence: Synthetic oligonucleotide
  Sense strand starting at position 3496 of SEQ ID NO: 585234
gugguucaagcgcaguaau

SEQ ID NO: 623783 - RNA, 19 nt, Artificial Sequence
  Description of Artificial Sequence: Synthetic oligonucleotide
  Antisense strand to SEQ ID NO: 623782
auuacugcgcuugaaccac

SEQ ID NO: 623784 - RNA, 19 nt, Artificial Sequence
  Description of Artificial Sequence: Synthetic oligonucleotide
  Sense strand starting at position 3619 of SEQ ID NO: 585234
aauggaaauugugcgaaca

SEQ ID NO: 623785 - RNA, 19 nt, Artificial Sequence
  Description of Artificial Sequence: Synthetic oligonucleotide
  Antisense strand to SEQ ID NO: 623784
uguucgcacaauuuccauu

SEQ ID NO: 623786 - RNA, 19 nt, Artificial Sequence
  Description of Artificial Sequence: Synthetic oligonucleotide
  Sense strand starting at position 3635 of SEQ ID NO: 585234
acagcugucaacgaagagu

SEQ ID NO: 623787 - RNA, 19 nt, Artificial Sequence
  Description of Artificial Sequence: Synthetic oligonucleotide
  Antisense strand to SEQ ID NO: 623786
acucuucguugacagcugu

SEQ ID NO: 623788 - RNA, 19 nt, Artificial Sequence
  Description of Artificial Sequence: Synthetic oligonucleotide
  Sense strand starting at position 3879 of SEQ ID NO: 585234
ccaggcucuagguaaaugu

SEQ ID NO: 623789 - RNA, 19 nt, Artificial Sequence
  Description of Artificial Sequence: Synthetic oligonucleotide
  Antisense strand to SEQ ID NO: 623788
acauuuaccuagagccugg

SEQ ID NO: 623790 - RNA, 19 nt, Artificial Sequence
  Description of Artificial Sequence: Synthetic oligonucleotide
  Sense strand starting at position 3918 of SEQ ID NO: 585234
uugguugaguuucuccgaa

SEQ ID NO: 623791 - RNA, 19 nt, Artificial Sequence
  Description of Artificial Sequence: Synthetic oligonucleotide
  Antisense strand to SEQ ID NO: 623790
uucggagaaacucaaccaa

SEQ ID NO: 623792 - RNA, 19 nt, Artificial Sequence
  Description of Artificial Sequence: Synthetic oligonucleotide
  Sense strand starting at position 3920 of SEQ ID NO: 585234
gguugaguuucuccgaaga

SEQ ID NO: 623793 - RNA, 19 nt, Artificial Sequence
  Description of Artificial Sequence: Synthetic oligonucleotide
  Antisense strand to SEQ ID NO: 623792
ucuucggagaaacucaacc

SEQ ID NO: 623794 - RNA, 19 nt, Artificial Sequence
  Description of Artificial Sequence: Synthetic oligonucleotide
  Sense strand starting at position 54 of SEQ ID NO: 585235
gagaaucacugaccuguau

SEQ ID NO: 623795 - RNA, 19 nt, Artificial Sequence
  Description of Artificial Sequence: Synthetic oligonucleotide
  Antisense strand to SEQ ID NO: 623794
auacaggucagugauucuc

SEQ ID NO: 623796 - RNA, 19 nt, Artificial Sequence
  Description of Artificial Sequence: Synthetic oligonucleotide
  Sense strand starting at position 163 of SEQ ID NO: 585235
ggccaucaucaggguagau

SEQ ID NO: 623797 - RNA, 19 nt, Artificial Sequence
  Description of Artificial Sequence: Synthetic oligonucleotide
  Antisense strand to SEQ ID NO: 623796
aucuacccugaugauggcc

SEQ ID NO: 623798 - RNA, 19 nt, Artificial Sequence
  Description of Artificial Sequence: Synthetic oligonucleotide
  Sense strand starting at position 173 of SEQ ID NO: 585235
aggguagauuaaucuacua

SEQ ID NO: 623799 - RNA, 19 nt, Artificial Sequence
  Description of Artificial Sequence: Synthetic oligonucleotide
  Antisense strand to SEQ ID NO: 623798
uaguagauuaaucuacccu

SEQ ID NO: 623800 - RNA, 19 nt, Artificial Sequence
  Description of Artificial Sequence: Synthetic oligonucleotide
  Sense strand starting at position 216 of SEQ ID NO: 585235
ccagacuggucuccuccaa

SEQ ID NO: 623801 - RNA, 19 nt, Artificial Sequence
  Description of Artificial Sequence: Synthetic oligonucleotide
  Antisense strand to SEQ ID NO: 623800
uuggaggagaccagucugg

SEQ ID NO: 623802 - RNA, 19 nt, Artificial Sequence
  Description of Artificial Sequence: Synthetic oligonucleotide
  Sense strand starting at position 509 of SEQ ID NO: 585235
ucucucaaccugggacauu

SEQ ID NO: 623803 - RNA, 19 nt, Artificial Sequence
  Description of Artificial Sequence: Synthetic oligonucleotide
  Antisense strand to SEQ ID NO: 623802
aaugucccagguugagaga

SEQ ID NO: 623804 - RNA, 19 nt, Artificial Sequence
  Description of Artificial Sequence: Synthetic oligonucleotide
  Sense strand starting at position 520 of SEQ ID NO: 585235
gggacauuauucucuccau

SEQ ID NO: 623805 - RNA, 19 nt, Artificial Sequence
  Description of Artificial Sequence: Synthetic oligonucleotide
  Antisense strand to SEQ ID NO: 623804
auggagagaauaauguccc

SEQ ID NO: 623806 - RNA, 19 nt, Artificial Sequence
  Description of Artificial Sequence: Synthetic oligonucleotide
  Sense strand starting at position 605 of SEQ ID NO: 585235
ucuucagagcuggguuaga

SEQ ID NO: 623807 - RNA, 19 nt, Artificial Sequence
  Description of Artificial Sequence: Synthetic oligonucleotide
  Antisense strand to SEQ ID NO: 623806
ucuaacccagcucugaaga

SEQ ID NO: 623808 - RNA, 19 nt, Artificial Sequence
  Description of Artificial Sequence: Synthetic oligonucleotide
  Sense strand starting at position 777 of SEQ ID NO: 585235
aggugcuuagaaggaauua

SEQ ID NO: 623809 - RNA, 19 nt, Artificial Sequence
  Description of Artificial Sequence: Synthetic oligonucleotide
  Antisense strand to SEQ ID NO: 623808
uaauuccuucuaagcaccu

SEQ ID NO: 623810 - RNA, 19 nt, Artificial Sequence
  Description of Artificial Sequence: Synthetic oligonucleotide
  Sense strand starting at position 847 of SEQ ID NO: 585235
uggagcuaauucucucaaa

SEQ ID NO: 623811 - RNA, 19 nt, Artificial Sequence
  Description of Artificial Sequence: Synthetic oligonucleotide
  Antisense strand to SEQ ID NO: 623810
uuugagagaauuagcucca

SEQ ID NO: 623812 - RNA, 19 nt, Artificial Sequence
  Description of Artificial Sequence: Synthetic oligonucleotide
  Sense strand starting at position 904 of SEQ ID NO: 585235
aagugugugccagauuauc

SEQ ID NO: 623813 - RNA, 19 nt, Artificial Sequence
  Description of Artificial Sequence: Synthetic oligonucleotide
  Antisense strand to SEQ ID NO: 623812
gauaaucuggcacacacuu

SEQ ID NO: 623814 - RNA, 19 nt, Artificial Sequence
  Description of Artificial Sequence: Synthetic oligonucleotide
  Sense strand starting at position 974 of SEQ ID NO: 585235
cccaacugacaguggaauu

SEQ ID NO: 623815 - RNA, 19 nt, Artificial Sequence
  Description of Artificial Sequence: Synthetic oligonucleotide
  Antisense strand to SEQ ID NO: 623814
aauuccacugucaguuggg

SEQ ID NO: 623816 - RNA, 19 nt, Artificial Sequence
  Description of Artificial Sequence: Synthetic oligonucleotide
  Sense strand starting at position 1006 of SEQ ID NO: 585235
auaauaguuugaccucaga

SEQ ID NO: 623817 - RNA, 19 nt, Artificial Sequence
  Description of Artificial Sequence: Synthetic oligonucleotide
  Antisense strand to SEQ ID NO: 623816
ucugaggucaaacuauuau

SEQ ID NO: 623818 - RNA, 19 nt, Artificial Sequence
  Description of Artificial Sequence: Synthetic oligonucleotide
  Sense strand starting at position 1145 of SEQ ID NO: 585235
guaucuugaagguggagaa

SEQ ID NO: 623819 - RNA, 19 nt, Artificial Sequence
  Description of Artificial Sequence: Synthetic oligonucleotide
  Antisense strand to SEQ ID NO: 623818
uucuccaccuucaagauac

SEQ ID NO: 623820 - RNA, 19 nt, Artificial Sequence
  Description of Artificial Sequence: Synthetic oligonucleotide
  Sense strand starting at position 1318 of SEQ ID NO: 585235
aggagugagucugucauca

SEQ ID NO: 623821 - RNA, 19 nt, Artificial Sequence
  Description of Artificial Sequence: Synthetic oligonucleotide
  Antisense strand to SEQ ID NO: 623820
ugaugacagacucacuccu

SEQ ID NO: 623822 - RNA, 19 nt, Artificial Sequence
  Description of Artificial Sequence: Synthetic oligonucleotide
  Sense strand starting at position 2059 of SEQ ID NO: 585235
gcgcgggagcguuugacau

SEQ ID NO: 623823 - RNA, 19 nt, Artificial Sequence
  Description of Artificial Sequence: Synthetic oligonucleotide
  Antisense strand to SEQ ID NO: 623822
augucaaacgcucccgcgc

SEQ ID NO: 623824 - RNA, 19 nt, Artificial Sequence
  Description of Artificial Sequence: Synthetic oligonucleotide
  Sense strand starting at position 2065 of SEQ ID NO: 585235
gagcguuugacauaaugga

SEQ ID NO: 623825 - RNA, 19 nt, Artificial Sequence
  Description of Artificial Sequence: Synthetic oligonucleotide
  Antisense strand to SEQ ID NO: 623824
uccauuaugucaaacgcuc

SEQ ID NO: 623826 - RNA, 19 nt, Artificial Sequence
  Description of Artificial Sequence: Synthetic oligonucleotide
  Sense strand starting at position 2069 of SEQ ID NO: 585235
guuugacauaauggagcuu

SEQ ID NO: 623827 - RNA, 19 nt, Artificial Sequence
  Description of Artificial Sequence: Synthetic oligonucleotide
  Antisense strand to SEQ ID NO: 623826
aagcuccauuaugucaaac

SEQ ID NO: 623828 - RNA, 19 nt, Artificial Sequence
  Description of Artificial Sequence: Synthetic oligonucleotide
  Sense strand starting at position 2286 of SEQ ID NO: 585235
acgauaauuguaggaguuu

SEQ ID NO: 623829 - RNA, 19 nt, Artificial Sequence
  Description of Artificial Sequence: Synthetic oligonucleotide
  Antisense strand to SEQ ID NO: 623828
aaacuccuacaauuaucgu

SEQ ID NO: 623830 - RNA, 19 nt, Artificial Sequence
  Description of Artificial Sequence: Synthetic oligonucleotide
  Sense strand starting at position 2327 of SEQ ID NO: 585235
accuuuacaucucuguuga

SEQ ID NO: 623831 - RNA, 19 nt, Artificial Sequence
  Description of Artificial Sequence: Synthetic oligonucleotide
  Antisense strand to SEQ ID NO: 623830
ucaacagagauguaaaggu

SEQ ID NO: 623832 - RNA, 19 nt, Artificial Sequence
  Description of Artificial Sequence: Synthetic oligonucleotide
  Sense strand starting at position 2426 of SEQ ID NO: 585235
uguggaguccuauagucaa

SEQ ID NO: 623833 - RNA, 19 nt, Artificial Sequence
  Description of Artificial Sequence: Synthetic oligonucleotide
  Antisense strand to SEQ ID NO: 623832
uugacuauaggacuccaca

SEQ ID NO: 623834 - RNA, 19 nt, Artificial Sequence
  Description of Artificial Sequence: Synthetic oligonucleotide
  Sense strand starting at position 2429 of SEQ ID NO: 585235
ggaguccuauagucaauac

SEQ ID NO: 623835 - RNA, 19 nt, Artificial Sequence
  Description of Artificial Sequence: Synthetic oligonucleotide
  Antisense strand to SEQ ID NO: 623834
guauugacuauaggacucc

SEQ ID NO: 623836 - RNA, 19 nt, Artificial Sequence
  Description of Artificial Sequence: Synthetic oligonucleotide
  Sense strand starting at position 2470 of SEQ ID NO: 585235
augccagugccucauaaug

SEQ ID NO: 623837 - RNA, 19 nt, Artificial Sequence
  Description of Artificial Sequence: Synthetic oligonucleotide
  Antisense strand to SEQ ID NO: 623836
cauuaugaggcacuggcau

SEQ ID NO: 623838 - RNA, 19 nt, Artificial Sequence
  Description of Artificial Sequence: Synthetic oligonucleotide
  Sense strand starting at position 2560 of SEQ ID NO: 585235
guaacuaugugcucaaaga

SEQ ID NO: 623839 - RNA, 19 nt, Artificial Sequence
  Description of Artificial Sequence: Synthetic oligonucleotide
  Antisense strand to SEQ ID NO: 623838
ucuuugagcacauaguuac

SEQ ID NO: 623840 - RNA, 19 nt, Artificial Sequence
  Description of Artificial Sequence: Synthetic oligonucleotide
  Sense strand starting at position 2642 of SEQ ID NO: 585235
uugugauacuucccacuug

SEQ ID NO: 623841 - RNA, 19 nt, Artificial Sequence
  Description of Artificial Sequence: Synthetic oligonucleotide
  Antisense strand to SEQ ID NO: 623840
caagugggaaguaucacaa

SEQ ID NO: 623842 - RNA, 19 nt, Artificial Sequence
  Description of Artificial Sequence: Synthetic oligonucleotide
  Sense strand starting at position 2728 of SEQ ID NO: 585235
ccgcucuagagaugaagga

SEQ ID NO: 623843 - RNA, 19 nt, Artificial Sequence
  Description of Artificial Sequence: Synthetic oligonucleotide
  Antisense strand to SEQ ID NO: 623842
uccuucaucucuagagcgg

SEQ ID NO: 623844 - RNA, 19 nt, Artificial Sequence
  Description of Artificial Sequence: Synthetic oligonucleotide
  Sense strand starting at position 2795 of SEQ ID NO: 585235
guuuaagaucaagguuugu

SEQ ID NO: 623845 - RNA, 19 nt, Artificial Sequence
  Description of Artificial Sequence: Synthetic oligonucleotide
  Antisense strand to SEQ ID NO: 623844
acaaaccuugaucuuaaac

SEQ ID NO: 623846 - RNA, 19 nt, Artificial Sequence
  Description of Artificial Sequence: Synthetic oligonucleotide
  Sense strand starting at position 2799 of SEQ ID NO: 585235
aagaucaagguuugucuaa

SEQ ID NO: 623847 - RNA, 19 nt, Artificial Sequence
  Description of Artificial Sequence: Synthetic oligonucleotide
  Antisense strand to SEQ ID NO: 623846
uuagacaaaccuugaucuu

SEQ ID NO: 623848 - RNA, 19 nt, Artificial Sequence
  Description of Artificial Sequence: Synthetic oligonucleotide
  Sense strand starting at position 2801 of SEQ ID NO: 585235
gaucaagguuugucuaacu

SEQ ID NO: 623849 - RNA, 19 nt, Artificial Sequence
  Description of Artificial Sequence: Synthetic oligonucleotide
  Antisense strand to SEQ ID NO: 623848
aguuagacaaaccuugauc

SEQ ID NO: 623850 - RNA, 19 nt, Artificial Sequence
  Description of Artificial Sequence: Synthetic oligonucleotide
  Sense strand starting at position 2877 of SEQ ID NO: 585235
guuggacuagcucacuaua

SEQ ID NO: 623851 - RNA, 19 nt, Artificial Sequence
  Description of Artificial Sequence: Synthetic oligonucleotide
  Antisense strand to SEQ ID NO: 623850
uauagugagcuaguccaac

SEQ ID NO: 623852 - RNA, 19 nt, Artificial Sequence
  Description of Artificial Sequence: Synthetic oligonucleotide
  Sense strand starting at position 2879 of SEQ ID NO: 585235
uggacuagcucacuauagu

SEQ ID NO: 623853 - RNA, 19 nt, Artificial Sequence
  Description of Artificial Sequence: Synthetic oligonucleotide
  Antisense strand to SEQ ID NO: 623852
acuauagugagcuagucca

SEQ ID NO: 623854 - RNA, 19 nt, Artificial Sequence
  Description of Artificial Sequence: Synthetic oligonucleotide
  Sense strand starting at position 2880 of SEQ ID NO: 585235
ggacuagcucacuauagua

SEQ ID NO: 623855 - RNA, 19 nt, Artificial Sequence
  Description of Artificial Sequence: Synthetic oligonucleotide
  Antisense strand to SEQ ID NO: 623854
uacuauagugagcuagucc

SEQ ID NO: 623856 - RNA, 19 nt, Artificial Sequence
  Description of Artificial Sequence: Synthetic oligonucleotide
  Sense strand starting at position 3163 of SEQ ID NO: 585235
uuuccaugccuguacuaca

SEQ ID NO: 623857 - RNA, 19 nt, Artificial Sequence
  Description of Artificial Sequence: Synthetic oligonucleotide
  Antisense strand to SEQ ID NO: 623856
uguaguacaggcauggaaa

SEQ ID NO: 623858 - RNA, 19 nt, Artificial Sequence
  Description of Artificial Sequence: Synthetic oligonucleotide
  Sense strand starting at position 3371 of SEQ ID NO: 585235
ggauuugucucuuuguauc

SEQ ID NO: 623859 - RNA, 19 nt, Artificial Sequence
  Description of Artificial Sequence: Synthetic oligonucleotide
  Antisense strand to SEQ ID NO: 623858
gauacaaagagacaaaucc

SEQ ID NO: 623860 - RNA, 19 nt, Artificial Sequence
  Description of Artificial Sequence: Synthetic oligonucleotide
  Sense strand starting at position 3404 of SEQ ID NO: 585235
guacuuauuuauccugcua

SEQ ID NO: 623861 - RNA, 19 nt, Artificial Sequence
  Description of Artificial Sequence: Synthetic oligonucleotide
  Antisense strand to SEQ ID NO: 623860
uagcaggauaaauaaguac

SEQ ID NO: 623862 - RNA, 19 nt, Artificial Sequence
  Description of Artificial Sequence: Synthetic oligonucleotide
  Sense strand starting at position 3411 of SEQ ID NO: 585235
uuuauccugcuaggaauua

SEQ ID NO: 623863 - RNA, 19 nt, Artificial Sequence
  Description of Artificial Sequence: Synthetic oligonucleotide
  Antisense strand to SEQ ID NO: 623862
uaauuccuagcaggauaaa

SEQ ID NO: 623864 - RNA, 19 nt, Artificial Sequence
  Description of Artificial Sequence: Synthetic oligonucleotide
  Sense strand starting at position 3423 of SEQ ID NO: 585235
ggaauuauguuucuuggca

SEQ ID NO: 623865 - RNA, 19 nt, Artificial Sequence
  Description of Artificial Sequence: Synthetic oligonucleotide
  Antisense strand to SEQ ID NO: 623864
ugccaagaaacauaauucc

SEQ ID NO: 623866 - RNA, 19 nt, Artificial Sequence
  Description of Artificial Sequence: Synthetic oligonucleotide
  Sense strand starting at position 3424 of SEQ ID NO: 585235
gaauuauguuucuuggcaa

SEQ ID NO: 623867 - RNA, 19 nt, Artificial Sequence
  Description of Artificial Sequence: Synthetic oligonucleotide
  Antisense strand to SEQ ID NO: 623866
uugccaagaaacauaauuc

SEQ ID NO: 623868 - RNA, 19 nt, Artificial Sequence
  Description of Artificial Sequence: Synthetic oligonucleotide
  Sense strand starting at position 3427 of SEQ ID NO: 585235
uuauguuucuuggcaacaa

SEQ ID NO: 623869 - RNA, 19 nt, Artificial Sequence
  Description of Artificial Sequence: Synthetic oligonucleotide
  Antisense strand to SEQ ID NO: 623868
uuguugccaagaaacauaa

SEQ ID NO: 623870 - RNA, 19 nt, Artificial Sequence
  Description of Artificial Sequence: Synthetic oligonucleotide
  Sense strand starting at position 3431 of SEQ ID NO: 585235
guuucuuggcaacaagauu

SEQ ID NO: 623871 - RNA, 19 nt, Artificial Sequence
  Description of Artificial Sequence: Synthetic oligonucleotide
  Antisense strand to SEQ ID NO: 623870
aaucuuguugccaagaaac

SEQ ID NO: 623872 - RNA, 19 nt, Artificial Sequence
  Description of Artificial Sequence: Synthetic oligonucleotide
  Sense strand starting at position 3443 of SEQ ID NO: 585235
caagauugggugugugaau

SEQ ID NO: 623873 - RNA, 19 nt, Artificial Sequence
  Description of Artificial Sequence: Synthetic oligonucleotide
  Antisense strand to SEQ ID NO: 623872
auucacacacccaaucuug

SEQ ID NO: 623874 - RNA, 19 nt, Artificial Sequence
  Description of Artificial Sequence: Synthetic oligonucleotide
  Sense strand starting at position 55 of SEQ ID NO: 585236
ggauaaaccuagguagcua

SEQ ID NO: 623875 - RNA, 19 nt, Artificial Sequence
  Description of Artificial Sequence: Synthetic oligonucleotide
  Antisense strand to SEQ ID NO: 623874
uagcuaccuagguuuaucc

SEQ ID NO: 623876 - RNA, 19 nt, Artificial Sequence
  Description of Artificial Sequence: Synthetic oligonucleotide
  Sense strand starting at position 72 of SEQ ID NO: 585236
uacauauuaguuugaggaa

SEQ ID NO: 623877 - RNA, 19 nt, Artificial Sequence
  Description of Artificial Sequence: Synthetic oligonucleotide
  Antisense strand to SEQ ID NO: 623876
uuccucaaacuaauaugua

SEQ ID NO: 623878 - RNA, 19 nt, Artificial Sequence
  Description of Artificial Sequence: Synthetic oligonucleotide
  Sense strand starting at position 114 of SEQ ID NO: 585236
cuguaucccugacuuuaga

SEQ ID NO: 623879 - RNA, 19 nt, Artificial Sequence
  Description of Artificial Sequence: Synthetic oligonucleotide
  Antisense strand to SEQ ID NO: 623878
ucuaaagucagggauacag

SEQ ID NO: 623880 - RNA, 19 nt, Artificial Sequence
  Description of Artificial Sequence: Synthetic oligonucleotide
  Sense strand starting at position 231 of SEQ ID NO: 585236
auugaacugcacuaaguaa

SEQ ID NO: 623881 - RNA, 19 nt, Artificial Sequence
  Description of Artificial Sequence: Synthetic oligonucleotide
  Antisense strand to SEQ ID NO: 623880
uuacuuagugcaguucaau

SEQ ID NO: 623882 - RNA, 19 nt, Artificial Sequence
  Description of Artificial Sequence: Synthetic oligonucleotide
  Sense strand starting at position 254 of SEQ ID NO: 585236
gaguaaacuuggcucauca

SEQ ID NO: 623883 - RNA, 19 nt, Artificial Sequence
  Description of Artificial Sequence: Synthetic oligonucleotide
  Antisense strand to SEQ ID NO: 623882
ugaugagccaaguuuacuc

SEQ ID NO: 623884 - RNA, 19 nt, Artificial Sequence
  Description of Artificial Sequence: Synthetic oligonucleotide
  Sense strand starting at position 256 of SEQ ID NO: 585236
guaaacuuggcucaucaua

SEQ ID NO: 623885 - RNA, 19 nt, Artificial Sequence
  Description of Artificial Sequence: Synthetic oligonucleotide
  Antisense strand to SEQ ID NO: 623884
uaugaugagccaaguuuac

SEQ ID NO: 623886 - RNA, 19 nt, Artificial Sequence
  Description of Artificial Sequence: Synthetic oligonucleotide
  Sense strand starting at position 412 of SEQ ID NO: 585236
uccugcacgacugaugaaa

SEQ ID NO: 623887 - RNA, 19 nt, Artificial Sequence
  Description of Artificial Sequence: Synthetic oligonucleotide
  Antisense strand to SEQ ID NO: 623886
uuucaucagucgugcagga

SEQ ID NO: 623888 - RNA, 19 nt, Artificial Sequence
  Description of Artificial Sequence: Synthetic oligonucleotide
  Sense strand starting at position 436 of SEQ ID NO: 585236
uccaguuaagcacaguaau

SEQ ID NO: 623889 - RNA, 19 nt, Artificial Sequence
  Description of Artificial Sequence: Synthetic oligonucleotide
  Antisense strand to SEQ ID NO: 623888
auuacugugcuuaacugga

SEQ ID NO: 623890 - RNA, 19 nt, Artificial Sequence
  Description of Artificial Sequence: Synthetic oligonucleotide
  Sense strand starting at position 472 of SEQ ID NO: 585236
gggcgcuuccguuucuaaa

SEQ ID NO: 623891 - RNA, 19 nt, Artificial Sequence
  Description of Artificial Sequence: Synthetic oligonucleotide
  Antisense strand to SEQ ID NO: 623890
uuuagaaacggaagcgccc

SEQ ID NO: 623892 - RNA, 19 nt, Artificial Sequence
  Description of Artificial Sequence: Synthetic oligonucleotide
  Sense strand starting at position 960 of SEQ ID NO: 585236
uacgguuaugacuaauuag

SEQ ID NO: 623893 - RNA, 19 nt, Artificial Sequence
  Description of Artificial Sequence: Synthetic oligonucleotide
  Antisense strand to SEQ ID NO: 623892
cuaauuagucauaaccgua

SEQ ID NO: 623894 - RNA, 19 nt, Artificial Sequence
  Description of Artificial Sequence: Synthetic oligonucleotide
  Sense strand starting at position 1073 of SEQ ID NO: 585236
cuuugauagauugaguagu

SEQ ID NO: 623895 - RNA, 19 nt, Artificial Sequence
  Description of Artificial Sequence: Synthetic oligonucleotide
  Antisense strand to SEQ ID NO: 623894
acuacucaaucuaucaaag

SEQ ID NO: 623896 - RNA, 19 nt, Artificial Sequence
  Description of Artificial Sequence: Synthetic oligonucleotide
  Sense strand starting at position 1075 of SEQ ID NO: 585236
uugauagauugaguaguaa

SEQ ID NO: 623897 - RNA, 19 nt, Artificial Sequence
  Description of Artificial Sequence: Synthetic oligonucleotide
  Antisense strand to SEQ ID NO: 623896
uuacuacucaaucuaucaa

SEQ ID NO: 623898 - RNA, 19 nt, Artificial Sequence
  Description of Artificial Sequence: Synthetic oligonucleotide
  Sense strand starting at position 1086 of SEQ ID NO: 585236
aguaguaaauucuuacuag

SEQ ID NO: 623899 - RNA, 19 nt, Artificial Sequence
  Description of Artificial Sequence: Synthetic oligonucleotide
  Antisense strand to SEQ ID NO: 623898
cuaguaagaauuuacuacu

SEQ ID NO: 623900 - RNA, 19 nt, Artificial Sequence
  Description of Artificial Sequence: Synthetic oligonucleotide
  Sense strand starting at position 1089 of SEQ ID NO: 585236
aguaaauucuuacuagaug

SEQ ID NO: 623901 - RNA, 19 nt, Artificial Sequence
  Description of Artificial Sequence: Synthetic oligonucleotide
  Antisense strand to SEQ ID NO: 623900
caucuaguaagaauuuacu

SEQ ID NO: 623902 - RNA, 19 nt, Artificial Sequence
  Description of Artificial Sequence: Synthetic oligonucleotide
  Sense strand starting at position 1100 of SEQ ID NO: 585236
acuagaugaggcuauguua

SEQ ID NO: 623903 - RNA, 19 nt, Artificial Sequence
  Description of Artificial Sequence: Synthetic oligonucleotide
  Antisense strand to SEQ ID NO: 623902
uaacauagccucaucuagu

SEQ ID NO: 623904 - RNA, 19 nt, Artificial Sequence
  Description of Artificial Sequence: Synthetic oligonucleotide
  Sense strand starting at position 1103 of SEQ ID NO: 585236
agaugaggcuauguuaaag

SEQ ID NO: 623905 - RNA, 19 nt, Artificial Sequence
  Description of Artificial Sequence: Synthetic oligonucleotide
  Antisense strand to SEQ ID NO: 623904
cuuuaacauagccucaucu

SEQ ID NO: 623906 - RNA, 19 nt, Artificial Sequence
  Description of Artificial Sequence: Synthetic oligonucleotide
  Sense strand starting at position 1307 of SEQ ID NO: 585236
gcagucuuuggcuucguca

SEQ ID NO: 623907 - RNA, 19 nt, Artificial Sequence
  Description of Artificial Sequence: Synthetic oligonucleotide
  Antisense strand to SEQ ID NO: 623906
ugacgaagccaaagacugc

SEQ ID NO: 623908 - RNA, 19 nt, Artificial Sequence
  Description of Artificial Sequence: Synthetic oligonucleotide
  Sense strand starting at position 1423 of SEQ ID NO: 585236
ggaggauuuccuuguugcc

SEQ ID NO: 623909 - RNA, 19 nt, Artificial Sequence
  Description of Artificial Sequence: Synthetic oligonucleotide
  Antisense strand to SEQ ID NO: 623908
ggcaacaaggaaauccucc

SEQ ID NO: 623910 - RNA, 19 nt, Artificial Sequence
  Description of Artificial Sequence: Synthetic oligonucleotide
  Sense strand starting at position 1585 of SEQ ID NO: 585236
cuuguugagcuugaaggaa

SEQ ID NO: 623911 - RNA, 19 nt, Artificial Sequence
  Description of Artificial Sequence: Synthetic oligonucleotide
  Antisense strand to SEQ ID NO: 623910
uuccuucaagcucaacaag

SEQ ID NO: 623912 - RNA, 19 nt, Artificial Sequence
  Description of Artificial Sequence: Synthetic oligonucleotide
  Sense strand starting at position 1948 of SEQ ID NO: 585236
gugguauaaaccugacgaa

SEQ ID NO: 623913 - RNA, 19 nt, Artificial Sequence
  Description of Artificial Sequence: Synthetic oligonucleotide
  Antisense strand to SEQ ID NO: 623912
uucgucagguuuauaccac

SEQ ID NO: 623914 - RNA, 19 nt, Artificial Sequence
  Description of Artificial Sequence: Synthetic oligonucleotide
  Sense strand starting at position 2020 of SEQ ID NO: 585236
ccgugauuggugcccguca

SEQ ID NO: 623915 - RNA, 19 nt, Artificial Sequence
  Description of Artificial Sequence: Synthetic oligonucleotide
  Antisense strand to SEQ ID NO: 623914
ugacgggcaccaaucacgg

SEQ ID NO: 623916 - RNA, 19 nt, Artificial Sequence
  Description of Artificial Sequence: Synthetic oligonucleotide
  Sense strand starting at position 2180 of SEQ ID NO: 585236
ccucauugugaaggaaauu

SEQ ID NO: 623917 - RNA, 19 nt, Artificial Sequence
  Description of Artificial Sequence: Synthetic oligonucleotide
  Antisense strand to SEQ ID NO: 623916
aauuuccuucacaaugagg

SEQ ID NO: 623918 - RNA, 19 nt, Artificial Sequence
  Description of Artificial Sequence: Synthetic oligonucleotide
  Sense strand starting at position 2191 of SEQ ID NO: 585236
aggaaauuguaggcagacu

SEQ ID NO: 623919 - RNA, 19 nt, Artificial Sequence
  Description of Artificial Sequence: Synthetic oligonucleotide
  Antisense strand to SEQ ID NO: 623918
agucugccuacaauuuccu

SEQ ID NO: 623920 - RNA, 19 nt, Artificial Sequence
  Description of Artificial Sequence: Synthetic oligonucleotide
  Sense strand starting at position 2491 of SEQ ID NO: 585236
gagcgaugugucucgcgaa

SEQ ID NO: 623921 - RNA, 19 nt, Artificial Sequence
  Description of Artificial Sequence: Synthetic oligonucleotide
  Antisense strand to SEQ ID NO: 623920
uucgcgagacacaucgcuc

SEQ ID NO: 623922 - RNA, 19 nt, Artificial Sequence
  Description of Artificial Sequence: Synthetic oligonucleotide
  Sense strand starting at position 2493 of SEQ ID NO: 585236
gcgaugugucucgcgaaua

SEQ ID NO: 623923 - RNA, 19 nt, Artificial Sequence
  Description of Artificial Sequence: Synthetic oligonucleotide
  Antisense strand to SEQ ID NO: 623922
uauucgcgagacacaucgc

SEQ ID NO: 623924 - RNA, 19 nt, Artificial Sequence
  Description of Artificial Sequence: Synthetic oligonucleotide
  Sense strand starting at position 2503 of SEQ ID NO: 585236
ucgcgaauaccuuucacgu

SEQ ID NO: 623925 - RNA, 19 nt, Artificial Sequence
  Description of Artificial Sequence: Synthetic oligonucleotide
  Antisense strand to SEQ ID NO: 623924
acgugaaagguauucgcga

SEQ ID NO: 623926 - RNA, 19 nt, Artificial Sequence
  Description of Artificial Sequence: Synthetic oligonucleotide
  Sense strand starting at position 2504 of SEQ ID NO: 585236
cgcgaauaccuuucacguc

SEQ ID NO: 623927 - RNA, 19 nt, Artificial Sequence
  Description of Artificial Sequence: Synthetic oligonucleotide
  Antisense strand to SEQ ID NO: 623926
gacgugaaagguauucgcg

SEQ ID NO: 623928 - RNA, 19 nt, Artificial Sequence
  Description of Artificial Sequence: Synthetic oligonucleotide
  Sense strand starting at position 2525 of SEQ ID NO: 585236
acaagaaugaaucguagac

SEQ ID NO: 623929 - RNA, 19 nt, Artificial Sequence
  Description of Artificial Sequence: Synthetic oligonucleotide
  Antisense strand to SEQ ID NO: 623928
gucuacgauucauucuugu

SEQ ID NO: 623930 - RNA, 19 nt, Artificial Sequence
  Description of Artificial Sequence: Synthetic oligonucleotide
  Sense strand starting at position 2813 of SEQ ID NO: 585236
aaaugcuggguccacgaaa

SEQ ID NO: 623931 - RNA, 19 nt, Artificial Sequence
  Description of Artificial Sequence: Synthetic oligonucleotide
  Antisense strand to SEQ ID NO: 623930
uuucguggacccagcauuu

SEQ ID NO: 623932 - RNA, 19 nt, Artificial Sequence
  Description of Artificial Sequence: Synthetic oligonucleotide
  Sense strand starting at position 2858 of SEQ ID NO: 585236
gggaguuaaguccacuuag

SEQ ID NO: 623933 - RNA, 19 nt, Artificial Sequence
  Description of Artificial Sequence: Synthetic oligonucleotide
  Antisense strand to SEQ ID NO: 623932
cuaaguggacuuaacuccc

SEQ ID NO: 623934 - RNA, 19 nt, Artificial Sequence
  Description of Artificial Sequence: Synthetic oligonucleotide
  Sense strand starting at position 2883 of SEQ ID NO: 585236
agcaaacacgggugauaaa

SEQ ID NO: 623935 - RNA, 19 nt, Artificial Sequence
  Description of Artificial Sequence: Synthetic oligonucleotide
  Antisense strand to SEQ ID NO: 623934
uuuaucacccguguuugcu

SEQ ID NO: 623936 - RNA, 19 nt, Artificial Sequence
  Description of Artificial Sequence: Synthetic oligonucleotide
  Sense strand starting at position 2884 of SEQ ID NO: 585236
gcaaacacgggugauaaau

SEQ ID NO: 623937 - RNA, 19 nt, Artificial Sequence
  Description of Artificial Sequence: Synthetic oligonucleotide
  Antisense strand to SEQ ID NO: 623936
auuuaucacccguguuugc

SEQ ID NO: 623938 - RNA, 19 nt, Artificial Sequence
  Description of Artificial Sequence: Synthetic oligonucleotide
  Sense strand starting at position 2949 of SEQ ID NO: 585236
uuguuuguggcuguuaagu

SEQ ID NO: 623939 - RNA, 19 nt, Artificial Sequence
  Description of Artificial Sequence: Synthetic oligonucleotide
  Antisense strand to SEQ ID NO: 623938
acuuaacagccacaaacaa

SEQ ID NO: 623940 - RNA, 19 nt, Artificial Sequence
  Description of Artificial Sequence: Synthetic oligonucleotide
  Sense strand starting at position 3011 of SEQ ID NO: 585236
aucagagacucagcuaaug

SEQ ID NO: 623941 - RNA, 19 nt, Artificial Sequence
  Description of Artificial Sequence: Synthetic oligonucleotide
  Antisense strand to SEQ ID NO: 623940
cauuagcugagucucugau

SEQ ID NO: 623942 - RNA, 19 nt, Artificial Sequence
  Description of Artificial Sequence: Synthetic oligonucleotide
  Sense strand starting at position 3229 of SEQ ID NO: 585236
aguggucccagauaaguau

SEQ ID NO: 623943 - RNA, 19 nt, Artificial Sequence
  Description of Artificial Sequence: Synthetic oligonucleotide
  Antisense strand to SEQ ID NO: 623942
auacuuaucugggaccacu

SEQ ID NO: 623944 - RNA, 19 nt, Artificial Sequence
  Description of Artificial Sequence: Synthetic oligonucleotide
  Sense strand starting at position 3233 of SEQ ID NO: 585236
gucccagauaaguauugua

SEQ ID NO: 623945 - RNA, 19 nt, Artificial Sequence
  Description of Artificial Sequence: Synthetic oligonucleotide
  Antisense strand to SEQ ID NO: 623944
uacaauacuuaucugggac

SEQ ID NO: 623946 - RNA, 19 nt, Artificial Sequence
  Description of Artificial Sequence: Synthetic oligonucleotide
  Sense strand starting at position 3423 of SEQ ID NO: 585236
aguaaacccuuugugaaag

SEQ ID NO: 623947 - RNA, 19 nt, Artificial Sequence
  Description of Artificial Sequence: Synthetic oligonucleotide
  Antisense strand to SEQ ID NO: 623946
cuuucacaaaggguuuacu

SEQ ID NO: 623948 - RNA, 19 nt, Artificial Sequence
  Description of Artificial Sequence: Synthetic oligonucleotide
  Sense strand starting at position 3449 of SEQ ID NO: 585236
ccuuucuuaguguaauaag

SEQ ID NO: 623949 - RNA, 19 nt, Artificial Sequence
  Description of Artificial Sequence: Synthetic oligonucleotide
  Antisense strand to SEQ ID NO: 623948
cuuauuacacuaagaaagg

SEQ ID NO: 623950 - RNA, 19 nt, Artificial Sequence
  Description of Artificial Sequence: Synthetic oligonucleotide
  Sense strand starting at position 3595 of SEQ ID NO: 585236
augggaacgcuccaugcaa

SEQ ID NO: 623951 - RNA, 19 nt, Artificial Sequence
  Description of Artificial Sequence: Synthetic oligonucleotide
  Antisense strand to SEQ ID NO: 623950
uugcauggagcguucccau

SEQ ID NO: 623952 - RNA, 19 nt, Artificial Sequence
  Description of Artificial Sequence: Synthetic oligonucleotide
  Sense strand starting at position 3619 of SEQ ID NO: 585236
ggaugauagaucugcuuuc

SEQ ID NO: 623953 - RNA, 19 nt, Artificial Sequence
  Description of Artificial Sequence: Synthetic oligonucleotide
  Antisense strand to SEQ ID NO: 623952
gaaagcagaucuaucaucc

SEQ ID NO: 623954 - RNA, 19 nt, Artificial Sequence
  Description of Artificial Sequence: Synthetic oligonucleotide
  Sense strand starting at position 255 of SEQ ID NO: 585237
uuggaacguuuguuaugaa

SEQ ID NO: 623955 - RNA, 19 nt, Artificial Sequence
  Description of Artificial Sequence: Synthetic oligonucleotide
  Antisense strand to SEQ ID NO: 623954
uucauaacaaacguuccaa

SEQ ID NO: 623956 - RNA, 19 nt, Artificial Sequence
  Description of Artificial Sequence: Synthetic oligonucleotide
  Sense strand starting at position 295 of SEQ ID NO: 585237
agagcuuaggaaugacuuu

SEQ ID NO: 623957 - RNA, 19 nt, Artificial Sequence
  Description of Artificial Sequence: Synthetic oligonucleotide
  Antisense strand to SEQ ID NO: 623956
aaagucauuccuaagcucu

SEQ ID NO: 623958 - RNA, 19 nt, Artificial Sequence
  Description of Artificial Sequence: Synthetic oligonucleotide
  Sense strand starting at position 336 of SEQ ID NO: 585237
aggugacauguuuaaguca

SEQ ID NO: 623959 - RNA, 19 nt, Artificial Sequence
  Description of Artificial Sequence: Synthetic oligonucleotide
  Antisense strand to SEQ ID NO: 623958
ugacuuaaacaugucaccu

SEQ ID NO: 623960 - RNA, 19 nt, Artificial Sequence
  Description of Artificial Sequence: Synthetic oligonucleotide
  Sense strand starting at position 339 of SEQ ID NO: 585237
ugacauguuuaagucagaa

SEQ ID NO: 623961 - RNA, 19 nt, Artificial Sequence
  Description of Artificial Sequence: Synthetic oligonucleotide
  Antisense strand to SEQ ID NO: 623960
uucugacuuaaacauguca

SEQ ID NO: 623962 - RNA, 19 nt, Artificial Sequence
  Description of Artificial Sequence: Synthetic oligonucleotide
  Sense strand starting at position 401 of SEQ ID NO: 585237
guguuuauucaucucgugu

SEQ ID NO: 623963 - RNA, 19 nt, Artificial Sequence
  Description of Artificial Sequence: Synthetic oligonucleotide
  Antisense strand to SEQ ID NO: 623962
acacgagaugaauaaacac

SEQ ID NO: 623964 - RNA, 19 nt, Artificial Sequence
  Description of Artificial Sequence: Synthetic oligonucleotide
  Sense strand starting at position 512 of SEQ ID NO: 585237
aucgcuggagcucaugaau

SEQ ID NO: 623965 - RNA, 19 nt, Artificial Sequence
  Description of Artificial Sequence: Synthetic oligonucleotide
  Antisense strand to SEQ ID NO: 623964
auucaugagcuccagcgau

SEQ ID NO: 623966 - RNA, 19 nt, Artificial Sequence
  Description of Artificial Sequence: Synthetic oligonucleotide
  Sense strand starting at position 520 of SEQ ID NO: 585237
agcucaugaauucgagauc

SEQ ID NO: 623967 - RNA, 19 nt, Artificial Sequence
  Description of Artificial Sequence: Synthetic oligonucleotide
  Antisense strand to SEQ ID NO: 623966
gaucucgaauucaugagcu

SEQ ID NO: 623968 - RNA, 19 nt, Artificial Sequence
  Description of Artificial Sequence: Synthetic oligonucleotide
  Sense strand starting at position 544 of SEQ ID NO: 585237
gggcaucauagcggauaca

SEQ ID NO: 623969 - RNA, 19 nt, Artificial Sequence
  Description of Artificial Sequence: Synthetic oligonucleotide
  Antisense strand to SEQ ID NO: 623968
uguauccgcuaugaugccc

SEQ ID NO: 623970 - RNA, 19 nt, Artificial Sequence
  Description of Artificial Sequence: Synthetic oligonucleotide
  Sense strand starting at position 545 of SEQ ID NO: 585237
ggcaucauagcggauacaa

SEQ ID NO: 623971 - RNA, 19 nt, Artificial Sequence
  Description of Artificial Sequence: Synthetic oligonucleotide
  Antisense strand to SEQ ID NO: 623970
uuguauccgcuaugaugcc

SEQ ID NO: 623972 - RNA, 19 nt, Artificial Sequence
  Description of Artificial Sequence: Synthetic oligonucleotide
  Sense strand starting at position 737 of SEQ ID NO: 585237
acagaaugacacggucaua

SEQ ID NO: 623973 - RNA, 19 nt, Artificial Sequence
  Description of Artificial Sequence: Synthetic oligonucleotide
  Antisense strand to SEQ ID NO: 623972
uaugaccgugucauucugu

SEQ ID NO: 623974 - RNA, 19 nt, Artificial Sequence
  Description of Artificial Sequence: Synthetic oligonucleotide
  Sense strand starting at position 755 of SEQ ID NO: 585237
aucaaauuggcauguaaua

SEQ ID NO: 623975 - RNA, 19 nt, Artificial Sequence
  Description of Artificial Sequence: Synthetic oligonucleotide
  Antisense strand to SEQ ID NO: 623974
uauuacaugccaauuugau

SEQ ID NO: 623976 - RNA, 19 nt, Artificial Sequence
  Description of Artificial Sequence: Synthetic oligonucleotide
  Sense strand starting at position 803 of SEQ ID NO: 585237
uugucuugugcguugauag

SEQ ID NO: 623977 - RNA, 19 nt, Artificial Sequence
  Description of Artificial Sequence: Synthetic oligonucleotide
  Antisense strand to SEQ ID NO: 623976
cuaucaacgcacaagacaa

SEQ ID NO: 623978 - RNA, 19 nt, Artificial Sequence
  Description of Artificial Sequence: Synthetic oligonucleotide
  Sense strand starting at position 830 of SEQ ID NO: 585237
auuaaugccgaacacauua

SEQ ID NO: 623979 - RNA, 19 nt, Artificial Sequence
  Description of Artificial Sequence: Synthetic oligonucleotide
  Antisense strand to SEQ ID NO: 623978
uaauguguucggcauuaau

SEQ ID NO: 623980 - RNA, 19 nt, Artificial Sequence
  Description of Artificial Sequence: Synthetic oligonucleotide
  Sense strand starting at position 1111 of SEQ ID NO: 585237
cucgauuaggguugaggga

SEQ ID NO: 623981 - RNA, 19 nt, Artificial Sequence
  Description of Artificial Sequence: Synthetic oligonucleotide
  Antisense strand to SEQ ID NO: 623980
ucccucaacccuaaucgag

SEQ ID NO: 623982 - RNA, 19 nt, Artificial Sequence
  Description of Artificial Sequence: Synthetic oligonucleotide
  Sense strand starting at position 1126 of SEQ ID NO: 585237
gggagaacugcccgagauu

SEQ ID NO: 623983 - RNA, 19 nt, Artificial Sequence
  Description of Artificial Sequence: Synthetic oligonucleotide
  Antisense strand to SEQ ID NO: 623982
aaucucgggcaguucuccc

SEQ ID NO: 623984 - RNA, 19 nt, Artificial Sequence
  Description of Artificial Sequence: Synthetic oligonucleotide
  Sense strand starting at position 1694 of SEQ ID NO: 585237
cagcuuaaugcggcuguua

SEQ ID NO: 623985 - RNA, 19 nt, Artificial Sequence
  Description of Artificial Sequence: Synthetic oligonucleotide
  Antisense strand to SEQ ID NO: 623984
uaacagccgcauuaagcug

SEQ ID NO: 623986 - RNA, 19 nt, Artificial Sequence
  Description of Artificial Sequence: Synthetic oligonucleotide
  Sense strand starting at position 1695 of SEQ ID NO: 585237
agcuuaaugcggcuguuau

SEQ ID NO: 623987 - RNA, 19 nt, Artificial Sequence
  Description of Artificial Sequence: Synthetic oligonucleotide
  Antisense strand to SEQ ID NO: 623986
auaacagccgcauuaagcu

SEQ ID NO: 623988 - RNA, 19 nt, Artificial Sequence
  Description of Artificial Sequence: Synthetic oligonucleotide
  Sense strand starting at position 1771 of SEQ ID NO: 585237
ggccauugcgcuccuuaga

SEQ ID NO: 623989 - RNA, 19 nt, Artificial Sequence
  Description of Artificial Sequence: Synthetic oligonucleotide
  Antisense strand to SEQ ID NO: 623988
ucuaaggagcgcaauggcc

SEQ ID NO: 623990 - RNA, 19 nt, Artificial Sequence
  Description of Artificial Sequence: Synthetic oligonucleotide
  Sense strand starting at position 1805 of SEQ ID NO: 585237
ggugaucagcucugagacu

SEQ ID NO: 623991 - RNA, 19 nt, Artificial Sequence
  Description of Artificial Sequence: Synthetic oligonucleotide
  Antisense strand to SEQ ID NO: 623990
agucucagagcugaucacc

SEQ ID NO: 623992 - RNA, 19 nt, Artificial Sequence
  Description of Artificial Sequence: Synthetic oligonucleotide
  Sense strand starting at position 1969 of SEQ ID NO: 585237
agagaauaagcucgaaauc

SEQ ID NO: 623993 - RNA, 19 nt, Artificial Sequence
  Description of Artificial Sequence: Synthetic oligonucleotide
  Antisense strand to SEQ ID NO: 623992
gauuucgagcuuauucucu

SEQ ID NO: 623994 - RNA, 19 nt, Artificial Sequence
  Description of Artificial Sequence: Synthetic oligonucleotide
  Sense strand starting at position 2303 of SEQ ID NO: 585237
ggcugagggcaucauguua

SEQ ID NO: 623995 - RNA, 19 nt, Artificial Sequence
  Description of Artificial Sequence: Synthetic oligonucleotide
  Antisense strand to SEQ ID NO: 623994
uaacaugaugcccucagcc

SEQ ID NO: 623996 - RNA, 19 nt, Artificial Sequence
  Description of Artificial Sequence: Synthetic oligonucleotide
  Sense strand starting at position 2346 of SEQ ID NO: 585237
ucuacuaaguauccaguga

SEQ ID NO: 623997 - RNA, 19 nt, Artificial Sequence
  Description of Artificial Sequence: Synthetic oligonucleotide
  Antisense strand to SEQ ID NO: 623996
ucacuggauacuuaguaga

SEQ ID NO: 623998 - RNA, 19 nt, Artificial Sequence
  Description of Artificial Sequence: Synthetic oligonucleotide
  Sense strand starting at position 2350 of SEQ ID NO: 585237
cuaaguauccagugaaagu

SEQ ID NO: 623999 - RNA, 19 nt, Artificial Sequence
  Description of Artificial Sequence: Synthetic oligonucleotide
  Antisense strand to SEQ ID NO: 623998
acuuucacuggauacuuag

SEQ ID NO: 624000 - RNA, 19 nt, Artificial Sequence
  Description of Artificial Sequence: Synthetic oligonucleotide
  Sense strand starting at position 2435 of SEQ ID NO: 585237
ugguuugggcaugaaguuu

SEQ ID NO: 624001 - RNA, 19 nt, Artificial Sequence
  Description of Artificial Sequence: Synthetic oligonucleotide
  Antisense strand to SEQ ID NO: 624000
aaacuucaugcccaaacca

SEQ ID NO: 624002 - RNA, 19 nt, Artificial Sequence
  Description of Artificial Sequence: Synthetic oligonucleotide
  Sense strand starting at position 2446 of SEQ ID NO: 585237
ugaaguuuguuucuaacug

SEQ ID NO: 624003 - RNA, 19 nt, Artificial Sequence
  Description of Artificial Sequence: Synthetic oligonucleotide
  Antisense strand to SEQ ID NO: 624002
caguuagaaacaaacuuca

SEQ ID NO: 624004 - RNA, 19 nt, Artificial Sequence
  Description of Artificial Sequence: Synthetic oligonucleotide
  Sense strand starting at position 2567 of SEQ ID NO: 585237
ugcuaaugucuuuacagaa

SEQ ID NO: 624005 - RNA, 19 nt, Artificial Sequence
  Description of Artificial Sequence: Synthetic oligonucleotide
  Antisense strand to SEQ ID NO: 624004
uucuguaaagacauuagca

SEQ ID NO: 624006 - RNA, 19 nt, Artificial Sequence
  Description of Artificial Sequence: Synthetic oligonucleotide
  Sense strand starting at position 2574 of SEQ ID NO: 585237
gucuuuacagaaugggauu

SEQ ID NO: 624007 - RNA, 19 nt, Artificial Sequence
  Description of Artificial Sequence: Synthetic oligonucleotide
  Antisense strand to SEQ ID NO: 624006
aaucccauucuguaaagac

SEQ ID NO: 624008 - RNA, 19 nt, Artificial Sequence
  Description of Artificial Sequence: Synthetic oligonucleotide
  Sense strand starting at position 2657 of SEQ ID NO: 585237
aucgcuuugacuuaaggau

SEQ ID NO: 624009 - RNA, 19 nt, Artificial Sequence
  Description of Artificial Sequence: Synthetic oligonucleotide
  Antisense strand to SEQ ID NO: 624008
auccuuaagucaaagcgau

SEQ ID NO: 624010 - RNA, 19 nt, Artificial Sequence
  Description of Artificial Sequence: Synthetic oligonucleotide
  Sense strand starting at position 2956 of SEQ ID NO: 585237
ggaauacucucuucuauga

SEQ ID NO: 624011 - RNA, 19 nt, Artificial Sequence
  Description of Artificial Sequence: Synthetic oligonucleotide
  Antisense strand to SEQ ID NO: 624010
ucauagaagagaguauucc

SEQ ID NO: 624012 - RNA, 19 nt, Artificial Sequence
  Description of Artificial Sequence: Synthetic oligonucleotide
  Sense strand starting at position 3027 of SEQ ID NO: 585237
uuagaagaauaucuggcua

SEQ ID NO: 624013 - RNA, 19 nt, Artificial Sequence
  Description of Artificial Sequence: Synthetic oligonucleotide
  Antisense strand to SEQ ID NO: 624012
uagccagauauucuucuaa

SEQ ID NO: 624014 - RNA, 19 nt, Artificial Sequence
  Description of Artificial Sequence: Synthetic oligonucleotide
  Sense strand starting at position 3039 of SEQ ID NO: 585237
cuggcuauugacugugaaa

SEQ ID NO: 624015 - RNA, 19 nt, Artificial Sequence
  Description of Artificial Sequence: Synthetic oligonucleotide
  Antisense strand to SEQ ID NO: 624014
uuucacagucaauagccag

SEQ ID NO: 624016 - RNA, 19 nt, Artificial Sequence
  Description of Artificial Sequence: Synthetic oligonucleotide
  Sense strand starting at position 3065 of SEQ ID NO: 585237
auuggauauugagcgacuu

SEQ ID NO: 624017 - RNA, 19 nt, Artificial Sequence
  Description of Artificial Sequence: Synthetic oligonucleotide
  Antisense strand to SEQ ID NO: 624016
aagucgcucaauauccaau

SEQ ID NO: 624018 - RNA, 19 nt, Artificial Sequence
  Description of Artificial Sequence: Synthetic oligonucleotide
  Sense strand starting at position 3120 of SEQ ID NO: 585237
aggcaaauacacugagguu

SEQ ID NO: 624019 - RNA, 19 nt, Artificial Sequence
  Description of Artificial Sequence: Synthetic oligonucleotide
  Antisense strand to SEQ ID NO: 624018
aaccucaguguauuugccu

SEQ ID NO: 624020 - RNA, 19 nt, Artificial Sequence
  Description of Artificial Sequence: Synthetic oligonucleotide
  Sense strand starting at position 3262 of SEQ ID NO: 585237
uugaaaugcugugcaagaa

SEQ ID NO: 624021 - RNA, 19 nt, Artificial Sequence
  Description of Artificial Sequence: Synthetic oligonucleotide
  Antisense strand to SEQ ID NO: 624020
uucuugcacagcauuucaa

SEQ ID NO: 624022 - RNA, 19 nt, Artificial Sequence
  Description of Artificial Sequence: Synthetic oligonucleotide
  Sense strand starting at position 3263 of SEQ ID NO: 585237
ugaaaugcugugcaagaaa

SEQ ID NO: 624023 - RNA, 19 nt, Artificial Sequence
  Description of Artificial Sequence: Synthetic oligonucleotide
  Antisense strand to SEQ ID NO: 624022
uuucuugcacagcauuuca

SEQ ID NO: 624024 - RNA, 19 nt, Artificial Sequence
  Description of Artificial Sequence: Synthetic oligonucleotide
  Sense strand starting at position 3332 of SEQ ID NO: 585237
gcagacuauggccaaaucu

SEQ ID NO: 624025 - RNA, 19 nt, Artificial Sequence
  Description of Artificial Sequence: Synthetic oligonucleotide
  Antisense strand to SEQ ID NO: 624024
agauuuggccauagucugc

SEQ ID NO: 624026 - RNA, 19 nt, Artificial Sequence
  Description of Artificial Sequence: Synthetic oligonucleotide
  Sense strand starting at position 3642 of SEQ ID NO: 585237
uugaauucagggugucaag

SEQ ID NO: 624027 - RNA, 19 nt, Artificial Sequence
  Description of Artificial Sequence: Synthetic oligonucleotide
  Antisense strand to SEQ ID NO: 624026
cuugacacccugaauucaa

SEQ ID NO: 624028 - RNA, 19 nt, Artificial Sequence
  Description of Artificial Sequence: Synthetic oligonucleotide
  Sense strand starting at position 3745 of SEQ ID NO: 585237
aacuaaagagugugugaca

SEQ ID NO: 624029 - RNA, 19 nt, Artificial Sequence
  Description of Artificial Sequence: Synthetic oligonucleotide
  Antisense strand to SEQ ID NO: 624028
ugucacacacucuuuaguu

SEQ ID NO: 624030 - RNA, 19 nt, Artificial Sequence
  Description of Artificial Sequence: Synthetic oligonucleotide
  Sense strand starting at position 3752 of SEQ ID NO: 585237
gagugugugacagagacua

SEQ ID NO: 624031 - RNA, 19 nt, Artificial Sequence
  Description of Artificial Sequence: Synthetic oligonucleotide
  Antisense strand to SEQ ID NO: 624030
uagucucugucacacacuc

SEQ ID NO: 624032 - RNA, 19 nt, Artificial Sequence
  Description of Artificial Sequence: Synthetic oligonucleotide
  Sense strand starting at position 3754 of SEQ ID NO: 585237
gugugugacagagacuaua

SEQ ID NO: 624033 - RNA, 19 nt, Artificial Sequence
  Description of Artificial Sequence: Synthetic oligonucleotide
  Antisense strand to SEQ ID NO: 624032
uauagucucugucacacac

SEQ ID NO: 624034 - RNA, 19 nt, Artificial Sequence
  Description of Artificial Sequence: Synthetic oligonucleotide
  Sense strand starting at position 68 of SEQ ID NO: 585238
uuucucuuucuugggauga

SEQ ID NO: 624035 - RNA, 19 nt, Artificial Sequence
  Description of Artificial Sequence: Synthetic oligonucleotide
  Antisense strand to SEQ ID NO: 624034
ucaucccaagaaagagaaa

SEQ ID NO: 624036 - RNA, 19 nt, Artificial Sequence
  Description of Artificial Sequence: Synthetic oligonucleotide
  Sense strand starting at position 79 of SEQ ID NO: 585238
ugggaugaauccgugguca

SEQ ID NO: 624037 - RNA, 19 nt, Artificial Sequence
  Description of Artificial Sequence: Synthetic oligonucleotide
  Antisense strand to SEQ ID NO: 624036
ugaccacggauucauccca

SEQ ID NO: 624038 - RNA, 19 nt, Artificial Sequence
  Description of Artificial Sequence: Synthetic oligonucleotide
  Sense strand starting at position 81 of SEQ ID NO: 585238
ggaugaauccguggucacu

SEQ ID NO: 624039 - RNA, 19 nt, Artificial Sequence
  Description of Artificial Sequence: Synthetic oligonucleotide
  Antisense strand to SEQ ID NO: 624038
agugaccacggauucaucc

SEQ ID NO: 624040 - RNA, 19 nt, Artificial Sequence
  Description of Artificial Sequence: Synthetic oligonucleotide
  Sense strand starting at position 83 of SEQ ID NO: 585238
augaauccguggucacuau

SEQ ID NO: 624041 - RNA, 19 nt, Artificial Sequence
  Description of Artificial Sequence: Synthetic oligonucleotide
  Antisense strand to SEQ ID NO: 624040
auagugaccacggauucau

SEQ ID NO: 624042 - RNA, 19 nt, Artificial Sequence
  Description of Artificial Sequence: Synthetic oligonucleotide
  Sense strand starting at position 120 of SEQ ID NO: 585238
cuauauuaaucauugugga

SEQ ID NO: 624043 - RNA, 19 nt, Artificial Sequence
  Description of Artificial Sequence: Synthetic oligonucleotide
  Antisense strand to SEQ ID NO: 624042
uccacaaugauuaauauag

SEQ ID NO: 624044 - RNA, 19 nt, Artificial Sequence
  Description of Artificial Sequence: Synthetic oligonucleotide
  Sense strand starting at position 121 of SEQ ID NO: 585238
uauauuaaucauuguggag

SEQ ID NO: 624045 - RNA, 19 nt, Artificial Sequence
  Description of Artificial Sequence: Synthetic oligonucleotide
  Antisense strand to SEQ ID NO: 624044
cuccacaaugauuaauaua

SEQ ID NO: 624046 - RNA, 19 nt, Artificial Sequence
  Description of Artificial Sequence: Synthetic oligonucleotide
  Sense strand starting at position 145 of SEQ ID NO: 585238
agaauaauugagcagcuua

SEQ ID NO: 624047 - RNA, 19 nt, Artificial Sequence
  Description of Artificial Sequence: Synthetic oligonucleotide
  Antisense strand to SEQ ID NO: 624046
uaagcugcucaauuauucu

SEQ ID NO: 624048 - RNA, 19 nt, Artificial Sequence
  Description of Artificial Sequence: Synthetic oligonucleotide
  Sense strand starting at position 296 of SEQ ID NO: 585238
aacgaaggccuuuauuaga

SEQ ID NO: 624049 - RNA, 19 nt, Artificial Sequence
  Description of Artificial Sequence: Synthetic oligonucleotide
  Antisense strand to SEQ ID NO: 624048
ucuaauaaaggccuucguu

SEQ ID NO: 624050 - RNA, 19 nt, Artificial Sequence
  Description of Artificial Sequence: Synthetic oligonucleotide
  Sense strand starting at position 461 of SEQ ID NO: 585238
cguagucaugcgaggacaa

SEQ ID NO: 624051 - RNA, 19 nt, Artificial Sequence
  Description of Artificial Sequence: Synthetic oligonucleotide
  Antisense strand to SEQ ID NO: 624050
uuguccucgcaugacuacg

SEQ ID NO: 624052 - RNA, 19 nt, Artificial Sequence
  Description of Artificial Sequence: Synthetic oligonucleotide
  Sense strand starting at position 462 of SEQ ID NO: 585238
guagucaugcgaggacaaa

SEQ ID NO: 624053 - RNA, 19 nt, Artificial Sequence
  Description of Artificial Sequence: Synthetic oligonucleotide
  Antisense strand to SEQ ID NO: 624052
uuuguccucgcaugacuac

SEQ ID NO: 624054 - RNA, 19 nt, Artificial Sequence
  Description of Artificial Sequence: Synthetic oligonucleotide
  Sense strand starting at position 544 of SEQ ID NO: 585238
agcggaaggcuacauguua

SEQ ID NO: 624055 - RNA, 19 nt, Artificial Sequence
  Description of Artificial Sequence: Synthetic oligonucleotide
  Antisense strand to SEQ ID NO: 624054
uaacauguagccuuccgcu

SEQ ID NO: 624056 - RNA, 19 nt, Artificial Sequence
  Description of Artificial Sequence: Synthetic oligonucleotide
  Sense strand starting at position 667 of SEQ ID NO: 585238
augagaaauuaacagcaga

SEQ ID NO: 624057 - RNA, 19 nt, Artificial Sequence
  Description of Artificial Sequence: Synthetic oligonucleotide
  Antisense strand to SEQ ID NO: 624056
ucugcuguuaauuucucau

SEQ ID NO: 624058 - RNA, 19 nt, Artificial Sequence
  Description of Artificial Sequence: Synthetic oligonucleotide
  Sense strand starting at position 778 of SEQ ID NO: 585238
auggaaagcguccgaaauc

SEQ ID NO: 624059 - RNA, 19 nt, Artificial Sequence
  Description of Artificial Sequence: Synthetic oligonucleotide
  Antisense strand to SEQ ID NO: 624058
gauuucggacgcuuuccau

SEQ ID NO: 624060 - RNA, 19 nt, Artificial Sequence
  Description of Artificial Sequence: Synthetic oligonucleotide
  Sense strand starting at position 972 of SEQ ID NO: 585238
cggacaucccuuuagacua

SEQ ID NO: 624061 - RNA, 19 nt, Artificial Sequence
  Description of Artificial Sequence: Synthetic oligonucleotide
  Antisense strand to SEQ ID NO: 624060
uagucuaaagggauguccg

SEQ ID NO: 624062 - RNA, 19 nt, Artificial Sequence
  Description of Artificial Sequence: Synthetic oligonucleotide
  Sense strand starting at position 1113 of SEQ ID NO: 585238
guuuaaaugcuguaaccuc

SEQ ID NO: 624063 - RNA, 19 nt, Artificial Sequence
  Description of Artificial Sequence: Synthetic oligonucleotide
  Antisense strand to SEQ ID NO: 624062
gagguuacagcauuuaaac

SEQ ID NO: 624064 - RNA, 19 nt, Artificial Sequence
  Description of Artificial Sequence: Synthetic oligonucleotide
  Sense strand starting at position 1155 of SEQ ID NO: 585238
ucacccaauucgucugaua

SEQ ID NO: 624065 - RNA, 19 nt, Artificial Sequence
  Description of Artificial Sequence: Synthetic oligonucleotide
  Antisense strand to SEQ ID NO: 624064
uaucagacgaauuggguga

SEQ ID NO: 624066 - RNA, 19 nt, Artificial Sequence
  Description of Artificial Sequence: Synthetic oligonucleotide
  Sense strand starting at position 1157 of SEQ ID NO: 585238
acccaauucgucugauacc

SEQ ID NO: 624067 - RNA, 19 nt, Artificial Sequence
  Description of Artificial Sequence: Synthetic oligonucleotide
  Antisense strand to SEQ ID NO: 624066
gguaucagacgaauugggu

SEQ ID NO: 624068 - RNA, 19 nt, Artificial Sequence
  Description of Artificial Sequence: Synthetic oligonucleotide
  Sense strand starting at position 1300 of SEQ ID NO: 585238
agaaguaggcguucgccua

SEQ ID NO: 624069 - RNA, 19 nt, Artificial Sequence
  Description of Artificial Sequence: Synthetic oligonucleotide
  Antisense strand to SEQ ID NO: 624068
uaggcgaacgccuacuucu

SEQ ID NO: 624070 - RNA, 19 nt, Artificial Sequence
  Description of Artificial Sequence: Synthetic oligonucleotide
  Sense strand starting at position 1404 of SEQ ID NO: 585238
gcuuucuugggcuucgcaa

SEQ ID NO: 624071 - RNA, 19 nt, Artificial Sequence
  Description of Artificial Sequence: Synthetic oligonucleotide
  Antisense strand to SEQ ID NO: 624070
uugcgaagcccaagaaagc

SEQ ID NO: 624072 - RNA, 19 nt, Artificial Sequence
  Description of Artificial Sequence: Synthetic oligonucleotide
  Sense strand starting at position 1447 of SEQ ID NO: 585238
ccacuuucuugguuacagu

SEQ ID NO: 624073 - RNA, 19 nt, Artificial Sequence
  Description of Artificial Sequence: Synthetic oligonucleotide
  Antisense strand to SEQ ID NO: 624072
acuguaaccaagaaagugg

SEQ ID NO: 624074 - RNA, 19 nt, Artificial Sequence
  Description of Artificial Sequence: Synthetic oligonucleotide
  Sense strand starting at position 1699 of SEQ ID NO: 585238
ggcucuugagaccaaguuu

SEQ ID NO: 624075 - RNA, 19 nt, Artificial Sequence
  Description of Artificial Sequence: Synthetic oligonucleotide
  Antisense strand to SEQ ID NO: 624074
aaacuuggucucaagagcc

SEQ ID NO: 624076 - RNA, 19 nt, Artificial Sequence
  Description of Artificial Sequence: Synthetic oligonucleotide
  Sense strand starting at position 2412 of SEQ ID NO: 585238
gcgaaaugguuuccaccua

SEQ ID NO: 624077 - RNA, 19 nt, Artificial Sequence
  Description of Artificial Sequence: Synthetic oligonucleotide
  Antisense strand to SEQ ID NO: 624076
uagguggaaaccauuucgc

SEQ ID NO: 624078 - RNA, 19 nt, Artificial Sequence
  Description of Artificial Sequence: Synthetic oligonucleotide
  Sense strand starting at position 2471 of SEQ ID NO: 585238
acagguccucugugaauuc

SEQ ID NO: 624079 - RNA, 19 nt, Artificial Sequence
  Description of Artificial Sequence: Synthetic oligonucleotide
  Antisense strand to SEQ ID NO: 624078
gaauucacagaggaccugu

SEQ ID NO: 624080 - RNA, 19 nt, Artificial Sequence
  Description of Artificial Sequence: Synthetic oligonucleotide
  Sense strand starting at position 2523 of SEQ ID NO: 585238
caaggauuccacggccagu

SEQ ID NO: 624081 - RNA, 19 nt, Artificial Sequence
  Description of Artificial Sequence: Synthetic oligonucleotide
  Antisense strand to SEQ ID NO: 624080
acuggccguggaauccuug

SEQ ID NO: 624082 - RNA, 19 nt, Artificial Sequence
  Description of Artificial Sequence: Synthetic oligonucleotide
  Sense strand starting at position 2690 of SEQ ID NO: 585238
cuucucuacaggcgagaaa

SEQ ID NO: 624083 - RNA, 19 nt, Artificial Sequence
  Description of Artificial Sequence: Synthetic oligonucleotide
  Antisense strand to SEQ ID NO: 624082
uuucucgccuguagagaag

SEQ ID NO: 624084 - RNA, 19 nt, Artificial Sequence
  Description of Artificial Sequence: Synthetic oligonucleotide
  Sense strand starting at position 2691 of SEQ ID NO: 585238
uucucuacaggcgagaaau

SEQ ID NO: 624085 - RNA, 19 nt, Artificial Sequence
  Description of Artificial Sequence: Synthetic oligonucleotide
  Antisense strand to SEQ ID NO: 624084
auuucucgccuguagagaa

SEQ ID NO: 624086 - RNA, 19 nt, Artificial Sequence
  Description of Artificial Sequence: Synthetic oligonucleotide
  Sense strand starting at position 2741 of SEQ ID NO: 585238
cucugaguuguguaaggca

SEQ ID NO: 624087 - RNA, 19 nt, Artificial Sequence
  Description of Artificial Sequence: Synthetic oligonucleotide
  Antisense strand to SEQ ID NO: 624086
ugccuuacacaacucagag

SEQ ID NO: 624088 - RNA, 19 nt, Artificial Sequence
  Description of Artificial Sequence: Synthetic oligonucleotide
  Sense strand starting at position 2762 of SEQ ID NO: 585238
aggucuggcccucaagaua

SEQ ID NO: 624089 - RNA, 19 nt, Artificial Sequence
  Description of Artificial Sequence: Synthetic oligonucleotide
  Antisense strand to SEQ ID NO: 624088
uaucuugagggccagaccu

SEQ ID NO: 624090 - RNA, 19 nt, Artificial Sequence
  Description of Artificial Sequence: Synthetic oligonucleotide
  Sense strand starting at position 2969 of SEQ ID NO: 585238
uuacgcaaguuaccauaua

SEQ ID NO: 624091 - RNA, 19 nt, Artificial Sequence
  Description of Artificial Sequence: Synthetic oligonucleotide
  Antisense strand to SEQ ID NO: 624090
uauaugguaacuugcguaa

SEQ ID NO: 624092 - RNA, 19 nt, Artificial Sequence
  Description of Artificial Sequence: Synthetic oligonucleotide
  Sense strand starting at position 3163 of SEQ ID NO: 585238
uaagaucuguuguugauga

SEQ ID NO: 624093 - RNA, 19 nt, Artificial Sequence
  Description of Artificial Sequence: Synthetic oligonucleotide
  Antisense strand to SEQ ID NO: 624092
ucaucaacaacagaucuua

SEQ ID NO: 624094 - RNA, 19 nt, Artificial Sequence
  Description of Artificial Sequence: Synthetic oligonucleotide
  Sense strand starting at position 3170 of SEQ ID NO: 585238
uguuguugaugagcugaaa

SEQ ID NO: 624095 - RNA, 19 nt, Artificial Sequence
  Description of Artificial Sequence: Synthetic oligonucleotide
  Antisense strand to SEQ ID NO: 624094
uuucagcucaucaacaaca

SEQ ID NO: 624096 - RNA, 19 nt, Artificial Sequence
  Description of Artificial Sequence: Synthetic oligonucleotide
  Sense strand starting at position 3314 of SEQ ID NO: 585238
aguaaauugucugcccaua

SEQ ID NO: 624097 - RNA, 19 nt, Artificial Sequence
  Description of Artificial Sequence: Synthetic oligonucleotide
  Antisense strand to SEQ ID NO: 624096
uaugggcagacaauuuacu

SEQ ID NO: 624098 - RNA, 19 nt, Artificial Sequence
  Description of Artificial Sequence: Synthetic oligonucleotide
  Sense strand starting at position 3363 of SEQ ID NO: 585238
ggacaaagguaauauuaca

SEQ ID NO: 624099 - RNA, 19 nt, Artificial Sequence
  Description of Artificial Sequence: Synthetic oligonucleotide
  Antisense strand to SEQ ID NO: 624098
uguaauauuaccuuugucc

SEQ ID NO: 624100 - RNA, 19 nt, Artificial Sequence
  Description of Artificial Sequence: Synthetic oligonucleotide
  Sense strand starting at position 3557 of SEQ ID NO: 585238
guccaacauuuguaaacau

SEQ ID NO: 624101 - RNA, 19 nt, Artificial Sequence
  Description of Artificial Sequence: Synthetic oligonucleotide
  Antisense strand to SEQ ID NO: 624100
auguuuacaaauguuggac

SEQ ID NO: 624102 - RNA, 19 nt, Artificial Sequence
  Description of Artificial Sequence: Synthetic oligonucleotide
  Sense strand starting at position 3589 of SEQ ID NO: 585238
gcuuauguccucugggaau

SEQ ID NO: 624103 - RNA, 19 nt, Artificial Sequence
  Description of Artificial Sequence: Synthetic oligonucleotide
  Antisense strand to SEQ ID NO: 624102
auucccagaggacauaagc

SEQ ID NO: 624104 - RNA, 19 nt, Artificial Sequence
  Description of Artificial Sequence: Synthetic oligonucleotide
  Sense strand starting at position 3591 of SEQ ID NO: 585238
uuauguccucugggaauua

SEQ ID NO: 624105 - RNA, 19 nt, Artificial Sequence
  Description of Artificial Sequence: Synthetic oligonucleotide
  Antisense strand to SEQ ID NO: 624104
uaauucccagaggacauaa

SEQ ID NO: 624106 - RNA, 19 nt, Artificial Sequence
  Description of Artificial Sequence: Synthetic oligonucleotide
  Sense strand starting at position 3634 of SEQ ID NO: 585238
augaauuagcaguggugga

SEQ ID NO: 624107 - RNA, 19 nt, Artificial Sequence
  Description of Artificial Sequence: Synthetic oligonucleotide
  Antisense strand to SEQ ID NO: 624106
uccaccacugcuaauucau

SEQ ID NO: 624108 - RNA, 19 nt, Artificial Sequence
  Description of Artificial Sequence: Synthetic oligonucleotide
  Sense strand starting at position 3635 of SEQ ID NO: 585238
ugaauuagcagugguggaa

SEQ ID NO: 624109 - RNA, 19 nt, Artificial Sequence
  Description of Artificial Sequence: Synthetic oligonucleotide
  Antisense strand to SEQ ID NO: 624108
uuccaccacugcuaauuca

SEQ ID NO: 624110 - RNA, 19 nt, Artificial Sequence
  Description of Artificial Sequence: Synthetic oligonucleotide
  Sense strand starting at position 3675 of SEQ ID NO: 585238
cucagagugacaggguaua

SEQ ID NO: 624111 - RNA, 19 nt, Artificial Sequence
  Description of Artificial Sequence: Synthetic oligonucleotide
  Antisense strand to SEQ ID NO: 624110
uauacccugucacucugag

SEQ ID NO: 624112 - RNA, 19 nt, Artificial Sequence
  Description of Artificial Sequence: Synthetic oligonucleotide
  Sense strand starting at position 3976 of SEQ ID NO: 585238
uugcaaugagccgaaauga

SEQ ID NO: 624113 - RNA, 19 nt, Artificial Sequence
  Description of Artificial Sequence: Synthetic oligonucleotide
  Antisense strand to SEQ ID NO: 624112
ucauuucggcucauugcaa

SEQ ID NO: 624114 - RNA, 19 nt, Artificial Sequence
  Description of Artificial Sequence: Synthetic oligonucleotide
  Sense strand starting at position 63 of SEQ ID NO: 585239
cuccgauuggcuuaauaca

SEQ ID NO: 624115 - RNA, 19 nt, Artificial Sequence
  Description of Artificial Sequence: Synthetic oligonucleotide
  Antisense strand to SEQ ID NO: 624114
uguauuaagccaaucggag

SEQ ID NO: 624116 - RNA, 19 nt, Artificial Sequence
  Description of Artificial Sequence: Synthetic oligonucleotide
  Sense strand starting at position 262 of SEQ ID NO: 585239
gugcuaggagguuaagagu

SEQ ID NO: 624117 - RNA, 19 nt, Artificial Sequence
  Description of Artificial Sequence: Synthetic oligonucleotide
  Antisense strand to SEQ ID NO: 624116
acucuuaaccuccuagcac

SEQ ID NO: 624118 - RNA, 19 nt, Artificial Sequence
  Description of Artificial Sequence: Synthetic oligonucleotide
  Sense strand starting at position 271 of SEQ ID NO: 585239
gguuaagaguaggcagaaa

SEQ ID NO: 624119 - RNA, 19 nt, Artificial Sequence
  Description of Artificial Sequence: Synthetic oligonucleotide
  Antisense strand to SEQ ID NO: 624118
uuucugccuacucuuaacc

SEQ ID NO: 624120 - RNA, 19 nt, Artificial Sequence
  Description of Artificial Sequence: Synthetic oligonucleotide
  Sense strand starting at position 422 of SEQ ID NO: 585239
gcgcgaucucggcuuacaa

SEQ ID NO: 624121 - RNA, 19 nt, Artificial Sequence
  Description of Artificial Sequence: Synthetic oligonucleotide
  Antisense strand to SEQ ID NO: 624120
uuguaagccgagaucgcgc

SEQ ID NO: 624122 - RNA, 19 nt, Artificial Sequence
  Description of Artificial Sequence: Synthetic oligonucleotide
  Sense strand starting at position 423 of SEQ ID NO: 585239
cgcgaucucggcuuacaac

SEQ ID NO: 624123 - RNA, 19 nt, Artificial Sequence
  Description of Artificial Sequence: Synthetic oligonucleotide
  Antisense strand to SEQ ID NO: 624122
guuguaagccgagaucgcg

SEQ ID NO: 624124 - RNA, 19 nt, Artificial Sequence
  Description of Artificial Sequence: Synthetic oligonucleotide
  Sense strand starting at position 847 of SEQ ID NO: 585239
ggaugugcucaggaaguca

SEQ ID NO: 624125 - RNA, 19 nt, Artificial Sequence
  Description of Artificial Sequence: Synthetic oligonucleotide
  Antisense strand to SEQ ID NO: 624124
ugacuuccugagcacaucc

SEQ ID NO: 624126 - RNA, 19 nt, Artificial Sequence
  Description of Artificial Sequence: Synthetic oligonucleotide
  Sense strand starting at position 863 of SEQ ID NO: 585239
ucaccucaacgcuaaagua

SEQ ID NO: 624127 - RNA, 19 nt, Artificial Sequence
  Description of Artificial Sequence: Synthetic oligonucleotide
  Antisense strand to SEQ ID NO: 624126
uacuuuagcguugagguga

SEQ ID NO: 624128 - RNA, 19 nt, Artificial Sequence
  Description of Artificial Sequence: Synthetic oligonucleotide
  Sense strand starting at position 897 of SEQ ID NO: 585239
accacaucccugugucaga

SEQ ID NO: 624129 - RNA, 19 nt, Artificial Sequence
  Description of Artificial Sequence: Synthetic oligonucleotide
  Antisense strand to SEQ ID NO: 624128
ucugacacagggauguggu

SEQ ID NO: 624130 - RNA, 19 nt, Artificial Sequence
  Description of Artificial Sequence: Synthetic oligonucleotide
  Sense strand starting at position 898 of SEQ ID NO: 585239
ccacaucccugugucagaa

SEQ ID NO: 624131 - RNA, 19 nt, Artificial Sequence
  Description of Artificial Sequence: Synthetic oligonucleotide
  Antisense strand to SEQ ID NO: 624130
uucugacacagggaugugg

SEQ ID NO: 624132 - RNA, 19 nt, Artificial Sequence
  Description of Artificial Sequence: Synthetic oligonucleotide
  Sense strand starting at position 1615 of SEQ ID NO: 585239
ucuuguugaguuugaagga

SEQ ID NO: 624133 - RNA, 19 nt, Artificial Sequence
  Description of Artificial Sequence: Synthetic oligonucleotide
  Antisense strand to SEQ ID NO: 624132
uccuucaaacucaacaaga

SEQ ID NO: 624134 - RNA, 19 nt, Artificial Sequence
  Description of Artificial Sequence: Synthetic oligonucleotide
  Sense strand starting at position 1649 of SEQ ID NO: 585239
accuuuggucugcaccaga

SEQ ID NO: 624135 - RNA, 19 nt, Artificial Sequence
  Description of Artificial Sequence: Synthetic oligonucleotide
  Antisense strand to SEQ ID NO: 624134
ucuggugcagaccaaaggu

SEQ ID NO: 624136 - RNA, 19 nt, Artificial Sequence
  Description of Artificial Sequence: Synthetic oligonucleotide
  Sense strand starting at position 1652 of SEQ ID NO: 585239
uuuggucugcaccagagua

SEQ ID NO: 624137 - RNA, 19 nt, Artificial Sequence
  Description of Artificial Sequence: Synthetic oligonucleotide
  Antisense strand to SEQ ID NO: 624136
uacucuggugcagaccaaa

SEQ ID NO: 624138 - RNA, 19 nt, Artificial Sequence
  Description of Artificial Sequence: Synthetic oligonucleotide
  Sense strand starting at position 1739 of SEQ ID NO: 585239
agccgcaagcgcuuucuua

SEQ ID NO: 624139 - RNA, 19 nt, Artificial Sequence
  Description of Artificial Sequence: Synthetic oligonucleotide
  Antisense strand to SEQ ID NO: 624138
uaagaaagcgcuugcggcu

SEQ ID NO: 624140 - RNA, 19 nt, Artificial Sequence
  Description of Artificial Sequence: Synthetic oligonucleotide
  Sense strand starting at position 1740 of SEQ ID NO: 585239
gccgcaagcgcuuucuuaa

SEQ ID NO: 624141 - RNA, 19 nt, Artificial Sequence
  Description of Artificial Sequence: Synthetic oligonucleotide
  Antisense strand to SEQ ID NO: 624140
uuaagaaagcgcuugcggc

SEQ ID NO: 624142 - RNA, 19 nt, Artificial Sequence
  Description of Artificial Sequence: Synthetic oligonucleotide
  Sense strand starting at position 1741 of SEQ ID NO: 585239
ccgcaagcgcuuucuuaag

SEQ ID NO: 624143 - RNA, 19 nt, Artificial Sequence
  Description of Artificial Sequence: Synthetic oligonucleotide
  Antisense strand to SEQ ID NO: 624142
cuuaagaaagcgcuugcgg

SEQ ID NO: 624144 - RNA, 19 nt, Artificial Sequence
  Description of Artificial Sequence: Synthetic oligonucleotide
  Sense strand starting at position 1775 of SEQ ID NO: 585239
gccgcugcgcuccuuagaa

SEQ ID NO: 624145 - RNA, 19 nt, Artificial Sequence
  Description of Artificial Sequence: Synthetic oligonucleotide
  Antisense strand to SEQ ID NO: 624144
uucuaaggagcgcagcggc

SEQ ID NO: 624146 - RNA, 19 nt, Artificial Sequence
  Description of Artificial Sequence: Synthetic oligonucleotide
  Sense strand starting at position 1807 of SEQ ID NO: 585239
uggugauaagcucagauac

SEQ ID NO: 624147 - RNA, 19 nt, Artificial Sequence
  Description of Artificial Sequence: Synthetic oligonucleotide
  Antisense strand to SEQ ID NO: 624146
guaucugagcuuaucacca

SEQ ID NO: 624148 - RNA, 19 nt, Artificial Sequence
  Description of Artificial Sequence: Synthetic oligonucleotide
  Sense strand starting at position 1835 of SEQ ID NO: 585239
ggaugcuuugcguuuccca

SEQ ID NO: 624149 - RNA, 19 nt, Artificial Sequence
  Description of Artificial Sequence: Synthetic oligonucleotide
  Antisense strand to SEQ ID NO: 624148
ugggaaacgcaaagcaucc

SEQ ID NO: 624150 - RNA, 19 nt, Artificial Sequence
  Description of Artificial Sequence: Synthetic oligonucleotide
  Sense strand starting at position 2030 of SEQ ID NO: 585239
uagagagacgcugagugau

SEQ ID NO: 624151 - RNA, 19 nt, Artificial Sequence
  Description of Artificial Sequence: Synthetic oligonucleotide
  Antisense strand to SEQ ID NO: 624150
aucacucagcgucucucua

SEQ ID NO: 624152 - RNA, 19 nt, Artificial Sequence
  Description of Artificial Sequence: Synthetic oligonucleotide
  Sense strand starting at position 2042 of SEQ ID NO: 585239
gagugaugauugguuccuu

SEQ ID NO: 624153 - RNA, 19 nt, Artificial Sequence
  Description of Artificial Sequence: Synthetic oligonucleotide
  Antisense strand to SEQ ID NO: 624152
aaggaaccaaucaucacuc

SEQ ID NO: 624154 - RNA, 19 nt, Artificial Sequence
  Description of Artificial Sequence: Synthetic oligonucleotide
  Sense strand starting at position 2290 of SEQ ID NO: 585239
uucggucaaaucgagacaa

SEQ ID NO: 624155 - RNA, 19 nt, Artificial Sequence
  Description of Artificial Sequence: Synthetic oligonucleotide
  Antisense strand to SEQ ID NO: 624154
uugucucgauuugaccgaa

SEQ ID NO: 624156 - RNA, 19 nt, Artificial Sequence
  Description of Artificial Sequence: Synthetic oligonucleotide
  Sense strand starting at position 2292 of SEQ ID NO: 585239
cggucaaaucgagacaacu

SEQ ID NO: 624157 - RNA, 19 nt, Artificial Sequence
  Description of Artificial Sequence: Synthetic oligonucleotide
  Antisense strand to SEQ ID NO: 624156
aguugucucgauuugaccg

SEQ ID NO: 624158 - RNA, 19 nt, Artificial Sequence
  Description of Artificial Sequence: Synthetic oligonucleotide
  Sense strand starting at position 2427 of SEQ ID NO: 585239
ccaaaugugcagggaaauu

SEQ ID NO: 624159 - RNA, 19 nt, Artificial Sequence
  Description of Artificial Sequence: Synthetic oligonucleotide
  Antisense strand to SEQ ID NO: 624158
aauuucccugcacauuugg

SEQ ID NO: 624160 - RNA, 19 nt, Artificial Sequence
  Description of Artificial Sequence: Synthetic oligonucleotide
  Sense strand starting at position 2492 of SEQ ID NO: 585239
ugcaucaaccucuaggaau

SEQ ID NO: 624161 - RNA, 19 nt, Artificial Sequence
  Description of Artificial Sequence: Synthetic oligonucleotide
  Antisense strand to SEQ ID NO: 624160
auuccuagagguugaugca

SEQ ID NO: 624162 - RNA, 19 nt, Artificial Sequence
  Description of Artificial Sequence: Synthetic oligonucleotide
  Sense strand starting at position 2505 of SEQ ID NO: 585239
aggaauuggcacugaggua

SEQ ID NO: 624163 - RNA, 19 nt, Artificial Sequence
  Description of Artificial Sequence: Synthetic oligonucleotide
  Antisense strand to SEQ ID NO: 624162
uaccucagugccaauuccu

SEQ ID NO: 624164 - RNA, 19 nt, Artificial Sequence
  Description of Artificial Sequence: Synthetic oligonucleotide
  Sense strand starting at position 2512 of SEQ ID NO: 585239
ggcacugagguagaaaguu

SEQ ID NO: 624165 - RNA, 19 nt, Artificial Sequence
  Description of Artificial Sequence: Synthetic oligonucleotide
  Antisense strand to SEQ ID NO: 624164
aacuuucuaccucagugcc

SEQ ID NO: 624166 - RNA, 19 nt, Artificial Sequence
  Description of Artificial Sequence: Synthetic oligonucleotide
  Sense strand starting at position 2584 of SEQ ID NO: 585239
guauuugaguuaccagugu

SEQ ID NO: 624167 - RNA, 19 nt, Artificial Sequence
  Description of Artificial Sequence: Synthetic oligonucleotide
  Antisense strand to SEQ ID NO: 624166
acacugguaacucaaauac

SEQ ID NO: 624168 - RNA, 19 nt, Artificial Sequence
  Description of Artificial Sequence: Synthetic oligonucleotide
  Sense strand starting at position 2597 of SEQ ID NO: 585239
caguguguaagcuggauuu

SEQ ID NO: 624169 - RNA, 19 nt, Artificial Sequence
  Description of Artificial Sequence: Synthetic oligonucleotide
  Antisense strand to SEQ ID NO: 624168
aaauccagcuuacacacug

SEQ ID NO: 624170 - RNA, 19 nt, Artificial Sequence
  Description of Artificial Sequence: Synthetic oligonucleotide
  Sense strand starting at position 2747 of SEQ ID NO: 585239
cgaucuagaaugggcauua

SEQ ID NO: 624171 - RNA, 19 nt, Artificial Sequence
  Description of Artificial Sequence: Synthetic oligonucleotide
  Antisense strand to SEQ ID NO: 624170
uaaugcccauucuagaucg

SEQ ID NO: 624172 - RNA, 19 nt, Artificial Sequence
  Description of Artificial Sequence: Synthetic oligonucleotide
  Sense strand starting at position 2748 of SEQ ID NO: 585239
gaucuagaaugggcauuaa

SEQ ID NO: 624173 - RNA, 19 nt, Artificial Sequence
  Description of Artificial Sequence: Synthetic oligonucleotide
  Antisense strand to SEQ ID NO: 624172
uuaaugcccauucuagauc

SEQ ID NO: 624174 - RNA, 19 nt, Artificial Sequence
  Description of Artificial Sequence: Synthetic oligonucleotide
  Sense strand starting at position 3003 of SEQ ID NO: 585239
uguacaaccuguuugaaua

SEQ ID NO: 624175 - RNA, 19 nt, Artificial Sequence
  Description of Artificial Sequence: Synthetic oligonucleotide
  Antisense strand to SEQ ID NO: 624174
uauucaaacagguuguaca

SEQ ID NO: 624176 - RNA, 19 nt, Artificial Sequence
  Description of Artificial Sequence: Synthetic oligonucleotide
  Sense strand starting at position 3004 of SEQ ID NO: 585239
guacaaccuguuugaauaa

SEQ ID NO: 624177 - RNA, 19 nt, Artificial Sequence
  Description of Artificial Sequence: Synthetic oligonucleotide
  Antisense strand to SEQ ID NO: 624176
uuauucaaacagguuguac

SEQ ID NO: 624178 - RNA, 19 nt, Artificial Sequence
  Description of Artificial Sequence: Synthetic oligonucleotide
  Sense strand starting at position 3011 of SEQ ID NO: 585239
cuguuugaauaacugguaa

SEQ ID NO: 624179 - RNA, 19 nt, Artificial Sequence
  Description of Artificial Sequence: Synthetic oligonucleotide
  Antisense strand to SEQ ID NO: 624178
uuaccaguuauucaaacag

SEQ ID NO: 624180 - RNA, 19 nt, Artificial Sequence
  Description of Artificial Sequence: Synthetic oligonucleotide
  Sense strand starting at position 3075 of SEQ ID NO: 585239
gugggcaucaaggguuaga

SEQ ID NO: 624181 - RNA, 19 nt, Artificial Sequence
  Description of Artificial Sequence: Synthetic oligonucleotide
  Antisense strand to SEQ ID NO: 624180
ucuaacccuugaugcccac

SEQ ID NO: 624182 - RNA, 19 nt, Artificial Sequence
  Description of Artificial Sequence: Synthetic oligonucleotide
  Sense strand starting at position 3192 of SEQ ID NO: 585239
gguugaauauguccaccua

SEQ ID NO: 624183 - RNA, 19 nt, Artificial Sequence
  Description of Artificial Sequence: Synthetic oligonucleotide
  Antisense strand to SEQ ID NO: 624182
uagguggacauauucaacc

SEQ ID NO: 624184 - RNA, 19 nt, Artificial Sequence
  Description of Artificial Sequence: Synthetic oligonucleotide
  Sense strand starting at position 3447 of SEQ ID NO: 585239
gccuacacucaauagugau

SEQ ID NO: 624185 - RNA, 19 nt, Artificial Sequence
  Description of Artificial Sequence: Synthetic oligonucleotide
  Antisense strand to SEQ ID NO: 624184
aucacuauugaguguaggc

SEQ ID NO: 624186 - RNA, 19 nt, Artificial Sequence
  Description of Artificial Sequence: Synthetic oligonucleotide
  Sense strand starting at position 3905 of SEQ ID NO: 585239
gaaacaagucucugggacu

SEQ ID NO: 624187 - RNA, 19 nt, Artificial Sequence
  Description of Artificial Sequence: Synthetic oligonucleotide
  Antisense strand to SEQ ID NO: 624186
agucccagagacuuguuuc

SEQ ID NO: 624188 - RNA, 19 nt, Artificial Sequence
  Description of Artificial Sequence: Synthetic oligonucleotide
  Sense strand starting at position 3918 of SEQ ID NO: 585239
gggacuuaagaccguguua

SEQ ID NO: 624189 - RNA, 19 nt, Artificial Sequence
  Description of Artificial Sequence: Synthetic oligonucleotide
  Antisense strand to SEQ ID NO: 624188
uaacacggucuuaaguccc

SEQ ID NO: 624190 - RNA, 19 nt, Artificial Sequence
  Description of Artificial Sequence: Synthetic oligonucleotide
  Sense strand starting at position 3920 of SEQ ID NO: 585239
gacuuaagaccguguuaua

SEQ ID NO: 624191 - RNA, 19 nt, Artificial Sequence
  Description of Artificial Sequence: Synthetic oligonucleotide
  Antisense strand to SEQ ID NO: 624190
uauaacacggucuuaaguc

SEQ ID NO: 624192 - RNA, 19 nt, Artificial Sequence
  Description of Artificial Sequence: Synthetic oligonucleotide
  Sense strand starting at position 3930 of SEQ ID NO: 585239
cguguuauacaccacugaa

SEQ ID NO: 624193 - RNA, 19 nt, Artificial Sequence
  Description of Artificial Sequence: Synthetic oligonucleotide
  Antisense strand to SEQ ID NO: 624192
uucagugguguauaacacg

SEQ ID NO: 624194 - RNA, 19 nt, Artificial Sequence
  Description of Artificial Sequence: Synthetic oligonucleotide
  Sense strand starting at position 217 of SEQ ID NO: 585240
cgccgaggcccuguucauu

SEQ ID NO: 624195 - RNA, 19 nt, Artificial Sequence
  Description of Artificial Sequence: Synthetic oligonucleotide
  Antisense strand to SEQ ID NO: 624194
aaugaacagggccucggcg

SEQ ID NO: 624196 - RNA, 19 nt, Artificial Sequence
  Description of Artificial Sequence: Synthetic oligonucleotide
  Sense strand starting at position 271 of SEQ ID NO: 585240
ucguuuaugauuggauuaa

SEQ ID NO: 624197 - RNA, 19 nt, Artificial Sequence
  Description of Artificial Sequence: Synthetic oligonucleotide
  Antisense strand to SEQ ID NO: 624196
uuaauccaaucauaaacga

SEQ ID NO: 624198 - RNA, 19 nt, Artificial Sequence
  Description of Artificial Sequence: Synthetic oligonucleotide
  Sense strand starting at position 351 of SEQ ID NO: 585240
cuauuucguuccuuuacuu

SEQ ID NO: 624199 - RNA, 19 nt, Artificial Sequence
  Description of Artificial Sequence: Synthetic oligonucleotide
  Antisense strand to SEQ ID NO: 624198
aaguaaaggaacgaaauag

SEQ ID NO: 624200 - RNA, 19 nt, Artificial Sequence
  Description of Artificial Sequence: Synthetic oligonucleotide
  Sense strand starting at position 419 of SEQ ID NO: 585240
ggccucuuuaggcaagaca

SEQ ID NO: 624201 - RNA, 19 nt, Artificial Sequence
  Description of Artificial Sequence: Synthetic oligonucleotide
  Antisense strand to SEQ ID NO: 624200
ugucuugccuaaagaggcc

SEQ ID NO: 624202 - RNA, 19 nt, Artificial Sequence
  Description of Artificial Sequence: Synthetic oligonucleotide
  Sense strand starting at position 570 of SEQ ID NO: 585240
ggacucguugcauacagaa

SEQ ID NO: 624203 - RNA, 19 nt, Artificial Sequence
  Description of Artificial Sequence: Synthetic oligonucleotide
  Antisense strand to SEQ ID NO: 624202
uucuguaugcaacgagucc

SEQ ID NO: 624204 - RNA, 19 nt, Artificial Sequence
  Description of Artificial Sequence: Synthetic oligonucleotide
  Sense strand starting at position 692 of SEQ ID NO: 585240
ugcagugucgguuucuaau

SEQ ID NO: 624205 - RNA, 19 nt, Artificial Sequence
  Description of Artificial Sequence: Synthetic oligonucleotide
  Antisense strand to SEQ ID NO: 624204
auuagaaaccgacacugca

SEQ ID NO: 624206 - RNA, 19 nt, Artificial Sequence
  Description of Artificial Sequence: Synthetic oligonucleotide
  Sense strand starting at position 694 of SEQ ID NO: 585240
cagugucgguuucuaauuu

SEQ ID NO: 624207 - RNA, 19 nt, Artificial Sequence
  Description of Artificial Sequence: Synthetic oligonucleotide
  Antisense strand to SEQ ID NO: 624206
aaauuagaaaccgacacug

SEQ ID NO: 624208 - RNA, 19 nt, Artificial Sequence
  Description of Artificial Sequence: Synthetic oligonucleotide
  Sense strand starting at position 824 of SEQ ID NO: 585240
ugccauacucgauagggau

SEQ ID NO: 624209 - RNA, 19 nt, Artificial Sequence
  Description of Artificial Sequence: Synthetic oligonucleotide
  Antisense strand to SEQ ID NO: 624208
aucccuaucgaguauggca

SEQ ID NO: 624210 - RNA, 19 nt, Artificial Sequence
  Description of Artificial Sequence: Synthetic oligonucleotide
  Sense strand starting at position 826 of SEQ ID NO: 585240
ccauacucgauagggauaa

SEQ ID NO: 624211 - RNA, 19 nt, Artificial Sequence
  Description of Artificial Sequence: Synthetic oligonucleotide
  Antisense strand to SEQ ID NO: 624210
uuaucccuaucgaguaugg

SEQ ID NO: 624212 - RNA, 19 nt, Artificial Sequence
  Description of Artificial Sequence: Synthetic oligonucleotide
  Sense strand starting at position 2100 of SEQ ID NO: 585240
cucggaucccgaguugugu

SEQ ID NO: 624213 - RNA, 19 nt, Artificial Sequence
  Description of Artificial Sequence: Synthetic oligonucleotide
  Antisense strand to SEQ ID NO: 624212
acacaacucgggauccgag

SEQ ID NO: 624214 - RNA, 19 nt, Artificial Sequence
  Description of Artificial Sequence: Synthetic oligonucleotide
  Sense strand starting at position 2101 of SEQ ID NO: 585240
ucggaucccgaguuguguu

SEQ ID NO: 624215 - RNA, 19 nt, Artificial Sequence
  Description of Artificial Sequence: Synthetic oligonucleotide
  Antisense strand to SEQ ID NO: 624214
aacacaacucgggauccga

SEQ ID NO: 624216 - RNA, 19 nt, Artificial Sequence
  Description of Artificial Sequence: Synthetic oligonucleotide
  Sense strand starting at position 2106 of SEQ ID NO: 585240
ucccgaguuguguuuguua

SEQ ID NO: 624217 - RNA, 19 nt, Artificial Sequence
  Description of Artificial Sequence: Synthetic oligonucleotide
  Antisense strand to SEQ ID NO: 624216
uaacaaacacaacucggga

SEQ ID NO: 624218 - RNA, 19 nt, Artificial Sequence
  Description of Artificial Sequence: Synthetic oligonucleotide
  Sense strand starting at position 2340 of SEQ ID NO: 585240
gaucuuuaacuguggacuu

SEQ ID NO: 624219 - RNA, 19 nt, Artificial Sequence
  Description of Artificial Sequence: Synthetic oligonucleotide
  Antisense strand to SEQ ID NO: 624218
aaguccacaguuaaagauc

SEQ ID NO: 624220 - RNA, 19 nt, Artificial Sequence
  Description of Artificial Sequence: Synthetic oligonucleotide
  Sense strand starting at position 2417 of SEQ ID NO: 585240
ugccacuggcauuaagauu

SEQ ID NO: 624221 - RNA, 19 nt, Artificial Sequence
  Description of Artificial Sequence: Synthetic oligonucleotide
  Antisense strand to SEQ ID NO: 624220
aaucuuaaugccaguggca

SEQ ID NO: 624222 - RNA, 19 nt, Artificial Sequence
  Description of Artificial Sequence: Synthetic oligonucleotide
  Sense strand starting at position 2451 of SEQ ID NO: 585240
cacuuaagugagggaagua

SEQ ID NO: 624223 - RNA, 19 nt, Artificial Sequence
  Description of Artificial Sequence: Synthetic oligonucleotide
  Antisense strand to SEQ ID NO: 624222
uacuucccucacuuaagug

SEQ ID NO: 624224 - RNA, 19 nt, Artificial Sequence
  Description of Artificial Sequence: Synthetic oligonucleotide
  Sense strand starting at position 2484 of SEQ ID NO: 585240
gagaguccugccuauugag

SEQ ID NO: 624225 - RNA, 19 nt, Artificial Sequence
  Description of Artificial Sequence: Synthetic oligonucleotide
  Antisense strand to SEQ ID NO: 624224
cucaauaggcaggacucuc

SEQ ID NO: 624226 - RNA, 19 nt, Artificial Sequence
  Description of Artificial Sequence: Synthetic oligonucleotide
  Sense strand starting at position 2521 of SEQ ID NO: 585240
aucaaacugguuuaguuua

SEQ ID NO: 624227 - RNA, 19 nt, Artificial Sequence
  Description of Artificial Sequence: Synthetic oligonucleotide
  Antisense strand to SEQ ID NO: 624226
uaaacuaaaccaguuugau

SEQ ID NO: 624228 - RNA, 19 nt, Artificial Sequence
  Description of Artificial Sequence: Synthetic oligonucleotide
  Sense strand starting at position 2720 of SEQ ID NO: 585240
acaauugcuccauggauug

SEQ ID NO: 624229 - RNA, 19 nt, Artificial Sequence
  Description of Artificial Sequence: Synthetic oligonucleotide
  Antisense strand to SEQ ID NO: 624228
caauccauggagcaauugu

SEQ ID NO: 624230 - RNA, 19 nt, Artificial Sequence
  Description of Artificial Sequence: Synthetic oligonucleotide
  Sense strand starting at position 2725 of SEQ ID NO: 585240
ugcuccauggauugagaua

SEQ ID NO: 624231 - RNA, 19 nt, Artificial Sequence
  Description of Artificial Sequence: Synthetic oligonucleotide
  Antisense strand to SEQ ID NO: 624230
uaucucaauccauggagca

SEQ ID NO: 624232 - RNA, 19 nt, Artificial Sequence
  Description of Artificial Sequence: Synthetic oligonucleotide
  Sense strand starting at position 2753 of SEQ ID NO: 585240
caggguauuugggaacgaa

SEQ ID NO: 624233 - RNA, 19 nt, Artificial Sequence
  Description of Artificial Sequence: Synthetic oligonucleotide
  Antisense strand to SEQ ID NO: 624232
uucguucccaaauacccug

SEQ ID NO: 624234 - RNA, 19 nt, Artificial Sequence
  Description of Artificial Sequence: Synthetic oligonucleotide
  Sense strand starting at position 2834 of SEQ ID NO: 585240
ucauaaagucacuggaagu

SEQ ID NO: 624235 - RNA, 19 nt, Artificial Sequence
  Description of Artificial Sequence: Synthetic oligonucleotide
  Antisense strand to SEQ ID NO: 624234
acuuccagugacuuuauga

SEQ ID NO: 624236 - RNA, 19 nt, Artificial Sequence
  Description of Artificial Sequence: Synthetic oligonucleotide
  Sense strand starting at position 2853 of SEQ ID NO: 585240
ggaggugcacuuuacuuua

SEQ ID NO: 624237 - RNA, 19 nt, Artificial Sequence
  Description of Artificial Sequence: Synthetic oligonucleotide
  Antisense strand to SEQ ID NO: 624236
uaaaguaaagugcaccucc

SEQ ID NO: 624238 - RNA, 19 nt, Artificial Sequence
  Description of Artificial Sequence: Synthetic oligonucleotide
  Sense strand starting at position 3095 of SEQ ID NO: 585240
ugaagauuguauuccaaug

SEQ ID NO: 624239 - RNA, 19 nt, Artificial Sequence
  Description of Artificial Sequence: Synthetic oligonucleotide
  Antisense strand to SEQ ID NO: 624238
cauuggaauacaaucuuca

SEQ ID NO: 624240 - RNA, 19 nt, Artificial Sequence
  Description of Artificial Sequence: Synthetic oligonucleotide
  Sense strand starting at position 3140 of SEQ ID NO: 585240
auaagugacauguagugau

SEQ ID NO: 624241 - RNA, 19 nt, Artificial Sequence
  Description of Artificial Sequence: Synthetic oligonucleotide
  Antisense strand to SEQ ID NO: 624240
aucacuacaugucacuuau

SEQ ID NO: 624242 - RNA, 19 nt, Artificial Sequence
  Description of Artificial Sequence: Synthetic oligonucleotide
  Sense strand starting at position 3144 of SEQ ID NO: 585240
gugacauguagugauuaaa

SEQ ID NO: 624243 - RNA, 19 nt, Artificial Sequence
  Description of Artificial Sequence: Synthetic oligonucleotide
  Antisense strand to SEQ ID NO: 624242
uuuaaucacuacaugucac

SEQ ID NO: 624244 - RNA, 19 nt, Artificial Sequence
  Description of Artificial Sequence: Synthetic oligonucleotide
  Sense strand starting at position 3147 of SEQ ID NO: 585240
acauguagugauuaaacga

SEQ ID NO: 624245 - RNA, 19 nt, Artificial Sequence
  Description of Artificial Sequence: Synthetic oligonucleotide
  Antisense strand to SEQ ID NO: 624244
ucguuuaaucacuacaugu

SEQ ID NO: 624246 - RNA, 19 nt, Artificial Sequence
  Description of Artificial Sequence: Synthetic oligonucleotide
  Sense strand starting at position 3154 of SEQ ID NO: 585240
gugauuaaacgacaaguuc

SEQ ID NO: 624247 - RNA, 19 nt, Artificial Sequence
  Description of Artificial Sequence: Synthetic oligonucleotide
  Antisense strand to SEQ ID NO: 624246
gaacuugucguuuaaucac

SEQ ID NO: 624248 - RNA, 19 nt, Artificial Sequence
  Description of Artificial Sequence: Synthetic oligonucleotide
  Sense strand starting at position 3187 of SEQ ID NO: 585240
gaaguagagcuuugagagu

SEQ ID NO: 624249 - RNA, 19 nt, Artificial Sequence
  Description of Artificial Sequence: Synthetic oligonucleotide
  Antisense strand to SEQ ID NO: 624248
acucucaaagcucuacuuc

SEQ ID NO: 624250 - RNA, 19 nt, Artificial Sequence
  Description of Artificial Sequence: Synthetic oligonucleotide
  Sense strand starting at position 3244 of SEQ ID NO: 585240
uccuuugaacaaugucuga

SEQ ID NO: 624251 - RNA, 19 nt, Artificial Sequence
  Description of Artificial Sequence: Synthetic oligonucleotide
  Antisense strand to SEQ ID NO: 624250
ucagacauuguucaaagga

SEQ ID NO: 624252 - RNA, 19 nt, Artificial Sequence
  Description of Artificial Sequence: Synthetic oligonucleotide
  Sense strand starting at position 3248 of SEQ ID NO: 585240
uugaacaaugucugaguga

SEQ ID NO: 624253 - RNA, 19 nt, Artificial Sequence
  Description of Artificial Sequence: Synthetic oligonucleotide
  Antisense strand to SEQ ID NO: 624252
ucacucagacauuguucaa

SEQ ID NO: 624254 - RNA, 19 nt, Artificial Sequence
  Description of Artificial Sequence: Synthetic oligonucleotide
  Sense strand starting at position 3251 of SEQ ID NO: 585240
aacaaugucugagugaauu

SEQ ID NO: 624255 - RNA, 19 nt, Artificial Sequence
  Description of Artificial Sequence: Synthetic oligonucleotide
  Antisense strand to SEQ ID NO: 624254
aauucacucagacauuguu

SEQ ID NO: 624256 - RNA, 19 nt, Artificial Sequence
  Description of Artificial Sequence: Synthetic oligonucleotide
  Sense strand starting at position 3274 of SEQ ID NO: 585240
uagguaguugcccaaucaa

SEQ ID NO: 624257 - RNA, 19 nt, Artificial Sequence
  Description of Artificial Sequence: Synthetic oligonucleotide
  Antisense strand to SEQ ID NO: 624256
uugauugggcaacuaccua

SEQ ID NO: 624258 - RNA, 19 nt, Artificial Sequence
  Description of Artificial Sequence: Synthetic oligonucleotide
  Sense strand starting at position 3657 of SEQ ID NO: 585240
aaacgauauggcuggaaca

SEQ ID NO: 624259 - RNA, 19 nt, Artificial Sequence
  Description of Artificial Sequence: Synthetic oligonucleotide
  Antisense strand to SEQ ID NO: 624258
uguuccagccauaucguuu

SEQ ID NO: 624260 - RNA, 19 nt, Artificial Sequence
  Description of Artificial Sequence: Synthetic oligonucleotide
  Sense strand starting at position 3659 of SEQ ID NO: 585240
acgauauggcuggaacagu

SEQ ID NO: 624261 - RNA, 19 nt, Artificial Sequence
  Description of Artificial Sequence: Synthetic oligonucleotide
  Antisense strand to SEQ ID NO: 624260
acuguuccagccauaucgu

SEQ ID NO: 624262 - RNA, 19 nt, Artificial Sequence
  Description of Artificial Sequence: Synthetic oligonucleotide
  Sense strand starting at position 3672 of SEQ ID NO: 585240
aacaguauggguggaacua

SEQ ID NO: 624263 - RNA, 19 nt, Artificial Sequence
  Description of Artificial Sequence: Synthetic oligonucleotide
  Antisense strand to SEQ ID NO: 624262
uaguuccacccauacuguu

SEQ ID NO: 624264 - RNA, 19 nt, Artificial Sequence
  Description of Artificial Sequence: Synthetic oligonucleotide
  Sense strand starting at position 3694 of SEQ ID NO: 585240
gccacuuaucauggaaaca

SEQ ID NO: 624265 - RNA, 19 nt, Artificial Sequence
  Description of Artificial Sequence: Synthetic oligonucleotide
  Antisense strand to SEQ ID NO: 624264
uguuuccaugauaaguggc

SEQ ID NO: 624266 - RNA, 19 nt, Artificial Sequence
  Description of Artificial Sequence: Synthetic oligonucleotide
  Sense strand starting at position 3730 of SEQ ID NO: 585240
gugcuauaaggugauauga

SEQ ID NO: 624267 - RNA, 19 nt, Artificial Sequence
  Description of Artificial Sequence: Synthetic oligonucleotide
  Antisense strand to SEQ ID NO: 624266
ucauaucaccuuauagcac

SEQ ID NO: 624268 - RNA, 19 nt, Artificial Sequence
  Description of Artificial Sequence: Synthetic oligonucleotide
  Sense strand starting at position 3778 of SEQ ID NO: 585240
uauggcguuggauaucauu

SEQ ID NO: 624269 - RNA, 19 nt, Artificial Sequence
  Description of Artificial Sequence: Synthetic oligonucleotide
  Antisense strand to SEQ ID NO: 624268
aaugauauccaacgccaua

SEQ ID NO: 624270 - RNA, 19 nt, Artificial Sequence
  Description of Artificial Sequence: Synthetic oligonucleotide
  Sense strand starting at position 3868 of SEQ ID NO: 585240
uuugauauaacacgaguga

SEQ ID NO: 624271 - RNA, 19 nt, Artificial Sequence
  Description of Artificial Sequence: Synthetic oligonucleotide
  Antisense strand to SEQ ID NO: 624270
ucacucguguuauaucaaa

SEQ ID NO: 624272 - RNA, 19 nt, Artificial Sequence
  Description of Artificial Sequence: Synthetic oligonucleotide
  Sense strand starting at position 3872 of SEQ ID NO: 585240
auauaacacgagugaaaug

SEQ ID NO: 624273 - RNA, 19 nt, Artificial Sequence
  Description of Artificial Sequence: Synthetic oligonucleotide
  Antisense strand to SEQ ID NO: 624272
cauuucacucguguuauau

SEQ ID NO: 624274 - RNA, 19 nt, Artificial Sequence
  Description of Artificial Sequence: Synthetic oligonucleotide
  Sense strand starting at position 58 of SEQ ID NO: 585241
accacuugaccguaauaug

SEQ ID NO: 624275 - RNA, 19 nt, Artificial Sequence
  Description of Artificial Sequence: Synthetic oligonucleotide
  Antisense strand to SEQ ID NO: 624274
cauauuacggucaaguggu

SEQ ID NO: 624276 - RNA, 19 nt, Artificial Sequence
  Description of Artificial Sequence: Synthetic oligonucleotide
  Sense strand starting at position 94 of SEQ ID NO: 585241
accuaauaguacuucggaa

SEQ ID NO: 624277 - RNA, 19 nt, Artificial Sequence
  Description of Artificial Sequence: Synthetic oligonucleotide
  Antisense strand to SEQ ID NO: 624276
uuccgaaguacuauuaggu

SEQ ID NO: 624278 - RNA, 19 nt, Artificial Sequence
  Description of Artificial Sequence: Synthetic oligonucleotide
  Sense strand starting at position 96 of SEQ ID NO: 585241
cuaauaguacuucggaaau

SEQ ID NO: 624279 - RNA, 19 nt, Artificial Sequence
  Description of Artificial Sequence: Synthetic oligonucleotide
  Antisense strand to SEQ ID NO: 624278
auuuccgaaguacuauuag

SEQ ID NO: 624280 - RNA, 19 nt, Artificial Sequence
  Description of Artificial Sequence: Synthetic oligonucleotide
  Sense strand starting at position 102 of SEQ ID NO: 585241
guacuucggaaauaagcaa

SEQ ID NO: 624281 - RNA, 19 nt, Artificial Sequence
  Description of Artificial Sequence: Synthetic oligonucleotide
  Antisense strand to SEQ ID NO: 624280
uugcuuauuuccgaaguac

SEQ ID NO: 624282 - RNA, 19 nt, Artificial Sequence
  Description of Artificial Sequence: Synthetic oligonucleotide
  Sense strand starting at position 282 of SEQ ID NO: 585241
gggacaccuugauuccuau

SEQ ID NO: 624283 - RNA, 19 nt, Artificial Sequence
  Description of Artificial Sequence: Synthetic oligonucleotide
  Antisense strand to SEQ ID NO: 624282
auaggaaucaagguguccc

SEQ ID NO: 624284 - RNA, 19 nt, Artificial Sequence
  Description of Artificial Sequence: Synthetic oligonucleotide
  Sense strand starting at position 310 of SEQ ID NO: 585241
ccuugaagucaguggauag

SEQ ID NO: 624285 - RNA, 19 nt, Artificial Sequence
  Description of Artificial Sequence: Synthetic oligonucleotide
  Antisense strand to SEQ ID NO: 624284
cuauccacugacuucaagg

SEQ ID NO: 624286 - RNA, 19 nt, Artificial Sequence
  Description of Artificial Sequence: Synthetic oligonucleotide
  Sense strand starting at position 314 of SEQ ID NO: 585241
gaagucaguggauagcaua

SEQ ID NO: 624287 - RNA, 19 nt, Artificial Sequence
  Description of Artificial Sequence: Synthetic oligonucleotide
  Antisense strand to SEQ ID NO: 624286
uaugcuauccacugacuuc

SEQ ID NO: 624288 - RNA, 19 nt, Artificial Sequence
  Description of Artificial Sequence: Synthetic oligonucleotide
  Sense strand starting at position 890 of SEQ ID NO: 585241
ggcauuagauugucacaag

SEQ ID NO: 624289 - RNA, 19 nt, Artificial Sequence
  Description of Artificial Sequence: Synthetic oligonucleotide
  Antisense strand to SEQ ID NO: 624288
cuugugacaaucuaaugcc

SEQ ID NO: 624290 - RNA, 19 nt, Artificial Sequence
  Description of Artificial Sequence: Synthetic oligonucleotide
  Sense strand starting at position 949 of SEQ ID NO: 585241
acaguuugagcuuaugaga

SEQ ID NO: 624291 - RNA, 19 nt, Artificial Sequence
  Description of Artificial Sequence: Synthetic oligonucleotide
  Antisense strand to SEQ ID NO: 624290
ucucauaagcucaaacugu

SEQ ID NO: 624292 - RNA, 19 nt, Artificial Sequence
  Description of Artificial Sequence: Synthetic oligonucleotide
  Sense strand starting at position 1034 of SEQ ID NO: 585241
ucagcugugcggcucaauu

SEQ ID NO: 624293 - RNA, 19 nt, Artificial Sequence
  Description of Artificial Sequence: Synthetic oligonucleotide
  Antisense strand to SEQ ID NO: 624292
aauugagccgcacagcuga

SEQ ID NO: 624294 - RNA, 19 nt, Artificial Sequence
  Description of Artificial Sequence: Synthetic oligonucleotide
  Sense strand starting at position 1154 of SEQ ID NO: 585241
gaagccuggccugaauuaa

SEQ ID NO: 624295 - RNA, 19 nt, Artificial Sequence
  Description of Artificial Sequence: Synthetic oligonucleotide
  Antisense strand to SEQ ID NO: 624294
uuaauucaggccaggcuuc

SEQ ID NO: 624296 - RNA, 19 nt, Artificial Sequence
  Description of Artificial Sequence: Synthetic oligonucleotide
  Sense strand starting at position 1490 of SEQ ID NO: 585241
cggcuucuuggcucucuua

SEQ ID NO: 624297 - RNA, 19 nt, Artificial Sequence
  Description of Artificial Sequence: Synthetic oligonucleotide
  Antisense strand to SEQ ID NO: 624296
uaagagagccaagaagccg

SEQ ID NO: 624298 - RNA, 19 nt, Artificial Sequence
  Description of Artificial Sequence: Synthetic oligonucleotide
  Sense strand starting at position 1700 of SEQ ID NO: 585241
caguuugaugcggcuguua

SEQ ID NO: 624299 - RNA, 19 nt, Artificial Sequence
  Description of Artificial Sequence: Synthetic oligonucleotide
  Antisense strand to SEQ ID NO: 624298
uaacagccgcaucaaacug

SEQ ID NO: 624300 - RNA, 19 nt, Artificial Sequence
  Description of Artificial Sequence: Synthetic oligonucleotide
  Sense strand starting at position 1811 of SEQ ID NO: 585241
ggugaucaacuuggacaca

SEQ ID NO: 624301 - RNA, 19 nt, Artificial Sequence
  Description of Artificial Sequence: Synthetic oligonucleotide
  Antisense strand to SEQ ID NO: 624300
uguguccaaguugaucacc

SEQ ID NO: 624302 - RNA, 19 nt, Artificial Sequence
  Description of Artificial Sequence: Synthetic oligonucleotide
  Sense strand starting at position 1966 of SEQ ID NO: 585241
agaaacgcaagauguaaua

SEQ ID NO: 624303 - RNA, 19 nt, Artificial Sequence
  Description of Artificial Sequence: Synthetic oligonucleotide
  Antisense strand to SEQ ID NO: 624302
uauuacaucuugcguuucu

SEQ ID NO: 624304 - RNA, 19 nt, Artificial Sequence
  Description of Artificial Sequence: Synthetic oligonucleotide
  Sense strand starting at position 1975 of SEQ ID NO: 585241
agauguaauaaccagcgaa

SEQ ID NO: 624305 - RNA, 19 nt, Artificial Sequence
  Description of Artificial Sequence: Synthetic oligonucleotide
  Antisense strand to SEQ ID NO: 624304
uucgcugguuauuacaucu

SEQ ID NO: 624306 - RNA, 19 nt, Artificial Sequence
  Description of Artificial Sequence: Synthetic oligonucleotide
  Sense strand starting at position 2089 of SEQ ID NO: 585241
aggaguauuuguguuuguu

SEQ ID NO: 624307 - RNA, 19 nt, Artificial Sequence
  Description of Artificial Sequence: Synthetic oligonucleotide
  Antisense strand to SEQ ID NO: 624306
aacaaacacaaauacuccu

SEQ ID NO: 624308 - RNA, 19 nt, Artificial Sequence
  Description of Artificial Sequence: Synthetic oligonucleotide
  Sense strand starting at position 2146 of SEQ ID NO: 585241
cagaaucucccagggucua

SEQ ID NO: 624309 - RNA, 19 nt, Artificial Sequence
  Description of Artificial Sequence: Synthetic oligonucleotide
  Antisense strand to SEQ ID NO: 624308
uagacccugggagauucug

SEQ ID NO: 624310 - RNA, 19 nt, Artificial Sequence
  Description of Artificial Sequence: Synthetic oligonucleotide
  Sense strand starting at position 2158 of SEQ ID NO: 585241
gggucuagugcugaauaau

SEQ ID NO: 624311 - RNA, 19 nt, Artificial Sequence
  Description of Artificial Sequence: Synthetic oligonucleotide
  Antisense strand to SEQ ID NO: 624310
auuauucagcacuagaccc

SEQ ID NO: 624312 - RNA, 19 nt, Artificial Sequence
  Description of Artificial Sequence: Synthetic oligonucleotide
  Sense strand starting at position 2168 of SEQ ID NO: 585241
cugaauaaucugcggaaau

SEQ ID NO: 624313 - RNA, 19 nt, Artificial Sequence
  Description of Artificial Sequence: Synthetic oligonucleotide
  Antisense strand to SEQ ID NO: 624312
auuuccgcagauuauucag

SEQ ID NO: 624314 - RNA, 19 nt, Artificial Sequence
  Description of Artificial Sequence: Synthetic oligonucleotide
  Sense strand starting at position 2170 of SEQ ID NO: 585241
gaauaaucugcggaaauuc

SEQ ID NO: 624315 - RNA, 19 nt, Artificial Sequence
  Description of Artificial Sequence: Synthetic oligonucleotide
  Antisense strand to SEQ ID NO: 624314
gaauuuccgcagauuauuc

SEQ ID NO: 624316 - RNA, 19 nt, Artificial Sequence
  Description of Artificial Sequence: Synthetic oligonucleotide
  Sense strand starting at position 2316 of SEQ ID NO: 585241
auaaguaaucuuuggcaga

SEQ ID NO: 624317 - RNA, 19 nt, Artificial Sequence
  Description of Artificial Sequence: Synthetic oligonucleotide
  Antisense strand to SEQ ID NO: 624316
ucugccaaagauuacuuau

SEQ ID NO: 624318 - RNA, 19 nt, Artificial Sequence
  Description of Artificial Sequence: Synthetic oligonucleotide
  Sense strand starting at position 2318 of SEQ ID NO: 585241
aaguaaucuuuggcagaag

SEQ ID NO: 624319 - RNA, 19 nt, Artificial Sequence
  Description of Artificial Sequence: Synthetic oligonucleotide
  Antisense strand to SEQ ID NO: 624318
cuucugccaaagauuacuu

SEQ ID NO: 624320 - RNA, 19 nt, Artificial Sequence
  Description of Artificial Sequence: Synthetic oligonucleotide
  Sense strand starting at position 2358 of SEQ ID NO: 585241
uggucuuccaaauggauag

SEQ ID NO: 624321 - RNA, 19 nt, Artificial Sequence
  Description of Artificial Sequence: Synthetic oligonucleotide
  Antisense strand to SEQ ID NO: 624320
cuauccauuuggaagacca

SEQ ID NO: 624322 - RNA, 19 nt, Artificial Sequence
  Description of Artificial Sequence: Synthetic oligonucleotide
  Sense strand starting at position 2376 of SEQ ID NO: 585241
gcuucaaaucgguagagga

SEQ ID NO: 624323 - RNA, 19 nt, Artificial Sequence
  Description of Artificial Sequence: Synthetic oligonucleotide
  Antisense strand to SEQ ID NO: 624322
uccucuaccgauuugaagc

SEQ ID NO: 624324 - RNA, 19 nt, Artificial Sequence
  Description of Artificial Sequence: Synthetic oligonucleotide
  Sense strand starting at position 2431 of SEQ ID NO: 585241
auuuauauaugugagggaa

SEQ ID NO: 624325 - RNA, 19 nt, Artificial Sequence
  Description of Artificial Sequence: Synthetic oligonucleotide
  Antisense strand to SEQ ID NO: 624324
uucccucacauauauaaau

SEQ ID NO: 624326 - RNA, 19 nt, Artificial Sequence
  Description of Artificial Sequence: Synthetic oligonucleotide
  Sense strand starting at position 2434 of SEQ ID NO: 585241
uauauaugugagggaagua

SEQ ID NO: 624327 - RNA, 19 nt, Artificial Sequence
  Description of Artificial Sequence: Synthetic oligonucleotide
  Antisense strand to SEQ ID NO: 624326
uacuucccucacauauaua

SEQ ID NO: 624328 - RNA, 19 nt, Artificial Sequence
  Description of Artificial Sequence: Synthetic oligonucleotide
  Sense strand starting at position 2480 of SEQ ID NO: 585241
ggagucagaagaugcuuau

SEQ ID NO: 624329 - RNA, 19 nt, Artificial Sequence
  Description of Artificial Sequence: Synthetic oligonucleotide
  Antisense strand to SEQ ID NO: 624328
auaagcaucuucugacucc

SEQ ID NO: 624330 - RNA, 19 nt, Artificial Sequence
  Description of Artificial Sequence: Synthetic oligonucleotide
  Sense strand starting at position 2483 of SEQ ID NO: 585241
gucagaagaugcuuauaga

SEQ ID NO: 624331 - RNA, 19 nt, Artificial Sequence
  Description of Artificial Sequence: Synthetic oligonucleotide
  Antisense strand to SEQ ID NO: 624330
ucuauaagcaucuucugac

SEQ ID NO: 624332 - RNA, 19 nt, Artificial Sequence
  Description of Artificial Sequence: Synthetic oligonucleotide
  Sense strand starting at position 2528 of SEQ ID NO: 585241
uuuauuuaggcaugugcaa

SEQ ID NO: 624333 - RNA, 19 nt, Artificial Sequence
  Description of Artificial Sequence: Synthetic oligonucleotide
  Antisense strand to SEQ ID NO: 624332
uugcacaugccuaaauaaa

SEQ ID NO: 624334 - RNA, 19 nt, Artificial Sequence
  Description of Artificial Sequence: Synthetic oligonucleotide
  Sense strand starting at position 2573 of SEQ ID NO: 585241
auggguugucuguaauuaa

SEQ ID NO: 624335 - RNA, 19 nt, Artificial Sequence
  Description of Artificial Sequence: Synthetic oligonucleotide
  Antisense strand to SEQ ID NO: 624334
uuaauuacagacaacccau

SEQ ID NO: 624336 - RNA, 19 nt, Artificial Sequence
  Description of Artificial Sequence: Synthetic oligonucleotide
  Sense strand starting at position 2662 of SEQ ID NO: 585241
uauguaagauuggccauaa

SEQ ID NO: 624337 - RNA, 19 nt, Artificial Sequence
  Description of Artificial Sequence: Synthetic oligonucleotide
  Antisense strand to SEQ ID NO: 624336
uuauggccaaucuuacaua

SEQ ID NO: 624338 - RNA, 19 nt, Artificial Sequence
  Description of Artificial Sequence: Synthetic oligonucleotide
  Sense strand starting at position 2663 of SEQ ID NO: 585241
auguaagauuggccauaau

SEQ ID NO: 624339 - RNA, 19 nt, Artificial Sequence
  Description of Artificial Sequence: Synthetic oligonucleotide
  Antisense strand to SEQ ID NO: 624338
auuauggccaaucuuacau

SEQ ID NO: 624340 - RNA, 19 nt, Artificial Sequence
  Description of Artificial Sequence: Synthetic oligonucleotide
  Sense strand starting at position 3145 of SEQ ID NO: 585241
ggcagauuuggcugcauag

SEQ ID NO: 624341 - RNA, 19 nt, Artificial Sequence
  Description of Artificial Sequence: Synthetic oligonucleotide
  Antisense strand to SEQ ID NO: 624340
cuaugcagccaaaucugcc

SEQ ID NO: 624342 - RNA, 19 nt, Artificial Sequence
  Description of Artificial Sequence: Synthetic oligonucleotide
  Sense strand starting at position 3169 of SEQ ID NO: 585241
gggaaaggguuguuggaau

SEQ ID NO: 624343 - RNA, 19 nt, Artificial Sequence
  Description of Artificial Sequence: Synthetic oligonucleotide
  Antisense strand to SEQ ID NO: 624342
auuccaacaacccuuuccc

SEQ ID NO: 624344 - RNA, 19 nt, Artificial Sequence
  Description of Artificial Sequence: Synthetic oligonucleotide
  Sense strand starting at position 3219 of SEQ ID NO: 585241
ggaacaggucuuugugaga

SEQ ID NO: 624345 - RNA, 19 nt, Artificial Sequence
  Description of Artificial Sequence: Synthetic oligonucleotide
  Antisense strand to SEQ ID NO: 624344
ucucacaaagaccuguucc

SEQ ID NO: 624346 - RNA, 19 nt, Artificial Sequence
  Description of Artificial Sequence: Synthetic oligonucleotide
  Sense strand starting at position 3247 of SEQ ID NO: 585241
auaagagcuugcucacaaa

SEQ ID NO: 624347 - RNA, 19 nt, Artificial Sequence
  Description of Artificial Sequence: Synthetic oligonucleotide
  Antisense strand to SEQ ID NO: 624346
uuugugagcaagcucuuau

SEQ ID NO: 624348 - RNA, 19 nt, Artificial Sequence
  Description of Artificial Sequence: Synthetic oligonucleotide
  Sense strand starting at position 3362 of SEQ ID NO: 585241
ccaaauacuugugugaaac

SEQ ID NO: 624349 - RNA, 19 nt, Artificial Sequence
  Description of Artificial Sequence: Synthetic oligonucleotide
  Antisense strand to SEQ ID NO: 624348
guuucacacaaguauuugg

SEQ ID NO: 624350 - RNA, 19 nt, Artificial Sequence
  Description of Artificial Sequence: Synthetic oligonucleotide
  Sense strand starting at position 3375 of SEQ ID NO: 585241
ugaaacauuugguagauau

SEQ ID NO: 624351 - RNA, 19 nt, Artificial Sequence
  Description of Artificial Sequence: Synthetic oligonucleotide
  Antisense strand to SEQ ID NO: 624350
auaucuaccaaauguuuca

SEQ ID NO: 624352 - RNA, 19 nt, Artificial Sequence
  Description of Artificial Sequence: Synthetic oligonucleotide
  Sense strand starting at position 3739 of SEQ ID NO: 585241
guuguaguugucuuggguu

SEQ ID NO: 624353 - RNA, 19 nt, Artificial Sequence
  Description of Artificial Sequence: Synthetic oligonucleotide
  Antisense strand to SEQ ID NO: 624352
aacccaagacaacuacaac

SEQ ID NO: 624354 - RNA, 19 nt, Artificial Sequence
  Description of Artificial Sequence: Synthetic oligonucleotide
  Sense strand starting at position 60 of SEQ ID NO: 585242
gguucucuucuauaaaguc

SEQ ID NO: 624355 - RNA, 19 nt, Artificial Sequence
  Description of Artificial Sequence: Synthetic oligonucleotide
  Antisense strand to SEQ ID NO: 624354
gacuuuauagaagagaacc

SEQ ID NO: 624356 - RNA, 19 nt, Artificial Sequence
  Description of Artificial Sequence: Synthetic oligonucleotide
  Sense strand starting at position 118 of SEQ ID NO: 585242
agugccacuuucuugacaa

SEQ ID NO: 624357 - RNA, 19 nt, Artificial Sequence
  Description of Artificial Sequence: Synthetic oligonucleotide
  Antisense strand to SEQ ID NO: 624356
uugucaagaaaguggcacu

SEQ ID NO: 624358 - RNA, 19 nt, Artificial Sequence
  Description of Artificial Sequence: Synthetic oligonucleotide
  Sense strand starting at position 175 of SEQ ID NO: 585242
uuugucuuauauccugauu

SEQ ID NO: 624359 - RNA, 19 nt, Artificial Sequence
  Description of Artificial Sequence: Synthetic oligonucleotide
  Antisense strand to SEQ ID NO: 624358
aaucaggauauaagacaaa

SEQ ID NO: 624360 - RNA, 19 nt, Artificial Sequence
  Description of Artificial Sequence: Synthetic oligonucleotide
  Sense strand starting at position 201 of SEQ ID NO: 585242
uuacauuugccauguucua

SEQ ID NO: 624361 - RNA, 19 nt, Artificial Sequence
  Description of Artificial Sequence: Synthetic oligonucleotide
  Antisense strand to SEQ ID NO: 624360
uagaacauggcaaauguaa

SEQ ID NO: 624362 - RNA, 19 nt, Artificial Sequence
  Description of Artificial Sequence: Synthetic oligonucleotide
  Sense strand starting at position 401 of SEQ ID NO: 585242
ccuuauuauguguagacau

SEQ ID NO: 624363 - RNA, 19 nt, Artificial Sequence
  Description of Artificial Sequence: Synthetic oligonucleotide
  Antisense strand to SEQ ID NO: 624362
augucuacacauaauaagg

SEQ ID NO: 624364 - RNA, 19 nt, Artificial Sequence
  Description of Artificial Sequence: Synthetic oligonucleotide
  Sense strand starting at position 403 of SEQ ID NO: 585242
uuauuauguguagacauca

SEQ ID NO: 624365 - RNA, 19 nt, Artificial Sequence
  Description of Artificial Sequence: Synthetic oligonucleotide
  Antisense strand to SEQ ID NO: 624364
ugaugucuacacauaauaa

SEQ ID NO: 624366 - RNA, 19 nt, Artificial Sequence
  Description of Artificial Sequence: Synthetic oligonucleotide
  Sense strand starting at position 408 of SEQ ID NO: 585242
auguguagacaucaagugu

SEQ ID NO: 624367 - RNA, 19 nt, Artificial Sequence
  Description of Artificial Sequence: Synthetic oligonucleotide
  Antisense strand to SEQ ID NO: 624366
acacuugaugucuacacau

SEQ ID NO: 624368 - RNA, 19 nt, Artificial Sequence
  Description of Artificial Sequence: Synthetic oligonucleotide
  Sense strand starting at position 412 of SEQ ID NO: 585242
guagacaucaaguguuuag

SEQ ID NO: 624369 - RNA, 19 nt, Artificial Sequence
  Description of Artificial Sequence: Synthetic oligonucleotide
  Antisense strand to SEQ ID NO: 624368
cuaaacacuugaugucuac

SEQ ID NO: 624370 - RNA, 19 nt, Artificial Sequence
  Description of Artificial Sequence: Synthetic oligonucleotide
  Sense strand starting at position 416 of SEQ ID NO: 585242
acaucaaguguuuagcagu

SEQ ID NO: 624371 - RNA, 19 nt, Artificial Sequence
  Description of Artificial Sequence: Synthetic oligonucleotide
  Antisense strand to SEQ ID NO: 624370
acugcuaaacacuugaugu

SEQ ID NO: 624372 - RNA, 19 nt, Artificial Sequence
  Description of Artificial Sequence: Synthetic oligonucleotide
  Sense strand starting at position 480 of SEQ ID NO: 585242
ucaacuguugaauaucgua

SEQ ID NO: 624373 - RNA, 19 nt, Artificial Sequence
  Description of Artificial Sequence: Synthetic oligonucleotide
  Antisense strand to SEQ ID NO: 624372
uacgauauucaacaguuga

SEQ ID NO: 624374 - RNA, 19 nt, Artificial Sequence
  Description of Artificial Sequence: Synthetic oligonucleotide
  Sense strand starting at position 669 of SEQ ID NO: 585242
uuauguucggccuucuagu

SEQ ID NO: 624375 - RNA, 19 nt, Artificial Sequence
  Description of Artificial Sequence: Synthetic oligonucleotide
  Antisense strand to SEQ ID NO: 624374
acuagaaggccgaacauaa

SEQ ID NO: 624376 - RNA, 19 nt, Artificial Sequence
  Description of Artificial Sequence: Synthetic oligonucleotide
  Sense strand starting at position 689 of SEQ ID NO: 585242
ccauuccugccugagucua

SEQ ID NO: 624377 - RNA, 19 nt, Artificial Sequence
  Description of Artificial Sequence: Synthetic oligonucleotide
  Antisense strand to SEQ ID NO: 624376
uagacucaggcaggaaugg

SEQ ID NO: 624378 - RNA, 19 nt, Artificial Sequence
  Description of Artificial Sequence: Synthetic oligonucleotide
  Sense strand starting at position 803 of SEQ ID NO: 585242
cgugaaaccacagguauca

SEQ ID NO: 624379 - RNA, 19 nt, Artificial Sequence
  Description of Artificial Sequence: Synthetic oligonucleotide
  Antisense strand to SEQ ID NO: 624378
ugauaccugugguuucacg

SEQ ID NO: 624380 - RNA, 19 nt, Artificial Sequence
  Description of Artificial Sequence: Synthetic oligonucleotide
  Sense strand starting at position 942 of SEQ ID NO: 585242
gacugauguuaccuggauu

SEQ ID NO: 624381 - RNA, 19 nt, Artificial Sequence
  Description of Artificial Sequence: Synthetic oligonucleotide
  Antisense strand to SEQ ID NO: 624380
aauccagguaacaucaguc

SEQ ID NO: 624382 - RNA, 19 nt, Artificial Sequence
  Description of Artificial Sequence: Synthetic oligonucleotide
  Sense strand starting at position 1010 of SEQ ID NO: 585242
auguguaacccuuaacaua

SEQ ID NO: 624383 - RNA, 19 nt, Artificial Sequence
  Description of Artificial Sequence: Synthetic oligonucleotide
  Antisense strand to SEQ ID NO: 624382
uauguuaaggguuacacau

SEQ ID NO: 624384 - RNA, 19 nt, Artificial Sequence
  Description of Artificial Sequence: Synthetic oligonucleotide
  Sense strand starting at position 1425 of SEQ ID NO: 585242
gcauuugugacaggcaagu

SEQ ID NO: 624385 - RNA, 19 nt, Artificial Sequence
  Description of Artificial Sequence: Synthetic oligonucleotide
  Antisense strand to SEQ ID NO: 624384
acuugccugucacaaaugc

SEQ ID NO: 624386 - RNA, 19 nt, Artificial Sequence
  Description of Artificial Sequence: Synthetic oligonucleotide
  Sense strand starting at position 1439 of SEQ ID NO: 585242
caaguaagauggcugguua

SEQ ID NO: 624387 - RNA, 19 nt, Artificial Sequence
  Description of Artificial Sequence: Synthetic oligonucleotide
  Antisense strand to SEQ ID NO: 624386
uaaccagccaucuuacuug

SEQ ID NO: 624388 - RNA, 19 nt, Artificial Sequence
  Description of Artificial Sequence: Synthetic oligonucleotide
  Sense strand starting at position 1440 of SEQ ID NO: 585242
aaguaagauggcugguuaa

SEQ ID NO: 624389 - RNA, 19 nt, Artificial Sequence
  Description of Artificial Sequence: Synthetic oligonucleotide
  Antisense strand to SEQ ID NO: 624388
uuaaccagccaucuuacuu

SEQ ID NO: 624390 - RNA, 19 nt, Artificial Sequence
  Description of Artificial Sequence: Synthetic oligonucleotide
  Sense strand starting at position 1678 of SEQ ID NO: 585242
cuuauugaguuccucauca

SEQ ID NO: 624391 - RNA, 19 nt, Artificial Sequence
  Description of Artificial Sequence: Synthetic oligonucleotide
  Antisense strand to SEQ ID NO: 624390
ugaugaggaacucaauaag

SEQ ID NO: 624392 - RNA, 19 nt, Artificial Sequence
  Description of Artificial Sequence: Synthetic oligonucleotide
  Sense strand starting at position 1845 of SEQ ID NO: 585242
cauaguuucccuuacgaag

SEQ ID NO: 624393 - RNA, 19 nt, Artificial Sequence
  Description of Artificial Sequence: Synthetic oligonucleotide
  Antisense strand to SEQ ID NO: 624392
cuucguaagggaaacuaug

SEQ ID NO: 624394 - RNA, 19 nt, Artificial Sequence
  Description of Artificial Sequence: Synthetic oligonucleotide
  Sense strand starting at position 2021 of SEQ ID NO: 585242
gccuauuuauagucugacu

SEQ ID NO: 624395 - RNA, 19 nt, Artificial Sequence
  Description of Artificial Sequence: Synthetic oligonucleotide
  Antisense strand to SEQ ID NO: 624394
agucagacuauaaauaggc

SEQ ID NO: 624396 - RNA, 19 nt, Artificial Sequence
  Description of Artificial Sequence: Synthetic oligonucleotide
  Sense strand starting at position 2024 of SEQ ID NO: 585242
uauuuauagucugacugag

SEQ ID NO: 624397 - RNA, 19 nt, Artificial Sequence
  Description of Artificial Sequence: Synthetic oligonucleotide
  Antisense strand to SEQ ID NO: 624396
cucagucagacuauaaaua

SEQ ID NO: 624398 - RNA, 19 nt, Artificial Sequence
  Description of Artificial Sequence: Synthetic oligonucleotide
  Sense strand starting at position 2026 of SEQ ID NO: 585242
uuuauagucugacugaggu

SEQ ID NO: 624399 - RNA, 19 nt, Artificial Sequence
  Description of Artificial Sequence: Synthetic oligonucleotide
  Antisense strand to SEQ ID NO: 624398
accucagucagacuauaaa

SEQ ID NO: 624400 - RNA, 19 nt, Artificial Sequence
  Description of Artificial Sequence: Synthetic oligonucleotide
  Sense strand starting at position 2046 of SEQ ID NO: 585242
ggcauuugcuaucugauug

SEQ ID NO: 624401 - RNA, 19 nt, Artificial Sequence
  Description of Artificial Sequence: Synthetic oligonucleotide
  Antisense strand to SEQ ID NO: 624400
caaucagauagcaaaugcc

SEQ ID NO: 624402 - RNA, 19 nt, Artificial Sequence
  Description of Artificial Sequence: Synthetic oligonucleotide
  Sense strand starting at position 2100 of SEQ ID NO: 585242
agaaucgccucauuugcau

SEQ ID NO: 624403 - RNA, 19 nt, Artificial Sequence
  Description of Artificial Sequence: Synthetic oligonucleotide
  Antisense strand to SEQ ID NO: 624402
augcaaaugaggcgauucu

SEQ ID NO: 624404 - RNA, 19 nt, Artificial Sequence
  Description of Artificial Sequence: Synthetic oligonucleotide
  Sense strand starting at position 2218 of SEQ ID NO: 585242
uguuuacuuggcgagacuu

SEQ ID NO: 624405 - RNA, 19 nt, Artificial Sequence
  Description of Artificial Sequence: Synthetic oligonucleotide
  Antisense strand to SEQ ID NO: 624404
aagucucgccaaguaaaca

SEQ ID NO: 624406 - RNA, 19 nt, Artificial Sequence
  Description of Artificial Sequence: Synthetic oligonucleotide
  Sense strand starting at position 2246 of SEQ ID NO: 585242
gucauuuggagcuguuuaa

SEQ ID NO: 624407 - RNA, 19 nt, Artificial Sequence
  Description of Artificial Sequence: Synthetic oligonucleotide
  Antisense strand to SEQ ID NO: 624406
uuaaacagcuccaaaugac

SEQ ID NO: 624408 - RNA, 19 nt, Artificial Sequence
  Description of Artificial Sequence: Synthetic oligonucleotide
  Sense strand starting at position 2250 of SEQ ID NO: 585242
uuuggagcuguuuaauacu

SEQ ID NO: 624409 - RNA, 19 nt, Artificial Sequence
  Description of Artificial Sequence: Synthetic oligonucleotide
  Antisense strand to SEQ ID NO: 624408
aguauuaaacagcuccaaa

SEQ ID NO: 624410 - RNA, 19 nt, Artificial Sequence
  Description of Artificial Sequence: Synthetic oligonucleotide
  Sense strand starting at position 2820 of SEQ ID NO: 585242
aguuucuaaccguaagggu

SEQ ID NO: 624411 - RNA, 19 nt, Artificial Sequence
  Description of Artificial Sequence: Synthetic oligonucleotide
  Antisense strand to SEQ ID NO: 624410
acccuuacgguuagaaacu

SEQ ID NO: 624412 - RNA, 19 nt, Artificial Sequence
  Description of Artificial Sequence: Synthetic oligonucleotide
  Sense strand starting at position 3113 of SEQ ID NO: 585242
cugcgaauauauccaaauc

SEQ ID NO: 624413 - RNA, 19 nt, Artificial Sequence
  Description of Artificial Sequence: Synthetic oligonucleotide
  Antisense strand to SEQ ID NO: 624412
gauuuggauauauucgcag

SEQ ID NO: 624414 - RNA, 19 nt, Artificial Sequence
  Description of Artificial Sequence: Synthetic oligonucleotide
  Sense strand starting at position 3168 of SEQ ID NO: 585242
agacaauccuugcuaggca

SEQ ID NO: 624415 - RNA, 19 nt, Artificial Sequence
  Description of Artificial Sequence: Synthetic oligonucleotide
  Antisense strand to SEQ ID NO: 624414
ugccuagcaaggauugucu

SEQ ID NO: 624416 - RNA, 19 nt, Artificial Sequence
  Description of Artificial Sequence: Synthetic oligonucleotide
  Sense strand starting at position 3642 of SEQ ID NO: 585242
uaagucaagguguggaaau

SEQ ID NO: 624417 - RNA, 19 nt, Artificial Sequence
  Description of Artificial Sequence: Synthetic oligonucleotide
  Antisense strand to SEQ ID NO: 624416
auuuccacaccuugacuua

SEQ ID NO: 624418 - RNA, 19 nt, Artificial Sequence
  Description of Artificial Sequence: Synthetic oligonucleotide
  Sense strand starting at position 3655 of SEQ ID NO: 585242
ggaaaugauugugcgaacu

SEQ ID NO: 624419 - RNA, 19 nt, Artificial Sequence
  Description of Artificial Sequence: Synthetic oligonucleotide
  Antisense strand to SEQ ID NO: 624418
aguucgcacaaucauuucc

SEQ ID NO: 624420 - RNA, 19 nt, Artificial Sequence
  Description of Artificial Sequence: Synthetic oligonucleotide
  Sense strand starting at position 3665 of SEQ ID NO: 585242
gugcgaacucuggagaacu

SEQ ID NO: 624421 - RNA, 19 nt, Artificial Sequence
  Description of Artificial Sequence: Synthetic oligonucleotide
  Antisense strand to SEQ ID NO: 624420
aguucuccagaguucgcac

SEQ ID NO: 624422 - RNA, 19 nt, Artificial Sequence
  Description of Artificial Sequence: Synthetic oligonucleotide
  Sense strand starting at position 3667 of SEQ ID NO: 585242
gcgaacucuggagaacuca

SEQ ID NO: 624423 - RNA, 19 nt, Artificial Sequence
  Description of Artificial Sequence: Synthetic oligonucleotide
  Antisense strand to SEQ ID NO: 624422
ugaguucuccagaguucgc

SEQ ID NO: 624424 - RNA, 19 nt, Artificial Sequence
  Description of Artificial Sequence: Synthetic oligonucleotide
  Sense strand starting at position 3683 of SEQ ID NO: 585242
ucacaaaucugguuagcag

SEQ ID NO: 624425 - RNA, 19 nt, Artificial Sequence
  Description of Artificial Sequence: Synthetic oligonucleotide
  Antisense strand to SEQ ID NO: 624424
cugcuaaccagauuuguga

SEQ ID NO: 624426 - RNA, 19 nt, Artificial Sequence
  Description of Artificial Sequence: Synthetic oligonucleotide
  Sense strand starting at position 3690 of SEQ ID NO: 585242
ucugguuagcaggaauuaa

SEQ ID NO: 624427 - RNA, 19 nt, Artificial Sequence
  Description of Artificial Sequence: Synthetic oligonucleotide
  Antisense strand to SEQ ID NO: 624426
uuaauuccugcuaaccaga

SEQ ID NO: 624428 - RNA, 19 nt, Artificial Sequence
  Description of Artificial Sequence: Synthetic oligonucleotide
  Sense strand starting at position 3852 of SEQ ID NO: 585242
ccuggaaaccugugguuag

SEQ ID NO: 624429 - RNA, 19 nt, Artificial Sequence
  Description of Artificial Sequence: Synthetic oligonucleotide
  Antisense strand to SEQ ID NO: 624428
cuaaccacagguuuccagg

SEQ ID NO: 624430 - RNA, 19 nt, Artificial Sequence
  Description of Artificial Sequence: Synthetic oligonucleotide
  Sense strand starting at position 3862 of SEQ ID NO: 585242
ugugguuagcuggaauucu

SEQ ID NO: 624431 - RNA, 19 nt, Artificial Sequence
  Description of Artificial Sequence: Synthetic oligonucleotide
  Antisense strand to SEQ ID NO: 624430
agaauuccagcuaaccaca

SEQ ID NO: 624432 - RNA, 19 nt, Artificial Sequence
  Description of Artificial Sequence: Synthetic oligonucleotide
  Sense strand starting at position 3941 of SEQ ID NO: 585242
augugcuuucucuacauua

SEQ ID NO: 624433 - RNA, 19 nt, Artificial Sequence
  Description of Artificial Sequence: Synthetic oligonucleotide
  Antisense strand to SEQ ID NO: 624432
uaauguagagaaagcacau

SEQ ID NO: 624434 - RNA, 19 nt, Artificial Sequence
  Description of Artificial Sequence: Synthetic oligonucleotide
  Sense strand starting at position 118 of SEQ ID NO: 585243
gaugucuuugggcauaaua

SEQ ID NO: 624435 - RNA, 19 nt, Artificial Sequence
  Description of Artificial Sequence: Synthetic oligonucleotide
  Antisense strand to SEQ ID NO: 624434
uauuaugcccaaagacauc

SEQ ID NO: 624436 - RNA, 19 nt, Artificial Sequence
  Description of Artificial Sequence: Synthetic oligonucleotide
  Sense strand starting at position 460 of SEQ ID NO: 585243
ggauuuccgagcugucugu

SEQ ID NO: 624437 - RNA, 19 nt, Artificial Sequence
  Description of Artificial Sequence: Synthetic oligonucleotide
  Antisense strand to SEQ ID NO: 624436
acagacagcucggaaaucc

SEQ ID NO: 624438 - RNA, 19 nt, Artificial Sequence
  Description of Artificial Sequence: Synthetic oligonucleotide
  Sense strand starting at position 466 of SEQ ID NO: 585243
ccgagcugucuguuuagua

SEQ ID NO: 624439 - RNA, 19 nt, Artificial Sequence
  Description of Artificial Sequence: Synthetic oligonucleotide
  Antisense strand to SEQ ID NO: 624438
uacuaaacagacagcucgg

SEQ ID NO: 624440 - RNA, 19 nt, Artificial Sequence
  Description of Artificial Sequence: Synthetic oligonucleotide
  Sense strand starting at position 862 of SEQ ID NO: 585243
uuugcauaugcgcuuuauu

SEQ ID NO: 624441 - RNA, 19 nt, Artificial Sequence
  Description of Artificial Sequence: Synthetic oligonucleotide
  Antisense strand to SEQ ID NO: 624440
aauaaagcgcauaugcaaa

SEQ ID NO: 624442 - RNA, 19 nt, Artificial Sequence
  Description of Artificial Sequence: Synthetic oligonucleotide
  Sense strand starting at position 865 of SEQ ID NO: 585243
gcauaugcgcuuuauuuaa

SEQ ID NO: 624443 - RNA, 19 nt, Artificial Sequence
  Description of Artificial Sequence: Synthetic oligonucleotide
  Antisense strand to SEQ ID NO: 624442
uuaaauaaagcgcauaugc

SEQ ID NO: 624444 - RNA, 19 nt, Artificial Sequence
  Description of Artificial Sequence: Synthetic oligonucleotide
  Sense strand starting at position 896 of SEQ ID NO: 585243
cugggugucgcauaagaag

SEQ ID NO: 624445 - RNA, 19 nt, Artificial Sequence
  Description of Artificial Sequence: Synthetic oligonucleotide
  Antisense strand to SEQ ID NO: 624444
cuucuuaugcgacacccag

SEQ ID NO: 624446 - RNA, 19 nt, Artificial Sequence
  Description of Artificial Sequence: Synthetic oligonucleotide
  Sense strand starting at position 907 of SEQ ID NO: 585243
auaagaagugugggcaauu

SEQ ID NO: 624447 - RNA, 19 nt, Artificial Sequence
  Description of Artificial Sequence: Synthetic oligonucleotide
  Antisense strand to SEQ ID NO: 624446
aauugcccacacuucuuau

SEQ ID NO: 624448 - RNA, 19 nt, Artificial Sequence
  Description of Artificial Sequence: Synthetic oligonucleotide
  Sense strand starting at position 908 of SEQ ID NO: 585243
uaagaagugugggcaauua

SEQ ID NO: 624449 - RNA, 19 nt, Artificial Sequence
  Description of Artificial Sequence: Synthetic oligonucleotide
  Antisense strand to SEQ ID NO: 624448
uaauugcccacacuucuua

SEQ ID NO: 624450 - RNA, 19 nt, Artificial Sequence
  Description of Artificial Sequence: Synthetic oligonucleotide
  Sense strand starting at position 1158 of SEQ ID NO: 585243
gugugcucucaauugugua

SEQ ID NO: 624451 - RNA, 19 nt, Artificial Sequence
  Description of Artificial Sequence: Synthetic oligonucleotide
  Antisense strand to SEQ ID NO: 624450
uacacaauugagagcacac

SEQ ID NO: 624452 - RNA, 19 nt, Artificial Sequence
  Description of Artificial Sequence: Synthetic oligonucleotide
  Sense strand starting at position 1192 of SEQ ID NO: 585243
cagcaaaugguaugacaua

SEQ ID NO: 624453 - RNA, 19 nt, Artificial Sequence
  Description of Artificial Sequence: Synthetic oligonucleotide
  Antisense strand to SEQ ID NO: 624452
uaugucauaccauuugcug

SEQ ID NO: 624454 - RNA, 19 nt, Artificial Sequence
  Description of Artificial Sequence: Synthetic oligonucleotide
  Sense strand starting at position 1264 of SEQ ID NO: 585243
gaaugcacucauggguaua

SEQ ID NO: 624455 - RNA, 19 nt, Artificial Sequence
  Description of Artificial Sequence: Synthetic oligonucleotide
  Antisense strand to SEQ ID NO: 624454
uauacccaugagugcauuc

SEQ ID NO: 624456 - RNA, 19 nt, Artificial Sequence
  Description of Artificial Sequence: Synthetic oligonucleotide
  Sense strand starting at position 1266 of SEQ ID NO: 585243
augcacucauggguauaau

SEQ ID NO: 624457 - RNA, 19 nt, Artificial Sequence
  Description of Artificial Sequence: Synthetic oligonucleotide
  Antisense strand to SEQ ID NO: 624456
auuauacccaugagugcau

SEQ ID NO: 624458 - RNA, 19 nt, Artificial Sequence
  Description of Artificial Sequence: Synthetic oligonucleotide
  Sense strand starting at position 1267 of SEQ ID NO: 585243
ugcacucauggguauaauu

SEQ ID NO: 624459 - RNA, 19 nt, Artificial Sequence
  Description of Artificial Sequence: Synthetic oligonucleotide
  Antisense strand to SEQ ID NO: 624458
aauuauacccaugagugca

SEQ ID NO: 624460 - RNA, 19 nt, Artificial Sequence
  Description of Artificial Sequence: Synthetic oligonucleotide
  Sense strand starting at position 1381 of SEQ ID NO: 585243
ccuagaauuccugagguuu

SEQ ID NO: 624461 - RNA, 19 nt, Artificial Sequence
  Description of Artificial Sequence: Synthetic oligonucleotide
  Antisense strand to SEQ ID NO: 624460
aaaccucaggaauucuagg

SEQ ID NO: 624462 - RNA, 19 nt, Artificial Sequence
  Description of Artificial Sequence: Synthetic oligonucleotide
  Sense strand starting at position 1967 of SEQ ID NO: 585243
gagcuuuaccgccuuguuu

SEQ ID NO: 624463 - RNA, 19 nt, Artificial Sequence
  Description of Artificial Sequence: Synthetic oligonucleotide
  Antisense strand to SEQ ID NO: 624462
aaacaaggcgguaaagcuc

SEQ ID NO: 624464 - RNA, 19 nt, Artificial Sequence
  Description of Artificial Sequence: Synthetic oligonucleotide
  Sense strand starting at position 2075 of SEQ ID NO: 585243
uuuauacugacuggaggua

SEQ ID NO: 624465 - RNA, 19 nt, Artificial Sequence
  Description of Artificial Sequence: Synthetic oligonucleotide
  Antisense strand to SEQ ID NO: 624464
uaccuccagucaguauaaa

SEQ ID NO: 624466 - RNA, 19 nt, Artificial Sequence
  Description of Artificial Sequence: Synthetic oligonucleotide
  Sense strand starting at position 2087 of SEQ ID NO: 585243
ggagguaggcugugaggaa

SEQ ID NO: 624467 - RNA, 19 nt, Artificial Sequence
  Description of Artificial Sequence: Synthetic oligonucleotide
  Antisense strand to SEQ ID NO: 624466
uuccucacagccuaccucc

SEQ ID NO: 624468 - RNA, 19 nt, Artificial Sequence
  Description of Artificial Sequence: Synthetic oligonucleotide
  Sense strand starting at position 2178 of SEQ ID NO: 585243
ccgucugguguaagguuua

SEQ ID NO: 624469 - RNA, 19 nt, Artificial Sequence
  Description of Artificial Sequence: Synthetic oligonucleotide
  Antisense strand to SEQ ID NO: 624468
uaaaccuuacaccagacgg

SEQ ID NO: 624470 - RNA, 19 nt, Artificial Sequence
  Description of Artificial Sequence: Synthetic oligonucleotide
  Sense strand starting at position 2228 of SEQ ID NO: 585243
agccuucgacuugaauacu

SEQ ID NO: 624471 - RNA, 19 nt, Artificial Sequence
  Description of Artificial Sequence: Synthetic oligonucleotide
  Antisense strand to SEQ ID NO: 624470
aguauucaagucgaaggcu

SEQ ID NO: 624472 - RNA, 19 nt, Artificial Sequence
  Description of Artificial Sequence: Synthetic oligonucleotide
  Sense strand starting at position 2248 of SEQ ID NO: 585243
auaauaauuggccgaauua

SEQ ID NO: 624473 - RNA, 19 nt, Artificial Sequence
  Description of Artificial Sequence: Synthetic oligonucleotide
  Antisense strand to SEQ ID NO: 624472
uaauucggccaauuauuau

SEQ ID NO: 624474 - RNA, 19 nt, Artificial Sequence
  Description of Artificial Sequence: Synthetic oligonucleotide
  Sense strand starting at position 2249 of SEQ ID NO: 585243
uaauaauuggccgaauuag

SEQ ID NO: 624475 - RNA, 19 nt, Artificial Sequence
  Description of Artificial Sequence: Synthetic oligonucleotide
  Antisense strand to SEQ ID NO: 624474
cuaauucggccaauuauua

SEQ ID NO: 624476 - RNA, 19 nt, Artificial Sequence
  Description of Artificial Sequence: Synthetic oligonucleotide
  Sense strand starting at position 2708 of SEQ ID NO: 585243
ccagaagacugugucucaa

SEQ ID NO: 624477 - RNA, 19 nt, Artificial Sequence
  Description of Artificial Sequence: Synthetic oligonucleotide
  Antisense strand to SEQ ID NO: 624476
uugagacacagucuucugg

SEQ ID NO: 624478 - RNA, 19 nt, Artificial Sequence
  Description of Artificial Sequence: Synthetic oligonucleotide
  Sense strand starting at position 2710 of SEQ ID NO: 585243
agaagacugugucucaaag

SEQ ID NO: 624479 - RNA, 19 nt, Artificial Sequence
  Description of Artificial Sequence: Synthetic oligonucleotide
  Antisense strand to SEQ ID NO: 624478
cuuugagacacagucuucu

SEQ ID NO: 624480 - RNA, 19 nt, Artificial Sequence
  Description of Artificial Sequence: Synthetic oligonucleotide
  Sense strand starting at position 2773 of SEQ ID NO: 585243
cccaaaucccagugaacug

SEQ ID NO: 624481 - RNA, 19 nt, Artificial Sequence
  Description of Artificial Sequence: Synthetic oligonucleotide
  Antisense strand to SEQ ID NO: 624480
caguucacugggauuuggg

SEQ ID NO: 624482 - RNA, 19 nt, Artificial Sequence
  Description of Artificial Sequence: Synthetic oligonucleotide
  Sense strand starting at position 2782 of SEQ ID NO: 585243
cagugaacuguagaagcuu

SEQ ID NO: 624483 - RNA, 19 nt, Artificial Sequence
  Description of Artificial Sequence: Synthetic oligonucleotide
  Antisense strand to SEQ ID NO: 624482
aagcuucuacaguucacug

SEQ ID NO: 624484 - RNA, 19 nt, Artificial Sequence
  Description of Artificial Sequence: Synthetic oligonucleotide
  Sense strand starting at position 2901 of SEQ ID NO: 585243
aggugacagcugugacaaa

SEQ ID NO: 624485 - RNA, 19 nt, Artificial Sequence
  Description of Artificial Sequence: Synthetic oligonucleotide
  Antisense strand to SEQ ID NO: 624484
uuugucacagcugucaccu

SEQ ID NO: 624486 - RNA, 19 nt, Artificial Sequence
  Description of Artificial Sequence: Synthetic oligonucleotide
  Sense strand starting at position 2912 of SEQ ID NO: 585243
gugacaaagucuguuuaga

SEQ ID NO: 624487 - RNA, 19 nt, Artificial Sequence
  Description of Artificial Sequence: Synthetic oligonucleotide
  Antisense strand to SEQ ID NO: 624486
ucuaaacagacuuugucac

SEQ ID NO: 624488 - RNA, 19 nt, Artificial Sequence
  Description of Artificial Sequence: Synthetic oligonucleotide
  Sense strand starting at position 2914 of SEQ ID NO: 585243
gacaaagucuguuuagaug

SEQ ID NO: 624489 - RNA, 19 nt, Artificial Sequence
  Description of Artificial Sequence: Synthetic oligonucleotide
  Antisense strand to SEQ ID NO: 624488
caucuaaacagacuuuguc

SEQ ID NO: 624490 - RNA, 19 nt, Artificial Sequence
  Description of Artificial Sequence: Synthetic oligonucleotide
  Sense strand starting at position 2969 of SEQ ID NO: 585243
aaucuucucugguugauga

SEQ ID NO: 624491 - RNA, 19 nt, Artificial Sequence
  Description of Artificial Sequence: Synthetic oligonucleotide
  Antisense strand to SEQ ID NO: 624490
ucaucaaccagagaagauu

SEQ ID NO: 624492 - RNA, 19 nt, Artificial Sequence
  Description of Artificial Sequence: Synthetic oligonucleotide
  Sense strand starting at position 2971 of SEQ ID NO: 585243
ucuucucugguugaugaga

SEQ ID NO: 624493 - RNA, 19 nt, Artificial Sequence
  Description of Artificial Sequence: Synthetic oligonucleotide
  Antisense strand to SEQ ID NO: 624492
ucucaucaaccagagaaga

SEQ ID NO: 624494 - RNA, 19 nt, Artificial Sequence
  Description of Artificial Sequence: Synthetic oligonucleotide
  Sense strand starting at position 3055 of SEQ ID NO: 585243
uugauuagaguucagcgaa

SEQ ID NO: 624495 - RNA, 19 nt, Artificial Sequence
  Description of Artificial Sequence: Synthetic oligonucleotide
  Antisense strand to SEQ ID NO: 624494
uucgcugaacucuaaucaa

SEQ ID NO: 624496 - RNA, 19 nt, Artificial Sequence
  Description of Artificial Sequence: Synthetic oligonucleotide
  Sense strand starting at position 3318 of SEQ ID NO: 585243
cccaaagucuagccauaga

SEQ ID NO: 624497 - RNA, 19 nt, Artificial Sequence
  Description of Artificial Sequence: Synthetic oligonucleotide
  Antisense strand to SEQ ID NO: 624496
ucuauggcuagacuuuggg

SEQ ID NO: 624498 - RNA, 19 nt, Artificial Sequence
  Description of Artificial Sequence: Synthetic oligonucleotide
  Sense strand starting at position 3466 of SEQ ID NO: 585243
aagagagucuuguccuaua

SEQ ID NO: 624499 - RNA, 19 nt, Artificial Sequence
  Description of Artificial Sequence: Synthetic oligonucleotide
  Antisense strand to SEQ ID NO: 624498
uauaggacaagacucucuu

SEQ ID NO: 624500 - RNA, 19 nt, Artificial Sequence
  Description of Artificial Sequence: Synthetic oligonucleotide
  Sense strand starting at position 3471 of SEQ ID NO: 585243
agucuuguccuauaaccag

SEQ ID NO: 624501 - RNA, 19 nt, Artificial Sequence
  Description of Artificial Sequence: Synthetic oligonucleotide
  Antisense strand to SEQ ID NO: 624500
cugguuauaggacaagacu

SEQ ID NO: 624502 - RNA, 19 nt, Artificial Sequence
  Description of Artificial Sequence: Synthetic oligonucleotide
  Sense strand starting at position 3594 of SEQ ID NO: 585243
guuuaucuuguugaaccua

SEQ ID NO: 624503 - RNA, 19 nt, Artificial Sequence
  Description of Artificial Sequence: Synthetic oligonucleotide
  Antisense strand to SEQ ID NO: 624502
uagguucaacaagauaaac

SEQ ID NO: 624504 - RNA, 19 nt, Artificial Sequence
  Description of Artificial Sequence: Synthetic oligonucleotide
  Sense strand starting at position 3768 of SEQ ID NO: 585243
uuccuuggccgggacaaua

SEQ ID NO: 624505 - RNA, 19 nt, Artificial Sequence
  Description of Artificial Sequence: Synthetic oligonucleotide
  Antisense strand to SEQ ID NO: 624504
uauugucccggccaaggaa

SEQ ID NO: 624506 - RNA, 19 nt, Artificial Sequence
  Description of Artificial Sequence: Synthetic oligonucleotide
  Sense strand starting at position 3835 of SEQ ID NO: 585243
acagauugccuagggaaau

SEQ ID NO: 624507 - RNA, 19 nt, Artificial Sequence
  Description of Artificial Sequence: Synthetic oligonucleotide
  Antisense strand to SEQ ID NO: 624506
auuucccuaggcaaucugu

SEQ ID NO: 624508 - RNA, 19 nt, Artificial Sequence
  Description of Artificial Sequence: Synthetic oligonucleotide
  Sense strand starting at position 3845 of SEQ ID NO: 585243
uagggaaaucuugguguuu

SEQ ID NO: 624509 - RNA, 19 nt, Artificial Sequence
  Description of Artificial Sequence: Synthetic oligonucleotide
  Antisense strand to SEQ ID NO: 624508
aaacaccaagauuucccua

SEQ ID NO: 624510 - RNA, 19 nt, Artificial Sequence
  Description of Artificial Sequence: Synthetic oligonucleotide
  Sense strand starting at position 3901 of SEQ ID NO: 585243
acagaugaacguggauuaa

SEQ ID NO: 624511 - RNA, 19 nt, Artificial Sequence
  Description of Artificial Sequence: Synthetic oligonucleotide
  Antisense strand to SEQ ID NO: 624510
uuaauccacguucaucugu

SEQ ID NO: 624512 - RNA, 19 nt, Artificial Sequence
  Description of Artificial Sequence: Synthetic oligonucleotide
  Sense strand starting at position 3925 of SEQ ID NO: 585243
ccaggaauuucugagguau

SEQ ID NO: 624513 - RNA, 19 nt, Artificial Sequence
  Description of Artificial Sequence: Synthetic oligonucleotide
  Antisense strand to SEQ ID NO: 624512
auaccucagaaauuccugg

SEQ ID NO: 624514 - RNA, 19 nt, Artificial Sequence
  Description of Artificial Sequence: Synthetic oligonucleotide
  Sense strand starting at position 83 of SEQ ID NO: 585244
cuuaauuccgaucaaagca

SEQ ID NO: 624515 - RNA, 19 nt, Artificial Sequence
  Description of Artificial Sequence: Synthetic oligonucleotide
  Antisense strand to SEQ ID NO: 624514
ugcuuugaucggaauuaag

SEQ ID NO: 624516 - RNA, 19 nt, Artificial Sequence
  Description of Artificial Sequence: Synthetic oligonucleotide
  Sense strand starting at position 294 of SEQ ID NO: 585244
ggcggaguuuguaugcagu

SEQ ID NO: 624517 - RNA, 19 nt, Artificial Sequence
  Description of Artificial Sequence: Synthetic oligonucleotide
  Antisense strand to SEQ ID NO: 624516
acugcauacaaacuccgcc

SEQ ID NO: 624518 - RNA, 19 nt, Artificial Sequence
  Description of Artificial Sequence: Synthetic oligonucleotide
  Sense strand starting at position 748 of SEQ ID NO: 585244
guuagugucgaagucguga

SEQ ID NO: 624519 - RNA, 19 nt, Artificial Sequence
  Description of Artificial Sequence: Synthetic oligonucleotide
  Antisense strand to SEQ ID NO: 624518
ucacgacuucgacacuaac

SEQ ID NO: 624520 - RNA, 19 nt, Artificial Sequence
  Description of Artificial Sequence: Synthetic oligonucleotide
  Sense strand starting at position 948 of SEQ ID NO: 585244
uagggacauuagucuguuu

SEQ ID NO: 624521 - RNA, 19 nt, Artificial Sequence
  Description of Artificial Sequence: Synthetic oligonucleotide
  Antisense strand to SEQ ID NO: 624520
aaacagacuaaugucccua

SEQ ID NO: 624522 - RNA, 19 nt, Artificial Sequence
  Description of Artificial Sequence: Synthetic oligonucleotide
  Sense strand starting at position 1102 of SEQ ID NO: 585244
ggacuagucggaggaccaa

SEQ ID NO: 624523 - RNA, 19 nt, Artificial Sequence
  Description of Artificial Sequence: Synthetic oligonucleotide
  Antisense strand to SEQ ID NO: 624522
uugguccuccgacuagucc

SEQ ID NO: 624524 - RNA, 19 nt, Artificial Sequence
  Description of Artificial Sequence: Synthetic oligonucleotide
  Sense strand starting at position 1122 of SEQ ID NO: 585244
caagguuaccaacacguua

SEQ ID NO: 624525 - RNA, 19 nt, Artificial Sequence
  Description of Artificial Sequence: Synthetic oligonucleotide
  Antisense strand to SEQ ID NO: 624524
uaacguguugguaaccuug

SEQ ID NO: 624526 - RNA, 19 nt, Artificial Sequence
  Description of Artificial Sequence: Synthetic oligonucleotide
  Sense strand starting at position 1127 of SEQ ID NO: 585244
uuaccaacacguuagaguu

SEQ ID NO: 624527 - RNA, 19 nt, Artificial Sequence
  Description of Artificial Sequence: Synthetic oligonucleotide
  Antisense strand to SEQ ID NO: 624526
aacucuaacguguugguaa

SEQ ID NO: 624528 - RNA, 19 nt, Artificial Sequence
  Description of Artificial Sequence: Synthetic oligonucleotide
  Sense strand starting at position 1177 of SEQ ID NO: 585244
caacgaaguguuuagauca

SEQ ID NO: 624529 - RNA, 19 nt, Artificial Sequence
  Description of Artificial Sequence: Synthetic oligonucleotide
  Antisense strand to SEQ ID NO: 624528
ugaucuaaacacuucguug

SEQ ID NO: 624530 - RNA, 19 nt, Artificial Sequence
  Description of Artificial Sequence: Synthetic oligonucleotide
  Sense strand starting at position 1185 of SEQ ID NO: 585244
uguuuagaucacgaggcau

SEQ ID NO: 624531 - RNA, 19 nt, Artificial Sequence
  Description of Artificial Sequence: Synthetic oligonucleotide
  Antisense strand to SEQ ID NO: 624530
augccucgugaucuaaaca

SEQ ID NO: 624532 - RNA, 19 nt, Artificial Sequence
  Description of Artificial Sequence: Synthetic oligonucleotide
  Sense strand starting at position 1197 of SEQ ID NO: 585244
gaggcaucccugcauguaa

SEQ ID NO: 624533 - RNA, 19 nt, Artificial Sequence
  Description of Artificial Sequence: Synthetic oligonucleotide
  Antisense strand to SEQ ID NO: 624532
uuacaugcagggaugccuc

SEQ ID NO: 624534 - RNA, 19 nt, Artificial Sequence
  Description of Artificial Sequence: Synthetic oligonucleotide
  Sense strand starting at position 1212 of SEQ ID NO: 585244
guaaacuguuaggcacuaa

SEQ ID NO: 624535 - RNA, 19 nt, Artificial Sequence
  Description of Artificial Sequence: Synthetic oligonucleotide
  Antisense strand to SEQ ID NO: 624534
uuagugccuaacaguuuac

SEQ ID NO: 624536 - RNA, 19 nt, Artificial Sequence
  Description of Artificial Sequence: Synthetic oligonucleotide
  Sense strand starting at position 1216 of SEQ ID NO: 585244
acuguuaggcacuaacuau

SEQ ID NO: 624537 - RNA, 19 nt, Artificial Sequence
  Description of Artificial Sequence: Synthetic oligonucleotide
  Antisense strand to SEQ ID NO: 624536
auaguuagugccuaacagu

SEQ ID NO: 624538 - RNA, 19 nt, Artificial Sequence
  Description of Artificial Sequence: Synthetic oligonucleotide
  Sense strand starting at position 1227 of SEQ ID NO: 585244
cuaacuauggucgaucuua

SEQ ID NO: 624539 - RNA, 19 nt, Artificial Sequence
  Description of Artificial Sequence: Synthetic oligonucleotide
  Antisense strand to SEQ ID NO: 624538
uaagaucgaccauaguuag

SEQ ID NO: 624540 - RNA, 19 nt, Artificial Sequence
  Description of Artificial Sequence: Synthetic oligonucleotide
  Sense strand starting at position 1266 of SEQ ID NO: 585244
uucuuuagaguaugauagu

SEQ ID NO: 624541 - RNA, 19 nt, Artificial Sequence
  Description of Artificial Sequence: Synthetic oligonucleotide
  Antisense strand to SEQ ID NO: 624540
acuaucauacucuaaagaa

SEQ ID NO: 624542 - RNA, 19 nt, Artificial Sequence
  Description of Artificial Sequence: Synthetic oligonucleotide
  Sense strand starting at position 1283 of SEQ ID NO: 585244
guacguaacugaccuacua

SEQ ID NO: 624543 - RNA, 19 nt, Artificial Sequence
  Description of Artificial Sequence: Synthetic oligonucleotide
  Antisense strand to SEQ ID NO: 624542
uaguaggucaguuacguac

SEQ ID NO: 624544 - RNA, 19 nt, Artificial Sequence
  Description of Artificial Sequence: Synthetic oligonucleotide
  Sense strand starting at position 1354 of SEQ ID NO: 585244
gcaguaauacgcuuugcuc

SEQ ID NO: 624545 - RNA, 19 nt, Artificial Sequence
  Description of Artificial Sequence: Synthetic oligonucleotide
  Antisense strand to SEQ ID NO: 624544
gagcaaagcguauuacugc

SEQ ID NO: 624546 - RNA, 19 nt, Artificial Sequence
  Description of Artificial Sequence: Synthetic oligonucleotide
  Sense strand starting at position 2035 of SEQ ID NO: 585244
uugauuggucgguagcaaa

SEQ ID NO: 624547 - RNA, 19 nt, Artificial Sequence
  Description of Artificial Sequence: Synthetic oligonucleotide
  Antisense strand to SEQ ID NO: 624546
uuugcuaccgaccaaucaa

SEQ ID NO: 624548 - RNA, 19 nt, Artificial Sequence
  Description of Artificial Sequence: Synthetic oligonucleotide
  Sense strand starting at position 2048 of SEQ ID NO: 585244
agcaaaugcuagucagaua

SEQ ID NO: 624549 - RNA, 19 nt, Artificial Sequence
  Description of Artificial Sequence: Synthetic oligonucleotide
  Antisense strand to SEQ ID NO: 624548
uaucugacuagcauuugcu

SEQ ID NO: 624550 - RNA, 19 nt, Artificial Sequence
  Description of Artificial Sequence: Synthetic oligonucleotide
  Sense strand starting at position 2049 of SEQ ID NO: 585244
gcaaaugcuagucagauag

SEQ ID NO: 624551 - RNA, 19 nt, Artificial Sequence
  Description of Artificial Sequence: Synthetic oligonucleotide
  Antisense strand to SEQ ID NO: 624550
cuaucugacuagcauuugc

SEQ ID NO: 624552 - RNA, 19 nt, Artificial Sequence
  Description of Artificial Sequence: Synthetic oligonucleotide
  Sense strand starting at position 2117 of SEQ ID NO: 585244
ggaugacaacugugcaguu

SEQ ID NO: 624553 - RNA, 19 nt, Artificial Sequence
  Description of Artificial Sequence: Synthetic oligonucleotide
  Antisense strand to SEQ ID NO: 624552
aacugcacaguugucaucc

SEQ ID NO: 624554 - RNA, 19 nt, Artificial Sequence
  Description of Artificial Sequence: Synthetic oligonucleotide
  Sense strand starting at position 2430 of SEQ ID NO: 585244
gaauucuuucguuaacgac

SEQ ID NO: 624555 - RNA, 19 nt, Artificial Sequence
  Description of Artificial Sequence: Synthetic oligonucleotide
  Antisense strand to SEQ ID NO: 624554
gucguuaacgaaagaauuc

SEQ ID NO: 624556 - RNA, 19 nt, Artificial Sequence
  Description of Artificial Sequence: Synthetic oligonucleotide
  Sense strand starting at position 2797 of SEQ ID NO: 585244
ggguccugaacccgaaaga

SEQ ID NO: 624557 - RNA, 19 nt, Artificial Sequence
  Description of Artificial Sequence: Synthetic oligonucleotide
  Antisense strand to SEQ ID NO: 624556
ucuuucggguucaggaccc

SEQ ID NO: 624558 - RNA, 19 nt, Artificial Sequence
  Description of Artificial Sequence: Synthetic oligonucleotide
  Sense strand starting at position 2841 of SEQ ID NO: 585244
ggucaauucguugugcuua

SEQ ID NO: 624559 - RNA, 19 nt, Artificial Sequence
  Description of Artificial Sequence: Synthetic oligonucleotide
  Antisense strand to SEQ ID NO: 624558
uaagcacaacgaauugacc

SEQ ID NO: 624560 - RNA, 19 nt, Artificial Sequence
  Description of Artificial Sequence: Synthetic oligonucleotide
  Sense strand starting at position 2846 of SEQ ID NO: 585244
auucguugugcuuaaauuu

SEQ ID NO: 624561 - RNA, 19 nt, Artificial Sequence
  Description of Artificial Sequence: Synthetic oligonucleotide
  Antisense strand to SEQ ID NO: 624560
aaauuuaagcacaacgaau

SEQ ID NO: 624562 - RNA, 19 nt, Artificial Sequence
  Description of Artificial Sequence: Synthetic oligonucleotide
  Sense strand starting at position 2988 of SEQ ID NO: 585244
gucauaauuucgccaccag

SEQ ID NO: 624563 - RNA, 19 nt, Artificial Sequence
  Description of Artificial Sequence: Synthetic oligonucleotide
  Antisense strand to SEQ ID NO: 624562
cugguggcgaaauuaugac

SEQ ID NO: 624564 - RNA, 19 nt, Artificial Sequence
  Description of Artificial Sequence: Synthetic oligonucleotide
  Sense strand starting at position 3107 of SEQ ID NO: 585244
ggcaguaacugccuaagga

SEQ ID NO: 624565 - RNA, 19 nt, Artificial Sequence
  Description of Artificial Sequence: Synthetic oligonucleotide
  Antisense strand to SEQ ID NO: 624564
uccuuaggcaguuacugcc

SEQ ID NO: 624566 - RNA, 19 nt, Artificial Sequence
  Description of Artificial Sequence: Synthetic oligonucleotide
  Sense strand starting at position 3108 of SEQ ID NO: 585244
gcaguaacugccuaaggaa

SEQ ID NO: 624567 - RNA, 19 nt, Artificial Sequence
  Description of Artificial Sequence: Synthetic oligonucleotide
  Antisense strand to SEQ ID NO: 624566
uuccuuaggcaguuacugc

SEQ ID NO: 624568 - RNA, 19 nt, Artificial Sequence
  Description of Artificial Sequence: Synthetic oligonucleotide
  Sense strand starting at position 3282 of SEQ ID NO: 585244
gcgccagauguugcuucau

SEQ ID NO: 624569 - RNA, 19 nt, Artificial Sequence
  Description of Artificial Sequence: Synthetic oligonucleotide
  Antisense strand to SEQ ID NO: 624568
augaagcaacaucuggcgc

SEQ ID NO: 624570 - RNA, 19 nt, Artificial Sequence
  Description of Artificial Sequence: Synthetic oligonucleotide
  Sense strand starting at position 3435 of SEQ ID NO: 585244
ugcagacaaguuugaaagu

SEQ ID NO: 624571 - RNA, 19 nt, Artificial Sequence
  Description of Artificial Sequence: Synthetic oligonucleotide
  Antisense strand to SEQ ID NO: 624570
acuuucaaacuugucugca

SEQ ID NO: 624572 - RNA, 19 nt, Artificial Sequence
  Description of Artificial Sequence: Synthetic oligonucleotide
  Sense strand starting at position 3445 of SEQ ID NO: 585244
uuugaaaguugcuuuagga

SEQ ID NO: 624573 - RNA, 19 nt, Artificial Sequence
  Description of Artificial Sequence: Synthetic oligonucleotide
  Antisense strand to SEQ ID NO: 624572
uccuaaagcaacuuucaaa

SEQ ID NO: 624574 - RNA, 19 nt, Artificial Sequence
  Description of Artificial Sequence: Synthetic oligonucleotide
  Sense strand starting at position 3472 of SEQ ID NO: 585244
cucuuaacugcuggguaaa

SEQ ID NO: 624575 - RNA, 19 nt, Artificial Sequence
  Description of Artificial Sequence: Synthetic oligonucleotide
  Antisense strand to SEQ ID NO: 624574
uuuacccagcaguuaagag

SEQ ID NO: 624576 - RNA, 19 nt, Artificial Sequence
  Description of Artificial Sequence: Synthetic oligonucleotide
  Sense strand starting at position 3473 of SEQ ID NO: 585244
ucuuaacugcuggguaaau

SEQ ID NO: 624577 - RNA, 19 nt, Artificial Sequence
  Description of Artificial Sequence: Synthetic oligonucleotide
  Antisense strand to SEQ ID NO: 624576
auuuacccagcaguuaaga

SEQ ID NO: 624578 - RNA, 19 nt, Artificial Sequence
  Description of Artificial Sequence: Synthetic oligonucleotide
  Sense strand starting at position 3474 of SEQ ID NO: 585244
cuuaacugcuggguaaauu

SEQ ID NO: 624579 - RNA, 19 nt, Artificial Sequence
  Description of Artificial Sequence: Synthetic oligonucleotide
  Antisense strand to SEQ ID NO: 624578
aauuuacccagcaguuaag

SEQ ID NO: 624580 - RNA, 19 nt, Artificial Sequence
  Description of Artificial Sequence: Synthetic oligonucleotide
  Sense strand starting at position 3587 of SEQ ID NO: 585244
cuguaucuccuagaggacu

SEQ ID NO: 624581 - RNA, 19 nt, Artificial Sequence
  Description of Artificial Sequence: Synthetic oligonucleotide
  Antisense strand to SEQ ID NO: 624580
aguccucuaggagauacag

SEQ ID NO: 624582 - RNA, 19 nt, Artificial Sequence
  Description of Artificial Sequence: Synthetic oligonucleotide
  Sense strand starting at position 3598 of SEQ ID NO: 585244
agaggacucucccuuccua

SEQ ID NO: 624583 - RNA, 19 nt, Artificial Sequence
  Description of Artificial Sequence: Synthetic oligonucleotide
  Antisense strand to SEQ ID NO: 624582
uaggaagggagaguccucu

SEQ ID NO: 624584 - RNA, 19 nt, Artificial Sequence
  Description of Artificial Sequence: Synthetic oligonucleotide
  Sense strand starting at position 3707 of SEQ ID NO: 585244
aaggguuagacguagucua

SEQ ID NO: 624585 - RNA, 19 nt, Artificial Sequence
  Description of Artificial Sequence: Synthetic oligonucleotide
  Antisense strand to SEQ ID NO: 624584
uagacuacgucuaacccuu

SEQ ID NO: 624586 - RNA, 19 nt, Artificial Sequence
  Description of Artificial Sequence: Synthetic oligonucleotide
  Sense strand starting at position 3874 of SEQ ID NO: 585244
uaacauaaggacuguguga

SEQ ID NO: 624587 - RNA, 19 nt, Artificial Sequence
  Description of Artificial Sequence: Synthetic oligonucleotide
  Antisense strand to SEQ ID NO: 624586
ucacacaguccuuauguua

SEQ ID NO: 624588 - RNA, 19 nt, Artificial Sequence
  Description of Artificial Sequence: Synthetic oligonucleotide
  Sense strand starting at position 3876 of SEQ ID NO: 585244
acauaaggacugugugauc

SEQ ID NO: 624589 - RNA, 19 nt, Artificial Sequence
  Description of Artificial Sequence: Synthetic oligonucleotide
  Antisense strand to SEQ ID NO: 624588
gaucacacaguccuuaugu

SEQ ID NO: 624590 - RNA, 19 nt, Artificial Sequence
  Description of Artificial Sequence: Synthetic oligonucleotide
  Sense strand starting at position 3881 of SEQ ID NO: 585244
aggacugugugaucuuaaa

SEQ ID NO: 624591 - RNA, 19 nt, Artificial Sequence
  Description of Artificial Sequence: Synthetic oligonucleotide
  Antisense strand to SEQ ID NO: 624590
uuuaagaucacacaguccu

SEQ ID NO: 624592 - RNA, 19 nt, Artificial Sequence
  Description of Artificial Sequence: Synthetic oligonucleotide
  Sense strand starting at position 3958 of SEQ ID NO: 585244
ggccuuauacuugaacacu

SEQ ID NO: 624593 - RNA, 19 nt, Artificial Sequence
  Description of Artificial Sequence: Synthetic oligonucleotide
  Antisense strand to SEQ ID NO: 624592
aguguucaaguauaaggcc

SEQ ID NO: 624594 - RNA, 19 nt, Artificial Sequence
  Description of Artificial Sequence: Synthetic oligonucleotide
  Sense strand starting at position 32 of SEQ ID NO: 585245
cccuguucugauuggacaa

SEQ ID NO: 624595 - RNA, 19 nt, Artificial Sequence
  Description of Artificial Sequence: Synthetic oligonucleotide
  Antisense strand to SEQ ID NO: 624594
uuguccaaucagaacaggg

SEQ ID NO: 624596 - RNA, 19 nt, Artificial Sequence
  Description of Artificial Sequence: Synthetic oligonucleotide
  Sense strand starting at position 110 of SEQ ID NO: 585245
cugcauguagaccaaauau

SEQ ID NO: 624597 - RNA, 19 nt, Artificial Sequence
  Description of Artificial Sequence: Synthetic oligonucleotide
  Antisense strand to SEQ ID NO: 624596
auauuuggucuacaugcag

SEQ ID NO: 624598 - RNA, 19 nt, Artificial Sequence
  Description of Artificial Sequence: Synthetic oligonucleotide
  Sense strand starting at position 290 of SEQ ID NO: 585245
ugaaacuggcuuugaucaa

SEQ ID NO: 624599 - RNA, 19 nt, Artificial Sequence
  Description of Artificial Sequence: Synthetic oligonucleotide
  Antisense strand to SEQ ID NO: 624598
uugaucaaagccaguuuca

SEQ ID NO: 624600 - RNA, 19 nt, Artificial Sequence
  Description of Artificial Sequence: Synthetic oligonucleotide
  Sense strand starting at position 479 of SEQ ID NO: 585245
accugauguuaagcuacau

SEQ ID NO: 624601 - RNA, 19 nt, Artificial Sequence
  Description of Artificial Sequence: Synthetic oligonucleotide
  Antisense strand to SEQ ID NO: 624600
auguagcuuaacaucaggu

SEQ ID NO: 624602 - RNA, 19 nt, Artificial Sequence
  Description of Artificial Sequence: Synthetic oligonucleotide
  Sense strand starting at position 565 of SEQ ID NO: 585245
acugguauuuguguaaucu

SEQ ID NO: 624603 - RNA, 19 nt, Artificial Sequence
  Description of Artificial Sequence: Synthetic oligonucleotide
  Antisense strand to SEQ ID NO: 624602
agauuacacaaauaccagu

SEQ ID NO: 624604 - RNA, 19 nt, Artificial Sequence
  Description of Artificial Sequence: Synthetic oligonucleotide
  Sense strand starting at position 569 of SEQ ID NO: 585245
guauuuguguaaucugcug

SEQ ID NO: 624605 - RNA, 19 nt, Artificial Sequence
  Description of Artificial Sequence: Synthetic oligonucleotide
  Antisense strand to SEQ ID NO: 624604
cagcagauuacacaaauac

SEQ ID NO: 624606 - RNA, 19 nt, Artificial Sequence
  Description of Artificial Sequence: Synthetic oligonucleotide
  Sense strand starting at position 571 of SEQ ID NO: 585245
auuuguguaaucugcugua

SEQ ID NO: 624607 - RNA, 19 nt, Artificial Sequence
  Description of Artificial Sequence: Synthetic oligonucleotide
  Antisense strand to SEQ ID NO: 624606
uacagcagauuacacaaau

SEQ ID NO: 624608 - RNA, 19 nt, Artificial Sequence
  Description of Artificial Sequence: Synthetic oligonucleotide
  Sense strand starting at position 648 of SEQ ID NO: 585245
uuuagucaugcugaacacu

SEQ ID NO: 624609 - RNA, 19 nt, Artificial Sequence
  Description of Artificial Sequence: Synthetic oligonucleotide
  Antisense strand to SEQ ID NO: 624608
aguguucagcaugacuaaa

SEQ ID NO: 624610 - RNA, 19 nt, Artificial Sequence
  Description of Artificial Sequence: Synthetic oligonucleotide
  Sense strand starting at position 733 of SEQ ID NO: 585245
auuaauuaggguuagcuca

SEQ ID NO: 624611 - RNA, 19 nt, Artificial Sequence
  Description of Artificial Sequence: Synthetic oligonucleotide
  Antisense strand to SEQ ID NO: 624610
ugagcuaacccuaauuaau

SEQ ID NO: 624612 - RNA, 19 nt, Artificial Sequence
  Description of Artificial Sequence: Synthetic oligonucleotide
  Sense strand starting at position 803 of SEQ ID NO: 585245
acagguuauuucguaucau

SEQ ID NO: 624613 - RNA, 19 nt, Artificial Sequence
  Description of Artificial Sequence: Synthetic oligonucleotide
  Antisense strand to SEQ ID NO: 624612
augauacgaaauaaccugu

SEQ ID NO: 624614 - RNA, 19 nt, Artificial Sequence
  Description of Artificial Sequence: Synthetic oligonucleotide
  Sense strand starting at position 973 of SEQ ID NO: 585245
cgcugcauugaucgauuua

SEQ ID NO: 624615 - RNA, 19 nt, Artificial Sequence
  Description of Artificial Sequence: Synthetic oligonucleotide
  Antisense strand to SEQ ID NO: 624614
uaaaucgaucaaugcagcg

SEQ ID NO: 624616 - RNA, 19 nt, Artificial Sequence
  Description of Artificial Sequence: Synthetic oligonucleotide
  Sense strand starting at position 1308 of SEQ ID NO: 585245
ggauuacaggcguaaggaa

SEQ ID NO: 624617 - RNA, 19 nt, Artificial Sequence
  Description of Artificial Sequence: Synthetic oligonucleotide
  Antisense strand to SEQ ID NO: 624616
uuccuuacgccuguaaucc

SEQ ID NO: 624618 - RNA, 19 nt, Artificial Sequence
  Description of Artificial Sequence: Synthetic oligonucleotide
  Sense strand starting at position 1335 of SEQ ID NO: 585245
cgccaauuugcuuauguau

SEQ ID NO: 624619 - RNA, 19 nt, Artificial Sequence
  Description of Artificial Sequence: Synthetic oligonucleotide
  Antisense strand to SEQ ID NO: 624618
auacauaagcaaauuggcg

SEQ ID NO: 624620 - RNA, 19 nt, Artificial Sequence
  Description of Artificial Sequence: Synthetic oligonucleotide
  Sense strand starting at position 1964 of SEQ ID NO: 585245
aaacgauguuaagcaauga

SEQ ID NO: 624621 - RNA, 19 nt, Artificial Sequence
  Description of Artificial Sequence: Synthetic oligonucleotide
  Antisense strand to SEQ ID NO: 624620
ucauugcuuaacaucguuu

SEQ ID NO: 624622 - RNA, 19 nt, Artificial Sequence
  Description of Artificial Sequence: Synthetic oligonucleotide
  Sense strand starting at position 1968 of SEQ ID NO: 585245
gauguuaagcaaugaagac

SEQ ID NO: 624623 - RNA, 19 nt, Artificial Sequence
  Description of Artificial Sequence: Synthetic oligonucleotide
  Antisense strand to SEQ ID NO: 624622
gucuucauugcuuaacauc

SEQ ID NO: 624624 - RNA, 19 nt, Artificial Sequence
  Description of Artificial Sequence: Synthetic oligonucleotide
  Sense strand starting at position 2005 of SEQ ID NO: 585245
uuuguuagcaagugagaaa

SEQ ID NO: 624625 - RNA, 19 nt, Artificial Sequence
  Description of Artificial Sequence: Synthetic oligonucleotide
  Antisense strand to SEQ ID NO: 624624
uuucucacuugcuaacaaa

SEQ ID NO: 624626 - RNA, 19 nt, Artificial Sequence
  Description of Artificial Sequence: Synthetic oligonucleotide
  Sense strand starting at position 2026 of SEQ ID NO: 585245
auuauacuuggaggucgaa

SEQ ID NO: 624627 - RNA, 19 nt, Artificial Sequence
  Description of Artificial Sequence: Synthetic oligonucleotide
  Antisense strand to SEQ ID NO: 624626
uucgaccuccaaguauaau

SEQ ID NO: 624628 - RNA, 19 nt, Artificial Sequence
  Description of Artificial Sequence: Synthetic oligonucleotide
  Sense strand starting at position 2053 of SEQ ID NO: 585245
aacgcuauuugauuggcua

SEQ ID NO: 624629 - RNA, 19 nt, Artificial Sequence
  Description of Artificial Sequence: Synthetic oligonucleotide
  Antisense strand to SEQ ID NO: 624628
uagccaaucaaauagcguu

SEQ ID NO: 624630 - RNA, 19 nt, Artificial Sequence
  Description of Artificial Sequence: Synthetic oligonucleotide
  Sense strand starting at position 2055 of SEQ ID NO: 585245
cgcuauuugauuggcuaga

SEQ ID NO: 624631 - RNA, 19 nt, Artificial Sequence
  Description of Artificial Sequence: Synthetic oligonucleotide
  Antisense strand to SEQ ID NO: 624630
ucuagccaaucaaauagcg

SEQ ID NO: 624632 - RNA, 19 nt, Artificial Sequence
  Description of Artificial Sequence: Synthetic oligonucleotide
  Sense strand starting at position 2096 of SEQ ID NO: 585245
acgcuagaaucaccuaauu

SEQ ID NO: 624633 - RNA, 19 nt, Artificial Sequence
  Description of Artificial Sequence: Synthetic oligonucleotide
  Antisense strand to SEQ ID NO: 624632
aauuaggugauucuagcgu

SEQ ID NO: 624634 - RNA, 19 nt, Artificial Sequence
  Description of Artificial Sequence: Synthetic oligonucleotide
  Sense strand starting at position 2147 of SEQ ID NO: 585245
ccaaucaauguguaagcuu

SEQ ID NO: 624635 - RNA, 19 nt, Artificial Sequence
  Description of Artificial Sequence: Synthetic oligonucleotide
  Antisense strand to SEQ ID NO: 624634
aagcuuacacauugauugg

SEQ ID NO: 624636 - RNA, 19 nt, Artificial Sequence
  Description of Artificial Sequence: Synthetic oligonucleotide
  Sense strand starting at position 2225 of SEQ ID NO: 585245
uugcauuucucuuuagguu

SEQ ID NO: 624637 - RNA, 19 nt, Artificial Sequence
  Description of Artificial Sequence: Synthetic oligonucleotide
  Antisense strand to SEQ ID NO: 624636
aaccuaaagagaaaugcaa

SEQ ID NO: 624638 - RNA, 19 nt, Artificial Sequence
  Description of Artificial Sequence: Synthetic oligonucleotide
  Sense strand starting at position 2240 of SEQ ID NO: 585245
gguuguggacgaaguguuu

SEQ ID NO: 624639 - RNA, 19 nt, Artificial Sequence
  Description of Artificial Sequence: Synthetic oligonucleotide
  Antisense strand to SEQ ID NO: 624638
aaacacuucguccacaacc

SEQ ID NO: 624640 - RNA, 19 nt, Artificial Sequence
  Description of Artificial Sequence: Synthetic oligonucleotide
  Sense strand starting at position 2249 of SEQ ID NO: 585245
cgaaguguuuauuuaucau

SEQ ID NO: 624641 - RNA, 19 nt, Artificial Sequence
  Description of Artificial Sequence: Synthetic oligonucleotide
  Antisense strand to SEQ ID NO: 624640
augauaaauaaacacuucg

SEQ ID NO: 624642 - RNA, 19 nt, Artificial Sequence
  Description of Artificial Sequence: Synthetic oligonucleotide
  Sense strand starting at position 3008 of SEQ ID NO: 585245
aggaaugucuuccuuaauu

SEQ ID NO: 624643 - RNA, 19 nt, Artificial Sequence
  Description of Artificial Sequence: Synthetic oligonucleotide
  Antisense strand to SEQ ID NO: 624642
aauuaaggaagacauuccu

SEQ ID NO: 624644 - RNA, 19 nt, Artificial Sequence
  Description of Artificial Sequence: Synthetic oligonucleotide
  Sense strand starting at position 3029 of SEQ ID NO: 585245
gguuuagucaucgcagcau

SEQ ID NO: 624645 - RNA, 19 nt, Artificial Sequence
  Description of Artificial Sequence: Synthetic oligonucleotide
  Antisense strand to SEQ ID NO: 624644
augcugcgaugacuaaacc

SEQ ID NO: 624646 - RNA, 19 nt, Artificial Sequence
  Description of Artificial Sequence: Synthetic oligonucleotide
  Sense strand starting at position 3040 of SEQ ID NO: 585245
cgcagcauuggcgaauuua

SEQ ID NO: 624647 - RNA, 19 nt, Artificial Sequence
  Description of Artificial Sequence: Synthetic oligonucleotide
  Antisense strand to SEQ ID NO: 624646
uaaauucgccaaugcugcg

SEQ ID NO: 624648 - RNA, 19 nt, Artificial Sequence
  Description of Artificial Sequence: Synthetic oligonucleotide
  Sense strand starting at position 3048 of SEQ ID NO: 585245
uggcgaauuuagcugguua

SEQ ID NO: 624649 - RNA, 19 nt, Artificial Sequence
  Description of Artificial Sequence: Synthetic oligonucleotide
  Antisense strand to SEQ ID NO: 624648
uaaccagcuaaauucgcca

SEQ ID NO: 624650 - RNA, 19 nt, Artificial Sequence
  Description of Artificial Sequence: Synthetic oligonucleotide
  Sense strand starting at position 3049 of SEQ ID NO: 585245
ggcgaauuuagcugguuaa

SEQ ID NO: 624651 - RNA, 19 nt, Artificial Sequence
  Description of Artificial Sequence: Synthetic oligonucleotide
  Antisense strand to SEQ ID NO: 624650
uuaaccagcuaaauucgcc

SEQ ID NO: 624652 - RNA, 19 nt, Artificial Sequence
  Description of Artificial Sequence: Synthetic oligonucleotide
  Sense strand starting at position 3050 of SEQ ID NO: 585245
gcgaauuuagcugguuaaa

SEQ ID NO: 624653 - RNA, 19 nt, Artificial Sequence
  Description of Artificial Sequence: Synthetic oligonucleotide
  Antisense strand to SEQ ID NO: 624652
uuuaaccagcuaaauucgc

SEQ ID NO: 624654 - RNA, 19 nt, Artificial Sequence
  Description of Artificial Sequence: Synthetic oligonucleotide
  Sense strand starting at position 3106 of SEQ ID NO: 585245
agacaaguaaugugcauga

SEQ ID NO: 624655 - RNA, 19 nt, Artificial Sequence
  Description of Artificial Sequence: Synthetic oligonucleotide
  Antisense strand to SEQ ID NO: 624654
ucaugcacauuacuugucu

SEQ ID NO: 624656 - RNA, 19 nt, Artificial Sequence
  Description of Artificial Sequence: Synthetic oligonucleotide
  Sense strand starting at position 3108 of SEQ ID NO: 585245
acaaguaaugugcaugaaa

SEQ ID NO: 624657 - RNA, 19 nt, Artificial Sequence
  Description of Artificial Sequence: Synthetic oligonucleotide
  Antisense strand to SEQ ID NO: 624656
uuucaugcacauuacuugu

SEQ ID NO: 624658 - RNA, 19 nt, Artificial Sequence
  Description of Artificial Sequence: Synthetic oligonucleotide
  Sense strand starting at position 3216 of SEQ ID NO: 585245
aaauaccauuugggaguaa

SEQ ID NO: 624659 - RNA, 19 nt, Artificial Sequence
  Description of Artificial Sequence: Synthetic oligonucleotide
  Antisense strand to SEQ ID NO: 624658
uuacucccaaaugguauuu

SEQ ID NO: 624660 - RNA, 19 nt, Artificial Sequence
  Description of Artificial Sequence: Synthetic oligonucleotide
  Sense strand starting at position 3217 of SEQ ID NO: 585245
aauaccauuugggaguaau

SEQ ID NO: 624661 - RNA, 19 nt, Artificial Sequence
  Description of Artificial Sequence: Synthetic oligonucleotide
  Antisense strand to SEQ ID NO: 624660
auuacucccaaaugguauu

SEQ ID NO: 624662 - RNA, 19 nt, Artificial Sequence
  Description of Artificial Sequence: Synthetic oligonucleotide
  Sense strand starting at position 3266 of SEQ ID NO: 585245
uugucacuuccucaaaguu

SEQ ID NO: 624663 - RNA, 19 nt, Artificial Sequence
  Description of Artificial Sequence: Synthetic oligonucleotide
  Antisense strand to SEQ ID NO: 624662
aacuuugaggaagugacaa

SEQ ID NO: 624664 - RNA, 19 nt, Artificial Sequence
  Description of Artificial Sequence: Synthetic oligonucleotide
  Sense strand starting at position 3492 of SEQ ID NO: 585245
augaauggcauccagugua

SEQ ID NO: 624665 - RNA, 19 nt, Artificial Sequence
  Description of Artificial Sequence: Synthetic oligonucleotide
  Antisense strand to SEQ ID NO: 624664
uacacuggaugccauucau

SEQ ID NO: 624666 - RNA, 19 nt, Artificial Sequence
  Description of Artificial Sequence: Synthetic oligonucleotide
  Sense strand starting at position 3495 of SEQ ID NO: 585245
aauggcauccaguguagaa

SEQ ID NO: 624667 - RNA, 19 nt, Artificial Sequence
  Description of Artificial Sequence: Synthetic oligonucleotide
  Antisense strand to SEQ ID NO: 624666
uucuacacuggaugccauu

SEQ ID NO: 624668 - RNA, 19 nt, Artificial Sequence
  Description of Artificial Sequence: Synthetic oligonucleotide
  Sense strand starting at position 3497 of SEQ ID NO: 585245
uggcauccaguguagaaua

SEQ ID NO: 624669 - RNA, 19 nt, Artificial Sequence
  Description of Artificial Sequence: Synthetic oligonucleotide
  Antisense strand to SEQ ID NO: 624668
uauucuacacuggaugcca

SEQ ID NO: 624670 - RNA, 19 nt, Artificial Sequence
  Description of Artificial Sequence: Synthetic oligonucleotide
  Sense strand starting at position 3502 of SEQ ID NO: 585245
uccaguguagaauacuuaa

SEQ ID NO: 624671 - RNA, 19 nt, Artificial Sequence
  Description of Artificial Sequence: Synthetic oligonucleotide
  Antisense strand to SEQ ID NO: 624670
uuaaguauucuacacugga

SEQ ID NO: 624672 - RNA, 19 nt, Artificial Sequence
  Description of Artificial Sequence: Synthetic oligonucleotide
  Sense strand starting at position 3657 of SEQ ID NO: 585245
uucgcuauuguugcucaga

SEQ ID NO: 624673 - RNA, 19 nt, Artificial Sequence
  Description of Artificial Sequence: Synthetic oligonucleotide
  Antisense strand to SEQ ID NO: 624672
ucugagcaacaauagcgaa

SEQ ID NO: 624674 - RNA, 19 nt, Artificial Sequence
  Description of Artificial Sequence: Synthetic oligonucleotide
  Sense strand starting at position 1075 of SEQ ID NO: 585246
ccggaaugcagucaucuuu

SEQ ID NO: 624675 - RNA, 19 nt, Artificial Sequence
  Description of Artificial Sequence: Synthetic oligonucleotide
  Antisense strand to SEQ ID NO: 624674
aaagaugacugcauuccgg

SEQ ID NO: 624676 - RNA, 19 nt, Artificial Sequence
  Description of Artificial Sequence: Synthetic oligonucleotide
  Sense strand starting at position 1142 of SEQ ID NO: 585246
uuguucucucguuucugua

SEQ ID NO: 624677 - RNA, 19 nt, Artificial Sequence
  Description of Artificial Sequence: Synthetic oligonucleotide
  Antisense strand to SEQ ID NO: 624676
uacagaaacgagagaacaa

SEQ ID NO: 624678 - RNA, 19 nt, Artificial Sequence
  Description of Artificial Sequence: Synthetic oligonucleotide
  Sense strand starting at position 1179 of SEQ ID NO: 585246
cugacaagugcacaugaau

SEQ ID NO: 624679 - RNA, 19 nt, Artificial Sequence
  Description of Artificial Sequence: Synthetic oligonucleotide
  Antisense strand to SEQ ID NO: 624678
auucaugugcacuugucag

SEQ ID NO: 624680 - RNA, 19 nt, Artificial Sequence
  Description of Artificial Sequence: Synthetic oligonucleotide
  Sense strand starting at position 1194 of SEQ ID NO: 585246
gaauaaacagccuguguau

SEQ ID NO: 624681 - RNA, 19 nt, Artificial Sequence
  Description of Artificial Sequence: Synthetic oligonucleotide
  Antisense strand to SEQ ID NO: 624680
auacacaggcuguuuauuc

SEQ ID NO: 624682 - RNA, 19 nt, Artificial Sequence
  Description of Artificial Sequence: Synthetic oligonucleotide
  Sense strand starting at position 1196 of SEQ ID NO: 585246
auaaacagccuguguauua

SEQ ID NO: 624683 - RNA, 19 nt, Artificial Sequence
  Description of Artificial Sequence: Synthetic oligonucleotide
  Antisense strand to SEQ ID NO: 624682
uaauacacaggcuguuuau

SEQ ID NO: 624684 - RNA, 19 nt, Artificial Sequence
  Description of Artificial Sequence: Synthetic oligonucleotide
  Sense strand starting at position 1260 of SEQ ID NO: 585246
cagugaaaccuugguguca

SEQ ID NO: 624685 - RNA, 19 nt, Artificial Sequence
  Description of Artificial Sequence: Synthetic oligonucleotide
  Antisense strand to SEQ ID NO: 624684
ugacaccaagguuucacug

SEQ ID NO: 624686 - RNA, 19 nt, Artificial Sequence
  Description of Artificial Sequence: Synthetic oligonucleotide
  Sense strand starting at position 1346 of SEQ ID NO: 585246
uaaauuagugcaugaaaug

SEQ ID NO: 624687 - RNA, 19 nt, Artificial Sequence
  Description of Artificial Sequence: Synthetic oligonucleotide
  Antisense strand to SEQ ID NO: 624686
cauuucaugcacuaauuua

SEQ ID NO: 624688 - RNA, 19 nt, Artificial Sequence
  Description of Artificial Sequence: Synthetic oligonucleotide
  Sense strand starting at position 1347 of SEQ ID NO: 585246
aaauuagugcaugaaaugu

SEQ ID NO: 624689 - RNA, 19 nt, Artificial Sequence
  Description of Artificial Sequence: Synthetic oligonucleotide
  Antisense strand to SEQ ID NO: 624688
acauuucaugcacuaauuu

SEQ ID NO: 624690 - RNA, 19 nt, Artificial Sequence
  Description of Artificial Sequence: Synthetic oligonucleotide
  Sense strand starting at position 1356 of SEQ ID NO: 585246
caugaaaugugagcaagga

SEQ ID NO: 624691 - RNA, 19 nt, Artificial Sequence
  Description of Artificial Sequence: Synthetic oligonucleotide
  Antisense strand to SEQ ID NO: 624690
uccuugcucacauuucaug

SEQ ID NO: 624692 - RNA, 19 nt, Artificial Sequence
  Description of Artificial Sequence: Synthetic oligonucleotide
  Sense strand starting at position 1398 of SEQ ID NO: 585246
acgucagaagcguucguua

SEQ ID NO: 624693 - RNA, 19 nt, Artificial Sequence
  Description of Artificial Sequence: Synthetic oligonucleotide
  Antisense strand to SEQ ID NO: 624692
uaacgaacgcuucugacgu

SEQ ID NO: 624694 - RNA, 19 nt, Artificial Sequence
  Description of Artificial Sequence: Synthetic oligonucleotide
  Sense strand starting at position 1994 of SEQ ID NO: 585246
aaagaaugggcucgaugga

SEQ ID NO: 624695 - RNA, 19 nt, Artificial Sequence
  Description of Artificial Sequence: Synthetic oligonucleotide
  Antisense strand to SEQ ID NO: 624694
uccaucgagcccauucuuu

SEQ ID NO: 624696 - RNA, 19 nt, Artificial Sequence
  Description of Artificial Sequence: Synthetic oligonucleotide
  Sense strand starting at position 2000 of SEQ ID NO: 585246
ugggcucgauggaggaaua

SEQ ID NO: 624697 - RNA, 19 nt, Artificial Sequence
  Description of Artificial Sequence: Synthetic oligonucleotide
  Antisense strand to SEQ ID NO: 624696
uauuccuccaucgagccca

SEQ ID NO: 624698 - RNA, 19 nt, Artificial Sequence
  Description of Artificial Sequence: Synthetic oligonucleotide
  Sense strand starting at position 2001 of SEQ ID NO: 585246
gggcucgauggaggaauaa

SEQ ID NO: 624699 - RNA, 19 nt, Artificial Sequence
  Description of Artificial Sequence: Synthetic oligonucleotide
  Antisense strand to SEQ ID NO: 624698
uuauuccuccaucgagccc

SEQ ID NO: 624700 - RNA, 19 nt, Artificial Sequence
  Description of Artificial Sequence: Synthetic oligonucleotide
  Sense strand starting at position 2016 of SEQ ID NO: 585246
auaagaagcuaguuauagu

SEQ ID NO: 624701 - RNA, 19 nt, Artificial Sequence
  Description of Artificial Sequence: Synthetic oligonucleotide
  Antisense strand to SEQ ID NO: 624700
acuauaacuagcuucuuau

SEQ ID NO: 624702 - RNA, 19 nt, Artificial Sequence
  Description of Artificial Sequence: Synthetic oligonucleotide
  Sense strand starting at position 2029 of SEQ ID NO: 585246
uauagucaucgguagaauu

SEQ ID NO: 624703 - RNA, 19 nt, Artificial Sequence
  Description of Artificial Sequence: Synthetic oligonucleotide
  Antisense strand to SEQ ID NO: 624702
aauucuaccgaugacuaua

SEQ ID NO: 624704 - RNA, 19 nt, Artificial Sequence
  Description of Artificial Sequence: Synthetic oligonucleotide
  Sense strand starting at position 2031 of SEQ ID NO: 585246
uagucaucgguagaauugu

SEQ ID NO: 624705 - RNA, 19 nt, Artificial Sequence
  Description of Artificial Sequence: Synthetic oligonucleotide
  Antisense strand to SEQ ID NO: 624704
acaauucuaccgaugacua

SEQ ID NO: 624706 - RNA, 19 nt, Artificial Sequence
  Description of Artificial Sequence: Synthetic oligonucleotide
  Sense strand starting at position 2042 of SEQ ID NO: 585246
agaauugugaaaggcgcaa

SEQ ID NO: 624707 - RNA, 19 nt, Artificial Sequence
  Description of Artificial Sequence: Synthetic oligonucleotide
  Antisense strand to SEQ ID NO: 624706
uugcgccuuucacaauucu

SEQ ID NO: 624708 - RNA, 19 nt, Artificial Sequence
  Description of Artificial Sequence: Synthetic oligonucleotide
  Sense strand starting at position 2054 of SEQ ID NO: 585246
ggcgcaauuugauugguua

SEQ ID NO: 624709 - RNA, 19 nt, Artificial Sequence
  Description of Artificial Sequence: Synthetic oligonucleotide
  Antisense strand to SEQ ID NO: 624708
uaaccaaucaaauugcgcc

SEQ ID NO: 624710 - RNA, 19 nt, Artificial Sequence
  Description of Artificial Sequence: Synthetic oligonucleotide
  Sense strand starting at position 2055 of SEQ ID NO: 585246
gcgcaauuugauugguuaa

SEQ ID NO: 624711 - RNA, 19 nt, Artificial Sequence
  Description of Artificial Sequence: Synthetic oligonucleotide
  Antisense strand to SEQ ID NO: 624710
uuaaccaaucaaauugcgc

SEQ ID NO: 624712 - RNA, 19 nt, Artificial Sequence
  Description of Artificial Sequence: Synthetic oligonucleotide
  Sense strand starting at position 2155 of SEQ ID NO: 585246
ccaaucagagcuggauauu

SEQ ID NO: 624713 - RNA, 19 nt, Artificial Sequence
  Description of Artificial Sequence: Synthetic oligonucleotide
  Antisense strand to SEQ ID NO: 624712
aauauccagcucugauugg

SEQ ID NO: 624714 - RNA, 19 nt, Artificial Sequence
  Description of Artificial Sequence: Synthetic oligonucleotide
  Sense strand starting at position 2321 of SEQ ID NO: 585246
ccaagaaggcugugaccaa

SEQ ID NO: 624715 - RNA, 19 nt, Artificial Sequence
  Description of Artificial Sequence: Synthetic oligonucleotide
  Antisense strand to SEQ ID NO: 624714
uuggucacagccuucuugg

SEQ ID NO: 624716 - RNA, 19 nt, Artificial Sequence
  Description of Artificial Sequence: Synthetic oligonucleotide
  Sense strand starting at position 2393 of SEQ ID NO: 585246
ccguguauguguacaaggu

SEQ ID NO: 624717 - RNA, 19 nt, Artificial Sequence
  Description of Artificial Sequence: Synthetic oligonucleotide
  Antisense strand to SEQ ID NO: 624716
accuuguacacauacacgg

SEQ ID NO: 624718 - RNA, 19 nt, Artificial Sequence
  Description of Artificial Sequence: Synthetic oligonucleotide
  Sense strand starting at position 2466 of SEQ ID NO: 585246
gaauuccuucguuaacgac

SEQ ID NO: 624719 - RNA, 19 nt, Artificial Sequence
  Description of Artificial Sequence: Synthetic oligonucleotide
  Antisense strand to SEQ ID NO: 624718
gucguuaacgaaggaauuc

SEQ ID NO: 624720 - RNA, 19 nt, Artificial Sequence
  Description of Artificial Sequence: Synthetic oligonucleotide
  Sense strand starting at position 2543 of SEQ ID NO: 585246
ccauuaccuccagggagau

SEQ ID NO: 624721 - RNA, 19 nt, Artificial Sequence
  Description of Artificial Sequence: Synthetic oligonucleotide
  Antisense strand to SEQ ID NO: 624720
aucucccuggagguaaugg

SEQ ID NO: 624722 - RNA, 19 nt, Artificial Sequence
  Description of Artificial Sequence: Synthetic oligonucleotide
  Sense strand starting at position 2625 of SEQ ID NO: 585246
caaggcugucaccaaguau

SEQ ID NO: 624723 - RNA, 19 nt, Artificial Sequence
  Description of Artificial Sequence: Synthetic oligonucleotide
  Antisense strand to SEQ ID NO: 624722
auacuuggugacagccuug

SEQ ID NO: 624724 - RNA, 19 nt, Artificial Sequence
  Description of Artificial Sequence: Synthetic oligonucleotide
  Sense strand starting at position 2640 of SEQ ID NO: 585246
guauacaagcuccaaguaa

SEQ ID NO: 624725 - RNA, 19 nt, Artificial Sequence
  Description of Artificial Sequence: Synthetic oligonucleotide
  Antisense strand to SEQ ID NO: 624724
uuacuuggagcuuguauac

SEQ ID NO: 624726 - RNA, 19 nt, Artificial Sequence
  Description of Artificial Sequence: Synthetic oligonucleotide
  Sense strand starting at position 2661 of SEQ ID NO: 585246
gugugcuuaggugcuuuaa

SEQ ID NO: 624727 - RNA, 19 nt, Artificial Sequence
  Description of Artificial Sequence: Synthetic oligonucleotide
  Antisense strand to SEQ ID NO: 624726
uuaaagcaccuaagcacac

SEQ ID NO: 624728 - RNA, 19 nt, Artificial Sequence
  Description of Artificial Sequence: Synthetic oligonucleotide
  Sense strand starting at position 2823 of SEQ ID NO: 585246
ggcuaacgugguuaaaucu

SEQ ID NO: 624729 - RNA, 19 nt, Artificial Sequence
  Description of Artificial Sequence: Synthetic oligonucleotide
  Antisense strand to SEQ ID NO: 624728
agauuuaaccacguuagcc

SEQ ID NO: 624730 - RNA, 19 nt, Artificial Sequence
  Description of Artificial Sequence: Synthetic oligonucleotide
  Sense strand starting at position 2887 of SEQ ID NO: 585246
cgugucaucccagagacuc

SEQ ID NO: 624731 - RNA, 19 nt, Artificial Sequence
  Description of Artificial Sequence: Synthetic oligonucleotide
  Antisense strand to SEQ ID NO: 624730
gagucucugggaugacacg

SEQ ID NO: 624732 - RNA, 19 nt, Artificial Sequence
  Description of Artificial Sequence: Synthetic oligonucleotide
  Sense strand starting at position 3076 of SEQ ID NO: 585246
uugggaggucgaugcauga

SEQ ID NO: 624733 - RNA, 19 nt, Artificial Sequence
  Description of Artificial Sequence: Synthetic oligonucleotide
  Antisense strand to SEQ ID NO: 624732
ucaugcaucgaccucccaa

SEQ ID NO: 624734 - RNA, 19 nt, Artificial Sequence
  Description of Artificial Sequence: Synthetic oligonucleotide
  Sense strand starting at position 3251 of SEQ ID NO: 585246
acugcaggaacaugugaau

SEQ ID NO: 624735 - RNA, 19 nt, Artificial Sequence
  Description of Artificial Sequence: Synthetic oligonucleotide
  Antisense strand to SEQ ID NO: 624734
auucacauguuccugcagu

SEQ ID NO: 624736 - RNA, 19 nt, Artificial Sequence
  Description of Artificial Sequence: Synthetic oligonucleotide
  Sense strand starting at position 3257 of SEQ ID NO: 585246
ggaacaugugaauacgcua

SEQ ID NO: 624737 - RNA, 19 nt, Artificial Sequence
  Description of Artificial Sequence: Synthetic oligonucleotide
  Antisense strand to SEQ ID NO: 624736
uagcguauucacauguucc

SEQ ID NO: 624738 - RNA, 19 nt, Artificial Sequence
  Description of Artificial Sequence: Synthetic oligonucleotide
  Sense strand starting at position 3320 of SEQ ID NO: 585246
gucuuugggucccuaaaga

SEQ ID NO: 624739 - RNA, 19 nt, Artificial Sequence
  Description of Artificial Sequence: Synthetic oligonucleotide
  Antisense strand to SEQ ID NO: 624738
ucuuuagggacccaaagac

SEQ ID NO: 624740 - RNA, 19 nt, Artificial Sequence
  Description of Artificial Sequence: Synthetic oligonucleotide
  Sense strand starting at position 3344 of SEQ ID NO: 585246
ugauaacaaguuugacuuu

SEQ ID NO: 624741 - RNA, 19 nt, Artificial Sequence
  Description of Artificial Sequence: Synthetic oligonucleotide
  Antisense strand to SEQ ID NO: 624740
aaagucaaacuuguuauca

SEQ ID NO: 624742 - RNA, 19 nt, Artificial Sequence
  Description of Artificial Sequence: Synthetic oligonucleotide
  Sense strand starting at position 3379 of SEQ ID NO: 585246
gaguuuguuguggagggaa

SEQ ID NO: 624743 - RNA, 19 nt, Artificial Sequence
  Description of Artificial Sequence: Synthetic oligonucleotide
  Antisense strand to SEQ ID NO: 624742
uucccuccacaacaaacuc

SEQ ID NO: 624744 - RNA, 19 nt, Artificial Sequence
  Description of Artificial Sequence: Synthetic oligonucleotide
  Sense strand starting at position 3381 of SEQ ID NO: 585246
guuuguuguggagggaaua

SEQ ID NO: 624745 - RNA, 19 nt, Artificial Sequence
  Description of Artificial Sequence: Synthetic oligonucleotide
  Antisense strand to SEQ ID NO: 624744
uauucccuccacaacaaac

SEQ ID NO: 624746 - RNA, 19 nt, Artificial Sequence
  Description of Artificial Sequence: Synthetic oligonucleotide
  Sense strand starting at position 3391 of SEQ ID NO: 585246
gagggaauaccaugggcau

SEQ ID NO: 624747 - RNA, 19 nt, Artificial Sequence
  Description of Artificial Sequence: Synthetic oligonucleotide
  Antisense strand to SEQ ID NO: 624746
augcccaugguauucccuc

SEQ ID NO: 624748 - RNA, 19 nt, Artificial Sequence
  Description of Artificial Sequence: Synthetic oligonucleotide
  Sense strand starting at position 3392 of SEQ ID NO: 585246
agggaauaccaugggcauu

SEQ ID NO: 624749 - RNA, 19 nt, Artificial Sequence
  Description of Artificial Sequence: Synthetic oligonucleotide
  Antisense strand to SEQ ID NO: 624748
aaugcccaugguauucccu

SEQ ID NO: 624750 - RNA, 19 nt, Artificial Sequence
  Description of Artificial Sequence: Synthetic oligonucleotide
  Sense strand starting at position 3404 of SEQ ID NO: 585246
gggcauuggcaauguaaag

SEQ ID NO: 624751 - RNA, 19 nt, Artificial Sequence
  Description of Artificial Sequence: Synthetic oligonucleotide
  Antisense strand to SEQ ID NO: 624750
cuuuacauugccaaugccc

SEQ ID NO: 624752 - RNA, 19 nt, Artificial Sequence
  Description of Artificial Sequence: Synthetic oligonucleotide
  Sense strand starting at position 3708 of SEQ ID NO: 585246
gcgaaagagcuagauucca

SEQ ID NO: 624753 - RNA, 19 nt, Artificial Sequence
  Description of Artificial Sequence: Synthetic oligonucleotide
  Antisense strand to SEQ ID NO: 624752
uggaaucuagcucuuucgc

SEQ ID NO: 624754 - RNA, 19 nt, Artificial Sequence
  Description of Artificial Sequence: Synthetic oligonucleotide
  Sense strand starting at position 94 of SEQ ID NO: 585247
gaguuaacgucuucuuaag

SEQ ID NO: 624755 - RNA, 19 nt, Artificial Sequence
  Description of Artificial Sequence: Synthetic oligonucleotide
  Antisense strand to SEQ ID NO: 624754
cuuaagaagacguuaacuc

SEQ ID NO: 624756 - RNA, 19 nt, Artificial Sequence
  Description of Artificial Sequence: Synthetic oligonucleotide
  Sense strand starting at position 96 of SEQ ID NO: 585247
guuaacgucuucuuaagau

SEQ ID NO: 624757 - RNA, 19 nt, Artificial Sequence
  Description of Artificial Sequence: Synthetic oligonucleotide
  Antisense strand to SEQ ID NO: 624756
aucuuaagaagacguuaac

SEQ ID NO: 624758 - RNA, 19 nt, Artificial Sequence
  Description of Artificial Sequence: Synthetic oligonucleotide
  Sense strand starting at position 455 of SEQ ID NO: 585247
ggcacaauugugcaaucuu

SEQ ID NO: 624759 - RNA, 19 nt, Artificial Sequence
  Description of Artificial Sequence: Synthetic oligonucleotide
  Antisense strand to SEQ ID NO: 624758
aagauugcacaauugugcc

SEQ ID NO: 624760 - RNA, 19 nt, Artificial Sequence
  Description of Artificial Sequence: Synthetic oligonucleotide
  Sense strand starting at position 467 of SEQ ID NO: 585247
caaucuuggcaugaguauu

SEQ ID NO: 624761 - RNA, 19 nt, Artificial Sequence
  Description of Artificial Sequence: Synthetic oligonucleotide
  Antisense strand to SEQ ID NO: 624760
aauacucaugccaagauug

SEQ ID NO: 624762 - RNA, 19 nt, Artificial Sequence
  Description of Artificial Sequence: Synthetic oligonucleotide
  Sense strand starting at position 473 of SEQ ID NO: 585247
uggcaugaguauuccuuau

SEQ ID NO: 624763 - RNA, 19 nt, Artificial Sequence
  Description of Artificial Sequence: Synthetic oligonucleotide
  Antisense strand to SEQ ID NO: 624762
auaaggaauacucaugcca

SEQ ID NO: 624764 - RNA, 19 nt, Artificial Sequence
  Description of Artificial Sequence: Synthetic oligonucleotide
  Sense strand starting at position 475 of SEQ ID NO: 585247
gcaugaguauuccuuauuu

SEQ ID NO: 624765 - RNA, 19 nt, Artificial Sequence
  Description of Artificial Sequence: Synthetic oligonucleotide
  Antisense strand to SEQ ID NO: 624764
aaauaaggaauacucaugc

SEQ ID NO: 624766 - RNA, 19 nt, Artificial Sequence
  Description of Artificial Sequence: Synthetic oligonucleotide
  Sense strand starting at position 509 of SEQ ID NO: 585247
aguuauuugcacuaccgua

SEQ ID NO: 624767 - RNA, 19 nt, Artificial Sequence
  Description of Artificial Sequence: Synthetic oligonucleotide
  Antisense strand to SEQ ID NO: 624766
uacgguagugcaaauaacu

SEQ ID NO: 624768 - RNA, 19 nt, Artificial Sequence
  Description of Artificial Sequence: Synthetic oligonucleotide
  Sense strand starting at position 514 of SEQ ID NO: 585247
uuugcacuaccguaguaaa

SEQ ID NO: 624769 - RNA, 19 nt, Artificial Sequence
  Description of Artificial Sequence: Synthetic oligonucleotide
  Antisense strand to SEQ ID NO: 624768
uuuacuacgguagugcaaa

SEQ ID NO: 624770 - RNA, 19 nt, Artificial Sequence
  Description of Artificial Sequence: Synthetic oligonucleotide
  Sense strand starting at position 710 of SEQ ID NO: 585247
cuaucugugaggcagacau

SEQ ID NO: 624771 - RNA, 19 nt, Artificial Sequence
  Description of Artificial Sequence: Synthetic oligonucleotide
  Antisense strand to SEQ ID NO: 624770
augucugccucacagauag

SEQ ID NO: 624772 - RNA, 19 nt, Artificial Sequence
  Description of Artificial Sequence: Synthetic oligonucleotide
  Sense strand starting at position 804 of SEQ ID NO: 585247
aaguucuucuagguaagca

SEQ ID NO: 624773 - RNA, 19 nt, Artificial Sequence
  Description of Artificial Sequence: Synthetic oligonucleotide
  Antisense strand to SEQ ID NO: 624772
ugcuuaccuagaagaacuu

SEQ ID NO: 624774 - RNA, 19 nt, Artificial Sequence
  Description of Artificial Sequence: Synthetic oligonucleotide
  Sense strand starting at position 814 of SEQ ID NO: 585247
agguaagcaacuugggaua

SEQ ID NO: 624775 - RNA, 19 nt, Artificial Sequence
  Description of Artificial Sequence: Synthetic oligonucleotide
  Antisense strand to SEQ ID NO: 624774
uaucccaaguugcuuaccu

SEQ ID NO: 624776 - RNA, 19 nt, Artificial Sequence
  Description of Artificial Sequence: Synthetic oligonucleotide
  Sense strand starting at position 857 of SEQ ID NO: 585247
uuucuugggcuccagauaa

SEQ ID NO: 624777 - RNA, 19 nt, Artificial Sequence
  Description of Artificial Sequence: Synthetic oligonucleotide
  Antisense strand to SEQ ID NO: 624776
uuaucuggagcccaagaaa

SEQ ID NO: 624778 - RNA, 19 nt, Artificial Sequence
  Description of Artificial Sequence: Synthetic oligonucleotide
  Sense strand starting at position 869 of SEQ ID NO: 585247
cagauaacgucaucccagu

SEQ ID NO: 624779 - RNA, 19 nt, Artificial Sequence
  Description of Artificial Sequence: Synthetic oligonucleotide
  Antisense strand to SEQ ID NO: 624778
acugggaugacguuaucug

SEQ ID NO: 624780 - RNA, 19 nt, Artificial Sequence
  Description of Artificial Sequence: Synthetic oligonucleotide
  Sense strand starting at position 1006 of SEQ ID NO: 585247
guggacuauugugucacaa

SEQ ID NO: 624781 - RNA, 19 nt, Artificial Sequence
  Description of Artificial Sequence: Synthetic oligonucleotide
  Antisense strand to SEQ ID NO: 624780
uugugacacaauaguccac

SEQ ID NO: 624782 - RNA, 19 nt, Artificial Sequence
  Description of Artificial Sequence: Synthetic oligonucleotide
  Sense strand starting at position 1189 of SEQ ID NO: 585247
ggaacagcugucugcuaaa

SEQ ID NO: 624783 - RNA, 19 nt, Artificial Sequence
  Description of Artificial Sequence: Synthetic oligonucleotide
  Antisense strand to SEQ ID NO: 624782
uuuagcagacagcuguucc

SEQ ID NO: 624784 - RNA, 19 nt, Artificial Sequence
  Description of Artificial Sequence: Synthetic oligonucleotide
  Sense strand starting at position 1422 of SEQ ID NO: 585247
auggguaauuuaugacuag

SEQ ID NO: 624785 - RNA, 19 nt, Artificial Sequence
  Description of Artificial Sequence: Synthetic oligonucleotide
  Antisense strand to SEQ ID NO: 624784
cuagucauaaauuacccau

SEQ ID NO: 624786 - RNA, 19 nt, Artificial Sequence
  Description of Artificial Sequence: Synthetic oligonucleotide
  Sense strand starting at position 1423 of SEQ ID NO: 585247
uggguaauuuaugacuaga

SEQ ID NO: 624787 - RNA, 19 nt, Artificial Sequence
  Description of Artificial Sequence: Synthetic oligonucleotide
  Antisense strand to SEQ ID NO: 624786
ucuagucauaaauuaccca

SEQ ID NO: 624788 - RNA, 19 nt, Artificial Sequence
  Description of Artificial Sequence: Synthetic oligonucleotide
  Sense strand starting at position 1436 of SEQ ID NO: 585247
acuagagucuuguccaugu

SEQ ID NO: 624789 - RNA, 19 nt, Artificial Sequence
  Description of Artificial Sequence: Synthetic oligonucleotide
  Antisense strand to SEQ ID NO: 624788
acauggacaagacucuagu

SEQ ID NO: 624790 - RNA, 19 nt, Artificial Sequence
  Description of Artificial Sequence: Synthetic oligonucleotide
  Sense strand starting at position 2101 of SEQ ID NO: 585247
gucuucuggauuugcgaau

SEQ ID NO: 624791 - RNA, 19 nt, Artificial Sequence
  Description of Artificial Sequence: Synthetic oligonucleotide
  Antisense strand to SEQ ID NO: 624790
auucgcaaauccagaagac

SEQ ID NO: 624792 - RNA, 19 nt, Artificial Sequence
  Description of Artificial Sequence: Synthetic oligonucleotide
  Sense strand starting at position 2140 of SEQ ID NO: 585247
cucugacguuacccugaau

SEQ ID NO: 624793 - RNA, 19 nt, Artificial Sequence
  Description of Artificial Sequence: Synthetic oligonucleotide
  Antisense strand to SEQ ID NO: 624792
auucaggguaacgucagag

SEQ ID NO: 624794 - RNA, 19 nt, Artificial Sequence
  Description of Artificial Sequence: Synthetic oligonucleotide
  Sense strand starting at position 2143 of SEQ ID NO: 585247
ugacguuacccugaauaac

SEQ ID NO: 624795 - RNA, 19 nt, Artificial Sequence
  Description of Artificial Sequence: Synthetic oligonucleotide
  Antisense strand to SEQ ID NO: 624794
guuauucaggguaacguca

SEQ ID NO: 624796 - RNA, 19 nt, Artificial Sequence
  Description of Artificial Sequence: Synthetic oligonucleotide
  Sense strand starting at position 2332 of SEQ ID NO: 585247
ccaagaaggcggugacuaa

SEQ ID NO: 624797 - RNA, 19 nt, Artificial Sequence
  Description of Artificial Sequence: Synthetic oligonucleotide
  Antisense strand to SEQ ID NO: 624796
uuagucaccgccuucuugg

SEQ ID NO: 624798 - RNA, 19 nt, Artificial Sequence
  Description of Artificial Sequence: Synthetic oligonucleotide
  Sense strand starting at position 2405 of SEQ ID NO: 585247
caucuauguguacaagguu

SEQ ID NO: 624799 - RNA, 19 nt, Artificial Sequence
  Description of Artificial Sequence: Synthetic oligonucleotide
  Antisense strand to SEQ ID NO: 624798
aaccuuguacacauagaug

SEQ ID NO: 624800 - RNA, 19 nt, Artificial Sequence
  Description of Artificial Sequence: Synthetic oligonucleotide
  Sense strand starting at position 2474 of SEQ ID NO: 585247
caugaauucguuugugaac

SEQ ID NO: 624801 - RNA, 19 nt, Artificial Sequence
  Description of Artificial Sequence: Synthetic oligonucleotide
  Antisense strand to SEQ ID NO: 624800
guucacaaacgaauucaug

SEQ ID NO: 624802 - RNA, 19 nt, Artificial Sequence
  Description of Artificial Sequence: Synthetic oligonucleotide
  Sense strand starting at position 2669 of SEQ ID NO: 585247
aacagugaguugguugcaa

SEQ ID NO: 624803 - RNA, 19 nt, Artificial Sequence
  Description of Artificial Sequence: Synthetic oligonucleotide
  Antisense strand to SEQ ID NO: 624802
uugcaaccaacucacuguu

SEQ ID NO: 624804 - RNA, 19 nt, Artificial Sequence
  Description of Artificial Sequence: Synthetic oligonucleotide
  Sense strand starting at position 2808 of SEQ ID NO: 585247
ucugaaguagagcaguuau

SEQ ID NO: 624805 - RNA, 19 nt, Artificial Sequence
  Description of Artificial Sequence: Synthetic oligonucleotide
  Antisense strand to SEQ ID NO: 624804
auaacugcucuacuucaga

SEQ ID NO: 624806 - RNA, 19 nt, Artificial Sequence
  Description of Artificial Sequence: Synthetic oligonucleotide
  Sense strand starting at position 2969 of SEQ ID NO: 585247
gucgguuagugauuuggaa

SEQ ID NO: 624807 - RNA, 19 nt, Artificial Sequence
  Description of Artificial Sequence: Synthetic oligonucleotide
  Antisense strand to SEQ ID NO: 624806
uuccaaaucacuaaccgac

SEQ ID NO: 624808 - RNA, 19 nt, Artificial Sequence
  Description of Artificial Sequence: Synthetic oligonucleotide
  Sense strand starting at position 3013 of SEQ ID NO: 585247
guuugaauuugcccgggca

SEQ ID NO: 624809 - RNA, 19 nt, Artificial Sequence
  Description of Artificial Sequence: Synthetic oligonucleotide
  Antisense strand to SEQ ID NO: 624808
ugcccgggcaaauucaaac

SEQ ID NO: 624810 - RNA, 19 nt, Artificial Sequence
  Description of Artificial Sequence: Synthetic oligonucleotide
  Sense strand starting at position 3014 of SEQ ID NO: 585247
uuugaauuugcccgggcaa

SEQ ID NO: 624811 - RNA, 19 nt, Artificial Sequence
  Description of Artificial Sequence: Synthetic oligonucleotide
  Antisense strand to SEQ ID NO: 624810
uugcccgggcaaauucaaa

SEQ ID NO: 624812 - RNA, 19 nt, Artificial Sequence
  Description of Artificial Sequence: Synthetic oligonucleotide
  Sense strand starting at position 3060 of SEQ ID NO: 585247
gguuguuguauccaggaag

SEQ ID NO: 624813 - RNA, 19 nt, Artificial Sequence
  Description of Artificial Sequence: Synthetic oligonucleotide
  Antisense strand to SEQ ID NO: 624812
cuuccuggauacaacaacc

SEQ ID NO: 624814 - RNA, 19 nt, Artificial Sequence
  Description of Artificial Sequence: Synthetic oligonucleotide
  Sense strand starting at position 3158 of SEQ ID NO: 585247
aguuucucauucuuuagua

SEQ ID NO: 624815 - RNA, 19 nt, Artificial Sequence
  Description of Artificial Sequence: Synthetic oligonucleotide
  Antisense strand to SEQ ID NO: 624814
uacuaaagaaugagaaacu

SEQ ID NO: 624816 - RNA, 19 nt, Artificial Sequence
  Description of Artificial Sequence: Synthetic oligonucleotide
  Sense strand starting at position 3183 of SEQ ID NO: 585247
cgcuuucgggaaggagauu

SEQ ID NO: 624817 - RNA, 19 nt, Artificial Sequence
  Description of Artificial Sequence: Synthetic oligonucleotide
  Antisense strand to SEQ ID NO: 624816
aaucuccuucccgaaagcg

SEQ ID NO: 624818 - RNA, 19 nt, Artificial Sequence
  Description of Artificial Sequence: Synthetic oligonucleotide
  Sense strand starting at position 3637 of SEQ ID NO: 585247
cccuuuaugguauaucuau

SEQ ID NO: 624819 - RNA, 19 nt, Artificial Sequence
  Description of Artificial Sequence: Synthetic oligonucleotide
  Antisense strand to SEQ ID NO: 624818
auagauauaccauaaaggg

SEQ ID NO: 624820 - RNA, 19 nt, Artificial Sequence
  Description of Artificial Sequence: Synthetic oligonucleotide
  Sense strand starting at position 3643 of SEQ ID NO: 585247
augguauaucuauauaagc

SEQ ID NO: 624821 - RNA, 19 nt, Artificial Sequence
  Description of Artificial Sequence: Synthetic oligonucleotide
  Antisense strand to SEQ ID NO: 624820
gcuuauauagauauaccau

SEQ ID NO: 624822 - RNA, 19 nt, Artificial Sequence
  Description of Artificial Sequence: Synthetic oligonucleotide
  Sense strand starting at position 3666 of SEQ ID NO: 585247
gcauuagaagccuaaacag

SEQ ID NO: 624823 - RNA, 19 nt, Artificial Sequence
  Description of Artificial Sequence: Synthetic oligonucleotide
  Antisense strand to SEQ ID NO: 624822
cuguuuaggcuucuaaugc

SEQ ID NO: 624824 - RNA, 19 nt, Artificial Sequence
  Description of Artificial Sequence: Synthetic oligonucleotide
  Sense strand starting at position 3694 of SEQ ID NO: 585247
gggcguaaugaaggcagaa

SEQ ID NO: 624825 - RNA, 19 nt, Artificial Sequence
  Description of Artificial Sequence: Synthetic oligonucleotide
  Antisense strand to SEQ ID NO: 624824
uucugccuucauuacgccc

SEQ ID NO: 624826 - RNA, 19 nt, Artificial Sequence
  Description of Artificial Sequence: Synthetic oligonucleotide
  Sense strand starting at position 3720 of SEQ ID NO: 585247
ggacauuuaucccagacuc

SEQ ID NO: 624827 - RNA, 19 nt, Artificial Sequence
  Description of Artificial Sequence: Synthetic oligonucleotide
  Antisense strand to SEQ ID NO: 624826
gagucugggauaaaugucc

SEQ ID NO: 624828 - RNA, 19 nt, Artificial Sequence
  Description of Artificial Sequence: Synthetic oligonucleotide
  Sense strand starting at position 3800 of SEQ ID NO: 585247
uuugacuuugccuagaaga

SEQ ID NO: 624829 - RNA, 19 nt, Artificial Sequence
  Description of Artificial Sequence: Synthetic oligonucleotide
  Antisense strand to SEQ ID NO: 624828
ucuucuaggcaaagucaaa

SEQ ID NO: 624830 - RNA, 19 nt, Artificial Sequence
  Description of Artificial Sequence: Synthetic oligonucleotide
  Sense strand starting at position 3849 of SEQ ID NO: 585247
gguugucacaaaugagaac

SEQ ID NO: 624831 - RNA, 19 nt, Artificial Sequence
  Description of Artificial Sequence: Synthetic oligonucleotide
  Antisense strand to SEQ ID NO: 624830
guucucauuugugacaacc

SEQ ID NO: 624832 - RNA, 19 nt, Artificial Sequence
  Description of Artificial Sequence: Synthetic oligonucleotide
  Sense strand starting at position 3953 of SEQ ID NO: 585247
ggaagcucccacuaugacu

SEQ ID NO: 624833 - RNA, 19 nt, Artificial Sequence
  Description of Artificial Sequence: Synthetic oligonucleotide
  Antisense strand to SEQ ID NO: 624832
agucauagugggagcuucc

SEQ ID NO: 624834 - RNA, 19 nt, Artificial Sequence
  Description of Artificial Sequence: Synthetic oligonucleotide
  Sense strand starting at position 92 of SEQ ID NO: 585248
acaaaucuauguguauuga

SEQ ID NO: 624835 - RNA, 19 nt, Artificial Sequence
  Description of Artificial Sequence: Synthetic oligonucleotide
  Antisense strand to SEQ ID NO: 624834
ucaauacacauagauuugu

SEQ ID NO: 624836 - RNA, 19 nt, Artificial Sequence
  Description of Artificial Sequence: Synthetic oligonucleotide
  Sense strand starting at position 186 of SEQ ID NO: 585248
gcuugaauuccguagagaa

SEQ ID NO: 624837 - RNA, 19 nt, Artificial Sequence
  Description of Artificial Sequence: Synthetic oligonucleotide
  Antisense strand to SEQ ID NO: 624836
uucucuacggaauucaagc

SEQ ID NO: 624838 - RNA, 19 nt, Artificial Sequence
  Description of Artificial Sequence: Synthetic oligonucleotide
  Sense strand starting at position 321 of SEQ ID NO: 585248
auagguguuacuugaucag

SEQ ID NO: 624839 - RNA, 19 nt, Artificial Sequence
  Description of Artificial Sequence: Synthetic oligonucleotide
  Antisense strand to SEQ ID NO: 624838
cugaucaaguaacaccuau

SEQ ID NO: 624840 - RNA, 19 nt, Artificial Sequence
  Description of Artificial Sequence: Synthetic oligonucleotide
  Sense strand starting at position 324 of SEQ ID NO: 585248
gguguuacuugaucagaga

SEQ ID NO: 624841 - RNA, 19 nt, Artificial Sequence
  Description of Artificial Sequence: Synthetic oligonucleotide
  Antisense strand to SEQ ID NO: 624840
ucucugaucaaguaacacc

SEQ ID NO: 624842 - RNA, 19 nt, Artificial Sequence
  Description of Artificial Sequence: Synthetic oligonucleotide
  Sense strand starting at position 325 of SEQ ID NO: 585248
guguuacuugaucagagac

SEQ ID NO: 624843 - RNA, 19 nt, Artificial Sequence
  Description of Artificial Sequence: Synthetic oligonucleotide
  Antisense strand to SEQ ID NO: 624842
gucucugaucaaguaacac

SEQ ID NO: 624844 - RNA, 19 nt, Artificial Sequence
  Description of Artificial Sequence: Synthetic oligonucleotide
  Sense strand starting at position 364 of SEQ ID NO: 585248
ugagaaagguaguuaucag

SEQ ID NO: 624845 - RNA, 19 nt, Artificial Sequence
  Description of Artificial Sequence: Synthetic oligonucleotide
  Antisense strand to SEQ ID NO: 624844
cugauaacuaccuuucuca

SEQ ID NO: 624846 - RNA, 19 nt, Artificial Sequence
  Description of Artificial Sequence: Synthetic oligonucleotide
  Sense strand starting at position 401 of SEQ ID NO: 585248
gugcaaaggccuuaagaca

SEQ ID NO: 624847 - RNA, 19 nt, Artificial Sequence
  Description of Artificial Sequence: Synthetic oligonucleotide
  Antisense strand to SEQ ID NO: 624846
ugucuuaaggccuuugcac

SEQ ID NO: 624848 - RNA, 19 nt, Artificial Sequence
  Description of Artificial Sequence: Synthetic oligonucleotide
  Sense strand starting at position 450 of SEQ ID NO: 585248
ccagaaagccuugaggcua

SEQ ID NO: 624849 - RNA, 19 nt, Artificial Sequence
  Description of Artificial Sequence: Synthetic oligonucleotide
  Antisense strand to SEQ ID NO: 624848
uagccucaaggcuuucugg

SEQ ID NO: 624850 - RNA, 19 nt, Artificial Sequence
  Description of Artificial Sequence: Synthetic oligonucleotide
  Sense strand starting at position 533 of SEQ ID NO: 585248
uuccuaggguagguaaauu

SEQ ID NO: 624851 - RNA, 19 nt, Artificial Sequence
  Description of Artificial Sequence: Synthetic oligonucleotide
  Antisense strand to SEQ ID NO: 624850
aauuuaccuacccuaggaa

SEQ ID NO: 624852 - RNA, 19 nt, Artificial Sequence
  Description of Artificial Sequence: Synthetic oligonucleotide
  Sense strand starting at position 544 of SEQ ID NO: 585248
gguaaauuaauguggacaa

SEQ ID NO: 624853 - RNA, 19 nt, Artificial Sequence
  Description of Artificial Sequence: Synthetic oligonucleotide
  Antisense strand to SEQ ID NO: 624852
uuguccacauuaauuuacc

SEQ ID NO: 624854 - RNA, 19 nt, Artificial Sequence
  Description of Artificial Sequence: Synthetic oligonucleotide
  Sense strand starting at position 649 of SEQ ID NO: 585248
acuacaagagugcauuaau

SEQ ID NO: 624855 - RNA, 19 nt, Artificial Sequence
  Description of Artificial Sequence: Synthetic oligonucleotide
  Antisense strand to SEQ ID NO: 624854
auuaaugcacucuuguagu

SEQ ID NO: 624856 - RNA, 19 nt, Artificial Sequence
  Description of Artificial Sequence: Synthetic oligonucleotide
  Sense strand starting at position 765 of SEQ ID NO: 585248
gcaaaugagucacuagacu

SEQ ID NO: 624857 - RNA, 19 nt, Artificial Sequence
  Description of Artificial Sequence: Synthetic oligonucleotide
  Antisense strand to SEQ ID NO: 624856
agucuagugacucauuugc

SEQ ID NO: 624858 - RNA, 19 nt, Artificial Sequence
  Description of Artificial Sequence: Synthetic oligonucleotide
  Sense strand starting at position 785 of SEQ ID NO: 585248
ucaucaccuggguaaaguu

SEQ ID NO: 624859 - RNA, 19 nt, Artificial Sequence
  Description of Artificial Sequence: Synthetic oligonucleotide
  Antisense strand to SEQ ID NO: 624858
aacuuuacccaggugauga

SEQ ID NO: 624860 - RNA, 19 nt, Artificial Sequence
  Description of Artificial Sequence: Synthetic oligonucleotide
  Sense strand starting at position 793 of SEQ ID NO: 585248
uggguaaaguuacucuuaa

SEQ ID NO: 624861 - RNA, 19 nt, Artificial Sequence
  Description of Artificial Sequence: Synthetic oligonucleotide
  Antisense strand to SEQ ID NO: 624860
uuaagaguaacuuuaccca

SEQ ID NO: 624862 - RNA, 19 nt, Artificial Sequence
  Description of Artificial Sequence: Synthetic oligonucleotide
  Sense strand starting at position 794 of SEQ ID NO: 585248
ggguaaaguuacucuuaag

SEQ ID NO: 624863 - RNA, 19 nt, Artificial Sequence
  Description of Artificial Sequence: Synthetic oligonucleotide
  Antisense strand to SEQ ID NO: 624862
cuuaagaguaacuuuaccc

SEQ ID NO: 624864 - RNA, 19 nt, Artificial Sequence
  Description of Artificial Sequence: Synthetic oligonucleotide
  Sense strand starting at position 916 of SEQ ID NO: 585248
gcuguuugacaacacuauu

SEQ ID NO: 624865 - RNA, 19 nt, Artificial Sequence
  Description of Artificial Sequence: Synthetic oligonucleotide
  Antisense strand to SEQ ID NO: 624864
aauaguguugucaaacagc

SEQ ID NO: 624866 - RNA, 19 nt, Artificial Sequence
  Description of Artificial Sequence: Synthetic oligonucleotide
  Sense strand starting at position 1342 of SEQ ID NO: 585248
cggaguauccuacaacaac

SEQ ID NO: 624867 - RNA, 19 nt, Artificial Sequence
  Description of Artificial Sequence: Synthetic oligonucleotide
  Antisense strand to SEQ ID NO: 624866
guuguuguaggauacuccg

SEQ ID NO: 624868 - RNA, 19 nt, Artificial Sequence
  Description of Artificial Sequence: Synthetic oligonucleotide
  Sense strand starting at position 1385 of SEQ ID NO: 585248
uggguuaauuuagaaacau

SEQ ID NO: 624869 - RNA, 19 nt, Artificial Sequence
  Description of Artificial Sequence: Synthetic oligonucleotide
  Antisense strand to SEQ ID NO: 624868
auguuucuaaauuaaccca

SEQ ID NO: 624870 - RNA, 19 nt, Artificial Sequence
  Description of Artificial Sequence: Synthetic oligonucleotide
  Sense strand starting at position 1502 of SEQ ID NO: 585248
ucucuaagacaguguagaa

SEQ ID NO: 624871 - RNA, 19 nt, Artificial Sequence
  Description of Artificial Sequence: Synthetic oligonucleotide
  Antisense strand to SEQ ID NO: 624870
uucuacacugucuuagaga

SEQ ID NO: 624872 - RNA, 19 nt, Artificial Sequence
  Description of Artificial Sequence: Synthetic oligonucleotide
  Sense strand starting at position 2029 of SEQ ID NO: 585248
gaagauaugucauugguua

SEQ ID NO: 624873 - RNA, 19 nt, Artificial Sequence
  Description of Artificial Sequence: Synthetic oligonucleotide
  Antisense strand to SEQ ID NO: 624872
uaaccaaugacauaucuuc

SEQ ID NO: 624874 - RNA, 19 nt, Artificial Sequence
  Description of Artificial Sequence: Synthetic oligonucleotide
  Sense strand starting at position 2030 of SEQ ID NO: 585248
aagauaugucauugguuag

SEQ ID NO: 624875 - RNA, 19 nt, Artificial Sequence
  Description of Artificial Sequence: Synthetic oligonucleotide
  Antisense strand to SEQ ID NO: 624874
cuaaccaaugacauaucuu

SEQ ID NO: 624876 - RNA, 19 nt, Artificial Sequence
  Description of Artificial Sequence: Synthetic oligonucleotide
  Sense strand starting at position 2110 of SEQ ID NO: 585248
ggguauaacuaaccucuga

SEQ ID NO: 624877 - RNA, 19 nt, Artificial Sequence
  Description of Artificial Sequence: Synthetic oligonucleotide
  Antisense strand to SEQ ID NO: 624876
ucagagguuaguuauaccc

SEQ ID NO: 624878 - RNA, 19 nt, Artificial Sequence
  Description of Artificial Sequence: Synthetic oligonucleotide
  Sense strand starting at position 2731 of SEQ ID NO: 585248
auauuagagcuguaaacac

SEQ ID NO: 624879 - RNA, 19 nt, Artificial Sequence
  Description of Artificial Sequence: Synthetic oligonucleotide
  Antisense strand to SEQ ID NO: 624878
guguuuacagcucuaauau

SEQ ID NO: 624880 - RNA, 19 nt, Artificial Sequence
  Description of Artificial Sequence: Synthetic oligonucleotide
  Sense strand starting at position 2792 of SEQ ID NO: 585248
ggauuaucaugaucuuauc

SEQ ID NO: 624881 - RNA, 19 nt, Artificial Sequence
  Description of Artificial Sequence: Synthetic oligonucleotide
  Antisense strand to SEQ ID NO: 624880
gauaagaucaugauaaucc

SEQ ID NO: 624882 - RNA, 19 nt, Artificial Sequence
  Description of Artificial Sequence: Synthetic oligonucleotide
  Sense strand starting at position 2874 of SEQ ID NO: 585248
guuaguacugagugaggaa

SEQ ID NO: 624883 - RNA, 19 nt, Artificial Sequence
  Description of Artificial Sequence: Synthetic oligonucleotide
  Antisense strand to SEQ ID NO: 624882
uuccucacucaguacuaac

SEQ ID NO: 624884 - RNA, 19 nt, Artificial Sequence
  Description of Artificial Sequence: Synthetic oligonucleotide
  Sense strand starting at position 2910 of SEQ ID NO: 585248
uagggaugugcaggaaacu

SEQ ID NO: 624885 - RNA, 19 nt, Artificial Sequence
  Description of Artificial Sequence: Synthetic oligonucleotide
  Antisense strand to SEQ ID NO: 624884
aguuuccugcacaucccua

SEQ ID NO: 624886 - RNA, 19 nt, Artificial Sequence
  Description of Artificial Sequence: Synthetic oligonucleotide
  Sense strand starting at position 2920 of SEQ ID NO: 585248
caggaaacuuguguuaaca

SEQ ID NO: 624887 - RNA, 19 nt, Artificial Sequence
  Description of Artificial Sequence: Synthetic oligonucleotide
  Antisense strand to SEQ ID NO: 624886
uguuaacacaaguuuccug

SEQ ID NO: 624888 - RNA, 19 nt, Artificial Sequence
  Description of Artificial Sequence: Synthetic oligonucleotide
  Sense strand starting at position 3037 of SEQ ID NO: 585248
uguacuuuccaccauguaa

SEQ ID NO: 624889 - RNA, 19 nt, Artificial Sequence
  Description of Artificial Sequence: Synthetic oligonucleotide
  Antisense strand to SEQ ID NO: 624888
uuacaugguggaaaguaca

SEQ ID NO: 624890 - RNA, 19 nt, Artificial Sequence
  Description of Artificial Sequence: Synthetic oligonucleotide
  Sense strand starting at position 3056 of SEQ ID NO: 585248
uggcguucuaacgugaguu

SEQ ID NO: 624891 - RNA, 19 nt, Artificial Sequence
  Description of Artificial Sequence: Synthetic oligonucleotide
  Antisense strand to SEQ ID NO: 624890
aacucacguuagaacgcca

SEQ ID NO: 624892 - RNA, 19 nt, Artificial Sequence
  Description of Artificial Sequence: Synthetic oligonucleotide
  Sense strand starting at position 3099 of SEQ ID NO: 585248
gauggcguuccaguacgua

SEQ ID NO: 624893 - RNA, 19 nt, Artificial Sequence
  Description of Artificial Sequence: Synthetic oligonucleotide
  Antisense strand to SEQ ID NO: 624892
uacguacuggaacgccauc

SEQ ID NO: 624894 - RNA, 19 nt, Artificial Sequence
  Description of Artificial Sequence: Synthetic oligonucleotide
  Sense strand starting at position 3128 of SEQ ID NO: 585248
ucgagcaguuaccuuauuu

SEQ ID NO: 624895 - RNA, 19 nt, Artificial Sequence
  Description of Artificial Sequence: Synthetic oligonucleotide
  Antisense strand to SEQ ID NO: 624894
aaauaagguaacugcucga

SEQ ID NO: 624896 - RNA, 19 nt, Artificial Sequence
  Description of Artificial Sequence: Synthetic oligonucleotide
  Sense strand starting at position 3316 of SEQ ID NO: 585248
ugaaaucaucacggagauu

SEQ ID NO: 624897 - RNA, 19 nt, Artificial Sequence
  Description of Artificial Sequence: Synthetic oligonucleotide
  Antisense strand to SEQ ID NO: 624896
aaucuccgugaugauuuca

SEQ ID NO: 624898 - RNA, 19 nt, Artificial Sequence
  Description of Artificial Sequence: Synthetic oligonucleotide
  Sense strand starting at position 3335 of SEQ ID NO: 585248
uuuggaauaguuuacuagu

SEQ ID NO: 624899 - RNA, 19 nt, Artificial Sequence
  Description of Artificial Sequence: Synthetic oligonucleotide
  Antisense strand to SEQ ID NO: 624898
acuaguaaacuauuccaaa

SEQ ID NO: 624900 - RNA, 19 nt, Artificial Sequence
  Description of Artificial Sequence: Synthetic oligonucleotide
  Sense strand starting at position 3361 of SEQ ID NO: 585248
gcauguucagcgucaauug

SEQ ID NO: 624901 - RNA, 19 nt, Artificial Sequence
  Description of Artificial Sequence: Synthetic oligonucleotide
  Antisense strand to SEQ ID NO: 624900
caauugacgcugaacaugc

SEQ ID NO: 624902 - RNA, 19 nt, Artificial Sequence
  Description of Artificial Sequence: Synthetic oligonucleotide
  Sense strand starting at position 3371 of SEQ ID NO: 585248
cgucaauugguccaaucag

SEQ ID NO: 624903 - RNA, 19 nt, Artificial Sequence
  Description of Artificial Sequence: Synthetic oligonucleotide
  Antisense strand to SEQ ID NO: 624902
cugauuggaccaauugacg

SEQ ID NO: 624904 - RNA, 19 nt, Artificial Sequence
  Description of Artificial Sequence: Synthetic oligonucleotide
  Sense strand starting at position 3488 of SEQ ID NO: 585248
gaagcaagaaguuggagua

SEQ ID NO: 624905 - RNA, 19 nt, Artificial Sequence
  Description of Artificial Sequence: Synthetic oligonucleotide
  Antisense strand to SEQ ID NO: 624904
uacuccaacuucuugcuuc

SEQ ID NO: 624906 - RNA, 19 nt, Artificial Sequence
  Description of Artificial Sequence: Synthetic oligonucleotide
  Sense strand starting at position 3696 of SEQ ID NO: 585248
uggcuaaauuugugauuua

SEQ ID NO: 624907 - RNA, 19 nt, Artificial Sequence
  Description of Artificial Sequence: Synthetic oligonucleotide
  Antisense strand to SEQ ID NO: 624906
uaaaucacaaauuuagcca

SEQ ID NO: 624908 - RNA, 19 nt, Artificial Sequence
  Description of Artificial Sequence: Synthetic oligonucleotide
  Sense strand starting at position 3697 of SEQ ID NO: 585248
ggcuaaauuugugauuuag

SEQ ID NO: 624909 - RNA, 19 nt, Artificial Sequence
  Description of Artificial Sequence: Synthetic oligonucleotide
  Antisense strand to SEQ ID NO: 624908
cuaaaucacaaauuuagcc

SEQ ID NO: 624910 - RNA, 19 nt, Artificial Sequence
  Description of Artificial Sequence: Synthetic oligonucleotide
  Sense strand starting at position 3850 of SEQ ID NO: 585248
uggagauuagcagggucau

SEQ ID NO: 624911 - RNA, 19 nt, Artificial Sequence
  Description of Artificial Sequence: Synthetic oligonucleotide
  Antisense strand to SEQ ID NO: 624910
augacccugcuaaucucca

SEQ ID NO: 624912 - RNA, 19 nt, Artificial Sequence
  Description of Artificial Sequence: Synthetic oligonucleotide
  Sense strand starting at position 3851 of SEQ ID NO: 585248
ggagauuagcagggucaua

SEQ ID NO: 624913 - RNA, 19 nt, Artificial Sequence
  Description of Artificial Sequence: Synthetic oligonucleotide
  Antisense strand to SEQ ID NO: 624912
uaugacccugcuaaucucc

SEQ ID NO: 624914 - RNA, 19 nt, Artificial Sequence
  Description of Artificial Sequence: Synthetic oligonucleotide
  Sense strand starting at position 188 of SEQ ID NO: 585249
gucugaagcugauuggaca

SEQ ID NO: 624915 - RNA, 19 nt, Artificial Sequence
  Description of Artificial Sequence: Synthetic oligonucleotide
  Antisense strand to SEQ ID NO: 624914
uguccaaucagcuucagac

SEQ ID NO: 624916 - RNA, 19 nt, Artificial Sequence
  Description of Artificial Sequence: Synthetic oligonucleotide
  Sense strand starting at position 401 of SEQ ID NO: 585249
aggagaacauuguaacaaa

SEQ ID NO: 624917 - RNA, 19 nt, Artificial Sequence
  Description of Artificial Sequence: Synthetic oligonucleotide
  Antisense strand to SEQ ID NO: 624916
uuuguuacaauguucuccu

SEQ ID NO: 624918 - RNA, 19 nt, Artificial Sequence
  Description of Artificial Sequence: Synthetic oligonucleotide
  Sense strand starting at position 858 of SEQ ID NO: 585249
uucguacauccagaucuga

SEQ ID NO: 624919 - RNA, 19 nt, Artificial Sequence
  Description of Artificial Sequence: Synthetic oligonucleotide
  Antisense strand to SEQ ID NO: 624918
ucagaucuggauguacgaa

SEQ ID NO: 624920 - RNA, 19 nt, Artificial Sequence
  Description of Artificial Sequence: Synthetic oligonucleotide
  Sense strand starting at position 937 of SEQ ID NO: 585249
uuaagucaucucuguacua

SEQ ID NO: 624921 - RNA, 19 nt, Artificial Sequence
  Description of Artificial Sequence: Synthetic oligonucleotide
  Antisense strand to SEQ ID NO: 624920
uaguacagagaugacuuaa

SEQ ID NO: 624922 - RNA, 19 nt, Artificial Sequence
  Description of Artificial Sequence: Synthetic oligonucleotide
  Sense strand starting at position 979 of SEQ ID NO: 585249
ggugggaaagcucgggaaa

SEQ ID NO: 624923 - RNA, 19 nt, Artificial Sequence
  Description of Artificial Sequence: Synthetic oligonucleotide
  Antisense strand to SEQ ID NO: 624922
uuucccgagcuuucccacc

SEQ ID NO: 624924 - RNA, 19 nt, Artificial Sequence
  Description of Artificial Sequence: Synthetic oligonucleotide
  Sense strand starting at position 980 of SEQ ID NO: 585249
gugggaaagcucgggaaau

SEQ ID NO: 624925 - RNA, 19 nt, Artificial Sequence
  Description of Artificial Sequence: Synthetic oligonucleotide
  Antisense strand to SEQ ID NO: 624924
auuucccgagcuuucccac

SEQ ID NO: 624926 - RNA, 19 nt, Artificial Sequence
  Description of Artificial Sequence: Synthetic oligonucleotide
  Sense strand starting at position 1059 of SEQ ID NO: 585249
cuguucuaauuagucuaau

SEQ ID NO: 624927 - RNA, 19 nt, Artificial Sequence
  Description of Artificial Sequence: Synthetic oligonucleotide
  Antisense strand to SEQ ID NO: 624926
auuagacuaauuagaacag

SEQ ID NO: 624928 - RNA, 19 nt, Artificial Sequence
  Description of Artificial Sequence: Synthetic oligonucleotide
  Sense strand starting at position 1154 of SEQ ID NO: 585249
gaauccaagucguugaucu

SEQ ID NO: 624929 - RNA, 19 nt, Artificial Sequence
  Description of Artificial Sequence: Synthetic oligonucleotide
  Antisense strand to SEQ ID NO: 624928
agaucaacgacuuggauuc

SEQ ID NO: 624930 - RNA, 19 nt, Artificial Sequence
  Description of Artificial Sequence: Synthetic oligonucleotide
  Sense strand starting at position 1155 of SEQ ID NO: 585249
aauccaagucguugaucua

SEQ ID NO: 624931 - RNA, 19 nt, Artificial Sequence
  Description of Artificial Sequence: Synthetic oligonucleotide
  Antisense strand to SEQ ID NO: 624930
uagaucaacgacuuggauu

SEQ ID NO: 624932 - RNA, 19 nt, Artificial Sequence
  Description of Artificial Sequence: Synthetic oligonucleotide
  Sense strand starting at position 1158 of SEQ ID NO: 585249
ccaagucguugaucuagau

SEQ ID NO: 624933 - RNA, 19 nt, Artificial Sequence
  Description of Artificial Sequence: Synthetic oligonucleotide
  Antisense strand to SEQ ID NO: 624932
aucuagaucaacgacuugg

SEQ ID NO: 624934 - RNA, 19 nt, Artificial Sequence
  Description of Artificial Sequence: Synthetic oligonucleotide
  Sense strand starting at position 1167 of SEQ ID NO: 585249
ugaucuagauuuggauuga

SEQ ID NO: 624935 - RNA, 19 nt, Artificial Sequence
  Description of Artificial Sequence: Synthetic oligonucleotide
  Antisense strand to SEQ ID NO: 624934
ucaauccaaaucuagauca

SEQ ID NO: 624936 - RNA, 19 nt, Artificial Sequence
  Description of Artificial Sequence: Synthetic oligonucleotide
  Sense strand starting at position 1168 of SEQ ID NO: 585249
gaucuagauuuggauugaa

SEQ ID NO: 624937 - RNA, 19 nt, Artificial Sequence
  Description of Artificial Sequence: Synthetic oligonucleotide
  Antisense strand to SEQ ID NO: 624936
uucaauccaaaucuagauc

SEQ ID NO: 624938 - RNA, 19 nt, Artificial Sequence
  Description of Artificial Sequence: Synthetic oligonucleotide
  Sense strand starting at position 1188 of SEQ ID NO: 585249
gucgaaugcccgguuuguu

SEQ ID NO: 624939 - RNA, 19 nt, Artificial Sequence
  Description of Artificial Sequence: Synthetic oligonucleotide
  Antisense strand to SEQ ID NO: 624938
aacaaaccgggcauucgac

SEQ ID NO: 624940 - RNA, 19 nt, Artificial Sequence
  Description of Artificial Sequence: Synthetic oligonucleotide
  Sense strand starting at position 1189 of SEQ ID NO: 585249
ucgaaugcccgguuuguua

SEQ ID NO: 624941 - RNA, 19 nt, Artificial Sequence
  Description of Artificial Sequence: Synthetic oligonucleotide
  Antisense strand to SEQ ID NO: 624940
uaacaaaccgggcauucga

SEQ ID NO: 624942 - RNA, 19 nt, Artificial Sequence
  Description of Artificial Sequence: Synthetic oligonucleotide
  Sense strand starting at position 1196 of SEQ ID NO: 585249
cccgguuuguuauuuacca

SEQ ID NO: 624943 - RNA, 19 nt, Artificial Sequence
  Description of Artificial Sequence: Synthetic oligonucleotide
  Antisense strand to SEQ ID NO: 624942
ugguaaauaacaaaccggg

SEQ ID NO: 624944 - RNA, 19 nt, Artificial Sequence
  Description of Artificial Sequence: Synthetic oligonucleotide
  Sense strand starting at position 1197 of SEQ ID NO: 585249
ccgguuuguuauuuaccaa

SEQ ID NO: 624945 - RNA, 19 nt, Artificial Sequence
  Description of Artificial Sequence: Synthetic oligonucleotide
  Antisense strand to SEQ ID NO: 624944
uugguaaauaacaaaccgg

SEQ ID NO: 624946 - RNA, 19 nt, Artificial Sequence
  Description of Artificial Sequence: Synthetic oligonucleotide
  Sense strand starting at position 1405 of SEQ ID NO: 585249
agcuaacgagauugucacu

SEQ ID NO: 624947 - RNA, 19 nt, Artificial Sequence
  Description of Artificial Sequence: Synthetic oligonucleotide
  Antisense strand to SEQ ID NO: 624946
agugacaaucucguuagcu

SEQ ID NO: 624948 - RNA, 19 nt, Artificial Sequence
  Description of Artificial Sequence: Synthetic oligonucleotide
  Sense strand starting at position 1410 of SEQ ID NO: 585249
acgagauugucacuaccua

SEQ ID NO: 624949 - RNA, 19 nt, Artificial Sequence
  Description of Artificial Sequence: Synthetic oligonucleotide
  Antisense strand to SEQ ID NO: 624948
uagguagugacaaucucgu

SEQ ID NO: 624950 - RNA, 19 nt, Artificial Sequence
  Description of Artificial Sequence: Synthetic oligonucleotide
  Sense strand starting at position 1411 of SEQ ID NO: 585249
cgagauugucacuaccuaa

SEQ ID NO: 624951 - RNA, 19 nt, Artificial Sequence
  Description of Artificial Sequence: Synthetic oligonucleotide
  Antisense strand to SEQ ID NO: 624950
uuagguagugacaaucucg

SEQ ID NO: 624952 - RNA, 19 nt, Artificial Sequence
  Description of Artificial Sequence: Synthetic oligonucleotide
  Sense strand starting at position 1439 of SEQ ID NO: 585249
cgaagacugaucuacguaa

SEQ ID NO: 624953 - RNA, 19 nt, Artificial Sequence
  Description of Artificial Sequence: Synthetic oligonucleotide
  Antisense strand to SEQ ID NO: 624952
uuacguagaucagucuucg

SEQ ID NO: 624954 - RNA, 19 nt, Artificial Sequence
  Description of Artificial Sequence: Synthetic oligonucleotide
  Sense strand starting at position 1455 of SEQ ID NO: 585249
uaaccuuuggagugguuua

SEQ ID NO: 624955 - RNA, 19 nt, Artificial Sequence
  Description of Artificial Sequence: Synthetic oligonucleotide
  Antisense strand to SEQ ID NO: 624954
uaaaccacuccaaagguua

SEQ ID NO: 624956 - RNA, 19 nt, Artificial Sequence
  Description of Artificial Sequence: Synthetic oligonucleotide
  Sense strand starting at position 1460 of SEQ ID NO: 585249
uuuggagugguuuagaagu

SEQ ID NO: 624957 - RNA, 19 nt, Artificial Sequence
  Description of Artificial Sequence: Synthetic oligonucleotide
  Antisense strand to SEQ ID NO: 624956
acuucuaaaccacuccaaa

SEQ ID NO: 624958 - RNA, 19 nt, Artificial Sequence
  Description of Artificial Sequence: Synthetic oligonucleotide
  Sense strand starting at position 1466 of SEQ ID NO: 585249
gugguuuagaaguaggcaa

SEQ ID NO: 624959 - RNA, 19 nt, Artificial Sequence
  Description of Artificial Sequence: Synthetic oligonucleotide
  Antisense strand to SEQ ID NO: 624958
uugccuacuucuaaaccac

SEQ ID NO: 624960 - RNA, 19 nt, Artificial Sequence
  Description of Artificial Sequence: Synthetic oligonucleotide
  Sense strand starting at position 2129 of SEQ ID NO: 585249
ucgauuaugcaggauaccu

SEQ ID NO: 624961 - RNA, 19 nt, Artificial Sequence
  Description of Artificial Sequence: Synthetic oligonucleotide
  Antisense strand to SEQ ID NO: 624960
agguauccugcauaaucga

SEQ ID NO: 624962 - RNA, 19 nt, Artificial Sequence
  Description of Artificial Sequence: Synthetic oligonucleotide
  Sense strand starting at position 2175 of SEQ ID NO: 585249
ucgucauccacggauaauu

SEQ ID NO: 624963 - RNA, 19 nt, Artificial Sequence
  Description of Artificial Sequence: Synthetic oligonucleotide
  Antisense strand to SEQ ID NO: 624962
aauuauccguggaugacga

SEQ ID NO: 624964 - RNA, 19 nt, Artificial Sequence
  Description of Artificial Sequence: Synthetic oligonucleotide
  Sense strand starting at position 2460 of SEQ ID NO: 585249
cuucuaaggccaugggaau

SEQ ID NO: 624965 - RNA, 19 nt, Artificial Sequence
  Description of Artificial Sequence: Synthetic oligonucleotide
  Antisense strand to SEQ ID NO: 624964
auucccauggccuuagaag

SEQ ID NO: 624966 - RNA, 19 nt, Artificial Sequence
  Description of Artificial Sequence: Synthetic oligonucleotide
  Sense strand starting at position 2739 of SEQ ID NO: 585249
gcugguucgcucuuccuau

SEQ ID NO: 624967 - RNA, 19 nt, Artificial Sequence
  Description of Artificial Sequence: Synthetic oligonucleotide
  Antisense strand to SEQ ID NO: 624966
auaggaagagcgaaccagc

SEQ ID NO: 624968 - RNA, 19 nt, Artificial Sequence
  Description of Artificial Sequence: Synthetic oligonucleotide
  Sense strand starting at position 2833 of SEQ ID NO: 585249
gugaaauguacaugaggua

SEQ ID NO: 624969 - RNA, 19 nt, Artificial Sequence
  Description of Artificial Sequence: Synthetic oligonucleotide
  Antisense strand to SEQ ID NO: 624968
uaccucauguacauuucac

SEQ ID NO: 624970 - RNA, 19 nt, Artificial Sequence
  Description of Artificial Sequence: Synthetic oligonucleotide
  Sense strand starting at position 2901 of SEQ ID NO: 585249
ggcauaaacuaaguccuua

SEQ ID NO: 624971 - RNA, 19 nt, Artificial Sequence
  Description of Artificial Sequence: Synthetic oligonucleotide
  Antisense strand to SEQ ID NO: 624970
uaaggacuuaguuuaugcc

SEQ ID NO: 624972 - RNA, 19 nt, Artificial Sequence
  Description of Artificial Sequence: Synthetic oligonucleotide
  Sense strand starting at position 2973 of SEQ ID NO: 585249
gggaucacguuauccggaa

SEQ ID NO: 624973 - RNA, 19 nt, Artificial Sequence
  Description of Artificial Sequence: Synthetic oligonucleotide
  Antisense strand to SEQ ID NO: 624972
uuccggauaacgugauccc

SEQ ID NO: 624974 - RNA, 19 nt, Artificial Sequence
  Description of Artificial Sequence: Synthetic oligonucleotide
  Sense strand starting at position 2974 of SEQ ID NO: 585249
ggaucacguuauccggaaa

SEQ ID NO: 624975 - RNA, 19 nt, Artificial Sequence
  Description of Artificial Sequence: Synthetic oligonucleotide
  Antisense strand to SEQ ID NO: 624974
uuuccggauaacgugaucc

SEQ ID NO: 624976 - RNA, 19 nt, Artificial Sequence
  Description of Artificial Sequence: Synthetic oligonucleotide
  Sense strand starting at position 2977 of SEQ ID NO: 585249
ucacguuauccggaaauuc

SEQ ID NO: 624977 - RNA, 19 nt, Artificial Sequence
  Description of Artificial Sequence: Synthetic oligonucleotide
  Antisense strand to SEQ ID NO: 624976
gaauuuccggauaacguga

SEQ ID NO: 624978 - RNA, 19 nt, Artificial Sequence
  Description of Artificial Sequence: Synthetic oligonucleotide
  Sense strand starting at position 2985 of SEQ ID NO: 585249
uccggaaauuccuugagca

SEQ ID NO: 624979 - RNA, 19 nt, Artificial Sequence
  Description of Artificial Sequence: Synthetic oligonucleotide
  Antisense strand to SEQ ID NO: 624978
ugcucaaggaauuuccgga

SEQ ID NO: 624980 - RNA, 19 nt, Artificial Sequence
  Description of Artificial Sequence: Synthetic oligonucleotide
  Sense strand starting at position 2986 of SEQ ID NO: 585249
ccggaaauuccuugagcau

SEQ ID NO: 624981 - RNA, 19 nt, Artificial Sequence
  Description of Artificial Sequence: Synthetic oligonucleotide
  Antisense strand to SEQ ID NO: 624980
augcucaaggaauuuccgg

SEQ ID NO: 624982 - RNA, 19 nt, Artificial Sequence
  Description of Artificial Sequence: Synthetic oligonucleotide
  Sense strand starting at position 2987 of SEQ ID NO: 585249
cggaaauuccuugagcauc

SEQ ID NO: 624983 - RNA, 19 nt, Artificial Sequence
  Description of Artificial Sequence: Synthetic oligonucleotide
  Antisense strand to SEQ ID NO: 624982
gaugcucaaggaauuuccg

SEQ ID NO: 624984 - RNA, 19 nt, Artificial Sequence
  Description of Artificial Sequence: Synthetic oligonucleotide
  Sense strand starting at position 3075 of SEQ ID NO: 585249
uggugaugucuggauguug

SEQ ID NO: 624985 - RNA, 19 nt, Artificial Sequence
  Description of Artificial Sequence: Synthetic oligonucleotide
  Antisense strand to SEQ ID NO: 624984
caacauccagacaucacca

SEQ ID NO: 624986 - RNA, 19 nt, Artificial Sequence
  Description of Artificial Sequence: Synthetic oligonucleotide
  Sense strand starting at position 3142 of SEQ ID NO: 585249
ugcgcaaccagacaugauu

SEQ ID NO: 624987 - RNA, 19 nt, Artificial Sequence
  Description of Artificial Sequence: Synthetic oligonucleotide
  Antisense strand to SEQ ID NO: 624986
aaucaugucugguugcgca

SEQ ID NO: 624988 - RNA, 19 nt, Artificial Sequence
  Description of Artificial Sequence: Synthetic oligonucleotide
  Sense strand starting at position 3738 of SEQ ID NO: 585249
aguauucugcuauaggaau

SEQ ID NO: 624989 - RNA, 19 nt, Artificial Sequence
  Description of Artificial Sequence: Synthetic oligonucleotide
  Antisense strand to SEQ ID NO: 624988
auuccuauagcagaauacu

SEQ ID NO: 624990 - RNA, 19 nt, Artificial Sequence
  Description of Artificial Sequence: Synthetic oligonucleotide
  Sense strand starting at position 3962 of SEQ ID NO: 585249
cuguuuguaguauaagacu

SEQ ID NO: 624991 - RNA, 19 nt, Artificial Sequence
  Description of Artificial Sequence: Synthetic oligonucleotide
  Antisense strand to SEQ ID NO: 624990
agucuuauacuacaaacag

SEQ ID NO: 624992 - RNA, 19 nt, Artificial Sequence
  Description of Artificial Sequence: Synthetic oligonucleotide
  Sense strand starting at position 3968 of SEQ ID NO: 585249
guaguauaagacugaagca

SEQ ID NO: 624993 - RNA, 19 nt, Artificial Sequence
  Description of Artificial Sequence: Synthetic oligonucleotide
  Antisense strand to SEQ ID NO: 624992
ugcuucagucuuauacuac

SEQ ID NO: 624994 - RNA, 19 nt, Artificial Sequence
  Description of Artificial Sequence: Synthetic oligonucleotide
  Sense strand starting at position 27 of SEQ ID NO: 585250
gucugaauuuccugagaug

SEQ ID NO: 624995 - RNA, 19 nt, Artificial Sequence
  Description of Artificial Sequence: Synthetic oligonucleotide
  Antisense strand to SEQ ID NO: 624994
caucucaggaaauucagac

SEQ ID NO: 624996 - RNA, 19 nt, Artificial Sequence
  Description of Artificial Sequence: Synthetic oligonucleotide
  Sense strand starting at position 30 of SEQ ID NO: 585250
ugaauuuccugagauggca

SEQ ID NO: 624997 - RNA, 19 nt, Artificial Sequence
  Description of Artificial Sequence: Synthetic oligonucleotide
  Antisense strand to SEQ ID NO: 624996
ugccaucucaggaaauuca

SEQ ID NO: 624998 - RNA, 19 nt, Artificial Sequence
  Description of Artificial Sequence: Synthetic oligonucleotide
  Sense strand starting at position 53 of SEQ ID NO: 585250
ucauaaguggcauaacaau

SEQ ID NO: 624999 - RNA, 19 nt, Artificial Sequence
  Description of Artificial Sequence: Synthetic oligonucleotide
  Antisense strand to SEQ ID NO: 624998
auuguuaugccacuuauga

SEQ ID NO: 625000 - RNA, 19 nt, Artificial Sequence
  Description of Artificial Sequence: Synthetic oligonucleotide
  Sense strand starting at position 95 of SEQ ID NO: 585250
ggaccuugauaugcccaua

SEQ ID NO: 625001 - RNA, 19 nt, Artificial Sequence
  Description of Artificial Sequence: Synthetic oligonucleotide
  Antisense strand to SEQ ID NO: 625000
uaugggcauaucaaggucc

SEQ ID NO: 625002 - RNA, 19 nt, Artificial Sequence
  Description of Artificial Sequence: Synthetic oligonucleotide
  Sense strand starting at position 525 of SEQ ID NO: 585250
acuagugcucuuggaauca

SEQ ID NO: 625003 - RNA, 19 nt, Artificial Sequence
  Description of Artificial Sequence: Synthetic oligonucleotide
  Antisense strand to SEQ ID NO: 625002
ugauuccaagagcacuagu

SEQ ID NO: 625004 - RNA, 19 nt, Artificial Sequence
  Description of Artificial Sequence: Synthetic oligonucleotide
  Sense strand starting at position 648 of SEQ ID NO: 585250
auuguaaguguuuacagga

SEQ ID NO: 625005 - RNA, 19 nt, Artificial Sequence
  Description of Artificial Sequence: Synthetic oligonucleotide
  Antisense strand to SEQ ID NO: 625004
uccuguaaacacuuacaau

SEQ ID NO: 625006 - RNA, 19 nt, Artificial Sequence
  Description of Artificial Sequence: Synthetic oligonucleotide
  Sense strand starting at position 663 of SEQ ID NO: 585250
aggauacauuuguaacaua

SEQ ID NO: 625007 - RNA, 19 nt, Artificial Sequence
  Description of Artificial Sequence: Synthetic oligonucleotide
  Antisense strand to SEQ ID NO: 625006
uauguuacaaauguauccu

SEQ ID NO: 625008 - RNA, 19 nt, Artificial Sequence
  Description of Artificial Sequence: Synthetic oligonucleotide
  Sense strand starting at position 818 of SEQ ID NO: 585250
gccgaacauguauauguuu

SEQ ID NO: 625009 - RNA, 19 nt, Artificial Sequence
  Description of Artificial Sequence: Synthetic oligonucleotide
  Antisense strand to SEQ ID NO: 625008
aaacauauacauguucggc

SEQ ID NO: 625010 - RNA, 19 nt, Artificial Sequence
  Description of Artificial Sequence: Synthetic oligonucleotide
  Sense strand starting at position 820 of SEQ ID NO: 585250
cgaacauguauauguuuga

SEQ ID NO: 625011 - RNA, 19 nt, Artificial Sequence
  Description of Artificial Sequence: Synthetic oligonucleotide
  Antisense strand to SEQ ID NO: 625010
ucaaacauauacauguucg

SEQ ID NO: 625012 - RNA, 19 nt, Artificial Sequence
  Description of Artificial Sequence: Synthetic oligonucleotide
  Sense strand starting at position 821 of SEQ ID NO: 585250
gaacauguauauguuugaa

SEQ ID NO: 625013 - RNA, 19 nt, Artificial Sequence
  Description of Artificial Sequence: Synthetic oligonucleotide
  Antisense strand to SEQ ID NO: 625012
uucaaacauauacauguuc

SEQ ID NO: 625014 - RNA, 19 nt, Artificial Sequence
  Description of Artificial Sequence: Synthetic oligonucleotide
  Sense strand starting at position 823 of SEQ ID NO: 585250
acauguauauguuugaaag

SEQ ID NO: 625015 - RNA, 19 nt, Artificial Sequence
  Description of Artificial Sequence: Synthetic oligonucleotide
  Antisense strand to SEQ ID NO: 625014
cuuucaaacauauacaugu

SEQ ID NO: 625016 - RNA, 19 nt, Artificial Sequence
  Description of Artificial Sequence: Synthetic oligonucleotide
  Sense strand starting at position 824 of SEQ ID NO: 585250
cauguauauguuugaaaga

SEQ ID NO: 625017 - RNA, 19 nt, Artificial Sequence
  Description of Artificial Sequence: Synthetic oligonucleotide
  Antisense strand to SEQ ID NO: 625016
ucuuucaaacauauacaug

SEQ ID NO: 625018 - RNA, 19 nt, Artificial Sequence
  Description of Artificial Sequence: Synthetic oligonucleotide
  Sense strand starting at position 933 of SEQ ID NO: 585250
auguauacauugguaaaca

SEQ ID NO: 625019 - RNA, 19 nt, Artificial Sequence
  Description of Artificial Sequence: Synthetic oligonucleotide
  Antisense strand to SEQ ID NO: 625018
uguuuaccaauguauacau

SEQ ID NO: 625020 - RNA, 19 nt, Artificial Sequence
  Description of Artificial Sequence: Synthetic oligonucleotide
  Sense strand starting at position 1144 of SEQ ID NO: 585250
cuuacagcccagugaguuu

SEQ ID NO: 625021 - RNA, 19 nt, Artificial Sequence
  Description of Artificial Sequence: Synthetic oligonucleotide
  Antisense strand to SEQ ID NO: 625020
aaacucacugggcuguaag

SEQ ID NO: 625022 - RNA, 19 nt, Artificial Sequence
  Description of Artificial Sequence: Synthetic oligonucleotide
  Sense strand starting at position 1151 of SEQ ID NO: 585250
cccagugaguuucccagaa

SEQ ID NO: 625023 - RNA, 19 nt, Artificial Sequence
  Description of Artificial Sequence: Synthetic oligonucleotide
  Antisense strand to SEQ ID NO: 625022
uucugggaaacucacuggg

SEQ ID NO: 625024 - RNA, 19 nt, Artificial Sequence
  Description of Artificial Sequence: Synthetic oligonucleotide
  Sense strand starting at position 1155 of SEQ ID NO: 585250
gugaguuucccagaaucau

SEQ ID NO: 625025 - RNA, 19 nt, Artificial Sequence
  Description of Artificial Sequence: Synthetic oligonucleotide
  Antisense strand to SEQ ID NO: 625024
augauucugggaaacucac

SEQ ID NO: 625026 - RNA, 19 nt, Artificial Sequence
  Description of Artificial Sequence: Synthetic oligonucleotide
  Sense strand starting at position 1400 of SEQ ID NO: 585250
aaacguaccuuguuaguau

SEQ ID NO: 625027 - RNA, 19 nt, Artificial Sequence
  Description of Artificial Sequence: Synthetic oligonucleotide
  Antisense strand to SEQ ID NO: 625026
auacuaacaagguacguuu

SEQ ID NO: 625028 - RNA, 19 nt, Artificial Sequence
  Description of Artificial Sequence: Synthetic oligonucleotide
  Sense strand starting at position 1407 of SEQ ID NO: 585250
ccuuguuaguaucuacauu

SEQ ID NO: 625029 - RNA, 19 nt, Artificial Sequence
  Description of Artificial Sequence: Synthetic oligonucleotide
  Antisense strand to SEQ ID NO: 625028
aauguagauacuaacaagg

SEQ ID NO: 625030 - RNA, 19 nt, Artificial Sequence
  Description of Artificial Sequence: Synthetic oligonucleotide
  Sense strand starting at position 1489 of SEQ ID NO: 585250
ccgaaacaucaugagugua

SEQ ID NO: 625031 - RNA, 19 nt, Artificial Sequence
  Description of Artificial Sequence: Synthetic oligonucleotide
  Antisense strand to SEQ ID NO: 625030
uacacucaugauguuucgg

SEQ ID NO: 625032 - RNA, 19 nt, Artificial Sequence
  Description of Artificial Sequence: Synthetic oligonucleotide
  Sense strand starting at position 1602 of SEQ ID NO: 585250
ucaacucggucuuuacuua

SEQ ID NO: 625033 - RNA, 19 nt, Artificial Sequence
  Description of Artificial Sequence: Synthetic oligonucleotide
  Antisense strand to SEQ ID NO: 625032
uaaguaaagaccgaguuga

SEQ ID NO: 625034 - RNA, 19 nt, Artificial Sequence
  Description of Artificial Sequence: Synthetic oligonucleotide
  Sense strand starting at position 1694 of SEQ ID NO: 585250
uggugacuuugcccagaag

SEQ ID NO: 625035 - RNA, 19 nt, Artificial Sequence
  Description of Artificial Sequence: Synthetic oligonucleotide
  Antisense strand to SEQ ID NO: 625034
cuucugggcaaagucacca

SEQ ID NO: 625036 - RNA, 19 nt, Artificial Sequence
  Description of Artificial Sequence: Synthetic oligonucleotide
  Sense strand starting at position 1697 of SEQ ID NO: 585250
ugacuuugcccagaagcuu

SEQ ID NO: 625037 - RNA, 19 nt, Artificial Sequence
  Description of Artificial Sequence: Synthetic oligonucleotide
  Antisense strand to SEQ ID NO: 625036
aagcuucugggcaaaguca

SEQ ID NO: 625038 - RNA, 19 nt, Artificial Sequence
  Description of Artificial Sequence: Synthetic oligonucleotide
  Sense strand starting at position 2015 of SEQ ID NO: 585250
uaccuuuacggucaagaaa

SEQ ID NO: 625039 - RNA, 19 nt, Artificial Sequence
  Description of Artificial Sequence: Synthetic oligonucleotide
  Antisense strand to SEQ ID NO: 625038
uuucuugaccguaaaggua

SEQ ID NO: 625040 - RNA, 19 nt, Artificial Sequence
  Description of Artificial Sequence: Synthetic oligonucleotide
  Sense strand starting at position 2128 of SEQ ID NO: 585250
accaauaggacucgaguau

SEQ ID NO: 625041 - RNA, 19 nt, Artificial Sequence
  Description of Artificial Sequence: Synthetic oligonucleotide
  Antisense strand to SEQ ID NO: 625040
auacucgaguccuauuggu

SEQ ID NO: 625042 - RNA, 19 nt, Artificial Sequence
  Description of Artificial Sequence: Synthetic oligonucleotide
  Sense strand starting at position 2183 of SEQ ID NO: 585250
ugacgucauccacggauaa

SEQ ID NO: 625043 - RNA, 19 nt, Artificial Sequence
  Description of Artificial Sequence: Synthetic oligonucleotide
  Antisense strand to SEQ ID NO: 625042
uuauccguggaugacguca

SEQ ID NO: 625044 - RNA, 19 nt, Artificial Sequence
  Description of Artificial Sequence: Synthetic oligonucleotide
  Sense strand starting at position 2184 of SEQ ID NO: 585250
gacgucauccacggauaau

SEQ ID NO: 625045 - RNA, 19 nt, Artificial Sequence
  Description of Artificial Sequence: Synthetic oligonucleotide
  Antisense strand to SEQ ID NO: 625044
auuauccguggaugacguc

SEQ ID NO: 625046 - RNA, 19 nt, Artificial Sequence
  Description of Artificial Sequence: Synthetic oligonucleotide
  Sense strand starting at position 2185 of SEQ ID NO: 585250
acgucauccacggauaauc

SEQ ID NO: 625047 - RNA, 19 nt, Artificial Sequence
  Description of Artificial Sequence: Synthetic oligonucleotide
  Antisense strand to SEQ ID NO: 625046
gauuauccguggaugacgu

SEQ ID NO: 625048 - RNA, 19 nt, Artificial Sequence
  Description of Artificial Sequence: Synthetic oligonucleotide
  Sense strand starting at position 2778 of SEQ ID NO: 585250
uuaaguuugucucccauua

SEQ ID NO: 625049 - RNA, 19 nt, Artificial Sequence
  Description of Artificial Sequence: Synthetic oligonucleotide
  Antisense strand to SEQ ID NO: 625048
uaaugggagacaaacuuaa

SEQ ID NO: 625050 - RNA, 19 nt, Artificial Sequence
  Description of Artificial Sequence: Synthetic oligonucleotide
  Sense strand starting at position 2810 of SEQ ID NO: 585250
acucgcuucguacauauaa

SEQ ID NO: 625051 - RNA, 19 nt, Artificial Sequence
  Description of Artificial Sequence: Synthetic oligonucleotide
  Antisense strand to SEQ ID NO: 625050
uuauauguacgaagcgagu

SEQ ID NO: 625052 - RNA, 19 nt, Artificial Sequence
  Description of Artificial Sequence: Synthetic oligonucleotide
  Sense strand starting at position 3285 of SEQ ID NO: 585250
gcagaaguuauagguaaag

SEQ ID NO: 625053 - RNA, 19 nt, Artificial Sequence
  Description of Artificial Sequence: Synthetic oligonucleotide
  Antisense strand to SEQ ID NO: 625052
cuuuaccuauaacuucugc

SEQ ID NO: 625054 - RNA, 19 nt, Artificial Sequence
  Description of Artificial Sequence: Synthetic oligonucleotide
  Sense strand starting at position 3312 of SEQ ID NO: 585250
aaauauguggaggguuagu

SEQ ID NO: 625055 - RNA, 19 nt, Artificial Sequence
  Description of Artificial Sequence: Synthetic oligonucleotide
  Antisense strand to SEQ ID NO: 625054
acuaacccuccacauauuu

SEQ ID NO: 625056 - RNA, 19 nt, Artificial Sequence
  Description of Artificial Sequence: Synthetic oligonucleotide
  Sense strand starting at position 3677 of SEQ ID NO: 585250
ugaauaccuagugaguguu

SEQ ID NO: 625057 - RNA, 19 nt, Artificial Sequence
  Description of Artificial Sequence: Synthetic oligonucleotide
  Antisense strand to SEQ ID NO: 625056
aacacucacuagguauuca

SEQ ID NO: 625058 - RNA, 19 nt, Artificial Sequence
  Description of Artificial Sequence: Synthetic oligonucleotide
  Sense strand starting at position 3687 of SEQ ID NO: 585250
gugaguguucuguagaugu

SEQ ID NO: 625059 - RNA, 19 nt, Artificial Sequence
  Description of Artificial Sequence: Synthetic oligonucleotide
  Antisense strand to SEQ ID NO: 625058
acaucuacagaacacucac

SEQ ID NO: 625060 - RNA, 19 nt, Artificial Sequence
  Description of Artificial Sequence: Synthetic oligonucleotide
  Sense strand starting at position 3689 of SEQ ID NO: 585250
gaguguucuguagaugugu

SEQ ID NO: 625061 - RNA, 19 nt, Artificial Sequence
  Description of Artificial Sequence: Synthetic oligonucleotide
  Antisense strand to SEQ ID NO: 625060
acacaucuacagaacacuc

SEQ ID NO: 625062 - RNA, 19 nt, Artificial Sequence
  Description of Artificial Sequence: Synthetic oligonucleotide
  Sense strand starting at position 3702 of SEQ ID NO: 585250
auguguuacaguuaaauug

SEQ ID NO: 625063 - RNA, 19 nt, Artificial Sequence
  Description of Artificial Sequence: Synthetic oligonucleotide
  Antisense strand to SEQ ID NO: 625062
caauuuaacuguaacacau

SEQ ID NO: 625064 - RNA, 19 nt, Artificial Sequence
  Description of Artificial Sequence: Synthetic oligonucleotide
  Sense strand starting at position 3709 of SEQ ID NO: 585250
acaguuaaauugccagaaa

SEQ ID NO: 625065 - RNA, 19 nt, Artificial Sequence
  Description of Artificial Sequence: Synthetic oligonucleotide
  Antisense strand to SEQ ID NO: 625064
uuucuggcaauuuaacugu

SEQ ID NO: 625066 - RNA, 19 nt, Artificial Sequence
  Description of Artificial Sequence: Synthetic oligonucleotide
  Sense strand starting at position 3712 of SEQ ID NO: 585250
guuaaauugccagaaauau

SEQ ID NO: 625067 - RNA, 19 nt, Artificial Sequence
  Description of Artificial Sequence: Synthetic oligonucleotide
  Antisense strand to SEQ ID NO: 625066
auauuucuggcaauuuaac

SEQ ID NO: 625068 - RNA, 19 nt, Artificial Sequence
  Description of Artificial Sequence: Synthetic oligonucleotide
  Sense strand starting at position 3795 of SEQ ID NO: 585250
aggcaucugcacugagauu

SEQ ID NO: 625069 - RNA, 19 nt, Artificial Sequence
  Description of Artificial Sequence: Synthetic oligonucleotide
  Antisense strand to SEQ ID NO: 625068
aaucucagugcagaugccu

SEQ ID NO: 625070 - RNA, 19 nt, Artificial Sequence
  Description of Artificial Sequence: Synthetic oligonucleotide
  Sense strand starting at position 3873 of SEQ ID NO: 585250
uuucuaacauaugugugau

SEQ ID NO: 625071 - RNA, 19 nt, Artificial Sequence
  Description of Artificial Sequence: Synthetic oligonucleotide
  Antisense strand to SEQ ID NO: 625070
aucacacauauguuagaaa

SEQ ID NO: 625072 - RNA, 19 nt, Artificial Sequence
  Description of Artificial Sequence: Synthetic oligonucleotide
  Sense strand starting at position 3886 of SEQ ID NO: 585250
ugugauuuaugcuaggaau

SEQ ID NO: 625073 - RNA, 19 nt, Artificial Sequence
  Description of Artificial Sequence: Synthetic oligonucleotide
  Antisense strand to SEQ ID NO: 625072
auuccuagcauaaaucaca

SEQ ID NO: 625074 - RNA, 19 nt, Artificial Sequence
  Description of Artificial Sequence: Synthetic oligonucleotide
  Sense strand starting at position 37 of SEQ ID NO: 585251
guucuaaaguaaucucaca

SEQ ID NO: 625075 - RNA, 19 nt, Artificial Sequence
  Description of Artificial Sequence: Synthetic oligonucleotide
  Antisense strand to SEQ ID NO: 625074
ugugagauuacuuuagaac

SEQ ID NO: 625076 - RNA, 19 nt, Artificial Sequence
  Description of Artificial Sequence: Synthetic oligonucleotide
  Sense strand starting at position 149 of SEQ ID NO: 585251
gacuuuauguaucuggauu

SEQ ID NO: 625077 - RNA, 19 nt, Artificial Sequence
  Description of Artificial Sequence: Synthetic oligonucleotide
  Antisense strand to SEQ ID NO: 625076
aauccagauacauaaaguc

SEQ ID NO: 625078 - RNA, 19 nt, Artificial Sequence
  Description of Artificial Sequence: Synthetic oligonucleotide
  Sense strand starting at position 262 of SEQ ID NO: 585251
guccuaaauugugcagaag

SEQ ID NO: 625079 - RNA, 19 nt, Artificial Sequence
  Description of Artificial Sequence: Synthetic oligonucleotide
  Antisense strand to SEQ ID NO: 625078
cuucugcacaauuuaggac

SEQ ID NO: 625080 - RNA, 19 nt, Artificial Sequence
  Description of Artificial Sequence: Synthetic oligonucleotide
  Sense strand starting at position 279 of SEQ ID NO: 585251
agggucagauaccuaaauu

SEQ ID NO: 625081 - RNA, 19 nt, Artificial Sequence
  Description of Artificial Sequence: Synthetic oligonucleotide
  Antisense strand to SEQ ID NO: 625080
aauuuagguaucugacccu

SEQ ID NO: 625082 - RNA, 19 nt, Artificial Sequence
  Description of Artificial Sequence: Synthetic oligonucleotide
  Sense strand starting at position 341 of SEQ ID NO: 585251
aggagcaaagguuaguuua

SEQ ID NO: 625083 - RNA, 19 nt, Artificial Sequence
  Description of Artificial Sequence: Synthetic oligonucleotide
  Antisense strand to SEQ ID NO: 625082
uaaacuaaccuuugcuccu

SEQ ID NO: 625084 - RNA, 19 nt, Artificial Sequence
  Description of Artificial Sequence: Synthetic oligonucleotide
  Sense strand starting at position 394 of SEQ ID NO: 585251
aguauuauuuagcuagcuu

SEQ ID NO: 625085 - RNA, 19 nt, Artificial Sequence
  Description of Artificial Sequence: Synthetic oligonucleotide
  Antisense strand to SEQ ID NO: 625084
aagcuagcuaaauaauacu

SEQ ID NO: 625086 - RNA, 19 nt, Artificial Sequence
  Description of Artificial Sequence: Synthetic oligonucleotide
  Sense strand starting at position 686 of SEQ ID NO: 585251
gcgguucuguuuaccggau

SEQ ID NO: 625087 - RNA, 19 nt, Artificial Sequence
  Description of Artificial Sequence: Synthetic oligonucleotide
  Antisense strand to SEQ ID NO: 625086
auccgguaaacagaaccgc

SEQ ID NO: 625088 - RNA, 19 nt, Artificial Sequence
  Description of Artificial Sequence: Synthetic oligonucleotide
  Sense strand starting at position 737 of SEQ ID NO: 585251
guagaaauuggacgacaca

SEQ ID NO: 625089 - RNA, 19 nt, Artificial Sequence
  Description of Artificial Sequence: Synthetic oligonucleotide
  Antisense strand to SEQ ID NO: 625088
ugugucguccaauuucuac

SEQ ID NO: 625090 - RNA, 19 nt, Artificial Sequence
  Description of Artificial Sequence: Synthetic oligonucleotide
  Sense strand starting at position 864 of SEQ ID NO: 585251
gcuguaguuugagucauuu

SEQ ID NO: 625091 - RNA, 19 nt, Artificial Sequence
  Description of Artificial Sequence: Synthetic oligonucleotide
  Antisense strand to SEQ ID NO: 625090
aaaugacucaaacuacagc

SEQ ID NO: 625092 - RNA, 19 nt, Artificial Sequence
  Description of Artificial Sequence: Synthetic oligonucleotide
  Sense strand starting at position 989 of SEQ ID NO: 585251
uggcuugugccucuaucuu

SEQ ID NO: 625093 - RNA, 19 nt, Artificial Sequence
  Description of Artificial Sequence: Synthetic oligonucleotide
  Antisense strand to SEQ ID NO: 625092
aagauagaggcacaagcca

SEQ ID NO: 625094 - RNA, 19 nt, Artificial Sequence
  Description of Artificial Sequence: Synthetic oligonucleotide
  Sense strand starting at position 1029 of SEQ ID NO: 585251
auauguagcccauaugcau

SEQ ID NO: 625095 - RNA, 19 nt, Artificial Sequence
  Description of Artificial Sequence: Synthetic oligonucleotide
  Antisense strand to SEQ ID NO: 625094
augcauaugggcuacauau

SEQ ID NO: 625096 - RNA, 19 nt, Artificial Sequence
  Description of Artificial Sequence: Synthetic oligonucleotide
  Sense strand starting at position 1137 of SEQ ID NO: 585251
uaaacugguuuguuccaga

SEQ ID NO: 625097 - RNA, 19 nt, Artificial Sequence
  Description of Artificial Sequence: Synthetic oligonucleotide
  Antisense strand to SEQ ID NO: 625096
ucuggaacaaaccaguuua

SEQ ID NO: 625098 - RNA, 19 nt, Artificial Sequence
  Description of Artificial Sequence: Synthetic oligonucleotide
  Sense strand starting at position 1142 of SEQ ID NO: 585251
ugguuuguuccagaucuug

SEQ ID NO: 625099 - RNA, 19 nt, Artificial Sequence
  Description of Artificial Sequence: Synthetic oligonucleotide
  Antisense strand to SEQ ID NO: 625098
caagaucuggaacaaacca

SEQ ID NO: 625100 - RNA, 19 nt, Artificial Sequence
  Description of Artificial Sequence: Synthetic oligonucleotide
  Sense strand starting at position 1169 of SEQ ID NO: 585251
gagguccuugcucacauua

SEQ ID NO: 625101 - RNA, 19 nt, Artificial Sequence
  Description of Artificial Sequence: Synthetic oligonucleotide
  Antisense strand to SEQ ID NO: 625100
uaaugugagcaaggaccuc

SEQ ID NO: 625102 - RNA, 19 nt, Artificial Sequence
  Description of Artificial Sequence: Synthetic oligonucleotide
  Sense strand starting at position 1219 of SEQ ID NO: 585251
gcuuguuaucucgcuucuu

SEQ ID NO: 625103 - RNA, 19 nt, Artificial Sequence
  Description of Artificial Sequence: Synthetic oligonucleotide
  Antisense strand to SEQ ID NO: 625102
aagaagcgagauaacaagc

SEQ ID NO: 625104 - RNA, 19 nt, Artificial Sequence
  Description of Artificial Sequence: Synthetic oligonucleotide
  Sense strand starting at position 1221 of SEQ ID NO: 585251
uuguuaucucgcuucuugu

SEQ ID NO: 625105 - RNA, 19 nt, Artificial Sequence
  Description of Artificial Sequence: Synthetic oligonucleotide
  Antisense strand to SEQ ID NO: 625104
acaagaagcgagauaacaa

SEQ ID NO: 625106 - RNA, 19 nt, Artificial Sequence
  Description of Artificial Sequence: Synthetic oligonucleotide
  Sense strand starting at position 1222 of SEQ ID NO: 585251
uguuaucucgcuucuuguu

SEQ ID NO: 625107 - RNA, 19 nt, Artificial Sequence
  Description of Artificial Sequence: Synthetic oligonucleotide
  Antisense strand to SEQ ID NO: 625106
aacaagaagcgagauaaca

SEQ ID NO: 625108 - RNA, 19 nt, Artificial Sequence
  Description of Artificial Sequence: Synthetic oligonucleotide
  Sense strand starting at position 1370 of SEQ ID NO: 585251
cgccuaaauuucuugaugu

SEQ ID NO: 625109 - RNA, 19 nt, Artificial Sequence
  Description of Artificial Sequence: Synthetic oligonucleotide
  Antisense strand to SEQ ID NO: 625108
acaucaagaaauuuaggcg

SEQ ID NO: 625110 - RNA, 19 nt, Artificial Sequence
  Description of Artificial Sequence: Synthetic oligonucleotide
  Sense strand starting at position 1381 of SEQ ID NO: 585251
cuugauguaccguaaacau

SEQ ID NO: 625111 - RNA, 19 nt, Artificial Sequence
  Description of Artificial Sequence: Synthetic oligonucleotide
  Antisense strand to SEQ ID NO: 625110
auguuuacgguacaucaag

SEQ ID NO: 625112 - RNA, 19 nt, Artificial Sequence
  Description of Artificial Sequence: Synthetic oligonucleotide
  Sense strand starting at position 1519 of SEQ ID NO: 585251
acagcucuacuuggugaaa

SEQ ID NO: 625113 - RNA, 19 nt, Artificial Sequence
  Description of Artificial Sequence: Synthetic oligonucleotide
  Antisense strand to SEQ ID NO: 625112
uuucaccaaguagagcugu

SEQ ID NO: 625114 - RNA, 19 nt, Artificial Sequence
  Description of Artificial Sequence: Synthetic oligonucleotide
  Sense strand starting at position 1565 of SEQ ID NO: 585251
uugguuuggaccgagguau

SEQ ID NO: 625115 - RNA, 19 nt, Artificial Sequence
  Description of Artificial Sequence: Synthetic oligonucleotide
  Antisense strand to SEQ ID NO: 625114
auaccucgguccaaaccaa

SEQ ID NO: 625116 - RNA, 19 nt, Artificial Sequence
  Description of Artificial Sequence: Synthetic oligonucleotide
  Sense strand starting at position 1567 of SEQ ID NO: 585251
gguuuggaccgagguauga

SEQ ID NO: 625117 - RNA, 19 nt, Artificial Sequence
  Description of Artificial Sequence: Synthetic oligonucleotide
  Antisense strand to SEQ ID NO: 625116
ucauaccucgguccaaacc

SEQ ID NO: 625118 - RNA, 19 nt, Artificial Sequence
  Description of Artificial Sequence: Synthetic oligonucleotide
  Sense strand starting at position 1938 of SEQ ID NO: 585251
ccuugaagaacgggucuua

SEQ ID NO: 625119 - RNA, 19 nt, Artificial Sequence
  Description of Artificial Sequence: Synthetic oligonucleotide
  Antisense strand to SEQ ID NO: 625118
uaagacccguucuucaagg

SEQ ID NO: 625120 - RNA, 19 nt, Artificial Sequence
  Description of Artificial Sequence: Synthetic oligonucleotide
  Sense strand starting at position 2025 of SEQ ID NO: 585251
guuccugagacugacguaa

SEQ ID NO: 625121 - RNA, 19 nt, Artificial Sequence
  Description of Artificial Sequence: Synthetic oligonucleotide
  Antisense strand to SEQ ID NO: 625120
uuacgucagucucaggaac

SEQ ID NO: 625122 - RNA, 19 nt, Artificial Sequence
  Description of Artificial Sequence: Synthetic oligonucleotide
  Sense strand starting at position 2110 of SEQ ID NO: 585251
acaguuucgcuuuaaccaa

SEQ ID NO: 625123 - RNA, 19 nt, Artificial Sequence
  Description of Artificial Sequence: Synthetic oligonucleotide
  Antisense strand to SEQ ID NO: 625122
uugguuaaagcgaaacugu

SEQ ID NO: 625124 - RNA, 19 nt, Artificial Sequence
  Description of Artificial Sequence: Synthetic oligonucleotide
  Sense strand starting at position 2117 of SEQ ID NO: 585251
cgcuuuaaccaaugggauu

SEQ ID NO: 625125 - RNA, 19 nt, Artificial Sequence
  Description of Artificial Sequence: Synthetic oligonucleotide
  Antisense strand to SEQ ID NO: 625124
aaucccauugguuaaagcg

SEQ ID NO: 625126 - RNA, 19 nt, Artificial Sequence
  Description of Artificial Sequence: Synthetic oligonucleotide
  Sense strand starting at position 2187 of SEQ ID NO: 585251
aggacucaccacugguuaa

SEQ ID NO: 625127 - RNA, 19 nt, Artificial Sequence
  Description of Artificial Sequence: Synthetic oligonucleotide
  Antisense strand to SEQ ID NO: 625126
uuaaccaguggugaguccu

SEQ ID NO: 625128 - RNA, 19 nt, Artificial Sequence
  Description of Artificial Sequence: Synthetic oligonucleotide
  Sense strand starting at position 2800 of SEQ ID NO: 585251
guucuuacagcagguauuu

SEQ ID NO: 625129 - RNA, 19 nt, Artificial Sequence
  Description of Artificial Sequence: Synthetic oligonucleotide
  Antisense strand to SEQ ID NO: 625128
aaauaccugcuguaagaac

SEQ ID NO: 625130 - RNA, 19 nt, Artificial Sequence
  Description of Artificial Sequence: Synthetic oligonucleotide
  Sense strand starting at position 2811 of SEQ ID NO: 585251
agguauuucuuacuugcua

SEQ ID NO: 625131 - RNA, 19 nt, Artificial Sequence
  Description of Artificial Sequence: Synthetic oligonucleotide
  Antisense strand to SEQ ID NO: 625130
uagcaaguaagaaauaccu

SEQ ID NO: 625132 - RNA, 19 nt, Artificial Sequence
  Description of Artificial Sequence: Synthetic oligonucleotide
  Sense strand starting at position 3198 of SEQ ID NO: 585251
gcagcaacgcuugagacaa

SEQ ID NO: 625133 - RNA, 19 nt, Artificial Sequence
  Description of Artificial Sequence: Synthetic oligonucleotide
  Antisense strand to SEQ ID NO: 625132
uugucucaagcguugcugc

SEQ ID NO: 625134 - RNA, 19 nt, Artificial Sequence
  Description of Artificial Sequence: Synthetic oligonucleotide
  Sense strand starting at position 3233 of SEQ ID NO: 585251
ggaugagguuuaucaucag

SEQ ID NO: 625135 - RNA, 19 nt, Artificial Sequence
  Description of Artificial Sequence: Synthetic oligonucleotide
  Antisense strand to SEQ ID NO: 625134
cugaugauaaaccucaucc

SEQ ID NO: 625136 - RNA, 19 nt, Artificial Sequence
  Description of Artificial Sequence: Synthetic oligonucleotide
  Sense strand starting at position 3236 of SEQ ID NO: 585251
ugagguuuaucaucagaca

SEQ ID NO: 625137 - RNA, 19 nt, Artificial Sequence
  Description of Artificial Sequence: Synthetic oligonucleotide
  Antisense strand to SEQ ID NO: 625136
ugucugaugauaaaccuca

SEQ ID NO: 625138 - RNA, 19 nt, Artificial Sequence
  Description of Artificial Sequence: Synthetic oligonucleotide
  Sense strand starting at position 3306 of SEQ ID NO: 585251
acuuaagugucacugguaa

SEQ ID NO: 625139 - RNA, 19 nt, Artificial Sequence
  Description of Artificial Sequence: Synthetic oligonucleotide
  Antisense strand to SEQ ID NO: 625138
uuaccagugacacuuaagu

SEQ ID NO: 625140 - RNA, 19 nt, Artificial Sequence
  Description of Artificial Sequence: Synthetic oligonucleotide
  Sense strand starting at position 3362 of SEQ ID NO: 585251
ucauguguacuuuaguaau

SEQ ID NO: 625141 - RNA, 19 nt, Artificial Sequence
  Description of Artificial Sequence: Synthetic oligonucleotide
  Antisense strand to SEQ ID NO: 625140
auuacuaaaguacacauga

SEQ ID NO: 625142 - RNA, 19 nt, Artificial Sequence
  Description of Artificial Sequence: Synthetic oligonucleotide
  Sense strand starting at position 3364 of SEQ ID NO: 585251
auguguacuuuaguaauga

SEQ ID NO: 625143 - RNA, 19 nt, Artificial Sequence
  Description of Artificial Sequence: Synthetic oligonucleotide
  Antisense strand to SEQ ID NO: 625142
ucauuacuaaaguacacau

SEQ ID NO: 625144 - RNA, 19 nt, Artificial Sequence
  Description of Artificial Sequence: Synthetic oligonucleotide
  Sense strand starting at position 3615 of SEQ ID NO: 585251
gaguguucuaguugggaaa

SEQ ID NO: 625145 - RNA, 19 nt, Artificial Sequence
  Description of Artificial Sequence: Synthetic oligonucleotide
  Antisense strand to SEQ ID NO: 625144
uuucccaacuagaacacuc

SEQ ID NO: 625146 - RNA, 19 nt, Artificial Sequence
  Description of Artificial Sequence: Synthetic oligonucleotide
  Sense strand starting at position 3687 of SEQ ID NO: 585251
uaauucucuuguguggaau

SEQ ID NO: 625147 - RNA, 19 nt, Artificial Sequence
  Description of Artificial Sequence: Synthetic oligonucleotide
  Antisense strand to SEQ ID NO: 625146
auuccacacaagagaauua

SEQ ID NO: 625148 - RNA, 19 nt, Artificial Sequence
  Description of Artificial Sequence: Synthetic oligonucleotide
  Sense strand starting at position 3688 of SEQ ID NO: 585251
aauucucuuguguggaauu

SEQ ID NO: 625149 - RNA, 19 nt, Artificial Sequence
  Description of Artificial Sequence: Synthetic oligonucleotide
  Antisense strand to SEQ ID NO: 625148
aauuccacacaagagaauu

SEQ ID NO: 625150 - RNA, 19 nt, Artificial Sequence
  Description of Artificial Sequence: Synthetic oligonucleotide
  Sense strand starting at position 3911 of SEQ ID NO: 585251
aacacuuaggaguggcaua

SEQ ID NO: 625151 - RNA, 19 nt, Artificial Sequence
  Description of Artificial Sequence: Synthetic oligonucleotide
  Antisense strand to SEQ ID NO: 625150
uaugccacuccuaaguguu

SEQ ID NO: 625152 - RNA, 19 nt, Artificial Sequence
  Description of Artificial Sequence: Synthetic oligonucleotide
  Sense strand starting at position 3912 of SEQ ID NO: 585251
acacuuaggaguggcauau

SEQ ID NO: 625153 - RNA, 19 nt, Artificial Sequence
  Description of Artificial Sequence: Synthetic oligonucleotide
  Antisense strand to SEQ ID NO: 625152
auaugccacuccuaagugu

SEQ ID NO: 625154 - RNA, 19 nt, Artificial Sequence
  Description of Artificial Sequence: Synthetic oligonucleotide
  Sense strand starting at position 19 of SEQ ID NO: 585252
cuacgacguggagaagaau

SEQ ID NO: 625155 - RNA, 19 nt, Artificial Sequence
  Description of Artificial Sequence: Synthetic oligonucleotide
  Antisense strand to SEQ ID NO: 625154
auucuucuccacgucguag

SEQ ID NO: 625156 - RNA, 19 nt, Artificial Sequence
  Description of Artificial Sequence: Synthetic oligonucleotide
  Sense strand starting at position 256 of SEQ ID NO: 585252
gaagaagacuccgaagaag

SEQ ID NO: 625157 - RNA, 19 nt, Artificial Sequence
  Description of Artificial Sequence: Synthetic oligonucleotide
  Antisense strand to SEQ ID NO: 625156
cuucuucggagucuucuuc

SEQ ID NO: 625158 - RNA, 19 nt, Artificial Sequence
  Description of Artificial Sequence: Synthetic oligonucleotide
  Sense strand starting at position 572 of SEQ ID NO: 585252
uagaucaggcagcaagauu

SEQ ID NO: 625159 - RNA, 19 nt, Artificial Sequence
  Description of Artificial Sequence: Synthetic oligonucleotide
  Antisense strand to SEQ ID NO: 625158
aaucuugcugccugaucua

SEQ ID NO: 625160 - RNA, 19 nt, Artificial Sequence
  Description of Artificial Sequence: Synthetic oligonucleotide
  Sense strand starting at position 622 of SEQ ID NO: 585252
ccucaacccuaaucgagua

SEQ ID NO: 625161 - RNA, 19 nt, Artificial Sequence
  Description of Artificial Sequence: Synthetic oligonucleotide
  Antisense strand to SEQ ID NO: 625160
uacucgauuaggguugagg

SEQ ID NO: 625162 - RNA, 19 nt, Artificial Sequence
  Description of Artificial Sequence: Synthetic oligonucleotide
  Sense strand starting at position 627 of SEQ ID NO: 585252
acccuaaucgaguaacgca

SEQ ID NO: 625163 - RNA, 19 nt, Artificial Sequence
  Description of Artificial Sequence: Synthetic oligonucleotide
  Antisense strand to SEQ ID NO: 625162
ugcguuacucgauuagggu

SEQ ID NO: 625164 - RNA, 19 nt, Artificial Sequence
  Description of Artificial Sequence: Synthetic oligonucleotide
  Sense strand starting at position 703 of SEQ ID NO: 585252
cuguuauuagaguaugaau

SEQ ID NO: 625165 - RNA, 19 nt, Artificial Sequence
  Description of Artificial Sequence: Synthetic oligonucleotide
  Antisense strand to SEQ ID NO: 625164
auucauacucuaauaacag

SEQ ID NO: 625166 - RNA, 19 nt, Artificial Sequence
  Description of Artificial Sequence: Synthetic oligonucleotide
  Sense strand starting at position 705 of SEQ ID NO: 585252
guuauuagaguaugaauuc

SEQ ID NO: 625167 - RNA, 19 nt, Artificial Sequence
  Description of Artificial Sequence: Synthetic oligonucleotide
  Antisense strand to SEQ ID NO: 625166
gaauucauacucuaauaac

SEQ ID NO: 625168 - RNA, 19 nt, Artificial Sequence
  Description of Artificial Sequence: Synthetic oligonucleotide
  Sense strand starting at position 810 of SEQ ID NO: 585252
ucuauaaucugauuggcca

SEQ ID NO: 625169 - RNA, 19 nt, Artificial Sequence
  Description of Artificial Sequence: Synthetic oligonucleotide
  Antisense strand to SEQ ID NO: 625168
uggccaaucagauuauaga

SEQ ID NO: 625170 - RNA, 19 nt, Artificial Sequence
  Description of Artificial Sequence: Synthetic oligonucleotide
  Sense strand starting at position 885 of SEQ ID NO: 585252
gcuacuucggcgucacuaa

SEQ ID NO: 625171 - RNA, 19 nt, Artificial Sequence
  Description of Artificial Sequence: Synthetic oligonucleotide
  Antisense strand to SEQ ID NO: 625170
uuagugacgccgaaguagc

SEQ ID NO: 625172 - RNA, 19 nt, Artificial Sequence
  Description of Artificial Sequence: Synthetic oligonucleotide
  Sense strand starting at position 901 of SEQ ID NO: 585252
uaauguguucggcauuaau

SEQ ID NO: 625173 - RNA, 19 nt, Artificial Sequence
  Description of Artificial Sequence: Synthetic oligonucleotide
  Antisense strand to SEQ ID NO: 625172
auuaaugccgaacacauua

SEQ ID NO: 625174 - RNA, 19 nt, Artificial Sequence
  Description of Artificial Sequence: Synthetic oligonucleotide
  Sense strand starting at position 904 of SEQ ID NO: 585252
uguguucggcauuaauaua

SEQ ID NO: 625175 - RNA, 19 nt, Artificial Sequence
  Description of Artificial Sequence: Synthetic oligonucleotide
  Antisense strand to SEQ ID NO: 625174
uauauuaaugccgaacaca

SEQ ID NO: 625176 - RNA, 19 nt, Artificial Sequence
  Description of Artificial Sequence: Synthetic oligonucleotide
  Sense strand starting at position 984 of SEQ ID NO: 585252
gccaauuugauaugaccgu

SEQ ID NO: 625177 - RNA, 19 nt, Artificial Sequence
  Description of Artificial Sequence: Synthetic oligonucleotide
  Antisense strand to SEQ ID NO: 625176
acggucauaucaaauuggc

SEQ ID NO: 625178 - RNA, 19 nt, Artificial Sequence
  Description of Artificial Sequence: Synthetic oligonucleotide
  Sense strand starting at position 1138 of SEQ ID NO: 585252
ugugaagugcuaggacuaa

SEQ ID NO: 625179 - RNA, 19 nt, Artificial Sequence
  Description of Artificial Sequence: Synthetic oligonucleotide
  Antisense strand to SEQ ID NO: 625178
uuaguccuagcacuucaca

SEQ ID NO: 625180 - RNA, 19 nt, Artificial Sequence
  Description of Artificial Sequence: Synthetic oligonucleotide
  Sense strand starting at position 1195 of SEQ ID NO: 585252
cuaugaugcccaggcagau

SEQ ID NO: 625181 - RNA, 19 nt, Artificial Sequence
  Description of Artificial Sequence: Synthetic oligonucleotide
  Antisense strand to SEQ ID NO: 625180
aucugccugggcaucauag

SEQ ID NO: 625182 - RNA, 19 nt, Artificial Sequence
  Description of Artificial Sequence: Synthetic oligonucleotide
  Sense strand starting at position 1348 of SEQ ID NO: 585252
cagcgaacauucuuguaag

SEQ ID NO: 625183 - RNA, 19 nt, Artificial Sequence
  Description of Artificial Sequence: Synthetic oligonucleotide
  Antisense strand to SEQ ID NO: 625182
cuuacaagaauguucgcug

SEQ ID NO: 625184 - RNA, 19 nt, Artificial Sequence
  Description of Artificial Sequence: Synthetic oligonucleotide
  Sense strand starting at position 1410 of SEQ ID NO: 585252
accugaauccuguaagguu

SEQ ID NO: 625185 - RNA, 19 nt, Artificial Sequence
  Description of Artificial Sequence: Synthetic oligonucleotide
  Antisense strand to SEQ ID NO: 625184
aaccuuacaggauucaggu

SEQ ID NO: 625186 - RNA, 19 nt, Artificial Sequence
  Description of Artificial Sequence: Synthetic oligonucleotide
  Sense strand starting at position 1442 of SEQ ID NO: 585252
auuccuaagcucuagauga

SEQ ID NO: 625187 - RNA, 19 nt, Artificial Sequence
  Description of Artificial Sequence: Synthetic oligonucleotide
  Antisense strand to SEQ ID NO: 625186
ucaucuagagcuuaggaau

SEQ ID NO: 625188 - RNA, 19 nt, Artificial Sequence
  Description of Artificial Sequence: Synthetic oligonucleotide
  Sense strand starting at position 1511 of SEQ ID NO: 585252
ccagcucucccgcagaaau

SEQ ID NO: 625189 - RNA, 19 nt, Artificial Sequence
  Description of Artificial Sequence: Synthetic oligonucleotide
  Antisense strand to SEQ ID NO: 625188
auuucugcgggagagcugg

SEQ ID NO: 625190 - RNA, 19 nt, Artificial Sequence
  Description of Artificial Sequence: Synthetic oligonucleotide
  Sense strand starting at position 2072 of SEQ ID NO: 585252
gugccauuggcucaaauua

SEQ ID NO: 625191 - RNA, 19 nt, Artificial Sequence
  Description of Artificial Sequence: Synthetic oligonucleotide
  Antisense strand to SEQ ID NO: 625190
uaauuugagccaauggcac

SEQ ID NO: 625192 - RNA, 19 nt, Artificial Sequence
  Description of Artificial Sequence: Synthetic oligonucleotide
  Sense strand starting at position 2131 of SEQ ID NO: 585252
gcuucuuuggauuggacaa

SEQ ID NO: 625193 - RNA, 19 nt, Artificial Sequence
  Description of Artificial Sequence: Synthetic oligonucleotide
  Antisense strand to SEQ ID NO: 625192
uuguccaauccaaagaagc

SEQ ID NO: 625194 - RNA, 19 nt, Artificial Sequence
  Description of Artificial Sequence: Synthetic oligonucleotide
  Sense strand starting at position 2141 of SEQ ID NO: 585252
auuggacaaacguguauau

SEQ ID NO: 625195 - RNA, 19 nt, Artificial Sequence
  Description of Artificial Sequence: Synthetic oligonucleotide
  Antisense strand to SEQ ID NO: 625194
auauacacguuuguccaau

SEQ ID NO: 625196 - RNA, 19 nt, Artificial Sequence
  Description of Artificial Sequence: Synthetic oligonucleotide
  Sense strand starting at position 2143 of SEQ ID NO: 585252
uggacaaacguguauauga

SEQ ID NO: 625197 - RNA, 19 nt, Artificial Sequence
  Description of Artificial Sequence: Synthetic oligonucleotide
  Antisense strand to SEQ ID NO: 625196
ucauauacacguuugucca

SEQ ID NO: 625198 - RNA, 19 nt, Artificial Sequence
  Description of Artificial Sequence: Synthetic oligonucleotide
  Sense strand starting at position 2153 of SEQ ID NO: 585252
uguauaugacgucaucuag

SEQ ID NO: 625199 - RNA, 19 nt, Artificial Sequence
  Description of Artificial Sequence: Synthetic oligonucleotide
  Antisense strand to SEQ ID NO: 625198
cuagaugacgucauauaca

SEQ ID NO: 625200 - RNA, 19 nt, Artificial Sequence
  Description of Artificial Sequence: Synthetic oligonucleotide
  Sense strand starting at position 2215 of SEQ ID NO: 585252
ugcauaagaauucgugaac

SEQ ID NO: 625201 - RNA, 19 nt, Artificial Sequence
  Description of Artificial Sequence: Synthetic oligonucleotide
  Antisense strand to SEQ ID NO: 625200
guucacgaauucuuaugca

SEQ ID NO: 625202 - RNA, 19 nt, Artificial Sequence
  Description of Artificial Sequence: Synthetic oligonucleotide
  Sense strand starting at position 2216 of SEQ ID NO: 585252
gcauaagaauucgugaaca

SEQ ID NO: 625203 - RNA, 19 nt, Artificial Sequence
  Description of Artificial Sequence: Synthetic oligonucleotide
  Antisense strand to SEQ ID NO: 625202
uguucacgaauucuuaugc

SEQ ID NO: 625204 - RNA, 19 nt, Artificial Sequence
  Description of Artificial Sequence: Synthetic oligonucleotide
  Sense strand starting at position 2899 of SEQ ID NO: 585252
guacccuuucugcaguuaa

SEQ ID NO: 625205 - RNA, 19 nt, Artificial Sequence
  Description of Artificial Sequence: Synthetic oligonucleotide
  Antisense strand to SEQ ID NO: 625204
uuaacugcagaaaggguac

SEQ ID NO: 625206 - RNA, 19 nt, Artificial Sequence
  Description of Artificial Sequence: Synthetic oligonucleotide
  Sense strand starting at position 3110 of SEQ ID NO: 585252
ugccaucuucgagcguauu

SEQ ID NO: 625207 - RNA, 19 nt, Artificial Sequence
  Description of Artificial Sequence: Synthetic oligonucleotide
  Antisense strand to SEQ ID NO: 625206
aauacgcucgaagauggca

SEQ ID NO: 625208 - RNA, 19 nt, Artificial Sequence
  Description of Artificial Sequence: Synthetic oligonucleotide
  Sense strand starting at position 3477 of SEQ ID NO: 585252
gauacauuguggccuuaug

SEQ ID NO: 625209 - RNA, 19 nt, Artificial Sequence
  Description of Artificial Sequence: Synthetic oligonucleotide
  Antisense strand to SEQ ID NO: 625208
cauaaggccacaauguauc

SEQ ID NO: 625210 - RNA, 19 nt, Artificial Sequence
  Description of Artificial Sequence: Synthetic oligonucleotide
  Sense strand starting at position 3617 of SEQ ID NO: 585252
uugaguuauugucuagaaa

SEQ ID NO: 625211 - RNA, 19 nt, Artificial Sequence
  Description of Artificial Sequence: Synthetic oligonucleotide
  Antisense strand to SEQ ID NO: 625210
uuucuagacaauaacucaa

SEQ ID NO: 625212 - RNA, 19 nt, Artificial Sequence
  Description of Artificial Sequence: Synthetic oligonucleotide
  Sense strand starting at position 3672 of SEQ ID NO: 585252
cugaaauaucacuggacgu

SEQ ID NO: 625213 - RNA, 19 nt, Artificial Sequence
  Description of Artificial Sequence: Synthetic oligonucleotide
  Antisense strand to SEQ ID NO: 625212
acguccagugauauuucag

SEQ ID NO: 625214 - RNA, 19 nt, Artificial Sequence
  Description of Artificial Sequence: Synthetic oligonucleotide
  Sense strand starting at position 3673 of SEQ ID NO: 585252
ugaaauaucacuggacguu

SEQ ID NO: 625215 - RNA, 19 nt, Artificial Sequence
  Description of Artificial Sequence: Synthetic oligonucleotide
  Antisense strand to SEQ ID NO: 625214
aacguccagugauauuuca

SEQ ID NO: 625216 - RNA, 19 nt, Artificial Sequence
  Description of Artificial Sequence: Synthetic oligonucleotide
  Sense strand starting at position 3674 of SEQ ID NO: 585252
gaaauaucacuggacguuu

SEQ ID NO: 625217 - RNA, 19 nt, Artificial Sequence
  Description of Artificial Sequence: Synthetic oligonucleotide
  Antisense strand to SEQ ID NO: 625216
aaacguccagugauauuuc

SEQ ID NO: 625218 - RNA, 19 nt, Artificial Sequence
  Description of Artificial Sequence: Synthetic oligonucleotide
  Sense strand starting at position 3725 of SEQ ID NO: 585252
guaggauacucagugacua

SEQ ID NO: 625219 - RNA, 19 nt, Artificial Sequence
  Description of Artificial Sequence: Synthetic oligonucleotide
  Antisense strand to SEQ ID NO: 625218
uagucacugaguauccuac

SEQ ID NO: 625220 - RNA, 19 nt, Artificial Sequence
  Description of Artificial Sequence: Synthetic oligonucleotide
  Sense strand starting at position 3744 of SEQ ID NO: 585252
ccauguaauccagguggca

SEQ ID NO: 625221 - RNA, 19 nt, Artificial Sequence
  Description of Artificial Sequence: Synthetic oligonucleotide
  Antisense strand to SEQ ID NO: 625220
ugccaccuggauuacaugg

SEQ ID NO: 625222 - RNA, 19 nt, Artificial Sequence
  Description of Artificial Sequence: Synthetic oligonucleotide
  Sense strand starting at position 3746 of SEQ ID NO: 585252
auguaauccagguggcauu

SEQ ID NO: 625223 - RNA, 19 nt, Artificial Sequence
  Description of Artificial Sequence: Synthetic oligonucleotide
  Antisense strand to SEQ ID NO: 625222
aaugccaccuggauuacau

SEQ ID NO: 625224 - RNA, 19 nt, Artificial Sequence
  Description of Artificial Sequence: Synthetic oligonucleotide
  Sense strand starting at position 3796 of SEQ ID NO: 585252
cagggaaugugcuuucuug

SEQ ID NO: 625225 - RNA, 19 nt, Artificial Sequence
  Description of Artificial Sequence: Synthetic oligonucleotide
  Antisense strand to SEQ ID NO: 625224
caagaaagcacauucccug

SEQ ID NO: 625226 - RNA, 19 nt, Artificial Sequence
  Description of Artificial Sequence: Synthetic oligonucleotide
  Sense strand starting at position 3804 of SEQ ID NO: 585252
gugcuuucuugccuaauuu

SEQ ID NO: 625227 - RNA, 19 nt, Artificial Sequence
  Description of Artificial Sequence: Synthetic oligonucleotide
  Antisense strand to SEQ ID NO: 625226
aaauuaggcaagaaagcac

SEQ ID NO: 625228 - RNA, 19 nt, Artificial Sequence
  Description of Artificial Sequence: Synthetic oligonucleotide
  Sense strand starting at position 3907 of SEQ ID NO: 585252
accaguuagaaaugagguu

SEQ ID NO: 625229 - RNA, 19 nt, Artificial Sequence
  Description of Artificial Sequence: Synthetic oligonucleotide
  Antisense strand to SEQ ID NO: 625228
aaccucauuucuaacuggu

SEQ ID NO: 625230 - RNA, 19 nt, Artificial Sequence
  Description of Artificial Sequence: Synthetic oligonucleotide
  Sense strand starting at position 3925 of SEQ ID NO: 585252
uuggauccuuccuugcuaa

SEQ ID NO: 625231 - RNA, 19 nt, Artificial Sequence
  Description of Artificial Sequence: Synthetic oligonucleotide
  Antisense strand to SEQ ID NO: 625230
uuagcaaggaaggauccaa

SEQ ID NO: 625232 - RNA, 19 nt, Artificial Sequence
  Description of Artificial Sequence: Synthetic oligonucleotide
  Sense strand starting at position 3926 of SEQ ID NO: 585252
uggauccuuccuugcuaau

SEQ ID NO: 625233 - RNA, 19 nt, Artificial Sequence
  Description of Artificial Sequence: Synthetic oligonucleotide
  Antisense strand to SEQ ID NO: 625232
auuagcaaggaaggaucca

SEQ ID NO: 625234 - RNA, 19 nt, Artificial Sequence
  Description of Artificial Sequence: Synthetic oligonucleotide
  Sense strand starting at position 131 of SEQ ID NO: 585253
agaauuuguguaggucagu

SEQ ID NO: 625235 - RNA, 19 nt, Artificial Sequence
  Description of Artificial Sequence: Synthetic oligonucleotide
  Antisense strand to SEQ ID NO: 625234
acugaccuacacaaauucu

SEQ ID NO: 625236 - RNA, 19 nt, Artificial Sequence
  Description of Artificial Sequence: Synthetic oligonucleotide
  Sense strand starting at position 137 of SEQ ID NO: 585253
uguguaggucagucguagu

SEQ ID NO: 625237 - RNA, 19 nt, Artificial Sequence
  Description of Artificial Sequence: Synthetic oligonucleotide
  Antisense strand to SEQ ID NO: 625236
acuacgacugaccuacaca

SEQ ID NO: 625238 - RNA, 19 nt, Artificial Sequence
  Description of Artificial Sequence: Synthetic oligonucleotide
  Sense strand starting at position 185 of SEQ ID NO: 585253
ccuauuucggaucguguaa

SEQ ID NO: 625239 - RNA, 19 nt, Artificial Sequence
  Description of Artificial Sequence: Synthetic oligonucleotide
  Antisense strand to SEQ ID NO: 625238
uuacacgauccgaaauagg

SEQ ID NO: 625240 - RNA, 19 nt, Artificial Sequence
  Description of Artificial Sequence: Synthetic oligonucleotide
  Sense strand starting at position 388 of SEQ ID NO: 585253
uuugauaggugcuugacua

SEQ ID NO: 625241 - RNA, 19 nt, Artificial Sequence
  Description of Artificial Sequence: Synthetic oligonucleotide
  Antisense strand to SEQ ID NO: 625240
uagucaagcaccuaucaaa

SEQ ID NO: 625242 - RNA, 19 nt, Artificial Sequence
  Description of Artificial Sequence: Synthetic oligonucleotide
  Sense strand starting at position 389 of SEQ ID NO: 585253
uugauaggugcuugacuaa

SEQ ID NO: 625243 - RNA, 19 nt, Artificial Sequence
  Description of Artificial Sequence: Synthetic oligonucleotide
  Antisense strand to SEQ ID NO: 625242
uuagucaagcaccuaucaa

SEQ ID NO: 625244 - RNA, 19 nt, Artificial Sequence
  Description of Artificial Sequence: Synthetic oligonucleotide
  Sense strand starting at position 392 of SEQ ID NO: 585253
auaggugcuugacuaaaug

SEQ ID NO: 625245 - RNA, 19 nt, Artificial Sequence
  Description of Artificial Sequence: Synthetic oligonucleotide
  Antisense strand to SEQ ID NO: 625244
cauuuagucaagcaccuau

SEQ ID NO: 625246 - RNA, 19 nt, Artificial Sequence
  Description of Artificial Sequence: Synthetic oligonucleotide
  Sense strand starting at position 459 of SEQ ID NO: 585253
uccaauggcugauuggauu

SEQ ID NO: 625247 - RNA, 19 nt, Artificial Sequence
  Description of Artificial Sequence: Synthetic oligonucleotide
  Antisense strand to SEQ ID NO: 625246
aauccaaucagccauugga

SEQ ID NO: 625248 - RNA, 19 nt, Artificial Sequence
  Description of Artificial Sequence: Synthetic oligonucleotide
  Sense strand starting at position 522 of SEQ ID NO: 585253
acagguuugggucagugau

SEQ ID NO: 625249 - RNA, 19 nt, Artificial Sequence
  Description of Artificial Sequence: Synthetic oligonucleotide
  Antisense strand to SEQ ID NO: 625248
aucacugacccaaaccugu

SEQ ID NO: 625250 - RNA, 19 nt, Artificial Sequence
  Description of Artificial Sequence: Synthetic oligonucleotide
  Sense strand starting at position 528 of SEQ ID NO: 585253
uugggucagugauuagauu

SEQ ID NO: 625251 - RNA, 19 nt, Artificial Sequence
  Description of Artificial Sequence: Synthetic oligonucleotide
  Antisense strand to SEQ ID NO: 625250
aaucuaaucacugacccaa

SEQ ID NO: 625252 - RNA, 19 nt, Artificial Sequence
  Description of Artificial Sequence: Synthetic oligonucleotide
  Sense strand starting at position 553 of SEQ ID NO: 585253
agugaaucuggguaguucu

SEQ ID NO: 625253 - RNA, 19 nt, Artificial Sequence
  Description of Artificial Sequence: Synthetic oligonucleotide
  Antisense strand to SEQ ID NO: 625252
agaacuacccagauucacu

SEQ ID NO: 625254 - RNA, 19 nt, Artificial Sequence
  Description of Artificial Sequence: Synthetic oligonucleotide
  Sense strand starting at position 623 of SEQ ID NO: 585253
gguucugguauugauaaag

SEQ ID NO: 625255 - RNA, 19 nt, Artificial Sequence
  Description of Artificial Sequence: Synthetic oligonucleotide
  Antisense strand to SEQ ID NO: 625254
cuuuaucaauaccagaacc

SEQ ID NO: 625256 - RNA, 19 nt, Artificial Sequence
  Description of Artificial Sequence: Synthetic oligonucleotide
  Sense strand starting at position 786 of SEQ ID NO: 585253
gaggucauggcucacugaa

SEQ ID NO: 625257 - RNA, 19 nt, Artificial Sequence
  Description of Artificial Sequence: Synthetic oligonucleotide
  Antisense strand to SEQ ID NO: 625256
uucagugagccaugaccuc

SEQ ID NO: 625258 - RNA, 19 nt, Artificial Sequence
  Description of Artificial Sequence: Synthetic oligonucleotide
  Sense strand starting at position 788 of SEQ ID NO: 585253
ggucauggcucacugaaau

SEQ ID NO: 625259 - RNA, 19 nt, Artificial Sequence
  Description of Artificial Sequence: Synthetic oligonucleotide
  Antisense strand to SEQ ID NO: 625258
auuucagugagccaugacc

SEQ ID NO: 625260 - RNA, 19 nt, Artificial Sequence
  Description of Artificial Sequence: Synthetic oligonucleotide
  Sense strand starting at position 838 of SEQ ID NO: 585253
gcugucaguccgccaaaua

SEQ ID NO: 625261 - RNA, 19 nt, Artificial Sequence
  Description of Artificial Sequence: Synthetic oligonucleotide
  Antisense strand to SEQ ID NO: 625260
uauuuggcggacugacagc

SEQ ID NO: 625262 - RNA, 19 nt, Artificial Sequence
  Description of Artificial Sequence: Synthetic oligonucleotide
  Sense strand starting at position 1371 of SEQ ID NO: 585253
guagcaguuggauaguauu

SEQ ID NO: 625263 - RNA, 19 nt, Artificial Sequence
  Description of Artificial Sequence: Synthetic oligonucleotide
  Antisense strand to SEQ ID NO: 625262
aauacuauccaacugcuac

SEQ ID NO: 625264 - RNA, 19 nt, Artificial Sequence
  Description of Artificial Sequence: Synthetic oligonucleotide
  Sense strand starting at position 1447 of SEQ ID NO: 585253
cuugaacucggccacaaau

SEQ ID NO: 625265 - RNA, 19 nt, Artificial Sequence
  Description of Artificial Sequence: Synthetic oligonucleotide
  Antisense strand to SEQ ID NO: 625264
auuuguggccgaguucaag

SEQ ID NO: 625266 - RNA, 19 nt, Artificial Sequence
  Description of Artificial Sequence: Synthetic oligonucleotide
  Sense strand starting at position 1458 of SEQ ID NO: 585253
ccacaaauuucugauaggu

SEQ ID NO: 625267 - RNA, 19 nt, Artificial Sequence
  Description of Artificial Sequence: Synthetic oligonucleotide
  Antisense strand to SEQ ID NO: 625266
accuaucagaaauuugugg

SEQ ID NO: 625268 - RNA, 19 nt, Artificial Sequence
  Description of Artificial Sequence: Synthetic oligonucleotide
  Sense strand starting at position 1460 of SEQ ID NO: 585253
acaaauuucugauagguuu

SEQ ID NO: 625269 - RNA, 19 nt, Artificial Sequence
  Description of Artificial Sequence: Synthetic oligonucleotide
  Antisense strand to SEQ ID NO: 625268
aaaccuaucagaaauuugu

SEQ ID NO: 625270 - RNA, 19 nt, Artificial Sequence
  Description of Artificial Sequence: Synthetic oligonucleotide
  Sense strand starting at position 1466 of SEQ ID NO: 585253
uucugauagguuuggagaa

SEQ ID NO: 625271 - RNA, 19 nt, Artificial Sequence
  Description of Artificial Sequence: Synthetic oligonucleotide
  Antisense strand to SEQ ID NO: 625270
uucuccaaaccuaucagaa

SEQ ID NO: 625272 - RNA, 19 nt, Artificial Sequence
  Description of Artificial Sequence: Synthetic oligonucleotide
  Sense strand starting at position 1493 of SEQ ID NO: 585253
ucaguucuuccguagaaau

SEQ ID NO: 625273 - RNA, 19 nt, Artificial Sequence
  Description of Artificial Sequence: Synthetic oligonucleotide
  Antisense strand to SEQ ID NO: 625272
auuucuacggaagaacuga

SEQ ID NO: 625274 - RNA, 19 nt, Artificial Sequence
  Description of Artificial Sequence: Synthetic oligonucleotide
  Sense strand starting at position 1871 of SEQ ID NO: 585253
gcacucguccuacaggaaa

SEQ ID NO: 625275 - RNA, 19 nt, Artificial Sequence
  Description of Artificial Sequence: Synthetic oligonucleotide
  Antisense strand to SEQ ID NO: 625274
uuuccuguaggacgagugc

SEQ ID NO: 625276 - RNA, 19 nt, Artificial Sequence
  Description of Artificial Sequence: Synthetic oligonucleotide
  Sense strand starting at position 2099 of SEQ ID NO: 585253
gagcuuucugaauauacgu

SEQ ID NO: 625277 - RNA, 19 nt, Artificial Sequence
  Description of Artificial Sequence: Synthetic oligonucleotide
  Antisense strand to SEQ ID NO: 625276
acguauauucagaaagcuc

SEQ ID NO: 625278 - RNA, 19 nt, Artificial Sequence
  Description of Artificial Sequence: Synthetic oligonucleotide
  Sense strand starting at position 2136 of SEQ ID NO: 585253
ugauauuaacgucaucuga

SEQ ID NO: 625279 - RNA, 19 nt, Artificial Sequence
  Description of Artificial Sequence: Synthetic oligonucleotide
  Antisense strand to SEQ ID NO: 625278
ucagaugacguuaauauca

SEQ ID NO: 625280 - RNA, 19 nt, Artificial Sequence
  Description of Artificial Sequence: Synthetic oligonucleotide
  Sense strand starting at position 2144 of SEQ ID NO: 585253
acgucaucugaguaacuuc

SEQ ID NO: 625281 - RNA, 19 nt, Artificial Sequence
  Description of Artificial Sequence: Synthetic oligonucleotide
  Antisense strand to SEQ ID NO: 625280
gaaguuacucagaugacgu

SEQ ID NO: 625282 - RNA, 19 nt, Artificial Sequence
  Description of Artificial Sequence: Synthetic oligonucleotide
  Sense strand starting at position 2238 of SEQ ID NO: 585253
ucauucuuguuauuugagu

SEQ ID NO: 625283 - RNA, 19 nt, Artificial Sequence
  Description of Artificial Sequence: Synthetic oligonucleotide
  Antisense strand to SEQ ID NO: 625282
acucaaauaacaagaauga

SEQ ID NO: 625284 - RNA, 19 nt, Artificial Sequence
  Description of Artificial Sequence: Synthetic oligonucleotide
  Sense strand starting at position 2713 of SEQ ID NO: 585253
agagaaagagccugugcau

SEQ ID NO: 625285 - RNA, 19 nt, Artificial Sequence
  Description of Artificial Sequence: Synthetic oligonucleotide
  Antisense strand to SEQ ID NO: 625284
augcacaggcucuuucucu

SEQ ID NO: 625286 - RNA, 19 nt, Artificial Sequence
  Description of Artificial Sequence: Synthetic oligonucleotide
  Sense strand starting at position 2892 of SEQ ID NO: 585253
ugcaguugugcuuuaagcu

SEQ ID NO: 625287 - RNA, 19 nt, Artificial Sequence
  Description of Artificial Sequence: Synthetic oligonucleotide
  Antisense strand to SEQ ID NO: 625286
agcuuaaagcacaacugca

SEQ ID NO: 625288 - RNA, 19 nt, Artificial Sequence
  Description of Artificial Sequence: Synthetic oligonucleotide
  Sense strand starting at position 3285 of SEQ ID NO: 585253
cccuucuuugauuggucaa

SEQ ID NO: 625289 - RNA, 19 nt, Artificial Sequence
  Description of Artificial Sequence: Synthetic oligonucleotide
  Antisense strand to SEQ ID NO: 625288
uugaccaaucaaagaaggg

SEQ ID NO: 625290 - RNA, 19 nt, Artificial Sequence
  Description of Artificial Sequence: Synthetic oligonucleotide
  Sense strand starting at position 3329 of SEQ ID NO: 585253
ggcugcaauuugccagaua

SEQ ID NO: 625291 - RNA, 19 nt, Artificial Sequence
  Description of Artificial Sequence: Synthetic oligonucleotide
  Antisense strand to SEQ ID NO: 625290
uaucuggcaaauugcagcc

SEQ ID NO: 625292 - RNA, 19 nt, Artificial Sequence
  Description of Artificial Sequence: Synthetic oligonucleotide
  Sense strand starting at position 3368 of SEQ ID NO: 585253
cgaagagguucucccggaa

SEQ ID NO: 625293 - RNA, 19 nt, Artificial Sequence
  Description of Artificial Sequence: Synthetic oligonucleotide
  Antisense strand to SEQ ID NO: 625292
uuccgggagaaccucuucg

SEQ ID NO: 625294 - RNA, 19 nt, Artificial Sequence
  Description of Artificial Sequence: Synthetic oligonucleotide
  Sense strand starting at position 3372 of SEQ ID NO: 585253
gagguucucccggaaugga

SEQ ID NO: 625295 - RNA, 19 nt, Artificial Sequence
  Description of Artificial Sequence: Synthetic oligonucleotide
  Antisense strand to SEQ ID NO: 625294
uccauuccgggagaaccuc

SEQ ID NO: 625296 - RNA, 19 nt, Artificial Sequence
  Description of Artificial Sequence: Synthetic oligonucleotide
  Sense strand starting at position 3375 of SEQ ID NO: 585253
guucucccggaauggaaau

SEQ ID NO: 625297 - RNA, 19 nt, Artificial Sequence
  Description of Artificial Sequence: Synthetic oligonucleotide
  Antisense strand to SEQ ID NO: 625296
auuuccauuccgggagaac

SEQ ID NO: 625298 - RNA, 19 nt, Artificial Sequence
  Description of Artificial Sequence: Synthetic oligonucleotide
  Sense strand starting at position 3385 of SEQ ID NO: 585253
aauggaaaugaccguuauc

SEQ ID NO: 625299 - RNA, 19 nt, Artificial Sequence
  Description of Artificial Sequence: Synthetic oligonucleotide
  Antisense strand to SEQ ID NO: 625298
gauaacggucauuuccauu

SEQ ID NO: 625300 - RNA, 19 nt, Artificial Sequence
  Description of Artificial Sequence: Synthetic oligonucleotide
  Sense strand starting at position 3432 of SEQ ID NO: 585253
agagcuggaagcugugaau

SEQ ID NO: 625301 - RNA, 19 nt, Artificial Sequence
  Description of Artificial Sequence: Synthetic oligonucleotide
  Antisense strand to SEQ ID NO: 625300
auucacagcuuccagcucu

SEQ ID NO: 625302 - RNA, 19 nt, Artificial Sequence
  Description of Artificial Sequence: Synthetic oligonucleotide
  Sense strand starting at position 3475 of SEQ ID NO: 585253
uacggauccugggugacau

SEQ ID NO: 625303 - RNA, 19 nt, Artificial Sequence
  Description of Artificial Sequence: Synthetic oligonucleotide
  Antisense strand to SEQ ID NO: 625302
augucacccaggauccgua

SEQ ID NO: 625304 - RNA, 19 nt, Artificial Sequence
  Description of Artificial Sequence: Synthetic oligonucleotide
  Sense strand starting at position 3487 of SEQ ID NO: 585253
gugacauugacuuaccggu

SEQ ID NO: 625305 - RNA, 19 nt, Artificial Sequence
  Description of Artificial Sequence: Synthetic oligonucleotide
  Antisense strand to SEQ ID NO: 625304
accgguaagucaaugucac

SEQ ID NO: 625306 - RNA, 19 nt, Artificial Sequence
  Description of Artificial Sequence: Synthetic oligonucleotide
  Sense strand starting at position 3561 of SEQ ID NO: 585253
auguuaggguggguugaaa

SEQ ID NO: 625307 - RNA, 19 nt, Artificial Sequence
  Description of Artificial Sequence: Synthetic oligonucleotide
  Antisense strand to SEQ ID NO: 625306
uuucaacccacccuaacau

SEQ ID NO: 625308 - RNA, 19 nt, Artificial Sequence
  Description of Artificial Sequence: Synthetic oligonucleotide
  Sense strand starting at position 3617 of SEQ ID NO: 585253
uaaggaagcuccuuuagga

SEQ ID NO: 625309 - RNA, 19 nt, Artificial Sequence
  Description of Artificial Sequence: Synthetic oligonucleotide
  Antisense strand to SEQ ID NO: 625308
uccuaaaggagcuuccuua

SEQ ID NO: 625310 - RNA, 19 nt, Artificial Sequence
  Description of Artificial Sequence: Synthetic oligonucleotide
  Sense strand starting at position 3711 of SEQ ID NO: 585253
ggaggugugccaggauuag

SEQ ID NO: 625311 - RNA, 19 nt, Artificial Sequence
  Description of Artificial Sequence: Synthetic oligonucleotide
  Antisense strand to SEQ ID NO: 625310
cuaauccuggcacaccucc

SEQ ID NO: 625312 - RNA, 19 nt, Artificial Sequence
  Description of Artificial Sequence: Synthetic oligonucleotide
  Sense strand starting at position 3914 of SEQ ID NO: 585253
ucaacagugccugaauucu

SEQ ID NO: 625313 - RNA, 19 nt, Artificial Sequence
  Description of Artificial Sequence: Synthetic oligonucleotide
  Antisense strand to SEQ ID NO: 625312
agaauucaggcacuguuga

SEQ ID NO: 625314 - RNA, 19 nt, Artificial Sequence
  Description of Artificial Sequence: Synthetic oligonucleotide
  Sense strand starting at position 443 of SEQ ID NO: 585254
aaaugaagaugcguuaaac

SEQ ID NO: 625315 - RNA, 19 nt, Artificial Sequence
  Description of Artificial Sequence: Synthetic oligonucleotide
  Antisense strand to SEQ ID NO: 625314
guuuaacgcaucuucauuu

SEQ ID NO: 625316 - RNA, 19 nt, Artificial Sequence
  Description of Artificial Sequence: Synthetic oligonucleotide
  Sense strand starting at position 521 of SEQ ID NO: 585254
gguggcugaaaucaguuua

SEQ ID NO: 625317 - RNA, 19 nt, Artificial Sequence
  Description of Artificial Sequence: Synthetic oligonucleotide
  Antisense strand to SEQ ID NO: 625316
uaaacugauuucagccacc

SEQ ID NO: 625318 - RNA, 19 nt, Artificial Sequence
  Description of Artificial Sequence: Synthetic oligonucleotide
  Sense strand starting at position 526 of SEQ ID NO: 585254
cugaaaucaguuuaaugcu

SEQ ID NO: 625319 - RNA, 19 nt, Artificial Sequence
  Description of Artificial Sequence: Synthetic oligonucleotide
  Antisense strand to SEQ ID NO: 625318
agcauuaaacugauuucag

SEQ ID NO: 625320 - RNA, 19 nt, Artificial Sequence
  Description of Artificial Sequence: Synthetic oligonucleotide
  Sense strand starting at position 660 of SEQ ID NO: 585254
uugugaguucuccagaguu

SEQ ID NO: 625321 - RNA, 19 nt, Artificial Sequence
  Description of Artificial Sequence: Synthetic oligonucleotide
  Antisense strand to SEQ ID NO: 625320
aacucuggagaacucacaa

SEQ ID NO: 625322 - RNA, 19 nt, Artificial Sequence
  Description of Artificial Sequence: Synthetic oligonucleotide
  Sense strand starting at position 699 of SEQ ID NO: 585254
uugacuuaccuguggcaca

SEQ ID NO: 625323 - RNA, 19 nt, Artificial Sequence
  Description of Artificial Sequence: Synthetic oligonucleotide
  Antisense strand to SEQ ID NO: 625322
ugugccacagguaagucaa

SEQ ID NO: 625324 - RNA, 19 nt, Artificial Sequence
  Description of Artificial Sequence: Synthetic oligonucleotide
  Sense strand starting at position 822 of SEQ ID NO: 585254
guguaaugcuaaccuuaaa

SEQ ID NO: 625325 - RNA, 19 nt, Artificial Sequence
  Description of Artificial Sequence: Synthetic oligonucleotide
  Antisense strand to SEQ ID NO: 625324
uuuaagguuagcauuacac

SEQ ID NO: 625326 - RNA, 19 nt, Artificial Sequence
  Description of Artificial Sequence: Synthetic oligonucleotide
  Sense strand starting at position 1182 of SEQ ID NO: 585254
gcugcaacuaguucgucua

SEQ ID NO: 625327 - RNA, 19 nt, Artificial Sequence
  Description of Artificial Sequence: Synthetic oligonucleotide
  Antisense strand to SEQ ID NO: 625326
uagacgaacuaguugcagc

SEQ ID NO: 625328 - RNA, 19 nt, Artificial Sequence
  Description of Artificial Sequence: Synthetic oligonucleotide
  Sense strand starting at position 1211 of SEQ ID NO: 585254
acagcugauuuggauauau

SEQ ID NO: 625329 - RNA, 19 nt, Artificial Sequence
  Description of Artificial Sequence: Synthetic oligonucleotide
  Antisense strand to SEQ ID NO: 625328
auauauccaaaucagcugu

SEQ ID NO: 625330 - RNA, 19 nt, Artificial Sequence
  Description of Artificial Sequence: Synthetic oligonucleotide
  Sense strand starting at position 1509 of SEQ ID NO: 585254
aacccuuacgguuagaaac

SEQ ID NO: 625331 - RNA, 19 nt, Artificial Sequence
  Description of Artificial Sequence: Synthetic oligonucleotide
  Antisense strand to SEQ ID NO: 625330
guuucuaaccguaaggguu

SEQ ID NO: 625332 - RNA, 19 nt, Artificial Sequence
  Description of Artificial Sequence: Synthetic oligonucleotide
  Sense strand starting at position 1560 of SEQ ID NO: 585254
auguuuaaguggcucugaa

SEQ ID NO: 625333 - RNA, 19 nt, Artificial Sequence
  Description of Artificial Sequence: Synthetic oligonucleotide
  Antisense strand to SEQ ID NO: 625332
uucagagccacuuaaacau

SEQ ID NO: 625334 - RNA, 19 nt, Artificial Sequence
  Description of Artificial Sequence: Synthetic oligonucleotide
  Sense strand starting at position 1984 of SEQ ID NO: 585254
agaugacaccuccggcaua

SEQ ID NO: 625335 - RNA, 19 nt, Artificial Sequence
  Description of Artificial Sequence: Synthetic oligonucleotide
  Antisense strand to SEQ ID NO: 625334
uaugccggaggugucaucu

SEQ ID NO: 625336 - RNA, 19 nt, Artificial Sequence
  Description of Artificial Sequence: Synthetic oligonucleotide
  Sense strand starting at position 2143 of SEQ ID NO: 585254
ggaugaaagaugcgguauu

SEQ ID NO: 625337 - RNA, 19 nt, Artificial Sequence
  Description of Artificial Sequence: Synthetic oligonucleotide
  Antisense strand to SEQ ID NO: 625336
aauaccgcaucuuucaucc

SEQ ID NO: 625338 - RNA, 19 nt, Artificial Sequence
  Description of Artificial Sequence: Synthetic oligonucleotide
  Sense strand starting at position 2231 of SEQ ID NO: 585254
ugcaaaugaggcgauucua

SEQ ID NO: 625339 - RNA, 19 nt, Artificial Sequence
  Description of Artificial Sequence: Synthetic oligonucleotide
  Antisense strand to SEQ ID NO: 625338
uagaaucgccucauuugca

SEQ ID NO: 625340 - RNA, 19 nt, Artificial Sequence
  Description of Artificial Sequence: Synthetic oligonucleotide
  Sense strand starting at position 2252 of SEQ ID NO: 585254
acgacuuucugauugggua

SEQ ID NO: 625341 - RNA, 19 nt, Artificial Sequence
  Description of Artificial Sequence: Synthetic oligonucleotide
  Antisense strand to SEQ ID NO: 625340
uacccaaucagaaagucgu

SEQ ID NO: 625342 - RNA, 19 nt, Artificial Sequence
  Description of Artificial Sequence: Synthetic oligonucleotide
  Sense strand starting at position 2331 of SEQ ID NO: 585254
guagcagcccuagaaaugu

SEQ ID NO: 625343 - RNA, 19 nt, Artificial Sequence
  Description of Artificial Sequence: Synthetic oligonucleotide
  Antisense strand to SEQ ID NO: 625342
acauuucuagggcugcuac

SEQ ID NO: 625344 - RNA, 19 nt, Artificial Sequence
  Description of Artificial Sequence: Synthetic oligonucleotide
  Sense strand starting at position 2376 of SEQ ID NO: 585254
cgaggagaugucuggacga

SEQ ID NO: 625345 - RNA, 19 nt, Artificial Sequence
  Description of Artificial Sequence: Synthetic oligonucleotide
  Antisense strand to SEQ ID NO: 625344
ucguccagacaucuccucg

SEQ ID NO: 625346 - RNA, 19 nt, Artificial Sequence
  Description of Artificial Sequence: Synthetic oligonucleotide
  Sense strand starting at position 2538 of SEQ ID NO: 585254
ggcggcaguguuagaguau

SEQ ID NO: 625347 - RNA, 19 nt, Artificial Sequence
  Description of Artificial Sequence: Synthetic oligonucleotide
  Antisense strand to SEQ ID NO: 625346
auacucuaacacugccgcc

SEQ ID NO: 625348 - RNA, 19 nt, Artificial Sequence
  Description of Artificial Sequence: Synthetic oligonucleotide
  Sense strand starting at position 2552 of SEQ ID NO: 585254
aguaucucacagcagaaau

SEQ ID NO: 625349 - RNA, 19 nt, Artificial Sequence
  Description of Artificial Sequence: Synthetic oligonucleotide
  Antisense strand to SEQ ID NO: 625348
auuucugcugugagauacu

SEQ ID NO: 625350 - RNA, 19 nt, Artificial Sequence
  Description of Artificial Sequence: Synthetic oligonucleotide
  Sense strand starting at position 2562 of SEQ ID NO: 585254
agcagaaauccuugagcug

SEQ ID NO: 625351 - RNA, 19 nt, Artificial Sequence
  Description of Artificial Sequence: Synthetic oligonucleotide
  Antisense strand to SEQ ID NO: 625350
cagcucaaggauuucugcu

SEQ ID NO: 625352 - RNA, 19 nt, Artificial Sequence
  Description of Artificial Sequence: Synthetic oligonucleotide
  Sense strand starting at position 2583 of SEQ ID NO: 585254
aggcaaugcgucucgcgau

SEQ ID NO: 625353 - RNA, 19 nt, Artificial Sequence
  Description of Artificial Sequence: Synthetic oligonucleotide
  Antisense strand to SEQ ID NO: 625352
aucgcgagacgcauugccu

SEQ ID NO: 625354 - RNA, 19 nt, Artificial Sequence
  Description of Artificial Sequence: Synthetic oligonucleotide
  Sense strand starting at position 2700 of SEQ ID NO: 585254
cggaguccugccuaacauu

SEQ ID NO: 625355 - RNA, 19 nt, Artificial Sequence
  Description of Artificial Sequence: Synthetic oligonucleotide
  Antisense strand to SEQ ID NO: 625354
aauguuaggcaggacuccg

SEQ ID NO: 625356 - RNA, 19 nt, Artificial Sequence
  Description of Artificial Sequence: Synthetic oligonucleotide
  Sense strand starting at position 2742 of SEQ ID NO: 585254
gacugagagucaccaccau

SEQ ID NO: 625357 - RNA, 19 nt, Artificial Sequence
  Description of Artificial Sequence: Synthetic oligonucleotide
  Antisense strand to SEQ ID NO: 625356
augguggugacucucaguc

SEQ ID NO: 625358 - RNA, 19 nt, Artificial Sequence
  Description of Artificial Sequence: Synthetic oligonucleotide
  Sense strand starting at position 2775 of SEQ ID NO: 585254
guaacuuaagguugucauu

SEQ ID NO: 625359 - RNA, 19 nt, Artificial Sequence
  Description of Artificial Sequence: Synthetic oligonucleotide
  Antisense strand to SEQ ID NO: 625358
aaugacaaccuuaaguuac

SEQ ID NO: 625360 - RNA, 19 nt, Artificial Sequence
  Description of Artificial Sequence: Synthetic oligonucleotide
  Sense strand starting at position 2799 of SEQ ID NO: 585254
aaagacuucugugucagaa

SEQ ID NO: 625361 - RNA, 19 nt, Artificial Sequence
  Description of Artificial Sequence: Synthetic oligonucleotide
  Antisense strand to SEQ ID NO: 625360
uucugacacagaagucuuu

SEQ ID NO: 625362 - RNA, 19 nt, Artificial Sequence
  Description of Artificial Sequence: Synthetic oligonucleotide
  Sense strand starting at position 2931 of SEQ ID NO: 585254
agcgcauuucgggaaugua

SEQ ID NO: 625363 - RNA, 19 nt, Artificial Sequence
  Description of Artificial Sequence: Synthetic oligonucleotide
  Antisense strand to SEQ ID NO: 625362
uacauucccgaaaugcgcu

SEQ ID NO: 625364 - RNA, 19 nt, Artificial Sequence
  Description of Artificial Sequence: Synthetic oligonucleotide
  Sense strand starting at position 3029 of SEQ ID NO: 585254
ggcuuaacgcuugugagca

SEQ ID NO: 625365 - RNA, 19 nt, Artificial Sequence
  Description of Artificial Sequence: Synthetic oligonucleotide
  Antisense strand to SEQ ID NO: 625364
ugcucacaagcguuaagcc

SEQ ID NO: 625366 - RNA, 19 nt, Artificial Sequence
  Description of Artificial Sequence: Synthetic oligonucleotide
  Sense strand starting at position 3100 of SEQ ID NO: 585254
gggcuugaccguuaacaua

SEQ ID NO: 625367 - RNA, 19 nt, Artificial Sequence
  Description of Artificial Sequence: Synthetic oligonucleotide
  Antisense strand to SEQ ID NO: 625366
uauguuaacggucaagccc

SEQ ID NO: 625368 - RNA, 19 nt, Artificial Sequence
  Description of Artificial Sequence: Synthetic oligonucleotide
  Sense strand starting at position 3196 of SEQ ID NO: 585254
gugggaggguuguucauga

SEQ ID NO: 625369 - RNA, 19 nt, Artificial Sequence
  Description of Artificial Sequence: Synthetic oligonucleotide
  Antisense strand to SEQ ID NO: 625368
ucaugaacaacccucccac

SEQ ID NO: 625370 - RNA, 19 nt, Artificial Sequence
  Description of Artificial Sequence: Synthetic oligonucleotide
  Sense strand starting at position 3230 of SEQ ID NO: 585254
guuacagugaacgaagauu

SEQ ID NO: 625371 - RNA, 19 nt, Artificial Sequence
  Description of Artificial Sequence: Synthetic oligonucleotide
  Antisense strand to SEQ ID NO: 625370
aaucuucguucacuguaac

SEQ ID NO: 625372 - RNA, 19 nt, Artificial Sequence
  Description of Artificial Sequence: Synthetic oligonucleotide
  Sense strand starting at position 3245 of SEQ ID NO: 585254
gauugauugcuccacugca

SEQ ID NO: 625373 - RNA, 19 nt, Artificial Sequence
  Description of Artificial Sequence: Synthetic oligonucleotide
  Antisense strand to SEQ ID NO: 625372
ugcaguggagcaaucaauc

SEQ ID NO: 625374 - RNA, 19 nt, Artificial Sequence
  Description of Artificial Sequence: Synthetic oligonucleotide
  Sense strand starting at position 3274 of SEQ ID NO: 585254
ggugacaugagcgagacua

SEQ ID NO: 625375 - RNA, 19 nt, Artificial Sequence
  Description of Artificial Sequence: Synthetic oligonucleotide
  Antisense strand to SEQ ID NO: 625374
uagucucgcucaugucacc

SEQ ID NO: 625376 - RNA, 19 nt, Artificial Sequence
  Description of Artificial Sequence: Synthetic oligonucleotide
  Sense strand starting at position 3317 of SEQ ID NO: 585254
aguuauguuaaggguuaca

SEQ ID NO: 625377 - RNA, 19 nt, Artificial Sequence
  Description of Artificial Sequence: Synthetic oligonucleotide
  Antisense strand to SEQ ID NO: 625376
uguaacccuuaacauaacu

SEQ ID NO: 625378 - RNA, 19 nt, Artificial Sequence
  Description of Artificial Sequence: Synthetic oligonucleotide
  Sense strand starting at position 3320 of SEQ ID NO: 585254
uauguuaaggguuacacau

SEQ ID NO: 625379 - RNA, 19 nt, Artificial Sequence
  Description of Artificial Sequence: Synthetic oligonucleotide
  Antisense strand to SEQ ID NO: 625378
auguguaacccuuaacaua

SEQ ID NO: 625380 - RNA, 19 nt, Artificial Sequence
  Description of Artificial Sequence: Synthetic oligonucleotide
  Sense strand starting at position 3361 of SEQ ID NO: 585254
gcaggagagguguaaucuu

SEQ ID NO: 625381 - RNA, 19 nt, Artificial Sequence
  Description of Artificial Sequence: Synthetic oligonucleotide
  Antisense strand to SEQ ID NO: 625380
aagauuacaccucuccugc

SEQ ID NO: 625382 - RNA, 19 nt, Artificial Sequence
  Description of Artificial Sequence: Synthetic oligonucleotide
  Sense strand starting at position 3382 of SEQ ID NO: 585254
uguuuaaauccagguaaca

SEQ ID NO: 625383 - RNA, 19 nt, Artificial Sequence
  Description of Artificial Sequence: Synthetic oligonucleotide
  Antisense strand to SEQ ID NO: 625382
uguuaccuggauuuaaaca

SEQ ID NO: 625384 - RNA, 19 nt, Artificial Sequence
  Description of Artificial Sequence: Synthetic oligonucleotide
  Sense strand starting at position 3479 of SEQ ID NO: 585254
guggcauguaaguaaguua

SEQ ID NO: 625385 - RNA, 19 nt, Artificial Sequence
  Description of Artificial Sequence: Synthetic oligonucleotide
  Antisense strand to SEQ ID NO: 625384
uaacuuacuuacaugccac

SEQ ID NO: 625386 - RNA, 19 nt, Artificial Sequence
  Description of Artificial Sequence: Synthetic oligonucleotide
  Sense strand starting at position 3671 of SEQ ID NO: 585254
cgaacauaauuugaaguuu

SEQ ID NO: 625387 - RNA, 19 nt, Artificial Sequence
  Description of Artificial Sequence: Synthetic oligonucleotide
  Antisense strand to SEQ ID NO: 625386
aaacuucaaauuauguucg

SEQ ID NO: 625388 - RNA, 19 nt, Artificial Sequence
  Description of Artificial Sequence: Synthetic oligonucleotide
  Sense strand starting at position 3687 of SEQ ID NO: 585254
uuuagaaauuuggaagagu

SEQ ID NO: 625389 - RNA, 19 nt, Artificial Sequence
  Description of Artificial Sequence: Synthetic oligonucleotide
  Antisense strand to SEQ ID NO: 625388
acucuuccaaauuucuaaa

SEQ ID NO: 625390 - RNA, 19 nt, Artificial Sequence
  Description of Artificial Sequence: Synthetic oligonucleotide
  Sense strand starting at position 3766 of SEQ ID NO: 585254
caguuugugcuguaaacac

SEQ ID NO: 625391 - RNA, 19 nt, Artificial Sequence
  Description of Artificial Sequence: Synthetic oligonucleotide
  Antisense strand to SEQ ID NO: 625390
guguuuacagcacaaacug

SEQ ID NO: 625392 - RNA, 19 nt, Artificial Sequence
  Description of Artificial Sequence: Synthetic oligonucleotide
  Sense strand starting at position 3938 of SEQ ID NO: 585254
cauaauaaggcauguauag

SEQ ID NO: 625393 - RNA, 19 nt, Artificial Sequence
  Description of Artificial Sequence: Synthetic oligonucleotide
  Antisense strand to SEQ ID NO: 625392
cuauacaugccuuauuaug

SEQ ID NO: 625394 - RNA, 19 nt, Artificial Sequence
  Description of Artificial Sequence: Synthetic oligonucleotide
  Sense strand starting at position 167 of SEQ ID NO: 585255
ugcauaguuguggauuaau

SEQ ID NO: 625395 - RNA, 19 nt, Artificial Sequence
  Description of Artificial Sequence: Synthetic oligonucleotide
  Antisense strand to SEQ ID NO: 625394
auuaauccacaacuaugca

SEQ ID NO: 625396 - RNA, 19 nt, Artificial Sequence
  Description of Artificial Sequence: Synthetic oligonucleotide
  Sense strand starting at position 175 of SEQ ID NO: 585255
uguggauuaauaugauuga

SEQ ID NO: 625397 - RNA, 19 nt, Artificial Sequence
  Description of Artificial Sequence: Synthetic oligonucleotide
  Antisense strand to SEQ ID NO: 625396
ucaaucauauuaauccaca

SEQ ID NO: 625398 - RNA, 19 nt, Artificial Sequence
  Description of Artificial Sequence: Synthetic oligonucleotide
  Sense strand starting at position 179 of SEQ ID NO: 585255
gauuaauaugauugacagu

SEQ ID NO: 625399 - RNA, 19 nt, Artificial Sequence
  Description of Artificial Sequence: Synthetic oligonucleotide
  Antisense strand to SEQ ID NO: 625398
acugucaaucauauuaauc

SEQ ID NO: 625400 - RNA, 19 nt, Artificial Sequence
  Description of Artificial Sequence: Synthetic oligonucleotide
  Sense strand starting at position 185 of SEQ ID NO: 585255
uaugauugacaguaggcau

SEQ ID NO: 625401 - RNA, 19 nt, Artificial Sequence
  Description of Artificial Sequence: Synthetic oligonucleotide
  Antisense strand to SEQ ID NO: 625400
augccuacugucaaucaua

SEQ ID NO: 625402 - RNA, 19 nt, Artificial Sequence
  Description of Artificial Sequence: Synthetic oligonucleotide
  Sense strand starting at position 196 of SEQ ID NO: 585255
guaggcauaugaucuaaug

SEQ ID NO: 625403 - RNA, 19 nt, Artificial Sequence
  Description of Artificial Sequence: Synthetic oligonucleotide
  Antisense strand to SEQ ID NO: 625402
cauuagaucauaugccuac

SEQ ID NO: 625404 - RNA, 19 nt, Artificial Sequence
  Description of Artificial Sequence: Synthetic oligonucleotide
  Sense strand starting at position 341 of SEQ ID NO: 585255
uaucaauuauggguauugu

SEQ ID NO: 625405 - RNA, 19 nt, Artificial Sequence
  Description of Artificial Sequence: Synthetic oligonucleotide
  Antisense strand to SEQ ID NO: 625404
acaauacccauaauugaua

SEQ ID NO: 625406 - RNA, 19 nt, Artificial Sequence
  Description of Artificial Sequence: Synthetic oligonucleotide
  Sense strand starting at position 342 of SEQ ID NO: 585255
aucaauuauggguauuguu

SEQ ID NO: 625407 - RNA, 19 nt, Artificial Sequence
  Description of Artificial Sequence: Synthetic oligonucleotide
  Antisense strand to SEQ ID NO: 625406
aacaauacccauaauugau

SEQ ID NO: 625408 - RNA, 19 nt, Artificial Sequence
  Description of Artificial Sequence: Synthetic oligonucleotide
  Sense strand starting at position 623 of SEQ ID NO: 585255
guguccagauaucccuaua

SEQ ID NO: 625409 - RNA, 19 nt, Artificial Sequence
  Description of Artificial Sequence: Synthetic oligonucleotide
  Antisense strand to SEQ ID NO: 625408
uauagggauaucuggacac

SEQ ID NO: 625410 - RNA, 19 nt, Artificial Sequence
  Description of Artificial Sequence: Synthetic oligonucleotide
  Sense strand starting at position 1040 of SEQ ID NO: 585255
guuggaguucuguaacaaa

SEQ ID NO: 625411 - RNA, 19 nt, Artificial Sequence
  Description of Artificial Sequence: Synthetic oligonucleotide
  Antisense strand to SEQ ID NO: 625410
uuuguuacagaacuccaac

SEQ ID NO: 625412 - RNA, 19 nt, Artificial Sequence
  Description of Artificial Sequence: Synthetic oligonucleotide
  Sense strand starting at position 1450 of SEQ ID NO: 585255
aguuaaccuuggcucuaaa

SEQ ID NO: 625413 - RNA, 19 nt, Artificial Sequence
  Description of Artificial Sequence: Synthetic oligonucleotide
  Antisense strand to SEQ ID NO: 625412
uuuagagccaagguuaacu

SEQ ID NO: 625414 - RNA, 19 nt, Artificial Sequence
  Description of Artificial Sequence: Synthetic oligonucleotide
  Sense strand starting at position 1487 of SEQ ID NO: 585255
uccaguugauccucuagaa

SEQ ID NO: 625415 - RNA, 19 nt, Artificial Sequence
  Description of Artificial Sequence: Synthetic oligonucleotide
  Antisense strand to SEQ ID NO: 625414
uucuagaggaucaacugga

SEQ ID NO: 625416 - RNA, 19 nt, Artificial Sequence
  Description of Artificial Sequence: Synthetic oligonucleotide
  Sense strand starting at position 1522 of SEQ ID NO: 585255
gcagcaccaccuuaagaaa

SEQ ID NO: 625417 - RNA, 19 nt, Artificial Sequence
  Description of Artificial Sequence: Synthetic oligonucleotide
  Antisense strand to SEQ ID NO: 625416
uuucuuaagguggugcugc

SEQ ID NO: 625418 - RNA, 19 nt, Artificial Sequence
  Description of Artificial Sequence: Synthetic oligonucleotide
  Sense strand starting at position 1535 of SEQ ID NO: 585255
aagaaauugugguuauagc

SEQ ID NO: 625419 - RNA, 19 nt, Artificial Sequence
  Description of Artificial Sequence: Synthetic oligonucleotide
  Antisense strand to SEQ ID NO: 625418
gcuauaaccacaauuucuu

SEQ ID NO: 625420 - RNA, 19 nt, Artificial Sequence
  Description of Artificial Sequence: Synthetic oligonucleotide
  Sense strand starting at position 1536 of SEQ ID NO: 585255
agaaauugugguuauagcu

SEQ ID NO: 625421 - RNA, 19 nt, Artificial Sequence
  Description of Artificial Sequence: Synthetic oligonucleotide
  Antisense strand to SEQ ID NO: 625420
agcuauaaccacaauuucu

SEQ ID NO: 625422 - RNA, 19 nt, Artificial Sequence
  Description of Artificial Sequence: Synthetic oligonucleotide
  Sense strand starting at position 1597 of SEQ ID NO: 585255
uuuggaagugcuuacauaa

SEQ ID NO: 625423 - RNA, 19 nt, Artificial Sequence
  Description of Artificial Sequence: Synthetic oligonucleotide
  Antisense strand to SEQ ID NO: 625422
uuauguaagcacuuccaaa

SEQ ID NO: 625424 - RNA, 19 nt, Artificial Sequence
  Description of Artificial Sequence: Synthetic oligonucleotide
  Sense strand starting at position 1700 of SEQ ID NO: 585255
ggcgcacagccgucugaau

SEQ ID NO: 625425 - RNA, 19 nt, Artificial Sequence
  Description of Artificial Sequence: Synthetic oligonucleotide
  Antisense strand to SEQ ID NO: 625424
auucagacggcugugcgcc

SEQ ID NO: 625426 - RNA, 19 nt, Artificial Sequence
  Description of Artificial Sequence: Synthetic oligonucleotide
  Sense strand starting at position 1728 of SEQ ID NO: 585255
ggugauggucgagcgcuua

SEQ ID NO: 625427 - RNA, 19 nt, Artificial Sequence
  Description of Artificial Sequence: Synthetic oligonucleotide
  Antisense strand to SEQ ID NO: 625426
uaagcgcucgaccaucacc

SEQ ID NO: 625428 - RNA, 19 nt, Artificial Sequence
  Description of Artificial Sequence: Synthetic oligonucleotide
  Sense strand starting at position 1905 of SEQ ID NO: 585255
gcgcuuacgcuucuuacca

SEQ ID NO: 625429 - RNA, 19 nt, Artificial Sequence
  Description of Artificial Sequence: Synthetic oligonucleotide
  Antisense strand to SEQ ID NO: 625428
ugguaagaagcguaagcgc

SEQ ID NO: 625430 - RNA, 19 nt, Artificial Sequence
  Description of Artificial Sequence: Synthetic oligonucleotide
  Sense strand starting at position 1927 of SEQ ID NO: 585255
uucuucugcgccuuaguga

SEQ ID NO: 625431 - RNA, 19 nt, Artificial Sequence
  Description of Artificial Sequence: Synthetic oligonucleotide
  Antisense strand to SEQ ID NO: 625430
ucacuaaggcgcagaagaa

SEQ ID NO: 625432 - RNA, 19 nt, Artificial Sequence
  Description of Artificial Sequence: Synthetic oligonucleotide
  Sense strand starting at position 1942 of SEQ ID NO: 585255
gugauagccuucuuagaac

SEQ ID NO: 625433 - RNA, 19 nt, Artificial Sequence
  Description of Artificial Sequence: Synthetic oligonucleotide
  Antisense strand to SEQ ID NO: 625432
guucuaagaaggcuaucac

SEQ ID NO: 625434 - RNA, 19 nt, Artificial Sequence
  Description of Artificial Sequence: Synthetic oligonucleotide
  Sense strand starting at position 2070 of SEQ ID NO: 585255
gagcccauguauuuauagu

SEQ ID NO: 625435 - RNA, 19 nt, Artificial Sequence
  Description of Artificial Sequence: Synthetic oligonucleotide
  Antisense strand to SEQ ID NO: 625434
acuauaaauacaugggcuc

SEQ ID NO: 625436 - RNA, 19 nt, Artificial Sequence
  Description of Artificial Sequence: Synthetic oligonucleotide
  Sense strand starting at position 2106 of SEQ ID NO: 585255
gguuuaagauuccucacuu

SEQ ID NO: 625437 - RNA, 19 nt, Artificial Sequence
  Description of Artificial Sequence: Synthetic oligonucleotide
  Antisense strand to SEQ ID NO: 625436
aagugaggaaucuuaaacc

SEQ ID NO: 625438 - RNA, 19 nt, Artificial Sequence
  Description of Artificial Sequence: Synthetic oligonucleotide
  Sense strand starting at position 2117 of SEQ ID NO: 585255
ccucacuucugauuggaca

SEQ ID NO: 625439 - RNA, 19 nt, Artificial Sequence
  Description of Artificial Sequence: Synthetic oligonucleotide
  Antisense strand to SEQ ID NO: 625438
uguccaaucagaagugagg

SEQ ID NO: 625440 - RNA, 19 nt, Artificial Sequence
  Description of Artificial Sequence: Synthetic oligonucleotide
  Sense strand starting at position 2118 of SEQ ID NO: 585255
cucacuucugauuggacaa

SEQ ID NO: 625441 - RNA, 19 nt, Artificial Sequence
  Description of Artificial Sequence: Synthetic oligonucleotide
  Antisense strand to SEQ ID NO: 625440
uuguccaaucagaagugag

SEQ ID NO: 625442 - RNA, 19 nt, Artificial Sequence
  Description of Artificial Sequence: Synthetic oligonucleotide
  Sense strand starting at position 2249 of SEQ ID NO: 585255
gcagccuugcaguuuguau

SEQ ID NO: 625443 - RNA, 19 nt, Artificial Sequence
  Description of Artificial Sequence: Synthetic oligonucleotide
  Antisense strand to SEQ ID NO: 625442
auacaaacugcaaggcugc

SEQ ID NO: 625444 - RNA, 19 nt, Artificial Sequence
  Description of Artificial Sequence: Synthetic oligonucleotide
  Sense strand starting at position 2336 of SEQ ID NO: 585255
gcuauuugcggacguggaa

SEQ ID NO: 625445 - RNA, 19 nt, Artificial Sequence
  Description of Artificial Sequence: Synthetic oligonucleotide
  Antisense strand to SEQ ID NO: 625444
uuccacguccgcaaauagc

SEQ ID NO: 625446 - RNA, 19 nt, Artificial Sequence
  Description of Artificial Sequence: Synthetic oligonucleotide
  Sense strand starting at position 3235 of SEQ ID NO: 585255
gggaaugugacuuggacuu

SEQ ID NO: 625447 - RNA, 19 nt, Artificial Sequence
  Description of Artificial Sequence: Synthetic oligonucleotide
  Antisense strand to SEQ ID NO: 625446
aaguccaagucacauuccc

SEQ ID NO: 625448 - RNA, 19 nt, Artificial Sequence
  Description of Artificial Sequence: Synthetic oligonucleotide
  Sense strand starting at position 3277 of SEQ ID NO: 585255
ugcuguucgccaguaacaa

SEQ ID NO: 625449 - RNA, 19 nt, Artificial Sequence
  Description of Artificial Sequence: Synthetic oligonucleotide
  Antisense strand to SEQ ID NO: 625448
uuguuacuggcgaacagca

SEQ ID NO: 625450 - RNA, 19 nt, Artificial Sequence
  Description of Artificial Sequence: Synthetic oligonucleotide
  Sense strand starting at position 3304 of SEQ ID NO: 585255
ggaaucucauucucugaau

SEQ ID NO: 625451 - RNA, 19 nt, Artificial Sequence
  Description of Artificial Sequence: Synthetic oligonucleotide
  Antisense strand to SEQ ID NO: 625450
auucagagaaugagauucc

SEQ ID NO: 625452 - RNA, 19 nt, Artificial Sequence
  Description of Artificial Sequence: Synthetic oligonucleotide
  Sense strand starting at position 3325 of SEQ ID NO: 585255
aagcguuauuucccgacau

SEQ ID NO: 625453 - RNA, 19 nt, Artificial Sequence
  Description of Artificial Sequence: Synthetic oligonucleotide
  Antisense strand to SEQ ID NO: 625452
augucgggaaauaacgcuu

SEQ ID NO: 625454 - RNA, 19 nt, Artificial Sequence
  Description of Artificial Sequence: Synthetic oligonucleotide
  Sense strand starting at position 3327 of SEQ ID NO: 585255
gcguuauuucccgacauga

SEQ ID NO: 625455 - RNA, 19 nt, Artificial Sequence
  Description of Artificial Sequence: Synthetic oligonucleotide
  Antisense strand to SEQ ID NO: 625454
ucaugucgggaaauaacgc

SEQ ID NO: 625456 - RNA, 19 nt, Artificial Sequence
  Description of Artificial Sequence: Synthetic oligonucleotide
  Sense strand starting at position 3360 of SEQ ID NO: 585255
ggugguuuagugaguguuc

SEQ ID NO: 625457 - RNA, 19 nt, Artificial Sequence
  Description of Artificial Sequence: Synthetic oligonucleotide
  Antisense strand to SEQ ID NO: 625456
gaacacucacuaaaccacc

SEQ ID NO: 625458 - RNA, 19 nt, Artificial Sequence
  Description of Artificial Sequence: Synthetic oligonucleotide
  Sense strand starting at position 3402 of SEQ ID NO: 585255
cugucaggaaugcagaauu

SEQ ID NO: 625459 - RNA, 19 nt, Artificial Sequence
  Description of Artificial Sequence: Synthetic oligonucleotide
  Antisense strand to SEQ ID NO: 625458
aauucugcauuccugacag

SEQ ID NO: 625460 - RNA, 19 nt, Artificial Sequence
  Description of Artificial Sequence: Synthetic oligonucleotide
  Sense strand starting at position 3437 of SEQ ID NO: 585255
cuuacugaaucggaauuua

SEQ ID NO: 625461 - RNA, 19 nt, Artificial Sequence
  Description of Artificial Sequence: Synthetic oligonucleotide
  Antisense strand to SEQ ID NO: 625460
uaaauuccgauucaguaag

SEQ ID NO: 625462 - RNA, 19 nt, Artificial Sequence
  Description of Artificial Sequence: Synthetic oligonucleotide
  Sense strand starting at position 3466 of SEQ ID NO: 585255
auccuuagauaccuuguua

SEQ ID NO: 625463 - RNA, 19 nt, Artificial Sequence
  Description of Artificial Sequence: Synthetic oligonucleotide
  Antisense strand to SEQ ID NO: 625462
uaacaagguaucuaaggau

SEQ ID NO: 625464 - RNA, 19 nt, Artificial Sequence
  Description of Artificial Sequence: Synthetic oligonucleotide
  Sense strand starting at position 3470 of SEQ ID NO: 585255
uuagauaccuuguuauaca

SEQ ID NO: 625465 - RNA, 19 nt, Artificial Sequence
  Description of Artificial Sequence: Synthetic oligonucleotide
  Antisense strand to SEQ ID NO: 625464
uguauaacaagguaucuaa

SEQ ID NO: 625466 - RNA, 19 nt, Artificial Sequence
  Description of Artificial Sequence: Synthetic oligonucleotide
  Sense strand starting at position 3493 of SEQ ID NO: 585255
guucuuugggacuggauga

SEQ ID NO: 625467 - RNA, 19 nt, Artificial Sequence
  Description of Artificial Sequence: Synthetic oligonucleotide
  Antisense strand to SEQ ID NO: 625466
ucauccagucccaaagaac

SEQ ID NO: 625468 - RNA, 19 nt, Artificial Sequence
  Description of Artificial Sequence: Synthetic oligonucleotide
  Sense strand starting at position 3524 of SEQ ID NO: 585255
gacaauuugucgcugcaga

SEQ ID NO: 625469 - RNA, 19 nt, Artificial Sequence
  Description of Artificial Sequence: Synthetic oligonucleotide
  Antisense strand to SEQ ID NO: 625468
ucugcagcgacaaauuguc

SEQ ID NO: 625470 - RNA, 19 nt, Artificial Sequence
  Description of Artificial Sequence: Synthetic oligonucleotide
  Sense strand starting at position 3525 of SEQ ID NO: 585255
acaauuugucgcugcagau

SEQ ID NO: 625471 - RNA, 19 nt, Artificial Sequence
  Description of Artificial Sequence: Synthetic oligonucleotide
  Antisense strand to SEQ ID NO: 625470
aucugcagcgacaaauugu

SEQ ID NO: 625472 - RNA, 19 nt, Artificial Sequence
  Description of Artificial Sequence: Synthetic oligonucleotide
  Sense strand starting at position 3586 of SEQ ID NO: 585255
ccaauaagauugucuagua

SEQ ID NO: 625473 - RNA, 19 nt, Artificial Sequence
  Description of Artificial Sequence: Synthetic oligonucleotide
  Antisense strand to SEQ ID NO: 625472
uacuagacaaucuuauugg

SEQ ID NO: 625474 - RNA, 19 nt, Artificial Sequence
  Description of Artificial Sequence: Synthetic oligonucleotide
  Sense strand starting at position 225 of SEQ ID NO: 585256
cagauaaguuaucuaggca

SEQ ID NO: 625475 - RNA, 19 nt, Artificial Sequence
  Description of Artificial Sequence: Synthetic oligonucleotide
  Antisense strand to SEQ ID NO: 625474
ugccuagauaacuuaucug

SEQ ID NO: 625476 - RNA, 19 nt, Artificial Sequence
  Description of Artificial Sequence: Synthetic oligonucleotide
  Sense strand starting at position 297 of SEQ ID NO: 585256
aaagacaggccuuaguuua

SEQ ID NO: 625477 - RNA, 19 nt, Artificial Sequence
  Description of Artificial Sequence: Synthetic oligonucleotide
  Antisense strand to SEQ ID NO: 625476
uaaacuaaggccugucuuu

SEQ ID NO: 625478 - RNA, 19 nt, Artificial Sequence
  Description of Artificial Sequence: Synthetic oligonucleotide
  Sense strand starting at position 311 of SEQ ID NO: 585256
guuuauuucccagguguga

SEQ ID NO: 625479 - RNA, 19 nt, Artificial Sequence
  Description of Artificial Sequence: Synthetic oligonucleotide
  Antisense strand to SEQ ID NO: 625478
ucacaccugggaaauaaac

SEQ ID NO: 625480 - RNA, 19 nt, Artificial Sequence
  Description of Artificial Sequence: Synthetic oligonucleotide
  Sense strand starting at position 325 of SEQ ID NO: 585256
ugugaaagaaauugcagau

SEQ ID NO: 625481 - RNA, 19 nt, Artificial Sequence
  Description of Artificial Sequence: Synthetic oligonucleotide
  Antisense strand to SEQ ID NO: 625480
aucugcaauuucuuucaca

SEQ ID NO: 625482 - RNA, 19 nt, Artificial Sequence
  Description of Artificial Sequence: Synthetic oligonucleotide
  Sense strand starting at position 350 of SEQ ID NO: 585256
ucacacaguccuuauguua

SEQ ID NO: 625483 - RNA, 19 nt, Artificial Sequence
  Description of Artificial Sequence: Synthetic oligonucleotide
  Antisense strand to SEQ ID NO: 625482
uaacauaaggacuguguga

SEQ ID NO: 625484 - RNA, 19 nt, Artificial Sequence
  Description of Artificial Sequence: Synthetic oligonucleotide
  Sense strand starting at position 485 of SEQ ID NO: 585256
aaacguguucuagacuuga

SEQ ID NO: 625485 - RNA, 19 nt, Artificial Sequence
  Description of Artificial Sequence: Synthetic oligonucleotide
  Antisense strand to SEQ ID NO: 625484
ucaagucuagaacacguuu

SEQ ID NO: 625486 - RNA, 19 nt, Artificial Sequence
  Description of Artificial Sequence: Synthetic oligonucleotide
  Sense strand starting at position 512 of SEQ ID NO: 585256
auagguagacuacgucuaa

SEQ ID NO: 625487 - RNA, 19 nt, Artificial Sequence
  Description of Artificial Sequence: Synthetic oligonucleotide
  Antisense strand to SEQ ID NO: 625486
uuagacguagucuaccuau

SEQ ID NO: 625488 - RNA, 19 nt, Artificial Sequence
  Description of Artificial Sequence: Synthetic oligonucleotide
  Sense strand starting at position 614 of SEQ ID NO: 585256
ccugcaguugucuaggaag

SEQ ID NO: 625489 - RNA, 19 nt, Artificial Sequence
  Description of Artificial Sequence: Synthetic oligonucleotide
  Antisense strand to SEQ ID NO: 625488
cuuccuagacaacugcagg

SEQ ID NO: 625490 - RNA, 19 nt, Artificial Sequence
  Description of Artificial Sequence: Synthetic oligonucleotide
  Sense strand starting at position 736 of SEQ ID NO: 585256
uucgaaggcuugucaauuu

SEQ ID NO: 625491 - RNA, 19 nt, Artificial Sequence
  Description of Artificial Sequence: Synthetic oligonucleotide
  Antisense strand to SEQ ID NO: 625490
aaauugacaagccuucgaa

SEQ ID NO: 625492 - RNA, 19 nt, Artificial Sequence
  Description of Artificial Sequence: Synthetic oligonucleotide
  Sense strand starting at position 767 of SEQ ID NO: 585256
agaguuggcuucuccuaaa

SEQ ID NO: 625493 - RNA, 19 nt, Artificial Sequence
  Description of Artificial Sequence: Synthetic oligonucleotide
  Antisense strand to SEQ ID NO: 625492
uuuaggagaagccaacucu

SEQ ID NO: 625494 - RNA, 19 nt, Artificial Sequence
  Description of Artificial Sequence: Synthetic oligonucleotide
  Sense strand starting at position 865 of SEQ ID NO: 585256
cugacugagcacugggauu

SEQ ID NO: 625495 - RNA, 19 nt, Artificial Sequence
  Description of Artificial Sequence: Synthetic oligonucleotide
  Antisense strand to SEQ ID NO: 625494
aaucccagugcucagucag

SEQ ID NO: 625496 - RNA, 19 nt, Artificial Sequence
  Description of Artificial Sequence: Synthetic oligonucleotide
  Sense strand starting at position 931 of SEQ ID NO: 585256
gaauaagauguaugaagca

SEQ ID NO: 625497 - RNA, 19 nt, Artificial Sequence
  Description of Artificial Sequence: Synthetic oligonucleotide
  Antisense strand to SEQ ID NO: 625496
ugcuucauacaucuuauuc

SEQ ID NO: 625498 - RNA, 19 nt, Artificial Sequence
  Description of Artificial Sequence: Synthetic oligonucleotide
  Sense strand starting at position 1108 of SEQ ID NO: 585256
gggaguccuuccuuaggca

SEQ ID NO: 625499 - RNA, 19 nt, Artificial Sequence
  Description of Artificial Sequence: Synthetic oligonucleotide
  Antisense strand to SEQ ID NO: 625498
ugccuaaggaaggacuccc

SEQ ID NO: 625500 - RNA, 19 nt, Artificial Sequence
  Description of Artificial Sequence: Synthetic oligonucleotide
  Sense strand starting at position 1185 of SEQ ID NO: 585256
ucccucgauugguuaauau

SEQ ID NO: 625501 - RNA, 19 nt, Artificial Sequence
  Description of Artificial Sequence: Synthetic oligonucleotide
  Antisense strand to SEQ ID NO: 625500
auauuaaccaaucgaggga

SEQ ID NO: 625502 - RNA, 19 nt, Artificial Sequence
  Description of Artificial Sequence: Synthetic oligonucleotide
  Sense strand starting at position 1232 of SEQ ID NO: 585256
gaagcugguggcgaaauua

SEQ ID NO: 625503 - RNA, 19 nt, Artificial Sequence
  Description of Artificial Sequence: Synthetic oligonucleotide
  Antisense strand to SEQ ID NO: 625502
uaauuucgccaccagcuuc

SEQ ID NO: 625504 - RNA, 19 nt, Artificial Sequence
  Description of Artificial Sequence: Synthetic oligonucleotide
  Sense strand starting at position 1302 of SEQ ID NO: 585256
gggucugaaaccuaagcga

SEQ ID NO: 625505 - RNA, 19 nt, Artificial Sequence
  Description of Artificial Sequence: Synthetic oligonucleotide
  Antisense strand to SEQ ID NO: 625504
ucgcuuagguuucagaccc

SEQ ID NO: 625506 - RNA, 19 nt, Artificial Sequence
  Description of Artificial Sequence: Synthetic oligonucleotide
  Sense strand starting at position 1598 of SEQ ID NO: 585256
uuaagacgcuuacuuggaa

SEQ ID NO: 625507 - RNA, 19 nt, Artificial Sequence
  Description of Artificial Sequence: Synthetic oligonucleotide
  Antisense strand to SEQ ID NO: 625506
uuccaaguaagcgucuuaa

SEQ ID NO: 625508 - RNA, 19 nt, Artificial Sequence
  Description of Artificial Sequence: Synthetic oligonucleotide
  Sense strand starting at position 1787 of SEQ ID NO: 585256
caaauaugucguuaacgaa

SEQ ID NO: 625509 - RNA, 19 nt, Artificial Sequence
  Description of Artificial Sequence: Synthetic oligonucleotide
  Antisense strand to SEQ ID NO: 625508
uucguuaacgacauauuug

SEQ ID NO: 625510 - RNA, 19 nt, Artificial Sequence
  Description of Artificial Sequence: Synthetic oligonucleotide
  Sense strand starting at position 1817 of SEQ ID NO: 585256
ugcccauggccuuggaaga

SEQ ID NO: 625511 - RNA, 19 nt, Artificial Sequence
  Description of Artificial Sequence: Synthetic oligonucleotide
  Antisense strand to SEQ ID NO: 625510
ucuuccaaggccaugggca

SEQ ID NO: 625512 - RNA, 19 nt, Artificial Sequence
  Description of Artificial Sequence: Synthetic oligonucleotide
  Sense strand starting at position 2007 of SEQ ID NO: 585256
acaccagaaaugugucgaa

SEQ ID NO: 625513 - RNA, 19 nt, Artificial Sequence
  Description of Artificial Sequence: Synthetic oligonucleotide
  Antisense strand to SEQ ID NO: 625512
uucgacacauuucuggugu

SEQ ID NO: 625514 - RNA, 19 nt, Artificial Sequence
  Description of Artificial Sequence: Synthetic oligonucleotide
  Sense strand starting at position 2011 of SEQ ID NO: 585256
cagaaaugugucgaaagua

SEQ ID NO: 625515 - RNA, 19 nt, Artificial Sequence
  Description of Artificial Sequence: Synthetic oligonucleotide
  Antisense strand to SEQ ID NO: 625514
uacuuucgacacauuucug

SEQ ID NO: 625516 - RNA, 19 nt, Artificial Sequence
  Description of Artificial Sequence: Synthetic oligonucleotide
  Sense strand starting at position 2129 of SEQ ID NO: 585256
ggcagagcuaugcaaauga

SEQ ID NO: 625517 - RNA, 19 nt, Artificial Sequence
  Description of Artificial Sequence: Synthetic oligonucleotide
  Antisense strand to SEQ ID NO: 625516
ucauuugcauagcucugcc

SEQ ID NO: 625518 - RNA, 19 nt, Artificial Sequence
  Description of Artificial Sequence: Synthetic oligonucleotide
  Sense strand starting at position 2140 of SEQ ID NO: 585256
gcaaaugagguaugaaagu

SEQ ID NO: 625519 - RNA, 19 nt, Artificial Sequence
  Description of Artificial Sequence: Synthetic oligonucleotide
  Antisense strand to SEQ ID NO: 625518
acuuucauaccucauuugc

SEQ ID NO: 625520 - RNA, 19 nt, Artificial Sequence
  Description of Artificial Sequence: Synthetic oligonucleotide
  Sense strand starting at position 2167 of SEQ ID NO: 585256
ucuauuggcuaucugacua

SEQ ID NO: 625521 - RNA, 19 nt, Artificial Sequence
  Description of Artificial Sequence: Synthetic oligonucleotide
  Antisense strand to SEQ ID NO: 625520
uagucagauagccaauaga

SEQ ID NO: 625522 - RNA, 19 nt, Artificial Sequence
  Description of Artificial Sequence: Synthetic oligonucleotide
  Sense strand starting at position 2172 of SEQ ID NO: 585256
uggcuaucugacuagcauu

SEQ ID NO: 625523 - RNA, 19 nt, Artificial Sequence
  Description of Artificial Sequence: Synthetic oligonucleotide
  Antisense strand to SEQ ID NO: 625522
aaugcuagucagauagcca

SEQ ID NO: 625524 - RNA, 19 nt, Artificial Sequence
  Description of Artificial Sequence: Synthetic oligonucleotide
  Sense strand starting at position 2838 of SEQ ID NO: 585256
gcacuaagguaaguuaauu

SEQ ID NO: 625525 - RNA, 19 nt, Artificial Sequence
  Description of Artificial Sequence: Synthetic oligonucleotide
  Antisense strand to SEQ ID NO: 625524
aauuaacuuaccuuagugc

SEQ ID NO: 625526 - RNA, 19 nt, Artificial Sequence
  Description of Artificial Sequence: Synthetic oligonucleotide
  Sense strand starting at position 2937 of SEQ ID NO: 585256
guaauaguaggucaguuac

SEQ ID NO: 625527 - RNA, 19 nt, Artificial Sequence
  Description of Artificial Sequence: Synthetic oligonucleotide
  Antisense strand to SEQ ID NO: 625526
guaacugaccuacuauuac

SEQ ID NO: 625528 - RNA, 19 nt, Artificial Sequence
  Description of Artificial Sequence: Synthetic oligonucleotide
  Sense strand starting at position 2945 of SEQ ID NO: 585256
aggucaguuacguacuauc

SEQ ID NO: 625529 - RNA, 19 nt, Artificial Sequence
  Description of Artificial Sequence: Synthetic oligonucleotide
  Antisense strand to SEQ ID NO: 625528
gauaguacguaacugaccu

SEQ ID NO: 625530 - RNA, 19 nt, Artificial Sequence
  Description of Artificial Sequence: Synthetic oligonucleotide
  Sense strand starting at position 3008 of SEQ ID NO: 585256
auaguuagugccuaacagu

SEQ ID NO: 625531 - RNA, 19 nt, Artificial Sequence
  Description of Artificial Sequence: Synthetic oligonucleotide
  Antisense strand to SEQ ID NO: 625530
acuguuaggcacuaacuau

SEQ ID NO: 625532 - RNA, 19 nt, Artificial Sequence
  Description of Artificial Sequence: Synthetic oligonucleotide
  Sense strand starting at position 3022 of SEQ ID NO: 585256
acaguuuacaugcagggau

SEQ ID NO: 625533 - RNA, 19 nt, Artificial Sequence
  Description of Artificial Sequence: Synthetic oligonucleotide
  Antisense strand to SEQ ID NO: 625532
aucccugcauguaaacugu

SEQ ID NO: 625534 - RNA, 19 nt, Artificial Sequence
  Description of Artificial Sequence: Synthetic oligonucleotide
  Sense strand starting at position 3183 of SEQ ID NO: 585256
uuuccuaauucugugagag

SEQ ID NO: 625535 - RNA, 19 nt, Artificial Sequence
  Description of Artificial Sequence: Synthetic oligonucleotide
  Antisense strand to SEQ ID NO: 625534
cucucacagaauuaggaaa

SEQ ID NO: 625536 - RNA, 19 nt, Artificial Sequence
  Description of Artificial Sequence: Synthetic oligonucleotide
  Sense strand starting at position 3184 of SEQ ID NO: 585256
uuccuaauucugugagagu

SEQ ID NO: 625537 - RNA, 19 nt, Artificial Sequence
  Description of Artificial Sequence: Synthetic oligonucleotide
  Antisense strand to SEQ ID NO: 625536
acucucacagaauuaggaa

SEQ ID NO: 625538 - RNA, 19 nt, Artificial Sequence
  Description of Artificial Sequence: Synthetic oligonucleotide
  Sense strand starting at position 3191 of SEQ ID NO: 585256
uucugugagaguuauaggu

SEQ ID NO: 625539 - RNA, 19 nt, Artificial Sequence
  Description of Artificial Sequence: Synthetic oligonucleotide
  Antisense strand to SEQ ID NO: 625538
accuauaacucucacagaa

SEQ ID NO: 625540 - RNA, 19 nt, Artificial Sequence
  Description of Artificial Sequence: Synthetic oligonucleotide
  Sense strand starting at position 3195 of SEQ ID NO: 585256
gugagaguuauagguccca

SEQ ID NO: 625541 - RNA, 19 nt, Artificial Sequence
  Description of Artificial Sequence: Synthetic oligonucleotide
  Antisense strand to SEQ ID NO: 625540
ugggaccuauaacucucac

SEQ ID NO: 625542 - RNA, 19 nt, Artificial Sequence
  Description of Artificial Sequence: Synthetic oligonucleotide
  Sense strand starting at position 3218 of SEQ ID NO: 585256
ugcuaaagugcagaguaua

SEQ ID NO: 625543 - RNA, 19 nt, Artificial Sequence
  Description of Artificial Sequence: Synthetic oligonucleotide
  Antisense strand to SEQ ID NO: 625542
uauacucugcacuuuagca

SEQ ID NO: 625544 - RNA, 19 nt, Artificial Sequence
  Description of Artificial Sequence: Synthetic oligonucleotide
  Sense strand starting at position 3221 of SEQ ID NO: 585256
uaaagugcagaguauauua

SEQ ID NO: 625545 - RNA, 19 nt, Artificial Sequence
  Description of Artificial Sequence: Synthetic oligonucleotide
  Antisense strand to SEQ ID NO: 625544
uaauauacucugcacuuua

SEQ ID NO: 625546 - RNA, 19 nt, Artificial Sequence
  Description of Artificial Sequence: Synthetic oligonucleotide
  Sense strand starting at position 3259 of SEQ ID NO: 585256
guugaaaggugucuguaaa

SEQ ID NO: 625547 - RNA, 19 nt, Artificial Sequence
  Description of Artificial Sequence: Synthetic oligonucleotide
  Antisense strand to SEQ ID NO: 625546
uuuacagacaccuuucaac

SEQ ID NO: 625548 - RNA, 19 nt, Artificial Sequence
  Description of Artificial Sequence: Synthetic oligonucleotide
  Sense strand starting at position 3280 of SEQ ID NO: 585256
agacuaaugucccuaaugu

SEQ ID NO: 625549 - RNA, 19 nt, Artificial Sequence
  Description of Artificial Sequence: Synthetic oligonucleotide
  Antisense strand to SEQ ID NO: 625548
acauuagggacauuagucu

SEQ ID NO: 625550 - RNA, 19 nt, Artificial Sequence
  Description of Artificial Sequence: Synthetic oligonucleotide
  Sense strand starting at position 3712 of SEQ ID NO: 585256
cuucuagggaucugguaac

SEQ ID NO: 625551 - RNA, 19 nt, Artificial Sequence
  Description of Artificial Sequence: Synthetic oligonucleotide
  Antisense strand to SEQ ID NO: 625550
guuaccagaucccuagaag

SEQ ID NO: 625552 - RNA, 19 nt, Artificial Sequence
  Description of Artificial Sequence: Synthetic oligonucleotide
  Sense strand starting at position 3768 of SEQ ID NO: 585256
uggacaaauuucuagagac

SEQ ID NO: 625553 - RNA, 19 nt, Artificial Sequence
  Description of Artificial Sequence: Synthetic oligonucleotide
  Antisense strand to SEQ ID NO: 625552
gucucuagaaauuugucca

SEQ ID NO: 625554 - RNA, 19 nt, Artificial Sequence
  Description of Artificial Sequence: Synthetic oligonucleotide
  Sense strand starting at position 154 of SEQ ID NO: 585257
ucuauacccuggucaguuu

SEQ ID NO: 625555 - RNA, 19 nt, Artificial Sequence
  Description of Artificial Sequence: Synthetic oligonucleotide
  Antisense strand to SEQ ID NO: 625554
aaacugaccaggguauaga

SEQ ID NO: 625556 - RNA, 19 nt, Artificial Sequence
  Description of Artificial Sequence: Synthetic oligonucleotide
  Sense strand starting at position 233 of SEQ ID NO: 585257
cucugaguuuacuuucuua

SEQ ID NO: 625557 - RNA, 19 nt, Artificial Sequence
  Description of Artificial Sequence: Synthetic oligonucleotide
  Antisense strand to SEQ ID NO: 625556
uaagaaaguaaacucagag

SEQ ID NO: 625558 - RNA, 19 nt, Artificial Sequence
  Description of Artificial Sequence: Synthetic oligonucleotide
  Sense strand starting at position 236 of SEQ ID NO: 585257
ugaguuuacuuucuuagac

SEQ ID NO: 625559 - RNA, 19 nt, Artificial Sequence
  Description of Artificial Sequence: Synthetic oligonucleotide
  Antisense strand to SEQ ID NO: 625558
gucuaagaaaguaaacuca

SEQ ID NO: 625560 - RNA, 19 nt, Artificial Sequence
  Description of Artificial Sequence: Synthetic oligonucleotide
  Sense strand starting at position 357 of SEQ ID NO: 585257
aucauuucguguuuguuua

SEQ ID NO: 625561 - RNA, 19 nt, Artificial Sequence
  Description of Artificial Sequence: Synthetic oligonucleotide
  Antisense strand to SEQ ID NO: 625560
uaaacaaacacgaaaugau

SEQ ID NO: 625562 - RNA, 19 nt, Artificial Sequence
  Description of Artificial Sequence: Synthetic oligonucleotide
  Sense strand starting at position 358 of SEQ ID NO: 585257
ucauuucguguuuguuuau

SEQ ID NO: 625563 - RNA, 19 nt, Artificial Sequence
  Description of Artificial Sequence: Synthetic oligonucleotide
  Antisense strand to SEQ ID NO: 625562
auaaacaaacacgaaauga

SEQ ID NO: 625564 - RNA, 19 nt, Artificial Sequence
  Description of Artificial Sequence: Synthetic oligonucleotide
  Sense strand starting at position 368 of SEQ ID NO: 585257
uuuguuuaugagggcauga

SEQ ID NO: 625565 - RNA, 19 nt, Artificial Sequence
  Description of Artificial Sequence: Synthetic oligonucleotide
  Antisense strand to SEQ ID NO: 625564
ucaugcccucauaaacaaa

SEQ ID NO: 625566 - RNA, 19 nt, Artificial Sequence
  Description of Artificial Sequence: Synthetic oligonucleotide
  Sense strand starting at position 501 of SEQ ID NO: 585257
ucacgucucaaguauuugu

SEQ ID NO: 625567 - RNA, 19 nt, Artificial Sequence
  Description of Artificial Sequence: Synthetic oligonucleotide
  Antisense strand to SEQ ID NO: 625566
acaaauacuugagacguga

SEQ ID NO: 625568 - RNA, 19 nt, Artificial Sequence
  Description of Artificial Sequence: Synthetic oligonucleotide
  Sense strand starting at position 511 of SEQ ID NO: 585257
aguauuuguuccuuuccuu

SEQ ID NO: 625569 - RNA, 19 nt, Artificial Sequence
  Description of Artificial Sequence: Synthetic oligonucleotide
  Antisense strand to SEQ ID NO: 625568
aaggaaaggaacaaauacu

SEQ ID NO: 625570 - RNA, 19 nt, Artificial Sequence
  Description of Artificial Sequence: Synthetic oligonucleotide
  Sense strand starting at position 749 of SEQ ID NO: 585257
ucaguccugcgauaacuau

SEQ ID NO: 625571 - RNA, 19 nt, Artificial Sequence
  Description of Artificial Sequence: Synthetic oligonucleotide
  Antisense strand to SEQ ID NO: 625570
auaguuaucgcaggacuga

SEQ ID NO: 625572 - RNA, 19 nt, Artificial Sequence
  Description of Artificial Sequence: Synthetic oligonucleotide
  Sense strand starting at position 785 of SEQ ID NO: 585257
gcaccuuaaugauugacua

SEQ ID NO: 625573 - RNA, 19 nt, Artificial Sequence
  Description of Artificial Sequence: Synthetic oligonucleotide
  Antisense strand to SEQ ID NO: 625572
uagucaaucauuaaggugc

SEQ ID NO: 625574 - RNA, 19 nt, Artificial Sequence
  Description of Artificial Sequence: Synthetic oligonucleotide
  Sense strand starting at position 814 of SEQ ID NO: 585257
gccguuacccggaggacuu

SEQ ID NO: 625575 - RNA, 19 nt, Artificial Sequence
  Description of Artificial Sequence: Synthetic oligonucleotide
  Antisense strand to SEQ ID NO: 625574
aaguccuccggguaacggc

SEQ ID NO: 625576 - RNA, 19 nt, Artificial Sequence
  Description of Artificial Sequence: Synthetic oligonucleotide
  Sense strand starting at position 1042 of SEQ ID NO: 585257
ucagaaaccuuuguaauag

SEQ ID NO: 625577 - RNA, 19 nt, Artificial Sequence
  Description of Artificial Sequence: Synthetic oligonucleotide
  Antisense strand to SEQ ID NO: 625576
cuauuacaaagguuucuga

SEQ ID NO: 625578 - RNA, 19 nt, Artificial Sequence
  Description of Artificial Sequence: Synthetic oligonucleotide
  Sense strand starting at position 1050 of SEQ ID NO: 585257
cuuuguaauaguuccgugu

SEQ ID NO: 625579 - RNA, 19 nt, Artificial Sequence
  Description of Artificial Sequence: Synthetic oligonucleotide
  Antisense strand to SEQ ID NO: 625578
acacggaacuauuacaaag

SEQ ID NO: 625580 - RNA, 19 nt, Artificial Sequence
  Description of Artificial Sequence: Synthetic oligonucleotide
  Sense strand starting at position 1051 of SEQ ID NO: 585257
uuuguaauaguuccguguu

SEQ ID NO: 625581 - RNA, 19 nt, Artificial Sequence
  Description of Artificial Sequence: Synthetic oligonucleotide
  Antisense strand to SEQ ID NO: 625580
aacacggaacuauuacaaa

SEQ ID NO: 625582 - RNA, 19 nt, Artificial Sequence
  Description of Artificial Sequence: Synthetic oligonucleotide
  Sense strand starting at position 1104 of SEQ ID NO: 585257
auuacauaucugcauggua

SEQ ID NO: 625583 - RNA, 19 nt, Artificial Sequence
  Description of Artificial Sequence: Synthetic oligonucleotide
  Antisense strand to SEQ ID NO: 625582
uaccaugcagauauguaau

SEQ ID NO: 625584 - RNA, 19 nt, Artificial Sequence
  Description of Artificial Sequence: Synthetic oligonucleotide
  Sense strand starting at position 1308 of SEQ ID NO: 585257
guuuaugcuaguguuaugu

SEQ ID NO: 625585 - RNA, 19 nt, Artificial Sequence
  Description of Artificial Sequence: Synthetic oligonucleotide
  Antisense strand to SEQ ID NO: 625584
acauaacacuagcauaaac

SEQ ID NO: 625586 - RNA, 19 nt, Artificial Sequence
  Description of Artificial Sequence: Synthetic oligonucleotide
  Sense strand starting at position 1384 of SEQ ID NO: 585257
auuguuauucccuguaacu

SEQ ID NO: 625587 - RNA, 19 nt, Artificial Sequence
  Description of Artificial Sequence: Synthetic oligonucleotide
  Antisense strand to SEQ ID NO: 625586
aguuacagggaauaacaau

SEQ ID NO: 625588 - RNA, 19 nt, Artificial Sequence
  Description of Artificial Sequence: Synthetic oligonucleotide
  Sense strand starting at position 1386 of SEQ ID NO: 585257
uguuauucccuguaacuuc

SEQ ID NO: 625589 - RNA, 19 nt, Artificial Sequence
  Description of Artificial Sequence: Synthetic oligonucleotide
  Antisense strand to SEQ ID NO: 625588
gaaguuacagggaauaaca

SEQ ID NO: 625590 - RNA, 19 nt, Artificial Sequence
  Description of Artificial Sequence: Synthetic oligonucleotide
  Sense strand starting at position 1407 of SEQ ID NO: 585257
aguuauuuccucugcagua

SEQ ID NO: 625591 - RNA, 19 nt, Artificial Sequence
  Description of Artificial Sequence: Synthetic oligonucleotide
  Antisense strand to SEQ ID NO: 625590
uacugcagaggaaauaacu

SEQ ID NO: 625592 - RNA, 19 nt, Artificial Sequence
  Description of Artificial Sequence: Synthetic oligonucleotide
  Sense strand starting at position 1408 of SEQ ID NO: 585257
guuauuuccucugcaguac

SEQ ID NO: 625593 - RNA, 19 nt, Artificial Sequence
  Description of Artificial Sequence: Synthetic oligonucleotide
  Antisense strand to SEQ ID NO: 625592
guacugcagaggaaauaac

SEQ ID NO: 625594 - RNA, 19 nt, Artificial Sequence
  Description of Artificial Sequence: Synthetic oligonucleotide
  Sense strand starting at position 2007 of SEQ ID NO: 585257
cgccgaggcccuguucauu

SEQ ID NO: 625595 - RNA, 19 nt, Artificial Sequence
  Description of Artificial Sequence: Synthetic oligonucleotide
  Antisense strand to SEQ ID NO: 625594
aaugaacagggccucggcg

SEQ ID NO: 625596 - RNA, 19 nt, Artificial Sequence
  Description of Artificial Sequence: Synthetic oligonucleotide
  Sense strand starting at position 2059 of SEQ ID NO: 585257
uuucguuuaugauuggauu

SEQ ID NO: 625597 - RNA, 19 nt, Artificial Sequence
  Description of Artificial Sequence: Synthetic oligonucleotide
  Antisense strand to SEQ ID NO: 625596
aauccaaucauaaacgaaa

SEQ ID NO: 625598 - RNA, 19 nt, Artificial Sequence
  Description of Artificial Sequence: Synthetic oligonucleotide
  Sense strand starting at position 2060 of SEQ ID NO: 585257
uucguuuaugauuggauua

SEQ ID NO: 625599 - RNA, 19 nt, Artificial Sequence
  Description of Artificial Sequence: Synthetic oligonucleotide
  Antisense strand to SEQ ID NO: 625598
uaauccaaucauaaacgaa

SEQ ID NO: 625600 - RNA, 19 nt, Artificial Sequence
  Description of Artificial Sequence: Synthetic oligonucleotide
  Sense strand starting at position 2061 of SEQ ID NO: 585257
ucguuuaugauuggauuaa

SEQ ID NO: 625601 - RNA, 19 nt, Artificial Sequence
  Description of Artificial Sequence: Synthetic oligonucleotide
  Antisense strand to SEQ ID NO: 625600
uuaauccaaucauaaacga

SEQ ID NO: 625602 - RNA, 19 nt, Artificial Sequence
  Description of Artificial Sequence: Synthetic oligonucleotide
  Sense strand starting at position 2081 of SEQ ID NO: 585257
uuuagagugucgucacaaa

SEQ ID NO: 625603 - RNA, 19 nt, Artificial Sequence
  Description of Artificial Sequence: Synthetic oligonucleotide
  Antisense strand to SEQ ID NO: 625602
uuugugacgacacucuaaa

SEQ ID NO: 625604 - RNA, 19 nt, Artificial Sequence
  Description of Artificial Sequence: Synthetic oligonucleotide
  Sense strand starting at position 2140 of SEQ ID NO: 585257
gcuauuucguuccuuuacu

SEQ ID NO: 625605 - RNA, 19 nt, Artificial Sequence
  Description of Artificial Sequence: Synthetic oligonucleotide
  Antisense strand to SEQ ID NO: 625604
aguaaaggaacgaaauagc

SEQ ID NO: 625606 - RNA, 19 nt, Artificial Sequence
  Description of Artificial Sequence: Synthetic oligonucleotide
  Sense strand starting at position 2141 of SEQ ID NO: 585257
cuauuucguuccuuuacuu

SEQ ID NO: 625607 - RNA, 19 nt, Artificial Sequence
  Description of Artificial Sequence: Synthetic oligonucleotide
  Antisense strand to SEQ ID NO: 625606
aaguaaaggaacgaaauag

SEQ ID NO: 625608 - RNA, 19 nt, Artificial Sequence
  Description of Artificial Sequence: Synthetic oligonucleotide
  Sense strand starting at position 2209 of SEQ ID NO: 585257
ggccucuuuaggcaagaca

SEQ ID NO: 625609 - RNA, 19 nt, Artificial Sequence
  Description of Artificial Sequence: Synthetic oligonucleotide
  Antisense strand to SEQ ID NO: 625608
ugucuugccuaaagaggcc

SEQ ID NO: 625610 - RNA, 19 nt, Artificial Sequence
  Description of Artificial Sequence: Synthetic oligonucleotide
  Sense strand starting at position 2360 of SEQ ID NO: 585257
ggacucguugcauacagaa

SEQ ID NO: 625611 - RNA, 19 nt, Artificial Sequence
  Description of Artificial Sequence: Synthetic oligonucleotide
  Antisense strand to SEQ ID NO: 625610
uucuguaugcaacgagucc

SEQ ID NO: 625612 - RNA, 19 nt, Artificial Sequence
  Description of Artificial Sequence: Synthetic oligonucleotide
  Sense strand starting at position 2429 of SEQ ID NO: 585257
ucggcaaguccuuaaucca

SEQ ID NO: 625613 - RNA, 19 nt, Artificial Sequence
  Description of Artificial Sequence: Synthetic oligonucleotide
  Antisense strand to SEQ ID NO: 625612
uggauuaaggacuugccga

SEQ ID NO: 625614 - RNA, 19 nt, Artificial Sequence
  Description of Artificial Sequence: Synthetic oligonucleotide
  Sense strand starting at position 2482 of SEQ ID NO: 585257
ugcagugucgguuucuaau

SEQ ID NO: 625615 - RNA, 19 nt, Artificial Sequence
  Description of Artificial Sequence: Synthetic oligonucleotide
  Antisense strand to SEQ ID NO: 625614
auuagaaaccgacacugca

SEQ ID NO: 625616 - RNA, 19 nt, Artificial Sequence
  Description of Artificial Sequence: Synthetic oligonucleotide
  Sense strand starting at position 2484 of SEQ ID NO: 585257
cagugucgguuucuaauuu

SEQ ID NO: 625617 - RNA, 19 nt, Artificial Sequence
  Description of Artificial Sequence: Synthetic oligonucleotide
  Antisense strand to SEQ ID NO: 625616
aaauuagaaaccgacacug

SEQ ID NO: 625618 - RNA, 19 nt, Artificial Sequence
  Description of Artificial Sequence: Synthetic oligonucleotide
  Sense strand starting at position 2538 of SEQ ID NO: 585257
aauguagcccuucggaaau

SEQ ID NO: 625619 - RNA, 19 nt, Artificial Sequence
  Description of Artificial Sequence: Synthetic oligonucleotide
  Antisense strand to SEQ ID NO: 625618
auuuccgaagggcuacauu

SEQ ID NO: 625620 - RNA, 19 nt, Artificial Sequence
  Description of Artificial Sequence: Synthetic oligonucleotide
  Sense strand starting at position 2614 of SEQ ID NO: 585257
ugccauacucgauagggau

SEQ ID NO: 625621 - RNA, 19 nt, Artificial Sequence
  Description of Artificial Sequence: Synthetic oligonucleotide
  Antisense strand to SEQ ID NO: 625620
aucccuaucgaguauggca

SEQ ID NO: 625622 - RNA, 19 nt, Artificial Sequence
  Description of Artificial Sequence: Synthetic oligonucleotide
  Sense strand starting at position 2616 of SEQ ID NO: 585257
ccauacucgauagggauaa

SEQ ID NO: 625623 - RNA, 19 nt, Artificial Sequence
  Description of Artificial Sequence: Synthetic oligonucleotide
  Antisense strand to SEQ ID NO: 625622
uuaucccuaucgaguaugg

SEQ ID NO: 625624 - RNA, 19 nt, Artificial Sequence
  Description of Artificial Sequence: Synthetic oligonucleotide
  Sense strand starting at position 2917 of SEQ ID NO: 585257
gacuuuguucccgggagac

SEQ ID NO: 625625 - RNA, 19 nt, Artificial Sequence
  Description of Artificial Sequence: Synthetic oligonucleotide
  Antisense strand to SEQ ID NO: 625624
gucucccgggaacaaaguc

SEQ ID NO: 625626 - RNA, 19 nt, Artificial Sequence
  Description of Artificial Sequence: Synthetic oligonucleotide
  Sense strand starting at position 3806 of SEQ ID NO: 585257
gcgcccgcccguuuauaua

SEQ ID NO: 625627 - RNA, 19 nt, Artificial Sequence
  Description of Artificial Sequence: Synthetic oligonucleotide
  Antisense strand to SEQ ID NO: 625626
uauauaaacgggcgggcgc

SEQ ID NO: 625628 - RNA, 19 nt, Artificial Sequence
  Description of Artificial Sequence: Synthetic oligonucleotide
  Sense strand starting at position 3890 of SEQ ID NO: 585257
cucggaucccgaguugugu

SEQ ID NO: 625629 - RNA, 19 nt, Artificial Sequence
  Description of Artificial Sequence: Synthetic oligonucleotide
  Antisense strand to SEQ ID NO: 625628
acacaacucgggauccgag

SEQ ID NO: 625630 - RNA, 19 nt, Artificial Sequence
  Description of Artificial Sequence: Synthetic oligonucleotide
  Sense strand starting at position 3891 of SEQ ID NO: 585257
ucggaucccgaguuguguu

SEQ ID NO: 625631 - RNA, 19 nt, Artificial Sequence
  Description of Artificial Sequence: Synthetic oligonucleotide
  Antisense strand to SEQ ID NO: 625630
aacacaacucgggauccga

SEQ ID NO: 625632 - RNA, 19 nt, Artificial Sequence
  Description of Artificial Sequence: Synthetic oligonucleotide
  Sense strand starting at position 3896 of SEQ ID NO: 585257
ucccgaguuguguuuguua

SEQ ID NO: 625633 - RNA, 19 nt, Artificial Sequence
  Description of Artificial Sequence: Synthetic oligonucleotide
  Antisense strand to SEQ ID NO: 625632
uaacaaacacaacucggga

SEQ ID NO: 625634 - RNA, 19 nt, Artificial Sequence
  Description of Artificial Sequence: Synthetic oligonucleotide
  Sense strand starting at position 34 of SEQ ID NO: 585258
uggacaaccuggucuugaa

SEQ ID NO: 625635 - RNA, 19 nt, Artificial Sequence
  Description of Artificial Sequence: Synthetic oligonucleotide
  Antisense strand to SEQ ID NO: 625634
uucaagaccagguugucca

SEQ ID NO: 625636 - RNA, 19 nt, Artificial Sequence
  Description of Artificial Sequence: Synthetic oligonucleotide
  Sense strand starting at position 181 of SEQ ID NO: 585258
gucuaucuugcucacugaa

SEQ ID NO: 625637 - RNA, 19 nt, Artificial Sequence
  Description of Artificial Sequence: Synthetic oligonucleotide
  Antisense strand to SEQ ID NO: 625636
uucagugagcaagauagac

SEQ ID NO: 625638 - RNA, 19 nt, Artificial Sequence
  Description of Artificial Sequence: Synthetic oligonucleotide
  Sense strand starting at position 276 of SEQ ID NO: 585258
cugauuuguuuauuguauc

SEQ ID NO: 625639 - RNA, 19 nt, Artificial Sequence
  Description of Artificial Sequence: Synthetic oligonucleotide
  Antisense strand to SEQ ID NO: 625638
gauacaauaaacaaaucag

SEQ ID NO: 625640 - RNA, 19 nt, Artificial Sequence
  Description of Artificial Sequence: Synthetic oligonucleotide
  Sense strand starting at position 317 of SEQ ID NO: 585258
uuucuuuggcuugaaacuu

SEQ ID NO: 625641 - RNA, 19 nt, Artificial Sequence
  Description of Artificial Sequence: Synthetic oligonucleotide
  Antisense strand to SEQ ID NO: 625640
aaguuucaagccaaagaaa

SEQ ID NO: 625642 - RNA, 19 nt, Artificial Sequence
  Description of Artificial Sequence: Synthetic oligonucleotide
  Sense strand starting at position 384 of SEQ ID NO: 585258
ccagaagcauauuccuaga

SEQ ID NO: 625643 - RNA, 19 nt, Artificial Sequence
  Description of Artificial Sequence: Synthetic oligonucleotide
  Antisense strand to SEQ ID NO: 625642
ucuaggaauaugcuucugg

SEQ ID NO: 625644 - RNA, 19 nt, Artificial Sequence
  Description of Artificial Sequence: Synthetic oligonucleotide
  Sense strand starting at position 633 of SEQ ID NO: 585258
ccacuauucucagugcaga

SEQ ID NO: 625645 - RNA, 19 nt, Artificial Sequence
  Description of Artificial Sequence: Synthetic oligonucleotide
  Antisense strand to SEQ ID NO: 625644
ucugcacugagaauagugg

SEQ ID NO: 625646 - RNA, 19 nt, Artificial Sequence
  Description of Artificial Sequence: Synthetic oligonucleotide
  Sense strand starting at position 636 of SEQ ID NO: 585258
cuauucucagugcagaagu

SEQ ID NO: 625647 - RNA, 19 nt, Artificial Sequence
  Description of Artificial Sequence: Synthetic oligonucleotide
  Antisense strand to SEQ ID NO: 625646
acuucugcacugagaauag

SEQ ID NO: 625648 - RNA, 19 nt, Artificial Sequence
  Description of Artificial Sequence: Synthetic oligonucleotide
  Sense strand starting at position 646 of SEQ ID NO: 585258
ugcagaaguccucaguaca

SEQ ID NO: 625649 - RNA, 19 nt, Artificial Sequence
  Description of Artificial Sequence: Synthetic oligonucleotide
  Antisense strand to SEQ ID NO: 625648
uguacugaggacuucugca

SEQ ID NO: 625650 - RNA, 19 nt, Artificial Sequence
  Description of Artificial Sequence: Synthetic oligonucleotide
  Sense strand starting at position 835 of SEQ ID NO: 585258
cugacuuguucuccagaga

SEQ ID NO: 625651 - RNA, 19 nt, Artificial Sequence
  Description of Artificial Sequence: Synthetic oligonucleotide
  Antisense strand to SEQ ID NO: 625650
ucucuggagaacaagucag

SEQ ID NO: 625652 - RNA, 19 nt, Artificial Sequence
  Description of Artificial Sequence: Synthetic oligonucleotide
  Sense strand starting at position 871 of SEQ ID NO: 585258
gccucagggaucugauuaa

SEQ ID NO: 625653 - RNA, 19 nt, Artificial Sequence
  Description of Artificial Sequence: Synthetic oligonucleotide
  Antisense strand to SEQ ID NO: 625652
uuaaucagaucccugaggc

SEQ ID NO: 625654 - RNA, 19 nt, Artificial Sequence
  Description of Artificial Sequence: Synthetic oligonucleotide
  Sense strand starting at position 922 of SEQ ID NO: 585258
ccuuauuaaugauuggauu

SEQ ID NO: 625655 - RNA, 19 nt, Artificial Sequence
  Description of Artificial Sequence: Synthetic oligonucleotide
  Antisense strand to SEQ ID NO: 625654
aauccaaucauuaauaagg

SEQ ID NO: 625656 - RNA, 19 nt, Artificial Sequence
  Description of Artificial Sequence: Synthetic oligonucleotide
  Sense strand starting at position 945 of SEQ ID NO: 585258
auagguauauagucaguuu

SEQ ID NO: 625657 - RNA, 19 nt, Artificial Sequence
  Description of Artificial Sequence: Synthetic oligonucleotide
  Antisense strand to SEQ ID NO: 625656
aaacugacuauauaccuau

SEQ ID NO: 625658 - RNA, 19 nt, Artificial Sequence
  Description of Artificial Sequence: Synthetic oligonucleotide
  Sense strand starting at position 1005 of SEQ ID NO: 585258
cuaagaacaugauaaagau

SEQ ID NO: 625659 - RNA, 19 nt, Artificial Sequence
  Description of Artificial Sequence: Synthetic oligonucleotide
  Antisense strand to SEQ ID NO: 625658
aucuuuaucauguucuuag

SEQ ID NO: 625660 - RNA, 19 nt, Artificial Sequence
  Description of Artificial Sequence: Synthetic oligonucleotide
  Sense strand starting at position 1033 of SEQ ID NO: 585258
auugucgaucaaugaacaa

SEQ ID NO: 625661 - RNA, 19 nt, Artificial Sequence
  Description of Artificial Sequence: Synthetic oligonucleotide
  Antisense strand to SEQ ID NO: 625660
uuguucauugaucgacaau

SEQ ID NO: 625662 - RNA, 19 nt, Artificial Sequence
  Description of Artificial Sequence: Synthetic oligonucleotide
  Sense strand starting at position 1083 of SEQ ID NO: 585258
gugguugcacacugagaau

SEQ ID NO: 625663 - RNA, 19 nt, Artificial Sequence
  Description of Artificial Sequence: Synthetic oligonucleotide
  Antisense strand to SEQ ID NO: 625662
auucucagugugcaaccac

SEQ ID NO: 625664 - RNA, 19 nt, Artificial Sequence
  Description of Artificial Sequence: Synthetic oligonucleotide
  Sense strand starting at position 1344 of SEQ ID NO: 585258
acucuugagaaacgaaguu

SEQ ID NO: 625665 - RNA, 19 nt, Artificial Sequence
  Description of Artificial Sequence: Synthetic oligonucleotide
  Antisense strand to SEQ ID NO: 625664
aacuucguuucucaagagu

SEQ ID NO: 625666 - RNA, 19 nt, Artificial Sequence
  Description of Artificial Sequence: Synthetic oligonucleotide
  Sense strand starting at position 1361 of SEQ ID NO: 585258
uuucucuucguagagcaaa

SEQ ID NO: 625667 - RNA, 19 nt, Artificial Sequence
  Description of Artificial Sequence: Synthetic oligonucleotide
  Antisense strand to SEQ ID NO: 625666
uuugcucuacgaagagaaa

SEQ ID NO: 625668 - RNA, 19 nt, Artificial Sequence
  Description of Artificial Sequence: Synthetic oligonucleotide
  Sense strand starting at position 1402 of SEQ ID NO: 585258
uuagguacuaucgagugau

SEQ ID NO: 625669 - RNA, 19 nt, Artificial Sequence
  Description of Artificial Sequence: Synthetic oligonucleotide
  Antisense strand to SEQ ID NO: 625668
aucacucgauaguaccuaa

SEQ ID NO: 625670 - RNA, 19 nt, Artificial Sequence
  Description of Artificial Sequence: Synthetic oligonucleotide
  Sense strand starting at position 1405 of SEQ ID NO: 585258
gguacuaucgagugauacc

SEQ ID NO: 625671 - RNA, 19 nt, Artificial Sequence
  Description of Artificial Sequence: Synthetic oligonucleotide
  Antisense strand to SEQ ID NO: 625670
gguaucacucgauaguacc

SEQ ID NO: 625672 - RNA, 19 nt, Artificial Sequence
  Description of Artificial Sequence: Synthetic oligonucleotide
  Sense strand starting at position 1406 of SEQ ID NO: 585258
guacuaucgagugauaccu

SEQ ID NO: 625673 - RNA, 19 nt, Artificial Sequence
  Description of Artificial Sequence: Synthetic oligonucleotide
  Antisense strand to SEQ ID NO: 625672
agguaucacucgauaguac

SEQ ID NO: 625674 - RNA, 19 nt, Artificial Sequence
  Description of Artificial Sequence: Synthetic oligonucleotide
  Sense strand starting at position 1541 of SEQ ID NO: 585258
aguauauagcuccaauugu

SEQ ID NO: 625675 - RNA, 19 nt, Artificial Sequence
  Description of Artificial Sequence: Synthetic oligonucleotide
  Antisense strand to SEQ ID NO: 625674
acaauuggagcuauauacu

SEQ ID NO: 625676 - RNA, 19 nt, Artificial Sequence
  Description of Artificial Sequence: Synthetic oligonucleotide
  Sense strand starting at position 2012 of SEQ ID NO: 585258
cuguucugcaguuaggaaa

SEQ ID NO: 625677 - RNA, 19 nt, Artificial Sequence
  Description of Artificial Sequence: Synthetic oligonucleotide
  Antisense strand to SEQ ID NO: 625676
uuuccuaacugcagaacag

SEQ ID NO: 625678 - RNA, 19 nt, Artificial Sequence
  Description of Artificial Sequence: Synthetic oligonucleotide
  Sense strand starting at position 2046 of SEQ ID NO: 585258
aucuccugauccucggaau

SEQ ID NO: 625679 - RNA, 19 nt, Artificial Sequence
  Description of Artificial Sequence: Synthetic oligonucleotide
  Antisense strand to SEQ ID NO: 625678
auuccgaggaucaggagau

SEQ ID NO: 625680 - RNA, 19 nt, Artificial Sequence
  Description of Artificial Sequence: Synthetic oligonucleotide
  Sense strand starting at position 2047 of SEQ ID NO: 585258
ucuccugauccucggaauu

SEQ ID NO: 625681 - RNA, 19 nt, Artificial Sequence
  Description of Artificial Sequence: Synthetic oligonucleotide
  Antisense strand to SEQ ID NO: 625680
aauuccgaggaucaggaga

SEQ ID NO: 625682 - RNA, 19 nt, Artificial Sequence
  Description of Artificial Sequence: Synthetic oligonucleotide
  Sense strand starting at position 2069 of SEQ ID NO: 585258
agacaauguuauguaaaug

SEQ ID NO: 625683 - RNA, 19 nt, Artificial Sequence
  Description of Artificial Sequence: Synthetic oligonucleotide
  Antisense strand to SEQ ID NO: 625682
cauuuacauaacauugucu

SEQ ID NO: 625684 - RNA, 19 nt, Artificial Sequence
  Description of Artificial Sequence: Synthetic oligonucleotide
  Sense strand starting at position 2171 of SEQ ID NO: 585258
uggucauauccugagagca

SEQ ID NO: 625685 - RNA, 19 nt, Artificial Sequence
  Description of Artificial Sequence: Synthetic oligonucleotide
  Antisense strand to SEQ ID NO: 625684
ugcucucaggauaugacca

SEQ ID NO: 625686 - RNA, 19 nt, Artificial Sequence
  Description of Artificial Sequence: Synthetic oligonucleotide
  Sense strand starting at position 2303 of SEQ ID NO: 585258
uuuauaugccagggagaca

SEQ ID NO: 625687 - RNA, 19 nt, Artificial Sequence
  Description of Artificial Sequence: Synthetic oligonucleotide
  Antisense strand to SEQ ID NO: 625686
ugucucccuggcauauaaa

SEQ ID NO: 625688 - RNA, 19 nt, Artificial Sequence
  Description of Artificial Sequence: Synthetic oligonucleotide
  Sense strand starting at position 2330 of SEQ ID NO: 585258
ggcgcaguuacgucuucga

SEQ ID NO: 625689 - RNA, 19 nt, Artificial Sequence
  Description of Artificial Sequence: Synthetic oligonucleotide
  Antisense strand to SEQ ID NO: 625688
ucgaagacguaacugcgcc

SEQ ID NO: 625690 - RNA, 19 nt, Artificial Sequence
  Description of Artificial Sequence: Synthetic oligonucleotide
  Sense strand starting at position 2332 of SEQ ID NO: 585258
cgcaguuacgucuucgaau

SEQ ID NO: 625691 - RNA, 19 nt, Artificial Sequence
  Description of Artificial Sequence: Synthetic oligonucleotide
  Antisense strand to SEQ ID NO: 625690
auucgaagacguaacugcg

SEQ ID NO: 625692 - RNA, 19 nt, Artificial Sequence
  Description of Artificial Sequence: Synthetic oligonucleotide
  Sense strand starting at position 2348 of SEQ ID NO: 585258
aauugaaaggucgguuuaa

SEQ ID NO: 625693 - RNA, 19 nt, Artificial Sequence
  Description of Artificial Sequence: Synthetic oligonucleotide
  Antisense strand to SEQ ID NO: 625692
uuaaaccgaccuuucaauu

SEQ ID NO: 625694 - RNA, 19 nt, Artificial Sequence
  Description of Artificial Sequence: Synthetic oligonucleotide
  Sense strand starting at position 2349 of SEQ ID NO: 585258
auugaaaggucgguuuaaa

SEQ ID NO: 625695 - RNA, 19 nt, Artificial Sequence
  Description of Artificial Sequence: Synthetic oligonucleotide
  Antisense strand to SEQ ID NO: 625694
uuuaaaccgaccuuucaau

SEQ ID NO: 625696 - RNA, 19 nt, Artificial Sequence
  Description of Artificial Sequence: Synthetic oligonucleotide
  Sense strand starting at position 2475 of SEQ ID NO: 585258
agaacaguguuucccacuu

SEQ ID NO: 625697 - RNA, 19 nt, Artificial Sequence
  Description of Artificial Sequence: Synthetic oligonucleotide
  Antisense strand to SEQ ID NO: 625696
aagugggaaacacuguucu

SEQ ID NO: 625698 - RNA, 19 nt, Artificial Sequence
  Description of Artificial Sequence: Synthetic oligonucleotide
  Sense strand starting at position 2504 of SEQ ID NO: 585258
gcacaaacacaucgugaaa

SEQ ID NO: 625699 - RNA, 19 nt, Artificial Sequence
  Description of Artificial Sequence: Synthetic oligonucleotide
  Antisense strand to SEQ ID NO: 625698
uuucacgauguguuugugc

SEQ ID NO: 625700 - RNA, 19 nt, Artificial Sequence
  Description of Artificial Sequence: Synthetic oligonucleotide
  Sense strand starting at position 2534 of SEQ ID NO: 585258
gcaauaaagcuccggagaa

SEQ ID NO: 625701 - RNA, 19 nt, Artificial Sequence
  Description of Artificial Sequence: Synthetic oligonucleotide
  Antisense strand to SEQ ID NO: 625700
uucuccggagcuuuauugc

SEQ ID NO: 625702 - RNA, 19 nt, Artificial Sequence
  Description of Artificial Sequence: Synthetic oligonucleotide
  Sense strand starting at position 2623 of SEQ ID NO: 585258
ggcuacaguccuuaaugga

SEQ ID NO: 625703 - RNA, 19 nt, Artificial Sequence
  Description of Artificial Sequence: Synthetic oligonucleotide
  Antisense strand to SEQ ID NO: 625702
uccauuaaggacuguagcc

SEQ ID NO: 625704 - RNA, 19 nt, Artificial Sequence
  Description of Artificial Sequence: Synthetic oligonucleotide
  Sense strand starting at position 2773 of SEQ ID NO: 585258
uuauuaucuuuggcugaag

SEQ ID NO: 625705 - RNA, 19 nt, Artificial Sequence
  Description of Artificial Sequence: Synthetic oligonucleotide
  Antisense strand to SEQ ID NO: 625704
cuucagccaaagauaauaa

SEQ ID NO: 625706 - RNA, 19 nt, Artificial Sequence
  Description of Artificial Sequence: Synthetic oligonucleotide
  Sense strand starting at position 2928 of SEQ ID NO: 585258
ggcccuaagucuccaggaa

SEQ ID NO: 625707 - RNA, 19 nt, Artificial Sequence
  Description of Artificial Sequence: Synthetic oligonucleotide
  Antisense strand to SEQ ID NO: 625706
uuccuggagacuuagggcc

SEQ ID NO: 625708 - RNA, 19 nt, Artificial Sequence
  Description of Artificial Sequence: Synthetic oligonucleotide
  Sense strand starting at position 2929 of SEQ ID NO: 585258
gcccuaagucuccaggaau

SEQ ID NO: 625709 - RNA, 19 nt, Artificial Sequence
  Description of Artificial Sequence: Synthetic oligonucleotide
  Antisense strand to SEQ ID NO: 625708
auuccuggagacuuagggc

SEQ ID NO: 625710 - RNA, 19 nt, Artificial Sequence
  Description of Artificial Sequence: Synthetic oligonucleotide
  Sense strand starting at position 3133 of SEQ ID NO: 585258
ucagaauaauagcuaaugu

SEQ ID NO: 625711 - RNA, 19 nt, Artificial Sequence
  Description of Artificial Sequence: Synthetic oligonucleotide
  Antisense strand to SEQ ID NO: 625710
acauuagcuauuauucuga

SEQ ID NO: 625712 - RNA, 19 nt, Artificial Sequence
  Description of Artificial Sequence: Synthetic oligonucleotide
  Sense strand starting at position 3144 of SEQ ID NO: 585258
gcuaaugugcuuuauuugu

SEQ ID NO: 625713 - RNA, 19 nt, Artificial Sequence
  Description of Artificial Sequence: Synthetic oligonucleotide
  Antisense strand to SEQ ID NO: 625712
acaaauaaagcacauuagc

SEQ ID NO: 625714 - RNA, 19 nt, Artificial Sequence
  Description of Artificial Sequence: Synthetic oligonucleotide
  Sense strand starting at position 7 of SEQ ID NO: 585259
uauaauuuguucugggaag

SEQ ID NO: 625715 - RNA, 19 nt, Artificial Sequence
  Description of Artificial Sequence: Synthetic oligonucleotide
  Antisense strand to SEQ ID NO: 625714
cuucccagaacaaauuaua

SEQ ID NO: 625716 - RNA, 19 nt, Artificial Sequence
  Description of Artificial Sequence: Synthetic oligonucleotide
  Sense strand starting at position 89 of SEQ ID NO: 585259
ugauguagaccuuaguuua

SEQ ID NO: 625717 - RNA, 19 nt, Artificial Sequence
  Description of Artificial Sequence: Synthetic oligonucleotide
  Antisense strand to SEQ ID NO: 625716
uaaacuaaggucuacauca

SEQ ID NO: 625718 - RNA, 19 nt, Artificial Sequence
  Description of Artificial Sequence: Synthetic oligonucleotide
  Sense strand starting at position 92 of SEQ ID NO: 585259
uguagaccuuaguuuagau

SEQ ID NO: 625719 - RNA, 19 nt, Artificial Sequence
  Description of Artificial Sequence: Synthetic oligonucleotide
  Antisense strand to SEQ ID NO: 625718
aucuaaacuaaggucuaca

SEQ ID NO: 625720 - RNA, 19 nt, Artificial Sequence
  Description of Artificial Sequence: Synthetic oligonucleotide
  Sense strand starting at position 145 of SEQ ID NO: 585259
cugcuaugccaauguaaau

SEQ ID NO: 625721 - RNA, 19 nt, Artificial Sequence
  Description of Artificial Sequence: Synthetic oligonucleotide
  Antisense strand to SEQ ID NO: 625720
auuuacauuggcauagcag

SEQ ID NO: 625722 - RNA, 19 nt, Artificial Sequence
  Description of Artificial Sequence: Synthetic oligonucleotide
  Sense strand starting at position 280 of SEQ ID NO: 585259
uguguucuguguccauuua

SEQ ID NO: 625723 - RNA, 19 nt, Artificial Sequence
  Description of Artificial Sequence: Synthetic oligonucleotide
  Antisense strand to SEQ ID NO: 625722
uaaauggacacagaacaca

SEQ ID NO: 625724 - RNA, 19 nt, Artificial Sequence
  Description of Artificial Sequence: Synthetic oligonucleotide
  Sense strand starting at position 281 of SEQ ID NO: 585259
guguucuguguccauuuau

SEQ ID NO: 625725 - RNA, 19 nt, Artificial Sequence
  Description of Artificial Sequence: Synthetic oligonucleotide
  Antisense strand to SEQ ID NO: 625724
auaaauggacacagaacac

SEQ ID NO: 625726 - RNA, 19 nt, Artificial Sequence
  Description of Artificial Sequence: Synthetic oligonucleotide
  Sense strand starting at position 582 of SEQ ID NO: 585259
ugcacucuacucugagcaa

SEQ ID NO: 625727 - RNA, 19 nt, Artificial Sequence
  Description of Artificial Sequence: Synthetic oligonucleotide
  Antisense strand to SEQ ID NO: 625726
uugcucagaguagagugca

SEQ ID NO: 625728 - RNA, 19 nt, Artificial Sequence
  Description of Artificial Sequence: Synthetic oligonucleotide
  Sense strand starting at position 662 of SEQ ID NO: 585259
uuucuuaacuggguugaaa

SEQ ID NO: 625729 - RNA, 19 nt, Artificial Sequence
  Description of Artificial Sequence: Synthetic oligonucleotide
  Antisense strand to SEQ ID NO: 625728
uuucaacccaguuaagaaa

SEQ ID NO: 625730 - RNA, 19 nt, Artificial Sequence
  Description of Artificial Sequence: Synthetic oligonucleotide
  Sense strand starting at position 664 of SEQ ID NO: 585259
ucuuaacuggguugaaauu

SEQ ID NO: 625731 - RNA, 19 nt, Artificial Sequence
  Description of Artificial Sequence: Synthetic oligonucleotide
  Antisense strand to SEQ ID NO: 625730
aauuucaacccaguuaaga

SEQ ID NO: 625732 - RNA, 19 nt, Artificial Sequence
  Description of Artificial Sequence: Synthetic oligonucleotide
  Sense strand starting at position 790 of SEQ ID NO: 585259
uuaaguaaggcuuguaauu

SEQ ID NO: 625733 - RNA, 19 nt, Artificial Sequence
  Description of Artificial Sequence: Synthetic oligonucleotide
  Antisense strand to SEQ ID NO: 625732
aauuacaagccuuacuuaa

SEQ ID NO: 625734 - RNA, 19 nt, Artificial Sequence
  Description of Artificial Sequence: Synthetic oligonucleotide
  Sense strand starting at position 872 of SEQ ID NO: 585259
uuguaaguagaaugacaua

SEQ ID NO: 625735 - RNA, 19 nt, Artificial Sequence
  Description of Artificial Sequence: Synthetic oligonucleotide
  Antisense strand to SEQ ID NO: 625734
uaugucauucuacuuacaa

SEQ ID NO: 625736 - RNA, 19 nt, Artificial Sequence
  Description of Artificial Sequence: Synthetic oligonucleotide
  Sense strand starting at position 1025 of SEQ ID NO: 585259
gugucucauuacucccaaa

SEQ ID NO: 625737 - RNA, 19 nt, Artificial Sequence
  Description of Artificial Sequence: Synthetic oligonucleotide
  Antisense strand to SEQ ID NO: 625736
uuugggaguaaugagacac

SEQ ID NO: 625738 - RNA, 19 nt, Artificial Sequence
  Description of Artificial Sequence: Synthetic oligonucleotide
  Sense strand starting at position 1085 of SEQ ID NO: 585259
gaacaauguugauuauuag

SEQ ID NO: 625739 - RNA, 19 nt, Artificial Sequence
  Description of Artificial Sequence: Synthetic oligonucleotide
  Antisense strand to SEQ ID NO: 625738
cuaauaaucaacauuguuc

SEQ ID NO: 625740 - RNA, 19 nt, Artificial Sequence
  Description of Artificial Sequence: Synthetic oligonucleotide
  Sense strand starting at position 1206 of SEQ ID NO: 585259
agcuaaauucgccaaugcu

SEQ ID NO: 625741 - RNA, 19 nt, Artificial Sequence
  Description of Artificial Sequence: Synthetic oligonucleotide
  Antisense strand to SEQ ID NO: 625740
agcauuggcgaauuuagcu

SEQ ID NO: 625742 - RNA, 19 nt, Artificial Sequence
  Description of Artificial Sequence: Synthetic oligonucleotide
  Sense strand starting at position 1218 of SEQ ID NO: 585259
caaugcugcgaugacuaaa

SEQ ID NO: 625743 - RNA, 19 nt, Artificial Sequence
  Description of Artificial Sequence: Synthetic oligonucleotide
  Antisense strand to SEQ ID NO: 625742
uuuagucaucgcagcauug

SEQ ID NO: 625744 - RNA, 19 nt, Artificial Sequence
  Description of Artificial Sequence: Synthetic oligonucleotide
  Sense strand starting at position 1226 of SEQ ID NO: 585259
cgaugacuaaaccggaauu

SEQ ID NO: 625745 - RNA, 19 nt, Artificial Sequence
  Description of Artificial Sequence: Synthetic oligonucleotide
  Antisense strand to SEQ ID NO: 625744
aauuccgguuuagucaucg

SEQ ID NO: 625746 - RNA, 19 nt, Artificial Sequence
  Description of Artificial Sequence: Synthetic oligonucleotide
  Sense strand starting at position 1247 of SEQ ID NO: 585259
ggaagacauuccuuucccu

SEQ ID NO: 625747 - RNA, 19 nt, Artificial Sequence
  Description of Artificial Sequence: Synthetic oligonucleotide
  Antisense strand to SEQ ID NO: 625746
agggaaaggaaugucuucc

SEQ ID NO: 625748 - RNA, 19 nt, Artificial Sequence
  Description of Artificial Sequence: Synthetic oligonucleotide
  Sense strand starting at position 1267 of SEQ ID NO: 585259
acacuaugucaguagcaaa

SEQ ID NO: 625749 - RNA, 19 nt, Artificial Sequence
  Description of Artificial Sequence: Synthetic oligonucleotide
  Antisense strand to SEQ ID NO: 625748
uuugcuacugacauagugu

SEQ ID NO: 625750 - RNA, 19 nt, Artificial Sequence
  Description of Artificial Sequence: Synthetic oligonucleotide
  Sense strand starting at position 1359 of SEQ ID NO: 585259
augugcuuaucagcacaau

SEQ ID NO: 625751 - RNA, 19 nt, Artificial Sequence
  Description of Artificial Sequence: Synthetic oligonucleotide
  Antisense strand to SEQ ID NO: 625750
auugugcugauaagcacau

SEQ ID NO: 625752 - RNA, 19 nt, Artificial Sequence
  Description of Artificial Sequence: Synthetic oligonucleotide
  Sense strand starting at position 1360 of SEQ ID NO: 585259
ugugcuuaucagcacaaug

SEQ ID NO: 625753 - RNA, 19 nt, Artificial Sequence
  Description of Artificial Sequence: Synthetic oligonucleotide
  Antisense strand to SEQ ID NO: 625752
cauugugcugauaagcaca

SEQ ID NO: 625754 - RNA, 19 nt, Artificial Sequence
  Description of Artificial Sequence: Synthetic oligonucleotide
  Sense strand starting at position 1414 of SEQ ID NO: 585259
acaugcuacgguuaaguau

SEQ ID NO: 625755 - RNA, 19 nt, Artificial Sequence
  Description of Artificial Sequence: Synthetic oligonucleotide
  Antisense strand to SEQ ID NO: 625754
auacuuaaccguagcaugu

SEQ ID NO: 625756 - RNA, 19 nt, Artificial Sequence
  Description of Artificial Sequence: Synthetic oligonucleotide
  Sense strand starting at position 1420 of SEQ ID NO: 585259
uacgguuaaguauagcauu

SEQ ID NO: 625757 - RNA, 19 nt, Artificial Sequence
  Description of Artificial Sequence: Synthetic oligonucleotide
  Antisense strand to SEQ ID NO: 625756
aaugcuauacuuaaccgua

SEQ ID NO: 625758 - RNA, 19 nt, Artificial Sequence
  Description of Artificial Sequence: Synthetic oligonucleotide
  Sense strand starting at position 1455 of SEQ ID NO: 585259
aaagaacuguggucuagac

SEQ ID NO: 625759 - RNA, 19 nt, Artificial Sequence
  Description of Artificial Sequence: Synthetic oligonucleotide
  Antisense strand to SEQ ID NO: 625758
gucuagaccacaguucuuu

SEQ ID NO: 625760 - RNA, 19 nt, Artificial Sequence
  Description of Artificial Sequence: Synthetic oligonucleotide
  Sense strand starting at position 2050 of SEQ ID NO: 585259
cacucugcagcugguaaua

SEQ ID NO: 625761 - RNA, 19 nt, Artificial Sequence
  Description of Artificial Sequence: Synthetic oligonucleotide
  Antisense strand to SEQ ID NO: 625760
uauuaccagcugcagagug

SEQ ID NO: 625762 - RNA, 19 nt, Artificial Sequence
  Description of Artificial Sequence: Synthetic oligonucleotide
  Sense strand starting at position 2083 of SEQ ID NO: 585259
aucguaaacuggcauuuaa

SEQ ID NO: 625763 - RNA, 19 nt, Artificial Sequence
  Description of Artificial Sequence: Synthetic oligonucleotide
  Antisense strand to SEQ ID NO: 625762
uuaaaugccaguuuacgau

SEQ ID NO: 625764 - RNA, 19 nt, Artificial Sequence
  Description of Artificial Sequence: Synthetic oligonucleotide
  Sense strand starting at position 2108 of SEQ ID NO: 585259
acacauugauuggaugaau

SEQ ID NO: 625765 - RNA, 19 nt, Artificial Sequence
  Description of Artificial Sequence: Synthetic oligonucleotide
  Antisense strand to SEQ ID NO: 625764
auucauccaaucaaugugu

SEQ ID NO: 625766 - RNA, 19 nt, Artificial Sequence
  Description of Artificial Sequence: Synthetic oligonucleotide
  Sense strand starting at position 2120 of SEQ ID NO: 585259
gaugaauugucucugugug

SEQ ID NO: 625767 - RNA, 19 nt, Artificial Sequence
  Description of Artificial Sequence: Synthetic oligonucleotide
  Antisense strand to SEQ ID NO: 625766
cacacagagacaauucauc

SEQ ID NO: 625768 - RNA, 19 nt, Artificial Sequence
  Description of Artificial Sequence: Synthetic oligonucleotide
  Sense strand starting at position 2149 of SEQ ID NO: 585259
ugcaaauuaggugauucua

SEQ ID NO: 625769 - RNA, 19 nt, Artificial Sequence
  Description of Artificial Sequence: Synthetic oligonucleotide
  Antisense strand to SEQ ID NO: 625768
uagaaucaccuaauuugca

SEQ ID NO: 625770 - RNA, 19 nt, Artificial Sequence
  Description of Artificial Sequence: Synthetic oligonucleotide
  Sense strand starting at position 2159 of SEQ ID NO: 585259
gugauucuagcguuucuuu

SEQ ID NO: 625771 - RNA, 19 nt, Artificial Sequence
  Description of Artificial Sequence: Synthetic oligonucleotide
  Antisense strand to SEQ ID NO: 625770
aaagaaacgcuagaaucac

SEQ ID NO: 625772 - RNA, 19 nt, Artificial Sequence
  Description of Artificial Sequence: Synthetic oligonucleotide
  Sense strand starting at position 2235 of SEQ ID NO: 585259
guauaauaguuucucacuu

SEQ ID NO: 625773 - RNA, 19 nt, Artificial Sequence
  Description of Artificial Sequence: Synthetic oligonucleotide
  Antisense strand to SEQ ID NO: 625772
aagugagaaacuauuauac

SEQ ID NO: 625774 - RNA, 19 nt, Artificial Sequence
  Description of Artificial Sequence: Synthetic oligonucleotide
  Sense strand starting at position 2598 of SEQ ID NO: 585259
aaacaaguugcuggguaaa

SEQ ID NO: 625775 - RNA, 19 nt, Artificial Sequence
  Description of Artificial Sequence: Synthetic oligonucleotide
  Antisense strand to SEQ ID NO: 625774
uuuacccagcaacuuguuu

SEQ ID NO: 625776 - RNA, 19 nt, Artificial Sequence
  Description of Artificial Sequence: Synthetic oligonucleotide
  Sense strand starting at position 2632 of SEQ ID NO: 585259
ggcgguguucugcccaaca

SEQ ID NO: 625777 - RNA, 19 nt, Artificial Sequence
  Description of Artificial Sequence: Synthetic oligonucleotide
  Antisense strand to SEQ ID NO: 625776
uguugggcagaacaccgcc

SEQ ID NO: 625778 - RNA, 19 nt, Artificial Sequence
  Description of Artificial Sequence: Synthetic oligonucleotide
  Sense strand starting at position 2845 of SEQ ID NO: 585259
ccauuuauaaguggguguu

SEQ ID NO: 625779 - RNA, 19 nt, Artificial Sequence
  Description of Artificial Sequence: Synthetic oligonucleotide
  Antisense strand to SEQ ID NO: 625778
aacacccacuuauaaaugg

SEQ ID NO: 625780 - RNA, 19 nt, Artificial Sequence
  Description of Artificial Sequence: Synthetic oligonucleotide
  Sense strand starting at position 2848 of SEQ ID NO: 585259
uuuauaaguggguguucuu

SEQ ID NO: 625781 - RNA, 19 nt, Artificial Sequence
  Description of Artificial Sequence: Synthetic oligonucleotide
  Antisense strand to SEQ ID NO: 625780
aagaacacccacuuauaaa

SEQ ID NO: 625782 - RNA, 19 nt, Artificial Sequence
  Description of Artificial Sequence: Synthetic oligonucleotide
  Sense strand starting at position 2851 of SEQ ID NO: 585259
auaaguggguguucuuaac

SEQ ID NO: 625783 - RNA, 19 nt, Artificial Sequence
  Description of Artificial Sequence: Synthetic oligonucleotide
  Antisense strand to SEQ ID NO: 625782
guuaagaacacccacuuau

SEQ ID NO: 625784 - RNA, 19 nt, Artificial Sequence
  Description of Artificial Sequence: Synthetic oligonucleotide
  Sense strand starting at position 2877 of SEQ ID NO: 585259
cgugaaacuaaccguccau

SEQ ID NO: 625785 - RNA, 19 nt, Artificial Sequence
  Description of Artificial Sequence: Synthetic oligonucleotide
  Antisense strand to SEQ ID NO: 625784
auggacgguuaguuucacg

SEQ ID NO: 625786 - RNA, 19 nt, Artificial Sequence
  Description of Artificial Sequence: Synthetic oligonucleotide
  Sense strand starting at position 3343 of SEQ ID NO: 585259
gaaguuaauguuugucagu

SEQ ID NO: 625787 - RNA, 19 nt, Artificial Sequence
  Description of Artificial Sequence: Synthetic oligonucleotide
  Antisense strand to SEQ ID NO: 625786
acugacaaacauuaacuuc

SEQ ID NO: 625788 - RNA, 19 nt, Artificial Sequence
  Description of Artificial Sequence: Synthetic oligonucleotide
  Sense strand starting at position 3381 of SEQ ID NO: 585259
uauaguuagugacuuaaag

SEQ ID NO: 625789 - RNA, 19 nt, Artificial Sequence
  Description of Artificial Sequence: Synthetic oligonucleotide
  Antisense strand to SEQ ID NO: 625788
cuuuaagucacuaacuaua

SEQ ID NO: 625790 - RNA, 19 nt, Artificial Sequence
  Description of Artificial Sequence: Synthetic oligonucleotide
  Sense strand starting at position 3751 of SEQ ID NO: 585259
ggugaaauuaaauguguuc

SEQ ID NO: 625791 - RNA, 19 nt, Artificial Sequence
  Description of Artificial Sequence: Synthetic oligonucleotide
  Antisense strand to SEQ ID NO: 625790
gaacacauuuaauuucacc

SEQ ID NO: 625792 - RNA, 19 nt, Artificial Sequence
  Description of Artificial Sequence: Synthetic oligonucleotide
  Sense strand starting at position 3804 of SEQ ID NO: 585259
augaguuaauagucauggu

SEQ ID NO: 625793 - RNA, 19 nt, Artificial Sequence
  Description of Artificial Sequence: Synthetic oligonucleotide
  Antisense strand to SEQ ID NO: 625792
accaugacuauuaacucau

SEQ ID NO: 625794 - RNA, 19 nt, Artificial Sequence
  Description of Artificial Sequence: Synthetic oligonucleotide
  Sense strand starting at position 4 of SEQ ID NO: 585260
gcuucagaggaaggucaua

SEQ ID NO: 625795 - RNA, 19 nt, Artificial Sequence
  Description of Artificial Sequence: Synthetic oligonucleotide
  Antisense strand to SEQ ID NO: 625794
uaugaccuuccucugaagc

SEQ ID NO: 625796 - RNA, 19 nt, Artificial Sequence
  Description of Artificial Sequence: Synthetic oligonucleotide
  Sense strand starting at position 15 of SEQ ID NO: 585260
aggucauacgaacauucuu

SEQ ID NO: 625797 - RNA, 19 nt, Artificial Sequence
  Description of Artificial Sequence: Synthetic oligonucleotide
  Antisense strand to SEQ ID NO: 625796
aagaauguucguaugaccu

SEQ ID NO: 625798 - RNA, 19 nt, Artificial Sequence
  Description of Artificial Sequence: Synthetic oligonucleotide
  Sense strand starting at position 20 of SEQ ID NO: 585260
auacgaacauucuugucua

SEQ ID NO: 625799 - RNA, 19 nt, Artificial Sequence
  Description of Artificial Sequence: Synthetic oligonucleotide
  Antisense strand to SEQ ID NO: 625798
uagacaagaauguucguau

SEQ ID NO: 625800 - RNA, 19 nt, Artificial Sequence
  Description of Artificial Sequence: Synthetic oligonucleotide
  Sense strand starting at position 93 of SEQ ID NO: 585260
aguacuauguugucagaaa

SEQ ID NO: 625801 - RNA, 19 nt, Artificial Sequence
  Description of Artificial Sequence: Synthetic oligonucleotide
  Antisense strand to SEQ ID NO: 625800
uuucugacaacauaguacu

SEQ ID NO: 625802 - RNA, 19 nt, Artificial Sequence
  Description of Artificial Sequence: Synthetic oligonucleotide
  Sense strand starting at position 102 of SEQ ID NO: 585260
uugucagaaaccugagguu

SEQ ID NO: 625803 - RNA, 19 nt, Artificial Sequence
  Description of Artificial Sequence: Synthetic oligonucleotide
  Antisense strand to SEQ ID NO: 625802
aaccucagguuucugacaa

SEQ ID NO: 625804 - RNA, 19 nt, Artificial Sequence
  Description of Artificial Sequence: Synthetic oligonucleotide
  Sense strand starting at position 124 of SEQ ID NO: 585260
cauggaguacuauggagua

SEQ ID NO: 625805 - RNA, 19 nt, Artificial Sequence
  Description of Artificial Sequence: Synthetic oligonucleotide
  Antisense strand to SEQ ID NO: 625804
uacuccauaguacuccaug

SEQ ID NO: 625806 - RNA, 19 nt, Artificial Sequence
  Description of Artificial Sequence: Synthetic oligonucleotide
  Sense strand starting at position 202 of SEQ ID NO: 585260
ugguuucuauguuugagac

SEQ ID NO: 625807 - RNA, 19 nt, Artificial Sequence
  Description of Artificial Sequence: Synthetic oligonucleotide
  Antisense strand to SEQ ID NO: 625806
gucucaaacauagaaacca

SEQ ID NO: 625808 - RNA, 19 nt, Artificial Sequence
  Description of Artificial Sequence: Synthetic oligonucleotide
  Sense strand starting at position 208 of SEQ ID NO: 585260
cuauguuugagacggaguu

SEQ ID NO: 625809 - RNA, 19 nt, Artificial Sequence
  Description of Artificial Sequence: Synthetic oligonucleotide
  Antisense strand to SEQ ID NO: 625808
aacuccgucucaaacauag

SEQ ID NO: 625810 - RNA, 19 nt, Artificial Sequence
  Description of Artificial Sequence: Synthetic oligonucleotide
  Sense strand starting at position 249 of SEQ ID NO: 585260
aaugaaauggcgggaucuu

SEQ ID NO: 625811 - RNA, 19 nt, Artificial Sequence
  Description of Artificial Sequence: Synthetic oligonucleotide
  Antisense strand to SEQ ID NO: 625810
aagaucccgccauuucauu

SEQ ID NO: 625812 - RNA, 19 nt, Artificial Sequence
  Description of Artificial Sequence: Synthetic oligonucleotide
  Sense strand starting at position 898 of SEQ ID NO: 585260
ccacaagagugcucagaaa

SEQ ID NO: 625813 - RNA, 19 nt, Artificial Sequence
  Description of Artificial Sequence: Synthetic oligonucleotide
  Antisense strand to SEQ ID NO: 625812
uuucugagcacucuugugg

SEQ ID NO: 625814 - RNA, 19 nt, Artificial Sequence
  Description of Artificial Sequence: Synthetic oligonucleotide
  Sense strand starting at position 925 of SEQ ID NO: 585260
uuguuaucaggugaucuuu

SEQ ID NO: 625815 - RNA, 19 nt, Artificial Sequence
  Description of Artificial Sequence: Synthetic oligonucleotide
  Antisense strand to SEQ ID NO: 625814
aaagaucaccugauaacaa

SEQ ID NO: 625816 - RNA, 19 nt, Artificial Sequence
  Description of Artificial Sequence: Synthetic oligonucleotide
  Sense strand starting at position 990 of SEQ ID NO: 585260
cuggaauugcacuagcgua

SEQ ID NO: 625817 - RNA, 19 nt, Artificial Sequence
  Description of Artificial Sequence: Synthetic oligonucleotide
  Antisense strand to SEQ ID NO: 625816
uacgcuagugcaauuccag

SEQ ID NO: 625818 - RNA, 19 nt, Artificial Sequence
  Description of Artificial Sequence: Synthetic oligonucleotide
  Sense strand starting at position 1024 of SEQ ID NO: 585260
agucucuagcccgagaguu

SEQ ID NO: 625819 - RNA, 19 nt, Artificial Sequence
  Description of Artificial Sequence: Synthetic oligonucleotide
  Antisense strand to SEQ ID NO: 625818
aacucucgggcuagagacu

SEQ ID NO: 625820 - RNA, 19 nt, Artificial Sequence
  Description of Artificial Sequence: Synthetic oligonucleotide
  Sense strand starting at position 1026 of SEQ ID NO: 585260
ucucuagcccgagaguuua

SEQ ID NO: 625821 - RNA, 19 nt, Artificial Sequence
  Description of Artificial Sequence: Synthetic oligonucleotide
  Antisense strand to SEQ ID NO: 625820
uaaacucucgggcuagaga

SEQ ID NO: 625822 - RNA, 19 nt, Artificial Sequence
  Description of Artificial Sequence: Synthetic oligonucleotide
  Sense strand starting at position 1061 of SEQ ID NO: 585260
cagccuaccgaguaaauga

SEQ ID NO: 625823 - RNA, 19 nt, Artificial Sequence
  Description of Artificial Sequence: Synthetic oligonucleotide
  Antisense strand to SEQ ID NO: 625822
ucauuuacucgguaggcug

SEQ ID NO: 625824 - RNA, 19 nt, Artificial Sequence
  Description of Artificial Sequence: Synthetic oligonucleotide
  Sense strand starting at position 1146 of SEQ ID NO: 585260
ccaggcaaaucuguuaacu

SEQ ID NO: 625825 - RNA, 19 nt, Artificial Sequence
  Description of Artificial Sequence: Synthetic oligonucleotide
  Antisense strand to SEQ ID NO: 625824
aguuaacagauuugccugg

SEQ ID NO: 625826 - RNA, 19 nt, Artificial Sequence
  Description of Artificial Sequence: Synthetic oligonucleotide
  Sense strand starting at position 1156 of SEQ ID NO: 585260
cuguuaacuccugagcuga

SEQ ID NO: 625827 - RNA, 19 nt, Artificial Sequence
  Description of Artificial Sequence: Synthetic oligonucleotide
  Antisense strand to SEQ ID NO: 625826
ucagcucaggaguuaacag

SEQ ID NO: 625828 - RNA, 19 nt, Artificial Sequence
  Description of Artificial Sequence: Synthetic oligonucleotide
  Sense strand starting at position 1172 of SEQ ID NO: 585260
ugaagaaagccucaugcau

SEQ ID NO: 625829 - RNA, 19 nt, Artificial Sequence
  Description of Artificial Sequence: Synthetic oligonucleotide
  Antisense strand to SEQ ID NO: 625828
augcaugaggcuuucuuca

SEQ ID NO: 625830 - RNA, 19 nt, Artificial Sequence
  Description of Artificial Sequence: Synthetic oligonucleotide
  Sense strand starting at position 1235 of SEQ ID NO: 585260
acaggaguaucuccugauc

SEQ ID NO: 625831 - RNA, 19 nt, Artificial Sequence
  Description of Artificial Sequence: Synthetic oligonucleotide
  Antisense strand to SEQ ID NO: 625830
gaucaggagauacuccugu

SEQ ID NO: 625832 - RNA, 19 nt, Artificial Sequence
  Description of Artificial Sequence: Synthetic oligonucleotide
  Sense strand starting at position 1450 of SEQ ID NO: 585260
uagccaaacuggucucgau

SEQ ID NO: 625833 - RNA, 19 nt, Artificial Sequence
  Description of Artificial Sequence: Synthetic oligonucleotide
  Antisense strand to SEQ ID NO: 625832
aucgagaccaguuuggcua

SEQ ID NO: 625834 - RNA, 19 nt, Artificial Sequence
  Description of Artificial Sequence: Synthetic oligonucleotide
  Sense strand starting at position 1546 of SEQ ID NO: 585260
auuaaagcucuuuauguga

SEQ ID NO: 625835 - RNA, 19 nt, Artificial Sequence
  Description of Artificial Sequence: Synthetic oligonucleotide
  Antisense strand to SEQ ID NO: 625834
ucacauaaagagcuuuaau

SEQ ID NO: 625836 - RNA, 19 nt, Artificial Sequence
  Description of Artificial Sequence: Synthetic oligonucleotide
  Sense strand starting at position 1564 of SEQ ID NO: 585260
agacuugaguggcucugaa

SEQ ID NO: 625837 - RNA, 19 nt, Artificial Sequence
  Description of Artificial Sequence: Synthetic oligonucleotide
  Antisense strand to SEQ ID NO: 625836
uucagagccacucaagucu

SEQ ID NO: 625838 - RNA, 19 nt, Artificial Sequence
  Description of Artificial Sequence: Synthetic oligonucleotide
  Sense strand starting at position 1626 of SEQ ID NO: 585260
gagcuuguauacuugguga

SEQ ID NO: 625839 - RNA, 19 nt, Artificial Sequence
  Description of Artificial Sequence: Synthetic oligonucleotide
  Antisense strand to SEQ ID NO: 625838
ucaccaaguauacaagcuc

SEQ ID NO: 625840 - RNA, 19 nt, Artificial Sequence
  Description of Artificial Sequence: Synthetic oligonucleotide
  Sense strand starting at position 1712 of SEQ ID NO: 585260
cuggaucucccuggaggua

SEQ ID NO: 625841 - RNA, 19 nt, Artificial Sequence
  Description of Artificial Sequence: Synthetic oligonucleotide
  Antisense strand to SEQ ID NO: 625840
uaccuccagggagauccag

SEQ ID NO: 625842 - RNA, 19 nt, Artificial Sequence
  Description of Artificial Sequence: Synthetic oligonucleotide
  Sense strand starting at position 1781 of SEQ ID NO: 585260
gcguucgaagaugucguua

SEQ ID NO: 625843 - RNA, 19 nt, Artificial Sequence
  Description of Artificial Sequence: Synthetic oligonucleotide
  Antisense strand to SEQ ID NO: 625842
uaacgacaucuucgaacgc

SEQ ID NO: 625844 - RNA, 19 nt, Artificial Sequence
  Description of Artificial Sequence: Synthetic oligonucleotide
  Sense strand starting at position 1786 of SEQ ID NO: 585260
cgaagaugucguuaacgaa

SEQ ID NO: 625845 - RNA, 19 nt, Artificial Sequence
  Description of Artificial Sequence: Synthetic oligonucleotide
  Antisense strand to SEQ ID NO: 625844
uucguuaacgacaucuucg

SEQ ID NO: 625846 - RNA, 19 nt, Artificial Sequence
  Description of Artificial Sequence: Synthetic oligonucleotide
  Sense strand starting at position 1790 of SEQ ID NO: 585260
gaugucguuaacgaaggaa

SEQ ID NO: 625847 - RNA, 19 nt, Artificial Sequence
  Description of Artificial Sequence: Synthetic oligonucleotide
  Antisense strand to SEQ ID NO: 625846
uuccuucguuaacgacauc

SEQ ID NO: 625848 - RNA, 19 nt, Artificial Sequence
  Description of Artificial Sequence: Synthetic oligonucleotide
  Sense strand starting at position 2109 of SEQ ID NO: 585260
ccagcucugauugggcaau

SEQ ID NO: 625849 - RNA, 19 nt, Artificial Sequence
  Description of Artificial Sequence: Synthetic oligonucleotide
  Antisense strand to SEQ ID NO: 625848
auugcccaaucagagcugg

SEQ ID NO: 625850 - RNA, 19 nt, Artificial Sequence
  Description of Artificial Sequence: Synthetic oligonucleotide
  Sense strand starting at position 2115 of SEQ ID NO: 585260
cugauugggcaauguguua

SEQ ID NO: 625851 - RNA, 19 nt, Artificial Sequence
  Description of Artificial Sequence: Synthetic oligonucleotide
  Antisense strand to SEQ ID NO: 625850
uaacacauugcccaaucag

SEQ ID NO: 625852 - RNA, 19 nt, Artificial Sequence
  Description of Artificial Sequence: Synthetic oligonucleotide
  Sense strand starting at position 2184 of SEQ ID NO: 585260
uggcucgucaaagaacaau

SEQ ID NO: 625853 - RNA, 19 nt, Artificial Sequence
  Description of Artificial Sequence: Synthetic oligonucleotide
  Antisense strand to SEQ ID NO: 625852
auuguucuuugacgagcca

SEQ ID NO: 625854 - RNA, 19 nt, Artificial Sequence
  Description of Artificial Sequence: Synthetic oligonucleotide
  Sense strand starting at position 2255 of SEQ ID NO: 585260
uucuuauuccuccaucgag

SEQ ID NO: 625855 - RNA, 19 nt, Artificial Sequence
  Description of Artificial Sequence: Synthetic oligonucleotide
  Antisense strand to SEQ ID NO: 625854
cucgauggaggaauaagaa

SEQ ID NO: 625856 - RNA, 19 nt, Artificial Sequence
  Description of Artificial Sequence: Synthetic oligonucleotide
  Sense strand starting at position 2882 of SEQ ID NO: 585260
cuggucaguucuuuauuga

SEQ ID NO: 625857 - RNA, 19 nt, Artificial Sequence
  Description of Artificial Sequence: Synthetic oligonucleotide
  Antisense strand to SEQ ID NO: 625856
ucaauaaagaacugaccag

SEQ ID NO: 625858 - RNA, 19 nt, Artificial Sequence
  Description of Artificial Sequence: Synthetic oligonucleotide
  Sense strand starting at position 2885 of SEQ ID NO: 585260
gucaguucuuuauugaaau

SEQ ID NO: 625859 - RNA, 19 nt, Artificial Sequence
  Description of Artificial Sequence: Synthetic oligonucleotide
  Antisense strand to SEQ ID NO: 625858
auuucaauaaagaacugac

SEQ ID NO: 625860 - RNA, 19 nt, Artificial Sequence
  Description of Artificial Sequence: Synthetic oligonucleotide
  Sense strand starting at position 3035 of SEQ ID NO: 585260
guccaugcuguguauacaa

SEQ ID NO: 625861 - RNA, 19 nt, Artificial Sequence
  Description of Artificial Sequence: Synthetic oligonucleotide
  Antisense strand to SEQ ID NO: 625860
uuguauacacagcauggac

SEQ ID NO: 625862 - RNA, 19 nt, Artificial Sequence
  Description of Artificial Sequence: Synthetic oligonucleotide
  Sense strand starting at position 3037 of SEQ ID NO: 585260
ccaugcuguguauacaaau

SEQ ID NO: 625863 - RNA, 19 nt, Artificial Sequence
  Description of Artificial Sequence: Synthetic oligonucleotide
  Antisense strand to SEQ ID NO: 625862
auuuguauacacagcaugg

SEQ ID NO: 625864 - RNA, 19 nt, Artificial Sequence
  Description of Artificial Sequence: Synthetic oligonucleotide
  Sense strand starting at position 3266 of SEQ ID NO: 585260
gggucaggaguucgaaauc

SEQ ID NO: 625865 - RNA, 19 nt, Artificial Sequence
  Description of Artificial Sequence: Synthetic oligonucleotide
  Antisense strand to SEQ ID NO: 625864
gauuucgaacuccugaccc

SEQ ID NO: 625866 - RNA, 19 nt, Artificial Sequence
  Description of Artificial Sequence: Synthetic oligonucleotide
  Sense strand starting at position 3505 of SEQ ID NO: 585260
acuacauuccucuagugag

SEQ ID NO: 625867 - RNA, 19 nt, Artificial Sequence
  Description of Artificial Sequence: Synthetic oligonucleotide
  Antisense strand to SEQ ID NO: 625866
cucacuagaggaauguagu

SEQ ID NO: 625868 - RNA, 19 nt, Artificial Sequence
  Description of Artificial Sequence: Synthetic oligonucleotide
  Sense strand starting at position 3515 of SEQ ID NO: 585260
ucuagugagaauuguguuu

SEQ ID NO: 625869 - RNA, 19 nt, Artificial Sequence
  Description of Artificial Sequence: Synthetic oligonucleotide
  Antisense strand to SEQ ID NO: 625868
aaacacaauucucacuaga

SEQ ID NO: 625870 - RNA, 19 nt, Artificial Sequence
  Description of Artificial Sequence: Synthetic oligonucleotide
  Sense strand starting at position 3521 of SEQ ID NO: 585260
gagaauuguguuuguugga

SEQ ID NO: 625871 - RNA, 19 nt, Artificial Sequence
  Description of Artificial Sequence: Synthetic oligonucleotide
  Antisense strand to SEQ ID NO: 625870
uccaacaaacacaauucuc

SEQ ID NO: 625872 - RNA, 19 nt, Artificial Sequence
  Description of Artificial Sequence: Synthetic oligonucleotide
  Sense strand starting at position 3522 of SEQ ID NO: 585260
agaauuguguuuguuggau

SEQ ID NO: 625873 - RNA, 19 nt, Artificial Sequence
  Description of Artificial Sequence: Synthetic oligonucleotide
  Antisense strand to SEQ ID NO: 625872
auccaacaaacacaauucu

SEQ ID NO: 625874 - RNA, 19 nt, Artificial Sequence
  Description of Artificial Sequence: Synthetic oligonucleotide
  Sense strand starting at position 64 of SEQ ID NO: 585261
ccuuguaaaucacugauga

SEQ ID NO: 625875 - RNA, 19 nt, Artificial Sequence
  Description of Artificial Sequence: Synthetic oligonucleotide
  Antisense strand to SEQ ID NO: 625874
ucaucagugauuuacaagg

SEQ ID NO: 625876 - RNA, 19 nt, Artificial Sequence
  Description of Artificial Sequence: Synthetic oligonucleotide
  Sense strand starting at position 65 of SEQ ID NO: 585261
cuuguaaaucacugaugag

SEQ ID NO: 625877 - RNA, 19 nt, Artificial Sequence
  Description of Artificial Sequence: Synthetic oligonucleotide
  Antisense strand to SEQ ID NO: 625876
cucaucagugauuuacaag

SEQ ID NO: 625878 - RNA, 19 nt, Artificial Sequence
  Description of Artificial Sequence: Synthetic oligonucleotide
  Sense strand starting at position 229 of SEQ ID NO: 585261
aggcaagaaugucuacuuu

SEQ ID NO: 625879 - RNA, 19 nt, Artificial Sequence
  Description of Artificial Sequence: Synthetic oligonucleotide
  Antisense strand to SEQ ID NO: 625878
aaaguagacauucuugccu

SEQ ID NO: 625880 - RNA, 19 nt, Artificial Sequence
  Description of Artificial Sequence: Synthetic oligonucleotide
  Sense strand starting at position 490 of SEQ ID NO: 585261
cagggauaguuucuaucuu

SEQ ID NO: 625881 - RNA, 19 nt, Artificial Sequence
  Description of Artificial Sequence: Synthetic oligonucleotide
  Antisense strand to SEQ ID NO: 625880
aagauagaaacuaucccug

SEQ ID NO: 625882 - RNA, 19 nt, Artificial Sequence
  Description of Artificial Sequence: Synthetic oligonucleotide
  Sense strand starting at position 682 of SEQ ID NO: 585261
gagaaaugcccaugagggu

SEQ ID NO: 625883 - RNA, 19 nt, Artificial Sequence
  Description of Artificial Sequence: Synthetic oligonucleotide
  Antisense strand to SEQ ID NO: 625882
acccucaugggcauuucuc

SEQ ID NO: 625884 - RNA, 19 nt, Artificial Sequence
  Description of Artificial Sequence: Synthetic oligonucleotide
  Sense strand starting at position 775 of SEQ ID NO: 585261
gcaggaguuguauacauag

SEQ ID NO: 625885 - RNA, 19 nt, Artificial Sequence
  Description of Artificial Sequence: Synthetic oligonucleotide
  Antisense strand to SEQ ID NO: 625884
cuauguauacaacuccugc

SEQ ID NO: 625886 - RNA, 19 nt, Artificial Sequence
  Description of Artificial Sequence: Synthetic oligonucleotide
  Sense strand starting at position 777 of SEQ ID NO: 585261
aggaguuguauacauaguu

SEQ ID NO: 625887 - RNA, 19 nt, Artificial Sequence
  Description of Artificial Sequence: Synthetic oligonucleotide
  Antisense strand to SEQ ID NO: 625886
aacuauguauacaacuccu

SEQ ID NO: 625888 - RNA, 19 nt, Artificial Sequence
  Description of Artificial Sequence: Synthetic oligonucleotide
  Sense strand starting at position 797 of SEQ ID NO: 585261
uggugauuccuguuagcgu

SEQ ID NO: 625889 - RNA, 19 nt, Artificial Sequence
  Description of Artificial Sequence: Synthetic oligonucleotide
  Antisense strand to SEQ ID NO: 625888
acgcuaacaggaaucacca

SEQ ID NO: 625890 - RNA, 19 nt, Artificial Sequence
  Description of Artificial Sequence: Synthetic oligonucleotide
  Sense strand starting at position 818 of SEQ ID NO: 585261
ucaaguuaagacugccuga

SEQ ID NO: 625891 - RNA, 19 nt, Artificial Sequence
  Description of Artificial Sequence: Synthetic oligonucleotide
  Antisense strand to SEQ ID NO: 625890
ucaggcagucuuaacuuga

SEQ ID NO: 625892 - RNA, 19 nt, Artificial Sequence
  Description of Artificial Sequence: Synthetic oligonucleotide
  Sense strand starting at position 962 of SEQ ID NO: 585261
gcuagaagcccucauacua

SEQ ID NO: 625893 - RNA, 19 nt, Artificial Sequence
  Description of Artificial Sequence: Synthetic oligonucleotide
  Antisense strand to SEQ ID NO: 625892
uaguaugagggcuucuagc

SEQ ID NO: 625894 - RNA, 19 nt, Artificial Sequence
  Description of Artificial Sequence: Synthetic oligonucleotide
  Sense strand starting at position 1143 of SEQ ID NO: 585261
acauuaugcuaucuagagu

SEQ ID NO: 625895 - RNA, 19 nt, Artificial Sequence
  Description of Artificial Sequence: Synthetic oligonucleotide
  Antisense strand to SEQ ID NO: 625894
acucuagauagcauaaugu

SEQ ID NO: 625896 - RNA, 19 nt, Artificial Sequence
  Description of Artificial Sequence: Synthetic oligonucleotide
  Sense strand starting at position 1151 of SEQ ID NO: 585261
cuaucuagaguggguuauu

SEQ ID NO: 625897 - RNA, 19 nt, Artificial Sequence
  Description of Artificial Sequence: Synthetic oligonucleotide
  Antisense strand to SEQ ID NO: 625896
aauaacccacucuagauag

SEQ ID NO: 625898 - RNA, 19 nt, Artificial Sequence
  Description of Artificial Sequence: Synthetic oligonucleotide
  Sense strand starting at position 1152 of SEQ ID NO: 585261
uaucuagaguggguuauua

SEQ ID NO: 625899 - RNA, 19 nt, Artificial Sequence
  Description of Artificial Sequence: Synthetic oligonucleotide
  Antisense strand to SEQ ID NO: 625898
uaauaacccacucuagaua

SEQ ID NO: 625900 - RNA, 19 nt, Artificial Sequence
  Description of Artificial Sequence: Synthetic oligonucleotide
  Sense strand starting at position 1154 of SEQ ID NO: 585261
ucuagaguggguuauuaua

SEQ ID NO: 625901 - RNA, 19 nt, Artificial Sequence
  Description of Artificial Sequence: Synthetic oligonucleotide
  Antisense strand to SEQ ID NO: 625900
uauaauaacccacucuaga

SEQ ID NO: 625902 - RNA, 19 nt, Artificial Sequence
  Description of Artificial Sequence: Synthetic oligonucleotide
  Sense strand starting at position 1161 of SEQ ID NO: 585261
uggguuauuauaggcacua

SEQ ID NO: 625903 - RNA, 19 nt, Artificial Sequence
  Description of Artificial Sequence: Synthetic oligonucleotide
  Antisense strand to SEQ ID NO: 625902
uagugccuauaauaaccca

SEQ ID NO: 625904 - RNA, 19 nt, Artificial Sequence
  Description of Artificial Sequence: Synthetic oligonucleotide
  Sense strand starting at position 1162 of SEQ ID NO: 585261
ggguuauuauaggcacuaa

SEQ ID NO: 625905 - RNA, 19 nt, Artificial Sequence
  Description of Artificial Sequence: Synthetic oligonucleotide
  Antisense strand to SEQ ID NO: 625904
uuagugccuauaauaaccc

SEQ ID NO: 625906 - RNA, 19 nt, Artificial Sequence
  Description of Artificial Sequence: Synthetic oligonucleotide
  Sense strand starting at position 1361 of SEQ ID NO: 585261
aaacuugcuugaguuuaag

SEQ ID NO: 625907 - RNA, 19 nt, Artificial Sequence
  Description of Artificial Sequence: Synthetic oligonucleotide
  Antisense strand to SEQ ID NO: 625906
cuuaaacucaagcaaguuu

SEQ ID NO: 625908 - RNA, 19 nt, Artificial Sequence
  Description of Artificial Sequence: Synthetic oligonucleotide
  Sense strand starting at position 1465 of SEQ ID NO: 585261
uugucaaacgcacagaaua

SEQ ID NO: 625909 - RNA, 19 nt, Artificial Sequence
  Description of Artificial Sequence: Synthetic oligonucleotide
  Antisense strand to SEQ ID NO: 625908
uauucugugcguuugacaa

SEQ ID NO: 625910 - RNA, 19 nt, Artificial Sequence
  Description of Artificial Sequence: Synthetic oligonucleotide
  Sense strand starting at position 1507 of SEQ ID NO: 585261
accuguauuggcgacacuu

SEQ ID NO: 625911 - RNA, 19 nt, Artificial Sequence
  Description of Artificial Sequence: Synthetic oligonucleotide
  Antisense strand to SEQ ID NO: 625910
aagugucgccaauacaggu

SEQ ID NO: 625912 - RNA, 19 nt, Artificial Sequence
  Description of Artificial Sequence: Synthetic oligonucleotide
  Sense strand starting at position 2175 of SEQ ID NO: 585261
ugcgaaaccuacccuaaau

SEQ ID NO: 625913 - RNA, 19 nt, Artificial Sequence
  Description of Artificial Sequence: Synthetic oligonucleotide
  Antisense strand to SEQ ID NO: 625912
auuuaggguagguuucgca

SEQ ID NO: 625914 - RNA, 19 nt, Artificial Sequence
  Description of Artificial Sequence: Synthetic oligonucleotide
  Sense strand starting at position 2286 of SEQ ID NO: 585261
cugucuccuuaggugagaa

SEQ ID NO: 625915 - RNA, 19 nt, Artificial Sequence
  Description of Artificial Sequence: Synthetic oligonucleotide
  Antisense strand to SEQ ID NO: 625914
uucucaccuaaggagacag

SEQ ID NO: 625916 - RNA, 19 nt, Artificial Sequence
  Description of Artificial Sequence: Synthetic oligonucleotide
  Sense strand starting at position 2287 of SEQ ID NO: 585261
ugucuccuuaggugagaau

SEQ ID NO: 625917 - RNA, 19 nt, Artificial Sequence
  Description of Artificial Sequence: Synthetic oligonucleotide
  Antisense strand to SEQ ID NO: 625916
auucucaccuaaggagaca

SEQ ID NO: 625918 - RNA, 19 nt, Artificial Sequence
  Description of Artificial Sequence: Synthetic oligonucleotide
  Sense strand starting at position 2288 of SEQ ID NO: 585261
gucuccuuaggugagaauu

SEQ ID NO: 625919 - RNA, 19 nt, Artificial Sequence
  Description of Artificial Sequence: Synthetic oligonucleotide
  Antisense strand to SEQ ID NO: 625918
aauucucaccuaaggagac

SEQ ID NO: 625920 - RNA, 19 nt, Artificial Sequence
  Description of Artificial Sequence: Synthetic oligonucleotide
  Sense strand starting at position 2290 of SEQ ID NO: 585261
cuccuuaggugagaauuua

SEQ ID NO: 625921 - RNA, 19 nt, Artificial Sequence
  Description of Artificial Sequence: Synthetic oligonucleotide
  Antisense strand to SEQ ID NO: 625920
uaaauucucaccuaaggag

SEQ ID NO: 625922 - RNA, 19 nt, Artificial Sequence
  Description of Artificial Sequence: Synthetic oligonucleotide
  Sense strand starting at position 2321 of SEQ ID NO: 585261
gacggauauuauguuucua

SEQ ID NO: 625923 - RNA, 19 nt, Artificial Sequence
  Description of Artificial Sequence: Synthetic oligonucleotide
  Antisense strand to SEQ ID NO: 625922
uagaaacauaauauccguc

SEQ ID NO: 625924 - RNA, 19 nt, Artificial Sequence
  Description of Artificial Sequence: Synthetic oligonucleotide
  Sense strand starting at position 2416 of SEQ ID NO: 585261
auuuacguguuuccagaau

SEQ ID NO: 625925 - RNA, 19 nt, Artificial Sequence
  Description of Artificial Sequence: Synthetic oligonucleotide
  Antisense strand to SEQ ID NO: 625924
auucuggaaacacguaaau

SEQ ID NO: 625926 - RNA, 19 nt, Artificial Sequence
  Description of Artificial Sequence: Synthetic oligonucleotide
  Sense strand starting at position 2452 of SEQ ID NO: 585261
uuuauaaucugaucaaggu

SEQ ID NO: 625927 - RNA, 19 nt, Artificial Sequence
  Description of Artificial Sequence: Synthetic oligonucleotide
  Antisense strand to SEQ ID NO: 625926
accuugaucagauuauaaa

SEQ ID NO: 625928 - RNA, 19 nt, Artificial Sequence
  Description of Artificial Sequence: Synthetic oligonucleotide
  Sense strand starting at position 2461 of SEQ ID NO: 585261
ugaucaaggucauuagcau

SEQ ID NO: 625929 - RNA, 19 nt, Artificial Sequence
  Description of Artificial Sequence: Synthetic oligonucleotide
  Antisense strand to SEQ ID NO: 625928
augcuaaugaccuugauca

SEQ ID NO: 625930 - RNA, 19 nt, Artificial Sequence
  Description of Artificial Sequence: Synthetic oligonucleotide
  Sense strand starting at position 2462 of SEQ ID NO: 585261
gaucaaggucauuagcauu

SEQ ID NO: 625931 - RNA, 19 nt, Artificial Sequence
  Description of Artificial Sequence: Synthetic oligonucleotide
  Antisense strand to SEQ ID NO: 625930
aaugcuaaugaccuugauc

SEQ ID NO: 625932 - RNA, 19 nt, Artificial Sequence
  Description of Artificial Sequence: Synthetic oligonucleotide
  Sense strand starting at position 2527 of SEQ ID NO: 585261
ucucaagagcgaugggauu

SEQ ID NO: 625933 - RNA, 19 nt, Artificial Sequence
  Description of Artificial Sequence: Synthetic oligonucleotide
  Antisense strand to SEQ ID NO: 625932
aaucccaucgcucuugaga

SEQ ID NO: 625934 - RNA, 19 nt, Artificial Sequence
  Description of Artificial Sequence: Synthetic oligonucleotide
  Sense strand starting at position 2613 of SEQ ID NO: 585261
gaaauaggguacuuauauu

SEQ ID NO: 625935 - RNA, 19 nt, Artificial Sequence
  Description of Artificial Sequence: Synthetic oligonucleotide
  Antisense strand to SEQ ID NO: 625934
aauauaaguacccuauuuc

SEQ ID NO: 625936 - RNA, 19 nt, Artificial Sequence
  Description of Artificial Sequence: Synthetic oligonucleotide
  Sense strand starting at position 2681 of SEQ ID NO: 585261
agacauugagcuggaccaa

SEQ ID NO: 625937 - RNA, 19 nt, Artificial Sequence
  Description of Artificial Sequence: Synthetic oligonucleotide
  Antisense strand to SEQ ID NO: 625936
uugguccagcucaaugucu

SEQ ID NO: 625938 - RNA, 19 nt, Artificial Sequence
  Description of Artificial Sequence: Synthetic oligonucleotide
  Sense strand starting at position 2974 of SEQ ID NO: 585261
ggacuuugccuuuauaaau

SEQ ID NO: 625939 - RNA, 19 nt, Artificial Sequence
  Description of Artificial Sequence: Synthetic oligonucleotide
  Antisense strand to SEQ ID NO: 625938
auuuauaaaggcaaagucc

SEQ ID NO: 625940 - RNA, 19 nt, Artificial Sequence
  Description of Artificial Sequence: Synthetic oligonucleotide
  Sense strand starting at position 3019 of SEQ ID NO: 585261
uugugaccauugcuugaaa

SEQ ID NO: 625941 - RNA, 19 nt, Artificial Sequence
  Description of Artificial Sequence: Synthetic oligonucleotide
  Antisense strand to SEQ ID NO: 625940
uuucaagcaauggucacaa

SEQ ID NO: 625942 - RNA, 19 nt, Artificial Sequence
  Description of Artificial Sequence: Synthetic oligonucleotide
  Sense strand starting at position 3193 of SEQ ID NO: 585261
ccgugaaauccgccgcuau

SEQ ID NO: 625943 - RNA, 19 nt, Artificial Sequence
  Description of Artificial Sequence: Synthetic oligonucleotide
  Antisense strand to SEQ ID NO: 625942
auagcggcggauuucacgg

SEQ ID NO: 625944 - RNA, 19 nt, Artificial Sequence
  Description of Artificial Sequence: Synthetic oligonucleotide
  Sense strand starting at position 3195 of SEQ ID NO: 585261
gugaaauccgccgcuauca

SEQ ID NO: 625945 - RNA, 19 nt, Artificial Sequence
  Description of Artificial Sequence: Synthetic oligonucleotide
  Antisense strand to SEQ ID NO: 625944
ugauagcggcggauuucac

SEQ ID NO: 625946 - RNA, 19 nt, Artificial Sequence
  Description of Artificial Sequence: Synthetic oligonucleotide
  Sense strand starting at position 3207 of SEQ ID NO: 585261
gcuaucagaaaucgacuga

SEQ ID NO: 625947 - RNA, 19 nt, Artificial Sequence
  Description of Artificial Sequence: Synthetic oligonucleotide
  Antisense strand to SEQ ID NO: 625946
ucagucgauuucugauagc

SEQ ID NO: 625948 - RNA, 19 nt, Artificial Sequence
  Description of Artificial Sequence: Synthetic oligonucleotide
  Sense strand starting at position 3211 of SEQ ID NO: 585261
ucagaaaucgacugagcua

SEQ ID NO: 625949 - RNA, 19 nt, Artificial Sequence
  Description of Artificial Sequence: Synthetic oligonucleotide
  Antisense strand to SEQ ID NO: 625948
uagcucagucgauuucuga

SEQ ID NO: 625950 - RNA, 19 nt, Artificial Sequence
  Description of Artificial Sequence: Synthetic oligonucleotide
  Sense strand starting at position 3532 of SEQ ID NO: 585261
cguagcacuagggaguaau

SEQ ID NO: 625951 - RNA, 19 nt, Artificial Sequence
  Description of Artificial Sequence: Synthetic oligonucleotide
  Antisense strand to SEQ ID NO: 625950
auuacucccuagugcuacg

SEQ ID NO: 625952 - RNA, 19 nt, Artificial Sequence
  Description of Artificial Sequence: Synthetic oligonucleotide
  Sense strand starting at position 3965 of SEQ ID NO: 585261
gguugugugcugaggcaaa

SEQ ID NO: 625953 - RNA, 19 nt, Artificial Sequence
  Description of Artificial Sequence: Synthetic oligonucleotide
  Antisense strand to SEQ ID NO: 625952
uuugccucagcacacaacc

SEQ ID NO: 625954 - RNA, 19 nt, Artificial Sequence
  Description of Artificial Sequence: Synthetic oligonucleotide
  Sense strand starting at position 58 of SEQ ID NO: 585262
gcccaaaggucaccauuaa

SEQ ID NO: 625955 - RNA, 19 nt, Artificial Sequence
  Description of Artificial Sequence: Synthetic oligonucleotide
  Antisense strand to SEQ ID NO: 625954
uuaauggugaccuuugggc

SEQ ID NO: 625956 - RNA, 19 nt, Artificial Sequence
  Description of Artificial Sequence: Synthetic oligonucleotide
  Sense strand starting at position 116 of SEQ ID NO: 585262
gacuuugcugugcaacaaa

SEQ ID NO: 625957 - RNA, 19 nt, Artificial Sequence
  Description of Artificial Sequence: Synthetic oligonucleotide
  Antisense strand to SEQ ID NO: 625956
uuuguugcacagcaaaguc

SEQ ID NO: 625958 - RNA, 19 nt, Artificial Sequence
  Description of Artificial Sequence: Synthetic oligonucleotide
  Sense strand starting at position 135 of SEQ ID NO: 585262
gaauauguguaucuccuga

SEQ ID NO: 625959 - RNA, 19 nt, Artificial Sequence
  Description of Artificial Sequence: Synthetic oligonucleotide
  Antisense strand to SEQ ID NO: 625958
ucaggagauacacauauuc

SEQ ID NO: 625960 - RNA, 19 nt, Artificial Sequence
  Description of Artificial Sequence: Synthetic oligonucleotide
  Sense strand starting at position 220 of SEQ ID NO: 585262
uugggauggucucuaacaa

SEQ ID NO: 625961 - RNA, 19 nt, Artificial Sequence
  Description of Artificial Sequence: Synthetic oligonucleotide
  Antisense strand to SEQ ID NO: 625960
uuguuagagaccaucccaa

SEQ ID NO: 625962 - RNA, 19 nt, Artificial Sequence
  Description of Artificial Sequence: Synthetic oligonucleotide
  Sense strand starting at position 315 of SEQ ID NO: 585262
accuuaauucuugagguca

SEQ ID NO: 625963 - RNA, 19 nt, Artificial Sequence
  Description of Artificial Sequence: Synthetic oligonucleotide
  Antisense strand to SEQ ID NO: 625962
ugaccucaagaauuaaggu

SEQ ID NO: 625964 - RNA, 19 nt, Artificial Sequence
  Description of Artificial Sequence: Synthetic oligonucleotide
  Sense strand starting at position 672 of SEQ ID NO: 585262
augguagaguuccugaucu

SEQ ID NO: 625965 - RNA, 19 nt, Artificial Sequence
  Description of Artificial Sequence: Synthetic oligonucleotide
  Antisense strand to SEQ ID NO: 625964
agaucaggaacucuaccau

SEQ ID NO: 625966 - RNA, 19 nt, Artificial Sequence
  Description of Artificial Sequence: Synthetic oligonucleotide
  Sense strand starting at position 674 of SEQ ID NO: 585262
gguagaguuccugaucuug

SEQ ID NO: 625967 - RNA, 19 nt, Artificial Sequence
  Description of Artificial Sequence: Synthetic oligonucleotide
  Antisense strand to SEQ ID NO: 625966
caagaucaggaacucuacc

SEQ ID NO: 625968 - RNA, 19 nt, Artificial Sequence
  Description of Artificial Sequence: Synthetic oligonucleotide
  Sense strand starting at position 685 of SEQ ID NO: 585262
ugaucuugccaagagguaa

SEQ ID NO: 625969 - RNA, 19 nt, Artificial Sequence
  Description of Artificial Sequence: Synthetic oligonucleotide
  Antisense strand to SEQ ID NO: 625968
uuaccucuuggcaagauca

SEQ ID NO: 625970 - RNA, 19 nt, Artificial Sequence
  Description of Artificial Sequence: Synthetic oligonucleotide
  Sense strand starting at position 696 of SEQ ID NO: 585262
agagguaauauguauagcu

SEQ ID NO: 625971 - RNA, 19 nt, Artificial Sequence
  Description of Artificial Sequence: Synthetic oligonucleotide
  Antisense strand to SEQ ID NO: 625970
agcuauacauauuaccucu

SEQ ID NO: 625972 - RNA, 19 nt, Artificial Sequence
  Description of Artificial Sequence: Synthetic oligonucleotide
  Sense strand starting at position 716 of SEQ ID NO: 585262
cgugaaguaauccaguaau

SEQ ID NO: 625973 - RNA, 19 nt, Artificial Sequence
  Description of Artificial Sequence: Synthetic oligonucleotide
  Antisense strand to SEQ ID NO: 625972
auuacuggauuacuucacg

SEQ ID NO: 625974 - RNA, 19 nt, Artificial Sequence
  Description of Artificial Sequence: Synthetic oligonucleotide
  Sense strand starting at position 805 of SEQ ID NO: 585262
ucugccaugguuuagaaau

SEQ ID NO: 625975 - RNA, 19 nt, Artificial Sequence
  Description of Artificial Sequence: Synthetic oligonucleotide
  Antisense strand to SEQ ID NO: 625974
auuucuaaaccauggcaga

SEQ ID NO: 625976 - RNA, 19 nt, Artificial Sequence
  Description of Artificial Sequence: Synthetic oligonucleotide
  Sense strand starting at position 2002 of SEQ ID NO: 585262
guucgcagccgaagugaua

SEQ ID NO: 625977 - RNA, 19 nt, Artificial Sequence
  Description of Artificial Sequence: Synthetic oligonucleotide
  Antisense strand to SEQ ID NO: 625976
uaucacuucggcugcgaac

SEQ ID NO: 625978 - RNA, 19 nt, Artificial Sequence
  Description of Artificial Sequence: Synthetic oligonucleotide
  Sense strand starting at position 2013 of SEQ ID NO: 585262
aagugauaccgucaaauga

SEQ ID NO: 625979 - RNA, 19 nt, Artificial Sequence
  Description of Artificial Sequence: Synthetic oligonucleotide
  Antisense strand to SEQ ID NO: 625978
ucauuugacgguaucacuu

SEQ ID NO: 625980 - RNA, 19 nt, Artificial Sequence
  Description of Artificial Sequence: Synthetic oligonucleotide
  Sense strand starting at position 2220 of SEQ ID NO: 585262
auaaguauguaagucagaa

SEQ ID NO: 625981 - RNA, 19 nt, Artificial Sequence
  Description of Artificial Sequence: Synthetic oligonucleotide
  Antisense strand to SEQ ID NO: 625980
uucugacuuacauacuuau

SEQ ID NO: 625982 - RNA, 19 nt, Artificial Sequence
  Description of Artificial Sequence: Synthetic oligonucleotide
  Sense strand starting at position 2286 of SEQ ID NO: 585262
uuucgauuggcugaaaucu

SEQ ID NO: 625983 - RNA, 19 nt, Artificial Sequence
  Description of Artificial Sequence: Synthetic oligonucleotide
  Antisense strand to SEQ ID NO: 625982
agauuucagccaaucgaaa

SEQ ID NO: 625984 - RNA, 19 nt, Artificial Sequence
  Description of Artificial Sequence: Synthetic oligonucleotide
  Sense strand starting at position 2301 of SEQ ID NO: 585262
aucuguguucaggagauag

SEQ ID NO: 625985 - RNA, 19 nt, Artificial Sequence
  Description of Artificial Sequence: Synthetic oligonucleotide
  Antisense strand to SEQ ID NO: 625984
cuaucuccugaacacagau

SEQ ID NO: 625986 - RNA, 19 nt, Artificial Sequence
  Description of Artificial Sequence: Synthetic oligonucleotide
  Sense strand starting at position 2303 of SEQ ID NO: 585262
cuguguucaggagauagca

SEQ ID NO: 625987 - RNA, 19 nt, Artificial Sequence
  Description of Artificial Sequence: Synthetic oligonucleotide
  Antisense strand to SEQ ID NO: 625986
ugcuaucuccugaacacag

SEQ ID NO: 625988 - RNA, 19 nt, Artificial Sequence
  Description of Artificial Sequence: Synthetic oligonucleotide
  Sense strand starting at position 2349 of SEQ ID NO: 585262
aagaguuuagcucuugcgu

SEQ ID NO: 625989 - RNA, 19 nt, Artificial Sequence
  Description of Artificial Sequence: Synthetic oligonucleotide
  Antisense strand to SEQ ID NO: 625988
acgcaagagcuaaacucuu

SEQ ID NO: 625990 - RNA, 19 nt, Artificial Sequence
  Description of Artificial Sequence: Synthetic oligonucleotide
  Sense strand starting at position 2350 of SEQ ID NO: 585262
agaguuuagcucuugcguu

SEQ ID NO: 625991 - RNA, 19 nt, Artificial Sequence
  Description of Artificial Sequence: Synthetic oligonucleotide
  Antisense strand to SEQ ID NO: 625990
aacgcaagagcuaaacucu

SEQ ID NO: 625992 - RNA, 19 nt, Artificial Sequence
  Description of Artificial Sequence: Synthetic oligonucleotide
  Sense strand starting at position 2731 of SEQ ID NO: 585262
ggcgguguccugcccaaua

SEQ ID NO: 625993 - RNA, 19 nt, Artificial Sequence
  Description of Artificial Sequence: Synthetic oligonucleotide
  Antisense strand to SEQ ID NO: 625992
uauugggcaggacaccgcc

SEQ ID NO: 625994 - RNA, 19 nt, Artificial Sequence
  Description of Artificial Sequence: Synthetic oligonucleotide
  Sense strand starting at position 2759 of SEQ ID NO: 585262
ugcuguugcccugucuaua

SEQ ID NO: 625995 - RNA, 19 nt, Artificial Sequence
  Description of Artificial Sequence: Synthetic oligonucleotide
  Antisense strand to SEQ ID NO: 625994
uauagacagggcaacagca

SEQ ID NO: 625996 - RNA, 19 nt, Artificial Sequence
  Description of Artificial Sequence: Synthetic oligonucleotide
  Sense strand starting at position 2828 of SEQ ID NO: 585262
aaguaagugcuuuaaugua

SEQ ID NO: 625997 - RNA, 19 nt, Artificial Sequence
  Description of Artificial Sequence: Synthetic oligonucleotide
  Antisense strand to SEQ ID NO: 625996
uacauuaaagcacuuacuu

SEQ ID NO: 625998 - RNA, 19 nt, Artificial Sequence
  Description of Artificial Sequence: Synthetic oligonucleotide
  Sense strand starting at position 2838 of SEQ ID NO: 585262
uuuaauguagucgggaaga

SEQ ID NO: 625999 - RNA, 19 nt, Artificial Sequence
  Description of Artificial Sequence: Synthetic oligonucleotide
  Antisense strand to SEQ ID NO: 625998
ucuucccgacuacauuaaa

SEQ ID NO: 626000 - RNA, 19 nt, Artificial Sequence
  Description of Artificial Sequence: Synthetic oligonucleotide
  Sense strand starting at position 2920 of SEQ ID NO: 585262
caaguuauccugcagaaga

SEQ ID NO: 626001 - RNA, 19 nt, Artificial Sequence
  Description of Artificial Sequence: Synthetic oligonucleotide
  Antisense strand to SEQ ID NO: 626000
ucuucugcaggauaacuug

SEQ ID NO: 626002 - RNA, 19 nt, Artificial Sequence
  Description of Artificial Sequence: Synthetic oligonucleotide
  Sense strand starting at position 2949 of SEQ ID NO: 585262
ggugguauccuggaauauc

SEQ ID NO: 626003 - RNA, 19 nt, Artificial Sequence
  Description of Artificial Sequence: Synthetic oligonucleotide
  Antisense strand to SEQ ID NO: 626002
gauauuccaggauaccacc

SEQ ID NO: 626004 - RNA, 19 nt, Artificial Sequence
  Description of Artificial Sequence: Synthetic oligonucleotide
  Sense strand starting at position 2992 of SEQ ID NO: 585262
aaugauaagagucguugga

SEQ ID NO: 626005 - RNA, 19 nt, Artificial Sequence
  Description of Artificial Sequence: Synthetic oligonucleotide
  Antisense strand to SEQ ID NO: 626004
uccaacgacucuuaucauu

SEQ ID NO: 626006 - RNA, 19 nt, Artificial Sequence
  Description of Artificial Sequence: Synthetic oligonucleotide
  Sense strand starting at position 2994 of SEQ ID NO: 585262
ugauaagagucguuggaaa

SEQ ID NO: 626007 - RNA, 19 nt, Artificial Sequence
  Description of Artificial Sequence: Synthetic oligonucleotide
  Antisense strand to SEQ ID NO: 626006
uuuccaacgacucuuauca

SEQ ID NO: 626008 - RNA, 19 nt, Artificial Sequence
  Description of Artificial Sequence: Synthetic oligonucleotide
  Sense strand starting at position 3126 of SEQ ID NO: 585262
gcucgugauuucccaggua

SEQ ID NO: 626009 - RNA, 19 nt, Artificial Sequence
  Description of Artificial Sequence: Synthetic oligonucleotide
  Antisense strand to SEQ ID NO: 626008
uaccugggaaaucacgagc

SEQ ID NO: 626010 - RNA, 19 nt, Artificial Sequence
  Description of Artificial Sequence: Synthetic oligonucleotide
  Sense strand starting at position 3129 of SEQ ID NO: 585262
cgugauuucccagguacau

SEQ ID NO: 626011 - RNA, 19 nt, Artificial Sequence
  Description of Artificial Sequence: Synthetic oligonucleotide
  Antisense strand to SEQ ID NO: 626010
auguaccugggaaaucacg

SEQ ID NO: 626012 - RNA, 19 nt, Artificial Sequence
  Description of Artificial Sequence: Synthetic oligonucleotide
  Sense strand starting at position 3154 of SEQ ID NO: 585262
ggaauccugccuuauaaug

SEQ ID NO: 626013 - RNA, 19 nt, Artificial Sequence
  Description of Artificial Sequence: Synthetic oligonucleotide
  Antisense strand to SEQ ID NO: 626012
cauuauaaggcaggauucc

SEQ ID NO: 626014 - RNA, 19 nt, Artificial Sequence
  Description of Artificial Sequence: Synthetic oligonucleotide
  Sense strand starting at position 3162 of SEQ ID NO: 585262
gccuuauaauggucaaagg

SEQ ID NO: 626015 - RNA, 19 nt, Artificial Sequence
  Description of Artificial Sequence: Synthetic oligonucleotide
  Antisense strand to SEQ ID NO: 626014
ccuuugaccauuauaaggc

SEQ ID NO: 626016 - RNA, 19 nt, Artificial Sequence
  Description of Artificial Sequence: Synthetic oligonucleotide
  Sense strand starting at position 3163 of SEQ ID NO: 585262
ccuuauaauggucaaaggu

SEQ ID NO: 626017 - RNA, 19 nt, Artificial Sequence
  Description of Artificial Sequence: Synthetic oligonucleotide
  Antisense strand to SEQ ID NO: 626016
accuuugaccauuauaagg

SEQ ID NO: 626018 - RNA, 19 nt, Artificial Sequence
  Description of Artificial Sequence: Synthetic oligonucleotide
  Sense strand starting at position 3513 of SEQ ID NO: 585262
caauuagaauguuucugag

SEQ ID NO: 626019 - RNA, 19 nt, Artificial Sequence
  Description of Artificial Sequence: Synthetic oligonucleotide
  Antisense strand to SEQ ID NO: 626018
cucagaaacauucuaauug

SEQ ID NO: 626020 - RNA, 19 nt, Artificial Sequence
  Description of Artificial Sequence: Synthetic oligonucleotide
  Sense strand starting at position 3515 of SEQ ID NO: 585262
auuagaauguuucugagua

SEQ ID NO: 626021 - RNA, 19 nt, Artificial Sequence
  Description of Artificial Sequence: Synthetic oligonucleotide
  Antisense strand to SEQ ID NO: 626020
uacucagaaacauucuaau

SEQ ID NO: 626022 - RNA, 19 nt, Artificial Sequence
  Description of Artificial Sequence: Synthetic oligonucleotide
  Sense strand starting at position 3519 of SEQ ID NO: 585262
gaauguuucugaguauaua

SEQ ID NO: 626023 - RNA, 19 nt, Artificial Sequence
  Description of Artificial Sequence: Synthetic oligonucleotide
  Antisense strand to SEQ ID NO: 626022
uauauacucagaaacauuc

SEQ ID NO: 626024 - RNA, 19 nt, Artificial Sequence
  Description of Artificial Sequence: Synthetic oligonucleotide
  Sense strand starting at position 3741 of SEQ ID NO: 585262
gcgagauucgccgcuauca

SEQ ID NO: 626025 - RNA, 19 nt, Artificial Sequence
  Description of Artificial Sequence: Synthetic oligonucleotide
  Antisense strand to SEQ ID NO: 626024
ugauagcggcgaaucucgc

SEQ ID NO: 626026 - RNA, 19 nt, Artificial Sequence
  Description of Artificial Sequence: Synthetic oligonucleotide
  Sense strand starting at position 3742 of SEQ ID NO: 585262
cgagauucgccgcuaucag

SEQ ID NO: 626027 - RNA, 19 nt, Artificial Sequence
  Description of Artificial Sequence: Synthetic oligonucleotide
  Antisense strand to SEQ ID NO: 626026
cugauagcggcgaaucucg

SEQ ID NO: 626028 - RNA, 19 nt, Artificial Sequence
  Description of Artificial Sequence: Synthetic oligonucleotide
  Sense strand starting at position 3799 of SEQ ID NO: 585262
acgccuggugcgagaaauc

SEQ ID NO: 626029 - RNA, 19 nt, Artificial Sequence
  Description of Artificial Sequence: Synthetic oligonucleotide
  Antisense strand to SEQ ID NO: 626028
gauuucucgcaccaggcgu

SEQ ID NO: 626030 - RNA, 19 nt, Artificial Sequence
  Description of Artificial Sequence: Synthetic oligonucleotide
  Sense strand starting at position 3809 of SEQ ID NO: 585262
cgagaaaucgcucaggacu

SEQ ID NO: 626031 - RNA, 19 nt, Artificial Sequence
  Description of Artificial Sequence: Synthetic oligonucleotide
  Antisense strand to SEQ ID NO: 626030
aguccugagcgauuucucg

SEQ ID NO: 626032 - RNA, 19 nt, Artificial Sequence
  Description of Artificial Sequence: Synthetic oligonucleotide
  Sense strand starting at position 3899 of SEQ ID NO: 585262
gggcucuuugaggauacca

SEQ ID NO: 626033 - RNA, 19 nt, Artificial Sequence
  Description of Artificial Sequence: Synthetic oligonucleotide
  Antisense strand to SEQ ID NO: 626032
ugguauccucaaagagccc

SEQ ID NO: 626034 - RNA, 19 nt, Artificial Sequence
  Description of Artificial Sequence: Synthetic oligonucleotide
  Sense strand starting at position 28 of SEQ ID NO: 585263
cuggacaaguguccgagaa

SEQ ID NO: 626035 - RNA, 19 nt, Artificial Sequence
  Description of Artificial Sequence: Synthetic oligonucleotide
  Antisense strand to SEQ ID NO: 626034
uucucggacacuuguccag

SEQ ID NO: 626036 - RNA, 19 nt, Artificial Sequence
  Description of Artificial Sequence: Synthetic oligonucleotide
  Sense strand starting at position 29 of SEQ ID NO: 585263
uggacaaguguccgagaaa

SEQ ID NO: 626037 - RNA, 19 nt, Artificial Sequence
  Description of Artificial Sequence: Synthetic oligonucleotide
  Antisense strand to SEQ ID NO: 626036
uuucucggacacuugucca

SEQ ID NO: 626038 - RNA, 19 nt, Artificial Sequence
  Description of Artificial Sequence: Synthetic oligonucleotide
  Sense strand starting at position 138 of SEQ ID NO: 585263
uguauuugauaguggauuu

SEQ ID NO: 626039 - RNA, 19 nt, Artificial Sequence
  Description of Artificial Sequence: Synthetic oligonucleotide
  Antisense strand to SEQ ID NO: 626038
aaauccacuaucaaauaca

SEQ ID NO: 626040 - RNA, 19 nt, Artificial Sequence
  Description of Artificial Sequence: Synthetic oligonucleotide
  Sense strand starting at position 180 of SEQ ID NO: 585263
auguuauuacugugcuaaa

SEQ ID NO: 626041 - RNA, 19 nt, Artificial Sequence
  Description of Artificial Sequence: Synthetic oligonucleotide
  Antisense strand to SEQ ID NO: 626040
uuuagcacaguaauaacau

SEQ ID NO: 626042 - RNA, 19 nt, Artificial Sequence
  Description of Artificial Sequence: Synthetic oligonucleotide
  Sense strand starting at position 191 of SEQ ID NO: 585263
gugcuaaauuuagauccau

SEQ ID NO: 626043 - RNA, 19 nt, Artificial Sequence
  Description of Artificial Sequence: Synthetic oligonucleotide
  Antisense strand to SEQ ID NO: 626042
auggaucuaaauuuagcac

SEQ ID NO: 626044 - RNA, 19 nt, Artificial Sequence
  Description of Artificial Sequence: Synthetic oligonucleotide
  Sense strand starting at position 219 of SEQ ID NO: 585263
acuagauaguaacucaagu

SEQ ID NO: 626045 - RNA, 19 nt, Artificial Sequence
  Description of Artificial Sequence: Synthetic oligonucleotide
  Antisense strand to SEQ ID NO: 626044
acuugaguuacuaucuagu

SEQ ID NO: 626046 - RNA, 19 nt, Artificial Sequence
  Description of Artificial Sequence: Synthetic oligonucleotide
  Sense strand starting at position 365 of SEQ ID NO: 585263
uugggugacugguucucau

SEQ ID NO: 626047 - RNA, 19 nt, Artificial Sequence
  Description of Artificial Sequence: Synthetic oligonucleotide
  Antisense strand to SEQ ID NO: 626046
augagaaccagucacccaa

SEQ ID NO: 626048 - RNA, 19 nt, Artificial Sequence
  Description of Artificial Sequence: Synthetic oligonucleotide
  Sense strand starting at position 457 of SEQ ID NO: 585263
auacuaacgaaaggaguuu

SEQ ID NO: 626049 - RNA, 19 nt, Artificial Sequence
  Description of Artificial Sequence: Synthetic oligonucleotide
  Antisense strand to SEQ ID NO: 626048
aaacuccuuucguuaguau

SEQ ID NO: 626050 - RNA, 19 nt, Artificial Sequence
  Description of Artificial Sequence: Synthetic oligonucleotide
  Sense strand starting at position 510 of SEQ ID NO: 585263
ugggauaaauguccucaag

SEQ ID NO: 626051 - RNA, 19 nt, Artificial Sequence
  Description of Artificial Sequence: Synthetic oligonucleotide
  Antisense strand to SEQ ID NO: 626050
cuugaggacauuuauccca

SEQ ID NO: 626052 - RNA, 19 nt, Artificial Sequence
  Description of Artificial Sequence: Synthetic oligonucleotide
  Sense strand starting at position 512 of SEQ ID NO: 585263
ggauaaauguccucaagcu

SEQ ID NO: 626053 - RNA, 19 nt, Artificial Sequence
  Description of Artificial Sequence: Synthetic oligonucleotide
  Antisense strand to SEQ ID NO: 626052
agcuugaggacauuuaucc

SEQ ID NO: 626054 - RNA, 19 nt, Artificial Sequence
  Description of Artificial Sequence: Synthetic oligonucleotide
  Sense strand starting at position 941 of SEQ ID NO: 585263
gaggaagucuccuucucaa

SEQ ID NO: 626055 - RNA, 19 nt, Artificial Sequence
  Description of Artificial Sequence: Synthetic oligonucleotide
  Antisense strand to SEQ ID NO: 626054
uugagaaggagacuuccuc

SEQ ID NO: 626056 - RNA, 19 nt, Artificial Sequence
  Description of Artificial Sequence: Synthetic oligonucleotide
  Sense strand starting at position 971 of SEQ ID NO: 585263
cugauuauguugccauaaa

SEQ ID NO: 626057 - RNA, 19 nt, Artificial Sequence
  Description of Artificial Sequence: Synthetic oligonucleotide
  Antisense strand to SEQ ID NO: 626056
uuuauggcaacauaaucag

SEQ ID NO: 626058 - RNA, 19 nt, Artificial Sequence
  Description of Artificial Sequence: Synthetic oligonucleotide
  Sense strand starting at position 1087 of SEQ ID NO: 585263
acaguuuacugaguuugua

SEQ ID NO: 626059 - RNA, 19 nt, Artificial Sequence
  Description of Artificial Sequence: Synthetic oligonucleotide
  Antisense strand to SEQ ID NO: 626058
uacaaacucaguaaacugu

SEQ ID NO: 626060 - RNA, 19 nt, Artificial Sequence
  Description of Artificial Sequence: Synthetic oligonucleotide
  Sense strand starting at position 1091 of SEQ ID NO: 585263
uuuacugaguuuguaagga

SEQ ID NO: 626061 - RNA, 19 nt, Artificial Sequence
  Description of Artificial Sequence: Synthetic oligonucleotide
  Antisense strand to SEQ ID NO: 626060
uccuuacaaacucaguaaa

SEQ ID NO: 626062 - RNA, 19 nt, Artificial Sequence
  Description of Artificial Sequence: Synthetic oligonucleotide
  Sense strand starting at position 1159 of SEQ ID NO: 585263
cguggacuuccuggauaca

SEQ ID NO: 626063 - RNA, 19 nt, Artificial Sequence
  Description of Artificial Sequence: Synthetic oligonucleotide
  Antisense strand to SEQ ID NO: 626062
uguauccaggaaguccacg

SEQ ID NO: 626064 - RNA, 19 nt, Artificial Sequence
  Description of Artificial Sequence: Synthetic oligonucleotide
  Sense strand starting at position 1207 of SEQ ID NO: 585263
ggcguugcccgggcaaauu

SEQ ID NO: 626065 - RNA, 19 nt, Artificial Sequence
  Description of Artificial Sequence: Synthetic oligonucleotide
  Antisense strand to SEQ ID NO: 626064
aauuugcccgggcaacgcc

SEQ ID NO: 626066 - RNA, 19 nt, Artificial Sequence
  Description of Artificial Sequence: Synthetic oligonucleotide
  Sense strand starting at position 1255 of SEQ ID NO: 585263
guuccaaaucacuaaccga

SEQ ID NO: 626067 - RNA, 19 nt, Artificial Sequence
  Description of Artificial Sequence: Synthetic oligonucleotide
  Antisense strand to SEQ ID NO: 626066
ucgguuagugauuuggaac

SEQ ID NO: 626068 - RNA, 19 nt, Artificial Sequence
  Description of Artificial Sequence: Synthetic oligonucleotide
  Sense strand starting at position 1498 of SEQ ID NO: 585263
accagcucuuucuuugaga

SEQ ID NO: 626069 - RNA, 19 nt, Artificial Sequence
  Description of Artificial Sequence: Synthetic oligonucleotide
  Antisense strand to SEQ ID NO: 626068
ucucaaagaaagagcuggu

SEQ ID NO: 626070 - RNA, 19 nt, Artificial Sequence
  Description of Artificial Sequence: Synthetic oligonucleotide
  Sense strand starting at position 1499 of SEQ ID NO: 585263
ccagcucuuucuuugagaa

SEQ ID NO: 626071 - RNA, 19 nt, Artificial Sequence
  Description of Artificial Sequence: Synthetic oligonucleotide
  Antisense strand to SEQ ID NO: 626070
uucucaaagaaagagcugg

SEQ ID NO: 626072 - RNA, 19 nt, Artificial Sequence
  Description of Artificial Sequence: Synthetic oligonucleotide
  Sense strand starting at position 1515 of SEQ ID NO: 585263
gaacauggguggcucuuaa

SEQ ID NO: 626073 - RNA, 19 nt, Artificial Sequence
  Description of Artificial Sequence: Synthetic oligonucleotide
  Antisense strand to SEQ ID NO: 626072
uuaagagccacccauguuc

SEQ ID NO: 626074 - RNA, 19 nt, Artificial Sequence
  Description of Artificial Sequence: Synthetic oligonucleotide
  Sense strand starting at position 2029 of SEQ ID NO: 585263
agaaucgcuuaugcaaaua

SEQ ID NO: 626075 - RNA, 19 nt, Artificial Sequence
  Description of Artificial Sequence: Synthetic oligonucleotide
  Antisense strand to SEQ ID NO: 626074
uauuugcauaagcgauucu

SEQ ID NO: 626076 - RNA, 19 nt, Artificial Sequence
  Description of Artificial Sequence: Synthetic oligonucleotide
  Sense strand starting at position 2060 of SEQ ID NO: 585263
gaagucuugugucugauug

SEQ ID NO: 626077 - RNA, 19 nt, Artificial Sequence
  Description of Artificial Sequence: Synthetic oligonucleotide
  Antisense strand to SEQ ID NO: 626076
caaucagacacaagacuuc

SEQ ID NO: 626078 - RNA, 19 nt, Artificial Sequence
  Description of Artificial Sequence: Synthetic oligonucleotide
  Sense strand starting at position 2079 of SEQ ID NO: 585263
guaguuauucaggguaacg

SEQ ID NO: 626079 - RNA, 19 nt, Artificial Sequence
  Description of Artificial Sequence: Synthetic oligonucleotide
  Antisense strand to SEQ ID NO: 626078
cguuacccugaauaacuac

SEQ ID NO: 626080 - RNA, 19 nt, Artificial Sequence
  Description of Artificial Sequence: Synthetic oligonucleotide
  Sense strand starting at position 2143 of SEQ ID NO: 585263
gcacuacuauugguugaaa

SEQ ID NO: 626081 - RNA, 19 nt, Artificial Sequence
  Description of Artificial Sequence: Synthetic oligonucleotide
  Antisense strand to SEQ ID NO: 626080
uuucaaccaauaguagugc

SEQ ID NO: 626082 - RNA, 19 nt, Artificial Sequence
  Description of Artificial Sequence: Synthetic oligonucleotide
  Sense strand starting at position 2145 of SEQ ID NO: 585263
acuacuauugguugaaauu

SEQ ID NO: 626083 - RNA, 19 nt, Artificial Sequence
  Description of Artificial Sequence: Synthetic oligonucleotide
  Antisense strand to SEQ ID NO: 626082
aauuucaaccaauaguagu

SEQ ID NO: 626084 - RNA, 19 nt, Artificial Sequence
  Description of Artificial Sequence: Synthetic oligonucleotide
  Sense strand starting at position 2870 of SEQ ID NO: 585263
gagggaaggugguccagau

SEQ ID NO: 626085 - RNA, 19 nt, Artificial Sequence
  Description of Artificial Sequence: Synthetic oligonucleotide
  Antisense strand to SEQ ID NO: 626084
aucuggaccaccuucccuc

SEQ ID NO: 626086 - RNA, 19 nt, Artificial Sequence
  Description of Artificial Sequence: Synthetic oligonucleotide
  Sense strand starting at position 2984 of SEQ ID NO: 585263
ucgugaguucuugaagcac

SEQ ID NO: 626087 - RNA, 19 nt, Artificial Sequence
  Description of Artificial Sequence: Synthetic oligonucleotide
  Antisense strand to SEQ ID NO: 626086
gugcuucaagaacucacga

SEQ ID NO: 626088 - RNA, 19 nt, Artificial Sequence
  Description of Artificial Sequence: Synthetic oligonucleotide
  Sense strand starting at position 3029 of SEQ ID NO: 585263
gcuagaauuuagcagacag

SEQ ID NO: 626089 - RNA, 19 nt, Artificial Sequence
  Description of Artificial Sequence: Synthetic oligonucleotide
  Antisense strand to SEQ ID NO: 626088
cugucugcuaaauucuagc

SEQ ID NO: 626090 - RNA, 19 nt, Artificial Sequence
  Description of Artificial Sequence: Synthetic oligonucleotide
  Sense strand starting at position 3208 of SEQ ID NO: 585263
gcugaagaacuuugugaca

SEQ ID NO: 626091 - RNA, 19 nt, Artificial Sequence
  Description of Artificial Sequence: Synthetic oligonucleotide
  Antisense strand to SEQ ID NO: 626090
ugucacaaaguucuucagc

SEQ ID NO: 626092 - RNA, 19 nt, Artificial Sequence
  Description of Artificial Sequence: Synthetic oligonucleotide
  Sense strand starting at position 3277 of SEQ ID NO: 585263
gauggauagcugugaagca

SEQ ID NO: 626093 - RNA, 19 nt, Artificial Sequence
  Description of Artificial Sequence: Synthetic oligonucleotide
  Antisense strand to SEQ ID NO: 626092
ugcuucacagcuauccauc

SEQ ID NO: 626094 - RNA, 19 nt, Artificial Sequence
  Description of Artificial Sequence: Synthetic oligonucleotide
  Sense strand starting at position 3363 of SEQ ID NO: 585263
ugacguuaucuggagccca

SEQ ID NO: 626095 - RNA, 19 nt, Artificial Sequence
  Description of Artificial Sequence: Synthetic oligonucleotide
  Antisense strand to SEQ ID NO: 626094
ugggcuccagauaacguca

SEQ ID NO: 626096 - RNA, 19 nt, Artificial Sequence
  Description of Artificial Sequence: Synthetic oligonucleotide
  Sense strand starting at position 3415 of SEQ ID NO: 585263
ccaaguugcuuaccuagaa

SEQ ID NO: 626097 - RNA, 19 nt, Artificial Sequence
  Description of Artificial Sequence: Synthetic oligonucleotide
  Antisense strand to SEQ ID NO: 626096
uucuagguaagcaacuugg

SEQ ID NO: 626098 - RNA, 19 nt, Artificial Sequence
  Description of Artificial Sequence: Synthetic oligonucleotide
  Sense strand starting at position 3419 of SEQ ID NO: 585263
guugcuuaccuagaagaac

SEQ ID NO: 626099 - RNA, 19 nt, Artificial Sequence
  Description of Artificial Sequence: Synthetic oligonucleotide
  Antisense strand to SEQ ID NO: 626098
guucuucuagguaagcaac

SEQ ID NO: 626100 - RNA, 19 nt, Artificial Sequence
  Description of Artificial Sequence: Synthetic oligonucleotide
  Sense strand starting at position 3430 of SEQ ID NO: 585263
agaagaacuugacaggaua

SEQ ID NO: 626101 - RNA, 19 nt, Artificial Sequence
  Description of Artificial Sequence: Synthetic oligonucleotide
  Antisense strand to SEQ ID NO: 626100
uauccugucaaguucuucu

SEQ ID NO: 626102 - RNA, 19 nt, Artificial Sequence
  Description of Artificial Sequence: Synthetic oligonucleotide
  Sense strand starting at position 3486 of SEQ ID NO: 585263
gguaaaguguuagcacaca

SEQ ID NO: 626103 - RNA, 19 nt, Artificial Sequence
  Description of Artificial Sequence: Synthetic oligonucleotide
  Antisense strand to SEQ ID NO: 626102
ugugugcuaacacuuuacc

SEQ ID NO: 626104 - RNA, 19 nt, Artificial Sequence
  Description of Artificial Sequence: Synthetic oligonucleotide
  Sense strand starting at position 3693 of SEQ ID NO: 585263
uucuguaaaggaggguuau

SEQ ID NO: 626105 - RNA, 19 nt, Artificial Sequence
  Description of Artificial Sequence: Synthetic oligonucleotide
  Antisense strand to SEQ ID NO: 626104
auaacccuccuuuacagaa

SEQ ID NO: 626106 - RNA, 19 nt, Artificial Sequence
  Description of Artificial Sequence: Synthetic oligonucleotide
  Sense strand starting at position 3694 of SEQ ID NO: 585263
ucuguaaaggaggguuauu

SEQ ID NO: 626107 - RNA, 19 nt, Artificial Sequence
  Description of Artificial Sequence: Synthetic oligonucleotide
  Antisense strand to SEQ ID NO: 626106
aauaacccuccuuuacaga

SEQ ID NO: 626108 - RNA, 19 nt, Artificial Sequence
  Description of Artificial Sequence: Synthetic oligonucleotide
  Sense strand starting at position 3706 of SEQ ID NO: 585263
gguuauuuacuacgguagu

SEQ ID NO: 626109 - RNA, 19 nt, Artificial Sequence
  Description of Artificial Sequence: Synthetic oligonucleotide
  Antisense strand to SEQ ID NO: 626108
acuaccguaguaaauaacc

SEQ ID NO: 626110 - RNA, 19 nt, Artificial Sequence
  Description of Artificial Sequence: Synthetic oligonucleotide
  Sense strand starting at position 3737 of SEQ ID NO: 585263
ugguguuguagcuaaauaa

SEQ ID NO: 626111 - RNA, 19 nt, Artificial Sequence
  Description of Artificial Sequence: Synthetic oligonucleotide
  Antisense strand to SEQ ID NO: 626110
uuauuuagcuacaacacca

SEQ ID NO: 626112 - RNA, 19 nt, Artificial Sequence
  Description of Artificial Sequence: Synthetic oligonucleotide
  Sense strand starting at position 3741 of SEQ ID NO: 585263
guuguagcuaaauaaggaa

SEQ ID NO: 626113 - RNA, 19 nt, Artificial Sequence
  Description of Artificial Sequence: Synthetic oligonucleotide
  Antisense strand to SEQ ID NO: 626112
uuccuuauuuagcuacaac

SEQ ID NO: 626114 - RNA, 19 nt, Artificial Sequence
  Description of Artificial Sequence: Synthetic oligonucleotide
  Sense strand starting at position 184 of SEQ ID NO: 585264
ccuccuauauagguauaga

SEQ ID NO: 626115 - RNA, 19 nt, Artificial Sequence
  Description of Artificial Sequence: Synthetic oligonucleotide
  Antisense strand to SEQ ID NO: 626114
ucuauaccuauauaggagg

SEQ ID NO: 626116 - RNA, 19 nt, Artificial Sequence
  Description of Artificial Sequence: Synthetic oligonucleotide
  Sense strand starting at position 310 of SEQ ID NO: 585264
uuggaucaacagugaacau

SEQ ID NO: 626117 - RNA, 19 nt, Artificial Sequence
  Description of Artificial Sequence: Synthetic oligonucleotide
  Antisense strand to SEQ ID NO: 626116
auguucacuguugauccaa

SEQ ID NO: 626118 - RNA, 19 nt, Artificial Sequence
  Description of Artificial Sequence: Synthetic oligonucleotide
  Sense strand starting at position 329 of SEQ ID NO: 585264
augcuuugcauguaugaag

SEQ ID NO: 626119 - RNA, 19 nt, Artificial Sequence
  Description of Artificial Sequence: Synthetic oligonucleotide
  Antisense strand to SEQ ID NO: 626118
cuucauacaugcaaagcau

SEQ ID NO: 626120 - RNA, 19 nt, Artificial Sequence
  Description of Artificial Sequence: Synthetic oligonucleotide
  Sense strand starting at position 419 of SEQ ID NO: 585264
guggccaaauauguuaaau

SEQ ID NO: 626121 - RNA, 19 nt, Artificial Sequence
  Description of Artificial Sequence: Synthetic oligonucleotide
  Antisense strand to SEQ ID NO: 626120
auuuaacauauuuggccac

SEQ ID NO: 626122 - RNA, 19 nt, Artificial Sequence
  Description of Artificial Sequence: Synthetic oligonucleotide
  Sense strand starting at position 844 of SEQ ID NO: 585264
accaauugacgcugaacau

SEQ ID NO: 626123 - RNA, 19 nt, Artificial Sequence
  Description of Artificial Sequence: Synthetic oligonucleotide
  Antisense strand to SEQ ID NO: 626122
auguucagcgucaauuggu

SEQ ID NO: 626124 - RNA, 19 nt, Artificial Sequence
  Description of Artificial Sequence: Synthetic oligonucleotide
  Sense strand starting at position 1156 of SEQ ID NO: 585264
acguuagaacgccauuaca

SEQ ID NO: 626125 - RNA, 19 nt, Artificial Sequence
  Description of Artificial Sequence: Synthetic oligonucleotide
  Antisense strand to SEQ ID NO: 626124
uguaauggcguucuaacgu

SEQ ID NO: 626126 - RNA, 19 nt, Artificial Sequence
  Description of Artificial Sequence: Synthetic oligonucleotide
  Sense strand starting at position 1167 of SEQ ID NO: 585264
ccauuacaugguggaaagu

SEQ ID NO: 626127 - RNA, 19 nt, Artificial Sequence
  Description of Artificial Sequence: Synthetic oligonucleotide
  Antisense strand to SEQ ID NO: 626126
acuuuccaccauguaaugg

SEQ ID NO: 626128 - RNA, 19 nt, Artificial Sequence
  Description of Artificial Sequence: Synthetic oligonucleotide
  Sense strand starting at position 1177 of SEQ ID NO: 585264
guggaaaguacacgugaca

SEQ ID NO: 626129 - RNA, 19 nt, Artificial Sequence
  Description of Artificial Sequence: Synthetic oligonucleotide
  Antisense strand to SEQ ID NO: 626128
ugucacguguacuuuccac

SEQ ID NO: 626130 - RNA, 19 nt, Artificial Sequence
  Description of Artificial Sequence: Synthetic oligonucleotide
  Sense strand starting at position 1402 of SEQ ID NO: 585264
cauuacucagugugauaag

SEQ ID NO: 626131 - RNA, 19 nt, Artificial Sequence
  Description of Artificial Sequence: Synthetic oligonucleotide
  Antisense strand to SEQ ID NO: 626130
cuuaucacacugaguaaug

SEQ ID NO: 626132 - RNA, 19 nt, Artificial Sequence
  Description of Artificial Sequence: Synthetic oligonucleotide
  Sense strand starting at position 1463 of SEQ ID NO: 585264
ggauuaggaacacguguuu

SEQ ID NO: 626133 - RNA, 19 nt, Artificial Sequence
  Description of Artificial Sequence: Synthetic oligonucleotide
  Antisense strand to SEQ ID NO: 626132
aaacacguguuccuaaucc

SEQ ID NO: 626134 - RNA, 19 nt, Artificial Sequence
  Description of Artificial Sequence: Synthetic oligonucleotide
  Sense strand starting at position 1495 of SEQ ID NO: 585264
cgauaauuuaaguggcucu

SEQ ID NO: 626135 - RNA, 19 nt, Artificial Sequence
  Description of Artificial Sequence: Synthetic oligonucleotide
  Antisense strand to SEQ ID NO: 626134
agagccacuuaaauuaucg

SEQ ID NO: 626136 - RNA, 19 nt, Artificial Sequence
  Description of Artificial Sequence: Synthetic oligonucleotide
  Sense strand starting at position 1714 of SEQ ID NO: 585264
cccgcgaugcguucgaaga

SEQ ID NO: 626137 - RNA, 19 nt, Artificial Sequence
  Description of Artificial Sequence: Synthetic oligonucleotide
  Antisense strand to SEQ ID NO: 626136
ucuucgaacgcaucgcggg

SEQ ID NO: 626138 - RNA, 19 nt, Artificial Sequence
  Description of Artificial Sequence: Synthetic oligonucleotide
  Sense strand starting at position 2057 of SEQ ID NO: 585264
gugaaaguccuguaucuga

SEQ ID NO: 626139 - RNA, 19 nt, Artificial Sequence
  Description of Artificial Sequence: Synthetic oligonucleotide
  Antisense strand to SEQ ID NO: 626138
ucagauacaggacuuucac

SEQ ID NO: 626140 - RNA, 19 nt, Artificial Sequence
  Description of Artificial Sequence: Synthetic oligonucleotide
  Sense strand starting at position 2071 of SEQ ID NO: 585264
ucugauuggugguuauuag

SEQ ID NO: 626141 - RNA, 19 nt, Artificial Sequence
  Description of Artificial Sequence: Synthetic oligonucleotide
  Antisense strand to SEQ ID NO: 626140
cuaauaaccaccaaucaga

SEQ ID NO: 626142 - RNA, 19 nt, Artificial Sequence
  Description of Artificial Sequence: Synthetic oligonucleotide
  Sense strand starting at position 2081 of SEQ ID NO: 585264
gguuauuagggugacguca

SEQ ID NO: 626143 - RNA, 19 nt, Artificial Sequence
  Description of Artificial Sequence: Synthetic oligonucleotide
  Antisense strand to SEQ ID NO: 626142
ugacgucacccuaauaacc

SEQ ID NO: 626144 - RNA, 19 nt, Artificial Sequence
  Description of Artificial Sequence: Synthetic oligonucleotide
  Sense strand starting at position 2093 of SEQ ID NO: 585264
gacgucagagguuaguuau

SEQ ID NO: 626145 - RNA, 19 nt, Artificial Sequence
  Description of Artificial Sequence: Synthetic oligonucleotide
  Antisense strand to SEQ ID NO: 626144
auaacuaaccucugacguc

SEQ ID NO: 626146 - RNA, 19 nt, Artificial Sequence
  Description of Artificial Sequence: Synthetic oligonucleotide
  Sense strand starting at position 2726 of SEQ ID NO: 585264
gcuggacacagucauguuu

SEQ ID NO: 626147 - RNA, 19 nt, Artificial Sequence
  Description of Artificial Sequence: Synthetic oligonucleotide
  Antisense strand to SEQ ID NO: 626146
aaacaugacuguguccagc

SEQ ID NO: 626148 - RNA, 19 nt, Artificial Sequence
  Description of Artificial Sequence: Synthetic oligonucleotide
  Sense strand starting at position 2766 of SEQ ID NO: 585264
gcuagauaacauuguaaag

SEQ ID NO: 626149 - RNA, 19 nt, Artificial Sequence
  Description of Artificial Sequence: Synthetic oligonucleotide
  Antisense strand to SEQ ID NO: 626148
cuuuacaauguuaucuagc

SEQ ID NO: 626150 - RNA, 19 nt, Artificial Sequence
  Description of Artificial Sequence: Synthetic oligonucleotide
  Sense strand starting at position 2862 of SEQ ID NO: 585264
aaaguuguuguaggauacu

SEQ ID NO: 626151 - RNA, 19 nt, Artificial Sequence
  Description of Artificial Sequence: Synthetic oligonucleotide
  Antisense strand to SEQ ID NO: 626150
aguauccuacaacaacuuu

SEQ ID NO: 626152 - RNA, 19 nt, Artificial Sequence
  Description of Artificial Sequence: Synthetic oligonucleotide
  Sense strand starting at position 2874 of SEQ ID NO: 585264
ggauacuccggagaagcuu

SEQ ID NO: 626153 - RNA, 19 nt, Artificial Sequence
  Description of Artificial Sequence: Synthetic oligonucleotide
  Antisense strand to SEQ ID NO: 626152
aagcuucuccggaguaucc

SEQ ID NO: 626154 - RNA, 19 nt, Artificial Sequence
  Description of Artificial Sequence: Synthetic oligonucleotide
  Sense strand starting at position 2921 of SEQ ID NO: 585264
acguacaaaucccugaaau

SEQ ID NO: 626155 - RNA, 19 nt, Artificial Sequence
  Description of Artificial Sequence: Synthetic oligonucleotide
  Antisense strand to SEQ ID NO: 626154
auuucagggauuuguacgu

SEQ ID NO: 626156 - RNA, 19 nt, Artificial Sequence
  Description of Artificial Sequence: Synthetic oligonucleotide
  Sense strand starting at position 2922 of SEQ ID NO: 585264
cguacaaaucccugaaauc

SEQ ID NO: 626157 - RNA, 19 nt, Artificial Sequence
  Description of Artificial Sequence: Synthetic oligonucleotide
  Antisense strand to SEQ ID NO: 626156
gauuucagggauuuguacg

SEQ ID NO: 626158 - RNA, 19 nt, Artificial Sequence
  Description of Artificial Sequence: Synthetic oligonucleotide
  Sense strand starting at position 3289 of SEQ ID NO: 585264
uuaauaguguugucaaaca

SEQ ID NO: 626159 - RNA, 19 nt, Artificial Sequence
  Description of Artificial Sequence: Synthetic oligonucleotide
  Antisense strand to SEQ ID NO: 626158
uguuugacaacacuauuaa

SEQ ID NO: 626160 - RNA, 19 nt, Artificial Sequence
  Description of Artificial Sequence: Synthetic oligonucleotide
  Sense strand starting at position 3294 of SEQ ID NO: 585264
aguguugucaaacagccau

SEQ ID NO: 626161 - RNA, 19 nt, Artificial Sequence
  Description of Artificial Sequence: Synthetic oligonucleotide
  Antisense strand to SEQ ID NO: 626160
auggcuguuugacaacacu

SEQ ID NO: 626162 - RNA, 19 nt, Artificial Sequence
  Description of Artificial Sequence: Synthetic oligonucleotide
  Sense strand starting at position 3319 of SEQ ID NO: 585264
gggauauacuugccauucu

SEQ ID NO: 626163 - RNA, 19 nt, Artificial Sequence
  Description of Artificial Sequence: Synthetic oligonucleotide
  Antisense strand to SEQ ID NO: 626162
agaauggcaaguauauccc

SEQ ID NO: 626164 - RNA, 19 nt, Artificial Sequence
  Description of Artificial Sequence: Synthetic oligonucleotide
  Sense strand starting at position 3383 of SEQ ID NO: 585264
agggcagccugauucuuaa

SEQ ID NO: 626165 - RNA, 19 nt, Artificial Sequence
  Description of Artificial Sequence: Synthetic oligonucleotide
  Antisense strand to SEQ ID NO: 626164
uuaagaaucaggcugcccu

SEQ ID NO: 626166 - RNA, 19 nt, Artificial Sequence
  Description of Artificial Sequence: Synthetic oligonucleotide
  Sense strand starting at position 3394 of SEQ ID NO: 585264
auucuuaaguggucuaacu

SEQ ID NO: 626167 - RNA, 19 nt, Artificial Sequence
  Description of Artificial Sequence: Synthetic oligonucleotide
  Antisense strand to SEQ ID NO: 626166
aguuagaccacuuaagaau

SEQ ID NO: 626168 - RNA, 19 nt, Artificial Sequence
  Description of Artificial Sequence: Synthetic oligonucleotide
  Sense strand starting at position 3396 of SEQ ID NO: 585264
ucuuaaguggucuaacucu

SEQ ID NO: 626169 - RNA, 19 nt, Artificial Sequence
  Description of Artificial Sequence: Synthetic oligonucleotide
  Antisense strand to SEQ ID NO: 626168
agaguuagaccacuuaaga

SEQ ID NO: 626170 - RNA, 19 nt, Artificial Sequence
  Description of Artificial Sequence: Synthetic oligonucleotide
  Sense strand starting at position 3421 of SEQ ID NO: 585264
uaacuuuacccaggugaug

SEQ ID NO: 626171 - RNA, 19 nt, Artificial Sequence
  Description of Artificial Sequence: Synthetic oligonucleotide
  Antisense strand to SEQ ID NO: 626170
caucaccuggguaaaguua

SEQ ID NO: 626172 - RNA, 19 nt, Artificial Sequence
  Description of Artificial Sequence: Synthetic oligonucleotide
  Sense strand starting at position 3444 of SEQ ID NO: 585264
ucuagugacucauuugcau

SEQ ID NO: 626173 - RNA, 19 nt, Artificial Sequence
  Description of Artificial Sequence: Synthetic oligonucleotide
  Antisense strand to SEQ ID NO: 626172
augcaaaugagucacuaga

SEQ ID NO: 626174 - RNA, 19 nt, Artificial Sequence
  Description of Artificial Sequence: Synthetic oligonucleotide
  Sense strand starting at position 3465 of SEQ ID NO: 585264
gaauuugauuccgauggaa

SEQ ID NO: 626175 - RNA, 19 nt, Artificial Sequence
  Description of Artificial Sequence: Synthetic oligonucleotide
  Antisense strand to SEQ ID NO: 626174
uuccaucggaaucaaauuc

SEQ ID NO: 626176 - RNA, 19 nt, Artificial Sequence
  Description of Artificial Sequence: Synthetic oligonucleotide
  Sense strand starting at position 3468 of SEQ ID NO: 585264
uuugauuccgauggaagga

SEQ ID NO: 626177 - RNA, 19 nt, Artificial Sequence
  Description of Artificial Sequence: Synthetic oligonucleotide
  Antisense strand to SEQ ID NO: 626176
uccuuccaucggaaucaaa

SEQ ID NO: 626178 - RNA, 19 nt, Artificial Sequence
  Description of Artificial Sequence: Synthetic oligonucleotide
  Sense strand starting at position 3534 of SEQ ID NO: 585264
gucccauuucuuuggagca

SEQ ID NO: 626179 - RNA, 19 nt, Artificial Sequence
  Description of Artificial Sequence: Synthetic oligonucleotide
  Antisense strand to SEQ ID NO: 626178
ugcuccaaagaaaugggac

SEQ ID NO: 626180 - RNA, 19 nt, Artificial Sequence
  Description of Artificial Sequence: Synthetic oligonucleotide
  Sense strand starting at position 3569 of SEQ ID NO: 585264
cuuguaguagcuuaggaua

SEQ ID NO: 626181 - RNA, 19 nt, Artificial Sequence
  Description of Artificial Sequence: Synthetic oligonucleotide
  Antisense strand to SEQ ID NO: 626180
uauccuaagcuacuacaag

SEQ ID NO: 626182 - RNA, 19 nt, Artificial Sequence
  Description of Artificial Sequence: Synthetic oligonucleotide
  Sense strand starting at position 3602 of SEQ ID NO: 585264
cugucuagcuaauuuguau

SEQ ID NO: 626183 - RNA, 19 nt, Artificial Sequence
  Description of Artificial Sequence: Synthetic oligonucleotide
  Antisense strand to SEQ ID NO: 626182
auacaaauuagcuagacag

SEQ ID NO: 626184 - RNA, 19 nt, Artificial Sequence
  Description of Artificial Sequence: Synthetic oligonucleotide
  Sense strand starting at position 3629 of SEQ ID NO: 585264
uuauuagaucgggauugcu

SEQ ID NO: 626185 - RNA, 19 nt, Artificial Sequence
  Description of Artificial Sequence: Synthetic oligonucleotide
  Antisense strand to SEQ ID NO: 626184
agcaaucccgaucuaauaa

SEQ ID NO: 626186 - RNA, 19 nt, Artificial Sequence
  Description of Artificial Sequence: Synthetic oligonucleotide
  Sense strand starting at position 3687 of SEQ ID NO: 585264
uaggaagcccuaugaguuu

SEQ ID NO: 626187 - RNA, 19 nt, Artificial Sequence
  Description of Artificial Sequence: Synthetic oligonucleotide
  Antisense strand to SEQ ID NO: 626186
aaacucauagggcuuccua

SEQ ID NO: 626188 - RNA, 19 nt, Artificial Sequence
  Description of Artificial Sequence: Synthetic oligonucleotide
  Sense strand starting at position 3874 of SEQ ID NO: 585264
cuauguaggucucugauca

SEQ ID NO: 626189 - RNA, 19 nt, Artificial Sequence
  Description of Artificial Sequence: Synthetic oligonucleotide
  Antisense strand to SEQ ID NO: 626188
ugaucagagaccuacauag

SEQ ID NO: 626190 - RNA, 19 nt, Artificial Sequence
  Description of Artificial Sequence: Synthetic oligonucleotide
  Sense strand starting at position 3875 of SEQ ID NO: 585264
uauguaggucucugaucaa

SEQ ID NO: 626191 - RNA, 19 nt, Artificial Sequence
  Description of Artificial Sequence: Synthetic oligonucleotide
  Antisense strand to SEQ ID NO: 626190
uugaucagagaccuacaua

SEQ ID NO: 626192 - RNA, 19 nt, Artificial Sequence
  Description of Artificial Sequence: Synthetic oligonucleotide
  Sense strand starting at position 3879 of SEQ ID NO: 585264
uaggucucugaucaaguaa

SEQ ID NO: 626193 - RNA, 19 nt, Artificial Sequence
  Description of Artificial Sequence: Synthetic oligonucleotide
  Antisense strand to SEQ ID NO: 626192
uuacuugaucagagaccua

SEQ ID NO: 626194 - RNA, 19 nt, Artificial Sequence
  Description of Artificial Sequence: Synthetic oligonucleotide
  Sense strand starting at position 54 of SEQ ID NO: 585265
aggcaauuuacucgagcuc

SEQ ID NO: 626195 - RNA, 19 nt, Artificial Sequence
  Description of Artificial Sequence: Synthetic oligonucleotide
  Antisense strand to SEQ ID NO: 626194
gagcucgaguaaauugccu

SEQ ID NO: 626196 - RNA, 19 nt, Artificial Sequence
  Description of Artificial Sequence: Synthetic oligonucleotide
  Sense strand starting at position 381 of SEQ ID NO: 585265
gauguaaagauaggugcau

SEQ ID NO: 626197 - RNA, 19 nt, Artificial Sequence
  Description of Artificial Sequence: Synthetic oligonucleotide
  Antisense strand to SEQ ID NO: 626196
augcaccuaucuuuacauc

SEQ ID NO: 626198 - RNA, 19 nt, Artificial Sequence
  Description of Artificial Sequence: Synthetic oligonucleotide
  Sense strand starting at position 382 of SEQ ID NO: 585265
auguaaagauaggugcauu

SEQ ID NO: 626199 - RNA, 19 nt, Artificial Sequence
  Description of Artificial Sequence: Synthetic oligonucleotide
  Antisense strand to SEQ ID NO: 626198
aaugcaccuaucuuuacau

SEQ ID NO: 626200 - RNA, 19 nt, Artificial Sequence
  Description of Artificial Sequence: Synthetic oligonucleotide
  Sense strand starting at position 463 of SEQ ID NO: 585265
accagcaaugauugagaau

SEQ ID NO: 626201 - RNA, 19 nt, Artificial Sequence
  Description of Artificial Sequence: Synthetic oligonucleotide
  Antisense strand to SEQ ID NO: 626200
auucucaaucauugcuggu

SEQ ID NO: 626202 - RNA, 19 nt, Artificial Sequence
  Description of Artificial Sequence: Synthetic oligonucleotide
  Sense strand starting at position 532 of SEQ ID NO: 585265
augacuggccuauggugaa

SEQ ID NO: 626203 - RNA, 19 nt, Artificial Sequence
  Description of Artificial Sequence: Synthetic oligonucleotide
  Antisense strand to SEQ ID NO: 626202
uucaccauaggccagucau

SEQ ID NO: 626204 - RNA, 19 nt, Artificial Sequence
  Description of Artificial Sequence: Synthetic oligonucleotide
  Sense strand starting at position 539 of SEQ ID NO: 585265
gccuauggugaauaguaga

SEQ ID NO: 626205 - RNA, 19 nt, Artificial Sequence
  Description of Artificial Sequence: Synthetic oligonucleotide
  Antisense strand to SEQ ID NO: 626204
ucuacuauucaccauaggc

SEQ ID NO: 626206 - RNA, 19 nt, Artificial Sequence
  Description of Artificial Sequence: Synthetic oligonucleotide
  Sense strand starting at position 546 of SEQ ID NO: 585265
gugaauaguagaugcuuaa

SEQ ID NO: 626207 - RNA, 19 nt, Artificial Sequence
  Description of Artificial Sequence: Synthetic oligonucleotide
  Antisense strand to SEQ ID NO: 626206
uuaagcaucuacuauucac

SEQ ID NO: 626208 - RNA, 19 nt, Artificial Sequence
  Description of Artificial Sequence: Synthetic oligonucleotide
  Sense strand starting at position 572 of SEQ ID NO: 585265
uaguaaauuggaugguaaa

SEQ ID NO: 626209 - RNA, 19 nt, Artificial Sequence
  Description of Artificial Sequence: Synthetic oligonucleotide
  Antisense strand to SEQ ID NO: 626208
uuuaccauccaauuuacua

SEQ ID NO: 626210 - RNA, 19 nt, Artificial Sequence
  Description of Artificial Sequence: Synthetic oligonucleotide
  Sense strand starting at position 573 of SEQ ID NO: 585265
aguaaauuggaugguaaau

SEQ ID NO: 626211 - RNA, 19 nt, Artificial Sequence
  Description of Artificial Sequence: Synthetic oligonucleotide
  Antisense strand to SEQ ID NO: 626210
auuuaccauccaauuuacu

SEQ ID NO: 626212 - RNA, 19 nt, Artificial Sequence
  Description of Artificial Sequence: Synthetic oligonucleotide
  Sense strand starting at position 682 of SEQ ID NO: 585265
aggagaaggcaagguguua

SEQ ID NO: 626213 - RNA, 19 nt, Artificial Sequence
  Description of Artificial Sequence: Synthetic oligonucleotide
  Antisense strand to SEQ ID NO: 626212
uaacaccuugccuucuccu

SEQ ID NO: 626214 - RNA, 19 nt, Artificial Sequence
  Description of Artificial Sequence: Synthetic oligonucleotide
  Sense strand starting at position 1020 of SEQ ID NO: 585265
uccaguuuagucggaaaga

SEQ ID NO: 626215 - RNA, 19 nt, Artificial Sequence
  Description of Artificial Sequence: Synthetic oligonucleotide
  Antisense strand to SEQ ID NO: 626214
ucuuuccgacuaaacugga

SEQ ID NO: 626216 - RNA, 19 nt, Artificial Sequence
  Description of Artificial Sequence: Synthetic oligonucleotide
  Sense strand starting at position 1173 of SEQ ID NO: 585265
gugcaacauccagacauca

SEQ ID NO: 626217 - RNA, 19 nt, Artificial Sequence
  Description of Artificial Sequence: Synthetic oligonucleotide
  Antisense strand to SEQ ID NO: 626216
ugaugucuggauguugcac

SEQ ID NO: 626218 - RNA, 19 nt, Artificial Sequence
  Description of Artificial Sequence: Synthetic oligonucleotide
  Sense strand starting at position 1543 of SEQ ID NO: 585265
aauagugaguggcucugaa

SEQ ID NO: 626219 - RNA, 19 nt, Artificial Sequence
  Description of Artificial Sequence: Synthetic oligonucleotide
  Antisense strand to SEQ ID NO: 626218
uucagagccacucacuauu

SEQ ID NO: 626220 - RNA, 19 nt, Artificial Sequence
  Description of Artificial Sequence: Synthetic oligonucleotide
  Sense strand starting at position 1564 of SEQ ID NO: 585265
gagccuuuggguuggacaa

SEQ ID NO: 626221 - RNA, 19 nt, Artificial Sequence
  Description of Artificial Sequence: Synthetic oligonucleotide
  Antisense strand to SEQ ID NO: 626220
uuguccaacccaaaggcuc

SEQ ID NO: 626222 - RNA, 19 nt, Artificial Sequence
  Description of Artificial Sequence: Synthetic oligonucleotide
  Sense strand starting at position 1792 of SEQ ID NO: 585265
uucccauggccuuagaaga

SEQ ID NO: 626223 - RNA, 19 nt, Artificial Sequence
  Description of Artificial Sequence: Synthetic oligonucleotide
  Antisense strand to SEQ ID NO: 626222
ucuucuaaggccaugggaa

SEQ ID NO: 626224 - RNA, 19 nt, Artificial Sequence
  Description of Artificial Sequence: Synthetic oligonucleotide
  Sense strand starting at position 1963 of SEQ ID NO: 585265
ccagcucgggcauaaugaa

SEQ ID NO: 626225 - RNA, 19 nt, Artificial Sequence
  Description of Artificial Sequence: Synthetic oligonucleotide
  Antisense strand to SEQ ID NO: 626224
uucauuaugcccgagcugg

SEQ ID NO: 626226 - RNA, 19 nt, Artificial Sequence
  Description of Artificial Sequence: Synthetic oligonucleotide
  Sense strand starting at position 2120 of SEQ ID NO: 585265
auagguauccugcauaauc

SEQ ID NO: 626227 - RNA, 19 nt, Artificial Sequence
  Description of Artificial Sequence: Synthetic oligonucleotide
  Antisense strand to SEQ ID NO: 626226
gauuaugcaggauaccuau

SEQ ID NO: 626228 - RNA, 19 nt, Artificial Sequence
  Description of Artificial Sequence: Synthetic oligonucleotide
  Sense strand starting at position 2122 of SEQ ID NO: 585265
agguauccugcauaaucga

SEQ ID NO: 626229 - RNA, 19 nt, Artificial Sequence
  Description of Artificial Sequence: Synthetic oligonucleotide
  Antisense strand to SEQ ID NO: 626228
ucgauuaugcaggauaccu

SEQ ID NO: 626230 - RNA, 19 nt, Artificial Sequence
  Description of Artificial Sequence: Synthetic oligonucleotide
  Sense strand starting at position 2139 of SEQ ID NO: 585265
gaguccuauuggucuaaau

SEQ ID NO: 626231 - RNA, 19 nt, Artificial Sequence
  Description of Artificial Sequence: Synthetic oligonucleotide
  Antisense strand to SEQ ID NO: 626230
auuuagaccaauaggacuc

SEQ ID NO: 626232 - RNA, 19 nt, Artificial Sequence
  Description of Artificial Sequence: Synthetic oligonucleotide
  Sense strand starting at position 2141 of SEQ ID NO: 585265
guccuauuggucuaaauaa

SEQ ID NO: 626233 - RNA, 19 nt, Artificial Sequence
  Description of Artificial Sequence: Synthetic oligonucleotide
  Antisense strand to SEQ ID NO: 626232
uuauuuagaccaauaggac

SEQ ID NO: 626234 - RNA, 19 nt, Artificial Sequence
  Description of Artificial Sequence: Synthetic oligonucleotide
  Sense strand starting at position 2245 of SEQ ID NO: 585265
cuuucuugaccguauagau

SEQ ID NO: 626235 - RNA, 19 nt, Artificial Sequence
  Description of Artificial Sequence: Synthetic oligonucleotide
  Antisense strand to SEQ ID NO: 626234
aucuauacggucaagaaag

SEQ ID NO: 626236 - RNA, 19 nt, Artificial Sequence
  Description of Artificial Sequence: Synthetic oligonucleotide
  Sense strand starting at position 2749 of SEQ ID NO: 585265
agaacugagcacuauguuu

SEQ ID NO: 626237 - RNA, 19 nt, Artificial Sequence
  Description of Artificial Sequence: Synthetic oligonucleotide
  Antisense strand to SEQ ID NO: 626236
aaacauagugcucaguucu

SEQ ID NO: 626238 - RNA, 19 nt, Artificial Sequence
  Description of Artificial Sequence: Synthetic oligonucleotide
  Sense strand starting at position 2755 of SEQ ID NO: 585265
gagcacuauguuuaaugua

SEQ ID NO: 626239 - RNA, 19 nt, Artificial Sequence
  Description of Artificial Sequence: Synthetic oligonucleotide
  Antisense strand to SEQ ID NO: 626238
uacauuaaacauagugcuc

SEQ ID NO: 626240 - RNA, 19 nt, Artificial Sequence
  Description of Artificial Sequence: Synthetic oligonucleotide
  Sense strand starting at position 2807 of SEQ ID NO: 585265
aaagguuacguagaucagu

SEQ ID NO: 626241 - RNA, 19 nt, Artificial Sequence
  Description of Artificial Sequence: Synthetic oligonucleotide
  Antisense strand to SEQ ID NO: 626240
acugaucuacguaaccuuu

SEQ ID NO: 626242 - RNA, 19 nt, Artificial Sequence
  Description of Artificial Sequence: Synthetic oligonucleotide
  Sense strand starting at position 2824 of SEQ ID NO: 585265
gucuucggugucuugguua

SEQ ID NO: 626243 - RNA, 19 nt, Artificial Sequence
  Description of Artificial Sequence: Synthetic oligonucleotide
  Antisense strand to SEQ ID NO: 626242
uaaccaagacaccgaagac

SEQ ID NO: 626244 - RNA, 19 nt, Artificial Sequence
  Description of Artificial Sequence: Synthetic oligonucleotide
  Sense strand starting at position 2830 of SEQ ID NO: 585265
ggugucuugguuagguagu

SEQ ID NO: 626245 - RNA, 19 nt, Artificial Sequence
  Description of Artificial Sequence: Synthetic oligonucleotide
  Antisense strand to SEQ ID NO: 626244
acuaccuaaccaagacacc

SEQ ID NO: 626246 - RNA, 19 nt, Artificial Sequence
  Description of Artificial Sequence: Synthetic oligonucleotide
  Sense strand starting at position 2907 of SEQ ID NO: 585265
ucaucuuaagcuuagugga

SEQ ID NO: 626247 - RNA, 19 nt, Artificial Sequence
  Description of Artificial Sequence: Synthetic oligonucleotide
  Antisense strand to SEQ ID NO: 626246
uccacuaagcuuaagauga

SEQ ID NO: 626248 - RNA, 19 nt, Artificial Sequence
  Description of Artificial Sequence: Synthetic oligonucleotide
  Sense strand starting at position 2954 of SEQ ID NO: 585265
uuauccaaguauguugaau

SEQ ID NO: 626249 - RNA, 19 nt, Artificial Sequence
  Description of Artificial Sequence: Synthetic oligonucleotide
  Antisense strand to SEQ ID NO: 626248
auucaacauacuuggauaa

SEQ ID NO: 626250 - RNA, 19 nt, Artificial Sequence
  Description of Artificial Sequence: Synthetic oligonucleotide
  Sense strand starting at position 3124 of SEQ ID NO: 585265
ugagaaauaucucucgaau

SEQ ID NO: 626251 - RNA, 19 nt, Artificial Sequence
  Description of Artificial Sequence: Synthetic oligonucleotide
  Antisense strand to SEQ ID NO: 626250
auucgagagauauuucuca

SEQ ID NO: 626252 - RNA, 19 nt, Artificial Sequence
  Description of Artificial Sequence: Synthetic oligonucleotide
  Sense strand starting at position 3136 of SEQ ID NO: 585265
cucgaaucuguauaauuaa

SEQ ID NO: 626253 - RNA, 19 nt, Artificial Sequence
  Description of Artificial Sequence: Synthetic oligonucleotide
  Antisense strand to SEQ ID NO: 626252
uuaauuauacagauucgag

SEQ ID NO: 626254 - RNA, 19 nt, Artificial Sequence
  Description of Artificial Sequence: Synthetic oligonucleotide
  Sense strand starting at position 3163 of SEQ ID NO: 585265
gaacauuaaugauugaguu

SEQ ID NO: 626255 - RNA, 19 nt, Artificial Sequence
  Description of Artificial Sequence: Synthetic oligonucleotide
  Antisense strand to SEQ ID NO: 626254
aacucaaucauuaauguuc

SEQ ID NO: 626256 - RNA, 19 nt, Artificial Sequence
  Description of Artificial Sequence: Synthetic oligonucleotide
  Sense strand starting at position 3388 of SEQ ID NO: 585265
cugaaucagaucuggaugu

SEQ ID NO: 626257 - RNA, 19 nt, Artificial Sequence
  Description of Artificial Sequence: Synthetic oligonucleotide
  Antisense strand to SEQ ID NO: 626256
acauccagaucugauucag

SEQ ID NO: 626258 - RNA, 19 nt, Artificial Sequence
  Description of Artificial Sequence: Synthetic oligonucleotide
  Sense strand starting at position 3392 of SEQ ID NO: 585265
aucagaucuggauguacga

SEQ ID NO: 626259 - RNA, 19 nt, Artificial Sequence
  Description of Artificial Sequence: Synthetic oligonucleotide
  Antisense strand to SEQ ID NO: 626258
ucguacauccagaucugau

SEQ ID NO: 626260 - RNA, 19 nt, Artificial Sequence
  Description of Artificial Sequence: Synthetic oligonucleotide
  Sense strand starting at position 3669 of SEQ ID NO: 585265
gccaauuguggauagugau

SEQ ID NO: 626261 - RNA, 19 nt, Artificial Sequence
  Description of Artificial Sequence: Synthetic oligonucleotide
  Antisense strand to SEQ ID NO: 626260
aucacuauccacaauuggc

SEQ ID NO: 626262 - RNA, 19 nt, Artificial Sequence
  Description of Artificial Sequence: Synthetic oligonucleotide
  Sense strand starting at position 3792 of SEQ ID NO: 585265
uugaaauauguuggcuaua

SEQ ID NO: 626263 - RNA, 19 nt, Artificial Sequence
  Description of Artificial Sequence: Synthetic oligonucleotide
  Antisense strand to SEQ ID NO: 626262
uauagccaacauauuucaa

SEQ ID NO: 626264 - RNA, 19 nt, Artificial Sequence
  Description of Artificial Sequence: Synthetic oligonucleotide
  Sense strand starting at position 3793 of SEQ ID NO: 585265
ugaaauauguuggcuauau

SEQ ID NO: 626265 - RNA, 19 nt, Artificial Sequence
  Description of Artificial Sequence: Synthetic oligonucleotide
  Antisense strand to SEQ ID NO: 626264
auauagccaacauauuuca

SEQ ID NO: 626266 - RNA, 19 nt, Artificial Sequence
  Description of Artificial Sequence: Synthetic oligonucleotide
  Sense strand starting at position 3794 of SEQ ID NO: 585265
gaaauauguuggcuauauu

SEQ ID NO: 626267 - RNA, 19 nt, Artificial Sequence
  Description of Artificial Sequence: Synthetic oligonucleotide
  Antisense strand to SEQ ID NO: 626266
aauauagccaacauauuuc

SEQ ID NO: 626268 - RNA, 19 nt, Artificial Sequence
  Description of Artificial Sequence: Synthetic oligonucleotide
  Sense strand starting at position 3860 of SEQ ID NO: 585265
uguucuccuagauaagugu

SEQ ID NO: 626269 - RNA, 19 nt, Artificial Sequence
  Description of Artificial Sequence: Synthetic oligonucleotide
  Antisense strand to SEQ ID NO: 626268
acacuuaucuaggagaaca

SEQ ID NO: 626270 - RNA, 19 nt, Artificial Sequence
  Description of Artificial Sequence: Synthetic oligonucleotide
  Sense strand starting at position 3863 of SEQ ID NO: 585265
ucuccuagauaaguguaaa

SEQ ID NO: 626271 - RNA, 19 nt, Artificial Sequence
  Description of Artificial Sequence: Synthetic oligonucleotide
  Antisense strand to SEQ ID NO: 626270
uuuacacuuaucuaggaga

SEQ ID NO: 626272 - RNA, 19 nt, Artificial Sequence
  Description of Artificial Sequence: Synthetic oligonucleotide
  Sense strand starting at position 3905 of SEQ ID NO: 585265
acuggaaaucgcuaguaua

SEQ ID NO: 626273 - RNA, 19 nt, Artificial Sequence
  Description of Artificial Sequence: Synthetic oligonucleotide
  Antisense strand to SEQ ID NO: 626272
uauacuagcgauuuccagu

SEQ ID NO: 626274 - RNA, 19 nt, Artificial Sequence
  Description of Artificial Sequence: Synthetic oligonucleotide
  Sense strand starting at position 63 of SEQ ID NO: 585266
aggguauguaaucaucugu

SEQ ID NO: 626275 - RNA, 19 nt, Artificial Sequence
  Description of Artificial Sequence: Synthetic oligonucleotide
  Antisense strand to SEQ ID NO: 626274
acagaugauuacauacccu

SEQ ID NO: 626276 - RNA, 19 nt, Artificial Sequence
  Description of Artificial Sequence: Synthetic oligonucleotide
  Sense strand starting at position 68 of SEQ ID NO: 585266
auguaaucaucuguauucu

SEQ ID NO: 626277 - RNA, 19 nt, Artificial Sequence
  Description of Artificial Sequence: Synthetic oligonucleotide
  Antisense strand to SEQ ID NO: 626276
agaauacagaugauuacau

SEQ ID NO: 626278 - RNA, 19 nt, Artificial Sequence
  Description of Artificial Sequence: Synthetic oligonucleotide
  Sense strand starting at position 69 of SEQ ID NO: 585266
uguaaucaucuguauucua

SEQ ID NO: 626279 - RNA, 19 nt, Artificial Sequence
  Description of Artificial Sequence: Synthetic oligonucleotide
  Antisense strand to SEQ ID NO: 626278
uagaauacagaugauuaca

SEQ ID NO: 626280 - RNA, 19 nt, Artificial Sequence
  Description of Artificial Sequence: Synthetic oligonucleotide
  Sense strand starting at position 115 of SEQ ID NO: 585266
gggaguaaucacugauucu

SEQ ID NO: 626281 - RNA, 19 nt, Artificial Sequence
  Description of Artificial Sequence: Synthetic oligonucleotide
  Antisense strand to SEQ ID NO: 626280
agaaucagugauuacuccc

SEQ ID NO: 626282 - RNA, 19 nt, Artificial Sequence
  Description of Artificial Sequence: Synthetic oligonucleotide
  Sense strand starting at position 441 of SEQ ID NO: 585266
cagguuggguuucuuuaaa

SEQ ID NO: 626283 - RNA, 19 nt, Artificial Sequence
  Description of Artificial Sequence: Synthetic oligonucleotide
  Antisense strand to SEQ ID NO: 626282
uuuaaagaaacccaaccug

SEQ ID NO: 626284 - RNA, 19 nt, Artificial Sequence
  Description of Artificial Sequence: Synthetic oligonucleotide
  Sense strand starting at position 448 of SEQ ID NO: 585266
gguuucuuuaaagaagugu

SEQ ID NO: 626285 - RNA, 19 nt, Artificial Sequence
  Description of Artificial Sequence: Synthetic oligonucleotide
  Antisense strand to SEQ ID NO: 626284
acacuucuuuaaagaaacc

SEQ ID NO: 626286 - RNA, 19 nt, Artificial Sequence
  Description of Artificial Sequence: Synthetic oligonucleotide
  Sense strand starting at position 454 of SEQ ID NO: 585266
uuuaaagaagugugaggau

SEQ ID NO: 626287 - RNA, 19 nt, Artificial Sequence
  Description of Artificial Sequence: Synthetic oligonucleotide
  Antisense strand to SEQ ID NO: 626286
auccucacacuucuuuaaa

SEQ ID NO: 626288 - RNA, 19 nt, Artificial Sequence
  Description of Artificial Sequence: Synthetic oligonucleotide
  Sense strand starting at position 487 of SEQ ID NO: 585266
aaagcaaucucagugcaga

SEQ ID NO: 626289 - RNA, 19 nt, Artificial Sequence
  Description of Artificial Sequence: Synthetic oligonucleotide
  Antisense strand to SEQ ID NO: 626288
ucugcacugagauugcuuu

SEQ ID NO: 626290 - RNA, 19 nt, Artificial Sequence
  Description of Artificial Sequence: Synthetic oligonucleotide
  Sense strand starting at position 488 of SEQ ID NO: 585266
aagcaaucucagugcagau

SEQ ID NO: 626291 - RNA, 19 nt, Artificial Sequence
  Description of Artificial Sequence: Synthetic oligonucleotide
  Antisense strand to SEQ ID NO: 626290
aucugcacugagauugcuu

SEQ ID NO: 626292 - RNA, 19 nt, Artificial Sequence
  Description of Artificial Sequence: Synthetic oligonucleotide
  Sense strand starting at position 513 of SEQ ID NO: 585266
ugaauccuuccagguaucu

SEQ ID NO: 626293 - RNA, 19 nt, Artificial Sequence
  Description of Artificial Sequence: Synthetic oligonucleotide
  Antisense strand to SEQ ID NO: 626292
agauaccuggaaggauuca

SEQ ID NO: 626294 - RNA, 19 nt, Artificial Sequence
  Description of Artificial Sequence: Synthetic oligonucleotide
  Sense strand starting at position 1085 of SEQ ID NO: 585266
gggauugugucuucccuaa

SEQ ID NO: 626295 - RNA, 19 nt, Artificial Sequence
  Description of Artificial Sequence: Synthetic oligonucleotide
  Antisense strand to SEQ ID NO: 626294
uuagggaagacacaauccc

SEQ ID NO: 626296 - RNA, 19 nt, Artificial Sequence
  Description of Artificial Sequence: Synthetic oligonucleotide
  Sense strand starting at position 2032 of SEQ ID NO: 585266
ggcuguuucguccucuuua

SEQ ID NO: 626297 - RNA, 19 nt, Artificial Sequence
  Description of Artificial Sequence: Synthetic oligonucleotide
  Antisense strand to SEQ ID NO: 626296
uaaagaggacgaaacagcc

SEQ ID NO: 626298 - RNA, 19 nt, Artificial Sequence
  Description of Artificial Sequence: Synthetic oligonucleotide
  Sense strand starting at position 2078 of SEQ ID NO: 585266
uagaauaggucagugcuga

SEQ ID NO: 626299 - RNA, 19 nt, Artificial Sequence
  Description of Artificial Sequence: Synthetic oligonucleotide
  Antisense strand to SEQ ID NO: 626298
ucagcacugaccuauucua

SEQ ID NO: 626300 - RNA, 19 nt, Artificial Sequence
  Description of Artificial Sequence: Synthetic oligonucleotide
  Sense strand starting at position 2079 of SEQ ID NO: 585266
agaauaggucagugcugau

SEQ ID NO: 626301 - RNA, 19 nt, Artificial Sequence
  Description of Artificial Sequence: Synthetic oligonucleotide
  Antisense strand to SEQ ID NO: 626300
aucagcacugaccuauucu

SEQ ID NO: 626302 - RNA, 19 nt, Artificial Sequence
  Description of Artificial Sequence: Synthetic oligonucleotide
  Sense strand starting at position 2099 of SEQ ID NO: 585266
ggugauuauccguggauga

SEQ ID NO: 626303 - RNA, 19 nt, Artificial Sequence
  Description of Artificial Sequence: Synthetic oligonucleotide
  Antisense strand to SEQ ID NO: 626302
ucauccacggauaaucacc

SEQ ID NO: 626304 - RNA, 19 nt, Artificial Sequence
  Description of Artificial Sequence: Synthetic oligonucleotide
  Sense strand starting at position 2146 of SEQ ID NO: 585266
auagguauccugcauacuc

SEQ ID NO: 626305 - RNA, 19 nt, Artificial Sequence
  Description of Artificial Sequence: Synthetic oligonucleotide
  Antisense strand to SEQ ID NO: 626304
gaguaugcaggauaccuau

SEQ ID NO: 626306 - RNA, 19 nt, Artificial Sequence
  Description of Artificial Sequence: Synthetic oligonucleotide
  Sense strand starting at position 2165 of SEQ ID NO: 585266
gaguccuauuggucuaaau

SEQ ID NO: 626307 - RNA, 19 nt, Artificial Sequence
  Description of Artificial Sequence: Synthetic oligonucleotide
  Antisense strand to SEQ ID NO: 626306
auuuagaccaauaggacuc

SEQ ID NO: 626308 - RNA, 19 nt, Artificial Sequence
  Description of Artificial Sequence: Synthetic oligonucleotide
  Sense strand starting at position 2167 of SEQ ID NO: 585266
guccuauuggucuaaauaa

SEQ ID NO: 626309 - RNA, 19 nt, Artificial Sequence
  Description of Artificial Sequence: Synthetic oligonucleotide
  Antisense strand to SEQ ID NO: 626308
uuauuuagaccaauaggac

SEQ ID NO: 626310 - RNA, 19 nt, Artificial Sequence
  Description of Artificial Sequence: Synthetic oligonucleotide
  Sense strand starting at position 2271 of SEQ ID NO: 585266
cuuucuugaccguaaaggu

SEQ ID NO: 626311 - RNA, 19 nt, Artificial Sequence
  Description of Artificial Sequence: Synthetic oligonucleotide
  Antisense strand to SEQ ID NO: 626310
accuuuacggucaagaaag

SEQ ID NO: 626312 - RNA, 19 nt, Artificial Sequence
  Description of Artificial Sequence: Synthetic oligonucleotide
  Sense strand starting at position 2815 of SEQ ID NO: 585266
gguguuaaucuuuaaccug

SEQ ID NO: 626313 - RNA, 19 nt, Artificial Sequence
  Description of Artificial Sequence: Synthetic oligonucleotide
  Antisense strand to SEQ ID NO: 626312
cagguuaaagauuaacacc

SEQ ID NO: 626314 - RNA, 19 nt, Artificial Sequence
  Description of Artificial Sequence: Synthetic oligonucleotide
  Sense strand starting at position 2833 of SEQ ID NO: 585266
guuuacauugccugaauuu

SEQ ID NO: 626315 - RNA, 19 nt, Artificial Sequence
  Description of Artificial Sequence: Synthetic oligonucleotide
  Antisense strand to SEQ ID NO: 626314
aaauucaggcaauguaaac

SEQ ID NO: 626316 - RNA, 19 nt, Artificial Sequence
  Description of Artificial Sequence: Synthetic oligonucleotide
  Sense strand starting at position 3086 of SEQ ID NO: 585266
agccucuuacugggaguua

SEQ ID NO: 626317 - RNA, 19 nt, Artificial Sequence
  Description of Artificial Sequence: Synthetic oligonucleotide
  Antisense strand to SEQ ID NO: 626316
uaacucccaguaagaggcu

SEQ ID NO: 626318 - RNA, 19 nt, Artificial Sequence
  Description of Artificial Sequence: Synthetic oligonucleotide
  Sense strand starting at position 3128 of SEQ ID NO: 585266
auuuaugauucugggaaac

SEQ ID NO: 626319 - RNA, 19 nt, Artificial Sequence
  Description of Artificial Sequence: Synthetic oligonucleotide
  Antisense strand to SEQ ID NO: 626318
guuucccagaaucauaaau

SEQ ID NO: 626320 - RNA, 19 nt, Artificial Sequence
  Description of Artificial Sequence: Synthetic oligonucleotide
  Sense strand starting at position 3153 of SEQ ID NO: 585266
ggcuguaaggaauauagua

SEQ ID NO: 626321 - RNA, 19 nt, Artificial Sequence
  Description of Artificial Sequence: Synthetic oligonucleotide
  Antisense strand to SEQ ID NO: 626320
uacuauauuccuuacagcc

SEQ ID NO: 626322 - RNA, 19 nt, Artificial Sequence
  Description of Artificial Sequence: Synthetic oligonucleotide
  Sense strand starting at position 3365 of SEQ ID NO: 585266
guauacauuggucauguuu

SEQ ID NO: 626323 - RNA, 19 nt, Artificial Sequence
  Description of Artificial Sequence: Synthetic oligonucleotide
  Antisense strand to SEQ ID NO: 626322
aaacaugaccaauguauac

SEQ ID NO: 626324 - RNA, 19 nt, Artificial Sequence
  Description of Artificial Sequence: Synthetic oligonucleotide
  Sense strand starting at position 3408 of SEQ ID NO: 585266
cuuacaagaguuuggaaua

SEQ ID NO: 626325 - RNA, 19 nt, Artificial Sequence
  Description of Artificial Sequence: Synthetic oligonucleotide
  Antisense strand to SEQ ID NO: 626324
uauuccaaacucuuguaag

SEQ ID NO: 626326 - RNA, 19 nt, Artificial Sequence
  Description of Artificial Sequence: Synthetic oligonucleotide
  Sense strand starting at position 3483 of SEQ ID NO: 585266
ucggcagugacccaauaau

SEQ ID NO: 626327 - RNA, 19 nt, Artificial Sequence
  Description of Artificial Sequence: Synthetic oligonucleotide
  Antisense strand to SEQ ID NO: 626326
auuauugggucacugccga

SEQ ID NO: 626328 - RNA, 19 nt, Artificial Sequence
  Description of Artificial Sequence: Synthetic oligonucleotide
  Sense strand starting at position 3507 of SEQ ID NO: 585266
guauuuauguuaguguacu

SEQ ID NO: 626329 - RNA, 19 nt, Artificial Sequence
  Description of Artificial Sequence: Synthetic oligonucleotide
  Antisense strand to SEQ ID NO: 626328
aguacacuaacauaaauac

SEQ ID NO: 626330 - RNA, 19 nt, Artificial Sequence
  Description of Artificial Sequence: Synthetic oligonucleotide
  Sense strand starting at position 3517 of SEQ ID NO: 585266
uaguguacugcugaaauca

SEQ ID NO: 626331 - RNA, 19 nt, Artificial Sequence
  Description of Artificial Sequence: Synthetic oligonucleotide
  Antisense strand to SEQ ID NO: 626330
ugauuucagcaguacacua

SEQ ID NO: 626332 - RNA, 19 nt, Artificial Sequence
  Description of Artificial Sequence: Synthetic oligonucleotide
  Sense strand starting at position 3628 of SEQ ID NO: 585266
uuacaaauguauccuguaa

SEQ ID NO: 626333 - RNA, 19 nt, Artificial Sequence
  Description of Artificial Sequence: Synthetic oligonucleotide
  Antisense strand to SEQ ID NO: 626332
uuacaggauacauuuguaa

SEQ ID NO: 626334 - RNA, 19 nt, Artificial Sequence
  Description of Artificial Sequence: Synthetic oligonucleotide
  Sense strand starting at position 3652 of SEQ ID NO: 585266
uacaauuaguaagugaguu

SEQ ID NO: 626335 - RNA, 19 nt, Artificial Sequence
  Description of Artificial Sequence: Synthetic oligonucleotide
  Antisense strand to SEQ ID NO: 626334
aacucacuuacuaauugua

SEQ ID NO: 626336 - RNA, 19 nt, Artificial Sequence
  Description of Artificial Sequence: Synthetic oligonucleotide
  Sense strand starting at position 3668 of SEQ ID NO: 585266
guuaaauacuuaguaacug

SEQ ID NO: 626337 - RNA, 19 nt, Artificial Sequence
  Description of Artificial Sequence: Synthetic oligonucleotide
  Antisense strand to SEQ ID NO: 626336
caguuacuaaguauuuaac

SEQ ID NO: 626338 - RNA, 19 nt, Artificial Sequence
  Description of Artificial Sequence: Synthetic oligonucleotide
  Sense strand starting at position 3677 of SEQ ID NO: 585266
uuaguaacugcuggauaag

SEQ ID NO: 626339 - RNA, 19 nt, Artificial Sequence
  Description of Artificial Sequence: Synthetic oligonucleotide
  Antisense strand to SEQ ID NO: 626338
cuuauccagcaguuacuaa

SEQ ID NO: 626340 - RNA, 19 nt, Artificial Sequence
  Description of Artificial Sequence: Synthetic oligonucleotide
  Sense strand starting at position 3678 of SEQ ID NO: 585266
uaguaacugcuggauaagu

SEQ ID NO: 626341 - RNA, 19 nt, Artificial Sequence
  Description of Artificial Sequence: Synthetic oligonucleotide
  Antisense strand to SEQ ID NO: 626340
acuuauccagcaguuacua

SEQ ID NO: 626342 - RNA, 19 nt, Artificial Sequence
  Description of Artificial Sequence: Synthetic oligonucleotide
  Sense strand starting at position 3736 of SEQ ID NO: 585266
ugguaagguugguucugaa

SEQ ID NO: 626343 - RNA, 19 nt, Artificial Sequence
  Description of Artificial Sequence: Synthetic oligonucleotide
  Antisense strand to SEQ ID NO: 626342
uucagaaccaaccuuacca

SEQ ID NO: 626344 - RNA, 19 nt, Artificial Sequence
  Description of Artificial Sequence: Synthetic oligonucleotide
  Sense strand starting at position 3743 of SEQ ID NO: 585266
guugguucugaauacuuau

SEQ ID NO: 626345 - RNA, 19 nt, Artificial Sequence
  Description of Artificial Sequence: Synthetic oligonucleotide
  Antisense strand to SEQ ID NO: 626344
auaaguauucagaaccaac

SEQ ID NO: 626346 - RNA, 19 nt, Artificial Sequence
  Description of Artificial Sequence: Synthetic oligonucleotide
  Sense strand starting at position 3746 of SEQ ID NO: 585266
gguucugaauacuuauuga

SEQ ID NO: 626347 - RNA, 19 nt, Artificial Sequence
  Description of Artificial Sequence: Synthetic oligonucleotide
  Antisense strand to SEQ ID NO: 626346
ucaauaaguauucagaacc

SEQ ID NO: 626348 - RNA, 19 nt, Artificial Sequence
  Description of Artificial Sequence: Synthetic oligonucleotide
  Sense strand starting at position 3770 of SEQ ID NO: 585266
agagcacuagugggugaau

SEQ ID NO: 626349 - RNA, 19 nt, Artificial Sequence
  Description of Artificial Sequence: Synthetic oligonucleotide
  Antisense strand to SEQ ID NO: 626348
auucacccacuagugcucu

SEQ ID NO: 626350 - RNA, 19 nt, Artificial Sequence
  Description of Artificial Sequence: Synthetic oligonucleotide
  Sense strand starting at position 3771 of SEQ ID NO: 585266
gagcacuagugggugaaua

SEQ ID NO: 626351 - RNA, 19 nt, Artificial Sequence
  Description of Artificial Sequence: Synthetic oligonucleotide
  Antisense strand to SEQ ID NO: 626350
uauucacccacuagugcuc

SEQ ID NO: 626352 - RNA, 19 nt, Artificial Sequence
  Description of Artificial Sequence: Synthetic oligonucleotide
  Sense strand starting at position 3850 of SEQ ID NO: 585266
aggucaguuccucauguua

SEQ ID NO: 626353 - RNA, 19 nt, Artificial Sequence
  Description of Artificial Sequence: Synthetic oligonucleotide
  Antisense strand to SEQ ID NO: 626352
uaacaugaggaacugaccu

SEQ ID NO: 626354 - RNA, 19 nt, Artificial Sequence
  Description of Artificial Sequence: Synthetic oligonucleotide
  Sense strand starting at position 121 of SEQ ID NO: 585267
cuguguguaccucaauaaa

SEQ ID NO: 626355 - RNA, 19 nt, Artificial Sequence
  Description of Artificial Sequence: Synthetic oligonucleotide
  Antisense strand to SEQ ID NO: 626354
uuuauugagguacacacag

SEQ ID NO: 626356 - RNA, 19 nt, Artificial Sequence
  Description of Artificial Sequence: Synthetic oligonucleotide
  Sense strand starting at position 287 of SEQ ID NO: 585267
ggaguacacuuacuggaua

SEQ ID NO: 626357 - RNA, 19 nt, Artificial Sequence
  Description of Artificial Sequence: Synthetic oligonucleotide
  Antisense strand to SEQ ID NO: 626356
uauccaguaaguguacucc

SEQ ID NO: 626358 - RNA, 19 nt, Artificial Sequence
  Description of Artificial Sequence: Synthetic oligonucleotide
  Sense strand starting at position 345 of SEQ ID NO: 585267
guggaagaguucccacacu

SEQ ID NO: 626359 - RNA, 19 nt, Artificial Sequence
  Description of Artificial Sequence: Synthetic oligonucleotide
  Antisense strand to SEQ ID NO: 626358
agugugggaacucuuccac

SEQ ID NO: 626360 - RNA, 19 nt, Artificial Sequence
  Description of Artificial Sequence: Synthetic oligonucleotide
  Sense strand starting at position 357 of SEQ ID NO: 585267
ccacacugauucuuggcaa

SEQ ID NO: 626361 - RNA, 19 nt, Artificial Sequence
  Description of Artificial Sequence: Synthetic oligonucleotide
  Antisense strand to SEQ ID NO: 626360
uugccaagaaucagugugg

SEQ ID NO: 626362 - RNA, 19 nt, Artificial Sequence
  Description of Artificial Sequence: Synthetic oligonucleotide
  Sense strand starting at position 626 of SEQ ID NO: 585267
acaagagaauuaugggaau

SEQ ID NO: 626363 - RNA, 19 nt, Artificial Sequence
  Description of Artificial Sequence: Synthetic oligonucleotide
  Antisense strand to SEQ ID NO: 626362
auucccauaauucucuugu

SEQ ID NO: 626364 - RNA, 19 nt, Artificial Sequence
  Description of Artificial Sequence: Synthetic oligonucleotide
  Sense strand starting at position 755 of SEQ ID NO: 585267
gggauuggccauugacauc

SEQ ID NO: 626365 - RNA, 19 nt, Artificial Sequence
  Description of Artificial Sequence: Synthetic oligonucleotide
  Antisense strand to SEQ ID NO: 626364
gaugucaauggccaauccc

SEQ ID NO: 626366 - RNA, 19 nt, Artificial Sequence
  Description of Artificial Sequence: Synthetic oligonucleotide
  Sense strand starting at position 789 of SEQ ID NO: 585267
acguguacggugcuguaaa

SEQ ID NO: 626367 - RNA, 19 nt, Artificial Sequence
  Description of Artificial Sequence: Synthetic oligonucleotide
  Antisense strand to SEQ ID NO: 626366
uuuacagcaccguacacgu

SEQ ID NO: 626368 - RNA, 19 nt, Artificial Sequence
  Description of Artificial Sequence: Synthetic oligonucleotide
  Sense strand starting at position 907 of SEQ ID NO: 585267
agucgauuuguacguuugu

SEQ ID NO: 626369 - RNA, 19 nt, Artificial Sequence
  Description of Artificial Sequence: Synthetic oligonucleotide
  Antisense strand to SEQ ID NO: 626368
acaaacguacaaaucgacu

SEQ ID NO: 626370 - RNA, 19 nt, Artificial Sequence
  Description of Artificial Sequence: Synthetic oligonucleotide
  Sense strand starting at position 980 of SEQ ID NO: 585267
ccggaagcacuguggauau

SEQ ID NO: 626371 - RNA, 19 nt, Artificial Sequence
  Description of Artificial Sequence: Synthetic oligonucleotide
  Antisense strand to SEQ ID NO: 626370
auauccacagugcuuccgg

SEQ ID NO: 626372 - RNA, 19 nt, Artificial Sequence
  Description of Artificial Sequence: Synthetic oligonucleotide
  Sense strand starting at position 1005 of SEQ ID NO: 585267
agugacacuuaaguauuau

SEQ ID NO: 626373 - RNA, 19 nt, Artificial Sequence
  Description of Artificial Sequence: Synthetic oligonucleotide
  Antisense strand to SEQ ID NO: 626372
auaauacuuaagugucacu

SEQ ID NO: 626374 - RNA, 19 nt, Artificial Sequence
  Description of Artificial Sequence: Synthetic oligonucleotide
  Sense strand starting at position 1060 of SEQ ID NO: 585267
uuacuagguuugucugaug

SEQ ID NO: 626375 - RNA, 19 nt, Artificial Sequence
  Description of Artificial Sequence: Synthetic oligonucleotide
  Antisense strand to SEQ ID NO: 626374
caucagacaaaccuaguaa

SEQ ID NO: 626376 - RNA, 19 nt, Artificial Sequence
  Description of Artificial Sequence: Synthetic oligonucleotide
  Sense strand starting at position 1482 of SEQ ID NO: 585267
gaaaucgucuuuguagcaa

SEQ ID NO: 626377 - RNA, 19 nt, Artificial Sequence
  Description of Artificial Sequence: Synthetic oligonucleotide
  Antisense strand to SEQ ID NO: 626376
uugcuacaaagacgauuuc

SEQ ID NO: 626378 - RNA, 19 nt, Artificial Sequence
  Description of Artificial Sequence: Synthetic oligonucleotide
  Sense strand starting at position 1532 of SEQ ID NO: 585267
gccaguucucuuugggaag

SEQ ID NO: 626379 - RNA, 19 nt, Artificial Sequence
  Description of Artificial Sequence: Synthetic oligonucleotide
  Antisense strand to SEQ ID NO: 626378
cuucccaaagagaacuggc

SEQ ID NO: 626380 - RNA, 19 nt, Artificial Sequence
  Description of Artificial Sequence: Synthetic oligonucleotide
  Sense strand starting at position 1995 of SEQ ID NO: 585267
cgggcaugacugggaguaa

SEQ ID NO: 626381 - RNA, 19 nt, Artificial Sequence
  Description of Artificial Sequence: Synthetic oligonucleotide
  Antisense strand to SEQ ID NO: 626380
uuacucccagucaugcccg

SEQ ID NO: 626382 - RNA, 19 nt, Artificial Sequence
  Description of Artificial Sequence: Synthetic oligonucleotide
  Sense strand starting at position 2127 of SEQ ID NO: 585267
uggugaguccuggaaacgu

SEQ ID NO: 626383 - RNA, 19 nt, Artificial Sequence
  Description of Artificial Sequence: Synthetic oligonucleotide
  Antisense strand to SEQ ID NO: 626382
acguuuccaggacucacca

SEQ ID NO: 626384 - RNA, 19 nt, Artificial Sequence
  Description of Artificial Sequence: Synthetic oligonucleotide
  Sense strand starting at position 2131 of SEQ ID NO: 585267
gaguccuggaaacguauau

SEQ ID NO: 626385 - RNA, 19 nt, Artificial Sequence
  Description of Artificial Sequence: Synthetic oligonucleotide
  Antisense strand to SEQ ID NO: 626384
auauacguuuccaggacuc

SEQ ID NO: 626386 - RNA, 19 nt, Artificial Sequence
  Description of Artificial Sequence: Synthetic oligonucleotide
  Sense strand starting at position 2135 of SEQ ID NO: 585267
ccuggaaacguauauuaac

SEQ ID NO: 626387 - RNA, 19 nt, Artificial Sequence
  Description of Artificial Sequence: Synthetic oligonucleotide
  Antisense strand to SEQ ID NO: 626386
guuaauauacguuuccagg

SEQ ID NO: 626388 - RNA, 19 nt, Artificial Sequence
  Description of Artificial Sequence: Synthetic oligonucleotide
  Sense strand starting at position 2144 of SEQ ID NO: 585267
guauauuaacuuuguccaa

SEQ ID NO: 626389 - RNA, 19 nt, Artificial Sequence
  Description of Artificial Sequence: Synthetic oligonucleotide
  Antisense strand to SEQ ID NO: 626388
uuggacaaaguuaauauac

SEQ ID NO: 626390 - RNA, 19 nt, Artificial Sequence
  Description of Artificial Sequence: Synthetic oligonucleotide
  Sense strand starting at position 2185 of SEQ ID NO: 585267
ccgcaaucccauugguuaa

SEQ ID NO: 626391 - RNA, 19 nt, Artificial Sequence
  Description of Artificial Sequence: Synthetic oligonucleotide
  Antisense strand to SEQ ID NO: 626390
uuaaccaaugggauugcgg

SEQ ID NO: 626392 - RNA, 19 nt, Artificial Sequence
  Description of Artificial Sequence: Synthetic oligonucleotide
  Sense strand starting at position 2210 of SEQ ID NO: 585267
acuguaauguuagccaaua

SEQ ID NO: 626393 - RNA, 19 nt, Artificial Sequence
  Description of Artificial Sequence: Synthetic oligonucleotide
  Antisense strand to SEQ ID NO: 626392
uauuggcuaacauuacagu

SEQ ID NO: 626394 - RNA, 19 nt, Artificial Sequence
  Description of Artificial Sequence: Synthetic oligonucleotide
  Sense strand starting at position 2211 of SEQ ID NO: 585267
cuguaauguuagccaauag

SEQ ID NO: 626395 - RNA, 19 nt, Artificial Sequence
  Description of Artificial Sequence: Synthetic oligonucleotide
  Antisense strand to SEQ ID NO: 626394
cuauuggcuaacauuacag

SEQ ID NO: 626396 - RNA, 19 nt, Artificial Sequence
  Description of Artificial Sequence: Synthetic oligonucleotide
  Sense strand starting at position 2247 of SEQ ID NO: 585267
gccucuguugacuauaagu

SEQ ID NO: 626397 - RNA, 19 nt, Artificial Sequence
  Description of Artificial Sequence: Synthetic oligonucleotide
  Antisense strand to SEQ ID NO: 626396
acuuauagucaacagaggc

SEQ ID NO: 626398 - RNA, 19 nt, Artificial Sequence
  Description of Artificial Sequence: Synthetic oligonucleotide
  Sense strand starting at position 2296 of SEQ ID NO: 585267
gaacguuacugauugaauu

SEQ ID NO: 626399 - RNA, 19 nt, Artificial Sequence
  Description of Artificial Sequence: Synthetic oligonucleotide
  Antisense strand to SEQ ID NO: 626398
aauucaaucaguaacguuc

SEQ ID NO: 626400 - RNA, 19 nt, Artificial Sequence
  Description of Artificial Sequence: Synthetic oligonucleotide
  Sense strand starting at position 2737 of SEQ ID NO: 585267
acucauaccucgguccaaa

SEQ ID NO: 626401 - RNA, 19 nt, Artificial Sequence
  Description of Artificial Sequence: Synthetic oligonucleotide
  Antisense strand to SEQ ID NO: 626400
uuuggaccgagguaugagu

SEQ ID NO: 626402 - RNA, 19 nt, Artificial Sequence
  Description of Artificial Sequence: Synthetic oligonucleotide
  Sense strand starting at position 2814 of SEQ ID NO: 585267
uuaucugauagucgaguca

SEQ ID NO: 626403 - RNA, 19 nt, Artificial Sequence
  Description of Artificial Sequence: Synthetic oligonucleotide
  Antisense strand to SEQ ID NO: 626402
ugacucgacuaucagauaa

SEQ ID NO: 626404 - RNA, 19 nt, Artificial Sequence
  Description of Artificial Sequence: Synthetic oligonucleotide
  Sense strand starting at position 2847 of SEQ ID NO: 585267
uggaaugcuguauggagau

SEQ ID NO: 626405 - RNA, 19 nt, Artificial Sequence
  Description of Artificial Sequence: Synthetic oligonucleotide
  Antisense strand to SEQ ID NO: 626404
aucuccauacagcauucca

SEQ ID NO: 626406 - RNA, 19 nt, Artificial Sequence
  Description of Artificial Sequence: Synthetic oligonucleotide
  Sense strand starting at position 2853 of SEQ ID NO: 585267
gcuguauggagaugaagca

SEQ ID NO: 626407 - RNA, 19 nt, Artificial Sequence
  Description of Artificial Sequence: Synthetic oligonucleotide
  Antisense strand to SEQ ID NO: 626406
ugcuucaucuccauacagc

SEQ ID NO: 626408 - RNA, 19 nt, Artificial Sequence
  Description of Artificial Sequence: Synthetic oligonucleotide
  Sense strand starting at position 2918 of SEQ ID NO: 585267
cauugaaauguuuacggua

SEQ ID NO: 626409 - RNA, 19 nt, Artificial Sequence
  Description of Artificial Sequence: Synthetic oligonucleotide
  Antisense strand to SEQ ID NO: 626408
uaccguaaacauuucaaug

SEQ ID NO: 626410 - RNA, 19 nt, Artificial Sequence
  Description of Artificial Sequence: Synthetic oligonucleotide
  Sense strand starting at position 2923 of SEQ ID NO: 585267
aaauguuuacgguacauca

SEQ ID NO: 626411 - RNA, 19 nt, Artificial Sequence
  Description of Artificial Sequence: Synthetic oligonucleotide
  Antisense strand to SEQ ID NO: 626410
ugauguaccguaaacauuu

SEQ ID NO: 626412 - RNA, 19 nt, Artificial Sequence
  Description of Artificial Sequence: Synthetic oligonucleotide
  Sense strand starting at position 3248 of SEQ ID NO: 585267
cccguaugauaaucagcua

SEQ ID NO: 626413 - RNA, 19 nt, Artificial Sequence
  Description of Artificial Sequence: Synthetic oligonucleotide
  Antisense strand to SEQ ID NO: 626412
uagcugauuaucauacggg

SEQ ID NO: 626414 - RNA, 19 nt, Artificial Sequence
  Description of Artificial Sequence: Synthetic oligonucleotide
  Sense strand starting at position 3277 of SEQ ID NO: 585267
augcauaugggcuacauau

SEQ ID NO: 626415 - RNA, 19 nt, Artificial Sequence
  Description of Artificial Sequence: Synthetic oligonucleotide
  Antisense strand to SEQ ID NO: 626414
auauguagcccauaugcau

SEQ ID NO: 626416 - RNA, 19 nt, Artificial Sequence
  Description of Artificial Sequence: Synthetic oligonucleotide
  Sense strand starting at position 3279 of SEQ ID NO: 585267
gcauaugggcuacauauca

SEQ ID NO: 626417 - RNA, 19 nt, Artificial Sequence
  Description of Artificial Sequence: Synthetic oligonucleotide
  Antisense strand to SEQ ID NO: 626416
ugauauguagcccauaugc

SEQ ID NO: 626418 - RNA, 19 nt, Artificial Sequence
  Description of Artificial Sequence: Synthetic oligonucleotide
  Sense strand starting at position 3373 of SEQ ID NO: 585267
ggcagaugcuggcuauaga

SEQ ID NO: 626419 - RNA, 19 nt, Artificial Sequence
  Description of Artificial Sequence: Synthetic oligonucleotide
  Antisense strand to SEQ ID NO: 626418
ucuauagccagcaucugcc

SEQ ID NO: 626420 - RNA, 19 nt, Artificial Sequence
  Description of Artificial Sequence: Synthetic oligonucleotide
  Sense strand starting at position 3374 of SEQ ID NO: 585267
gcagaugcuggcuauagau

SEQ ID NO: 626421 - RNA, 19 nt, Artificial Sequence
  Description of Artificial Sequence: Synthetic oligonucleotide
  Antisense strand to SEQ ID NO: 626420
aucuauagccagcaucugc

SEQ ID NO: 626422 - RNA, 19 nt, Artificial Sequence
  Description of Artificial Sequence: Synthetic oligonucleotide
  Sense strand starting at position 3376 of SEQ ID NO: 585267
agaugcuggcuauagauua

SEQ ID NO: 626423 - RNA, 19 nt, Artificial Sequence
  Description of Artificial Sequence: Synthetic oligonucleotide
  Antisense strand to SEQ ID NO: 626422
uaaucuauagccagcaucu

SEQ ID NO: 626424 - RNA, 19 nt, Artificial Sequence
  Description of Artificial Sequence: Synthetic oligonucleotide
  Sense strand starting at position 3516 of SEQ ID NO: 585267
aguguaauacucuguuuac

SEQ ID NO: 626425 - RNA, 19 nt, Artificial Sequence
  Description of Artificial Sequence: Synthetic oligonucleotide
  Antisense strand to SEQ ID NO: 626424
guaaacagaguauuacacu

SEQ ID NO: 626426 - RNA, 19 nt, Artificial Sequence
  Description of Artificial Sequence: Synthetic oligonucleotide
  Sense strand starting at position 3517 of SEQ ID NO: 585267
guguaauacucuguuuacu

SEQ ID NO: 626427 - RNA, 19 nt, Artificial Sequence
  Description of Artificial Sequence: Synthetic oligonucleotide
  Antisense strand to SEQ ID NO: 626426
aguaaacagaguauuacac

SEQ ID NO: 626428 - RNA, 19 nt, Artificial Sequence
  Description of Artificial Sequence: Synthetic oligonucleotide
  Sense strand starting at position 3519 of SEQ ID NO: 585267
guaauacucuguuuacuaa

SEQ ID NO: 626429 - RNA, 19 nt, Artificial Sequence
  Description of Artificial Sequence: Synthetic oligonucleotide
  Antisense strand to SEQ ID NO: 626428
uuaguaaacagaguauuac

SEQ ID NO: 626430 - RNA, 19 nt, Artificial Sequence
  Description of Artificial Sequence: Synthetic oligonucleotide
  Sense strand starting at position 3893 of SEQ ID NO: 585267
cuguauuacagaggacuga

SEQ ID NO: 626431 - RNA, 19 nt, Artificial Sequence
  Description of Artificial Sequence: Synthetic oligonucleotide
  Antisense strand to SEQ ID NO: 626430
ucaguccucuguaauacag

SEQ ID NO: 626432 - RNA, 19 nt, Artificial Sequence
  Description of Artificial Sequence: Synthetic oligonucleotide
  Sense strand starting at position 3907 of SEQ ID NO: 585267
acugaaagcuagcuaaaua

SEQ ID NO: 626433 - RNA, 19 nt, Artificial Sequence
  Description of Artificial Sequence: Synthetic oligonucleotide
  Antisense strand to SEQ ID NO: 626432
uauuuagcuagcuuucagu

SEQ ID NO: 626434 - RNA, 19 nt, Artificial Sequence
  Description of Artificial Sequence: Synthetic oligonucleotide
  Sense strand starting at position 30 of SEQ ID NO: 585268
cggcaaauccuacaaugua

SEQ ID NO: 626435 - RNA, 19 nt, Artificial Sequence
  Description of Artificial Sequence: Synthetic oligonucleotide
  Antisense strand to SEQ ID NO: 626434
uacauuguaggauuugccg

SEQ ID NO: 626436 - RNA, 19 nt, Artificial Sequence
  Description of Artificial Sequence: Synthetic oligonucleotide
  Sense strand starting at position 112 of SEQ ID NO: 585268
agacuauucguccgagaua

SEQ ID NO: 626437 - RNA, 19 nt, Artificial Sequence
  Description of Artificial Sequence: Synthetic oligonucleotide
  Antisense strand to SEQ ID NO: 626436
uaucucggacgaauagucu

SEQ ID NO: 626438 - RNA, 19 nt, Artificial Sequence
  Description of Artificial Sequence: Synthetic oligonucleotide
  Sense strand starting at position 239 of SEQ ID NO: 585268
gcuaaagauuuacaauaga

SEQ ID NO: 626439 - RNA, 19 nt, Artificial Sequence
  Description of Artificial Sequence: Synthetic oligonucleotide
  Antisense strand to SEQ ID NO: 626438
ucuauuguaaaucuuuagc

SEQ ID NO: 626440 - RNA, 19 nt, Artificial Sequence
  Description of Artificial Sequence: Synthetic oligonucleotide
  Sense strand starting at position 256 of SEQ ID NO: 585268
gaaguaauuuauugaagag

SEQ ID NO: 626441 - RNA, 19 nt, Artificial Sequence
  Description of Artificial Sequence: Synthetic oligonucleotide
  Antisense strand to SEQ ID NO: 626440
cucuucaauaaauuacuuc

SEQ ID NO: 626442 - RNA, 19 nt, Artificial Sequence
  Description of Artificial Sequence: Synthetic oligonucleotide
  Sense strand starting at position 295 of SEQ ID NO: 585268
gaugcaaugcuaugagaau

SEQ ID NO: 626443 - RNA, 19 nt, Artificial Sequence
  Description of Artificial Sequence: Synthetic oligonucleotide
  Antisense strand to SEQ ID NO: 626442
auucucauagcauugcauc

SEQ ID NO: 626444 - RNA, 19 nt, Artificial Sequence
  Description of Artificial Sequence: Synthetic oligonucleotide
  Sense strand starting at position 389 of SEQ ID NO: 585268
cuccuauuucugugaucuc

SEQ ID NO: 626445 - RNA, 19 nt, Artificial Sequence
  Description of Artificial Sequence: Synthetic oligonucleotide
  Antisense strand to SEQ ID NO: 626444
gagaucacagaaauaggag

SEQ ID NO: 626446 - RNA, 19 nt, Artificial Sequence
  Description of Artificial Sequence: Synthetic oligonucleotide
  Sense strand starting at position 644 of SEQ ID NO: 585268
ccgcuuugacaccaauaau

SEQ ID NO: 626447 - RNA, 19 nt, Artificial Sequence
  Description of Artificial Sequence: Synthetic oligonucleotide
  Antisense strand to SEQ ID NO: 626446
auuauuggugucaaagcgg

SEQ ID NO: 626448 - RNA, 19 nt, Artificial Sequence
  Description of Artificial Sequence: Synthetic oligonucleotide
  Sense strand starting at position 674 of SEQ ID NO: 585268
cuaacauaucugcagcgau

SEQ ID NO: 626449 - RNA, 19 nt, Artificial Sequence
  Description of Artificial Sequence: Synthetic oligonucleotide
  Antisense strand to SEQ ID NO: 626448
aucgcugcagauauguuag

SEQ ID NO: 626450 - RNA, 19 nt, Artificial Sequence
  Description of Artificial Sequence: Synthetic oligonucleotide
  Sense strand starting at position 703 of SEQ ID NO: 585268
augccuauucucuaaagug

SEQ ID NO: 626451 - RNA, 19 nt, Artificial Sequence
  Description of Artificial Sequence: Synthetic oligonucleotide
  Antisense strand to SEQ ID NO: 626450
cacuuuagagaauaggcau

SEQ ID NO: 626452 - RNA, 19 nt, Artificial Sequence
  Description of Artificial Sequence: Synthetic oligonucleotide
  Sense strand starting at position 710 of SEQ ID NO: 585268
uucucuaaaguguauggaa

SEQ ID NO: 626453 - RNA, 19 nt, Artificial Sequence
  Description of Artificial Sequence: Synthetic oligonucleotide
  Antisense strand to SEQ ID NO: 626452
uuccauacacuuuagagaa

SEQ ID NO: 626454 - RNA, 19 nt, Artificial Sequence
  Description of Artificial Sequence: Synthetic oligonucleotide
  Sense strand starting at position 885 of SEQ ID NO: 585268
ggaugagacuaucuggcaa

SEQ ID NO: 626455 - RNA, 19 nt, Artificial Sequence
  Description of Artificial Sequence: Synthetic oligonucleotide
  Antisense strand to SEQ ID NO: 626454
uugccagauagucucaucc

SEQ ID NO: 626456 - RNA, 19 nt, Artificial Sequence
  Description of Artificial Sequence: Synthetic oligonucleotide
  Sense strand starting at position 927 of SEQ ID NO: 585268
caaauagagcguugaccaa

SEQ ID NO: 626457 - RNA, 19 nt, Artificial Sequence
  Description of Artificial Sequence: Synthetic oligonucleotide
  Antisense strand to SEQ ID NO: 626456
uuggucaacgcucuauuug

SEQ ID NO: 626458 - RNA, 19 nt, Artificial Sequence
  Description of Artificial Sequence: Synthetic oligonucleotide
  Sense strand starting at position 931 of SEQ ID NO: 585268
uagagcguugaccaaucaa

SEQ ID NO: 626459 - RNA, 19 nt, Artificial Sequence
  Description of Artificial Sequence: Synthetic oligonucleotide
  Antisense strand to SEQ ID NO: 626458
uugauuggucaacgcucua

SEQ ID NO: 626460 - RNA, 19 nt, Artificial Sequence
  Description of Artificial Sequence: Synthetic oligonucleotide
  Sense strand starting at position 1323 of SEQ ID NO: 585268
guaauuauagcuuaaagca

SEQ ID NO: 626461 - RNA, 19 nt, Artificial Sequence
  Description of Artificial Sequence: Synthetic oligonucleotide
  Antisense strand to SEQ ID NO: 626460
ugcuuuaagcuauaauuac

SEQ ID NO: 626462 - RNA, 19 nt, Artificial Sequence
  Description of Artificial Sequence: Synthetic oligonucleotide
  Sense strand starting at position 1384 of SEQ ID NO: 585268
cuaaauuugucugauggag

SEQ ID NO: 626463 - RNA, 19 nt, Artificial Sequence
  Description of Artificial Sequence: Synthetic oligonucleotide
  Antisense strand to SEQ ID NO: 626462
cuccaucagacaaauuuag

SEQ ID NO: 626464 - RNA, 19 nt, Artificial Sequence
  Description of Artificial Sequence: Synthetic oligonucleotide
  Sense strand starting at position 1452 of SEQ ID NO: 585268
cgccgucuucccuccuaau

SEQ ID NO: 626465 - RNA, 19 nt, Artificial Sequence
  Description of Artificial Sequence: Synthetic oligonucleotide
  Antisense strand to SEQ ID NO: 626464
auuaggagggaagacggcg

SEQ ID NO: 626466 - RNA, 19 nt, Artificial Sequence
  Description of Artificial Sequence: Synthetic oligonucleotide
  Sense strand starting at position 2047 of SEQ ID NO: 585268
agaugagauugagaaauuc

SEQ ID NO: 626467 - RNA, 19 nt, Artificial Sequence
  Description of Artificial Sequence: Synthetic oligonucleotide
  Antisense strand to SEQ ID NO: 626466
gaauuucucaaucucaucu

SEQ ID NO: 626468 - RNA, 19 nt, Artificial Sequence
  Description of Artificial Sequence: Synthetic oligonucleotide
  Sense strand starting at position 2055 of SEQ ID NO: 585268
uugagaaauucuucugucu

SEQ ID NO: 626469 - RNA, 19 nt, Artificial Sequence
  Description of Artificial Sequence: Synthetic oligonucleotide
  Antisense strand to SEQ ID NO: 626468
agacagaagaauuucucaa

SEQ ID NO: 626470 - RNA, 19 nt, Artificial Sequence
  Description of Artificial Sequence: Synthetic oligonucleotide
  Sense strand starting at position 2058 of SEQ ID NO: 585268
agaaauucuucugucugau

SEQ ID NO: 626471 - RNA, 19 nt, Artificial Sequence
  Description of Artificial Sequence: Synthetic oligonucleotide
  Antisense strand to SEQ ID NO: 626470
aucagacagaagaauuucu

SEQ ID NO: 626472 - RNA, 19 nt, Artificial Sequence
  Description of Artificial Sequence: Synthetic oligonucleotide
  Sense strand starting at position 2064 of SEQ ID NO: 585268
ucuucugucugauuggaag

SEQ ID NO: 626473 - RNA, 19 nt, Artificial Sequence
  Description of Artificial Sequence: Synthetic oligonucleotide
  Antisense strand to SEQ ID NO: 626472
cuuccaaucagacagaaga

SEQ ID NO: 626474 - RNA, 19 nt, Artificial Sequence
  Description of Artificial Sequence: Synthetic oligonucleotide
  Sense strand starting at position 2075 of SEQ ID NO: 585268
auuggaaguuacucagaug

SEQ ID NO: 626475 - RNA, 19 nt, Artificial Sequence
  Description of Artificial Sequence: Synthetic oligonucleotide
  Antisense strand to SEQ ID NO: 626474
caucugaguaacuuccaau

SEQ ID NO: 626476 - RNA, 19 nt, Artificial Sequence
  Description of Artificial Sequence: Synthetic oligonucleotide
  Sense strand starting at position 2086 of SEQ ID NO: 585268
cucagaugacguuaauauc

SEQ ID NO: 626477 - RNA, 19 nt, Artificial Sequence
  Description of Artificial Sequence: Synthetic oligonucleotide
  Antisense strand to SEQ ID NO: 626476
gauauuaacgucaucugag

SEQ ID NO: 626478 - RNA, 19 nt, Artificial Sequence
  Description of Artificial Sequence: Synthetic oligonucleotide
  Sense strand starting at position 2095 of SEQ ID NO: 585268
cguuaauaucaauauaguc

SEQ ID NO: 626479 - RNA, 19 nt, Artificial Sequence
  Description of Artificial Sequence: Synthetic oligonucleotide
  Antisense strand to SEQ ID NO: 626478
gacuauauugauauuaacg

SEQ ID NO: 626480 - RNA, 19 nt, Artificial Sequence
  Description of Artificial Sequence: Synthetic oligonucleotide
  Sense strand starting at position 2592 of SEQ ID NO: 585268
ggcgguguucugccuaaca

SEQ ID NO: 626481 - RNA, 19 nt, Artificial Sequence
  Description of Artificial Sequence: Synthetic oligonucleotide
  Antisense strand to SEQ ID NO: 626480
uguuaggcagaacaccgcc

SEQ ID NO: 626482 - RNA, 19 nt, Artificial Sequence
  Description of Artificial Sequence: Synthetic oligonucleotide
  Sense strand starting at position 2662 of SEQ ID NO: 585268
gcaaguaagggcugaacuu

SEQ ID NO: 626483 - RNA, 19 nt, Artificial Sequence
  Description of Artificial Sequence: Synthetic oligonucleotide
  Antisense strand to SEQ ID NO: 626482
aaguucagcccuuacuugc

SEQ ID NO: 626484 - RNA, 19 nt, Artificial Sequence
  Description of Artificial Sequence: Synthetic oligonucleotide
  Sense strand starting at position 2663 of SEQ ID NO: 585268
caaguaagggcugaacuuu

SEQ ID NO: 626485 - RNA, 19 nt, Artificial Sequence
  Description of Artificial Sequence: Synthetic oligonucleotide
  Antisense strand to SEQ ID NO: 626484
aaaguucagcccuuacuug

SEQ ID NO: 626486 - RNA, 19 nt, Artificial Sequence
  Description of Artificial Sequence: Synthetic oligonucleotide
  Sense strand starting at position 2772 of SEQ ID NO: 585268
agaaauuuguggccgaguu

SEQ ID NO: 626487 - RNA, 19 nt, Artificial Sequence
  Description of Artificial Sequence: Synthetic oligonucleotide
  Antisense strand to SEQ ID NO: 626486
aacucggccacaaauuucu

SEQ ID NO: 626488 - RNA, 19 nt, Artificial Sequence
  Description of Artificial Sequence: Synthetic oligonucleotide
  Sense strand starting at position 2773 of SEQ ID NO: 585268
gaaauuuguggccgaguuc

SEQ ID NO: 626489 - RNA, 19 nt, Artificial Sequence
  Description of Artificial Sequence: Synthetic oligonucleotide
  Antisense strand to SEQ ID NO: 626488
gaacucggccacaaauuuc

SEQ ID NO: 626490 - RNA, 19 nt, Artificial Sequence
  Description of Artificial Sequence: Synthetic oligonucleotide
  Sense strand starting at position 2835 of SEQ ID NO: 585268
uugaaucaggccuaguaaa

SEQ ID NO: 626491 - RNA, 19 nt, Artificial Sequence
  Description of Artificial Sequence: Synthetic oligonucleotide
  Antisense strand to SEQ ID NO: 626490
uuuacuaggccugauucaa

SEQ ID NO: 626492 - RNA, 19 nt, Artificial Sequence
  Description of Artificial Sequence: Synthetic oligonucleotide
  Sense strand starting at position 2952 of SEQ ID NO: 585268
gugguuuaugcguccuuag

SEQ ID NO: 626493 - RNA, 19 nt, Artificial Sequence
  Description of Artificial Sequence: Synthetic oligonucleotide
  Antisense strand to SEQ ID NO: 626492
cuaaggacgcauaaaccac

SEQ ID NO: 626494 - RNA, 19 nt, Artificial Sequence
  Description of Artificial Sequence: Synthetic oligonucleotide
  Sense strand starting at position 2954 of SEQ ID NO: 585268
gguuuaugcguccuuagca

SEQ ID NO: 626495 - RNA, 19 nt, Artificial Sequence
  Description of Artificial Sequence: Synthetic oligonucleotide
  Antisense strand to SEQ ID NO: 626494
ugcuaaggacgcauaaacc

SEQ ID NO: 626496 - RNA, 19 nt, Artificial Sequence
  Description of Artificial Sequence: Synthetic oligonucleotide
  Sense strand starting at position 3381 of SEQ ID NO: 585268
ccuguauuuggcggacuga

SEQ ID NO: 626497 - RNA, 19 nt, Artificial Sequence
  Description of Artificial Sequence: Synthetic oligonucleotide
  Antisense strand to SEQ ID NO: 626496
ucaguccgccaaauacagg

SEQ ID NO: 626498 - RNA, 19 nt, Artificial Sequence
  Description of Artificial Sequence: Synthetic oligonucleotide
  Sense strand starting at position 3546 of SEQ ID NO: 585268
ugcuccugugaauauaaua

SEQ ID NO: 626499 - RNA, 19 nt, Artificial Sequence
  Description of Artificial Sequence: Synthetic oligonucleotide
  Antisense strand to SEQ ID NO: 626498
uauuauauucacaggagca

SEQ ID NO: 626500 - RNA, 19 nt, Artificial Sequence
  Description of Artificial Sequence: Synthetic oligonucleotide
  Sense strand starting at position 3590 of SEQ ID NO: 585268
cuuuaugggucuuuaucaa

SEQ ID NO: 626501 - RNA, 19 nt, Artificial Sequence
  Description of Artificial Sequence: Synthetic oligonucleotide
  Antisense strand to SEQ ID NO: 626500
uugauaaagacccauaaag

SEQ ID NO: 626502 - RNA, 19 nt, Artificial Sequence
  Description of Artificial Sequence: Synthetic oligonucleotide
  Sense strand starting at position 3618 of SEQ ID NO: 585268
cugguaguucuuugaucaa

SEQ ID NO: 626503 - RNA, 19 nt, Artificial Sequence
  Description of Artificial Sequence: Synthetic oligonucleotide
  Antisense strand to SEQ ID NO: 626502
uugaucaaagaacuaccag

SEQ ID NO: 626504 - RNA, 19 nt, Artificial Sequence
  Description of Artificial Sequence: Synthetic oligonucleotide
  Sense strand starting at position 3621 of SEQ ID NO: 585268
guaguucuuugaucaacua

SEQ ID NO: 626505 - RNA, 19 nt, Artificial Sequence
  Description of Artificial Sequence: Synthetic oligonucleotide
  Antisense strand to SEQ ID NO: 626504
uaguugaucaaagaacuac

SEQ ID NO: 626506 - RNA, 19 nt, Artificial Sequence
  Description of Artificial Sequence: Synthetic oligonucleotide
  Sense strand starting at position 3716 of SEQ ID NO: 585268
cuguaauuccgcgcaugcu

SEQ ID NO: 626507 - RNA, 19 nt, Artificial Sequence
  Description of Artificial Sequence: Synthetic oligonucleotide
  Antisense strand to SEQ ID NO: 626506
agcaugcgcggaauuacag

SEQ ID NO: 626508 - RNA, 19 nt, Artificial Sequence
  Description of Artificial Sequence: Synthetic oligonucleotide
  Sense strand starting at position 3777 of SEQ ID NO: 585268
auuggauugcauuaaacuc

SEQ ID NO: 626509 - RNA, 19 nt, Artificial Sequence
  Description of Artificial Sequence: Synthetic oligonucleotide
  Antisense strand to SEQ ID NO: 626508
gaguuuaaugcaauccaau

SEQ ID NO: 626510 - RNA, 19 nt, Artificial Sequence
  Description of Artificial Sequence: Synthetic oligonucleotide
  Sense strand starting at position 3785 of SEQ ID NO: 585268
gcauuaaacucaguuaaug

SEQ ID NO: 626511 - RNA, 19 nt, Artificial Sequence
  Description of Artificial Sequence: Synthetic oligonucleotide
  Antisense strand to SEQ ID NO: 626510
cauuaacugaguuuaaugc

SEQ ID NO: 626512 - RNA, 19 nt, Artificial Sequence
  Description of Artificial Sequence: Synthetic oligonucleotide
  Sense strand starting at position 3806 of SEQ ID NO: 585268
gaggucagauaccauuuau

SEQ ID NO: 626513 - RNA, 19 nt, Artificial Sequence
  Description of Artificial Sequence: Synthetic oligonucleotide
  Antisense strand to SEQ ID NO: 626512
auaaaugguaucugaccuc

SEQ ID NO: 626514 - RNA, 19 nt, Artificial Sequence
  Description of Artificial Sequence: Synthetic oligonucleotide
  Sense strand starting at position 26 of SEQ ID NO: 585269
acuuaaaugucucugugau

SEQ ID NO: 626515 - RNA, 19 nt, Artificial Sequence
  Description of Artificial Sequence: Synthetic oligonucleotide
  Antisense strand to SEQ ID NO: 626514
aucacagagacauuuaagu

SEQ ID NO: 626516 - RNA, 19 nt, Artificial Sequence
  Description of Artificial Sequence: Synthetic oligonucleotide
  Sense strand starting at position 151 of SEQ ID NO: 585269
aggaaauauuagcucauca

SEQ ID NO: 626517 - RNA, 19 nt, Artificial Sequence
  Description of Artificial Sequence: Synthetic oligonucleotide
  Antisense strand to SEQ ID NO: 626516
ugaugagcuaauauuuccu

SEQ ID NO: 626518 - RNA, 19 nt, Artificial Sequence
  Description of Artificial Sequence: Synthetic oligonucleotide
  Sense strand starting at position 166 of SEQ ID NO: 585269
aucaguucugauugguuga

SEQ ID NO: 626519 - RNA, 19 nt, Artificial Sequence
  Description of Artificial Sequence: Synthetic oligonucleotide
  Antisense strand to SEQ ID NO: 626518
ucaaccaaucagaacugau

SEQ ID NO: 626520 - RNA, 19 nt, Artificial Sequence
  Description of Artificial Sequence: Synthetic oligonucleotide
  Sense strand starting at position 168 of SEQ ID NO: 585269
caguucugauugguugaca

SEQ ID NO: 626521 - RNA, 19 nt, Artificial Sequence
  Description of Artificial Sequence: Synthetic oligonucleotide
  Antisense strand to SEQ ID NO: 626520
ugucaaccaaucagaacug

SEQ ID NO: 626522 - RNA, 19 nt, Artificial Sequence
  Description of Artificial Sequence: Synthetic oligonucleotide
  Sense strand starting at position 177 of SEQ ID NO: 585269
uugguugacagcuacgaau

SEQ ID NO: 626523 - RNA, 19 nt, Artificial Sequence
  Description of Artificial Sequence: Synthetic oligonucleotide
  Antisense strand to SEQ ID NO: 626522
auucguagcugucaaccaa

SEQ ID NO: 626524 - RNA, 19 nt, Artificial Sequence
  Description of Artificial Sequence: Synthetic oligonucleotide
  Sense strand starting at position 190 of SEQ ID NO: 585269
acgaauggcccucauugau

SEQ ID NO: 626525 - RNA, 19 nt, Artificial Sequence
  Description of Artificial Sequence: Synthetic oligonucleotide
  Antisense strand to SEQ ID NO: 626524
aucaaugagggccauucgu

SEQ ID NO: 626526 - RNA, 19 nt, Artificial Sequence
  Description of Artificial Sequence: Synthetic oligonucleotide
  Sense strand starting at position 219 of SEQ ID NO: 585269
uucuuugucccuuggaaac

SEQ ID NO: 626527 - RNA, 19 nt, Artificial Sequence
  Description of Artificial Sequence: Synthetic oligonucleotide
  Antisense strand to SEQ ID NO: 626526
guuuccaagggacaaagaa

SEQ ID NO: 626528 - RNA, 19 nt, Artificial Sequence
  Description of Artificial Sequence: Synthetic oligonucleotide
  Sense strand starting at position 363 of SEQ ID NO: 585269
augucagcucaguaucauu

SEQ ID NO: 626529 - RNA, 19 nt, Artificial Sequence
  Description of Artificial Sequence: Synthetic oligonucleotide
  Antisense strand to SEQ ID NO: 626528
aaugauacugagcugacau

SEQ ID NO: 626530 - RNA, 19 nt, Artificial Sequence
  Description of Artificial Sequence: Synthetic oligonucleotide
  Sense strand starting at position 398 of SEQ ID NO: 585269
ugagcuucuugacuuaaug

SEQ ID NO: 626531 - RNA, 19 nt, Artificial Sequence
  Description of Artificial Sequence: Synthetic oligonucleotide
  Antisense strand to SEQ ID NO: 626530
cauuaagucaagaagcuca

SEQ ID NO: 626532 - RNA, 19 nt, Artificial Sequence
  Description of Artificial Sequence: Synthetic oligonucleotide
  Sense strand starting at position 852 of SEQ ID NO: 585269
ggaaaccgaucuuuauaua

SEQ ID NO: 626533 - RNA, 19 nt, Artificial Sequence
  Description of Artificial Sequence: Synthetic oligonucleotide
  Antisense strand to SEQ ID NO: 626532
uauauaaagaucgguuucc

SEQ ID NO: 626534 - RNA, 19 nt, Artificial Sequence
  Description of Artificial Sequence: Synthetic oligonucleotide
  Sense strand starting at position 1254 of SEQ ID NO: 585269
cagaguguagcugggauua

SEQ ID NO: 626535 - RNA, 19 nt, Artificial Sequence
  Description of Artificial Sequence: Synthetic oligonucleotide
  Antisense strand to SEQ ID NO: 626534
uaaucccagcuacacucug

SEQ ID NO: 626536 - RNA, 19 nt, Artificial Sequence
  Description of Artificial Sequence: Synthetic oligonucleotide
  Sense strand starting at position 2077 of SEQ ID NO: 585269
aagugcagugauuggauga

SEQ ID NO: 626537 - RNA, 19 nt, Artificial Sequence
  Description of Artificial Sequence: Synthetic oligonucleotide
  Antisense strand to SEQ ID NO: 626536
ucauccaaucacugcacuu

SEQ ID NO: 626538 - RNA, 19 nt, Artificial Sequence
  Description of Artificial Sequence: Synthetic oligonucleotide
  Sense strand starting at position 2078 of SEQ ID NO: 585269
agugcagugauuggaugau

SEQ ID NO: 626539 - RNA, 19 nt, Artificial Sequence
  Description of Artificial Sequence: Synthetic oligonucleotide
  Antisense strand to SEQ ID NO: 626538
aucauccaaucacugcacu

SEQ ID NO: 626540 - RNA, 19 nt, Artificial Sequence
  Description of Artificial Sequence: Synthetic oligonucleotide
  Sense strand starting at position 2124 of SEQ ID NO: 585269
cucugauuggucuaucuuu

SEQ ID NO: 626541 - RNA, 19 nt, Artificial Sequence
  Description of Artificial Sequence: Synthetic oligonucleotide
  Antisense strand to SEQ ID NO: 626540
aaagauagaccaaucagag

SEQ ID NO: 626542 - RNA, 19 nt, Artificial Sequence
  Description of Artificial Sequence: Synthetic oligonucleotide
  Sense strand starting at position 2130 of SEQ ID NO: 585269
uuggucuaucuuuaagcca

SEQ ID NO: 626543 - RNA, 19 nt, Artificial Sequence
  Description of Artificial Sequence: Synthetic oligonucleotide
  Antisense strand to SEQ ID NO: 626542
uggcuuaaagauagaccaa

SEQ ID NO: 626544 - RNA, 19 nt, Artificial Sequence
  Description of Artificial Sequence: Synthetic oligonucleotide
  Sense strand starting at position 2269 of SEQ ID NO: 585269
ucuuaaacuugggcucaaa

SEQ ID NO: 626545 - RNA, 19 nt, Artificial Sequence
  Description of Artificial Sequence: Synthetic oligonucleotide
  Antisense strand to SEQ ID NO: 626544
uuugagcccaaguuuaaga

SEQ ID NO: 626546 - RNA, 19 nt, Artificial Sequence
  Description of Artificial Sequence: Synthetic oligonucleotide
  Sense strand starting at position 2526 of SEQ ID NO: 585269
ucaccuccucuccggaaau

SEQ ID NO: 626547 - RNA, 19 nt, Artificial Sequence
  Description of Artificial Sequence: Synthetic oligonucleotide
  Antisense strand to SEQ ID NO: 626546
auuuccggagaggagguga

SEQ ID NO: 626548 - RNA, 19 nt, Artificial Sequence
  Description of Artificial Sequence: Synthetic oligonucleotide
  Sense strand starting at position 2528 of SEQ ID NO: 585269
accuccucuccggaaaugu

SEQ ID NO: 626549 - RNA, 19 nt, Artificial Sequence
  Description of Artificial Sequence: Synthetic oligonucleotide
  Antisense strand to SEQ ID NO: 626548
acauuuccggagaggaggu

SEQ ID NO: 626550 - RNA, 19 nt, Artificial Sequence
  Description of Artificial Sequence: Synthetic oligonucleotide
  Sense strand starting at position 2541 of SEQ ID NO: 585269
aaauguacccuuuacggga

SEQ ID NO: 626551 - RNA, 19 nt, Artificial Sequence
  Description of Artificial Sequence: Synthetic oligonucleotide
  Antisense strand to SEQ ID NO: 626550
ucccguaaaggguacauuu

SEQ ID NO: 626552 - RNA, 19 nt, Artificial Sequence
  Description of Artificial Sequence: Synthetic oligonucleotide
  Sense strand starting at position 2554 of SEQ ID NO: 585269
acgggaauuucugaaaccu

SEQ ID NO: 626553 - RNA, 19 nt, Artificial Sequence
  Description of Artificial Sequence: Synthetic oligonucleotide
  Antisense strand to SEQ ID NO: 626552
agguuucagaaauucccgu

SEQ ID NO: 626554 - RNA, 19 nt, Artificial Sequence
  Description of Artificial Sequence: Synthetic oligonucleotide
  Sense strand starting at position 2582 of SEQ ID NO: 585269
auuggauuccuuuguaaug

SEQ ID NO: 626555 - RNA, 19 nt, Artificial Sequence
  Description of Artificial Sequence: Synthetic oligonucleotide
  Antisense strand to SEQ ID NO: 626554
cauuacaaaggaauccaau

SEQ ID NO: 626556 - RNA, 19 nt, Artificial Sequence
  Description of Artificial Sequence: Synthetic oligonucleotide
  Sense strand starting at position 2599 of SEQ ID NO: 585269
ugcuuuaauugacuuagga

SEQ ID NO: 626557 - RNA, 19 nt, Artificial Sequence
  Description of Artificial Sequence: Synthetic oligonucleotide
  Antisense strand to SEQ ID NO: 626556
uccuaagucaauuaaagca

SEQ ID NO: 626558 - RNA, 19 nt, Artificial Sequence
  Description of Artificial Sequence: Synthetic oligonucleotide
  Sense strand starting at position 2607 of SEQ ID NO: 585269
uugacuuaggaguguuauu

SEQ ID NO: 626559 - RNA, 19 nt, Artificial Sequence
  Description of Artificial Sequence: Synthetic oligonucleotide
  Antisense strand to SEQ ID NO: 626558
aauaacacuccuaagucaa

SEQ ID NO: 626560 - RNA, 19 nt, Artificial Sequence
  Description of Artificial Sequence: Synthetic oligonucleotide
  Sense strand starting at position 2612 of SEQ ID NO: 585269
uuaggaguguuauugaaau

SEQ ID NO: 626561 - RNA, 19 nt, Artificial Sequence
  Description of Artificial Sequence: Synthetic oligonucleotide
  Antisense strand to SEQ ID NO: 626560
auuucaauaacacuccuaa

SEQ ID NO: 626562 - RNA, 19 nt, Artificial Sequence
  Description of Artificial Sequence: Synthetic oligonucleotide
  Sense strand starting at position 2702 of SEQ ID NO: 585269
ugauuaugcucuuugaauc

SEQ ID NO: 626563 - RNA, 19 nt, Artificial Sequence
  Description of Artificial Sequence: Synthetic oligonucleotide
  Antisense strand to SEQ ID NO: 626562
gauucaaagagcauaauca

SEQ ID NO: 626564 - RNA, 19 nt, Artificial Sequence
  Description of Artificial Sequence: Synthetic oligonucleotide
  Sense strand starting at position 2852 of SEQ ID NO: 585269
guggacuuggcccaagaga

SEQ ID NO: 626565 - RNA, 19 nt, Artificial Sequence
  Description of Artificial Sequence: Synthetic oligonucleotide
  Antisense strand to SEQ ID NO: 626564
ucucuugggccaaguccac

SEQ ID NO: 626566 - RNA, 19 nt, Artificial Sequence
  Description of Artificial Sequence: Synthetic oligonucleotide
  Sense strand starting at position 2880 of SEQ ID NO: 585269
gugguucgcaaggaacaua

SEQ ID NO: 626567 - RNA, 19 nt, Artificial Sequence
  Description of Artificial Sequence: Synthetic oligonucleotide
  Antisense strand to SEQ ID NO: 626566
uauguuccuugcgaaccac

SEQ ID NO: 626568 - RNA, 19 nt, Artificial Sequence
  Description of Artificial Sequence: Synthetic oligonucleotide
  Sense strand starting at position 2883 of SEQ ID NO: 585269
guucgcaaggaacauaauu

SEQ ID NO: 626569 - RNA, 19 nt, Artificial Sequence
  Description of Artificial Sequence: Synthetic oligonucleotide
  Antisense strand to SEQ ID NO: 626568
aauuauguuccuugcgaac

SEQ ID NO: 626570 - RNA, 19 nt, Artificial Sequence
  Description of Artificial Sequence: Synthetic oligonucleotide
  Sense strand starting at position 3202 of SEQ ID NO: 585269
agauaccucgcuuauuaca

SEQ ID NO: 626571 - RNA, 19 nt, Artificial Sequence
  Description of Artificial Sequence: Synthetic oligonucleotide
  Antisense strand to SEQ ID NO: 626570
uguaauaagcgagguaucu

SEQ ID NO: 626572 - RNA, 19 nt, Artificial Sequence
  Description of Artificial Sequence: Synthetic oligonucleotide
  Sense strand starting at position 3210 of SEQ ID NO: 585269
cgcuuauuacacuaagaaa

SEQ ID NO: 626573 - RNA, 19 nt, Artificial Sequence
  Description of Artificial Sequence: Synthetic oligonucleotide
  Antisense strand to SEQ ID NO: 626572
uuucuuaguguaauaagcg

SEQ ID NO: 626574 - RNA, 19 nt, Artificial Sequence
  Description of Artificial Sequence: Synthetic oligonucleotide
  Sense strand starting at position 3415 of SEQ ID NO: 585269
ugcagaagauggguacaau

SEQ ID NO: 626575 - RNA, 19 nt, Artificial Sequence
  Description of Artificial Sequence: Synthetic oligonucleotide
  Antisense strand to SEQ ID NO: 626574
auuguacccaucuucugca

SEQ ID NO: 626576 - RNA, 19 nt, Artificial Sequence
  Description of Artificial Sequence: Synthetic oligonucleotide
  Sense strand starting at position 3427 of SEQ ID NO: 585269
guacaauacuuaucuggga

SEQ ID NO: 626577 - RNA, 19 nt, Artificial Sequence
  Description of Artificial Sequence: Synthetic oligonucleotide
  Antisense strand to SEQ ID NO: 626576
ucccagauaaguauuguac

SEQ ID NO: 626578 - RNA, 19 nt, Artificial Sequence
  Description of Artificial Sequence: Synthetic oligonucleotide
  Sense strand starting at position 3546 of SEQ ID NO: 585269
cggaaauaagaccgcauua

SEQ ID NO: 626579 - RNA, 19 nt, Artificial Sequence
  Description of Artificial Sequence: Synthetic oligonucleotide
  Antisense strand to SEQ ID NO: 626578
uaaugcggucuuauuuccg

SEQ ID NO: 626580 - RNA, 19 nt, Artificial Sequence
  Description of Artificial Sequence: Synthetic oligonucleotide
  Sense strand starting at position 3656 of SEQ ID NO: 585269
cugagucucugauuggcaa

SEQ ID NO: 626581 - RNA, 19 nt, Artificial Sequence
  Description of Artificial Sequence: Synthetic oligonucleotide
  Antisense strand to SEQ ID NO: 626580
uugccaaucagagacucag

SEQ ID NO: 626582 - RNA, 19 nt, Artificial Sequence
  Description of Artificial Sequence: Synthetic oligonucleotide
  Sense strand starting at position 3663 of SEQ ID NO: 585269
ucugauuggcaaugugaga

SEQ ID NO: 626583 - RNA, 19 nt, Artificial Sequence
  Description of Artificial Sequence: Synthetic oligonucleotide
  Antisense strand to SEQ ID NO: 626582
ucucacauugccaaucaga

SEQ ID NO: 626584 - RNA, 19 nt, Artificial Sequence
  Description of Artificial Sequence: Synthetic oligonucleotide
  Sense strand starting at position 3690 of SEQ ID NO: 585269
gcuuauugauacuuugaaa

SEQ ID NO: 626585 - RNA, 19 nt, Artificial Sequence
  Description of Artificial Sequence: Synthetic oligonucleotide
  Antisense strand to SEQ ID NO: 626584
uuucaaaguaucaauaagc

SEQ ID NO: 626586 - RNA, 19 nt, Artificial Sequence
  Description of Artificial Sequence: Synthetic oligonucleotide
  Sense strand starting at position 3731 of SEQ ID NO: 585269
guuaaaggguuguuaccau

SEQ ID NO: 626587 - RNA, 19 nt, Artificial Sequence
  Description of Artificial Sequence: Synthetic oligonucleotide
  Antisense strand to SEQ ID NO: 626586
augguaacaacccuuuaac

SEQ ID NO: 626588 - RNA, 19 nt, Artificial Sequence
  Description of Artificial Sequence: Synthetic oligonucleotide
  Sense strand starting at position 3881 of SEQ ID NO: 585269
gcuugugaggcccauaaau

SEQ ID NO: 626589 - RNA, 19 nt, Artificial Sequence
  Description of Artificial Sequence: Synthetic oligonucleotide
  Antisense strand to SEQ ID NO: 626588
auuuaugggccucacaagc

SEQ ID NO: 626590 - RNA, 19 nt, Artificial Sequence
  Description of Artificial Sequence: Synthetic oligonucleotide
  Sense strand starting at position 3883 of SEQ ID NO: 585269
uugugaggcccauaaauau

SEQ ID NO: 626591 - RNA, 19 nt, Artificial Sequence
  Description of Artificial Sequence: Synthetic oligonucleotide
  Antisense strand to SEQ ID NO: 626590
auauuuaugggccucacaa

SEQ ID NO: 626592 - RNA, 19 nt, Artificial Sequence
  Description of Artificial Sequence: Synthetic oligonucleotide
  Sense strand starting at position 3917 of SEQ ID NO: 585269
augaguugaccaugucaug

SEQ ID NO: 626593 - RNA, 19 nt, Artificial Sequence
  Description of Artificial Sequence: Synthetic oligonucleotide
  Antisense strand to SEQ ID NO: 626592
caugacauggucaacucau

SEQ ID NO: 626594 - RNA, 19 nt, Artificial Sequence
  Description of Artificial Sequence: Synthetic oligonucleotide
  Sense strand starting at position 1 of SEQ ID NO: 585270
auccucagacaguaaugua

SEQ ID NO: 626595 - RNA, 19 nt, Artificial Sequence
  Description of Artificial Sequence: Synthetic oligonucleotide
  Antisense strand to SEQ ID NO: 626594
uacauuacugucugaggau

SEQ ID NO: 626596 - RNA, 19 nt, Artificial Sequence
  Description of Artificial Sequence: Synthetic oligonucleotide
  Sense strand starting at position 122 of SEQ ID NO: 585270
gcacaucuauaacuggaaa

SEQ ID NO: 626597 - RNA, 19 nt, Artificial Sequence
  Description of Artificial Sequence: Synthetic oligonucleotide
  Antisense strand to SEQ ID NO: 626596
uuuccaguuauagaugugc

SEQ ID NO: 626598 - RNA, 19 nt, Artificial Sequence
  Description of Artificial Sequence: Synthetic oligonucleotide
  Sense strand starting at position 225 of SEQ ID NO: 585270
cuauacugucuguggauaa

SEQ ID NO: 626599 - RNA, 19 nt, Artificial Sequence
  Description of Artificial Sequence: Synthetic oligonucleotide
  Antisense strand to SEQ ID NO: 626598
uuauccacagacaguauag

SEQ ID NO: 626600 - RNA, 19 nt, Artificial Sequence
  Description of Artificial Sequence: Synthetic oligonucleotide
  Sense strand starting at position 470 of SEQ ID NO: 585270
uuuaguaugguacaucagu

SEQ ID NO: 626601 - RNA, 19 nt, Artificial Sequence
  Description of Artificial Sequence: Synthetic oligonucleotide
  Antisense strand to SEQ ID NO: 626600
acugauguaccauacuaaa

SEQ ID NO: 626602 - RNA, 19 nt, Artificial Sequence
  Description of Artificial Sequence: Synthetic oligonucleotide
  Sense strand starting at position 512 of SEQ ID NO: 585270
aaagaauguuagguguaaa

SEQ ID NO: 626603 - RNA, 19 nt, Artificial Sequence
  Description of Artificial Sequence: Synthetic oligonucleotide
  Antisense strand to SEQ ID NO: 626602
uuuacaccuaacauucuuu

SEQ ID NO: 626604 - RNA, 19 nt, Artificial Sequence
  Description of Artificial Sequence: Synthetic oligonucleotide
  Sense strand starting at position 556 of SEQ ID NO: 585270
gaggcaaggucuuuggaau

SEQ ID NO: 626605 - RNA, 19 nt, Artificial Sequence
  Description of Artificial Sequence: Synthetic oligonucleotide
  Antisense strand to SEQ ID NO: 626604
auuccaaagaccuugccuc

SEQ ID NO: 626606 - RNA, 19 nt, Artificial Sequence
  Description of Artificial Sequence: Synthetic oligonucleotide
  Sense strand starting at position 557 of SEQ ID NO: 585270
aggcaaggucuuuggaauu

SEQ ID NO: 626607 - RNA, 19 nt, Artificial Sequence
  Description of Artificial Sequence: Synthetic oligonucleotide
  Antisense strand to SEQ ID NO: 626606
aauuccaaagaccuugccu

SEQ ID NO: 626608 - RNA, 19 nt, Artificial Sequence
  Description of Artificial Sequence: Synthetic oligonucleotide
  Sense strand starting at position 563 of SEQ ID NO: 585270
ggucuuuggaauuaguagu

SEQ ID NO: 626609 - RNA, 19 nt, Artificial Sequence
  Description of Artificial Sequence: Synthetic oligonucleotide
  Antisense strand to SEQ ID NO: 626608
acuacuaauuccaaagacc

SEQ ID NO: 626610 - RNA, 19 nt, Artificial Sequence
  Description of Artificial Sequence: Synthetic oligonucleotide
  Sense strand starting at position 947 of SEQ ID NO: 585270
ggauuaaauuaugcuuggu

SEQ ID NO: 626611 - RNA, 19 nt, Artificial Sequence
  Description of Artificial Sequence: Synthetic oligonucleotide
  Antisense strand to SEQ ID NO: 626610
accaagcauaauuuaaucc

SEQ ID NO: 626612 - RNA, 19 nt, Artificial Sequence
  Description of Artificial Sequence: Synthetic oligonucleotide
  Sense strand starting at position 965 of SEQ ID NO: 585270
ucgacagacugacagauuu

SEQ ID NO: 626613 - RNA, 19 nt, Artificial Sequence
  Description of Artificial Sequence: Synthetic oligonucleotide
  Antisense strand to SEQ ID NO: 626612
aaaucugucagucugucga

SEQ ID NO: 626614 - RNA, 19 nt, Artificial Sequence
  Description of Artificial Sequence: Synthetic oligonucleotide
  Sense strand starting at position 988 of SEQ ID NO: 585270
uggguagcuagcuauggau

SEQ ID NO: 626615 - RNA, 19 nt, Artificial Sequence
  Description of Artificial Sequence: Synthetic oligonucleotide
  Antisense strand to SEQ ID NO: 626614
auccauagcuagcuaccca

SEQ ID NO: 626616 - RNA, 19 nt, Artificial Sequence
  Description of Artificial Sequence: Synthetic oligonucleotide
  Sense strand starting at position 1138 of SEQ ID NO: 585270
ggacuauguauugagcuga

SEQ ID NO: 626617 - RNA, 19 nt, Artificial Sequence
  Description of Artificial Sequence: Synthetic oligonucleotide
  Antisense strand to SEQ ID NO: 626616
ucagcucaauacauagucc

SEQ ID NO: 626618 - RNA, 19 nt, Artificial Sequence
  Description of Artificial Sequence: Synthetic oligonucleotide
  Sense strand starting at position 1284 of SEQ ID NO: 585270
cuuacaaaguuguuuaaac

SEQ ID NO: 626619 - RNA, 19 nt, Artificial Sequence
  Description of Artificial Sequence: Synthetic oligonucleotide
  Antisense strand to SEQ ID NO: 626618
guuuaaacaacuuuguaag

SEQ ID NO: 626620 - RNA, 19 nt, Artificial Sequence
  Description of Artificial Sequence: Synthetic oligonucleotide
  Sense strand starting at position 1319 of SEQ ID NO: 585270
aagcuagaggccugaauga

SEQ ID NO: 626621 - RNA, 19 nt, Artificial Sequence
  Description of Artificial Sequence: Synthetic oligonucleotide
  Antisense strand to SEQ ID NO: 626620
ucauucaggccucuagcuu

SEQ ID NO: 626622 - RNA, 19 nt, Artificial Sequence
  Description of Artificial Sequence: Synthetic oligonucleotide
  Sense strand starting at position 1330 of SEQ ID NO: 585270
cugaaugauaguggacuua

SEQ ID NO: 626623 - RNA, 19 nt, Artificial Sequence
  Description of Artificial Sequence: Synthetic oligonucleotide
  Antisense strand to SEQ ID NO: 626622
uaaguccacuaucauucag

SEQ ID NO: 626624 - RNA, 19 nt, Artificial Sequence
  Description of Artificial Sequence: Synthetic oligonucleotide
  Sense strand starting at position 1414 of SEQ ID NO: 585270
accguuauuucuguuaauc

SEQ ID NO: 626625 - RNA, 19 nt, Artificial Sequence
  Description of Artificial Sequence: Synthetic oligonucleotide
  Antisense strand to SEQ ID NO: 626624
gauuaacagaaauaacggu

SEQ ID NO: 626626 - RNA, 19 nt, Artificial Sequence
  Description of Artificial Sequence: Synthetic oligonucleotide
  Sense strand starting at position 1625 of SEQ ID NO: 585270
ggaugucuuugggcauaau

SEQ ID NO: 626627 - RNA, 19 nt, Artificial Sequence
  Description of Artificial Sequence: Synthetic oligonucleotide
  Antisense strand to SEQ ID NO: 626626
auuaugcccaaagacaucc

SEQ ID NO: 626628 - RNA, 19 nt, Artificial Sequence
  Description of Artificial Sequence: Synthetic oligonucleotide
  Sense strand starting at position 1626 of SEQ ID NO: 585270
gaugucuuugggcauaaua

SEQ ID NO: 626629 - RNA, 19 nt, Artificial Sequence
  Description of Artificial Sequence: Synthetic oligonucleotide
  Antisense strand to SEQ ID NO: 626628
uauuaugcccaaagacauc

SEQ ID NO: 626630 - RNA, 19 nt, Artificial Sequence
  Description of Artificial Sequence: Synthetic oligonucleotide
  Sense strand starting at position 1628 of SEQ ID NO: 585270
ugucuuugggcauaauagu

SEQ ID NO: 626631 - RNA, 19 nt, Artificial Sequence
  Description of Artificial Sequence: Synthetic oligonucleotide
  Antisense strand to SEQ ID NO: 626630
acuauuaugcccaaagaca

SEQ ID NO: 626632 - RNA, 19 nt, Artificial Sequence
  Description of Artificial Sequence: Synthetic oligonucleotide
  Sense strand starting at position 1968 of SEQ ID NO: 585270
ggauuuccgagcugucugu

SEQ ID NO: 626633 - RNA, 19 nt, Artificial Sequence
  Description of Artificial Sequence: Synthetic oligonucleotide
  Antisense strand to SEQ ID NO: 626632
acagacagcucggaaaucc

SEQ ID NO: 626634 - RNA, 19 nt, Artificial Sequence
  Description of Artificial Sequence: Synthetic oligonucleotide
  Sense strand starting at position 1974 of SEQ ID NO: 585270
ccgagcugucuguuuagua

SEQ ID NO: 626635 - RNA, 19 nt, Artificial Sequence
  Description of Artificial Sequence: Synthetic oligonucleotide
  Antisense strand to SEQ ID NO: 626634
uacuaaacagacagcucgg

SEQ ID NO: 626636 - RNA, 19 nt, Artificial Sequence
  Description of Artificial Sequence: Synthetic oligonucleotide
  Sense strand starting at position 2370 of SEQ ID NO: 585270
uuugcauaugcgcuuuauu

SEQ ID NO: 626637 - RNA, 19 nt, Artificial Sequence
  Description of Artificial Sequence: Synthetic oligonucleotide
  Antisense strand to SEQ ID NO: 626636
aauaaagcgcauaugcaaa

SEQ ID NO: 626638 - RNA, 19 nt, Artificial Sequence
  Description of Artificial Sequence: Synthetic oligonucleotide
  Sense strand starting at position 2373 of SEQ ID NO: 585270
gcauaugcgcuuuauuuaa

SEQ ID NO: 626639 - RNA, 19 nt, Artificial Sequence
  Description of Artificial Sequence: Synthetic oligonucleotide
  Antisense strand to SEQ ID NO: 626638
uuaaauaaagcgcauaugc

SEQ ID NO: 626640 - RNA, 19 nt, Artificial Sequence
  Description of Artificial Sequence: Synthetic oligonucleotide
  Sense strand starting at position 2404 of SEQ ID NO: 585270
cugggugucgcauaagaag

SEQ ID NO: 626641 - RNA, 19 nt, Artificial Sequence
  Description of Artificial Sequence: Synthetic oligonucleotide
  Antisense strand to SEQ ID NO: 626640
cuucuuaugcgacacccag

SEQ ID NO: 626642 - RNA, 19 nt, Artificial Sequence
  Description of Artificial Sequence: Synthetic oligonucleotide
  Sense strand starting at position 2415 of SEQ ID NO: 585270
auaagaagugugggcaauu

SEQ ID NO: 626643 - RNA, 19 nt, Artificial Sequence
  Description of Artificial Sequence: Synthetic oligonucleotide
  Antisense strand to SEQ ID NO: 626642
aauugcccacacuucuuau

SEQ ID NO: 626644 - RNA, 19 nt, Artificial Sequence
  Description of Artificial Sequence: Synthetic oligonucleotide
  Sense strand starting at position 2416 of SEQ ID NO: 585270
uaagaagugugggcaauua

SEQ ID NO: 626645 - RNA, 19 nt, Artificial Sequence
  Description of Artificial Sequence: Synthetic oligonucleotide
  Antisense strand to SEQ ID NO: 626644
uaauugcccacacuucuua

SEQ ID NO: 626646 - RNA, 19 nt, Artificial Sequence
  Description of Artificial Sequence: Synthetic oligonucleotide
  Sense strand starting at position 2666 of SEQ ID NO: 585270
gugugcucucaauugugua

SEQ ID NO: 626647 - RNA, 19 nt, Artificial Sequence
  Description of Artificial Sequence: Synthetic oligonucleotide
  Antisense strand to SEQ ID NO: 626646
uacacaauugagagcacac

SEQ ID NO: 626648 - RNA, 19 nt, Artificial Sequence
  Description of Artificial Sequence: Synthetic oligonucleotide
  Sense strand starting at position 2700 of SEQ ID NO: 585270
cagcaaaugguaugacaua

SEQ ID NO: 626649 - RNA, 19 nt, Artificial Sequence
  Description of Artificial Sequence: Synthetic oligonucleotide
  Antisense strand to SEQ ID NO: 626648
uaugucauaccauuugcug

SEQ ID NO: 626650 - RNA, 19 nt, Artificial Sequence
  Description of Artificial Sequence: Synthetic oligonucleotide
  Sense strand starting at position 2772 of SEQ ID NO: 585270
gaaugcacucauggguaua

SEQ ID NO: 626651 - RNA, 19 nt, Artificial Sequence
  Description of Artificial Sequence: Synthetic oligonucleotide
  Antisense strand to SEQ ID NO: 626650
uauacccaugagugcauuc

SEQ ID NO: 626652 - RNA, 19 nt, Artificial Sequence
  Description of Artificial Sequence: Synthetic oligonucleotide
  Sense strand starting at position 2774 of SEQ ID NO: 585270
augcacucauggguauaau

SEQ ID NO: 626653 - RNA, 19 nt, Artificial Sequence
  Description of Artificial Sequence: Synthetic oligonucleotide
  Antisense strand to SEQ ID NO: 626652
auuauacccaugagugcau

SEQ ID NO: 626654 - RNA, 19 nt, Artificial Sequence
  Description of Artificial Sequence: Synthetic oligonucleotide
  Sense strand starting at position 2775 of SEQ ID NO: 585270
ugcacucauggguauaauu

SEQ ID NO: 626655 - RNA, 19 nt, Artificial Sequence
  Description of Artificial Sequence: Synthetic oligonucleotide
  Antisense strand to SEQ ID NO: 626654
aauuauacccaugagugca

SEQ ID NO: 626656 - RNA, 19 nt, Artificial Sequence
  Description of Artificial Sequence: Synthetic oligonucleotide
  Sense strand starting at position 2889 of SEQ ID NO: 585270
ccuagaauuccugagguuu

SEQ ID NO: 626657 - RNA, 19 nt, Artificial Sequence
  Description of Artificial Sequence: Synthetic oligonucleotide
  Antisense strand to SEQ ID NO: 626656
aaaccucaggaauucuagg

SEQ ID NO: 626658 - RNA, 19 nt, Artificial Sequence
  Description of Artificial Sequence: Synthetic oligonucleotide
  Sense strand starting at position 3475 of SEQ ID NO: 585270
gagcuuuaccgccuuguuu

SEQ ID NO: 626659 - RNA, 19 nt, Artificial Sequence
  Description of Artificial Sequence: Synthetic oligonucleotide
  Antisense strand to SEQ ID NO: 626658
aaacaaggcgguaaagcuc

SEQ ID NO: 626660 - RNA, 19 nt, Artificial Sequence
  Description of Artificial Sequence: Synthetic oligonucleotide
  Sense strand starting at position 3583 of SEQ ID NO: 585270
uuuauacugacuggaggua

SEQ ID NO: 626661 - RNA, 19 nt, Artificial Sequence
  Description of Artificial Sequence: Synthetic oligonucleotide
  Antisense strand to SEQ ID NO: 626660
uaccuccagucaguauaaa

SEQ ID NO: 626662 - RNA, 19 nt, Artificial Sequence
  Description of Artificial Sequence: Synthetic oligonucleotide
  Sense strand starting at position 3595 of SEQ ID NO: 585270
ggagguaggcugugaggaa

SEQ ID NO: 626663 - RNA, 19 nt, Artificial Sequence
  Description of Artificial Sequence: Synthetic oligonucleotide
  Antisense strand to SEQ ID NO: 626662
uuccucacagccuaccucc

SEQ ID NO: 626664 - RNA, 19 nt, Artificial Sequence
  Description of Artificial Sequence: Synthetic oligonucleotide
  Sense strand starting at position 3686 of SEQ ID NO: 585270
ccgucugguguaagguuua

SEQ ID NO: 626665 - RNA, 19 nt, Artificial Sequence
  Description of Artificial Sequence: Synthetic oligonucleotide
  Antisense strand to SEQ ID NO: 626664
uaaaccuuacaccagacgg

SEQ ID NO: 626666 - RNA, 19 nt, Artificial Sequence
  Description of Artificial Sequence: Synthetic oligonucleotide
  Sense strand starting at position 3697 of SEQ ID NO: 585270
aagguuuauguuugaccca

SEQ ID NO: 626667 - RNA, 19 nt, Artificial Sequence
  Description of Artificial Sequence: Synthetic oligonucleotide
  Antisense strand to SEQ ID NO: 626666
ugggucaaacauaaaccuu

SEQ ID NO: 626668 - RNA, 19 nt, Artificial Sequence
  Description of Artificial Sequence: Synthetic oligonucleotide
  Sense strand starting at position 3736 of SEQ ID NO: 585270
agccuucgacuugaauacu

SEQ ID NO: 626669 - RNA, 19 nt, Artificial Sequence
  Description of Artificial Sequence: Synthetic oligonucleotide
  Antisense strand to SEQ ID NO: 626668
aguauucaagucgaaggcu

SEQ ID NO: 626670 - RNA, 19 nt, Artificial Sequence
  Description of Artificial Sequence: Synthetic oligonucleotide
  Sense strand starting at position 3756 of SEQ ID NO: 585270
auaauaauuggccgaauua

SEQ ID NO: 626671 - RNA, 19 nt, Artificial Sequence
  Description of Artificial Sequence: Synthetic oligonucleotide
  Antisense strand to SEQ ID NO: 626670
uaauucggccaauuauuau

SEQ ID NO: 626672 - RNA, 19 nt, Artificial Sequence
  Description of Artificial Sequence: Synthetic oligonucleotide
  Sense strand starting at position 3757 of SEQ ID NO: 585270
uaauaauuggccgaauuag

SEQ ID NO: 626673 - RNA, 19 nt, Artificial Sequence
  Description of Artificial Sequence: Synthetic oligonucleotide
  Antisense strand to SEQ ID NO: 626672
cuaauucggccaauuauua

SEQ ID NO: 626674 - RNA, 19 nt, Artificial Sequence
  Description of Artificial Sequence: Synthetic oligonucleotide
  Sense strand starting at position 248 of SEQ ID NO: 585271
uccuacugcucacuggaau

SEQ ID NO: 626675 - RNA, 19 nt, Artificial Sequence
  Description of Artificial Sequence: Synthetic oligonucleotide
  Antisense strand to SEQ ID NO: 626674
auuccagugagcaguagga

SEQ ID NO: 626676 - RNA, 19 nt, Artificial Sequence
  Description of Artificial Sequence: Synthetic oligonucleotide
  Sense strand starting at position 249 of SEQ ID NO: 585271
ccuacugcucacuggaaua

SEQ ID NO: 626677 - RNA, 19 nt, Artificial Sequence
  Description of Artificial Sequence: Synthetic oligonucleotide
  Antisense strand to SEQ ID NO: 626676
uauuccagugagcaguagg

SEQ ID NO: 626678 - RNA, 19 nt, Artificial Sequence
  Description of Artificial Sequence: Synthetic oligonucleotide
  Sense strand starting at position 272 of SEQ ID NO: 585271
accuaaauuccuggcaaga

SEQ ID NO: 626679 - RNA, 19 nt, Artificial Sequence
  Description of Artificial Sequence: Synthetic oligonucleotide
  Antisense strand to SEQ ID NO: 626678
ucuugccaggaauuuaggu

SEQ ID NO: 626680 - RNA, 19 nt, Artificial Sequence
  Description of Artificial Sequence: Synthetic oligonucleotide
  Sense strand starting at position 354 of SEQ ID NO: 585271
gagugucuaguggagagua

SEQ ID NO: 626681 - RNA, 19 nt, Artificial Sequence
  Description of Artificial Sequence: Synthetic oligonucleotide
  Antisense strand to SEQ ID NO: 626680
uacucuccacuagacacuc

SEQ ID NO: 626682 - RNA, 19 nt, Artificial Sequence
  Description of Artificial Sequence: Synthetic oligonucleotide
  Sense strand starting at position 356 of SEQ ID NO: 585271
gugucuaguggagaguaga

SEQ ID NO: 626683 - RNA, 19 nt, Artificial Sequence
  Description of Artificial Sequence: Synthetic oligonucleotide
  Antisense strand to SEQ ID NO: 626682
ucuacucuccacuagacac

SEQ ID NO: 626684 - RNA, 19 nt, Artificial Sequence
  Description of Artificial Sequence: Synthetic oligonucleotide
  Sense strand starting at position 377 of SEQ ID NO: 585271
cguauagagccagaagcua

SEQ ID NO: 626685 - RNA, 19 nt, Artificial Sequence
  Description of Artificial Sequence: Synthetic oligonucleotide
  Antisense strand to SEQ ID NO: 626684
uagcuucuggcucuauacg

SEQ ID NO: 626686 - RNA, 19 nt, Artificial Sequence
  Description of Artificial Sequence: Synthetic oligonucleotide
  Sense strand starting at position 616 of SEQ ID NO: 585271
uaauuucgaucugaagaug

SEQ ID NO: 626687 - RNA, 19 nt, Artificial Sequence
  Description of Artificial Sequence: Synthetic oligonucleotide
  Antisense strand to SEQ ID NO: 626686
caucuucagaucgaaauua

SEQ ID NO: 626688 - RNA, 19 nt, Artificial Sequence
  Description of Artificial Sequence: Synthetic oligonucleotide
  Sense strand starting at position 791 of SEQ ID NO: 585271
auauuuacagucugcagua

SEQ ID NO: 626689 - RNA, 19 nt, Artificial Sequence
  Description of Artificial Sequence: Synthetic oligonucleotide
  Antisense strand to SEQ ID NO: 626688
uacugcagacuguaaauau

SEQ ID NO: 626690 - RNA, 19 nt, Artificial Sequence
  Description of Artificial Sequence: Synthetic oligonucleotide
  Sense strand starting at position 1012 of SEQ ID NO: 585271
cucaaauucccuggauaag

SEQ ID NO: 626691 - RNA, 19 nt, Artificial Sequence
  Description of Artificial Sequence: Synthetic oligonucleotide
  Antisense strand to SEQ ID NO: 626690
cuuauccagggaauuugag

SEQ ID NO: 626692 - RNA, 19 nt, Artificial Sequence
  Description of Artificial Sequence: Synthetic oligonucleotide
  Sense strand starting at position 1027 of SEQ ID NO: 585271
uaaggaugaccgcauaauc

SEQ ID NO: 626693 - RNA, 19 nt, Artificial Sequence
  Description of Artificial Sequence: Synthetic oligonucleotide
  Antisense strand to SEQ ID NO: 626692
gauuaugcggucauccuua

SEQ ID NO: 626694 - RNA, 19 nt, Artificial Sequence
  Description of Artificial Sequence: Synthetic oligonucleotide
  Sense strand starting at position 1040 of SEQ ID NO: 585271
auaaucuuuggauggucau

SEQ ID NO: 626695 - RNA, 19 nt, Artificial Sequence
  Description of Artificial Sequence: Synthetic oligonucleotide
  Antisense strand to SEQ ID NO: 626694
augaccauccaaagauuau

SEQ ID NO: 626696 - RNA, 19 nt, Artificial Sequence
  Description of Artificial Sequence: Synthetic oligonucleotide
  Sense strand starting at position 1041 of SEQ ID NO: 585271
uaaucuuuggauggucaua

SEQ ID NO: 626697 - RNA, 19 nt, Artificial Sequence
  Description of Artificial Sequence: Synthetic oligonucleotide
  Antisense strand to SEQ ID NO: 626696
uaugaccauccaaagauua

SEQ ID NO: 626698 - RNA, 19 nt, Artificial Sequence
  Description of Artificial Sequence: Synthetic oligonucleotide
  Sense strand starting at position 1206 of SEQ ID NO: 585271
ggacuuagguaacuacaca

SEQ ID NO: 626699 - RNA, 19 nt, Artificial Sequence
  Description of Artificial Sequence: Synthetic oligonucleotide
  Antisense strand to SEQ ID NO: 626698
uguguaguuaccuaagucc

SEQ ID NO: 626700 - RNA, 19 nt, Artificial Sequence
  Description of Artificial Sequence: Synthetic oligonucleotide
  Sense strand starting at position 1271 of SEQ ID NO: 585271
aauugucacguggauuaaa

SEQ ID NO: 626701 - RNA, 19 nt, Artificial Sequence
  Description of Artificial Sequence: Synthetic oligonucleotide
  Antisense strand to SEQ ID NO: 626700
uuuaauccacgugacaauu

SEQ ID NO: 626702 - RNA, 19 nt, Artificial Sequence
  Description of Artificial Sequence: Synthetic oligonucleotide
  Sense strand starting at position 1433 of SEQ ID NO: 585271
cugauagacuugucugcag

SEQ ID NO: 626703 - RNA, 19 nt, Artificial Sequence
  Description of Artificial Sequence: Synthetic oligonucleotide
  Antisense strand to SEQ ID NO: 626702
cugcagacaagucuaucag

SEQ ID NO: 626704 - RNA, 19 nt, Artificial Sequence
  Description of Artificial Sequence: Synthetic oligonucleotide
  Sense strand starting at position 1991 of SEQ ID NO: 585271
guacgagccauuugcaaug

SEQ ID NO: 626705 - RNA, 19 nt, Artificial Sequence
  Description of Artificial Sequence: Synthetic oligonucleotide
  Antisense strand to SEQ ID NO: 626704
cauugcaaauggcucguac

SEQ ID NO: 626706 - RNA, 19 nt, Artificial Sequence
  Description of Artificial Sequence: Synthetic oligonucleotide
  Sense strand starting at position 2041 of SEQ ID NO: 585271
gcaaguggccuuuaaauau

SEQ ID NO: 626707 - RNA, 19 nt, Artificial Sequence
  Description of Artificial Sequence: Synthetic oligonucleotide
  Antisense strand to SEQ ID NO: 626706
auauuuaaaggccacuugc

SEQ ID NO: 626708 - RNA, 19 nt, Artificial Sequence
  Description of Artificial Sequence: Synthetic oligonucleotide
  Sense strand starting at position 2159 of SEQ ID NO: 585271
aaucuuauuggaugaguug

SEQ ID NO: 626709 - RNA, 19 nt, Artificial Sequence
  Description of Artificial Sequence: Synthetic oligonucleotide
  Antisense strand to SEQ ID NO: 626708
caacucauccaauaagauu

SEQ ID NO: 626710 - RNA, 19 nt, Artificial Sequence
  Description of Artificial Sequence: Synthetic oligonucleotide
  Sense strand starting at position 2320 of SEQ ID NO: 585271
uugagugggacuugaaauu

SEQ ID NO: 626711 - RNA, 19 nt, Artificial Sequence
  Description of Artificial Sequence: Synthetic oligonucleotide
  Antisense strand to SEQ ID NO: 626710
aauuucaagucccacucaa

SEQ ID NO: 626712 - RNA, 19 nt, Artificial Sequence
  Description of Artificial Sequence: Synthetic oligonucleotide
  Sense strand starting at position 2405 of SEQ ID NO: 585271
cagacucaugucgggaaau

SEQ ID NO: 626713 - RNA, 19 nt, Artificial Sequence
  Description of Artificial Sequence: Synthetic oligonucleotide
  Antisense strand to SEQ ID NO: 626712
auuucccgacaugagucug

SEQ ID NO: 626714 - RNA, 19 nt, Artificial Sequence
  Description of Artificial Sequence: Synthetic oligonucleotide
  Sense strand starting at position 2418 of SEQ ID NO: 585271
ggaaauaacgcuuauauuc

SEQ ID NO: 626715 - RNA, 19 nt, Artificial Sequence
  Description of Artificial Sequence: Synthetic oligonucleotide
  Antisense strand to SEQ ID NO: 626714
gaauauaagcguuauuucc

SEQ ID NO: 626716 - RNA, 19 nt, Artificial Sequence
  Description of Artificial Sequence: Synthetic oligonucleotide
  Sense strand starting at position 2587 of SEQ ID NO: 585271
guacuuucuaaaggaaggu

SEQ ID NO: 626717 - RNA, 19 nt, Artificial Sequence
  Description of Artificial Sequence: Synthetic oligonucleotide
  Antisense strand to SEQ ID NO: 626716
accuuccuuuagaaaguac

SEQ ID NO: 626718 - RNA, 19 nt, Artificial Sequence
  Description of Artificial Sequence: Synthetic oligonucleotide
  Sense strand starting at position 2591 of SEQ ID NO: 585271
uuucuaaaggaagguguua

SEQ ID NO: 626719 - RNA, 19 nt, Artificial Sequence
  Description of Artificial Sequence: Synthetic oligonucleotide
  Antisense strand to SEQ ID NO: 626718
uaacaccuuccuuuagaaa

SEQ ID NO: 626720 - RNA, 19 nt, Artificial Sequence
  Description of Artificial Sequence: Synthetic oligonucleotide
  Sense strand starting at position 2593 of SEQ ID NO: 585271
ucuaaaggaagguguuauu

SEQ ID NO: 626721 - RNA, 19 nt, Artificial Sequence
  Description of Artificial Sequence: Synthetic oligonucleotide
  Antisense strand to SEQ ID NO: 626720
aauaacaccuuccuuuaga

SEQ ID NO: 626722 - RNA, 19 nt, Artificial Sequence
  Description of Artificial Sequence: Synthetic oligonucleotide
  Sense strand starting at position 2690 of SEQ ID NO: 585271
gcgagaugggacgaucacu

SEQ ID NO: 626723 - RNA, 19 nt, Artificial Sequence
  Description of Artificial Sequence: Synthetic oligonucleotide
  Antisense strand to SEQ ID NO: 626722
agugaucgucccaucucgc

SEQ ID NO: 626724 - RNA, 19 nt, Artificial Sequence
  Description of Artificial Sequence: Synthetic oligonucleotide
  Sense strand starting at position 2980 of SEQ ID NO: 585271
uccuuucuuguguaacuau

SEQ ID NO: 626725 - RNA, 19 nt, Artificial Sequence
  Description of Artificial Sequence: Synthetic oligonucleotide
  Antisense strand to SEQ ID NO: 626724
auaguuacacaagaaagga

SEQ ID NO: 626726 - RNA, 19 nt, Artificial Sequence
  Description of Artificial Sequence: Synthetic oligonucleotide
  Sense strand starting at position 3049 of SEQ ID NO: 585271
gaguguuuacuugaccuug

SEQ ID NO: 626727 - RNA, 19 nt, Artificial Sequence
  Description of Artificial Sequence: Synthetic oligonucleotide
  Antisense strand to SEQ ID NO: 626726
caaggucaaguaaacacuc

SEQ ID NO: 626728 - RNA, 19 nt, Artificial Sequence
  Description of Artificial Sequence: Synthetic oligonucleotide
  Sense strand starting at position 3069 of SEQ ID NO: 585271
ccuuaucguggcucuguua

SEQ ID NO: 626729 - RNA, 19 nt, Artificial Sequence
  Description of Artificial Sequence: Synthetic oligonucleotide
  Antisense strand to SEQ ID NO: 626728
uaacagagccacgauaagg

SEQ ID NO: 626730 - RNA, 19 nt, Artificial Sequence
  Description of Artificial Sequence: Synthetic oligonucleotide
  Sense strand starting at position 3070 of SEQ ID NO: 585271
cuuaucguggcucuguuau

SEQ ID NO: 626731 - RNA, 19 nt, Artificial Sequence
  Description of Artificial Sequence: Synthetic oligonucleotide
  Antisense strand to SEQ ID NO: 626730
auaacagagccacgauaag

SEQ ID NO: 626732 - RNA, 19 nt, Artificial Sequence
  Description of Artificial Sequence: Synthetic oligonucleotide
  Sense strand starting at position 3096 of SEQ ID NO: 585271
acaggacggccugaauauu

SEQ ID NO: 626733 - RNA, 19 nt, Artificial Sequence
  Description of Artificial Sequence: Synthetic oligonucleotide
  Antisense strand to SEQ ID NO: 626732
aauauucaggccguccugu

SEQ ID NO: 626734 - RNA, 19 nt, Artificial Sequence
  Description of Artificial Sequence: Synthetic oligonucleotide
  Sense strand starting at position 3265 of SEQ ID NO: 585271
cagguauuguaaguacacu

SEQ ID NO: 626735 - RNA, 19 nt, Artificial Sequence
  Description of Artificial Sequence: Synthetic oligonucleotide
  Antisense strand to SEQ ID NO: 626734
aguguacuuacaauaccug

SEQ ID NO: 626736 - RNA, 19 nt, Artificial Sequence
  Description of Artificial Sequence: Synthetic oligonucleotide
  Sense strand starting at position 3651 of SEQ ID NO: 585271
ucauuugaaucucaggacu

SEQ ID NO: 626737 - RNA, 19 nt, Artificial Sequence
  Description of Artificial Sequence: Synthetic oligonucleotide
  Antisense strand to SEQ ID NO: 626736
aguccugagauucaaauga

SEQ ID NO: 626738 - RNA, 19 nt, Artificial Sequence
  Description of Artificial Sequence: Synthetic oligonucleotide
  Sense strand starting at position 3653 of SEQ ID NO: 585271
auuugaaucucaggacuau

SEQ ID NO: 626739 - RNA, 19 nt, Artificial Sequence
  Description of Artificial Sequence: Synthetic oligonucleotide
  Antisense strand to SEQ ID NO: 626738
auaguccugagauucaaau

SEQ ID NO: 626740 - RNA, 19 nt, Artificial Sequence
  Description of Artificial Sequence: Synthetic oligonucleotide
  Sense strand starting at position 3698 of SEQ ID NO: 585271
uguacuacucuguagugga

SEQ ID NO: 626741 - RNA, 19 nt, Artificial Sequence
  Description of Artificial Sequence: Synthetic oligonucleotide
  Antisense strand to SEQ ID NO: 626740
uccacuacagaguaguaca

SEQ ID NO: 626742 - RNA, 19 nt, Artificial Sequence
  Description of Artificial Sequence: Synthetic oligonucleotide
  Sense strand starting at position 3731 of SEQ ID NO: 585271
uuucuauucuguuuaggaa

SEQ ID NO: 626743 - RNA, 19 nt, Artificial Sequence
  Description of Artificial Sequence: Synthetic oligonucleotide
  Antisense strand to SEQ ID NO: 626742
uuccuaaacagaauagaaa

SEQ ID NO: 626744 - RNA, 19 nt, Artificial Sequence
  Description of Artificial Sequence: Synthetic oligonucleotide
  Sense strand starting at position 3732 of SEQ ID NO: 585271
uucuauucuguuuaggaau

SEQ ID NO: 626745 - RNA, 19 nt, Artificial Sequence
  Description of Artificial Sequence: Synthetic oligonucleotide
  Antisense strand to SEQ ID NO: 626744
auuccuaaacagaauagaa

SEQ ID NO: 626746 - RNA, 19 nt, Artificial Sequence
  Description of Artificial Sequence: Synthetic oligonucleotide
  Sense strand starting at position 3738 of SEQ ID NO: 585271
ucuguuuaggaauagcaau

SEQ ID NO: 626747 - RNA, 19 nt, Artificial Sequence
  Description of Artificial Sequence: Synthetic oligonucleotide
  Antisense strand to SEQ ID NO: 626746
auugcuauuccuaaacaga

SEQ ID NO: 626748 - RNA, 19 nt, Artificial Sequence
  Description of Artificial Sequence: Synthetic oligonucleotide
  Sense strand starting at position 3757 of SEQ ID NO: 585271
gccugaacccucuaagucu

SEQ ID NO: 626749 - RNA, 19 nt, Artificial Sequence
  Description of Artificial Sequence: Synthetic oligonucleotide
  Antisense strand to SEQ ID NO: 626748
agacuuagaggguucaggc

SEQ ID NO: 626750 - RNA, 19 nt, Artificial Sequence
  Description of Artificial Sequence: Synthetic oligonucleotide
  Sense strand starting at position 3796 of SEQ ID NO: 585271
uucuaagaaggcuaucacu

SEQ ID NO: 626751 - RNA, 19 nt, Artificial Sequence
  Description of Artificial Sequence: Synthetic oligonucleotide
  Antisense strand to SEQ ID NO: 626750
agugauagccuucuuagaa

SEQ ID NO: 626752 - RNA, 19 nt, Artificial Sequence
  Description of Artificial Sequence: Synthetic oligonucleotide
  Sense strand starting at position 3871 of SEQ ID NO: 585271
uaucuauguguacaagguu

SEQ ID NO: 626753 - RNA, 19 nt, Artificial Sequence
  Description of Artificial Sequence: Synthetic oligonucleotide
  Antisense strand to SEQ ID NO: 626752
aaccuuguacacauagaua

SEQ ID NO: 626754 - RNA, 19 nt, Artificial Sequence
  Description of Artificial Sequence: Synthetic oligonucleotide
  Sense strand starting at position 32 of SEQ ID NO: 585272
cccuguucugauuggacaa

SEQ ID NO: 626755 - RNA, 19 nt, Artificial Sequence
  Description of Artificial Sequence: Synthetic oligonucleotide
  Antisense strand to SEQ ID NO: 626754
uuguccaaucagaacaggg

SEQ ID NO: 626756 - RNA, 19 nt, Artificial Sequence
  Description of Artificial Sequence: Synthetic oligonucleotide
  Sense strand starting at position 110 of SEQ ID NO: 585272
cugcauguagaccaaauau

SEQ ID NO: 626757 - RNA, 19 nt, Artificial Sequence
  Description of Artificial Sequence: Synthetic oligonucleotide
  Antisense strand to SEQ ID NO: 626756
auauuuggucuacaugcag

SEQ ID NO: 626758 - RNA, 19 nt, Artificial Sequence
  Description of Artificial Sequence: Synthetic oligonucleotide
  Sense strand starting at position 290 of SEQ ID NO: 585272
ugaaacuggcuuugaucaa

SEQ ID NO: 626759 - RNA, 19 nt, Artificial Sequence
  Description of Artificial Sequence: Synthetic oligonucleotide
  Antisense strand to SEQ ID NO: 626758
uugaucaaagccaguuuca

SEQ ID NO: 626760 - RNA, 19 nt, Artificial Sequence
  Description of Artificial Sequence: Synthetic oligonucleotide
  Sense strand starting at position 479 of SEQ ID NO: 585272
accugauguuaagcuacau

SEQ ID NO: 626761 - RNA, 19 nt, Artificial Sequence
  Description of Artificial Sequence: Synthetic oligonucleotide
  Antisense strand to SEQ ID NO: 626760
auguagcuuaacaucaggu

SEQ ID NO: 626762 - RNA, 19 nt, Artificial Sequence
  Description of Artificial Sequence: Synthetic oligonucleotide
  Sense strand starting at position 565 of SEQ ID NO: 585272
acugguauuuguguaaucu

SEQ ID NO: 626763 - RNA, 19 nt, Artificial Sequence
  Description of Artificial Sequence: Synthetic oligonucleotide
  Antisense strand to SEQ ID NO: 626762
agauuacacaaauaccagu

SEQ ID NO: 626764 - RNA, 19 nt, Artificial Sequence
  Description of Artificial Sequence: Synthetic oligonucleotide
  Sense strand starting at position 569 of SEQ ID NO: 585272
guauuuguguaaucugcug

SEQ ID NO: 626765 - RNA, 19 nt, Artificial Sequence
  Description of Artificial Sequence: Synthetic oligonucleotide
  Antisense strand to SEQ ID NO: 626764
cagcagauuacacaaauac

SEQ ID NO: 626766 - RNA, 19 nt, Artificial Sequence
  Description of Artificial Sequence: Synthetic oligonucleotide
  Sense strand starting at position 571 of SEQ ID NO: 585272
auuuguguaaucugcugua

SEQ ID NO: 626767 - RNA, 19 nt, Artificial Sequence
  Description of Artificial Sequence: Synthetic oligonucleotide
  Antisense strand to SEQ ID NO: 626766
uacagcagauuacacaaau

SEQ ID NO: 626768 - RNA, 19 nt, Artificial Sequence
  Description of Artificial Sequence: Synthetic oligonucleotide
  Sense strand starting at position 648 of SEQ ID NO: 585272
uuuagucaugcugaacacu

SEQ ID NO: 626769 - RNA, 19 nt, Artificial Sequence
  Description of Artificial Sequence: Synthetic oligonucleotide
  Antisense strand to SEQ ID NO: 626768
aguguucagcaugacuaaa

SEQ ID NO: 626770 - RNA, 19 nt, Artificial Sequence
  Description of Artificial Sequence: Synthetic oligonucleotide
  Sense strand starting at position 733 of SEQ ID NO: 585272
auuaauuaggguuagcuca

SEQ ID NO: 626771 - RNA, 19 nt, Artificial Sequence
  Description of Artificial Sequence: Synthetic oligonucleotide
  Antisense strand to SEQ ID NO: 626770
ugagcuaacccuaauuaau

SEQ ID NO: 626772 - RNA, 19 nt, Artificial Sequence
  Description of Artificial Sequence: Synthetic oligonucleotide
  Sense strand starting at position 803 of SEQ ID NO: 585272
acagguuauuucguaucau

SEQ ID NO: 626773 - RNA, 19 nt, Artificial Sequence
  Description of Artificial Sequence: Synthetic oligonucleotide
  Antisense strand to SEQ ID NO: 626772
augauacgaaauaaccugu

SEQ ID NO: 626774 - RNA, 19 nt, Artificial Sequence
  Description of Artificial Sequence: Synthetic oligonucleotide
  Sense strand starting at position 973 of SEQ ID NO: 585272
cgcugcauugaucgauuua

SEQ ID NO: 626775 - RNA, 19 nt, Artificial Sequence
  Description of Artificial Sequence: Synthetic oligonucleotide
  Antisense strand to SEQ ID NO: 626774
uaaaucgaucaaugcagcg

SEQ ID NO: 626776 - RNA, 19 nt, Artificial Sequence
  Description of Artificial Sequence: Synthetic oligonucleotide
  Sense strand starting at position 1308 of SEQ ID NO: 585272
ggauuacaggcguaaggaa

SEQ ID NO: 626777 - RNA, 19 nt, Artificial Sequence
  Description of Artificial Sequence: Synthetic oligonucleotide
  Antisense strand to SEQ ID NO: 626776
uuccuuacgccuguaaucc

SEQ ID NO: 626778 - RNA, 19 nt, Artificial Sequence
  Description of Artificial Sequence: Synthetic oligonucleotide
  Sense strand starting at position 1335 of SEQ ID NO: 585272
cgccaauuugcuuauguau

SEQ ID NO: 626779 - RNA, 19 nt, Artificial Sequence
  Description of Artificial Sequence: Synthetic oligonucleotide
  Antisense strand to SEQ ID NO: 626778
auacauaagcaaauuggcg

SEQ ID NO: 626780 - RNA, 19 nt, Artificial Sequence
  Description of Artificial Sequence: Synthetic oligonucleotide
  Sense strand starting at position 1964 of SEQ ID NO: 585272
aaacgauguuaagcaauga

SEQ ID NO: 626781 - RNA, 19 nt, Artificial Sequence
  Description of Artificial Sequence: Synthetic oligonucleotide
  Antisense strand to SEQ ID NO: 626780
ucauugcuuaacaucguuu

SEQ ID NO: 626782 - RNA, 19 nt, Artificial Sequence
  Description of Artificial Sequence: Synthetic oligonucleotide
  Sense strand starting at position 1968 of SEQ ID NO: 585272
gauguuaagcaaugaagac

SEQ ID NO: 626783 - RNA, 19 nt, Artificial Sequence
  Description of Artificial Sequence: Synthetic oligonucleotide
  Antisense strand to SEQ ID NO: 626782
gucuucauugcuuaacauc

SEQ ID NO: 626784 - RNA, 19 nt, Artificial Sequence
  Description of Artificial Sequence: Synthetic oligonucleotide
  Sense strand starting at position 2005 of SEQ ID NO: 585272
uuuguuagcaagugagaaa

SEQ ID NO: 626785 - RNA, 19 nt, Artificial Sequence
  Description of Artificial Sequence: Synthetic oligonucleotide
  Antisense strand to SEQ ID NO: 626784
uuucucacuugcuaacaaa

SEQ ID NO: 626786 - RNA, 19 nt, Artificial Sequence
  Description of Artificial Sequence: Synthetic oligonucleotide
  Sense strand starting at position 2026 of SEQ ID NO: 585272
auuauacuuggaggucgaa

SEQ ID NO: 626787 - RNA, 19 nt, Artificial Sequence
  Description of Artificial Sequence: Synthetic oligonucleotide
  Antisense strand to SEQ ID NO: 626786
uucgaccuccaaguauaau

SEQ ID NO: 626788 - RNA, 19 nt, Artificial Sequence
  Description of Artificial Sequence: Synthetic oligonucleotide
  Sense strand starting at position 2053 of SEQ ID NO: 585272
aacgcuauuugauuggcua

SEQ ID NO: 626789 - RNA, 19 nt, Artificial Sequence
  Description of Artificial Sequence: Synthetic oligonucleotide
  Antisense strand to SEQ ID NO: 626788
uagccaaucaaauagcguu

SEQ ID NO: 626790 - RNA, 19 nt, Artificial Sequence
  Description of Artificial Sequence: Synthetic oligonucleotide
  Sense strand starting at position 2055 of SEQ ID NO: 585272
cgcuauuugauuggcuaga

SEQ ID NO: 626791 - RNA, 19 nt, Artificial Sequence
  Description of Artificial Sequence: Synthetic oligonucleotide
  Antisense strand to SEQ ID NO: 626790
ucuagccaaucaaauagcg

SEQ ID NO: 626792 - RNA, 19 nt, Artificial Sequence
  Description of Artificial Sequence: Synthetic oligonucleotide
  Sense strand starting at position 2096 of SEQ ID NO: 585272
acgcuagaaucaccuaauu

SEQ ID NO: 626793 - RNA, 19 nt, Artificial Sequence
  Description of Artificial Sequence: Synthetic oligonucleotide
  Antisense strand to SEQ ID NO: 626792
aauuaggugauucuagcgu

SEQ ID NO: 626794 - RNA, 19 nt, Artificial Sequence
  Description of Artificial Sequence: Synthetic oligonucleotide
  Sense strand starting at position 2147 of SEQ ID NO: 585272
ccaaucaauguguaagcuu

SEQ ID NO: 626795 - RNA, 19 nt, Artificial Sequence
  Description of Artificial Sequence: Synthetic oligonucleotide
  Antisense strand to SEQ ID NO: 626794
aagcuuacacauugauugg

SEQ ID NO: 626796 - RNA, 19 nt, Artificial Sequence
  Description of Artificial Sequence: Synthetic oligonucleotide
  Sense strand starting at position 2225 of SEQ ID NO: 585272
uugcauuucucuuuagguu

SEQ ID NO: 626797 - RNA, 19 nt, Artificial Sequence
  Description of Artificial Sequence: Synthetic oligonucleotide
  Antisense strand to SEQ ID NO: 626796
aaccuaaagagaaaugcaa

SEQ ID NO: 626798 - RNA, 19 nt, Artificial Sequence
  Description of Artificial Sequence: Synthetic oligonucleotide
  Sense strand starting at position 2240 of SEQ ID NO: 585272
gguuguggacgaaguguuu

SEQ ID NO: 626799 - RNA, 19 nt, Artificial Sequence
  Description of Artificial Sequence: Synthetic oligonucleotide
  Antisense strand to SEQ ID NO: 626798
aaacacuucguccacaacc

SEQ ID NO: 626800 - RNA, 19 nt, Artificial Sequence
  Description of Artificial Sequence: Synthetic oligonucleotide
  Sense strand starting at position 2249 of SEQ ID NO: 585272
cgaaguguuuauuuaucau

SEQ ID NO: 626801 - RNA, 19 nt, Artificial Sequence
  Description of Artificial Sequence: Synthetic oligonucleotide
  Antisense strand to SEQ ID NO: 626800
augauaaauaaacacuucg

SEQ ID NO: 626802 - RNA, 19 nt, Artificial Sequence
  Description of Artificial Sequence: Synthetic oligonucleotide
  Sense strand starting at position 3008 of SEQ ID NO: 585272
aggaaugucuuccuuaauu

SEQ ID NO: 626803 - RNA, 19 nt, Artificial Sequence
  Description of Artificial Sequence: Synthetic oligonucleotide
  Antisense strand to SEQ ID NO: 626802
aauuaaggaagacauuccu

SEQ ID NO: 626804 - RNA, 19 nt, Artificial Sequence
  Description of Artificial Sequence: Synthetic oligonucleotide
  Sense strand starting at position 3029 of SEQ ID NO: 585272
gguuuagucaucgcagcau

SEQ ID NO: 626805 - RNA, 19 nt, Artificial Sequence
  Description of Artificial Sequence: Synthetic oligonucleotide
  Antisense strand to SEQ ID NO: 626804
augcugcgaugacuaaacc

SEQ ID NO: 626806 - RNA, 19 nt, Artificial Sequence
  Description of Artificial Sequence: Synthetic oligonucleotide
  Sense strand starting at position 3040 of SEQ ID NO: 585272
cgcagcauuggcgaauuua

SEQ ID NO: 626807 - RNA, 19 nt, Artificial Sequence
  Description of Artificial Sequence: Synthetic oligonucleotide
  Antisense strand to SEQ ID NO: 626806
uaaauucgccaaugcugcg

SEQ ID NO: 626808 - RNA, 19 nt, Artificial Sequence
  Description of Artificial Sequence: Synthetic oligonucleotide
  Sense strand starting at position 3048 of SEQ ID NO: 585272
uggcgaauuuagcugguua

SEQ ID NO: 626809 - RNA, 19 nt, Artificial Sequence
  Description of Artificial Sequence: Synthetic oligonucleotide
  Antisense strand to SEQ ID NO: 626808
uaaccagcuaaauucgcca

SEQ ID NO: 626810 - RNA, 19 nt, Artificial Sequence
  Description of Artificial Sequence: Synthetic oligonucleotide
  Sense strand starting at position 3049 of SEQ ID NO: 585272
ggcgaauuuagcugguuaa

SEQ ID NO: 626811 - RNA, 19 nt, Artificial Sequence
  Description of Artificial Sequence: Synthetic oligonucleotide
  Antisense strand to SEQ ID NO: 626810
uuaaccagcuaaauucgcc

SEQ ID NO: 626812 - RNA, 19 nt, Artificial Sequence
  Description of Artificial Sequence: Synthetic oligonucleotide
  Sense strand starting at position 3050 of SEQ ID NO: 585272
gcgaauuuagcugguuaaa

SEQ ID NO: 626813 - RNA, 19 nt, Artificial Sequence
  Description of Artificial Sequence: Synthetic oligonucleotide
  Antisense strand to SEQ ID NO: 626812
uuuaaccagcuaaauucgc

SEQ ID NO: 626814 - RNA, 19 nt, Artificial Sequence
  Description of Artificial Sequence: Synthetic oligonucleotide
  Sense strand starting at position 3106 of SEQ ID NO: 585272
agacaaguaaugugcauga

SEQ ID NO: 626815 - RNA, 19 nt, Artificial Sequence
  Description of Artificial Sequence: Synthetic oligonucleotide
  Antisense strand to SEQ ID NO: 626814
ucaugcacauuacuugucu

SEQ ID NO: 626816 - RNA, 19 nt, Artificial Sequence
  Description of Artificial Sequence: Synthetic oligonucleotide
  Sense strand starting at position 3108 of SEQ ID NO: 585272
acaaguaaugugcaugaaa

SEQ ID NO: 626817 - RNA, 19 nt, Artificial Sequence
  Description of Artificial Sequence: Synthetic oligonucleotide
  Antisense strand to SEQ ID NO: 626816
uuucaugcacauuacuugu

SEQ ID NO: 626818 - RNA, 19 nt, Artificial Sequence
  Description of Artificial Sequence: Synthetic oligonucleotide
  Sense strand starting at position 3216 of SEQ ID NO: 585272
aaauaccauuugggaguaa

SEQ ID NO: 626819 - RNA, 19 nt, Artificial Sequence
  Description of Artificial Sequence: Synthetic oligonucleotide
  Antisense strand to SEQ ID NO: 626818
uuacucccaaaugguauuu

SEQ ID NO: 626820 - RNA, 19 nt, Artificial Sequence
  Description of Artificial Sequence: Synthetic oligonucleotide
  Sense strand starting at position 3217 of SEQ ID NO: 585272
aauaccauuugggaguaau

SEQ ID NO: 626821 - RNA, 19 nt, Artificial Sequence
  Description of Artificial Sequence: Synthetic oligonucleotide
  Antisense strand to SEQ ID NO: 626820
auuacucccaaaugguauu

SEQ ID NO: 626822 - RNA, 19 nt, Artificial Sequence
  Description of Artificial Sequence: Synthetic oligonucleotide
  Sense strand starting at position 3266 of SEQ ID NO: 585272
uugucacuuccucaaaguu

SEQ ID NO: 626823 - RNA, 19 nt, Artificial Sequence
  Description of Artificial Sequence: Synthetic oligonucleotide
  Antisense strand to SEQ ID NO: 626822
aacuuugaggaagugacaa

SEQ ID NO: 626824 - RNA, 19 nt, Artificial Sequence
  Description of Artificial Sequence: Synthetic oligonucleotide
  Sense strand starting at position 3492 of SEQ ID NO: 585272
augaauggcauccagugua

SEQ ID NO: 626825 - RNA, 19 nt, Artificial Sequence
  Description of Artificial Sequence: Synthetic oligonucleotide
  Antisense strand to SEQ ID NO: 626824
uacacuggaugccauucau

SEQ ID NO: 626826 - RNA, 19 nt, Artificial Sequence
  Description of Artificial Sequence: Synthetic oligonucleotide
  Sense strand starting at position 3495 of SEQ ID NO: 585272
aauggcauccaguguagaa

SEQ ID NO: 626827 - RNA, 19 nt, Artificial Sequence
  Description of Artificial Sequence: Synthetic oligonucleotide
  Antisense strand to SEQ ID NO: 626826
uucuacacuggaugccauu

SEQ ID NO: 626828 - RNA, 19 nt, Artificial Sequence
  Description of Artificial Sequence: Synthetic oligonucleotide
  Sense strand starting at position 3497 of SEQ ID NO: 585272
uggcauccaguguagaaua

SEQ ID NO: 626829 - RNA, 19 nt, Artificial Sequence
  Description of Artificial Sequence: Synthetic oligonucleotide
  Antisense strand to SEQ ID NO: 626828
uauucuacacuggaugcca

SEQ ID NO: 626830 - RNA, 19 nt, Artificial Sequence
  Description of Artificial Sequence: Synthetic oligonucleotide
  Sense strand starting at position 3502 of SEQ ID NO: 585272
uccaguguagaauacuuaa

SEQ ID NO: 626831 - RNA, 19 nt, Artificial Sequence
  Description of Artificial Sequence: Synthetic oligonucleotide
  Antisense strand to SEQ ID NO: 626830
uuaaguauucuacacugga

SEQ ID NO: 626832 - RNA, 19 nt, Artificial Sequence
  Description of Artificial Sequence: Synthetic oligonucleotide
  Sense strand starting at position 3657 of SEQ ID NO: 585272
uucgcuauuguugcucaga

SEQ ID NO: 626833 - RNA, 19 nt, Artificial Sequence
  Description of Artificial Sequence: Synthetic oligonucleotide
  Antisense strand to SEQ ID NO: 626832
ucugagcaacaauagcgaa

SEQ ID NO: 626834 - RNA, 19 nt, Artificial Sequence
  Description of Artificial Sequence: Synthetic oligonucleotide
  Sense strand starting at position 229 of SEQ ID NO: 585273
guagaaauuucucaaugag

SEQ ID NO: 626835 - RNA, 19 nt, Artificial Sequence
  Description of Artificial Sequence: Synthetic oligonucleotide
  Antisense strand to SEQ ID NO: 626834
cucauugagaaauuucuac

SEQ ID NO: 626836 - RNA, 19 nt, Artificial Sequence
  Description of Artificial Sequence: Synthetic oligonucleotide
  Sense strand starting at position 325 of SEQ ID NO: 585273
ugcaguaucccauauagua

SEQ ID NO: 626837 - RNA, 19 nt, Artificial Sequence
  Description of Artificial Sequence: Synthetic oligonucleotide
  Antisense strand to SEQ ID NO: 626836
uacuauaugggauacugca

SEQ ID NO: 626838 - RNA, 19 nt, Artificial Sequence
  Description of Artificial Sequence: Synthetic oligonucleotide
  Sense strand starting at position 371 of SEQ ID NO: 585273
cagccuguaugauuucgua

SEQ ID NO: 626839 - RNA, 19 nt, Artificial Sequence
  Description of Artificial Sequence: Synthetic oligonucleotide
  Antisense strand to SEQ ID NO: 626838
uacgaaaucauacaggcug

SEQ ID NO: 626840 - RNA, 19 nt, Artificial Sequence
  Description of Artificial Sequence: Synthetic oligonucleotide
  Sense strand starting at position 429 of SEQ ID NO: 585273
cgaagcugugccuuuguau

SEQ ID NO: 626841 - RNA, 19 nt, Artificial Sequence
  Description of Artificial Sequence: Synthetic oligonucleotide
  Antisense strand to SEQ ID NO: 626840
auacaaaggcacagcuucg

SEQ ID NO: 626842 - RNA, 19 nt, Artificial Sequence
  Description of Artificial Sequence: Synthetic oligonucleotide
  Sense strand starting at position 437 of SEQ ID NO: 585273
ugccuuuguauggaaagga

SEQ ID NO: 626843 - RNA, 19 nt, Artificial Sequence
  Description of Artificial Sequence: Synthetic oligonucleotide
  Antisense strand to SEQ ID NO: 626842
uccuuuccauacaaaggca

SEQ ID NO: 626844 - RNA, 19 nt, Artificial Sequence
  Description of Artificial Sequence: Synthetic oligonucleotide
  Sense strand starting at position 542 of SEQ ID NO: 585273
uugauuaagacaggguauu

SEQ ID NO: 626845 - RNA, 19 nt, Artificial Sequence
  Description of Artificial Sequence: Synthetic oligonucleotide
  Antisense strand to SEQ ID NO: 626844
aauacccugucuuaaucaa

SEQ ID NO: 626846 - RNA, 19 nt, Artificial Sequence
  Description of Artificial Sequence: Synthetic oligonucleotide
  Sense strand starting at position 840 of SEQ ID NO: 585273
ggcucaugauuucugcauu

SEQ ID NO: 626847 - RNA, 19 nt, Artificial Sequence
  Description of Artificial Sequence: Synthetic oligonucleotide
  Antisense strand to SEQ ID NO: 626846
aaugcagaaaucaugagcc

SEQ ID NO: 626848 - RNA, 19 nt, Artificial Sequence
  Description of Artificial Sequence: Synthetic oligonucleotide
  Sense strand starting at position 1258 of SEQ ID NO: 585273
gguuaagcaggguacaauu

SEQ ID NO: 626849 - RNA, 19 nt, Artificial Sequence
  Description of Artificial Sequence: Synthetic oligonucleotide
  Antisense strand to SEQ ID NO: 626848
aauuguacccugcuuaacc

SEQ ID NO: 626850 - RNA, 19 nt, Artificial Sequence
  Description of Artificial Sequence: Synthetic oligonucleotide
  Sense strand starting at position 1272 of SEQ ID NO: 585273
caauuaaguggccaggagu

SEQ ID NO: 626851 - RNA, 19 nt, Artificial Sequence
  Description of Artificial Sequence: Synthetic oligonucleotide
  Antisense strand to SEQ ID NO: 626850
acuccuggccacuuaauug

SEQ ID NO: 626852 - RNA, 19 nt, Artificial Sequence
  Description of Artificial Sequence: Synthetic oligonucleotide
  Sense strand starting at position 1275 of SEQ ID NO: 585273
uuaaguggccaggaguuua

SEQ ID NO: 626853 - RNA, 19 nt, Artificial Sequence
  Description of Artificial Sequence: Synthetic oligonucleotide
  Antisense strand to SEQ ID NO: 626852
uaaacuccuggccacuuaa

SEQ ID NO: 626854 - RNA, 19 nt, Artificial Sequence
  Description of Artificial Sequence: Synthetic oligonucleotide
  Sense strand starting at position 1410 of SEQ ID NO: 585273
cgcuuaaauuuggaaauuu

SEQ ID NO: 626855 - RNA, 19 nt, Artificial Sequence
  Description of Artificial Sequence: Synthetic oligonucleotide
  Antisense strand to SEQ ID NO: 626854
aaauuuccaaauuuaagcg

SEQ ID NO: 626856 - RNA, 19 nt, Artificial Sequence
  Description of Artificial Sequence: Synthetic oligonucleotide
  Sense strand starting at position 1474 of SEQ ID NO: 585273
uuuggaucagugcaguuua

SEQ ID NO: 626857 - RNA, 19 nt, Artificial Sequence
  Description of Artificial Sequence: Synthetic oligonucleotide
  Antisense strand to SEQ ID NO: 626856
uaaacugcacugauccaaa

SEQ ID NO: 626858 - RNA, 19 nt, Artificial Sequence
  Description of Artificial Sequence: Synthetic oligonucleotide
  Sense strand starting at position 1502 of SEQ ID NO: 585273
ugcgucucaaaggauuaca

SEQ ID NO: 626859 - RNA, 19 nt, Artificial Sequence
  Description of Artificial Sequence: Synthetic oligonucleotide
  Antisense strand to SEQ ID NO: 626858
uguaauccuuugagacgca

SEQ ID NO: 626860 - RNA, 19 nt, Artificial Sequence
  Description of Artificial Sequence: Synthetic oligonucleotide
  Sense strand starting at position 2158 of SEQ ID NO: 585273
gcaagauucugauugguaa

SEQ ID NO: 626861 - RNA, 19 nt, Artificial Sequence
  Description of Artificial Sequence: Synthetic oligonucleotide
  Antisense strand to SEQ ID NO: 626860
uuaccaaucagaaucuugc

SEQ ID NO: 626862 - RNA, 19 nt, Artificial Sequence
  Description of Artificial Sequence: Synthetic oligonucleotide
  Sense strand starting at position 2159 of SEQ ID NO: 585273
caagauucugauugguaaa

SEQ ID NO: 626863 - RNA, 19 nt, Artificial Sequence
  Description of Artificial Sequence: Synthetic oligonucleotide
  Antisense strand to SEQ ID NO: 626862
uuuaccaaucagaaucuug

SEQ ID NO: 626864 - RNA, 19 nt, Artificial Sequence
  Description of Artificial Sequence: Synthetic oligonucleotide
  Sense strand starting at position 2161 of SEQ ID NO: 585273
agauucugauugguaaauu

SEQ ID NO: 626865 - RNA, 19 nt, Artificial Sequence
  Description of Artificial Sequence: Synthetic oligonucleotide
  Antisense strand to SEQ ID NO: 626864
aauuuaccaaucagaaucu

SEQ ID NO: 626866 - RNA, 19 nt, Artificial Sequence
  Description of Artificial Sequence: Synthetic oligonucleotide
  Sense strand starting at position 2162 of SEQ ID NO: 585273
gauucugauugguaaauuu

SEQ ID NO: 626867 - RNA, 19 nt, Artificial Sequence
  Description of Artificial Sequence: Synthetic oligonucleotide
  Antisense strand to SEQ ID NO: 626866
aaauuuaccaaucagaauc

SEQ ID NO: 626868 - RNA, 19 nt, Artificial Sequence
  Description of Artificial Sequence: Synthetic oligonucleotide
  Sense strand starting at position 2169 of SEQ ID NO: 585273
auugguaaauuuggauaga

SEQ ID NO: 626869 - RNA, 19 nt, Artificial Sequence
  Description of Artificial Sequence: Synthetic oligonucleotide
  Antisense strand to SEQ ID NO: 626868
ucuauccaaauuuaccaau

SEQ ID NO: 626870 - RNA, 19 nt, Artificial Sequence
  Description of Artificial Sequence: Synthetic oligonucleotide
  Sense strand starting at position 2255 of SEQ ID NO: 585273
cugcaaagacauugaucau

SEQ ID NO: 626871 - RNA, 19 nt, Artificial Sequence
  Description of Artificial Sequence: Synthetic oligonucleotide
  Antisense strand to SEQ ID NO: 626870
augaucaaugucuuugcag

SEQ ID NO: 626872 - RNA, 19 nt, Artificial Sequence
  Description of Artificial Sequence: Synthetic oligonucleotide
  Sense strand starting at position 2279 of SEQ ID NO: 585273
uuaauagacugaucuguua

SEQ ID NO: 626873 - RNA, 19 nt, Artificial Sequence
  Description of Artificial Sequence: Synthetic oligonucleotide
  Antisense strand to SEQ ID NO: 626872
uaacagaucagucuauuaa

SEQ ID NO: 626874 - RNA, 19 nt, Artificial Sequence
  Description of Artificial Sequence: Synthetic oligonucleotide
  Sense strand starting at position 2323 of SEQ ID NO: 585273
uguguuugcguuagaaagu

SEQ ID NO: 626875 - RNA, 19 nt, Artificial Sequence
  Description of Artificial Sequence: Synthetic oligonucleotide
  Antisense strand to SEQ ID NO: 626874
acuuucuaacgcaaacaca

SEQ ID NO: 626876 - RNA, 19 nt, Artificial Sequence
  Description of Artificial Sequence: Synthetic oligonucleotide
  Sense strand starting at position 2332 of SEQ ID NO: 585273
guuagaaagugcuuuagaa

SEQ ID NO: 626877 - RNA, 19 nt, Artificial Sequence
  Description of Artificial Sequence: Synthetic oligonucleotide
  Antisense strand to SEQ ID NO: 626876
uucuaaagcacuuucuaac

SEQ ID NO: 626878 - RNA, 19 nt, Artificial Sequence
  Description of Artificial Sequence: Synthetic oligonucleotide
  Sense strand starting at position 2334 of SEQ ID NO: 585273
uagaaagugcuuuagaauu

SEQ ID NO: 626879 - RNA, 19 nt, Artificial Sequence
  Description of Artificial Sequence: Synthetic oligonucleotide
  Antisense strand to SEQ ID NO: 626878
aauucuaaagcacuuucua

SEQ ID NO: 626880 - RNA, 19 nt, Artificial Sequence
  Description of Artificial Sequence: Synthetic oligonucleotide
  Sense strand starting at position 2466 of SEQ ID NO: 585273
uauagaguacaaggcuaau

SEQ ID NO: 626881 - RNA, 19 nt, Artificial Sequence
  Description of Artificial Sequence: Synthetic oligonucleotide
  Antisense strand to SEQ ID NO: 626880
auuagccuuguacucuaua

SEQ ID NO: 626882 - RNA, 19 nt, Artificial Sequence
  Description of Artificial Sequence: Synthetic oligonucleotide
  Sense strand starting at position 2733 of SEQ ID NO: 585273
guuguuucucuguaagaca

SEQ ID NO: 626883 - RNA, 19 nt, Artificial Sequence
  Description of Artificial Sequence: Synthetic oligonucleotide
  Antisense strand to SEQ ID NO: 626882
ugucuuacagagaaacaac

SEQ ID NO: 626884 - RNA, 19 nt, Artificial Sequence
  Description of Artificial Sequence: Synthetic oligonucleotide
  Sense strand starting at position 2801 of SEQ ID NO: 585273
cgaacaauuuaagacacau

SEQ ID NO: 626885 - RNA, 19 nt, Artificial Sequence
  Description of Artificial Sequence: Synthetic oligonucleotide
  Antisense strand to SEQ ID NO: 626884
augugucuuaaauuguucg

SEQ ID NO: 626886 - RNA, 19 nt, Artificial Sequence
  Description of Artificial Sequence: Synthetic oligonucleotide
  Sense strand starting at position 2976 of SEQ ID NO: 585273
ugugaauuaaccuaucgga

SEQ ID NO: 626887 - RNA, 19 nt, Artificial Sequence
  Description of Artificial Sequence: Synthetic oligonucleotide
  Antisense strand to SEQ ID NO: 626886
uccgauagguuaauucaca

SEQ ID NO: 626888 - RNA, 19 nt, Artificial Sequence
  Description of Artificial Sequence: Synthetic oligonucleotide
  Sense strand starting at position 2990 of SEQ ID NO: 585273
ucggauucccuguaaggug

SEQ ID NO: 626889 - RNA, 19 nt, Artificial Sequence
  Description of Artificial Sequence: Synthetic oligonucleotide
  Antisense strand to SEQ ID NO: 626888
caccuuacagggaauccga

SEQ ID NO: 626890 - RNA, 19 nt, Artificial Sequence
  Description of Artificial Sequence: Synthetic oligonucleotide
  Sense strand starting at position 3104 of SEQ ID NO: 585273
acaaguucgcguuugugua

SEQ ID NO: 626891 - RNA, 19 nt, Artificial Sequence
  Description of Artificial Sequence: Synthetic oligonucleotide
  Antisense strand to SEQ ID NO: 626890
uacacaaacgcgaacuugu

SEQ ID NO: 626892 - RNA, 19 nt, Artificial Sequence
  Description of Artificial Sequence: Synthetic oligonucleotide
  Sense strand starting at position 3114 of SEQ ID NO: 585273
guuuguguaagcguacuau

SEQ ID NO: 626893 - RNA, 19 nt, Artificial Sequence
  Description of Artificial Sequence: Synthetic oligonucleotide
  Antisense strand to SEQ ID NO: 626892
auaguacgcuuacacaaac

SEQ ID NO: 626894 - RNA, 19 nt, Artificial Sequence
  Description of Artificial Sequence: Synthetic oligonucleotide
  Sense strand starting at position 3120 of SEQ ID NO: 585273
guaagcguacuauaaauau

SEQ ID NO: 626895 - RNA, 19 nt, Artificial Sequence
  Description of Artificial Sequence: Synthetic oligonucleotide
  Antisense strand to SEQ ID NO: 626894
auauuuauaguacgcuuac

SEQ ID NO: 626896 - RNA, 19 nt, Artificial Sequence
  Description of Artificial Sequence: Synthetic oligonucleotide
  Sense strand starting at position 3212 of SEQ ID NO: 585273
uuucuuucucauuggaaag

SEQ ID NO: 626897 - RNA, 19 nt, Artificial Sequence
  Description of Artificial Sequence: Synthetic oligonucleotide
  Antisense strand to SEQ ID NO: 626896
cuuuccaaugagaaagaaa

SEQ ID NO: 626898 - RNA, 19 nt, Artificial Sequence
  Description of Artificial Sequence: Synthetic oligonucleotide
  Sense strand starting at position 3281 of SEQ ID NO: 585273
ggcgauugacaucaugaau

SEQ ID NO: 626899 - RNA, 19 nt, Artificial Sequence
  Description of Artificial Sequence: Synthetic oligonucleotide
  Antisense strand to SEQ ID NO: 626898
auucaugaugucaaucgcc

SEQ ID NO: 626900 - RNA, 19 nt, Artificial Sequence
  Description of Artificial Sequence: Synthetic oligonucleotide
  Sense strand starting at position 3345 of SEQ ID NO: 585273
auuuaucacugcccgcaaa

SEQ ID NO: 626901 - RNA, 19 nt, Artificial Sequence
  Description of Artificial Sequence: Synthetic oligonucleotide
  Antisense strand to SEQ ID NO: 626900
uuugcgggcagugauaaau

SEQ ID NO: 626902 - RNA, 19 nt, Artificial Sequence
  Description of Artificial Sequence: Synthetic oligonucleotide
  Sense strand starting at position 3557 of SEQ ID NO: 585273
ugggcaagucuugacugaa

SEQ ID NO: 626903 - RNA, 19 nt, Artificial Sequence
  Description of Artificial Sequence: Synthetic oligonucleotide
  Antisense strand to SEQ ID NO: 626902
uucagucaagacuugccca

SEQ ID NO: 626904 - RNA, 19 nt, Artificial Sequence
  Description of Artificial Sequence: Synthetic oligonucleotide
  Sense strand starting at position 3560 of SEQ ID NO: 585273
gcaagucuugacugaaauu

SEQ ID NO: 626905 - RNA, 19 nt, Artificial Sequence
  Description of Artificial Sequence: Synthetic oligonucleotide
  Antisense strand to SEQ ID NO: 626904
aauuucagucaagacuugc

SEQ ID NO: 626906 - RNA, 19 nt, Artificial Sequence
  Description of Artificial Sequence: Synthetic oligonucleotide
  Sense strand starting at position 3767 of SEQ ID NO: 585273
gggcugggccguuuguuaa

SEQ ID NO: 626907 - RNA, 19 nt, Artificial Sequence
  Description of Artificial Sequence: Synthetic oligonucleotide
  Antisense strand to SEQ ID NO: 626906
uuaacaaacggcccagccc

SEQ ID NO: 626908 - RNA, 19 nt, Artificial Sequence
  Description of Artificial Sequence: Synthetic oligonucleotide
  Sense strand starting at position 3781 of SEQ ID NO: 585273
guuaaugagagcuaugcac

SEQ ID NO: 626909 - RNA, 19 nt, Artificial Sequence
  Description of Artificial Sequence: Synthetic oligonucleotide
  Antisense strand to SEQ ID NO: 626908
gugcauagcucucauuaac

SEQ ID NO: 626910 - RNA, 19 nt, Artificial Sequence
  Description of Artificial Sequence: Synthetic oligonucleotide
  Sense strand starting at position 3848 of SEQ ID NO: 585273
ccaagaccuguuuauugau

SEQ ID NO: 626911 - RNA, 19 nt, Artificial Sequence
  Description of Artificial Sequence: Synthetic oligonucleotide
  Antisense strand to SEQ ID NO: 626910
aucaauaaacaggucuugg

SEQ ID NO: 626912 - RNA, 19 nt, Artificial Sequence
  Description of Artificial Sequence: Synthetic oligonucleotide
  Sense strand starting at position 3971 of SEQ ID NO: 585273
aggucacagucagugagaa

SEQ ID NO: 626913 - RNA, 19 nt, Artificial Sequence
  Description of Artificial Sequence: Synthetic oligonucleotide
  Antisense strand to SEQ ID NO: 626912
uucucacugacugugaccu

SEQ ID NO: 626914 - RNA, 19 nt, Artificial Sequence
  Description of Artificial Sequence: Synthetic oligonucleotide
  Sense strand starting at position 32 of SEQ ID NO: 585274
gaagcagggucagcaauau

SEQ ID NO: 626915 - RNA, 19 nt, Artificial Sequence
  Description of Artificial Sequence: Synthetic oligonucleotide
  Antisense strand to SEQ ID NO: 626914
auauugcugacccugcuuc

SEQ ID NO: 626916 - RNA, 19 nt, Artificial Sequence
  Description of Artificial Sequence: Synthetic oligonucleotide
  Sense strand starting at position 36 of SEQ ID NO: 585274
cagggucagcaauaucuaa

SEQ ID NO: 626917 - RNA, 19 nt, Artificial Sequence
  Description of Artificial Sequence: Synthetic oligonucleotide
  Antisense strand to SEQ ID NO: 626916
uuagauauugcugacccug

SEQ ID NO: 626918 - RNA, 19 nt, Artificial Sequence
  Description of Artificial Sequence: Synthetic oligonucleotide
  Sense strand starting at position 455 of SEQ ID NO: 585274
uggccaggcugauuaaauu

SEQ ID NO: 626919 - RNA, 19 nt, Artificial Sequence
  Description of Artificial Sequence: Synthetic oligonucleotide
  Antisense strand to SEQ ID NO: 626918
aauuuaaucagccuggcca

SEQ ID NO: 626920 - RNA, 19 nt, Artificial Sequence
  Description of Artificial Sequence: Synthetic oligonucleotide
  Sense strand starting at position 927 of SEQ ID NO: 585274
uccuguugaugucucaaau

SEQ ID NO: 626921 - RNA, 19 nt, Artificial Sequence
  Description of Artificial Sequence: Synthetic oligonucleotide
  Antisense strand to SEQ ID NO: 626920
auuugagacaucaacagga

SEQ ID NO: 626922 - RNA, 19 nt, Artificial Sequence
  Description of Artificial Sequence: Synthetic oligonucleotide
  Sense strand starting at position 1289 of SEQ ID NO: 585274
cuauguuaggcagacuagu

SEQ ID NO: 626923 - RNA, 19 nt, Artificial Sequence
  Description of Artificial Sequence: Synthetic oligonucleotide
  Antisense strand to SEQ ID NO: 626922
acuagucugccuaacauag

SEQ ID NO: 626924 - RNA, 19 nt, Artificial Sequence
  Description of Artificial Sequence: Synthetic oligonucleotide
  Sense strand starting at position 1295 of SEQ ID NO: 585274
uaggcagacuagucucgaa

SEQ ID NO: 626925 - RNA, 19 nt, Artificial Sequence
  Description of Artificial Sequence: Synthetic oligonucleotide
  Antisense strand to SEQ ID NO: 626924
uucgagacuagucugccua

SEQ ID NO: 626926 - RNA, 19 nt, Artificial Sequence
  Description of Artificial Sequence: Synthetic oligonucleotide
  Sense strand starting at position 1317 of SEQ ID NO: 585274
cugaccuuuguauaaguaa

SEQ ID NO: 626927 - RNA, 19 nt, Artificial Sequence
  Description of Artificial Sequence: Synthetic oligonucleotide
  Antisense strand to SEQ ID NO: 626926
uuacuuauacaaaggucag

SEQ ID NO: 626928 - RNA, 19 nt, Artificial Sequence
  Description of Artificial Sequence: Synthetic oligonucleotide
  Sense strand starting at position 1547 of SEQ ID NO: 585274
aagagccuuugguuuaagu

SEQ ID NO: 626929 - RNA, 19 nt, Artificial Sequence
  Description of Artificial Sequence: Synthetic oligonucleotide
  Antisense strand to SEQ ID NO: 626928
acuuaaaccaaaggcucuu

SEQ ID NO: 626930 - RNA, 19 nt, Artificial Sequence
  Description of Artificial Sequence: Synthetic oligonucleotide
  Sense strand starting at position 1829 of SEQ ID NO: 585274
uucugauagcggcggauuu

SEQ ID NO: 626931 - RNA, 19 nt, Artificial Sequence
  Description of Artificial Sequence: Synthetic oligonucleotide
  Antisense strand to SEQ ID NO: 626930
aaauccgccgcuaucagaa

SEQ ID NO: 626932 - RNA, 19 nt, Artificial Sequence
  Description of Artificial Sequence: Synthetic oligonucleotide
  Sense strand starting at position 1992 of SEQ ID NO: 585274
gugccauaggaauggguuu

SEQ ID NO: 626933 - RNA, 19 nt, Artificial Sequence
  Description of Artificial Sequence: Synthetic oligonucleotide
  Antisense strand to SEQ ID NO: 626932
aaacccauuccuauggcac

SEQ ID NO: 626934 - RNA, 19 nt, Artificial Sequence
  Description of Artificial Sequence: Synthetic oligonucleotide
  Sense strand starting at position 2070 of SEQ ID NO: 585274
ccuucugauugguccgaau

SEQ ID NO: 626935 - RNA, 19 nt, Artificial Sequence
  Description of Artificial Sequence: Synthetic oligonucleotide
  Antisense strand to SEQ ID NO: 626934
auucggaccaaucagaagg

SEQ ID NO: 626936 - RNA, 19 nt, Artificial Sequence
  Description of Artificial Sequence: Synthetic oligonucleotide
  Sense strand starting at position 2072 of SEQ ID NO: 585274
uucugauugguccgaaucu

SEQ ID NO: 626937 - RNA, 19 nt, Artificial Sequence
  Description of Artificial Sequence: Synthetic oligonucleotide
  Antisense strand to SEQ ID NO: 626936
agauucggaccaaucagaa

SEQ ID NO: 626938 - RNA, 19 nt, Artificial Sequence
  Description of Artificial Sequence: Synthetic oligonucleotide
  Sense strand starting at position 2091 of SEQ ID NO: 585274
uccaguuucgcgcccugaa

SEQ ID NO: 626939 - RNA, 19 nt, Artificial Sequence
  Description of Artificial Sequence: Synthetic oligonucleotide
  Antisense strand to SEQ ID NO: 626938
uucagggcgcgaaacugga

SEQ ID NO: 626940 - RNA, 19 nt, Artificial Sequence
  Description of Artificial Sequence: Synthetic oligonucleotide
  Sense strand starting at position 2092 of SEQ ID NO: 585274
ccaguuucgcgcccugaau

SEQ ID NO: 626941 - RNA, 19 nt, Artificial Sequence
  Description of Artificial Sequence: Synthetic oligonucleotide
  Antisense strand to SEQ ID NO: 626940
auucagggcgcgaaacugg

SEQ ID NO: 626942 - RNA, 19 nt, Artificial Sequence
  Description of Artificial Sequence: Synthetic oligonucleotide
  Sense strand starting at position 2093 of SEQ ID NO: 585274
caguuucgcgcccugaauu

SEQ ID NO: 626943 - RNA, 19 nt, Artificial Sequence
  Description of Artificial Sequence: Synthetic oligonucleotide
  Antisense strand to SEQ ID NO: 626942
aauucagggcgcgaaacug

SEQ ID NO: 626944 - RNA, 19 nt, Artificial Sequence
  Description of Artificial Sequence: Synthetic oligonucleotide
  Sense strand starting at position 2118 of SEQ ID NO: 585274
ugugauaggacuugugauc

SEQ ID NO: 626945 - RNA, 19 nt, Artificial Sequence
  Description of Artificial Sequence: Synthetic oligonucleotide
  Antisense strand to SEQ ID NO: 626944
gaucacaaguccuaucaca

SEQ ID NO: 626946 - RNA, 19 nt, Artificial Sequence
  Description of Artificial Sequence: Synthetic oligonucleotide
  Sense strand starting at position 2123 of SEQ ID NO: 585274
uaggacuugugaucagcua

SEQ ID NO: 626947 - RNA, 19 nt, Artificial Sequence
  Description of Artificial Sequence: Synthetic oligonucleotide
  Antisense strand to SEQ ID NO: 626946
uagcugaucacaaguccua

SEQ ID NO: 626948 - RNA, 19 nt, Artificial Sequence
  Description of Artificial Sequence: Synthetic oligonucleotide
  Sense strand starting at position 2256 of SEQ ID NO: 585274
uuaaucaguuuguuuggga

SEQ ID NO: 626949 - RNA, 19 nt, Artificial Sequence
  Description of Artificial Sequence: Synthetic oligonucleotide
  Antisense strand to SEQ ID NO: 626948
ucccaaacaaacugauuaa

SEQ ID NO: 626950 - RNA, 19 nt, Artificial Sequence
  Description of Artificial Sequence: Synthetic oligonucleotide
  Sense strand starting at position 2257 of SEQ ID NO: 585274
uaaucaguuuguuugggau

SEQ ID NO: 626951 - RNA, 19 nt, Artificial Sequence
  Description of Artificial Sequence: Synthetic oligonucleotide
  Antisense strand to SEQ ID NO: 626950
aucccaaacaaacugauua

SEQ ID NO: 626952 - RNA, 19 nt, Artificial Sequence
  Description of Artificial Sequence: Synthetic oligonucleotide
  Sense strand starting at position 2264 of SEQ ID NO: 585274
uuuguuugggauuauguuu

SEQ ID NO: 626953 - RNA, 19 nt, Artificial Sequence
  Description of Artificial Sequence: Synthetic oligonucleotide
  Antisense strand to SEQ ID NO: 626952
aaacauaaucccaaacaaa

SEQ ID NO: 626954 - RNA, 19 nt, Artificial Sequence
  Description of Artificial Sequence: Synthetic oligonucleotide
  Sense strand starting at position 2269 of SEQ ID NO: 585274
uugggauuauguuugacag

SEQ ID NO: 626955 - RNA, 19 nt, Artificial Sequence
  Description of Artificial Sequence: Synthetic oligonucleotide
  Antisense strand to SEQ ID NO: 626954
cugucaaacauaaucccaa

SEQ ID NO: 626956 - RNA, 19 nt, Artificial Sequence
  Description of Artificial Sequence: Synthetic oligonucleotide
  Sense strand starting at position 2270 of SEQ ID NO: 585274
ugggauuauguuugacaga

SEQ ID NO: 626957 - RNA, 19 nt, Artificial Sequence
  Description of Artificial Sequence: Synthetic oligonucleotide
  Antisense strand to SEQ ID NO: 626956
ucugucaaacauaauccca

SEQ ID NO: 626958 - RNA, 19 nt, Artificial Sequence
  Description of Artificial Sequence: Synthetic oligonucleotide
  Sense strand starting at position 2277 of SEQ ID NO: 585274
auguuugacagacggaaau

SEQ ID NO: 626959 - RNA, 19 nt, Artificial Sequence
  Description of Artificial Sequence: Synthetic oligonucleotide
  Antisense strand to SEQ ID NO: 626958
auuuccgucugucaaacau

SEQ ID NO: 626960 - RNA, 19 nt, Artificial Sequence
  Description of Artificial Sequence: Synthetic oligonucleotide
  Sense strand starting at position 2338 of SEQ ID NO: 585274
gagagugauugguccagcu

SEQ ID NO: 626961 - RNA, 19 nt, Artificial Sequence
  Description of Artificial Sequence: Synthetic oligonucleotide
  Antisense strand to SEQ ID NO: 626960
agcuggaccaaucacucuc

SEQ ID NO: 626962 - RNA, 19 nt, Artificial Sequence
  Description of Artificial Sequence: Synthetic oligonucleotide
  Sense strand starting at position 2340 of SEQ ID NO: 585274
gagugauugguccagcuca

SEQ ID NO: 626963 - RNA, 19 nt, Artificial Sequence
  Description of Artificial Sequence: Synthetic oligonucleotide
  Antisense strand to SEQ ID NO: 626962
ugagcuggaccaaucacuc

SEQ ID NO: 626964 - RNA, 19 nt, Artificial Sequence
  Description of Artificial Sequence: Synthetic oligonucleotide
  Sense strand starting at position 2567 of SEQ ID NO: 585274
ugcuaaugaccuugaucag

SEQ ID NO: 626965 - RNA, 19 nt, Artificial Sequence
  Description of Artificial Sequence: Synthetic oligonucleotide
  Antisense strand to SEQ ID NO: 626964
cugaucaaggucauuagca

SEQ ID NO: 626966 - RNA, 19 nt, Artificial Sequence
  Description of Artificial Sequence: Synthetic oligonucleotide
  Sense strand starting at position 2620 of SEQ ID NO: 585274
acacguaaaucuuuagcua

SEQ ID NO: 626967 - RNA, 19 nt, Artificial Sequence
  Description of Artificial Sequence: Synthetic oligonucleotide
  Antisense strand to SEQ ID NO: 626966
uagcuaaagauuuacgugu

SEQ ID NO: 626968 - RNA, 19 nt, Artificial Sequence
  Description of Artificial Sequence: Synthetic oligonucleotide
  Sense strand starting at position 2689 of SEQ ID NO: 585274
gcaauuugguaggaaacua

SEQ ID NO: 626969 - RNA, 19 nt, Artificial Sequence
  Description of Artificial Sequence: Synthetic oligonucleotide
  Antisense strand to SEQ ID NO: 626968
uaguuuccuaccaaauugc

SEQ ID NO: 626970 - RNA, 19 nt, Artificial Sequence
  Description of Artificial Sequence: Synthetic oligonucleotide
  Sense strand starting at position 2859 of SEQ ID NO: 585274
guagguuucgcauaaauau

SEQ ID NO: 626971 - RNA, 19 nt, Artificial Sequence
  Description of Artificial Sequence: Synthetic oligonucleotide
  Antisense strand to SEQ ID NO: 626970
auauuuaugcgaaaccuac

SEQ ID NO: 626972 - RNA, 19 nt, Artificial Sequence
  Description of Artificial Sequence: Synthetic oligonucleotide
  Sense strand starting at position 2923 of SEQ ID NO: 585274
ugguccaaucagggauuga

SEQ ID NO: 626973 - RNA, 19 nt, Artificial Sequence
  Description of Artificial Sequence: Synthetic oligonucleotide
  Antisense strand to SEQ ID NO: 626972
ucaaucccugauuggacca

SEQ ID NO: 626974 - RNA, 19 nt, Artificial Sequence
  Description of Artificial Sequence: Synthetic oligonucleotide
  Sense strand starting at position 3742 of SEQ ID NO: 585274
ugggcauucuuguuuagga

SEQ ID NO: 626975 - RNA, 19 nt, Artificial Sequence
  Description of Artificial Sequence: Synthetic oligonucleotide
  Antisense strand to SEQ ID NO: 626974
uccuaaacaagaaugccca

SEQ ID NO: 626976 - RNA, 19 nt, Artificial Sequence
  Description of Artificial Sequence: Synthetic oligonucleotide
  Sense strand starting at position 3743 of SEQ ID NO: 585274
gggcauucuuguuuaggaa

SEQ ID NO: 626977 - RNA, 19 nt, Artificial Sequence
  Description of Artificial Sequence: Synthetic oligonucleotide
  Antisense strand to SEQ ID NO: 626976
uuccuaaacaagaaugccc

SEQ ID NO: 626978 - RNA, 19 nt, Artificial Sequence
  Description of Artificial Sequence: Synthetic oligonucleotide
  Sense strand starting at position 3744 of SEQ ID NO: 585274
ggcauucuuguuuaggaac

SEQ ID NO: 626979 - RNA, 19 nt, Artificial Sequence
  Description of Artificial Sequence: Synthetic oligonucleotide
  Antisense strand to SEQ ID NO: 626978
guuccuaaacaagaaugcc

SEQ ID NO: 626980 - RNA, 19 nt, Artificial Sequence
  Description of Artificial Sequence: Synthetic oligonucleotide
  Sense strand starting at position 3897 of SEQ ID NO: 585274
uaauguggucuuuguagga

SEQ ID NO: 626981 - RNA, 19 nt, Artificial Sequence
  Description of Artificial Sequence: Synthetic oligonucleotide
  Antisense strand to SEQ ID NO: 626980
uccuacaaagaccacauua

SEQ ID NO: 626982 - RNA, 19 nt, Artificial Sequence
  Description of Artificial Sequence: Synthetic oligonucleotide
  Sense strand starting at position 3912 of SEQ ID NO: 585274
aggagucucguggaaguua

SEQ ID NO: 626983 - RNA, 19 nt, Artificial Sequence
  Description of Artificial Sequence: Synthetic oligonucleotide
  Antisense strand to SEQ ID NO: 626982
uaacuuccacgagacuccu

SEQ ID NO: 626984 - RNA, 19 nt, Artificial Sequence
  Description of Artificial Sequence: Synthetic oligonucleotide
  Sense strand starting at position 3926 of SEQ ID NO: 585274
aguuaauguuaacugggau

SEQ ID NO: 626985 - RNA, 19 nt, Artificial Sequence
  Description of Artificial Sequence: Synthetic oligonucleotide
  Antisense strand to SEQ ID NO: 626984
aucccaguuaacauuaacu

SEQ ID NO: 626986 - RNA, 19 nt, Artificial Sequence
  Description of Artificial Sequence: Synthetic oligonucleotide
  Sense strand starting at position 3927 of SEQ ID NO: 585274
guuaauguuaacugggaua

SEQ ID NO: 626987 - RNA, 19 nt, Artificial Sequence
  Description of Artificial Sequence: Synthetic oligonucleotide
  Antisense strand to SEQ ID NO: 626986
uaucccaguuaacauuaac

SEQ ID NO: 626988 - RNA, 19 nt, Artificial Sequence
  Description of Artificial Sequence: Synthetic oligonucleotide
  Sense strand starting at position 3929 of SEQ ID NO: 585274
uaauguuaacugggauauu

SEQ ID NO: 626989 - RNA, 19 nt, Artificial Sequence
  Description of Artificial Sequence: Synthetic oligonucleotide
  Antisense strand to SEQ ID NO: 626988
aauaucccaguuaacauua

SEQ ID NO: 626990 - RNA, 19 nt, Artificial Sequence
  Description of Artificial Sequence: Synthetic oligonucleotide
  Sense strand starting at position 3932 of SEQ ID NO: 585274
uguuaacugggauauugua

SEQ ID NO: 626991 - RNA, 19 nt, Artificial Sequence
  Description of Artificial Sequence: Synthetic oligonucleotide
  Antisense strand to SEQ ID NO: 626990
uacaauaucccaguuaaca

SEQ ID NO: 626992 - RNA, 19 nt, Artificial Sequence
  Description of Artificial Sequence: Synthetic oligonucleotide
  Sense strand starting at position 3940 of SEQ ID NO: 585274
gggauauuguaguuuacca

SEQ ID NO: 626993 - RNA, 19 nt, Artificial Sequence
  Description of Artificial Sequence: Synthetic oligonucleotide
  Antisense strand to SEQ ID NO: 626992
ugguaaacuacaauauccc

SEQ ID NO: 626994 - RNA, 19 nt, Artificial Sequence
  Description of Artificial Sequence: Synthetic oligonucleotide
  Sense strand starting at position 5 of SEQ ID NO: 585275
uguuauugaagcuggauga

SEQ ID NO: 626995 - RNA, 19 nt, Artificial Sequence
  Description of Artificial Sequence: Synthetic oligonucleotide
  Antisense strand to SEQ ID NO: 626994
ucauccagcuucaauaaca

SEQ ID NO: 626996 - RNA, 19 nt, Artificial Sequence
  Description of Artificial Sequence: Synthetic oligonucleotide
  Sense strand starting at position 61 of SEQ ID NO: 585275
ccauauauucuggaauguc

SEQ ID NO: 626997 - RNA, 19 nt, Artificial Sequence
  Description of Artificial Sequence: Synthetic oligonucleotide
  Antisense strand to SEQ ID NO: 626996
gacauuccagaauauaugg

SEQ ID NO: 626998 - RNA, 19 nt, Artificial Sequence
  Description of Artificial Sequence: Synthetic oligonucleotide
  Sense strand starting at position 182 of SEQ ID NO: 585275
ugugcuaaucuguaaagga

SEQ ID NO: 626999 - RNA, 19 nt, Artificial Sequence
  Description of Artificial Sequence: Synthetic oligonucleotide
  Antisense strand to SEQ ID NO: 626998
uccuuuacagauuagcaca

SEQ ID NO: 627000 - RNA, 19 nt, Artificial Sequence
  Description of Artificial Sequence: Synthetic oligonucleotide
  Sense strand starting at position 191 of SEQ ID NO: 585275
cuguaaaggaaggguucua

SEQ ID NO: 627001 - RNA, 19 nt, Artificial Sequence
  Description of Artificial Sequence: Synthetic oligonucleotide
  Antisense strand to SEQ ID NO: 627000
uagaacccuuccuuuacag

SEQ ID NO: 627002 - RNA, 19 nt, Artificial Sequence
  Description of Artificial Sequence: Synthetic oligonucleotide
  Sense strand starting at position 394 of SEQ ID NO: 585275
aagccagguguugaaagau

SEQ ID NO: 627003 - RNA, 19 nt, Artificial Sequence
  Description of Artificial Sequence: Synthetic oligonucleotide
  Antisense strand to SEQ ID NO: 627002
aucuuucaacaccuggcuu

SEQ ID NO: 627004 - RNA, 19 nt, Artificial Sequence
  Description of Artificial Sequence: Synthetic oligonucleotide
  Sense strand starting at position 400 of SEQ ID NO: 585275
gguguugaaagauagucaa

SEQ ID NO: 627005 - RNA, 19 nt, Artificial Sequence
  Description of Artificial Sequence: Synthetic oligonucleotide
  Antisense strand to SEQ ID NO: 627004
uugacuaucuuucaacacc

SEQ ID NO: 627006 - RNA, 19 nt, Artificial Sequence
  Description of Artificial Sequence: Synthetic oligonucleotide
  Sense strand starting at position 403 of SEQ ID NO: 585275
guugaaagauagucaagca

SEQ ID NO: 627007 - RNA, 19 nt, Artificial Sequence
  Description of Artificial Sequence: Synthetic oligonucleotide
  Antisense strand to SEQ ID NO: 627006
ugcuugacuaucuuucaac

SEQ ID NO: 627008 - RNA, 19 nt, Artificial Sequence
  Description of Artificial Sequence: Synthetic oligonucleotide
  Sense strand starting at position 423 of SEQ ID NO: 585275
gccagaaagucuuuagaga

SEQ ID NO: 627009 - RNA, 19 nt, Artificial Sequence
  Description of Artificial Sequence: Synthetic oligonucleotide
  Antisense strand to SEQ ID NO: 627008
ucucuaaagacuuucuggc

SEQ ID NO: 627010 - RNA, 19 nt, Artificial Sequence
  Description of Artificial Sequence: Synthetic oligonucleotide
  Sense strand starting at position 431 of SEQ ID NO: 585275
gucuuuagagaccaguaua

SEQ ID NO: 627011 - RNA, 19 nt, Artificial Sequence
  Description of Artificial Sequence: Synthetic oligonucleotide
  Antisense strand to SEQ ID NO: 627010
uauacuggucucuaaagac

SEQ ID NO: 627012 - RNA, 19 nt, Artificial Sequence
  Description of Artificial Sequence: Synthetic oligonucleotide
  Sense strand starting at position 441 of SEQ ID NO: 585275
accaguauauucucucuga

SEQ ID NO: 627013 - RNA, 19 nt, Artificial Sequence
  Description of Artificial Sequence: Synthetic oligonucleotide
  Antisense strand to SEQ ID NO: 627012
ucagagagaauauacuggu

SEQ ID NO: 627014 - RNA, 19 nt, Artificial Sequence
  Description of Artificial Sequence: Synthetic oligonucleotide
  Sense strand starting at position 444 of SEQ ID NO: 585275
aguauauucucucugaagg

SEQ ID NO: 627015 - RNA, 19 nt, Artificial Sequence
  Description of Artificial Sequence: Synthetic oligonucleotide
  Antisense strand to SEQ ID NO: 627014
ccuucagagagaauauacu

SEQ ID NO: 627016 - RNA, 19 nt, Artificial Sequence
  Description of Artificial Sequence: Synthetic oligonucleotide
  Sense strand starting at position 837 of SEQ ID NO: 585275
gcaggaugccuuuacugau

SEQ ID NO: 627017 - RNA, 19 nt, Artificial Sequence
  Description of Artificial Sequence: Synthetic oligonucleotide
  Antisense strand to SEQ ID NO: 627016
aucaguaaaggcauccugc

SEQ ID NO: 627018 - RNA, 19 nt, Artificial Sequence
  Description of Artificial Sequence: Synthetic oligonucleotide
  Sense strand starting at position 844 of SEQ ID NO: 585275
gccuuuacugaugagacca

SEQ ID NO: 627019 - RNA, 19 nt, Artificial Sequence
  Description of Artificial Sequence: Synthetic oligonucleotide
  Antisense strand to SEQ ID NO: 627018
uggucucaucaguaaaggc

SEQ ID NO: 627020 - RNA, 19 nt, Artificial Sequence
  Description of Artificial Sequence: Synthetic oligonucleotide
  Sense strand starting at position 906 of SEQ ID NO: 585275
aucugagguauaugcagau

SEQ ID NO: 627021 - RNA, 19 nt, Artificial Sequence
  Description of Artificial Sequence: Synthetic oligonucleotide
  Antisense strand to SEQ ID NO: 627020
aucugcauauaccucagau

SEQ ID NO: 627022 - RNA, 19 nt, Artificial Sequence
  Description of Artificial Sequence: Synthetic oligonucleotide
  Sense strand starting at position 1255 of SEQ ID NO: 585275
caucuauaauggguguaag

SEQ ID NO: 627023 - RNA, 19 nt, Artificial Sequence
  Description of Artificial Sequence: Synthetic oligonucleotide
  Antisense strand to SEQ ID NO: 627022
cuuacacccauuauagaug

SEQ ID NO: 627024 - RNA, 19 nt, Artificial Sequence
  Description of Artificial Sequence: Synthetic oligonucleotide
  Sense strand starting at position 1258 of SEQ ID NO: 585275
cuauaauggguguaaguag

SEQ ID NO: 627025 - RNA, 19 nt, Artificial Sequence
  Description of Artificial Sequence: Synthetic oligonucleotide
  Antisense strand to SEQ ID NO: 627024
cuacuuacacccauuauag

SEQ ID NO: 627026 - RNA, 19 nt, Artificial Sequence
  Description of Artificial Sequence: Synthetic oligonucleotide
  Sense strand starting at position 1283 of SEQ ID NO: 585275
cgacuaacgcuugagacaa

SEQ ID NO: 627027 - RNA, 19 nt, Artificial Sequence
  Description of Artificial Sequence: Synthetic oligonucleotide
  Antisense strand to SEQ ID NO: 627026
uugucucaagcguuagucg

SEQ ID NO: 627028 - RNA, 19 nt, Artificial Sequence
  Description of Artificial Sequence: Synthetic oligonucleotide
  Sense strand starting at position 1568 of SEQ ID NO: 585275
uagaauuacugcccggaaa

SEQ ID NO: 627029 - RNA, 19 nt, Artificial Sequence
  Description of Artificial Sequence: Synthetic oligonucleotide
  Antisense strand to SEQ ID NO: 627028
uuuccgggcaguaauucua

SEQ ID NO: 627030 - RNA, 19 nt, Artificial Sequence
  Description of Artificial Sequence: Synthetic oligonucleotide
  Sense strand starting at position 1569 of SEQ ID NO: 585275
agaauuacugcccggaaac

SEQ ID NO: 627031 - RNA, 19 nt, Artificial Sequence
  Description of Artificial Sequence: Synthetic oligonucleotide
  Antisense strand to SEQ ID NO: 627030
guuuccgggcaguaauucu

SEQ ID NO: 627032 - RNA, 19 nt, Artificial Sequence
  Description of Artificial Sequence: Synthetic oligonucleotide
  Sense strand starting at position 1626 of SEQ ID NO: 585275
aauguccuugggcaugaua

SEQ ID NO: 627033 - RNA, 19 nt, Artificial Sequence
  Description of Artificial Sequence: Synthetic oligonucleotide
  Antisense strand to SEQ ID NO: 627032
uaucaugcccaaggacauu

SEQ ID NO: 627034 - RNA, 19 nt, Artificial Sequence
  Description of Artificial Sequence: Synthetic oligonucleotide
  Sense strand starting at position 2039 of SEQ ID NO: 585275
aguggaaacugcccuuaua

SEQ ID NO: 627035 - RNA, 19 nt, Artificial Sequence
  Description of Artificial Sequence: Synthetic oligonucleotide
  Antisense strand to SEQ ID NO: 627034
uauaagggcaguuuccacu

SEQ ID NO: 627036 - RNA, 19 nt, Artificial Sequence
  Description of Artificial Sequence: Synthetic oligonucleotide
  Sense strand starting at position 2042 of SEQ ID NO: 585275
ggaaacugcccuuauauau

SEQ ID NO: 627037 - RNA, 19 nt, Artificial Sequence
  Description of Artificial Sequence: Synthetic oligonucleotide
  Antisense strand to SEQ ID NO: 627036
auauauaagggcaguuucc

SEQ ID NO: 627038 - RNA, 19 nt, Artificial Sequence
  Description of Artificial Sequence: Synthetic oligonucleotide
  Sense strand starting at position 2121 of SEQ ID NO: 585275
ggcugaagaguccaacgau

SEQ ID NO: 627039 - RNA, 19 nt, Artificial Sequence
  Description of Artificial Sequence: Synthetic oligonucleotide
  Antisense strand to SEQ ID NO: 627038
aucguuggacucuucagcc

SEQ ID NO: 627040 - RNA, 19 nt, Artificial Sequence
  Description of Artificial Sequence: Synthetic oligonucleotide
  Sense strand starting at position 2134 of SEQ ID NO: 585275
aacgaugugauuggugaau

SEQ ID NO: 627041 - RNA, 19 nt, Artificial Sequence
  Description of Artificial Sequence: Synthetic oligonucleotide
  Antisense strand to SEQ ID NO: 627040
auucaccaaucacaucguu

SEQ ID NO: 627042 - RNA, 19 nt, Artificial Sequence
  Description of Artificial Sequence: Synthetic oligonucleotide
  Sense strand starting at position 2273 of SEQ ID NO: 585275
guaaacgacuacuuuaaga

SEQ ID NO: 627043 - RNA, 19 nt, Artificial Sequence
  Description of Artificial Sequence: Synthetic oligonucleotide
  Antisense strand to SEQ ID NO: 627042
ucuuaaaguagucguuuac

SEQ ID NO: 627044 - RNA, 19 nt, Artificial Sequence
  Description of Artificial Sequence: Synthetic oligonucleotide
  Sense strand starting at position 2405 of SEQ ID NO: 585275
gcuggaaaccuuugaccau

SEQ ID NO: 627045 - RNA, 19 nt, Artificial Sequence
  Description of Artificial Sequence: Synthetic oligonucleotide
  Antisense strand to SEQ ID NO: 627044
auggucaaagguuuccagc

SEQ ID NO: 627046 - RNA, 19 nt, Artificial Sequence
  Description of Artificial Sequence: Synthetic oligonucleotide
  Sense strand starting at position 2432 of SEQ ID NO: 585275
aggauuccugggugaugua

SEQ ID NO: 627047 - RNA, 19 nt, Artificial Sequence
  Description of Artificial Sequence: Synthetic oligonucleotide
  Antisense strand to SEQ ID NO: 627046
uacaucacccaggaauccu

SEQ ID NO: 627048 - RNA, 19 nt, Artificial Sequence
  Description of Artificial Sequence: Synthetic oligonucleotide
  Sense strand starting at position 2441 of SEQ ID NO: 585275
gggugauguaccugggaaa

SEQ ID NO: 627049 - RNA, 19 nt, Artificial Sequence
  Description of Artificial Sequence: Synthetic oligonucleotide
  Antisense strand to SEQ ID NO: 627048
uuucccagguacaucaccc

SEQ ID NO: 627050 - RNA, 19 nt, Artificial Sequence
  Description of Artificial Sequence: Synthetic oligonucleotide
  Sense strand starting at position 2442 of SEQ ID NO: 585275
ggugauguaccugggaaau

SEQ ID NO: 627051 - RNA, 19 nt, Artificial Sequence
  Description of Artificial Sequence: Synthetic oligonucleotide
  Antisense strand to SEQ ID NO: 627050
auuucccagguacaucacc

SEQ ID NO: 627052 - RNA, 19 nt, Artificial Sequence
  Description of Artificial Sequence: Synthetic oligonucleotide
  Sense strand starting at position 2467 of SEQ ID NO: 585275
ccaagaagucaccgacaua

SEQ ID NO: 627053 - RNA, 19 nt, Artificial Sequence
  Description of Artificial Sequence: Synthetic oligonucleotide
  Antisense strand to SEQ ID NO: 627052
uaugucggugacuucuugg

SEQ ID NO: 627054 - RNA, 19 nt, Artificial Sequence
  Description of Artificial Sequence: Synthetic oligonucleotide
  Sense strand starting at position 2614 of SEQ ID NO: 585275
gguccuauugaugauauuc

SEQ ID NO: 627055 - RNA, 19 nt, Artificial Sequence
  Description of Artificial Sequence: Synthetic oligonucleotide
  Antisense strand to SEQ ID NO: 627054
gaauaucaucaauaggacc

SEQ ID NO: 627056 - RNA, 19 nt, Artificial Sequence
  Description of Artificial Sequence: Synthetic oligonucleotide
  Sense strand starting at position 2653 of SEQ ID NO: 585275
ccucuucugcaggauaacu

SEQ ID NO: 627057 - RNA, 19 nt, Artificial Sequence
  Description of Artificial Sequence: Synthetic oligonucleotide
  Antisense strand to SEQ ID NO: 627056
aguuauccugcagaagagg

SEQ ID NO: 627058 - RNA, 19 nt, Artificial Sequence
  Description of Artificial Sequence: Synthetic oligonucleotide
  Sense strand starting at position 3204 of SEQ ID NO: 585275
gaaagugauugauucuagu

SEQ ID NO: 627059 - RNA, 19 nt, Artificial Sequence
  Description of Artificial Sequence: Synthetic oligonucleotide
  Antisense strand to SEQ ID NO: 627058
acuagaaucaaucacuuuc

SEQ ID NO: 627060 - RNA, 19 nt, Artificial Sequence
  Description of Artificial Sequence: Synthetic oligonucleotide
  Sense strand starting at position 3248 of SEQ ID NO: 585275
aucuauauucggcaaagua

SEQ ID NO: 627061 - RNA, 19 nt, Artificial Sequence
  Description of Artificial Sequence: Synthetic oligonucleotide
  Antisense strand to SEQ ID NO: 627060
uacuuugccgaauauagau

SEQ ID NO: 627062 - RNA, 19 nt, Artificial Sequence
  Description of Artificial Sequence: Synthetic oligonucleotide
  Sense strand starting at position 3271 of SEQ ID NO: 585275
gugcuaucuccugaacaca

SEQ ID NO: 627063 - RNA, 19 nt, Artificial Sequence
  Description of Artificial Sequence: Synthetic oligonucleotide
  Antisense strand to SEQ ID NO: 627062
uguguucaggagauagcac

SEQ ID NO: 627064 - RNA, 19 nt, Artificial Sequence
  Description of Artificial Sequence: Synthetic oligonucleotide
  Sense strand starting at position 3358 of SEQ ID NO: 585275
ugacuuacauacuuauagu

SEQ ID NO: 627065 - RNA, 19 nt, Artificial Sequence
  Description of Artificial Sequence: Synthetic oligonucleotide
  Antisense strand to SEQ ID NO: 627064
acuauaaguauguaaguca

SEQ ID NO: 627066 - RNA, 19 nt, Artificial Sequence
  Description of Artificial Sequence: Synthetic oligonucleotide
  Sense strand starting at position 3382 of SEQ ID NO: 585275
ggucaaauuaugcaagguu

SEQ ID NO: 627067 - RNA, 19 nt, Artificial Sequence
  Description of Artificial Sequence: Synthetic oligonucleotide
  Antisense strand to SEQ ID NO: 627066
aaccuugcauaauuugacc

SEQ ID NO: 627068 - RNA, 19 nt, Artificial Sequence
  Description of Artificial Sequence: Synthetic oligonucleotide
  Sense strand starting at position 3504 of SEQ ID NO: 585275
uugcauauacacgagguaa

SEQ ID NO: 627069 - RNA, 19 nt, Artificial Sequence
  Description of Artificial Sequence: Synthetic oligonucleotide
  Antisense strand to SEQ ID NO: 627068
uuaccucguguauaugcaa

SEQ ID NO: 627070 - RNA, 19 nt, Artificial Sequence
  Description of Artificial Sequence: Synthetic oligonucleotide
  Sense strand starting at position 3559 of SEQ ID NO: 585275
uggucauuugacgguauca

SEQ ID NO: 627071 - RNA, 19 nt, Artificial Sequence
  Description of Artificial Sequence: Synthetic oligonucleotide
  Antisense strand to SEQ ID NO: 627070
ugauaccgucaaaugacca

SEQ ID NO: 627072 - RNA, 19 nt, Artificial Sequence
  Description of Artificial Sequence: Synthetic oligonucleotide
  Sense strand starting at position 3572 of SEQ ID NO: 585275
guaucacuucggcugcgaa

SEQ ID NO: 627073 - RNA, 19 nt, Artificial Sequence
  Description of Artificial Sequence: Synthetic oligonucleotide
  Antisense strand to SEQ ID NO: 627072
uucgcagccgaagugauac

SEQ ID NO: 627074 - RNA, 19 nt, Artificial Sequence
  Description of Artificial Sequence: Synthetic oligonucleotide
  Sense strand starting at position 148 of SEQ ID NO: 585276
ggaugagcagauugugaau

SEQ ID NO: 627075 - RNA, 19 nt, Artificial Sequence
  Description of Artificial Sequence: Synthetic oligonucleotide
  Antisense strand to SEQ ID NO: 627074
auucacaaucugcucaucc

SEQ ID NO: 627076 - RNA, 19 nt, Artificial Sequence
  Description of Artificial Sequence: Synthetic oligonucleotide
  Sense strand starting at position 172 of SEQ ID NO: 585276
aguagugaucuugauauca

SEQ ID NO: 627077 - RNA, 19 nt, Artificial Sequence
  Description of Artificial Sequence: Synthetic oligonucleotide
  Antisense strand to SEQ ID NO: 627076
ugauaucaagaucacuacu

SEQ ID NO: 627078 - RNA, 19 nt, Artificial Sequence
  Description of Artificial Sequence: Synthetic oligonucleotide
  Sense strand starting at position 378 of SEQ ID NO: 585276
aagccaauuugccagggaa

SEQ ID NO: 627079 - RNA, 19 nt, Artificial Sequence
  Description of Artificial Sequence: Synthetic oligonucleotide
  Antisense strand to SEQ ID NO: 627078
uucccuggcaaauuggcuu

SEQ ID NO: 627080 - RNA, 19 nt, Artificial Sequence
  Description of Artificial Sequence: Synthetic oligonucleotide
  Sense strand starting at position 502 of SEQ ID NO: 585276
agaagcugauuugagcaua

SEQ ID NO: 627081 - RNA, 19 nt, Artificial Sequence
  Description of Artificial Sequence: Synthetic oligonucleotide
  Antisense strand to SEQ ID NO: 627080
uaugcucaaaucagcuucu

SEQ ID NO: 627082 - RNA, 19 nt, Artificial Sequence
  Description of Artificial Sequence: Synthetic oligonucleotide
  Sense strand starting at position 564 of SEQ ID NO: 585276
ggguaugucuccuuacuau

SEQ ID NO: 627083 - RNA, 19 nt, Artificial Sequence
  Description of Artificial Sequence: Synthetic oligonucleotide
  Antisense strand to SEQ ID NO: 627082
auaguaaggagacauaccc

SEQ ID NO: 627084 - RNA, 19 nt, Artificial Sequence
  Description of Artificial Sequence: Synthetic oligonucleotide
  Sense strand starting at position 632 of SEQ ID NO: 585276
uccuacguuacuggagaua

SEQ ID NO: 627085 - RNA, 19 nt, Artificial Sequence
  Description of Artificial Sequence: Synthetic oligonucleotide
  Antisense strand to SEQ ID NO: 627084
uaucuccaguaacguagga

SEQ ID NO: 627086 - RNA, 19 nt, Artificial Sequence
  Description of Artificial Sequence: Synthetic oligonucleotide
  Sense strand starting at position 641 of SEQ ID NO: 585276
acuggagauaugcgaguaa

SEQ ID NO: 627087 - RNA, 19 nt, Artificial Sequence
  Description of Artificial Sequence: Synthetic oligonucleotide
  Antisense strand to SEQ ID NO: 627086
uuacucgcauaucuccagu

SEQ ID NO: 627088 - RNA, 19 nt, Artificial Sequence
  Description of Artificial Sequence: Synthetic oligonucleotide
  Sense strand starting at position 673 of SEQ ID NO: 585276
cucucaugagccuguauuu

SEQ ID NO: 627089 - RNA, 19 nt, Artificial Sequence
  Description of Artificial Sequence: Synthetic oligonucleotide
  Antisense strand to SEQ ID NO: 627088
aaauacaggcucaugagag

SEQ ID NO: 627090 - RNA, 19 nt, Artificial Sequence
  Description of Artificial Sequence: Synthetic oligonucleotide
  Sense strand starting at position 895 of SEQ ID NO: 585276
uugaauacuccugacaguu

SEQ ID NO: 627091 - RNA, 19 nt, Artificial Sequence
  Description of Artificial Sequence: Synthetic oligonucleotide
  Antisense strand to SEQ ID NO: 627090
aacugucaggaguauucaa

SEQ ID NO: 627092 - RNA, 19 nt, Artificial Sequence
  Description of Artificial Sequence: Synthetic oligonucleotide
  Sense strand starting at position 1005 of SEQ ID NO: 585276
gcgggcuuucuccagaaga

SEQ ID NO: 627093 - RNA, 19 nt, Artificial Sequence
  Description of Artificial Sequence: Synthetic oligonucleotide
  Antisense strand to SEQ ID NO: 627092
ucuucuggagaaagcccgc

SEQ ID NO: 627094 - RNA, 19 nt, Artificial Sequence
  Description of Artificial Sequence: Synthetic oligonucleotide
  Sense strand starting at position 1007 of SEQ ID NO: 585276
gggcuuucuccagaagacu

SEQ ID NO: 627095 - RNA, 19 nt, Artificial Sequence
  Description of Artificial Sequence: Synthetic oligonucleotide
  Antisense strand to SEQ ID NO: 627094
agucuucuggagaaagccc

SEQ ID NO: 627096 - RNA, 19 nt, Artificial Sequence
  Description of Artificial Sequence: Synthetic oligonucleotide
  Sense strand starting at position 1109 of SEQ ID NO: 585276
acuuaacacugcuuaggaa

SEQ ID NO: 627097 - RNA, 19 nt, Artificial Sequence
  Description of Artificial Sequence: Synthetic oligonucleotide
  Antisense strand to SEQ ID NO: 627096
uuccuaagcaguguuaagu

SEQ ID NO: 627098 - RNA, 19 nt, Artificial Sequence
  Description of Artificial Sequence: Synthetic oligonucleotide
  Sense strand starting at position 1221 of SEQ ID NO: 585276
gcguguuggcaagaaauau

SEQ ID NO: 627099 - RNA, 19 nt, Artificial Sequence
  Description of Artificial Sequence: Synthetic oligonucleotide
  Antisense strand to SEQ ID NO: 627098
auauuucuugccaacacgc

SEQ ID NO: 627100 - RNA, 19 nt, Artificial Sequence
  Description of Artificial Sequence: Synthetic oligonucleotide
  Sense strand starting at position 1407 of SEQ ID NO: 585276
aagggauaggcugagucuu

SEQ ID NO: 627101 - RNA, 19 nt, Artificial Sequence
  Description of Artificial Sequence: Synthetic oligonucleotide
  Antisense strand to SEQ ID NO: 627100
aagacucagccuaucccuu

SEQ ID NO: 627102 - RNA, 19 nt, Artificial Sequence
  Description of Artificial Sequence: Synthetic oligonucleotide
  Sense strand starting at position 1425 of SEQ ID NO: 585276
uacgaaacagauuguauaa

SEQ ID NO: 627103 - RNA, 19 nt, Artificial Sequence
  Description of Artificial Sequence: Synthetic oligonucleotide
  Antisense strand to SEQ ID NO: 627102
uuauacaaucuguuucgua

SEQ ID NO: 627104 - RNA, 19 nt, Artificial Sequence
  Description of Artificial Sequence: Synthetic oligonucleotide
  Sense strand starting at position 1436 of SEQ ID NO: 585276
uuguauaacgucuggaaau

SEQ ID NO: 627105 - RNA, 19 nt, Artificial Sequence
  Description of Artificial Sequence: Synthetic oligonucleotide
  Antisense strand to SEQ ID NO: 627104
auuuccagacguuauacaa

SEQ ID NO: 627106 - RNA, 19 nt, Artificial Sequence
  Description of Artificial Sequence: Synthetic oligonucleotide
  Sense strand starting at position 2053 of SEQ ID NO: 585276
gucugaagcugauuggaca

SEQ ID NO: 627107 - RNA, 19 nt, Artificial Sequence
  Description of Artificial Sequence: Synthetic oligonucleotide
  Antisense strand to SEQ ID NO: 627106
uguccaaucagcuucagac

SEQ ID NO: 627108 - RNA, 19 nt, Artificial Sequence
  Description of Artificial Sequence: Synthetic oligonucleotide
  Sense strand starting at position 2266 of SEQ ID NO: 585276
aggagaacauuguaacaaa

SEQ ID NO: 627109 - RNA, 19 nt, Artificial Sequence
  Description of Artificial Sequence: Synthetic oligonucleotide
  Antisense strand to SEQ ID NO: 627108
uuuguuacaauguucuccu

SEQ ID NO: 627110 - RNA, 19 nt, Artificial Sequence
  Description of Artificial Sequence: Synthetic oligonucleotide
  Sense strand starting at position 2394 of SEQ ID NO: 585276
uuccaaaugcaauguguau

SEQ ID NO: 627111 - RNA, 19 nt, Artificial Sequence
  Description of Artificial Sequence: Synthetic oligonucleotide
  Antisense strand to SEQ ID NO: 627110
auacacauugcauuuggaa

SEQ ID NO: 627112 - RNA, 19 nt, Artificial Sequence
  Description of Artificial Sequence: Synthetic oligonucleotide
  Sense strand starting at position 2723 of SEQ ID NO: 585276
uucguacauccagaucuga

SEQ ID NO: 627113 - RNA, 19 nt, Artificial Sequence
  Description of Artificial Sequence: Synthetic oligonucleotide
  Antisense strand to SEQ ID NO: 627112
ucagaucuggauguacgaa

SEQ ID NO: 627114 - RNA, 19 nt, Artificial Sequence
  Description of Artificial Sequence: Synthetic oligonucleotide
  Sense strand starting at position 2802 of SEQ ID NO: 585276
uuaagucaucucuguacua

SEQ ID NO: 627115 - RNA, 19 nt, Artificial Sequence
  Description of Artificial Sequence: Synthetic oligonucleotide
  Antisense strand to SEQ ID NO: 627114
uaguacagagaugacuuaa

SEQ ID NO: 627116 - RNA, 19 nt, Artificial Sequence
  Description of Artificial Sequence: Synthetic oligonucleotide
  Sense strand starting at position 2844 of SEQ ID NO: 585276
ggugggaaagcucgggaaa

SEQ ID NO: 627117 - RNA, 19 nt, Artificial Sequence
  Description of Artificial Sequence: Synthetic oligonucleotide
  Antisense strand to SEQ ID NO: 627116
uuucccgagcuuucccacc

SEQ ID NO: 627118 - RNA, 19 nt, Artificial Sequence
  Description of Artificial Sequence: Synthetic oligonucleotide
  Sense strand starting at position 2845 of SEQ ID NO: 585276
gugggaaagcucgggaaau

SEQ ID NO: 627119 - RNA, 19 nt, Artificial Sequence
  Description of Artificial Sequence: Synthetic oligonucleotide
  Antisense strand to SEQ ID NO: 627118
auuucccgagcuuucccac

SEQ ID NO: 627120 - RNA, 19 nt, Artificial Sequence
  Description of Artificial Sequence: Synthetic oligonucleotide
  Sense strand starting at position 2924 of SEQ ID NO: 585276
cuguucuaauuagucuaau

SEQ ID NO: 627121 - RNA, 19 nt, Artificial Sequence
  Description of Artificial Sequence: Synthetic oligonucleotide
  Antisense strand to SEQ ID NO: 627120
auuagacuaauuagaacag

SEQ ID NO: 627122 - RNA, 19 nt, Artificial Sequence
  Description of Artificial Sequence: Synthetic oligonucleotide
  Sense strand starting at position 3019 of SEQ ID NO: 585276
gaauccaagucguugaucu

SEQ ID NO: 627123 - RNA, 19 nt, Artificial Sequence
  Description of Artificial Sequence: Synthetic oligonucleotide
  Antisense strand to SEQ ID NO: 627122
agaucaacgacuuggauuc

SEQ ID NO: 627124 - RNA, 19 nt, Artificial Sequence
  Description of Artificial Sequence: Synthetic oligonucleotide
  Sense strand starting at position 3020 of SEQ ID NO: 585276
aauccaagucguugaucua

SEQ ID NO: 627125 - RNA, 19 nt, Artificial Sequence
  Description of Artificial Sequence: Synthetic oligonucleotide
  Antisense strand to SEQ ID NO: 627124
uagaucaacgacuuggauu

SEQ ID NO: 627126 - RNA, 19 nt, Artificial Sequence
  Description of Artificial Sequence: Synthetic oligonucleotide
  Sense strand starting at position 3023 of SEQ ID NO: 585276
ccaagucguugaucuagau

SEQ ID NO: 627127 - RNA, 19 nt, Artificial Sequence
  Description of Artificial Sequence: Synthetic oligonucleotide
  Antisense strand to SEQ ID NO: 627126
aucuagaucaacgacuugg

SEQ ID NO: 627128 - RNA, 19 nt, Artificial Sequence
  Description of Artificial Sequence: Synthetic oligonucleotide
  Sense strand starting at position 3032 of SEQ ID NO: 585276
ugaucuagauuuggauuga

SEQ ID NO: 627129 - RNA, 19 nt, Artificial Sequence
  Description of Artificial Sequence: Synthetic oligonucleotide
  Antisense strand to SEQ ID NO: 627128
ucaauccaaaucuagauca

SEQ ID NO: 627130 - RNA, 19 nt, Artificial Sequence
  Description of Artificial Sequence: Synthetic oligonucleotide
  Sense strand starting at position 3033 of SEQ ID NO: 585276
gaucuagauuuggauugaa

SEQ ID NO: 627131 - RNA, 19 nt, Artificial Sequence
  Description of Artificial Sequence: Synthetic oligonucleotide
  Antisense strand to SEQ ID NO: 627130
uucaauccaaaucuagauc

SEQ ID NO: 627132 - RNA, 19 nt, Artificial Sequence
  Description of Artificial Sequence: Synthetic oligonucleotide
  Sense strand starting at position 3053 of SEQ ID NO: 585276
gucgaaugcccgguuuguu

SEQ ID NO: 627133 - RNA, 19 nt, Artificial Sequence
  Description of Artificial Sequence: Synthetic oligonucleotide
  Antisense strand to SEQ ID NO: 627132
aacaaaccgggcauucgac

SEQ ID NO: 627134 - RNA, 19 nt, Artificial Sequence
  Description of Artificial Sequence: Synthetic oligonucleotide
  Sense strand starting at position 3054 of SEQ ID NO: 585276
ucgaaugcccgguuuguua

SEQ ID NO: 627135 - RNA, 19 nt, Artificial Sequence
  Description of Artificial Sequence: Synthetic oligonucleotide
  Antisense strand to SEQ ID NO: 627134
uaacaaaccgggcauucga

SEQ ID NO: 627136 - RNA, 19 nt, Artificial Sequence
  Description of Artificial Sequence: Synthetic oligonucleotide
  Sense strand starting at position 3061 of SEQ ID NO: 585276
cccgguuuguuauuuacca

SEQ ID NO: 627137 - RNA, 19 nt, Artificial Sequence
  Description of Artificial Sequence: Synthetic oligonucleotide
  Antisense strand to SEQ ID NO: 627136
ugguaaauaacaaaccggg

SEQ ID NO: 627138 - RNA, 19 nt, Artificial Sequence
  Description of Artificial Sequence: Synthetic oligonucleotide
  Sense strand starting at position 3062 of SEQ ID NO: 585276
ccgguuuguuauuuaccaa

SEQ ID NO: 627139 - RNA, 19 nt, Artificial Sequence
  Description of Artificial Sequence: Synthetic oligonucleotide
  Antisense strand to SEQ ID NO: 627138
uugguaaauaacaaaccgg

SEQ ID NO: 627140 - RNA, 19 nt, Artificial Sequence
  Description of Artificial Sequence: Synthetic oligonucleotide
  Sense strand starting at position 3270 of SEQ ID NO: 585276
agcuaacgagauugucacu

SEQ ID NO: 627141 - RNA, 19 nt, Artificial Sequence
  Description of Artificial Sequence: Synthetic oligonucleotide
  Antisense strand to SEQ ID NO: 627140
agugacaaucucguuagcu

SEQ ID NO: 627142 - RNA, 19 nt, Artificial Sequence
  Description of Artificial Sequence: Synthetic oligonucleotide
  Sense strand starting at position 3275 of SEQ ID NO: 585276
acgagauugucacuaccua

SEQ ID NO: 627143 - RNA, 19 nt, Artificial Sequence
  Description of Artificial Sequence: Synthetic oligonucleotide
  Antisense strand to SEQ ID NO: 627142
uagguagugacaaucucgu

SEQ ID NO: 627144 - RNA, 19 nt, Artificial Sequence
  Description of Artificial Sequence: Synthetic oligonucleotide
  Sense strand starting at position 3276 of SEQ ID NO: 585276
cgagauugucacuaccuaa

SEQ ID NO: 627145 - RNA, 19 nt, Artificial Sequence
  Description of Artificial Sequence: Synthetic oligonucleotide
  Antisense strand to SEQ ID NO: 627144
uuagguagugacaaucucg

SEQ ID NO: 627146 - RNA, 19 nt, Artificial Sequence
  Description of Artificial Sequence: Synthetic oligonucleotide
  Sense strand starting at position 3304 of SEQ ID NO: 585276
cgaagacugaucuacguaa

SEQ ID NO: 627147 - RNA, 19 nt, Artificial Sequence
  Description of Artificial Sequence: Synthetic oligonucleotide
  Antisense strand to SEQ ID NO: 627146
uuacguagaucagucuucg

SEQ ID NO: 627148 - RNA, 19 nt, Artificial Sequence
  Description of Artificial Sequence: Synthetic oligonucleotide
  Sense strand starting at position 3320 of SEQ ID NO: 585276
uaaccuuuggagugguuua

SEQ ID NO: 627149 - RNA, 19 nt, Artificial Sequence
  Description of Artificial Sequence: Synthetic oligonucleotide
  Antisense strand to SEQ ID NO: 627148
uaaaccacuccaaagguua

SEQ ID NO: 627150 - RNA, 19 nt, Artificial Sequence
  Description of Artificial Sequence: Synthetic oligonucleotide
  Sense strand starting at position 3325 of SEQ ID NO: 585276
uuuggagugguuuagaagu

SEQ ID NO: 627151 - RNA, 19 nt, Artificial Sequence
  Description of Artificial Sequence: Synthetic oligonucleotide
  Antisense strand to SEQ ID NO: 627150
acuucuaaaccacuccaaa

SEQ ID NO: 627152 - RNA, 19 nt, Artificial Sequence
  Description of Artificial Sequence: Synthetic oligonucleotide
  Sense strand starting at position 3331 of SEQ ID NO: 585276
gugguuuagaaguaggcaa

SEQ ID NO: 627153 - RNA, 19 nt, Artificial Sequence
  Description of Artificial Sequence: Synthetic oligonucleotide
  Antisense strand to SEQ ID NO: 627152
uugccuacuucuaaaccac

SEQ ID NO: 627154 - RNA, 19 nt, Artificial Sequence
  Description of Artificial Sequence: Synthetic oligonucleotide
  Sense strand starting at position 111 of SEQ ID NO: 585277
gucagcuaucuuuagugau

SEQ ID NO: 627155 - RNA, 19 nt, Artificial Sequence
  Description of Artificial Sequence: Synthetic oligonucleotide
  Antisense strand to SEQ ID NO: 627154
aucacuaaagauagcugac

SEQ ID NO: 627156 - RNA, 19 nt, Artificial Sequence
  Description of Artificial Sequence: Synthetic oligonucleotide
  Sense strand starting at position 226 of SEQ ID NO: 585277
gccucuuugcaagagugaa

SEQ ID NO: 627157 - RNA, 19 nt, Artificial Sequence
  Description of Artificial Sequence: Synthetic oligonucleotide
  Antisense strand to SEQ ID NO: 627156
uucacucuugcaaagaggc

SEQ ID NO: 627158 - RNA, 19 nt, Artificial Sequence
  Description of Artificial Sequence: Synthetic oligonucleotide
  Sense strand starting at position 329 of SEQ ID NO: 585277
gauaucuccuaggucaaga

SEQ ID NO: 627159 - RNA, 19 nt, Artificial Sequence
  Description of Artificial Sequence: Synthetic oligonucleotide
  Antisense strand to SEQ ID NO: 627158
ucuugaccuaggagauauc

SEQ ID NO: 627160 - RNA, 19 nt, Artificial Sequence
  Description of Artificial Sequence: Synthetic oligonucleotide
  Sense strand starting at position 379 of SEQ ID NO: 585277
aggucaugauagucacaua

SEQ ID NO: 627161 - RNA, 19 nt, Artificial Sequence
  Description of Artificial Sequence: Synthetic oligonucleotide
  Antisense strand to SEQ ID NO: 627160
uaugugacuaucaugaccu

SEQ ID NO: 627162 - RNA, 19 nt, Artificial Sequence
  Description of Artificial Sequence: Synthetic oligonucleotide
  Sense strand starting at position 496 of SEQ ID NO: 585277
ccagacugauucucucuga

SEQ ID NO: 627163 - RNA, 19 nt, Artificial Sequence
  Description of Artificial Sequence: Synthetic oligonucleotide
  Antisense strand to SEQ ID NO: 627162
ucagagagaaucagucugg

SEQ ID NO: 627164 - RNA, 19 nt, Artificial Sequence
  Description of Artificial Sequence: Synthetic oligonucleotide
  Sense strand starting at position 687 of SEQ ID NO: 585277
acacauggcuugcuaaaca

SEQ ID NO: 627165 - RNA, 19 nt, Artificial Sequence
  Description of Artificial Sequence: Synthetic oligonucleotide
  Antisense strand to SEQ ID NO: 627164
uguuuagcaagccaugugu

SEQ ID NO: 627166 - RNA, 19 nt, Artificial Sequence
  Description of Artificial Sequence: Synthetic oligonucleotide
  Sense strand starting at position 808 of SEQ ID NO: 585277
aguuacaugggcuauacaa

SEQ ID NO: 627167 - RNA, 19 nt, Artificial Sequence
  Description of Artificial Sequence: Synthetic oligonucleotide
  Antisense strand to SEQ ID NO: 627166
uuguauagcccauguaacu

SEQ ID NO: 627168 - RNA, 19 nt, Artificial Sequence
  Description of Artificial Sequence: Synthetic oligonucleotide
  Sense strand starting at position 826 of SEQ ID NO: 585277
agagcuaaauagcuuacau

SEQ ID NO: 627169 - RNA, 19 nt, Artificial Sequence
  Description of Artificial Sequence: Synthetic oligonucleotide
  Antisense strand to SEQ ID NO: 627168
auguaagcuauuuagcucu

SEQ ID NO: 627170 - RNA, 19 nt, Artificial Sequence
  Description of Artificial Sequence: Synthetic oligonucleotide
  Sense strand starting at position 1342 of SEQ ID NO: 585277
gagugauaauccuuaucag

SEQ ID NO: 627171 - RNA, 19 nt, Artificial Sequence
  Description of Artificial Sequence: Synthetic oligonucleotide
  Antisense strand to SEQ ID NO: 627170
cugauaaggauuaucacuc

SEQ ID NO: 627172 - RNA, 19 nt, Artificial Sequence
  Description of Artificial Sequence: Synthetic oligonucleotide
  Sense strand starting at position 1343 of SEQ ID NO: 585277
agugauaauccuuaucagu

SEQ ID NO: 627173 - RNA, 19 nt, Artificial Sequence
  Description of Artificial Sequence: Synthetic oligonucleotide
  Antisense strand to SEQ ID NO: 627172
acugauaaggauuaucacu

SEQ ID NO: 627174 - RNA, 19 nt, Artificial Sequence
  Description of Artificial Sequence: Synthetic oligonucleotide
  Sense strand starting at position 1345 of SEQ ID NO: 585277
ugauaauccuuaucaguag

SEQ ID NO: 627175 - RNA, 19 nt, Artificial Sequence
  Description of Artificial Sequence: Synthetic oligonucleotide
  Antisense strand to SEQ ID NO: 627174
cuacugauaaggauuauca

SEQ ID NO: 627176 - RNA, 19 nt, Artificial Sequence
  Description of Artificial Sequence: Synthetic oligonucleotide
  Sense strand starting at position 1366 of SEQ ID NO: 585277
acagguucuguaugugaaa

SEQ ID NO: 627177 - RNA, 19 nt, Artificial Sequence
  Description of Artificial Sequence: Synthetic oligonucleotide
  Antisense strand to SEQ ID NO: 627176
uuucacauacagaaccugu

SEQ ID NO: 627178 - RNA, 19 nt, Artificial Sequence
  Description of Artificial Sequence: Synthetic oligonucleotide
  Sense strand starting at position 1367 of SEQ ID NO: 585277
cagguucuguaugugaaau

SEQ ID NO: 627179 - RNA, 19 nt, Artificial Sequence
  Description of Artificial Sequence: Synthetic oligonucleotide
  Antisense strand to SEQ ID NO: 627178
auuucacauacagaaccug

SEQ ID NO: 627180 - RNA, 19 nt, Artificial Sequence
  Description of Artificial Sequence: Synthetic oligonucleotide
  Sense strand starting at position 1556 of SEQ ID NO: 585277
gacagacuucuugggcuga

SEQ ID NO: 627181 - RNA, 19 nt, Artificial Sequence
  Description of Artificial Sequence: Synthetic oligonucleotide
  Antisense strand to SEQ ID NO: 627180
ucagcccaagaagucuguc

SEQ ID NO: 627182 - RNA, 19 nt, Artificial Sequence
  Description of Artificial Sequence: Synthetic oligonucleotide
  Sense strand starting at position 1558 of SEQ ID NO: 585277
cagacuucuugggcugaua

SEQ ID NO: 627183 - RNA, 19 nt, Artificial Sequence
  Description of Artificial Sequence: Synthetic oligonucleotide
  Antisense strand to SEQ ID NO: 627182
uaucagcccaagaagucug

SEQ ID NO: 627184 - RNA, 19 nt, Artificial Sequence
  Description of Artificial Sequence: Synthetic oligonucleotide
  Sense strand starting at position 1561 of SEQ ID NO: 585277
acuucuugggcugauagga

SEQ ID NO: 627185 - RNA, 19 nt, Artificial Sequence
  Description of Artificial Sequence: Synthetic oligonucleotide
  Antisense strand to SEQ ID NO: 627184
uccuaucagcccaagaagu

SEQ ID NO: 627186 - RNA, 19 nt, Artificial Sequence
  Description of Artificial Sequence: Synthetic oligonucleotide
  Sense strand starting at position 1619 of SEQ ID NO: 585277
ggaugucuuuaggcauaau

SEQ ID NO: 627187 - RNA, 19 nt, Artificial Sequence
  Description of Artificial Sequence: Synthetic oligonucleotide
  Antisense strand to SEQ ID NO: 627186
auuaugccuaaagacaucc

SEQ ID NO: 627188 - RNA, 19 nt, Artificial Sequence
  Description of Artificial Sequence: Synthetic oligonucleotide
  Sense strand starting at position 1622 of SEQ ID NO: 585277
ugucuuuaggcauaauagu

SEQ ID NO: 627189 - RNA, 19 nt, Artificial Sequence
  Description of Artificial Sequence: Synthetic oligonucleotide
  Antisense strand to SEQ ID NO: 627188
acuauuaugccuaaagaca

SEQ ID NO: 627190 - RNA, 19 nt, Artificial Sequence
  Description of Artificial Sequence: Synthetic oligonucleotide
  Sense strand starting at position 1766 of SEQ ID NO: 585277
gugcgaucucccguaccaa

SEQ ID NO: 627191 - RNA, 19 nt, Artificial Sequence
  Description of Artificial Sequence: Synthetic oligonucleotide
  Antisense strand to SEQ ID NO: 627190
uugguacgggagaucgcac

SEQ ID NO: 627192 - RNA, 19 nt, Artificial Sequence
  Description of Artificial Sequence: Synthetic oligonucleotide
  Sense strand starting at position 1959 of SEQ ID NO: 585277
gguggacuugcgagcuguu

SEQ ID NO: 627193 - RNA, 19 nt, Artificial Sequence
  Description of Artificial Sequence: Synthetic oligonucleotide
  Antisense strand to SEQ ID NO: 627192
aacagcucgcaaguccacc

SEQ ID NO: 627194 - RNA, 19 nt, Artificial Sequence
  Description of Artificial Sequence: Synthetic oligonucleotide
  Sense strand starting at position 2427 of SEQ ID NO: 585277
cguugugguaugccaguau

SEQ ID NO: 627195 - RNA, 19 nt, Artificial Sequence
  Description of Artificial Sequence: Synthetic oligonucleotide
  Antisense strand to SEQ ID NO: 627194
auacuggcauaccacaacg

SEQ ID NO: 627196 - RNA, 19 nt, Artificial Sequence
  Description of Artificial Sequence: Synthetic oligonucleotide
  Sense strand starting at position 2431 of SEQ ID NO: 585277
gugguaugccaguauuucu

SEQ ID NO: 627197 - RNA, 19 nt, Artificial Sequence
  Description of Artificial Sequence: Synthetic oligonucleotide
  Antisense strand to SEQ ID NO: 627196
agaaauacuggcauaccac

SEQ ID NO: 627198 - RNA, 19 nt, Artificial Sequence
  Description of Artificial Sequence: Synthetic oligonucleotide
  Sense strand starting at position 2434 of SEQ ID NO: 585277
guaugccaguauuucucaa

SEQ ID NO: 627199 - RNA, 19 nt, Artificial Sequence
  Description of Artificial Sequence: Synthetic oligonucleotide
  Antisense strand to SEQ ID NO: 627198
uugagaaauacuggcauac

SEQ ID NO: 627200 - RNA, 19 nt, Artificial Sequence
  Description of Artificial Sequence: Synthetic oligonucleotide
  Sense strand starting at position 2493 of SEQ ID NO: 585277
ucuguaaagggcgauauua

SEQ ID NO: 627201 - RNA, 19 nt, Artificial Sequence
  Description of Artificial Sequence: Synthetic oligonucleotide
  Antisense strand to SEQ ID NO: 627200
uaauaucgcccuuuacaga

SEQ ID NO: 627202 - RNA, 19 nt, Artificial Sequence
  Description of Artificial Sequence: Synthetic oligonucleotide
  Sense strand starting at position 2495 of SEQ ID NO: 585277
uguaaagggcgauauuaaa

SEQ ID NO: 627203 - RNA, 19 nt, Artificial Sequence
  Description of Artificial Sequence: Synthetic oligonucleotide
  Antisense strand to SEQ ID NO: 627202
uuuaauaucgcccuuuaca

SEQ ID NO: 627204 - RNA, 19 nt, Artificial Sequence
  Description of Artificial Sequence: Synthetic oligonucleotide
  Sense strand starting at position 2570 of SEQ ID NO: 585277
cgguaaaguaaucgauaca

SEQ ID NO: 627205 - RNA, 19 nt, Artificial Sequence
  Description of Artificial Sequence: Synthetic oligonucleotide
  Antisense strand to SEQ ID NO: 627204
uguaucgauuacuuuaccg

SEQ ID NO: 627206 - RNA, 19 nt, Artificial Sequence
  Description of Artificial Sequence: Synthetic oligonucleotide
  Sense strand starting at position 2643 of SEQ ID NO: 585277
uauagauuuggccguguau

SEQ ID NO: 627207 - RNA, 19 nt, Artificial Sequence
  Description of Artificial Sequence: Synthetic oligonucleotide
  Antisense strand to SEQ ID NO: 627206
auacacggccaaaucuaua

SEQ ID NO: 627208 - RNA, 19 nt, Artificial Sequence
  Description of Artificial Sequence: Synthetic oligonucleotide
  Sense strand starting at position 2645 of SEQ ID NO: 585277
uagauuuggccguguauca

SEQ ID NO: 627209 - RNA, 19 nt, Artificial Sequence
  Description of Artificial Sequence: Synthetic oligonucleotide
  Antisense strand to SEQ ID NO: 627208
ugauacacggccaaaucua

SEQ ID NO: 627210 - RNA, 19 nt, Artificial Sequence
  Description of Artificial Sequence: Synthetic oligonucleotide
  Sense strand starting at position 2769 of SEQ ID NO: 585277
guuuaaguguucuuaagaa

SEQ ID NO: 627211 - RNA, 19 nt, Artificial Sequence
  Description of Artificial Sequence: Synthetic oligonucleotide
  Antisense strand to SEQ ID NO: 627210
uucuuaagaacacuuaaac

SEQ ID NO: 627212 - RNA, 19 nt, Artificial Sequence
  Description of Artificial Sequence: Synthetic oligonucleotide
  Sense strand starting at position 2850 of SEQ ID NO: 585277
ugaggaaccguguaaguaa

SEQ ID NO: 627213 - RNA, 19 nt, Artificial Sequence
  Description of Artificial Sequence: Synthetic oligonucleotide
  Antisense strand to SEQ ID NO: 627212
uuacuuacacgguuccuca

SEQ ID NO: 627214 - RNA, 19 nt, Artificial Sequence
  Description of Artificial Sequence: Synthetic oligonucleotide
  Sense strand starting at position 3022 of SEQ ID NO: 585277
gcgugucuccucguauaua

SEQ ID NO: 627215 - RNA, 19 nt, Artificial Sequence
  Description of Artificial Sequence: Synthetic oligonucleotide
  Antisense strand to SEQ ID NO: 627214
uauauacgaggagacacgc

SEQ ID NO: 627216 - RNA, 19 nt, Artificial Sequence
  Description of Artificial Sequence: Synthetic oligonucleotide
  Sense strand starting at position 3034 of SEQ ID NO: 585277
guauauaaggccugagaug

SEQ ID NO: 627217 - RNA, 19 nt, Artificial Sequence
  Description of Artificial Sequence: Synthetic oligonucleotide
  Antisense strand to SEQ ID NO: 627216
caucucaggccuuauauac

SEQ ID NO: 627218 - RNA, 19 nt, Artificial Sequence
  Description of Artificial Sequence: Synthetic oligonucleotide
  Sense strand starting at position 3106 of SEQ ID NO: 585277
cugaauguugucgcgcaga

SEQ ID NO: 627219 - RNA, 19 nt, Artificial Sequence
  Description of Artificial Sequence: Synthetic oligonucleotide
  Antisense strand to SEQ ID NO: 627218
ucugcgcgacaacauucag

SEQ ID NO: 627220 - RNA, 19 nt, Artificial Sequence
  Description of Artificial Sequence: Synthetic oligonucleotide
  Sense strand starting at position 3108 of SEQ ID NO: 585277
gaauguugucgcgcagaac

SEQ ID NO: 627221 - RNA, 19 nt, Artificial Sequence
  Description of Artificial Sequence: Synthetic oligonucleotide
  Antisense strand to SEQ ID NO: 627220
guucugcgcgacaacauuc

SEQ ID NO: 627222 - RNA, 19 nt, Artificial Sequence
  Description of Artificial Sequence: Synthetic oligonucleotide
  Sense strand starting at position 3226 of SEQ ID NO: 585277
gcagcaguacuuuauauag

SEQ ID NO: 627223 - RNA, 19 nt, Artificial Sequence
  Description of Artificial Sequence: Synthetic oligonucleotide
  Antisense strand to SEQ ID NO: 627222
cuauauaaaguacugcugc

SEQ ID NO: 627224 - RNA, 19 nt, Artificial Sequence
  Description of Artificial Sequence: Synthetic oligonucleotide
  Sense strand starting at position 3494 of SEQ ID NO: 585277
ucgauuguucuagugcuuu

SEQ ID NO: 627225 - RNA, 19 nt, Artificial Sequence
  Description of Artificial Sequence: Synthetic oligonucleotide
  Antisense strand to SEQ ID NO: 627224
aaagcacuagaacaaucga

SEQ ID NO: 627226 - RNA, 19 nt, Artificial Sequence
  Description of Artificial Sequence: Synthetic oligonucleotide
  Sense strand starting at position 3576 of SEQ ID NO: 585277
ugaaauagcguguagaaac

SEQ ID NO: 627227 - RNA, 19 nt, Artificial Sequence
  Description of Artificial Sequence: Synthetic oligonucleotide
  Antisense strand to SEQ ID NO: 627226
guuucuacacgcuauuuca

SEQ ID NO: 627228 - RNA, 19 nt, Artificial Sequence
  Description of Artificial Sequence: Synthetic oligonucleotide
  Sense strand starting at position 3608 of SEQ ID NO: 585277
acucgaagugaucagccua

SEQ ID NO: 627229 - RNA, 19 nt, Artificial Sequence
  Description of Artificial Sequence: Synthetic oligonucleotide
  Antisense strand to SEQ ID NO: 627228
uaggcugaucacuucgagu

SEQ ID NO: 627230 - RNA, 19 nt, Artificial Sequence
  Description of Artificial Sequence: Synthetic oligonucleotide
  Sense strand starting at position 3656 of SEQ ID NO: 585277
ugaugauagcuccaaggug

SEQ ID NO: 627231 - RNA, 19 nt, Artificial Sequence
  Description of Artificial Sequence: Synthetic oligonucleotide
  Antisense strand to SEQ ID NO: 627230
caccuuggagcuaucauca

SEQ ID NO: 627232 - RNA, 19 nt, Artificial Sequence
  Description of Artificial Sequence: Synthetic oligonucleotide
  Sense strand starting at position 3831 of SEQ ID NO: 585277
caggaagcuguuugagaaa

SEQ ID NO: 627233 - RNA, 19 nt, Artificial Sequence
  Description of Artificial Sequence: Synthetic oligonucleotide
  Antisense strand to SEQ ID NO: 627232
uuucucaaacagcuuccug

SEQ ID NO: 627234 - RNA, 19 nt, Artificial Sequence
  Description of Artificial Sequence: Synthetic oligonucleotide
  Sense strand starting at position 122 of SEQ ID NO: 585278
uuuccuugauagguauaca

SEQ ID NO: 627235 - RNA, 19 nt, Artificial Sequence
  Description of Artificial Sequence: Synthetic oligonucleotide
  Antisense strand to SEQ ID NO: 627234
uguauaccuaucaaggaaa

SEQ ID NO: 627236 - RNA, 19 nt, Artificial Sequence
  Description of Artificial Sequence: Synthetic oligonucleotide
  Sense strand starting at position 338 of SEQ ID NO: 585278
uguccaaggcccuagaaua

SEQ ID NO: 627237 - RNA, 19 nt, Artificial Sequence
  Description of Artificial Sequence: Synthetic oligonucleotide
  Antisense strand to SEQ ID NO: 627236
uauucuagggccuuggaca

SEQ ID NO: 627238 - RNA, 19 nt, Artificial Sequence
  Description of Artificial Sequence: Synthetic oligonucleotide
  Sense strand starting at position 828 of SEQ ID NO: 585278
agggaauccuccuuccacu

SEQ ID NO: 627239 - RNA, 19 nt, Artificial Sequence
  Description of Artificial Sequence: Synthetic oligonucleotide
  Antisense strand to SEQ ID NO: 627238
aguggaaggaggauucccu

SEQ ID NO: 627240 - RNA, 19 nt, Artificial Sequence
  Description of Artificial Sequence: Synthetic oligonucleotide
  Sense strand starting at position 1035 of SEQ ID NO: 585278
cuauaaucucaaggugaua

SEQ ID NO: 627241 - RNA, 19 nt, Artificial Sequence
  Description of Artificial Sequence: Synthetic oligonucleotide
  Antisense strand to SEQ ID NO: 627240
uaucaccuugagauuauag

SEQ ID NO: 627242 - RNA, 19 nt, Artificial Sequence
  Description of Artificial Sequence: Synthetic oligonucleotide
  Sense strand starting at position 1104 of SEQ ID NO: 585278
cgugucuaugugcuaaauc

SEQ ID NO: 627243 - RNA, 19 nt, Artificial Sequence
  Description of Artificial Sequence: Synthetic oligonucleotide
  Antisense strand to SEQ ID NO: 627242
gauuuagcacauagacacg

SEQ ID NO: 627244 - RNA, 19 nt, Artificial Sequence
  Description of Artificial Sequence: Synthetic oligonucleotide
  Sense strand starting at position 1171 of SEQ ID NO: 585278
ggcagugcccguuucaguu

SEQ ID NO: 627245 - RNA, 19 nt, Artificial Sequence
  Description of Artificial Sequence: Synthetic oligonucleotide
  Antisense strand to SEQ ID NO: 627244
aacugaaacgggcacugcc

SEQ ID NO: 627246 - RNA, 19 nt, Artificial Sequence
  Description of Artificial Sequence: Synthetic oligonucleotide
  Sense strand starting at position 1300 of SEQ ID NO: 585278
cggauugaccuuggauaua

SEQ ID NO: 627247 - RNA, 19 nt, Artificial Sequence
  Description of Artificial Sequence: Synthetic oligonucleotide
  Antisense strand to SEQ ID NO: 627246
uauauccaaggucaauccg

SEQ ID NO: 627248 - RNA, 19 nt, Artificial Sequence
  Description of Artificial Sequence: Synthetic oligonucleotide
  Sense strand starting at position 1325 of SEQ ID NO: 585278
cugacuuuccucggagaaa

SEQ ID NO: 627249 - RNA, 19 nt, Artificial Sequence
  Description of Artificial Sequence: Synthetic oligonucleotide
  Antisense strand to SEQ ID NO: 627248
uuucuccgaggaaagucag

SEQ ID NO: 627250 - RNA, 19 nt, Artificial Sequence
  Description of Artificial Sequence: Synthetic oligonucleotide
  Sense strand starting at position 1342 of SEQ ID NO: 585278
aagugagacccuugugaga

SEQ ID NO: 627251 - RNA, 19 nt, Artificial Sequence
  Description of Artificial Sequence: Synthetic oligonucleotide
  Antisense strand to SEQ ID NO: 627250
ucucacaagggucucacuu

SEQ ID NO: 627252 - RNA, 19 nt, Artificial Sequence
  Description of Artificial Sequence: Synthetic oligonucleotide
  Sense strand starting at position 1351 of SEQ ID NO: 585278
ccuugugagaugggucaca

SEQ ID NO: 627253 - RNA, 19 nt, Artificial Sequence
  Description of Artificial Sequence: Synthetic oligonucleotide
  Antisense strand to SEQ ID NO: 627252
ugugacccaucucacaagg

SEQ ID NO: 627254 - RNA, 19 nt, Artificial Sequence
  Description of Artificial Sequence: Synthetic oligonucleotide
  Sense strand starting at position 1502 of SEQ ID NO: 585278
cagcuauccucagugagaa

SEQ ID NO: 627255 - RNA, 19 nt, Artificial Sequence
  Description of Artificial Sequence: Synthetic oligonucleotide
  Antisense strand to SEQ ID NO: 627254
uucucacugaggauagcug

SEQ ID NO: 627256 - RNA, 19 nt, Artificial Sequence
  Description of Artificial Sequence: Synthetic oligonucleotide
  Sense strand starting at position 1503 of SEQ ID NO: 585278
agcuauccucagugagaau

SEQ ID NO: 627257 - RNA, 19 nt, Artificial Sequence
  Description of Artificial Sequence: Synthetic oligonucleotide
  Antisense strand to SEQ ID NO: 627256
auucucacugaggauagcu

SEQ ID NO: 627258 - RNA, 19 nt, Artificial Sequence
  Description of Artificial Sequence: Synthetic oligonucleotide
  Sense strand starting at position 1518 of SEQ ID NO: 585278
gaauguaaguggcucugaa

SEQ ID NO: 627259 - RNA, 19 nt, Artificial Sequence
  Description of Artificial Sequence: Synthetic oligonucleotide
  Antisense strand to SEQ ID NO: 627258
uucagagccacuuacauuc

SEQ ID NO: 627260 - RNA, 19 nt, Artificial Sequence
  Description of Artificial Sequence: Synthetic oligonucleotide
  Sense strand starting at position 1625 of SEQ ID NO: 585278
ggauguccuuaggcauaau

SEQ ID NO: 627261 - RNA, 19 nt, Artificial Sequence
  Description of Artificial Sequence: Synthetic oligonucleotide
  Antisense strand to SEQ ID NO: 627260
auuaugccuaaggacaucc

SEQ ID NO: 627262 - RNA, 19 nt, Artificial Sequence
  Description of Artificial Sequence: Synthetic oligonucleotide
  Sense strand starting at position 1628 of SEQ ID NO: 585278
uguccuuaggcauaauagu

SEQ ID NO: 627263 - RNA, 19 nt, Artificial Sequence
  Description of Artificial Sequence: Synthetic oligonucleotide
  Antisense strand to SEQ ID NO: 627262
acuauuaugccuaaggaca

SEQ ID NO: 627264 - RNA, 19 nt, Artificial Sequence
  Description of Artificial Sequence: Synthetic oligonucleotide
  Sense strand starting at position 1762 of SEQ ID NO: 585278
uugaaauccugcgcgauuu

SEQ ID NO: 627265 - RNA, 19 nt, Artificial Sequence
  Description of Artificial Sequence: Synthetic oligonucleotide
  Antisense strand to SEQ ID NO: 627264
aaaucgcgcaggauuucaa

SEQ ID NO: 627266 - RNA, 19 nt, Artificial Sequence
  Description of Artificial Sequence: Synthetic oligonucleotide
  Sense strand starting at position 1763 of SEQ ID NO: 585278
ugaaauccugcgcgauuuc

SEQ ID NO: 627267 - RNA, 19 nt, Artificial Sequence
  Description of Artificial Sequence: Synthetic oligonucleotide
  Antisense strand to SEQ ID NO: 627266
gaaaucgcgcaggauuuca

SEQ ID NO: 627268 - RNA, 19 nt, Artificial Sequence
  Description of Artificial Sequence: Synthetic oligonucleotide
  Sense strand starting at position 2004 of SEQ ID NO: 585278
ugagaaagcuaugcucuga

SEQ ID NO: 627269 - RNA, 19 nt, Artificial Sequence
  Description of Artificial Sequence: Synthetic oligonucleotide
  Antisense strand to SEQ ID NO: 627268
ucagagcauagcuuucuca

SEQ ID NO: 627270 - RNA, 19 nt, Artificial Sequence
  Description of Artificial Sequence: Synthetic oligonucleotide
  Sense strand starting at position 2070 of SEQ ID NO: 585278
ugaucugauccugauuggu

SEQ ID NO: 627271 - RNA, 19 nt, Artificial Sequence
  Description of Artificial Sequence: Synthetic oligonucleotide
  Antisense strand to SEQ ID NO: 627270
accaaucaggaucagauca

SEQ ID NO: 627272 - RNA, 19 nt, Artificial Sequence
  Description of Artificial Sequence: Synthetic oligonucleotide
  Sense strand starting at position 2072 of SEQ ID NO: 585278
aucugauccugauugguca

SEQ ID NO: 627273 - RNA, 19 nt, Artificial Sequence
  Description of Artificial Sequence: Synthetic oligonucleotide
  Antisense strand to SEQ ID NO: 627272
ugaccaaucaggaucagau

SEQ ID NO: 627274 - RNA, 19 nt, Artificial Sequence
  Description of Artificial Sequence: Synthetic oligonucleotide
  Sense strand starting at position 2075 of SEQ ID NO: 585278
ugauccugauuggucagaa

SEQ ID NO: 627275 - RNA, 19 nt, Artificial Sequence
  Description of Artificial Sequence: Synthetic oligonucleotide
  Antisense strand to SEQ ID NO: 627274
uucugaccaaucaggauca

SEQ ID NO: 627276 - RNA, 19 nt, Artificial Sequence
  Description of Artificial Sequence: Synthetic oligonucleotide
  Sense strand starting at position 2076 of SEQ ID NO: 585278
gauccugauuggucagaac

SEQ ID NO: 627277 - RNA, 19 nt, Artificial Sequence
  Description of Artificial Sequence: Synthetic oligonucleotide
  Antisense strand to SEQ ID NO: 627276
guucugaccaaucaggauc

SEQ ID NO: 627278 - RNA, 19 nt, Artificial Sequence
  Description of Artificial Sequence: Synthetic oligonucleotide
  Sense strand starting at position 2524 of SEQ ID NO: 585278
agaauuuguguaggucagu

SEQ ID NO: 627279 - RNA, 19 nt, Artificial Sequence
  Description of Artificial Sequence: Synthetic oligonucleotide
  Antisense strand to SEQ ID NO: 627278
acugaccuacacaaauucu

SEQ ID NO: 627280 - RNA, 19 nt, Artificial Sequence
  Description of Artificial Sequence: Synthetic oligonucleotide
  Sense strand starting at position 2530 of SEQ ID NO: 585278
uguguaggucagucguagu

SEQ ID NO: 627281 - RNA, 19 nt, Artificial Sequence
  Description of Artificial Sequence: Synthetic oligonucleotide
  Antisense strand to SEQ ID NO: 627280
acuacgacugaccuacaca

SEQ ID NO: 627282 - RNA, 19 nt, Artificial Sequence
  Description of Artificial Sequence: Synthetic oligonucleotide
  Sense strand starting at position 2578 of SEQ ID NO: 585278
ccuauuucggaucguguaa

SEQ ID NO: 627283 - RNA, 19 nt, Artificial Sequence
  Description of Artificial Sequence: Synthetic oligonucleotide
  Antisense strand to SEQ ID NO: 627282
uuacacgauccgaaauagg

SEQ ID NO: 627284 - RNA, 19 nt, Artificial Sequence
  Description of Artificial Sequence: Synthetic oligonucleotide
  Sense strand starting at position 2782 of SEQ ID NO: 585278
uugauaggugcuugacuaa

SEQ ID NO: 627285 - RNA, 19 nt, Artificial Sequence
  Description of Artificial Sequence: Synthetic oligonucleotide
  Antisense strand to SEQ ID NO: 627284
uuagucaagcaccuaucaa

SEQ ID NO: 627286 - RNA, 19 nt, Artificial Sequence
  Description of Artificial Sequence: Synthetic oligonucleotide
  Sense strand starting at position 2785 of SEQ ID NO: 585278
auaggugcuugacuaaaug

SEQ ID NO: 627287 - RNA, 19 nt, Artificial Sequence
  Description of Artificial Sequence: Synthetic oligonucleotide
  Antisense strand to SEQ ID NO: 627286
cauuuagucaagcaccuau

SEQ ID NO: 627288 - RNA, 19 nt, Artificial Sequence
  Description of Artificial Sequence: Synthetic oligonucleotide
  Sense strand starting at position 2852 of SEQ ID NO: 585278
uccaauggcugauuggauu

SEQ ID NO: 627289 - RNA, 19 nt, Artificial Sequence
  Description of Artificial Sequence: Synthetic oligonucleotide
  Antisense strand to SEQ ID NO: 627288
aauccaaucagccauugga

SEQ ID NO: 627290 - RNA, 19 nt, Artificial Sequence
  Description of Artificial Sequence: Synthetic oligonucleotide
  Sense strand starting at position 2915 of SEQ ID NO: 585278
acagguuugggucagugau

SEQ ID NO: 627291 - RNA, 19 nt, Artificial Sequence
  Description of Artificial Sequence: Synthetic oligonucleotide
  Antisense strand to SEQ ID NO: 627290
aucacugacccaaaccugu

SEQ ID NO: 627292 - RNA, 19 nt, Artificial Sequence
  Description of Artificial Sequence: Synthetic oligonucleotide
  Sense strand starting at position 2921 of SEQ ID NO: 585278
uugggucagugauuagauu

SEQ ID NO: 627293 - RNA, 19 nt, Artificial Sequence
  Description of Artificial Sequence: Synthetic oligonucleotide
  Antisense strand to SEQ ID NO: 627292
aaucuaaucacugacccaa

SEQ ID NO: 627294 - RNA, 19 nt, Artificial Sequence
  Description of Artificial Sequence: Synthetic oligonucleotide
  Sense strand starting at position 2946 of SEQ ID NO: 585278
agugaaucuggguaguucu

SEQ ID NO: 627295 - RNA, 19 nt, Artificial Sequence
  Description of Artificial Sequence: Synthetic oligonucleotide
  Antisense strand to SEQ ID NO: 627294
agaacuacccagauucacu

SEQ ID NO: 627296 - RNA, 19 nt, Artificial Sequence
  Description of Artificial Sequence: Synthetic oligonucleotide
  Sense strand starting at position 3016 of SEQ ID NO: 585278
gguucugguauugauaaag

SEQ ID NO: 627297 - RNA, 19 nt, Artificial Sequence
  Description of Artificial Sequence: Synthetic oligonucleotide
  Antisense strand to SEQ ID NO: 627296
cuuuaucaauaccagaacc

SEQ ID NO: 627298 - RNA, 19 nt, Artificial Sequence
  Description of Artificial Sequence: Synthetic oligonucleotide
  Sense strand starting at position 3179 of SEQ ID NO: 585278
gaggucauggcucacugaa

SEQ ID NO: 627299 - RNA, 19 nt, Artificial Sequence
  Description of Artificial Sequence: Synthetic oligonucleotide
  Antisense strand to SEQ ID NO: 627298
uucagugagccaugaccuc

SEQ ID NO: 627300 - RNA, 19 nt, Artificial Sequence
  Description of Artificial Sequence: Synthetic oligonucleotide
  Sense strand starting at position 3181 of SEQ ID NO: 585278
ggucauggcucacugaaau

SEQ ID NO: 627301 - RNA, 19 nt, Artificial Sequence
  Description of Artificial Sequence: Synthetic oligonucleotide
  Antisense strand to SEQ ID NO: 627300
auuucagugagccaugacc

SEQ ID NO: 627302 - RNA, 19 nt, Artificial Sequence
  Description of Artificial Sequence: Synthetic oligonucleotide
  Sense strand starting at position 3231 of SEQ ID NO: 585278
gcugucaguccgccaaaua

SEQ ID NO: 627303 - RNA, 19 nt, Artificial Sequence
  Description of Artificial Sequence: Synthetic oligonucleotide
  Antisense strand to SEQ ID NO: 627302
uauuuggcggacugacagc

SEQ ID NO: 627304 - RNA, 19 nt, Artificial Sequence
  Description of Artificial Sequence: Synthetic oligonucleotide
  Sense strand starting at position 3840 of SEQ ID NO: 585278
cuugaacucggccacaaau

SEQ ID NO: 627305 - RNA, 19 nt, Artificial Sequence
  Description of Artificial Sequence: Synthetic oligonucleotide
  Antisense strand to SEQ ID NO: 627304
auuuguggccgaguucaag

SEQ ID NO: 627306 - RNA, 19 nt, Artificial Sequence
  Description of Artificial Sequence: Synthetic oligonucleotide
  Sense strand starting at position 3851 of SEQ ID NO: 585278
ccacaaauuucugauaggu

SEQ ID NO: 627307 - RNA, 19 nt, Artificial Sequence
  Description of Artificial Sequence: Synthetic oligonucleotide
  Antisense strand to SEQ ID NO: 627306
accuaucagaaauuugugg

SEQ ID NO: 627308 - RNA, 19 nt, Artificial Sequence
  Description of Artificial Sequence: Synthetic oligonucleotide
  Sense strand starting at position 3853 of SEQ ID NO: 585278
acaaauuucugauagguuu

SEQ ID NO: 627309 - RNA, 19 nt, Artificial Sequence
  Description of Artificial Sequence: Synthetic oligonucleotide
  Antisense strand to SEQ ID NO: 627308
aaaccuaucagaaauuugu

SEQ ID NO: 627310 - RNA, 19 nt, Artificial Sequence
  Description of Artificial Sequence: Synthetic oligonucleotide
  Sense strand starting at position 3859 of SEQ ID NO: 585278
uucugauagguuuggagaa

SEQ ID NO: 627311 - RNA, 19 nt, Artificial Sequence
  Description of Artificial Sequence: Synthetic oligonucleotide
  Antisense strand to SEQ ID NO: 627310
uucuccaaaccuaucagaa

SEQ ID NO: 627312 - RNA, 19 nt, Artificial Sequence
  Description of Artificial Sequence: Synthetic oligonucleotide
  Sense strand starting at position 3886 of SEQ ID NO: 585278
ucaguucuuccguagaaau

SEQ ID NO: 627313 - RNA, 19 nt, Artificial Sequence
  Description of Artificial Sequence: Synthetic oligonucleotide
  Antisense strand to SEQ ID NO: 627312
auuucuacggaagaacuga

SEQ ID NO: 627314 - RNA, 19 nt, Artificial Sequence
  Description of Artificial Sequence: Synthetic oligonucleotide
  Sense strand starting at position 34 of SEQ ID NO: 585279
augacauaucagcaaugcu

SEQ ID NO: 627315 - RNA, 19 nt, Artificial Sequence
  Description of Artificial Sequence: Synthetic oligonucleotide
  Antisense strand to SEQ ID NO: 627314
agcauugcugauaugucau

SEQ ID NO: 627316 - RNA, 19 nt, Artificial Sequence
  Description of Artificial Sequence: Synthetic oligonucleotide
  Sense strand starting at position 96 of SEQ ID NO: 585279
gagcuagucguggcuuauu

SEQ ID NO: 627317 - RNA, 19 nt, Artificial Sequence
  Description of Artificial Sequence: Synthetic oligonucleotide
  Antisense strand to SEQ ID NO: 627316
aauaagccacgacuagcuc

SEQ ID NO: 627318 - RNA, 19 nt, Artificial Sequence
  Description of Artificial Sequence: Synthetic oligonucleotide
  Sense strand starting at position 131 of SEQ ID NO: 585279
cucccauauggguaaucga

SEQ ID NO: 627319 - RNA, 19 nt, Artificial Sequence
  Description of Artificial Sequence: Synthetic oligonucleotide
  Antisense strand to SEQ ID NO: 627318
ucgauuacccauaugggag

SEQ ID NO: 627320 - RNA, 19 nt, Artificial Sequence
  Description of Artificial Sequence: Synthetic oligonucleotide
  Sense strand starting at position 134 of SEQ ID NO: 585279
ccauauggguaaucgauau

SEQ ID NO: 627321 - RNA, 19 nt, Artificial Sequence
  Description of Artificial Sequence: Synthetic oligonucleotide
  Antisense strand to SEQ ID NO: 627320
auaucgauuacccauaugg

SEQ ID NO: 627322 - RNA, 19 nt, Artificial Sequence
  Description of Artificial Sequence: Synthetic oligonucleotide
  Sense strand starting at position 138 of SEQ ID NO: 585279
auggguaaucgauauccac

SEQ ID NO: 627323 - RNA, 19 nt, Artificial Sequence
  Description of Artificial Sequence: Synthetic oligonucleotide
  Antisense strand to SEQ ID NO: 627322
guggauaucgauuacccau

SEQ ID NO: 627324 - RNA, 19 nt, Artificial Sequence
  Description of Artificial Sequence: Synthetic oligonucleotide
  Sense strand starting at position 141 of SEQ ID NO: 585279
gguaaucgauauccacaca

SEQ ID NO: 627325 - RNA, 19 nt, Artificial Sequence
  Description of Artificial Sequence: Synthetic oligonucleotide
  Antisense strand to SEQ ID NO: 627324
uguguggauaucgauuacc

SEQ ID NO: 627326 - RNA, 19 nt, Artificial Sequence
  Description of Artificial Sequence: Synthetic oligonucleotide
  Sense strand starting at position 165 of SEQ ID NO: 585279
cuacauugacucuggaauu

SEQ ID NO: 627327 - RNA, 19 nt, Artificial Sequence
  Description of Artificial Sequence: Synthetic oligonucleotide
  Antisense strand to SEQ ID NO: 627326
aauuccagagucaauguag

SEQ ID NO: 627328 - RNA, 19 nt, Artificial Sequence
  Description of Artificial Sequence: Synthetic oligonucleotide
  Sense strand starting at position 406 of SEQ ID NO: 585279
uuguguaauuccucaagaa

SEQ ID NO: 627329 - RNA, 19 nt, Artificial Sequence
  Description of Artificial Sequence: Synthetic oligonucleotide
  Antisense strand to SEQ ID NO: 627328
uucuugaggaauuacacaa

SEQ ID NO: 627330 - RNA, 19 nt, Artificial Sequence
  Description of Artificial Sequence: Synthetic oligonucleotide
  Sense strand starting at position 407 of SEQ ID NO: 585279
uguguaauuccucaagaaa

SEQ ID NO: 627331 - RNA, 19 nt, Artificial Sequence
  Description of Artificial Sequence: Synthetic oligonucleotide
  Antisense strand to SEQ ID NO: 627330
uuucuugaggaauuacaca

SEQ ID NO: 627332 - RNA, 19 nt, Artificial Sequence
  Description of Artificial Sequence: Synthetic oligonucleotide
  Sense strand starting at position 494 of SEQ ID NO: 585279
caucgugaggcugaaauca

SEQ ID NO: 627333 - RNA, 19 nt, Artificial Sequence
  Description of Artificial Sequence: Synthetic oligonucleotide
  Antisense strand to SEQ ID NO: 627332
ugauuucagccucacgaug

SEQ ID NO: 627334 - RNA, 19 nt, Artificial Sequence
  Description of Artificial Sequence: Synthetic oligonucleotide
  Sense strand starting at position 571 of SEQ ID NO: 585279
agaugagaguaagauauuu

SEQ ID NO: 627335 - RNA, 19 nt, Artificial Sequence
  Description of Artificial Sequence: Synthetic oligonucleotide
  Antisense strand to SEQ ID NO: 627334
aaauaucuuacucucaucu

SEQ ID NO: 627336 - RNA, 19 nt, Artificial Sequence
  Description of Artificial Sequence: Synthetic oligonucleotide
  Sense strand starting at position 630 of SEQ ID NO: 585279
gaguucugaagcuagaugu

SEQ ID NO: 627337 - RNA, 19 nt, Artificial Sequence
  Description of Artificial Sequence: Synthetic oligonucleotide
  Antisense strand to SEQ ID NO: 627336
acaucuagcuucagaacuc

SEQ ID NO: 627338 - RNA, 19 nt, Artificial Sequence
  Description of Artificial Sequence: Synthetic oligonucleotide
  Sense strand starting at position 928 of SEQ ID NO: 585279
uucuuaguuguacaaccau

SEQ ID NO: 627339 - RNA, 19 nt, Artificial Sequence
  Description of Artificial Sequence: Synthetic oligonucleotide
  Antisense strand to SEQ ID NO: 627338
augguuguacaacuaagaa

SEQ ID NO: 627340 - RNA, 19 nt, Artificial Sequence
  Description of Artificial Sequence: Synthetic oligonucleotide
  Sense strand starting at position 985 of SEQ ID NO: 585279
uuuccauuucugcguaaag

SEQ ID NO: 627341 - RNA, 19 nt, Artificial Sequence
  Description of Artificial Sequence: Synthetic oligonucleotide
  Antisense strand to SEQ ID NO: 627340
cuuuacgcagaaauggaaa

SEQ ID NO: 627342 - RNA, 19 nt, Artificial Sequence
  Description of Artificial Sequence: Synthetic oligonucleotide
  Sense strand starting at position 1102 of SEQ ID NO: 585279
cuggguauuccaggagucu

SEQ ID NO: 627343 - RNA, 19 nt, Artificial Sequence
  Description of Artificial Sequence: Synthetic oligonucleotide
  Antisense strand to SEQ ID NO: 627342
agacuccuggaauacccag

SEQ ID NO: 627344 - RNA, 19 nt, Artificial Sequence
  Description of Artificial Sequence: Synthetic oligonucleotide
  Sense strand starting at position 1164 of SEQ ID NO: 585279
uguauugguggcgauaaau

SEQ ID NO: 627345 - RNA, 19 nt, Artificial Sequence
  Description of Artificial Sequence: Synthetic oligonucleotide
  Antisense strand to SEQ ID NO: 627344
auuuaucgccaccaauaca

SEQ ID NO: 627346 - RNA, 19 nt, Artificial Sequence
  Description of Artificial Sequence: Synthetic oligonucleotide
  Sense strand starting at position 1189 of SEQ ID NO: 585279
uugcucucaguacaugauu

SEQ ID NO: 627347 - RNA, 19 nt, Artificial Sequence
  Description of Artificial Sequence: Synthetic oligonucleotide
  Antisense strand to SEQ ID NO: 627346
aaucauguacugagagcaa

SEQ ID NO: 627348 - RNA, 19 nt, Artificial Sequence
  Description of Artificial Sequence: Synthetic oligonucleotide
  Sense strand starting at position 1215 of SEQ ID NO: 585279
acuuaaaugucucugugau

SEQ ID NO: 627349 - RNA, 19 nt, Artificial Sequence
  Description of Artificial Sequence: Synthetic oligonucleotide
  Antisense strand to SEQ ID NO: 627348
aucacagagacauuuaagu

SEQ ID NO: 627350 - RNA, 19 nt, Artificial Sequence
  Description of Artificial Sequence: Synthetic oligonucleotide
  Sense strand starting at position 1340 of SEQ ID NO: 585279
aggaaauauuagcucauca

SEQ ID NO: 627351 - RNA, 19 nt, Artificial Sequence
  Description of Artificial Sequence: Synthetic oligonucleotide
  Antisense strand to SEQ ID NO: 627350
ugaugagcuaauauuuccu

SEQ ID NO: 627352 - RNA, 19 nt, Artificial Sequence
  Description of Artificial Sequence: Synthetic oligonucleotide
  Sense strand starting at position 1355 of SEQ ID NO: 585279
aucaguucugauugguuga

SEQ ID NO: 627353 - RNA, 19 nt, Artificial Sequence
  Description of Artificial Sequence: Synthetic oligonucleotide
  Antisense strand to SEQ ID NO: 627352
ucaaccaaucagaacugau

SEQ ID NO: 627354 - RNA, 19 nt, Artificial Sequence
  Description of Artificial Sequence: Synthetic oligonucleotide
  Sense strand starting at position 1357 of SEQ ID NO: 585279
caguucugauugguugaca

SEQ ID NO: 627355 - RNA, 19 nt, Artificial Sequence
  Description of Artificial Sequence: Synthetic oligonucleotide
  Antisense strand to SEQ ID NO: 627354
ugucaaccaaucagaacug

SEQ ID NO: 627356 - RNA, 19 nt, Artificial Sequence
  Description of Artificial Sequence: Synthetic oligonucleotide
  Sense strand starting at position 1366 of SEQ ID NO: 585279
uugguugacagcuacgaau

SEQ ID NO: 627357 - RNA, 19 nt, Artificial Sequence
  Description of Artificial Sequence: Synthetic oligonucleotide
  Antisense strand to SEQ ID NO: 627356
auucguagcugucaaccaa

SEQ ID NO: 627358 - RNA, 19 nt, Artificial Sequence
  Description of Artificial Sequence: Synthetic oligonucleotide
  Sense strand starting at position 1379 of SEQ ID NO: 585279
acgaauggcccucauugau

SEQ ID NO: 627359 - RNA, 19 nt, Artificial Sequence
  Description of Artificial Sequence: Synthetic oligonucleotide
  Antisense strand to SEQ ID NO: 627358
aucaaugagggccauucgu

SEQ ID NO: 627360 - RNA, 19 nt, Artificial Sequence
  Description of Artificial Sequence: Synthetic oligonucleotide
  Sense strand starting at position 1587 of SEQ ID NO: 585279
ugagcuucuugacuuaaug

SEQ ID NO: 627361 - RNA, 19 nt, Artificial Sequence
  Description of Artificial Sequence: Synthetic oligonucleotide
  Antisense strand to SEQ ID NO: 627360
cauuaagucaagaagcuca

SEQ ID NO: 627362 - RNA, 19 nt, Artificial Sequence
  Description of Artificial Sequence: Synthetic oligonucleotide
  Sense strand starting at position 2041 of SEQ ID NO: 585279
ggaaaccgaucuuuauaua

SEQ ID NO: 627363 - RNA, 19 nt, Artificial Sequence
  Description of Artificial Sequence: Synthetic oligonucleotide
  Antisense strand to SEQ ID NO: 627362
uauauaaagaucgguuucc

SEQ ID NO: 627364 - RNA, 19 nt, Artificial Sequence
  Description of Artificial Sequence: Synthetic oligonucleotide
  Sense strand starting at position 2443 of SEQ ID NO: 585279
cagaguguagcugggauua

SEQ ID NO: 627365 - RNA, 19 nt, Artificial Sequence
  Description of Artificial Sequence: Synthetic oligonucleotide
  Antisense strand to SEQ ID NO: 627364
uaaucccagcuacacucug

SEQ ID NO: 627366 - RNA, 19 nt, Artificial Sequence
  Description of Artificial Sequence: Synthetic oligonucleotide
  Sense strand starting at position 3266 of SEQ ID NO: 585279
aagugcagugauuggauga

SEQ ID NO: 627367 - RNA, 19 nt, Artificial Sequence
  Description of Artificial Sequence: Synthetic oligonucleotide
  Antisense strand to SEQ ID NO: 627366
ucauccaaucacugcacuu

SEQ ID NO: 627368 - RNA, 19 nt, Artificial Sequence
  Description of Artificial Sequence: Synthetic oligonucleotide
  Sense strand starting at position 3267 of SEQ ID NO: 585279
agugcagugauuggaugau

SEQ ID NO: 627369 - RNA, 19 nt, Artificial Sequence
  Description of Artificial Sequence: Synthetic oligonucleotide
  Antisense strand to SEQ ID NO: 627368
aucauccaaucacugcacu

SEQ ID NO: 627370 - RNA, 19 nt, Artificial Sequence
  Description of Artificial Sequence: Synthetic oligonucleotide
  Sense strand starting at position 3313 of SEQ ID NO: 585279
cucugauuggucuaucuuu

SEQ ID NO: 627371 - RNA, 19 nt, Artificial Sequence
  Description of Artificial Sequence: Synthetic oligonucleotide
  Antisense strand to SEQ ID NO: 627370
aaagauagaccaaucagag

SEQ ID NO: 627372 - RNA, 19 nt, Artificial Sequence
  Description of Artificial Sequence: Synthetic oligonucleotide
  Sense strand starting at position 3319 of SEQ ID NO: 585279
uuggucuaucuuuaagcca

SEQ ID NO: 627373 - RNA, 19 nt, Artificial Sequence
  Description of Artificial Sequence: Synthetic oligonucleotide
  Antisense strand to SEQ ID NO: 627372
uggcuuaaagauagaccaa

SEQ ID NO: 627374 - RNA, 19 nt, Artificial Sequence
  Description of Artificial Sequence: Synthetic oligonucleotide
  Sense strand starting at position 3458 of SEQ ID NO: 585279
ucuuaaacuugggcucaaa

SEQ ID NO: 627375 - RNA, 19 nt, Artificial Sequence
  Description of Artificial Sequence: Synthetic oligonucleotide
  Antisense strand to SEQ ID NO: 627374
uuugagcccaaguuuaaga

SEQ ID NO: 627376 - RNA, 19 nt, Artificial Sequence
  Description of Artificial Sequence: Synthetic oligonucleotide
  Sense strand starting at position 3715 of SEQ ID NO: 585279
ucaccuccucuccggaaau

SEQ ID NO: 627377 - RNA, 19 nt, Artificial Sequence
  Description of Artificial Sequence: Synthetic oligonucleotide
  Antisense strand to SEQ ID NO: 627376
auuuccggagaggagguga

SEQ ID NO: 627378 - RNA, 19 nt, Artificial Sequence
  Description of Artificial Sequence: Synthetic oligonucleotide
  Sense strand starting at position 3717 of SEQ ID NO: 585279
accuccucuccggaaaugu

SEQ ID NO: 627379 - RNA, 19 nt, Artificial Sequence
  Description of Artificial Sequence: Synthetic oligonucleotide
  Antisense strand to SEQ ID NO: 627378
acauuuccggagaggaggu

SEQ ID NO: 627380 - RNA, 19 nt, Artificial Sequence
  Description of Artificial Sequence: Synthetic oligonucleotide
  Sense strand starting at position 3730 of SEQ ID NO: 585279
aaauguacccuuuacggga

SEQ ID NO: 627381 - RNA, 19 nt, Artificial Sequence
  Description of Artificial Sequence: Synthetic oligonucleotide
  Antisense strand to SEQ ID NO: 627380
ucccguaaaggguacauuu

SEQ ID NO: 627382 - RNA, 19 nt, Artificial Sequence
  Description of Artificial Sequence: Synthetic oligonucleotide
  Sense strand starting at position 3743 of SEQ ID NO: 585279
acgggaauuucugaaaccu

SEQ ID NO: 627383 - RNA, 19 nt, Artificial Sequence
  Description of Artificial Sequence: Synthetic oligonucleotide
  Antisense strand to SEQ ID NO: 627382
agguuucagaaauucccgu

SEQ ID NO: 627384 - RNA, 19 nt, Artificial Sequence
  Description of Artificial Sequence: Synthetic oligonucleotide
  Sense strand starting at position 3771 of SEQ ID NO: 585279
auuggauuccuuuguaaug

SEQ ID NO: 627385 - RNA, 19 nt, Artificial Sequence
  Description of Artificial Sequence: Synthetic oligonucleotide
  Antisense strand to SEQ ID NO: 627384
cauuacaaaggaauccaau

SEQ ID NO: 627386 - RNA, 19 nt, Artificial Sequence
  Description of Artificial Sequence: Synthetic oligonucleotide
  Sense strand starting at position 3788 of SEQ ID NO: 585279
ugcuuuaauugacuuagga

SEQ ID NO: 627387 - RNA, 19 nt, Artificial Sequence
  Description of Artificial Sequence: Synthetic oligonucleotide
  Antisense strand to SEQ ID NO: 627386
uccuaagucaauuaaagca

SEQ ID NO: 627388 - RNA, 19 nt, Artificial Sequence
  Description of Artificial Sequence: Synthetic oligonucleotide
  Sense strand starting at position 3796 of SEQ ID NO: 585279
uugacuuaggaguguuauu

SEQ ID NO: 627389 - RNA, 19 nt, Artificial Sequence
  Description of Artificial Sequence: Synthetic oligonucleotide
  Antisense strand to SEQ ID NO: 627388
aauaacacuccuaagucaa

SEQ ID NO: 627390 - RNA, 19 nt, Artificial Sequence
  Description of Artificial Sequence: Synthetic oligonucleotide
  Sense strand starting at position 3801 of SEQ ID NO: 585279
uuaggaguguuauugaaau

SEQ ID NO: 627391 - RNA, 19 nt, Artificial Sequence
  Description of Artificial Sequence: Synthetic oligonucleotide
  Antisense strand to SEQ ID NO: 627390
auuucaauaacacuccuaa

SEQ ID NO: 627392 - RNA, 19 nt, Artificial Sequence
  Description of Artificial Sequence: Synthetic oligonucleotide
  Sense strand starting at position 3891 of SEQ ID NO: 585279
ugauuaugcucuuugaauc

SEQ ID NO: 627393 - RNA, 19 nt, Artificial Sequence
  Description of Artificial Sequence: Synthetic oligonucleotide
  Antisense strand to SEQ ID NO: 627392
gauucaaagagcauaauca

SEQ ID NO: 627394 - RNA, 19 nt, Artificial Sequence
  Description of Artificial Sequence: Synthetic oligonucleotide
  Sense strand starting at position 90 of SEQ ID NO: 585280
ggccuauauuucuuaagcu

SEQ ID NO: 627395 - RNA, 19 nt, Artificial Sequence
  Description of Artificial Sequence: Synthetic oligonucleotide
  Antisense strand to SEQ ID NO: 627394
agcuuaagaaauauaggcc

SEQ ID NO: 627396 - RNA, 19 nt, Artificial Sequence
  Description of Artificial Sequence: Synthetic oligonucleotide
  Sense strand starting at position 170 of SEQ ID NO: 585280
uuaggcaucccgggaauga

SEQ ID NO: 627397 - RNA, 19 nt, Artificial Sequence
  Description of Artificial Sequence: Synthetic oligonucleotide
  Antisense strand to SEQ ID NO: 627396
ucauucccgggaugccuaa

SEQ ID NO: 627398 - RNA, 19 nt, Artificial Sequence
  Description of Artificial Sequence: Synthetic oligonucleotide
  Sense strand starting at position 263 of SEQ ID NO: 585280
ugguguucuguugaacaaa

SEQ ID NO: 627399 - RNA, 19 nt, Artificial Sequence
  Description of Artificial Sequence: Synthetic oligonucleotide
  Antisense strand to SEQ ID NO: 627398
uuuguucaacagaacacca

SEQ ID NO: 627400 - RNA, 19 nt, Artificial Sequence
  Description of Artificial Sequence: Synthetic oligonucleotide
  Sense strand starting at position 266 of SEQ ID NO: 585280
uguucuguugaacaaacua

SEQ ID NO: 627401 - RNA, 19 nt, Artificial Sequence
  Description of Artificial Sequence: Synthetic oligonucleotide
  Antisense strand to SEQ ID NO: 627400
uaguuuguucaacagaaca

SEQ ID NO: 627402 - RNA, 19 nt, Artificial Sequence
  Description of Artificial Sequence: Synthetic oligonucleotide
  Sense strand starting at position 320 of SEQ ID NO: 585280
aguugaguuagccaagaaa

SEQ ID NO: 627403 - RNA, 19 nt, Artificial Sequence
  Description of Artificial Sequence: Synthetic oligonucleotide
  Antisense strand to SEQ ID NO: 627402
uuucuuggcuaacucaacu

SEQ ID NO: 627404 - RNA, 19 nt, Artificial Sequence
  Description of Artificial Sequence: Synthetic oligonucleotide
  Sense strand starting at position 408 of SEQ ID NO: 585280
uagggcuguguagagaaau

SEQ ID NO: 627405 - RNA, 19 nt, Artificial Sequence
  Description of Artificial Sequence: Synthetic oligonucleotide
  Antisense strand to SEQ ID NO: 627404
auuucucuacacagcccua

SEQ ID NO: 627406 - RNA, 19 nt, Artificial Sequence
  Description of Artificial Sequence: Synthetic oligonucleotide
  Sense strand starting at position 441 of SEQ ID NO: 585280
auguauagaucacucuagu

SEQ ID NO: 627407 - RNA, 19 nt, Artificial Sequence
  Description of Artificial Sequence: Synthetic oligonucleotide
  Antisense strand to SEQ ID NO: 627406
acuagagugaucuauacau

SEQ ID NO: 627408 - RNA, 19 nt, Artificial Sequence
  Description of Artificial Sequence: Synthetic oligonucleotide
  Sense strand starting at position 659 of SEQ ID NO: 585280
aggagaagcuuguuagcaa

SEQ ID NO: 627409 - RNA, 19 nt, Artificial Sequence
  Description of Artificial Sequence: Synthetic oligonucleotide
  Antisense strand to SEQ ID NO: 627408
uugcuaacaagcuucuccu

SEQ ID NO: 627410 - RNA, 19 nt, Artificial Sequence
  Description of Artificial Sequence: Synthetic oligonucleotide
  Sense strand starting at position 710 of SEQ ID NO: 585280
ugaaguagccaucaauaua

SEQ ID NO: 627411 - RNA, 19 nt, Artificial Sequence
  Description of Artificial Sequence: Synthetic oligonucleotide
  Antisense strand to SEQ ID NO: 627410
uauauugauggcuacuuca

SEQ ID NO: 627412 - RNA, 19 nt, Artificial Sequence
  Description of Artificial Sequence: Synthetic oligonucleotide
  Sense strand starting at position 898 of SEQ ID NO: 585280
agaugcaagucaucugaga

SEQ ID NO: 627413 - RNA, 19 nt, Artificial Sequence
  Description of Artificial Sequence: Synthetic oligonucleotide
  Antisense strand to SEQ ID NO: 627412
ucucagaugacuugcaucu

SEQ ID NO: 627414 - RNA, 19 nt, Artificial Sequence
  Description of Artificial Sequence: Synthetic oligonucleotide
  Sense strand starting at position 1012 of SEQ ID NO: 585280
agucuacuaagugggaauu

SEQ ID NO: 627415 - RNA, 19 nt, Artificial Sequence
  Description of Artificial Sequence: Synthetic oligonucleotide
  Antisense strand to SEQ ID NO: 627414
aauucccacuuaguagacu

SEQ ID NO: 627416 - RNA, 19 nt, Artificial Sequence
  Description of Artificial Sequence: Synthetic oligonucleotide
  Sense strand starting at position 1014 of SEQ ID NO: 585280
ucuacuaagugggaauuua

SEQ ID NO: 627417 - RNA, 19 nt, Artificial Sequence
  Description of Artificial Sequence: Synthetic oligonucleotide
  Antisense strand to SEQ ID NO: 627416
uaaauucccacuuaguaga

SEQ ID NO: 627418 - RNA, 19 nt, Artificial Sequence
  Description of Artificial Sequence: Synthetic oligonucleotide
  Sense strand starting at position 1219 of SEQ ID NO: 585280
gguguuaccagggaagcua

SEQ ID NO: 627419 - RNA, 19 nt, Artificial Sequence
  Description of Artificial Sequence: Synthetic oligonucleotide
  Antisense strand to SEQ ID NO: 627418
uagcuucccugguaacacc

SEQ ID NO: 627420 - RNA, 19 nt, Artificial Sequence
  Description of Artificial Sequence: Synthetic oligonucleotide
  Sense strand starting at position 1336 of SEQ ID NO: 585280
uaggcucucguacaaauaa

SEQ ID NO: 627421 - RNA, 19 nt, Artificial Sequence
  Description of Artificial Sequence: Synthetic oligonucleotide
  Antisense strand to SEQ ID NO: 627420
uuauuuguacgagagccua

SEQ ID NO: 627422 - RNA, 19 nt, Artificial Sequence
  Description of Artificial Sequence: Synthetic oligonucleotide
  Sense strand starting at position 1480 of SEQ ID NO: 585280
ucguuuacuuagcugauuu

SEQ ID NO: 627423 - RNA, 19 nt, Artificial Sequence
  Description of Artificial Sequence: Synthetic oligonucleotide
  Antisense strand to SEQ ID NO: 627422
aaaucagcuaaguaaacga

SEQ ID NO: 627424 - RNA, 19 nt, Artificial Sequence
  Description of Artificial Sequence: Synthetic oligonucleotide
  Sense strand starting at position 1491 of SEQ ID NO: 585280
gcugauuucugcuuuagca

SEQ ID NO: 627425 - RNA, 19 nt, Artificial Sequence
  Description of Artificial Sequence: Synthetic oligonucleotide
  Antisense strand to SEQ ID NO: 627424
ugcuaaagcagaaaucagc

SEQ ID NO: 627426 - RNA, 19 nt, Artificial Sequence
  Description of Artificial Sequence: Synthetic oligonucleotide
  Sense strand starting at position 1558 of SEQ ID NO: 585280
ucuacauacuaggcagaau

SEQ ID NO: 627427 - RNA, 19 nt, Artificial Sequence
  Description of Artificial Sequence: Synthetic oligonucleotide
  Antisense strand to SEQ ID NO: 627426
auucugccuaguauguaga

SEQ ID NO: 627428 - RNA, 19 nt, Artificial Sequence
  Description of Artificial Sequence: Synthetic oligonucleotide
  Sense strand starting at position 1569 of SEQ ID NO: 585280
ggcagaauagccgaguaaa

SEQ ID NO: 627429 - RNA, 19 nt, Artificial Sequence
  Description of Artificial Sequence: Synthetic oligonucleotide
  Antisense strand to SEQ ID NO: 627428
uuuacucggcuauucugcc

SEQ ID NO: 627430 - RNA, 19 nt, Artificial Sequence
  Description of Artificial Sequence: Synthetic oligonucleotide
  Sense strand starting at position 1581 of SEQ ID NO: 585280
gaguaaagccauugagaug

SEQ ID NO: 627431 - RNA, 19 nt, Artificial Sequence
  Description of Artificial Sequence: Synthetic oligonucleotide
  Antisense strand to SEQ ID NO: 627430
caucucaauggcuuuacuc

SEQ ID NO: 627432 - RNA, 19 nt, Artificial Sequence
  Description of Artificial Sequence: Synthetic oligonucleotide
  Sense strand starting at position 1582 of SEQ ID NO: 585280
aguaaagccauugagaugu

SEQ ID NO: 627433 - RNA, 19 nt, Artificial Sequence
  Description of Artificial Sequence: Synthetic oligonucleotide
  Antisense strand to SEQ ID NO: 627432
acaucucaauggcuuuacu

SEQ ID NO: 627434 - RNA, 19 nt, Artificial Sequence
  Description of Artificial Sequence: Synthetic oligonucleotide
  Sense strand starting at position 1720 of SEQ ID NO: 585280
ugacgcuugagcgcguaaa

SEQ ID NO: 627435 - RNA, 19 nt, Artificial Sequence
  Description of Artificial Sequence: Synthetic oligonucleotide
  Antisense strand to SEQ ID NO: 627434
uuuacgcgcucaagcguca

SEQ ID NO: 627436 - RNA, 19 nt, Artificial Sequence
  Description of Artificial Sequence: Synthetic oligonucleotide
  Sense strand starting at position 1799 of SEQ ID NO: 585280
ggaucacguucuccagaaa

SEQ ID NO: 627437 - RNA, 19 nt, Artificial Sequence
  Description of Artificial Sequence: Synthetic oligonucleotide
  Antisense strand to SEQ ID NO: 627436
uuucuggagaacgugaucc

SEQ ID NO: 627438 - RNA, 19 nt, Artificial Sequence
  Description of Artificial Sequence: Synthetic oligonucleotide
  Sense strand starting at position 1802 of SEQ ID NO: 585280
ucacguucuccagaaacac

SEQ ID NO: 627439 - RNA, 19 nt, Artificial Sequence
  Description of Artificial Sequence: Synthetic oligonucleotide
  Antisense strand to SEQ ID NO: 627438
guguuucuggagaacguga

SEQ ID NO: 627440 - RNA, 19 nt, Artificial Sequence
  Description of Artificial Sequence: Synthetic oligonucleotide
  Sense strand starting at position 2422 of SEQ ID NO: 585280
cugaccuguuucuuagaag

SEQ ID NO: 627441 - RNA, 19 nt, Artificial Sequence
  Description of Artificial Sequence: Synthetic oligonucleotide
  Antisense strand to SEQ ID NO: 627440
cuucuaagaaacaggucag

SEQ ID NO: 627442 - RNA, 19 nt, Artificial Sequence
  Description of Artificial Sequence: Synthetic oligonucleotide
  Sense strand starting at position 2436 of SEQ ID NO: 585280
agaagcaguaggugaaauu

SEQ ID NO: 627443 - RNA, 19 nt, Artificial Sequence
  Description of Artificial Sequence: Synthetic oligonucleotide
  Antisense strand to SEQ ID NO: 627442
aauuucaccuacugcuucu

SEQ ID NO: 627444 - RNA, 19 nt, Artificial Sequence
  Description of Artificial Sequence: Synthetic oligonucleotide
  Sense strand starting at position 2492 of SEQ ID NO: 585280
gcaacauucuucucaagga

SEQ ID NO: 627445 - RNA, 19 nt, Artificial Sequence
  Description of Artificial Sequence: Synthetic oligonucleotide
  Antisense strand to SEQ ID NO: 627444
uccuugagaagaauguugc

SEQ ID NO: 627446 - RNA, 19 nt, Artificial Sequence
  Description of Artificial Sequence: Synthetic oligonucleotide
  Sense strand starting at position 2516 of SEQ ID NO: 585280
ggcugaggccaagagaauu

SEQ ID NO: 627447 - RNA, 19 nt, Artificial Sequence
  Description of Artificial Sequence: Synthetic oligonucleotide
  Antisense strand to SEQ ID NO: 627446
aauucucuuggccucagcc

SEQ ID NO: 627448 - RNA, 19 nt, Artificial Sequence
  Description of Artificial Sequence: Synthetic oligonucleotide
  Sense strand starting at position 2885 of SEQ ID NO: 585280
uguaaaucggguuaugaug

SEQ ID NO: 627449 - RNA, 19 nt, Artificial Sequence
  Description of Artificial Sequence: Synthetic oligonucleotide
  Antisense strand to SEQ ID NO: 627448
caucauaacccgauuuaca

SEQ ID NO: 627450 - RNA, 19 nt, Artificial Sequence
  Description of Artificial Sequence: Synthetic oligonucleotide
  Sense strand starting at position 2930 of SEQ ID NO: 585280
augugaacgaggcaugaga

SEQ ID NO: 627451 - RNA, 19 nt, Artificial Sequence
  Description of Artificial Sequence: Synthetic oligonucleotide
  Antisense strand to SEQ ID NO: 627450
ucucaugccucguucacau

SEQ ID NO: 627452 - RNA, 19 nt, Artificial Sequence
  Description of Artificial Sequence: Synthetic oligonucleotide
  Sense strand starting at position 3028 of SEQ ID NO: 585280
uugggauauuguccugaac

SEQ ID NO: 627453 - RNA, 19 nt, Artificial Sequence
  Description of Artificial Sequence: Synthetic oligonucleotide
  Antisense strand to SEQ ID NO: 627452
guucaggacaauaucccaa

SEQ ID NO: 627454 - RNA, 19 nt, Artificial Sequence
  Description of Artificial Sequence: Synthetic oligonucleotide
  Sense strand starting at position 3031 of SEQ ID NO: 585280
ggauauuguccugaacucu

SEQ ID NO: 627455 - RNA, 19 nt, Artificial Sequence
  Description of Artificial Sequence: Synthetic oligonucleotide
  Antisense strand to SEQ ID NO: 627454
agaguucaggacaauaucc

SEQ ID NO: 627456 - RNA, 19 nt, Artificial Sequence
  Description of Artificial Sequence: Synthetic oligonucleotide
  Sense strand starting at position 3095 of SEQ ID NO: 585280
auguauguauuaguaagga

SEQ ID NO: 627457 - RNA, 19 nt, Artificial Sequence
  Description of Artificial Sequence: Synthetic oligonucleotide
  Antisense strand to SEQ ID NO: 627456
uccuuacuaauacauacau

SEQ ID NO: 627458 - RNA, 19 nt, Artificial Sequence
  Description of Artificial Sequence: Synthetic oligonucleotide
  Sense strand starting at position 3100 of SEQ ID NO: 585280
uguauuaguaaggauuguu

SEQ ID NO: 627459 - RNA, 19 nt, Artificial Sequence
  Description of Artificial Sequence: Synthetic oligonucleotide
  Antisense strand to SEQ ID NO: 627458
aacaauccuuacuaauaca

SEQ ID NO: 627460 - RNA, 19 nt, Artificial Sequence
  Description of Artificial Sequence: Synthetic oligonucleotide
  Sense strand starting at position 3145 of SEQ ID NO: 585280
guacaagguguugacagau

SEQ ID NO: 627461 - RNA, 19 nt, Artificial Sequence
  Description of Artificial Sequence: Synthetic oligonucleotide
  Antisense strand to SEQ ID NO: 627460
aucugucaacaccuuguac

SEQ ID NO: 627462 - RNA, 19 nt, Artificial Sequence
  Description of Artificial Sequence: Synthetic oligonucleotide
  Sense strand starting at position 3247 of SEQ ID NO: 585280
agcauucgugcuuuccuau

SEQ ID NO: 627463 - RNA, 19 nt, Artificial Sequence
  Description of Artificial Sequence: Synthetic oligonucleotide
  Antisense strand to SEQ ID NO: 627462
auaggaaagcacgaaugcu

SEQ ID NO: 627464 - RNA, 19 nt, Artificial Sequence
  Description of Artificial Sequence: Synthetic oligonucleotide
  Sense strand starting at position 3248 of SEQ ID NO: 585280
gcauucgugcuuuccuaua

SEQ ID NO: 627465 - RNA, 19 nt, Artificial Sequence
  Description of Artificial Sequence: Synthetic oligonucleotide
  Antisense strand to SEQ ID NO: 627464
uauaggaaagcacgaaugc

SEQ ID NO: 627466 - RNA, 19 nt, Artificial Sequence
  Description of Artificial Sequence: Synthetic oligonucleotide
  Sense strand starting at position 3411 of SEQ ID NO: 585280
uugacuucuuucucugaga

SEQ ID NO: 627467 - RNA, 19 nt, Artificial Sequence
  Description of Artificial Sequence: Synthetic oligonucleotide
  Antisense strand to SEQ ID NO: 627466
ucucagagaaagaagucaa

SEQ ID NO: 627468 - RNA, 19 nt, Artificial Sequence
  Description of Artificial Sequence: Synthetic oligonucleotide
  Sense strand starting at position 3412 of SEQ ID NO: 585280
ugacuucuuucucugagaa

SEQ ID NO: 627469 - RNA, 19 nt, Artificial Sequence
  Description of Artificial Sequence: Synthetic oligonucleotide
  Antisense strand to SEQ ID NO: 627468
uucucagagaaagaaguca

SEQ ID NO: 627470 - RNA, 19 nt, Artificial Sequence
  Description of Artificial Sequence: Synthetic oligonucleotide
  Sense strand starting at position 3424 of SEQ ID NO: 585280
cugagaaucuuagccaucu

SEQ ID NO: 627471 - RNA, 19 nt, Artificial Sequence
  Description of Artificial Sequence: Synthetic oligonucleotide
  Antisense strand to SEQ ID NO: 627470
agauggcuaagauucucag

SEQ ID NO: 627472 - RNA, 19 nt, Artificial Sequence
  Description of Artificial Sequence: Synthetic oligonucleotide
  Sense strand starting at position 3425 of SEQ ID NO: 585280
ugagaaucuuagccaucuc

SEQ ID NO: 627473 - RNA, 19 nt, Artificial Sequence
  Description of Artificial Sequence: Synthetic oligonucleotide
  Antisense strand to SEQ ID NO: 627472
gagauggcuaagauucuca

SEQ ID NO: 627474 - RNA, 19 nt, Artificial Sequence
  Description of Artificial Sequence: Synthetic oligonucleotide
  Sense strand starting at position 38 of SEQ ID NO: 585281
uuaguauucuuacugauca

SEQ ID NO: 627475 - RNA, 19 nt, Artificial Sequence
  Description of Artificial Sequence: Synthetic oligonucleotide
  Antisense strand to SEQ ID NO: 627474
ugaucaguaagaauacuaa

SEQ ID NO: 627476 - RNA, 19 nt, Artificial Sequence
  Description of Artificial Sequence: Synthetic oligonucleotide
  Sense strand starting at position 85 of SEQ ID NO: 585281
uacuuuggaccaugguauu

SEQ ID NO: 627477 - RNA, 19 nt, Artificial Sequence
  Description of Artificial Sequence: Synthetic oligonucleotide
  Antisense strand to SEQ ID NO: 627476
aauaccaugguccaaagua

SEQ ID NO: 627478 - RNA, 19 nt, Artificial Sequence
  Description of Artificial Sequence: Synthetic oligonucleotide
  Sense strand starting at position 239 of SEQ ID NO: 585281
guguccuauaaugaaaggu

SEQ ID NO: 627479 - RNA, 19 nt, Artificial Sequence
  Description of Artificial Sequence: Synthetic oligonucleotide
  Antisense strand to SEQ ID NO: 627478
accuuucauuauaggacac

SEQ ID NO: 627480 - RNA, 19 nt, Artificial Sequence
  Description of Artificial Sequence: Synthetic oligonucleotide
  Sense strand starting at position 255 of SEQ ID NO: 585281
gguuguaaacauuauguuu

SEQ ID NO: 627481 - RNA, 19 nt, Artificial Sequence
  Description of Artificial Sequence: Synthetic oligonucleotide
  Antisense strand to SEQ ID NO: 627480
aaacauaauguuuacaacc

SEQ ID NO: 627482 - RNA, 19 nt, Artificial Sequence
  Description of Artificial Sequence: Synthetic oligonucleotide
  Sense strand starting at position 336 of SEQ ID NO: 585281
ucccaaugaguucggaauu

SEQ ID NO: 627483 - RNA, 19 nt, Artificial Sequence
  Description of Artificial Sequence: Synthetic oligonucleotide
  Antisense strand to SEQ ID NO: 627482
aauuccgaacucauuggga

SEQ ID NO: 627484 - RNA, 19 nt, Artificial Sequence
  Description of Artificial Sequence: Synthetic oligonucleotide
  Sense strand starting at position 347 of SEQ ID NO: 585281
ucggaauuacuaggauugu

SEQ ID NO: 627485 - RNA, 19 nt, Artificial Sequence
  Description of Artificial Sequence: Synthetic oligonucleotide
  Antisense strand to SEQ ID NO: 627484
acaauccuaguaauuccga

SEQ ID NO: 627486 - RNA, 19 nt, Artificial Sequence
  Description of Artificial Sequence: Synthetic oligonucleotide
  Sense strand starting at position 351 of SEQ ID NO: 585281
aauuacuaggauugugcaa

SEQ ID NO: 627487 - RNA, 19 nt, Artificial Sequence
  Description of Artificial Sequence: Synthetic oligonucleotide
  Antisense strand to SEQ ID NO: 627486
uugcacaauccuaguaauu

SEQ ID NO: 627488 - RNA, 19 nt, Artificial Sequence
  Description of Artificial Sequence: Synthetic oligonucleotide
  Sense strand starting at position 430 of SEQ ID NO: 585281
aauggacugucaccagauu

SEQ ID NO: 627489 - RNA, 19 nt, Artificial Sequence
  Description of Artificial Sequence: Synthetic oligonucleotide
  Antisense strand to SEQ ID NO: 627488
aaucuggugacaguccauu

SEQ ID NO: 627490 - RNA, 19 nt, Artificial Sequence
  Description of Artificial Sequence: Synthetic oligonucleotide
  Sense strand starting at position 497 of SEQ ID NO: 585281
ccggucucucaauaauaug

SEQ ID NO: 627491 - RNA, 19 nt, Artificial Sequence
  Description of Artificial Sequence: Synthetic oligonucleotide
  Antisense strand to SEQ ID NO: 627490
cauauuauugagagaccgg

SEQ ID NO: 627492 - RNA, 19 nt, Artificial Sequence
  Description of Artificial Sequence: Synthetic oligonucleotide
  Sense strand starting at position 1007 of SEQ ID NO: 585281
augagagcuugucccuaaa

SEQ ID NO: 627493 - RNA, 19 nt, Artificial Sequence
  Description of Artificial Sequence: Synthetic oligonucleotide
  Antisense strand to SEQ ID NO: 627492
uuuagggacaagcucucau

SEQ ID NO: 627494 - RNA, 19 nt, Artificial Sequence
  Description of Artificial Sequence: Synthetic oligonucleotide
  Sense strand starting at position 1009 of SEQ ID NO: 585281
gagagcuugucccuaaaga

SEQ ID NO: 627495 - RNA, 19 nt, Artificial Sequence
  Description of Artificial Sequence: Synthetic oligonucleotide
  Antisense strand to SEQ ID NO: 627494
ucuuuagggacaagcucuc

SEQ ID NO: 627496 - RNA, 19 nt, Artificial Sequence
  Description of Artificial Sequence: Synthetic oligonucleotide
  Sense strand starting at position 1010 of SEQ ID NO: 585281
agagcuugucccuaaagau

SEQ ID NO: 627497 - RNA, 19 nt, Artificial Sequence
  Description of Artificial Sequence: Synthetic oligonucleotide
  Antisense strand to SEQ ID NO: 627496
aucuuuagggacaagcucu

SEQ ID NO: 627498 - RNA, 19 nt, Artificial Sequence
  Description of Artificial Sequence: Synthetic oligonucleotide
  Sense strand starting at position 1101 of SEQ ID NO: 585281
uucgguuaaguccaaagua

SEQ ID NO: 627499 - RNA, 19 nt, Artificial Sequence
  Description of Artificial Sequence: Synthetic oligonucleotide
  Antisense strand to SEQ ID NO: 627498
uacuuuggacuuaaccgaa

SEQ ID NO: 627500 - RNA, 19 nt, Artificial Sequence
  Description of Artificial Sequence: Synthetic oligonucleotide
  Sense strand starting at position 1344 of SEQ ID NO: 585281
ucggauucuugaucucaag

SEQ ID NO: 627501 - RNA, 19 nt, Artificial Sequence
  Description of Artificial Sequence: Synthetic oligonucleotide
  Antisense strand to SEQ ID NO: 627500
cuugagaucaagaauccga

SEQ ID NO: 627502 - RNA, 19 nt, Artificial Sequence
  Description of Artificial Sequence: Synthetic oligonucleotide
  Sense strand starting at position 2076 of SEQ ID NO: 585281
acaugaguuggcgcgguuu

SEQ ID NO: 627503 - RNA, 19 nt, Artificial Sequence
  Description of Artificial Sequence: Synthetic oligonucleotide
  Antisense strand to SEQ ID NO: 627502
aaaccgcgccaacucaugu

SEQ ID NO: 627504 - RNA, 19 nt, Artificial Sequence
  Description of Artificial Sequence: Synthetic oligonucleotide
  Sense strand starting at position 2224 of SEQ ID NO: 585281
cgcuguauuccugucagcu

SEQ ID NO: 627505 - RNA, 19 nt, Artificial Sequence
  Description of Artificial Sequence: Synthetic oligonucleotide
  Antisense strand to SEQ ID NO: 627504
agcugacaggaauacagcg

SEQ ID NO: 627506 - RNA, 19 nt, Artificial Sequence
  Description of Artificial Sequence: Synthetic oligonucleotide
  Sense strand starting at position 2225 of SEQ ID NO: 585281
gcuguauuccugucagcuu

SEQ ID NO: 627507 - RNA, 19 nt, Artificial Sequence
  Description of Artificial Sequence: Synthetic oligonucleotide
  Antisense strand to SEQ ID NO: 627506
aagcugacaggaauacagc

SEQ ID NO: 627508 - RNA, 19 nt, Artificial Sequence
  Description of Artificial Sequence: Synthetic oligonucleotide
  Sense strand starting at position 2338 of SEQ ID NO: 585281
auguuuaaaggaggucaga

SEQ ID NO: 627509 - RNA, 19 nt, Artificial Sequence
  Description of Artificial Sequence: Synthetic oligonucleotide
  Antisense strand to SEQ ID NO: 627508
ucugaccuccuuuaaacau

SEQ ID NO: 627510 - RNA, 19 nt, Artificial Sequence
  Description of Artificial Sequence: Synthetic oligonucleotide
  Sense strand starting at position 2349 of SEQ ID NO: 585281
aggucagauuuauagguca

SEQ ID NO: 627511 - RNA, 19 nt, Artificial Sequence
  Description of Artificial Sequence: Synthetic oligonucleotide
  Antisense strand to SEQ ID NO: 627510
ugaccuauaaaucugaccu

SEQ ID NO: 627512 - RNA, 19 nt, Artificial Sequence
  Description of Artificial Sequence: Synthetic oligonucleotide
  Sense strand starting at position 2752 of SEQ ID NO: 585281
uugcuacagcuuuagagaa

SEQ ID NO: 627513 - RNA, 19 nt, Artificial Sequence
  Description of Artificial Sequence: Synthetic oligonucleotide
  Antisense strand to SEQ ID NO: 627512
uucucuaaagcuguagcaa

SEQ ID NO: 627514 - RNA, 19 nt, Artificial Sequence
  Description of Artificial Sequence: Synthetic oligonucleotide
  Sense strand starting at position 2815 of SEQ ID NO: 585281
gcuaauacuugauuaaggu

SEQ ID NO: 627515 - RNA, 19 nt, Artificial Sequence
  Description of Artificial Sequence: Synthetic oligonucleotide
  Antisense strand to SEQ ID NO: 627514
accuuaaucaaguauuagc

SEQ ID NO: 627516 - RNA, 19 nt, Artificial Sequence
  Description of Artificial Sequence: Synthetic oligonucleotide
  Sense strand starting at position 2871 of SEQ ID NO: 585281
uugugauaagauuauuggu

SEQ ID NO: 627517 - RNA, 19 nt, Artificial Sequence
  Description of Artificial Sequence: Synthetic oligonucleotide
  Antisense strand to SEQ ID NO: 627516
accaauaaucuuaucacaa

SEQ ID NO: 627518 - RNA, 19 nt, Artificial Sequence
  Description of Artificial Sequence: Synthetic oligonucleotide
  Sense strand starting at position 2873 of SEQ ID NO: 585281
gugauaagauuauuggugu

SEQ ID NO: 627519 - RNA, 19 nt, Artificial Sequence
  Description of Artificial Sequence: Synthetic oligonucleotide
  Antisense strand to SEQ ID NO: 627518
acaccaauaaucuuaucac

SEQ ID NO: 627520 - RNA, 19 nt, Artificial Sequence
  Description of Artificial Sequence: Synthetic oligonucleotide
  Sense strand starting at position 2931 of SEQ ID NO: 585281
cagaauugggucugaaugu

SEQ ID NO: 627521 - RNA, 19 nt, Artificial Sequence
  Description of Artificial Sequence: Synthetic oligonucleotide
  Antisense strand to SEQ ID NO: 627520
acauucagacccaauucug

SEQ ID NO: 627522 - RNA, 19 nt, Artificial Sequence
  Description of Artificial Sequence: Synthetic oligonucleotide
  Sense strand starting at position 2942 of SEQ ID NO: 585281
cugaaugugguuugaagaa

SEQ ID NO: 627523 - RNA, 19 nt, Artificial Sequence
  Description of Artificial Sequence: Synthetic oligonucleotide
  Antisense strand to SEQ ID NO: 627522
uucuucaaaccacauucag

SEQ ID NO: 627524 - RNA, 19 nt, Artificial Sequence
  Description of Artificial Sequence: Synthetic oligonucleotide
  Sense strand starting at position 3082 of SEQ ID NO: 585281
augaauuucuauugggaau

SEQ ID NO: 627525 - RNA, 19 nt, Artificial Sequence
  Description of Artificial Sequence: Synthetic oligonucleotide
  Antisense strand to SEQ ID NO: 627524
auucccaauagaaauucau

SEQ ID NO: 627526 - RNA, 19 nt, Artificial Sequence
  Description of Artificial Sequence: Synthetic oligonucleotide
  Sense strand starting at position 3117 of SEQ ID NO: 585281
uggccugugagagacauua

SEQ ID NO: 627527 - RNA, 19 nt, Artificial Sequence
  Description of Artificial Sequence: Synthetic oligonucleotide
  Antisense strand to SEQ ID NO: 627526
uaaugucucucacaggcca

SEQ ID NO: 627528 - RNA, 19 nt, Artificial Sequence
  Description of Artificial Sequence: Synthetic oligonucleotide
  Sense strand starting at position 3119 of SEQ ID NO: 585281
gccugugagagacauuaua

SEQ ID NO: 627529 - RNA, 19 nt, Artificial Sequence
  Description of Artificial Sequence: Synthetic oligonucleotide
  Antisense strand to SEQ ID NO: 627528
uauaaugucucucacaggc

SEQ ID NO: 627530 - RNA, 19 nt, Artificial Sequence
  Description of Artificial Sequence: Synthetic oligonucleotide
  Sense strand starting at position 3145 of SEQ ID NO: 585281
cucagacuugcucacauga

SEQ ID NO: 627531 - RNA, 19 nt, Artificial Sequence
  Description of Artificial Sequence: Synthetic oligonucleotide
  Antisense strand to SEQ ID NO: 627530
ucaugugagcaagucugag

SEQ ID NO: 627532 - RNA, 19 nt, Artificial Sequence
  Description of Artificial Sequence: Synthetic oligonucleotide
  Sense strand starting at position 3203 of SEQ ID NO: 585281
aggccagaaugcucuacau

SEQ ID NO: 627533 - RNA, 19 nt, Artificial Sequence
  Description of Artificial Sequence: Synthetic oligonucleotide
  Antisense strand to SEQ ID NO: 627532
auguagagcauucuggccu

SEQ ID NO: 627534 - RNA, 19 nt, Artificial Sequence
  Description of Artificial Sequence: Synthetic oligonucleotide
  Sense strand starting at position 3272 of SEQ ID NO: 585281
caaauugaguucuuagguu

SEQ ID NO: 627535 - RNA, 19 nt, Artificial Sequence
  Description of Artificial Sequence: Synthetic oligonucleotide
  Antisense strand to SEQ ID NO: 627534
aaccuaagaacucaauuug

SEQ ID NO: 627536 - RNA, 19 nt, Artificial Sequence
  Description of Artificial Sequence: Synthetic oligonucleotide
  Sense strand starting at position 3492 of SEQ ID NO: 585281
ugugaacuacccuggaaca

SEQ ID NO: 627537 - RNA, 19 nt, Artificial Sequence
  Description of Artificial Sequence: Synthetic oligonucleotide
  Antisense strand to SEQ ID NO: 627536
uguuccaggguaguucaca

SEQ ID NO: 627538 - RNA, 19 nt, Artificial Sequence
  Description of Artificial Sequence: Synthetic oligonucleotide
  Sense strand starting at position 3551 of SEQ ID NO: 585281
ggaugccuuuccuuuauuu

SEQ ID NO: 627539 - RNA, 19 nt, Artificial Sequence
  Description of Artificial Sequence: Synthetic oligonucleotide
  Antisense strand to SEQ ID NO: 627538
aaauaaaggaaaggcaucc

SEQ ID NO: 627540 - RNA, 19 nt, Artificial Sequence
  Description of Artificial Sequence: Synthetic oligonucleotide
  Sense strand starting at position 3705 of SEQ ID NO: 585281
uuuaaaggaucuguacaug

SEQ ID NO: 627541 - RNA, 19 nt, Artificial Sequence
  Description of Artificial Sequence: Synthetic oligonucleotide
  Antisense strand to SEQ ID NO: 627540
cauguacagauccuuuaaa

SEQ ID NO: 627542 - RNA, 19 nt, Artificial Sequence
  Description of Artificial Sequence: Synthetic oligonucleotide
  Sense strand starting at position 3710 of SEQ ID NO: 585281
aggaucuguacauguagau

SEQ ID NO: 627543 - RNA, 19 nt, Artificial Sequence
  Description of Artificial Sequence: Synthetic oligonucleotide
  Antisense strand to SEQ ID NO: 627542
aucuacauguacagauccu

SEQ ID NO: 627544 - RNA, 19 nt, Artificial Sequence
  Description of Artificial Sequence: Synthetic oligonucleotide
  Sense strand starting at position 3714 of SEQ ID NO: 585281
ucuguacauguagauauau

SEQ ID NO: 627545 - RNA, 19 nt, Artificial Sequence
  Description of Artificial Sequence: Synthetic oligonucleotide
  Antisense strand to SEQ ID NO: 627544
auauaucuacauguacaga

SEQ ID NO: 627546 - RNA, 19 nt, Artificial Sequence
  Description of Artificial Sequence: Synthetic oligonucleotide
  Sense strand starting at position 3778 of SEQ ID NO: 585281
ucaaucuuaugguuaggga

SEQ ID NO: 627547 - RNA, 19 nt, Artificial Sequence
  Description of Artificial Sequence: Synthetic oligonucleotide
  Antisense strand to SEQ ID NO: 627546
ucccuaaccauaagauuga

SEQ ID NO: 627548 - RNA, 19 nt, Artificial Sequence
  Description of Artificial Sequence: Synthetic oligonucleotide
  Sense strand starting at position 3793 of SEQ ID NO: 585281
gggagagauuaggcucacu

SEQ ID NO: 627549 - RNA, 19 nt, Artificial Sequence
  Description of Artificial Sequence: Synthetic oligonucleotide
  Antisense strand to SEQ ID NO: 627548
agugagccuaaucucuccc

SEQ ID NO: 627550 - RNA, 19 nt, Artificial Sequence
  Description of Artificial Sequence: Synthetic oligonucleotide
  Sense strand starting at position 3926 of SEQ ID NO: 585281
caaguugugguugagagga

SEQ ID NO: 627551 - RNA, 19 nt, Artificial Sequence
  Description of Artificial Sequence: Synthetic oligonucleotide
  Antisense strand to SEQ ID NO: 627550
uccucucaaccacaacuug

SEQ ID NO: 627552 - RNA, 19 nt, Artificial Sequence
  Description of Artificial Sequence: Synthetic oligonucleotide
  Sense strand starting at position 3982 of SEQ ID NO: 585281
aucagagguuaaucuauga

SEQ ID NO: 627553 - RNA, 19 nt, Artificial Sequence
  Description of Artificial Sequence: Synthetic oligonucleotide
  Antisense strand to SEQ ID NO: 627552
ucauagauuaaccucugau

SEQ ID NO: 627554 - RNA, 19 nt, Artificial Sequence
  Description of Artificial Sequence: Synthetic oligonucleotide
  Sense strand starting at position 53 of SEQ ID NO: 585282
auccauugugauuagucca

SEQ ID NO: 627555 - RNA, 19 nt, Artificial Sequence
  Description of Artificial Sequence: Synthetic oligonucleotide
  Antisense strand to SEQ ID NO: 627554
uggacuaaucacaauggau

SEQ ID NO: 627556 - RNA, 19 nt, Artificial Sequence
  Description of Artificial Sequence: Synthetic oligonucleotide
  Sense strand starting at position 260 of SEQ ID NO: 585282
cucaccuguguuggaaaua

SEQ ID NO: 627557 - RNA, 19 nt, Artificial Sequence
  Description of Artificial Sequence: Synthetic oligonucleotide
  Antisense strand to SEQ ID NO: 627556
uauuuccaacacaggugag

SEQ ID NO: 627558 - RNA, 19 nt, Artificial Sequence
  Description of Artificial Sequence: Synthetic oligonucleotide
  Sense strand starting at position 265 of SEQ ID NO: 585282
cuguguuggaaauaaugua

SEQ ID NO: 627559 - RNA, 19 nt, Artificial Sequence
  Description of Artificial Sequence: Synthetic oligonucleotide
  Antisense strand to SEQ ID NO: 627558
uacauuauuuccaacacag

SEQ ID NO: 627560 - RNA, 19 nt, Artificial Sequence
  Description of Artificial Sequence: Synthetic oligonucleotide
  Sense strand starting at position 273 of SEQ ID NO: 585282
gaaauaauguagccacaug

SEQ ID NO: 627561 - RNA, 19 nt, Artificial Sequence
  Description of Artificial Sequence: Synthetic oligonucleotide
  Antisense strand to SEQ ID NO: 627560
cauguggcuacauuauuuc

SEQ ID NO: 627562 - RNA, 19 nt, Artificial Sequence
  Description of Artificial Sequence: Synthetic oligonucleotide
  Sense strand starting at position 315 of SEQ ID NO: 585282
caggaaauguugucucuug

SEQ ID NO: 627563 - RNA, 19 nt, Artificial Sequence
  Description of Artificial Sequence: Synthetic oligonucleotide
  Antisense strand to SEQ ID NO: 627562
caagagacaacauuuccug

SEQ ID NO: 627564 - RNA, 19 nt, Artificial Sequence
  Description of Artificial Sequence: Synthetic oligonucleotide
  Sense strand starting at position 401 of SEQ ID NO: 585282
ggguuuacucaauauucuc

SEQ ID NO: 627565 - RNA, 19 nt, Artificial Sequence
  Description of Artificial Sequence: Synthetic oligonucleotide
  Antisense strand to SEQ ID NO: 627564
gagaauauugaguaaaccc

SEQ ID NO: 627566 - RNA, 19 nt, Artificial Sequence
  Description of Artificial Sequence: Synthetic oligonucleotide
  Sense strand starting at position 448 of SEQ ID NO: 585282
cgaauaauacaguggcaua

SEQ ID NO: 627567 - RNA, 19 nt, Artificial Sequence
  Description of Artificial Sequence: Synthetic oligonucleotide
  Antisense strand to SEQ ID NO: 627566
uaugccacuguauuauucg

SEQ ID NO: 627568 - RNA, 19 nt, Artificial Sequence
  Description of Artificial Sequence: Synthetic oligonucleotide
  Sense strand starting at position 480 of SEQ ID NO: 585282
gauuguaaggacuggagua

SEQ ID NO: 627569 - RNA, 19 nt, Artificial Sequence
  Description of Artificial Sequence: Synthetic oligonucleotide
  Antisense strand to SEQ ID NO: 627568
uacuccaguccuuacaauc

SEQ ID NO: 627570 - RNA, 19 nt, Artificial Sequence
  Description of Artificial Sequence: Synthetic oligonucleotide
  Sense strand starting at position 481 of SEQ ID NO: 585282
auuguaaggacuggaguaa

SEQ ID NO: 627571 - RNA, 19 nt, Artificial Sequence
  Description of Artificial Sequence: Synthetic oligonucleotide
  Antisense strand to SEQ ID NO: 627570
uuacuccaguccuuacaau

SEQ ID NO: 627572 - RNA, 19 nt, Artificial Sequence
  Description of Artificial Sequence: Synthetic oligonucleotide
  Sense strand starting at position 563 of SEQ ID NO: 585282
ggaauuuaaucaugacaac

SEQ ID NO: 627573 - RNA, 19 nt, Artificial Sequence
  Description of Artificial Sequence: Synthetic oligonucleotide
  Antisense strand to SEQ ID NO: 627572
guugucaugauuaaauucc

SEQ ID NO: 627574 - RNA, 19 nt, Artificial Sequence
  Description of Artificial Sequence: Synthetic oligonucleotide
  Sense strand starting at position 1001 of SEQ ID NO: 585282
uaacaaugccuugguagga

SEQ ID NO: 627575 - RNA, 19 nt, Artificial Sequence
  Description of Artificial Sequence: Synthetic oligonucleotide
  Antisense strand to SEQ ID NO: 627574
uccuaccaaggcauuguua

SEQ ID NO: 627576 - RNA, 19 nt, Artificial Sequence
  Description of Artificial Sequence: Synthetic oligonucleotide
  Sense strand starting at position 1002 of SEQ ID NO: 585282
aacaaugccuugguaggaa

SEQ ID NO: 627577 - RNA, 19 nt, Artificial Sequence
  Description of Artificial Sequence: Synthetic oligonucleotide
  Antisense strand to SEQ ID NO: 627576
uuccuaccaaggcauuguu

SEQ ID NO: 627578 - RNA, 19 nt, Artificial Sequence
  Description of Artificial Sequence: Synthetic oligonucleotide
  Sense strand starting at position 1142 of SEQ ID NO: 585282
uuucucugauagccaugaa

SEQ ID NO: 627579 - RNA, 19 nt, Artificial Sequence
  Description of Artificial Sequence: Synthetic oligonucleotide
  Antisense strand to SEQ ID NO: 627578
uucauggcuaucagagaaa

SEQ ID NO: 627580 - RNA, 19 nt, Artificial Sequence
  Description of Artificial Sequence: Synthetic oligonucleotide
  Sense strand starting at position 1145 of SEQ ID NO: 585282
cucugauagccaugaagaa

SEQ ID NO: 627581 - RNA, 19 nt, Artificial Sequence
  Description of Artificial Sequence: Synthetic oligonucleotide
  Antisense strand to SEQ ID NO: 627580
uucuucauggcuaucagag

SEQ ID NO: 627582 - RNA, 19 nt, Artificial Sequence
  Description of Artificial Sequence: Synthetic oligonucleotide
  Sense strand starting at position 1513 of SEQ ID NO: 585282
cucaccggccaguaagaua

SEQ ID NO: 627583 - RNA, 19 nt, Artificial Sequence
  Description of Artificial Sequence: Synthetic oligonucleotide
  Antisense strand to SEQ ID NO: 627582
uaucuuacuggccggugag

SEQ ID NO: 627584 - RNA, 19 nt, Artificial Sequence
  Description of Artificial Sequence: Synthetic oligonucleotide
  Sense strand starting at position 1518 of SEQ ID NO: 585282
cggccaguaagauaugaag

SEQ ID NO: 627585 - RNA, 19 nt, Artificial Sequence
  Description of Artificial Sequence: Synthetic oligonucleotide
  Antisense strand to SEQ ID NO: 627584
cuucauaucuuacuggccg

SEQ ID NO: 627586 - RNA, 19 nt, Artificial Sequence
  Description of Artificial Sequence: Synthetic oligonucleotide
  Sense strand starting at position 1615 of SEQ ID NO: 585282
acucuuucuccugagugga

SEQ ID NO: 627587 - RNA, 19 nt, Artificial Sequence
  Description of Artificial Sequence: Synthetic oligonucleotide
  Antisense strand to SEQ ID NO: 627586
uccacucaggagaaagagu

SEQ ID NO: 627588 - RNA, 19 nt, Artificial Sequence
  Description of Artificial Sequence: Synthetic oligonucleotide
  Sense strand starting at position 1617 of SEQ ID NO: 585282
ucuuucuccugaguggaua

SEQ ID NO: 627589 - RNA, 19 nt, Artificial Sequence
  Description of Artificial Sequence: Synthetic oligonucleotide
  Antisense strand to SEQ ID NO: 627588
uauccacucaggagaaaga

SEQ ID NO: 627590 - RNA, 19 nt, Artificial Sequence
  Description of Artificial Sequence: Synthetic oligonucleotide
  Sense strand starting at position 1668 of SEQ ID NO: 585282
uaguguacuguagagguaa

SEQ ID NO: 627591 - RNA, 19 nt, Artificial Sequence
  Description of Artificial Sequence: Synthetic oligonucleotide
  Antisense strand to SEQ ID NO: 627590
uuaccucuacaguacacua

SEQ ID NO: 627592 - RNA, 19 nt, Artificial Sequence
  Description of Artificial Sequence: Synthetic oligonucleotide
  Sense strand starting at position 1905 of SEQ ID NO: 585282
cuuggugauuccuuggaua

SEQ ID NO: 627593 - RNA, 19 nt, Artificial Sequence
  Description of Artificial Sequence: Synthetic oligonucleotide
  Antisense strand to SEQ ID NO: 627592
uauccaaggaaucaccaag

SEQ ID NO: 627594 - RNA, 19 nt, Artificial Sequence
  Description of Artificial Sequence: Synthetic oligonucleotide
  Sense strand starting at position 1907 of SEQ ID NO: 585282
uggugauuccuuggauauu

SEQ ID NO: 627595 - RNA, 19 nt, Artificial Sequence
  Description of Artificial Sequence: Synthetic oligonucleotide
  Antisense strand to SEQ ID NO: 627594
aauauccaaggaaucacca

SEQ ID NO: 627596 - RNA, 19 nt, Artificial Sequence
  Description of Artificial Sequence: Synthetic oligonucleotide
  Sense strand starting at position 2060 of SEQ ID NO: 585282
uuuauaauagcaugacgga

SEQ ID NO: 627597 - RNA, 19 nt, Artificial Sequence
  Description of Artificial Sequence: Synthetic oligonucleotide
  Antisense strand to SEQ ID NO: 627596
uccgucaugcuauuauaaa

SEQ ID NO: 627598 - RNA, 19 nt, Artificial Sequence
  Description of Artificial Sequence: Synthetic oligonucleotide
  Sense strand starting at position 2711 of SEQ ID NO: 585282
auaucuuuauugucucuga

SEQ ID NO: 627599 - RNA, 19 nt, Artificial Sequence
  Description of Artificial Sequence: Synthetic oligonucleotide
  Antisense strand to SEQ ID NO: 627598
ucagagacaauaaagauau

SEQ ID NO: 627600 - RNA, 19 nt, Artificial Sequence
  Description of Artificial Sequence: Synthetic oligonucleotide
  Sense strand starting at position 2796 of SEQ ID NO: 585282
agugcuacugagggaacua

SEQ ID NO: 627601 - RNA, 19 nt, Artificial Sequence
  Description of Artificial Sequence: Synthetic oligonucleotide
  Antisense strand to SEQ ID NO: 627600
uaguucccucaguagcacu

SEQ ID NO: 627602 - RNA, 19 nt, Artificial Sequence
  Description of Artificial Sequence: Synthetic oligonucleotide
  Sense strand starting at position 2906 of SEQ ID NO: 585282
aaaccuuguugggcugaaa

SEQ ID NO: 627603 - RNA, 19 nt, Artificial Sequence
  Description of Artificial Sequence: Synthetic oligonucleotide
  Antisense strand to SEQ ID NO: 627602
uuucagcccaacaagguuu

SEQ ID NO: 627604 - RNA, 19 nt, Artificial Sequence
  Description of Artificial Sequence: Synthetic oligonucleotide
  Sense strand starting at position 2951 of SEQ ID NO: 585282
gccuuuaaucauggacaga

SEQ ID NO: 627605 - RNA, 19 nt, Artificial Sequence
  Description of Artificial Sequence: Synthetic oligonucleotide
  Antisense strand to SEQ ID NO: 627604
ucuguccaugauuaaaggc

SEQ ID NO: 627606 - RNA, 19 nt, Artificial Sequence
  Description of Artificial Sequence: Synthetic oligonucleotide
  Sense strand starting at position 3012 of SEQ ID NO: 585282
gcaaauuggcaucauagua

SEQ ID NO: 627607 - RNA, 19 nt, Artificial Sequence
  Description of Artificial Sequence: Synthetic oligonucleotide
  Antisense strand to SEQ ID NO: 627606
uacuaugaugccaauuugc

SEQ ID NO: 627608 - RNA, 19 nt, Artificial Sequence
  Description of Artificial Sequence: Synthetic oligonucleotide
  Sense strand starting at position 3186 of SEQ ID NO: 585282
uuagaauagugucuagauu

SEQ ID NO: 627609 - RNA, 19 nt, Artificial Sequence
  Description of Artificial Sequence: Synthetic oligonucleotide
  Antisense strand to SEQ ID NO: 627608
aaucuagacacuauucuaa

SEQ ID NO: 627610 - RNA, 19 nt, Artificial Sequence
  Description of Artificial Sequence: Synthetic oligonucleotide
  Sense strand starting at position 3187 of SEQ ID NO: 585282
uagaauagugucuagauuc

SEQ ID NO: 627611 - RNA, 19 nt, Artificial Sequence
  Description of Artificial Sequence: Synthetic oligonucleotide
  Antisense strand to SEQ ID NO: 627610
gaaucuagacacuauucua

SEQ ID NO: 627612 - RNA, 19 nt, Artificial Sequence
  Description of Artificial Sequence: Synthetic oligonucleotide
  Sense strand starting at position 3299 of SEQ ID NO: 585282
gagagacaguauucuaauu

SEQ ID NO: 627613 - RNA, 19 nt, Artificial Sequence
  Description of Artificial Sequence: Synthetic oligonucleotide
  Antisense strand to SEQ ID NO: 627612
aauuagaauacugucucuc

SEQ ID NO: 627614 - RNA, 19 nt, Artificial Sequence
  Description of Artificial Sequence: Synthetic oligonucleotide
  Sense strand starting at position 3301 of SEQ ID NO: 585282
gagacaguauucuaauuug

SEQ ID NO: 627615 - RNA, 19 nt, Artificial Sequence
  Description of Artificial Sequence: Synthetic oligonucleotide
  Antisense strand to SEQ ID NO: 627614
caaauuagaauacugucuc

SEQ ID NO: 627616 - RNA, 19 nt, Artificial Sequence
  Description of Artificial Sequence: Synthetic oligonucleotide
  Sense strand starting at position 3400 of SEQ ID NO: 585282
agguccuuuggguggaaua

SEQ ID NO: 627617 - RNA, 19 nt, Artificial Sequence
  Description of Artificial Sequence: Synthetic oligonucleotide
  Antisense strand to SEQ ID NO: 627616
uauuccacccaaaggaccu

SEQ ID NO: 627618 - RNA, 19 nt, Artificial Sequence
  Description of Artificial Sequence: Synthetic oligonucleotide
  Sense strand starting at position 3401 of SEQ ID NO: 585282
gguccuuuggguggaauau

SEQ ID NO: 627619 - RNA, 19 nt, Artificial Sequence
  Description of Artificial Sequence: Synthetic oligonucleotide
  Antisense strand to SEQ ID NO: 627618
auauuccacccaaaggacc

SEQ ID NO: 627620 - RNA, 19 nt, Artificial Sequence
  Description of Artificial Sequence: Synthetic oligonucleotide
  Sense strand starting at position 3402 of SEQ ID NO: 585282
guccuuuggguggaauauu

SEQ ID NO: 627621 - RNA, 19 nt, Artificial Sequence
  Description of Artificial Sequence: Synthetic oligonucleotide
  Antisense strand to SEQ ID NO: 627620
aauauuccacccaaaggac

SEQ ID NO: 627622 - RNA, 19 nt, Artificial Sequence
  Description of Artificial Sequence: Synthetic oligonucleotide
  Sense strand starting at position 3475 of SEQ ID NO: 585282
guuuauugaguuuauggua

SEQ ID NO: 627623 - RNA, 19 nt, Artificial Sequence
  Description of Artificial Sequence: Synthetic oligonucleotide
  Antisense strand to SEQ ID NO: 627622
uaccauaaacucaauaaac

SEQ ID NO: 627624 - RNA, 19 nt, Artificial Sequence
  Description of Artificial Sequence: Synthetic oligonucleotide
  Sense strand starting at position 3501 of SEQ ID NO: 585282
aagauugcagaguaagguu

SEQ ID NO: 627625 - RNA, 19 nt, Artificial Sequence
  Description of Artificial Sequence: Synthetic oligonucleotide
  Antisense strand to SEQ ID NO: 627624
aaccuuacucugcaaucuu

SEQ ID NO: 627626 - RNA, 19 nt, Artificial Sequence
  Description of Artificial Sequence: Synthetic oligonucleotide
  Sense strand starting at position 3636 of SEQ ID NO: 585282
uguguaugaacucaggcaa

SEQ ID NO: 627627 - RNA, 19 nt, Artificial Sequence
  Description of Artificial Sequence: Synthetic oligonucleotide
  Antisense strand to SEQ ID NO: 627626
uugccugaguucauacaca

SEQ ID NO: 627628 - RNA, 19 nt, Artificial Sequence
  Description of Artificial Sequence: Synthetic oligonucleotide
  Sense strand starting at position 3650 of SEQ ID NO: 585282
ggcaacaaacaguguaauu

SEQ ID NO: 627629 - RNA, 19 nt, Artificial Sequence
  Description of Artificial Sequence: Synthetic oligonucleotide
  Antisense strand to SEQ ID NO: 627628
aauuacacuguuuguugcc

SEQ ID NO: 627630 - RNA, 19 nt, Artificial Sequence
  Description of Artificial Sequence: Synthetic oligonucleotide
  Sense strand starting at position 3661 of SEQ ID NO: 585282
guguaauuggcaggacaag

SEQ ID NO: 627631 - RNA, 19 nt, Artificial Sequence
  Description of Artificial Sequence: Synthetic oligonucleotide
  Antisense strand to SEQ ID NO: 627630
cuuguccugccaauuacac

SEQ ID NO: 627632 - RNA, 19 nt, Artificial Sequence
  Description of Artificial Sequence: Synthetic oligonucleotide
  Sense strand starting at position 3662 of SEQ ID NO: 585282
uguaauuggcaggacaagu

SEQ ID NO: 627633 - RNA, 19 nt, Artificial Sequence
  Description of Artificial Sequence: Synthetic oligonucleotide
  Antisense strand to SEQ ID NO: 627632
acuuguccugccaauuaca

SEQ ID NO: 627634 - RNA, 19 nt, Artificial Sequence
  Description of Artificial Sequence: Synthetic oligonucleotide
  Sense strand starting at position 218 of SEQ ID NO: 585283
gacaucauguguuucugau

SEQ ID NO: 627635 - RNA, 19 nt, Artificial Sequence
  Description of Artificial Sequence: Synthetic oligonucleotide
  Antisense strand to SEQ ID NO: 627634
aucagaaacacaugauguc

SEQ ID NO: 627636 - RNA, 19 nt, Artificial Sequence
  Description of Artificial Sequence: Synthetic oligonucleotide
  Sense strand starting at position 240 of SEQ ID NO: 585283
guguacuauguacauuaca

SEQ ID NO: 627637 - RNA, 19 nt, Artificial Sequence
  Description of Artificial Sequence: Synthetic oligonucleotide
  Antisense strand to SEQ ID NO: 627636
uguaauguacauaguacac

SEQ ID NO: 627638 - RNA, 19 nt, Artificial Sequence
  Description of Artificial Sequence: Synthetic oligonucleotide
  Sense strand starting at position 297 of SEQ ID NO: 585283
caauuaaguguaugaaagu

SEQ ID NO: 627639 - RNA, 19 nt, Artificial Sequence
  Description of Artificial Sequence: Synthetic oligonucleotide
  Antisense strand to SEQ ID NO: 627638
acuuucauacacuuaauug

SEQ ID NO: 627640 - RNA, 19 nt, Artificial Sequence
  Description of Artificial Sequence: Synthetic oligonucleotide
  Sense strand starting at position 306 of SEQ ID NO: 585283
guaugaaagucacuuguac

SEQ ID NO: 627641 - RNA, 19 nt, Artificial Sequence
  Description of Artificial Sequence: Synthetic oligonucleotide
  Antisense strand to SEQ ID NO: 627640
guacaagugacuuucauac

SEQ ID NO: 627642 - RNA, 19 nt, Artificial Sequence
  Description of Artificial Sequence: Synthetic oligonucleotide
  Sense strand starting at position 411 of SEQ ID NO: 585283
uaagucuggucuccgagaa

SEQ ID NO: 627643 - RNA, 19 nt, Artificial Sequence
  Description of Artificial Sequence: Synthetic oligonucleotide
  Antisense strand to SEQ ID NO: 627642
uucucggagaccagacuua

SEQ ID NO: 627644 - RNA, 19 nt, Artificial Sequence
  Description of Artificial Sequence: Synthetic oligonucleotide
  Sense strand starting at position 412 of SEQ ID NO: 585283
aagucuggucuccgagaaa

SEQ ID NO: 627645 - RNA, 19 nt, Artificial Sequence
  Description of Artificial Sequence: Synthetic oligonucleotide
  Antisense strand to SEQ ID NO: 627644
uuucucggagaccagacuu

SEQ ID NO: 627646 - RNA, 19 nt, Artificial Sequence
  Description of Artificial Sequence: Synthetic oligonucleotide
  Sense strand starting at position 415 of SEQ ID NO: 585283
ucuggucuccgagaaauca

SEQ ID NO: 627647 - RNA, 19 nt, Artificial Sequence
  Description of Artificial Sequence: Synthetic oligonucleotide
  Antisense strand to SEQ ID NO: 627646
ugauuucucggagaccaga

SEQ ID NO: 627648 - RNA, 19 nt, Artificial Sequence
  Description of Artificial Sequence: Synthetic oligonucleotide
  Sense strand starting at position 499 of SEQ ID NO: 585283
gaaguuauggcuggauccu

SEQ ID NO: 627649 - RNA, 19 nt, Artificial Sequence
  Description of Artificial Sequence: Synthetic oligonucleotide
  Antisense strand to SEQ ID NO: 627648
aggauccagccauaacuuc

SEQ ID NO: 627650 - RNA, 19 nt, Artificial Sequence
  Description of Artificial Sequence: Synthetic oligonucleotide
  Sense strand starting at position 500 of SEQ ID NO: 585283
aaguuauggcuggauccuu

SEQ ID NO: 627651 - RNA, 19 nt, Artificial Sequence
  Description of Artificial Sequence: Synthetic oligonucleotide
  Antisense strand to SEQ ID NO: 627650
aaggauccagccauaacuu

SEQ ID NO: 627652 - RNA, 19 nt, Artificial Sequence
  Description of Artificial Sequence: Synthetic oligonucleotide
  Sense strand starting at position 505 of SEQ ID NO: 585283
auggcuggauccuucuuua

SEQ ID NO: 627653 - RNA, 19 nt, Artificial Sequence
  Description of Artificial Sequence: Synthetic oligonucleotide
  Antisense strand to SEQ ID NO: 627652
uaaagaaggauccagccau

SEQ ID NO: 627654 - RNA, 19 nt, Artificial Sequence
  Description of Artificial Sequence: Synthetic oligonucleotide
  Sense strand starting at position 508 of SEQ ID NO: 585283
gcuggauccuucuuuaaac

SEQ ID NO: 627655 - RNA, 19 nt, Artificial Sequence
  Description of Artificial Sequence: Synthetic oligonucleotide
  Antisense strand to SEQ ID NO: 627654
guuuaaagaaggauccagc

SEQ ID NO: 627656 - RNA, 19 nt, Artificial Sequence
  Description of Artificial Sequence: Synthetic oligonucleotide
  Sense strand starting at position 866 of SEQ ID NO: 585283
cgcaaucaugauggaugaa

SEQ ID NO: 627657 - RNA, 19 nt, Artificial Sequence
  Description of Artificial Sequence: Synthetic oligonucleotide
  Antisense strand to SEQ ID NO: 627656
uucauccaucaugauugcg

SEQ ID NO: 627658 - RNA, 19 nt, Artificial Sequence
  Description of Artificial Sequence: Synthetic oligonucleotide
  Sense strand starting at position 943 of SEQ ID NO: 585283
gcaggaacaugaguuccua

SEQ ID NO: 627659 - RNA, 19 nt, Artificial Sequence
  Description of Artificial Sequence: Synthetic oligonucleotide
  Antisense strand to SEQ ID NO: 627658
uaggaacucauguuccugc

SEQ ID NO: 627660 - RNA, 19 nt, Artificial Sequence
  Description of Artificial Sequence: Synthetic oligonucleotide
  Sense strand starting at position 1078 of SEQ ID NO: 585283
ggacaacuggguuggcuua

SEQ ID NO: 627661 - RNA, 19 nt, Artificial Sequence
  Description of Artificial Sequence: Synthetic oligonucleotide
  Antisense strand to SEQ ID NO: 627660
uaagccaacccaguugucc

SEQ ID NO: 627662 - RNA, 19 nt, Artificial Sequence
  Description of Artificial Sequence: Synthetic oligonucleotide
  Sense strand starting at position 1106 of SEQ ID NO: 585283
cgaaaugaaugcuugcaac

SEQ ID NO: 627663 - RNA, 19 nt, Artificial Sequence
  Description of Artificial Sequence: Synthetic oligonucleotide
  Antisense strand to SEQ ID NO: 627662
guugcaagcauucauuucg

SEQ ID NO: 627664 - RNA, 19 nt, Artificial Sequence
  Description of Artificial Sequence: Synthetic oligonucleotide
  Sense strand starting at position 1129 of SEQ ID NO: 585283
ccuugcgugagcuuaucua

SEQ ID NO: 627665 - RNA, 19 nt, Artificial Sequence
  Description of Artificial Sequence: Synthetic oligonucleotide
  Antisense strand to SEQ ID NO: 627664
uagauaagcucacgcaagg

SEQ ID NO: 627666 - RNA, 19 nt, Artificial Sequence
  Description of Artificial Sequence: Synthetic oligonucleotide
  Sense strand starting at position 1499 of SEQ ID NO: 585283
aaauguaauuuggaacgaa

SEQ ID NO: 627667 - RNA, 19 nt, Artificial Sequence
  Description of Artificial Sequence: Synthetic oligonucleotide
  Antisense strand to SEQ ID NO: 627666
uucguuccaaauuacauuu

SEQ ID NO: 627668 - RNA, 19 nt, Artificial Sequence
  Description of Artificial Sequence: Synthetic oligonucleotide
  Sense strand starting at position 2049 of SEQ ID NO: 585283
acgguaguauucuuauaug

SEQ ID NO: 627669 - RNA, 19 nt, Artificial Sequence
  Description of Artificial Sequence: Synthetic oligonucleotide
  Antisense strand to SEQ ID NO: 627668
cauauaagaauacuaccgu

SEQ ID NO: 627670 - RNA, 19 nt, Artificial Sequence
  Description of Artificial Sequence: Synthetic oligonucleotide
  Sense strand starting at position 2058 of SEQ ID NO: 585283
uucuuauaugccgggaauu

SEQ ID NO: 627671 - RNA, 19 nt, Artificial Sequence
  Description of Artificial Sequence: Synthetic oligonucleotide
  Antisense strand to SEQ ID NO: 627670
aauucccggcauauaagaa

SEQ ID NO: 627672 - RNA, 19 nt, Artificial Sequence
  Description of Artificial Sequence: Synthetic oligonucleotide
  Sense strand starting at position 2059 of SEQ ID NO: 585283
ucuuauaugccgggaauuc

SEQ ID NO: 627673 - RNA, 19 nt, Artificial Sequence
  Description of Artificial Sequence: Synthetic oligonucleotide
  Antisense strand to SEQ ID NO: 627672
gaauucccggcauauaaga

SEQ ID NO: 627674 - RNA, 19 nt, Artificial Sequence
  Description of Artificial Sequence: Synthetic oligonucleotide
  Sense strand starting at position 2209 of SEQ ID NO: 585283
gagucaucucugcaagucu

SEQ ID NO: 627675 - RNA, 19 nt, Artificial Sequence
  Description of Artificial Sequence: Synthetic oligonucleotide
  Antisense strand to SEQ ID NO: 627674
agacuugcagagaugacuc

SEQ ID NO: 627676 - RNA, 19 nt, Artificial Sequence
  Description of Artificial Sequence: Synthetic oligonucleotide
  Sense strand starting at position 2220 of SEQ ID NO: 585283
gcaagucuugcguucccaa

SEQ ID NO: 627677 - RNA, 19 nt, Artificial Sequence
  Description of Artificial Sequence: Synthetic oligonucleotide
  Antisense strand to SEQ ID NO: 627676
uugggaacgcaagacuugc

SEQ ID NO: 627678 - RNA, 19 nt, Artificial Sequence
  Description of Artificial Sequence: Synthetic oligonucleotide
  Sense strand starting at position 2239 of SEQ ID NO: 585283
agaggaaauuuaggcauau

SEQ ID NO: 627679 - RNA, 19 nt, Artificial Sequence
  Description of Artificial Sequence: Synthetic oligonucleotide
  Antisense strand to SEQ ID NO: 627678
auaugccuaaauuuccucu

SEQ ID NO: 627680 - RNA, 19 nt, Artificial Sequence
  Description of Artificial Sequence: Synthetic oligonucleotide
  Sense strand starting at position 2299 of SEQ ID NO: 585283
aucauuugcugcuugggau

SEQ ID NO: 627681 - RNA, 19 nt, Artificial Sequence
  Description of Artificial Sequence: Synthetic oligonucleotide
  Antisense strand to SEQ ID NO: 627680
aucccaagcagcaaaugau

SEQ ID NO: 627682 - RNA, 19 nt, Artificial Sequence
  Description of Artificial Sequence: Synthetic oligonucleotide
  Sense strand starting at position 2337 of SEQ ID NO: 585283
ggagcuuuggcucacaaga

SEQ ID NO: 627683 - RNA, 19 nt, Artificial Sequence
  Description of Artificial Sequence: Synthetic oligonucleotide
  Antisense strand to SEQ ID NO: 627682
ucuugugagccaaagcucc

SEQ ID NO: 627684 - RNA, 19 nt, Artificial Sequence
  Description of Artificial Sequence: Synthetic oligonucleotide
  Sense strand starting at position 2999 of SEQ ID NO: 585283
ccuagaaacucacuggugu

SEQ ID NO: 627685 - RNA, 19 nt, Artificial Sequence
  Description of Artificial Sequence: Synthetic oligonucleotide
  Antisense strand to SEQ ID NO: 627684
acaccagugaguuucuagg

SEQ ID NO: 627686 - RNA, 19 nt, Artificial Sequence
  Description of Artificial Sequence: Synthetic oligonucleotide
  Sense strand starting at position 3023 of SEQ ID NO: 585283
uguuuacuucucuauuguu

SEQ ID NO: 627687 - RNA, 19 nt, Artificial Sequence
  Description of Artificial Sequence: Synthetic oligonucleotide
  Antisense strand to SEQ ID NO: 627686
aacaauagagaaguaaaca

SEQ ID NO: 627688 - RNA, 19 nt, Artificial Sequence
  Description of Artificial Sequence: Synthetic oligonucleotide
  Sense strand starting at position 3065 of SEQ ID NO: 585283
gguagcagccuuuaucaca

SEQ ID NO: 627689 - RNA, 19 nt, Artificial Sequence
  Description of Artificial Sequence: Synthetic oligonucleotide
  Antisense strand to SEQ ID NO: 627688
ugugauaaaggcugcuacc

SEQ ID NO: 627690 - RNA, 19 nt, Artificial Sequence
  Description of Artificial Sequence: Synthetic oligonucleotide
  Sense strand starting at position 3085 of SEQ ID NO: 585283
gagaauuggcaacguguaa

SEQ ID NO: 627691 - RNA, 19 nt, Artificial Sequence
  Description of Artificial Sequence: Synthetic oligonucleotide
  Antisense strand to SEQ ID NO: 627690
uuacacguugccaauucuc

SEQ ID NO: 627692 - RNA, 19 nt, Artificial Sequence
  Description of Artificial Sequence: Synthetic oligonucleotide
  Sense strand starting at position 3104 of SEQ ID NO: 585283
ugggccaaguuauuaaaua

SEQ ID NO: 627693 - RNA, 19 nt, Artificial Sequence
  Description of Artificial Sequence: Synthetic oligonucleotide
  Antisense strand to SEQ ID NO: 627692
uauuuaauaacuuggccca

SEQ ID NO: 627694 - RNA, 19 nt, Artificial Sequence
  Description of Artificial Sequence: Synthetic oligonucleotide
  Sense strand starting at position 3453 of SEQ ID NO: 585283
guccuauucccaggaggag

SEQ ID NO: 627695 - RNA, 19 nt, Artificial Sequence
  Description of Artificial Sequence: Synthetic oligonucleotide
  Antisense strand to SEQ ID NO: 627694
cuccuccugggaauaggac

SEQ ID NO: 627696 - RNA, 19 nt, Artificial Sequence
  Description of Artificial Sequence: Synthetic oligonucleotide
  Sense strand starting at position 3470 of SEQ ID NO: 585283
agagaaugcugcccaagaa

SEQ ID NO: 627697 - RNA, 19 nt, Artificial Sequence
  Description of Artificial Sequence: Synthetic oligonucleotide
  Antisense strand to SEQ ID NO: 627696
uucuugggcagcauucucu

SEQ ID NO: 627698 - RNA, 19 nt, Artificial Sequence
  Description of Artificial Sequence: Synthetic oligonucleotide
  Sense strand starting at position 3517 of SEQ ID NO: 585283
ggcuauuaucauuagcuca

SEQ ID NO: 627699 - RNA, 19 nt, Artificial Sequence
  Description of Artificial Sequence: Synthetic oligonucleotide
  Antisense strand to SEQ ID NO: 627698
ugagcuaaugauaauagcc

SEQ ID NO: 627700 - RNA, 19 nt, Artificial Sequence
  Description of Artificial Sequence: Synthetic oligonucleotide
  Sense strand starting at position 3522 of SEQ ID NO: 585283
uuaucauuagcucagucua

SEQ ID NO: 627701 - RNA, 19 nt, Artificial Sequence
  Description of Artificial Sequence: Synthetic oligonucleotide
  Antisense strand to SEQ ID NO: 627700
uagacugagcuaaugauaa

SEQ ID NO: 627702 - RNA, 19 nt, Artificial Sequence
  Description of Artificial Sequence: Synthetic oligonucleotide
  Sense strand starting at position 3524 of SEQ ID NO: 585283
aucauuagcucagucuauu

SEQ ID NO: 627703 - RNA, 19 nt, Artificial Sequence
  Description of Artificial Sequence: Synthetic oligonucleotide
  Antisense strand to SEQ ID NO: 627702
aauagacugagcuaaugau

SEQ ID NO: 627704 - RNA, 19 nt, Artificial Sequence
  Description of Artificial Sequence: Synthetic oligonucleotide
  Sense strand starting at position 3556 of SEQ ID NO: 585283
acccuuuguguccaaucau

SEQ ID NO: 627705 - RNA, 19 nt, Artificial Sequence
  Description of Artificial Sequence: Synthetic oligonucleotide
  Antisense strand to SEQ ID NO: 627704
augauuggacacaaagggu

SEQ ID NO: 627706 - RNA, 19 nt, Artificial Sequence
  Description of Artificial Sequence: Synthetic oligonucleotide
  Sense strand starting at position 3666 of SEQ ID NO: 585283
ggguacauguuaguuaauu

SEQ ID NO: 627707 - RNA, 19 nt, Artificial Sequence
  Description of Artificial Sequence: Synthetic oligonucleotide
  Antisense strand to SEQ ID NO: 627706
aauuaacuaacauguaccc

SEQ ID NO: 627708 - RNA, 19 nt, Artificial Sequence
  Description of Artificial Sequence: Synthetic oligonucleotide
  Sense strand starting at position 3809 of SEQ ID NO: 585283
gugagacugugauauuuag

SEQ ID NO: 627709 - RNA, 19 nt, Artificial Sequence
  Description of Artificial Sequence: Synthetic oligonucleotide
  Antisense strand to SEQ ID NO: 627708
cuaaauaucacagucucac

SEQ ID NO: 627710 - RNA, 19 nt, Artificial Sequence
  Description of Artificial Sequence: Synthetic oligonucleotide
  Sense strand starting at position 3815 of SEQ ID NO: 585283
cugugauauuuaggaagaa

SEQ ID NO: 627711 - RNA, 19 nt, Artificial Sequence
  Description of Artificial Sequence: Synthetic oligonucleotide
  Antisense strand to SEQ ID NO: 627710
uucuuccuaaauaucacag

SEQ ID NO: 627712 - RNA, 19 nt, Artificial Sequence
  Description of Artificial Sequence: Synthetic oligonucleotide
  Sense strand starting at position 3816 of SEQ ID NO: 585283
ugugauauuuaggaagaau

SEQ ID NO: 627713 - RNA, 19 nt, Artificial Sequence
  Description of Artificial Sequence: Synthetic oligonucleotide
  Antisense strand to SEQ ID NO: 627712
auucuuccuaaauaucaca

SEQ ID NO: 627714 - RNA, 19 nt, Artificial Sequence
  Description of Artificial Sequence: Synthetic oligonucleotide
  Sense strand starting at position 8 of SEQ ID NO: 585284
gguaaaggcuucuugaaga

SEQ ID NO: 627715 - RNA, 19 nt, Artificial Sequence
  Description of Artificial Sequence: Synthetic oligonucleotide
  Antisense strand to SEQ ID NO: 627714
ucuucaagaagccuuuacc

SEQ ID NO: 627716 - RNA, 19 nt, Artificial Sequence
  Description of Artificial Sequence: Synthetic oligonucleotide
  Sense strand starting at position 41 of SEQ ID NO: 585284
gaagaauauuuguggaaca

SEQ ID NO: 627717 - RNA, 19 nt, Artificial Sequence
  Description of Artificial Sequence: Synthetic oligonucleotide
  Antisense strand to SEQ ID NO: 627716
uguuccacaaauauucuuc

SEQ ID NO: 627718 - RNA, 19 nt, Artificial Sequence
  Description of Artificial Sequence: Synthetic oligonucleotide
  Sense strand starting at position 51 of SEQ ID NO: 585284
uguggaacaguguauguaa

SEQ ID NO: 627719 - RNA, 19 nt, Artificial Sequence
  Description of Artificial Sequence: Synthetic oligonucleotide
  Antisense strand to SEQ ID NO: 627718
uuacauacacuguuccaca

SEQ ID NO: 627720 - RNA, 19 nt, Artificial Sequence
  Description of Artificial Sequence: Synthetic oligonucleotide
  Sense strand starting at position 54 of SEQ ID NO: 585284
ggaacaguguauguaauga

SEQ ID NO: 627721 - RNA, 19 nt, Artificial Sequence
  Description of Artificial Sequence: Synthetic oligonucleotide
  Antisense strand to SEQ ID NO: 627720
ucauuacauacacuguucc

SEQ ID NO: 627722 - RNA, 19 nt, Artificial Sequence
  Description of Artificial Sequence: Synthetic oligonucleotide
  Sense strand starting at position 65 of SEQ ID NO: 585284
uguaaugaauuaccauuga

SEQ ID NO: 627723 - RNA, 19 nt, Artificial Sequence
  Description of Artificial Sequence: Synthetic oligonucleotide
  Antisense strand to SEQ ID NO: 627722
ucaaugguaauucauuaca

SEQ ID NO: 627724 - RNA, 19 nt, Artificial Sequence
  Description of Artificial Sequence: Synthetic oligonucleotide
  Sense strand starting at position 108 of SEQ ID NO: 585284
acuucuucgguauggugaa

SEQ ID NO: 627725 - RNA, 19 nt, Artificial Sequence
  Description of Artificial Sequence: Synthetic oligonucleotide
  Antisense strand to SEQ ID NO: 627724
uucaccauaccgaagaagu

SEQ ID NO: 627726 - RNA, 19 nt, Artificial Sequence
  Description of Artificial Sequence: Synthetic oligonucleotide
  Sense strand starting at position 156 of SEQ ID NO: 585284
gggugauaaccggguaggu

SEQ ID NO: 627727 - RNA, 19 nt, Artificial Sequence
  Description of Artificial Sequence: Synthetic oligonucleotide
  Antisense strand to SEQ ID NO: 627726
accuacccgguuaucaccc

SEQ ID NO: 627728 - RNA, 19 nt, Artificial Sequence
  Description of Artificial Sequence: Synthetic oligonucleotide
  Sense strand starting at position 191 of SEQ ID NO: 585284
gaaacacuuuggguuauaa

SEQ ID NO: 627729 - RNA, 19 nt, Artificial Sequence
  Description of Artificial Sequence: Synthetic oligonucleotide
  Antisense strand to SEQ ID NO: 627728
uuauaacccaaaguguuuc

SEQ ID NO: 627730 - RNA, 19 nt, Artificial Sequence
  Description of Artificial Sequence: Synthetic oligonucleotide
  Sense strand starting at position 213 of SEQ ID NO: 585284
accaguacuugagaaauaa

SEQ ID NO: 627731 - RNA, 19 nt, Artificial Sequence
  Description of Artificial Sequence: Synthetic oligonucleotide
  Antisense strand to SEQ ID NO: 627730
uuauuucucaaguacuggu

SEQ ID NO: 627732 - RNA, 19 nt, Artificial Sequence
  Description of Artificial Sequence: Synthetic oligonucleotide
  Sense strand starting at position 534 of SEQ ID NO: 585284
acucguugagcucaaguga

SEQ ID NO: 627733 - RNA, 19 nt, Artificial Sequence
  Description of Artificial Sequence: Synthetic oligonucleotide
  Antisense strand to SEQ ID NO: 627732
ucacuugagcucaacgagu

SEQ ID NO: 627734 - RNA, 19 nt, Artificial Sequence
  Description of Artificial Sequence: Synthetic oligonucleotide
  Sense strand starting at position 791 of SEQ ID NO: 585284
cgggcuaacuuuccuauuu

SEQ ID NO: 627735 - RNA, 19 nt, Artificial Sequence
  Description of Artificial Sequence: Synthetic oligonucleotide
  Antisense strand to SEQ ID NO: 627734
aaauaggaaaguuagcccg

SEQ ID NO: 627736 - RNA, 19 nt, Artificial Sequence
  Description of Artificial Sequence: Synthetic oligonucleotide
  Sense strand starting at position 911 of SEQ ID NO: 585284
gugauucaggccugaggca

SEQ ID NO: 627737 - RNA, 19 nt, Artificial Sequence
  Description of Artificial Sequence: Synthetic oligonucleotide
  Antisense strand to SEQ ID NO: 627736
ugccucaggccugaaucac

SEQ ID NO: 627738 - RNA, 19 nt, Artificial Sequence
  Description of Artificial Sequence: Synthetic oligonucleotide
  Sense strand starting at position 943 of SEQ ID NO: 585284
caaguaguggauuaaguuu

SEQ ID NO: 627739 - RNA, 19 nt, Artificial Sequence
  Description of Artificial Sequence: Synthetic oligonucleotide
  Antisense strand to SEQ ID NO: 627738
aaacuuaauccacuacuug

SEQ ID NO: 627740 - RNA, 19 nt, Artificial Sequence
  Description of Artificial Sequence: Synthetic oligonucleotide
  Sense strand starting at position 949 of SEQ ID NO: 585284
guggauuaaguuuaccagu

SEQ ID NO: 627741 - RNA, 19 nt, Artificial Sequence
  Description of Artificial Sequence: Synthetic oligonucleotide
  Antisense strand to SEQ ID NO: 627740
acugguaaacuuaauccac

SEQ ID NO: 627742 - RNA, 19 nt, Artificial Sequence
  Description of Artificial Sequence: Synthetic oligonucleotide
  Sense strand starting at position 951 of SEQ ID NO: 585284
ggauuaaguuuaccaguaa

SEQ ID NO: 627743 - RNA, 19 nt, Artificial Sequence
  Description of Artificial Sequence: Synthetic oligonucleotide
  Antisense strand to SEQ ID NO: 627742
uuacugguaaacuuaaucc

SEQ ID NO: 627744 - RNA, 19 nt, Artificial Sequence
  Description of Artificial Sequence: Synthetic oligonucleotide
  Sense strand starting at position 965 of SEQ ID NO: 585284
aguaauugaucuguccaca

SEQ ID NO: 627745 - RNA, 19 nt, Artificial Sequence
  Description of Artificial Sequence: Synthetic oligonucleotide
  Antisense strand to SEQ ID NO: 627744
uguggacagaucaauuacu

SEQ ID NO: 627746 - RNA, 19 nt, Artificial Sequence
  Description of Artificial Sequence: Synthetic oligonucleotide
  Sense strand starting at position 988 of SEQ ID NO: 585284
cccuaagauuacucacguu

SEQ ID NO: 627747 - RNA, 19 nt, Artificial Sequence
  Description of Artificial Sequence: Synthetic oligonucleotide
  Antisense strand to SEQ ID NO: 627746
aacgugaguaaucuuaggg

SEQ ID NO: 627748 - RNA, 19 nt, Artificial Sequence
  Description of Artificial Sequence: Synthetic oligonucleotide
  Sense strand starting at position 1002 of SEQ ID NO: 585284
acguucuaugccuaauaaa

SEQ ID NO: 627749 - RNA, 19 nt, Artificial Sequence
  Description of Artificial Sequence: Synthetic oligonucleotide
  Antisense strand to SEQ ID NO: 627748
uuuauuaggcauagaacgu

SEQ ID NO: 627750 - RNA, 19 nt, Artificial Sequence
  Description of Artificial Sequence: Synthetic oligonucleotide
  Sense strand starting at position 1452 of SEQ ID NO: 585284
aauguuugcgaucgaaaua

SEQ ID NO: 627751 - RNA, 19 nt, Artificial Sequence
  Description of Artificial Sequence: Synthetic oligonucleotide
  Antisense strand to SEQ ID NO: 627750
uauuucgaucgcaaacauu

SEQ ID NO: 627752 - RNA, 19 nt, Artificial Sequence
  Description of Artificial Sequence: Synthetic oligonucleotide
  Sense strand starting at position 1453 of SEQ ID NO: 585284
auguuugcgaucgaaauac

SEQ ID NO: 627753 - RNA, 19 nt, Artificial Sequence
  Description of Artificial Sequence: Synthetic oligonucleotide
  Antisense strand to SEQ ID NO: 627752
guauuucgaucgcaaacau

SEQ ID NO: 627754 - RNA, 19 nt, Artificial Sequence
  Description of Artificial Sequence: Synthetic oligonucleotide
  Sense strand starting at position 1550 of SEQ ID NO: 585284
cgguuuaacucaguuagaa

SEQ ID NO: 627755 - RNA, 19 nt, Artificial Sequence
  Description of Artificial Sequence: Synthetic oligonucleotide
  Antisense strand to SEQ ID NO: 627754
uucuaacugaguuaaaccg

SEQ ID NO: 627756 - RNA, 19 nt, Artificial Sequence
  Description of Artificial Sequence: Synthetic oligonucleotide
  Sense strand starting at position 1588 of SEQ ID NO: 585284
aacccaagucgucaucagu

SEQ ID NO: 627757 - RNA, 19 nt, Artificial Sequence
  Description of Artificial Sequence: Synthetic oligonucleotide
  Antisense strand to SEQ ID NO: 627756
acugaugacgacuuggguu

SEQ ID NO: 627758 - RNA, 19 nt, Artificial Sequence
  Description of Artificial Sequence: Synthetic oligonucleotide
  Sense strand starting at position 2157 of SEQ ID NO: 585284
acacuauugccuugggaag

SEQ ID NO: 627759 - RNA, 19 nt, Artificial Sequence
  Description of Artificial Sequence: Synthetic oligonucleotide
  Antisense strand to SEQ ID NO: 627758
cuucccaaggcaauagugu

SEQ ID NO: 627760 - RNA, 19 nt, Artificial Sequence
  Description of Artificial Sequence: Synthetic oligonucleotide
  Sense strand starting at position 2239 of SEQ ID NO: 585284
gggucuugaguguagguuu

SEQ ID NO: 627761 - RNA, 19 nt, Artificial Sequence
  Description of Artificial Sequence: Synthetic oligonucleotide
  Antisense strand to SEQ ID NO: 627760
aaaccuacacucaagaccc

SEQ ID NO: 627762 - RNA, 19 nt, Artificial Sequence
  Description of Artificial Sequence: Synthetic oligonucleotide
  Sense strand starting at position 2283 of SEQ ID NO: 585284
gggcucucgaacugauaau

SEQ ID NO: 627763 - RNA, 19 nt, Artificial Sequence
  Description of Artificial Sequence: Synthetic oligonucleotide
  Antisense strand to SEQ ID NO: 627762
auuaucaguucgagagccc

SEQ ID NO: 627764 - RNA, 19 nt, Artificial Sequence
  Description of Artificial Sequence: Synthetic oligonucleotide
  Sense strand starting at position 2284 of SEQ ID NO: 585284
ggcucucgaacugauaaug

SEQ ID NO: 627765 - RNA, 19 nt, Artificial Sequence
  Description of Artificial Sequence: Synthetic oligonucleotide
  Antisense strand to SEQ ID NO: 627764
cauuaucaguucgagagcc

SEQ ID NO: 627766 - RNA, 19 nt, Artificial Sequence
  Description of Artificial Sequence: Synthetic oligonucleotide
  Sense strand starting at position 2294 of SEQ ID NO: 585284
cugauaaugucugucuccu

SEQ ID NO: 627767 - RNA, 19 nt, Artificial Sequence
  Description of Artificial Sequence: Synthetic oligonucleotide
  Antisense strand to SEQ ID NO: 627766
aggagacagacauuaucag

SEQ ID NO: 627768 - RNA, 19 nt, Artificial Sequence
  Description of Artificial Sequence: Synthetic oligonucleotide
  Sense strand starting at position 2348 of SEQ ID NO: 585284
gcuacacuugucuaccgaa

SEQ ID NO: 627769 - RNA, 19 nt, Artificial Sequence
  Description of Artificial Sequence: Synthetic oligonucleotide
  Antisense strand to SEQ ID NO: 627768
uucgguagacaaguguagc

SEQ ID NO: 627770 - RNA, 19 nt, Artificial Sequence
  Description of Artificial Sequence: Synthetic oligonucleotide
  Sense strand starting at position 2679 of SEQ ID NO: 585284
augugaagauucuuugaaa

SEQ ID NO: 627771 - RNA, 19 nt, Artificial Sequence
  Description of Artificial Sequence: Synthetic oligonucleotide
  Antisense strand to SEQ ID NO: 627770
uuucaaagaaucuucacau

SEQ ID NO: 627772 - RNA, 19 nt, Artificial Sequence
  Description of Artificial Sequence: Synthetic oligonucleotide
  Sense strand starting at position 3067 of SEQ ID NO: 585284
uagcguuuggcagagacau

SEQ ID NO: 627773 - RNA, 19 nt, Artificial Sequence
  Description of Artificial Sequence: Synthetic oligonucleotide
  Antisense strand to SEQ ID NO: 627772
augucucugccaaacgcua

SEQ ID NO: 627774 - RNA, 19 nt, Artificial Sequence
  Description of Artificial Sequence: Synthetic oligonucleotide
  Sense strand starting at position 3069 of SEQ ID NO: 585284
gcguuuggcagagacauau

SEQ ID NO: 627775 - RNA, 19 nt, Artificial Sequence
  Description of Artificial Sequence: Synthetic oligonucleotide
  Antisense strand to SEQ ID NO: 627774
auaugucucugccaaacgc

SEQ ID NO: 627776 - RNA, 19 nt, Artificial Sequence
  Description of Artificial Sequence: Synthetic oligonucleotide
  Sense strand starting at position 3207 of SEQ ID NO: 585284
uaaggaaucccaggcuuga

SEQ ID NO: 627777 - RNA, 19 nt, Artificial Sequence
  Description of Artificial Sequence: Synthetic oligonucleotide
  Antisense strand to SEQ ID NO: 627776
ucaagccugggauuccuua

SEQ ID NO: 627778 - RNA, 19 nt, Artificial Sequence
  Description of Artificial Sequence: Synthetic oligonucleotide
  Sense strand starting at position 3240 of SEQ ID NO: 585284
aauaaauggcauuguauug

SEQ ID NO: 627779 - RNA, 19 nt, Artificial Sequence
  Description of Artificial Sequence: Synthetic oligonucleotide
  Antisense strand to SEQ ID NO: 627778
caauacaaugccauuuauu

SEQ ID NO: 627780 - RNA, 19 nt, Artificial Sequence
  Description of Artificial Sequence: Synthetic oligonucleotide
  Sense strand starting at position 3269 of SEQ ID NO: 585284
ucuggagucucacuaccuu

SEQ ID NO: 627781 - RNA, 19 nt, Artificial Sequence
  Description of Artificial Sequence: Synthetic oligonucleotide
  Antisense strand to SEQ ID NO: 627780
aagguagugagacuccaga

SEQ ID NO: 627782 - RNA, 19 nt, Artificial Sequence
  Description of Artificial Sequence: Synthetic oligonucleotide
  Sense strand starting at position 3324 of SEQ ID NO: 585284
augguaaaucauggugaau

SEQ ID NO: 627783 - RNA, 19 nt, Artificial Sequence
  Description of Artificial Sequence: Synthetic oligonucleotide
  Antisense strand to SEQ ID NO: 627782
auucaccaugauuuaccau

SEQ ID NO: 627784 - RNA, 19 nt, Artificial Sequence
  Description of Artificial Sequence: Synthetic oligonucleotide
  Sense strand starting at position 3383 of SEQ ID NO: 585284
gugaaauacuguccuaaua

SEQ ID NO: 627785 - RNA, 19 nt, Artificial Sequence
  Description of Artificial Sequence: Synthetic oligonucleotide
  Antisense strand to SEQ ID NO: 627784
uauuaggacaguauuucac

SEQ ID NO: 627786 - RNA, 19 nt, Artificial Sequence
  Description of Artificial Sequence: Synthetic oligonucleotide
  Sense strand starting at position 3713 of SEQ ID NO: 585284
acuacaugccaagaauagu

SEQ ID NO: 627787 - RNA, 19 nt, Artificial Sequence
  Description of Artificial Sequence: Synthetic oligonucleotide
  Antisense strand to SEQ ID NO: 627786
acuauucuuggcauguagu

SEQ ID NO: 627788 - RNA, 19 nt, Artificial Sequence
  Description of Artificial Sequence: Synthetic oligonucleotide
  Sense strand starting at position 3839 of SEQ ID NO: 585284
gcauacuucuacuuacugu

SEQ ID NO: 627789 - RNA, 19 nt, Artificial Sequence
  Description of Artificial Sequence: Synthetic oligonucleotide
  Antisense strand to SEQ ID NO: 627788
acaguaaguagaaguaugc

SEQ ID NO: 627790 - RNA, 19 nt, Artificial Sequence
  Description of Artificial Sequence: Synthetic oligonucleotide
  Sense strand starting at position 3903 of SEQ ID NO: 585284
cacucugaagcuuguuaga

SEQ ID NO: 627791 - RNA, 19 nt, Artificial Sequence
  Description of Artificial Sequence: Synthetic oligonucleotide
  Antisense strand to SEQ ID NO: 627790
ucuaacaagcuucagagug

SEQ ID NO: 627792 - RNA, 19 nt, Artificial Sequence
  Description of Artificial Sequence: Synthetic oligonucleotide
  Sense strand starting at position 3905 of SEQ ID NO: 585284
cucugaagcuuguuagaca

SEQ ID NO: 627793 - RNA, 19 nt, Artificial Sequence
  Description of Artificial Sequence: Synthetic oligonucleotide
  Antisense strand to SEQ ID NO: 627792
ugucuaacaagcuucagag

SEQ ID NO: 627794 - RNA, 19 nt, Artificial Sequence
  Description of Artificial Sequence: Synthetic oligonucleotide
  Sense strand starting at position 26 of SEQ ID NO: 585285
aucccaugugaguaagcua

SEQ ID NO: 627795 - RNA, 19 nt, Artificial Sequence
  Description of Artificial Sequence: Synthetic oligonucleotide
  Antisense strand to SEQ ID NO: 627794
uagcuuacucacaugggau

SEQ ID NO: 627796 - RNA, 19 nt, Artificial Sequence
  Description of Artificial Sequence: Synthetic oligonucleotide
  Sense strand starting at position 53 of SEQ ID NO: 585285
cugucuugaccuuagcaga

SEQ ID NO: 627797 - RNA, 19 nt, Artificial Sequence
  Description of Artificial Sequence: Synthetic oligonucleotide
  Antisense strand to SEQ ID NO: 627796
ucugcuaaggucaagacag

SEQ ID NO: 627798 - RNA, 19 nt, Artificial Sequence
  Description of Artificial Sequence: Synthetic oligonucleotide
  Sense strand starting at position 99 of SEQ ID NO: 585285
aguuuauggccauaauauc

SEQ ID NO: 627799 - RNA, 19 nt, Artificial Sequence
  Description of Artificial Sequence: Synthetic oligonucleotide
  Antisense strand to SEQ ID NO: 627798
gauauuauggccauaaacu

SEQ ID NO: 627800 - RNA, 19 nt, Artificial Sequence
  Description of Artificial Sequence: Synthetic oligonucleotide
  Sense strand starting at position 253 of SEQ ID NO: 585285
ugcaucuuuggucauauau

SEQ ID NO: 627801 - RNA, 19 nt, Artificial Sequence
  Description of Artificial Sequence: Synthetic oligonucleotide
  Antisense strand to SEQ ID NO: 627800
auauaugaccaaagaugca

SEQ ID NO: 627802 - RNA, 19 nt, Artificial Sequence
  Description of Artificial Sequence: Synthetic oligonucleotide
  Sense strand starting at position 390 of SEQ ID NO: 585285
gcuaacagcugaucaugau

SEQ ID NO: 627803 - RNA, 19 nt, Artificial Sequence
  Description of Artificial Sequence: Synthetic oligonucleotide
  Antisense strand to SEQ ID NO: 627802
aucaugaucagcuguuagc

SEQ ID NO: 627804 - RNA, 19 nt, Artificial Sequence
  Description of Artificial Sequence: Synthetic oligonucleotide
  Sense strand starting at position 449 of SEQ ID NO: 585285
gugucaugcggcucagugu

SEQ ID NO: 627805 - RNA, 19 nt, Artificial Sequence
  Description of Artificial Sequence: Synthetic oligonucleotide
  Antisense strand to SEQ ID NO: 627804
acacugagccgcaugacac

SEQ ID NO: 627806 - RNA, 19 nt, Artificial Sequence
  Description of Artificial Sequence: Synthetic oligonucleotide
  Sense strand starting at position 690 of SEQ ID NO: 585285
acagacucaugagaauuua

SEQ ID NO: 627807 - RNA, 19 nt, Artificial Sequence
  Description of Artificial Sequence: Synthetic oligonucleotide
  Antisense strand to SEQ ID NO: 627806
uaaauucucaugagucugu

SEQ ID NO: 627808 - RNA, 19 nt, Artificial Sequence
  Description of Artificial Sequence: Synthetic oligonucleotide
  Sense strand starting at position 744 of SEQ ID NO: 585285
agggaaauuccauguaauc

SEQ ID NO: 627809 - RNA, 19 nt, Artificial Sequence
  Description of Artificial Sequence: Synthetic oligonucleotide
  Antisense strand to SEQ ID NO: 627808
gauuacauggaauuucccu

SEQ ID NO: 627810 - RNA, 19 nt, Artificial Sequence
  Description of Artificial Sequence: Synthetic oligonucleotide
  Sense strand starting at position 1074 of SEQ ID NO: 585285
gcaguuacaccuuaucaag

SEQ ID NO: 627811 - RNA, 19 nt, Artificial Sequence
  Description of Artificial Sequence: Synthetic oligonucleotide
  Antisense strand to SEQ ID NO: 627810
cuugauaagguguaacugc

SEQ ID NO: 627812 - RNA, 19 nt, Artificial Sequence
  Description of Artificial Sequence: Synthetic oligonucleotide
  Sense strand starting at position 1085 of SEQ ID NO: 585285
uuaucaagguguuucuaua

SEQ ID NO: 627813 - RNA, 19 nt, Artificial Sequence
  Description of Artificial Sequence: Synthetic oligonucleotide
  Antisense strand to SEQ ID NO: 627812
uauagaaacaccuugauaa

SEQ ID NO: 627814 - RNA, 19 nt, Artificial Sequence
  Description of Artificial Sequence: Synthetic oligonucleotide
  Sense strand starting at position 1093 of SEQ ID NO: 585285
guguuucuauauuuacgau

SEQ ID NO: 627815 - RNA, 19 nt, Artificial Sequence
  Description of Artificial Sequence: Synthetic oligonucleotide
  Antisense strand to SEQ ID NO: 627814
aucguaaauauagaaacac

SEQ ID NO: 627816 - RNA, 19 nt, Artificial Sequence
  Description of Artificial Sequence: Synthetic oligonucleotide
  Sense strand starting at position 1127 of SEQ ID NO: 585285
gcacgaaacagguaaacuu

SEQ ID NO: 627817 - RNA, 19 nt, Artificial Sequence
  Description of Artificial Sequence: Synthetic oligonucleotide
  Antisense strand to SEQ ID NO: 627816
aaguuuaccuguuucgugc

SEQ ID NO: 627818 - RNA, 19 nt, Artificial Sequence
  Description of Artificial Sequence: Synthetic oligonucleotide
  Sense strand starting at position 1252 of SEQ ID NO: 585285
guauucucugguuauugaa

SEQ ID NO: 627819 - RNA, 19 nt, Artificial Sequence
  Description of Artificial Sequence: Synthetic oligonucleotide
  Antisense strand to SEQ ID NO: 627818
uucaauaaccagagaauac

SEQ ID NO: 627820 - RNA, 19 nt, Artificial Sequence
  Description of Artificial Sequence: Synthetic oligonucleotide
  Sense strand starting at position 1267 of SEQ ID NO: 585285
ugaaauugcuuauuaagca

SEQ ID NO: 627821 - RNA, 19 nt, Artificial Sequence
  Description of Artificial Sequence: Synthetic oligonucleotide
  Antisense strand to SEQ ID NO: 627820
ugcuuaauaagcaauuuca

SEQ ID NO: 627822 - RNA, 19 nt, Artificial Sequence
  Description of Artificial Sequence: Synthetic oligonucleotide
  Sense strand starting at position 1271 of SEQ ID NO: 585285
auugcuuauuaagcagaau

SEQ ID NO: 627823 - RNA, 19 nt, Artificial Sequence
  Description of Artificial Sequence: Synthetic oligonucleotide
  Antisense strand to SEQ ID NO: 627822
auucugcuuaauaagcaau

SEQ ID NO: 627824 - RNA, 19 nt, Artificial Sequence
  Description of Artificial Sequence: Synthetic oligonucleotide
  Sense strand starting at position 1274 of SEQ ID NO: 585285
gcuuauuaagcagaauaua

SEQ ID NO: 627825 - RNA, 19 nt, Artificial Sequence
  Description of Artificial Sequence: Synthetic oligonucleotide
  Antisense strand to SEQ ID NO: 627824
uauauucugcuuaauaagc

SEQ ID NO: 627826 - RNA, 19 nt, Artificial Sequence
  Description of Artificial Sequence: Synthetic oligonucleotide
  Sense strand starting at position 1326 of SEQ ID NO: 585285
uuuaauuacggaggguaau

SEQ ID NO: 627827 - RNA, 19 nt, Artificial Sequence
  Description of Artificial Sequence: Synthetic oligonucleotide
  Antisense strand to SEQ ID NO: 627826
auuacccuccguaauuaaa

SEQ ID NO: 627828 - RNA, 19 nt, Artificial Sequence
  Description of Artificial Sequence: Synthetic oligonucleotide
  Sense strand starting at position 1492 of SEQ ID NO: 585285
gucagccuuggcguaaauu

SEQ ID NO: 627829 - RNA, 19 nt, Artificial Sequence
  Description of Artificial Sequence: Synthetic oligonucleotide
  Antisense strand to SEQ ID NO: 627828
aauuuacgccaaggcugac

SEQ ID NO: 627830 - RNA, 19 nt, Artificial Sequence
  Description of Artificial Sequence: Synthetic oligonucleotide
  Sense strand starting at position 1493 of SEQ ID NO: 585285
ucagccuuggcguaaauuu

SEQ ID NO: 627831 - RNA, 19 nt, Artificial Sequence
  Description of Artificial Sequence: Synthetic oligonucleotide
  Antisense strand to SEQ ID NO: 627830
aaauuuacgccaaggcuga

SEQ ID NO: 627832 - RNA, 19 nt, Artificial Sequence
  Description of Artificial Sequence: Synthetic oligonucleotide
  Sense strand starting at position 1583 of SEQ ID NO: 585285
gcguuaguuaaguuuccac

SEQ ID NO: 627833 - RNA, 19 nt, Artificial Sequence
  Description of Artificial Sequence: Synthetic oligonucleotide
  Antisense strand to SEQ ID NO: 627832
guggaaacuuaacuaacgc

SEQ ID NO: 627834 - RNA, 19 nt, Artificial Sequence
  Description of Artificial Sequence: Synthetic oligonucleotide
  Sense strand starting at position 1586 of SEQ ID NO: 585285
uuaguuaaguuuccacaau

SEQ ID NO: 627835 - RNA, 19 nt, Artificial Sequence
  Description of Artificial Sequence: Synthetic oligonucleotide
  Antisense strand to SEQ ID NO: 627834
auuguggaaacuuaacuaa

SEQ ID NO: 627836 - RNA, 19 nt, Artificial Sequence
  Description of Artificial Sequence: Synthetic oligonucleotide
  Sense strand starting at position 1651 of SEQ ID NO: 585285
ggccauuaacgauauugca

SEQ ID NO: 627837 - RNA, 19 nt, Artificial Sequence
  Description of Artificial Sequence: Synthetic oligonucleotide
  Antisense strand to SEQ ID NO: 627836
ugcaauaucguuaauggcc

SEQ ID NO: 627838 - RNA, 19 nt, Artificial Sequence
  Description of Artificial Sequence: Synthetic oligonucleotide
  Sense strand starting at position 1907 of SEQ ID NO: 585285
ugguaaugcccugaauauu

SEQ ID NO: 627839 - RNA, 19 nt, Artificial Sequence
  Description of Artificial Sequence: Synthetic oligonucleotide
  Antisense strand to SEQ ID NO: 627838
aauauucagggcauuacca

SEQ ID NO: 627840 - RNA, 19 nt, Artificial Sequence
  Description of Artificial Sequence: Synthetic oligonucleotide
  Sense strand starting at position 2033 of SEQ ID NO: 585285
cgauuacucgcuuuccgca

SEQ ID NO: 627841 - RNA, 19 nt, Artificial Sequence
  Description of Artificial Sequence: Synthetic oligonucleotide
  Antisense strand to SEQ ID NO: 627840
ugcggaaagcgaguaaucg

SEQ ID NO: 627842 - RNA, 19 nt, Artificial Sequence
  Description of Artificial Sequence: Synthetic oligonucleotide
  Sense strand starting at position 2056 of SEQ ID NO: 585285
uuuauauaacgguagagua

SEQ ID NO: 627843 - RNA, 19 nt, Artificial Sequence
  Description of Artificial Sequence: Synthetic oligonucleotide
  Antisense strand to SEQ ID NO: 627842
uacucuaccguuauauaaa

SEQ ID NO: 627844 - RNA, 19 nt, Artificial Sequence
  Description of Artificial Sequence: Synthetic oligonucleotide
  Sense strand starting at position 2157 of SEQ ID NO: 585285
auaagaaauucucuuguag

SEQ ID NO: 627845 - RNA, 19 nt, Artificial Sequence
  Description of Artificial Sequence: Synthetic oligonucleotide
  Antisense strand to SEQ ID NO: 627844
cuacaagagaauuucuuau

SEQ ID NO: 627846 - RNA, 19 nt, Artificial Sequence
  Description of Artificial Sequence: Synthetic oligonucleotide
  Sense strand starting at position 2166 of SEQ ID NO: 585285
ucucuuguaguagggagau

SEQ ID NO: 627847 - RNA, 19 nt, Artificial Sequence
  Description of Artificial Sequence: Synthetic oligonucleotide
  Antisense strand to SEQ ID NO: 627846
aucucccuacuacaagaga

SEQ ID NO: 627848 - RNA, 19 nt, Artificial Sequence
  Description of Artificial Sequence: Synthetic oligonucleotide
  Sense strand starting at position 2180 of SEQ ID NO: 585285
gagauuugcuggcauuuag

SEQ ID NO: 627849 - RNA, 19 nt, Artificial Sequence
  Description of Artificial Sequence: Synthetic oligonucleotide
  Antisense strand to SEQ ID NO: 627848
cuaaaugccagcaaaucuc

SEQ ID NO: 627850 - RNA, 19 nt, Artificial Sequence
  Description of Artificial Sequence: Synthetic oligonucleotide
  Sense strand starting at position 2205 of SEQ ID NO: 585285
aggaucucuaaacgaaagu

SEQ ID NO: 627851 - RNA, 19 nt, Artificial Sequence
  Description of Artificial Sequence: Synthetic oligonucleotide
  Antisense strand to SEQ ID NO: 627850
acuuucguuuagagauccu

SEQ ID NO: 627852 - RNA, 19 nt, Artificial Sequence
  Description of Artificial Sequence: Synthetic oligonucleotide
  Sense strand starting at position 2239 of SEQ ID NO: 585285
agaggaaaguaucucgauu

SEQ ID NO: 627853 - RNA, 19 nt, Artificial Sequence
  Description of Artificial Sequence: Synthetic oligonucleotide
  Antisense strand to SEQ ID NO: 627852
aaucgagauacuuuccucu

SEQ ID NO: 627854 - RNA, 19 nt, Artificial Sequence
  Description of Artificial Sequence: Synthetic oligonucleotide
  Sense strand starting at position 2265 of SEQ ID NO: 585285
ucuguauguguuuaaagau

SEQ ID NO: 627855 - RNA, 19 nt, Artificial Sequence
  Description of Artificial Sequence: Synthetic oligonucleotide
  Antisense strand to SEQ ID NO: 627854
aucuuuaaacacauacaga

SEQ ID NO: 627856 - RNA, 19 nt, Artificial Sequence
  Description of Artificial Sequence: Synthetic oligonucleotide
  Sense strand starting at position 2595 of SEQ ID NO: 585285
uccuucccuguauauuaga

SEQ ID NO: 627857 - RNA, 19 nt, Artificial Sequence
  Description of Artificial Sequence: Synthetic oligonucleotide
  Antisense strand to SEQ ID NO: 627856
ucuaauauacagggaagga

SEQ ID NO: 627858 - RNA, 19 nt, Artificial Sequence
  Description of Artificial Sequence: Synthetic oligonucleotide
  Sense strand starting at position 2741 of SEQ ID NO: 585285
cucucucaccgauauuaga

SEQ ID NO: 627859 - RNA, 19 nt, Artificial Sequence
  Description of Artificial Sequence: Synthetic oligonucleotide
  Antisense strand to SEQ ID NO: 627858
ucuaauaucggugagagag

SEQ ID NO: 627860 - RNA, 19 nt, Artificial Sequence
  Description of Artificial Sequence: Synthetic oligonucleotide
  Sense strand starting at position 2756 of SEQ ID NO: 585285
uagacauguuaaucugagu

SEQ ID NO: 627861 - RNA, 19 nt, Artificial Sequence
  Description of Artificial Sequence: Synthetic oligonucleotide
  Antisense strand to SEQ ID NO: 627860
acucagauuaacaugucua

SEQ ID NO: 627862 - RNA, 19 nt, Artificial Sequence
  Description of Artificial Sequence: Synthetic oligonucleotide
  Sense strand starting at position 2796 of SEQ ID NO: 585285
aaggguaaauacuuguuaa

SEQ ID NO: 627863 - RNA, 19 nt, Artificial Sequence
  Description of Artificial Sequence: Synthetic oligonucleotide
  Antisense strand to SEQ ID NO: 627862
uuaacaaguauuuacccuu

SEQ ID NO: 627864 - RNA, 19 nt, Artificial Sequence
  Description of Artificial Sequence: Synthetic oligonucleotide
  Sense strand starting at position 2839 of SEQ ID NO: 585285
acuggcauauaguuaguaa

SEQ ID NO: 627865 - RNA, 19 nt, Artificial Sequence
  Description of Artificial Sequence: Synthetic oligonucleotide
  Antisense strand to SEQ ID NO: 627864
uuacuaacuauaugccagu

SEQ ID NO: 627866 - RNA, 19 nt, Artificial Sequence
  Description of Artificial Sequence: Synthetic oligonucleotide
  Sense strand starting at position 2842 of SEQ ID NO: 585285
ggcauauaguuaguaaaug

SEQ ID NO: 627867 - RNA, 19 nt, Artificial Sequence
  Description of Artificial Sequence: Synthetic oligonucleotide
  Antisense strand to SEQ ID NO: 627866
cauuuacuaacuauaugcc

SEQ ID NO: 627868 - RNA, 19 nt, Artificial Sequence
  Description of Artificial Sequence: Synthetic oligonucleotide
  Sense strand starting at position 3533 of SEQ ID NO: 585285
cuaguuaaacgagagcauu

SEQ ID NO: 627869 - RNA, 19 nt, Artificial Sequence
  Description of Artificial Sequence: Synthetic oligonucleotide
  Antisense strand to SEQ ID NO: 627868
aaugcucucguuuaacuag

SEQ ID NO: 627870 - RNA, 19 nt, Artificial Sequence
  Description of Artificial Sequence: Synthetic oligonucleotide
  Sense strand starting at position 3662 of SEQ ID NO: 585285
gaagcagggucagcaauau

SEQ ID NO: 627871 - RNA, 19 nt, Artificial Sequence
  Description of Artificial Sequence: Synthetic oligonucleotide
  Antisense strand to SEQ ID NO: 627870
auauugcugacccugcuuc

SEQ ID NO: 627872 - RNA, 19 nt, Artificial Sequence
  Description of Artificial Sequence: Synthetic oligonucleotide
  Sense strand starting at position 3666 of SEQ ID NO: 585285
cagggucagcaauaucuaa

SEQ ID NO: 627873 - RNA, 19 nt, Artificial Sequence
  Description of Artificial Sequence: Synthetic oligonucleotide
  Antisense strand to SEQ ID NO: 627872
uuagauauugcugacccug

SEQ ID NO: 627874 - RNA, 19 nt, Artificial Sequence
  Description of Artificial Sequence: Synthetic oligonucleotide
  Sense strand starting at position 33 of SEQ ID NO: 585286
ccuacaauuugcuugcuga

SEQ ID NO: 627875 - RNA, 19 nt, Artificial Sequence
  Description of Artificial Sequence: Synthetic oligonucleotide
  Antisense strand to SEQ ID NO: 627874
ucagcaagcaaauuguagg

SEQ ID NO: 627876 - RNA, 19 nt, Artificial Sequence
  Description of Artificial Sequence: Synthetic oligonucleotide
  Sense strand starting at position 134 of SEQ ID NO: 585286
ccagacauaugucucugua

SEQ ID NO: 627877 - RNA, 19 nt, Artificial Sequence
  Description of Artificial Sequence: Synthetic oligonucleotide
  Antisense strand to SEQ ID NO: 627876
uacagagacauaugucugg

SEQ ID NO: 627878 - RNA, 19 nt, Artificial Sequence
  Description of Artificial Sequence: Synthetic oligonucleotide
  Sense strand starting at position 136 of SEQ ID NO: 585286
agacauaugucucuguaua

SEQ ID NO: 627879 - RNA, 19 nt, Artificial Sequence
  Description of Artificial Sequence: Synthetic oligonucleotide
  Antisense strand to SEQ ID NO: 627878
uauacagagacauaugucu

SEQ ID NO: 627880 - RNA, 19 nt, Artificial Sequence
  Description of Artificial Sequence: Synthetic oligonucleotide
  Sense strand starting at position 138 of SEQ ID NO: 585286
acauaugucucuguauaaa

SEQ ID NO: 627881 - RNA, 19 nt, Artificial Sequence
  Description of Artificial Sequence: Synthetic oligonucleotide
  Antisense strand to SEQ ID NO: 627880
uuuauacagagacauaugu

SEQ ID NO: 627882 - RNA, 19 nt, Artificial Sequence
  Description of Artificial Sequence: Synthetic oligonucleotide
  Sense strand starting at position 198 of SEQ ID NO: 585286
gucacuucugcucaggaca

SEQ ID NO: 627883 - RNA, 19 nt, Artificial Sequence
  Description of Artificial Sequence: Synthetic oligonucleotide
  Antisense strand to SEQ ID NO: 627882
uguccugagcagaagugac

SEQ ID NO: 627884 - RNA, 19 nt, Artificial Sequence
  Description of Artificial Sequence: Synthetic oligonucleotide
  Sense strand starting at position 566 of SEQ ID NO: 585286
ccuacaaguuuggucucua

SEQ ID NO: 627885 - RNA, 19 nt, Artificial Sequence
  Description of Artificial Sequence: Synthetic oligonucleotide
  Antisense strand to SEQ ID NO: 627884
uagagaccaaacuuguagg

SEQ ID NO: 627886 - RNA, 19 nt, Artificial Sequence
  Description of Artificial Sequence: Synthetic oligonucleotide
  Sense strand starting at position 571 of SEQ ID NO: 585286
aaguuuggucucuagcaaa

SEQ ID NO: 627887 - RNA, 19 nt, Artificial Sequence
  Description of Artificial Sequence: Synthetic oligonucleotide
  Antisense strand to SEQ ID NO: 627886
uuugcuagagaccaaacuu

SEQ ID NO: 627888 - RNA, 19 nt, Artificial Sequence
  Description of Artificial Sequence: Synthetic oligonucleotide
  Sense strand starting at position 584 of SEQ ID NO: 585286
agcaaaucauuguccugau

SEQ ID NO: 627889 - RNA, 19 nt, Artificial Sequence
  Description of Artificial Sequence: Synthetic oligonucleotide
  Antisense strand to SEQ ID NO: 627888
aucaggacaaugauuugcu

SEQ ID NO: 627890 - RNA, 19 nt, Artificial Sequence
  Description of Artificial Sequence: Synthetic oligonucleotide
  Sense strand starting at position 585 of SEQ ID NO: 585286
gcaaaucauuguccugaug

SEQ ID NO: 627891 - RNA, 19 nt, Artificial Sequence
  Description of Artificial Sequence: Synthetic oligonucleotide
  Antisense strand to SEQ ID NO: 627890
caucaggacaaugauuugc

SEQ ID NO: 627892 - RNA, 19 nt, Artificial Sequence
  Description of Artificial Sequence: Synthetic oligonucleotide
  Sense strand starting at position 630 of SEQ ID NO: 585286
gaucauugcugguuaagaa

SEQ ID NO: 627893 - RNA, 19 nt, Artificial Sequence
  Description of Artificial Sequence: Synthetic oligonucleotide
  Antisense strand to SEQ ID NO: 627892
uucuuaaccagcaaugauc

SEQ ID NO: 627894 - RNA, 19 nt, Artificial Sequence
  Description of Artificial Sequence: Synthetic oligonucleotide
  Sense strand starting at position 631 of SEQ ID NO: 585286
aucauugcugguuaagaau

SEQ ID NO: 627895 - RNA, 19 nt, Artificial Sequence
  Description of Artificial Sequence: Synthetic oligonucleotide
  Antisense strand to SEQ ID NO: 627894
auucuuaaccagcaaugau

SEQ ID NO: 627896 - RNA, 19 nt, Artificial Sequence
  Description of Artificial Sequence: Synthetic oligonucleotide
  Sense strand starting at position 943 of SEQ ID NO: 585286
auaaguuauggugauguuu

SEQ ID NO: 627897 - RNA, 19 nt, Artificial Sequence
  Description of Artificial Sequence: Synthetic oligonucleotide
  Antisense strand to SEQ ID NO: 627896
aaacaucaccauaacuuau

SEQ ID NO: 627898 - RNA, 19 nt, Artificial Sequence
  Description of Artificial Sequence: Synthetic oligonucleotide
  Sense strand starting at position 1299 of SEQ ID NO: 585286
uucuguagucuuugagaac

SEQ ID NO: 627899 - RNA, 19 nt, Artificial Sequence
  Description of Artificial Sequence: Synthetic oligonucleotide
  Antisense strand to SEQ ID NO: 627898
guucucaaagacuacagaa

SEQ ID NO: 627900 - RNA, 19 nt, Artificial Sequence
  Description of Artificial Sequence: Synthetic oligonucleotide
  Sense strand starting at position 1505 of SEQ ID NO: 585286
cgagauuaagcacgaguaa

SEQ ID NO: 627901 - RNA, 19 nt, Artificial Sequence
  Description of Artificial Sequence: Synthetic oligonucleotide
  Antisense strand to SEQ ID NO: 627900
uuacucgugcuuaaucucg

SEQ ID NO: 627902 - RNA, 19 nt, Artificial Sequence
  Description of Artificial Sequence: Synthetic oligonucleotide
  Sense strand starting at position 1506 of SEQ ID NO: 585286
gagauuaagcacgaguaau

SEQ ID NO: 627903 - RNA, 19 nt, Artificial Sequence
  Description of Artificial Sequence: Synthetic oligonucleotide
  Antisense strand to SEQ ID NO: 627902
auuacucgugcuuaaucuc

SEQ ID NO: 627904 - RNA, 19 nt, Artificial Sequence
  Description of Artificial Sequence: Synthetic oligonucleotide
  Sense strand starting at position 1523 of SEQ ID NO: 585286
auuaaacguuaccugcaaa

SEQ ID NO: 627905 - RNA, 19 nt, Artificial Sequence
  Description of Artificial Sequence: Synthetic oligonucleotide
  Antisense strand to SEQ ID NO: 627904
uuugcagguaacguuuaau

SEQ ID NO: 627906 - RNA, 19 nt, Artificial Sequence
  Description of Artificial Sequence: Synthetic oligonucleotide
  Sense strand starting at position 1784 of SEQ ID NO: 585286
aagugacagcgucacgaau

SEQ ID NO: 627907 - RNA, 19 nt, Artificial Sequence
  Description of Artificial Sequence: Synthetic oligonucleotide
  Antisense strand to SEQ ID NO: 627906
auucgugacgcugucacuu

SEQ ID NO: 627908 - RNA, 19 nt, Artificial Sequence
  Description of Artificial Sequence: Synthetic oligonucleotide
  Sense strand starting at position 1799 of SEQ ID NO: 585286
gaaucacguucuccaggaa

SEQ ID NO: 627909 - RNA, 19 nt, Artificial Sequence
  Description of Artificial Sequence: Synthetic oligonucleotide
  Antisense strand to SEQ ID NO: 627908
uuccuggagaacgugauuc

SEQ ID NO: 627910 - RNA, 19 nt, Artificial Sequence
  Description of Artificial Sequence: Synthetic oligonucleotide
  Sense strand starting at position 1831 of SEQ ID NO: 585286
ccacgagucuccucauaga

SEQ ID NO: 627911 - RNA, 19 nt, Artificial Sequence
  Description of Artificial Sequence: Synthetic oligonucleotide
  Antisense strand to SEQ ID NO: 627910
ucuaugaggagacucgugg

SEQ ID NO: 627912 - RNA, 19 nt, Artificial Sequence
  Description of Artificial Sequence: Synthetic oligonucleotide
  Sense strand starting at position 1892 of SEQ ID NO: 585286
gccggauagcuggcuuagu

SEQ ID NO: 627913 - RNA, 19 nt, Artificial Sequence
  Description of Artificial Sequence: Synthetic oligonucleotide
  Antisense strand to SEQ ID NO: 627912
acuaagccagcuauccggc

SEQ ID NO: 627914 - RNA, 19 nt, Artificial Sequence
  Description of Artificial Sequence: Synthetic oligonucleotide
  Sense strand starting at position 1908 of SEQ ID NO: 585286
agugaugcccuggauguua

SEQ ID NO: 627915 - RNA, 19 nt, Artificial Sequence
  Description of Artificial Sequence: Synthetic oligonucleotide
  Antisense strand to SEQ ID NO: 627914
uaacauccagggcaucacu

SEQ ID NO: 627916 - RNA, 19 nt, Artificial Sequence
  Description of Artificial Sequence: Synthetic oligonucleotide
  Sense strand starting at position 1992 of SEQ ID NO: 585286
gccagacaugacuaagcaa

SEQ ID NO: 627917 - RNA, 19 nt, Artificial Sequence
  Description of Artificial Sequence: Synthetic oligonucleotide
  Antisense strand to SEQ ID NO: 627916
uugcuuagucaugucuggc

SEQ ID NO: 627918 - RNA, 19 nt, Artificial Sequence
  Description of Artificial Sequence: Synthetic oligonucleotide
  Sense strand starting at position 1995 of SEQ ID NO: 585286
agacaugacuaagcaacuu

SEQ ID NO: 627919 - RNA, 19 nt, Artificial Sequence
  Description of Artificial Sequence: Synthetic oligonucleotide
  Antisense strand to SEQ ID NO: 627918
aaguugcuuagucaugucu

SEQ ID NO: 627920 - RNA, 19 nt, Artificial Sequence
  Description of Artificial Sequence: Synthetic oligonucleotide
  Sense strand starting at position 2057 of SEQ ID NO: 585286
cccuuauaugccgggaauu

SEQ ID NO: 627921 - RNA, 19 nt, Artificial Sequence
  Description of Artificial Sequence: Synthetic oligonucleotide
  Antisense strand to SEQ ID NO: 627920
aauucccggcauauaaggg

SEQ ID NO: 627922 - RNA, 19 nt, Artificial Sequence
  Description of Artificial Sequence: Synthetic oligonucleotide
  Sense strand starting at position 2058 of SEQ ID NO: 585286
ccuuauaugccgggaauuc

SEQ ID NO: 627923 - RNA, 19 nt, Artificial Sequence
  Description of Artificial Sequence: Synthetic oligonucleotide
  Antisense strand to SEQ ID NO: 627922
gaauucccggcauauaagg

SEQ ID NO: 627924 - RNA, 19 nt, Artificial Sequence
  Description of Artificial Sequence: Synthetic oligonucleotide
  Sense strand starting at position 2217 of SEQ ID NO: 585286
cuugcaauugcugggaaau

SEQ ID NO: 627925 - RNA, 19 nt, Artificial Sequence
  Description of Artificial Sequence: Synthetic oligonucleotide
  Antisense strand to SEQ ID NO: 627924
auuucccagcaauugcaag

SEQ ID NO: 627926 - RNA, 19 nt, Artificial Sequence
  Description of Artificial Sequence: Synthetic oligonucleotide
  Sense strand starting at position 2218 of SEQ ID NO: 585286
uugcaauugcugggaaaua

SEQ ID NO: 627927 - RNA, 19 nt, Artificial Sequence
  Description of Artificial Sequence: Synthetic oligonucleotide
  Antisense strand to SEQ ID NO: 627926
uauuucccagcaauugcaa

SEQ ID NO: 627928 - RNA, 19 nt, Artificial Sequence
  Description of Artificial Sequence: Synthetic oligonucleotide
  Sense strand starting at position 2542 of SEQ ID NO: 585286
gaaggcaugauagguuagu

SEQ ID NO: 627929 - RNA, 19 nt, Artificial Sequence
  Description of Artificial Sequence: Synthetic oligonucleotide
  Antisense strand to SEQ ID NO: 627928
acuaaccuaucaugccuuc

SEQ ID NO: 627930 - RNA, 19 nt, Artificial Sequence
  Description of Artificial Sequence: Synthetic oligonucleotide
  Sense strand starting at position 2560 of SEQ ID NO: 585286
ugauucgugguagaauuau

SEQ ID NO: 627931 - RNA, 19 nt, Artificial Sequence
  Description of Artificial Sequence: Synthetic oligonucleotide
  Antisense strand to SEQ ID NO: 627930
auaauucuaccacgaauca

SEQ ID NO: 627932 - RNA, 19 nt, Artificial Sequence
  Description of Artificial Sequence: Synthetic oligonucleotide
  Sense strand starting at position 2907 of SEQ ID NO: 585286
accugugguagccaaagaa

SEQ ID NO: 627933 - RNA, 19 nt, Artificial Sequence
  Description of Artificial Sequence: Synthetic oligonucleotide
  Antisense strand to SEQ ID NO: 627932
uucuuuggcuaccacaggu

SEQ ID NO: 627934 - RNA, 19 nt, Artificial Sequence
  Description of Artificial Sequence: Synthetic oligonucleotide
  Sense strand starting at position 2980 of SEQ ID NO: 585286
uccuguaaguaguuaagag

SEQ ID NO: 627935 - RNA, 19 nt, Artificial Sequence
  Description of Artificial Sequence: Synthetic oligonucleotide
  Antisense strand to SEQ ID NO: 627934
cucuuaacuacuuacagga

SEQ ID NO: 627936 - RNA, 19 nt, Artificial Sequence
  Description of Artificial Sequence: Synthetic oligonucleotide
  Sense strand starting at position 2981 of SEQ ID NO: 585286
ccuguaaguaguuaagagu

SEQ ID NO: 627937 - RNA, 19 nt, Artificial Sequence
  Description of Artificial Sequence: Synthetic oligonucleotide
  Antisense strand to SEQ ID NO: 627936
acucuuaacuacuuacagg

SEQ ID NO: 627938 - RNA, 19 nt, Artificial Sequence
  Description of Artificial Sequence: Synthetic oligonucleotide
  Sense strand starting at position 3166 of SEQ ID NO: 585286
uagguuaaacaaugacgaa

SEQ ID NO: 627939 - RNA, 19 nt, Artificial Sequence
  Description of Artificial Sequence: Synthetic oligonucleotide
  Antisense strand to SEQ ID NO: 627938
uucgucauuguuuaaccua

SEQ ID NO: 627940 - RNA, 19 nt, Artificial Sequence
  Description of Artificial Sequence: Synthetic oligonucleotide
  Sense strand starting at position 3238 of SEQ ID NO: 585286
cgggaaauaaugugaaacu

SEQ ID NO: 627941 - RNA, 19 nt, Artificial Sequence
  Description of Artificial Sequence: Synthetic oligonucleotide
  Antisense strand to SEQ ID NO: 627940
aguuucacauuauuucccg

SEQ ID NO: 627942 - RNA, 19 nt, Artificial Sequence
  Description of Artificial Sequence: Synthetic oligonucleotide
  Sense strand starting at position 3293 of SEQ ID NO: 585286
acccaagugucauuaauca

SEQ ID NO: 627943 - RNA, 19 nt, Artificial Sequence
  Description of Artificial Sequence: Synthetic oligonucleotide
  Antisense strand to SEQ ID NO: 627942
ugauuaaugacacuugggu

SEQ ID NO: 627944 - RNA, 19 nt, Artificial Sequence
  Description of Artificial Sequence: Synthetic oligonucleotide
  Sense strand starting at position 3301 of SEQ ID NO: 585286
gucauuaaucaauauguca

SEQ ID NO: 627945 - RNA, 19 nt, Artificial Sequence
  Description of Artificial Sequence: Synthetic oligonucleotide
  Antisense strand to SEQ ID NO: 627944
ugacauauugauuaaugac

SEQ ID NO: 627946 - RNA, 19 nt, Artificial Sequence
  Description of Artificial Sequence: Synthetic oligonucleotide
  Sense strand starting at position 3308 of SEQ ID NO: 585286
aucaauaugucaucuguaa

SEQ ID NO: 627947 - RNA, 19 nt, Artificial Sequence
  Description of Artificial Sequence: Synthetic oligonucleotide
  Antisense strand to SEQ ID NO: 627946
uuacagaugacauauugau

SEQ ID NO: 627948 - RNA, 19 nt, Artificial Sequence
  Description of Artificial Sequence: Synthetic oligonucleotide
  Sense strand starting at position 3569 of SEQ ID NO: 585286
caaggaucuuaaucucgga

SEQ ID NO: 627949 - RNA, 19 nt, Artificial Sequence
  Description of Artificial Sequence: Synthetic oligonucleotide
  Antisense strand to SEQ ID NO: 627948
uccgagauuaagauccuug

SEQ ID NO: 627950 - RNA, 19 nt, Artificial Sequence
  Description of Artificial Sequence: Synthetic oligonucleotide
  Sense strand starting at position 3672 of SEQ ID NO: 585286
acugguaaaugugucucua

SEQ ID NO: 627951 - RNA, 19 nt, Artificial Sequence
  Description of Artificial Sequence: Synthetic oligonucleotide
  Antisense strand to SEQ ID NO: 627950
uagagacacauuuaccagu

SEQ ID NO: 627952 - RNA, 19 nt, Artificial Sequence
  Description of Artificial Sequence: Synthetic oligonucleotide
  Sense strand starting at position 3850 of SEQ ID NO: 585286
uuaaguagucuacagucua

SEQ ID NO: 627953 - RNA, 19 nt, Artificial Sequence
  Description of Artificial Sequence: Synthetic oligonucleotide
  Antisense strand to SEQ ID NO: 627952
uagacuguagacuacuuaa

SEQ ID NO: 627954 - RNA, 19 nt, Artificial Sequence
  Description of Artificial Sequence: Synthetic oligonucleotide
  Sense strand starting at position 135 of SEQ ID NO: 585287
uuuaucaggucuucccuua

SEQ ID NO: 627955 - RNA, 19 nt, Artificial Sequence
  Description of Artificial Sequence: Synthetic oligonucleotide
  Antisense strand to SEQ ID NO: 627954
uaagggaagaccugauaaa

SEQ ID NO: 627956 - RNA, 19 nt, Artificial Sequence
  Description of Artificial Sequence: Synthetic oligonucleotide
  Sense strand starting at position 223 of SEQ ID NO: 585287
acauaagccgccuaaaugu

SEQ ID NO: 627957 - RNA, 19 nt, Artificial Sequence
  Description of Artificial Sequence: Synthetic oligonucleotide
  Antisense strand to SEQ ID NO: 627956
acauuuaggcggcuuaugu

SEQ ID NO: 627958 - RNA, 19 nt, Artificial Sequence
  Description of Artificial Sequence: Synthetic oligonucleotide
  Sense strand starting at position 811 of SEQ ID NO: 585287
aguauuuacugacacauua

SEQ ID NO: 627959 - RNA, 19 nt, Artificial Sequence
  Description of Artificial Sequence: Synthetic oligonucleotide
  Antisense strand to SEQ ID NO: 627958
uaaugugucaguaaauacu

SEQ ID NO: 627960 - RNA, 19 nt, Artificial Sequence
  Description of Artificial Sequence: Synthetic oligonucleotide
  Sense strand starting at position 1032 of SEQ ID NO: 585287
ggcugugcuacugagaaag

SEQ ID NO: 627961 - RNA, 19 nt, Artificial Sequence
  Description of Artificial Sequence: Synthetic oligonucleotide
  Antisense strand to SEQ ID NO: 627960
cuuucucaguagcacagcc

SEQ ID NO: 627962 - RNA, 19 nt, Artificial Sequence
  Description of Artificial Sequence: Synthetic oligonucleotide
  Sense strand starting at position 1170 of SEQ ID NO: 585287
uuaagacugcccuacuguu

SEQ ID NO: 627963 - RNA, 19 nt, Artificial Sequence
  Description of Artificial Sequence: Synthetic oligonucleotide
  Antisense strand to SEQ ID NO: 627962
aacaguagggcagucuuaa

SEQ ID NO: 627964 - RNA, 19 nt, Artificial Sequence
  Description of Artificial Sequence: Synthetic oligonucleotide
  Sense strand starting at position 1183 of SEQ ID NO: 585287
acuguucuacaguaguaaa

SEQ ID NO: 627965 - RNA, 19 nt, Artificial Sequence
  Description of Artificial Sequence: Synthetic oligonucleotide
  Antisense strand to SEQ ID NO: 627964
uuuacuacuguagaacagu

SEQ ID NO: 627966 - RNA, 19 nt, Artificial Sequence
  Description of Artificial Sequence: Synthetic oligonucleotide
  Sense strand starting at position 1296 of SEQ ID NO: 585287
uuuaguggagcccaucaaa

SEQ ID NO: 627967 - RNA, 19 nt, Artificial Sequence
  Description of Artificial Sequence: Synthetic oligonucleotide
  Antisense strand to SEQ ID NO: 627966
uuugaugggcuccacuaaa

SEQ ID NO: 627968 - RNA, 19 nt, Artificial Sequence
  Description of Artificial Sequence: Synthetic oligonucleotide
  Sense strand starting at position 1316 of SEQ ID NO: 585287
ucauuaucuccugagacgu

SEQ ID NO: 627969 - RNA, 19 nt, Artificial Sequence
  Description of Artificial Sequence: Synthetic oligonucleotide
  Antisense strand to SEQ ID NO: 627968
acgucucaggagauaauga

SEQ ID NO: 627970 - RNA, 19 nt, Artificial Sequence
  Description of Artificial Sequence: Synthetic oligonucleotide
  Sense strand starting at position 1406 of SEQ ID NO: 585287
aacuaauccgagcgguaaa

SEQ ID NO: 627971 - RNA, 19 nt, Artificial Sequence
  Description of Artificial Sequence: Synthetic oligonucleotide
  Antisense strand to SEQ ID NO: 627970
uuuaccgcucggauuaguu

SEQ ID NO: 627972 - RNA, 19 nt, Artificial Sequence
  Description of Artificial Sequence: Synthetic oligonucleotide
  Sense strand starting at position 1456 of SEQ ID NO: 585287
gaaguuacuggccagcaga

SEQ ID NO: 627973 - RNA, 19 nt, Artificial Sequence
  Description of Artificial Sequence: Synthetic oligonucleotide
  Antisense strand to SEQ ID NO: 627972
ucugcuggccaguaacuuc

SEQ ID NO: 627974 - RNA, 19 nt, Artificial Sequence
  Description of Artificial Sequence: Synthetic oligonucleotide
  Sense strand starting at position 1505 of SEQ ID NO: 585287
caaggucaccuguagucau

SEQ ID NO: 627975 - RNA, 19 nt, Artificial Sequence
  Description of Artificial Sequence: Synthetic oligonucleotide
  Antisense strand to SEQ ID NO: 627974
augacuacaggugaccuug

SEQ ID NO: 627976 - RNA, 19 nt, Artificial Sequence
  Description of Artificial Sequence: Synthetic oligonucleotide
  Sense strand starting at position 1591 of SEQ ID NO: 585287
uuaagagacucaguuugca

SEQ ID NO: 627977 - RNA, 19 nt, Artificial Sequence
  Description of Artificial Sequence: Synthetic oligonucleotide
  Antisense strand to SEQ ID NO: 627976
ugcaaacugagucucuuaa

SEQ ID NO: 627978 - RNA, 19 nt, Artificial Sequence
  Description of Artificial Sequence: Synthetic oligonucleotide
  Sense strand starting at position 1990 of SEQ ID NO: 585287
gcguccugacauuaucaag

SEQ ID NO: 627979 - RNA, 19 nt, Artificial Sequence
  Description of Artificial Sequence: Synthetic oligonucleotide
  Antisense strand to SEQ ID NO: 627978
cuugauaaugucaggacgc

SEQ ID NO: 627980 - RNA, 19 nt, Artificial Sequence
  Description of Artificial Sequence: Synthetic oligonucleotide
  Sense strand starting at position 2000 of SEQ ID NO: 585287
auuaucaaguggucagaga

SEQ ID NO: 627981 - RNA, 19 nt, Artificial Sequence
  Description of Artificial Sequence: Synthetic oligonucleotide
  Antisense strand to SEQ ID NO: 627980
ucucugaccacuugauaau

SEQ ID NO: 627982 - RNA, 19 nt, Artificial Sequence
  Description of Artificial Sequence: Synthetic oligonucleotide
  Sense strand starting at position 2290 of SEQ ID NO: 585287
auguuaucucugcauauau

SEQ ID NO: 627983 - RNA, 19 nt, Artificial Sequence
  Description of Artificial Sequence: Synthetic oligonucleotide
  Antisense strand to SEQ ID NO: 627982
auauaugcagagauaacau

SEQ ID NO: 627984 - RNA, 19 nt, Artificial Sequence
  Description of Artificial Sequence: Synthetic oligonucleotide
  Sense strand starting at position 2518 of SEQ ID NO: 585287
aaauaucgagcuugguaau

SEQ ID NO: 627985 - RNA, 19 nt, Artificial Sequence
  Description of Artificial Sequence: Synthetic oligonucleotide
  Antisense strand to SEQ ID NO: 627984
auuaccaagcucgauauuu

SEQ ID NO: 627986 - RNA, 19 nt, Artificial Sequence
  Description of Artificial Sequence: Synthetic oligonucleotide
  Sense strand starting at position 2631 of SEQ ID NO: 585287
agggacuuucucuggaauu

SEQ ID NO: 627987 - RNA, 19 nt, Artificial Sequence
  Description of Artificial Sequence: Synthetic oligonucleotide
  Antisense strand to SEQ ID NO: 627986
aauuccagagaaagucccu

SEQ ID NO: 627988 - RNA, 19 nt, Artificial Sequence
  Description of Artificial Sequence: Synthetic oligonucleotide
  Sense strand starting at position 2641 of SEQ ID NO: 585287
ucuggaauuuccugauaug

SEQ ID NO: 627989 - RNA, 19 nt, Artificial Sequence
  Description of Artificial Sequence: Synthetic oligonucleotide
  Antisense strand to SEQ ID NO: 627988
cauaucaggaaauuccaga

SEQ ID NO: 627990 - RNA, 19 nt, Artificial Sequence
  Description of Artificial Sequence: Synthetic oligonucleotide
  Sense strand starting at position 2644 of SEQ ID NO: 585287
ggaauuuccugauaugacc

SEQ ID NO: 627991 - RNA, 19 nt, Artificial Sequence
  Description of Artificial Sequence: Synthetic oligonucleotide
  Antisense strand to SEQ ID NO: 627990
ggucauaucaggaaauucc

SEQ ID NO: 627992 - RNA, 19 nt, Artificial Sequence
  Description of Artificial Sequence: Synthetic oligonucleotide
  Sense strand starting at position 3015 of SEQ ID NO: 585287
uuauuaaucuugucaguug

SEQ ID NO: 627993 - RNA, 19 nt, Artificial Sequence
  Description of Artificial Sequence: Synthetic oligonucleotide
  Antisense strand to SEQ ID NO: 627992
caacugacaagauuaauaa

SEQ ID NO: 627994 - RNA, 19 nt, Artificial Sequence
  Description of Artificial Sequence: Synthetic oligonucleotide
  Sense strand starting at position 3018 of SEQ ID NO: 585287
uuaaucuugucaguugauu

SEQ ID NO: 627995 - RNA, 19 nt, Artificial Sequence
  Description of Artificial Sequence: Synthetic oligonucleotide
  Antisense strand to SEQ ID NO: 627994
aaucaacugacaagauuaa

SEQ ID NO: 627996 - RNA, 19 nt, Artificial Sequence
  Description of Artificial Sequence: Synthetic oligonucleotide
  Sense strand starting at position 3117 of SEQ ID NO: 585287
uuaacuaaugcuggguaga

SEQ ID NO: 627997 - RNA, 19 nt, Artificial Sequence
  Description of Artificial Sequence: Synthetic oligonucleotide
  Antisense strand to SEQ ID NO: 627996
ucuacccagcauuaguuaa

SEQ ID NO: 627998 - RNA, 19 nt, Artificial Sequence
  Description of Artificial Sequence: Synthetic oligonucleotide
  Sense strand starting at position 3118 of SEQ ID NO: 585287
uaacuaaugcuggguagaa

SEQ ID NO: 627999 - RNA, 19 nt, Artificial Sequence
  Description of Artificial Sequence: Synthetic oligonucleotide
  Antisense strand to SEQ ID NO: 627998
uucuacccagcauuaguua

SEQ ID NO: 628000 - RNA, 19 nt, Artificial Sequence
  Description of Artificial Sequence: Synthetic oligonucleotide
  Sense strand starting at position 3119 of SEQ ID NO: 585287
aacuaaugcuggguagaac

SEQ ID NO: 628001 - RNA, 19 nt, Artificial Sequence
  Description of Artificial Sequence: Synthetic oligonucleotide
  Antisense strand to SEQ ID NO: 628000
guucuacccagcauuaguu

SEQ ID NO: 628002 - RNA, 19 nt, Artificial Sequence
  Description of Artificial Sequence: Synthetic oligonucleotide
  Sense strand starting at position 3170 of SEQ ID NO: 585287
cuugauuucuuguauauag

SEQ ID NO: 628003 - RNA, 19 nt, Artificial Sequence
  Description of Artificial Sequence: Synthetic oligonucleotide
  Antisense strand to SEQ ID NO: 628002
cuauauacaagaaaucaag

SEQ ID NO: 628004 - RNA, 19 nt, Artificial Sequence
  Description of Artificial Sequence: Synthetic oligonucleotide
  Sense strand starting at position 3207 of SEQ ID NO: 585287
uuaaucaguugguuaguca

SEQ ID NO: 628005 - RNA, 19 nt, Artificial Sequence
  Description of Artificial Sequence: Synthetic oligonucleotide
  Antisense strand to SEQ ID NO: 628004
ugacuaaccaacugauuaa

SEQ ID NO: 628006 - RNA, 19 nt, Artificial Sequence
  Description of Artificial Sequence: Synthetic oligonucleotide
  Sense strand starting at position 3215 of SEQ ID NO: 585287
uugguuagucagcacaaua

SEQ ID NO: 628007 - RNA, 19 nt, Artificial Sequence
  Description of Artificial Sequence: Synthetic oligonucleotide
  Antisense strand to SEQ ID NO: 628006
uauugugcugacuaaccaa

SEQ ID NO: 628008 - RNA, 19 nt, Artificial Sequence
  Description of Artificial Sequence: Synthetic oligonucleotide
  Sense strand starting at position 3351 of SEQ ID NO: 585287
acagcagugcuugaaguau

SEQ ID NO: 628009 - RNA, 19 nt, Artificial Sequence
  Description of Artificial Sequence: Synthetic oligonucleotide
  Antisense strand to SEQ ID NO: 628008
auacuucaagcacugcugu

SEQ ID NO: 628010 - RNA, 19 nt, Artificial Sequence
  Description of Artificial Sequence: Synthetic oligonucleotide
  Sense strand starting at position 3500 of SEQ ID NO: 585287
auugauaugacuggcugua

SEQ ID NO: 628011 - RNA, 19 nt, Artificial Sequence
  Description of Artificial Sequence: Synthetic oligonucleotide
  Antisense strand to SEQ ID NO: 628010
uacagccagucauaucaau

SEQ ID NO: 628012 - RNA, 19 nt, Artificial Sequence
  Description of Artificial Sequence: Synthetic oligonucleotide
  Sense strand starting at position 3502 of SEQ ID NO: 585287
ugauaugacuggcuguaac

SEQ ID NO: 628013 - RNA, 19 nt, Artificial Sequence
  Description of Artificial Sequence: Synthetic oligonucleotide
  Antisense strand to SEQ ID NO: 628012
guuacagccagucauauca

SEQ ID NO: 628014 - RNA, 19 nt, Artificial Sequence
  Description of Artificial Sequence: Synthetic oligonucleotide
  Sense strand starting at position 3541 of SEQ ID NO: 585287
auauguuguaaagagggua

SEQ ID NO: 628015 - RNA, 19 nt, Artificial Sequence
  Description of Artificial Sequence: Synthetic oligonucleotide
  Antisense strand to SEQ ID NO: 628014
uacccucuuuacaacauau

SEQ ID NO: 628016 - RNA, 19 nt, Artificial Sequence
  Description of Artificial Sequence: Synthetic oligonucleotide
  Sense strand starting at position 3561 of SEQ ID NO: 585287
gguagcauagguuaauuga

SEQ ID NO: 628017 - RNA, 19 nt, Artificial Sequence
  Description of Artificial Sequence: Synthetic oligonucleotide
  Antisense strand to SEQ ID NO: 628016
ucaauuaaccuaugcuacc

SEQ ID NO: 628018 - RNA, 19 nt, Artificial Sequence
  Description of Artificial Sequence: Synthetic oligonucleotide
  Sense strand starting at position 3564 of SEQ ID NO: 585287
agcauagguuaauugaaua

SEQ ID NO: 628019 - RNA, 19 nt, Artificial Sequence
  Description of Artificial Sequence: Synthetic oligonucleotide
  Antisense strand to SEQ ID NO: 628018
uauucaauuaaccuaugcu

SEQ ID NO: 628020 - RNA, 19 nt, Artificial Sequence
  Description of Artificial Sequence: Synthetic oligonucleotide
  Sense strand starting at position 3569 of SEQ ID NO: 585287
agguuaauugaauacguua

SEQ ID NO: 628021 - RNA, 19 nt, Artificial Sequence
  Description of Artificial Sequence: Synthetic oligonucleotide
  Antisense strand to SEQ ID NO: 628020
uaacguauucaauuaaccu

SEQ ID NO: 628022 - RNA, 19 nt, Artificial Sequence
  Description of Artificial Sequence: Synthetic oligonucleotide
  Sense strand starting at position 3583 of SEQ ID NO: 585287
cguuaaucuaaggguaaau

SEQ ID NO: 628023 - RNA, 19 nt, Artificial Sequence
  Description of Artificial Sequence: Synthetic oligonucleotide
  Antisense strand to SEQ ID NO: 628022
auuuacccuuagauuaacg

SEQ ID NO: 628024 - RNA, 19 nt, Artificial Sequence
  Description of Artificial Sequence: Synthetic oligonucleotide
  Sense strand starting at position 3618 of SEQ ID NO: 585287
aggcuuaauuaucuguuga

SEQ ID NO: 628025 - RNA, 19 nt, Artificial Sequence
  Description of Artificial Sequence: Synthetic oligonucleotide
  Antisense strand to SEQ ID NO: 628024
ucaacagauaauuaagccu

SEQ ID NO: 628026 - RNA, 19 nt, Artificial Sequence
  Description of Artificial Sequence: Synthetic oligonucleotide
  Sense strand starting at position 3620 of SEQ ID NO: 585287
gcuuaauuaucuguugaaa

SEQ ID NO: 628027 - RNA, 19 nt, Artificial Sequence
  Description of Artificial Sequence: Synthetic oligonucleotide
  Antisense strand to SEQ ID NO: 628026
uuucaacagauaauuaagc

SEQ ID NO: 628028 - RNA, 19 nt, Artificial Sequence
  Description of Artificial Sequence: Synthetic oligonucleotide
  Sense strand starting at position 3814 of SEQ ID NO: 585287
cccaguuuccagcgagaaa

SEQ ID NO: 628029 - RNA, 19 nt, Artificial Sequence
  Description of Artificial Sequence: Synthetic oligonucleotide
  Antisense strand to SEQ ID NO: 628028
uuucucgcuggaaacuggg

SEQ ID NO: 628030 - RNA, 19 nt, Artificial Sequence
  Description of Artificial Sequence: Synthetic oligonucleotide
  Sense strand starting at position 3932 of SEQ ID NO: 585287
ucauaagguuuccugugau

SEQ ID NO: 628031 - RNA, 19 nt, Artificial Sequence
  Description of Artificial Sequence: Synthetic oligonucleotide
  Antisense strand to SEQ ID NO: 628030
aucacaggaaaccuuauga

SEQ ID NO: 628032 - RNA, 19 nt, Artificial Sequence
  Description of Artificial Sequence: Synthetic oligonucleotide
  Sense strand starting at position 3935 of SEQ ID NO: 585287
uaagguuuccugugauaag

SEQ ID NO: 628033 - RNA, 19 nt, Artificial Sequence
  Description of Artificial Sequence: Synthetic oligonucleotide
  Antisense strand to SEQ ID NO: 628032
cuuaucacaggaaaccuua

SEQ ID NO: 628034 - RNA, 19 nt, Artificial Sequence
  Description of Artificial Sequence: Synthetic oligonucleotide
  Sense strand starting at position 372 of SEQ ID NO: 585288
uuacaauuccuuuguggua

SEQ ID NO: 628035 - RNA, 19 nt, Artificial Sequence
  Description of Artificial Sequence: Synthetic oligonucleotide
  Antisense strand to SEQ ID NO: 628034
uaccacaaaggaauuguaa

SEQ ID NO: 628036 - RNA, 19 nt, Artificial Sequence
  Description of Artificial Sequence: Synthetic oligonucleotide
  Sense strand starting at position 384 of SEQ ID NO: 585288
ugugguaauuacuuggacu

SEQ ID NO: 628037 - RNA, 19 nt, Artificial Sequence
  Description of Artificial Sequence: Synthetic oligonucleotide
  Antisense strand to SEQ ID NO: 628036
aguccaaguaauuaccaca

SEQ ID NO: 628038 - RNA, 19 nt, Artificial Sequence
  Description of Artificial Sequence: Synthetic oligonucleotide
  Sense strand starting at position 385 of SEQ ID NO: 585288
gugguaauuacuuggacua

SEQ ID NO: 628039 - RNA, 19 nt, Artificial Sequence
  Description of Artificial Sequence: Synthetic oligonucleotide
  Antisense strand to SEQ ID NO: 628038
uaguccaaguaauuaccac

SEQ ID NO: 628040 - RNA, 19 nt, Artificial Sequence
  Description of Artificial Sequence: Synthetic oligonucleotide
  Sense strand starting at position 442 of SEQ ID NO: 585288
cuauuauuguccuuccaga

SEQ ID NO: 628041 - RNA, 19 nt, Artificial Sequence
  Description of Artificial Sequence: Synthetic oligonucleotide
  Antisense strand to SEQ ID NO: 628040
ucuggaaggacaauaauag

SEQ ID NO: 628042 - RNA, 19 nt, Artificial Sequence
  Description of Artificial Sequence: Synthetic oligonucleotide
  Sense strand starting at position 447 of SEQ ID NO: 585288
auuguccuuccagaucuuu

SEQ ID NO: 628043 - RNA, 19 nt, Artificial Sequence
  Description of Artificial Sequence: Synthetic oligonucleotide
  Antisense strand to SEQ ID NO: 628042
aaagaucuggaaggacaau

SEQ ID NO: 628044 - RNA, 19 nt, Artificial Sequence
  Description of Artificial Sequence: Synthetic oligonucleotide
  Sense strand starting at position 589 of SEQ ID NO: 585288
ucaaguguccaaugccaga

SEQ ID NO: 628045 - RNA, 19 nt, Artificial Sequence
  Description of Artificial Sequence: Synthetic oligonucleotide
  Antisense strand to SEQ ID NO: 628044
ucuggcauuggacacuuga

SEQ ID NO: 628046 - RNA, 19 nt, Artificial Sequence
  Description of Artificial Sequence: Synthetic oligonucleotide
  Sense strand starting at position 594 of SEQ ID NO: 585288
uguccaaugccagaugaau

SEQ ID NO: 628047 - RNA, 19 nt, Artificial Sequence
  Description of Artificial Sequence: Synthetic oligonucleotide
  Antisense strand to SEQ ID NO: 628046
auucaucuggcauuggaca

SEQ ID NO: 628048 - RNA, 19 nt, Artificial Sequence
  Description of Artificial Sequence: Synthetic oligonucleotide
  Sense strand starting at position 671 of SEQ ID NO: 585288
ugucauuucuuauagauga

SEQ ID NO: 628049 - RNA, 19 nt, Artificial Sequence
  Description of Artificial Sequence: Synthetic oligonucleotide
  Antisense strand to SEQ ID NO: 628048
ucaucuauaagaaaugaca

SEQ ID NO: 628050 - RNA, 19 nt, Artificial Sequence
  Description of Artificial Sequence: Synthetic oligonucleotide
  Sense strand starting at position 793 of SEQ ID NO: 585288
uugucauugccagagaaca

SEQ ID NO: 628051 - RNA, 19 nt, Artificial Sequence
  Description of Artificial Sequence: Synthetic oligonucleotide
  Antisense strand to SEQ ID NO: 628050
uguucucuggcaaugacaa

SEQ ID NO: 628052 - RNA, 19 nt, Artificial Sequence
  Description of Artificial Sequence: Synthetic oligonucleotide
  Sense strand starting at position 828 of SEQ ID NO: 585288
ugggacucgggagguauaa

SEQ ID NO: 628053 - RNA, 19 nt, Artificial Sequence
  Description of Artificial Sequence: Synthetic oligonucleotide
  Antisense strand to SEQ ID NO: 628052
uuauaccucccgaguccca

SEQ ID NO: 628054 - RNA, 19 nt, Artificial Sequence
  Description of Artificial Sequence: Synthetic oligonucleotide
  Sense strand starting at position 859 of SEQ ID NO: 585288
uacuuuaaagcauggugau

SEQ ID NO: 628055 - RNA, 19 nt, Artificial Sequence
  Description of Artificial Sequence: Synthetic oligonucleotide
  Antisense strand to SEQ ID NO: 628054
aucaccaugcuuuaaagua

SEQ ID NO: 628056 - RNA, 19 nt, Artificial Sequence
  Description of Artificial Sequence: Synthetic oligonucleotide
  Sense strand starting at position 860 of SEQ ID NO: 585288
acuuuaaagcauggugaua

SEQ ID NO: 628057 - RNA, 19 nt, Artificial Sequence
  Description of Artificial Sequence: Synthetic oligonucleotide
  Antisense strand to SEQ ID NO: 628056
uaucaccaugcuuuaaagu

SEQ ID NO: 628058 - RNA, 19 nt, Artificial Sequence
  Description of Artificial Sequence: Synthetic oligonucleotide
  Sense strand starting at position 871 of SEQ ID NO: 585288
uggugauaauaguuaaugu

SEQ ID NO: 628059 - RNA, 19 nt, Artificial Sequence
  Description of Artificial Sequence: Synthetic oligonucleotide
  Antisense strand to SEQ ID NO: 628058
acauuaacuauuaucacca

SEQ ID NO: 628060 - RNA, 19 nt, Artificial Sequence
  Description of Artificial Sequence: Synthetic oligonucleotide
  Sense strand starting at position 872 of SEQ ID NO: 585288
ggugauaauaguuaaugua

SEQ ID NO: 628061 - RNA, 19 nt, Artificial Sequence
  Description of Artificial Sequence: Synthetic oligonucleotide
  Antisense strand to SEQ ID NO: 628060
uacauuaacuauuaucacc

SEQ ID NO: 628062 - RNA, 19 nt, Artificial Sequence
  Description of Artificial Sequence: Synthetic oligonucleotide
  Sense strand starting at position 908 of SEQ ID NO: 585288
gcugauaggccuuaaaugu

SEQ ID NO: 628063 - RNA, 19 nt, Artificial Sequence
  Description of Artificial Sequence: Synthetic oligonucleotide
  Antisense strand to SEQ ID NO: 628062
acauuuaaggccuaucagc

SEQ ID NO: 628064 - RNA, 19 nt, Artificial Sequence
  Description of Artificial Sequence: Synthetic oligonucleotide
  Sense strand starting at position 949 of SEQ ID NO: 585288
gauguuaagcucgauguaa

SEQ ID NO: 628065 - RNA, 19 nt, Artificial Sequence
  Description of Artificial Sequence: Synthetic oligonucleotide
  Antisense strand to SEQ ID NO: 628064
uuacaucgagcuuaacauc

SEQ ID NO: 628066 - RNA, 19 nt, Artificial Sequence
  Description of Artificial Sequence: Synthetic oligonucleotide
  Sense strand starting at position 988 of SEQ ID NO: 585288
gucagaucagauuguacau

SEQ ID NO: 628067 - RNA, 19 nt, Artificial Sequence
  Description of Artificial Sequence: Synthetic oligonucleotide
  Antisense strand to SEQ ID NO: 628066
auguacaaucugaucugac

SEQ ID NO: 628068 - RNA, 19 nt, Artificial Sequence
  Description of Artificial Sequence: Synthetic oligonucleotide
  Sense strand starting at position 994 of SEQ ID NO: 585288
ucagauuguacauguaagu

SEQ ID NO: 628069 - RNA, 19 nt, Artificial Sequence
  Description of Artificial Sequence: Synthetic oligonucleotide
  Antisense strand to SEQ ID NO: 628068
acuuacauguacaaucuga

SEQ ID NO: 628070 - RNA, 19 nt, Artificial Sequence
  Description of Artificial Sequence: Synthetic oligonucleotide
  Sense strand starting at position 1011 of SEQ ID NO: 585288
guugucauaccuuaaugag

SEQ ID NO: 628071 - RNA, 19 nt, Artificial Sequence
  Description of Artificial Sequence: Synthetic oligonucleotide
  Antisense strand to SEQ ID NO: 628070
cucauuaagguaugacaac

SEQ ID NO: 628072 - RNA, 19 nt, Artificial Sequence
  Description of Artificial Sequence: Synthetic oligonucleotide
  Sense strand starting at position 1360 of SEQ ID NO: 585288
uccgauuaccacugucaag

SEQ ID NO: 628073 - RNA, 19 nt, Artificial Sequence
  Description of Artificial Sequence: Synthetic oligonucleotide
  Antisense strand to SEQ ID NO: 628072
cuugacagugguaaucgga

SEQ ID NO: 628074 - RNA, 19 nt, Artificial Sequence
  Description of Artificial Sequence: Synthetic oligonucleotide
  Sense strand starting at position 1446 of SEQ ID NO: 585288
cguaaacaagcuuacgaau

SEQ ID NO: 628075 - RNA, 19 nt, Artificial Sequence
  Description of Artificial Sequence: Synthetic oligonucleotide
  Antisense strand to SEQ ID NO: 628074
auucguaagcuuguuuacg

SEQ ID NO: 628076 - RNA, 19 nt, Artificial Sequence
  Description of Artificial Sequence: Synthetic oligonucleotide
  Sense strand starting at position 1568 of SEQ ID NO: 585288
agaacugacucagaaccaa

SEQ ID NO: 628077 - RNA, 19 nt, Artificial Sequence
  Description of Artificial Sequence: Synthetic oligonucleotide
  Antisense strand to SEQ ID NO: 628076
uugguucugagucaguucu

SEQ ID NO: 628078 - RNA, 19 nt, Artificial Sequence
  Description of Artificial Sequence: Synthetic oligonucleotide
  Sense strand starting at position 2182 of SEQ ID NO: 585288
ucuuguuuccguguucuga

SEQ ID NO: 628079 - RNA, 19 nt, Artificial Sequence
  Description of Artificial Sequence: Synthetic oligonucleotide
  Antisense strand to SEQ ID NO: 628078
ucagaacacggaaacaaga

SEQ ID NO: 628080 - RNA, 19 nt, Artificial Sequence
  Description of Artificial Sequence: Synthetic oligonucleotide
  Sense strand starting at position 2384 of SEQ ID NO: 585288
ugagaucugcgugagcaaa

SEQ ID NO: 628081 - RNA, 19 nt, Artificial Sequence
  Description of Artificial Sequence: Synthetic oligonucleotide
  Antisense strand to SEQ ID NO: 628080
uuugcucacgcagaucuca

SEQ ID NO: 628082 - RNA, 19 nt, Artificial Sequence
  Description of Artificial Sequence: Synthetic oligonucleotide
  Sense strand starting at position 2450 of SEQ ID NO: 585288
acauuaguccagcaugaua

SEQ ID NO: 628083 - RNA, 19 nt, Artificial Sequence
  Description of Artificial Sequence: Synthetic oligonucleotide
  Antisense strand to SEQ ID NO: 628082
uaucaugcuggacuaaugu

SEQ ID NO: 628084 - RNA, 19 nt, Artificial Sequence
  Description of Artificial Sequence: Synthetic oligonucleotide
  Sense strand starting at position 2462 of SEQ ID NO: 585288
caugauagcgcuuacacuu

SEQ ID NO: 628085 - RNA, 19 nt, Artificial Sequence
  Description of Artificial Sequence: Synthetic oligonucleotide
  Antisense strand to SEQ ID NO: 628084
aaguguaagcgcuaucaug

SEQ ID NO: 628086 - RNA, 19 nt, Artificial Sequence
  Description of Artificial Sequence: Synthetic oligonucleotide
  Sense strand starting at position 2469 of SEQ ID NO: 585288
gcgcuuacacuuuaggaga

SEQ ID NO: 628087 - RNA, 19 nt, Artificial Sequence
  Description of Artificial Sequence: Synthetic oligonucleotide
  Antisense strand to SEQ ID NO: 628086
ucuccuaaaguguaagcgc

SEQ ID NO: 628088 - RNA, 19 nt, Artificial Sequence
  Description of Artificial Sequence: Synthetic oligonucleotide
  Sense strand starting at position 2529 of SEQ ID NO: 585288
guaacaacagccuguuauc

SEQ ID NO: 628089 - RNA, 19 nt, Artificial Sequence
  Description of Artificial Sequence: Synthetic oligonucleotide
  Antisense strand to SEQ ID NO: 628088
gauaacaggcuguuguuac

SEQ ID NO: 628090 - RNA, 19 nt, Artificial Sequence
  Description of Artificial Sequence: Synthetic oligonucleotide
  Sense strand starting at position 2653 of SEQ ID NO: 585288
uuacaacuucgcguuguuu

SEQ ID NO: 628091 - RNA, 19 nt, Artificial Sequence
  Description of Artificial Sequence: Synthetic oligonucleotide
  Antisense strand to SEQ ID NO: 628090
aaacaacgcgaaguuguaa

SEQ ID NO: 628092 - RNA, 19 nt, Artificial Sequence
  Description of Artificial Sequence: Synthetic oligonucleotide
  Sense strand starting at position 2844 of SEQ ID NO: 585288
uuauacauacucggaacua

SEQ ID NO: 628093 - RNA, 19 nt, Artificial Sequence
  Description of Artificial Sequence: Synthetic oligonucleotide
  Antisense strand to SEQ ID NO: 628092
uaguuccgaguauguauaa

SEQ ID NO: 628094 - RNA, 19 nt, Artificial Sequence
  Description of Artificial Sequence: Synthetic oligonucleotide
  Sense strand starting at position 2912 of SEQ ID NO: 585288
gggaaucuauguucacggu

SEQ ID NO: 628095 - RNA, 19 nt, Artificial Sequence
  Description of Artificial Sequence: Synthetic oligonucleotide
  Antisense strand to SEQ ID NO: 628094
accgugaacauagauuccc

SEQ ID NO: 628096 - RNA, 19 nt, Artificial Sequence
  Description of Artificial Sequence: Synthetic oligonucleotide
  Sense strand starting at position 2913 of SEQ ID NO: 585288
ggaaucuauguucacgguu

SEQ ID NO: 628097 - RNA, 19 nt, Artificial Sequence
  Description of Artificial Sequence: Synthetic oligonucleotide
  Antisense strand to SEQ ID NO: 628096
aaccgugaacauagauucc

SEQ ID NO: 628098 - RNA, 19 nt, Artificial Sequence
  Description of Artificial Sequence: Synthetic oligonucleotide
  Sense strand starting at position 3297 of SEQ ID NO: 585288
uuuguugauugagucuuga

SEQ ID NO: 628099 - RNA, 19 nt, Artificial Sequence
  Description of Artificial Sequence: Synthetic oligonucleotide
  Antisense strand to SEQ ID NO: 628098
ucaagacucaaucaacaaa

SEQ ID NO: 628100 - RNA, 19 nt, Artificial Sequence
  Description of Artificial Sequence: Synthetic oligonucleotide
  Sense strand starting at position 3321 of SEQ ID NO: 585288
ugaacuaguuacccagcaa

SEQ ID NO: 628101 - RNA, 19 nt, Artificial Sequence
  Description of Artificial Sequence: Synthetic oligonucleotide
  Antisense strand to SEQ ID NO: 628100
uugcuggguaacuaguuca

SEQ ID NO: 628102 - RNA, 19 nt, Artificial Sequence
  Description of Artificial Sequence: Synthetic oligonucleotide
  Sense strand starting at position 3325 of SEQ ID NO: 585288
cuaguuacccagcaagauu

SEQ ID NO: 628103 - RNA, 19 nt, Artificial Sequence
  Description of Artificial Sequence: Synthetic oligonucleotide
  Antisense strand to SEQ ID NO: 628102
aaucuugcuggguaacuag

SEQ ID NO: 628104 - RNA, 19 nt, Artificial Sequence
  Description of Artificial Sequence: Synthetic oligonucleotide
  Sense strand starting at position 3544 of SEQ ID NO: 585288
gucacauaccuguaauauu

SEQ ID NO: 628105 - RNA, 19 nt, Artificial Sequence
  Description of Artificial Sequence: Synthetic oligonucleotide
  Antisense strand to SEQ ID NO: 628104
aauauuacagguaugugac

SEQ ID NO: 628106 - RNA, 19 nt, Artificial Sequence
  Description of Artificial Sequence: Synthetic oligonucleotide
  Sense strand starting at position 3615 of SEQ ID NO: 585288
uuacauugagccgaaauca

SEQ ID NO: 628107 - RNA, 19 nt, Artificial Sequence
  Description of Artificial Sequence: Synthetic oligonucleotide
  Antisense strand to SEQ ID NO: 628106
ugauuucggcucaauguaa

SEQ ID NO: 628108 - RNA, 19 nt, Artificial Sequence
  Description of Artificial Sequence: Synthetic oligonucleotide
  Sense strand starting at position 3767 of SEQ ID NO: 585288
uuugacuuaccuuguuuga

SEQ ID NO: 628109 - RNA, 19 nt, Artificial Sequence
  Description of Artificial Sequence: Synthetic oligonucleotide
  Antisense strand to SEQ ID NO: 628108
ucaaacaagguaagucaaa

SEQ ID NO: 628110 - RNA, 19 nt, Artificial Sequence
  Description of Artificial Sequence: Synthetic oligonucleotide
  Sense strand starting at position 3899 of SEQ ID NO: 585288
gucucuuagcauuagauca

SEQ ID NO: 628111 - RNA, 19 nt, Artificial Sequence
  Description of Artificial Sequence: Synthetic oligonucleotide
  Antisense strand to SEQ ID NO: 628110
ugaucuaaugcuaagagac

SEQ ID NO: 628112 - RNA, 19 nt, Artificial Sequence
  Description of Artificial Sequence: Synthetic oligonucleotide
  Sense strand starting at position 3919 of SEQ ID NO: 585288
acacauuauguccagucau

SEQ ID NO: 628113 - RNA, 19 nt, Artificial Sequence
  Description of Artificial Sequence: Synthetic oligonucleotide
  Antisense strand to SEQ ID NO: 628112
augacuggacauaaugugu

SEQ ID NO: 628114 - RNA, 19 nt, Artificial Sequence
  Description of Artificial Sequence: Synthetic oligonucleotide
  Sense strand starting at position 156 of SEQ ID NO: 585289
aggccagaauggucuccaa

SEQ ID NO: 628115 - RNA, 19 nt, Artificial Sequence
  Description of Artificial Sequence: Synthetic oligonucleotide
  Antisense strand to SEQ ID NO: 628114
uuggagaccauucuggccu

SEQ ID NO: 628116 - RNA, 19 nt, Artificial Sequence
  Description of Artificial Sequence: Synthetic oligonucleotide
  Sense strand starting at position 300 of SEQ ID NO: 585289
ccaggaguuguguaauuaa

SEQ ID NO: 628117 - RNA, 19 nt, Artificial Sequence
  Description of Artificial Sequence: Synthetic oligonucleotide
  Antisense strand to SEQ ID NO: 628116
uuaauuacacaacuccugg

SEQ ID NO: 628118 - RNA, 19 nt, Artificial Sequence
  Description of Artificial Sequence: Synthetic oligonucleotide
  Sense strand starting at position 303 of SEQ ID NO: 585289
ggaguuguguaauuaaacc

SEQ ID NO: 628119 - RNA, 19 nt, Artificial Sequence
  Description of Artificial Sequence: Synthetic oligonucleotide
  Antisense strand to SEQ ID NO: 628118
gguuuaauuacacaacucc

SEQ ID NO: 628120 - RNA, 19 nt, Artificial Sequence
  Description of Artificial Sequence: Synthetic oligonucleotide
  Sense strand starting at position 332 of SEQ ID NO: 585289
augaaaucauaggaaauac

SEQ ID NO: 628121 - RNA, 19 nt, Artificial Sequence
  Description of Artificial Sequence: Synthetic oligonucleotide
  Antisense strand to SEQ ID NO: 628120
guauuuccuaugauuucau

SEQ ID NO: 628122 - RNA, 19 nt, Artificial Sequence
  Description of Artificial Sequence: Synthetic oligonucleotide
  Sense strand starting at position 342 of SEQ ID NO: 585289
aggaaauaccugugucaag

SEQ ID NO: 628123 - RNA, 19 nt, Artificial Sequence
  Description of Artificial Sequence: Synthetic oligonucleotide
  Antisense strand to SEQ ID NO: 628122
cuugacacagguauuuccu

SEQ ID NO: 628124 - RNA, 19 nt, Artificial Sequence
  Description of Artificial Sequence: Synthetic oligonucleotide
  Sense strand starting at position 343 of SEQ ID NO: 585289
ggaaauaccugugucaagu

SEQ ID NO: 628125 - RNA, 19 nt, Artificial Sequence
  Description of Artificial Sequence: Synthetic oligonucleotide
  Antisense strand to SEQ ID NO: 628124
acuugacacagguauuucc

SEQ ID NO: 628126 - RNA, 19 nt, Artificial Sequence
  Description of Artificial Sequence: Synthetic oligonucleotide
  Sense strand starting at position 438 of SEQ ID NO: 585289
cucacacuuugggugauaa

SEQ ID NO: 628127 - RNA, 19 nt, Artificial Sequence
  Description of Artificial Sequence: Synthetic oligonucleotide
  Antisense strand to SEQ ID NO: 628126
uuaucacccaaagugugag

SEQ ID NO: 628128 - RNA, 19 nt, Artificial Sequence
  Description of Artificial Sequence: Synthetic oligonucleotide
  Sense strand starting at position 439 of SEQ ID NO: 585289
ucacacuuugggugauaaa

SEQ ID NO: 628129 - RNA, 19 nt, Artificial Sequence
  Description of Artificial Sequence: Synthetic oligonucleotide
  Antisense strand to SEQ ID NO: 628128
uuuaucacccaaaguguga

SEQ ID NO: 628130 - RNA, 19 nt, Artificial Sequence
  Description of Artificial Sequence: Synthetic oligonucleotide
  Sense strand starting at position 643 of SEQ ID NO: 585289
agugacggcauguaagaau

SEQ ID NO: 628131 - RNA, 19 nt, Artificial Sequence
  Description of Artificial Sequence: Synthetic oligonucleotide
  Antisense strand to SEQ ID NO: 628130
auucuuacaugccgucacu

SEQ ID NO: 628132 - RNA, 19 nt, Artificial Sequence
  Description of Artificial Sequence: Synthetic oligonucleotide
  Sense strand starting at position 692 of SEQ ID NO: 585289
acagguuccuuccuuaaag

SEQ ID NO: 628133 - RNA, 19 nt, Artificial Sequence
  Description of Artificial Sequence: Synthetic oligonucleotide
  Antisense strand to SEQ ID NO: 628132
cuuuaaggaaggaaccugu

SEQ ID NO: 628134 - RNA, 19 nt, Artificial Sequence
  Description of Artificial Sequence: Synthetic oligonucleotide
  Sense strand starting at position 694 of SEQ ID NO: 585289
agguuccuuccuuaaagca

SEQ ID NO: 628135 - RNA, 19 nt, Artificial Sequence
  Description of Artificial Sequence: Synthetic oligonucleotide
  Antisense strand to SEQ ID NO: 628134
ugcuuuaaggaaggaaccu

SEQ ID NO: 628136 - RNA, 19 nt, Artificial Sequence
  Description of Artificial Sequence: Synthetic oligonucleotide
  Sense strand starting at position 740 of SEQ ID NO: 585289
aggugauaguauccuuaaa

SEQ ID NO: 628137 - RNA, 19 nt, Artificial Sequence
  Description of Artificial Sequence: Synthetic oligonucleotide
  Antisense strand to SEQ ID NO: 628136
uuuaaggauacuaucaccu

SEQ ID NO: 628138 - RNA, 19 nt, Artificial Sequence
  Description of Artificial Sequence: Synthetic oligonucleotide
  Sense strand starting at position 742 of SEQ ID NO: 585289
gugauaguauccuuaaacc

SEQ ID NO: 628139 - RNA, 19 nt, Artificial Sequence
  Description of Artificial Sequence: Synthetic oligonucleotide
  Antisense strand to SEQ ID NO: 628138
gguuuaaggauacuaucac

SEQ ID NO: 628140 - RNA, 19 nt, Artificial Sequence
  Description of Artificial Sequence: Synthetic oligonucleotide
  Sense strand starting at position 770 of SEQ ID NO: 585289
agaaucucggguuggauaa

SEQ ID NO: 628141 - RNA, 19 nt, Artificial Sequence
  Description of Artificial Sequence: Synthetic oligonucleotide
  Antisense strand to SEQ ID NO: 628140
uuauccaacccgagauucu

SEQ ID NO: 628142 - RNA, 19 nt, Artificial Sequence
  Description of Artificial Sequence: Synthetic oligonucleotide
  Sense strand starting at position 777 of SEQ ID NO: 585289
cggguuggauaaccucaaa

SEQ ID NO: 628143 - RNA, 19 nt, Artificial Sequence
  Description of Artificial Sequence: Synthetic oligonucleotide
  Antisense strand to SEQ ID NO: 628142
uuugagguuauccaacccg

SEQ ID NO: 628144 - RNA, 19 nt, Artificial Sequence
  Description of Artificial Sequence: Synthetic oligonucleotide
  Sense strand starting at position 845 of SEQ ID NO: 585289
guuuacuuacuaggaaucu

SEQ ID NO: 628145 - RNA, 19 nt, Artificial Sequence
  Description of Artificial Sequence: Synthetic oligonucleotide
  Antisense strand to SEQ ID NO: 628144
agauuccuaguaaguaaac

SEQ ID NO: 628146 - RNA, 19 nt, Artificial Sequence
  Description of Artificial Sequence: Synthetic oligonucleotide
  Sense strand starting at position 920 of SEQ ID NO: 585289
gaggaauucucagcgguaa

SEQ ID NO: 628147 - RNA, 19 nt, Artificial Sequence
  Description of Artificial Sequence: Synthetic oligonucleotide
  Antisense strand to SEQ ID NO: 628146
uuaccgcugagaauuccuc

SEQ ID NO: 628148 - RNA, 19 nt, Artificial Sequence
  Description of Artificial Sequence: Synthetic oligonucleotide
  Sense strand starting at position 921 of SEQ ID NO: 585289
aggaauucucagcgguaaa

SEQ ID NO: 628149 - RNA, 19 nt, Artificial Sequence
  Description of Artificial Sequence: Synthetic oligonucleotide
  Antisense strand to SEQ ID NO: 628148
uuuaccgcugagaauuccu

SEQ ID NO: 628150 - RNA, 19 nt, Artificial Sequence
  Description of Artificial Sequence: Synthetic oligonucleotide
  Sense strand starting at position 922 of SEQ ID NO: 585289
ggaauucucagcgguaaag

SEQ ID NO: 628151 - RNA, 19 nt, Artificial Sequence
  Description of Artificial Sequence: Synthetic oligonucleotide
  Antisense strand to SEQ ID NO: 628150
cuuuaccgcugagaauucc

SEQ ID NO: 628152 - RNA, 19 nt, Artificial Sequence
  Description of Artificial Sequence: Synthetic oligonucleotide
  Sense strand starting at position 924 of SEQ ID NO: 585289
aauucucagcgguaaagcu

SEQ ID NO: 628153 - RNA, 19 nt, Artificial Sequence
  Description of Artificial Sequence: Synthetic oligonucleotide
  Antisense strand to SEQ ID NO: 628152
agcuuuaccgcugagaauu

SEQ ID NO: 628154 - RNA, 19 nt, Artificial Sequence
  Description of Artificial Sequence: Synthetic oligonucleotide
  Sense strand starting at position 963 of SEQ ID NO: 585289
aggauaaguuagucuuugu

SEQ ID NO: 628155 - RNA, 19 nt, Artificial Sequence
  Description of Artificial Sequence: Synthetic oligonucleotide
  Antisense strand to SEQ ID NO: 628154
acaaagacuaacuuauccu

SEQ ID NO: 628156 - RNA, 19 nt, Artificial Sequence
  Description of Artificial Sequence: Synthetic oligonucleotide
  Sense strand starting at position 999 of SEQ ID NO: 585289
acugauaagcuacguauuu

SEQ ID NO: 628157 - RNA, 19 nt, Artificial Sequence
  Description of Artificial Sequence: Synthetic oligonucleotide
  Antisense strand to SEQ ID NO: 628156
aaauacguagcuuaucagu

SEQ ID NO: 628158 - RNA, 19 nt, Artificial Sequence
  Description of Artificial Sequence: Synthetic oligonucleotide
  Sense strand starting at position 1095 of SEQ ID NO: 585289
gauuaaagguuguugcaua

SEQ ID NO: 628159 - RNA, 19 nt, Artificial Sequence
  Description of Artificial Sequence: Synthetic oligonucleotide
  Antisense strand to SEQ ID NO: 628158
uaugcaacaaccuuuaauc

SEQ ID NO: 628160 - RNA, 19 nt, Artificial Sequence
  Description of Artificial Sequence: Synthetic oligonucleotide
  Sense strand starting at position 1100 of SEQ ID NO: 585289
aagguuguugcauaauaag

SEQ ID NO: 628161 - RNA, 19 nt, Artificial Sequence
  Description of Artificial Sequence: Synthetic oligonucleotide
  Antisense strand to SEQ ID NO: 628160
cuuauuaugcaacaaccuu

SEQ ID NO: 628162 - RNA, 19 nt, Artificial Sequence
  Description of Artificial Sequence: Synthetic oligonucleotide
  Sense strand starting at position 1338 of SEQ ID NO: 585289
gagacccggucuuuggaaa

SEQ ID NO: 628163 - RNA, 19 nt, Artificial Sequence
  Description of Artificial Sequence: Synthetic oligonucleotide
  Antisense strand to SEQ ID NO: 628162
uuuccaaagaccgggucuc

SEQ ID NO: 628164 - RNA, 19 nt, Artificial Sequence
  Description of Artificial Sequence: Synthetic oligonucleotide
  Sense strand starting at position 1521 of SEQ ID NO: 585289
agugacugaugccuacuua

SEQ ID NO: 628165 - RNA, 19 nt, Artificial Sequence
  Description of Artificial Sequence: Synthetic oligonucleotide
  Antisense strand to SEQ ID NO: 628164
uaaguaggcaucagucacu

SEQ ID NO: 628166 - RNA, 19 nt, Artificial Sequence
  Description of Artificial Sequence: Synthetic oligonucleotide
  Sense strand starting at position 1907 of SEQ ID NO: 585289
uggugaugcccuggauauu

SEQ ID NO: 628167 - RNA, 19 nt, Artificial Sequence
  Description of Artificial Sequence: Synthetic oligonucleotide
  Antisense strand to SEQ ID NO: 628166
aauauccagggcaucacca

SEQ ID NO: 628168 - RNA, 19 nt, Artificial Sequence
  Description of Artificial Sequence: Synthetic oligonucleotide
  Sense strand starting at position 1908 of SEQ ID NO: 585289
ggugaugcccuggauauug

SEQ ID NO: 628169 - RNA, 19 nt, Artificial Sequence
  Description of Artificial Sequence: Synthetic oligonucleotide
  Antisense strand to SEQ ID NO: 628168
caauauccagggcaucacc

SEQ ID NO: 628170 - RNA, 19 nt, Artificial Sequence
  Description of Artificial Sequence: Synthetic oligonucleotide
  Sense strand starting at position 1917 of SEQ ID NO: 585289
cuggauauugucgcgcagu

SEQ ID NO: 628171 - RNA, 19 nt, Artificial Sequence
  Description of Artificial Sequence: Synthetic oligonucleotide
  Antisense strand to SEQ ID NO: 628170
acugcgcgacaauauccag

SEQ ID NO: 628172 - RNA, 19 nt, Artificial Sequence
  Description of Artificial Sequence: Synthetic oligonucleotide
  Sense strand starting at position 1919 of SEQ ID NO: 585289
ggauauugucgcgcaguac

SEQ ID NO: 628173 - RNA, 19 nt, Artificial Sequence
  Description of Artificial Sequence: Synthetic oligonucleotide
  Antisense strand to SEQ ID NO: 628172
guacugcgcgacaauaucc

SEQ ID NO: 628174 - RNA, 19 nt, Artificial Sequence
  Description of Artificial Sequence: Synthetic oligonucleotide
  Sense strand starting at position 2181 of SEQ ID NO: 585289
ucuuguuuccguguucuga

SEQ ID NO: 628175 - RNA, 19 nt, Artificial Sequence
  Description of Artificial Sequence: Synthetic oligonucleotide
  Antisense strand to SEQ ID NO: 628174
ucagaacacggaaacaaga

SEQ ID NO: 628176 - RNA, 19 nt, Artificial Sequence
  Description of Artificial Sequence: Synthetic oligonucleotide
  Sense strand starting at position 2341 of SEQ ID NO: 585289
caggcuaguuaaucaugua

SEQ ID NO: 628177 - RNA, 19 nt, Artificial Sequence
  Description of Artificial Sequence: Synthetic oligonucleotide
  Antisense strand to SEQ ID NO: 628176
uacaugauuaacuagccug

SEQ ID NO: 628178 - RNA, 19 nt, Artificial Sequence
  Description of Artificial Sequence: Synthetic oligonucleotide
  Sense strand starting at position 2393 of SEQ ID NO: 585289
aaauguauacaguguugua

SEQ ID NO: 628179 - RNA, 19 nt, Artificial Sequence
  Description of Artificial Sequence: Synthetic oligonucleotide
  Antisense strand to SEQ ID NO: 628178
uacaacacuguauacauuu

SEQ ID NO: 628180 - RNA, 19 nt, Artificial Sequence
  Description of Artificial Sequence: Synthetic oligonucleotide
  Sense strand starting at position 2815 of SEQ ID NO: 585289
ugauaauugcauuagcuuu

SEQ ID NO: 628181 - RNA, 19 nt, Artificial Sequence
  Description of Artificial Sequence: Synthetic oligonucleotide
  Antisense strand to SEQ ID NO: 628180
aaagcuaaugcaauuauca

SEQ ID NO: 628182 - RNA, 19 nt, Artificial Sequence
  Description of Artificial Sequence: Synthetic oligonucleotide
  Sense strand starting at position 2821 of SEQ ID NO: 585289
uugcauuagcuuuaggacu

SEQ ID NO: 628183 - RNA, 19 nt, Artificial Sequence
  Description of Artificial Sequence: Synthetic oligonucleotide
  Antisense strand to SEQ ID NO: 628182
aguccuaaagcuaaugcaa

SEQ ID NO: 628184 - RNA, 19 nt, Artificial Sequence
  Description of Artificial Sequence: Synthetic oligonucleotide
  Sense strand starting at position 2834 of SEQ ID NO: 585289
aggacuuaauuggaauaga

SEQ ID NO: 628185 - RNA, 19 nt, Artificial Sequence
  Description of Artificial Sequence: Synthetic oligonucleotide
  Antisense strand to SEQ ID NO: 628184
ucuauuccaauuaaguccu

SEQ ID NO: 628186 - RNA, 19 nt, Artificial Sequence
  Description of Artificial Sequence: Synthetic oligonucleotide
  Sense strand starting at position 3127 of SEQ ID NO: 585289
ugcucuugaucucuugaca

SEQ ID NO: 628187 - RNA, 19 nt, Artificial Sequence
  Description of Artificial Sequence: Synthetic oligonucleotide
  Antisense strand to SEQ ID NO: 628186
ugucaagagaucaagagca

SEQ ID NO: 628188 - RNA, 19 nt, Artificial Sequence
  Description of Artificial Sequence: Synthetic oligonucleotide
  Sense strand starting at position 3743 of SEQ ID NO: 585289
guaguuaagaguugaaacu

SEQ ID NO: 628189 - RNA, 19 nt, Artificial Sequence
  Description of Artificial Sequence: Synthetic oligonucleotide
  Antisense strand to SEQ ID NO: 628188
aguuucaacucuuaacuac

SEQ ID NO: 628190 - RNA, 19 nt, Artificial Sequence
  Description of Artificial Sequence: Synthetic oligonucleotide
  Sense strand starting at position 3816 of SEQ ID NO: 585289
ugacuuguuaccgaucaga

SEQ ID NO: 628191 - RNA, 19 nt, Artificial Sequence
  Description of Artificial Sequence: Synthetic oligonucleotide
  Antisense strand to SEQ ID NO: 628190
ucugaucgguaacaaguca

SEQ ID NO: 628192 - RNA, 19 nt, Artificial Sequence
  Description of Artificial Sequence: Synthetic oligonucleotide
  Sense strand starting at position 3839 of SEQ ID NO: 585289
aggugacuuguuuauucuu

SEQ ID NO: 628193 - RNA, 19 nt, Artificial Sequence
  Description of Artificial Sequence: Synthetic oligonucleotide
  Antisense strand to SEQ ID NO: 628192
aagaauaaacaagucaccu

SEQ ID NO: 628194 - RNA, 19 nt, Artificial Sequence
  Description of Artificial Sequence: Synthetic oligonucleotide
  Sense strand starting at position 152 of SEQ ID NO: 585290
gagugauaauccuuaucag

SEQ ID NO: 628195 - RNA, 19 nt, Artificial Sequence
  Description of Artificial Sequence: Synthetic oligonucleotide
  Antisense strand to SEQ ID NO: 628194
cugauaaggauuaucacuc

SEQ ID NO: 628196 - RNA, 19 nt, Artificial Sequence
  Description of Artificial Sequence: Synthetic oligonucleotide
  Sense strand starting at position 153 of SEQ ID NO: 585290
agugauaauccuuaucagu

SEQ ID NO: 628197 - RNA, 19 nt, Artificial Sequence
  Description of Artificial Sequence: Synthetic oligonucleotide
  Antisense strand to SEQ ID NO: 628196
acugauaaggauuaucacu

SEQ ID NO: 628198 - RNA, 19 nt, Artificial Sequence
  Description of Artificial Sequence: Synthetic oligonucleotide
  Sense strand starting at position 155 of SEQ ID NO: 585290
ugauaauccuuaucaguag

SEQ ID NO: 628199 - RNA, 19 nt, Artificial Sequence
  Description of Artificial Sequence: Synthetic oligonucleotide
  Antisense strand to SEQ ID NO: 628198
cuacugauaaggauuauca

SEQ ID NO: 628200 - RNA, 19 nt, Artificial Sequence
  Description of Artificial Sequence: Synthetic oligonucleotide
  Sense strand starting at position 176 of SEQ ID NO: 585290
acagguucuguaugugaaa

SEQ ID NO: 628201 - RNA, 19 nt, Artificial Sequence
  Description of Artificial Sequence: Synthetic oligonucleotide
  Antisense strand to SEQ ID NO: 628200
uuucacauacagaaccugu

SEQ ID NO: 628202 - RNA, 19 nt, Artificial Sequence
  Description of Artificial Sequence: Synthetic oligonucleotide
  Sense strand starting at position 177 of SEQ ID NO: 585290
cagguucuguaugugaaau

SEQ ID NO: 628203 - RNA, 19 nt, Artificial Sequence
  Description of Artificial Sequence: Synthetic oligonucleotide
  Antisense strand to SEQ ID NO: 628202
auuucacauacagaaccug

SEQ ID NO: 628204 - RNA, 19 nt, Artificial Sequence
  Description of Artificial Sequence: Synthetic oligonucleotide
  Sense strand starting at position 366 of SEQ ID NO: 585290
gacagacuucuugggcuga

SEQ ID NO: 628205 - RNA, 19 nt, Artificial Sequence
  Description of Artificial Sequence: Synthetic oligonucleotide
  Antisense strand to SEQ ID NO: 628204
ucagcccaagaagucuguc

SEQ ID NO: 628206 - RNA, 19 nt, Artificial Sequence
  Description of Artificial Sequence: Synthetic oligonucleotide
  Sense strand starting at position 368 of SEQ ID NO: 585290
cagacuucuugggcugaua

SEQ ID NO: 628207 - RNA, 19 nt, Artificial Sequence
  Description of Artificial Sequence: Synthetic oligonucleotide
  Antisense strand to SEQ ID NO: 628206
uaucagcccaagaagucug

SEQ ID NO: 628208 - RNA, 19 nt, Artificial Sequence
  Description of Artificial Sequence: Synthetic oligonucleotide
  Sense strand starting at position 371 of SEQ ID NO: 585290
acuucuugggcugauagga

SEQ ID NO: 628209 - RNA, 19 nt, Artificial Sequence
  Description of Artificial Sequence: Synthetic oligonucleotide
  Antisense strand to SEQ ID NO: 628208
uccuaucagcccaagaagu

SEQ ID NO: 628210 - RNA, 19 nt, Artificial Sequence
  Description of Artificial Sequence: Synthetic oligonucleotide
  Sense strand starting at position 426 of SEQ ID NO: 585290
gcuggaugucuuuaggcau

SEQ ID NO: 628211 - RNA, 19 nt, Artificial Sequence
  Description of Artificial Sequence: Synthetic oligonucleotide
  Antisense strand to SEQ ID NO: 628210
augccuaaagacauccagc

SEQ ID NO: 628212 - RNA, 19 nt, Artificial Sequence
  Description of Artificial Sequence: Synthetic oligonucleotide
  Sense strand starting at position 429 of SEQ ID NO: 585290
ggaugucuuuaggcauaau

SEQ ID NO: 628213 - RNA, 19 nt, Artificial Sequence
  Description of Artificial Sequence: Synthetic oligonucleotide
  Antisense strand to SEQ ID NO: 628212
auuaugccuaaagacaucc

SEQ ID NO: 628214 - RNA, 19 nt, Artificial Sequence
  Description of Artificial Sequence: Synthetic oligonucleotide
  Sense strand starting at position 432 of SEQ ID NO: 585290
ugucuuuaggcauaauagu

SEQ ID NO: 628215 - RNA, 19 nt, Artificial Sequence
  Description of Artificial Sequence: Synthetic oligonucleotide
  Antisense strand to SEQ ID NO: 628214
acuauuaugccuaaagaca

SEQ ID NO: 628216 - RNA, 19 nt, Artificial Sequence
  Description of Artificial Sequence: Synthetic oligonucleotide
  Sense strand starting at position 576 of SEQ ID NO: 585290
gugcgaucucccguaccaa

SEQ ID NO: 628217 - RNA, 19 nt, Artificial Sequence
  Description of Artificial Sequence: Synthetic oligonucleotide
  Antisense strand to SEQ ID NO: 628216
uugguacgggagaucgcac

SEQ ID NO: 628218 - RNA, 19 nt, Artificial Sequence
  Description of Artificial Sequence: Synthetic oligonucleotide
  Sense strand starting at position 769 of SEQ ID NO: 585290
gguggacuugcgagcuguu

SEQ ID NO: 628219 - RNA, 19 nt, Artificial Sequence
  Description of Artificial Sequence: Synthetic oligonucleotide
  Antisense strand to SEQ ID NO: 628218
aacagcucgcaaguccacc

SEQ ID NO: 628220 - RNA, 19 nt, Artificial Sequence
  Description of Artificial Sequence: Synthetic oligonucleotide
  Sense strand starting at position 1237 of SEQ ID NO: 585290
cguugugguaugccaguau

SEQ ID NO: 628221 - RNA, 19 nt, Artificial Sequence
  Description of Artificial Sequence: Synthetic oligonucleotide
  Antisense strand to SEQ ID NO: 628220
auacuggcauaccacaacg

SEQ ID NO: 628222 - RNA, 19 nt, Artificial Sequence
  Description of Artificial Sequence: Synthetic oligonucleotide
  Sense strand starting at position 1241 of SEQ ID NO: 585290
gugguaugccaguauuucu

SEQ ID NO: 628223 - RNA, 19 nt, Artificial Sequence
  Description of Artificial Sequence: Synthetic oligonucleotide
  Antisense strand to SEQ ID NO: 628222
agaaauacuggcauaccac

SEQ ID NO: 628224 - RNA, 19 nt, Artificial Sequence
  Description of Artificial Sequence: Synthetic oligonucleotide
  Sense strand starting at position 1244 of SEQ ID NO: 585290
guaugccaguauuucucaa

SEQ ID NO: 628225 - RNA, 19 nt, Artificial Sequence
  Description of Artificial Sequence: Synthetic oligonucleotide
  Antisense strand to SEQ ID NO: 628224
uugagaaauacuggcauac

SEQ ID NO: 628226 - RNA, 19 nt, Artificial Sequence
  Description of Artificial Sequence: Synthetic oligonucleotide
  Sense strand starting at position 1303 of SEQ ID NO: 585290
ucuguaaagggcgauauua

SEQ ID NO: 628227 - RNA, 19 nt, Artificial Sequence
  Description of Artificial Sequence: Synthetic oligonucleotide
  Antisense strand to SEQ ID NO: 628226
uaauaucgcccuuuacaga

SEQ ID NO: 628228 - RNA, 19 nt, Artificial Sequence
  Description of Artificial Sequence: Synthetic oligonucleotide
  Sense strand starting at position 1305 of SEQ ID NO: 585290
uguaaagggcgauauuaaa

SEQ ID NO: 628229 - RNA, 19 nt, Artificial Sequence
  Description of Artificial Sequence: Synthetic oligonucleotide
  Antisense strand to SEQ ID NO: 628228
uuuaauaucgcccuuuaca

SEQ ID NO: 628230 - RNA, 19 nt, Artificial Sequence
  Description of Artificial Sequence: Synthetic oligonucleotide
  Sense strand starting at position 1380 of SEQ ID NO: 585290
cgguaaaguaaucgauaca

SEQ ID NO: 628231 - RNA, 19 nt, Artificial Sequence
  Description of Artificial Sequence: Synthetic oligonucleotide
  Antisense strand to SEQ ID NO: 628230
uguaucgauuacuuuaccg

SEQ ID NO: 628232 - RNA, 19 nt, Artificial Sequence
  Description of Artificial Sequence: Synthetic oligonucleotide
  Sense strand starting at position 1453 of SEQ ID NO: 585290
uauagauuuggccguguau

SEQ ID NO: 628233 - RNA, 19 nt, Artificial Sequence
  Description of Artificial Sequence: Synthetic oligonucleotide
  Antisense strand to SEQ ID NO: 628232
auacacggccaaaucuaua

SEQ ID NO: 628234 - RNA, 19 nt, Artificial Sequence
  Description of Artificial Sequence: Synthetic oligonucleotide
  Sense strand starting at position 1455 of SEQ ID NO: 585290
uagauuuggccguguauca

SEQ ID NO: 628235 - RNA, 19 nt, Artificial Sequence
  Description of Artificial Sequence: Synthetic oligonucleotide
  Antisense strand to SEQ ID NO: 628234
ugauacacggccaaaucua

SEQ ID NO: 628236 - RNA, 19 nt, Artificial Sequence
  Description of Artificial Sequence: Synthetic oligonucleotide
  Sense strand starting at position 1579 of SEQ ID NO: 585290
guuuaaguguucuuaagaa

SEQ ID NO: 628237 - RNA, 19 nt, Artificial Sequence
  Description of Artificial Sequence: Synthetic oligonucleotide
  Antisense strand to SEQ ID NO: 628236
uucuuaagaacacuuaaac

SEQ ID NO: 628238 - RNA, 19 nt, Artificial Sequence
  Description of Artificial Sequence: Synthetic oligonucleotide
  Sense strand starting at position 1660 of SEQ ID NO: 585290
ugaggaaccguguaaguaa

SEQ ID NO: 628239 - RNA, 19 nt, Artificial Sequence
  Description of Artificial Sequence: Synthetic oligonucleotide
  Antisense strand to SEQ ID NO: 628238
uuacuuacacgguuccuca

SEQ ID NO: 628240 - RNA, 19 nt, Artificial Sequence
  Description of Artificial Sequence: Synthetic oligonucleotide
  Sense strand starting at position 1832 of SEQ ID NO: 585290
gcgugucuccucguauaua

SEQ ID NO: 628241 - RNA, 19 nt, Artificial Sequence
  Description of Artificial Sequence: Synthetic oligonucleotide
  Antisense strand to SEQ ID NO: 628240
uauauacgaggagacacgc

SEQ ID NO: 628242 - RNA, 19 nt, Artificial Sequence
  Description of Artificial Sequence: Synthetic oligonucleotide
  Sense strand starting at position 1844 of SEQ ID NO: 585290
guauauaaggccugagaug

SEQ ID NO: 628243 - RNA, 19 nt, Artificial Sequence
  Description of Artificial Sequence: Synthetic oligonucleotide
  Antisense strand to SEQ ID NO: 628242
caucucaggccuuauauac

SEQ ID NO: 628244 - RNA, 19 nt, Artificial Sequence
  Description of Artificial Sequence: Synthetic oligonucleotide
  Sense strand starting at position 1916 of SEQ ID NO: 585290
cugaauguugucgcgcaga

SEQ ID NO: 628245 - RNA, 19 nt, Artificial Sequence
  Description of Artificial Sequence: Synthetic oligonucleotide
  Antisense strand to SEQ ID NO: 628244
ucugcgcgacaacauucag

SEQ ID NO: 628246 - RNA, 19 nt, Artificial Sequence
  Description of Artificial Sequence: Synthetic oligonucleotide
  Sense strand starting at position 1918 of SEQ ID NO: 585290
gaauguugucgcgcagaac

SEQ ID NO: 628247 - RNA, 19 nt, Artificial Sequence
  Description of Artificial Sequence: Synthetic oligonucleotide
  Antisense strand to SEQ ID NO: 628246
guucugcgcgacaacauuc

SEQ ID NO: 628248 - RNA, 19 nt, Artificial Sequence
  Description of Artificial Sequence: Synthetic oligonucleotide
  Sense strand starting at position 2036 of SEQ ID NO: 585290
gcagcaguacuuuauauag

SEQ ID NO: 628249 - RNA, 19 nt, Artificial Sequence
  Description of Artificial Sequence: Synthetic oligonucleotide
  Antisense strand to SEQ ID NO: 628248
cuauauaaaguacugcugc

SEQ ID NO: 628250 - RNA, 19 nt, Artificial Sequence
  Description of Artificial Sequence: Synthetic oligonucleotide
  Sense strand starting at position 2304 of SEQ ID NO: 585290
ucgauuguucuagugcuuu

SEQ ID NO: 628251 - RNA, 19 nt, Artificial Sequence
  Description of Artificial Sequence: Synthetic oligonucleotide
  Antisense strand to SEQ ID NO: 628250
aaagcacuagaacaaucga

SEQ ID NO: 628252 - RNA, 19 nt, Artificial Sequence
  Description of Artificial Sequence: Synthetic oligonucleotide
  Sense strand starting at position 2386 of SEQ ID NO: 585290
ugaaauagcguguagaaac

SEQ ID NO: 628253 - RNA, 19 nt, Artificial Sequence
  Description of Artificial Sequence: Synthetic oligonucleotide
  Antisense strand to SEQ ID NO: 628252
guuucuacacgcuauuuca

SEQ ID NO: 628254 - RNA, 19 nt, Artificial Sequence
  Description of Artificial Sequence: Synthetic oligonucleotide
  Sense strand starting at position 2400 of SEQ ID NO: 585290
gaaacugcuuccguacaaa

SEQ ID NO: 628255 - RNA, 19 nt, Artificial Sequence
  Description of Artificial Sequence: Synthetic oligonucleotide
  Antisense strand to SEQ ID NO: 628254
uuuguacggaagcaguuuc

SEQ ID NO: 628256 - RNA, 19 nt, Artificial Sequence
  Description of Artificial Sequence: Synthetic oligonucleotide
  Sense strand starting at position 2418 of SEQ ID NO: 585290
acucgaagugaucagccua

SEQ ID NO: 628257 - RNA, 19 nt, Artificial Sequence
  Description of Artificial Sequence: Synthetic oligonucleotide
  Antisense strand to SEQ ID NO: 628256
uaggcugaucacuucgagu

SEQ ID NO: 628258 - RNA, 19 nt, Artificial Sequence
  Description of Artificial Sequence: Synthetic oligonucleotide
  Sense strand starting at position 2466 of SEQ ID NO: 585290
ugaugauagcuccaaggug

SEQ ID NO: 628259 - RNA, 19 nt, Artificial Sequence
  Description of Artificial Sequence: Synthetic oligonucleotide
  Antisense strand to SEQ ID NO: 628258
caccuuggagcuaucauca

SEQ ID NO: 628260 - RNA, 19 nt, Artificial Sequence
  Description of Artificial Sequence: Synthetic oligonucleotide
  Sense strand starting at position 2641 of SEQ ID NO: 585290
caggaagcuguuugagaaa

SEQ ID NO: 628261 - RNA, 19 nt, Artificial Sequence
  Description of Artificial Sequence: Synthetic oligonucleotide
  Antisense strand to SEQ ID NO: 628260
uuucucaaacagcuuccug

SEQ ID NO: 628262 - RNA, 19 nt, Artificial Sequence
  Description of Artificial Sequence: Synthetic oligonucleotide
  Sense strand starting at position 2806 of SEQ ID NO: 585290
gaccgaggaugacuuuauu

SEQ ID NO: 628263 - RNA, 19 nt, Artificial Sequence
  Description of Artificial Sequence: Synthetic oligonucleotide
  Antisense strand to SEQ ID NO: 628262
aauaaagucauccucgguc

SEQ ID NO: 628264 - RNA, 19 nt, Artificial Sequence
  Description of Artificial Sequence: Synthetic oligonucleotide
  Sense strand starting at position 3119 of SEQ ID NO: 585290
aaguaagaguccgucucaa

SEQ ID NO: 628265 - RNA, 19 nt, Artificial Sequence
  Description of Artificial Sequence: Synthetic oligonucleotide
  Antisense strand to SEQ ID NO: 628264
uugagacggacucuuacuu

SEQ ID NO: 628266 - RNA, 19 nt, Artificial Sequence
  Description of Artificial Sequence: Synthetic oligonucleotide
  Sense strand starting at position 3212 of SEQ ID NO: 585290
cagauuucguuucucagua

SEQ ID NO: 628267 - RNA, 19 nt, Artificial Sequence
  Description of Artificial Sequence: Synthetic oligonucleotide
  Antisense strand to SEQ ID NO: 628266
uacugagaaacgaaaucug

SEQ ID NO: 628268 - RNA, 19 nt, Artificial Sequence
  Description of Artificial Sequence: Synthetic oligonucleotide
  Sense strand starting at position 3213 of SEQ ID NO: 585290
agauuucguuucucaguaa

SEQ ID NO: 628269 - RNA, 19 nt, Artificial Sequence
  Description of Artificial Sequence: Synthetic oligonucleotide
  Antisense strand to SEQ ID NO: 628268
uuacugagaaacgaaaucu

SEQ ID NO: 628270 - RNA, 19 nt, Artificial Sequence
  Description of Artificial Sequence: Synthetic oligonucleotide
  Sense strand starting at position 3224 of SEQ ID NO: 585290
cucaguaauguuuaccuuu

SEQ ID NO: 628271 - RNA, 19 nt, Artificial Sequence
  Description of Artificial Sequence: Synthetic oligonucleotide
  Antisense strand to SEQ ID NO: 628270
aaagguaaacauuacugag

SEQ ID NO: 628272 - RNA, 19 nt, Artificial Sequence
  Description of Artificial Sequence: Synthetic oligonucleotide
  Sense strand starting at position 3337 of SEQ ID NO: 585290
ugauuacuguaugugcaaa

SEQ ID NO: 628273 - RNA, 19 nt, Artificial Sequence
  Description of Artificial Sequence: Synthetic oligonucleotide
  Antisense strand to SEQ ID NO: 628272
uuugcacauacaguaauca

SEQ ID NO: 628274 - RNA, 19 nt, Artificial Sequence
  Description of Artificial Sequence: Synthetic oligonucleotide
  Sense strand starting at position 64 of SEQ ID NO: 585291
ucuguuaacuaagaaggua

SEQ ID NO: 628275 - RNA, 19 nt, Artificial Sequence
  Description of Artificial Sequence: Synthetic oligonucleotide
  Antisense strand to SEQ ID NO: 628274
uaccuucuuaguuaacaga

SEQ ID NO: 628276 - RNA, 19 nt, Artificial Sequence
  Description of Artificial Sequence: Synthetic oligonucleotide
  Sense strand starting at position 72 of SEQ ID NO: 585291
cuaagaagguagcuaucau

SEQ ID NO: 628277 - RNA, 19 nt, Artificial Sequence
  Description of Artificial Sequence: Synthetic oligonucleotide
  Antisense strand to SEQ ID NO: 628276
augauagcuaccuucuuag

SEQ ID NO: 628278 - RNA, 19 nt, Artificial Sequence
  Description of Artificial Sequence: Synthetic oligonucleotide
  Sense strand starting at position 76 of SEQ ID NO: 585291
gaagguagcuaucauuuau

SEQ ID NO: 628279 - RNA, 19 nt, Artificial Sequence
  Description of Artificial Sequence: Synthetic oligonucleotide
  Antisense strand to SEQ ID NO: 628278
auaaaugauagcuaccuuc

SEQ ID NO: 628280 - RNA, 19 nt, Artificial Sequence
  Description of Artificial Sequence: Synthetic oligonucleotide
  Sense strand starting at position 144 of SEQ ID NO: 585291
acaacuaaagaauguggua

SEQ ID NO: 628281 - RNA, 19 nt, Artificial Sequence
  Description of Artificial Sequence: Synthetic oligonucleotide
  Antisense strand to SEQ ID NO: 628280
uaccacauucuuuaguugu

SEQ ID NO: 628282 - RNA, 19 nt, Artificial Sequence
  Description of Artificial Sequence: Synthetic oligonucleotide
  Sense strand starting at position 156 of SEQ ID NO: 585291
ugugguacugcaugacuca

SEQ ID NO: 628283 - RNA, 19 nt, Artificial Sequence
  Description of Artificial Sequence: Synthetic oligonucleotide
  Antisense strand to SEQ ID NO: 628282
ugagucaugcaguaccaca

SEQ ID NO: 628284 - RNA, 19 nt, Artificial Sequence
  Description of Artificial Sequence: Synthetic oligonucleotide
  Sense strand starting at position 163 of SEQ ID NO: 585291
cugcaugacucaguuauau

SEQ ID NO: 628285 - RNA, 19 nt, Artificial Sequence
  Description of Artificial Sequence: Synthetic oligonucleotide
  Antisense strand to SEQ ID NO: 628284
auauaacugagucaugcag

SEQ ID NO: 628286 - RNA, 19 nt, Artificial Sequence
  Description of Artificial Sequence: Synthetic oligonucleotide
  Sense strand starting at position 239 of SEQ ID NO: 585291
gcagcaagucaugacgacu

SEQ ID NO: 628287 - RNA, 19 nt, Artificial Sequence
  Description of Artificial Sequence: Synthetic oligonucleotide
  Antisense strand to SEQ ID NO: 628286
agucgucaugacuugcugc

SEQ ID NO: 628288 - RNA, 19 nt, Artificial Sequence
  Description of Artificial Sequence: Synthetic oligonucleotide
  Sense strand starting at position 242 of SEQ ID NO: 585291
gcaagucaugacgacuuau

SEQ ID NO: 628289 - RNA, 19 nt, Artificial Sequence
  Description of Artificial Sequence: Synthetic oligonucleotide
  Antisense strand to SEQ ID NO: 628288
auaagucgucaugacuugc

SEQ ID NO: 628290 - RNA, 19 nt, Artificial Sequence
  Description of Artificial Sequence: Synthetic oligonucleotide
  Sense strand starting at position 252 of SEQ ID NO: 585291
acgacuuaucuugguguca

SEQ ID NO: 628291 - RNA, 19 nt, Artificial Sequence
  Description of Artificial Sequence: Synthetic oligonucleotide
  Antisense strand to SEQ ID NO: 628290
ugacaccaagauaagucgu

SEQ ID NO: 628292 - RNA, 19 nt, Artificial Sequence
  Description of Artificial Sequence: Synthetic oligonucleotide
  Sense strand starting at position 253 of SEQ ID NO: 585291
cgacuuaucuuggugucaa

SEQ ID NO: 628293 - RNA, 19 nt, Artificial Sequence
  Description of Artificial Sequence: Synthetic oligonucleotide
  Antisense strand to SEQ ID NO: 628292
uugacaccaagauaagucg

SEQ ID NO: 628294 - RNA, 19 nt, Artificial Sequence
  Description of Artificial Sequence: Synthetic oligonucleotide
  Sense strand starting at position 383 of SEQ ID NO: 585291
acaucagaagguuguuaua

SEQ ID NO: 628295 - RNA, 19 nt, Artificial Sequence
  Description of Artificial Sequence: Synthetic oligonucleotide
  Antisense strand to SEQ ID NO: 628294
uauaacaaccuucugaugu

SEQ ID NO: 628296 - RNA, 19 nt, Artificial Sequence
  Description of Artificial Sequence: Synthetic oligonucleotide
  Sense strand starting at position 385 of SEQ ID NO: 585291
aucagaagguuguuauaag

SEQ ID NO: 628297 - RNA, 19 nt, Artificial Sequence
  Description of Artificial Sequence: Synthetic oligonucleotide
  Antisense strand to SEQ ID NO: 628296
cuuauaacaaccuucugau

SEQ ID NO: 628298 - RNA, 19 nt, Artificial Sequence
  Description of Artificial Sequence: Synthetic oligonucleotide
  Sense strand starting at position 422 of SEQ ID NO: 585291
agacgcuuugccugucaca

SEQ ID NO: 628299 - RNA, 19 nt, Artificial Sequence
  Description of Artificial Sequence: Synthetic oligonucleotide
  Antisense strand to SEQ ID NO: 628298
ugugacaggcaaagcgucu

SEQ ID NO: 628300 - RNA, 19 nt, Artificial Sequence
  Description of Artificial Sequence: Synthetic oligonucleotide
  Sense strand starting at position 485 of SEQ ID NO: 585291
gaaggaaugugucuaacau

SEQ ID NO: 628301 - RNA, 19 nt, Artificial Sequence
  Description of Artificial Sequence: Synthetic oligonucleotide
  Antisense strand to SEQ ID NO: 628300
auguuagacacauuccuuc

SEQ ID NO: 628302 - RNA, 19 nt, Artificial Sequence
  Description of Artificial Sequence: Synthetic oligonucleotide
  Sense strand starting at position 558 of SEQ ID NO: 585291
uaaagaaggccacgauuaa

SEQ ID NO: 628303 - RNA, 19 nt, Artificial Sequence
  Description of Artificial Sequence: Synthetic oligonucleotide
  Antisense strand to SEQ ID NO: 628302
uuaaucguggccuucuuua

SEQ ID NO: 628304 - RNA, 19 nt, Artificial Sequence
  Description of Artificial Sequence: Synthetic oligonucleotide
  Sense strand starting at position 591 of SEQ ID NO: 585291
cccugaucuggcuguaugu

SEQ ID NO: 628305 - RNA, 19 nt, Artificial Sequence
  Description of Artificial Sequence: Synthetic oligonucleotide
  Antisense strand to SEQ ID NO: 628304
acauacagccagaucaggg

SEQ ID NO: 628306 - RNA, 19 nt, Artificial Sequence
  Description of Artificial Sequence: Synthetic oligonucleotide
  Sense strand starting at position 601 of SEQ ID NO: 585291
gcuguaugucagcucagca

SEQ ID NO: 628307 - RNA, 19 nt, Artificial Sequence
  Description of Artificial Sequence: Synthetic oligonucleotide
  Antisense strand to SEQ ID NO: 628306
ugcugagcugacauacagc

SEQ ID NO: 628308 - RNA, 19 nt, Artificial Sequence
  Description of Artificial Sequence: Synthetic oligonucleotide
  Sense strand starting at position 697 of SEQ ID NO: 585291
ugugcuaagugaucuauaa

SEQ ID NO: 628309 - RNA, 19 nt, Artificial Sequence
  Description of Artificial Sequence: Synthetic oligonucleotide
  Antisense strand to SEQ ID NO: 628308
uuauagaucacuuagcaca

SEQ ID NO: 628310 - RNA, 19 nt, Artificial Sequence
  Description of Artificial Sequence: Synthetic oligonucleotide
  Sense strand starting at position 731 of SEQ ID NO: 585291
agcuccuugcucuaaagaa

SEQ ID NO: 628311 - RNA, 19 nt, Artificial Sequence
  Description of Artificial Sequence: Synthetic oligonucleotide
  Antisense strand to SEQ ID NO: 628310
uucuuuagagcaaggagcu

SEQ ID NO: 628312 - RNA, 19 nt, Artificial Sequence
  Description of Artificial Sequence: Synthetic oligonucleotide
  Sense strand starting at position 818 of SEQ ID NO: 585291
uugcaugaaugcuuaacua

SEQ ID NO: 628313 - RNA, 19 nt, Artificial Sequence
  Description of Artificial Sequence: Synthetic oligonucleotide
  Antisense strand to SEQ ID NO: 628312
uaguuaagcauucaugcaa

SEQ ID NO: 628314 - RNA, 19 nt, Artificial Sequence
  Description of Artificial Sequence: Synthetic oligonucleotide
  Sense strand starting at position 831 of SEQ ID NO: 585291
uaacuacguucguuguuaa

SEQ ID NO: 628315 - RNA, 19 nt, Artificial Sequence
  Description of Artificial Sequence: Synthetic oligonucleotide
  Antisense strand to SEQ ID NO: 628314
uuaacaacgaacguaguua

SEQ ID NO: 628316 - RNA, 19 nt, Artificial Sequence
  Description of Artificial Sequence: Synthetic oligonucleotide
  Sense strand starting at position 832 of SEQ ID NO: 585291
aacuacguucguuguuaaa

SEQ ID NO: 628317 - RNA, 19 nt, Artificial Sequence
  Description of Artificial Sequence: Synthetic oligonucleotide
  Antisense strand to SEQ ID NO: 628316
uuuaacaacgaacguaguu

SEQ ID NO: 628318 - RNA, 19 nt, Artificial Sequence
  Description of Artificial Sequence: Synthetic oligonucleotide
  Sense strand starting at position 869 of SEQ ID NO: 585291
uaacgauauuuggaaguuu

SEQ ID NO: 628319 - RNA, 19 nt, Artificial Sequence
  Description of Artificial Sequence: Synthetic oligonucleotide
  Antisense strand to SEQ ID NO: 628318
aaacuuccaaauaucguua

SEQ ID NO: 628320 - RNA, 19 nt, Artificial Sequence
  Description of Artificial Sequence: Synthetic oligonucleotide
  Sense strand starting at position 894 of SEQ ID NO: 585291
cgugaacucugacuguaau

SEQ ID NO: 628321 - RNA, 19 nt, Artificial Sequence
  Description of Artificial Sequence: Synthetic oligonucleotide
  Antisense strand to SEQ ID NO: 628320
auuacagucagaguucacg

SEQ ID NO: 628322 - RNA, 19 nt, Artificial Sequence
  Description of Artificial Sequence: Synthetic oligonucleotide
  Sense strand starting at position 895 of SEQ ID NO: 585291
gugaacucugacuguaauc

SEQ ID NO: 628323 - RNA, 19 nt, Artificial Sequence
  Description of Artificial Sequence: Synthetic oligonucleotide
  Antisense strand to SEQ ID NO: 628322
gauuacagucagaguucac

SEQ ID NO: 628324 - RNA, 19 nt, Artificial Sequence
  Description of Artificial Sequence: Synthetic oligonucleotide
  Sense strand starting at position 1018 of SEQ ID NO: 585291
agcuguccaucccauauuu

SEQ ID NO: 628325 - RNA, 19 nt, Artificial Sequence
  Description of Artificial Sequence: Synthetic oligonucleotide
  Antisense strand to SEQ ID NO: 628324
aaauaugggauggacagcu

SEQ ID NO: 628326 - RNA, 19 nt, Artificial Sequence
  Description of Artificial Sequence: Synthetic oligonucleotide
  Sense strand starting at position 1107 of SEQ ID NO: 585291
cguuccuuuacgggaaaga

SEQ ID NO: 628327 - RNA, 19 nt, Artificial Sequence
  Description of Artificial Sequence: Synthetic oligonucleotide
  Antisense strand to SEQ ID NO: 628326
ucuuucccguaaaggaacg

SEQ ID NO: 628328 - RNA, 19 nt, Artificial Sequence
  Description of Artificial Sequence: Synthetic oligonucleotide
  Sense strand starting at position 1537 of SEQ ID NO: 585291
ccagguggccgggaguaaa

SEQ ID NO: 628329 - RNA, 19 nt, Artificial Sequence
  Description of Artificial Sequence: Synthetic oligonucleotide
  Antisense strand to SEQ ID NO: 628328
uuuacucccggccaccugg

SEQ ID NO: 628330 - RNA, 19 nt, Artificial Sequence
  Description of Artificial Sequence: Synthetic oligonucleotide
  Sense strand starting at position 3262 of SEQ ID NO: 585291
gaaagucauugugaaacuu

SEQ ID NO: 628331 - RNA, 19 nt, Artificial Sequence
  Description of Artificial Sequence: Synthetic oligonucleotide
  Antisense strand to SEQ ID NO: 628330
aaguuucacaaugacuuuc

SEQ ID NO: 628332 - RNA, 19 nt, Artificial Sequence
  Description of Artificial Sequence: Synthetic oligonucleotide
  Sense strand starting at position 3353 of SEQ ID NO: 585291
gggacauguuaacccugaa

SEQ ID NO: 628333 - RNA, 19 nt, Artificial Sequence
  Description of Artificial Sequence: Synthetic oligonucleotide
  Antisense strand to SEQ ID NO: 628332
uucaggguuaacauguccc

SEQ ID NO: 628334 - RNA, 19 nt, Artificial Sequence
  Description of Artificial Sequence: Synthetic oligonucleotide
  Sense strand starting at position 3356 of SEQ ID NO: 585291
acauguuaacccugaacug

SEQ ID NO: 628335 - RNA, 19 nt, Artificial Sequence
  Description of Artificial Sequence: Synthetic oligonucleotide
  Antisense strand to SEQ ID NO: 628334
caguucaggguuaacaugu

SEQ ID NO: 628336 - RNA, 19 nt, Artificial Sequence
  Description of Artificial Sequence: Synthetic oligonucleotide
  Sense strand starting at position 3387 of SEQ ID NO: 585291
gguggcggauguucuauua

SEQ ID NO: 628337 - RNA, 19 nt, Artificial Sequence
  Description of Artificial Sequence: Synthetic oligonucleotide
  Antisense strand to SEQ ID NO: 628336
uaauagaacauccgccacc

SEQ ID NO: 628338 - RNA, 19 nt, Artificial Sequence
  Description of Artificial Sequence: Synthetic oligonucleotide
  Sense strand starting at position 3413 of SEQ ID NO: 585291
gaggaaagccaagguuauu

SEQ ID NO: 628339 - RNA, 19 nt, Artificial Sequence
  Description of Artificial Sequence: Synthetic oligonucleotide
  Antisense strand to SEQ ID NO: 628338
aauaaccuuggcuuuccuc

SEQ ID NO: 628340 - RNA, 19 nt, Artificial Sequence
  Description of Artificial Sequence: Synthetic oligonucleotide
  Sense strand starting at position 3621 of SEQ ID NO: 585291
gggaguaauuagcaugaac

SEQ ID NO: 628341 - RNA, 19 nt, Artificial Sequence
  Description of Artificial Sequence: Synthetic oligonucleotide
  Antisense strand to SEQ ID NO: 628340
guucaugcuaauuacuccc

SEQ ID NO: 628342 - RNA, 19 nt, Artificial Sequence
  Description of Artificial Sequence: Synthetic oligonucleotide
  Sense strand starting at position 3623 of SEQ ID NO: 585291
gaguaauuagcaugaacca

SEQ ID NO: 628343 - RNA, 19 nt, Artificial Sequence
  Description of Artificial Sequence: Synthetic oligonucleotide
  Antisense strand to SEQ ID NO: 628342
ugguucaugcuaauuacuc

SEQ ID NO: 628344 - RNA, 19 nt, Artificial Sequence
  Description of Artificial Sequence: Synthetic oligonucleotide
  Sense strand starting at position 3684 of SEQ ID NO: 585291
aguggaaauccauggcaaa

SEQ ID NO: 628345 - RNA, 19 nt, Artificial Sequence
  Description of Artificial Sequence: Synthetic oligonucleotide
  Antisense strand to SEQ ID NO: 628344
uuugccauggauuuccacu

SEQ ID NO: 628346 - RNA, 19 nt, Artificial Sequence
  Description of Artificial Sequence: Synthetic oligonucleotide
  Sense strand starting at position 3685 of SEQ ID NO: 585291
guggaaauccauggcaaag

SEQ ID NO: 628347 - RNA, 19 nt, Artificial Sequence
  Description of Artificial Sequence: Synthetic oligonucleotide
  Antisense strand to SEQ ID NO: 628346
cuuugccauggauuuccac

SEQ ID NO: 628348 - RNA, 19 nt, Artificial Sequence
  Description of Artificial Sequence: Synthetic oligonucleotide
  Sense strand starting at position 3753 of SEQ ID NO: 585291
uaaagaacguucgcaguuu

SEQ ID NO: 628349 - RNA, 19 nt, Artificial Sequence
  Description of Artificial Sequence: Synthetic oligonucleotide
  Antisense strand to SEQ ID NO: 628348
aaacugcgaacguucuuua

SEQ ID NO: 628350 - RNA, 19 nt, Artificial Sequence
  Description of Artificial Sequence: Synthetic oligonucleotide
  Sense strand starting at position 3832 of SEQ ID NO: 585291
ccucaaacuugagaggaau

SEQ ID NO: 628351 - RNA, 19 nt, Artificial Sequence
  Description of Artificial Sequence: Synthetic oligonucleotide
  Antisense strand to SEQ ID NO: 628350
auuccucucaaguuugagg

SEQ ID NO: 628352 - RNA, 19 nt, Artificial Sequence
  Description of Artificial Sequence: Synthetic oligonucleotide
  Sense strand starting at position 3960 of SEQ ID NO: 585291
uggccaucugugcaaacuu

SEQ ID NO: 628353 - RNA, 19 nt, Artificial Sequence
  Description of Artificial Sequence: Synthetic oligonucleotide
  Antisense strand to SEQ ID NO: 628352
aaguuugcacagauggcca

SEQ ID NO: 628354 - RNA, 19 nt, Artificial Sequence
  Description of Artificial Sequence: Synthetic oligonucleotide
  Sense strand starting at position 25 of SEQ ID NO: 585292
uccacagucuacuucguua

SEQ ID NO: 628355 - RNA, 19 nt, Artificial Sequence
  Description of Artificial Sequence: Synthetic oligonucleotide
  Antisense strand to SEQ ID NO: 628354
uaacgaaguagacugugga

SEQ ID NO: 628356 - RNA, 19 nt, Artificial Sequence
  Description of Artificial Sequence: Synthetic oligonucleotide
  Sense strand starting at position 83 of SEQ ID NO: 585292
ugagacauuugcuacauau

SEQ ID NO: 628357 - RNA, 19 nt, Artificial Sequence
  Description of Artificial Sequence: Synthetic oligonucleotide
  Antisense strand to SEQ ID NO: 628356
auauguagcaaaugucuca

SEQ ID NO: 628358 - RNA, 19 nt, Artificial Sequence
  Description of Artificial Sequence: Synthetic oligonucleotide
  Sense strand starting at position 113 of SEQ ID NO: 585292
augggaucuauaugugcaa

SEQ ID NO: 628359 - RNA, 19 nt, Artificial Sequence
  Description of Artificial Sequence: Synthetic oligonucleotide
  Antisense strand to SEQ ID NO: 628358
uugcacauauagaucccau

SEQ ID NO: 628360 - RNA, 19 nt, Artificial Sequence
  Description of Artificial Sequence: Synthetic oligonucleotide
  Sense strand starting at position 114 of SEQ ID NO: 585292
ugggaucuauaugugcaaa

SEQ ID NO: 628361 - RNA, 19 nt, Artificial Sequence
  Description of Artificial Sequence: Synthetic oligonucleotide
  Antisense strand to SEQ ID NO: 628360
uuugcacauauagauccca

SEQ ID NO: 628362 - RNA, 19 nt, Artificial Sequence
  Description of Artificial Sequence: Synthetic oligonucleotide
  Sense strand starting at position 115 of SEQ ID NO: 585292
gggaucuauaugugcaaau

SEQ ID NO: 628363 - RNA, 19 nt, Artificial Sequence
  Description of Artificial Sequence: Synthetic oligonucleotide
  Antisense strand to SEQ ID NO: 628362
auuugcacauauagauccc

SEQ ID NO: 628364 - RNA, 19 nt, Artificial Sequence
  Description of Artificial Sequence: Synthetic oligonucleotide
  Sense strand starting at position 116 of SEQ ID NO: 585292
ggaucuauaugugcaaaua

SEQ ID NO: 628365 - RNA, 19 nt, Artificial Sequence
  Description of Artificial Sequence: Synthetic oligonucleotide
  Antisense strand to SEQ ID NO: 628364
uauuugcacauauagaucc

SEQ ID NO: 628366 - RNA, 19 nt, Artificial Sequence
  Description of Artificial Sequence: Synthetic oligonucleotide
  Sense strand starting at position 147 of SEQ ID NO: 585292
ugguuugcucaagggcaaa

SEQ ID NO: 628367 - RNA, 19 nt, Artificial Sequence
  Description of Artificial Sequence: Synthetic oligonucleotide
  Antisense strand to SEQ ID NO: 628366
uuugcccuugagcaaacca

SEQ ID NO: 628368 - RNA, 19 nt, Artificial Sequence
  Description of Artificial Sequence: Synthetic oligonucleotide
  Sense strand starting at position 192 of SEQ ID NO: 585292
gaggaaacguuucuaauaa

SEQ ID NO: 628369 - RNA, 19 nt, Artificial Sequence
  Description of Artificial Sequence: Synthetic oligonucleotide
  Antisense strand to SEQ ID NO: 628368
uuauuagaaacguuuccuc

SEQ ID NO: 628370 - RNA, 19 nt, Artificial Sequence
  Description of Artificial Sequence: Synthetic oligonucleotide
  Sense strand starting at position 233 of SEQ ID NO: 585292
aggacagaucauugcaaau

SEQ ID NO: 628371 - RNA, 19 nt, Artificial Sequence
  Description of Artificial Sequence: Synthetic oligonucleotide
  Antisense strand to SEQ ID NO: 628370
auuugcaaugaucuguccu

SEQ ID NO: 628372 - RNA, 19 nt, Artificial Sequence
  Description of Artificial Sequence: Synthetic oligonucleotide
  Sense strand starting at position 279 of SEQ ID NO: 585292
ucaaguaaugucugggcuu

SEQ ID NO: 628373 - RNA, 19 nt, Artificial Sequence
  Description of Artificial Sequence: Synthetic oligonucleotide
  Antisense strand to SEQ ID NO: 628372
aagcccagacauuacuuga

SEQ ID NO: 628374 - RNA, 19 nt, Artificial Sequence
  Description of Artificial Sequence: Synthetic oligonucleotide
  Sense strand starting at position 281 of SEQ ID NO: 585292
aaguaaugucugggcuuga

SEQ ID NO: 628375 - RNA, 19 nt, Artificial Sequence
  Description of Artificial Sequence: Synthetic oligonucleotide
  Antisense strand to SEQ ID NO: 628374
ucaagcccagacauuacuu

SEQ ID NO: 628376 - RNA, 19 nt, Artificial Sequence
  Description of Artificial Sequence: Synthetic oligonucleotide
  Sense strand starting at position 282 of SEQ ID NO: 585292
aguaaugucugggcuugau

SEQ ID NO: 628377 - RNA, 19 nt, Artificial Sequence
  Description of Artificial Sequence: Synthetic oligonucleotide
  Antisense strand to SEQ ID NO: 628376
aucaagcccagacauuacu

SEQ ID NO: 628378 - RNA, 19 nt, Artificial Sequence
  Description of Artificial Sequence: Synthetic oligonucleotide
  Sense strand starting at position 285 of SEQ ID NO: 585292
aaugucugggcuugauuau

SEQ ID NO: 628379 - RNA, 19 nt, Artificial Sequence
  Description of Artificial Sequence: Synthetic oligonucleotide
  Antisense strand to SEQ ID NO: 628378
auaaucaagcccagacauu

SEQ ID NO: 628380 - RNA, 19 nt, Artificial Sequence
  Description of Artificial Sequence: Synthetic oligonucleotide
  Sense strand starting at position 351 of SEQ ID NO: 585292
ugacuagggcucuggguau

SEQ ID NO: 628381 - RNA, 19 nt, Artificial Sequence
  Description of Artificial Sequence: Synthetic oligonucleotide
  Antisense strand to SEQ ID NO: 628380
auacccagagcccuaguca

SEQ ID NO: 628382 - RNA, 19 nt, Artificial Sequence
  Description of Artificial Sequence: Synthetic oligonucleotide
  Sense strand starting at position 358 of SEQ ID NO: 585292
ggcucuggguaugcuagaa

SEQ ID NO: 628383 - RNA, 19 nt, Artificial Sequence
  Description of Artificial Sequence: Synthetic oligonucleotide
  Antisense strand to SEQ ID NO: 628382
uucuagcauacccagagcc

SEQ ID NO: 628384 - RNA, 19 nt, Artificial Sequence
  Description of Artificial Sequence: Synthetic oligonucleotide
  Sense strand starting at position 388 of SEQ ID NO: 585292
ucuugugaauuauugaggu

SEQ ID NO: 628385 - RNA, 19 nt, Artificial Sequence
  Description of Artificial Sequence: Synthetic oligonucleotide
  Antisense strand to SEQ ID NO: 628384
accucaauaauucacaaga

SEQ ID NO: 628386 - RNA, 19 nt, Artificial Sequence
  Description of Artificial Sequence: Synthetic oligonucleotide
  Sense strand starting at position 558 of SEQ ID NO: 585292
cuaaauaacucugcagaga

SEQ ID NO: 628387 - RNA, 19 nt, Artificial Sequence
  Description of Artificial Sequence: Synthetic oligonucleotide
  Antisense strand to SEQ ID NO: 628386
ucucugcagaguuauuuag

SEQ ID NO: 628388 - RNA, 19 nt, Artificial Sequence
  Description of Artificial Sequence: Synthetic oligonucleotide
  Sense strand starting at position 606 of SEQ ID NO: 585292
acaacuuccugugugaaug

SEQ ID NO: 628389 - RNA, 19 nt, Artificial Sequence
  Description of Artificial Sequence: Synthetic oligonucleotide
  Antisense strand to SEQ ID NO: 628388
cauucacacaggaaguugu

SEQ ID NO: 628390 - RNA, 19 nt, Artificial Sequence
  Description of Artificial Sequence: Synthetic oligonucleotide
  Sense strand starting at position 617 of SEQ ID NO: 585292
ugugaaugcuaagccauua

SEQ ID NO: 628391 - RNA, 19 nt, Artificial Sequence
  Description of Artificial Sequence: Synthetic oligonucleotide
  Antisense strand to SEQ ID NO: 628390
uaauggcuuagcauucaca

SEQ ID NO: 628392 - RNA, 19 nt, Artificial Sequence
  Description of Artificial Sequence: Synthetic oligonucleotide
  Sense strand starting at position 655 of SEQ ID NO: 585292
agugaaaccuauuaucaag

SEQ ID NO: 628393 - RNA, 19 nt, Artificial Sequence
  Description of Artificial Sequence: Synthetic oligonucleotide
  Antisense strand to SEQ ID NO: 628392
cuugauaauagguuucacu

SEQ ID NO: 628394 - RNA, 19 nt, Artificial Sequence
  Description of Artificial Sequence: Synthetic oligonucleotide
  Sense strand starting at position 671 of SEQ ID NO: 585292
aagagauuccucuggucuc

SEQ ID NO: 628395 - RNA, 19 nt, Artificial Sequence
  Description of Artificial Sequence: Synthetic oligonucleotide
  Antisense strand to SEQ ID NO: 628394
gagaccagaggaaucucuu

SEQ ID NO: 628396 - RNA, 19 nt, Artificial Sequence
  Description of Artificial Sequence: Synthetic oligonucleotide
  Sense strand starting at position 681 of SEQ ID NO: 585292
ucuggucuccucgaaguca

SEQ ID NO: 628397 - RNA, 19 nt, Artificial Sequence
  Description of Artificial Sequence: Synthetic oligonucleotide
  Antisense strand to SEQ ID NO: 628396
ugacuucgaggagaccaga

SEQ ID NO: 628398 - RNA, 19 nt, Artificial Sequence
  Description of Artificial Sequence: Synthetic oligonucleotide
  Sense strand starting at position 743 of SEQ ID NO: 585292
uccuccaagugucuugauu

SEQ ID NO: 628399 - RNA, 19 nt, Artificial Sequence
  Description of Artificial Sequence: Synthetic oligonucleotide
  Antisense strand to SEQ ID NO: 628398
aaucaagacacuuggagga

SEQ ID NO: 628400 - RNA, 19 nt, Artificial Sequence
  Description of Artificial Sequence: Synthetic oligonucleotide
  Sense strand starting at position 830 of SEQ ID NO: 585292
aagcuuucccguuagggaa

SEQ ID NO: 628401 - RNA, 19 nt, Artificial Sequence
  Description of Artificial Sequence: Synthetic oligonucleotide
  Antisense strand to SEQ ID NO: 628400
uucccuaacgggaaagcuu

SEQ ID NO: 628402 - RNA, 19 nt, Artificial Sequence
  Description of Artificial Sequence: Synthetic oligonucleotide
  Sense strand starting at position 1684 of SEQ ID NO: 585292
ugaaccuuccaucgagaca

SEQ ID NO: 628403 - RNA, 19 nt, Artificial Sequence
  Description of Artificial Sequence: Synthetic oligonucleotide
  Antisense strand to SEQ ID NO: 628402
ugucucgauggaagguuca

SEQ ID NO: 628404 - RNA, 19 nt, Artificial Sequence
  Description of Artificial Sequence: Synthetic oligonucleotide
  Sense strand starting at position 2213 of SEQ ID NO: 585292
cggcgauuccaauauaaag

SEQ ID NO: 628405 - RNA, 19 nt, Artificial Sequence
  Description of Artificial Sequence: Synthetic oligonucleotide
  Antisense strand to SEQ ID NO: 628404
cuuuauauuggaaucgccg

SEQ ID NO: 628406 - RNA, 19 nt, Artificial Sequence
  Description of Artificial Sequence: Synthetic oligonucleotide
  Sense strand starting at position 2393 of SEQ ID NO: 585292
ggaggaacgcugugaacga

SEQ ID NO: 628407 - RNA, 19 nt, Artificial Sequence
  Description of Artificial Sequence: Synthetic oligonucleotide
  Antisense strand to SEQ ID NO: 628406
ucguucacagcguuccucc

SEQ ID NO: 628408 - RNA, 19 nt, Artificial Sequence
  Description of Artificial Sequence: Synthetic oligonucleotide
  Sense strand starting at position 2498 of SEQ ID NO: 585292
gaagauguuugugcggaga

SEQ ID NO: 628409 - RNA, 19 nt, Artificial Sequence
  Description of Artificial Sequence: Synthetic oligonucleotide
  Antisense strand to SEQ ID NO: 628408
ucuccgcacaaacaucuuc

SEQ ID NO: 628410 - RNA, 19 nt, Artificial Sequence
  Description of Artificial Sequence: Synthetic oligonucleotide
  Sense strand starting at position 2895 of SEQ ID NO: 585292
gcauuuccuuaaggacaga

SEQ ID NO: 628411 - RNA, 19 nt, Artificial Sequence
  Description of Artificial Sequence: Synthetic oligonucleotide
  Antisense strand to SEQ ID NO: 628410
ucuguccuuaaggaaaugc

SEQ ID NO: 628412 - RNA, 19 nt, Artificial Sequence
  Description of Artificial Sequence: Synthetic oligonucleotide
  Sense strand starting at position 3448 of SEQ ID NO: 585292
ggucucuacuugucaugca

SEQ ID NO: 628413 - RNA, 19 nt, Artificial Sequence
  Description of Artificial Sequence: Synthetic oligonucleotide
  Antisense strand to SEQ ID NO: 628412
ugcaugacaaguagagacc

SEQ ID NO: 628414 - RNA, 19 nt, Artificial Sequence
  Description of Artificial Sequence: Synthetic oligonucleotide
  Sense strand starting at position 3481 of SEQ ID NO: 585292
ucucuaggagccugagaau

SEQ ID NO: 628415 - RNA, 19 nt, Artificial Sequence
  Description of Artificial Sequence: Synthetic oligonucleotide
  Antisense strand to SEQ ID NO: 628414
auucucaggcuccuagaga

SEQ ID NO: 628416 - RNA, 19 nt, Artificial Sequence
  Description of Artificial Sequence: Synthetic oligonucleotide
  Sense strand starting at position 3484 of SEQ ID NO: 585292
cuaggagccugagaauuuc

SEQ ID NO: 628417 - RNA, 19 nt, Artificial Sequence
  Description of Artificial Sequence: Synthetic oligonucleotide
  Antisense strand to SEQ ID NO: 628416
gaaauucucaggcuccuag

SEQ ID NO: 628418 - RNA, 19 nt, Artificial Sequence
  Description of Artificial Sequence: Synthetic oligonucleotide
  Sense strand starting at position 3500 of SEQ ID NO: 585292
uuccuuuaaggauguggaa

SEQ ID NO: 628419 - RNA, 19 nt, Artificial Sequence
  Description of Artificial Sequence: Synthetic oligonucleotide
  Antisense strand to SEQ ID NO: 628418
uuccacauccuuaaaggaa

SEQ ID NO: 628420 - RNA, 19 nt, Artificial Sequence
  Description of Artificial Sequence: Synthetic oligonucleotide
  Sense strand starting at position 3502 of SEQ ID NO: 585292
ccuuuaaggauguggaaac

SEQ ID NO: 628421 - RNA, 19 nt, Artificial Sequence
  Description of Artificial Sequence: Synthetic oligonucleotide
  Antisense strand to SEQ ID NO: 628420
guuuccacauccuuaaagg

SEQ ID NO: 628422 - RNA, 19 nt, Artificial Sequence
  Description of Artificial Sequence: Synthetic oligonucleotide
  Sense strand starting at position 3575 of SEQ ID NO: 585292
gacgaacggaauuguauaa

SEQ ID NO: 628423 - RNA, 19 nt, Artificial Sequence
  Description of Artificial Sequence: Synthetic oligonucleotide
  Antisense strand to SEQ ID NO: 628422
uuauacaauuccguucguc

SEQ ID NO: 628424 - RNA, 19 nt, Artificial Sequence
  Description of Artificial Sequence: Synthetic oligonucleotide
  Sense strand starting at position 3582 of SEQ ID NO: 585292
ggaauuguauaauuaguag

SEQ ID NO: 628425 - RNA, 19 nt, Artificial Sequence
  Description of Artificial Sequence: Synthetic oligonucleotide
  Antisense strand to SEQ ID NO: 628424
cuacuaauuauacaauucc

SEQ ID NO: 628426 - RNA, 19 nt, Artificial Sequence
  Description of Artificial Sequence: Synthetic oligonucleotide
  Sense strand starting at position 3602 of SEQ ID NO: 585292
gcccuuagauuuggaacca

SEQ ID NO: 628427 - RNA, 19 nt, Artificial Sequence
  Description of Artificial Sequence: Synthetic oligonucleotide
  Antisense strand to SEQ ID NO: 628426
ugguuccaaaucuaagggc

SEQ ID NO: 628428 - RNA, 19 nt, Artificial Sequence
  Description of Artificial Sequence: Synthetic oligonucleotide
  Sense strand starting at position 3664 of SEQ ID NO: 585292
acaauuauguuaucgguca

SEQ ID NO: 628429 - RNA, 19 nt, Artificial Sequence
  Description of Artificial Sequence: Synthetic oligonucleotide
  Antisense strand to SEQ ID NO: 628428
ugaccgauaacauaauugu

SEQ ID NO: 628430 - RNA, 19 nt, Artificial Sequence
  Description of Artificial Sequence: Synthetic oligonucleotide
  Sense strand starting at position 3669 of SEQ ID NO: 585292
uauguuaucggucaagaaa

SEQ ID NO: 628431 - RNA, 19 nt, Artificial Sequence
  Description of Artificial Sequence: Synthetic oligonucleotide
  Antisense strand to SEQ ID NO: 628430
uuucuugaccgauaacaua

SEQ ID NO: 628432 - RNA, 19 nt, Artificial Sequence
  Description of Artificial Sequence: Synthetic oligonucleotide
  Sense strand starting at position 3798 of SEQ ID NO: 585292
ggauuaccuucccugaggu

SEQ ID NO: 628433 - RNA, 19 nt, Artificial Sequence
  Description of Artificial Sequence: Synthetic oligonucleotide
  Antisense strand to SEQ ID NO: 628432
accucagggaagguaaucc

SEQ ID NO: 628434 - RNA, 19 nt, Artificial Sequence
  Description of Artificial Sequence: Synthetic oligonucleotide
  Sense strand starting at position 496 of SEQ ID NO: 585293
cugggauaaucuucuauuc

SEQ ID NO: 628435 - RNA, 19 nt, Artificial Sequence
  Description of Artificial Sequence: Synthetic oligonucleotide
  Antisense strand to SEQ ID NO: 628434
gaauagaagauuaucccag

SEQ ID NO: 628436 - RNA, 19 nt, Artificial Sequence
  Description of Artificial Sequence: Synthetic oligonucleotide
  Sense strand starting at position 505 of SEQ ID NO: 585293
ucuucuauucccugagaag

SEQ ID NO: 628437 - RNA, 19 nt, Artificial Sequence
  Description of Artificial Sequence: Synthetic oligonucleotide
  Antisense strand to SEQ ID NO: 628436
cuucucagggaauagaaga

SEQ ID NO: 628438 - RNA, 19 nt, Artificial Sequence
  Description of Artificial Sequence: Synthetic oligonucleotide
  Sense strand starting at position 508 of SEQ ID NO: 585293
ucuauucccugagaaggga

SEQ ID NO: 628439 - RNA, 19 nt, Artificial Sequence
  Description of Artificial Sequence: Synthetic oligonucleotide
  Antisense strand to SEQ ID NO: 628438
ucccuucucagggaauaga

SEQ ID NO: 628440 - RNA, 19 nt, Artificial Sequence
  Description of Artificial Sequence: Synthetic oligonucleotide
  Sense strand starting at position 567 of SEQ ID NO: 585293
cucagaagugcuggacuca

SEQ ID NO: 628441 - RNA, 19 nt, Artificial Sequence
  Description of Artificial Sequence: Synthetic oligonucleotide
  Antisense strand to SEQ ID NO: 628440
ugaguccagcacuucugag

SEQ ID NO: 628442 - RNA, 19 nt, Artificial Sequence
  Description of Artificial Sequence: Synthetic oligonucleotide
  Sense strand starting at position 595 of SEQ ID NO: 585293
acacauugagugugaagca

SEQ ID NO: 628443 - RNA, 19 nt, Artificial Sequence
  Description of Artificial Sequence: Synthetic oligonucleotide
  Antisense strand to SEQ ID NO: 628442
ugcuucacacucaaugugu

SEQ ID NO: 628444 - RNA, 19 nt, Artificial Sequence
  Description of Artificial Sequence: Synthetic oligonucleotide
  Sense strand starting at position 673 of SEQ ID NO: 585293
accacucaucaguauucga

SEQ ID NO: 628445 - RNA, 19 nt, Artificial Sequence
  Description of Artificial Sequence: Synthetic oligonucleotide
  Antisense strand to SEQ ID NO: 628444
ucgaauacugaugaguggu

SEQ ID NO: 628446 - RNA, 19 nt, Artificial Sequence
  Description of Artificial Sequence: Synthetic oligonucleotide
  Sense strand starting at position 677 of SEQ ID NO: 585293
cucaucaguauucgaggga

SEQ ID NO: 628447 - RNA, 19 nt, Artificial Sequence
  Description of Artificial Sequence: Synthetic oligonucleotide
  Antisense strand to SEQ ID NO: 628446
ucccucgaauacugaugag

SEQ ID NO: 628448 - RNA, 19 nt, Artificial Sequence
  Description of Artificial Sequence: Synthetic oligonucleotide
  Sense strand starting at position 681 of SEQ ID NO: 585293
ucaguauucgagggaucgu

SEQ ID NO: 628449 - RNA, 19 nt, Artificial Sequence
  Description of Artificial Sequence: Synthetic oligonucleotide
  Antisense strand to SEQ ID NO: 628448
acgaucccucgaauacuga

SEQ ID NO: 628450 - RNA, 19 nt, Artificial Sequence
  Description of Artificial Sequence: Synthetic oligonucleotide
  Sense strand starting at position 833 of SEQ ID NO: 585293
auucuaguguuggucccaa

SEQ ID NO: 628451 - RNA, 19 nt, Artificial Sequence
  Description of Artificial Sequence: Synthetic oligonucleotide
  Antisense strand to SEQ ID NO: 628450
uugggaccaacacuagaau

SEQ ID NO: 628452 - RNA, 19 nt, Artificial Sequence
  Description of Artificial Sequence: Synthetic oligonucleotide
  Sense strand starting at position 2041 of SEQ ID NO: 585293
cgucgugaguauccaggau

SEQ ID NO: 628453 - RNA, 19 nt, Artificial Sequence
  Description of Artificial Sequence: Synthetic oligonucleotide
  Antisense strand to SEQ ID NO: 628452
auccuggauacucacgacg

SEQ ID NO: 628454 - RNA, 19 nt, Artificial Sequence
  Description of Artificial Sequence: Synthetic oligonucleotide
  Sense strand starting at position 2279 of SEQ ID NO: 585293
gggagaaacccucggcaug

SEQ ID NO: 628455 - RNA, 19 nt, Artificial Sequence
  Description of Artificial Sequence: Synthetic oligonucleotide
  Antisense strand to SEQ ID NO: 628454
caugccgaggguuucuccc

SEQ ID NO: 628456 - RNA, 19 nt, Artificial Sequence
  Description of Artificial Sequence: Synthetic oligonucleotide
  Sense strand starting at position 2424 of SEQ ID NO: 585293
gccagagaguaagcuugau

SEQ ID NO: 628457 - RNA, 19 nt, Artificial Sequence
  Description of Artificial Sequence: Synthetic oligonucleotide
  Antisense strand to SEQ ID NO: 628456
aucaagcuuacucucuggc

SEQ ID NO: 628458 - RNA, 19 nt, Artificial Sequence
  Description of Artificial Sequence: Synthetic oligonucleotide
  Sense strand starting at position 2430 of SEQ ID NO: 585293
gaguaagcuugaucuggga

SEQ ID NO: 628459 - RNA, 19 nt, Artificial Sequence
  Description of Artificial Sequence: Synthetic oligonucleotide
  Antisense strand to SEQ ID NO: 628458
ucccagaucaagcuuacuc

SEQ ID NO: 628460 - RNA, 19 nt, Artificial Sequence
  Description of Artificial Sequence: Synthetic oligonucleotide
  Sense strand starting at position 2432 of SEQ ID NO: 585293
guaagcuugaucugggaau

SEQ ID NO: 628461 - RNA, 19 nt, Artificial Sequence
  Description of Artificial Sequence: Synthetic oligonucleotide
  Antisense strand to SEQ ID NO: 628460
auucccagaucaagcuuac

SEQ ID NO: 628462 - RNA, 19 nt, Artificial Sequence
  Description of Artificial Sequence: Synthetic oligonucleotide
  Sense strand starting at position 2528 of SEQ ID NO: 585293
agaccaauuugcucuuugu

SEQ ID NO: 628463 - RNA, 19 nt, Artificial Sequence
  Description of Artificial Sequence: Synthetic oligonucleotide
  Antisense strand to SEQ ID NO: 628462
acaaagagcaaauuggucu

SEQ ID NO: 628464 - RNA, 19 nt, Artificial Sequence
  Description of Artificial Sequence: Synthetic oligonucleotide
  Sense strand starting at position 2592 of SEQ ID NO: 585293
ucaggaaucuaauagguaa

SEQ ID NO: 628465 - RNA, 19 nt, Artificial Sequence
  Description of Artificial Sequence: Synthetic oligonucleotide
  Antisense strand to SEQ ID NO: 628464
uuaccuauuagauuccuga

SEQ ID NO: 628466 - RNA, 19 nt, Artificial Sequence
  Description of Artificial Sequence: Synthetic oligonucleotide
  Sense strand starting at position 2633 of SEQ ID NO: 585293
auguauaaauguguccaaa

SEQ ID NO: 628467 - RNA, 19 nt, Artificial Sequence
  Description of Artificial Sequence: Synthetic oligonucleotide
  Antisense strand to SEQ ID NO: 628466
uuuggacacauuuauacau

SEQ ID NO: 628468 - RNA, 19 nt, Artificial Sequence
  Description of Artificial Sequence: Synthetic oligonucleotide
  Sense strand starting at position 2685 of SEQ ID NO: 585293
ugcacuuucccagacaaug

SEQ ID NO: 628469 - RNA, 19 nt, Artificial Sequence
  Description of Artificial Sequence: Synthetic oligonucleotide
  Antisense strand to SEQ ID NO: 628468
cauugucugggaaagugca

SEQ ID NO: 628470 - RNA, 19 nt, Artificial Sequence
  Description of Artificial Sequence: Synthetic oligonucleotide
  Sense strand starting at position 2709 of SEQ ID NO: 585293
gugacuccugcuugucuua

SEQ ID NO: 628471 - RNA, 19 nt, Artificial Sequence
  Description of Artificial Sequence: Synthetic oligonucleotide
  Antisense strand to SEQ ID NO: 628470
uaagacaagcaggagucac

SEQ ID NO: 628472 - RNA, 19 nt, Artificial Sequence
  Description of Artificial Sequence: Synthetic oligonucleotide
  Sense strand starting at position 2744 of SEQ ID NO: 585293
auuccuuagcucugaguuu

SEQ ID NO: 628473 - RNA, 19 nt, Artificial Sequence
  Description of Artificial Sequence: Synthetic oligonucleotide
  Antisense strand to SEQ ID NO: 628472
aaacucagagcuaaggaau

SEQ ID NO: 628474 - RNA, 19 nt, Artificial Sequence
  Description of Artificial Sequence: Synthetic oligonucleotide
  Sense strand starting at position 2799 of SEQ ID NO: 585293
gccacuguguuccuauaug

SEQ ID NO: 628475 - RNA, 19 nt, Artificial Sequence
  Description of Artificial Sequence: Synthetic oligonucleotide
  Antisense strand to SEQ ID NO: 628474
cauauaggaacacaguggc

SEQ ID NO: 628476 - RNA, 19 nt, Artificial Sequence
  Description of Artificial Sequence: Synthetic oligonucleotide
  Sense strand starting at position 3048 of SEQ ID NO: 585293
ccuccuaggcucuguagau

SEQ ID NO: 628477 - RNA, 19 nt, Artificial Sequence
  Description of Artificial Sequence: Synthetic oligonucleotide
  Antisense strand to SEQ ID NO: 628476
aucuacagagccuaggagg

SEQ ID NO: 628478 - RNA, 19 nt, Artificial Sequence
  Description of Artificial Sequence: Synthetic oligonucleotide
  Sense strand starting at position 3049 of SEQ ID NO: 585293
cuccuaggcucuguagauu

SEQ ID NO: 628479 - RNA, 19 nt, Artificial Sequence
  Description of Artificial Sequence: Synthetic oligonucleotide
  Antisense strand to SEQ ID NO: 628478
aaucuacagagccuaggag

SEQ ID NO: 628480 - RNA, 19 nt, Artificial Sequence
  Description of Artificial Sequence: Synthetic oligonucleotide
  Sense strand starting at position 3052 of SEQ ID NO: 585293
cuaggcucuguagauugau

SEQ ID NO: 628481 - RNA, 19 nt, Artificial Sequence
  Description of Artificial Sequence: Synthetic oligonucleotide
  Antisense strand to SEQ ID NO: 628480
aucaaucuacagagccuag

SEQ ID NO: 628482 - RNA, 19 nt, Artificial Sequence
  Description of Artificial Sequence: Synthetic oligonucleotide
  Sense strand starting at position 3314 of SEQ ID NO: 585293
gugugucauuucuccacuu

SEQ ID NO: 628483 - RNA, 19 nt, Artificial Sequence
  Description of Artificial Sequence: Synthetic oligonucleotide
  Antisense strand to SEQ ID NO: 628482
aaguggagaaaugacacac

SEQ ID NO: 628484 - RNA, 19 nt, Artificial Sequence
  Description of Artificial Sequence: Synthetic oligonucleotide
  Sense strand starting at position 3315 of SEQ ID NO: 585293
ugugucauuucuccacuua

SEQ ID NO: 628485 - RNA, 19 nt, Artificial Sequence
  Description of Artificial Sequence: Synthetic oligonucleotide
  Antisense strand to SEQ ID NO: 628484
uaaguggagaaaugacaca

SEQ ID NO: 628486 - RNA, 19 nt, Artificial Sequence
  Description of Artificial Sequence: Synthetic oligonucleotide
  Sense strand starting at position 3377 of SEQ ID NO: 585293
gugucaggcacuugagcau

SEQ ID NO: 628487 - RNA, 19 nt, Artificial Sequence
  Description of Artificial Sequence: Synthetic oligonucleotide
  Antisense strand to SEQ ID NO: 628486
augcucaagugccugacac

SEQ ID NO: 628488 - RNA, 19 nt, Artificial Sequence
  Description of Artificial Sequence: Synthetic oligonucleotide
  Sense strand starting at position 3533 of SEQ ID NO: 585293
augcaacuaguguguauau

SEQ ID NO: 628489 - RNA, 19 nt, Artificial Sequence
  Description of Artificial Sequence: Synthetic oligonucleotide
  Antisense strand to SEQ ID NO: 628488
auauacacacuaguugcau

SEQ ID NO: 628490 - RNA, 19 nt, Artificial Sequence
  Description of Artificial Sequence: Synthetic oligonucleotide
  Sense strand starting at position 3535 of SEQ ID NO: 585293
gcaacuaguguguauauca

SEQ ID NO: 628491 - RNA, 19 nt, Artificial Sequence
  Description of Artificial Sequence: Synthetic oligonucleotide
  Antisense strand to SEQ ID NO: 628490
ugauauacacacuaguugc

SEQ ID NO: 628492 - RNA, 19 nt, Artificial Sequence
  Description of Artificial Sequence: Synthetic oligonucleotide
  Sense strand starting at position 3609 of SEQ ID NO: 585293
gcuuauaguuccuugguca

SEQ ID NO: 628493 - RNA, 19 nt, Artificial Sequence
  Description of Artificial Sequence: Synthetic oligonucleotide
  Antisense strand to SEQ ID NO: 628492
ugaccaaggaacuauaagc

SEQ ID NO: 628494 - RNA, 19 nt, Artificial Sequence
  Description of Artificial Sequence: Synthetic oligonucleotide
  Sense strand starting at position 3610 of SEQ ID NO: 585293
cuuauaguuccuuggucag

SEQ ID NO: 628495 - RNA, 19 nt, Artificial Sequence
  Description of Artificial Sequence: Synthetic oligonucleotide
  Antisense strand to SEQ ID NO: 628494
cugaccaaggaacuauaag

SEQ ID NO: 628496 - RNA, 19 nt, Artificial Sequence
  Description of Artificial Sequence: Synthetic oligonucleotide
  Sense strand starting at position 3612 of SEQ ID NO: 585293
uauaguuccuuggucagaa

SEQ ID NO: 628497 - RNA, 19 nt, Artificial Sequence
  Description of Artificial Sequence: Synthetic oligonucleotide
  Antisense strand to SEQ ID NO: 628496
uucugaccaaggaacuaua

SEQ ID NO: 628498 - RNA, 19 nt, Artificial Sequence
  Description of Artificial Sequence: Synthetic oligonucleotide
  Sense strand starting at position 3613 of SEQ ID NO: 585293
auaguuccuuggucagaaa

SEQ ID NO: 628499 - RNA, 19 nt, Artificial Sequence
  Description of Artificial Sequence: Synthetic oligonucleotide
  Antisense strand to SEQ ID NO: 628498
uuucugaccaaggaacuau

SEQ ID NO: 628500 - RNA, 19 nt, Artificial Sequence
  Description of Artificial Sequence: Synthetic oligonucleotide
  Sense strand starting at position 3614 of SEQ ID NO: 585293
uaguuccuuggucagaaau

SEQ ID NO: 628501 - RNA, 19 nt, Artificial Sequence
  Description of Artificial Sequence: Synthetic oligonucleotide
  Antisense strand to SEQ ID NO: 628500
auuucugaccaaggaacua

SEQ ID NO: 628502 - RNA, 19 nt, Artificial Sequence
  Description of Artificial Sequence: Synthetic oligonucleotide
  Sense strand starting at position 3645 of SEQ ID NO: 585293
uggauagaaucuccauucu

SEQ ID NO: 628503 - RNA, 19 nt, Artificial Sequence
  Description of Artificial Sequence: Synthetic oligonucleotide
  Antisense strand to SEQ ID NO: 628502
agaauggagauucuaucca

SEQ ID NO: 628504 - RNA, 19 nt, Artificial Sequence
  Description of Artificial Sequence: Synthetic oligonucleotide
  Sense strand starting at position 3705 of SEQ ID NO: 585293
gguuuauacagagguggca

SEQ ID NO: 628505 - RNA, 19 nt, Artificial Sequence
  Description of Artificial Sequence: Synthetic oligonucleotide
  Antisense strand to SEQ ID NO: 628504
ugccaccucuguauaaacc

SEQ ID NO: 628506 - RNA, 19 nt, Artificial Sequence
  Description of Artificial Sequence: Synthetic oligonucleotide
  Sense strand starting at position 3772 of SEQ ID NO: 585293
gcugucaauguagagaacu

SEQ ID NO: 628507 - RNA, 19 nt, Artificial Sequence
  Description of Artificial Sequence: Synthetic oligonucleotide
  Antisense strand to SEQ ID NO: 628506
aguucucuacauugacagc

SEQ ID NO: 628508 - RNA, 19 nt, Artificial Sequence
  Description of Artificial Sequence: Synthetic oligonucleotide
  Sense strand starting at position 3798 of SEQ ID NO: 585293
gcucaauucccggugcuca

SEQ ID NO: 628509 - RNA, 19 nt, Artificial Sequence
  Description of Artificial Sequence: Synthetic oligonucleotide
  Antisense strand to SEQ ID NO: 628508
ugagcaccgggaauugagc

SEQ ID NO: 628510 - RNA, 19 nt, Artificial Sequence
  Description of Artificial Sequence: Synthetic oligonucleotide
  Sense strand starting at position 3901 of SEQ ID NO: 585293
gguacaguggcccaaugau

SEQ ID NO: 628511 - RNA, 19 nt, Artificial Sequence
  Description of Artificial Sequence: Synthetic oligonucleotide
  Antisense strand to SEQ ID NO: 628510
aucauugggccacuguacc

SEQ ID NO: 628512 - RNA, 19 nt, Artificial Sequence
  Description of Artificial Sequence: Synthetic oligonucleotide
  Sense strand starting at position 3910 of SEQ ID NO: 585293
gcccaaugaucucugcuca

SEQ ID NO: 628513 - RNA, 19 nt, Artificial Sequence
  Description of Artificial Sequence: Synthetic oligonucleotide
  Antisense strand to SEQ ID NO: 628512
ugagcagagaucauugggc

SEQ ID NO: 628514 - RNA, 19 nt, Artificial Sequence
  Description of Artificial Sequence: Synthetic oligonucleotide
  Sense strand starting at position 1 of SEQ ID NO: 585294
ggaagacggcucugggaaa

SEQ ID NO: 628515 - RNA, 19 nt, Artificial Sequence
  Description of Artificial Sequence: Synthetic oligonucleotide
  Antisense strand to SEQ ID NO: 628514
uuucccagagccgucuucc

SEQ ID NO: 628516 - RNA, 19 nt, Artificial Sequence
  Description of Artificial Sequence: Synthetic oligonucleotide
  Sense strand starting at position 56 of SEQ ID NO: 585294
gcuccugcuuucccugaga

SEQ ID NO: 628517 - RNA, 19 nt, Artificial Sequence
  Description of Artificial Sequence: Synthetic oligonucleotide
  Antisense strand to SEQ ID NO: 628516
ucucagggaaagcaggagc

SEQ ID NO: 628518 - RNA, 19 nt, Artificial Sequence
  Description of Artificial Sequence: Synthetic oligonucleotide
  Sense strand starting at position 58 of SEQ ID NO: 585294
uccugcuuucccugagaag

SEQ ID NO: 628519 - RNA, 19 nt, Artificial Sequence
  Description of Artificial Sequence: Synthetic oligonucleotide
  Antisense strand to SEQ ID NO: 628518
cuucucagggaaagcagga

SEQ ID NO: 628520 - RNA, 19 nt, Artificial Sequence
  Description of Artificial Sequence: Synthetic oligonucleotide
  Sense strand starting at position 59 of SEQ ID NO: 585294
ccugcuuucccugagaaga

SEQ ID NO: 628521 - RNA, 19 nt, Artificial Sequence
  Description of Artificial Sequence: Synthetic oligonucleotide
  Antisense strand to SEQ ID NO: 628520
ucuucucagggaaagcagg

SEQ ID NO: 628522 - RNA, 19 nt, Artificial Sequence
  Description of Artificial Sequence: Synthetic oligonucleotide
  Sense strand starting at position 164 of SEQ ID NO: 585294
ugcucuucuccagaaggca

SEQ ID NO: 628523 - RNA, 19 nt, Artificial Sequence
  Description of Artificial Sequence: Synthetic oligonucleotide
  Antisense strand to SEQ ID NO: 628522
ugccuucuggagaagagca

SEQ ID NO: 628524 - RNA, 19 nt, Artificial Sequence
  Description of Artificial Sequence: Synthetic oligonucleotide
  Sense strand starting at position 330 of SEQ ID NO: 585294
uggccucauggucagagau

SEQ ID NO: 628525 - RNA, 19 nt, Artificial Sequence
  Description of Artificial Sequence: Synthetic oligonucleotide
  Antisense strand to SEQ ID NO: 628524
aucucugaccaugaggcca

SEQ ID NO: 628526 - RNA, 19 nt, Artificial Sequence
  Description of Artificial Sequence: Synthetic oligonucleotide
  Sense strand starting at position 445 of SEQ ID NO: 585294
augugaccagccugagaau

SEQ ID NO: 628527 - RNA, 19 nt, Artificial Sequence
  Description of Artificial Sequence: Synthetic oligonucleotide
  Antisense strand to SEQ ID NO: 628526
auucucaggcuggucacau

SEQ ID NO: 628528 - RNA, 19 nt, Artificial Sequence
  Description of Artificial Sequence: Synthetic oligonucleotide
  Sense strand starting at position 576 of SEQ ID NO: 585294
agggacuucugcuccugau

SEQ ID NO: 628529 - RNA, 19 nt, Artificial Sequence
  Description of Artificial Sequence: Synthetic oligonucleotide
  Antisense strand to SEQ ID NO: 628528
aucaggagcagaagucccu

SEQ ID NO: 628530 - RNA, 19 nt, Artificial Sequence
  Description of Artificial Sequence: Synthetic oligonucleotide
  Sense strand starting at position 588 of SEQ ID NO: 585294
uccugaucugaguggaggu

SEQ ID NO: 628531 - RNA, 19 nt, Artificial Sequence
  Description of Artificial Sequence: Synthetic oligonucleotide
  Antisense strand to SEQ ID NO: 628530
accuccacucagaucagga

SEQ ID NO: 628532 - RNA, 19 nt, Artificial Sequence
  Description of Artificial Sequence: Synthetic oligonucleotide
  Sense strand starting at position 589 of SEQ ID NO: 585294
ccugaucugaguggaggua

SEQ ID NO: 628533 - RNA, 19 nt, Artificial Sequence
  Description of Artificial Sequence: Synthetic oligonucleotide
  Antisense strand to SEQ ID NO: 628532
uaccuccacucagaucagg

SEQ ID NO: 628534 - RNA, 19 nt, Artificial Sequence
  Description of Artificial Sequence: Synthetic oligonucleotide
  Sense strand starting at position 604 of SEQ ID NO: 585294
gguaaagugacucagaagu

SEQ ID NO: 628535 - RNA, 19 nt, Artificial Sequence
  Description of Artificial Sequence: Synthetic oligonucleotide
  Antisense strand to SEQ ID NO: 628534
acuucugagucacuuuacc

SEQ ID NO: 628536 - RNA, 19 nt, Artificial Sequence
  Description of Artificial Sequence: Synthetic oligonucleotide
  Sense strand starting at position 614 of SEQ ID NO: 585294
cucagaagugcuggaauca

SEQ ID NO: 628537 - RNA, 19 nt, Artificial Sequence
  Description of Artificial Sequence: Synthetic oligonucleotide
  Antisense strand to SEQ ID NO: 628536
ugauuccagcacuucugag

SEQ ID NO: 628538 - RNA, 19 nt, Artificial Sequence
  Description of Artificial Sequence: Synthetic oligonucleotide
  Sense strand starting at position 726 of SEQ ID NO: 585294
ugaucaguauucuagggac

SEQ ID NO: 628539 - RNA, 19 nt, Artificial Sequence
  Description of Artificial Sequence: Synthetic oligonucleotide
  Antisense strand to SEQ ID NO: 628538
gucccuagaauacugauca

SEQ ID NO: 628540 - RNA, 19 nt, Artificial Sequence
  Description of Artificial Sequence: Synthetic oligonucleotide
  Sense strand starting at position 755 of SEQ ID NO: 585294
uccauuuccucagagacgu

SEQ ID NO: 628541 - RNA, 19 nt, Artificial Sequence
  Description of Artificial Sequence: Synthetic oligonucleotide
  Antisense strand to SEQ ID NO: 628540
acgucucugaggaaaugga

SEQ ID NO: 628542 - RNA, 19 nt, Artificial Sequence
  Description of Artificial Sequence: Synthetic oligonucleotide
  Sense strand starting at position 768 of SEQ ID NO: 585294
agacgucauuccuuaauug

SEQ ID NO: 628543 - RNA, 19 nt, Artificial Sequence
  Description of Artificial Sequence: Synthetic oligonucleotide
  Antisense strand to SEQ ID NO: 628542
caauuaaggaaugacgucu

SEQ ID NO: 628544 - RNA, 19 nt, Artificial Sequence
  Description of Artificial Sequence: Synthetic oligonucleotide
  Sense strand starting at position 769 of SEQ ID NO: 585294
gacgucauuccuuaauugu

SEQ ID NO: 628545 - RNA, 19 nt, Artificial Sequence
  Description of Artificial Sequence: Synthetic oligonucleotide
  Antisense strand to SEQ ID NO: 628544
acaauuaaggaaugacguc

SEQ ID NO: 628546 - RNA, 19 nt, Artificial Sequence
  Description of Artificial Sequence: Synthetic oligonucleotide
  Sense strand starting at position 772 of SEQ ID NO: 585294
gucauuccuuaauugucua

SEQ ID NO: 628547 - RNA, 19 nt, Artificial Sequence
  Description of Artificial Sequence: Synthetic oligonucleotide
  Antisense strand to SEQ ID NO: 628546
uagacaauuaaggaaugac

SEQ ID NO: 628548 - RNA, 19 nt, Artificial Sequence
  Description of Artificial Sequence: Synthetic oligonucleotide
  Sense strand starting at position 776 of SEQ ID NO: 585294
uuccuuaauugucuagaga

SEQ ID NO: 628549 - RNA, 19 nt, Artificial Sequence
  Description of Artificial Sequence: Synthetic oligonucleotide
  Antisense strand to SEQ ID NO: 628548
ucucuagacaauuaaggaa

SEQ ID NO: 628550 - RNA, 19 nt, Artificial Sequence
  Description of Artificial Sequence: Synthetic oligonucleotide
  Sense strand starting at position 1542 of SEQ ID NO: 585294
ccuuguagaucuguguguu

SEQ ID NO: 628551 - RNA, 19 nt, Artificial Sequence
  Description of Artificial Sequence: Synthetic oligonucleotide
  Antisense strand to SEQ ID NO: 628550
aacacacagaucuacaagg

SEQ ID NO: 628552 - RNA, 19 nt, Artificial Sequence
  Description of Artificial Sequence: Synthetic oligonucleotide
  Sense strand starting at position 1543 of SEQ ID NO: 585294
cuuguagaucuguguguuc

SEQ ID NO: 628553 - RNA, 19 nt, Artificial Sequence
  Description of Artificial Sequence: Synthetic oligonucleotide
  Antisense strand to SEQ ID NO: 628552
gaacacacagaucuacaag

SEQ ID NO: 628554 - RNA, 19 nt, Artificial Sequence
  Description of Artificial Sequence: Synthetic oligonucleotide
  Sense strand starting at position 1552 of SEQ ID NO: 585294
cuguguguuccggucccaa

SEQ ID NO: 628555 - RNA, 19 nt, Artificial Sequence
  Description of Artificial Sequence: Synthetic oligonucleotide
  Antisense strand to SEQ ID NO: 628554
uugggaccggaacacacag

SEQ ID NO: 628556 - RNA, 19 nt, Artificial Sequence
  Description of Artificial Sequence: Synthetic oligonucleotide
  Sense strand starting at position 2016 of SEQ ID NO: 585294
cugauuggcuucucuagau

SEQ ID NO: 628557 - RNA, 19 nt, Artificial Sequence
  Description of Artificial Sequence: Synthetic oligonucleotide
  Antisense strand to SEQ ID NO: 628556
aucuagagaagccaaucag

SEQ ID NO: 628558 - RNA, 19 nt, Artificial Sequence
  Description of Artificial Sequence: Synthetic oligonucleotide
  Sense strand starting at position 2411 of SEQ ID NO: 585294
uggacucuuguguagggaa

SEQ ID NO: 628559 - RNA, 19 nt, Artificial Sequence
  Description of Artificial Sequence: Synthetic oligonucleotide
  Antisense strand to SEQ ID NO: 628558
uucccuacacaagagucca

SEQ ID NO: 628560 - RNA, 19 nt, Artificial Sequence
  Description of Artificial Sequence: Synthetic oligonucleotide
  Sense strand starting at position 2413 of SEQ ID NO: 585294
gacucuuguguagggaaac

SEQ ID NO: 628561 - RNA, 19 nt, Artificial Sequence
  Description of Artificial Sequence: Synthetic oligonucleotide
  Antisense strand to SEQ ID NO: 628560
guuucccuacacaagaguc

SEQ ID NO: 628562 - RNA, 19 nt, Artificial Sequence
  Description of Artificial Sequence: Synthetic oligonucleotide
  Sense strand starting at position 2540 of SEQ ID NO: 585294
uagggauucucauagagac

SEQ ID NO: 628563 - RNA, 19 nt, Artificial Sequence
  Description of Artificial Sequence: Synthetic oligonucleotide
  Antisense strand to SEQ ID NO: 628562
gucucuaugagaaucccua

SEQ ID NO: 628564 - RNA, 19 nt, Artificial Sequence
  Description of Artificial Sequence: Synthetic oligonucleotide
  Sense strand starting at position 2615 of SEQ ID NO: 585294
ugauuagaauuccaauuug

SEQ ID NO: 628565 - RNA, 19 nt, Artificial Sequence
  Description of Artificial Sequence: Synthetic oligonucleotide
  Antisense strand to SEQ ID NO: 628564
caaauuggaauucuaauca

SEQ ID NO: 628566 - RNA, 19 nt, Artificial Sequence
  Description of Artificial Sequence: Synthetic oligonucleotide
  Sense strand starting at position 2708 of SEQ ID NO: 585294
ucuguaacucuggguuguu

SEQ ID NO: 628567 - RNA, 19 nt, Artificial Sequence
  Description of Artificial Sequence: Synthetic oligonucleotide
  Antisense strand to SEQ ID NO: 628566
aacaacccagaguuacaga

SEQ ID NO: 628568 - RNA, 19 nt, Artificial Sequence
  Description of Artificial Sequence: Synthetic oligonucleotide
  Sense strand starting at position 2756 of SEQ ID NO: 585294
ugaguuucccugugugagu

SEQ ID NO: 628569 - RNA, 19 nt, Artificial Sequence
  Description of Artificial Sequence: Synthetic oligonucleotide
  Antisense strand to SEQ ID NO: 628568
acucacacagggaaacuca

SEQ ID NO: 628570 - RNA, 19 nt, Artificial Sequence
  Description of Artificial Sequence: Synthetic oligonucleotide
  Sense strand starting at position 3064 of SEQ ID NO: 585294
aggcucuuccacugcuuua

SEQ ID NO: 628571 - RNA, 19 nt, Artificial Sequence
  Description of Artificial Sequence: Synthetic oligonucleotide
  Antisense strand to SEQ ID NO: 628570
uaaagcaguggaagagccu

SEQ ID NO: 628572 - RNA, 19 nt, Artificial Sequence
  Description of Artificial Sequence: Synthetic oligonucleotide
  Sense strand starting at position 3265 of SEQ ID NO: 585294
gcuaaugugacucagguca

SEQ ID NO: 628573 - RNA, 19 nt, Artificial Sequence
  Description of Artificial Sequence: Synthetic oligonucleotide
  Antisense strand to SEQ ID NO: 628572
ugaccugagucacauuagc

SEQ ID NO: 628574 - RNA, 19 nt, Artificial Sequence
  Description of Artificial Sequence: Synthetic oligonucleotide
  Sense strand starting at position 3511 of SEQ ID NO: 585294
agguuauauuaagcugcau

SEQ ID NO: 628575 - RNA, 19 nt, Artificial Sequence
  Description of Artificial Sequence: Synthetic oligonucleotide
  Antisense strand to SEQ ID NO: 628574
augcagcuuaauauaaccu

SEQ ID NO: 628576 - RNA, 19 nt, Artificial Sequence
  Description of Artificial Sequence: Synthetic oligonucleotide
  Sense strand starting at position 3555 of SEQ ID NO: 585294
caguguaguuucuuguaac

SEQ ID NO: 628577 - RNA, 19 nt, Artificial Sequence
  Description of Artificial Sequence: Synthetic oligonucleotide
  Antisense strand to SEQ ID NO: 628576
guuacaagaaacuacacug

SEQ ID NO: 628578 - RNA, 19 nt, Artificial Sequence
  Description of Artificial Sequence: Synthetic oligonucleotide
  Sense strand starting at position 3569 of SEQ ID NO: 585294
guaaccuaccauugugcua

SEQ ID NO: 628579 - RNA, 19 nt, Artificial Sequence
  Description of Artificial Sequence: Synthetic oligonucleotide
  Antisense strand to SEQ ID NO: 628578
uagcacaaugguagguuac

SEQ ID NO: 628580 - RNA, 19 nt, Artificial Sequence
  Description of Artificial Sequence: Synthetic oligonucleotide
  Sense strand starting at position 3617 of SEQ ID NO: 585294
auuauagacucagugauac

SEQ ID NO: 628581 - RNA, 19 nt, Artificial Sequence
  Description of Artificial Sequence: Synthetic oligonucleotide
  Antisense strand to SEQ ID NO: 628580
guaucacugagucuauaau

SEQ ID NO: 628582 - RNA, 19 nt, Artificial Sequence
  Description of Artificial Sequence: Synthetic oligonucleotide
  Sense strand starting at position 3628 of SEQ ID NO: 585294
agugauacagugcaauacu

SEQ ID NO: 628583 - RNA, 19 nt, Artificial Sequence
  Description of Artificial Sequence: Synthetic oligonucleotide
  Antisense strand to SEQ ID NO: 628582
aguauugcacuguaucacu

SEQ ID NO: 628584 - RNA, 19 nt, Artificial Sequence
  Description of Artificial Sequence: Synthetic oligonucleotide
  Sense strand starting at position 3698 of SEQ ID NO: 585294
gugaaugugacauguguau

SEQ ID NO: 628585 - RNA, 19 nt, Artificial Sequence
  Description of Artificial Sequence: Synthetic oligonucleotide
  Antisense strand to SEQ ID NO: 628584
auacacaugucacauucac

SEQ ID NO: 628586 - RNA, 19 nt, Artificial Sequence
  Description of Artificial Sequence: Synthetic oligonucleotide
  Sense strand starting at position 3700 of SEQ ID NO: 585294
gaaugugacauguguaugu

SEQ ID NO: 628587 - RNA, 19 nt, Artificial Sequence
  Description of Artificial Sequence: Synthetic oligonucleotide
  Antisense strand to SEQ ID NO: 628586
acauacacaugucacauuc

SEQ ID NO: 628588 - RNA, 19 nt, Artificial Sequence
  Description of Artificial Sequence: Synthetic oligonucleotide
  Sense strand starting at position 3704 of SEQ ID NO: 585294
gugacauguguaugugcau

SEQ ID NO: 628589 - RNA, 19 nt, Artificial Sequence
  Description of Artificial Sequence: Synthetic oligonucleotide
  Antisense strand to SEQ ID NO: 628588
augcacauacacaugucac

SEQ ID NO: 628590 - RNA, 19 nt, Artificial Sequence
  Description of Artificial Sequence: Synthetic oligonucleotide
  Sense strand starting at position 3707 of SEQ ID NO: 585294
acauguguaugugcaucau

SEQ ID NO: 628591 - RNA, 19 nt, Artificial Sequence
  Description of Artificial Sequence: Synthetic oligonucleotide
  Antisense strand to SEQ ID NO: 628590
augaugcacauacacaugu

SEQ ID NO: 628592 - RNA, 19 nt, Artificial Sequence
  Description of Artificial Sequence: Synthetic oligonucleotide
  Sense strand starting at position 3967 of SEQ ID NO: 585294
uggcgaauauugguaauua

SEQ ID NO: 628593 - RNA, 19 nt, Artificial Sequence
  Description of Artificial Sequence: Synthetic oligonucleotide
  Antisense strand to SEQ ID NO: 628592
uaauuaccaauauucgcca

SEQ ID NO: 628594 - RNA, 19 nt, Artificial Sequence
  Description of Artificial Sequence: Synthetic oligonucleotide
  Sense strand starting at position 27 of SEQ ID NO: 585295
uucugcuuucucugauaag

SEQ ID NO: 628595 - RNA, 19 nt, Artificial Sequence
  Description of Artificial Sequence: Synthetic oligonucleotide
  Antisense strand to SEQ ID NO: 628594
cuuaucagagaaagcagaa

SEQ ID NO: 628596 - RNA, 19 nt, Artificial Sequence
  Description of Artificial Sequence: Synthetic oligonucleotide
  Sense strand starting at position 28 of SEQ ID NO: 585295
ucugcuuucucugauaaga

SEQ ID NO: 628597 - RNA, 19 nt, Artificial Sequence
  Description of Artificial Sequence: Synthetic oligonucleotide
  Antisense strand to SEQ ID NO: 628596
ucuuaucagagaaagcaga

SEQ ID NO: 628598 - RNA, 19 nt, Artificial Sequence
  Description of Artificial Sequence: Synthetic oligonucleotide
  Sense strand starting at position 30 of SEQ ID NO: 585295
ugcuuucucugauaagaga

SEQ ID NO: 628599 - RNA, 19 nt, Artificial Sequence
  Description of Artificial Sequence: Synthetic oligonucleotide
  Antisense strand to SEQ ID NO: 628598
ucucuuaucagagaaagca

SEQ ID NO: 628600 - RNA, 19 nt, Artificial Sequence
  Description of Artificial Sequence: Synthetic oligonucleotide
  Sense strand starting at position 133 of SEQ ID NO: 585295
ugcucuuguccagaaggca

SEQ ID NO: 628601 - RNA, 19 nt, Artificial Sequence
  Description of Artificial Sequence: Synthetic oligonucleotide
  Antisense strand to SEQ ID NO: 628600
ugccuucuggacaagagca

SEQ ID NO: 628602 - RNA, 19 nt, Artificial Sequence
  Description of Artificial Sequence: Synthetic oligonucleotide
  Sense strand starting at position 345 of SEQ ID NO: 585295
ggguucugacgggaagagu

SEQ ID NO: 628603 - RNA, 19 nt, Artificial Sequence
  Description of Artificial Sequence: Synthetic oligonucleotide
  Antisense strand to SEQ ID NO: 628602
acucuucccgucagaaccc

SEQ ID NO: 628604 - RNA, 19 nt, Artificial Sequence
  Description of Artificial Sequence: Synthetic oligonucleotide
  Sense strand starting at position 414 of SEQ ID NO: 585295
augugaccauccugagaau

SEQ ID NO: 628605 - RNA, 19 nt, Artificial Sequence
  Description of Artificial Sequence: Synthetic oligonucleotide
  Antisense strand to SEQ ID NO: 628604
auucucaggauggucacau

SEQ ID NO: 628606 - RNA, 19 nt, Artificial Sequence
  Description of Artificial Sequence: Synthetic oligonucleotide
  Sense strand starting at position 522 of SEQ ID NO: 585295
aguucuagucucugaggga

SEQ ID NO: 628607 - RNA, 19 nt, Artificial Sequence
  Description of Artificial Sequence: Synthetic oligonucleotide
  Antisense strand to SEQ ID NO: 628606
ucccucagagacuagaacu

SEQ ID NO: 628608 - RNA, 19 nt, Artificial Sequence
  Description of Artificial Sequence: Synthetic oligonucleotide
  Sense strand starting at position 523 of SEQ ID NO: 585295
guucuagucucugagggag

SEQ ID NO: 628609 - RNA, 19 nt, Artificial Sequence
  Description of Artificial Sequence: Synthetic oligonucleotide
  Antisense strand to SEQ ID NO: 628608
cucccucagagacuagaac

SEQ ID NO: 628610 - RNA, 19 nt, Artificial Sequence
  Description of Artificial Sequence: Synthetic oligonucleotide
  Sense strand starting at position 670 of SEQ ID NO: 585295
agcugcugcaguggucaaa

SEQ ID NO: 628611 - RNA, 19 nt, Artificial Sequence
  Description of Artificial Sequence: Synthetic oligonucleotide
  Antisense strand to SEQ ID NO: 628610
uuugaccacugcagcagcu

SEQ ID NO: 628612 - RNA, 19 nt, Artificial Sequence
  Description of Artificial Sequence: Synthetic oligonucleotide
  Sense strand starting at position 679 of SEQ ID NO: 585295
aguggucaaaguggucaaa

SEQ ID NO: 628613 - RNA, 19 nt, Artificial Sequence
  Description of Artificial Sequence: Synthetic oligonucleotide
  Antisense strand to SEQ ID NO: 628612
uuugaccacuuugaccacu

SEQ ID NO: 628614 - RNA, 19 nt, Artificial Sequence
  Description of Artificial Sequence: Synthetic oligonucleotide
  Sense strand starting at position 709 of SEQ ID NO: 585295
aucaguauuccagggacug

SEQ ID NO: 628615 - RNA, 19 nt, Artificial Sequence
  Description of Artificial Sequence: Synthetic oligonucleotide
  Antisense strand to SEQ ID NO: 628614
cagucccuggaauacugau

SEQ ID NO: 628616 - RNA, 19 nt, Artificial Sequence
  Description of Artificial Sequence: Synthetic oligonucleotide
  Sense strand starting at position 710 of SEQ ID NO: 585295
ucaguauuccagggacugu

SEQ ID NO: 628617 - RNA, 19 nt, Artificial Sequence
  Description of Artificial Sequence: Synthetic oligonucleotide
  Antisense strand to SEQ ID NO: 628616
acagucccuggaauacuga

SEQ ID NO: 628618 - RNA, 19 nt, Artificial Sequence
  Description of Artificial Sequence: Synthetic oligonucleotide
  Sense strand starting at position 759 of SEQ ID NO: 585295
ccuuaauuguccuagagag

SEQ ID NO: 628619 - RNA, 19 nt, Artificial Sequence
  Description of Artificial Sequence: Synthetic oligonucleotide
  Antisense strand to SEQ ID NO: 628618
cucucuaggacaauuaagg

SEQ ID NO: 628620 - RNA, 19 nt, Artificial Sequence
  Description of Artificial Sequence: Synthetic oligonucleotide
  Sense strand starting at position 761 of SEQ ID NO: 585295
uuaauuguccuagagagca

SEQ ID NO: 628621 - RNA, 19 nt, Artificial Sequence
  Description of Artificial Sequence: Synthetic oligonucleotide
  Antisense strand to SEQ ID NO: 628620
ugcucucuaggacaauuaa

SEQ ID NO: 628622 - RNA, 19 nt, Artificial Sequence
  Description of Artificial Sequence: Synthetic oligonucleotide
  Sense strand starting at position 835 of SEQ ID NO: 585295
gggcgauauuccagugcug

SEQ ID NO: 628623 - RNA, 19 nt, Artificial Sequence
  Description of Artificial Sequence: Synthetic oligonucleotide
  Antisense strand to SEQ ID NO: 628622
cagcacuggaauaucgccc

SEQ ID NO: 628624 - RNA, 19 nt, Artificial Sequence
  Description of Artificial Sequence: Synthetic oligonucleotide
  Sense strand starting at position 837 of SEQ ID NO: 585295
gcgauauuccagugcugau

SEQ ID NO: 628625 - RNA, 19 nt, Artificial Sequence
  Description of Artificial Sequence: Synthetic oligonucleotide
  Antisense strand to SEQ ID NO: 628624
aucagcacuggaauaucgc

SEQ ID NO: 628626 - RNA, 19 nt, Artificial Sequence
  Description of Artificial Sequence: Synthetic oligonucleotide
  Sense strand starting at position 2051 of SEQ ID NO: 585295
gggacgcgucaugaguauu

SEQ ID NO: 628627 - RNA, 19 nt, Artificial Sequence
  Description of Artificial Sequence: Synthetic oligonucleotide
  Antisense strand to SEQ ID NO: 628626
aauacucaugacgcguccc

SEQ ID NO: 628628 - RNA, 19 nt, Artificial Sequence
  Description of Artificial Sequence: Synthetic oligonucleotide
  Sense strand starting at position 2057 of SEQ ID NO: 585295
cgucaugaguauucaggaa

SEQ ID NO: 628629 - RNA, 19 nt, Artificial Sequence
  Description of Artificial Sequence: Synthetic oligonucleotide
  Antisense strand to SEQ ID NO: 628628
uuccugaauacucaugacg

SEQ ID NO: 628630 - RNA, 19 nt, Artificial Sequence
  Description of Artificial Sequence: Synthetic oligonucleotide
  Sense strand starting at position 2459 of SEQ ID NO: 585295
acucuuguacagggaaacu

SEQ ID NO: 628631 - RNA, 19 nt, Artificial Sequence
  Description of Artificial Sequence: Synthetic oligonucleotide
  Antisense strand to SEQ ID NO: 628630
aguuucccuguacaagagu

SEQ ID NO: 628632 - RNA, 19 nt, Artificial Sequence
  Description of Artificial Sequence: Synthetic oligonucleotide
  Sense strand starting at position 2525 of SEQ ID NO: 585295
acguguagagucaggaguu

SEQ ID NO: 628633 - RNA, 19 nt, Artificial Sequence
  Description of Artificial Sequence: Synthetic oligonucleotide
  Antisense strand to SEQ ID NO: 628632
aacuccugacucuacacgu

SEQ ID NO: 628634 - RNA, 19 nt, Artificial Sequence
  Description of Artificial Sequence: Synthetic oligonucleotide
  Sense strand starting at position 2583 of SEQ ID NO: 585295
gguagagauucucauagag

SEQ ID NO: 628635 - RNA, 19 nt, Artificial Sequence
  Description of Artificial Sequence: Synthetic oligonucleotide
  Antisense strand to SEQ ID NO: 628634
cucuaugagaaucucuacc

SEQ ID NO: 628636 - RNA, 19 nt, Artificial Sequence
  Description of Artificial Sequence: Synthetic oligonucleotide
  Sense strand starting at position 2585 of SEQ ID NO: 585295
uagagauucucauagagac

SEQ ID NO: 628637 - RNA, 19 nt, Artificial Sequence
  Description of Artificial Sequence: Synthetic oligonucleotide
  Antisense strand to SEQ ID NO: 628636
gucucuaugagaaucucua

SEQ ID NO: 628638 - RNA, 19 nt, Artificial Sequence
  Description of Artificial Sequence: Synthetic oligonucleotide
  Sense strand starting at position 2668 of SEQ ID NO: 585295
auuccaaucugugaaagac

SEQ ID NO: 628639 - RNA, 19 nt, Artificial Sequence
  Description of Artificial Sequence: Synthetic oligonucleotide
  Antisense strand to SEQ ID NO: 628638
gucuuucacagauuggaau

SEQ ID NO: 628640 - RNA, 19 nt, Artificial Sequence
  Description of Artificial Sequence: Synthetic oligonucleotide
  Sense strand starting at position 2676 of SEQ ID NO: 585295
cugugaaagaccuguguca

SEQ ID NO: 628641 - RNA, 19 nt, Artificial Sequence
  Description of Artificial Sequence: Synthetic oligonucleotide
  Antisense strand to SEQ ID NO: 628640
ugacacaggucuuucacag

SEQ ID NO: 628642 - RNA, 19 nt, Artificial Sequence
  Description of Artificial Sequence: Synthetic oligonucleotide
  Sense strand starting at position 2678 of SEQ ID NO: 585295
gugaaagaccugugucaaa

SEQ ID NO: 628643 - RNA, 19 nt, Artificial Sequence
  Description of Artificial Sequence: Synthetic oligonucleotide
  Antisense strand to SEQ ID NO: 628642
uuugacacaggucuuucac

SEQ ID NO: 628644 - RNA, 19 nt, Artificial Sequence
  Description of Artificial Sequence: Synthetic oligonucleotide
  Sense strand starting at position 2763 of SEQ ID NO: 585295
gguuguugcauuuaaaguu

SEQ ID NO: 628645 - RNA, 19 nt, Artificial Sequence
  Description of Artificial Sequence: Synthetic oligonucleotide
  Antisense strand to SEQ ID NO: 628644
aacuuuaaaugcaacaacc

SEQ ID NO: 628646 - RNA, 19 nt, Artificial Sequence
  Description of Artificial Sequence: Synthetic oligonucleotide
  Sense strand starting at position 2785 of SEQ ID NO: 585295
cucauucucuagccagagu

SEQ ID NO: 628647 - RNA, 19 nt, Artificial Sequence
  Description of Artificial Sequence: Synthetic oligonucleotide
  Antisense strand to SEQ ID NO: 628646
acucuggcuagagaaugag

SEQ ID NO: 628648 - RNA, 19 nt, Artificial Sequence
  Description of Artificial Sequence: Synthetic oligonucleotide
  Sense strand starting at position 2799 of SEQ ID NO: 585295
agaguuucccugugugagu

SEQ ID NO: 628649 - RNA, 19 nt, Artificial Sequence
  Description of Artificial Sequence: Synthetic oligonucleotide
  Antisense strand to SEQ ID NO: 628648
acucacacagggaaacucu

SEQ ID NO: 628650 - RNA, 19 nt, Artificial Sequence
  Description of Artificial Sequence: Synthetic oligonucleotide
  Sense strand starting at position 2954 of SEQ ID NO: 585295
uuucgugaacuaugcacau

SEQ ID NO: 628651 - RNA, 19 nt, Artificial Sequence
  Description of Artificial Sequence: Synthetic oligonucleotide
  Antisense strand to SEQ ID NO: 628650
augugcauaguucacgaaa

SEQ ID NO: 628652 - RNA, 19 nt, Artificial Sequence
  Description of Artificial Sequence: Synthetic oligonucleotide
  Sense strand starting at position 2958 of SEQ ID NO: 585295
gugaacuaugcacaucuaa

SEQ ID NO: 628653 - RNA, 19 nt, Artificial Sequence
  Description of Artificial Sequence: Synthetic oligonucleotide
  Antisense strand to SEQ ID NO: 628652
uuagaugugcauaguucac

SEQ ID NO: 628654 - RNA, 19 nt, Artificial Sequence
  Description of Artificial Sequence: Synthetic oligonucleotide
  Sense strand starting at position 3036 of SEQ ID NO: 585295
ucauaaggagcccauuagu

SEQ ID NO: 628655 - RNA, 19 nt, Artificial Sequence
  Description of Artificial Sequence: Synthetic oligonucleotide
  Antisense strand to SEQ ID NO: 628654
acuaaugggcuccuuauga

SEQ ID NO: 628656 - RNA, 19 nt, Artificial Sequence
  Description of Artificial Sequence: Synthetic oligonucleotide
  Sense strand starting at position 3567 of SEQ ID NO: 585295
agguaauauuaagcugcau

SEQ ID NO: 628657 - RNA, 19 nt, Artificial Sequence
  Description of Artificial Sequence: Synthetic oligonucleotide
  Antisense strand to SEQ ID NO: 628656
augcagcuuaauauuaccu

SEQ ID NO: 628658 - RNA, 19 nt, Artificial Sequence
  Description of Artificial Sequence: Synthetic oligonucleotide
  Sense strand starting at position 3656 of SEQ ID NO: 585295
auguuacaucaauauacgu

SEQ ID NO: 628659 - RNA, 19 nt, Artificial Sequence
  Description of Artificial Sequence: Synthetic oligonucleotide
  Antisense strand to SEQ ID NO: 628658
acguauauugauguaacau

SEQ ID NO: 628660 - RNA, 19 nt, Artificial Sequence
  Description of Artificial Sequence: Synthetic oligonucleotide
  Sense strand starting at position 3684 of SEQ ID NO: 585295
aacgauacaguguaauacu

SEQ ID NO: 628661 - RNA, 19 nt, Artificial Sequence
  Description of Artificial Sequence: Synthetic oligonucleotide
  Antisense strand to SEQ ID NO: 628660
aguauuacacuguaucguu

SEQ ID NO: 628662 - RNA, 19 nt, Artificial Sequence
  Description of Artificial Sequence: Synthetic oligonucleotide
  Sense strand starting at position 3748 of SEQ ID NO: 585295
auggguguguaugugauau

SEQ ID NO: 628663 - RNA, 19 nt, Artificial Sequence
  Description of Artificial Sequence: Synthetic oligonucleotide
  Antisense strand to SEQ ID NO: 628662
auaucacauacacacccau

SEQ ID NO: 628664 - RNA, 19 nt, Artificial Sequence
  Description of Artificial Sequence: Synthetic oligonucleotide
  Sense strand starting at position 3754 of SEQ ID NO: 585295
guguaugugauauguguau

SEQ ID NO: 628665 - RNA, 19 nt, Artificial Sequence
  Description of Artificial Sequence: Synthetic oligonucleotide
  Antisense strand to SEQ ID NO: 628664
auacacauaucacauacac

SEQ ID NO: 628666 - RNA, 19 nt, Artificial Sequence
  Description of Artificial Sequence: Synthetic oligonucleotide
  Sense strand starting at position 3756 of SEQ ID NO: 585295
guaugugauauguguaugu

SEQ ID NO: 628667 - RNA, 19 nt, Artificial Sequence
  Description of Artificial Sequence: Synthetic oligonucleotide
  Antisense strand to SEQ ID NO: 628666
acauacacauaucacauac

SEQ ID NO: 628668 - RNA, 19 nt, Artificial Sequence
  Description of Artificial Sequence: Synthetic oligonucleotide
  Sense strand starting at position 3760 of SEQ ID NO: 585295
gugauauguguaugugcau

SEQ ID NO: 628669 - RNA, 19 nt, Artificial Sequence
  Description of Artificial Sequence: Synthetic oligonucleotide
  Antisense strand to SEQ ID NO: 628668
augcacauacacauaucac

SEQ ID NO: 628670 - RNA, 19 nt, Artificial Sequence
  Description of Artificial Sequence: Synthetic oligonucleotide
  Sense strand starting at position 3763 of SEQ ID NO: 585295
auauguguaugugcaucau

SEQ ID NO: 628671 - RNA, 19 nt, Artificial Sequence
  Description of Artificial Sequence: Synthetic oligonucleotide
  Antisense strand to SEQ ID NO: 628670
augaugcacauacacauau

SEQ ID NO: 628672 - RNA, 19 nt, Artificial Sequence
  Description of Artificial Sequence: Synthetic oligonucleotide
  Sense strand starting at position 3902 of SEQ ID NO: 585295
uggguuugaugaucuaaca

SEQ ID NO: 628673 - RNA, 19 nt, Artificial Sequence
  Description of Artificial Sequence: Synthetic oligonucleotide
  Antisense strand to SEQ ID NO: 628672
uguuagaucaucaaaccca

SEQ ID NO: 628674 - RNA, 19 nt, Artificial Sequence
  Description of Artificial Sequence: Synthetic oligonucleotide
  Sense strand starting at position 88 of SEQ ID NO: 585296
uuuccugugucuguuauuu

SEQ ID NO: 628675 - RNA, 19 nt, Artificial Sequence
  Description of Artificial Sequence: Synthetic oligonucleotide
  Antisense strand to SEQ ID NO: 628674
aaauaacagacacaggaaa

SEQ ID NO: 628676 - RNA, 19 nt, Artificial Sequence
  Description of Artificial Sequence: Synthetic oligonucleotide
  Sense strand starting at position 92 of SEQ ID NO: 585296
cugugucuguuauuuagac

SEQ ID NO: 628677 - RNA, 19 nt, Artificial Sequence
  Description of Artificial Sequence: Synthetic oligonucleotide
  Antisense strand to SEQ ID NO: 628676
gucuaaauaacagacacag

SEQ ID NO: 628678 - RNA, 19 nt, Artificial Sequence
  Description of Artificial Sequence: Synthetic oligonucleotide
  Sense strand starting at position 142 of SEQ ID NO: 585296
auggcaucucuccaagcuu

SEQ ID NO: 628679 - RNA, 19 nt, Artificial Sequence
  Description of Artificial Sequence: Synthetic oligonucleotide
  Antisense strand to SEQ ID NO: 628678
aagcuuggagagaugccau

SEQ ID NO: 628680 - RNA, 19 nt, Artificial Sequence
  Description of Artificial Sequence: Synthetic oligonucleotide
  Sense strand starting at position 420 of SEQ ID NO: 585296
gauugcuugugccuaggaa

SEQ ID NO: 628681 - RNA, 19 nt, Artificial Sequence
  Description of Artificial Sequence: Synthetic oligonucleotide
  Antisense strand to SEQ ID NO: 628680
uuccuaggcacaagcaauc

SEQ ID NO: 628682 - RNA, 19 nt, Artificial Sequence
  Description of Artificial Sequence: Synthetic oligonucleotide
  Sense strand starting at position 976 of SEQ ID NO: 585296
agggcuguauccucccaaa

SEQ ID NO: 628683 - RNA, 19 nt, Artificial Sequence
  Description of Artificial Sequence: Synthetic oligonucleotide
  Antisense strand to SEQ ID NO: 628682
uuugggaggauacagcccu

SEQ ID NO: 628684 - RNA, 19 nt, Artificial Sequence
  Description of Artificial Sequence: Synthetic oligonucleotide
  Sense strand starting at position 996 of SEQ ID NO: 585296
gggauuccuuugucuaauu

SEQ ID NO: 628685 - RNA, 19 nt, Artificial Sequence
  Description of Artificial Sequence: Synthetic oligonucleotide
  Antisense strand to SEQ ID NO: 628684
aauuagacaaaggaauccc

SEQ ID NO: 628686 - RNA, 19 nt, Artificial Sequence
  Description of Artificial Sequence: Synthetic oligonucleotide
  Sense strand starting at position 997 of SEQ ID NO: 585296
ggauuccuuugucuaauuc

SEQ ID NO: 628687 - RNA, 19 nt, Artificial Sequence
  Description of Artificial Sequence: Synthetic oligonucleotide
  Antisense strand to SEQ ID NO: 628686
gaauuagacaaaggaaucc

SEQ ID NO: 628688 - RNA, 19 nt, Artificial Sequence
  Description of Artificial Sequence: Synthetic oligonucleotide
  Sense strand starting at position 1545 of SEQ ID NO: 585296
uuuccaauggugugaacuu

SEQ ID NO: 628689 - RNA, 19 nt, Artificial Sequence
  Description of Artificial Sequence: Synthetic oligonucleotide
  Antisense strand to SEQ ID NO: 628688
aaguucacaccauuggaaa

SEQ ID NO: 628690 - RNA, 19 nt, Artificial Sequence
  Description of Artificial Sequence: Synthetic oligonucleotide
  Sense strand starting at position 1555 of SEQ ID NO: 585296
ugugaacuugcacaaauaa

SEQ ID NO: 628691 - RNA, 19 nt, Artificial Sequence
  Description of Artificial Sequence: Synthetic oligonucleotide
  Antisense strand to SEQ ID NO: 628690
uuauuugugcaaguucaca

SEQ ID NO: 628692 - RNA, 19 nt, Artificial Sequence
  Description of Artificial Sequence: Synthetic oligonucleotide
  Sense strand starting at position 1624 of SEQ ID NO: 585296
ucaagagauugucuuaaau

SEQ ID NO: 628693 - RNA, 19 nt, Artificial Sequence
  Description of Artificial Sequence: Synthetic oligonucleotide
  Antisense strand to SEQ ID NO: 628692
auuuaagacaaucucuuga

SEQ ID NO: 628694 - RNA, 19 nt, Artificial Sequence
  Description of Artificial Sequence: Synthetic oligonucleotide
  Sense strand starting at position 1649 of SEQ ID NO: 585296
ugcaaagcaucacugauau

SEQ ID NO: 628695 - RNA, 19 nt, Artificial Sequence
  Description of Artificial Sequence: Synthetic oligonucleotide
  Antisense strand to SEQ ID NO: 628694
auaucagugaugcuuugca

SEQ ID NO: 628696 - RNA, 19 nt, Artificial Sequence
  Description of Artificial Sequence: Synthetic oligonucleotide
  Sense strand starting at position 1660 of SEQ ID NO: 585296
acugauaucguuuaccaac

SEQ ID NO: 628697 - RNA, 19 nt, Artificial Sequence
  Description of Artificial Sequence: Synthetic oligonucleotide
  Antisense strand to SEQ ID NO: 628696
guugguaaacgauaucagu

SEQ ID NO: 628698 - RNA, 19 nt, Artificial Sequence
  Description of Artificial Sequence: Synthetic oligonucleotide
  Sense strand starting at position 1865 of SEQ ID NO: 585296
agugguaacaucuguagca

SEQ ID NO: 628699 - RNA, 19 nt, Artificial Sequence
  Description of Artificial Sequence: Synthetic oligonucleotide
  Antisense strand to SEQ ID NO: 628698
ugcuacagauguuaccacu

SEQ ID NO: 628700 - RNA, 19 nt, Artificial Sequence
  Description of Artificial Sequence: Synthetic oligonucleotide
  Sense strand starting at position 2055 of SEQ ID NO: 585296
cagagaagcguaggguuua

SEQ ID NO: 628701 - RNA, 19 nt, Artificial Sequence
  Description of Artificial Sequence: Synthetic oligonucleotide
  Antisense strand to SEQ ID NO: 628700
uaaacccuacgcuucucug

SEQ ID NO: 628702 - RNA, 19 nt, Artificial Sequence
  Description of Artificial Sequence: Synthetic oligonucleotide
  Sense strand starting at position 2066 of SEQ ID NO: 585296
aggguuuaacaucaucagu

SEQ ID NO: 628703 - RNA, 19 nt, Artificial Sequence
  Description of Artificial Sequence: Synthetic oligonucleotide
  Antisense strand to SEQ ID NO: 628702
acugaugauguuaaacccu

SEQ ID NO: 628704 - RNA, 19 nt, Artificial Sequence
  Description of Artificial Sequence: Synthetic oligonucleotide
  Sense strand starting at position 2068 of SEQ ID NO: 585296
gguuuaacaucaucaguca

SEQ ID NO: 628705 - RNA, 19 nt, Artificial Sequence
  Description of Artificial Sequence: Synthetic oligonucleotide
  Antisense strand to SEQ ID NO: 628704
ugacugaugauguuaaacc

SEQ ID NO: 628706 - RNA, 19 nt, Artificial Sequence
  Description of Artificial Sequence: Synthetic oligonucleotide
  Sense strand starting at position 2117 of SEQ ID NO: 585296
ugaagacuuggcuguuuga

SEQ ID NO: 628707 - RNA, 19 nt, Artificial Sequence
  Description of Artificial Sequence: Synthetic oligonucleotide
  Antisense strand to SEQ ID NO: 628706
ucaaacagccaagucuuca

SEQ ID NO: 628708 - RNA, 19 nt, Artificial Sequence
  Description of Artificial Sequence: Synthetic oligonucleotide
  Sense strand starting at position 2120 of SEQ ID NO: 585296
agacuuggcuguuugacca

SEQ ID NO: 628709 - RNA, 19 nt, Artificial Sequence
  Description of Artificial Sequence: Synthetic oligonucleotide
  Antisense strand to SEQ ID NO: 628708
uggucaaacagccaagucu

SEQ ID NO: 628710 - RNA, 19 nt, Artificial Sequence
  Description of Artificial Sequence: Synthetic oligonucleotide
  Sense strand starting at position 2142 of SEQ ID NO: 585296
cagaguauggcauguaacu

SEQ ID NO: 628711 - RNA, 19 nt, Artificial Sequence
  Description of Artificial Sequence: Synthetic oligonucleotide
  Antisense strand to SEQ ID NO: 628710
aguuacaugccauacucug

SEQ ID NO: 628712 - RNA, 19 nt, Artificial Sequence
  Description of Artificial Sequence: Synthetic oligonucleotide
  Sense strand starting at position 2199 of SEQ ID NO: 585296
ggaguucccucuuugguuu

SEQ ID NO: 628713 - RNA, 19 nt, Artificial Sequence
  Description of Artificial Sequence: Synthetic oligonucleotide
  Antisense strand to SEQ ID NO: 628712
aaaccaaagagggaacucc

SEQ ID NO: 628714 - RNA, 19 nt, Artificial Sequence
  Description of Artificial Sequence: Synthetic oligonucleotide
  Sense strand starting at position 2439 of SEQ ID NO: 585296
caagaaauucuggguguug

SEQ ID NO: 628715 - RNA, 19 nt, Artificial Sequence
  Description of Artificial Sequence: Synthetic oligonucleotide
  Antisense strand to SEQ ID NO: 628714
caacacccagaauuucuug

SEQ ID NO: 628716 - RNA, 19 nt, Artificial Sequence
  Description of Artificial Sequence: Synthetic oligonucleotide
  Sense strand starting at position 2774 of SEQ ID NO: 585296
cuguguacuaguugauaug

SEQ ID NO: 628717 - RNA, 19 nt, Artificial Sequence
  Description of Artificial Sequence: Synthetic oligonucleotide
  Antisense strand to SEQ ID NO: 628716
cauaucaacuaguacacag

SEQ ID NO: 628718 - RNA, 19 nt, Artificial Sequence
  Description of Artificial Sequence: Synthetic oligonucleotide
  Sense strand starting at position 2775 of SEQ ID NO: 585296
uguguacuaguugauauga

SEQ ID NO: 628719 - RNA, 19 nt, Artificial Sequence
  Description of Artificial Sequence: Synthetic oligonucleotide
  Antisense strand to SEQ ID NO: 628718
ucauaucaacuaguacaca

SEQ ID NO: 628720 - RNA, 19 nt, Artificial Sequence
  Description of Artificial Sequence: Synthetic oligonucleotide
  Sense strand starting at position 2818 of SEQ ID NO: 585296
uccuguauaauaggaggua

SEQ ID NO: 628721 - RNA, 19 nt, Artificial Sequence
  Description of Artificial Sequence: Synthetic oligonucleotide
  Antisense strand to SEQ ID NO: 628720
uaccuccuauuauacagga

SEQ ID NO: 628722 - RNA, 19 nt, Artificial Sequence
  Description of Artificial Sequence: Synthetic oligonucleotide
  Sense strand starting at position 2821 of SEQ ID NO: 585296
uguauaauaggagguaaug

SEQ ID NO: 628723 - RNA, 19 nt, Artificial Sequence
  Description of Artificial Sequence: Synthetic oligonucleotide
  Antisense strand to SEQ ID NO: 628722
cauuaccuccuauuauaca

SEQ ID NO: 628724 - RNA, 19 nt, Artificial Sequence
  Description of Artificial Sequence: Synthetic oligonucleotide
  Sense strand starting at position 3111 of SEQ ID NO: 585296
guagcaauacagcaauaau

SEQ ID NO: 628725 - RNA, 19 nt, Artificial Sequence
  Description of Artificial Sequence: Synthetic oligonucleotide
  Antisense strand to SEQ ID NO: 628724
auuauugcuguauugcuac

SEQ ID NO: 628726 - RNA, 19 nt, Artificial Sequence
  Description of Artificial Sequence: Synthetic oligonucleotide
  Sense strand starting at position 3232 of SEQ ID NO: 585296
acugauuagcugugggagu

SEQ ID NO: 628727 - RNA, 19 nt, Artificial Sequence
  Description of Artificial Sequence: Synthetic oligonucleotide
  Antisense strand to SEQ ID NO: 628726
acucccacagcuaaucagu

SEQ ID NO: 628728 - RNA, 19 nt, Artificial Sequence
  Description of Artificial Sequence: Synthetic oligonucleotide
  Sense strand starting at position 3396 of SEQ ID NO: 585296
uugaaaugccaguggaaca

SEQ ID NO: 628729 - RNA, 19 nt, Artificial Sequence
  Description of Artificial Sequence: Synthetic oligonucleotide
  Antisense strand to SEQ ID NO: 628728
uguuccacuggcauuucaa

SEQ ID NO: 628730 - RNA, 19 nt, Artificial Sequence
  Description of Artificial Sequence: Synthetic oligonucleotide
  Sense strand starting at position 3463 of SEQ ID NO: 585296
ccagguauggucugaagac

SEQ ID NO: 628731 - RNA, 19 nt, Artificial Sequence
  Description of Artificial Sequence: Synthetic oligonucleotide
  Antisense strand to SEQ ID NO: 628730
gucuucagaccauaccugg

SEQ ID NO: 628732 - RNA, 19 nt, Artificial Sequence
  Description of Artificial Sequence: Synthetic oligonucleotide
  Sense strand starting at position 3492 of SEQ ID NO: 585296
gagucaucagcacaaaugu

SEQ ID NO: 628733 - RNA, 19 nt, Artificial Sequence
  Description of Artificial Sequence: Synthetic oligonucleotide
  Antisense strand to SEQ ID NO: 628732
acauuugugcugaugacuc

SEQ ID NO: 628734 - RNA, 19 nt, Artificial Sequence
  Description of Artificial Sequence: Synthetic oligonucleotide
  Sense strand starting at position 3538 of SEQ ID NO: 585296
ccaaguaaacugugcagaa

SEQ ID NO: 628735 - RNA, 19 nt, Artificial Sequence
  Description of Artificial Sequence: Synthetic oligonucleotide
  Antisense strand to SEQ ID NO: 628734
uucugcacaguuuacuugg

SEQ ID NO: 628736 - RNA, 19 nt, Artificial Sequence
  Description of Artificial Sequence: Synthetic oligonucleotide
  Sense strand starting at position 3614 of SEQ ID NO: 585296
accaguuauccaggaucca

SEQ ID NO: 628737 - RNA, 19 nt, Artificial Sequence
  Description of Artificial Sequence: Synthetic oligonucleotide
  Antisense strand to SEQ ID NO: 628736
uggauccuggauaacuggu

SEQ ID NO: 628738 - RNA, 19 nt, Artificial Sequence
  Description of Artificial Sequence: Synthetic oligonucleotide
  Sense strand starting at position 3626 of SEQ ID NO: 585296
ggauccagucaggagcauu

SEQ ID NO: 628739 - RNA, 19 nt, Artificial Sequence
  Description of Artificial Sequence: Synthetic oligonucleotide
  Antisense strand to SEQ ID NO: 628738
aaugcuccugacuggaucc

SEQ ID NO: 628740 - RNA, 19 nt, Artificial Sequence
  Description of Artificial Sequence: Synthetic oligonucleotide
  Sense strand starting at position 3689 of SEQ ID NO: 585296
auugguuacaaagguguua

SEQ ID NO: 628741 - RNA, 19 nt, Artificial Sequence
  Description of Artificial Sequence: Synthetic oligonucleotide
  Antisense strand to SEQ ID NO: 628740
uaacaccuuuguaaccaau

SEQ ID NO: 628742 - RNA, 19 nt, Artificial Sequence
  Description of Artificial Sequence: Synthetic oligonucleotide
  Sense strand starting at position 3691 of SEQ ID NO: 585296
ugguuacaaagguguuaaa

SEQ ID NO: 628743 - RNA, 19 nt, Artificial Sequence
  Description of Artificial Sequence: Synthetic oligonucleotide
  Antisense strand to SEQ ID NO: 628742
uuuaacaccuuuguaacca

SEQ ID NO: 628744 - RNA, 19 nt, Artificial Sequence
  Description of Artificial Sequence: Synthetic oligonucleotide
  Sense strand starting at position 3737 of SEQ ID NO: 585296
aaaggagaguccuagaaau

SEQ ID NO: 628745 - RNA, 19 nt, Artificial Sequence
  Description of Artificial Sequence: Synthetic oligonucleotide
  Antisense strand to SEQ ID NO: 628744
auuucuaggacucuccuuu

SEQ ID NO: 628746 - RNA, 19 nt, Artificial Sequence
  Description of Artificial Sequence: Synthetic oligonucleotide
  Sense strand starting at position 3808 of SEQ ID NO: 585296
ugagcuggaaucuguaaau

SEQ ID NO: 628747 - RNA, 19 nt, Artificial Sequence
  Description of Artificial Sequence: Synthetic oligonucleotide
  Antisense strand to SEQ ID NO: 628746
auuuacagauuccagcuca

SEQ ID NO: 628748 - RNA, 19 nt, Artificial Sequence
  Description of Artificial Sequence: Synthetic oligonucleotide
  Sense strand starting at position 3828 of SEQ ID NO: 585296
uacucauugccuugugaga

SEQ ID NO: 628749 - RNA, 19 nt, Artificial Sequence
  Description of Artificial Sequence: Synthetic oligonucleotide
  Antisense strand to SEQ ID NO: 628748
ucucacaaggcaaugagua

SEQ ID NO: 628750 - RNA, 19 nt, Artificial Sequence
  Description of Artificial Sequence: Synthetic oligonucleotide
  Sense strand starting at position 3851 of SEQ ID NO: 585296
cugucauagucaguuccaa

SEQ ID NO: 628751 - RNA, 19 nt, Artificial Sequence
  Description of Artificial Sequence: Synthetic oligonucleotide
  Antisense strand to SEQ ID NO: 628750
uuggaacugacuaugacag

SEQ ID NO: 628752 - RNA, 19 nt, Artificial Sequence
  Description of Artificial Sequence: Synthetic oligonucleotide
  Sense strand starting at position 3897 of SEQ ID NO: 585296
aggcuagaauccuugagaa

SEQ ID NO: 628753 - RNA, 19 nt, Artificial Sequence
  Description of Artificial Sequence: Synthetic oligonucleotide
  Antisense strand to SEQ ID NO: 628752
uucucaaggauucuagccu

SEQ ID NO: 628754 - RNA, 19 nt, Artificial Sequence
  Description of Artificial Sequence: Synthetic oligonucleotide
  Sense strand starting at position 91 of SEQ ID NO: 585297
agauaacaggagugucuuu

SEQ ID NO: 628755 - RNA, 19 nt, Artificial Sequence
  Description of Artificial Sequence: Synthetic oligonucleotide
  Antisense strand to SEQ ID NO: 628754
aaagacacuccuguuaucu

SEQ ID NO: 628756 - RNA, 19 nt, Artificial Sequence
  Description of Artificial Sequence: Synthetic oligonucleotide
  Sense strand starting at position 175 of SEQ ID NO: 585297
ugauuagaagucuggaacu

SEQ ID NO: 628757 - RNA, 19 nt, Artificial Sequence
  Description of Artificial Sequence: Synthetic oligonucleotide
  Antisense strand to SEQ ID NO: 628756
aguuccagacuucuaauca

SEQ ID NO: 628758 - RNA, 19 nt, Artificial Sequence
  Description of Artificial Sequence: Synthetic oligonucleotide
  Sense strand starting at position 250 of SEQ ID NO: 585297
aucagucaugccuacauga

SEQ ID NO: 628759 - RNA, 19 nt, Artificial Sequence
  Description of Artificial Sequence: Synthetic oligonucleotide
  Antisense strand to SEQ ID NO: 628758
ucauguaggcaugacugau

SEQ ID NO: 628760 - RNA, 19 nt, Artificial Sequence
  Description of Artificial Sequence: Synthetic oligonucleotide
  Sense strand starting at position 306 of SEQ ID NO: 585297
gagaacuucucaguuggua

SEQ ID NO: 628761 - RNA, 19 nt, Artificial Sequence
  Description of Artificial Sequence: Synthetic oligonucleotide
  Antisense strand to SEQ ID NO: 628760
uaccaacugagaaguucuc

SEQ ID NO: 628762 - RNA, 19 nt, Artificial Sequence
  Description of Artificial Sequence: Synthetic oligonucleotide
  Sense strand starting at position 310 of SEQ ID NO: 585297
acuucucaguugguaaaca

SEQ ID NO: 628763 - RNA, 19 nt, Artificial Sequence
  Description of Artificial Sequence: Synthetic oligonucleotide
  Antisense strand to SEQ ID NO: 628762
uguuuaccaacugagaagu

SEQ ID NO: 628764 - RNA, 19 nt, Artificial Sequence
  Description of Artificial Sequence: Synthetic oligonucleotide
  Sense strand starting at position 470 of SEQ ID NO: 585297
augaucuaguguucuauac

SEQ ID NO: 628765 - RNA, 19 nt, Artificial Sequence
  Description of Artificial Sequence: Synthetic oligonucleotide
  Antisense strand to SEQ ID NO: 628764
guauagaacacuagaucau

SEQ ID NO: 628766 - RNA, 19 nt, Artificial Sequence
  Description of Artificial Sequence: Synthetic oligonucleotide
  Sense strand starting at position 595 of SEQ ID NO: 585297
aucugaucugaucacugua

SEQ ID NO: 628767 - RNA, 19 nt, Artificial Sequence
  Description of Artificial Sequence: Synthetic oligonucleotide
  Antisense strand to SEQ ID NO: 628766
uacagugaucagaucagau

SEQ ID NO: 628768 - RNA, 19 nt, Artificial Sequence
  Description of Artificial Sequence: Synthetic oligonucleotide
  Sense strand starting at position 718 of SEQ ID NO: 585297
uccugaguuccauaagcca

SEQ ID NO: 628769 - RNA, 19 nt, Artificial Sequence
  Description of Artificial Sequence: Synthetic oligonucleotide
  Antisense strand to SEQ ID NO: 628768
uggcuuauggaacucagga

SEQ ID NO: 628770 - RNA, 19 nt, Artificial Sequence
  Description of Artificial Sequence: Synthetic oligonucleotide
  Sense strand starting at position 778 of SEQ ID NO: 585297
cucugauuuguaggcaagu

SEQ ID NO: 628771 - RNA, 19 nt, Artificial Sequence
  Description of Artificial Sequence: Synthetic oligonucleotide
  Antisense strand to SEQ ID NO: 628770
acuugccuacaaaucagag

SEQ ID NO: 628772 - RNA, 19 nt, Artificial Sequence
  Description of Artificial Sequence: Synthetic oligonucleotide
  Sense strand starting at position 779 of SEQ ID NO: 585297
ucugauuuguaggcaaguu

SEQ ID NO: 628773 - RNA, 19 nt, Artificial Sequence
  Description of Artificial Sequence: Synthetic oligonucleotide
  Antisense strand to SEQ ID NO: 628772
aacuugccuacaaaucaga

SEQ ID NO: 628774 - RNA, 19 nt, Artificial Sequence
  Description of Artificial Sequence: Synthetic oligonucleotide
  Sense strand starting at position 800 of SEQ ID NO: 585297
acagaagauguggguaauu

SEQ ID NO: 628775 - RNA, 19 nt, Artificial Sequence
  Description of Artificial Sequence: Synthetic oligonucleotide
  Antisense strand to SEQ ID NO: 628774
aauuacccacaucuucugu

SEQ ID NO: 628776 - RNA, 19 nt, Artificial Sequence
  Description of Artificial Sequence: Synthetic oligonucleotide
  Sense strand starting at position 810 of SEQ ID NO: 585297
uggguaauuugggaaccua

SEQ ID NO: 628777 - RNA, 19 nt, Artificial Sequence
  Description of Artificial Sequence: Synthetic oligonucleotide
  Antisense strand to SEQ ID NO: 628776
uagguucccaaauuaccca

SEQ ID NO: 628778 - RNA, 19 nt, Artificial Sequence
  Description of Artificial Sequence: Synthetic oligonucleotide
  Sense strand starting at position 821 of SEQ ID NO: 585297
ggaaccuacuacuugugau

SEQ ID NO: 628779 - RNA, 19 nt, Artificial Sequence
  Description of Artificial Sequence: Synthetic oligonucleotide
  Antisense strand to SEQ ID NO: 628778
aucacaaguaguagguucc

SEQ ID NO: 628780 - RNA, 19 nt, Artificial Sequence
  Description of Artificial Sequence: Synthetic oligonucleotide
  Sense strand starting at position 867 of SEQ ID NO: 585297
gggacugagucuuuaaccu

SEQ ID NO: 628781 - RNA, 19 nt, Artificial Sequence
  Description of Artificial Sequence: Synthetic oligonucleotide
  Antisense strand to SEQ ID NO: 628780
agguuaaagacucaguccc

SEQ ID NO: 628782 - RNA, 19 nt, Artificial Sequence
  Description of Artificial Sequence: Synthetic oligonucleotide
  Sense strand starting at position 893 of SEQ ID NO: 585297
cuauguuaacucuaguuaa

SEQ ID NO: 628783 - RNA, 19 nt, Artificial Sequence
  Description of Artificial Sequence: Synthetic oligonucleotide
  Antisense strand to SEQ ID NO: 628782
uuaacuagaguuaacauag

SEQ ID NO: 628784 - RNA, 19 nt, Artificial Sequence
  Description of Artificial Sequence: Synthetic oligonucleotide
  Sense strand starting at position 950 of SEQ ID NO: 585297
auaggagaauugguuggua

SEQ ID NO: 628785 - RNA, 19 nt, Artificial Sequence
  Description of Artificial Sequence: Synthetic oligonucleotide
  Antisense strand to SEQ ID NO: 628784
uaccaaccaauucuccuau

SEQ ID NO: 628786 - RNA, 19 nt, Artificial Sequence
  Description of Artificial Sequence: Synthetic oligonucleotide
  Sense strand starting at position 952 of SEQ ID NO: 585297
aggagaauugguugguaug

SEQ ID NO: 628787 - RNA, 19 nt, Artificial Sequence
  Description of Artificial Sequence: Synthetic oligonucleotide
  Antisense strand to SEQ ID NO: 628786
cauaccaaccaauucuccu

SEQ ID NO: 628788 - RNA, 19 nt, Artificial Sequence
  Description of Artificial Sequence: Synthetic oligonucleotide
  Sense strand starting at position 1069 of SEQ ID NO: 585297
aaccuaagccuuggugaca

SEQ ID NO: 628789 - RNA, 19 nt, Artificial Sequence
  Description of Artificial Sequence: Synthetic oligonucleotide
  Antisense strand to SEQ ID NO: 628788
ugucaccaaggcuuagguu

SEQ ID NO: 628790 - RNA, 19 nt, Artificial Sequence
  Description of Artificial Sequence: Synthetic oligonucleotide
  Sense strand starting at position 1070 of SEQ ID NO: 585297
accuaagccuuggugacau

SEQ ID NO: 628791 - RNA, 19 nt, Artificial Sequence
  Description of Artificial Sequence: Synthetic oligonucleotide
  Antisense strand to SEQ ID NO: 628790
augucaccaaggcuuaggu

SEQ ID NO: 628792 - RNA, 19 nt, Artificial Sequence
  Description of Artificial Sequence: Synthetic oligonucleotide
  Sense strand starting at position 1154 of SEQ ID NO: 585297
uucugaaagucugauuuga

SEQ ID NO: 628793 - RNA, 19 nt, Artificial Sequence
  Description of Artificial Sequence: Synthetic oligonucleotide
  Antisense strand to SEQ ID NO: 628792
ucaaaucagacuuucagaa

SEQ ID NO: 628794 - RNA, 19 nt, Artificial Sequence
  Description of Artificial Sequence: Synthetic oligonucleotide
  Sense strand starting at position 1181 of SEQ ID NO: 585297
guagaaguaguagauaagu

SEQ ID NO: 628795 - RNA, 19 nt, Artificial Sequence
  Description of Artificial Sequence: Synthetic oligonucleotide
  Antisense strand to SEQ ID NO: 628794
acuuaucuacuacuucuac

SEQ ID NO: 628796 - RNA, 19 nt, Artificial Sequence
  Description of Artificial Sequence: Synthetic oligonucleotide
  Sense strand starting at position 1216 of SEQ ID NO: 585297
cucuuuaugcaagacuaag

SEQ ID NO: 628797 - RNA, 19 nt, Artificial Sequence
  Description of Artificial Sequence: Synthetic oligonucleotide
  Antisense strand to SEQ ID NO: 628796
cuuagucuugcauaaagag

SEQ ID NO: 628798 - RNA, 19 nt, Artificial Sequence
  Description of Artificial Sequence: Synthetic oligonucleotide
  Sense strand starting at position 1256 of SEQ ID NO: 585297
ccgagauuauuugcauguu

SEQ ID NO: 628799 - RNA, 19 nt, Artificial Sequence
  Description of Artificial Sequence: Synthetic oligonucleotide
  Antisense strand to SEQ ID NO: 628798
aacaugcaaauaaucucgg

SEQ ID NO: 628800 - RNA, 19 nt, Artificial Sequence
  Description of Artificial Sequence: Synthetic oligonucleotide
  Sense strand starting at position 1344 of SEQ ID NO: 585297
gagaaagagucagccuugu

SEQ ID NO: 628801 - RNA, 19 nt, Artificial Sequence
  Description of Artificial Sequence: Synthetic oligonucleotide
  Antisense strand to SEQ ID NO: 628800
acaaggcugacucuuucuc

SEQ ID NO: 628802 - RNA, 19 nt, Artificial Sequence
  Description of Artificial Sequence: Synthetic oligonucleotide
  Sense strand starting at position 1360 of SEQ ID NO: 585297
uguauugugcuggaaauau

SEQ ID NO: 628803 - RNA, 19 nt, Artificial Sequence
  Description of Artificial Sequence: Synthetic oligonucleotide
  Antisense strand to SEQ ID NO: 628802
auauuuccagcacaauaca

SEQ ID NO: 628804 - RNA, 19 nt, Artificial Sequence
  Description of Artificial Sequence: Synthetic oligonucleotide
  Sense strand starting at position 1667 of SEQ ID NO: 585297
gaagaaguguccuuaccug

SEQ ID NO: 628805 - RNA, 19 nt, Artificial Sequence
  Description of Artificial Sequence: Synthetic oligonucleotide
  Antisense strand to SEQ ID NO: 628804
cagguaaggacacuucuuc

SEQ ID NO: 628806 - RNA, 19 nt, Artificial Sequence
  Description of Artificial Sequence: Synthetic oligonucleotide
  Sense strand starting at position 1830 of SEQ ID NO: 585297
gguagaugaucuccagaca

SEQ ID NO: 628807 - RNA, 19 nt, Artificial Sequence
  Description of Artificial Sequence: Synthetic oligonucleotide
  Antisense strand to SEQ ID NO: 628806
ugucuggagaucaucuacc

SEQ ID NO: 628808 - RNA, 19 nt, Artificial Sequence
  Description of Artificial Sequence: Synthetic oligonucleotide
  Sense strand starting at position 1969 of SEQ ID NO: 585297
gggacagauuggcuaggua

SEQ ID NO: 628809 - RNA, 19 nt, Artificial Sequence
  Description of Artificial Sequence: Synthetic oligonucleotide
  Antisense strand to SEQ ID NO: 628808
uaccuagccaaucuguccc

SEQ ID NO: 628810 - RNA, 19 nt, Artificial Sequence
  Description of Artificial Sequence: Synthetic oligonucleotide
  Sense strand starting at position 2038 of SEQ ID NO: 585297
ucaguuacuagguaaacgu

SEQ ID NO: 628811 - RNA, 19 nt, Artificial Sequence
  Description of Artificial Sequence: Synthetic oligonucleotide
  Antisense strand to SEQ ID NO: 628810
acguuuaccuaguaacuga

SEQ ID NO: 628812 - RNA, 19 nt, Artificial Sequence
  Description of Artificial Sequence: Synthetic oligonucleotide
  Sense strand starting at position 2143 of SEQ ID NO: 585297
uggagagaauaaucgcaau

SEQ ID NO: 628813 - RNA, 19 nt, Artificial Sequence
  Description of Artificial Sequence: Synthetic oligonucleotide
  Antisense strand to SEQ ID NO: 628812
auugcgauuauucucucca

SEQ ID NO: 628814 - RNA, 19 nt, Artificial Sequence
  Description of Artificial Sequence: Synthetic oligonucleotide
  Sense strand starting at position 2154 of SEQ ID NO: 585297
aucgcaauauucccaggau

SEQ ID NO: 628815 - RNA, 19 nt, Artificial Sequence
  Description of Artificial Sequence: Synthetic oligonucleotide
  Antisense strand to SEQ ID NO: 628814
auccugggaauauugcgau

SEQ ID NO: 628816 - RNA, 19 nt, Artificial Sequence
  Description of Artificial Sequence: Synthetic oligonucleotide
  Sense strand starting at position 2157 of SEQ ID NO: 585297
gcaauauucccaggaugua

SEQ ID NO: 628817 - RNA, 19 nt, Artificial Sequence
  Description of Artificial Sequence: Synthetic oligonucleotide
  Antisense strand to SEQ ID NO: 628816
uacauccugggaauauugc

SEQ ID NO: 628818 - RNA, 19 nt, Artificial Sequence
  Description of Artificial Sequence: Synthetic oligonucleotide
  Sense strand starting at position 2297 of SEQ ID NO: 585297
cuugucuguccugagauga

SEQ ID NO: 628819 - RNA, 19 nt, Artificial Sequence
  Description of Artificial Sequence: Synthetic oligonucleotide
  Antisense strand to SEQ ID NO: 628818
ucaucucaggacagacaag

SEQ ID NO: 628820 - RNA, 19 nt, Artificial Sequence
  Description of Artificial Sequence: Synthetic oligonucleotide
  Sense strand starting at position 2390 of SEQ ID NO: 585297
agaauugucuggucucaaa

SEQ ID NO: 628821 - RNA, 19 nt, Artificial Sequence
  Description of Artificial Sequence: Synthetic oligonucleotide
  Antisense strand to SEQ ID NO: 628820
uuugagaccagacaauucu

SEQ ID NO: 628822 - RNA, 19 nt, Artificial Sequence
  Description of Artificial Sequence: Synthetic oligonucleotide
  Sense strand starting at position 2923 of SEQ ID NO: 585297
uugugugucaucgggauuu

SEQ ID NO: 628823 - RNA, 19 nt, Artificial Sequence
  Description of Artificial Sequence: Synthetic oligonucleotide
  Antisense strand to SEQ ID NO: 628822
aaaucccgaugacacacaa

SEQ ID NO: 628824 - RNA, 19 nt, Artificial Sequence
  Description of Artificial Sequence: Synthetic oligonucleotide
  Sense strand starting at position 3389 of SEQ ID NO: 585297
augggauuccugggacgaa

SEQ ID NO: 628825 - RNA, 19 nt, Artificial Sequence
  Description of Artificial Sequence: Synthetic oligonucleotide
  Antisense strand to SEQ ID NO: 628824
uucgucccaggaaucccau

SEQ ID NO: 628826 - RNA, 19 nt, Artificial Sequence
  Description of Artificial Sequence: Synthetic oligonucleotide
  Sense strand starting at position 3488 of SEQ ID NO: 585297
aguguauaagccuuccguu

SEQ ID NO: 628827 - RNA, 19 nt, Artificial Sequence
  Description of Artificial Sequence: Synthetic oligonucleotide
  Antisense strand to SEQ ID NO: 628826
aacggaaggcuuauacacu

SEQ ID NO: 628828 - RNA, 19 nt, Artificial Sequence
  Description of Artificial Sequence: Synthetic oligonucleotide
  Sense strand starting at position 3489 of SEQ ID NO: 585297
guguauaagccuuccguuu

SEQ ID NO: 628829 - RNA, 19 nt, Artificial Sequence
  Description of Artificial Sequence: Synthetic oligonucleotide
  Antisense strand to SEQ ID NO: 628828
aaacggaaggcuuauacac

SEQ ID NO: 628830 - RNA, 19 nt, Artificial Sequence
  Description of Artificial Sequence: Synthetic oligonucleotide
  Sense strand starting at position 3575 of SEQ ID NO: 585297
gacgguaucucauuaugau

SEQ ID NO: 628831 - RNA, 19 nt, Artificial Sequence
  Description of Artificial Sequence: Synthetic oligonucleotide
  Antisense strand to SEQ ID NO: 628830
aucauaaugagauaccguc

SEQ ID NO: 628832 - RNA, 19 nt, Artificial Sequence
  Description of Artificial Sequence: Synthetic oligonucleotide
  Sense strand starting at position 3576 of SEQ ID NO: 585297
acgguaucucauuaugauu

SEQ ID NO: 628833 - RNA, 19 nt, Artificial Sequence
  Description of Artificial Sequence: Synthetic oligonucleotide
  Antisense strand to SEQ ID NO: 628832
aaucauaaugagauaccgu

SEQ ID NO: 628834 - RNA, 19 nt, Artificial Sequence
  Description of Artificial Sequence: Synthetic oligonucleotide
  Sense strand starting at position 209 of SEQ ID NO: 585298
aggugucauuccucaagga

SEQ ID NO: 628835 - RNA, 19 nt, Artificial Sequence
  Description of Artificial Sequence: Synthetic oligonucleotide
  Antisense strand to SEQ ID NO: 628834
uccuugaggaaugacaccu

SEQ ID NO: 628836 - RNA, 19 nt, Artificial Sequence
  Description of Artificial Sequence: Synthetic oligonucleotide
  Sense strand starting at position 210 of SEQ ID NO: 585298
ggugucauuccucaaggag

SEQ ID NO: 628837 - RNA, 19 nt, Artificial Sequence
  Description of Artificial Sequence: Synthetic oligonucleotide
  Antisense strand to SEQ ID NO: 628836
cuccuugaggaaugacacc

SEQ ID NO: 628838 - RNA, 19 nt, Artificial Sequence
  Description of Artificial Sequence: Synthetic oligonucleotide
  Sense strand starting at position 343 of SEQ ID NO: 585298
ggaggaaguuucucuggac

SEQ ID NO: 628839 - RNA, 19 nt, Artificial Sequence
  Description of Artificial Sequence: Synthetic oligonucleotide
  Antisense strand to SEQ ID NO: 628838
guccagagaaacuuccucc

SEQ ID NO: 628840 - RNA, 19 nt, Artificial Sequence
  Description of Artificial Sequence: Synthetic oligonucleotide
  Sense strand starting at position 705 of SEQ ID NO: 585298
cacaauaugugauuguuga

SEQ ID NO: 628841 - RNA, 19 nt, Artificial Sequence
  Description of Artificial Sequence: Synthetic oligonucleotide
  Antisense strand to SEQ ID NO: 628840
ucaacaaucacauauugug

SEQ ID NO: 628842 - RNA, 19 nt, Artificial Sequence
  Description of Artificial Sequence: Synthetic oligonucleotide
  Sense strand starting at position 706 of SEQ ID NO: 585298
acaauaugugauuguugag

SEQ ID NO: 628843 - RNA, 19 nt, Artificial Sequence
  Description of Artificial Sequence: Synthetic oligonucleotide
  Antisense strand to SEQ ID NO: 628842
cucaacaaucacauauugu

SEQ ID NO: 628844 - RNA, 19 nt, Artificial Sequence
  Description of Artificial Sequence: Synthetic oligonucleotide
  Sense strand starting at position 1043 of SEQ ID NO: 585298
uggagcuuugcacagagau

SEQ ID NO: 628845 - RNA, 19 nt, Artificial Sequence
  Description of Artificial Sequence: Synthetic oligonucleotide
  Antisense strand to SEQ ID NO: 628844
aucucugugcaaagcucca

SEQ ID NO: 628846 - RNA, 19 nt, Artificial Sequence
  Description of Artificial Sequence: Synthetic oligonucleotide
  Sense strand starting at position 1150 of SEQ ID NO: 585298
gaggcaacucaaggcauua

SEQ ID NO: 628847 - RNA, 19 nt, Artificial Sequence
  Description of Artificial Sequence: Synthetic oligonucleotide
  Antisense strand to SEQ ID NO: 628846
uaaugccuugaguugccuc

SEQ ID NO: 628848 - RNA, 19 nt, Artificial Sequence
  Description of Artificial Sequence: Synthetic oligonucleotide
  Sense strand starting at position 1186 of SEQ ID NO: 585298
ggagucagaagucaagguu

SEQ ID NO: 628849 - RNA, 19 nt, Artificial Sequence
  Description of Artificial Sequence: Synthetic oligonucleotide
  Antisense strand to SEQ ID NO: 628848
aaccuugacuucugacucc

SEQ ID NO: 628850 - RNA, 19 nt, Artificial Sequence
  Description of Artificial Sequence: Synthetic oligonucleotide
  Sense strand starting at position 1222 of SEQ ID NO: 585298
aucucagagcauuaugacu

SEQ ID NO: 628851 - RNA, 19 nt, Artificial Sequence
  Description of Artificial Sequence: Synthetic oligonucleotide
  Antisense strand to SEQ ID NO: 628850
agucauaaugcucugagau

SEQ ID NO: 628852 - RNA, 19 nt, Artificial Sequence
  Description of Artificial Sequence: Synthetic oligonucleotide
  Sense strand starting at position 1304 of SEQ ID NO: 585298
uguagaacucuaugaaguu

SEQ ID NO: 628853 - RNA, 19 nt, Artificial Sequence
  Description of Artificial Sequence: Synthetic oligonucleotide
  Antisense strand to SEQ ID NO: 628852
aacuucauagaguucuaca

SEQ ID NO: 628854 - RNA, 19 nt, Artificial Sequence
  Description of Artificial Sequence: Synthetic oligonucleotide
  Sense strand starting at position 1449 of SEQ ID NO: 585298
acagguaaauaguuaacua

SEQ ID NO: 628855 - RNA, 19 nt, Artificial Sequence
  Description of Artificial Sequence: Synthetic oligonucleotide
  Antisense strand to SEQ ID NO: 628854
uaguuaacuauuuaccugu

SEQ ID NO: 628856 - RNA, 19 nt, Artificial Sequence
  Description of Artificial Sequence: Synthetic oligonucleotide
  Sense strand starting at position 1533 of SEQ ID NO: 585298
uagagaaaucagggugcuu

SEQ ID NO: 628857 - RNA, 19 nt, Artificial Sequence
  Description of Artificial Sequence: Synthetic oligonucleotide
  Antisense strand to SEQ ID NO: 628856
aagcacccugauuucucua

SEQ ID NO: 628858 - RNA, 19 nt, Artificial Sequence
  Description of Artificial Sequence: Synthetic oligonucleotide
  Sense strand starting at position 1600 of SEQ ID NO: 585298
ugaggagaaaucugaacgu

SEQ ID NO: 628859 - RNA, 19 nt, Artificial Sequence
  Description of Artificial Sequence: Synthetic oligonucleotide
  Antisense strand to SEQ ID NO: 628858
acguucagauuucuccuca

SEQ ID NO: 628860 - RNA, 19 nt, Artificial Sequence
  Description of Artificial Sequence: Synthetic oligonucleotide
  Sense strand starting at position 1710 of SEQ ID NO: 585298
gugucucuuggugaaggaa

SEQ ID NO: 628861 - RNA, 19 nt, Artificial Sequence
  Description of Artificial Sequence: Synthetic oligonucleotide
  Antisense strand to SEQ ID NO: 628860
uuccuucaccaagagacac

SEQ ID NO: 628862 - RNA, 19 nt, Artificial Sequence
  Description of Artificial Sequence: Synthetic oligonucleotide
  Sense strand starting at position 1722 of SEQ ID NO: 585298
gaaggaaguugcccauaaa

SEQ ID NO: 628863 - RNA, 19 nt, Artificial Sequence
  Description of Artificial Sequence: Synthetic oligonucleotide
  Antisense strand to SEQ ID NO: 628862
uuuaugggcaacuuccuuc

SEQ ID NO: 628864 - RNA, 19 nt, Artificial Sequence
  Description of Artificial Sequence: Synthetic oligonucleotide
  Sense strand starting at position 1725 of SEQ ID NO: 585298
ggaaguugcccauaaacca

SEQ ID NO: 628865 - RNA, 19 nt, Artificial Sequence
  Description of Artificial Sequence: Synthetic oligonucleotide
  Antisense strand to SEQ ID NO: 628864
ugguuuaugggcaacuucc

SEQ ID NO: 628866 - RNA, 19 nt, Artificial Sequence
  Description of Artificial Sequence: Synthetic oligonucleotide
  Sense strand starting at position 1876 of SEQ ID NO: 585298
gggucaucaggguguggaa

SEQ ID NO: 628867 - RNA, 19 nt, Artificial Sequence
  Description of Artificial Sequence: Synthetic oligonucleotide
  Antisense strand to SEQ ID NO: 628866
uuccacacccugaugaccc

SEQ ID NO: 628868 - RNA, 19 nt, Artificial Sequence
  Description of Artificial Sequence: Synthetic oligonucleotide
  Sense strand starting at position 1951 of SEQ ID NO: 585298
gucucaguccgugugguga

SEQ ID NO: 628869 - RNA, 19 nt, Artificial Sequence
  Description of Artificial Sequence: Synthetic oligonucleotide
  Antisense strand to SEQ ID NO: 628868
ucaccacacggacugagac

SEQ ID NO: 628870 - RNA, 19 nt, Artificial Sequence
  Description of Artificial Sequence: Synthetic oligonucleotide
  Sense strand starting at position 2047 of SEQ ID NO: 585298
cacagaaauucucugagug

SEQ ID NO: 628871 - RNA, 19 nt, Artificial Sequence
  Description of Artificial Sequence: Synthetic oligonucleotide
  Antisense strand to SEQ ID NO: 628870
cacucagagaauuucugug

SEQ ID NO: 628872 - RNA, 19 nt, Artificial Sequence
  Description of Artificial Sequence: Synthetic oligonucleotide
  Sense strand starting at position 2048 of SEQ ID NO: 585298
acagaaauucucugaguga

SEQ ID NO: 628873 - RNA, 19 nt, Artificial Sequence
  Description of Artificial Sequence: Synthetic oligonucleotide
  Antisense strand to SEQ ID NO: 628872
ucacucagagaauuucugu

SEQ ID NO: 628874 - RNA, 19 nt, Artificial Sequence
  Description of Artificial Sequence: Synthetic oligonucleotide
  Sense strand starting at position 2051 of SEQ ID NO: 585298
gaaauucucugagugaaug

SEQ ID NO: 628875 - RNA, 19 nt, Artificial Sequence
  Description of Artificial Sequence: Synthetic oligonucleotide
  Antisense strand to SEQ ID NO: 628874
cauucacucagagaauuuc

SEQ ID NO: 628876 - RNA, 19 nt, Artificial Sequence
  Description of Artificial Sequence: Synthetic oligonucleotide
  Sense strand starting at position 2052 of SEQ ID NO: 585298
aaauucucugagugaaugu

SEQ ID NO: 628877 - RNA, 19 nt, Artificial Sequence
  Description of Artificial Sequence: Synthetic oligonucleotide
  Antisense strand to SEQ ID NO: 628876
acauucacucagagaauuu

SEQ ID NO: 628878 - RNA, 19 nt, Artificial Sequence
  Description of Artificial Sequence: Synthetic oligonucleotide
  Sense strand starting at position 2104 of SEQ ID NO: 585298
gugagaagguggaaggauu

SEQ ID NO: 628879 - RNA, 19 nt, Artificial Sequence
  Description of Artificial Sequence: Synthetic oligonucleotide
  Antisense strand to SEQ ID NO: 628878
aauccuuccaccuucucac

SEQ ID NO: 628880 - RNA, 19 nt, Artificial Sequence
  Description of Artificial Sequence: Synthetic oligonucleotide
  Sense strand starting at position 2245 of SEQ ID NO: 585298
gcagcugagcuccaacaaa

SEQ ID NO: 628881 - RNA, 19 nt, Artificial Sequence
  Description of Artificial Sequence: Synthetic oligonucleotide
  Antisense strand to SEQ ID NO: 628880
uuuguuggagcucagcugc

SEQ ID NO: 628882 - RNA, 19 nt, Artificial Sequence
  Description of Artificial Sequence: Synthetic oligonucleotide
  Sense strand starting at position 2291 of SEQ ID NO: 585298
agggaauccuacuuuccca

SEQ ID NO: 628883 - RNA, 19 nt, Artificial Sequence
  Description of Artificial Sequence: Synthetic oligonucleotide
  Antisense strand to SEQ ID NO: 628882
ugggaaaguaggauucccu

SEQ ID NO: 628884 - RNA, 19 nt, Artificial Sequence
  Description of Artificial Sequence: Synthetic oligonucleotide
  Sense strand starting at position 2310 of SEQ ID NO: 585298
agaaguuuccguggacaaa

SEQ ID NO: 628885 - RNA, 19 nt, Artificial Sequence
  Description of Artificial Sequence: Synthetic oligonucleotide
  Antisense strand to SEQ ID NO: 628884
uuuguccacggaaacuucu

SEQ ID NO: 628886 - RNA, 19 nt, Artificial Sequence
  Description of Artificial Sequence: Synthetic oligonucleotide
  Sense strand starting at position 2311 of SEQ ID NO: 585298
gaaguuuccguggacaaau

SEQ ID NO: 628887 - RNA, 19 nt, Artificial Sequence
  Description of Artificial Sequence: Synthetic oligonucleotide
  Antisense strand to SEQ ID NO: 628886
auuuguccacggaaacuuc

SEQ ID NO: 628888 - RNA, 19 nt, Artificial Sequence
  Description of Artificial Sequence: Synthetic oligonucleotide
  Sense strand starting at position 2382 of SEQ ID NO: 585298
uuggcuacacaauggaaua

SEQ ID NO: 628889 - RNA, 19 nt, Artificial Sequence
  Description of Artificial Sequence: Synthetic oligonucleotide
  Antisense strand to SEQ ID NO: 628888
uauuccauuguguagccaa

SEQ ID NO: 628890 - RNA, 19 nt, Artificial Sequence
  Description of Artificial Sequence: Synthetic oligonucleotide
  Sense strand starting at position 2911 of SEQ ID NO: 585298
uuuacuuaauggguuagau

SEQ ID NO: 628891 - RNA, 19 nt, Artificial Sequence
  Description of Artificial Sequence: Synthetic oligonucleotide
  Antisense strand to SEQ ID NO: 628890
aucuaacccauuaaguaaa

SEQ ID NO: 628892 - RNA, 19 nt, Artificial Sequence
  Description of Artificial Sequence: Synthetic oligonucleotide
  Sense strand starting at position 3037 of SEQ ID NO: 585298
augaauaagggaugccuau

SEQ ID NO: 628893 - RNA, 19 nt, Artificial Sequence
  Description of Artificial Sequence: Synthetic oligonucleotide
  Antisense strand to SEQ ID NO: 628892
auaggcaucccuuauucau

SEQ ID NO: 628894 - RNA, 19 nt, Artificial Sequence
  Description of Artificial Sequence: Synthetic oligonucleotide
  Sense strand starting at position 3104 of SEQ ID NO: 585298
gcuaguaauugauuugcau

SEQ ID NO: 628895 - RNA, 19 nt, Artificial Sequence
  Description of Artificial Sequence: Synthetic oligonucleotide
  Antisense strand to SEQ ID NO: 628894
augcaaaucaauuacuagc

SEQ ID NO: 628896 - RNA, 19 nt, Artificial Sequence
  Description of Artificial Sequence: Synthetic oligonucleotide
  Sense strand starting at position 3211 of SEQ ID NO: 585298
gagacaccugcgcaugaau

SEQ ID NO: 628897 - RNA, 19 nt, Artificial Sequence
  Description of Artificial Sequence: Synthetic oligonucleotide
  Antisense strand to SEQ ID NO: 628896
auucaugcgcaggugucuc

SEQ ID NO: 628898 - RNA, 19 nt, Artificial Sequence
  Description of Artificial Sequence: Synthetic oligonucleotide
  Sense strand starting at position 3470 of SEQ ID NO: 585298
augauaauccucuauggcu

SEQ ID NO: 628899 - RNA, 19 nt, Artificial Sequence
  Description of Artificial Sequence: Synthetic oligonucleotide
  Antisense strand to SEQ ID NO: 628898
agccauagaggauuaucau

SEQ ID NO: 628900 - RNA, 19 nt, Artificial Sequence
  Description of Artificial Sequence: Synthetic oligonucleotide
  Sense strand starting at position 3496 of SEQ ID NO: 585298
uggugaacuucuguaaaua

SEQ ID NO: 628901 - RNA, 19 nt, Artificial Sequence
  Description of Artificial Sequence: Synthetic oligonucleotide
  Antisense strand to SEQ ID NO: 628900
uauuuacagaaguucacca

SEQ ID NO: 628902 - RNA, 19 nt, Artificial Sequence
  Description of Artificial Sequence: Synthetic oligonucleotide
  Sense strand starting at position 3497 of SEQ ID NO: 585298
ggugaacuucuguaaauau

SEQ ID NO: 628903 - RNA, 19 nt, Artificial Sequence
  Description of Artificial Sequence: Synthetic oligonucleotide
  Antisense strand to SEQ ID NO: 628902
auauuuacagaaguucacc

SEQ ID NO: 628904 - RNA, 19 nt, Artificial Sequence
  Description of Artificial Sequence: Synthetic oligonucleotide
  Sense strand starting at position 3524 of SEQ ID NO: 585298
ggcucuaauaaaugugaug

SEQ ID NO: 628905 - RNA, 19 nt, Artificial Sequence
  Description of Artificial Sequence: Synthetic oligonucleotide
  Antisense strand to SEQ ID NO: 628904
caucacauuuauuagagcc

SEQ ID NO: 628906 - RNA, 19 nt, Artificial Sequence
  Description of Artificial Sequence: Synthetic oligonucleotide
  Sense strand starting at position 3563 of SEQ ID NO: 585298
uguuuauuggaucaagcau

SEQ ID NO: 628907 - RNA, 19 nt, Artificial Sequence
  Description of Artificial Sequence: Synthetic oligonucleotide
  Antisense strand to SEQ ID NO: 628906
augcuugauccaauaaaca

SEQ ID NO: 628908 - RNA, 19 nt, Artificial Sequence
  Description of Artificial Sequence: Synthetic oligonucleotide
  Sense strand starting at position 3622 of SEQ ID NO: 585298
uuuggacuggccuauacau

SEQ ID NO: 628909 - RNA, 19 nt, Artificial Sequence
  Description of Artificial Sequence: Synthetic oligonucleotide
  Antisense strand to SEQ ID NO: 628908
auguauaggccaguccaaa

SEQ ID NO: 628910 - RNA, 19 nt, Artificial Sequence
  Description of Artificial Sequence: Synthetic oligonucleotide
  Sense strand starting at position 3708 of SEQ ID NO: 585298
agggcagugaaguaaucau

SEQ ID NO: 628911 - RNA, 19 nt, Artificial Sequence
  Description of Artificial Sequence: Synthetic oligonucleotide
  Antisense strand to SEQ ID NO: 628910
augauuacuucacugcccu

SEQ ID NO: 628912 - RNA, 19 nt, Artificial Sequence
  Description of Artificial Sequence: Synthetic oligonucleotide
  Sense strand starting at position 3946 of SEQ ID NO: 585298
uacagucuuggugaacuga

SEQ ID NO: 628913 - RNA, 19 nt, Artificial Sequence
  Description of Artificial Sequence: Synthetic oligonucleotide
  Antisense strand to SEQ ID NO: 628912
ucaguucaccaagacugua

SEQ ID NO: 628914 - RNA, 19 nt, Artificial Sequence
  Description of Artificial Sequence: Synthetic oligonucleotide
  Sense strand starting at position 125 of SEQ ID NO: 585299
uggucaaugccacaaacau

SEQ ID NO: 628915 - RNA, 19 nt, Artificial Sequence
  Description of Artificial Sequence: Synthetic oligonucleotide
  Antisense strand to SEQ ID NO: 628914
auguuuguggcauugacca

SEQ ID NO: 628916 - RNA, 19 nt, Artificial Sequence
  Description of Artificial Sequence: Synthetic oligonucleotide
  Sense strand starting at position 324 of SEQ ID NO: 585299
gguaaauuacgucagacca

SEQ ID NO: 628917 - RNA, 19 nt, Artificial Sequence
  Description of Artificial Sequence: Synthetic oligonucleotide
  Antisense strand to SEQ ID NO: 628916
uggucugacguaauuuacc

SEQ ID NO: 628918 - RNA, 19 nt, Artificial Sequence
  Description of Artificial Sequence: Synthetic oligonucleotide
  Sense strand starting at position 365 of SEQ ID NO: 585299
ugaccucaguaugcucaaa

SEQ ID NO: 628919 - RNA, 19 nt, Artificial Sequence
  Description of Artificial Sequence: Synthetic oligonucleotide
  Antisense strand to SEQ ID NO: 628918
uuugagcauacugagguca

SEQ ID NO: 628920 - RNA, 19 nt, Artificial Sequence
  Description of Artificial Sequence: Synthetic oligonucleotide
  Sense strand starting at position 618 of SEQ ID NO: 585299
cugugaacucauuggguaa

SEQ ID NO: 628921 - RNA, 19 nt, Artificial Sequence
  Description of Artificial Sequence: Synthetic oligonucleotide
  Antisense strand to SEQ ID NO: 628920
uuacccaaugaguucacag

SEQ ID NO: 628922 - RNA, 19 nt, Artificial Sequence
  Description of Artificial Sequence: Synthetic oligonucleotide
  Sense strand starting at position 619 of SEQ ID NO: 585299
ugugaacucauuggguaaa

SEQ ID NO: 628923 - RNA, 19 nt, Artificial Sequence
  Description of Artificial Sequence: Synthetic oligonucleotide
  Antisense strand to SEQ ID NO: 628922
uuuacccaaugaguucaca

SEQ ID NO: 628924 - RNA, 19 nt, Artificial Sequence
  Description of Artificial Sequence: Synthetic oligonucleotide
  Sense strand starting at position 756 of SEQ ID NO: 585299
cuugaaagauaauugcuau

SEQ ID NO: 628925 - RNA, 19 nt, Artificial Sequence
  Description of Artificial Sequence: Synthetic oligonucleotide
  Antisense strand to SEQ ID NO: 628924
auagcaauuaucuuucaag

SEQ ID NO: 628926 - RNA, 19 nt, Artificial Sequence
  Description of Artificial Sequence: Synthetic oligonucleotide
  Sense strand starting at position 784 of SEQ ID NO: 585299
guuguaauuuacuuuccuu

SEQ ID NO: 628927 - RNA, 19 nt, Artificial Sequence
  Description of Artificial Sequence: Synthetic oligonucleotide
  Antisense strand to SEQ ID NO: 628926
aaggaaaguaaauuacaac

SEQ ID NO: 628928 - RNA, 19 nt, Artificial Sequence
  Description of Artificial Sequence: Synthetic oligonucleotide
  Sense strand starting at position 910 of SEQ ID NO: 585299
gccuguaauuucucagcau

SEQ ID NO: 628929 - RNA, 19 nt, Artificial Sequence
  Description of Artificial Sequence: Synthetic oligonucleotide
  Antisense strand to SEQ ID NO: 628928
augcugagaaauuacaggc

SEQ ID NO: 628930 - RNA, 19 nt, Artificial Sequence
  Description of Artificial Sequence: Synthetic oligonucleotide
  Sense strand starting at position 913 of SEQ ID NO: 585299
uguaauuucucagcaugua

SEQ ID NO: 628931 - RNA, 19 nt, Artificial Sequence
  Description of Artificial Sequence: Synthetic oligonucleotide
  Antisense strand to SEQ ID NO: 628930
uacaugcugagaaauuaca

SEQ ID NO: 628932 - RNA, 19 nt, Artificial Sequence
  Description of Artificial Sequence: Synthetic oligonucleotide
  Sense strand starting at position 947 of SEQ ID NO: 585299
ccucuaguagucuaaacca

SEQ ID NO: 628933 - RNA, 19 nt, Artificial Sequence
  Description of Artificial Sequence: Synthetic oligonucleotide
  Antisense strand to SEQ ID NO: 628932
ugguuuagacuacuagagg

SEQ ID NO: 628934 - RNA, 19 nt, Artificial Sequence
  Description of Artificial Sequence: Synthetic oligonucleotide
  Sense strand starting at position 1021 of SEQ ID NO: 585299
aguuguauuguuuaaugga

SEQ ID NO: 628935 - RNA, 19 nt, Artificial Sequence
  Description of Artificial Sequence: Synthetic oligonucleotide
  Antisense strand to SEQ ID NO: 628934
uccauuaaacaauacaacu

SEQ ID NO: 628936 - RNA, 19 nt, Artificial Sequence
  Description of Artificial Sequence: Synthetic oligonucleotide
  Sense strand starting at position 1058 of SEQ ID NO: 585299
guuucuauucucugagaau

SEQ ID NO: 628937 - RNA, 19 nt, Artificial Sequence
  Description of Artificial Sequence: Synthetic oligonucleotide
  Antisense strand to SEQ ID NO: 628936
auucucagagaauagaaac

SEQ ID NO: 628938 - RNA, 19 nt, Artificial Sequence
  Description of Artificial Sequence: Synthetic oligonucleotide
  Sense strand starting at position 1166 of SEQ ID NO: 585299
guuucugcucauuaauaug

SEQ ID NO: 628939 - RNA, 19 nt, Artificial Sequence
  Description of Artificial Sequence: Synthetic oligonucleotide
  Antisense strand to SEQ ID NO: 628938
cauauuaaugagcagaaac

SEQ ID NO: 628940 - RNA, 19 nt, Artificial Sequence
  Description of Artificial Sequence: Synthetic oligonucleotide
  Sense strand starting at position 1414 of SEQ ID NO: 585299
aacugagauuuguuuccgu

SEQ ID NO: 628941 - RNA, 19 nt, Artificial Sequence
  Description of Artificial Sequence: Synthetic oligonucleotide
  Antisense strand to SEQ ID NO: 628940
acggaaacaaaucucaguu

SEQ ID NO: 628942 - RNA, 19 nt, Artificial Sequence
  Description of Artificial Sequence: Synthetic oligonucleotide
  Sense strand starting at position 1678 of SEQ ID NO: 585299
agggaagaacacuguucuu

SEQ ID NO: 628943 - RNA, 19 nt, Artificial Sequence
  Description of Artificial Sequence: Synthetic oligonucleotide
  Antisense strand to SEQ ID NO: 628942
aagaacaguguucuucccu

SEQ ID NO: 628944 - RNA, 19 nt, Artificial Sequence
  Description of Artificial Sequence: Synthetic oligonucleotide
  Sense strand starting at position 1681 of SEQ ID NO: 585299
gaagaacacuguucuuuga

SEQ ID NO: 628945 - RNA, 19 nt, Artificial Sequence
  Description of Artificial Sequence: Synthetic oligonucleotide
  Antisense strand to SEQ ID NO: 628944
ucaaagaacaguguucuuc

SEQ ID NO: 628946 - RNA, 19 nt, Artificial Sequence
  Description of Artificial Sequence: Synthetic oligonucleotide
  Sense strand starting at position 1683 of SEQ ID NO: 585299
agaacacuguucuuugaaa

SEQ ID NO: 628947 - RNA, 19 nt, Artificial Sequence
  Description of Artificial Sequence: Synthetic oligonucleotide
  Antisense strand to SEQ ID NO: 628946
uuucaaagaacaguguucu

SEQ ID NO: 628948 - RNA, 19 nt, Artificial Sequence
  Description of Artificial Sequence: Synthetic oligonucleotide
  Sense strand starting at position 1801 of SEQ ID NO: 585299
cucuguucuuaccuggaga

SEQ ID NO: 628949 - RNA, 19 nt, Artificial Sequence
  Description of Artificial Sequence: Synthetic oligonucleotide
  Antisense strand to SEQ ID NO: 628948
ucuccagguaagaacagag

SEQ ID NO: 628950 - RNA, 19 nt, Artificial Sequence
  Description of Artificial Sequence: Synthetic oligonucleotide
  Sense strand starting at position 1802 of SEQ ID NO: 585299
ucuguucuuaccuggagag

SEQ ID NO: 628951 - RNA, 19 nt, Artificial Sequence
  Description of Artificial Sequence: Synthetic oligonucleotide
  Antisense strand to SEQ ID NO: 628950
cucuccagguaagaacaga

SEQ ID NO: 628952 - RNA, 19 nt, Artificial Sequence
  Description of Artificial Sequence: Synthetic oligonucleotide
  Sense strand starting at position 1839 of SEQ ID NO: 585299
gaggaauccagucggguca

SEQ ID NO: 628953 - RNA, 19 nt, Artificial Sequence
  Description of Artificial Sequence: Synthetic oligonucleotide
  Antisense strand to SEQ ID NO: 628952
ugacccgacuggauuccuc

SEQ ID NO: 628954 - RNA, 19 nt, Artificial Sequence
  Description of Artificial Sequence: Synthetic oligonucleotide
  Sense strand starting at position 2318 of SEQ ID NO: 585299
acaggcaguguguaaauua

SEQ ID NO: 628955 - RNA, 19 nt, Artificial Sequence
  Description of Artificial Sequence: Synthetic oligonucleotide
  Antisense strand to SEQ ID NO: 628954
uaauuuacacacugccugu

SEQ ID NO: 628956 - RNA, 19 nt, Artificial Sequence
  Description of Artificial Sequence: Synthetic oligonucleotide
  Sense strand starting at position 2370 of SEQ ID NO: 585299
ugaagcauaugccucaaga

SEQ ID NO: 628957 - RNA, 19 nt, Artificial Sequence
  Description of Artificial Sequence: Synthetic oligonucleotide
  Antisense strand to SEQ ID NO: 628956
ucuugaggcauaugcuuca

SEQ ID NO: 628958 - RNA, 19 nt, Artificial Sequence
  Description of Artificial Sequence: Synthetic oligonucleotide
  Sense strand starting at position 2399 of SEQ ID NO: 585299
aagggauuaucagagaaga

SEQ ID NO: 628959 - RNA, 19 nt, Artificial Sequence
  Description of Artificial Sequence: Synthetic oligonucleotide
  Antisense strand to SEQ ID NO: 628958
ucuucucugauaaucccuu

SEQ ID NO: 628960 - RNA, 19 nt, Artificial Sequence
  Description of Artificial Sequence: Synthetic oligonucleotide
  Sense strand starting at position 2429 of SEQ ID NO: 585299
uagagaacauuuggagagu

SEQ ID NO: 628961 - RNA, 19 nt, Artificial Sequence
  Description of Artificial Sequence: Synthetic oligonucleotide
  Antisense strand to SEQ ID NO: 628960
acucuccaaauguucucua

SEQ ID NO: 628962 - RNA, 19 nt, Artificial Sequence
  Description of Artificial Sequence: Synthetic oligonucleotide
  Sense strand starting at position 2430 of SEQ ID NO: 585299
agagaacauuuggagagua

SEQ ID NO: 628963 - RNA, 19 nt, Artificial Sequence
  Description of Artificial Sequence: Synthetic oligonucleotide
  Antisense strand to SEQ ID NO: 628962
uacucuccaaauguucucu

SEQ ID NO: 628964 - RNA, 19 nt, Artificial Sequence
  Description of Artificial Sequence: Synthetic oligonucleotide
  Sense strand starting at position 2616 of SEQ ID NO: 585299
cagaguguuaaagguagaa

SEQ ID NO: 628965 - RNA, 19 nt, Artificial Sequence
  Description of Artificial Sequence: Synthetic oligonucleotide
  Antisense strand to SEQ ID NO: 628964
uucuaccuuuaacacucug

SEQ ID NO: 628966 - RNA, 19 nt, Artificial Sequence
  Description of Artificial Sequence: Synthetic oligonucleotide
  Sense strand starting at position 2824 of SEQ ID NO: 585299
acagcaugauguuccaaca

SEQ ID NO: 628967 - RNA, 19 nt, Artificial Sequence
  Description of Artificial Sequence: Synthetic oligonucleotide
  Antisense strand to SEQ ID NO: 628966
uguuggaacaucaugcugu

SEQ ID NO: 628968 - RNA, 19 nt, Artificial Sequence
  Description of Artificial Sequence: Synthetic oligonucleotide
  Sense strand starting at position 2846 of SEQ ID NO: 585299
cuauacauuguguauugau

SEQ ID NO: 628969 - RNA, 19 nt, Artificial Sequence
  Description of Artificial Sequence: Synthetic oligonucleotide
  Antisense strand to SEQ ID NO: 628968
aucaauacacaauguauag

SEQ ID NO: 628970 - RNA, 19 nt, Artificial Sequence
  Description of Artificial Sequence: Synthetic oligonucleotide
  Sense strand starting at position 2872 of SEQ ID NO: 585299
ggguaauuaguaugugaua

SEQ ID NO: 628971 - RNA, 19 nt, Artificial Sequence
  Description of Artificial Sequence: Synthetic oligonucleotide
  Antisense strand to SEQ ID NO: 628970
uaucacauacuaauuaccc

SEQ ID NO: 628972 - RNA, 19 nt, Artificial Sequence
  Description of Artificial Sequence: Synthetic oligonucleotide
  Sense strand starting at position 2873 of SEQ ID NO: 585299
gguaauuaguaugugauau

SEQ ID NO: 628973 - RNA, 19 nt, Artificial Sequence
  Description of Artificial Sequence: Synthetic oligonucleotide
  Antisense strand to SEQ ID NO: 628972
auaucacauacuaauuacc

SEQ ID NO: 628974 - RNA, 19 nt, Artificial Sequence
  Description of Artificial Sequence: Synthetic oligonucleotide
  Sense strand starting at position 2963 of SEQ ID NO: 585299
ccuggagggcucuauguua

SEQ ID NO: 628975 - RNA, 19 nt, Artificial Sequence
  Description of Artificial Sequence: Synthetic oligonucleotide
  Antisense strand to SEQ ID NO: 628974
uaacauagagcccuccagg

SEQ ID NO: 628976 - RNA, 19 nt, Artificial Sequence
  Description of Artificial Sequence: Synthetic oligonucleotide
  Sense strand starting at position 3048 of SEQ ID NO: 585299
guugaccucaucgaaguaa

SEQ ID NO: 628977 - RNA, 19 nt, Artificial Sequence
  Description of Artificial Sequence: Synthetic oligonucleotide
  Antisense strand to SEQ ID NO: 628976
uuacuucgaugaggucaac

SEQ ID NO: 628978 - RNA, 19 nt, Artificial Sequence
  Description of Artificial Sequence: Synthetic oligonucleotide
  Sense strand starting at position 3059 of SEQ ID NO: 585299
cgaaguaaagaguacguua

SEQ ID NO: 628979 - RNA, 19 nt, Artificial Sequence
  Description of Artificial Sequence: Synthetic oligonucleotide
  Antisense strand to SEQ ID NO: 628978
uaacguacucuuuacuucg

SEQ ID NO: 628980 - RNA, 19 nt, Artificial Sequence
  Description of Artificial Sequence: Synthetic oligonucleotide
  Sense strand starting at position 3064 of SEQ ID NO: 585299
uaaagaguacguuaggagu

SEQ ID NO: 628981 - RNA, 19 nt, Artificial Sequence
  Description of Artificial Sequence: Synthetic oligonucleotide
  Antisense strand to SEQ ID NO: 628980
acuccuaacguacucuuua

SEQ ID NO: 628982 - RNA, 19 nt, Artificial Sequence
  Description of Artificial Sequence: Synthetic oligonucleotide
  Sense strand starting at position 3071 of SEQ ID NO: 585299
uacguuaggaguuaccaga

SEQ ID NO: 628983 - RNA, 19 nt, Artificial Sequence
  Description of Artificial Sequence: Synthetic oligonucleotide
  Antisense strand to SEQ ID NO: 628982
ucugguaacuccuaacgua

SEQ ID NO: 628984 - RNA, 19 nt, Artificial Sequence
  Description of Artificial Sequence: Synthetic oligonucleotide
  Sense strand starting at position 3383 of SEQ ID NO: 585299
ugauuaagucaugaaugca

SEQ ID NO: 628985 - RNA, 19 nt, Artificial Sequence
  Description of Artificial Sequence: Synthetic oligonucleotide
  Antisense strand to SEQ ID NO: 628984
ugcauucaugacuuaauca

SEQ ID NO: 628986 - RNA, 19 nt, Artificial Sequence
  Description of Artificial Sequence: Synthetic oligonucleotide
  Sense strand starting at position 3403 of SEQ ID NO: 585299
aggccuccugaaugggauu

SEQ ID NO: 628987 - RNA, 19 nt, Artificial Sequence
  Description of Artificial Sequence: Synthetic oligonucleotide
  Antisense strand to SEQ ID NO: 628986
aaucccauucaggaggccu

SEQ ID NO: 628988 - RNA, 19 nt, Artificial Sequence
  Description of Artificial Sequence: Synthetic oligonucleotide
  Sense strand starting at position 3404 of SEQ ID NO: 585299
ggccuccugaaugggauua

SEQ ID NO: 628989 - RNA, 19 nt, Artificial Sequence
  Description of Artificial Sequence: Synthetic oligonucleotide
  Antisense strand to SEQ ID NO: 628988
uaaucccauucaggaggcc

SEQ ID NO: 628990 - RNA, 19 nt, Artificial Sequence
  Description of Artificial Sequence: Synthetic oligonucleotide
  Sense strand starting at position 3829 of SEQ ID NO: 585299
cuggaaugauuugacucaa

SEQ ID NO: 628991 - RNA, 19 nt, Artificial Sequence
  Description of Artificial Sequence: Synthetic oligonucleotide
  Antisense strand to SEQ ID NO: 628990
uugagucaaaucauuccag

SEQ ID NO: 628992 - RNA, 19 nt, Artificial Sequence
  Description of Artificial Sequence: Synthetic oligonucleotide
  Sense strand starting at position 3841 of SEQ ID NO: 585299
gacucaaguguuuaguuaa

SEQ ID NO: 628993 - RNA, 19 nt, Artificial Sequence
  Description of Artificial Sequence: Synthetic oligonucleotide
  Antisense strand to SEQ ID NO: 628992
uuaacuaaacacuugaguc

SEQ ID NO: 628994 - RNA, 19 nt, Artificial Sequence
  Description of Artificial Sequence: Synthetic oligonucleotide
  Sense strand starting at position 168 of SEQ ID NO: 585300
ggcucugggccuggaauuu

SEQ ID NO: 628995 - RNA, 19 nt, Artificial Sequence
  Description of Artificial Sequence: Synthetic oligonucleotide
  Antisense strand to SEQ ID NO: 628994
aaauuccaggcccagagcc

SEQ ID NO: 628996 - RNA, 19 nt, Artificial Sequence
  Description of Artificial Sequence: Synthetic oligonucleotide
  Sense strand starting at position 237 of SEQ ID NO: 585300
agucaagaccugggaucuu

SEQ ID NO: 628997 - RNA, 19 nt, Artificial Sequence
  Description of Artificial Sequence: Synthetic oligonucleotide
  Antisense strand to SEQ ID NO: 628996
aagaucccaggucuugacu

SEQ ID NO: 628998 - RNA, 19 nt, Artificial Sequence
  Description of Artificial Sequence: Synthetic oligonucleotide
  Sense strand starting at position 248 of SEQ ID NO: 585300
gggaucuugccuuagcaau

SEQ ID NO: 628999 - RNA, 19 nt, Artificial Sequence
  Description of Artificial Sequence: Synthetic oligonucleotide
  Antisense strand to SEQ ID NO: 628998
auugcuaaggcaagauccc

SEQ ID NO: 629000 - RNA, 19 nt, Artificial Sequence
  Description of Artificial Sequence: Synthetic oligonucleotide
  Sense strand starting at position 467 of SEQ ID NO: 585300
gccugaagauacucaaaca

SEQ ID NO: 629001 - RNA, 19 nt, Artificial Sequence
  Description of Artificial Sequence: Synthetic oligonucleotide
  Antisense strand to SEQ ID NO: 629000
uguuugaguaucuucaggc

SEQ ID NO: 629002 - RNA, 19 nt, Artificial Sequence
  Description of Artificial Sequence: Synthetic oligonucleotide
  Sense strand starting at position 507 of SEQ ID NO: 585300
acugauaauucuguguaga

SEQ ID NO: 629003 - RNA, 19 nt, Artificial Sequence
  Description of Artificial Sequence: Synthetic oligonucleotide
  Antisense strand to SEQ ID NO: 629002
ucuacacagaauuaucagu

SEQ ID NO: 629004 - RNA, 19 nt, Artificial Sequence
  Description of Artificial Sequence: Synthetic oligonucleotide
  Sense strand starting at position 508 of SEQ ID NO: 585300
cugauaauucuguguagac

SEQ ID NO: 629005 - RNA, 19 nt, Artificial Sequence
  Description of Artificial Sequence: Synthetic oligonucleotide
  Antisense strand to SEQ ID NO: 629004
gucuacacagaauuaucag

SEQ ID NO: 629006 - RNA, 19 nt, Artificial Sequence
  Description of Artificial Sequence: Synthetic oligonucleotide
  Sense strand starting at position 509 of SEQ ID NO: 585300
ugauaauucuguguagaca

SEQ ID NO: 629007 - RNA, 19 nt, Artificial Sequence
  Description of Artificial Sequence: Synthetic oligonucleotide
  Antisense strand to SEQ ID NO: 629006
ugucuacacagaauuauca

SEQ ID NO: 629008 - RNA, 19 nt, Artificial Sequence
  Description of Artificial Sequence: Synthetic oligonucleotide
  Sense strand starting at position 510 of SEQ ID NO: 585300
gauaauucuguguagacac

SEQ ID NO: 629009 - RNA, 19 nt, Artificial Sequence
  Description of Artificial Sequence: Synthetic oligonucleotide
  Antisense strand to SEQ ID NO: 629008
gugucuacacagaauuauc

SEQ ID NO: 629010 - RNA, 19 nt, Artificial Sequence
  Description of Artificial Sequence: Synthetic oligonucleotide
  Sense strand starting at position 778 of SEQ ID NO: 585300
cggaaacccagaggucuua

SEQ ID NO: 629011 - RNA, 19 nt, Artificial Sequence
  Description of Artificial Sequence: Synthetic oligonucleotide
  Antisense strand to SEQ ID NO: 629010
uaagaccucuggguuuccg

SEQ ID NO: 629012 - RNA, 19 nt, Artificial Sequence
  Description of Artificial Sequence: Synthetic oligonucleotide
  Sense strand starting at position 899 of SEQ ID NO: 585300
agaaguuucugguccacag

SEQ ID NO: 629013 - RNA, 19 nt, Artificial Sequence
  Description of Artificial Sequence: Synthetic oligonucleotide
  Antisense strand to SEQ ID NO: 629012
cuguggaccagaaacuucu

SEQ ID NO: 629014 - RNA, 19 nt, Artificial Sequence
  Description of Artificial Sequence: Synthetic oligonucleotide
  Sense strand starting at position 994 of SEQ ID NO: 585300
acugcaaagucaucaugga

SEQ ID NO: 629015 - RNA, 19 nt, Artificial Sequence
  Description of Artificial Sequence: Synthetic oligonucleotide
  Antisense strand to SEQ ID NO: 629014
uccaugaugacuuugcagu

SEQ ID NO: 629016 - RNA, 19 nt, Artificial Sequence
  Description of Artificial Sequence: Synthetic oligonucleotide
  Sense strand starting at position 995 of SEQ ID NO: 585300
cugcaaagucaucauggaa

SEQ ID NO: 629017 - RNA, 19 nt, Artificial Sequence
  Description of Artificial Sequence: Synthetic oligonucleotide
  Antisense strand to SEQ ID NO: 629016
uuccaugaugacuuugcag

SEQ ID NO: 629018 - RNA, 19 nt, Artificial Sequence
  Description of Artificial Sequence: Synthetic oligonucleotide
  Sense strand starting at position 1376 of SEQ ID NO: 585300
ucaagaaacuggucgagaa

SEQ ID NO: 629019 - RNA, 19 nt, Artificial Sequence
  Description of Artificial Sequence: Synthetic oligonucleotide
  Antisense strand to SEQ ID NO: 629018
uucucgaccaguuucuuga

SEQ ID NO: 629020 - RNA, 19 nt, Artificial Sequence
  Description of Artificial Sequence: Synthetic oligonucleotide
  Sense strand starting at position 1476 of SEQ ID NO: 585300
ucaggauggaaaugucagu

SEQ ID NO: 629021 - RNA, 19 nt, Artificial Sequence
  Description of Artificial Sequence: Synthetic oligonucleotide
  Antisense strand to SEQ ID NO: 629020
acugacauuuccauccuga

SEQ ID NO: 629022 - RNA, 19 nt, Artificial Sequence
  Description of Artificial Sequence: Synthetic oligonucleotide
  Sense strand starting at position 1486 of SEQ ID NO: 585300
aaugucagucagggaguua

SEQ ID NO: 629023 - RNA, 19 nt, Artificial Sequence
  Description of Artificial Sequence: Synthetic oligonucleotide
  Antisense strand to SEQ ID NO: 629022
uaacucccugacugacauu

SEQ ID NO: 629024 - RNA, 19 nt, Artificial Sequence
  Description of Artificial Sequence: Synthetic oligonucleotide
  Sense strand starting at position 1487 of SEQ ID NO: 585300
augucagucagggaguuaa

SEQ ID NO: 629025 - RNA, 19 nt, Artificial Sequence
  Description of Artificial Sequence: Synthetic oligonucleotide
  Antisense strand to SEQ ID NO: 629024
uuaacucccugacugacau

SEQ ID NO: 629026 - RNA, 19 nt, Artificial Sequence
  Description of Artificial Sequence: Synthetic oligonucleotide
  Sense strand starting at position 1794 of SEQ ID NO: 585300
gugggaagauuugggaaga

SEQ ID NO: 629027 - RNA, 19 nt, Artificial Sequence
  Description of Artificial Sequence: Synthetic oligonucleotide
  Antisense strand to SEQ ID NO: 629026
ucuucccaaaucuucccac

SEQ ID NO: 629028 - RNA, 19 nt, Artificial Sequence
  Description of Artificial Sequence: Synthetic oligonucleotide
  Sense strand starting at position 1795 of SEQ ID NO: 585300
ugggaagauuugggaagaa

SEQ ID NO: 629029 - RNA, 19 nt, Artificial Sequence
  Description of Artificial Sequence: Synthetic oligonucleotide
  Antisense strand to SEQ ID NO: 629028
uucuucccaaaucuuccca

SEQ ID NO: 629030 - RNA, 19 nt, Artificial Sequence
  Description of Artificial Sequence: Synthetic oligonucleotide
  Sense strand starting at position 1805 of SEQ ID NO: 585300
ugggaagaaucguuaauau

SEQ ID NO: 629031 - RNA, 19 nt, Artificial Sequence
  Description of Artificial Sequence: Synthetic oligonucleotide
  Antisense strand to SEQ ID NO: 629030
auauuaacgauucuuccca

SEQ ID NO: 629032 - RNA, 19 nt, Artificial Sequence
  Description of Artificial Sequence: Synthetic oligonucleotide
  Sense strand starting at position 1839 of SEQ ID NO: 585300
gaaagaggauuagaugaga

SEQ ID NO: 629033 - RNA, 19 nt, Artificial Sequence
  Description of Artificial Sequence: Synthetic oligonucleotide
  Antisense strand to SEQ ID NO: 629032
ucucaucuaauccucuuuc

SEQ ID NO: 629034 - RNA, 19 nt, Artificial Sequence
  Description of Artificial Sequence: Synthetic oligonucleotide
  Sense strand starting at position 2450 of SEQ ID NO: 585300
aaggguaugguguggagau

SEQ ID NO: 629035 - RNA, 19 nt, Artificial Sequence
  Description of Artificial Sequence: Synthetic oligonucleotide
  Antisense strand to SEQ ID NO: 629034
aucuccacaccauacccuu

SEQ ID NO: 629036 - RNA, 19 nt, Artificial Sequence
  Description of Artificial Sequence: Synthetic oligonucleotide
  Sense strand starting at position 2813 of SEQ ID NO: 585300
gugacuugggaaggucaga

SEQ ID NO: 629037 - RNA, 19 nt, Artificial Sequence
  Description of Artificial Sequence: Synthetic oligonucleotide
  Antisense strand to SEQ ID NO: 629036
ucugaccuucccaagucac

SEQ ID NO: 629038 - RNA, 19 nt, Artificial Sequence
  Description of Artificial Sequence: Synthetic oligonucleotide
  Sense strand starting at position 3031 of SEQ ID NO: 585300
ucaggaagucuggguguaa

SEQ ID NO: 629039 - RNA, 19 nt, Artificial Sequence
  Description of Artificial Sequence: Synthetic oligonucleotide
  Antisense strand to SEQ ID NO: 629038
uuacacccagacuuccuga

SEQ ID NO: 629040 - RNA, 19 nt, Artificial Sequence
  Description of Artificial Sequence: Synthetic oligonucleotide
  Sense strand starting at position 3032 of SEQ ID NO: 585300
caggaagucuggguguaaa

SEQ ID NO: 629041 - RNA, 19 nt, Artificial Sequence
  Description of Artificial Sequence: Synthetic oligonucleotide
  Antisense strand to SEQ ID NO: 629040
uuuacacccagacuuccug

SEQ ID NO: 629042 - RNA, 19 nt, Artificial Sequence
  Description of Artificial Sequence: Synthetic oligonucleotide
  Sense strand starting at position 3186 of SEQ ID NO: 585300
guaguaucaggauguggga

SEQ ID NO: 629043 - RNA, 19 nt, Artificial Sequence
  Description of Artificial Sequence: Synthetic oligonucleotide
  Antisense strand to SEQ ID NO: 629042
ucccacauccugauacuac

SEQ ID NO: 629044 - RNA, 19 nt, Artificial Sequence
  Description of Artificial Sequence: Synthetic oligonucleotide
  Sense strand starting at position 3203 of SEQ ID NO: 585300
gauugagcccuggaccuuu

SEQ ID NO: 629045 - RNA, 19 nt, Artificial Sequence
  Description of Artificial Sequence: Synthetic oligonucleotide
  Antisense strand to SEQ ID NO: 629044
aaagguccagggcucaauc

SEQ ID NO: 629046 - RNA, 19 nt, Artificial Sequence
  Description of Artificial Sequence: Synthetic oligonucleotide
  Sense strand starting at position 3378 of SEQ ID NO: 585300
aggaaaguugcugagguaa

SEQ ID NO: 629047 - RNA, 19 nt, Artificial Sequence
  Description of Artificial Sequence: Synthetic oligonucleotide
  Antisense strand to SEQ ID NO: 629046
uuaccucagcaacuuuccu

SEQ ID NO: 629048 - RNA, 19 nt, Artificial Sequence
  Description of Artificial Sequence: Synthetic oligonucleotide
  Sense strand starting at position 3389 of SEQ ID NO: 585300
ugagguaauugguugagag

SEQ ID NO: 629049 - RNA, 19 nt, Artificial Sequence
  Description of Artificial Sequence: Synthetic oligonucleotide
  Antisense strand to SEQ ID NO: 629048
cucucaaccaauuaccuca

SEQ ID NO: 629050 - RNA, 19 nt, Artificial Sequence
  Description of Artificial Sequence: Synthetic oligonucleotide
  Sense strand starting at position 3390 of SEQ ID NO: 585300
gagguaauugguugagaga

SEQ ID NO: 629051 - RNA, 19 nt, Artificial Sequence
  Description of Artificial Sequence: Synthetic oligonucleotide
  Antisense strand to SEQ ID NO: 629050
ucucucaaccaauuaccuc

SEQ ID NO: 629052 - RNA, 19 nt, Artificial Sequence
  Description of Artificial Sequence: Synthetic oligonucleotide
  Sense strand starting at position 3399 of SEQ ID NO: 585300
gguugagagagguguucaa

SEQ ID NO: 629053 - RNA, 19 nt, Artificial Sequence
  Description of Artificial Sequence: Synthetic oligonucleotide
  Antisense strand to SEQ ID NO: 629052
uugaacaccucucucaacc

SEQ ID NO: 629054 - RNA, 19 nt, Artificial Sequence
  Description of Artificial Sequence: Synthetic oligonucleotide
  Sense strand starting at position 3446 of SEQ ID NO: 585300
uuacuaagacuuuguagag

SEQ ID NO: 629055 - RNA, 19 nt, Artificial Sequence
  Description of Artificial Sequence: Synthetic oligonucleotide
  Antisense strand to SEQ ID NO: 629054
cucuacaaagucuuaguaa

SEQ ID NO: 629056 - RNA, 19 nt, Artificial Sequence
  Description of Artificial Sequence: Synthetic oligonucleotide
  Sense strand starting at position 3591 of SEQ ID NO: 585300
ucugaagacucuucuggag

SEQ ID NO: 629057 - RNA, 19 nt, Artificial Sequence
  Description of Artificial Sequence: Synthetic oligonucleotide
  Antisense strand to SEQ ID NO: 629056
cuccagaagagucuucaga

SEQ ID NO: 629058 - RNA, 19 nt, Artificial Sequence
  Description of Artificial Sequence: Synthetic oligonucleotide
  Sense strand starting at position 3693 of SEQ ID NO: 585300
uaaucagcucccuagaggu

SEQ ID NO: 629059 - RNA, 19 nt, Artificial Sequence
  Description of Artificial Sequence: Synthetic oligonucleotide
  Antisense strand to SEQ ID NO: 629058
accucuagggagcugauua

SEQ ID NO: 629060 - RNA, 19 nt, Artificial Sequence
  Description of Artificial Sequence: Synthetic oligonucleotide
  Sense strand starting at position 3724 of SEQ ID NO: 585300
agauaaguauugucagaac

SEQ ID NO: 629061 - RNA, 19 nt, Artificial Sequence
  Description of Artificial Sequence: Synthetic oligonucleotide
  Antisense strand to SEQ ID NO: 629060
guucugacaauacuuaucu

SEQ ID NO: 629062 - RNA, 19 nt, Artificial Sequence
  Description of Artificial Sequence: Synthetic oligonucleotide
  Sense strand starting at position 3733 of SEQ ID NO: 585300
uugucagaacacugaagau

SEQ ID NO: 629063 - RNA, 19 nt, Artificial Sequence
  Description of Artificial Sequence: Synthetic oligonucleotide
  Antisense strand to SEQ ID NO: 629062
aucuucaguguucugacaa

SEQ ID NO: 629064 - RNA, 19 nt, Artificial Sequence
  Description of Artificial Sequence: Synthetic oligonucleotide
  Sense strand starting at position 3771 of SEQ ID NO: 585300
gaagguuggagaugugucu

SEQ ID NO: 629065 - RNA, 19 nt, Artificial Sequence
  Description of Artificial Sequence: Synthetic oligonucleotide
  Antisense strand to SEQ ID NO: 629064
agacacaucuccaaccuuc

SEQ ID NO: 629066 - RNA, 19 nt, Artificial Sequence
  Description of Artificial Sequence: Synthetic oligonucleotide
  Sense strand starting at position 3778 of SEQ ID NO: 585300
ggagaugugucuucagaag

SEQ ID NO: 629067 - RNA, 19 nt, Artificial Sequence
  Description of Artificial Sequence: Synthetic oligonucleotide
  Antisense strand to SEQ ID NO: 629066
cuucugaagacacaucucc

SEQ ID NO: 629068 - RNA, 19 nt, Artificial Sequence
  Description of Artificial Sequence: Synthetic oligonucleotide
  Sense strand starting at position 3875 of SEQ ID NO: 585300
uugcaaucaaggcaugagu

SEQ ID NO: 629069 - RNA, 19 nt, Artificial Sequence
  Description of Artificial Sequence: Synthetic oligonucleotide
  Antisense strand to SEQ ID NO: 629068
acucaugccuugauugcaa

SEQ ID NO: 629070 - RNA, 19 nt, Artificial Sequence
  Description of Artificial Sequence: Synthetic oligonucleotide
  Sense strand starting at position 3949 of SEQ ID NO: 585300
gugacaauuccagggugga

SEQ ID NO: 629071 - RNA, 19 nt, Artificial Sequence
  Description of Artificial Sequence: Synthetic oligonucleotide
  Antisense strand to SEQ ID NO: 629070
uccacccuggaauugucac

SEQ ID NO: 629072 - RNA, 19 nt, Artificial Sequence
  Description of Artificial Sequence: Synthetic oligonucleotide
  Sense strand starting at position 3950 of SEQ ID NO: 585300
ugacaauuccaggguggau

SEQ ID NO: 629073 - RNA, 19 nt, Artificial Sequence
  Description of Artificial Sequence: Synthetic oligonucleotide
  Antisense strand to SEQ ID NO: 629072
auccacccuggaauuguca

SEQ ID NO: 629074 - RNA, 19 nt, Artificial Sequence
  Description of Artificial Sequence: Synthetic oligonucleotide
  Sense strand starting at position 11 of SEQ ID NO: 585301
aggauaagugcagauacgu

SEQ ID NO: 629075 - RNA, 19 nt, Artificial Sequence
  Description of Artificial Sequence: Synthetic oligonucleotide
  Antisense strand to SEQ ID NO: 629074
acguaucugcacuuauccu

SEQ ID NO: 629076 - RNA, 19 nt, Artificial Sequence
  Description of Artificial Sequence: Synthetic oligonucleotide
  Sense strand starting at position 156 of SEQ ID NO: 585301
agaagauacugaguuuacu

SEQ ID NO: 629077 - RNA, 19 nt, Artificial Sequence
  Description of Artificial Sequence: Synthetic oligonucleotide
  Antisense strand to SEQ ID NO: 629076
aguaaacucaguaucuucu

SEQ ID NO: 629078 - RNA, 19 nt, Artificial Sequence
  Description of Artificial Sequence: Synthetic oligonucleotide
  Sense strand starting at position 179 of SEQ ID NO: 585301
ggcuauugcacuuagaaga

SEQ ID NO: 629079 - RNA, 19 nt, Artificial Sequence
  Description of Artificial Sequence: Synthetic oligonucleotide
  Antisense strand to SEQ ID NO: 629078
ucuucuaagugcaauagcc

SEQ ID NO: 629080 - RNA, 19 nt, Artificial Sequence
  Description of Artificial Sequence: Synthetic oligonucleotide
  Sense strand starting at position 197 of SEQ ID NO: 585301
accugaaagucaucuaagg

SEQ ID NO: 629081 - RNA, 19 nt, Artificial Sequence
  Description of Artificial Sequence: Synthetic oligonucleotide
  Antisense strand to SEQ ID NO: 629080
ccuuagaugacuuucaggu

SEQ ID NO: 629082 - RNA, 19 nt, Artificial Sequence
  Description of Artificial Sequence: Synthetic oligonucleotide
  Sense strand starting at position 269 of SEQ ID NO: 585301
aggccauagaacugagagu

SEQ ID NO: 629083 - RNA, 19 nt, Artificial Sequence
  Description of Artificial Sequence: Synthetic oligonucleotide
  Antisense strand to SEQ ID NO: 629082
acucucaguucuauggccu

SEQ ID NO: 629084 - RNA, 19 nt, Artificial Sequence
  Description of Artificial Sequence: Synthetic oligonucleotide
  Sense strand starting at position 337 of SEQ ID NO: 585301
aaaucagaauugccgagau

SEQ ID NO: 629085 - RNA, 19 nt, Artificial Sequence
  Description of Artificial Sequence: Synthetic oligonucleotide
  Antisense strand to SEQ ID NO: 629084
aucucggcaauucugauuu

SEQ ID NO: 629086 - RNA, 19 nt, Artificial Sequence
  Description of Artificial Sequence: Synthetic oligonucleotide
  Sense strand starting at position 339 of SEQ ID NO: 585301
aucagaauugccgagaucu

SEQ ID NO: 629087 - RNA, 19 nt, Artificial Sequence
  Description of Artificial Sequence: Synthetic oligonucleotide
  Antisense strand to SEQ ID NO: 629086
agaucucggcaauucugau

SEQ ID NO: 629088 - RNA, 19 nt, Artificial Sequence
  Description of Artificial Sequence: Synthetic oligonucleotide
  Sense strand starting at position 341 of SEQ ID NO: 585301
cagaauugccgagaucuca

SEQ ID NO: 629089 - RNA, 19 nt, Artificial Sequence
  Description of Artificial Sequence: Synthetic oligonucleotide
  Antisense strand to SEQ ID NO: 629088
ugagaucucggcaauucug

SEQ ID NO: 629090 - RNA, 19 nt, Artificial Sequence
  Description of Artificial Sequence: Synthetic oligonucleotide
  Sense strand starting at position 349 of SEQ ID NO: 585301
ccgagaucucaggguauaa

SEQ ID NO: 629091 - RNA, 19 nt, Artificial Sequence
  Description of Artificial Sequence: Synthetic oligonucleotide
  Antisense strand to SEQ ID NO: 629090
uuauacccugagaucucgg

SEQ ID NO: 629092 - RNA, 19 nt, Artificial Sequence
  Description of Artificial Sequence: Synthetic oligonucleotide
  Sense strand starting at position 466 of SEQ ID NO: 585301
uggauuauagugcaaaugu

SEQ ID NO: 629093 - RNA, 19 nt, Artificial Sequence
  Description of Artificial Sequence: Synthetic oligonucleotide
  Antisense strand to SEQ ID NO: 629092
acauuugcacuauaaucca

SEQ ID NO: 629094 - RNA, 19 nt, Artificial Sequence
  Description of Artificial Sequence: Synthetic oligonucleotide
  Sense strand starting at position 565 of SEQ ID NO: 585301
gaggauccucagggaugua

SEQ ID NO: 629095 - RNA, 19 nt, Artificial Sequence
  Description of Artificial Sequence: Synthetic oligonucleotide
  Antisense strand to SEQ ID NO: 629094
uacaucccugaggauccuc

SEQ ID NO: 629096 - RNA, 19 nt, Artificial Sequence
  Description of Artificial Sequence: Synthetic oligonucleotide
  Sense strand starting at position 758 of SEQ ID NO: 585301
agcugagcucauuaggaau

SEQ ID NO: 629097 - RNA, 19 nt, Artificial Sequence
  Description of Artificial Sequence: Synthetic oligonucleotide
  Antisense strand to SEQ ID NO: 629096
auuccuaaugagcucagcu

SEQ ID NO: 629098 - RNA, 19 nt, Artificial Sequence
  Description of Artificial Sequence: Synthetic oligonucleotide
  Sense strand starting at position 771 of SEQ ID NO: 585301
aggaauuucuaccaagaau

SEQ ID NO: 629099 - RNA, 19 nt, Artificial Sequence
  Description of Artificial Sequence: Synthetic oligonucleotide
  Antisense strand to SEQ ID NO: 629098
auucuugguagaaauuccu

SEQ ID NO: 629100 - RNA, 19 nt, Artificial Sequence
  Description of Artificial Sequence: Synthetic oligonucleotide
  Sense strand starting at position 1035 of SEQ ID NO: 585301
ugucauucucccugauuuc

SEQ ID NO: 629101 - RNA, 19 nt, Artificial Sequence
  Description of Artificial Sequence: Synthetic oligonucleotide
  Antisense strand to SEQ ID NO: 629100
gaaaucagggagaaugaca

SEQ ID NO: 629102 - RNA, 19 nt, Artificial Sequence
  Description of Artificial Sequence: Synthetic oligonucleotide
  Sense strand starting at position 1135 of SEQ ID NO: 585301
aguccugaaucucucagaa

SEQ ID NO: 629103 - RNA, 19 nt, Artificial Sequence
  Description of Artificial Sequence: Synthetic oligonucleotide
  Antisense strand to SEQ ID NO: 629102
uucugagagauucaggacu

SEQ ID NO: 629104 - RNA, 19 nt, Artificial Sequence
  Description of Artificial Sequence: Synthetic oligonucleotide
  Sense strand starting at position 1367 of SEQ ID NO: 585301
auaggagggcccugauagu

SEQ ID NO: 629105 - RNA, 19 nt, Artificial Sequence
  Description of Artificial Sequence: Synthetic oligonucleotide
  Antisense strand to SEQ ID NO: 629104
acuaucagggcccuccuau

SEQ ID NO: 629106 - RNA, 19 nt, Artificial Sequence
  Description of Artificial Sequence: Synthetic oligonucleotide
  Sense strand starting at position 1458 of SEQ ID NO: 585301
cucguugaucugcugugua

SEQ ID NO: 629107 - RNA, 19 nt, Artificial Sequence
  Description of Artificial Sequence: Synthetic oligonucleotide
  Antisense strand to SEQ ID NO: 629106
uacacagcagaucaacgag

SEQ ID NO: 629108 - RNA, 19 nt, Artificial Sequence
  Description of Artificial Sequence: Synthetic oligonucleotide
  Sense strand starting at position 1460 of SEQ ID NO: 585301
cguugaucugcuguguaac

SEQ ID NO: 629109 - RNA, 19 nt, Artificial Sequence
  Description of Artificial Sequence: Synthetic oligonucleotide
  Antisense strand to SEQ ID NO: 629108
guuacacagcagaucaacg

SEQ ID NO: 629110 - RNA, 19 nt, Artificial Sequence
  Description of Artificial Sequence: Synthetic oligonucleotide
  Sense strand starting at position 1575 of SEQ ID NO: 585301
ugaagauuccugugagaug

SEQ ID NO: 629111 - RNA, 19 nt, Artificial Sequence
  Description of Artificial Sequence: Synthetic oligonucleotide
  Antisense strand to SEQ ID NO: 629110
caucucacaggaaucuuca

SEQ ID NO: 629112 - RNA, 19 nt, Artificial Sequence
  Description of Artificial Sequence: Synthetic oligonucleotide
  Sense strand starting at position 1851 of SEQ ID NO: 585301
agaucacagcucugauaug

SEQ ID NO: 629113 - RNA, 19 nt, Artificial Sequence
  Description of Artificial Sequence: Synthetic oligonucleotide
  Antisense strand to SEQ ID NO: 629112
cauaucagagcugugaucu

SEQ ID NO: 629114 - RNA, 19 nt, Artificial Sequence
  Description of Artificial Sequence: Synthetic oligonucleotide
  Sense strand starting at position 2264 of SEQ ID NO: 585301
acagucagaugaucuuuga

SEQ ID NO: 629115 - RNA, 19 nt, Artificial Sequence
  Description of Artificial Sequence: Synthetic oligonucleotide
  Antisense strand to SEQ ID NO: 629114
ucaaagaucaucugacugu

SEQ ID NO: 629116 - RNA, 19 nt, Artificial Sequence
  Description of Artificial Sequence: Synthetic oligonucleotide
  Sense strand starting at position 2347 of SEQ ID NO: 585301
uucugcugauaauuaagaa

SEQ ID NO: 629117 - RNA, 19 nt, Artificial Sequence
  Description of Artificial Sequence: Synthetic oligonucleotide
  Antisense strand to SEQ ID NO: 629116
uucuuaauuaucagcagaa

SEQ ID NO: 629118 - RNA, 19 nt, Artificial Sequence
  Description of Artificial Sequence: Synthetic oligonucleotide
  Sense strand starting at position 2409 of SEQ ID NO: 585301
gguccaccucccugagaua

SEQ ID NO: 629119 - RNA, 19 nt, Artificial Sequence
  Description of Artificial Sequence: Synthetic oligonucleotide
  Antisense strand to SEQ ID NO: 629118
uaucucagggagguggacc

SEQ ID NO: 629120 - RNA, 19 nt, Artificial Sequence
  Description of Artificial Sequence: Synthetic oligonucleotide
  Sense strand starting at position 2497 of SEQ ID NO: 585301
ugaaguugaucuuuaauug

SEQ ID NO: 629121 - RNA, 19 nt, Artificial Sequence
  Description of Artificial Sequence: Synthetic oligonucleotide
  Antisense strand to SEQ ID NO: 629120
caauuaaagaucaacuuca

SEQ ID NO: 629122 - RNA, 19 nt, Artificial Sequence
  Description of Artificial Sequence: Synthetic oligonucleotide
  Sense strand starting at position 2498 of SEQ ID NO: 585301
gaaguugaucuuuaauugu

SEQ ID NO: 629123 - RNA, 19 nt, Artificial Sequence
  Description of Artificial Sequence: Synthetic oligonucleotide
  Antisense strand to SEQ ID NO: 629122
acaauuaaagaucaacuuc

SEQ ID NO: 629124 - RNA, 19 nt, Artificial Sequence
  Description of Artificial Sequence: Synthetic oligonucleotide
  Sense strand starting at position 2635 of SEQ ID NO: 585301
uuacuagucuuguuauuuc

SEQ ID NO: 629125 - RNA, 19 nt, Artificial Sequence
  Description of Artificial Sequence: Synthetic oligonucleotide
  Antisense strand to SEQ ID NO: 629124
gaaauaacaagacuaguaa

SEQ ID NO: 629126 - RNA, 19 nt, Artificial Sequence
  Description of Artificial Sequence: Synthetic oligonucleotide
  Sense strand starting at position 2851 of SEQ ID NO: 585301
auuugauacucauagagaa

SEQ ID NO: 629127 - RNA, 19 nt, Artificial Sequence
  Description of Artificial Sequence: Synthetic oligonucleotide
  Antisense strand to SEQ ID NO: 629126
uucucuaugaguaucaaau

SEQ ID NO: 629128 - RNA, 19 nt, Artificial Sequence
  Description of Artificial Sequence: Synthetic oligonucleotide
  Sense strand starting at position 3088 of SEQ ID NO: 585301
cugagacaucgaggaagua

SEQ ID NO: 629129 - RNA, 19 nt, Artificial Sequence
  Description of Artificial Sequence: Synthetic oligonucleotide
  Antisense strand to SEQ ID NO: 629128
uacuuccucgaugucucag

SEQ ID NO: 629130 - RNA, 19 nt, Artificial Sequence
  Description of Artificial Sequence: Synthetic oligonucleotide
  Sense strand starting at position 3330 of SEQ ID NO: 585301
auuagaauuggugguccaa

SEQ ID NO: 629131 - RNA, 19 nt, Artificial Sequence
  Description of Artificial Sequence: Synthetic oligonucleotide
  Antisense strand to SEQ ID NO: 629130
uuggaccaccaauucuaau

SEQ ID NO: 629132 - RNA, 19 nt, Artificial Sequence
  Description of Artificial Sequence: Synthetic oligonucleotide
  Sense strand starting at position 3332 of SEQ ID NO: 585301
uagaauuggugguccaaca

SEQ ID NO: 629133 - RNA, 19 nt, Artificial Sequence
  Description of Artificial Sequence: Synthetic oligonucleotide
  Antisense strand to SEQ ID NO: 629132
uguuggaccaccaauucua

SEQ ID NO: 629134 - RNA, 19 nt, Artificial Sequence
  Description of Artificial Sequence: Synthetic oligonucleotide
  Sense strand starting at position 3632 of SEQ ID NO: 585301
ggcagugucguuaaagcug

SEQ ID NO: 629135 - RNA, 19 nt, Artificial Sequence
  Description of Artificial Sequence: Synthetic oligonucleotide
  Antisense strand to SEQ ID NO: 629134
cagcuuuaacgacacugcc

SEQ ID NO: 629136 - RNA, 19 nt, Artificial Sequence
  Description of Artificial Sequence: Synthetic oligonucleotide
  Sense strand starting at position 3638 of SEQ ID NO: 585301
gucguuaaagcugcauauu

SEQ ID NO: 629137 - RNA, 19 nt, Artificial Sequence
  Description of Artificial Sequence: Synthetic oligonucleotide
  Antisense strand to SEQ ID NO: 629136
aauaugcagcuuuaacgac

SEQ ID NO: 629138 - RNA, 19 nt, Artificial Sequence
  Description of Artificial Sequence: Synthetic oligonucleotide
  Sense strand starting at position 3639 of SEQ ID NO: 585301
ucguuaaagcugcauauuu

SEQ ID NO: 629139 - RNA, 19 nt, Artificial Sequence
  Description of Artificial Sequence: Synthetic oligonucleotide
  Antisense strand to SEQ ID NO: 629138
aaauaugcagcuuuaacga

SEQ ID NO: 629140 - RNA, 19 nt, Artificial Sequence
  Description of Artificial Sequence: Synthetic oligonucleotide
  Sense strand starting at position 3692 of SEQ ID NO: 585301
guguaaggucccuagacug

SEQ ID NO: 629141 - RNA, 19 nt, Artificial Sequence
  Description of Artificial Sequence: Synthetic oligonucleotide
  Antisense strand to SEQ ID NO: 629140
cagucuagggaccuuacac

SEQ ID NO: 629142 - RNA, 19 nt, Artificial Sequence
  Description of Artificial Sequence: Synthetic oligonucleotide
  Sense strand starting at position 3727 of SEQ ID NO: 585301
augacaguccuguggaaga

SEQ ID NO: 629143 - RNA, 19 nt, Artificial Sequence
  Description of Artificial Sequence: Synthetic oligonucleotide
  Antisense strand to SEQ ID NO: 629142
ucuuccacaggacugucau

SEQ ID NO: 629144 - RNA, 19 nt, Artificial Sequence
  Description of Artificial Sequence: Synthetic oligonucleotide
  Sense strand starting at position 3738 of SEQ ID NO: 585301
guggaagaaccugguaacu

SEQ ID NO: 629145 - RNA, 19 nt, Artificial Sequence
  Description of Artificial Sequence: Synthetic oligonucleotide
  Antisense strand to SEQ ID NO: 629144
aguuaccagguucuuccac

SEQ ID NO: 629146 - RNA, 19 nt, Artificial Sequence
  Description of Artificial Sequence: Synthetic oligonucleotide
  Sense strand starting at position 3796 of SEQ ID NO: 585301
aaauaugaaugggugcuaa

SEQ ID NO: 629147 - RNA, 19 nt, Artificial Sequence
  Description of Artificial Sequence: Synthetic oligonucleotide
  Antisense strand to SEQ ID NO: 629146
uuagcacccauucauauuu

SEQ ID NO: 629148 - RNA, 19 nt, Artificial Sequence
  Description of Artificial Sequence: Synthetic oligonucleotide
  Sense strand starting at position 3866 of SEQ ID NO: 585301
ugaguucugagauggguac

SEQ ID NO: 629149 - RNA, 19 nt, Artificial Sequence
  Description of Artificial Sequence: Synthetic oligonucleotide
  Antisense strand to SEQ ID NO: 629148
guacccaucucagaacuca

SEQ ID NO: 629150 - RNA, 19 nt, Artificial Sequence
  Description of Artificial Sequence: Synthetic oligonucleotide
  Sense strand starting at position 3873 of SEQ ID NO: 585301
ugagauggguacucuaauc

SEQ ID NO: 629151 - RNA, 19 nt, Artificial Sequence
  Description of Artificial Sequence: Synthetic oligonucleotide
  Antisense strand to SEQ ID NO: 629150
gauuagaguacccaucuca

SEQ ID NO: 629152 - RNA, 19 nt, Artificial Sequence
  Description of Artificial Sequence: Synthetic oligonucleotide
  Sense strand starting at position 3897 of SEQ ID NO: 585301
aagucaugccacugaauga

SEQ ID NO: 629153 - RNA, 19 nt, Artificial Sequence
  Description of Artificial Sequence: Synthetic oligonucleotide
  Antisense strand to SEQ ID NO: 629152
ucauucaguggcaugacuu

SEQ ID NO: 629154 - RNA, 19 nt, Artificial Sequence
  Description of Artificial Sequence: Synthetic oligonucleotide
  Sense strand starting at position 78 of SEQ ID NO: 585302
ggcuguauucaggagauuc

SEQ ID NO: 629155 - RNA, 19 nt, Artificial Sequence
  Description of Artificial Sequence: Synthetic oligonucleotide
  Antisense strand to SEQ ID NO: 629154
gaaucuccugaauacagcc

SEQ ID NO: 629156 - RNA, 19 nt, Artificial Sequence
  Description of Artificial Sequence: Synthetic oligonucleotide
  Sense strand starting at position 100 of SEQ ID NO: 585302
ccuugcuacccugaaagau

SEQ ID NO: 629157 - RNA, 19 nt, Artificial Sequence
  Description of Artificial Sequence: Synthetic oligonucleotide
  Antisense strand to SEQ ID NO: 629156
aucuuucaggguagcaagg

SEQ ID NO: 629158 - RNA, 19 nt, Artificial Sequence
  Description of Artificial Sequence: Synthetic oligonucleotide
  Sense strand starting at position 262 of SEQ ID NO: 585302
gguguaaauuuggacuaga

SEQ ID NO: 629159 - RNA, 19 nt, Artificial Sequence
  Description of Artificial Sequence: Synthetic oligonucleotide
  Antisense strand to SEQ ID NO: 629158
ucuaguccaaauuuacacc

SEQ ID NO: 629160 - RNA, 19 nt, Artificial Sequence
  Description of Artificial Sequence: Synthetic oligonucleotide
  Sense strand starting at position 287 of SEQ ID NO: 585302
cugagaguacaaugguuga

SEQ ID NO: 629161 - RNA, 19 nt, Artificial Sequence
  Description of Artificial Sequence: Synthetic oligonucleotide
  Antisense strand to SEQ ID NO: 629160
ucaaccauuguacucucag

SEQ ID NO: 629162 - RNA, 19 nt, Artificial Sequence
  Description of Artificial Sequence: Synthetic oligonucleotide
  Sense strand starting at position 290 of SEQ ID NO: 585302
agaguacaaugguugaacu

SEQ ID NO: 629163 - RNA, 19 nt, Artificial Sequence
  Description of Artificial Sequence: Synthetic oligonucleotide
  Antisense strand to SEQ ID NO: 629162
aguucaaccauuguacucu

SEQ ID NO: 629164 - RNA, 19 nt, Artificial Sequence
  Description of Artificial Sequence: Synthetic oligonucleotide
  Sense strand starting at position 291 of SEQ ID NO: 585302
gaguacaaugguugaacua

SEQ ID NO: 629165 - RNA, 19 nt, Artificial Sequence
  Description of Artificial Sequence: Synthetic oligonucleotide
  Antisense strand to SEQ ID NO: 629164
uaguucaaccauuguacuc

SEQ ID NO: 629166 - RNA, 19 nt, Artificial Sequence
  Description of Artificial Sequence: Synthetic oligonucleotide
  Sense strand starting at position 411 of SEQ ID NO: 585302
gugagaugguaucucaaga

SEQ ID NO: 629167 - RNA, 19 nt, Artificial Sequence
  Description of Artificial Sequence: Synthetic oligonucleotide
  Antisense strand to SEQ ID NO: 629166
ucuugagauaccaucucac

SEQ ID NO: 629168 - RNA, 19 nt, Artificial Sequence
  Description of Artificial Sequence: Synthetic oligonucleotide
  Sense strand starting at position 1013 of SEQ ID NO: 585302
uccugagaguauccugaga

SEQ ID NO: 629169 - RNA, 19 nt, Artificial Sequence
  Description of Artificial Sequence: Synthetic oligonucleotide
  Antisense strand to SEQ ID NO: 629168
ucucaggauacucucagga

SEQ ID NO: 629170 - RNA, 19 nt, Artificial Sequence
  Description of Artificial Sequence: Synthetic oligonucleotide
  Sense strand starting at position 1301 of SEQ ID NO: 585302
uuaauuguccaagggaugu

SEQ ID NO: 629171 - RNA, 19 nt, Artificial Sequence
  Description of Artificial Sequence: Synthetic oligonucleotide
  Antisense strand to SEQ ID NO: 629170
acaucccuuggacaauuaa

SEQ ID NO: 629172 - RNA, 19 nt, Artificial Sequence
  Description of Artificial Sequence: Synthetic oligonucleotide
  Sense strand starting at position 1352 of SEQ ID NO: 585302
auucuucgugagcacugaa

SEQ ID NO: 629173 - RNA, 19 nt, Artificial Sequence
  Description of Artificial Sequence: Synthetic oligonucleotide
  Antisense strand to SEQ ID NO: 629172
uucagugcucacgaagaau

SEQ ID NO: 629174 - RNA, 19 nt, Artificial Sequence
  Description of Artificial Sequence: Synthetic oligonucleotide
  Sense strand starting at position 1366 of SEQ ID NO: 585302
cugaauccucagugauccu

SEQ ID NO: 629175 - RNA, 19 nt, Artificial Sequence
  Description of Artificial Sequence: Synthetic oligonucleotide
  Antisense strand to SEQ ID NO: 629174
aggaucacugaggauucag

SEQ ID NO: 629176 - RNA, 19 nt, Artificial Sequence
  Description of Artificial Sequence: Synthetic oligonucleotide
  Sense strand starting at position 1578 of SEQ ID NO: 585302
guacccauguccuuggaga

SEQ ID NO: 629177 - RNA, 19 nt, Artificial Sequence
  Description of Artificial Sequence: Synthetic oligonucleotide
  Antisense strand to SEQ ID NO: 629176
ucuccaaggacauggguac

SEQ ID NO: 629178 - RNA, 19 nt, Artificial Sequence
  Description of Artificial Sequence: Synthetic oligonucleotide
  Sense strand starting at position 1580 of SEQ ID NO: 585302
acccauguccuuggagaga

SEQ ID NO: 629179 - RNA, 19 nt, Artificial Sequence
  Description of Artificial Sequence: Synthetic oligonucleotide
  Antisense strand to SEQ ID NO: 629178
ucucuccaaggacaugggu

SEQ ID NO: 629180 - RNA, 19 nt, Artificial Sequence
  Description of Artificial Sequence: Synthetic oligonucleotide
  Sense strand starting at position 1634 of SEQ ID NO: 585302
ggaugaaccucuuucucua

SEQ ID NO: 629181 - RNA, 19 nt, Artificial Sequence
  Description of Artificial Sequence: Synthetic oligonucleotide
  Antisense strand to SEQ ID NO: 629180
uagagaaagagguucaucc

SEQ ID NO: 629182 - RNA, 19 nt, Artificial Sequence
  Description of Artificial Sequence: Synthetic oligonucleotide
  Sense strand starting at position 1642 of SEQ ID NO: 585302
cucuuucucuagcugggaa

SEQ ID NO: 629183 - RNA, 19 nt, Artificial Sequence
  Description of Artificial Sequence: Synthetic oligonucleotide
  Antisense strand to SEQ ID NO: 629182
uucccagcuagagaaagag

SEQ ID NO: 629184 - RNA, 19 nt, Artificial Sequence
  Description of Artificial Sequence: Synthetic oligonucleotide
  Sense strand starting at position 2038 of SEQ ID NO: 585302
gacacugagcuuuguauga

SEQ ID NO: 629185 - RNA, 19 nt, Artificial Sequence
  Description of Artificial Sequence: Synthetic oligonucleotide
  Antisense strand to SEQ ID NO: 629184
ucauacaaagcucaguguc

SEQ ID NO: 629186 - RNA, 19 nt, Artificial Sequence
  Description of Artificial Sequence: Synthetic oligonucleotide
  Sense strand starting at position 2053 of SEQ ID NO: 585302
augagucauugcucacuag

SEQ ID NO: 629187 - RNA, 19 nt, Artificial Sequence
  Description of Artificial Sequence: Synthetic oligonucleotide
  Antisense strand to SEQ ID NO: 629186
cuagugagcaaugacucau

SEQ ID NO: 629188 - RNA, 19 nt, Artificial Sequence
  Description of Artificial Sequence: Synthetic oligonucleotide
  Sense strand starting at position 2060 of SEQ ID NO: 585302
auugcucacuaggcagaaa

SEQ ID NO: 629189 - RNA, 19 nt, Artificial Sequence
  Description of Artificial Sequence: Synthetic oligonucleotide
  Antisense strand to SEQ ID NO: 629188
uuucugccuagugagcaau

SEQ ID NO: 629190 - RNA, 19 nt, Artificial Sequence
  Description of Artificial Sequence: Synthetic oligonucleotide
  Sense strand starting at position 2063 of SEQ ID NO: 585302
gcucacuaggcagaaaguu

SEQ ID NO: 629191 - RNA, 19 nt, Artificial Sequence
  Description of Artificial Sequence: Synthetic oligonucleotide
  Antisense strand to SEQ ID NO: 629190
aacuuucugccuagugagc

SEQ ID NO: 629192 - RNA, 19 nt, Artificial Sequence
  Description of Artificial Sequence: Synthetic oligonucleotide
  Sense strand starting at position 2071 of SEQ ID NO: 585302
ggcagaaaguuaguaugaa

SEQ ID NO: 629193 - RNA, 19 nt, Artificial Sequence
  Description of Artificial Sequence: Synthetic oligonucleotide
  Antisense strand to SEQ ID NO: 629192
uucauacuaacuuucugcc

SEQ ID NO: 629194 - RNA, 19 nt, Artificial Sequence
  Description of Artificial Sequence: Synthetic oligonucleotide
  Sense strand starting at position 2079 of SEQ ID NO: 585302
guuaguaugaaaggucuga

SEQ ID NO: 629195 - RNA, 19 nt, Artificial Sequence
  Description of Artificial Sequence: Synthetic oligonucleotide
  Antisense strand to SEQ ID NO: 629194
ucagaccuuucauacuaac

SEQ ID NO: 629196 - RNA, 19 nt, Artificial Sequence
  Description of Artificial Sequence: Synthetic oligonucleotide
  Sense strand starting at position 2098 of SEQ ID NO: 585302
aaauauaaagccugugaug

SEQ ID NO: 629197 - RNA, 19 nt, Artificial Sequence
  Description of Artificial Sequence: Synthetic oligonucleotide
  Antisense strand to SEQ ID NO: 629196
caucacaggcuuuauauuu

SEQ ID NO: 629198 - RNA, 19 nt, Artificial Sequence
  Description of Artificial Sequence: Synthetic oligonucleotide
  Sense strand starting at position 2109 of SEQ ID NO: 585302
cugugaugcacuuaagaug

SEQ ID NO: 629199 - RNA, 19 nt, Artificial Sequence
  Description of Artificial Sequence: Synthetic oligonucleotide
  Antisense strand to SEQ ID NO: 629198
caucuuaagugcaucacag

SEQ ID NO: 629200 - RNA, 19 nt, Artificial Sequence
  Description of Artificial Sequence: Synthetic oligonucleotide
  Sense strand starting at position 2163 of SEQ ID NO: 585302
cagauaagucaugauguuu

SEQ ID NO: 629201 - RNA, 19 nt, Artificial Sequence
  Description of Artificial Sequence: Synthetic oligonucleotide
  Antisense strand to SEQ ID NO: 629200
aaacaucaugacuuaucug

SEQ ID NO: 629202 - RNA, 19 nt, Artificial Sequence
  Description of Artificial Sequence: Synthetic oligonucleotide
  Sense strand starting at position 2205 of SEQ ID NO: 585302
cucugaaggugaucucaaa

SEQ ID NO: 629203 - RNA, 19 nt, Artificial Sequence
  Description of Artificial Sequence: Synthetic oligonucleotide
  Antisense strand to SEQ ID NO: 629202
uuugagaucaccuucagag

SEQ ID NO: 629204 - RNA, 19 nt, Artificial Sequence
  Description of Artificial Sequence: Synthetic oligonucleotide
  Sense strand starting at position 2233 of SEQ ID NO: 585302
ggcccaucuacagggauua

SEQ ID NO: 629205 - RNA, 19 nt, Artificial Sequence
  Description of Artificial Sequence: Synthetic oligonucleotide
  Antisense strand to SEQ ID NO: 629204
uaaucccuguagaugggcc

SEQ ID NO: 629206 - RNA, 19 nt, Artificial Sequence
  Description of Artificial Sequence: Synthetic oligonucleotide
  Sense strand starting at position 2234 of SEQ ID NO: 585302
gcccaucuacagggauuau

SEQ ID NO: 629207 - RNA, 19 nt, Artificial Sequence
  Description of Artificial Sequence: Synthetic oligonucleotide
  Antisense strand to SEQ ID NO: 629206
auaaucccuguagaugggc

SEQ ID NO: 629208 - RNA, 19 nt, Artificial Sequence
  Description of Artificial Sequence: Synthetic oligonucleotide
  Sense strand starting at position 2345 of SEQ ID NO: 585302
gcaugacuuagagggauua

SEQ ID NO: 629209 - RNA, 19 nt, Artificial Sequence
  Description of Artificial Sequence: Synthetic oligonucleotide
  Antisense strand to SEQ ID NO: 629208
uaaucccucuaagucaugc

SEQ ID NO: 629210 - RNA, 19 nt, Artificial Sequence
  Description of Artificial Sequence: Synthetic oligonucleotide
  Sense strand starting at position 2382 of SEQ ID NO: 585302
ucaaaugaggucugagucu

SEQ ID NO: 629211 - RNA, 19 nt, Artificial Sequence
  Description of Artificial Sequence: Synthetic oligonucleotide
  Antisense strand to SEQ ID NO: 629210
agacucagaccucauuuga

SEQ ID NO: 629212 - RNA, 19 nt, Artificial Sequence
  Description of Artificial Sequence: Synthetic oligonucleotide
  Sense strand starting at position 2698 of SEQ ID NO: 585302
gaucaauaggucugaaauu

SEQ ID NO: 629213 - RNA, 19 nt, Artificial Sequence
  Description of Artificial Sequence: Synthetic oligonucleotide
  Antisense strand to SEQ ID NO: 629212
aauuucagaccuauugauc

SEQ ID NO: 629214 - RNA, 19 nt, Artificial Sequence
  Description of Artificial Sequence: Synthetic oligonucleotide
  Sense strand starting at position 2707 of SEQ ID NO: 585302
gucugaaauugcuuuggaa

SEQ ID NO: 629215 - RNA, 19 nt, Artificial Sequence
  Description of Artificial Sequence: Synthetic oligonucleotide
  Antisense strand to SEQ ID NO: 629214
uuccaaagcaauuucagac

SEQ ID NO: 629216 - RNA, 19 nt, Artificial Sequence
  Description of Artificial Sequence: Synthetic oligonucleotide
  Sense strand starting at position 2885 of SEQ ID NO: 585302
uuauaaaugugauccuguu

SEQ ID NO: 629217 - RNA, 19 nt, Artificial Sequence
  Description of Artificial Sequence: Synthetic oligonucleotide
  Antisense strand to SEQ ID NO: 629216
aacaggaucacauuuauaa

SEQ ID NO: 629218 - RNA, 19 nt, Artificial Sequence
  Description of Artificial Sequence: Synthetic oligonucleotide
  Sense strand starting at position 3024 of SEQ ID NO: 585302
aggugucuaguaggauuaa

SEQ ID NO: 629219 - RNA, 19 nt, Artificial Sequence
  Description of Artificial Sequence: Synthetic oligonucleotide
  Antisense strand to SEQ ID NO: 629218
uuaauccuacuagacaccu

SEQ ID NO: 629220 - RNA, 19 nt, Artificial Sequence
  Description of Artificial Sequence: Synthetic oligonucleotide
  Sense strand starting at position 3123 of SEQ ID NO: 585302
ugccauagauaauuagaca

SEQ ID NO: 629221 - RNA, 19 nt, Artificial Sequence
  Description of Artificial Sequence: Synthetic oligonucleotide
  Antisense strand to SEQ ID NO: 629220
ugucuaauuaucuauggca

SEQ ID NO: 629222 - RNA, 19 nt, Artificial Sequence
  Description of Artificial Sequence: Synthetic oligonucleotide
  Sense strand starting at position 3139 of SEQ ID NO: 585302
acaaauacuuccucgaugu

SEQ ID NO: 629223 - RNA, 19 nt, Artificial Sequence
  Description of Artificial Sequence: Synthetic oligonucleotide
  Antisense strand to SEQ ID NO: 629222
acaucgaggaaguauuugu

SEQ ID NO: 629224 - RNA, 19 nt, Artificial Sequence
  Description of Artificial Sequence: Synthetic oligonucleotide
  Sense strand starting at position 3201 of SEQ ID NO: 585302
ucagguuuaauaugagguu

SEQ ID NO: 629225 - RNA, 19 nt, Artificial Sequence
  Description of Artificial Sequence: Synthetic oligonucleotide
  Antisense strand to SEQ ID NO: 629224
aaccucauauuaaaccuga

SEQ ID NO: 629226 - RNA, 19 nt, Artificial Sequence
  Description of Artificial Sequence: Synthetic oligonucleotide
  Sense strand starting at position 3267 of SEQ ID NO: 585302
ccuaaucuguuaguaauua

SEQ ID NO: 629227 - RNA, 19 nt, Artificial Sequence
  Description of Artificial Sequence: Synthetic oligonucleotide
  Antisense strand to SEQ ID NO: 629226
uaauuacuaacagauuagg

SEQ ID NO: 629228 - RNA, 19 nt, Artificial Sequence
  Description of Artificial Sequence: Synthetic oligonucleotide
  Sense strand starting at position 3374 of SEQ ID NO: 585302
ugugaccuucucuaugagu

SEQ ID NO: 629229 - RNA, 19 nt, Artificial Sequence
  Description of Artificial Sequence: Synthetic oligonucleotide
  Antisense strand to SEQ ID NO: 629228
acucauagagaaggucaca

SEQ ID NO: 629230 - RNA, 19 nt, Artificial Sequence
  Description of Artificial Sequence: Synthetic oligonucleotide
  Sense strand starting at position 3376 of SEQ ID NO: 585302
ugaccuucucuaugaguau

SEQ ID NO: 629231 - RNA, 19 nt, Artificial Sequence
  Description of Artificial Sequence: Synthetic oligonucleotide
  Antisense strand to SEQ ID NO: 629230
auacucauagagaagguca

SEQ ID NO: 629232 - RNA, 19 nt, Artificial Sequence
  Description of Artificial Sequence: Synthetic oligonucleotide
  Sense strand starting at position 3819 of SEQ ID NO: 585302
gagguaucucagggaggug

SEQ ID NO: 629233 - RNA, 19 nt, Artificial Sequence
  Description of Artificial Sequence: Synthetic oligonucleotide
  Antisense strand to SEQ ID NO: 629232
caccucccugagauaccuc

SEQ ID NO: 629234 - RNA, 19 nt, Artificial Sequence
  Description of Artificial Sequence: Synthetic oligonucleotide
  Sense strand starting at position 8 of SEQ ID NO: 585303
ccgagcauucuugcuugua

SEQ ID NO: 629235 - RNA, 19 nt, Artificial Sequence
  Description of Artificial Sequence: Synthetic oligonucleotide
  Antisense strand to SEQ ID NO: 629234
uacaagcaagaaugcucgg

SEQ ID NO: 629236 - RNA, 19 nt, Artificial Sequence
  Description of Artificial Sequence: Synthetic oligonucleotide
  Sense strand starting at position 218 of SEQ ID NO: 585303
ccacauugugccuaaugaa

SEQ ID NO: 629237 - RNA, 19 nt, Artificial Sequence
  Description of Artificial Sequence: Synthetic oligonucleotide
  Antisense strand to SEQ ID NO: 629236
uucauuaggcacaaugugg

SEQ ID NO: 629238 - RNA, 19 nt, Artificial Sequence
  Description of Artificial Sequence: Synthetic oligonucleotide
  Sense strand starting at position 323 of SEQ ID NO: 585303
ugaaacuuccacugccgaa

SEQ ID NO: 629239 - RNA, 19 nt, Artificial Sequence
  Description of Artificial Sequence: Synthetic oligonucleotide
  Antisense strand to SEQ ID NO: 629238
uucggcaguggaaguuuca

SEQ ID NO: 629240 - RNA, 19 nt, Artificial Sequence
  Description of Artificial Sequence: Synthetic oligonucleotide
  Sense strand starting at position 366 of SEQ ID NO: 585303
gguuaauaaaguugugaaa

SEQ ID NO: 629241 - RNA, 19 nt, Artificial Sequence
  Description of Artificial Sequence: Synthetic oligonucleotide
  Antisense strand to SEQ ID NO: 629240
uuucacaacuuuauuaacc

SEQ ID NO: 629242 - RNA, 19 nt, Artificial Sequence
  Description of Artificial Sequence: Synthetic oligonucleotide
  Sense strand starting at position 1070 of SEQ ID NO: 585303
gguugauaauuugagaaua

SEQ ID NO: 629243 - RNA, 19 nt, Artificial Sequence
  Description of Artificial Sequence: Synthetic oligonucleotide
  Antisense strand to SEQ ID NO: 629242
uauucucaaauuaucaacc

SEQ ID NO: 629244 - RNA, 19 nt, Artificial Sequence
  Description of Artificial Sequence: Synthetic oligonucleotide
  Sense strand starting at position 1170 of SEQ ID NO: 585303
gaagcuauaucuguaauag

SEQ ID NO: 629245 - RNA, 19 nt, Artificial Sequence
  Description of Artificial Sequence: Synthetic oligonucleotide
  Antisense strand to SEQ ID NO: 629244
cuauuacagauauagcuuc

SEQ ID NO: 629246 - RNA, 19 nt, Artificial Sequence
  Description of Artificial Sequence: Synthetic oligonucleotide
  Sense strand starting at position 1261 of SEQ ID NO: 585303
uuacuugugaggugacaca

SEQ ID NO: 629247 - RNA, 19 nt, Artificial Sequence
  Description of Artificial Sequence: Synthetic oligonucleotide
  Antisense strand to SEQ ID NO: 629246
ugugucaccucacaaguaa

SEQ ID NO: 629248 - RNA, 19 nt, Artificial Sequence
  Description of Artificial Sequence: Synthetic oligonucleotide
  Sense strand starting at position 1298 of SEQ ID NO: 585303
aagugaggaccauguggua

SEQ ID NO: 629249 - RNA, 19 nt, Artificial Sequence
  Description of Artificial Sequence: Synthetic oligonucleotide
  Antisense strand to SEQ ID NO: 629248
uaccacaugguccucacuu

SEQ ID NO: 629250 - RNA, 19 nt, Artificial Sequence
  Description of Artificial Sequence: Synthetic oligonucleotide
  Sense strand starting at position 1385 of SEQ ID NO: 585303
guggaaaugugaguaaguc

SEQ ID NO: 629251 - RNA, 19 nt, Artificial Sequence
  Description of Artificial Sequence: Synthetic oligonucleotide
  Antisense strand to SEQ ID NO: 629250
gacuuacucacauuuccac

SEQ ID NO: 629252 - RNA, 19 nt, Artificial Sequence
  Description of Artificial Sequence: Synthetic oligonucleotide
  Sense strand starting at position 1386 of SEQ ID NO: 585303
uggaaaugugaguaagucu

SEQ ID NO: 629253 - RNA, 19 nt, Artificial Sequence
  Description of Artificial Sequence: Synthetic oligonucleotide
  Antisense strand to SEQ ID NO: 629252
agacuuacucacauuucca

SEQ ID NO: 629254 - RNA, 19 nt, Artificial Sequence
  Description of Artificial Sequence: Synthetic oligonucleotide
  Sense strand starting at position 1624 of SEQ ID NO: 585303
gccguagucacugaauaua

SEQ ID NO: 629255 - RNA, 19 nt, Artificial Sequence
  Description of Artificial Sequence: Synthetic oligonucleotide
  Antisense strand to SEQ ID NO: 629254
uauauucagugacuacggc

SEQ ID NO: 629256 - RNA, 19 nt, Artificial Sequence
  Description of Artificial Sequence: Synthetic oligonucleotide
  Sense strand starting at position 1659 of SEQ ID NO: 585303
guccuuagugaacacaaca

SEQ ID NO: 629257 - RNA, 19 nt, Artificial Sequence
  Description of Artificial Sequence: Synthetic oligonucleotide
  Antisense strand to SEQ ID NO: 629256
uguuguguucacuaaggac

SEQ ID NO: 629258 - RNA, 19 nt, Artificial Sequence
  Description of Artificial Sequence: Synthetic oligonucleotide
  Sense strand starting at position 1710 of SEQ ID NO: 585303
ugguuuccugaaggaggaa

SEQ ID NO: 629259 - RNA, 19 nt, Artificial Sequence
  Description of Artificial Sequence: Synthetic oligonucleotide
  Antisense strand to SEQ ID NO: 629258
uuccuccuucaggaaacca

SEQ ID NO: 629260 - RNA, 19 nt, Artificial Sequence
  Description of Artificial Sequence: Synthetic oligonucleotide
  Sense strand starting at position 2094 of SEQ ID NO: 585303
cucaguuacuaguugaaga

SEQ ID NO: 629261 - RNA, 19 nt, Artificial Sequence
  Description of Artificial Sequence: Synthetic oligonucleotide
  Antisense strand to SEQ ID NO: 629260
ucuucaacuaguaacugag

SEQ ID NO: 629262 - RNA, 19 nt, Artificial Sequence
  Description of Artificial Sequence: Synthetic oligonucleotide
  Sense strand starting at position 2095 of SEQ ID NO: 585303
ucaguuacuaguugaagag

SEQ ID NO: 629263 - RNA, 19 nt, Artificial Sequence
  Description of Artificial Sequence: Synthetic oligonucleotide
  Antisense strand to SEQ ID NO: 629262
cucuucaacuaguaacuga

SEQ ID NO: 629264 - RNA, 19 nt, Artificial Sequence
  Description of Artificial Sequence: Synthetic oligonucleotide
  Sense strand starting at position 2096 of SEQ ID NO: 585303
caguuacuaguugaagagu

SEQ ID NO: 629265 - RNA, 19 nt, Artificial Sequence
  Description of Artificial Sequence: Synthetic oligonucleotide
  Antisense strand to SEQ ID NO: 629264
acucuucaacuaguaacug

SEQ ID NO: 629266 - RNA, 19 nt, Artificial Sequence
  Description of Artificial Sequence: Synthetic oligonucleotide
  Sense strand starting at position 2104 of SEQ ID NO: 585303
aguugaagaguuuguauua

SEQ ID NO: 629267 - RNA, 19 nt, Artificial Sequence
  Description of Artificial Sequence: Synthetic oligonucleotide
  Antisense strand to SEQ ID NO: 629266
uaauacaaacucuucaacu

SEQ ID NO: 629268 - RNA, 19 nt, Artificial Sequence
  Description of Artificial Sequence: Synthetic oligonucleotide
  Sense strand starting at position 2105 of SEQ ID NO: 585303
guugaagaguuuguauuaa

SEQ ID NO: 629269 - RNA, 19 nt, Artificial Sequence
  Description of Artificial Sequence: Synthetic oligonucleotide
  Antisense strand to SEQ ID NO: 629268
uuaauacaaacucuucaac

SEQ ID NO: 629270 - RNA, 19 nt, Artificial Sequence
  Description of Artificial Sequence: Synthetic oligonucleotide
  Sense strand starting at position 2186 of SEQ ID NO: 585303
ggaauuguucuaugaauaa

SEQ ID NO: 629271 - RNA, 19 nt, Artificial Sequence
  Description of Artificial Sequence: Synthetic oligonucleotide
  Antisense strand to SEQ ID NO: 629270
uuauucauagaacaauucc

SEQ ID NO: 629272 - RNA, 19 nt, Artificial Sequence
  Description of Artificial Sequence: Synthetic oligonucleotide
  Sense strand starting at position 2241 of SEQ ID NO: 585303
gcaugucugccagucgcaa

SEQ ID NO: 629273 - RNA, 19 nt, Artificial Sequence
  Description of Artificial Sequence: Synthetic oligonucleotide
  Antisense strand to SEQ ID NO: 629272
uugcgacuggcagacaugc

SEQ ID NO: 629274 - RNA, 19 nt, Artificial Sequence
  Description of Artificial Sequence: Synthetic oligonucleotide
  Sense strand starting at position 2668 of SEQ ID NO: 585303
gcuuacaaccuccaggaau

SEQ ID NO: 629275 - RNA, 19 nt, Artificial Sequence
  Description of Artificial Sequence: Synthetic oligonucleotide
  Antisense strand to SEQ ID NO: 629274
auuccuggagguuguaagc

SEQ ID NO: 629276 - RNA, 19 nt, Artificial Sequence
  Description of Artificial Sequence: Synthetic oligonucleotide
  Sense strand starting at position 2890 of SEQ ID NO: 585303
cuggguaaguucuucucaa

SEQ ID NO: 629277 - RNA, 19 nt, Artificial Sequence
  Description of Artificial Sequence: Synthetic oligonucleotide
  Antisense strand to SEQ ID NO: 629276
uugagaagaacuuacccag

SEQ ID NO: 629278 - RNA, 19 nt, Artificial Sequence
  Description of Artificial Sequence: Synthetic oligonucleotide
  Sense strand starting at position 2891 of SEQ ID NO: 585303
uggguaaguucuucucaag

SEQ ID NO: 629279 - RNA, 19 nt, Artificial Sequence
  Description of Artificial Sequence: Synthetic oligonucleotide
  Antisense strand to SEQ ID NO: 629278
cuugagaagaacuuaccca

SEQ ID NO: 629280 - RNA, 19 nt, Artificial Sequence
  Description of Artificial Sequence: Synthetic oligonucleotide
  Sense strand starting at position 2974 of SEQ ID NO: 585303
ugucuauaguaacuauaug

SEQ ID NO: 629281 - RNA, 19 nt, Artificial Sequence
  Description of Artificial Sequence: Synthetic oligonucleotide
  Antisense strand to SEQ ID NO: 629280
cauauaguuacuauagaca

SEQ ID NO: 629282 - RNA, 19 nt, Artificial Sequence
  Description of Artificial Sequence: Synthetic oligonucleotide
  Sense strand starting at position 3011 of SEQ ID NO: 585303
cuuugcauugaguaauccu

SEQ ID NO: 629283 - RNA, 19 nt, Artificial Sequence
  Description of Artificial Sequence: Synthetic oligonucleotide
  Antisense strand to SEQ ID NO: 629282
aggauuacucaaugcaaag

SEQ ID NO: 629284 - RNA, 19 nt, Artificial Sequence
  Description of Artificial Sequence: Synthetic oligonucleotide
  Sense strand starting at position 3018 of SEQ ID NO: 585303
uugaguaauccuuauguuc

SEQ ID NO: 629285 - RNA, 19 nt, Artificial Sequence
  Description of Artificial Sequence: Synthetic oligonucleotide
  Antisense strand to SEQ ID NO: 629284
gaacauaaggauuacucaa

SEQ ID NO: 629286 - RNA, 19 nt, Artificial Sequence
  Description of Artificial Sequence: Synthetic oligonucleotide
  Sense strand starting at position 3078 of SEQ ID NO: 585303
ggacauugauuacauuuaa

SEQ ID NO: 629287 - RNA, 19 nt, Artificial Sequence
  Description of Artificial Sequence: Synthetic oligonucleotide
  Antisense strand to SEQ ID NO: 629286
uuaaauguaaucaaugucc

SEQ ID NO: 629288 - RNA, 19 nt, Artificial Sequence
  Description of Artificial Sequence: Synthetic oligonucleotide
  Sense strand starting at position 3105 of SEQ ID NO: 585303
uggcucaauuacucuaaga

SEQ ID NO: 629289 - RNA, 19 nt, Artificial Sequence
  Description of Artificial Sequence: Synthetic oligonucleotide
  Antisense strand to SEQ ID NO: 629288
ucuuagaguaauugagcca

SEQ ID NO: 629290 - RNA, 19 nt, Artificial Sequence
  Description of Artificial Sequence: Synthetic oligonucleotide
  Sense strand starting at position 3255 of SEQ ID NO: 585303
uccaaauauuugcaaggga

SEQ ID NO: 629291 - RNA, 19 nt, Artificial Sequence
  Description of Artificial Sequence: Synthetic oligonucleotide
  Antisense strand to SEQ ID NO: 629290
ucccuugcaaauauuugga

SEQ ID NO: 629292 - RNA, 19 nt, Artificial Sequence
  Description of Artificial Sequence: Synthetic oligonucleotide
  Sense strand starting at position 3270 of SEQ ID NO: 585303
gggacuagagauugagcua

SEQ ID NO: 629293 - RNA, 19 nt, Artificial Sequence
  Description of Artificial Sequence: Synthetic oligonucleotide
  Antisense strand to SEQ ID NO: 629292
uagcucaaucucuaguccc

SEQ ID NO: 629294 - RNA, 19 nt, Artificial Sequence
  Description of Artificial Sequence: Synthetic oligonucleotide
  Sense strand starting at position 3287 of SEQ ID NO: 585303
uaaaguuaguccuuagagg

SEQ ID NO: 629295 - RNA, 19 nt, Artificial Sequence
  Description of Artificial Sequence: Synthetic oligonucleotide
  Antisense strand to SEQ ID NO: 629294
ccucuaaggacuaacuuua

SEQ ID NO: 629296 - RNA, 19 nt, Artificial Sequence
  Description of Artificial Sequence: Synthetic oligonucleotide
  Sense strand starting at position 3302 of SEQ ID NO: 585303
gagggaaacuuauuauguu

SEQ ID NO: 629297 - RNA, 19 nt, Artificial Sequence
  Description of Artificial Sequence: Synthetic oligonucleotide
  Antisense strand to SEQ ID NO: 629296
aacauaauaaguuucccuc

SEQ ID NO: 629298 - RNA, 19 nt, Artificial Sequence
  Description of Artificial Sequence: Synthetic oligonucleotide
  Sense strand starting at position 3346 of SEQ ID NO: 585303
ugugauagaaaccguaagu

SEQ ID NO: 629299 - RNA, 19 nt, Artificial Sequence
  Description of Artificial Sequence: Synthetic oligonucleotide
  Antisense strand to SEQ ID NO: 629298
acuuacgguuucuaucaca

SEQ ID NO: 629300 - RNA, 19 nt, Artificial Sequence
  Description of Artificial Sequence: Synthetic oligonucleotide
  Sense strand starting at position 3412 of SEQ ID NO: 585303
cugagauucucagcacuau

SEQ ID NO: 629301 - RNA, 19 nt, Artificial Sequence
  Description of Artificial Sequence: Synthetic oligonucleotide
  Antisense strand to SEQ ID NO: 629300
auagugcugagaaucucag

SEQ ID NO: 629302 - RNA, 19 nt, Artificial Sequence
  Description of Artificial Sequence: Synthetic oligonucleotide
  Sense strand starting at position 3413 of SEQ ID NO: 585303
ugagauucucagcacuaug

SEQ ID NO: 629303 - RNA, 19 nt, Artificial Sequence
  Description of Artificial Sequence: Synthetic oligonucleotide
  Antisense strand to SEQ ID NO: 629302
cauagugcugagaaucuca

SEQ ID NO: 629304 - RNA, 19 nt, Artificial Sequence
  Description of Artificial Sequence: Synthetic oligonucleotide
  Sense strand starting at position 3500 of SEQ ID NO: 585303
gagagcugucuggauguaa

SEQ ID NO: 629305 - RNA, 19 nt, Artificial Sequence
  Description of Artificial Sequence: Synthetic oligonucleotide
  Antisense strand to SEQ ID NO: 629304
uuacauccagacagcucuc

SEQ ID NO: 629306 - RNA, 19 nt, Artificial Sequence
  Description of Artificial Sequence: Synthetic oligonucleotide
  Sense strand starting at position 3504 of SEQ ID NO: 585303
gcugucuggauguaauuaa

SEQ ID NO: 629307 - RNA, 19 nt, Artificial Sequence
  Description of Artificial Sequence: Synthetic oligonucleotide
  Antisense strand to SEQ ID NO: 629306
uuaauuacauccagacagc

SEQ ID NO: 629308 - RNA, 19 nt, Artificial Sequence
  Description of Artificial Sequence: Synthetic oligonucleotide
  Sense strand starting at position 3572 of SEQ ID NO: 585303
gguucuccuguuggagaua

SEQ ID NO: 629309 - RNA, 19 nt, Artificial Sequence
  Description of Artificial Sequence: Synthetic oligonucleotide
  Antisense strand to SEQ ID NO: 629308
uaucuccaacaggagaacc

SEQ ID NO: 629310 - RNA, 19 nt, Artificial Sequence
  Description of Artificial Sequence: Synthetic oligonucleotide
  Sense strand starting at position 3735 of SEQ ID NO: 585303
cucucuugggagugauuac

SEQ ID NO: 629311 - RNA, 19 nt, Artificial Sequence
  Description of Artificial Sequence: Synthetic oligonucleotide
  Antisense strand to SEQ ID NO: 629310
guaaucacucccaagagag

SEQ ID NO: 629312 - RNA, 19 nt, Artificial Sequence
  Description of Artificial Sequence: Synthetic oligonucleotide
  Sense strand starting at position 3736 of SEQ ID NO: 585303
ucucuugggagugauuacu

SEQ ID NO: 629313 - RNA, 19 nt, Artificial Sequence
  Description of Artificial Sequence: Synthetic oligonucleotide
  Antisense strand to SEQ ID NO: 629312
aguaaucacucccaagaga

SEQ ID NO: 629314 - RNA, 19 nt, Artificial Sequence
  Description of Artificial Sequence: Synthetic oligonucleotide
  Sense strand starting at position 90 of SEQ ID NO: 585304
gcugaauucugacuuguga

SEQ ID NO: 629315 - RNA, 19 nt, Artificial Sequence
  Description of Artificial Sequence: Synthetic oligonucleotide
  Antisense strand to SEQ ID NO: 629314
ucacaagucagaauucagc

SEQ ID NO: 629316 - RNA, 19 nt, Artificial Sequence
  Description of Artificial Sequence: Synthetic oligonucleotide
  Sense strand starting at position 171 of SEQ ID NO: 585304
cugauuguauugguauaaa

SEQ ID NO: 629317 - RNA, 19 nt, Artificial Sequence
  Description of Artificial Sequence: Synthetic oligonucleotide
  Antisense strand to SEQ ID NO: 629316
uuuauaccaauacaaucag

SEQ ID NO: 629318 - RNA, 19 nt, Artificial Sequence
  Description of Artificial Sequence: Synthetic oligonucleotide
  Sense strand starting at position 771 of SEQ ID NO: 585304
gguuaauaagguugugaaa

SEQ ID NO: 629319 - RNA, 19 nt, Artificial Sequence
  Description of Artificial Sequence: Synthetic oligonucleotide
  Antisense strand to SEQ ID NO: 629318
uuucacaaccuuauuaacc

SEQ ID NO: 629320 - RNA, 19 nt, Artificial Sequence
  Description of Artificial Sequence: Synthetic oligonucleotide
  Sense strand starting at position 861 of SEQ ID NO: 585304
ugcccaugucuguaaagga

SEQ ID NO: 629321 - RNA, 19 nt, Artificial Sequence
  Description of Artificial Sequence: Synthetic oligonucleotide
  Antisense strand to SEQ ID NO: 629320
uccuuuacagacaugggca

SEQ ID NO: 629322 - RNA, 19 nt, Artificial Sequence
  Description of Artificial Sequence: Synthetic oligonucleotide
  Sense strand starting at position 1055 of SEQ ID NO: 585304
gguugacaauuugagaaua

SEQ ID NO: 629323 - RNA, 19 nt, Artificial Sequence
  Description of Artificial Sequence: Synthetic oligonucleotide
  Antisense strand to SEQ ID NO: 629322
uauucucaaauugucaacc

SEQ ID NO: 629324 - RNA, 19 nt, Artificial Sequence
  Description of Artificial Sequence: Synthetic oligonucleotide
  Sense strand starting at position 1100 of SEQ ID NO: 585304
aucauaaaguucucaguuu

SEQ ID NO: 629325 - RNA, 19 nt, Artificial Sequence
  Description of Artificial Sequence: Synthetic oligonucleotide
  Antisense strand to SEQ ID NO: 629324
aaacugagaacuuuaugau

SEQ ID NO: 629326 - RNA, 19 nt, Artificial Sequence
  Description of Artificial Sequence: Synthetic oligonucleotide
  Sense strand starting at position 1245 of SEQ ID NO: 585304
gaucauaagcgaggugaca

SEQ ID NO: 629327 - RNA, 19 nt, Artificial Sequence
  Description of Artificial Sequence: Synthetic oligonucleotide
  Antisense strand to SEQ ID NO: 629326
ugucaccucgcuuaugauc

SEQ ID NO: 629328 - RNA, 19 nt, Artificial Sequence
  Description of Artificial Sequence: Synthetic oligonucleotide
  Sense strand starting at position 1247 of SEQ ID NO: 585304
ucauaagcgaggugacaua

SEQ ID NO: 629329 - RNA, 19 nt, Artificial Sequence
  Description of Artificial Sequence: Synthetic oligonucleotide
  Antisense strand to SEQ ID NO: 629328
uaugucaccucgcuuauga

SEQ ID NO: 629330 - RNA, 19 nt, Artificial Sequence
  Description of Artificial Sequence: Synthetic oligonucleotide
  Sense strand starting at position 1256 of SEQ ID NO: 585304
aggugacauauaugaggua

SEQ ID NO: 629331 - RNA, 19 nt, Artificial Sequence
  Description of Artificial Sequence: Synthetic oligonucleotide
  Antisense strand to SEQ ID NO: 629330
uaccucauauaugucaccu

SEQ ID NO: 629332 - RNA, 19 nt, Artificial Sequence
  Description of Artificial Sequence: Synthetic oligonucleotide
  Sense strand starting at position 1278 of SEQ ID NO: 585304
gagaguaaguaccacauuu

SEQ ID NO: 629333 - RNA, 19 nt, Artificial Sequence
  Description of Artificial Sequence: Synthetic oligonucleotide
  Antisense strand to SEQ ID NO: 629332
aaaugugguacuuacucuc

SEQ ID NO: 629334 - RNA, 19 nt, Artificial Sequence
  Description of Artificial Sequence: Synthetic oligonucleotide
  Sense strand starting at position 1289 of SEQ ID NO: 585304
ccacauuuaccacguggua

SEQ ID NO: 629335 - RNA, 19 nt, Artificial Sequence
  Description of Artificial Sequence: Synthetic oligonucleotide
  Antisense strand to SEQ ID NO: 629334
uaccacgugguaaaugugg

SEQ ID NO: 629336 - RNA, 19 nt, Artificial Sequence
  Description of Artificial Sequence: Synthetic oligonucleotide
  Sense strand starting at position 1363 of SEQ ID NO: 585304
ugccaauucccauguggaa

SEQ ID NO: 629337 - RNA, 19 nt, Artificial Sequence
  Description of Artificial Sequence: Synthetic oligonucleotide
  Antisense strand to SEQ ID NO: 629336
uuccacaugggaauuggca

SEQ ID NO: 629338 - RNA, 19 nt, Artificial Sequence
  Description of Artificial Sequence: Synthetic oligonucleotide
  Sense strand starting at position 1414 of SEQ ID NO: 585304
ucuuuauaucuauagagug

SEQ ID NO: 629339 - RNA, 19 nt, Artificial Sequence
  Description of Artificial Sequence: Synthetic oligonucleotide
  Antisense strand to SEQ ID NO: 629338
cacucuauagauauaaaga

SEQ ID NO: 629340 - RNA, 19 nt, Artificial Sequence
  Description of Artificial Sequence: Synthetic oligonucleotide
  Sense strand starting at position 1419 of SEQ ID NO: 585304
auaucuauagaguguacau

SEQ ID NO: 629341 - RNA, 19 nt, Artificial Sequence
  Description of Artificial Sequence: Synthetic oligonucleotide
  Antisense strand to SEQ ID NO: 629340
auguacacucuauagauau

SEQ ID NO: 629342 - RNA, 19 nt, Artificial Sequence
  Description of Artificial Sequence: Synthetic oligonucleotide
  Sense strand starting at position 1503 of SEQ ID NO: 585304
cagagaaauuugggaguaa

SEQ ID NO: 629343 - RNA, 19 nt, Artificial Sequence
  Description of Artificial Sequence: Synthetic oligonucleotide
  Antisense strand to SEQ ID NO: 629342
uuacucccaaauuucucug

SEQ ID NO: 629344 - RNA, 19 nt, Artificial Sequence
  Description of Artificial Sequence: Synthetic oligonucleotide
  Sense strand starting at position 1504 of SEQ ID NO: 585304
agagaaauuugggaguaac

SEQ ID NO: 629345 - RNA, 19 nt, Artificial Sequence
  Description of Artificial Sequence: Synthetic oligonucleotide
  Antisense strand to SEQ ID NO: 629344
guuacucccaaauuucucu

SEQ ID NO: 629346 - RNA, 19 nt, Artificial Sequence
  Description of Artificial Sequence: Synthetic oligonucleotide
  Sense strand starting at position 1561 of SEQ ID NO: 585304
auggaaacaucccuagucu

SEQ ID NO: 629347 - RNA, 19 nt, Artificial Sequence
  Description of Artificial Sequence: Synthetic oligonucleotide
  Antisense strand to SEQ ID NO: 629346
agacuagggauguuuccau

SEQ ID NO: 629348 - RNA, 19 nt, Artificial Sequence
  Description of Artificial Sequence: Synthetic oligonucleotide
  Sense strand starting at position 1562 of SEQ ID NO: 585304
uggaaacaucccuagucuu

SEQ ID NO: 629349 - RNA, 19 nt, Artificial Sequence
  Description of Artificial Sequence: Synthetic oligonucleotide
  Antisense strand to SEQ ID NO: 629348
aagacuagggauguuucca

SEQ ID NO: 629350 - RNA, 19 nt, Artificial Sequence
  Description of Artificial Sequence: Synthetic oligonucleotide
  Sense strand starting at position 1616 of SEQ ID NO: 585304
aggcuauagucucuggaua

SEQ ID NO: 629351 - RNA, 19 nt, Artificial Sequence
  Description of Artificial Sequence: Synthetic oligonucleotide
  Antisense strand to SEQ ID NO: 629350
uauccagagacuauagccu

SEQ ID NO: 629352 - RNA, 19 nt, Artificial Sequence
  Description of Artificial Sequence: Synthetic oligonucleotide
  Sense strand starting at position 1645 of SEQ ID NO: 585304
agaacaacguccuugguaa

SEQ ID NO: 629353 - RNA, 19 nt, Artificial Sequence
  Description of Artificial Sequence: Synthetic oligonucleotide
  Antisense strand to SEQ ID NO: 629352
uuaccaaggacguuguucu

SEQ ID NO: 629354 - RNA, 19 nt, Artificial Sequence
  Description of Artificial Sequence: Synthetic oligonucleotide
  Sense strand starting at position 1646 of SEQ ID NO: 585304
gaacaacguccuugguaaa

SEQ ID NO: 629355 - RNA, 19 nt, Artificial Sequence
  Description of Artificial Sequence: Synthetic oligonucleotide
  Antisense strand to SEQ ID NO: 629354
uuuaccaaggacguuguuc

SEQ ID NO: 629356 - RNA, 19 nt, Artificial Sequence
  Description of Artificial Sequence: Synthetic oligonucleotide
  Sense strand starting at position 1659 of SEQ ID NO: 585304
gguaaacuccaauagcaca

SEQ ID NO: 629357 - RNA, 19 nt, Artificial Sequence
  Description of Artificial Sequence: Synthetic oligonucleotide
  Antisense strand to SEQ ID NO: 629356
ugugcuauuggaguuuacc

SEQ ID NO: 629358 - RNA, 19 nt, Artificial Sequence
  Description of Artificial Sequence: Synthetic oligonucleotide
  Sense strand starting at position 1763 of SEQ ID NO: 585304
uugggaaauuucuacuauu

SEQ ID NO: 629359 - RNA, 19 nt, Artificial Sequence
  Description of Artificial Sequence: Synthetic oligonucleotide
  Antisense strand to SEQ ID NO: 629358
aauaguagaaauuucccaa

SEQ ID NO: 629360 - RNA, 19 nt, Artificial Sequence
  Description of Artificial Sequence: Synthetic oligonucleotide
  Sense strand starting at position 1993 of SEQ ID NO: 585304
uugugaggaccucgagaca

SEQ ID NO: 629361 - RNA, 19 nt, Artificial Sequence
  Description of Artificial Sequence: Synthetic oligonucleotide
  Antisense strand to SEQ ID NO: 629360
ugucucgagguccucacaa

SEQ ID NO: 629362 - RNA, 19 nt, Artificial Sequence
  Description of Artificial Sequence: Synthetic oligonucleotide
  Sense strand starting at position 2099 of SEQ ID NO: 585304
aguugcagaguuuauauua

SEQ ID NO: 629363 - RNA, 19 nt, Artificial Sequence
  Description of Artificial Sequence: Synthetic oligonucleotide
  Antisense strand to SEQ ID NO: 629362
uaauauaaacucugcaacu

SEQ ID NO: 629364 - RNA, 19 nt, Artificial Sequence
  Description of Artificial Sequence: Synthetic oligonucleotide
  Sense strand starting at position 2113 of SEQ ID NO: 585304
uauuaagagcccuggaaga

SEQ ID NO: 629365 - RNA, 19 nt, Artificial Sequence
  Description of Artificial Sequence: Synthetic oligonucleotide
  Antisense strand to SEQ ID NO: 629364
ucuuccagggcucuuaaua

SEQ ID NO: 629366 - RNA, 19 nt, Artificial Sequence
  Description of Artificial Sequence: Synthetic oligonucleotide
  Sense strand starting at position 2236 of SEQ ID NO: 585304
ugugcaugucugcuagugu

SEQ ID NO: 629367 - RNA, 19 nt, Artificial Sequence
  Description of Artificial Sequence: Synthetic oligonucleotide
  Antisense strand to SEQ ID NO: 629366
acacuagcagacaugcaca

SEQ ID NO: 629368 - RNA, 19 nt, Artificial Sequence
  Description of Artificial Sequence: Synthetic oligonucleotide
  Sense strand starting at position 2239 of SEQ ID NO: 585304
gcaugucugcuagugucaa

SEQ ID NO: 629369 - RNA, 19 nt, Artificial Sequence
  Description of Artificial Sequence: Synthetic oligonucleotide
  Antisense strand to SEQ ID NO: 629368
uugacacuagcagacaugc

SEQ ID NO: 629370 - RNA, 19 nt, Artificial Sequence
  Description of Artificial Sequence: Synthetic oligonucleotide
  Sense strand starting at position 2290 of SEQ ID NO: 585304
uagguaaggucaucaauaa

SEQ ID NO: 629371 - RNA, 19 nt, Artificial Sequence
  Description of Artificial Sequence: Synthetic oligonucleotide
  Antisense strand to SEQ ID NO: 629370
uuauugaugaccuuaccua

SEQ ID NO: 629372 - RNA, 19 nt, Artificial Sequence
  Description of Artificial Sequence: Synthetic oligonucleotide
  Sense strand starting at position 2331 of SEQ ID NO: 585304
uggguuacauucuccagga

SEQ ID NO: 629373 - RNA, 19 nt, Artificial Sequence
  Description of Artificial Sequence: Synthetic oligonucleotide
  Antisense strand to SEQ ID NO: 629372
uccuggagaauguaaccca

SEQ ID NO: 629374 - RNA, 19 nt, Artificial Sequence
  Description of Artificial Sequence: Synthetic oligonucleotide
  Sense strand starting at position 2413 of SEQ ID NO: 585304
guauguggguuagcuauuu

SEQ ID NO: 629375 - RNA, 19 nt, Artificial Sequence
  Description of Artificial Sequence: Synthetic oligonucleotide
  Antisense strand to SEQ ID NO: 629374
aaauagcuaacccacauac

SEQ ID NO: 629376 - RNA, 19 nt, Artificial Sequence
  Description of Artificial Sequence: Synthetic oligonucleotide
  Sense strand starting at position 2442 of SEQ ID NO: 585304
uuccauaguguauauggua

SEQ ID NO: 629377 - RNA, 19 nt, Artificial Sequence
  Description of Artificial Sequence: Synthetic oligonucleotide
  Antisense strand to SEQ ID NO: 629376
uaccauauacacuauggaa

SEQ ID NO: 629378 - RNA, 19 nt, Artificial Sequence
  Description of Artificial Sequence: Synthetic oligonucleotide
  Sense strand starting at position 3112 of SEQ ID NO: 585304
auuuaagaaugucaaguca

SEQ ID NO: 629379 - RNA, 19 nt, Artificial Sequence
  Description of Artificial Sequence: Synthetic oligonucleotide
  Antisense strand to SEQ ID NO: 629378
ugacuugacauucuuaaau

SEQ ID NO: 629380 - RNA, 19 nt, Artificial Sequence
  Description of Artificial Sequence: Synthetic oligonucleotide
  Sense strand starting at position 3237 of SEQ ID NO: 585304
cagauauugcaagggacua

SEQ ID NO: 629381 - RNA, 19 nt, Artificial Sequence
  Description of Artificial Sequence: Synthetic oligonucleotide
  Antisense strand to SEQ ID NO: 629380
uagucccuugcaauaucug

SEQ ID NO: 629382 - RNA, 19 nt, Artificial Sequence
  Description of Artificial Sequence: Synthetic oligonucleotide
  Sense strand starting at position 3272 of SEQ ID NO: 585304
guaguaaucacagggaaac

SEQ ID NO: 629383 - RNA, 19 nt, Artificial Sequence
  Description of Artificial Sequence: Synthetic oligonucleotide
  Antisense strand to SEQ ID NO: 629382
guuucccugugauuacuac

SEQ ID NO: 629384 - RNA, 19 nt, Artificial Sequence
  Description of Artificial Sequence: Synthetic oligonucleotide
  Sense strand starting at position 3337 of SEQ ID NO: 585304
caaguuaguaauggagguu

SEQ ID NO: 629385 - RNA, 19 nt, Artificial Sequence
  Description of Artificial Sequence: Synthetic oligonucleotide
  Antisense strand to SEQ ID NO: 629384
aaccuccauuacuaacuug

SEQ ID NO: 629386 - RNA, 19 nt, Artificial Sequence
  Description of Artificial Sequence: Synthetic oligonucleotide
  Sense strand starting at position 3338 of SEQ ID NO: 585304
aaguuaguaauggagguuu

SEQ ID NO: 629387 - RNA, 19 nt, Artificial Sequence
  Description of Artificial Sequence: Synthetic oligonucleotide
  Antisense strand to SEQ ID NO: 629386
aaaccuccauuacuaacuu

SEQ ID NO: 629388 - RNA, 19 nt, Artificial Sequence
  Description of Artificial Sequence: Synthetic oligonucleotide
  Sense strand starting at position 3340 of SEQ ID NO: 585304
guuaguaauggagguuuca

SEQ ID NO: 629389 - RNA, 19 nt, Artificial Sequence
  Description of Artificial Sequence: Synthetic oligonucleotide
  Antisense strand to SEQ ID NO: 629388
ugaaaccuccauuacuaac

SEQ ID NO: 629390 - RNA, 19 nt, Artificial Sequence
  Description of Artificial Sequence: Synthetic oligonucleotide
  Sense strand starting at position 3693 of SEQ ID NO: 585304
ccaggcacaucucucgaaa

SEQ ID NO: 629391 - RNA, 19 nt, Artificial Sequence
  Description of Artificial Sequence: Synthetic oligonucleotide
  Antisense strand to SEQ ID NO: 629390
uuucgagagaugugccugg

SEQ ID NO: 629392 - RNA, 19 nt, Artificial Sequence
  Description of Artificial Sequence: Synthetic oligonucleotide
  Sense strand starting at position 3696 of SEQ ID NO: 585304
ggcacaucucucgaaagag

SEQ ID NO: 629393 - RNA, 19 nt, Artificial Sequence
  Description of Artificial Sequence: Synthetic oligonucleotide
  Antisense strand to SEQ ID NO: 629392
cucuuucgagagaugugcc

SEQ ID NO: 629394 - RNA, 19 nt, Artificial Sequence
  Description of Artificial Sequence: Synthetic oligonucleotide
  Sense strand starting at position 278 of SEQ ID NO: 585305
cgcguacuccucucgguua

SEQ ID NO: 629395 - RNA, 19 nt, Artificial Sequence
  Description of Artificial Sequence: Synthetic oligonucleotide
  Antisense strand to SEQ ID NO: 629394
uaaccgagaggaguacgcg

SEQ ID NO: 629396 - RNA, 19 nt, Artificial Sequence
  Description of Artificial Sequence: Synthetic oligonucleotide
  Sense strand starting at position 283 of SEQ ID NO: 585305
acuccucucgguuauagau

SEQ ID NO: 629397 - RNA, 19 nt, Artificial Sequence
  Description of Artificial Sequence: Synthetic oligonucleotide
  Antisense strand to SEQ ID NO: 629396
aucuauaaccgagaggagu

SEQ ID NO: 629398 - RNA, 19 nt, Artificial Sequence
  Description of Artificial Sequence: Synthetic oligonucleotide
  Sense strand starting at position 298 of SEQ ID NO: 585305
agauguaucuggucacaag

SEQ ID NO: 629399 - RNA, 19 nt, Artificial Sequence
  Description of Artificial Sequence: Synthetic oligonucleotide
  Antisense strand to SEQ ID NO: 629398
cuugugaccagauacaucu

SEQ ID NO: 629400 - RNA, 19 nt, Artificial Sequence
  Description of Artificial Sequence: Synthetic oligonucleotide
  Sense strand starting at position 761 of SEQ ID NO: 585305
cugagaguucaacggaaug

SEQ ID NO: 629401 - RNA, 19 nt, Artificial Sequence
  Description of Artificial Sequence: Synthetic oligonucleotide
  Antisense strand to SEQ ID NO: 629400
cauuccguugaacucucag

SEQ ID NO: 629402 - RNA, 19 nt, Artificial Sequence
  Description of Artificial Sequence: Synthetic oligonucleotide
  Sense strand starting at position 1054 of SEQ ID NO: 585305
ucacaaguauaauugugua

SEQ ID NO: 629403 - RNA, 19 nt, Artificial Sequence
  Description of Artificial Sequence: Synthetic oligonucleotide
  Antisense strand to SEQ ID NO: 629402
uacacaauuauacuuguga

SEQ ID NO: 629404 - RNA, 19 nt, Artificial Sequence
  Description of Artificial Sequence: Synthetic oligonucleotide
  Sense strand starting at position 1147 of SEQ ID NO: 585305
ugaagugagugguuucaca

SEQ ID NO: 629405 - RNA, 19 nt, Artificial Sequence
  Description of Artificial Sequence: Synthetic oligonucleotide
  Antisense strand to SEQ ID NO: 629404
ugugaaaccacucacuuca

SEQ ID NO: 629406 - RNA, 19 nt, Artificial Sequence
  Description of Artificial Sequence: Synthetic oligonucleotide
  Sense strand starting at position 1344 of SEQ ID NO: 585305
gcuccacucggucaggaau

SEQ ID NO: 629407 - RNA, 19 nt, Artificial Sequence
  Description of Artificial Sequence: Synthetic oligonucleotide
  Antisense strand to SEQ ID NO: 629406
auuccugaccgaguggagc

SEQ ID NO: 629408 - RNA, 19 nt, Artificial Sequence
  Description of Artificial Sequence: Synthetic oligonucleotide
  Sense strand starting at position 1486 of SEQ ID NO: 585305
ugugucuuuggagaaauuc

SEQ ID NO: 629409 - RNA, 19 nt, Artificial Sequence
  Description of Artificial Sequence: Synthetic oligonucleotide
  Antisense strand to SEQ ID NO: 629408
gaauuucuccaaagacaca

SEQ ID NO: 629410 - RNA, 19 nt, Artificial Sequence
  Description of Artificial Sequence: Synthetic oligonucleotide
  Sense strand starting at position 1548 of SEQ ID NO: 585305
guaguaaauguacacuuua

SEQ ID NO: 629411 - RNA, 19 nt, Artificial Sequence
  Description of Artificial Sequence: Synthetic oligonucleotide
  Antisense strand to SEQ ID NO: 629410
uaaaguguacauuuacuac

SEQ ID NO: 629412 - RNA, 19 nt, Artificial Sequence
  Description of Artificial Sequence: Synthetic oligonucleotide
  Sense strand starting at position 1600 of SEQ ID NO: 585305
ggcuuaagccuguaggaug

SEQ ID NO: 629413 - RNA, 19 nt, Artificial Sequence
  Description of Artificial Sequence: Synthetic oligonucleotide
  Antisense strand to SEQ ID NO: 629412
cauccuacaggcuuaagcc

SEQ ID NO: 629414 - RNA, 19 nt, Artificial Sequence
  Description of Artificial Sequence: Synthetic oligonucleotide
  Sense strand starting at position 1619 of SEQ ID NO: 585305
gggauuggauuguccucau

SEQ ID NO: 629415 - RNA, 19 nt, Artificial Sequence
  Description of Artificial Sequence: Synthetic oligonucleotide
  Antisense strand to SEQ ID NO: 629414
augaggacaauccaauccc

SEQ ID NO: 629416 - RNA, 19 nt, Artificial Sequence
  Description of Artificial Sequence: Synthetic oligonucleotide
  Sense strand starting at position 1622 of SEQ ID NO: 585305
auuggauuguccucaucuc

SEQ ID NO: 629417 - RNA, 19 nt, Artificial Sequence
  Description of Artificial Sequence: Synthetic oligonucleotide
  Antisense strand to SEQ ID NO: 629416
gagaugaggacaauccaau

SEQ ID NO: 629418 - RNA, 19 nt, Artificial Sequence
  Description of Artificial Sequence: Synthetic oligonucleotide
  Sense strand starting at position 1623 of SEQ ID NO: 585305
uuggauuguccucaucuca

SEQ ID NO: 629419 - RNA, 19 nt, Artificial Sequence
  Description of Artificial Sequence: Synthetic oligonucleotide
  Antisense strand to SEQ ID NO: 629418
ugagaugaggacaauccaa

SEQ ID NO: 629420 - RNA, 19 nt, Artificial Sequence
  Description of Artificial Sequence: Synthetic oligonucleotide
  Sense strand starting at position 1702 of SEQ ID NO: 585305
augaaagauuguguccaag

SEQ ID NO: 629421 - RNA, 19 nt, Artificial Sequence
  Description of Artificial Sequence: Synthetic oligonucleotide
  Antisense strand to SEQ ID NO: 629420
cuuggacacaaucuuucau

SEQ ID NO: 629422 - RNA, 19 nt, Artificial Sequence
  Description of Artificial Sequence: Synthetic oligonucleotide
  Sense strand starting at position 1704 of SEQ ID NO: 585305
gaaagauuguguccaagau

SEQ ID NO: 629423 - RNA, 19 nt, Artificial Sequence
  Description of Artificial Sequence: Synthetic oligonucleotide
  Antisense strand to SEQ ID NO: 629422
aucuuggacacaaucuuuc

SEQ ID NO: 629424 - RNA, 19 nt, Artificial Sequence
  Description of Artificial Sequence: Synthetic oligonucleotide
  Sense strand starting at position 1708 of SEQ ID NO: 585305
gauuguguccaagaucaua

SEQ ID NO: 629425 - RNA, 19 nt, Artificial Sequence
  Description of Artificial Sequence: Synthetic oligonucleotide
  Antisense strand to SEQ ID NO: 629424
uaugaucuuggacacaauc

SEQ ID NO: 629426 - RNA, 19 nt, Artificial Sequence
  Description of Artificial Sequence: Synthetic oligonucleotide
  Sense strand starting at position 1962 of SEQ ID NO: 585305
accugauggaucugaugua

SEQ ID NO: 629427 - RNA, 19 nt, Artificial Sequence
  Description of Artificial Sequence: Synthetic oligonucleotide
  Antisense strand to SEQ ID NO: 629426
uacaucagauccaucaggu

SEQ ID NO: 629428 - RNA, 19 nt, Artificial Sequence
  Description of Artificial Sequence: Synthetic oligonucleotide
  Sense strand starting at position 1971 of SEQ ID NO: 585305
aucugauguaccuggcaga

SEQ ID NO: 629429 - RNA, 19 nt, Artificial Sequence
  Description of Artificial Sequence: Synthetic oligonucleotide
  Antisense strand to SEQ ID NO: 629428
ucugccagguacaucagau

SEQ ID NO: 629430 - RNA, 19 nt, Artificial Sequence
  Description of Artificial Sequence: Synthetic oligonucleotide
  Sense strand starting at position 1972 of SEQ ID NO: 585305
ucugauguaccuggcagaa

SEQ ID NO: 629431 - RNA, 19 nt, Artificial Sequence
  Description of Artificial Sequence: Synthetic oligonucleotide
  Antisense strand to SEQ ID NO: 629430
uucugccagguacaucaga

SEQ ID NO: 629432 - RNA, 19 nt, Artificial Sequence
  Description of Artificial Sequence: Synthetic oligonucleotide
  Sense strand starting at position 2028 of SEQ ID NO: 585305
auuggauggucccucggaa

SEQ ID NO: 629433 - RNA, 19 nt, Artificial Sequence
  Description of Artificial Sequence: Synthetic oligonucleotide
  Antisense strand to SEQ ID NO: 629432
uuccgagggaccauccaau

SEQ ID NO: 629434 - RNA, 19 nt, Artificial Sequence
  Description of Artificial Sequence: Synthetic oligonucleotide
  Sense strand starting at position 2081 of SEQ ID NO: 585305
ucugucucugggcagacau

SEQ ID NO: 629435 - RNA, 19 nt, Artificial Sequence
  Description of Artificial Sequence: Synthetic oligonucleotide
  Antisense strand to SEQ ID NO: 629434
augucugcccagagacaga

SEQ ID NO: 629436 - RNA, 19 nt, Artificial Sequence
  Description of Artificial Sequence: Synthetic oligonucleotide
  Sense strand starting at position 2149 of SEQ ID NO: 585305
aauuguacuggaugaacau

SEQ ID NO: 629437 - RNA, 19 nt, Artificial Sequence
  Description of Artificial Sequence: Synthetic oligonucleotide
  Antisense strand to SEQ ID NO: 629436
auguucauccaguacaauu

SEQ ID NO: 629438 - RNA, 19 nt, Artificial Sequence
  Description of Artificial Sequence: Synthetic oligonucleotide
  Sense strand starting at position 2180 of SEQ ID NO: 585305
uuuccucucgauuauagaa

SEQ ID NO: 629439 - RNA, 19 nt, Artificial Sequence
  Description of Artificial Sequence: Synthetic oligonucleotide
  Antisense strand to SEQ ID NO: 629438
uucuauaaucgagaggaaa

SEQ ID NO: 629440 - RNA, 19 nt, Artificial Sequence
  Description of Artificial Sequence: Synthetic oligonucleotide
  Sense strand starting at position 2259 of SEQ ID NO: 585305
aguaaacaucucuguaaua

SEQ ID NO: 629441 - RNA, 19 nt, Artificial Sequence
  Description of Artificial Sequence: Synthetic oligonucleotide
  Antisense strand to SEQ ID NO: 629440
uauuacagagauguuuacu

SEQ ID NO: 629442 - RNA, 19 nt, Artificial Sequence
  Description of Artificial Sequence: Synthetic oligonucleotide
  Sense strand starting at position 2260 of SEQ ID NO: 585305
guaaacaucucuguaauau

SEQ ID NO: 629443 - RNA, 19 nt, Artificial Sequence
  Description of Artificial Sequence: Synthetic oligonucleotide
  Antisense strand to SEQ ID NO: 629442
auauuacagagauguuuac

SEQ ID NO: 629444 - RNA, 19 nt, Artificial Sequence
  Description of Artificial Sequence: Synthetic oligonucleotide
  Sense strand starting at position 2292 of SEQ ID NO: 585305
uuguuauuauacuugggau

SEQ ID NO: 629445 - RNA, 19 nt, Artificial Sequence
  Description of Artificial Sequence: Synthetic oligonucleotide
  Antisense strand to SEQ ID NO: 629444
aucccaaguauaauaacaa

SEQ ID NO: 629446 - RNA, 19 nt, Artificial Sequence
  Description of Artificial Sequence: Synthetic oligonucleotide
  Sense strand starting at position 2470 of SEQ ID NO: 585305
ccacuaaugugcuuuagaa

SEQ ID NO: 629447 - RNA, 19 nt, Artificial Sequence
  Description of Artificial Sequence: Synthetic oligonucleotide
  Antisense strand to SEQ ID NO: 629446
uucuaaagcacauuagugg

SEQ ID NO: 629448 - RNA, 19 nt, Artificial Sequence
  Description of Artificial Sequence: Synthetic oligonucleotide
  Sense strand starting at position 2472 of SEQ ID NO: 585305
acuaaugugcuuuagaaga

SEQ ID NO: 629449 - RNA, 19 nt, Artificial Sequence
  Description of Artificial Sequence: Synthetic oligonucleotide
  Antisense strand to SEQ ID NO: 629448
ucuucuaaagcacauuagu

SEQ ID NO: 629450 - RNA, 19 nt, Artificial Sequence
  Description of Artificial Sequence: Synthetic oligonucleotide
  Sense strand starting at position 2477 of SEQ ID NO: 585305
ugugcuuuagaagagucaa

SEQ ID NO: 629451 - RNA, 19 nt, Artificial Sequence
  Description of Artificial Sequence: Synthetic oligonucleotide
  Antisense strand to SEQ ID NO: 629450
uugacucuucuaaagcaca

SEQ ID NO: 629452 - RNA, 19 nt, Artificial Sequence
  Description of Artificial Sequence: Synthetic oligonucleotide
  Sense strand starting at position 2743 of SEQ ID NO: 585305
uuguauuuaugcucuucua

SEQ ID NO: 629453 - RNA, 19 nt, Artificial Sequence
  Description of Artificial Sequence: Synthetic oligonucleotide
  Antisense strand to SEQ ID NO: 629452
uagaagagcauaaauacaa

SEQ ID NO: 629454 - RNA, 19 nt, Artificial Sequence
  Description of Artificial Sequence: Synthetic oligonucleotide
  Sense strand starting at position 2827 of SEQ ID NO: 585305
cucccugaaccaugaaaug

SEQ ID NO: 629455 - RNA, 19 nt, Artificial Sequence
  Description of Artificial Sequence: Synthetic oligonucleotide
  Antisense strand to SEQ ID NO: 629454
cauuucaugguucagggag

SEQ ID NO: 629456 - RNA, 19 nt, Artificial Sequence
  Description of Artificial Sequence: Synthetic oligonucleotide
  Sense strand starting at position 2896 of SEQ ID NO: 585305
gaugcagucauguuucguu

SEQ ID NO: 629457 - RNA, 19 nt, Artificial Sequence
  Description of Artificial Sequence: Synthetic oligonucleotide
  Antisense strand to SEQ ID NO: 629456
aacgaaacaugacugcauc

SEQ ID NO: 629458 - RNA, 19 nt, Artificial Sequence
  Description of Artificial Sequence: Synthetic oligonucleotide
  Sense strand starting at position 2976 of SEQ ID NO: 585305
uggagaaaguguuuagagu

SEQ ID NO: 629459 - RNA, 19 nt, Artificial Sequence
  Description of Artificial Sequence: Synthetic oligonucleotide
  Antisense strand to SEQ ID NO: 629458
acucuaaacacuuucucca

SEQ ID NO: 629460 - RNA, 19 nt, Artificial Sequence
  Description of Artificial Sequence: Synthetic oligonucleotide
  Sense strand starting at position 2977 of SEQ ID NO: 585305
ggagaaaguguuuagaguc

SEQ ID NO: 629461 - RNA, 19 nt, Artificial Sequence
  Description of Artificial Sequence: Synthetic oligonucleotide
  Antisense strand to SEQ ID NO: 629460
gacucuaaacacuuucucc

SEQ ID NO: 629462 - RNA, 19 nt, Artificial Sequence
  Description of Artificial Sequence: Synthetic oligonucleotide
  Sense strand starting at position 2983 of SEQ ID NO: 585305
aguguuuagagucacagag

SEQ ID NO: 629463 - RNA, 19 nt, Artificial Sequence
  Description of Artificial Sequence: Synthetic oligonucleotide
  Antisense strand to SEQ ID NO: 629462
cucugugacucuaaacacu

SEQ ID NO: 629464 - RNA, 19 nt, Artificial Sequence
  Description of Artificial Sequence: Synthetic oligonucleotide
  Sense strand starting at position 2987 of SEQ ID NO: 585305
uuuagagucacagagugua

SEQ ID NO: 629465 - RNA, 19 nt, Artificial Sequence
  Description of Artificial Sequence: Synthetic oligonucleotide
  Antisense strand to SEQ ID NO: 629464
uacacucugugacucuaaa

SEQ ID NO: 629466 - RNA, 19 nt, Artificial Sequence
  Description of Artificial Sequence: Synthetic oligonucleotide
  Sense strand starting at position 3029 of SEQ ID NO: 585305
ucccaaauggcagagguau

SEQ ID NO: 629467 - RNA, 19 nt, Artificial Sequence
  Description of Artificial Sequence: Synthetic oligonucleotide
  Antisense strand to SEQ ID NO: 629466
auaccucugccauuuggga

SEQ ID NO: 629468 - RNA, 19 nt, Artificial Sequence
  Description of Artificial Sequence: Synthetic oligonucleotide
  Sense strand starting at position 3080 of SEQ ID NO: 585305
acaguuccucauggacaua

SEQ ID NO: 629469 - RNA, 19 nt, Artificial Sequence
  Description of Artificial Sequence: Synthetic oligonucleotide
  Antisense strand to SEQ ID NO: 629468
uauguccaugaggaacugu

SEQ ID NO: 629470 - RNA, 19 nt, Artificial Sequence
  Description of Artificial Sequence: Synthetic oligonucleotide
  Sense strand starting at position 3544 of SEQ ID NO: 585305
cugugauggacgcauaaag

SEQ ID NO: 629471 - RNA, 19 nt, Artificial Sequence
  Description of Artificial Sequence: Synthetic oligonucleotide
  Antisense strand to SEQ ID NO: 629470
cuuuaugcguccaucacag

SEQ ID NO: 629472 - RNA, 19 nt, Artificial Sequence
  Description of Artificial Sequence: Synthetic oligonucleotide
  Sense strand starting at position 3928 of SEQ ID NO: 585305
gcccuaucccugcugcauu

SEQ ID NO: 629473 - RNA, 19 nt, Artificial Sequence
  Description of Artificial Sequence: Synthetic oligonucleotide
  Antisense strand to SEQ ID NO: 629472
aaugcagcagggauagggc

SEQ ID NO: 629474 - RNA, 19 nt, Artificial Sequence
  Description of Artificial Sequence: Synthetic oligonucleotide
  Sense strand starting at position 185 of SEQ ID NO: 585306
ccaagaaguccuuauaguu

SEQ ID NO: 629475 - RNA, 19 nt, Artificial Sequence
  Description of Artificial Sequence: Synthetic oligonucleotide
  Antisense strand to SEQ ID NO: 629474
aacuauaaggacuucuugg

SEQ ID NO: 629476 - RNA, 19 nt, Artificial Sequence
  Description of Artificial Sequence: Synthetic oligonucleotide
  Sense strand starting at position 363 of SEQ ID NO: 585306
caagaaauccucugcggag

SEQ ID NO: 629477 - RNA, 19 nt, Artificial Sequence
  Description of Artificial Sequence: Synthetic oligonucleotide
  Antisense strand to SEQ ID NO: 629476
cuccgcagaggauuucuug

SEQ ID NO: 629478 - RNA, 19 nt, Artificial Sequence
  Description of Artificial Sequence: Synthetic oligonucleotide
  Sense strand starting at position 364 of SEQ ID NO: 585306
aagaaauccucugcggaga

SEQ ID NO: 629479 - RNA, 19 nt, Artificial Sequence
  Description of Artificial Sequence: Synthetic oligonucleotide
  Antisense strand to SEQ ID NO: 629478
ucuccgcagaggauuucuu

SEQ ID NO: 629480 - RNA, 19 nt, Artificial Sequence
  Description of Artificial Sequence: Synthetic oligonucleotide
  Sense strand starting at position 365 of SEQ ID NO: 585306
agaaauccucugcggagaa

SEQ ID NO: 629481 - RNA, 19 nt, Artificial Sequence
  Description of Artificial Sequence: Synthetic oligonucleotide
  Antisense strand to SEQ ID NO: 629480
uucuccgcagaggauuucu

SEQ ID NO: 629482 - RNA, 19 nt, Artificial Sequence
  Description of Artificial Sequence: Synthetic oligonucleotide
  Sense strand starting at position 578 of SEQ ID NO: 585306
cucugagggccucgggaau

SEQ ID NO: 629483 - RNA, 19 nt, Artificial Sequence
  Description of Artificial Sequence: Synthetic oligonucleotide
  Antisense strand to SEQ ID NO: 629482
auucccgaggcccucagag

SEQ ID NO: 629484 - RNA, 19 nt, Artificial Sequence
  Description of Artificial Sequence: Synthetic oligonucleotide
  Sense strand starting at position 602 of SEQ ID NO: 585306
uuccuuuagggagguaaga

SEQ ID NO: 629485 - RNA, 19 nt, Artificial Sequence
  Description of Artificial Sequence: Synthetic oligonucleotide
  Antisense strand to SEQ ID NO: 629484
ucuuaccucccuaaaggaa

SEQ ID NO: 629486 - RNA, 19 nt, Artificial Sequence
  Description of Artificial Sequence: Synthetic oligonucleotide
  Sense strand starting at position 770 of SEQ ID NO: 585306
ccacauaaauuugagaguu

SEQ ID NO: 629487 - RNA, 19 nt, Artificial Sequence
  Description of Artificial Sequence: Synthetic oligonucleotide
  Antisense strand to SEQ ID NO: 629486
aacucucaaauuuaugugg

SEQ ID NO: 629488 - RNA, 19 nt, Artificial Sequence
  Description of Artificial Sequence: Synthetic oligonucleotide
  Sense strand starting at position 824 of SEQ ID NO: 585306
uguucucauccugauguaa

SEQ ID NO: 629489 - RNA, 19 nt, Artificial Sequence
  Description of Artificial Sequence: Synthetic oligonucleotide
  Antisense strand to SEQ ID NO: 629488
uuacaucaggaugagaaca

SEQ ID NO: 629490 - RNA, 19 nt, Artificial Sequence
  Description of Artificial Sequence: Synthetic oligonucleotide
  Sense strand starting at position 936 of SEQ ID NO: 585306
acucacuucuguguuagaa

SEQ ID NO: 629491 - RNA, 19 nt, Artificial Sequence
  Description of Artificial Sequence: Synthetic oligonucleotide
  Antisense strand to SEQ ID NO: 629490
uucuaacacagaagugagu

SEQ ID NO: 629492 - RNA, 19 nt, Artificial Sequence
  Description of Artificial Sequence: Synthetic oligonucleotide
  Sense strand starting at position 944 of SEQ ID NO: 585306
cuguguuagaaaggaccua

SEQ ID NO: 629493 - RNA, 19 nt, Artificial Sequence
  Description of Artificial Sequence: Synthetic oligonucleotide
  Antisense strand to SEQ ID NO: 629492
uagguccuuucuaacacag

SEQ ID NO: 629494 - RNA, 19 nt, Artificial Sequence
  Description of Artificial Sequence: Synthetic oligonucleotide
  Sense strand starting at position 1187 of SEQ ID NO: 585306
uggagugguuucucaauau

SEQ ID NO: 629495 - RNA, 19 nt, Artificial Sequence
  Description of Artificial Sequence: Synthetic oligonucleotide
  Antisense strand to SEQ ID NO: 629494
auauugagaaaccacucca

SEQ ID NO: 629496 - RNA, 19 nt, Artificial Sequence
  Description of Artificial Sequence: Synthetic oligonucleotide
  Sense strand starting at position 1191 of SEQ ID NO: 585306
gugguuucucaauauguau

SEQ ID NO: 629497 - RNA, 19 nt, Artificial Sequence
  Description of Artificial Sequence: Synthetic oligonucleotide
  Antisense strand to SEQ ID NO: 629496
auacauauugagaaaccac

SEQ ID NO: 629498 - RNA, 19 nt, Artificial Sequence
  Description of Artificial Sequence: Synthetic oligonucleotide
  Sense strand starting at position 1367 of SEQ ID NO: 585306
cuaagaguuugccuccaca

SEQ ID NO: 629499 - RNA, 19 nt, Artificial Sequence
  Description of Artificial Sequence: Synthetic oligonucleotide
  Antisense strand to SEQ ID NO: 629498
uguggaggcaaacucuuag

SEQ ID NO: 629500 - RNA, 19 nt, Artificial Sequence
  Description of Artificial Sequence: Synthetic oligonucleotide
  Sense strand starting at position 1370 of SEQ ID NO: 585306
agaguuugccuccacaaac

SEQ ID NO: 629501 - RNA, 19 nt, Artificial Sequence
  Description of Artificial Sequence: Synthetic oligonucleotide
  Antisense strand to SEQ ID NO: 629500
guuuguggaggcaaacucu

SEQ ID NO: 629502 - RNA, 19 nt, Artificial Sequence
  Description of Artificial Sequence: Synthetic oligonucleotide
  Sense strand starting at position 1406 of SEQ ID NO: 585306
aguauagacuccuuuaccu

SEQ ID NO: 629503 - RNA, 19 nt, Artificial Sequence
  Description of Artificial Sequence: Synthetic oligonucleotide
  Antisense strand to SEQ ID NO: 629502
agguaaaggagucuauacu

SEQ ID NO: 629504 - RNA, 19 nt, Artificial Sequence
  Description of Artificial Sequence: Synthetic oligonucleotide
  Sense strand starting at position 1552 of SEQ ID NO: 585306
uccugucacagguagugaa

SEQ ID NO: 629505 - RNA, 19 nt, Artificial Sequence
  Description of Artificial Sequence: Synthetic oligonucleotide
  Antisense strand to SEQ ID NO: 629504
uucacuaccugugacagga

SEQ ID NO: 629506 - RNA, 19 nt, Artificial Sequence
  Description of Artificial Sequence: Synthetic oligonucleotide
  Sense strand starting at position 1608 of SEQ ID NO: 585306
ggcuuaaaccugugggauu

SEQ ID NO: 629507 - RNA, 19 nt, Artificial Sequence
  Description of Artificial Sequence: Synthetic oligonucleotide
  Antisense strand to SEQ ID NO: 629506
aaucccacagguuuaagcc

SEQ ID NO: 629508 - RNA, 19 nt, Artificial Sequence
  Description of Artificial Sequence: Synthetic oligonucleotide
  Sense strand starting at position 1630 of SEQ ID NO: 585306
guuggauuauccucaccuc

SEQ ID NO: 629509 - RNA, 19 nt, Artificial Sequence
  Description of Artificial Sequence: Synthetic oligonucleotide
  Antisense strand to SEQ ID NO: 629508
gaggugaggauaauccaac

SEQ ID NO: 629510 - RNA, 19 nt, Artificial Sequence
  Description of Artificial Sequence: Synthetic oligonucleotide
  Sense strand starting at position 1811 of SEQ ID NO: 585306
cugcacuuacugggaaagu

SEQ ID NO: 629511 - RNA, 19 nt, Artificial Sequence
  Description of Artificial Sequence: Synthetic oligonucleotide
  Antisense strand to SEQ ID NO: 629510
acuuucccaguaagugcag

SEQ ID NO: 629512 - RNA, 19 nt, Artificial Sequence
  Description of Artificial Sequence: Synthetic oligonucleotide
  Sense strand starting at position 1899 of SEQ ID NO: 585306
cagggaucugcagagccau

SEQ ID NO: 629513 - RNA, 19 nt, Artificial Sequence
  Description of Artificial Sequence: Synthetic oligonucleotide
  Antisense strand to SEQ ID NO: 629512
auggcucugcagaucccug

SEQ ID NO: 629514 - RNA, 19 nt, Artificial Sequence
  Description of Artificial Sequence: Synthetic oligonucleotide
  Sense strand starting at position 1913 of SEQ ID NO: 585306
gccaucuuccaagacguaa

SEQ ID NO: 629515 - RNA, 19 nt, Artificial Sequence
  Description of Artificial Sequence: Synthetic oligonucleotide
  Antisense strand to SEQ ID NO: 629514
uuacgucuuggaagauggc

SEQ ID NO: 629516 - RNA, 19 nt, Artificial Sequence
  Description of Artificial Sequence: Synthetic oligonucleotide
  Sense strand starting at position 2182 of SEQ ID NO: 585306
ggugaagauuucugaauag

SEQ ID NO: 629517 - RNA, 19 nt, Artificial Sequence
  Description of Artificial Sequence: Synthetic oligonucleotide
  Antisense strand to SEQ ID NO: 629516
cuauucagaaaucuucacc

SEQ ID NO: 629518 - RNA, 19 nt, Artificial Sequence
  Description of Artificial Sequence: Synthetic oligonucleotide
  Sense strand starting at position 2303 of SEQ ID NO: 585306
gggcaaauuaagugaggau

SEQ ID NO: 629519 - RNA, 19 nt, Artificial Sequence
  Description of Artificial Sequence: Synthetic oligonucleotide
  Antisense strand to SEQ ID NO: 629518
auccucacuuaauuugccc

SEQ ID NO: 629520 - RNA, 19 nt, Artificial Sequence
  Description of Artificial Sequence: Synthetic oligonucleotide
  Sense strand starting at position 2446 of SEQ ID NO: 585306
ccacuaaugugcuuuauga

SEQ ID NO: 629521 - RNA, 19 nt, Artificial Sequence
  Description of Artificial Sequence: Synthetic oligonucleotide
  Antisense strand to SEQ ID NO: 629520
ucauaaagcacauuagugg

SEQ ID NO: 629522 - RNA, 19 nt, Artificial Sequence
  Description of Artificial Sequence: Synthetic oligonucleotide
  Sense strand starting at position 2448 of SEQ ID NO: 585306
acuaaugugcuuuaugaga

SEQ ID NO: 629523 - RNA, 19 nt, Artificial Sequence
  Description of Artificial Sequence: Synthetic oligonucleotide
  Antisense strand to SEQ ID NO: 629522
ucucauaaagcacauuagu

SEQ ID NO: 629524 - RNA, 19 nt, Artificial Sequence
  Description of Artificial Sequence: Synthetic oligonucleotide
  Sense strand starting at position 2675 of SEQ ID NO: 585306
acuggcaagugauucuuua

SEQ ID NO: 629525 - RNA, 19 nt, Artificial Sequence
  Description of Artificial Sequence: Synthetic oligonucleotide
  Antisense strand to SEQ ID NO: 629524
uaaagaaucacuugccagu

SEQ ID NO: 629526 - RNA, 19 nt, Artificial Sequence
  Description of Artificial Sequence: Synthetic oligonucleotide
  Sense strand starting at position 2679 of SEQ ID NO: 585306
gcaagugauucuuuauuau

SEQ ID NO: 629527 - RNA, 19 nt, Artificial Sequence
  Description of Artificial Sequence: Synthetic oligonucleotide
  Antisense strand to SEQ ID NO: 629526
auaauaaagaaucacuugc

SEQ ID NO: 629528 - RNA, 19 nt, Artificial Sequence
  Description of Artificial Sequence: Synthetic oligonucleotide
  Sense strand starting at position 2682 of SEQ ID NO: 585306
agugauucuuuauuaugca

SEQ ID NO: 629529 - RNA, 19 nt, Artificial Sequence
  Description of Artificial Sequence: Synthetic oligonucleotide
  Antisense strand to SEQ ID NO: 629528
ugcauaauaaagaaucacu

SEQ ID NO: 629530 - RNA, 19 nt, Artificial Sequence
  Description of Artificial Sequence: Synthetic oligonucleotide
  Sense strand starting at position 2690 of SEQ ID NO: 585306
uuuauuaugcaagaaggua

SEQ ID NO: 629531 - RNA, 19 nt, Artificial Sequence
  Description of Artificial Sequence: Synthetic oligonucleotide
  Antisense strand to SEQ ID NO: 629530
uaccuucuugcauaauaaa

SEQ ID NO: 629532 - RNA, 19 nt, Artificial Sequence
  Description of Artificial Sequence: Synthetic oligonucleotide
  Sense strand starting at position 2718 of SEQ ID NO: 585306
ugcucuucgagugaaagua

SEQ ID NO: 629533 - RNA, 19 nt, Artificial Sequence
  Description of Artificial Sequence: Synthetic oligonucleotide
  Antisense strand to SEQ ID NO: 629532
uacuuucacucgaagagca

SEQ ID NO: 629534 - RNA, 19 nt, Artificial Sequence
  Description of Artificial Sequence: Synthetic oligonucleotide
  Sense strand starting at position 2917 of SEQ ID NO: 585306
cguauuaaugauggagcaa

SEQ ID NO: 629535 - RNA, 19 nt, Artificial Sequence
  Description of Artificial Sequence: Synthetic oligonucleotide
  Antisense strand to SEQ ID NO: 629534
uugcuccaucauuaauacg

SEQ ID NO: 629536 - RNA, 19 nt, Artificial Sequence
  Description of Artificial Sequence: Synthetic oligonucleotide
  Sense strand starting at position 2928 of SEQ ID NO: 585306
uggagcaaauguuuagagu

SEQ ID NO: 629537 - RNA, 19 nt, Artificial Sequence
  Description of Artificial Sequence: Synthetic oligonucleotide
  Antisense strand to SEQ ID NO: 629536
acucuaaacauuugcucca

SEQ ID NO: 629538 - RNA, 19 nt, Artificial Sequence
  Description of Artificial Sequence: Synthetic oligonucleotide
  Sense strand starting at position 2929 of SEQ ID NO: 585306
ggagcaaauguuuagaguu

SEQ ID NO: 629539 - RNA, 19 nt, Artificial Sequence
  Description of Artificial Sequence: Synthetic oligonucleotide
  Antisense strand to SEQ ID NO: 629538
aacucuaaacauuugcucc

SEQ ID NO: 629540 - RNA, 19 nt, Artificial Sequence
  Description of Artificial Sequence: Synthetic oligonucleotide
  Sense strand starting at position 3217 of SEQ ID NO: 585306
agaauauguuuaccaggua

SEQ ID NO: 629541 - RNA, 19 nt, Artificial Sequence
  Description of Artificial Sequence: Synthetic oligonucleotide
  Antisense strand to SEQ ID NO: 629540
uaccugguaaacauauucu

SEQ ID NO: 629542 - RNA, 19 nt, Artificial Sequence
  Description of Artificial Sequence: Synthetic oligonucleotide
  Sense strand starting at position 3258 of SEQ ID NO: 585306
uagcaagagguuugcaaua

SEQ ID NO: 629543 - RNA, 19 nt, Artificial Sequence
  Description of Artificial Sequence: Synthetic oligonucleotide
  Antisense strand to SEQ ID NO: 629542
uauugcaaaccucuugcua

SEQ ID NO: 629544 - RNA, 19 nt, Artificial Sequence
  Description of Artificial Sequence: Synthetic oligonucleotide
  Sense strand starting at position 3511 of SEQ ID NO: 585306
accugaagaugcccucaau

SEQ ID NO: 629545 - RNA, 19 nt, Artificial Sequence
  Description of Artificial Sequence: Synthetic oligonucleotide
  Antisense strand to SEQ ID NO: 629544
auugagggcaucuucaggu

SEQ ID NO: 629546 - RNA, 19 nt, Artificial Sequence
  Description of Artificial Sequence: Synthetic oligonucleotide
  Sense strand starting at position 3514 of SEQ ID NO: 585306
ugaagaugcccucaauguc

SEQ ID NO: 629547 - RNA, 19 nt, Artificial Sequence
  Description of Artificial Sequence: Synthetic oligonucleotide
  Antisense strand to SEQ ID NO: 629546
gacauugagggcaucuuca

SEQ ID NO: 629548 - RNA, 19 nt, Artificial Sequence
  Description of Artificial Sequence: Synthetic oligonucleotide
  Sense strand starting at position 3547 of SEQ ID NO: 585306
cucagcgucccucagaaua

SEQ ID NO: 629549 - RNA, 19 nt, Artificial Sequence
  Description of Artificial Sequence: Synthetic oligonucleotide
  Antisense strand to SEQ ID NO: 629548
uauucugagggacgcugag

SEQ ID NO: 629550 - RNA, 19 nt, Artificial Sequence
  Description of Artificial Sequence: Synthetic oligonucleotide
  Sense strand starting at position 3601 of SEQ ID NO: 585306
ggagaagcuucccucaggu

SEQ ID NO: 629551 - RNA, 19 nt, Artificial Sequence
  Description of Artificial Sequence: Synthetic oligonucleotide
  Antisense strand to SEQ ID NO: 629550
accugagggaagcuucucc

SEQ ID NO: 629552 - RNA, 19 nt, Artificial Sequence
  Description of Artificial Sequence: Synthetic oligonucleotide
  Sense strand starting at position 3885 of SEQ ID NO: 585306
ccgccauucugucuaauuu

SEQ ID NO: 629553 - RNA, 19 nt, Artificial Sequence
  Description of Artificial Sequence: Synthetic oligonucleotide
  Antisense strand to SEQ ID NO: 629552
aaauuagacagaauggcgg

SEQ ID NO: 629554 - RNA, 19 nt, Artificial Sequence
  Description of Artificial Sequence: Synthetic oligonucleotide
  Sense strand starting at position 207 of SEQ ID NO: 585307
ggugguuaccucuaugaga

SEQ ID NO: 629555 - RNA, 19 nt, Artificial Sequence
  Description of Artificial Sequence: Synthetic oligonucleotide
  Antisense strand to SEQ ID NO: 629554
ucucauagagguaaccacc

SEQ ID NO: 629556 - RNA, 19 nt, Artificial Sequence
  Description of Artificial Sequence: Synthetic oligonucleotide
  Sense strand starting at position 209 of SEQ ID NO: 585307
ugguuaccucuaugagaag

SEQ ID NO: 629557 - RNA, 19 nt, Artificial Sequence
  Description of Artificial Sequence: Synthetic oligonucleotide
  Antisense strand to SEQ ID NO: 629556
cuucucauagagguaacca

SEQ ID NO: 629558 - RNA, 19 nt, Artificial Sequence
  Description of Artificial Sequence: Synthetic oligonucleotide
  Sense strand starting at position 236 of SEQ ID NO: 585307
cuggauugaccuuggcaau

SEQ ID NO: 629559 - RNA, 19 nt, Artificial Sequence
  Description of Artificial Sequence: Synthetic oligonucleotide
  Antisense strand to SEQ ID NO: 629558
auugccaaggucaauccag

SEQ ID NO: 629560 - RNA, 19 nt, Artificial Sequence
  Description of Artificial Sequence: Synthetic oligonucleotide
  Sense strand starting at position 237 of SEQ ID NO: 585307
uggauugaccuuggcaauu

SEQ ID NO: 629561 - RNA, 19 nt, Artificial Sequence
  Description of Artificial Sequence: Synthetic oligonucleotide
  Antisense strand to SEQ ID NO: 629560
aauugccaaggucaaucca

SEQ ID NO: 629562 - RNA, 19 nt, Artificial Sequence
  Description of Artificial Sequence: Synthetic oligonucleotide
  Sense strand starting at position 278 of SEQ ID NO: 585307
uuaaauugggacuguuauu

SEQ ID NO: 629563 - RNA, 19 nt, Artificial Sequence
  Description of Artificial Sequence: Synthetic oligonucleotide
  Antisense strand to SEQ ID NO: 629562
aauaacagucccaauuuaa

SEQ ID NO: 629564 - RNA, 19 nt, Artificial Sequence
  Description of Artificial Sequence: Synthetic oligonucleotide
  Sense strand starting at position 283 of SEQ ID NO: 585307
uugggacuguuauuaugga

SEQ ID NO: 629565 - RNA, 19 nt, Artificial Sequence
  Description of Artificial Sequence: Synthetic oligonucleotide
  Antisense strand to SEQ ID NO: 629564
uccauaauaacagucccaa

SEQ ID NO: 629566 - RNA, 19 nt, Artificial Sequence
  Description of Artificial Sequence: Synthetic oligonucleotide
  Sense strand starting at position 291 of SEQ ID NO: 585307
guuauuauggaagauguuc

SEQ ID NO: 629567 - RNA, 19 nt, Artificial Sequence
  Description of Artificial Sequence: Synthetic oligonucleotide
  Antisense strand to SEQ ID NO: 629566
gaacaucuuccauaauaac

SEQ ID NO: 629568 - RNA, 19 nt, Artificial Sequence
  Description of Artificial Sequence: Synthetic oligonucleotide
  Sense strand starting at position 296 of SEQ ID NO: 585307
uauggaagauguucuguua

SEQ ID NO: 629569 - RNA, 19 nt, Artificial Sequence
  Description of Artificial Sequence: Synthetic oligonucleotide
  Antisense strand to SEQ ID NO: 629568
uaacagaacaucuuccaua

SEQ ID NO: 629570 - RNA, 19 nt, Artificial Sequence
  Description of Artificial Sequence: Synthetic oligonucleotide
  Sense strand starting at position 299 of SEQ ID NO: 585307
ggaagauguucuguuauga

SEQ ID NO: 629571 - RNA, 19 nt, Artificial Sequence
  Description of Artificial Sequence: Synthetic oligonucleotide
  Antisense strand to SEQ ID NO: 629570
ucauaacagaacaucuucc

SEQ ID NO: 629572 - RNA, 19 nt, Artificial Sequence
  Description of Artificial Sequence: Synthetic oligonucleotide
  Sense strand starting at position 307 of SEQ ID NO: 585307
uucuguuaugauugacauu

SEQ ID NO: 629573 - RNA, 19 nt, Artificial Sequence
  Description of Artificial Sequence: Synthetic oligonucleotide
  Antisense strand to SEQ ID NO: 629572
aaugucaaucauaacagaa

SEQ ID NO: 629574 - RNA, 19 nt, Artificial Sequence
  Description of Artificial Sequence: Synthetic oligonucleotide
  Sense strand starting at position 405 of SEQ ID NO: 585307
uaucgaugagugggagauu

SEQ ID NO: 629575 - RNA, 19 nt, Artificial Sequence
  Description of Artificial Sequence: Synthetic oligonucleotide
  Antisense strand to SEQ ID NO: 629574
aaucucccacucaucgaua

SEQ ID NO: 629576 - RNA, 19 nt, Artificial Sequence
  Description of Artificial Sequence: Synthetic oligonucleotide
  Sense strand starting at position 406 of SEQ ID NO: 585307
aucgaugagugggagauuu

SEQ ID NO: 629577 - RNA, 19 nt, Artificial Sequence
  Description of Artificial Sequence: Synthetic oligonucleotide
  Antisense strand to SEQ ID NO: 629576
aaaucucccacucaucgau

SEQ ID NO: 629578 - RNA, 19 nt, Artificial Sequence
  Description of Artificial Sequence: Synthetic oligonucleotide
  Sense strand starting at position 444 of SEQ ID NO: 585307
aagauaaggugagauauuu

SEQ ID NO: 629579 - RNA, 19 nt, Artificial Sequence
  Description of Artificial Sequence: Synthetic oligonucleotide
  Antisense strand to SEQ ID NO: 629578
aaauaucucaccuuaucuu

SEQ ID NO: 629580 - RNA, 19 nt, Artificial Sequence
  Description of Artificial Sequence: Synthetic oligonucleotide
  Sense strand starting at position 762 of SEQ ID NO: 585307
cagccaagaugagagauuu

SEQ ID NO: 629581 - RNA, 19 nt, Artificial Sequence
  Description of Artificial Sequence: Synthetic oligonucleotide
  Antisense strand to SEQ ID NO: 629580
aaaucucucaucuuggcug

SEQ ID NO: 629582 - RNA, 19 nt, Artificial Sequence
  Description of Artificial Sequence: Synthetic oligonucleotide
  Sense strand starting at position 799 of SEQ ID NO: 585307
ugauaaaccuaggaauuua

SEQ ID NO: 629583 - RNA, 19 nt, Artificial Sequence
  Description of Artificial Sequence: Synthetic oligonucleotide
  Antisense strand to SEQ ID NO: 629582
uaaauuccuagguuuauca

SEQ ID NO: 629584 - RNA, 19 nt, Artificial Sequence
  Description of Artificial Sequence: Synthetic oligonucleotide
  Sense strand starting at position 879 of SEQ ID NO: 585307
ggaagauccucugucuuuc

SEQ ID NO: 629585 - RNA, 19 nt, Artificial Sequence
  Description of Artificial Sequence: Synthetic oligonucleotide
  Antisense strand to SEQ ID NO: 629584
gaaagacagaggaucuucc

SEQ ID NO: 629586 - RNA, 19 nt, Artificial Sequence
  Description of Artificial Sequence: Synthetic oligonucleotide
  Sense strand starting at position 890 of SEQ ID NO: 585307
ugucuuucuagguaaguau

SEQ ID NO: 629587 - RNA, 19 nt, Artificial Sequence
  Description of Artificial Sequence: Synthetic oligonucleotide
  Antisense strand to SEQ ID NO: 629586
auacuuaccuagaaagaca

SEQ ID NO: 629588 - RNA, 19 nt, Artificial Sequence
  Description of Artificial Sequence: Synthetic oligonucleotide
  Sense strand starting at position 1070 of SEQ ID NO: 585307
aauguugcucuggagauga

SEQ ID NO: 629589 - RNA, 19 nt, Artificial Sequence
  Description of Artificial Sequence: Synthetic oligonucleotide
  Antisense strand to SEQ ID NO: 629588
ucaucuccagagcaacauu

SEQ ID NO: 629590 - RNA, 19 nt, Artificial Sequence
  Description of Artificial Sequence: Synthetic oligonucleotide
  Sense strand starting at position 1072 of SEQ ID NO: 585307
uguugcucuggagaugaga

SEQ ID NO: 629591 - RNA, 19 nt, Artificial Sequence
  Description of Artificial Sequence: Synthetic oligonucleotide
  Antisense strand to SEQ ID NO: 629590
ucucaucuccagagcaaca

SEQ ID NO: 629592 - RNA, 19 nt, Artificial Sequence
  Description of Artificial Sequence: Synthetic oligonucleotide
  Sense strand starting at position 1162 of SEQ ID NO: 585307
gauauaagaucugcuguac

SEQ ID NO: 629593 - RNA, 19 nt, Artificial Sequence
  Description of Artificial Sequence: Synthetic oligonucleotide
  Antisense strand to SEQ ID NO: 629592
guacagcagaucuuauauc

SEQ ID NO: 629594 - RNA, 19 nt, Artificial Sequence
  Description of Artificial Sequence: Synthetic oligonucleotide
  Sense strand starting at position 1633 of SEQ ID NO: 585307
ucaguuuguggugagggaa

SEQ ID NO: 629595 - RNA, 19 nt, Artificial Sequence
  Description of Artificial Sequence: Synthetic oligonucleotide
  Antisense strand to SEQ ID NO: 629594
uucccucaccacaaacuga

SEQ ID NO: 629596 - RNA, 19 nt, Artificial Sequence
  Description of Artificial Sequence: Synthetic oligonucleotide
  Sense strand starting at position 1636 of SEQ ID NO: 585307
guuuguggugagggaagaa

SEQ ID NO: 629597 - RNA, 19 nt, Artificial Sequence
  Description of Artificial Sequence: Synthetic oligonucleotide
  Antisense strand to SEQ ID NO: 629596
uucuucccucaccacaaac

SEQ ID NO: 629598 - RNA, 19 nt, Artificial Sequence
  Description of Artificial Sequence: Synthetic oligonucleotide
  Sense strand starting at position 1677 of SEQ ID NO: 585307
auacuuucugucgagacca

SEQ ID NO: 629599 - RNA, 19 nt, Artificial Sequence
  Description of Artificial Sequence: Synthetic oligonucleotide
  Antisense strand to SEQ ID NO: 629598
uggucucgacagaaaguau

SEQ ID NO: 629600 - RNA, 19 nt, Artificial Sequence
  Description of Artificial Sequence: Synthetic oligonucleotide
  Sense strand starting at position 1738 of SEQ ID NO: 585307
uccaaauguccauaggucu

SEQ ID NO: 629601 - RNA, 19 nt, Artificial Sequence
  Description of Artificial Sequence: Synthetic oligonucleotide
  Antisense strand to SEQ ID NO: 629600
agaccuauggacauuugga

SEQ ID NO: 629602 - RNA, 19 nt, Artificial Sequence
  Description of Artificial Sequence: Synthetic oligonucleotide
  Sense strand starting at position 2169 of SEQ ID NO: 585307
uuaagacuguuagucaauc

SEQ ID NO: 629603 - RNA, 19 nt, Artificial Sequence
  Description of Artificial Sequence: Synthetic oligonucleotide
  Antisense strand to SEQ ID NO: 629602
gauugacuaacagucuuaa

SEQ ID NO: 629604 - RNA, 19 nt, Artificial Sequence
  Description of Artificial Sequence: Synthetic oligonucleotide
  Sense strand starting at position 2320 of SEQ ID NO: 585307
ggagaguuugcguaaggga

SEQ ID NO: 629605 - RNA, 19 nt, Artificial Sequence
  Description of Artificial Sequence: Synthetic oligonucleotide
  Antisense strand to SEQ ID NO: 629604
ucccuuacgcaaacucucc

SEQ ID NO: 629606 - RNA, 19 nt, Artificial Sequence
  Description of Artificial Sequence: Synthetic oligonucleotide
  Sense strand starting at position 2327 of SEQ ID NO: 585307
uugcguaagggacaauaaa

SEQ ID NO: 629607 - RNA, 19 nt, Artificial Sequence
  Description of Artificial Sequence: Synthetic oligonucleotide
  Antisense strand to SEQ ID NO: 629606
uuuauugucccuuacgcaa

SEQ ID NO: 629608 - RNA, 19 nt, Artificial Sequence
  Description of Artificial Sequence: Synthetic oligonucleotide
  Sense strand starting at position 2365 of SEQ ID NO: 585307
auugucaggccauggagau

SEQ ID NO: 629609 - RNA, 19 nt, Artificial Sequence
  Description of Artificial Sequence: Synthetic oligonucleotide
  Antisense strand to SEQ ID NO: 629608
aucuccauggccugacaau

SEQ ID NO: 629610 - RNA, 19 nt, Artificial Sequence
  Description of Artificial Sequence: Synthetic oligonucleotide
  Sense strand starting at position 2375 of SEQ ID NO: 585307
cauggagauugucugaauu

SEQ ID NO: 629611 - RNA, 19 nt, Artificial Sequence
  Description of Artificial Sequence: Synthetic oligonucleotide
  Antisense strand to SEQ ID NO: 629610
aauucagacaaucuccaug

SEQ ID NO: 629612 - RNA, 19 nt, Artificial Sequence
  Description of Artificial Sequence: Synthetic oligonucleotide
  Sense strand starting at position 2494 of SEQ ID NO: 585307
cuggcauuguaucucauuu

SEQ ID NO: 629613 - RNA, 19 nt, Artificial Sequence
  Description of Artificial Sequence: Synthetic oligonucleotide
  Antisense strand to SEQ ID NO: 629612
aaaugagauacaaugccag

SEQ ID NO: 629614 - RNA, 19 nt, Artificial Sequence
  Description of Artificial Sequence: Synthetic oligonucleotide
  Sense strand starting at position 2566 of SEQ ID NO: 585307
gaugaaaggcuguaucuug

SEQ ID NO: 629615 - RNA, 19 nt, Artificial Sequence
  Description of Artificial Sequence: Synthetic oligonucleotide
  Antisense strand to SEQ ID NO: 629614
caagauacagccuuucauc

SEQ ID NO: 629616 - RNA, 19 nt, Artificial Sequence
  Description of Artificial Sequence: Synthetic oligonucleotide
  Sense strand starting at position 2604 of SEQ ID NO: 585307
uggaaauagugggcuguaa

SEQ ID NO: 629617 - RNA, 19 nt, Artificial Sequence
  Description of Artificial Sequence: Synthetic oligonucleotide
  Antisense strand to SEQ ID NO: 629616
uuacagcccacuauuucca

SEQ ID NO: 629618 - RNA, 19 nt, Artificial Sequence
  Description of Artificial Sequence: Synthetic oligonucleotide
  Sense strand starting at position 2606 of SEQ ID NO: 585307
gaaauagugggcuguaaag

SEQ ID NO: 629619 - RNA, 19 nt, Artificial Sequence
  Description of Artificial Sequence: Synthetic oligonucleotide
  Antisense strand to SEQ ID NO: 629618
cuuuacagcccacuauuuc

SEQ ID NO: 629620 - RNA, 19 nt, Artificial Sequence
  Description of Artificial Sequence: Synthetic oligonucleotide
  Sense strand starting at position 2608 of SEQ ID NO: 585307
aauagugggcuguaaagga

SEQ ID NO: 629621 - RNA, 19 nt, Artificial Sequence
  Description of Artificial Sequence: Synthetic oligonucleotide
  Antisense strand to SEQ ID NO: 629620
uccuuuacagcccacuauu

SEQ ID NO: 629622 - RNA, 19 nt, Artificial Sequence
  Description of Artificial Sequence: Synthetic oligonucleotide
  Sense strand starting at position 3062 of SEQ ID NO: 585307
uucuauugggaacguuaga

SEQ ID NO: 629623 - RNA, 19 nt, Artificial Sequence
  Description of Artificial Sequence: Synthetic oligonucleotide
  Antisense strand to SEQ ID NO: 629622
ucuaacguucccaauagaa

SEQ ID NO: 629624 - RNA, 19 nt, Artificial Sequence
  Description of Artificial Sequence: Synthetic oligonucleotide
  Sense strand starting at position 3092 of SEQ ID NO: 585307
acagaacggcuuuaauauu

SEQ ID NO: 629625 - RNA, 19 nt, Artificial Sequence
  Description of Artificial Sequence: Synthetic oligonucleotide
  Antisense strand to SEQ ID NO: 629624
aauauuaaagccguucugu

SEQ ID NO: 629626 - RNA, 19 nt, Artificial Sequence
  Description of Artificial Sequence: Synthetic oligonucleotide
  Sense strand starting at position 3231 of SEQ ID NO: 585307
acucucuuguuucugaaga

SEQ ID NO: 629627 - RNA, 19 nt, Artificial Sequence
  Description of Artificial Sequence: Synthetic oligonucleotide
  Antisense strand to SEQ ID NO: 629626
ucuucagaaacaagagagu

SEQ ID NO: 629628 - RNA, 19 nt, Artificial Sequence
  Description of Artificial Sequence: Synthetic oligonucleotide
  Sense strand starting at position 3596 of SEQ ID NO: 585307
gcaccauguuaaccaggau

SEQ ID NO: 629629 - RNA, 19 nt, Artificial Sequence
  Description of Artificial Sequence: Synthetic oligonucleotide
  Antisense strand to SEQ ID NO: 629628
auccugguuaacauggugc

SEQ ID NO: 629630 - RNA, 19 nt, Artificial Sequence
  Description of Artificial Sequence: Synthetic oligonucleotide
  Sense strand starting at position 3876 of SEQ ID NO: 585307
acuccuagaucgcuagaaa

SEQ ID NO: 629631 - RNA, 19 nt, Artificial Sequence
  Description of Artificial Sequence: Synthetic oligonucleotide
  Antisense strand to SEQ ID NO: 629630
uuucuagcgaucuaggagu

SEQ ID NO: 629632 - RNA, 19 nt, Artificial Sequence
  Description of Artificial Sequence: Synthetic oligonucleotide
  Sense strand starting at position 3877 of SEQ ID NO: 585307
cuccuagaucgcuagaaag

SEQ ID NO: 629633 - RNA, 19 nt, Artificial Sequence
  Description of Artificial Sequence: Synthetic oligonucleotide
  Antisense strand to SEQ ID NO: 629632
cuuucuagcgaucuaggag

SEQ ID NO: 629634 - RNA, 19 nt, Artificial Sequence
  Description of Artificial Sequence: Synthetic oligonucleotide
  Sense strand starting at position 14 of SEQ ID NO: 585308
agggacgcucucuaacuua

SEQ ID NO: 629635 - RNA, 19 nt, Artificial Sequence
  Description of Artificial Sequence: Synthetic oligonucleotide
  Antisense strand to SEQ ID NO: 629634
uaaguuagagagcgucccu

SEQ ID NO: 629636 - RNA, 19 nt, Artificial Sequence
  Description of Artificial Sequence: Synthetic oligonucleotide
  Sense strand starting at position 252 of SEQ ID NO: 585308
cuccuucuaguuggaagaa

SEQ ID NO: 629637 - RNA, 19 nt, Artificial Sequence
  Description of Artificial Sequence: Synthetic oligonucleotide
  Antisense strand to SEQ ID NO: 629636
uucuuccaacuagaaggag

SEQ ID NO: 629638 - RNA, 19 nt, Artificial Sequence
  Description of Artificial Sequence: Synthetic oligonucleotide
  Sense strand starting at position 528 of SEQ ID NO: 585308
ggaucacuugagcauaagu

SEQ ID NO: 629639 - RNA, 19 nt, Artificial Sequence
  Description of Artificial Sequence: Synthetic oligonucleotide
  Antisense strand to SEQ ID NO: 629638
acuuaugcucaagugaucc

SEQ ID NO: 629640 - RNA, 19 nt, Artificial Sequence
  Description of Artificial Sequence: Synthetic oligonucleotide
  Sense strand starting at position 580 of SEQ ID NO: 585308
ugagcuauagacuggguga

SEQ ID NO: 629641 - RNA, 19 nt, Artificial Sequence
  Description of Artificial Sequence: Synthetic oligonucleotide
  Antisense strand to SEQ ID NO: 629640
ucacccagucuauagcuca

SEQ ID NO: 629642 - RNA, 19 nt, Artificial Sequence
  Description of Artificial Sequence: Synthetic oligonucleotide
  Sense strand starting at position 666 of SEQ ID NO: 585308
cugugcaagcuuuagagau

SEQ ID NO: 629643 - RNA, 19 nt, Artificial Sequence
  Description of Artificial Sequence: Synthetic oligonucleotide
  Antisense strand to SEQ ID NO: 629642
aucucuaaagcuugcacag

SEQ ID NO: 629644 - RNA, 19 nt, Artificial Sequence
  Description of Artificial Sequence: Synthetic oligonucleotide
  Sense strand starting at position 676 of SEQ ID NO: 585308
uuuagagauuucuggaaau

SEQ ID NO: 629645 - RNA, 19 nt, Artificial Sequence
  Description of Artificial Sequence: Synthetic oligonucleotide
  Antisense strand to SEQ ID NO: 629644
auuuccagaaaucucuaaa

SEQ ID NO: 629646 - RNA, 19 nt, Artificial Sequence
  Description of Artificial Sequence: Synthetic oligonucleotide
  Sense strand starting at position 740 of SEQ ID NO: 585308
agcagacauggcuaguuaa

SEQ ID NO: 629647 - RNA, 19 nt, Artificial Sequence
  Description of Artificial Sequence: Synthetic oligonucleotide
  Antisense strand to SEQ ID NO: 629646
uuaacuagccaugucugcu

SEQ ID NO: 629648 - RNA, 19 nt, Artificial Sequence
  Description of Artificial Sequence: Synthetic oligonucleotide
  Sense strand starting at position 743 of SEQ ID NO: 585308
agacauggcuaguuaagga

SEQ ID NO: 629649 - RNA, 19 nt, Artificial Sequence
  Description of Artificial Sequence: Synthetic oligonucleotide
  Antisense strand to SEQ ID NO: 629648
uccuuaacuagccaugucu

SEQ ID NO: 629650 - RNA, 19 nt, Artificial Sequence
  Description of Artificial Sequence: Synthetic oligonucleotide
  Sense strand starting at position 778 of SEQ ID NO: 585308
gggugaaccuaggaaauuu

SEQ ID NO: 629651 - RNA, 19 nt, Artificial Sequence
  Description of Artificial Sequence: Synthetic oligonucleotide
  Antisense strand to SEQ ID NO: 629650
aaauuuccuagguucaccc

SEQ ID NO: 629652 - RNA, 19 nt, Artificial Sequence
  Description of Artificial Sequence: Synthetic oligonucleotide
  Sense strand starting at position 815 of SEQ ID NO: 585308
gacaaugaguucccaagac

SEQ ID NO: 629653 - RNA, 19 nt, Artificial Sequence
  Description of Artificial Sequence: Synthetic oligonucleotide
  Antisense strand to SEQ ID NO: 629652
gucuugggaacucauuguc

SEQ ID NO: 629654 - RNA, 19 nt, Artificial Sequence
  Description of Artificial Sequence: Synthetic oligonucleotide
  Sense strand starting at position 830 of SEQ ID NO: 585308
agacuugcccauugacuuu

SEQ ID NO: 629655 - RNA, 19 nt, Artificial Sequence
  Description of Artificial Sequence: Synthetic oligonucleotide
  Antisense strand to SEQ ID NO: 629654
aaagucaaugggcaagucu

SEQ ID NO: 629656 - RNA, 19 nt, Artificial Sequence
  Description of Artificial Sequence: Synthetic oligonucleotide
  Sense strand starting at position 852 of SEQ ID NO: 585308
cccuaugagacgugaacaa

SEQ ID NO: 629657 - RNA, 19 nt, Artificial Sequence
  Description of Artificial Sequence: Synthetic oligonucleotide
  Antisense strand to SEQ ID NO: 629656
uuguucacgucucauaggg

SEQ ID NO: 629658 - RNA, 19 nt, Artificial Sequence
  Description of Artificial Sequence: Synthetic oligonucleotide
  Sense strand starting at position 898 of SEQ ID NO: 585308
cagaguauauaguuugaac

SEQ ID NO: 629659 - RNA, 19 nt, Artificial Sequence
  Description of Artificial Sequence: Synthetic oligonucleotide
  Antisense strand to SEQ ID NO: 629658
guucaaacuauauacucug

SEQ ID NO: 629660 - RNA, 19 nt, Artificial Sequence
  Description of Artificial Sequence: Synthetic oligonucleotide
  Sense strand starting at position 900 of SEQ ID NO: 585308
gaguauauaguuugaacau

SEQ ID NO: 629661 - RNA, 19 nt, Artificial Sequence
  Description of Artificial Sequence: Synthetic oligonucleotide
  Antisense strand to SEQ ID NO: 629660
auguucaaacuauauacuc

SEQ ID NO: 629662 - RNA, 19 nt, Artificial Sequence
  Description of Artificial Sequence: Synthetic oligonucleotide
  Sense strand starting at position 1273 of SEQ ID NO: 585308
ccuuauaaacauuggaguu

SEQ ID NO: 629663 - RNA, 19 nt, Artificial Sequence
  Description of Artificial Sequence: Synthetic oligonucleotide
  Antisense strand to SEQ ID NO: 629662
aacuccaauguuuauaagg

SEQ ID NO: 629664 - RNA, 19 nt, Artificial Sequence
  Description of Artificial Sequence: Synthetic oligonucleotide
  Sense strand starting at position 1326 of SEQ ID NO: 585308
cuggguccauccucacaua

SEQ ID NO: 629665 - RNA, 19 nt, Artificial Sequence
  Description of Artificial Sequence: Synthetic oligonucleotide
  Antisense strand to SEQ ID NO: 629664
uaugugaggauggacccag

SEQ ID NO: 629666 - RNA, 19 nt, Artificial Sequence
  Description of Artificial Sequence: Synthetic oligonucleotide
  Sense strand starting at position 1327 of SEQ ID NO: 585308
uggguccauccucacauau

SEQ ID NO: 629667 - RNA, 19 nt, Artificial Sequence
  Description of Artificial Sequence: Synthetic oligonucleotide
  Antisense strand to SEQ ID NO: 629666
auaugugaggauggaccca

SEQ ID NO: 629668 - RNA, 19 nt, Artificial Sequence
  Description of Artificial Sequence: Synthetic oligonucleotide
  Sense strand starting at position 1389 of SEQ ID NO: 585308
cuggaucgucuaggagaga

SEQ ID NO: 629669 - RNA, 19 nt, Artificial Sequence
  Description of Artificial Sequence: Synthetic oligonucleotide
  Antisense strand to SEQ ID NO: 629668
ucucuccuagacgauccag

SEQ ID NO: 629670 - RNA, 19 nt, Artificial Sequence
  Description of Artificial Sequence: Synthetic oligonucleotide
  Sense strand starting at position 1659 of SEQ ID NO: 585308
ggaaauaauuugggaucca

SEQ ID NO: 629671 - RNA, 19 nt, Artificial Sequence
  Description of Artificial Sequence: Synthetic oligonucleotide
  Antisense strand to SEQ ID NO: 629670
uggaucccaaauuauuucc

SEQ ID NO: 629672 - RNA, 19 nt, Artificial Sequence
  Description of Artificial Sequence: Synthetic oligonucleotide
  Sense strand starting at position 1709 of SEQ ID NO: 585308
gucacaauuucuuaaggga

SEQ ID NO: 629673 - RNA, 19 nt, Artificial Sequence
  Description of Artificial Sequence: Synthetic oligonucleotide
  Antisense strand to SEQ ID NO: 629672
ucccuuaagaaauugugac

SEQ ID NO: 629674 - RNA, 19 nt, Artificial Sequence
  Description of Artificial Sequence: Synthetic oligonucleotide
  Sense strand starting at position 1712 of SEQ ID NO: 585308
acaauuucuuaagggacau

SEQ ID NO: 629675 - RNA, 19 nt, Artificial Sequence
  Description of Artificial Sequence: Synthetic oligonucleotide
  Antisense strand to SEQ ID NO: 629674
augucccuuaagaaauugu

SEQ ID NO: 629676 - RNA, 19 nt, Artificial Sequence
  Description of Artificial Sequence: Synthetic oligonucleotide
  Sense strand starting at position 1991 of SEQ ID NO: 585308
aaguuauagggaggaaguu

SEQ ID NO: 629677 - RNA, 19 nt, Artificial Sequence
  Description of Artificial Sequence: Synthetic oligonucleotide
  Antisense strand to SEQ ID NO: 629676
aacuuccucccuauaacuu

SEQ ID NO: 629678 - RNA, 19 nt, Artificial Sequence
  Description of Artificial Sequence: Synthetic oligonucleotide
  Sense strand starting at position 2486 of SEQ ID NO: 585308
aaaugugauucuguggaug

SEQ ID NO: 629679 - RNA, 19 nt, Artificial Sequence
  Description of Artificial Sequence: Synthetic oligonucleotide
  Antisense strand to SEQ ID NO: 629678
cauccacagaaucacauuu

SEQ ID NO: 629680 - RNA, 19 nt, Artificial Sequence
  Description of Artificial Sequence: Synthetic oligonucleotide
  Sense strand starting at position 2524 of SEQ ID NO: 585308
cggguaucugaugauauga

SEQ ID NO: 629681 - RNA, 19 nt, Artificial Sequence
  Description of Artificial Sequence: Synthetic oligonucleotide
  Antisense strand to SEQ ID NO: 629680
ucauaucaucagauacccg

SEQ ID NO: 629682 - RNA, 19 nt, Artificial Sequence
  Description of Artificial Sequence: Synthetic oligonucleotide
  Sense strand starting at position 2553 of SEQ ID NO: 585308
gcuguugaccggagagcuu

SEQ ID NO: 629683 - RNA, 19 nt, Artificial Sequence
  Description of Artificial Sequence: Synthetic oligonucleotide
  Antisense strand to SEQ ID NO: 629682
aagcucuccggucaacagc

SEQ ID NO: 629684 - RNA, 19 nt, Artificial Sequence
  Description of Artificial Sequence: Synthetic oligonucleotide
  Sense strand starting at position 2565 of SEQ ID NO: 585308
agagcuuaaucuguaccua

SEQ ID NO: 629685 - RNA, 19 nt, Artificial Sequence
  Description of Artificial Sequence: Synthetic oligonucleotide
  Antisense strand to SEQ ID NO: 629684
uagguacagauuaagcucu

SEQ ID NO: 629686 - RNA, 19 nt, Artificial Sequence
  Description of Artificial Sequence: Synthetic oligonucleotide
  Sense strand starting at position 2590 of SEQ ID NO: 585308
gguagagaugucuguaaua

SEQ ID NO: 629687 - RNA, 19 nt, Artificial Sequence
  Description of Artificial Sequence: Synthetic oligonucleotide
  Antisense strand to SEQ ID NO: 629686
uauuacagacaucucuacc

SEQ ID NO: 629688 - RNA, 19 nt, Artificial Sequence
  Description of Artificial Sequence: Synthetic oligonucleotide
  Sense strand starting at position 2698 of SEQ ID NO: 585308
gugucaucuccagaacaca

SEQ ID NO: 629689 - RNA, 19 nt, Artificial Sequence
  Description of Artificial Sequence: Synthetic oligonucleotide
  Antisense strand to SEQ ID NO: 629688
uguguucuggagaugacac

SEQ ID NO: 629690 - RNA, 19 nt, Artificial Sequence
  Description of Artificial Sequence: Synthetic oligonucleotide
  Sense strand starting at position 2802 of SEQ ID NO: 585308
uaaggucaacuguguaauc

SEQ ID NO: 629691 - RNA, 19 nt, Artificial Sequence
  Description of Artificial Sequence: Synthetic oligonucleotide
  Antisense strand to SEQ ID NO: 629690
gauuacacaguugaccuua

SEQ ID NO: 629692 - RNA, 19 nt, Artificial Sequence
  Description of Artificial Sequence: Synthetic oligonucleotide
  Sense strand starting at position 2803 of SEQ ID NO: 585308
aaggucaacuguguaauca

SEQ ID NO: 629693 - RNA, 19 nt, Artificial Sequence
  Description of Artificial Sequence: Synthetic oligonucleotide
  Antisense strand to SEQ ID NO: 629692
ugauuacacaguugaccuu

SEQ ID NO: 629694 - RNA, 19 nt, Artificial Sequence
  Description of Artificial Sequence: Synthetic oligonucleotide
  Sense strand starting at position 2804 of SEQ ID NO: 585308
aggucaacuguguaaucaa

SEQ ID NO: 629695 - RNA, 19 nt, Artificial Sequence
  Description of Artificial Sequence: Synthetic oligonucleotide
  Antisense strand to SEQ ID NO: 629694
uugauuacacaguugaccu

SEQ ID NO: 629696 - RNA, 19 nt, Artificial Sequence
  Description of Artificial Sequence: Synthetic oligonucleotide
  Sense strand starting at position 2807 of SEQ ID NO: 585308
ucaacuguguaaucaaagu

SEQ ID NO: 629697 - RNA, 19 nt, Artificial Sequence
  Description of Artificial Sequence: Synthetic oligonucleotide
  Antisense strand to SEQ ID NO: 629696
acuuugauuacacaguuga

SEQ ID NO: 629698 - RNA, 19 nt, Artificial Sequence
  Description of Artificial Sequence: Synthetic oligonucleotide
  Sense strand starting at position 2813 of SEQ ID NO: 585308
guguaaucaaaguaugcag

SEQ ID NO: 629699 - RNA, 19 nt, Artificial Sequence
  Description of Artificial Sequence: Synthetic oligonucleotide
  Antisense strand to SEQ ID NO: 629698
cugcauacuuugauuacac

SEQ ID NO: 629700 - RNA, 19 nt, Artificial Sequence
  Description of Artificial Sequence: Synthetic oligonucleotide
  Sense strand starting at position 2834 of SEQ ID NO: 585308
ggcugagaugaucgaucaa

SEQ ID NO: 629701 - RNA, 19 nt, Artificial Sequence
  Description of Artificial Sequence: Synthetic oligonucleotide
  Antisense strand to SEQ ID NO: 629700
uugaucgaucaucucagcc

SEQ ID NO: 629702 - RNA, 19 nt, Artificial Sequence
  Description of Artificial Sequence: Synthetic oligonucleotide
  Sense strand starting at position 3007 of SEQ ID NO: 585308
aagggaagauauuagaaga

SEQ ID NO: 629703 - RNA, 19 nt, Artificial Sequence
  Description of Artificial Sequence: Synthetic oligonucleotide
  Antisense strand to SEQ ID NO: 629702
ucuucuaauaucuucccuu

SEQ ID NO: 629704 - RNA, 19 nt, Artificial Sequence
  Description of Artificial Sequence: Synthetic oligonucleotide
  Sense strand starting at position 3340 of SEQ ID NO: 585308
uaacuaguacguuacagaa

SEQ ID NO: 629705 - RNA, 19 nt, Artificial Sequence
  Description of Artificial Sequence: Synthetic oligonucleotide
  Antisense strand to SEQ ID NO: 629704
uucuguaacguacuaguua

SEQ ID NO: 629706 - RNA, 19 nt, Artificial Sequence
  Description of Artificial Sequence: Synthetic oligonucleotide
  Sense strand starting at position 3589 of SEQ ID NO: 585308
uguuucuaggaaugagaua

SEQ ID NO: 629707 - RNA, 19 nt, Artificial Sequence
  Description of Artificial Sequence: Synthetic oligonucleotide
  Antisense strand to SEQ ID NO: 629706
uaucucauuccuagaaaca

SEQ ID NO: 629708 - RNA, 19 nt, Artificial Sequence
  Description of Artificial Sequence: Synthetic oligonucleotide
  Sense strand starting at position 3600 of SEQ ID NO: 585308
augagauacucaccaugcu

SEQ ID NO: 629709 - RNA, 19 nt, Artificial Sequence
  Description of Artificial Sequence: Synthetic oligonucleotide
  Antisense strand to SEQ ID NO: 629708
agcauggugaguaucucau

SEQ ID NO: 629710 - RNA, 19 nt, Artificial Sequence
  Description of Artificial Sequence: Synthetic oligonucleotide
  Sense strand starting at position 3925 of SEQ ID NO: 585308
ggauuaguaaagggccaua

SEQ ID NO: 629711 - RNA, 19 nt, Artificial Sequence
  Description of Artificial Sequence: Synthetic oligonucleotide
  Antisense strand to SEQ ID NO: 629710
uauggcccuuuacuaaucc

SEQ ID NO: 629712 - RNA, 19 nt, Artificial Sequence
  Description of Artificial Sequence: Synthetic oligonucleotide
  Sense strand starting at position 3936 of SEQ ID NO: 585308
gggccauagccucaaacaa

SEQ ID NO: 629713 - RNA, 19 nt, Artificial Sequence
  Description of Artificial Sequence: Synthetic oligonucleotide
  Antisense strand to SEQ ID NO: 629712
uuguuugaggcuauggccc

SEQ ID NO: 629714 - RNA, 19 nt, Artificial Sequence
  Description of Artificial Sequence: Synthetic oligonucleotide
  Sense strand starting at position 96 of SEQ ID NO: 585309
uuguguaaccuugagaguc

SEQ ID NO: 629715 - RNA, 19 nt, Artificial Sequence
  Description of Artificial Sequence: Synthetic oligonucleotide
  Antisense strand to SEQ ID NO: 629714
gacucucaagguuacacaa

SEQ ID NO: 629716 - RNA, 19 nt, Artificial Sequence
  Description of Artificial Sequence: Synthetic oligonucleotide
  Sense strand starting at position 311 of SEQ ID NO: 585309
uucuccucccggugagaaa

SEQ ID NO: 629717 - RNA, 19 nt, Artificial Sequence
  Description of Artificial Sequence: Synthetic oligonucleotide
  Antisense strand to SEQ ID NO: 629716
uuucucaccgggaggagaa

SEQ ID NO: 629718 - RNA, 19 nt, Artificial Sequence
  Description of Artificial Sequence: Synthetic oligonucleotide
  Sense strand starting at position 312 of SEQ ID NO: 585309
ucuccucccggugagaaau

SEQ ID NO: 629719 - RNA, 19 nt, Artificial Sequence
  Description of Artificial Sequence: Synthetic oligonucleotide
  Antisense strand to SEQ ID NO: 629718
auuucucaccgggaggaga

SEQ ID NO: 629720 - RNA, 19 nt, Artificial Sequence
  Description of Artificial Sequence: Synthetic oligonucleotide
  Sense strand starting at position 322 of SEQ ID NO: 585309
gugagaaauacaggcaaau

SEQ ID NO: 629721 - RNA, 19 nt, Artificial Sequence
  Description of Artificial Sequence: Synthetic oligonucleotide
  Antisense strand to SEQ ID NO: 629720
auuugccuguauuucucac

SEQ ID NO: 629722 - RNA, 19 nt, Artificial Sequence
  Description of Artificial Sequence: Synthetic oligonucleotide
  Sense strand starting at position 621 of SEQ ID NO: 585309
gaaggauagcuugagucuu

SEQ ID NO: 629723 - RNA, 19 nt, Artificial Sequence
  Description of Artificial Sequence: Synthetic oligonucleotide
  Antisense strand to SEQ ID NO: 629722
aagacucaagcuauccuuc

SEQ ID NO: 629724 - RNA, 19 nt, Artificial Sequence
  Description of Artificial Sequence: Synthetic oligonucleotide
  Sense strand starting at position 751 of SEQ ID NO: 585309
gugcuaaggaucugugcaa

SEQ ID NO: 629725 - RNA, 19 nt, Artificial Sequence
  Description of Artificial Sequence: Synthetic oligonucleotide
  Antisense strand to SEQ ID NO: 629724
uugcacagauccuuagcac

SEQ ID NO: 629726 - RNA, 19 nt, Artificial Sequence
  Description of Artificial Sequence: Synthetic oligonucleotide
  Sense strand starting at position 755 of SEQ ID NO: 585309
uaaggaucugugcaagcuu

SEQ ID NO: 629727 - RNA, 19 nt, Artificial Sequence
  Description of Artificial Sequence: Synthetic oligonucleotide
  Antisense strand to SEQ ID NO: 629726
aagcuugcacagauccuua

SEQ ID NO: 629728 - RNA, 19 nt, Artificial Sequence
  Description of Artificial Sequence: Synthetic oligonucleotide
  Sense strand starting at position 762 of SEQ ID NO: 585309
cugugcaagcuuuagggau

SEQ ID NO: 629729 - RNA, 19 nt, Artificial Sequence
  Description of Artificial Sequence: Synthetic oligonucleotide
  Antisense strand to SEQ ID NO: 629728
aucccuaaagcuugcacag

SEQ ID NO: 629730 - RNA, 19 nt, Artificial Sequence
  Description of Artificial Sequence: Synthetic oligonucleotide
  Sense strand starting at position 784 of SEQ ID NO: 585309
uggauaugaugacaacaua

SEQ ID NO: 629731 - RNA, 19 nt, Artificial Sequence
  Description of Artificial Sequence: Synthetic oligonucleotide
  Antisense strand to SEQ ID NO: 629730
uauguugucaucauaucca

SEQ ID NO: 629732 - RNA, 19 nt, Artificial Sequence
  Description of Artificial Sequence: Synthetic oligonucleotide
  Sense strand starting at position 886 of SEQ ID NO: 585309
cuaugaaauuuaggacaag

SEQ ID NO: 629733 - RNA, 19 nt, Artificial Sequence
  Description of Artificial Sequence: Synthetic oligonucleotide
  Antisense strand to SEQ ID NO: 629732
cuuguccuaaauuucauag

SEQ ID NO: 629734 - RNA, 19 nt, Artificial Sequence
  Description of Artificial Sequence: Synthetic oligonucleotide
  Sense strand starting at position 950 of SEQ ID NO: 585309
agcccuaugagaugugaac

SEQ ID NO: 629735 - RNA, 19 nt, Artificial Sequence
  Description of Artificial Sequence: Synthetic oligonucleotide
  Antisense strand to SEQ ID NO: 629734
guucacaucucauagggcu

SEQ ID NO: 629736 - RNA, 19 nt, Artificial Sequence
  Description of Artificial Sequence: Synthetic oligonucleotide
  Sense strand starting at position 1077 of SEQ ID NO: 585309
uguccuauguuaguugaau

SEQ ID NO: 629737 - RNA, 19 nt, Artificial Sequence
  Description of Artificial Sequence: Synthetic oligonucleotide
  Antisense strand to SEQ ID NO: 629736
auucaacuaacauaggaca

SEQ ID NO: 629738 - RNA, 19 nt, Artificial Sequence
  Description of Artificial Sequence: Synthetic oligonucleotide
  Sense strand starting at position 1078 of SEQ ID NO: 585309
guccuauguuaguugaauc

SEQ ID NO: 629739 - RNA, 19 nt, Artificial Sequence
  Description of Artificial Sequence: Synthetic oligonucleotide
  Antisense strand to SEQ ID NO: 629738
gauucaacuaacauaggac

SEQ ID NO: 629740 - RNA, 19 nt, Artificial Sequence
  Description of Artificial Sequence: Synthetic oligonucleotide
  Sense strand starting at position 1116 of SEQ ID NO: 585309
uagagcauguaggagauau

SEQ ID NO: 629741 - RNA, 19 nt, Artificial Sequence
  Description of Artificial Sequence: Synthetic oligonucleotide
  Antisense strand to SEQ ID NO: 629740
auaucuccuacaugcucua

SEQ ID NO: 629742 - RNA, 19 nt, Artificial Sequence
  Description of Artificial Sequence: Synthetic oligonucleotide
  Sense strand starting at position 1197 of SEQ ID NO: 585309
uuuagaggaugccuuaagu

SEQ ID NO: 629743 - RNA, 19 nt, Artificial Sequence
  Description of Artificial Sequence: Synthetic oligonucleotide
  Antisense strand to SEQ ID NO: 629742
acuuaaggcauccucuaaa

SEQ ID NO: 629744 - RNA, 19 nt, Artificial Sequence
  Description of Artificial Sequence: Synthetic oligonucleotide
  Sense strand starting at position 1362 of SEQ ID NO: 585309
caggguaaacauuggaguu

SEQ ID NO: 629745 - RNA, 19 nt, Artificial Sequence
  Description of Artificial Sequence: Synthetic oligonucleotide
  Antisense strand to SEQ ID NO: 629744
aacuccaauguuuacccug

SEQ ID NO: 629746 - RNA, 19 nt, Artificial Sequence
  Description of Artificial Sequence: Synthetic oligonucleotide
  Sense strand starting at position 1364 of SEQ ID NO: 585309
ggguaaacauuggaguuca

SEQ ID NO: 629747 - RNA, 19 nt, Artificial Sequence
  Description of Artificial Sequence: Synthetic oligonucleotide
  Antisense strand to SEQ ID NO: 629746
ugaacuccaauguuuaccc

SEQ ID NO: 629748 - RNA, 19 nt, Artificial Sequence
  Description of Artificial Sequence: Synthetic oligonucleotide
  Sense strand starting at position 1415 of SEQ ID NO: 585309
cuggguccauucucacaua

SEQ ID NO: 629749 - RNA, 19 nt, Artificial Sequence
  Description of Artificial Sequence: Synthetic oligonucleotide
  Antisense strand to SEQ ID NO: 629748
uaugugagaauggacccag

SEQ ID NO: 629750 - RNA, 19 nt, Artificial Sequence
  Description of Artificial Sequence: Synthetic oligonucleotide
  Sense strand starting at position 1457 of SEQ ID NO: 585309
agguucugucaagggcaua

SEQ ID NO: 629751 - RNA, 19 nt, Artificial Sequence
  Description of Artificial Sequence: Synthetic oligonucleotide
  Antisense strand to SEQ ID NO: 629750
uaugcccuugacagaaccu

SEQ ID NO: 629752 - RNA, 19 nt, Artificial Sequence
  Description of Artificial Sequence: Synthetic oligonucleotide
  Sense strand starting at position 1458 of SEQ ID NO: 585309
gguucugucaagggcauaa

SEQ ID NO: 629753 - RNA, 19 nt, Artificial Sequence
  Description of Artificial Sequence: Synthetic oligonucleotide
  Antisense strand to SEQ ID NO: 629752
uuaugcccuugacagaacc

SEQ ID NO: 629754 - RNA, 19 nt, Artificial Sequence
  Description of Artificial Sequence: Synthetic oligonucleotide
  Sense strand starting at position 1480 of SEQ ID NO: 585309
aggauugucuaggagagac

SEQ ID NO: 629755 - RNA, 19 nt, Artificial Sequence
  Description of Artificial Sequence: Synthetic oligonucleotide
  Antisense strand to SEQ ID NO: 629754
gucucuccuagacaauccu

SEQ ID NO: 629756 - RNA, 19 nt, Artificial Sequence
  Description of Artificial Sequence: Synthetic oligonucleotide
  Sense strand starting at position 1653 of SEQ ID NO: 585309
gguuucauugguggagauu

SEQ ID NO: 629757 - RNA, 19 nt, Artificial Sequence
  Description of Artificial Sequence: Synthetic oligonucleotide
  Antisense strand to SEQ ID NO: 629756
aaucuccaccaaugaaacc

SEQ ID NO: 629758 - RNA, 19 nt, Artificial Sequence
  Description of Artificial Sequence: Synthetic oligonucleotide
  Sense strand starting at position 1759 of SEQ ID NO: 585309
gggaucccaugauaaagau

SEQ ID NO: 629759 - RNA, 19 nt, Artificial Sequence
  Description of Artificial Sequence: Synthetic oligonucleotide
  Antisense strand to SEQ ID NO: 629758
aucuuuaucaugggauccc

SEQ ID NO: 629760 - RNA, 19 nt, Artificial Sequence
  Description of Artificial Sequence: Synthetic oligonucleotide
  Sense strand starting at position 1798 of SEQ ID NO: 585309
gucacaauuucuuaaggca

SEQ ID NO: 629761 - RNA, 19 nt, Artificial Sequence
  Description of Artificial Sequence: Synthetic oligonucleotide
  Antisense strand to SEQ ID NO: 629760
ugccuuaagaaauugugac

SEQ ID NO: 629762 - RNA, 19 nt, Artificial Sequence
  Description of Artificial Sequence: Synthetic oligonucleotide
  Sense strand starting at position 1947 of SEQ ID NO: 585309
cugucagcuuugccaugua

SEQ ID NO: 629763 - RNA, 19 nt, Artificial Sequence
  Description of Artificial Sequence: Synthetic oligonucleotide
  Antisense strand to SEQ ID NO: 629762
uacauggcaaagcugacag

SEQ ID NO: 629764 - RNA, 19 nt, Artificial Sequence
  Description of Artificial Sequence: Synthetic oligonucleotide
  Sense strand starting at position 1950 of SEQ ID NO: 585309
ucagcuuugccauguagga

SEQ ID NO: 629765 - RNA, 19 nt, Artificial Sequence
  Description of Artificial Sequence: Synthetic oligonucleotide
  Antisense strand to SEQ ID NO: 629764
uccuacauggcaaagcuga

SEQ ID NO: 629766 - RNA, 19 nt, Artificial Sequence
  Description of Artificial Sequence: Synthetic oligonucleotide
  Sense strand starting at position 2161 of SEQ ID NO: 585309
ucaauaguaucaucaguug

SEQ ID NO: 629767 - RNA, 19 nt, Artificial Sequence
  Description of Artificial Sequence: Synthetic oligonucleotide
  Antisense strand to SEQ ID NO: 629766
caacugaugauacuauuga

SEQ ID NO: 629768 - RNA, 19 nt, Artificial Sequence
  Description of Artificial Sequence: Synthetic oligonucleotide
  Sense strand starting at position 2381 of SEQ ID NO: 585309
caagacaauuguuugcaga

SEQ ID NO: 629769 - RNA, 19 nt, Artificial Sequence
  Description of Artificial Sequence: Synthetic oligonucleotide
  Antisense strand to SEQ ID NO: 629768
ucugcaaacaauugucuug

SEQ ID NO: 629770 - RNA, 19 nt, Artificial Sequence
  Description of Artificial Sequence: Synthetic oligonucleotide
  Sense strand starting at position 2383 of SEQ ID NO: 585309
agacaauuguuugcagaag

SEQ ID NO: 629771 - RNA, 19 nt, Artificial Sequence
  Description of Artificial Sequence: Synthetic oligonucleotide
  Antisense strand to SEQ ID NO: 629770
cuucugcaaacaauugucu

SEQ ID NO: 629772 - RNA, 19 nt, Artificial Sequence
  Description of Artificial Sequence: Synthetic oligonucleotide
  Sense strand starting at position 2438 of SEQ ID NO: 585309
agggaacaugguuguaaau

SEQ ID NO: 629773 - RNA, 19 nt, Artificial Sequence
  Description of Artificial Sequence: Synthetic oligonucleotide
  Antisense strand to SEQ ID NO: 629772
auuuacaaccauguucccu

SEQ ID NO: 629774 - RNA, 19 nt, Artificial Sequence
  Description of Artificial Sequence: Synthetic oligonucleotide
  Sense strand starting at position 2440 of SEQ ID NO: 585309
ggaacaugguuguaaauug

SEQ ID NO: 629775 - RNA, 19 nt, Artificial Sequence
  Description of Artificial Sequence: Synthetic oligonucleotide
  Antisense strand to SEQ ID NO: 629774
caauuuacaaccauguucc

SEQ ID NO: 629776 - RNA, 19 nt, Artificial Sequence
  Description of Artificial Sequence: Synthetic oligonucleotide
  Sense strand starting at position 2477 of SEQ ID NO: 585309
cuuauugcaccguaucuua

SEQ ID NO: 629777 - RNA, 19 nt, Artificial Sequence
  Description of Artificial Sequence: Synthetic oligonucleotide
  Antisense strand to SEQ ID NO: 629776
uaagauacggugcaauaag

SEQ ID NO: 629778 - RNA, 19 nt, Artificial Sequence
  Description of Artificial Sequence: Synthetic oligonucleotide
  Sense strand starting at position 2574 of SEQ ID NO: 585309
uggacaaugcugugauucu

SEQ ID NO: 629779 - RNA, 19 nt, Artificial Sequence
  Description of Artificial Sequence: Synthetic oligonucleotide
  Antisense strand to SEQ ID NO: 629778
agaaucacagcauugucca

SEQ ID NO: 629780 - RNA, 19 nt, Artificial Sequence
  Description of Artificial Sequence: Synthetic oligonucleotide
  Sense strand starting at position 2660 of SEQ ID NO: 585309
agagcuuaauccguaccua

SEQ ID NO: 629781 - RNA, 19 nt, Artificial Sequence
  Description of Artificial Sequence: Synthetic oligonucleotide
  Antisense strand to SEQ ID NO: 629780
uagguacggauuaagcucu

SEQ ID NO: 629782 - RNA, 19 nt, Artificial Sequence
  Description of Artificial Sequence: Synthetic oligonucleotide
  Sense strand starting at position 2661 of SEQ ID NO: 585309
gagcuuaauccguaccuau

SEQ ID NO: 629783 - RNA, 19 nt, Artificial Sequence
  Description of Artificial Sequence: Synthetic oligonucleotide
  Antisense strand to SEQ ID NO: 629782
auagguacggauuaagcuc

SEQ ID NO: 629784 - RNA, 19 nt, Artificial Sequence
  Description of Artificial Sequence: Synthetic oligonucleotide
  Sense strand starting at position 2904 of SEQ ID NO: 585309
aacugugcaguccaaguau

SEQ ID NO: 629785 - RNA, 19 nt, Artificial Sequence
  Description of Artificial Sequence: Synthetic oligonucleotide
  Antisense strand to SEQ ID NO: 629784
auacuuggacugcacaguu

SEQ ID NO: 629786 - RNA, 19 nt, Artificial Sequence
  Description of Artificial Sequence: Synthetic oligonucleotide
  Sense strand starting at position 2916 of SEQ ID NO: 585309
caaguauucgugggucuga

SEQ ID NO: 629787 - RNA, 19 nt, Artificial Sequence
  Description of Artificial Sequence: Synthetic oligonucleotide
  Antisense strand to SEQ ID NO: 629786
ucagacccacgaauacuug

SEQ ID NO: 629788 - RNA, 19 nt, Artificial Sequence
  Description of Artificial Sequence: Synthetic oligonucleotide
  Sense strand starting at position 2925 of SEQ ID NO: 585309
gugggucugagagaucgau

SEQ ID NO: 629789 - RNA, 19 nt, Artificial Sequence
  Description of Artificial Sequence: Synthetic oligonucleotide
  Antisense strand to SEQ ID NO: 629788
aucgaucucucagacccac

SEQ ID NO: 629790 - RNA, 19 nt, Artificial Sequence
  Description of Artificial Sequence: Synthetic oligonucleotide
  Sense strand starting at position 3844 of SEQ ID NO: 585309
gccgucaucccgucuaaga

SEQ ID NO: 629791 - RNA, 19 nt, Artificial Sequence
  Description of Artificial Sequence: Synthetic oligonucleotide
  Antisense strand to SEQ ID NO: 629790
ucuuagacgggaugacggc

SEQ ID NO: 629792 - RNA, 19 nt, Artificial Sequence
  Description of Artificial Sequence: Synthetic oligonucleotide
  Sense strand starting at position 3846 of SEQ ID NO: 585309
cgucaucccgucuaagaag

SEQ ID NO: 629793 - RNA, 19 nt, Artificial Sequence
  Description of Artificial Sequence: Synthetic oligonucleotide
  Antisense strand to SEQ ID NO: 629792
cuucuuagacgggaugacg

SEQ ID NO: 629794 - RNA, 19 nt, Artificial Sequence
  Description of Artificial Sequence: Synthetic oligonucleotide
  Sense strand starting at position 296 of SEQ ID NO: 585310
ggcacuuuguaucucucau

SEQ ID NO: 629795 - RNA, 19 nt, Artificial Sequence
  Description of Artificial Sequence: Synthetic oligonucleotide
  Antisense strand to SEQ ID NO: 629794
augagagauacaaagugcc

SEQ ID NO: 629796 - RNA, 19 nt, Artificial Sequence
  Description of Artificial Sequence: Synthetic oligonucleotide
  Sense strand starting at position 338 of SEQ ID NO: 585310
ugaccauccugagaaggaa

SEQ ID NO: 629797 - RNA, 19 nt, Artificial Sequence
  Description of Artificial Sequence: Synthetic oligonucleotide
  Antisense strand to SEQ ID NO: 629796
uuccuucucaggaugguca

SEQ ID NO: 629798 - RNA, 19 nt, Artificial Sequence
  Description of Artificial Sequence: Synthetic oligonucleotide
  Sense strand starting at position 359 of SEQ ID NO: 585310
ggacaauuauaguaggaga

SEQ ID NO: 629799 - RNA, 19 nt, Artificial Sequence
  Description of Artificial Sequence: Synthetic oligonucleotide
  Antisense strand to SEQ ID NO: 629798
ucuccuacuauaauugucc

SEQ ID NO: 629800 - RNA, 19 nt, Artificial Sequence
  Description of Artificial Sequence: Synthetic oligonucleotide
  Sense strand starting at position 362 of SEQ ID NO: 585310
caauuauaguaggagaaga

SEQ ID NO: 629801 - RNA, 19 nt, Artificial Sequence
  Description of Artificial Sequence: Synthetic oligonucleotide
  Antisense strand to SEQ ID NO: 629800
ucuucuccuacuauaauug

SEQ ID NO: 629802 - RNA, 19 nt, Artificial Sequence
  Description of Artificial Sequence: Synthetic oligonucleotide
  Sense strand starting at position 423 of SEQ ID NO: 585310
agccucuuauuccuuggaa

SEQ ID NO: 629803 - RNA, 19 nt, Artificial Sequence
  Description of Artificial Sequence: Synthetic oligonucleotide
  Antisense strand to SEQ ID NO: 629802
uuccaaggaauaagaggcu

SEQ ID NO: 629804 - RNA, 19 nt, Artificial Sequence
  Description of Artificial Sequence: Synthetic oligonucleotide
  Sense strand starting at position 424 of SEQ ID NO: 585310
gccucuuauuccuuggaaa

SEQ ID NO: 629805 - RNA, 19 nt, Artificial Sequence
  Description of Artificial Sequence: Synthetic oligonucleotide
  Antisense strand to SEQ ID NO: 629804
uuuccaaggaauaagaggc

SEQ ID NO: 629806 - RNA, 19 nt, Artificial Sequence
  Description of Artificial Sequence: Synthetic oligonucleotide
  Sense strand starting at position 425 of SEQ ID NO: 585310
ccucuuauuccuuggaaag

SEQ ID NO: 629807 - RNA, 19 nt, Artificial Sequence
  Description of Artificial Sequence: Synthetic oligonucleotide
  Antisense strand to SEQ ID NO: 629806
cuuuccaaggaauaagagg

SEQ ID NO: 629808 - RNA, 19 nt, Artificial Sequence
  Description of Artificial Sequence: Synthetic oligonucleotide
  Sense strand starting at position 442 of SEQ ID NO: 585310
aguucuagaaucgggauga

SEQ ID NO: 629809 - RNA, 19 nt, Artificial Sequence
  Description of Artificial Sequence: Synthetic oligonucleotide
  Antisense strand to SEQ ID NO: 629808
ucaucccgauucuagaacu

SEQ ID NO: 629810 - RNA, 19 nt, Artificial Sequence
  Description of Artificial Sequence: Synthetic oligonucleotide
  Sense strand starting at position 446 of SEQ ID NO: 585310
cuagaaucgggaugagcua

SEQ ID NO: 629811 - RNA, 19 nt, Artificial Sequence
  Description of Artificial Sequence: Synthetic oligonucleotide
  Antisense strand to SEQ ID NO: 629810
uagcucaucccgauucuag

SEQ ID NO: 629812 - RNA, 19 nt, Artificial Sequence
  Description of Artificial Sequence: Synthetic oligonucleotide
  Sense strand starting at position 511 of SEQ ID NO: 585310
gaugcugagugacugagaa

SEQ ID NO: 629813 - RNA, 19 nt, Artificial Sequence
  Description of Artificial Sequence: Synthetic oligonucleotide
  Antisense strand to SEQ ID NO: 629812
uucucagucacucagcauc

SEQ ID NO: 629814 - RNA, 19 nt, Artificial Sequence
  Description of Artificial Sequence: Synthetic oligonucleotide
  Sense strand starting at position 602 of SEQ ID NO: 585310
uuccuaauacugggaguca

SEQ ID NO: 629815 - RNA, 19 nt, Artificial Sequence
  Description of Artificial Sequence: Synthetic oligonucleotide
  Antisense strand to SEQ ID NO: 629814
ugacucccaguauuaggaa

SEQ ID NO: 629816 - RNA, 19 nt, Artificial Sequence
  Description of Artificial Sequence: Synthetic oligonucleotide
  Sense strand starting at position 621 of SEQ ID NO: 585310
aagagaacugcucaucagu

SEQ ID NO: 629817 - RNA, 19 nt, Artificial Sequence
  Description of Artificial Sequence: Synthetic oligonucleotide
  Antisense strand to SEQ ID NO: 629816
acugaugagcaguucucuu

SEQ ID NO: 629818 - RNA, 19 nt, Artificial Sequence
  Description of Artificial Sequence: Synthetic oligonucleotide
  Sense strand starting at position 623 of SEQ ID NO: 585310
gagaacugcucaucaguuc

SEQ ID NO: 629819 - RNA, 19 nt, Artificial Sequence
  Description of Artificial Sequence: Synthetic oligonucleotide
  Antisense strand to SEQ ID NO: 629818
gaacugaugagcaguucuc

SEQ ID NO: 629820 - RNA, 19 nt, Artificial Sequence
  Description of Artificial Sequence: Synthetic oligonucleotide
  Sense strand starting at position 652 of SEQ ID NO: 585310
uggaaucuccagcgagacu

SEQ ID NO: 629821 - RNA, 19 nt, Artificial Sequence
  Description of Artificial Sequence: Synthetic oligonucleotide
  Antisense strand to SEQ ID NO: 629820
agucucgcuggagauucca

SEQ ID NO: 629822 - RNA, 19 nt, Artificial Sequence
  Description of Artificial Sequence: Synthetic oligonucleotide
  Sense strand starting at position 653 of SEQ ID NO: 585310
ggaaucuccagcgagacua

SEQ ID NO: 629823 - RNA, 19 nt, Artificial Sequence
  Description of Artificial Sequence: Synthetic oligonucleotide
  Antisense strand to SEQ ID NO: 629822
uagucucgcuggagauucc

SEQ ID NO: 629824 - RNA, 19 nt, Artificial Sequence
  Description of Artificial Sequence: Synthetic oligonucleotide
  Sense strand starting at position 711 of SEQ ID NO: 585310
gagagucacucugugguau

SEQ ID NO: 629825 - RNA, 19 nt, Artificial Sequence
  Description of Artificial Sequence: Synthetic oligonucleotide
  Antisense strand to SEQ ID NO: 629824
auaccacagagugacucuc

SEQ ID NO: 629826 - RNA, 19 nt, Artificial Sequence
  Description of Artificial Sequence: Synthetic oligonucleotide
  Sense strand starting at position 712 of SEQ ID NO: 585310
agagucacucugugguaua

SEQ ID NO: 629827 - RNA, 19 nt, Artificial Sequence
  Description of Artificial Sequence: Synthetic oligonucleotide
  Antisense strand to SEQ ID NO: 629826
uauaccacagagugacucu

SEQ ID NO: 629828 - RNA, 19 nt, Artificial Sequence
  Description of Artificial Sequence: Synthetic oligonucleotide
  Sense strand starting at position 2001 of SEQ ID NO: 585310
cgucaugaguauccaggaa

SEQ ID NO: 629829 - RNA, 19 nt, Artificial Sequence
  Description of Artificial Sequence: Synthetic oligonucleotide
  Antisense strand to SEQ ID NO: 629828
uuccuggauacucaugacg

SEQ ID NO: 629830 - RNA, 19 nt, Artificial Sequence
  Description of Artificial Sequence: Synthetic oligonucleotide
  Sense strand starting at position 2433 of SEQ ID NO: 585310
uuuguuucuguggauugua

SEQ ID NO: 629831 - RNA, 19 nt, Artificial Sequence
  Description of Artificial Sequence: Synthetic oligonucleotide
  Antisense strand to SEQ ID NO: 629830
uacaauccacagaaacaaa

SEQ ID NO: 629832 - RNA, 19 nt, Artificial Sequence
  Description of Artificial Sequence: Synthetic oligonucleotide
  Sense strand starting at position 2436 of SEQ ID NO: 585310
guuucuguggauuguauca

SEQ ID NO: 629833 - RNA, 19 nt, Artificial Sequence
  Description of Artificial Sequence: Synthetic oligonucleotide
  Antisense strand to SEQ ID NO: 629832
ugauacaauccacagaaac

SEQ ID NO: 629834 - RNA, 19 nt, Artificial Sequence
  Description of Artificial Sequence: Synthetic oligonucleotide
  Sense strand starting at position 2768 of SEQ ID NO: 585310
ucuugaucucuugaucgga

SEQ ID NO: 629835 - RNA, 19 nt, Artificial Sequence
  Description of Artificial Sequence: Synthetic oligonucleotide
  Antisense strand to SEQ ID NO: 629834
uccgaucaagagaucaaga

SEQ ID NO: 629836 - RNA, 19 nt, Artificial Sequence
  Description of Artificial Sequence: Synthetic oligonucleotide
  Sense strand starting at position 2770 of SEQ ID NO: 585310
uugaucucuugaucggaaa

SEQ ID NO: 629837 - RNA, 19 nt, Artificial Sequence
  Description of Artificial Sequence: Synthetic oligonucleotide
  Antisense strand to SEQ ID NO: 629836
uuuccgaucaagagaucaa

SEQ ID NO: 629838 - RNA, 19 nt, Artificial Sequence
  Description of Artificial Sequence: Synthetic oligonucleotide
  Sense strand starting at position 2771 of SEQ ID NO: 585310
ugaucucuugaucggaaau

SEQ ID NO: 629839 - RNA, 19 nt, Artificial Sequence
  Description of Artificial Sequence: Synthetic oligonucleotide
  Antisense strand to SEQ ID NO: 629838
auuuccgaucaagagauca

SEQ ID NO: 629840 - RNA, 19 nt, Artificial Sequence
  Description of Artificial Sequence: Synthetic oligonucleotide
  Sense strand starting at position 3108 of SEQ ID NO: 585310
gacagagugagaugucuag

SEQ ID NO: 629841 - RNA, 19 nt, Artificial Sequence
  Description of Artificial Sequence: Synthetic oligonucleotide
  Antisense strand to SEQ ID NO: 629840
cuagacaucucacucuguc

SEQ ID NO: 629842 - RNA, 19 nt, Artificial Sequence
  Description of Artificial Sequence: Synthetic oligonucleotide
  Sense strand starting at position 3182 of SEQ ID NO: 585310
ucaagaaguugccuuugua

SEQ ID NO: 629843 - RNA, 19 nt, Artificial Sequence
  Description of Artificial Sequence: Synthetic oligonucleotide
  Antisense strand to SEQ ID NO: 629842
uacaaaggcaacuucuuga

SEQ ID NO: 629844 - RNA, 19 nt, Artificial Sequence
  Description of Artificial Sequence: Synthetic oligonucleotide
  Sense strand starting at position 3207 of SEQ ID NO: 585310
ccagcugagacucguuaca

SEQ ID NO: 629845 - RNA, 19 nt, Artificial Sequence
  Description of Artificial Sequence: Synthetic oligonucleotide
  Antisense strand to SEQ ID NO: 629844
uguaacgagucucagcugg

SEQ ID NO: 629846 - RNA, 19 nt, Artificial Sequence
  Description of Artificial Sequence: Synthetic oligonucleotide
  Sense strand starting at position 3209 of SEQ ID NO: 585310
agcugagacucguuacaac

SEQ ID NO: 629847 - RNA, 19 nt, Artificial Sequence
  Description of Artificial Sequence: Synthetic oligonucleotide
  Antisense strand to SEQ ID NO: 629846
guuguaacgagucucagcu

SEQ ID NO: 629848 - RNA, 19 nt, Artificial Sequence
  Description of Artificial Sequence: Synthetic oligonucleotide
  Sense strand starting at position 3289 of SEQ ID NO: 585310
gcuaaauugcgcucccauc

SEQ ID NO: 629849 - RNA, 19 nt, Artificial Sequence
  Description of Artificial Sequence: Synthetic oligonucleotide
  Antisense strand to SEQ ID NO: 629848
gaugggagcgcaauuuagc

SEQ ID NO: 629850 - RNA, 19 nt, Artificial Sequence
  Description of Artificial Sequence: Synthetic oligonucleotide
  Sense strand starting at position 3310 of SEQ ID NO: 585310
ugccaugacaguugacgau

SEQ ID NO: 629851 - RNA, 19 nt, Artificial Sequence
  Description of Artificial Sequence: Synthetic oligonucleotide
  Antisense strand to SEQ ID NO: 629850
aucgucaacugucauggca

SEQ ID NO: 629852 - RNA, 19 nt, Artificial Sequence
  Description of Artificial Sequence: Synthetic oligonucleotide
  Sense strand starting at position 3322 of SEQ ID NO: 585310
ugacgaucuccaugacgau

SEQ ID NO: 629853 - RNA, 19 nt, Artificial Sequence
  Description of Artificial Sequence: Synthetic oligonucleotide
  Antisense strand to SEQ ID NO: 629852
aucgucauggagaucguca

SEQ ID NO: 629854 - RNA, 19 nt, Artificial Sequence
  Description of Artificial Sequence: Synthetic oligonucleotide
  Sense strand starting at position 3378 of SEQ ID NO: 585310
guauuaccaguuuggagaa

SEQ ID NO: 629855 - RNA, 19 nt, Artificial Sequence
  Description of Artificial Sequence: Synthetic oligonucleotide
  Antisense strand to SEQ ID NO: 629854
uucuccaaacugguaauac

SEQ ID NO: 629856 - RNA, 19 nt, Artificial Sequence
  Description of Artificial Sequence: Synthetic oligonucleotide
  Sense strand starting at position 3391 of SEQ ID NO: 585310
ggagaaguucacugccugu

SEQ ID NO: 629857 - RNA, 19 nt, Artificial Sequence
  Description of Artificial Sequence: Synthetic oligonucleotide
  Antisense strand to SEQ ID NO: 629856
acaggcagugaacuucucc

SEQ ID NO: 629858 - RNA, 19 nt, Artificial Sequence
  Description of Artificial Sequence: Synthetic oligonucleotide
  Sense strand starting at position 3518 of SEQ ID NO: 585310
uggagaaguugacuuggca

SEQ ID NO: 629859 - RNA, 19 nt, Artificial Sequence
  Description of Artificial Sequence: Synthetic oligonucleotide
  Antisense strand to SEQ ID NO: 629858
ugccaagucaacuucucca

SEQ ID NO: 629860 - RNA, 19 nt, Artificial Sequence
  Description of Artificial Sequence: Synthetic oligonucleotide
  Sense strand starting at position 3554 of SEQ ID NO: 585310
acaaguccugugcaggaaa

SEQ ID NO: 629861 - RNA, 19 nt, Artificial Sequence
  Description of Artificial Sequence: Synthetic oligonucleotide
  Antisense strand to SEQ ID NO: 629860
uuuccugcacaggacuugu

SEQ ID NO: 629862 - RNA, 19 nt, Artificial Sequence
  Description of Artificial Sequence: Synthetic oligonucleotide
  Sense strand starting at position 3556 of SEQ ID NO: 585310
aaguccugugcaggaaaua

SEQ ID NO: 629863 - RNA, 19 nt, Artificial Sequence
  Description of Artificial Sequence: Synthetic oligonucleotide
  Antisense strand to SEQ ID NO: 629862
uauuuccugcacaggacuu

SEQ ID NO: 629864 - RNA, 19 nt, Artificial Sequence
  Description of Artificial Sequence: Synthetic oligonucleotide
  Sense strand starting at position 3621 of SEQ ID NO: 585310
ugcgacucccagugaggaa

SEQ ID NO: 629865 - RNA, 19 nt, Artificial Sequence
  Description of Artificial Sequence: Synthetic oligonucleotide
  Antisense strand to SEQ ID NO: 629864
uuccucacugggagucgca

SEQ ID NO: 629866 - RNA, 19 nt, Artificial Sequence
  Description of Artificial Sequence: Synthetic oligonucleotide
  Sense strand starting at position 3622 of SEQ ID NO: 585310
gcgacucccagugaggaaa

SEQ ID NO: 629867 - RNA, 19 nt, Artificial Sequence
  Description of Artificial Sequence: Synthetic oligonucleotide
  Antisense strand to SEQ ID NO: 629866
uuuccucacugggagucgc

SEQ ID NO: 629868 - RNA, 19 nt, Artificial Sequence
  Description of Artificial Sequence: Synthetic oligonucleotide
  Sense strand starting at position 3733 of SEQ ID NO: 585310
gcaucauucuuggcucaua

SEQ ID NO: 629869 - RNA, 19 nt, Artificial Sequence
  Description of Artificial Sequence: Synthetic oligonucleotide
  Antisense strand to SEQ ID NO: 629868
uaugagccaagaaugaugc

SEQ ID NO: 629870 - RNA, 19 nt, Artificial Sequence
  Description of Artificial Sequence: Synthetic oligonucleotide
  Sense strand starting at position 3736 of SEQ ID NO: 585310
ucauucuuggcucauagca

SEQ ID NO: 629871 - RNA, 19 nt, Artificial Sequence
  Description of Artificial Sequence: Synthetic oligonucleotide
  Antisense strand to SEQ ID NO: 629870
ugcuaugagccaagaauga

SEQ ID NO: 629872 - RNA, 19 nt, Artificial Sequence
  Description of Artificial Sequence: Synthetic oligonucleotide
  Sense strand starting at position 3751 of SEQ ID NO: 585310
agcauacauucucuuaugu

SEQ ID NO: 629873 - RNA, 19 nt, Artificial Sequence
  Description of Artificial Sequence: Synthetic oligonucleotide
  Antisense strand to SEQ ID NO: 629872
acauaagagaauguaugcu

SEQ ID NO: 629874 - RNA, 19 nt, Artificial Sequence
  Description of Artificial Sequence: Synthetic oligonucleotide
  Sense strand starting at position 301 of SEQ ID NO: 585311
uuuggaggaucugagaaga

SEQ ID NO: 629875 - RNA, 19 nt, Artificial Sequence
  Description of Artificial Sequence: Synthetic oligonucleotide
  Antisense strand to SEQ ID NO: 629874
ucuucucagauccuccaaa

SEQ ID NO: 629876 - RNA, 19 nt, Artificial Sequence
  Description of Artificial Sequence: Synthetic oligonucleotide
  Sense strand starting at position 339 of SEQ ID NO: 585311
uugcacuccucaugggaaa

SEQ ID NO: 629877 - RNA, 19 nt, Artificial Sequence
  Description of Artificial Sequence: Synthetic oligonucleotide
  Antisense strand to SEQ ID NO: 629876
uuucccaugaggagugcaa

SEQ ID NO: 629878 - RNA, 19 nt, Artificial Sequence
  Description of Artificial Sequence: Synthetic oligonucleotide
  Sense strand starting at position 507 of SEQ ID NO: 585311
gacuucuggcccugaccua

SEQ ID NO: 629879 - RNA, 19 nt, Artificial Sequence
  Description of Artificial Sequence: Synthetic oligonucleotide
  Antisense strand to SEQ ID NO: 629878
uaggucagggccagaaguc

SEQ ID NO: 629880 - RNA, 19 nt, Artificial Sequence
  Description of Artificial Sequence: Synthetic oligonucleotide
  Sense strand starting at position 646 of SEQ ID NO: 585311
ucgguauuccagggacugu

SEQ ID NO: 629881 - RNA, 19 nt, Artificial Sequence
  Description of Artificial Sequence: Synthetic oligonucleotide
  Antisense strand to SEQ ID NO: 629880
acagucccuggaauaccga

SEQ ID NO: 629882 - RNA, 19 nt, Artificial Sequence
  Description of Artificial Sequence: Synthetic oligonucleotide
  Sense strand starting at position 657 of SEQ ID NO: 585311
gggacugucuucccuccau

SEQ ID NO: 629883 - RNA, 19 nt, Artificial Sequence
  Description of Artificial Sequence: Synthetic oligonucleotide
  Antisense strand to SEQ ID NO: 629882
auggagggaagacaguccc

SEQ ID NO: 629884 - RNA, 19 nt, Artificial Sequence
  Description of Artificial Sequence: Synthetic oligonucleotide
  Sense strand starting at position 749 of SEQ ID NO: 585311
ucucgaaagccaggaagau

SEQ ID NO: 629885 - RNA, 19 nt, Artificial Sequence
  Description of Artificial Sequence: Synthetic oligonucleotide
  Antisense strand to SEQ ID NO: 629884
aucuuccuggcuuucgaga

SEQ ID NO: 629886 - RNA, 19 nt, Artificial Sequence
  Description of Artificial Sequence: Synthetic oligonucleotide
  Sense strand starting at position 758 of SEQ ID NO: 585311
ccaggaagauucuuccuac

SEQ ID NO: 629887 - RNA, 19 nt, Artificial Sequence
  Description of Artificial Sequence: Synthetic oligonucleotide
  Antisense strand to SEQ ID NO: 629886
guaggaagaaucuuccugg

SEQ ID NO: 629888 - RNA, 19 nt, Artificial Sequence
  Description of Artificial Sequence: Synthetic oligonucleotide
  Sense strand starting at position 761 of SEQ ID NO: 585311
ggaagauucuuccuacuca

SEQ ID NO: 629889 - RNA, 19 nt, Artificial Sequence
  Description of Artificial Sequence: Synthetic oligonucleotide
  Antisense strand to SEQ ID NO: 629888
ugaguaggaagaaucuucc

SEQ ID NO: 629890 - RNA, 19 nt, Artificial Sequence
  Description of Artificial Sequence: Synthetic oligonucleotide
  Sense strand starting at position 2010 of SEQ ID NO: 585311
cguuaugaguauccaggaa

SEQ ID NO: 629891 - RNA, 19 nt, Artificial Sequence
  Description of Artificial Sequence: Synthetic oligonucleotide
  Antisense strand to SEQ ID NO: 629890
uuccuggauacucauaacg

SEQ ID NO: 629892 - RNA, 19 nt, Artificial Sequence
  Description of Artificial Sequence: Synthetic oligonucleotide
  Sense strand starting at position 2245 of SEQ ID NO: 585311
gggagaaaccuucggcaug

SEQ ID NO: 629893 - RNA, 19 nt, Artificial Sequence
  Description of Artificial Sequence: Synthetic oligonucleotide
  Antisense strand to SEQ ID NO: 629892
caugccgaagguuucuccc

SEQ ID NO: 629894 - RNA, 19 nt, Artificial Sequence
  Description of Artificial Sequence: Synthetic oligonucleotide
  Sense strand starting at position 2247 of SEQ ID NO: 585311
gagaaaccuucggcaugga

SEQ ID NO: 629895 - RNA, 19 nt, Artificial Sequence
  Description of Artificial Sequence: Synthetic oligonucleotide
  Antisense strand to SEQ ID NO: 629894
uccaugccgaagguuucuc

SEQ ID NO: 629896 - RNA, 19 nt, Artificial Sequence
  Description of Artificial Sequence: Synthetic oligonucleotide
  Sense strand starting at position 2381 of SEQ ID NO: 585311
ggagcuuggugccagacaa

SEQ ID NO: 629897 - RNA, 19 nt, Artificial Sequence
  Description of Artificial Sequence: Synthetic oligonucleotide
  Antisense strand to SEQ ID NO: 629896
uugucuggcaccaagcucc

SEQ ID NO: 629898 - RNA, 19 nt, Artificial Sequence
  Description of Artificial Sequence: Synthetic oligonucleotide
  Sense strand starting at position 2399 of SEQ ID NO: 585311
augaacuuguccugagaau

SEQ ID NO: 629899 - RNA, 19 nt, Artificial Sequence
  Description of Artificial Sequence: Synthetic oligonucleotide
  Antisense strand to SEQ ID NO: 629898
auucucaggacaaguucau

SEQ ID NO: 629900 - RNA, 19 nt, Artificial Sequence
  Description of Artificial Sequence: Synthetic oligonucleotide
  Sense strand starting at position 2664 of SEQ ID NO: 585311
aaaguuguaccugagcaua

SEQ ID NO: 629901 - RNA, 19 nt, Artificial Sequence
  Description of Artificial Sequence: Synthetic oligonucleotide
  Antisense strand to SEQ ID NO: 629900
uaugcucagguacaacuuu

SEQ ID NO: 629902 - RNA, 19 nt, Artificial Sequence
  Description of Artificial Sequence: Synthetic oligonucleotide
  Sense strand starting at position 2669 of SEQ ID NO: 585311
uguaccugagcauaugaaa

SEQ ID NO: 629903 - RNA, 19 nt, Artificial Sequence
  Description of Artificial Sequence: Synthetic oligonucleotide
  Antisense strand to SEQ ID NO: 629902
uuucauaugcucagguaca

SEQ ID NO: 629904 - RNA, 19 nt, Artificial Sequence
  Description of Artificial Sequence: Synthetic oligonucleotide
  Sense strand starting at position 2733 of SEQ ID NO: 585311
ugcagugaguaguagaauc

SEQ ID NO: 629905 - RNA, 19 nt, Artificial Sequence
  Description of Artificial Sequence: Synthetic oligonucleotide
  Antisense strand to SEQ ID NO: 629904
gauucuacuacucacugca

SEQ ID NO: 629906 - RNA, 19 nt, Artificial Sequence
  Description of Artificial Sequence: Synthetic oligonucleotide
  Sense strand starting at position 2735 of SEQ ID NO: 585311
cagugaguaguagaaucuu

SEQ ID NO: 629907 - RNA, 19 nt, Artificial Sequence
  Description of Artificial Sequence: Synthetic oligonucleotide
  Antisense strand to SEQ ID NO: 629906
aagauucuacuacucacug

SEQ ID NO: 629908 - RNA, 19 nt, Artificial Sequence
  Description of Artificial Sequence: Synthetic oligonucleotide
  Sense strand starting at position 2761 of SEQ ID NO: 585311
ccugaauuaucaggaaccu

SEQ ID NO: 629909 - RNA, 19 nt, Artificial Sequence
  Description of Artificial Sequence: Synthetic oligonucleotide
  Antisense strand to SEQ ID NO: 629908
agguuccugauaauucagg

SEQ ID NO: 629910 - RNA, 19 nt, Artificial Sequence
  Description of Artificial Sequence: Synthetic oligonucleotide
  Sense strand starting at position 3094 of SEQ ID NO: 585311
ucaggaaucuuauguguaa

SEQ ID NO: 629911 - RNA, 19 nt, Artificial Sequence
  Description of Artificial Sequence: Synthetic oligonucleotide
  Antisense strand to SEQ ID NO: 629910
uuacacauaagauuccuga

SEQ ID NO: 629912 - RNA, 19 nt, Artificial Sequence
  Description of Artificial Sequence: Synthetic oligonucleotide
  Sense strand starting at position 3095 of SEQ ID NO: 585311
caggaaucuuauguguaaa

SEQ ID NO: 629913 - RNA, 19 nt, Artificial Sequence
  Description of Artificial Sequence: Synthetic oligonucleotide
  Antisense strand to SEQ ID NO: 629912
uuuacacauaagauuccug

SEQ ID NO: 629914 - RNA, 19 nt, Artificial Sequence
  Description of Artificial Sequence: Synthetic oligonucleotide
  Sense strand starting at position 3147 of SEQ ID NO: 585311
gucuaaaugcauuacaguu

SEQ ID NO: 629915 - RNA, 19 nt, Artificial Sequence
  Description of Artificial Sequence: Synthetic oligonucleotide
  Antisense strand to SEQ ID NO: 629914
aacuguaaugcauuuagac

SEQ ID NO: 629916 - RNA, 19 nt, Artificial Sequence
  Description of Artificial Sequence: Synthetic oligonucleotide
  Sense strand starting at position 3155 of SEQ ID NO: 585311
gcauuacaguuguacaacu

SEQ ID NO: 629917 - RNA, 19 nt, Artificial Sequence
  Description of Artificial Sequence: Synthetic oligonucleotide
  Antisense strand to SEQ ID NO: 629916
aguuguacaacuguaaugc

SEQ ID NO: 629918 - RNA, 19 nt, Artificial Sequence
  Description of Artificial Sequence: Synthetic oligonucleotide
  Sense strand starting at position 3190 of SEQ ID NO: 585311
uuugcuuucccagacuaug

SEQ ID NO: 629919 - RNA, 19 nt, Artificial Sequence
  Description of Artificial Sequence: Synthetic oligonucleotide
  Antisense strand to SEQ ID NO: 629918
cauagucugggaaagcaaa

SEQ ID NO: 629920 - RNA, 19 nt, Artificial Sequence
  Description of Artificial Sequence: Synthetic oligonucleotide
  Sense strand starting at position 3193 of SEQ ID NO: 585311
gcuuucccagacuauguau

SEQ ID NO: 629921 - RNA, 19 nt, Artificial Sequence
  Description of Artificial Sequence: Synthetic oligonucleotide
  Antisense strand to SEQ ID NO: 629920
auacauagucugggaaagc

SEQ ID NO: 629922 - RNA, 19 nt, Artificial Sequence
  Description of Artificial Sequence: Synthetic oligonucleotide
  Sense strand starting at position 3212 of SEQ ID NO: 585311
cugugacucuuguuguauu

SEQ ID NO: 629923 - RNA, 19 nt, Artificial Sequence
  Description of Artificial Sequence: Synthetic oligonucleotide
  Antisense strand to SEQ ID NO: 629922
aauacaacaagagucacag

SEQ ID NO: 629924 - RNA, 19 nt, Artificial Sequence
  Description of Artificial Sequence: Synthetic oligonucleotide
  Sense strand starting at position 3298 of SEQ ID NO: 585311
aguagcacaacgugugauu

SEQ ID NO: 629925 - RNA, 19 nt, Artificial Sequence
  Description of Artificial Sequence: Synthetic oligonucleotide
  Antisense strand to SEQ ID NO: 629924
aaucacacguugugcuacu

SEQ ID NO: 629926 - RNA, 19 nt, Artificial Sequence
  Description of Artificial Sequence: Synthetic oligonucleotide
  Sense strand starting at position 3303 of SEQ ID NO: 585311
cacaacgugugauuguaua

SEQ ID NO: 629927 - RNA, 19 nt, Artificial Sequence
  Description of Artificial Sequence: Synthetic oligonucleotide
  Antisense strand to SEQ ID NO: 629926
uauacaaucacacguugug

SEQ ID NO: 629928 - RNA, 19 nt, Artificial Sequence
  Description of Artificial Sequence: Synthetic oligonucleotide
  Sense strand starting at position 3358 of SEQ ID NO: 585311
guugcaaguguucaacgca

SEQ ID NO: 629929 - RNA, 19 nt, Artificial Sequence
  Description of Artificial Sequence: Synthetic oligonucleotide
  Antisense strand to SEQ ID NO: 629928
ugcguugaacacuugcaac

SEQ ID NO: 629930 - RNA, 19 nt, Artificial Sequence
  Description of Artificial Sequence: Synthetic oligonucleotide
  Sense strand starting at position 3418 of SEQ ID NO: 585311
uaggaaguauccgcaucua

SEQ ID NO: 629931 - RNA, 19 nt, Artificial Sequence
  Description of Artificial Sequence: Synthetic oligonucleotide
  Antisense strand to SEQ ID NO: 629930
uagaugcggauacuuccua

SEQ ID NO: 629932 - RNA, 19 nt, Artificial Sequence
  Description of Artificial Sequence: Synthetic oligonucleotide
  Sense strand starting at position 3557 of SEQ ID NO: 585311
ccugcuaggcucuguagau

SEQ ID NO: 629933 - RNA, 19 nt, Artificial Sequence
  Description of Artificial Sequence: Synthetic oligonucleotide
  Antisense strand to SEQ ID NO: 629932
aucuacagagccuagcagg

SEQ ID NO: 629934 - RNA, 19 nt, Artificial Sequence
  Description of Artificial Sequence: Synthetic oligonucleotide
  Sense strand starting at position 3605 of SEQ ID NO: 585311
guuuaaagcuaagaauucu

SEQ ID NO: 629935 - RNA, 19 nt, Artificial Sequence
  Description of Artificial Sequence: Synthetic oligonucleotide
  Antisense strand to SEQ ID NO: 629934
agaauucuuagcuuuaaac

SEQ ID NO: 629936 - RNA, 19 nt, Artificial Sequence
  Description of Artificial Sequence: Synthetic oligonucleotide
  Sense strand starting at position 3734 of SEQ ID NO: 585311
cucugucacuccugaauag

SEQ ID NO: 629937 - RNA, 19 nt, Artificial Sequence
  Description of Artificial Sequence: Synthetic oligonucleotide
  Antisense strand to SEQ ID NO: 629936
cuauucaggagugacagag

SEQ ID NO: 629938 - RNA, 19 nt, Artificial Sequence
  Description of Artificial Sequence: Synthetic oligonucleotide
  Sense strand starting at position 3735 of SEQ ID NO: 585311
ucugucacuccugaauagu

SEQ ID NO: 629939 - RNA, 19 nt, Artificial Sequence
  Description of Artificial Sequence: Synthetic oligonucleotide
  Antisense strand to SEQ ID NO: 629938
acuauucaggagugacaga

SEQ ID NO: 629940 - RNA, 19 nt, Artificial Sequence
  Description of Artificial Sequence: Synthetic oligonucleotide
  Sense strand starting at position 3781 of SEQ ID NO: 585311
accugaguguucucuccac

SEQ ID NO: 629941 - RNA, 19 nt, Artificial Sequence
  Description of Artificial Sequence: Synthetic oligonucleotide
  Antisense strand to SEQ ID NO: 629940
guggagagaacacucaggu

SEQ ID NO: 629942 - RNA, 19 nt, Artificial Sequence
  Description of Artificial Sequence: Synthetic oligonucleotide
  Sense strand starting at position 3785 of SEQ ID NO: 585311
gaguguucucuccacagug

SEQ ID NO: 629943 - RNA, 19 nt, Artificial Sequence
  Description of Artificial Sequence: Synthetic oligonucleotide
  Antisense strand to SEQ ID NO: 629942
cacuguggagagaacacuc

SEQ ID NO: 629944 - RNA, 19 nt, Artificial Sequence
  Description of Artificial Sequence: Synthetic oligonucleotide
  Sense strand starting at position 3816 of SEQ ID NO: 585311
ugagucaaagugugucguu

SEQ ID NO: 629945 - RNA, 19 nt, Artificial Sequence
  Description of Artificial Sequence: Synthetic oligonucleotide
  Antisense strand to SEQ ID NO: 629944
aacgacacacuuugacuca

SEQ ID NO: 629946 - RNA, 19 nt, Artificial Sequence
  Description of Artificial Sequence: Synthetic oligonucleotide
  Sense strand starting at position 3817 of SEQ ID NO: 585311
gagucaaagugugucguuu

SEQ ID NO: 629947 - RNA, 19 nt, Artificial Sequence
  Description of Artificial Sequence: Synthetic oligonucleotide
  Antisense strand to SEQ ID NO: 629946
aaacgacacacuuugacuc

SEQ ID NO: 629948 - RNA, 19 nt, Artificial Sequence
  Description of Artificial Sequence: Synthetic oligonucleotide
  Sense strand starting at position 3947 of SEQ ID NO: 585311
uuuguugucuaguugaaug

SEQ ID NO: 629949 - RNA, 19 nt, Artificial Sequence
  Description of Artificial Sequence: Synthetic oligonucleotide
  Antisense strand to SEQ ID NO: 629948
cauucaacuagacaacaaa

SEQ ID NO: 629950 - RNA, 19 nt, Artificial Sequence
  Description of Artificial Sequence: Synthetic oligonucleotide
  Sense strand starting at position 3949 of SEQ ID NO: 585311
uguugucuaguugaaugaa

SEQ ID NO: 629951 - RNA, 19 nt, Artificial Sequence
  Description of Artificial Sequence: Synthetic oligonucleotide
  Antisense strand to SEQ ID NO: 629950
uucauucaacuagacaaca

SEQ ID NO: 629952 - RNA, 19 nt, Artificial Sequence
  Description of Artificial Sequence: Synthetic oligonucleotide
  Sense strand starting at position 3952 of SEQ ID NO: 585311
ugucuaguugaaugaaaua

SEQ ID NO: 629953 - RNA, 19 nt, Artificial Sequence
  Description of Artificial Sequence: Synthetic oligonucleotide
  Antisense strand to SEQ ID NO: 629952
uauuucauucaacuagaca

SEQ ID NO: 629954 - RNA, 19 nt, Artificial Sequence
  Description of Artificial Sequence: Synthetic oligonucleotide
  Sense strand starting at position 60 of SEQ ID NO: 585312
gggcgauauucuaguguug

SEQ ID NO: 629955 - RNA, 19 nt, Artificial Sequence
  Description of Artificial Sequence: Synthetic oligonucleotide
  Antisense strand to SEQ ID NO: 629954
caacacuagaauaucgccc

SEQ ID NO: 629956 - RNA, 19 nt, Artificial Sequence
  Description of Artificial Sequence: Synthetic oligonucleotide
  Sense strand starting at position 1419 of SEQ ID NO: 585312
ccaagcguucugucucagu

SEQ ID NO: 629957 - RNA, 19 nt, Artificial Sequence
  Description of Artificial Sequence: Synthetic oligonucleotide
  Antisense strand to SEQ ID NO: 629956
acugagacagaacgcuugg

SEQ ID NO: 629958 - RNA, 19 nt, Artificial Sequence
  Description of Artificial Sequence: Synthetic oligonucleotide
  Sense strand starting at position 1421 of SEQ ID NO: 585312
aagcguucugucucagugu

SEQ ID NO: 629959 - RNA, 19 nt, Artificial Sequence
  Description of Artificial Sequence: Synthetic oligonucleotide
  Antisense strand to SEQ ID NO: 629958
acacugagacagaacgcuu

SEQ ID NO: 629960 - RNA, 19 nt, Artificial Sequence
  Description of Artificial Sequence: Synthetic oligonucleotide
  Sense strand starting at position 1434 of SEQ ID NO: 585312
cagugucucccugagucuu

SEQ ID NO: 629961 - RNA, 19 nt, Artificial Sequence
  Description of Artificial Sequence: Synthetic oligonucleotide
  Antisense strand to SEQ ID NO: 629960
aagacucagggagacacug

SEQ ID NO: 629962 - RNA, 19 nt, Artificial Sequence
  Description of Artificial Sequence: Synthetic oligonucleotide
  Sense strand starting at position 1581 of SEQ ID NO: 585312
ccuguacucuucuagaaga

SEQ ID NO: 629963 - RNA, 19 nt, Artificial Sequence
  Description of Artificial Sequence: Synthetic oligonucleotide
  Antisense strand to SEQ ID NO: 629962
ucuucuagaagaguacagg

SEQ ID NO: 629964 - RNA, 19 nt, Artificial Sequence
  Description of Artificial Sequence: Synthetic oligonucleotide
  Sense strand starting at position 1631 of SEQ ID NO: 585312
gugagcucgcccugggauu

SEQ ID NO: 629965 - RNA, 19 nt, Artificial Sequence
  Description of Artificial Sequence: Synthetic oligonucleotide
  Antisense strand to SEQ ID NO: 629964
aaucccagggcgagcucac

SEQ ID NO: 629966 - RNA, 19 nt, Artificial Sequence
  Description of Artificial Sequence: Synthetic oligonucleotide
  Sense strand starting at position 1642 of SEQ ID NO: 585312
cugggauuguagguguaaa

SEQ ID NO: 629967 - RNA, 19 nt, Artificial Sequence
  Description of Artificial Sequence: Synthetic oligonucleotide
  Antisense strand to SEQ ID NO: 629966
uuuacaccuacaaucccag

SEQ ID NO: 629968 - RNA, 19 nt, Artificial Sequence
  Description of Artificial Sequence: Synthetic oligonucleotide
  Sense strand starting at position 1643 of SEQ ID NO: 585312
ugggauuguagguguaaag

SEQ ID NO: 629969 - RNA, 19 nt, Artificial Sequence
  Description of Artificial Sequence: Synthetic oligonucleotide
  Antisense strand to SEQ ID NO: 629968
cuuuacaccuacaauccca

SEQ ID NO: 629970 - RNA, 19 nt, Artificial Sequence
  Description of Artificial Sequence: Synthetic oligonucleotide
  Sense strand starting at position 1748 of SEQ ID NO: 585312
aacuauaguggguagcaua

SEQ ID NO: 629971 - RNA, 19 nt, Artificial Sequence
  Description of Artificial Sequence: Synthetic oligonucleotide
  Antisense strand to SEQ ID NO: 629970
uaugcuacccacuauaguu

SEQ ID NO: 629972 - RNA, 19 nt, Artificial Sequence
  Description of Artificial Sequence: Synthetic oligonucleotide
  Sense strand starting at position 1759 of SEQ ID NO: 585312
guagcauaaccuugguaac

SEQ ID NO: 629973 - RNA, 19 nt, Artificial Sequence
  Description of Artificial Sequence: Synthetic oligonucleotide
  Antisense strand to SEQ ID NO: 629972
guuaccaagguuaugcuac

SEQ ID NO: 629974 - RNA, 19 nt, Artificial Sequence
  Description of Artificial Sequence: Synthetic oligonucleotide
  Sense strand starting at position 1817 of SEQ ID NO: 585312
uuuggccuguugguauaua

SEQ ID NO: 629975 - RNA, 19 nt, Artificial Sequence
  Description of Artificial Sequence: Synthetic oligonucleotide
  Antisense strand to SEQ ID NO: 629974
uauauaccaacaggccaaa

SEQ ID NO: 629976 - RNA, 19 nt, Artificial Sequence
  Description of Artificial Sequence: Synthetic oligonucleotide
  Sense strand starting at position 1997 of SEQ ID NO: 585312
acacuauguuacuauaugu

SEQ ID NO: 629977 - RNA, 19 nt, Artificial Sequence
  Description of Artificial Sequence: Synthetic oligonucleotide
  Antisense strand to SEQ ID NO: 629976
acauauaguaacauagugu

SEQ ID NO: 629978 - RNA, 19 nt, Artificial Sequence
  Description of Artificial Sequence: Synthetic oligonucleotide
  Sense strand starting at position 2054 of SEQ ID NO: 585312
guuguaaguguucagugca

SEQ ID NO: 629979 - RNA, 19 nt, Artificial Sequence
  Description of Artificial Sequence: Synthetic oligonucleotide
  Antisense strand to SEQ ID NO: 629978
ugcacugaacacuuacaac

SEQ ID NO: 629980 - RNA, 19 nt, Artificial Sequence
  Description of Artificial Sequence: Synthetic oligonucleotide
  Sense strand starting at position 2057 of SEQ ID NO: 585312
guaaguguucagugcaguc

SEQ ID NO: 629981 - RNA, 19 nt, Artificial Sequence
  Description of Artificial Sequence: Synthetic oligonucleotide
  Antisense strand to SEQ ID NO: 629980
gacugcacugaacacuuac

SEQ ID NO: 629982 - RNA, 19 nt, Artificial Sequence
  Description of Artificial Sequence: Synthetic oligonucleotide
  Sense strand starting at position 2126 of SEQ ID NO: 585312
acaugugaguggaguguau

SEQ ID NO: 629983 - RNA, 19 nt, Artificial Sequence
  Description of Artificial Sequence: Synthetic oligonucleotide
  Antisense strand to SEQ ID NO: 629982
auacacuccacucacaugu

SEQ ID NO: 629984 - RNA, 19 nt, Artificial Sequence
  Description of Artificial Sequence: Synthetic oligonucleotide
  Sense strand starting at position 2128 of SEQ ID NO: 585312
augugaguggaguguauau

SEQ ID NO: 629985 - RNA, 19 nt, Artificial Sequence
  Description of Artificial Sequence: Synthetic oligonucleotide
  Antisense strand to SEQ ID NO: 629984
auauacacuccacucacau

SEQ ID NO: 629986 - RNA, 19 nt, Artificial Sequence
  Description of Artificial Sequence: Synthetic oligonucleotide
  Sense strand starting at position 2250 of SEQ ID NO: 585312
cagcgaagcucuguagaug

SEQ ID NO: 629987 - RNA, 19 nt, Artificial Sequence
  Description of Artificial Sequence: Synthetic oligonucleotide
  Antisense strand to SEQ ID NO: 629986
caucuacagagcuucgcug

SEQ ID NO: 629988 - RNA, 19 nt, Artificial Sequence
  Description of Artificial Sequence: Synthetic oligonucleotide
  Sense strand starting at position 2253 of SEQ ID NO: 585312
cgaagcucuguagauggau

SEQ ID NO: 629989 - RNA, 19 nt, Artificial Sequence
  Description of Artificial Sequence: Synthetic oligonucleotide
  Antisense strand to SEQ ID NO: 629988
auccaucuacagagcuucg

SEQ ID NO: 629990 - RNA, 19 nt, Artificial Sequence
  Description of Artificial Sequence: Synthetic oligonucleotide
  Sense strand starting at position 2256 of SEQ ID NO: 585312
agcucuguagauggaugua

SEQ ID NO: 629991 - RNA, 19 nt, Artificial Sequence
  Description of Artificial Sequence: Synthetic oligonucleotide
  Antisense strand to SEQ ID NO: 629990
uacauccaucuacagagcu

SEQ ID NO: 629992 - RNA, 19 nt, Artificial Sequence
  Description of Artificial Sequence: Synthetic oligonucleotide
  Sense strand starting at position 2296 of SEQ ID NO: 585312
guuuaaaccuaagaguucu

SEQ ID NO: 629993 - RNA, 19 nt, Artificial Sequence
  Description of Artificial Sequence: Synthetic oligonucleotide
  Antisense strand to SEQ ID NO: 629992
agaacucuuagguuuaaac

SEQ ID NO: 629994 - RNA, 19 nt, Artificial Sequence
  Description of Artificial Sequence: Synthetic oligonucleotide
  Sense strand starting at position 2471 of SEQ ID NO: 585312
acaugaguguucucucuau

SEQ ID NO: 629995 - RNA, 19 nt, Artificial Sequence
  Description of Artificial Sequence: Synthetic oligonucleotide
  Antisense strand to SEQ ID NO: 629994
auagagagaacacucaugu

SEQ ID NO: 629996 - RNA, 19 nt, Artificial Sequence
  Description of Artificial Sequence: Synthetic oligonucleotide
  Sense strand starting at position 2475 of SEQ ID NO: 585312
gaguguucucucuauagug

SEQ ID NO: 629997 - RNA, 19 nt, Artificial Sequence
  Description of Artificial Sequence: Synthetic oligonucleotide
  Antisense strand to SEQ ID NO: 629996
cacuauagagagaacacuc

SEQ ID NO: 629998 - RNA, 19 nt, Artificial Sequence
  Description of Artificial Sequence: Synthetic oligonucleotide
  Sense strand starting at position 2649 of SEQ ID NO: 585312
augaaugaauuaugagugu

SEQ ID NO: 629999 - RNA, 19 nt, Artificial Sequence
  Description of Artificial Sequence: Synthetic oligonucleotide
  Antisense strand to SEQ ID NO: 629998
acacucauaauucauucau

SEQ ID NO: 630000 - RNA, 19 nt, Artificial Sequence
  Description of Artificial Sequence: Synthetic oligonucleotide
  Sense strand starting at position 2734 of SEQ ID NO: 585312
auguaacuagugugcguau

SEQ ID NO: 630001 - RNA, 19 nt, Artificial Sequence
  Description of Artificial Sequence: Synthetic oligonucleotide
  Antisense strand to SEQ ID NO: 630000
auacgcacacuaguuacau

SEQ ID NO: 630002 - RNA, 19 nt, Artificial Sequence
  Description of Artificial Sequence: Synthetic oligonucleotide
  Sense strand starting at position 2736 of SEQ ID NO: 585312
guaacuagugugcguauca

SEQ ID NO: 630003 - RNA, 19 nt, Artificial Sequence
  Description of Artificial Sequence: Synthetic oligonucleotide
  Antisense strand to SEQ ID NO: 630002
ugauacgcacacuaguuac

SEQ ID NO: 630004 - RNA, 19 nt, Artificial Sequence
  Description of Artificial Sequence: Synthetic oligonucleotide
  Sense strand starting at position 2737 of SEQ ID NO: 585312
uaacuagugugcguaucaa

SEQ ID NO: 630005 - RNA, 19 nt, Artificial Sequence
  Description of Artificial Sequence: Synthetic oligonucleotide
  Antisense strand to SEQ ID NO: 630004
uugauacgcacacuaguua

SEQ ID NO: 630006 - RNA, 19 nt, Artificial Sequence
  Description of Artificial Sequence: Synthetic oligonucleotide
  Sense strand starting at position 2782 of SEQ ID NO: 585312
ugagucuguguaugaauuu

SEQ ID NO: 630007 - RNA, 19 nt, Artificial Sequence
  Description of Artificial Sequence: Synthetic oligonucleotide
  Antisense strand to SEQ ID NO: 630006
aaauucauacacagacuca

SEQ ID NO: 630008 - RNA, 19 nt, Artificial Sequence
  Description of Artificial Sequence: Synthetic oligonucleotide
  Sense strand starting at position 2799 of SEQ ID NO: 585312
uuuauaagacuggguaaca

SEQ ID NO: 630009 - RNA, 19 nt, Artificial Sequence
  Description of Artificial Sequence: Synthetic oligonucleotide
  Antisense strand to SEQ ID NO: 630008
uguuacccagucuuauaaa

SEQ ID NO: 630010 - RNA, 19 nt, Artificial Sequence
  Description of Artificial Sequence: Synthetic oligonucleotide
  Sense strand starting at position 2811 of SEQ ID NO: 585312
gguaacaaauugucacaaa

SEQ ID NO: 630011 - RNA, 19 nt, Artificial Sequence
  Description of Artificial Sequence: Synthetic oligonucleotide
  Antisense strand to SEQ ID NO: 630010
uuugugacaauuuguuacc

SEQ ID NO: 630012 - RNA, 19 nt, Artificial Sequence
  Description of Artificial Sequence: Synthetic oligonucleotide
  Sense strand starting at position 3044 of SEQ ID NO: 585312
agacgagugucucacuaua

SEQ ID NO: 630013 - RNA, 19 nt, Artificial Sequence
  Description of Artificial Sequence: Synthetic oligonucleotide
  Antisense strand to SEQ ID NO: 630012
uauagugagacacucgucu

SEQ ID NO: 630014 - RNA, 19 nt, Artificial Sequence
  Description of Artificial Sequence: Synthetic oligonucleotide
  Sense strand starting at position 3046 of SEQ ID NO: 585312
acgagugucucacuauauu

SEQ ID NO: 630015 - RNA, 19 nt, Artificial Sequence
  Description of Artificial Sequence: Synthetic oligonucleotide
  Antisense strand to SEQ ID NO: 630014
aauauagugagacacucgu

SEQ ID NO: 630016 - RNA, 19 nt, Artificial Sequence
  Description of Artificial Sequence: Synthetic oligonucleotide
  Sense strand starting at position 3092 of SEQ ID NO: 585312
gcaaguguuccuccugugu

SEQ ID NO: 630017 - RNA, 19 nt, Artificial Sequence
  Description of Artificial Sequence: Synthetic oligonucleotide
  Antisense strand to SEQ ID NO: 630016
acacaggaggaacacuugc

SEQ ID NO: 630018 - RNA, 19 nt, Artificial Sequence
  Description of Artificial Sequence: Synthetic oligonucleotide
  Sense strand starting at position 3114 of SEQ ID NO: 585312
cuccucaaauguuaggaua

SEQ ID NO: 630019 - RNA, 19 nt, Artificial Sequence
  Description of Artificial Sequence: Synthetic oligonucleotide
  Antisense strand to SEQ ID NO: 630018
uauccuaacauuugaggag

SEQ ID NO: 630020 - RNA, 19 nt, Artificial Sequence
  Description of Artificial Sequence: Synthetic oligonucleotide
  Sense strand starting at position 3116 of SEQ ID NO: 585312
ccucaaauguuaggauaca

SEQ ID NO: 630021 - RNA, 19 nt, Artificial Sequence
  Description of Artificial Sequence: Synthetic oligonucleotide
  Antisense strand to SEQ ID NO: 630020
uguauccuaacauuugagg

SEQ ID NO: 630022 - RNA, 19 nt, Artificial Sequence
  Description of Artificial Sequence: Synthetic oligonucleotide
  Sense strand starting at position 3163 of SEQ ID NO: 585312
acacucauuuguuguuuau

SEQ ID NO: 630023 - RNA, 19 nt, Artificial Sequence
  Description of Artificial Sequence: Synthetic oligonucleotide
  Antisense strand to SEQ ID NO: 630022
auaaacaacaaaugagugu

SEQ ID NO: 630024 - RNA, 19 nt, Artificial Sequence
  Description of Artificial Sequence: Synthetic oligonucleotide
  Sense strand starting at position 3166 of SEQ ID NO: 585312
cucauuuguuguuuauagu

SEQ ID NO: 630025 - RNA, 19 nt, Artificial Sequence
  Description of Artificial Sequence: Synthetic oligonucleotide
  Antisense strand to SEQ ID NO: 630024
acuauaaacaacaaaugag

SEQ ID NO: 630026 - RNA, 19 nt, Artificial Sequence
  Description of Artificial Sequence: Synthetic oligonucleotide
  Sense strand starting at position 3191 of SEQ ID NO: 585312
aucagaaaucugggcauga

SEQ ID NO: 630027 - RNA, 19 nt, Artificial Sequence
  Description of Artificial Sequence: Synthetic oligonucleotide
  Antisense strand to SEQ ID NO: 630026
ucaugcccagauuucugau

SEQ ID NO: 630028 - RNA, 19 nt, Artificial Sequence
  Description of Artificial Sequence: Synthetic oligonucleotide
  Sense strand starting at position 3658 of SEQ ID NO: 585312
guuguugggagccaugaua

SEQ ID NO: 630029 - RNA, 19 nt, Artificial Sequence
  Description of Artificial Sequence: Synthetic oligonucleotide
  Antisense strand to SEQ ID NO: 630028
uaucauggcucccaacaac

SEQ ID NO: 630030 - RNA, 19 nt, Artificial Sequence
  Description of Artificial Sequence: Synthetic oligonucleotide
  Sense strand starting at position 3750 of SEQ ID NO: 585312
aagugaucauugugaauag

SEQ ID NO: 630031 - RNA, 19 nt, Artificial Sequence
  Description of Artificial Sequence: Synthetic oligonucleotide
  Antisense strand to SEQ ID NO: 630030
cuauucacaaugaucacuu

SEQ ID NO: 630032 - RNA, 19 nt, Artificial Sequence
  Description of Artificial Sequence: Synthetic oligonucleotide
  Sense strand starting at position 3751 of SEQ ID NO: 585312
agugaucauugugaauagu

SEQ ID NO: 630033 - RNA, 19 nt, Artificial Sequence
  Description of Artificial Sequence: Synthetic oligonucleotide
  Antisense strand to SEQ ID NO: 630032
acuauucacaaugaucacu

SEQ ID NO: 630034 - RNA, 19 nt, Artificial Sequence
  Description of Artificial Sequence: Synthetic oligonucleotide
  Sense strand starting at position 74 of SEQ ID NO: 585313
ccaagaaacguucgucuuu

SEQ ID NO: 630035 - RNA, 19 nt, Artificial Sequence
  Description of Artificial Sequence: Synthetic oligonucleotide
  Antisense strand to SEQ ID NO: 630034
aaagacgaacguuucuugg

SEQ ID NO: 630036 - RNA, 19 nt, Artificial Sequence
  Description of Artificial Sequence: Synthetic oligonucleotide
  Sense strand starting at position 97 of SEQ ID NO: 585313
ccuguuucugaacaucaga

SEQ ID NO: 630037 - RNA, 19 nt, Artificial Sequence
  Description of Artificial Sequence: Synthetic oligonucleotide
  Antisense strand to SEQ ID NO: 630036
ucugauguucagaaacagg

SEQ ID NO: 630038 - RNA, 19 nt, Artificial Sequence
  Description of Artificial Sequence: Synthetic oligonucleotide
  Sense strand starting at position 114 of SEQ ID NO: 585313
gaggccugucuuggaggaa

SEQ ID NO: 630039 - RNA, 19 nt, Artificial Sequence
  Description of Artificial Sequence: Synthetic oligonucleotide
  Antisense strand to SEQ ID NO: 630038
uuccuccaagacaggccuc

SEQ ID NO: 630040 - RNA, 19 nt, Artificial Sequence
  Description of Artificial Sequence: Synthetic oligonucleotide
  Sense strand starting at position 117 of SEQ ID NO: 585313
gccugucuuggaggaacua

SEQ ID NO: 630041 - RNA, 19 nt, Artificial Sequence
  Description of Artificial Sequence: Synthetic oligonucleotide
  Antisense strand to SEQ ID NO: 630040
uaguuccuccaagacaggc

SEQ ID NO: 630042 - RNA, 19 nt, Artificial Sequence
  Description of Artificial Sequence: Synthetic oligonucleotide
  Sense strand starting at position 216 of SEQ ID NO: 585313
ugcaaacugugcuccucaa

SEQ ID NO: 630043 - RNA, 19 nt, Artificial Sequence
  Description of Artificial Sequence: Synthetic oligonucleotide
  Antisense strand to SEQ ID NO: 630042
uugaggagcacaguuugca

SEQ ID NO: 630044 - RNA, 19 nt, Artificial Sequence
  Description of Artificial Sequence: Synthetic oligonucleotide
  Sense strand starting at position 330 of SEQ ID NO: 585313
ccuugaguugccuaagguc

SEQ ID NO: 630045 - RNA, 19 nt, Artificial Sequence
  Description of Artificial Sequence: Synthetic oligonucleotide
  Antisense strand to SEQ ID NO: 630044
gaccuuaggcaacucaagg

SEQ ID NO: 630046 - RNA, 19 nt, Artificial Sequence
  Description of Artificial Sequence: Synthetic oligonucleotide
  Sense strand starting at position 372 of SEQ ID NO: 585313
agaaguagguucccggaga

SEQ ID NO: 630047 - RNA, 19 nt, Artificial Sequence
  Description of Artificial Sequence: Synthetic oligonucleotide
  Antisense strand to SEQ ID NO: 630046
ucuccgggaaccuacuucu

SEQ ID NO: 630048 - RNA, 19 nt, Artificial Sequence
  Description of Artificial Sequence: Synthetic oligonucleotide
  Sense strand starting at position 777 of SEQ ID NO: 585313
agggacuaguuccaacaga

SEQ ID NO: 630049 - RNA, 19 nt, Artificial Sequence
  Description of Artificial Sequence: Synthetic oligonucleotide
  Antisense strand to SEQ ID NO: 630048
ucuguuggaacuagucccu

SEQ ID NO: 630050 - RNA, 19 nt, Artificial Sequence
  Description of Artificial Sequence: Synthetic oligonucleotide
  Sense strand starting at position 2343 of SEQ ID NO: 585313
gagaaacgcgcucguuaga

SEQ ID NO: 630051 - RNA, 19 nt, Artificial Sequence
  Description of Artificial Sequence: Synthetic oligonucleotide
  Antisense strand to SEQ ID NO: 630050
ucuaacgagcgcguuucuc

SEQ ID NO: 630052 - RNA, 19 nt, Artificial Sequence
  Description of Artificial Sequence: Synthetic oligonucleotide
  Sense strand starting at position 2346 of SEQ ID NO: 585313
aaacgcgcucguuagagaa

SEQ ID NO: 630053 - RNA, 19 nt, Artificial Sequence
  Description of Artificial Sequence: Synthetic oligonucleotide
  Antisense strand to SEQ ID NO: 630052
uucucuaacgagcgcguuu

SEQ ID NO: 630054 - RNA, 19 nt, Artificial Sequence
  Description of Artificial Sequence: Synthetic oligonucleotide
  Sense strand starting at position 2348 of SEQ ID NO: 585313
acgcgcucguuagagaauu

SEQ ID NO: 630055 - RNA, 19 nt, Artificial Sequence
  Description of Artificial Sequence: Synthetic oligonucleotide
  Antisense strand to SEQ ID NO: 630054
aauucucuaacgagcgcgu

SEQ ID NO: 630056 - RNA, 19 nt, Artificial Sequence
  Description of Artificial Sequence: Synthetic oligonucleotide
  Sense strand starting at position 2349 of SEQ ID NO: 585313
cgcgcucguuagagaauuc

SEQ ID NO: 630057 - RNA, 19 nt, Artificial Sequence
  Description of Artificial Sequence: Synthetic oligonucleotide
  Antisense strand to SEQ ID NO: 630056
gaauucucuaacgagcgcg

SEQ ID NO: 630058 - RNA, 19 nt, Artificial Sequence
  Description of Artificial Sequence: Synthetic oligonucleotide
  Sense strand starting at position 2358 of SEQ ID NO: 585313
uagagaauuccgcggccua

SEQ ID NO: 630059 - RNA, 19 nt, Artificial Sequence
  Description of Artificial Sequence: Synthetic oligonucleotide
  Antisense strand to SEQ ID NO: 630058
uaggccgcggaauucucua

SEQ ID NO: 630060 - RNA, 19 nt, Artificial Sequence
  Description of Artificial Sequence: Synthetic oligonucleotide
  Sense strand starting at position 2359 of SEQ ID NO: 585313
agagaauuccgcggccuac

SEQ ID NO: 630061 - RNA, 19 nt, Artificial Sequence
  Description of Artificial Sequence: Synthetic oligonucleotide
  Antisense strand to SEQ ID NO: 630060
guaggccgcggaauucucu

SEQ ID NO: 630062 - RNA, 19 nt, Artificial Sequence
  Description of Artificial Sequence: Synthetic oligonucleotide
  Sense strand starting at position 2464 of SEQ ID NO: 585313
uguggcugauuggugagau

SEQ ID NO: 630063 - RNA, 19 nt, Artificial Sequence
  Description of Artificial Sequence: Synthetic oligonucleotide
  Antisense strand to SEQ ID NO: 630062
aucucaccaaucagccaca

SEQ ID NO: 630064 - RNA, 19 nt, Artificial Sequence
  Description of Artificial Sequence: Synthetic oligonucleotide
  Sense strand starting at position 2465 of SEQ ID NO: 585313
guggcugauuggugagaua

SEQ ID NO: 630065 - RNA, 19 nt, Artificial Sequence
  Description of Artificial Sequence: Synthetic oligonucleotide
  Antisense strand to SEQ ID NO: 630064
uaucucaccaaucagccac

SEQ ID NO: 630066 - RNA, 19 nt, Artificial Sequence
  Description of Artificial Sequence: Synthetic oligonucleotide
  Sense strand starting at position 2468 of SEQ ID NO: 585313
gcugauuggugagauacaa

SEQ ID NO: 630067 - RNA, 19 nt, Artificial Sequence
  Description of Artificial Sequence: Synthetic oligonucleotide
  Antisense strand to SEQ ID NO: 630066
uuguaucucaccaaucagc

SEQ ID NO: 630068 - RNA, 19 nt, Artificial Sequence
  Description of Artificial Sequence: Synthetic oligonucleotide
  Sense strand starting at position 2479 of SEQ ID NO: 585313
agauacaagucuugugaaa

SEQ ID NO: 630069 - RNA, 19 nt, Artificial Sequence
  Description of Artificial Sequence: Synthetic oligonucleotide
  Antisense strand to SEQ ID NO: 630068
uuucacaagacuuguaucu

SEQ ID NO: 630070 - RNA, 19 nt, Artificial Sequence
  Description of Artificial Sequence: Synthetic oligonucleotide
  Sense strand starting at position 2481 of SEQ ID NO: 585313
auacaagucuugugaaauu

SEQ ID NO: 630071 - RNA, 19 nt, Artificial Sequence
  Description of Artificial Sequence: Synthetic oligonucleotide
  Antisense strand to SEQ ID NO: 630070
aauuucacaagacuuguau

SEQ ID NO: 630072 - RNA, 19 nt, Artificial Sequence
  Description of Artificial Sequence: Synthetic oligonucleotide
  Sense strand starting at position 2503 of SEQ ID NO: 585313
acgugaaacuugugaaauc

SEQ ID NO: 630073 - RNA, 19 nt, Artificial Sequence
  Description of Artificial Sequence: Synthetic oligonucleotide
  Antisense strand to SEQ ID NO: 630072
gauuucacaaguuucacgu

SEQ ID NO: 630074 - RNA, 19 nt, Artificial Sequence
  Description of Artificial Sequence: Synthetic oligonucleotide
  Sense strand starting at position 2562 of SEQ ID NO: 585313
gguggagccuuccagcgaa

SEQ ID NO: 630075 - RNA, 19 nt, Artificial Sequence
  Description of Artificial Sequence: Synthetic oligonucleotide
  Antisense strand to SEQ ID NO: 630074
uucgcuggaaggcuccacc

SEQ ID NO: 630076 - RNA, 19 nt, Artificial Sequence
  Description of Artificial Sequence: Synthetic oligonucleotide
  Sense strand starting at position 2632 of SEQ ID NO: 585313
aggugacuuagaugguguu

SEQ ID NO: 630077 - RNA, 19 nt, Artificial Sequence
  Description of Artificial Sequence: Synthetic oligonucleotide
  Antisense strand to SEQ ID NO: 630076
aacaccaucuaagucaccu

SEQ ID NO: 630078 - RNA, 19 nt, Artificial Sequence
  Description of Artificial Sequence: Synthetic oligonucleotide
  Sense strand starting at position 2642 of SEQ ID NO: 585313
gaugguguucuggagauac

SEQ ID NO: 630079 - RNA, 19 nt, Artificial Sequence
  Description of Artificial Sequence: Synthetic oligonucleotide
  Antisense strand to SEQ ID NO: 630078
guaucuccagaacaccauc

SEQ ID NO: 630080 - RNA, 19 nt, Artificial Sequence
  Description of Artificial Sequence: Synthetic oligonucleotide
  Sense strand starting at position 2687 of SEQ ID NO: 585313
uuccguugggacuguaaau

SEQ ID NO: 630081 - RNA, 19 nt, Artificial Sequence
  Description of Artificial Sequence: Synthetic oligonucleotide
  Antisense strand to SEQ ID NO: 630080
auuuacagucccaacggaa

SEQ ID NO: 630082 - RNA, 19 nt, Artificial Sequence
  Description of Artificial Sequence: Synthetic oligonucleotide
  Sense strand starting at position 2973 of SEQ ID NO: 585313
uccugugaugcagggaauu

SEQ ID NO: 630083 - RNA, 19 nt, Artificial Sequence
  Description of Artificial Sequence: Synthetic oligonucleotide
  Antisense strand to SEQ ID NO: 630082
aauucccugcaucacagga

SEQ ID NO: 630084 - RNA, 19 nt, Artificial Sequence
  Description of Artificial Sequence: Synthetic oligonucleotide
  Sense strand starting at position 2975 of SEQ ID NO: 585313
cugugaugcagggaauuga

SEQ ID NO: 630085 - RNA, 19 nt, Artificial Sequence
  Description of Artificial Sequence: Synthetic oligonucleotide
  Antisense strand to SEQ ID NO: 630084
ucaauucccugcaucacag

SEQ ID NO: 630086 - RNA, 19 nt, Artificial Sequence
  Description of Artificial Sequence: Synthetic oligonucleotide
  Sense strand starting at position 3012 of SEQ ID NO: 585313
acggcugugacucauguuu

SEQ ID NO: 630087 - RNA, 19 nt, Artificial Sequence
  Description of Artificial Sequence: Synthetic oligonucleotide
  Antisense strand to SEQ ID NO: 630086
aaacaugagucacagccgu

SEQ ID NO: 630088 - RNA, 19 nt, Artificial Sequence
  Description of Artificial Sequence: Synthetic oligonucleotide
  Sense strand starting at position 3179 of SEQ ID NO: 585313
gcaggaauguggcaggaau

SEQ ID NO: 630089 - RNA, 19 nt, Artificial Sequence
  Description of Artificial Sequence: Synthetic oligonucleotide
  Antisense strand to SEQ ID NO: 630088
auuccugccacauuccugc

SEQ ID NO: 630090 - RNA, 19 nt, Artificial Sequence
  Description of Artificial Sequence: Synthetic oligonucleotide
  Sense strand starting at position 3442 of SEQ ID NO: 585313
aacgcaguuccugagaagu

SEQ ID NO: 630091 - RNA, 19 nt, Artificial Sequence
  Description of Artificial Sequence: Synthetic oligonucleotide
  Antisense strand to SEQ ID NO: 630090
acuucucaggaacugcguu

SEQ ID NO: 630092 - RNA, 19 nt, Artificial Sequence
  Description of Artificial Sequence: Synthetic oligonucleotide
  Sense strand starting at position 147 of SEQ ID NO: 585314
ccaagaaacguucgucuuu

SEQ ID NO: 630093 - RNA, 19 nt, Artificial Sequence
  Description of Artificial Sequence: Synthetic oligonucleotide
  Antisense strand to SEQ ID NO: 630092
aaagacgaacguuucuugg

SEQ ID NO: 630094 - RNA, 19 nt, Artificial Sequence
  Description of Artificial Sequence: Synthetic oligonucleotide
  Sense strand starting at position 170 of SEQ ID NO: 585314
ccuguuucugaacaucaga

SEQ ID NO: 630095 - RNA, 19 nt, Artificial Sequence
  Description of Artificial Sequence: Synthetic oligonucleotide
  Antisense strand to SEQ ID NO: 630094
ucugauguucagaaacagg

SEQ ID NO: 630096 - RNA, 19 nt, Artificial Sequence
  Description of Artificial Sequence: Synthetic oligonucleotide
  Sense strand starting at position 187 of SEQ ID NO: 585314
gaggccugucuuggaggaa

SEQ ID NO: 630097 - RNA, 19 nt, Artificial Sequence
  Description of Artificial Sequence: Synthetic oligonucleotide
  Antisense strand to SEQ ID NO: 630096
uuccuccaagacaggccuc

SEQ ID NO: 630098 - RNA, 19 nt, Artificial Sequence
  Description of Artificial Sequence: Synthetic oligonucleotide
  Sense strand starting at position 190 of SEQ ID NO: 585314
gccugucuuggaggaacua

SEQ ID NO: 630099 - RNA, 19 nt, Artificial Sequence
  Description of Artificial Sequence: Synthetic oligonucleotide
  Antisense strand to SEQ ID NO: 630098
uaguuccuccaagacaggc

SEQ ID NO: 630100 - RNA, 19 nt, Artificial Sequence
  Description of Artificial Sequence: Synthetic oligonucleotide
  Sense strand starting at position 289 of SEQ ID NO: 585314
ugcaaacugugcuccucaa

SEQ ID NO: 630101 - RNA, 19 nt, Artificial Sequence
  Description of Artificial Sequence: Synthetic oligonucleotide
  Antisense strand to SEQ ID NO: 630100
uugaggagcacaguuugca

SEQ ID NO: 630102 - RNA, 19 nt, Artificial Sequence
  Description of Artificial Sequence: Synthetic oligonucleotide
  Sense strand starting at position 403 of SEQ ID NO: 585314
ccuugaguugccuaagguc

SEQ ID NO: 630103 - RNA, 19 nt, Artificial Sequence
  Description of Artificial Sequence: Synthetic oligonucleotide
  Antisense strand to SEQ ID NO: 630102
gaccuuaggcaacucaagg

SEQ ID NO: 630104 - RNA, 19 nt, Artificial Sequence
  Description of Artificial Sequence: Synthetic oligonucleotide
  Sense strand starting at position 445 of SEQ ID NO: 585314
agaaguagguucccggaga

SEQ ID NO: 630105 - RNA, 19 nt, Artificial Sequence
  Description of Artificial Sequence: Synthetic oligonucleotide
  Antisense strand to SEQ ID NO: 630104
ucuccgggaaccuacuucu

SEQ ID NO: 630106 - RNA, 19 nt, Artificial Sequence
  Description of Artificial Sequence: Synthetic oligonucleotide
  Sense strand starting at position 850 of SEQ ID NO: 585314
agggacuaguuccaacaga

SEQ ID NO: 630107 - RNA, 19 nt, Artificial Sequence
  Description of Artificial Sequence: Synthetic oligonucleotide
  Antisense strand to SEQ ID NO: 630106
ucuguuggaacuagucccu

SEQ ID NO: 630108 - RNA, 19 nt, Artificial Sequence
  Description of Artificial Sequence: Synthetic oligonucleotide
  Sense strand starting at position 2416 of SEQ ID NO: 585314
gagaaacgcgcucguuaga

SEQ ID NO: 630109 - RNA, 19 nt, Artificial Sequence
  Description of Artificial Sequence: Synthetic oligonucleotide
  Antisense strand to SEQ ID NO: 630108
ucuaacgagcgcguuucuc

SEQ ID NO: 630110 - RNA, 19 nt, Artificial Sequence
  Description of Artificial Sequence: Synthetic oligonucleotide
  Sense strand starting at position 2419 of SEQ ID NO: 585314
aaacgcgcucguuagagaa

SEQ ID NO: 630111 - RNA, 19 nt, Artificial Sequence
  Description of Artificial Sequence: Synthetic oligonucleotide
  Antisense strand to SEQ ID NO: 630110
uucucuaacgagcgcguuu

SEQ ID NO: 630112 - RNA, 19 nt, Artificial Sequence
  Description of Artificial Sequence: Synthetic oligonucleotide
  Sense strand starting at position 2421 of SEQ ID NO: 585314
acgcgcucguuagagaauu

SEQ ID NO: 630113 - RNA, 19 nt, Artificial Sequence
  Description of Artificial Sequence: Synthetic oligonucleotide
  Antisense strand to SEQ ID NO: 630112
aauucucuaacgagcgcgu

SEQ ID NO: 630114 - RNA, 19 nt, Artificial Sequence
  Description of Artificial Sequence: Synthetic oligonucleotide
  Sense strand starting at position 2422 of SEQ ID NO: 585314
cgcgcucguuagagaauuc

SEQ ID NO: 630115 - RNA, 19 nt, Artificial Sequence
  Description of Artificial Sequence: Synthetic oligonucleotide
  Antisense strand to SEQ ID NO: 630114
gaauucucuaacgagcgcg

SEQ ID NO: 630116 - RNA, 19 nt, Artificial Sequence
  Description of Artificial Sequence: Synthetic oligonucleotide
  Sense strand starting at position 2431 of SEQ ID NO: 585314
uagagaauuccgcggccua

SEQ ID NO: 630117 - RNA, 19 nt, Artificial Sequence
  Description of Artificial Sequence: Synthetic oligonucleotide
  Antisense strand to SEQ ID NO: 630116
uaggccgcggaauucucua

SEQ ID NO: 630118 - RNA, 19 nt, Artificial Sequence
  Description of Artificial Sequence: Synthetic oligonucleotide
  Sense strand starting at position 2432 of SEQ ID NO: 585314
agagaauuccgcggccuac

SEQ ID NO: 630119 - RNA, 19 nt, Artificial Sequence
  Description of Artificial Sequence: Synthetic oligonucleotide
  Antisense strand to SEQ ID NO: 630118
guaggccgcggaauucucu

SEQ ID NO: 630120 - RNA, 19 nt, Artificial Sequence
  Description of Artificial Sequence: Synthetic oligonucleotide
  Sense strand starting at position 2537 of SEQ ID NO: 585314
uguggcugauuggugagau

SEQ ID NO: 630121 - RNA, 19 nt, Artificial Sequence
  Description of Artificial Sequence: Synthetic oligonucleotide
  Antisense strand to SEQ ID NO: 630120
aucucaccaaucagccaca

SEQ ID NO: 630122 - RNA, 19 nt, Artificial Sequence
  Description of Artificial Sequence: Synthetic oligonucleotide
  Sense strand starting at position 2538 of SEQ ID NO: 585314
guggcugauuggugagaua

SEQ ID NO: 630123 - RNA, 19 nt, Artificial Sequence
  Description of Artificial Sequence: Synthetic oligonucleotide
  Antisense strand to SEQ ID NO: 630122
uaucucaccaaucagccac

SEQ ID NO: 630124 - RNA, 19 nt, Artificial Sequence
  Description of Artificial Sequence: Synthetic oligonucleotide
  Sense strand starting at position 2541 of SEQ ID NO: 585314
gcugauuggugagauacaa

SEQ ID NO: 630125 - RNA, 19 nt, Artificial Sequence
  Description of Artificial Sequence: Synthetic oligonucleotide
  Antisense strand to SEQ ID NO: 630124
uuguaucucaccaaucagc

SEQ ID NO: 630126 - RNA, 19 nt, Artificial Sequence
  Description of Artificial Sequence: Synthetic oligonucleotide
  Sense strand starting at position 2552 of SEQ ID NO: 585314
agauacaagucuugugaaa

SEQ ID NO: 630127 - RNA, 19 nt, Artificial Sequence
  Description of Artificial Sequence: Synthetic oligonucleotide
  Antisense strand to SEQ ID NO: 630126
uuucacaagacuuguaucu

SEQ ID NO: 630128 - RNA, 19 nt, Artificial Sequence
  Description of Artificial Sequence: Synthetic oligonucleotide
  Sense strand starting at position 2554 of SEQ ID NO: 585314
auacaagucuugugaaauu

SEQ ID NO: 630129 - RNA, 19 nt, Artificial Sequence
  Description of Artificial Sequence: Synthetic oligonucleotide
  Antisense strand to SEQ ID NO: 630128
aauuucacaagacuuguau

SEQ ID NO: 630130 - RNA, 19 nt, Artificial Sequence
  Description of Artificial Sequence: Synthetic oligonucleotide
  Sense strand starting at position 2576 of SEQ ID NO: 585314
acgugaaacuugugaaauc

SEQ ID NO: 630131 - RNA, 19 nt, Artificial Sequence
  Description of Artificial Sequence: Synthetic oligonucleotide
  Antisense strand to SEQ ID NO: 630130
gauuucacaaguuucacgu

SEQ ID NO: 630132 - RNA, 19 nt, Artificial Sequence
  Description of Artificial Sequence: Synthetic oligonucleotide
  Sense strand starting at position 2635 of SEQ ID NO: 585314
gguggagccuuccagcgaa

SEQ ID NO: 630133 - RNA, 19 nt, Artificial Sequence
  Description of Artificial Sequence: Synthetic oligonucleotide
  Antisense strand to SEQ ID NO: 630132
uucgcuggaaggcuccacc

SEQ ID NO: 630134 - RNA, 19 nt, Artificial Sequence
  Description of Artificial Sequence: Synthetic oligonucleotide
  Sense strand starting at position 2705 of SEQ ID NO: 585314
aggugacuuagaugguguu

SEQ ID NO: 630135 - RNA, 19 nt, Artificial Sequence
  Description of Artificial Sequence: Synthetic oligonucleotide
  Antisense strand to SEQ ID NO: 630134
aacaccaucuaagucaccu

SEQ ID NO: 630136 - RNA, 19 nt, Artificial Sequence
  Description of Artificial Sequence: Synthetic oligonucleotide
  Sense strand starting at position 2715 of SEQ ID NO: 585314
gaugguguucuggagauac

SEQ ID NO: 630137 - RNA, 19 nt, Artificial Sequence
  Description of Artificial Sequence: Synthetic oligonucleotide
  Antisense strand to SEQ ID NO: 630136
guaucuccagaacaccauc

SEQ ID NO: 630138 - RNA, 19 nt, Artificial Sequence
  Description of Artificial Sequence: Synthetic oligonucleotide
  Sense strand starting at position 2760 of SEQ ID NO: 585314
uuccguugggacuguaaau

SEQ ID NO: 630139 - RNA, 19 nt, Artificial Sequence
  Description of Artificial Sequence: Synthetic oligonucleotide
  Antisense strand to SEQ ID NO: 630138
auuuacagucccaacggaa

SEQ ID NO: 630140 - RNA, 19 nt, Artificial Sequence
  Description of Artificial Sequence: Synthetic oligonucleotide
  Sense strand starting at position 3046 of SEQ ID NO: 585314
uccugugaugcagggaauu

SEQ ID NO: 630141 - RNA, 19 nt, Artificial Sequence
  Description of Artificial Sequence: Synthetic oligonucleotide
  Antisense strand to SEQ ID NO: 630140
aauucccugcaucacagga

SEQ ID NO: 630142 - RNA, 19 nt, Artificial Sequence
  Description of Artificial Sequence: Synthetic oligonucleotide
  Sense strand starting at position 3048 of SEQ ID NO: 585314
cugugaugcagggaauuga

SEQ ID NO: 630143 - RNA, 19 nt, Artificial Sequence
  Description of Artificial Sequence: Synthetic oligonucleotide
  Antisense strand to SEQ ID NO: 630142
ucaauucccugcaucacag

SEQ ID NO: 630144 - RNA, 19 nt, Artificial Sequence
  Description of Artificial Sequence: Synthetic oligonucleotide
  Sense strand starting at position 3085 of SEQ ID NO: 585314
acggcugugacucauguuu

SEQ ID NO: 630145 - RNA, 19 nt, Artificial Sequence
  Description of Artificial Sequence: Synthetic oligonucleotide
  Antisense strand to SEQ ID NO: 630144
aaacaugagucacagccgu

SEQ ID NO: 630146 - RNA, 19 nt, Artificial Sequence
  Description of Artificial Sequence: Synthetic oligonucleotide
  Sense strand starting at position 3252 of SEQ ID NO: 585314
gcaggaauguggcaggaau

SEQ ID NO: 630147 - RNA, 19 nt, Artificial Sequence
  Description of Artificial Sequence: Synthetic oligonucleotide
  Antisense strand to SEQ ID NO: 630146
auuccugccacauuccugc

SEQ ID NO: 630148 - RNA, 19 nt, Artificial Sequence
  Description of Artificial Sequence: Synthetic oligonucleotide
  Sense strand starting at position 3515 of SEQ ID NO: 585314
aacgcaguuccugagaagu

SEQ ID NO: 630149 - RNA, 19 nt, Artificial Sequence
  Description of Artificial Sequence: Synthetic oligonucleotide
  Antisense strand to SEQ ID NO: 630148
acuucucaggaacugcguu

SEQ ID NO: 630150 - RNA, 19 nt, Artificial Sequence
  Description of Artificial Sequence: Synthetic oligonucleotide
  Sense strand starting at position 399 of SEQ ID NO: 585315
ggaggugagaucugacgua

SEQ ID NO: 630151 - RNA, 19 nt, Artificial Sequence
  Description of Artificial Sequence: Synthetic oligonucleotide
  Antisense strand to SEQ ID NO: 630150
uacgucagaucucaccucc

SEQ ID NO: 630152 - RNA, 19 nt, Artificial Sequence
  Description of Artificial Sequence: Synthetic oligonucleotide
  Sense strand starting at position 451 of SEQ ID NO: 585315
ugcccuuucucuuuaagag

SEQ ID NO: 630153 - RNA, 19 nt, Artificial Sequence
  Description of Artificial Sequence: Synthetic oligonucleotide
  Antisense strand to SEQ ID NO: 630152
cucuuaaagagaaagggca

SEQ ID NO: 630154 - RNA, 19 nt, Artificial Sequence
  Description of Artificial Sequence: Synthetic oligonucleotide
  Sense strand starting at position 452 of SEQ ID NO: 585315
gcccuuucucuuuaagaga

SEQ ID NO: 630155 - RNA, 19 nt, Artificial Sequence
  Description of Artificial Sequence: Synthetic oligonucleotide
  Antisense strand to SEQ ID NO: 630154
ucucuuaaagagaaagggc

SEQ ID NO: 630156 - RNA, 19 nt, Artificial Sequence
  Description of Artificial Sequence: Synthetic oligonucleotide
  Sense strand starting at position 526 of SEQ ID NO: 585315
ggcagcuauggacauugau

SEQ ID NO: 630157 - RNA, 19 nt, Artificial Sequence
  Description of Artificial Sequence: Synthetic oligonucleotide
  Antisense strand to SEQ ID NO: 630156
aucaauguccauagcugcc

SEQ ID NO: 630158 - RNA, 19 nt, Artificial Sequence
  Description of Artificial Sequence: Synthetic oligonucleotide
  Sense strand starting at position 655 of SEQ ID NO: 585315
uguucucacccaggguaaa

SEQ ID NO: 630159 - RNA, 19 nt, Artificial Sequence
  Description of Artificial Sequence: Synthetic oligonucleotide
  Antisense strand to SEQ ID NO: 630158
uuuacccugggugagaaca

SEQ ID NO: 630160 - RNA, 19 nt, Artificial Sequence
  Description of Artificial Sequence: Synthetic oligonucleotide
  Sense strand starting at position 656 of SEQ ID NO: 585315
guucucacccaggguaaau

SEQ ID NO: 630161 - RNA, 19 nt, Artificial Sequence
  Description of Artificial Sequence: Synthetic oligonucleotide
  Antisense strand to SEQ ID NO: 630160
auuuacccugggugagaac

SEQ ID NO: 630162 - RNA, 19 nt, Artificial Sequence
  Description of Artificial Sequence: Synthetic oligonucleotide
  Sense strand starting at position 712 of SEQ ID NO: 585315
ggagaugguugaagcuagu

SEQ ID NO: 630163 - RNA, 19 nt, Artificial Sequence
  Description of Artificial Sequence: Synthetic oligonucleotide
  Antisense strand to SEQ ID NO: 630162
acuagcuucaaccaucucc

SEQ ID NO: 630164 - RNA, 19 nt, Artificial Sequence
  Description of Artificial Sequence: Synthetic oligonucleotide
  Sense strand starting at position 819 of SEQ ID NO: 585315
gggacuuugucagaugggu

SEQ ID NO: 630165 - RNA, 19 nt, Artificial Sequence
  Description of Artificial Sequence: Synthetic oligonucleotide
  Antisense strand to SEQ ID NO: 630164
acccaucugacaaaguccc

SEQ ID NO: 630166 - RNA, 19 nt, Artificial Sequence
  Description of Artificial Sequence: Synthetic oligonucleotide
  Sense strand starting at position 827 of SEQ ID NO: 585315
gucagauggguagggaauu

SEQ ID NO: 630167 - RNA, 19 nt, Artificial Sequence
  Description of Artificial Sequence: Synthetic oligonucleotide
  Antisense strand to SEQ ID NO: 630166
aauucccuacccaucugac

SEQ ID NO: 630168 - RNA, 19 nt, Artificial Sequence
  Description of Artificial Sequence: Synthetic oligonucleotide
  Sense strand starting at position 888 of SEQ ID NO: 585315
cauccuuuaggaugagguu

SEQ ID NO: 630169 - RNA, 19 nt, Artificial Sequence
  Description of Artificial Sequence: Synthetic oligonucleotide
  Antisense strand to SEQ ID NO: 630168
aaccucauccuaaaggaug

SEQ ID NO: 630170 - RNA, 19 nt, Artificial Sequence
  Description of Artificial Sequence: Synthetic oligonucleotide
  Sense strand starting at position 902 of SEQ ID NO: 585315
agguuuagggcucauccua

SEQ ID NO: 630171 - RNA, 19 nt, Artificial Sequence
  Description of Artificial Sequence: Synthetic oligonucleotide
  Antisense strand to SEQ ID NO: 630170
uaggaugagcccuaaaccu

SEQ ID NO: 630172 - RNA, 19 nt, Artificial Sequence
  Description of Artificial Sequence: Synthetic oligonucleotide
  Sense strand starting at position 1034 of SEQ ID NO: 585315
caaccuguauuugggaaua

SEQ ID NO: 630173 - RNA, 19 nt, Artificial Sequence
  Description of Artificial Sequence: Synthetic oligonucleotide
  Antisense strand to SEQ ID NO: 630172
uauucccaaauacagguug

SEQ ID NO: 630174 - RNA, 19 nt, Artificial Sequence
  Description of Artificial Sequence: Synthetic oligonucleotide
  Sense strand starting at position 1044 of SEQ ID NO: 585315
uugggaauacccuguauua

SEQ ID NO: 630175 - RNA, 19 nt, Artificial Sequence
  Description of Artificial Sequence: Synthetic oligonucleotide
  Antisense strand to SEQ ID NO: 630174
uaauacaggguauucccaa

SEQ ID NO: 630176 - RNA, 19 nt, Artificial Sequence
  Description of Artificial Sequence: Synthetic oligonucleotide
  Sense strand starting at position 1229 of SEQ ID NO: 585315
cuguaagaucaagguaauu

SEQ ID NO: 630177 - RNA, 19 nt, Artificial Sequence
  Description of Artificial Sequence: Synthetic oligonucleotide
  Antisense strand to SEQ ID NO: 630176
aauuaccuugaucuuacag

SEQ ID NO: 630178 - RNA, 19 nt, Artificial Sequence
  Description of Artificial Sequence: Synthetic oligonucleotide
  Sense strand starting at position 1250 of SEQ ID NO: 585315
aagguaccugccugaacua

SEQ ID NO: 630179 - RNA, 19 nt, Artificial Sequence
  Description of Artificial Sequence: Synthetic oligonucleotide
  Antisense strand to SEQ ID NO: 630178
uaguucaggcagguaccuu

SEQ ID NO: 630180 - RNA, 19 nt, Artificial Sequence
  Description of Artificial Sequence: Synthetic oligonucleotide
  Sense strand starting at position 1485 of SEQ ID NO: 585315
gugggacucccaugucuaa

SEQ ID NO: 630181 - RNA, 19 nt, Artificial Sequence
  Description of Artificial Sequence: Synthetic oligonucleotide
  Antisense strand to SEQ ID NO: 630180
uuagacaugggagucccac

SEQ ID NO: 630182 - RNA, 19 nt, Artificial Sequence
  Description of Artificial Sequence: Synthetic oligonucleotide
  Sense strand starting at position 1631 of SEQ ID NO: 585315
acagcaggacuuugguaau

SEQ ID NO: 630183 - RNA, 19 nt, Artificial Sequence
  Description of Artificial Sequence: Synthetic oligonucleotide
  Antisense strand to SEQ ID NO: 630182
auuaccaaaguccugcugu

SEQ ID NO: 630184 - RNA, 19 nt, Artificial Sequence
  Description of Artificial Sequence: Synthetic oligonucleotide
  Sense strand starting at position 1634 of SEQ ID NO: 585315
gcaggacuuugguaauuau

SEQ ID NO: 630185 - RNA, 19 nt, Artificial Sequence
  Description of Artificial Sequence: Synthetic oligonucleotide
  Antisense strand to SEQ ID NO: 630184
auaauuaccaaaguccugc

SEQ ID NO: 630186 - RNA, 19 nt, Artificial Sequence
  Description of Artificial Sequence: Synthetic oligonucleotide
  Sense strand starting at position 1637 of SEQ ID NO: 585315
ggacuuugguaauuauucu

SEQ ID NO: 630187 - RNA, 19 nt, Artificial Sequence
  Description of Artificial Sequence: Synthetic oligonucleotide
  Antisense strand to SEQ ID NO: 630186
agaauaauuaccaaagucc

SEQ ID NO: 630188 - RNA, 19 nt, Artificial Sequence
  Description of Artificial Sequence: Synthetic oligonucleotide
  Sense strand starting at position 1692 of SEQ ID NO: 585315
caaggugguuggugauuua

SEQ ID NO: 630189 - RNA, 19 nt, Artificial Sequence
  Description of Artificial Sequence: Synthetic oligonucleotide
  Antisense strand to SEQ ID NO: 630188
uaaaucaccaaccaccuug

SEQ ID NO: 630190 - RNA, 19 nt, Artificial Sequence
  Description of Artificial Sequence: Synthetic oligonucleotide
  Sense strand starting at position 1705 of SEQ ID NO: 585315
gauuuauccugcuccguca

SEQ ID NO: 630191 - RNA, 19 nt, Artificial Sequence
  Description of Artificial Sequence: Synthetic oligonucleotide
  Antisense strand to SEQ ID NO: 630190
ugacggagcaggauaaauc

SEQ ID NO: 630192 - RNA, 19 nt, Artificial Sequence
  Description of Artificial Sequence: Synthetic oligonucleotide
  Sense strand starting at position 1708 of SEQ ID NO: 585315
uuauccugcuccgucauua

SEQ ID NO: 630193 - RNA, 19 nt, Artificial Sequence
  Description of Artificial Sequence: Synthetic oligonucleotide
  Antisense strand to SEQ ID NO: 630192
uaaugacggagcaggauaa

SEQ ID NO: 630194 - RNA, 19 nt, Artificial Sequence
  Description of Artificial Sequence: Synthetic oligonucleotide
  Sense strand starting at position 1732 of SEQ ID NO: 585315
uuggccugcucugcaauua

SEQ ID NO: 630195 - RNA, 19 nt, Artificial Sequence
  Description of Artificial Sequence: Synthetic oligonucleotide
  Antisense strand to SEQ ID NO: 630194
uaauugcagagcaggccaa

SEQ ID NO: 630196 - RNA, 19 nt, Artificial Sequence
  Description of Artificial Sequence: Synthetic oligonucleotide
  Sense strand starting at position 1743 of SEQ ID NO: 585315
ugcaauuacaggcagugau

SEQ ID NO: 630197 - RNA, 19 nt, Artificial Sequence
  Description of Artificial Sequence: Synthetic oligonucleotide
  Antisense strand to SEQ ID NO: 630196
aucacugccuguaauugca

SEQ ID NO: 630198 - RNA, 19 nt, Artificial Sequence
  Description of Artificial Sequence: Synthetic oligonucleotide
  Sense strand starting at position 1825 of SEQ ID NO: 585315
gagugcugaccucauauaa

SEQ ID NO: 630199 - RNA, 19 nt, Artificial Sequence
  Description of Artificial Sequence: Synthetic oligonucleotide
  Antisense strand to SEQ ID NO: 630198
uuauaugaggucagcacuc

SEQ ID NO: 630200 - RNA, 19 nt, Artificial Sequence
  Description of Artificial Sequence: Synthetic oligonucleotide
  Sense strand starting at position 2065 of SEQ ID NO: 585315
ccaagaaacguucgucuuu

SEQ ID NO: 630201 - RNA, 19 nt, Artificial Sequence
  Description of Artificial Sequence: Synthetic oligonucleotide
  Antisense strand to SEQ ID NO: 630200
aaagacgaacguuucuugg

SEQ ID NO: 630202 - RNA, 19 nt, Artificial Sequence
  Description of Artificial Sequence: Synthetic oligonucleotide
  Sense strand starting at position 2088 of SEQ ID NO: 585315
ccuguuucugaacaucaga

SEQ ID NO: 630203 - RNA, 19 nt, Artificial Sequence
  Description of Artificial Sequence: Synthetic oligonucleotide
  Antisense strand to SEQ ID NO: 630202
ucugauguucagaaacagg

SEQ ID NO: 630204 - RNA, 19 nt, Artificial Sequence
  Description of Artificial Sequence: Synthetic oligonucleotide
  Sense strand starting at position 2105 of SEQ ID NO: 585315
gaggccugucuuggaggaa

SEQ ID NO: 630205 - RNA, 19 nt, Artificial Sequence
  Description of Artificial Sequence: Synthetic oligonucleotide
  Antisense strand to SEQ ID NO: 630204
uuccuccaagacaggccuc

SEQ ID NO: 630206 - RNA, 19 nt, Artificial Sequence
  Description of Artificial Sequence: Synthetic oligonucleotide
  Sense strand starting at position 2108 of SEQ ID NO: 585315
gccugucuuggaggaacua

SEQ ID NO: 630207 - RNA, 19 nt, Artificial Sequence
  Description of Artificial Sequence: Synthetic oligonucleotide
  Antisense strand to SEQ ID NO: 630206
uaguuccuccaagacaggc

SEQ ID NO: 630208 - RNA, 19 nt, Artificial Sequence
  Description of Artificial Sequence: Synthetic oligonucleotide
  Sense strand starting at position 2207 of SEQ ID NO: 585315
ugcaaacugugcuccucaa

SEQ ID NO: 630209 - RNA, 19 nt, Artificial Sequence
  Description of Artificial Sequence: Synthetic oligonucleotide
  Antisense strand to SEQ ID NO: 630208
uugaggagcacaguuugca

SEQ ID NO: 630210 - RNA, 19 nt, Artificial Sequence
  Description of Artificial Sequence: Synthetic oligonucleotide
  Sense strand starting at position 2321 of SEQ ID NO: 585315
ccuugaguugccuaagguc

SEQ ID NO: 630211 - RNA, 19 nt, Artificial Sequence
  Description of Artificial Sequence: Synthetic oligonucleotide
  Antisense strand to SEQ ID NO: 630210
gaccuuaggcaacucaagg

SEQ ID NO: 630212 - RNA, 19 nt, Artificial Sequence
  Description of Artificial Sequence: Synthetic oligonucleotide
  Sense strand starting at position 2363 of SEQ ID NO: 585315
agaaguagguucccggaga

SEQ ID NO: 630213 - RNA, 19 nt, Artificial Sequence
  Description of Artificial Sequence: Synthetic oligonucleotide
  Antisense strand to SEQ ID NO: 630212
ucuccgggaaccuacuucu

SEQ ID NO: 630214 - RNA, 19 nt, Artificial Sequence
  Description of Artificial Sequence: Synthetic oligonucleotide
  Sense strand starting at position 2768 of SEQ ID NO: 585315
agggacuaguuccaacaga

SEQ ID NO: 630215 - RNA, 19 nt, Artificial Sequence
  Description of Artificial Sequence: Synthetic oligonucleotide
  Antisense strand to SEQ ID NO: 630214
ucuguuggaacuagucccu

SEQ ID NO: 630216 - RNA, 19 nt, Artificial Sequence
  Description of Artificial Sequence: Synthetic oligonucleotide
  Sense strand starting at position 332 of SEQ ID NO: 585316
auaucuuagcagggcaaau

SEQ ID NO: 630217 - RNA, 19 nt, Artificial Sequence
  Description of Artificial Sequence: Synthetic oligonucleotide
  Antisense strand to SEQ ID NO: 630216
auuugcccugcuaagauau

SEQ ID NO: 630218 - RNA, 19 nt, Artificial Sequence
  Description of Artificial Sequence: Synthetic oligonucleotide
  Sense strand starting at position 491 of SEQ ID NO: 585316
auaaguuaaugguuccuga

SEQ ID NO: 630219 - RNA, 19 nt, Artificial Sequence
  Description of Artificial Sequence: Synthetic oligonucleotide
  Antisense strand to SEQ ID NO: 630218
ucaggaaccauuaacuuau

SEQ ID NO: 630220 - RNA, 19 nt, Artificial Sequence
  Description of Artificial Sequence: Synthetic oligonucleotide
  Sense strand starting at position 494 of SEQ ID NO: 585316
aguuaaugguuccugauua

SEQ ID NO: 630221 - RNA, 19 nt, Artificial Sequence
  Description of Artificial Sequence: Synthetic oligonucleotide
  Antisense strand to SEQ ID NO: 630220
uaaucaggaaccauuaacu

SEQ ID NO: 630222 - RNA, 19 nt, Artificial Sequence
  Description of Artificial Sequence: Synthetic oligonucleotide
  Sense strand starting at position 667 of SEQ ID NO: 585316
guuagaugaccauggccau

SEQ ID NO: 630223 - RNA, 19 nt, Artificial Sequence
  Description of Artificial Sequence: Synthetic oligonucleotide
  Antisense strand to SEQ ID NO: 630222
auggccauggucaucuaac

SEQ ID NO: 630224 - RNA, 19 nt, Artificial Sequence
  Description of Artificial Sequence: Synthetic oligonucleotide
  Sense strand starting at position 843 of SEQ ID NO: 585316
ugguacaauuaugcuuaau

SEQ ID NO: 630225 - RNA, 19 nt, Artificial Sequence
  Description of Artificial Sequence: Synthetic oligonucleotide
  Antisense strand to SEQ ID NO: 630224
auuaagcauaauuguacca

SEQ ID NO: 630226 - RNA, 19 nt, Artificial Sequence
  Description of Artificial Sequence: Synthetic oligonucleotide
  Sense strand starting at position 845 of SEQ ID NO: 585316
guacaauuaugcuuaauga

SEQ ID NO: 630227 - RNA, 19 nt, Artificial Sequence
  Description of Artificial Sequence: Synthetic oligonucleotide
  Antisense strand to SEQ ID NO: 630226
ucauuaagcauaauuguac

SEQ ID NO: 630228 - RNA, 19 nt, Artificial Sequence
  Description of Artificial Sequence: Synthetic oligonucleotide
  Sense strand starting at position 932 of SEQ ID NO: 585316
ccuguaauuuaacaagaag

SEQ ID NO: 630229 - RNA, 19 nt, Artificial Sequence
  Description of Artificial Sequence: Synthetic oligonucleotide
  Antisense strand to SEQ ID NO: 630228
cuucuuguuaaauuacagg

SEQ ID NO: 630230 - RNA, 19 nt, Artificial Sequence
  Description of Artificial Sequence: Synthetic oligonucleotide
  Sense strand starting at position 1082 of SEQ ID NO: 585316
uuauuuaucugacacuggu

SEQ ID NO: 630231 - RNA, 19 nt, Artificial Sequence
  Description of Artificial Sequence: Synthetic oligonucleotide
  Antisense strand to SEQ ID NO: 630230
accagugucagauaaauaa

SEQ ID NO: 630232 - RNA, 19 nt, Artificial Sequence
  Description of Artificial Sequence: Synthetic oligonucleotide
  Sense strand starting at position 1085 of SEQ ID NO: 585316
uuuaucugacacugguuaa

SEQ ID NO: 630233 - RNA, 19 nt, Artificial Sequence
  Description of Artificial Sequence: Synthetic oligonucleotide
  Antisense strand to SEQ ID NO: 630232
uuaaccagugucagauaaa

SEQ ID NO: 630234 - RNA, 19 nt, Artificial Sequence
  Description of Artificial Sequence: Synthetic oligonucleotide
  Sense strand starting at position 1095 of SEQ ID NO: 585316
acugguuaagagugcauua

SEQ ID NO: 630235 - RNA, 19 nt, Artificial Sequence
  Description of Artificial Sequence: Synthetic oligonucleotide
  Antisense strand to SEQ ID NO: 630234
uaaugcacucuuaaccagu

SEQ ID NO: 630236 - RNA, 19 nt, Artificial Sequence
  Description of Artificial Sequence: Synthetic oligonucleotide
  Sense strand starting at position 1097 of SEQ ID NO: 585316
ugguuaagagugcauuaaa

SEQ ID NO: 630237 - RNA, 19 nt, Artificial Sequence
  Description of Artificial Sequence: Synthetic oligonucleotide
  Antisense strand to SEQ ID NO: 630236
uuuaaugcacucuuaacca

SEQ ID NO: 630238 - RNA, 19 nt, Artificial Sequence
  Description of Artificial Sequence: Synthetic oligonucleotide
  Sense strand starting at position 1169 of SEQ ID NO: 585316
ggaacaaugugggaauaaa

SEQ ID NO: 630239 - RNA, 19 nt, Artificial Sequence
  Description of Artificial Sequence: Synthetic oligonucleotide
  Antisense strand to SEQ ID NO: 630238
uuuauucccacauuguucc

SEQ ID NO: 630240 - RNA, 19 nt, Artificial Sequence
  Description of Artificial Sequence: Synthetic oligonucleotide
  Sense strand starting at position 1253 of SEQ ID NO: 585316
gauaauuaauguucugaug

SEQ ID NO: 630241 - RNA, 19 nt, Artificial Sequence
  Description of Artificial Sequence: Synthetic oligonucleotide
  Antisense strand to SEQ ID NO: 630240
caucagaacauuaauuauc

SEQ ID NO: 630242 - RNA, 19 nt, Artificial Sequence
  Description of Artificial Sequence: Synthetic oligonucleotide
  Sense strand starting at position 1259 of SEQ ID NO: 585316
uaauguucugauggauuau

SEQ ID NO: 630243 - RNA, 19 nt, Artificial Sequence
  Description of Artificial Sequence: Synthetic oligonucleotide
  Antisense strand to SEQ ID NO: 630242
auaauccaucagaacauua

SEQ ID NO: 630244 - RNA, 19 nt, Artificial Sequence
  Description of Artificial Sequence: Synthetic oligonucleotide
  Sense strand starting at position 1341 of SEQ ID NO: 585316
acaaauuuguagucuuugu

SEQ ID NO: 630245 - RNA, 19 nt, Artificial Sequence
  Description of Artificial Sequence: Synthetic oligonucleotide
  Antisense strand to SEQ ID NO: 630244
acaaagacuacaaauuugu

SEQ ID NO: 630246 - RNA, 19 nt, Artificial Sequence
  Description of Artificial Sequence: Synthetic oligonucleotide
  Sense strand starting at position 1345 of SEQ ID NO: 585316
auuuguagucuuuguuaca

SEQ ID NO: 630247 - RNA, 19 nt, Artificial Sequence
  Description of Artificial Sequence: Synthetic oligonucleotide
  Antisense strand to SEQ ID NO: 630246
uguaacaaagacuacaaau

SEQ ID NO: 630248 - RNA, 19 nt, Artificial Sequence
  Description of Artificial Sequence: Synthetic oligonucleotide
  Sense strand starting at position 1382 of SEQ ID NO: 585316
gaauaagggcgguauccuu

SEQ ID NO: 630249 - RNA, 19 nt, Artificial Sequence
  Description of Artificial Sequence: Synthetic oligonucleotide
  Antisense strand to SEQ ID NO: 630248
aaggauaccgcccuuauuc

SEQ ID NO: 630250 - RNA, 19 nt, Artificial Sequence
  Description of Artificial Sequence: Synthetic oligonucleotide
  Sense strand starting at position 1389 of SEQ ID NO: 585316
ggcgguauccuugaaggaa

SEQ ID NO: 630251 - RNA, 19 nt, Artificial Sequence
  Description of Artificial Sequence: Synthetic oligonucleotide
  Antisense strand to SEQ ID NO: 630250
uuccuucaaggauaccgcc

SEQ ID NO: 630252 - RNA, 19 nt, Artificial Sequence
  Description of Artificial Sequence: Synthetic oligonucleotide
  Sense strand starting at position 1403 of SEQ ID NO: 585316
aggaauaccuaugaauaca

SEQ ID NO: 630253 - RNA, 19 nt, Artificial Sequence
  Description of Artificial Sequence: Synthetic oligonucleotide
  Antisense strand to SEQ ID NO: 630252
uguauucauagguauuccu

SEQ ID NO: 630254 - RNA, 19 nt, Artificial Sequence
  Description of Artificial Sequence: Synthetic oligonucleotide
  Sense strand starting at position 1775 of SEQ ID NO: 585316
agagaugcucccggagaag

SEQ ID NO: 630255 - RNA, 19 nt, Artificial Sequence
  Description of Artificial Sequence: Synthetic oligonucleotide
  Antisense strand to SEQ ID NO: 630254
cuucuccgggagcaucucu

SEQ ID NO: 630256 - RNA, 19 nt, Artificial Sequence
  Description of Artificial Sequence: Synthetic oligonucleotide
  Sense strand starting at position 2159 of SEQ ID NO: 585316
cagggcugacuguaucuua

SEQ ID NO: 630257 - RNA, 19 nt, Artificial Sequence
  Description of Artificial Sequence: Synthetic oligonucleotide
  Antisense strand to SEQ ID NO: 630256
uaagauacagucagcccug

SEQ ID NO: 630258 - RNA, 19 nt, Artificial Sequence
  Description of Artificial Sequence: Synthetic oligonucleotide
  Sense strand starting at position 2249 of SEQ ID NO: 585316
gcgugaguguuuauguuga

SEQ ID NO: 630259 - RNA, 19 nt, Artificial Sequence
  Description of Artificial Sequence: Synthetic oligonucleotide
  Antisense strand to SEQ ID NO: 630258
ucaacauaaacacucacgc

SEQ ID NO: 630260 - RNA, 19 nt, Artificial Sequence
  Description of Artificial Sequence: Synthetic oligonucleotide
  Sense strand starting at position 2254 of SEQ ID NO: 585316
aguguuuauguugaugagu

SEQ ID NO: 630261 - RNA, 19 nt, Artificial Sequence
  Description of Artificial Sequence: Synthetic oligonucleotide
  Antisense strand to SEQ ID NO: 630260
acucaucaacauaaacacu

SEQ ID NO: 630262 - RNA, 19 nt, Artificial Sequence
  Description of Artificial Sequence: Synthetic oligonucleotide
  Sense strand starting at position 2308 of SEQ ID NO: 585316
uguagauuugccuaccguu

SEQ ID NO: 630263 - RNA, 19 nt, Artificial Sequence
  Description of Artificial Sequence: Synthetic oligonucleotide
  Antisense strand to SEQ ID NO: 630262
aacgguaggcaaaucuaca

SEQ ID NO: 630264 - RNA, 19 nt, Artificial Sequence
  Description of Artificial Sequence: Synthetic oligonucleotide
  Sense strand starting at position 2382 of SEQ ID NO: 585316
ggcaaucagcaagguuaaa

SEQ ID NO: 630265 - RNA, 19 nt, Artificial Sequence
  Description of Artificial Sequence: Synthetic oligonucleotide
  Antisense strand to SEQ ID NO: 630264
uuuaaccuugcugauugcc

SEQ ID NO: 630266 - RNA, 19 nt, Artificial Sequence
  Description of Artificial Sequence: Synthetic oligonucleotide
  Sense strand starting at position 2435 of SEQ ID NO: 585316
gucuuaaauuagguuacau

SEQ ID NO: 630267 - RNA, 19 nt, Artificial Sequence
  Description of Artificial Sequence: Synthetic oligonucleotide
  Antisense strand to SEQ ID NO: 630266
auguaaccuaauuuaagac

SEQ ID NO: 630268 - RNA, 19 nt, Artificial Sequence
  Description of Artificial Sequence: Synthetic oligonucleotide
  Sense strand starting at position 2469 of SEQ ID NO: 585316
agagguacguuccuaaaug

SEQ ID NO: 630269 - RNA, 19 nt, Artificial Sequence
  Description of Artificial Sequence: Synthetic oligonucleotide
  Antisense strand to SEQ ID NO: 630268
cauuuaggaacguaccucu

SEQ ID NO: 630270 - RNA, 19 nt, Artificial Sequence
  Description of Artificial Sequence: Synthetic oligonucleotide
  Sense strand starting at position 2511 of SEQ ID NO: 585316
ugcgguuaagcgcugaaau

SEQ ID NO: 630271 - RNA, 19 nt, Artificial Sequence
  Description of Artificial Sequence: Synthetic oligonucleotide
  Antisense strand to SEQ ID NO: 630270
auuucagcgcuuaaccgca

SEQ ID NO: 630272 - RNA, 19 nt, Artificial Sequence
  Description of Artificial Sequence: Synthetic oligonucleotide
  Sense strand starting at position 2606 of SEQ ID NO: 585316
cuauacaaguucuuaggau

SEQ ID NO: 630273 - RNA, 19 nt, Artificial Sequence
  Description of Artificial Sequence: Synthetic oligonucleotide
  Antisense strand to SEQ ID NO: 630272
auccuaagaacuuguauag

SEQ ID NO: 630274 - RNA, 19 nt, Artificial Sequence
  Description of Artificial Sequence: Synthetic oligonucleotide
  Sense strand starting at position 2801 of SEQ ID NO: 585316
aauagucucgugcaggaua

SEQ ID NO: 630275 - RNA, 19 nt, Artificial Sequence
  Description of Artificial Sequence: Synthetic oligonucleotide
  Antisense strand to SEQ ID NO: 630274
uauccugcacgagacuauu

SEQ ID NO: 630276 - RNA, 19 nt, Artificial Sequence
  Description of Artificial Sequence: Synthetic oligonucleotide
  Sense strand starting at position 2812 of SEQ ID NO: 585316
gcaggauaccuagggucuu

SEQ ID NO: 630277 - RNA, 19 nt, Artificial Sequence
  Description of Artificial Sequence: Synthetic oligonucleotide
  Antisense strand to SEQ ID NO: 630276
aagacccuagguauccugc

SEQ ID NO: 630278 - RNA, 19 nt, Artificial Sequence
  Description of Artificial Sequence: Synthetic oligonucleotide
  Sense strand starting at position 3079 of SEQ ID NO: 585316
agagaaaucguguagaucc

SEQ ID NO: 630279 - RNA, 19 nt, Artificial Sequence
  Description of Artificial Sequence: Synthetic oligonucleotide
  Antisense strand to SEQ ID NO: 630278
ggaucuacacgauuucucu

SEQ ID NO: 630280 - RNA, 19 nt, Artificial Sequence
  Description of Artificial Sequence: Synthetic oligonucleotide
  Sense strand starting at position 3081 of SEQ ID NO: 585316
agaaaucguguagauccuu

SEQ ID NO: 630281 - RNA, 19 nt, Artificial Sequence
  Description of Artificial Sequence: Synthetic oligonucleotide
  Antisense strand to SEQ ID NO: 630280
aaggaucuacacgauuucu

SEQ ID NO: 630282 - RNA, 19 nt, Artificial Sequence
  Description of Artificial Sequence: Synthetic oligonucleotide
  Sense strand starting at position 3587 of SEQ ID NO: 585316
aaacuccgguuguuauuua

SEQ ID NO: 630283 - RNA, 19 nt, Artificial Sequence
  Description of Artificial Sequence: Synthetic oligonucleotide
  Antisense strand to SEQ ID NO: 630282
uaaauaacaaccggaguuu

SEQ ID NO: 630284 - RNA, 19 nt, Artificial Sequence
  Description of Artificial Sequence: Synthetic oligonucleotide
  Sense strand starting at position 3591 of SEQ ID NO: 585316
uccgguuguuauuuaccua

SEQ ID NO: 630285 - RNA, 19 nt, Artificial Sequence
  Description of Artificial Sequence: Synthetic oligonucleotide
  Antisense strand to SEQ ID NO: 630284
uagguaaauaacaaccgga

SEQ ID NO: 630286 - RNA, 19 nt, Artificial Sequence
  Description of Artificial Sequence: Synthetic oligonucleotide
  Sense strand starting at position 3595 of SEQ ID NO: 585316
guuguuauuuaccuaagca

SEQ ID NO: 630287 - RNA, 19 nt, Artificial Sequence
  Description of Artificial Sequence: Synthetic oligonucleotide
  Antisense strand to SEQ ID NO: 630286
ugcuuagguaaauaacaac

SEQ ID NO: 630288 - RNA, 19 nt, Artificial Sequence
  Description of Artificial Sequence: Synthetic oligonucleotide
  Sense strand starting at position 3705 of SEQ ID NO: 585316
auggacgguacugguuaua

SEQ ID NO: 630289 - RNA, 19 nt, Artificial Sequence
  Description of Artificial Sequence: Synthetic oligonucleotide
  Antisense strand to SEQ ID NO: 630288
uauaaccaguaccguccau

SEQ ID NO: 630290 - RNA, 19 nt, Artificial Sequence
  Description of Artificial Sequence: Synthetic oligonucleotide
  Sense strand starting at position 3708 of SEQ ID NO: 585316
gacgguacugguuauaucu

SEQ ID NO: 630291 - RNA, 19 nt, Artificial Sequence
  Description of Artificial Sequence: Synthetic oligonucleotide
  Antisense strand to SEQ ID NO: 630290
agauauaaccaguaccguc

SEQ ID NO: 630292 - RNA, 19 nt, Artificial Sequence
  Description of Artificial Sequence: Synthetic oligonucleotide
  Sense strand starting at position 3920 of SEQ ID NO: 585316
ccucuaagauaagucagau

SEQ ID NO: 630293 - RNA, 19 nt, Artificial Sequence
  Description of Artificial Sequence: Synthetic oligonucleotide
  Antisense strand to SEQ ID NO: 630292
aucugacuuaucuuagagg

SEQ ID NO: 630294 - RNA, 19 nt, Artificial Sequence
  Description of Artificial Sequence: Synthetic oligonucleotide
  Sense strand starting at position 3939 of SEQ ID NO: 585316
augauaugaucuucugcua

SEQ ID NO: 630295 - RNA, 19 nt, Artificial Sequence
  Description of Artificial Sequence: Synthetic oligonucleotide
  Antisense strand to SEQ ID NO: 630294
uagcagaagaucauaucau

SEQ ID NO: 630296 - RNA, 19 nt, Artificial Sequence
  Description of Artificial Sequence: Synthetic oligonucleotide
  Sense strand starting at position 4 of SEQ ID NO: 585317
cuaaccuacuguuuaugua

SEQ ID NO: 630297 - RNA, 19 nt, Artificial Sequence
  Description of Artificial Sequence: Synthetic oligonucleotide
  Antisense strand to SEQ ID NO: 630296
uacauaaacaguagguuag

SEQ ID NO: 630298 - RNA, 19 nt, Artificial Sequence
  Description of Artificial Sequence: Synthetic oligonucleotide
  Sense strand starting at position 8 of SEQ ID NO: 585317
ccuacuguuuauguaaaca

SEQ ID NO: 630299 - RNA, 19 nt, Artificial Sequence
  Description of Artificial Sequence: Synthetic oligonucleotide
  Antisense strand to SEQ ID NO: 630298
uguuuacauaaacaguagg

SEQ ID NO: 630300 - RNA, 19 nt, Artificial Sequence
  Description of Artificial Sequence: Synthetic oligonucleotide
  Sense strand starting at position 28 of SEQ ID NO: 585317
ugguuauaauucccaggaa

SEQ ID NO: 630301 - RNA, 19 nt, Artificial Sequence
  Description of Artificial Sequence: Synthetic oligonucleotide
  Antisense strand to SEQ ID NO: 630300
uuccugggaauuauaacca

SEQ ID NO: 630302 - RNA, 19 nt, Artificial Sequence
  Description of Artificial Sequence: Synthetic oligonucleotide
  Sense strand starting at position 29 of SEQ ID NO: 585317
gguuauaauucccaggaaa

SEQ ID NO: 630303 - RNA, 19 nt, Artificial Sequence
  Description of Artificial Sequence: Synthetic oligonucleotide
  Antisense strand to SEQ ID NO: 630302
uuuccugggaauuauaacc

SEQ ID NO: 630304 - RNA, 19 nt, Artificial Sequence
  Description of Artificial Sequence: Synthetic oligonucleotide
  Sense strand starting at position 77 of SEQ ID NO: 585317
uaacccguaucuugaugau

SEQ ID NO: 630305 - RNA, 19 nt, Artificial Sequence
  Description of Artificial Sequence: Synthetic oligonucleotide
  Antisense strand to SEQ ID NO: 630304
aucaucaagauacggguua

SEQ ID NO: 630306 - RNA, 19 nt, Artificial Sequence
  Description of Artificial Sequence: Synthetic oligonucleotide
  Sense strand starting at position 80 of SEQ ID NO: 585317
cccguaucuugaugauuag

SEQ ID NO: 630307 - RNA, 19 nt, Artificial Sequence
  Description of Artificial Sequence: Synthetic oligonucleotide
  Antisense strand to SEQ ID NO: 630306
cuaaucaucaagauacggg

SEQ ID NO: 630308 - RNA, 19 nt, Artificial Sequence
  Description of Artificial Sequence: Synthetic oligonucleotide
  Sense strand starting at position 81 of SEQ ID NO: 585317
ccguaucuugaugauuagu

SEQ ID NO: 630309 - RNA, 19 nt, Artificial Sequence
  Description of Artificial Sequence: Synthetic oligonucleotide
  Antisense strand to SEQ ID NO: 630308
acuaaucaucaagauacgg

SEQ ID NO: 630310 - RNA, 19 nt, Artificial Sequence
  Description of Artificial Sequence: Synthetic oligonucleotide
  Sense strand starting at position 83 of SEQ ID NO: 585317
guaucuugaugauuaguuc

SEQ ID NO: 630311 - RNA, 19 nt, Artificial Sequence
  Description of Artificial Sequence: Synthetic oligonucleotide
  Antisense strand to SEQ ID NO: 630310
gaacuaaucaucaagauac

SEQ ID NO: 630312 - RNA, 19 nt, Artificial Sequence
  Description of Artificial Sequence: Synthetic oligonucleotide
  Sense strand starting at position 91 of SEQ ID NO: 585317
augauuaguuccuuugucu

SEQ ID NO: 630313 - RNA, 19 nt, Artificial Sequence
  Description of Artificial Sequence: Synthetic oligonucleotide
  Antisense strand to SEQ ID NO: 630312
agacaaaggaacuaaucau

SEQ ID NO: 630314 - RNA, 19 nt, Artificial Sequence
  Description of Artificial Sequence: Synthetic oligonucleotide
  Sense strand starting at position 270 of SEQ ID NO: 585317
gucuucuuaaacugggagu

SEQ ID NO: 630315 - RNA, 19 nt, Artificial Sequence
  Description of Artificial Sequence: Synthetic oligonucleotide
  Antisense strand to SEQ ID NO: 630314
acucccaguuuaagaagac

SEQ ID NO: 630316 - RNA, 19 nt, Artificial Sequence
  Description of Artificial Sequence: Synthetic oligonucleotide
  Sense strand starting at position 283 of SEQ ID NO: 585317
gggaguaccuuuggauuuc

SEQ ID NO: 630317 - RNA, 19 nt, Artificial Sequence
  Description of Artificial Sequence: Synthetic oligonucleotide
  Antisense strand to SEQ ID NO: 630316
gaaauccaaagguacuccc

SEQ ID NO: 630318 - RNA, 19 nt, Artificial Sequence
  Description of Artificial Sequence: Synthetic oligonucleotide
  Sense strand starting at position 317 of SEQ ID NO: 585317
cccacccuuucguaaguga

SEQ ID NO: 630319 - RNA, 19 nt, Artificial Sequence
  Description of Artificial Sequence: Synthetic oligonucleotide
  Antisense strand to SEQ ID NO: 630318
ucacuuacgaaaggguggg

SEQ ID NO: 630320 - RNA, 19 nt, Artificial Sequence
  Description of Artificial Sequence: Synthetic oligonucleotide
  Sense strand starting at position 320 of SEQ ID NO: 585317
acccuuucguaagugagua

SEQ ID NO: 630321 - RNA, 19 nt, Artificial Sequence
  Description of Artificial Sequence: Synthetic oligonucleotide
  Antisense strand to SEQ ID NO: 630320
uacucacuuacgaaagggu

SEQ ID NO: 630322 - RNA, 19 nt, Artificial Sequence
  Description of Artificial Sequence: Synthetic oligonucleotide
  Sense strand starting at position 324 of SEQ ID NO: 585317
uuucguaagugaguacgaa

SEQ ID NO: 630323 - RNA, 19 nt, Artificial Sequence
  Description of Artificial Sequence: Synthetic oligonucleotide
  Antisense strand to SEQ ID NO: 630322
uucguacucacuuacgaaa

SEQ ID NO: 630324 - RNA, 19 nt, Artificial Sequence
  Description of Artificial Sequence: Synthetic oligonucleotide
  Sense strand starting at position 325 of SEQ ID NO: 585317
uucguaagugaguacgaaa

SEQ ID NO: 630325 - RNA, 19 nt, Artificial Sequence
  Description of Artificial Sequence: Synthetic oligonucleotide
  Antisense strand to SEQ ID NO: 630324
uuucguacucacuuacgaa

SEQ ID NO: 630326 - RNA, 19 nt, Artificial Sequence
  Description of Artificial Sequence: Synthetic oligonucleotide
  Sense strand starting at position 336 of SEQ ID NO: 585317
guacgaaaugggugagaau

SEQ ID NO: 630327 - RNA, 19 nt, Artificial Sequence
  Description of Artificial Sequence: Synthetic oligonucleotide
  Antisense strand to SEQ ID NO: 630326
auucucacccauuucguac

SEQ ID NO: 630328 - RNA, 19 nt, Artificial Sequence
  Description of Artificial Sequence: Synthetic oligonucleotide
  Sense strand starting at position 350 of SEQ ID NO: 585317
agaauaagacuuuggcauc

SEQ ID NO: 630329 - RNA, 19 nt, Artificial Sequence
  Description of Artificial Sequence: Synthetic oligonucleotide
  Antisense strand to SEQ ID NO: 630328
gaugccaaagucuuauucu

SEQ ID NO: 630330 - RNA, 19 nt, Artificial Sequence
  Description of Artificial Sequence: Synthetic oligonucleotide
  Sense strand starting at position 353 of SEQ ID NO: 585317
auaagacuuuggcaucuau

SEQ ID NO: 630331 - RNA, 19 nt, Artificial Sequence
  Description of Artificial Sequence: Synthetic oligonucleotide
  Antisense strand to SEQ ID NO: 630330
auagaugccaaagucuuau

SEQ ID NO: 630332 - RNA, 19 nt, Artificial Sequence
  Description of Artificial Sequence: Synthetic oligonucleotide
  Sense strand starting at position 394 of SEQ ID NO: 585317
aguaguuauugguugguga

SEQ ID NO: 630333 - RNA, 19 nt, Artificial Sequence
  Description of Artificial Sequence: Synthetic oligonucleotide
  Antisense strand to SEQ ID NO: 630332
ucaccaaccaauaacuacu

SEQ ID NO: 630334 - RNA, 19 nt, Artificial Sequence
  Description of Artificial Sequence: Synthetic oligonucleotide
  Sense strand starting at position 395 of SEQ ID NO: 585317
guaguuauugguuggugag

SEQ ID NO: 630335 - RNA, 19 nt, Artificial Sequence
  Description of Artificial Sequence: Synthetic oligonucleotide
  Antisense strand to SEQ ID NO: 630334
cucaccaaccaauaacuac

SEQ ID NO: 630336 - RNA, 19 nt, Artificial Sequence
  Description of Artificial Sequence: Synthetic oligonucleotide
  Sense strand starting at position 396 of SEQ ID NO: 585317
uaguuauugguuggugaga

SEQ ID NO: 630337 - RNA, 19 nt, Artificial Sequence
  Description of Artificial Sequence: Synthetic oligonucleotide
  Antisense strand to SEQ ID NO: 630336
ucucaccaaccaauaacua

SEQ ID NO: 630338 - RNA, 19 nt, Artificial Sequence
  Description of Artificial Sequence: Synthetic oligonucleotide
  Sense strand starting at position 397 of SEQ ID NO: 585317
aguuauugguuggugagau

SEQ ID NO: 630339 - RNA, 19 nt, Artificial Sequence
  Description of Artificial Sequence: Synthetic oligonucleotide
  Antisense strand to SEQ ID NO: 630338
aucucaccaaccaauaacu

SEQ ID NO: 630340 - RNA, 19 nt, Artificial Sequence
  Description of Artificial Sequence: Synthetic oligonucleotide
  Sense strand starting at position 398 of SEQ ID NO: 585317
guuauugguuggugagaug

SEQ ID NO: 630341 - RNA, 19 nt, Artificial Sequence
  Description of Artificial Sequence: Synthetic oligonucleotide
  Antisense strand to SEQ ID NO: 630340
caucucaccaaccaauaac

SEQ ID NO: 630342 - RNA, 19 nt, Artificial Sequence
  Description of Artificial Sequence: Synthetic oligonucleotide
  Sense strand starting at position 407 of SEQ ID NO: 585317
uggugagaugcaggacaau

SEQ ID NO: 630343 - RNA, 19 nt, Artificial Sequence
  Description of Artificial Sequence: Synthetic oligonucleotide
  Antisense strand to SEQ ID NO: 630342
auuguccugcaucucacca

SEQ ID NO: 630344 - RNA, 19 nt, Artificial Sequence
  Description of Artificial Sequence: Synthetic oligonucleotide
  Sense strand starting at position 430 of SEQ ID NO: 585317
gucuuuaagucccagcuga

SEQ ID NO: 630345 - RNA, 19 nt, Artificial Sequence
  Description of Artificial Sequence: Synthetic oligonucleotide
  Antisense strand to SEQ ID NO: 630344
ucagcugggacuuaaagac

SEQ ID NO: 630346 - RNA, 19 nt, Artificial Sequence
  Description of Artificial Sequence: Synthetic oligonucleotide
  Sense strand starting at position 526 of SEQ ID NO: 585317
acaguaugugcacaacaaa

SEQ ID NO: 630347 - RNA, 19 nt, Artificial Sequence
  Description of Artificial Sequence: Synthetic oligonucleotide
  Antisense strand to SEQ ID NO: 630346
uuuguugugcacauacugu

SEQ ID NO: 630348 - RNA, 19 nt, Artificial Sequence
  Description of Artificial Sequence: Synthetic oligonucleotide
  Sense strand starting at position 702 of SEQ ID NO: 585317
aguccauggucuuugauaa

SEQ ID NO: 630349 - RNA, 19 nt, Artificial Sequence
  Description of Artificial Sequence: Synthetic oligonucleotide
  Antisense strand to SEQ ID NO: 630348
uuaucaaagaccauggacu

SEQ ID NO: 630350 - RNA, 19 nt, Artificial Sequence
  Description of Artificial Sequence: Synthetic oligonucleotide
  Sense strand starting at position 703 of SEQ ID NO: 585317
guccauggucuuugauaaa

SEQ ID NO: 630351 - RNA, 19 nt, Artificial Sequence
  Description of Artificial Sequence: Synthetic oligonucleotide
  Antisense strand to SEQ ID NO: 630350
uuuaucaaagaccauggac

SEQ ID NO: 630352 - RNA, 19 nt, Artificial Sequence
  Description of Artificial Sequence: Synthetic oligonucleotide
  Sense strand starting at position 706 of SEQ ID NO: 585317
cauggucuuugauaaagca

SEQ ID NO: 630353 - RNA, 19 nt, Artificial Sequence
  Description of Artificial Sequence: Synthetic oligonucleotide
  Antisense strand to SEQ ID NO: 630352
ugcuuuaucaaagaccaug

SEQ ID NO: 630354 - RNA, 19 nt, Artificial Sequence
  Description of Artificial Sequence: Synthetic oligonucleotide
  Sense strand starting at position 722 of SEQ ID NO: 585317
gcaagacauuagguguaau

SEQ ID NO: 630355 - RNA, 19 nt, Artificial Sequence
  Description of Artificial Sequence: Synthetic oligonucleotide
  Antisense strand to SEQ ID NO: 630354
auuacaccuaaugucuugc

SEQ ID NO: 630356 - RNA, 19 nt, Artificial Sequence
  Description of Artificial Sequence: Synthetic oligonucleotide
  Sense strand starting at position 767 of SEQ ID NO: 585317
cguugacacuguuggaaac

SEQ ID NO: 630357 - RNA, 19 nt, Artificial Sequence
  Description of Artificial Sequence: Synthetic oligonucleotide
  Antisense strand to SEQ ID NO: 630356
guuuccaacagugucaacg

SEQ ID NO: 630358 - RNA, 19 nt, Artificial Sequence
  Description of Artificial Sequence: Synthetic oligonucleotide
  Sense strand starting at position 911 of SEQ ID NO: 585317
gagggagauuugugucccu

SEQ ID NO: 630359 - RNA, 19 nt, Artificial Sequence
  Description of Artificial Sequence: Synthetic oligonucleotide
  Antisense strand to SEQ ID NO: 630358
agggacacaaaucucccuc

SEQ ID NO: 630360 - RNA, 19 nt, Artificial Sequence
  Description of Artificial Sequence: Synthetic oligonucleotide
  Sense strand starting at position 921 of SEQ ID NO: 585317
ugugucccugaauguagua

SEQ ID NO: 630361 - RNA, 19 nt, Artificial Sequence
  Description of Artificial Sequence: Synthetic oligonucleotide
  Antisense strand to SEQ ID NO: 630360
uacuacauucagggacaca

SEQ ID NO: 630362 - RNA, 19 nt, Artificial Sequence
  Description of Artificial Sequence: Synthetic oligonucleotide
  Sense strand starting at position 122 of SEQ ID NO: 585318
augaguuuccacggagguu

SEQ ID NO: 630363 - RNA, 19 nt, Artificial Sequence
  Description of Artificial Sequence: Synthetic oligonucleotide
  Antisense strand to SEQ ID NO: 630362
aaccuccguggaaacucau

SEQ ID NO: 630364 - RNA, 19 nt, Artificial Sequence
  Description of Artificial Sequence: Synthetic oligonucleotide
  Sense strand starting at position 123 of SEQ ID NO: 585318
ugaguuuccacggagguua

SEQ ID NO: 630365 - RNA, 19 nt, Artificial Sequence
  Description of Artificial Sequence: Synthetic oligonucleotide
  Antisense strand to SEQ ID NO: 630364
uaaccuccguggaaacuca

SEQ ID NO: 630366 - RNA, 19 nt, Artificial Sequence
  Description of Artificial Sequence: Synthetic oligonucleotide
  Sense strand starting at position 235 of SEQ ID NO: 585318
augcaucugcuuuaaagag

SEQ ID NO: 630367 - RNA, 19 nt, Artificial Sequence
  Description of Artificial Sequence: Synthetic oligonucleotide
  Antisense strand to SEQ ID NO: 630366
cucuuuaaagcagaugcau

SEQ ID NO: 630368 - RNA, 19 nt, Artificial Sequence
  Description of Artificial Sequence: Synthetic oligonucleotide
  Sense strand starting at position 366 of SEQ ID NO: 585318
gaggauaaauccuugucau

SEQ ID NO: 630369 - RNA, 19 nt, Artificial Sequence
  Description of Artificial Sequence: Synthetic oligonucleotide
  Antisense strand to SEQ ID NO: 630368
augacaaggauuuauccuc

SEQ ID NO: 630370 - RNA, 19 nt, Artificial Sequence
  Description of Artificial Sequence: Synthetic oligonucleotide
  Sense strand starting at position 367 of SEQ ID NO: 585318
aggauaaauccuugucauc

SEQ ID NO: 630371 - RNA, 19 nt, Artificial Sequence
  Description of Artificial Sequence: Synthetic oligonucleotide
  Antisense strand to SEQ ID NO: 630370
gaugacaaggauuuauccu

SEQ ID NO: 630372 - RNA, 19 nt, Artificial Sequence
  Description of Artificial Sequence: Synthetic oligonucleotide
  Sense strand starting at position 412 of SEQ ID NO: 585318
cuuucugggcaccauaaua

SEQ ID NO: 630373 - RNA, 19 nt, Artificial Sequence
  Description of Artificial Sequence: Synthetic oligonucleotide
  Antisense strand to SEQ ID NO: 630372
uauuauggugcccagaaag

SEQ ID NO: 630374 - RNA, 19 nt, Artificial Sequence
  Description of Artificial Sequence: Synthetic oligonucleotide
  Sense strand starting at position 433 of SEQ ID NO: 585318
uugcuuauauuucugagua

SEQ ID NO: 630375 - RNA, 19 nt, Artificial Sequence
  Description of Artificial Sequence: Synthetic oligonucleotide
  Antisense strand to SEQ ID NO: 630374
uacucagaaauauaagcaa

SEQ ID NO: 630376 - RNA, 19 nt, Artificial Sequence
  Description of Artificial Sequence: Synthetic oligonucleotide
  Sense strand starting at position 517 of SEQ ID NO: 585318
uugucuugcuaaccaagau

SEQ ID NO: 630377 - RNA, 19 nt, Artificial Sequence
  Description of Artificial Sequence: Synthetic oligonucleotide
  Antisense strand to SEQ ID NO: 630376
aucuugguuagcaagacaa

SEQ ID NO: 630378 - RNA, 19 nt, Artificial Sequence
  Description of Artificial Sequence: Synthetic oligonucleotide
  Sense strand starting at position 558 of SEQ ID NO: 585318
ugucuuguuaagggaacca

SEQ ID NO: 630379 - RNA, 19 nt, Artificial Sequence
  Description of Artificial Sequence: Synthetic oligonucleotide
  Antisense strand to SEQ ID NO: 630378
ugguucccuuaacaagaca

SEQ ID NO: 630380 - RNA, 19 nt, Artificial Sequence
  Description of Artificial Sequence: Synthetic oligonucleotide
  Sense strand starting at position 1129 of SEQ ID NO: 585318
cuuggcuaaucccuagaaa

SEQ ID NO: 630381 - RNA, 19 nt, Artificial Sequence
  Description of Artificial Sequence: Synthetic oligonucleotide
  Antisense strand to SEQ ID NO: 630380
uuucuagggauuagccaag

SEQ ID NO: 630382 - RNA, 19 nt, Artificial Sequence
  Description of Artificial Sequence: Synthetic oligonucleotide
  Sense strand starting at position 1262 of SEQ ID NO: 585318
agccauguggcagagguaa

SEQ ID NO: 630383 - RNA, 19 nt, Artificial Sequence
  Description of Artificial Sequence: Synthetic oligonucleotide
  Antisense strand to SEQ ID NO: 630382
uuaccucugccacauggcu

SEQ ID NO: 630384 - RNA, 19 nt, Artificial Sequence
  Description of Artificial Sequence: Synthetic oligonucleotide
  Sense strand starting at position 1264 of SEQ ID NO: 585318
ccauguggcagagguaaga

SEQ ID NO: 630385 - RNA, 19 nt, Artificial Sequence
  Description of Artificial Sequence: Synthetic oligonucleotide
  Antisense strand to SEQ ID NO: 630384
ucuuaccucugccacaugg

SEQ ID NO: 630386 - RNA, 19 nt, Artificial Sequence
  Description of Artificial Sequence: Synthetic oligonucleotide
  Sense strand starting at position 1296 of SEQ ID NO: 585318
ggcaccaguccugauucua

SEQ ID NO: 630387 - RNA, 19 nt, Artificial Sequence
  Description of Artificial Sequence: Synthetic oligonucleotide
  Antisense strand to SEQ ID NO: 630386
uagaaucaggacuggugcc

SEQ ID NO: 630388 - RNA, 19 nt, Artificial Sequence
  Description of Artificial Sequence: Synthetic oligonucleotide
  Sense strand starting at position 1354 of SEQ ID NO: 585318
uuucuuugugauggaauag

SEQ ID NO: 630389 - RNA, 19 nt, Artificial Sequence
  Description of Artificial Sequence: Synthetic oligonucleotide
  Antisense strand to SEQ ID NO: 630388
cuauuccaucacaaagaaa

SEQ ID NO: 630390 - RNA, 19 nt, Artificial Sequence
  Description of Artificial Sequence: Synthetic oligonucleotide
  Sense strand starting at position 1420 of SEQ ID NO: 585318
cgaggguuucucgaaggua

SEQ ID NO: 630391 - RNA, 19 nt, Artificial Sequence
  Description of Artificial Sequence: Synthetic oligonucleotide
  Antisense strand to SEQ ID NO: 630390
uaccuucgagaaacccucg

SEQ ID NO: 630392 - RNA, 19 nt, Artificial Sequence
  Description of Artificial Sequence: Synthetic oligonucleotide
  Sense strand starting at position 1423 of SEQ ID NO: 585318
ggguuucucgaagguaaau

SEQ ID NO: 630393 - RNA, 19 nt, Artificial Sequence
  Description of Artificial Sequence: Synthetic oligonucleotide
  Antisense strand to SEQ ID NO: 630392
auuuaccuucgagaaaccc

SEQ ID NO: 630394 - RNA, 19 nt, Artificial Sequence
  Description of Artificial Sequence: Synthetic oligonucleotide
  Sense strand starting at position 1653 of SEQ ID NO: 585318
cucggagcucaggagagau

SEQ ID NO: 630395 - RNA, 19 nt, Artificial Sequence
  Description of Artificial Sequence: Synthetic oligonucleotide
  Antisense strand to SEQ ID NO: 630394
aucucuccugagcuccgag

SEQ ID NO: 630396 - RNA, 19 nt, Artificial Sequence
  Description of Artificial Sequence: Synthetic oligonucleotide
  Sense strand starting at position 1673 of SEQ ID NO: 585318
cugcgauuacucuggagac

SEQ ID NO: 630397 - RNA, 19 nt, Artificial Sequence
  Description of Artificial Sequence: Synthetic oligonucleotide
  Antisense strand to SEQ ID NO: 630396
gucuccagaguaaucgcag

SEQ ID NO: 630398 - RNA, 19 nt, Artificial Sequence
  Description of Artificial Sequence: Synthetic oligonucleotide
  Sense strand starting at position 2183 of SEQ ID NO: 585318
ggaagaauuucguaguaag

SEQ ID NO: 630399 - RNA, 19 nt, Artificial Sequence
  Description of Artificial Sequence: Synthetic oligonucleotide
  Antisense strand to SEQ ID NO: 630398
cuuacuacgaaauucuucc

SEQ ID NO: 630400 - RNA, 19 nt, Artificial Sequence
  Description of Artificial Sequence: Synthetic oligonucleotide
  Sense strand starting at position 2186 of SEQ ID NO: 585318
agaauuucguaguaagaug

SEQ ID NO: 630401 - RNA, 19 nt, Artificial Sequence
  Description of Artificial Sequence: Synthetic oligonucleotide
  Antisense strand to SEQ ID NO: 630400
caucuuacuacgaaauucu

SEQ ID NO: 630402 - RNA, 19 nt, Artificial Sequence
  Description of Artificial Sequence: Synthetic oligonucleotide
  Sense strand starting at position 2191 of SEQ ID NO: 585318
uucguaguaagaugaggaa

SEQ ID NO: 630403 - RNA, 19 nt, Artificial Sequence
  Description of Artificial Sequence: Synthetic oligonucleotide
  Antisense strand to SEQ ID NO: 630402
uuccucaucuuacuacgaa

SEQ ID NO: 630404 - RNA, 19 nt, Artificial Sequence
  Description of Artificial Sequence: Synthetic oligonucleotide
  Sense strand starting at position 2341 of SEQ ID NO: 585318
guguuucuucguuccaagu

SEQ ID NO: 630405 - RNA, 19 nt, Artificial Sequence
  Description of Artificial Sequence: Synthetic oligonucleotide
  Antisense strand to SEQ ID NO: 630404
acuuggaacgaagaaacac

SEQ ID NO: 630406 - RNA, 19 nt, Artificial Sequence
  Description of Artificial Sequence: Synthetic oligonucleotide
  Sense strand starting at position 2632 of SEQ ID NO: 585318
cagaaugcuccgcaaagaa

SEQ ID NO: 630407 - RNA, 19 nt, Artificial Sequence
  Description of Artificial Sequence: Synthetic oligonucleotide
  Antisense strand to SEQ ID NO: 630406
uucuuugcggagcauucug

SEQ ID NO: 630408 - RNA, 19 nt, Artificial Sequence
  Description of Artificial Sequence: Synthetic oligonucleotide
  Sense strand starting at position 2692 of SEQ ID NO: 585318
cugagucuuccaggcaaau

SEQ ID NO: 630409 - RNA, 19 nt, Artificial Sequence
  Description of Artificial Sequence: Synthetic oligonucleotide
  Antisense strand to SEQ ID NO: 630408
auuugccuggaagacucag

SEQ ID NO: 630410 - RNA, 19 nt, Artificial Sequence
  Description of Artificial Sequence: Synthetic oligonucleotide
  Sense strand starting at position 2893 of SEQ ID NO: 585318
acccguaauaucuggguga

SEQ ID NO: 630411 - RNA, 19 nt, Artificial Sequence
  Description of Artificial Sequence: Synthetic oligonucleotide
  Antisense strand to SEQ ID NO: 630410
ucacccagauauuacgggu

SEQ ID NO: 630412 - RNA, 19 nt, Artificial Sequence
  Description of Artificial Sequence: Synthetic oligonucleotide
  Sense strand starting at position 2895 of SEQ ID NO: 585318
ccguaauaucugggugaac

SEQ ID NO: 630413 - RNA, 19 nt, Artificial Sequence
  Description of Artificial Sequence: Synthetic oligonucleotide
  Antisense strand to SEQ ID NO: 630412
guucacccagauauuacgg

SEQ ID NO: 630414 - RNA, 19 nt, Artificial Sequence
  Description of Artificial Sequence: Synthetic oligonucleotide
  Sense strand starting at position 3130 of SEQ ID NO: 585318
ugcagauaacggugaagaa

SEQ ID NO: 630415 - RNA, 19 nt, Artificial Sequence
  Description of Artificial Sequence: Synthetic oligonucleotide
  Antisense strand to SEQ ID NO: 630414
uucuucaccguuaucugca

SEQ ID NO: 630416 - RNA, 19 nt, Artificial Sequence
  Description of Artificial Sequence: Synthetic oligonucleotide
  Sense strand starting at position 3187 of SEQ ID NO: 585318
ggcggaagcggauaauaaa

SEQ ID NO: 630417 - RNA, 19 nt, Artificial Sequence
  Description of Artificial Sequence: Synthetic oligonucleotide
  Antisense strand to SEQ ID NO: 630416
uuuauuauccgcuuccgcc

SEQ ID NO: 630418 - RNA, 19 nt, Artificial Sequence
  Description of Artificial Sequence: Synthetic oligonucleotide
  Sense strand starting at position 3228 of SEQ ID NO: 585318
gugauaagcgauuggagaa

SEQ ID NO: 630419 - RNA, 19 nt, Artificial Sequence
  Description of Artificial Sequence: Synthetic oligonucleotide
  Antisense strand to SEQ ID NO: 630418
uucuccaaucgcuuaucac

SEQ ID NO: 630420 - RNA, 19 nt, Artificial Sequence
  Description of Artificial Sequence: Synthetic oligonucleotide
  Sense strand starting at position 3229 of SEQ ID NO: 585318
ugauaagcgauuggagaaa

SEQ ID NO: 630421 - RNA, 19 nt, Artificial Sequence
  Description of Artificial Sequence: Synthetic oligonucleotide
  Antisense strand to SEQ ID NO: 630420
uuucuccaaucgcuuauca

SEQ ID NO: 630422 - RNA, 19 nt, Artificial Sequence
  Description of Artificial Sequence: Synthetic oligonucleotide
  Sense strand starting at position 3413 of SEQ ID NO: 585318
gugcucaguggagaggaau

SEQ ID NO: 630423 - RNA, 19 nt, Artificial Sequence
  Description of Artificial Sequence: Synthetic oligonucleotide
  Antisense strand to SEQ ID NO: 630422
auuccucuccacugagcac

SEQ ID NO: 630424 - RNA, 19 nt, Artificial Sequence
  Description of Artificial Sequence: Synthetic oligonucleotide
  Sense strand starting at position 3504 of SEQ ID NO: 585318
uaaggacucuggcugguau

SEQ ID NO: 630425 - RNA, 19 nt, Artificial Sequence
  Description of Artificial Sequence: Synthetic oligonucleotide
  Antisense strand to SEQ ID NO: 630424
auaccagccagaguccuua

SEQ ID NO: 630426 - RNA, 19 nt, Artificial Sequence
  Description of Artificial Sequence: Synthetic oligonucleotide
  Sense strand starting at position 3505 of SEQ ID NO: 585318
aaggacucuggcugguauu

SEQ ID NO: 630427 - RNA, 19 nt, Artificial Sequence
  Description of Artificial Sequence: Synthetic oligonucleotide
  Antisense strand to SEQ ID NO: 630426
aauaccagccagaguccuu

SEQ ID NO: 630428 - RNA, 19 nt, Artificial Sequence
  Description of Artificial Sequence: Synthetic oligonucleotide
  Sense strand starting at position 3515 of SEQ ID NO: 585318
gcugguauucuguaggaaa

SEQ ID NO: 630429 - RNA, 19 nt, Artificial Sequence
  Description of Artificial Sequence: Synthetic oligonucleotide
  Antisense strand to SEQ ID NO: 630428
uuuccuacagaauaccagc

SEQ ID NO: 630430 - RNA, 19 nt, Artificial Sequence
  Description of Artificial Sequence: Synthetic oligonucleotide
  Sense strand starting at position 3517 of SEQ ID NO: 585318
ugguauucuguaggaaacu

SEQ ID NO: 630431 - RNA, 19 nt, Artificial Sequence
  Description of Artificial Sequence: Synthetic oligonucleotide
  Antisense strand to SEQ ID NO: 630430
aguuuccuacagaauacca

SEQ ID NO: 630432 - RNA, 19 nt, Artificial Sequence
  Description of Artificial Sequence: Synthetic oligonucleotide
  Sense strand starting at position 3549 of SEQ ID NO: 585318
cggugacguggucugaguu

SEQ ID NO: 630433 - RNA, 19 nt, Artificial Sequence
  Description of Artificial Sequence: Synthetic oligonucleotide
  Antisense strand to SEQ ID NO: 630432
aacucagaccacgucaccg

SEQ ID NO: 630434 - RNA, 19 nt, Artificial Sequence
  Description of Artificial Sequence: Synthetic oligonucleotide
  Sense strand starting at position 3676 of SEQ ID NO: 585318
cucagaauuugacagcuuu

SEQ ID NO: 630435 - RNA, 19 nt, Artificial Sequence
  Description of Artificial Sequence: Synthetic oligonucleotide
  Antisense strand to SEQ ID NO: 630434
aaagcugucaaauucugag

SEQ ID NO: 630436 - RNA, 19 nt, Artificial Sequence
  Description of Artificial Sequence: Synthetic oligonucleotide
  Sense strand starting at position 3714 of SEQ ID NO: 585318
cggacacucauaugaaugu

SEQ ID NO: 630437 - RNA, 19 nt, Artificial Sequence
  Description of Artificial Sequence: Synthetic oligonucleotide
  Antisense strand to SEQ ID NO: 630436
acauucauaugaguguccg

SEQ ID NO: 630438 - RNA, 19 nt, Artificial Sequence
  Description of Artificial Sequence: Synthetic oligonucleotide
  Sense strand starting at position 3787 of SEQ ID NO: 585318
guccauauuucugagaaua

SEQ ID NO: 630439 - RNA, 19 nt, Artificial Sequence
  Description of Artificial Sequence: Synthetic oligonucleotide
  Antisense strand to SEQ ID NO: 630438
uauucucagaaauauggac

SEQ ID NO: 630440 - RNA, 19 nt, Artificial Sequence
  Description of Artificial Sequence: Synthetic oligonucleotide
  Sense strand starting at position 3976 of SEQ ID NO: 585318
aagguagaccuagguuaug

SEQ ID NO: 630441 - RNA, 19 nt, Artificial Sequence
  Description of Artificial Sequence: Synthetic oligonucleotide
  Antisense strand to SEQ ID NO: 630440
cauaaccuaggucuaccuu

SEQ ID NO: 630442 - RNA, 19 nt, Artificial Sequence
  Description of Artificial Sequence: Synthetic oligonucleotide
  Sense strand starting at position 2 of SEQ ID NO: 585319
uucugaaagcauggauucu

SEQ ID NO: 630443 - RNA, 19 nt, Artificial Sequence
  Description of Artificial Sequence: Synthetic oligonucleotide
  Antisense strand to SEQ ID NO: 630442
agaauccaugcuuucagaa

SEQ ID NO: 630444 - RNA, 19 nt, Artificial Sequence
  Description of Artificial Sequence: Synthetic oligonucleotide
  Sense strand starting at position 108 of SEQ ID NO: 585319
ggucuucaguuacuggaga

SEQ ID NO: 630445 - RNA, 19 nt, Artificial Sequence
  Description of Artificial Sequence: Synthetic oligonucleotide
  Antisense strand to SEQ ID NO: 630444
ucuccaguaacugaagacc

SEQ ID NO: 630446 - RNA, 19 nt, Artificial Sequence
  Description of Artificial Sequence: Synthetic oligonucleotide
  Sense strand starting at position 287 of SEQ ID NO: 585319
augcauuagugaucauuag

SEQ ID NO: 630447 - RNA, 19 nt, Artificial Sequence
  Description of Artificial Sequence: Synthetic oligonucleotide
  Antisense strand to SEQ ID NO: 630446
cuaaugaucacuaaugcau

SEQ ID NO: 630448 - RNA, 19 nt, Artificial Sequence
  Description of Artificial Sequence: Synthetic oligonucleotide
  Sense strand starting at position 288 of SEQ ID NO: 585319
ugcauuagugaucauuaga

SEQ ID NO: 630449 - RNA, 19 nt, Artificial Sequence
  Description of Artificial Sequence: Synthetic oligonucleotide
  Antisense strand to SEQ ID NO: 630448
ucuaaugaucacuaaugca

SEQ ID NO: 630450 - RNA, 19 nt, Artificial Sequence
  Description of Artificial Sequence: Synthetic oligonucleotide
  Sense strand starting at position 466 of SEQ ID NO: 585319
agaagcucugauuacacuu

SEQ ID NO: 630451 - RNA, 19 nt, Artificial Sequence
  Description of Artificial Sequence: Synthetic oligonucleotide
  Antisense strand to SEQ ID NO: 630450
aaguguaaucagagcuucu

SEQ ID NO: 630452 - RNA, 19 nt, Artificial Sequence
  Description of Artificial Sequence: Synthetic oligonucleotide
  Sense strand starting at position 497 of SEQ ID NO: 585319
acaacuagugagugagaca

SEQ ID NO: 630453 - RNA, 19 nt, Artificial Sequence
  Description of Artificial Sequence: Synthetic oligonucleotide
  Antisense strand to SEQ ID NO: 630452
ugucucacucacuaguugu

SEQ ID NO: 630454 - RNA, 19 nt, Artificial Sequence
  Description of Artificial Sequence: Synthetic oligonucleotide
  Sense strand starting at position 635 of SEQ ID NO: 585319
aggucuacagauuagcuua

SEQ ID NO: 630455 - RNA, 19 nt, Artificial Sequence
  Description of Artificial Sequence: Synthetic oligonucleotide
  Antisense strand to SEQ ID NO: 630454
uaagcuaaucuguagaccu

SEQ ID NO: 630456 - RNA, 19 nt, Artificial Sequence
  Description of Artificial Sequence: Synthetic oligonucleotide
  Sense strand starting at position 637 of SEQ ID NO: 585319
gucuacagauuagcuuaaa

SEQ ID NO: 630457 - RNA, 19 nt, Artificial Sequence
  Description of Artificial Sequence: Synthetic oligonucleotide
  Antisense strand to SEQ ID NO: 630456
uuuaagcuaaucuguagac

SEQ ID NO: 630458 - RNA, 19 nt, Artificial Sequence
  Description of Artificial Sequence: Synthetic oligonucleotide
  Sense strand starting at position 1138 of SEQ ID NO: 585319
ugcccauuagacuagacau

SEQ ID NO: 630459 - RNA, 19 nt, Artificial Sequence
  Description of Artificial Sequence: Synthetic oligonucleotide
  Antisense strand to SEQ ID NO: 630458
augucuagucuaaugggca

SEQ ID NO: 630460 - RNA, 19 nt, Artificial Sequence
  Description of Artificial Sequence: Synthetic oligonucleotide
  Sense strand starting at position 1454 of SEQ ID NO: 585319
uuuaaugcuccugauagca

SEQ ID NO: 630461 - RNA, 19 nt, Artificial Sequence
  Description of Artificial Sequence: Synthetic oligonucleotide
  Antisense strand to SEQ ID NO: 630460
ugcuaucaggagcauuaaa

SEQ ID NO: 630462 - RNA, 19 nt, Artificial Sequence
  Description of Artificial Sequence: Synthetic oligonucleotide
  Sense strand starting at position 1472 of SEQ ID NO: 585319
acauuaaguguccacucau

SEQ ID NO: 630463 - RNA, 19 nt, Artificial Sequence
  Description of Artificial Sequence: Synthetic oligonucleotide
  Antisense strand to SEQ ID NO: 630462
augaguggacacuuaaugu

SEQ ID NO: 630464 - RNA, 19 nt, Artificial Sequence
  Description of Artificial Sequence: Synthetic oligonucleotide
  Sense strand starting at position 1511 of SEQ ID NO: 585319
auagauacaucaucacugu

SEQ ID NO: 630465 - RNA, 19 nt, Artificial Sequence
  Description of Artificial Sequence: Synthetic oligonucleotide
  Antisense strand to SEQ ID NO: 630464
acagugaugauguaucuau

SEQ ID NO: 630466 - RNA, 19 nt, Artificial Sequence
  Description of Artificial Sequence: Synthetic oligonucleotide
  Sense strand starting at position 1668 of SEQ ID NO: 585319
aacaucuugguuugaggaa

SEQ ID NO: 630467 - RNA, 19 nt, Artificial Sequence
  Description of Artificial Sequence: Synthetic oligonucleotide
  Antisense strand to SEQ ID NO: 630466
uuccucaaaccaagauguu

SEQ ID NO: 630468 - RNA, 19 nt, Artificial Sequence
  Description of Artificial Sequence: Synthetic oligonucleotide
  Sense strand starting at position 1702 of SEQ ID NO: 585319
uuuaaaggcucaguaaauc

SEQ ID NO: 630469 - RNA, 19 nt, Artificial Sequence
  Description of Artificial Sequence: Synthetic oligonucleotide
  Antisense strand to SEQ ID NO: 630468
gauuuacugagccuuuaaa

SEQ ID NO: 630470 - RNA, 19 nt, Artificial Sequence
  Description of Artificial Sequence: Synthetic oligonucleotide
  Sense strand starting at position 1738 of SEQ ID NO: 585319
aaagcauguuuccugggaa

SEQ ID NO: 630471 - RNA, 19 nt, Artificial Sequence
  Description of Artificial Sequence: Synthetic oligonucleotide
  Antisense strand to SEQ ID NO: 630470
uucccaggaaacaugcuuu

SEQ ID NO: 630472 - RNA, 19 nt, Artificial Sequence
  Description of Artificial Sequence: Synthetic oligonucleotide
  Sense strand starting at position 1945 of SEQ ID NO: 585319
ccacgccugcuguuugaau

SEQ ID NO: 630473 - RNA, 19 nt, Artificial Sequence
  Description of Artificial Sequence: Synthetic oligonucleotide
  Antisense strand to SEQ ID NO: 630472
auucaaacagcaggcgugg

SEQ ID NO: 630474 - RNA, 19 nt, Artificial Sequence
  Description of Artificial Sequence: Synthetic oligonucleotide
  Sense strand starting at position 2045 of SEQ ID NO: 585319
uugguugucacagagcuaa

SEQ ID NO: 630475 - RNA, 19 nt, Artificial Sequence
  Description of Artificial Sequence: Synthetic oligonucleotide
  Antisense strand to SEQ ID NO: 630474
uuagcucugugacaaccaa

SEQ ID NO: 630476 - RNA, 19 nt, Artificial Sequence
  Description of Artificial Sequence: Synthetic oligonucleotide
  Sense strand starting at position 2248 of SEQ ID NO: 585319
gugagauaauugucaaagu

SEQ ID NO: 630477 - RNA, 19 nt, Artificial Sequence
  Description of Artificial Sequence: Synthetic oligonucleotide
  Antisense strand to SEQ ID NO: 630476
acuuugacaauuaucucac

SEQ ID NO: 630478 - RNA, 19 nt, Artificial Sequence
  Description of Artificial Sequence: Synthetic oligonucleotide
  Sense strand starting at position 2753 of SEQ ID NO: 585319
ugagcauagcaaugacaua

SEQ ID NO: 630479 - RNA, 19 nt, Artificial Sequence
  Description of Artificial Sequence: Synthetic oligonucleotide
  Antisense strand to SEQ ID NO: 630478
uaugucauugcuaugcuca

SEQ ID NO: 630480 - RNA, 19 nt, Artificial Sequence
  Description of Artificial Sequence: Synthetic oligonucleotide
  Sense strand starting at position 2799 of SEQ ID NO: 585319
uuuaguugugaguagaaga

SEQ ID NO: 630481 - RNA, 19 nt, Artificial Sequence
  Description of Artificial Sequence: Synthetic oligonucleotide
  Antisense strand to SEQ ID NO: 630480
ucuucuacucacaacuaaa

SEQ ID NO: 630482 - RNA, 19 nt, Artificial Sequence
  Description of Artificial Sequence: Synthetic oligonucleotide
  Sense strand starting at position 2823 of SEQ ID NO: 585319
gugaaaucgaagugauacu

SEQ ID NO: 630483 - RNA, 19 nt, Artificial Sequence
  Description of Artificial Sequence: Synthetic oligonucleotide
  Antisense strand to SEQ ID NO: 630482
aguaucacuucgauuucac

SEQ ID NO: 630484 - RNA, 19 nt, Artificial Sequence
  Description of Artificial Sequence: Synthetic oligonucleotide
  Sense strand starting at position 2832 of SEQ ID NO: 585319
aagugauacuuacugaagu

SEQ ID NO: 630485 - RNA, 19 nt, Artificial Sequence
  Description of Artificial Sequence: Synthetic oligonucleotide
  Antisense strand to SEQ ID NO: 630484
acuucaguaaguaucacuu

SEQ ID NO: 630486 - RNA, 19 nt, Artificial Sequence
  Description of Artificial Sequence: Synthetic oligonucleotide
  Sense strand starting at position 2858 of SEQ ID NO: 585319
ggugacuaucaggauguca

SEQ ID NO: 630487 - RNA, 19 nt, Artificial Sequence
  Description of Artificial Sequence: Synthetic oligonucleotide
  Antisense strand to SEQ ID NO: 630486
ugacauccugauagucacc

SEQ ID NO: 630488 - RNA, 19 nt, Artificial Sequence
  Description of Artificial Sequence: Synthetic oligonucleotide
  Sense strand starting at position 2860 of SEQ ID NO: 585319
ugacuaucaggaugucaca

SEQ ID NO: 630489 - RNA, 19 nt, Artificial Sequence
  Description of Artificial Sequence: Synthetic oligonucleotide
  Antisense strand to SEQ ID NO: 630488
ugugacauccugauaguca

SEQ ID NO: 630490 - RNA, 19 nt, Artificial Sequence
  Description of Artificial Sequence: Synthetic oligonucleotide
  Sense strand starting at position 2870 of SEQ ID NO: 585319
gaugucacauguuugagga

SEQ ID NO: 630491 - RNA, 19 nt, Artificial Sequence
  Description of Artificial Sequence: Synthetic oligonucleotide
  Antisense strand to SEQ ID NO: 630490
uccucaaacaugugacauc

SEQ ID NO: 630492 - RNA, 19 nt, Artificial Sequence
  Description of Artificial Sequence: Synthetic oligonucleotide
  Sense strand starting at position 2945 of SEQ ID NO: 585319
cugaaacauguucggacua

SEQ ID NO: 630493 - RNA, 19 nt, Artificial Sequence
  Description of Artificial Sequence: Synthetic oligonucleotide
  Antisense strand to SEQ ID NO: 630492
uaguccgaacauguuucag

SEQ ID NO: 630494 - RNA, 19 nt, Artificial Sequence
  Description of Artificial Sequence: Synthetic oligonucleotide
  Sense strand starting at position 3005 of SEQ ID NO: 585319
uagacagguuuggugauau

SEQ ID NO: 630495 - RNA, 19 nt, Artificial Sequence
  Description of Artificial Sequence: Synthetic oligonucleotide
  Antisense strand to SEQ ID NO: 630494
auaucaccaaaccugucua

SEQ ID NO: 630496 - RNA, 19 nt, Artificial Sequence
  Description of Artificial Sequence: Synthetic oligonucleotide
  Sense strand starting at position 3109 of SEQ ID NO: 585319
gcuuuacuagugcuguuau

SEQ ID NO: 630497 - RNA, 19 nt, Artificial Sequence
  Description of Artificial Sequence: Synthetic oligonucleotide
  Antisense strand to SEQ ID NO: 630496
auaacagcacuaguaaagc

SEQ ID NO: 630498 - RNA, 19 nt, Artificial Sequence
  Description of Artificial Sequence: Synthetic oligonucleotide
  Sense strand starting at position 3198 of SEQ ID NO: 585319
aagauaagauuguuugccu

SEQ ID NO: 630499 - RNA, 19 nt, Artificial Sequence
  Description of Artificial Sequence: Synthetic oligonucleotide
  Antisense strand to SEQ ID NO: 630498
aggcaaacaaucuuaucuu

SEQ ID NO: 630500 - RNA, 19 nt, Artificial Sequence
  Description of Artificial Sequence: Synthetic oligonucleotide
  Sense strand starting at position 3256 of SEQ ID NO: 585319
uauagauagcaaugaguca

SEQ ID NO: 630501 - RNA, 19 nt, Artificial Sequence
  Description of Artificial Sequence: Synthetic oligonucleotide
  Antisense strand to SEQ ID NO: 630500
ugacucauugcuaucuaua

SEQ ID NO: 630502 - RNA, 19 nt, Artificial Sequence
  Description of Artificial Sequence: Synthetic oligonucleotide
  Sense strand starting at position 3261 of SEQ ID NO: 585319
auagcaaugagucaugguu

SEQ ID NO: 630503 - RNA, 19 nt, Artificial Sequence
  Description of Artificial Sequence: Synthetic oligonucleotide
  Antisense strand to SEQ ID NO: 630502
aaccaugacucauugcuau

SEQ ID NO: 630504 - RNA, 19 nt, Artificial Sequence
  Description of Artificial Sequence: Synthetic oligonucleotide
  Sense strand starting at position 3352 of SEQ ID NO: 585319
aggauugagugauugaucu

SEQ ID NO: 630505 - RNA, 19 nt, Artificial Sequence
  Description of Artificial Sequence: Synthetic oligonucleotide
  Antisense strand to SEQ ID NO: 630504
agaucaaucacucaauccu

SEQ ID NO: 630506 - RNA, 19 nt, Artificial Sequence
  Description of Artificial Sequence: Synthetic oligonucleotide
  Sense strand starting at position 3356 of SEQ ID NO: 585319
uugagugauugaucuauuc

SEQ ID NO: 630507 - RNA, 19 nt, Artificial Sequence
  Description of Artificial Sequence: Synthetic oligonucleotide
  Antisense strand to SEQ ID NO: 630506
gaauagaucaaucacucaa

SEQ ID NO: 630508 - RNA, 19 nt, Artificial Sequence
  Description of Artificial Sequence: Synthetic oligonucleotide
  Sense strand starting at position 3418 of SEQ ID NO: 585319
cuauuauacuagguuuauc

SEQ ID NO: 630509 - RNA, 19 nt, Artificial Sequence
  Description of Artificial Sequence: Synthetic oligonucleotide
  Antisense strand to SEQ ID NO: 630508
gauaaaccuaguauaauag

SEQ ID NO: 630510 - RNA, 19 nt, Artificial Sequence
  Description of Artificial Sequence: Synthetic oligonucleotide
  Sense strand starting at position 3423 of SEQ ID NO: 585319
auacuagguuuaucagaga

SEQ ID NO: 630511 - RNA, 19 nt, Artificial Sequence
  Description of Artificial Sequence: Synthetic oligonucleotide
  Antisense strand to SEQ ID NO: 630510
ucucugauaaaccuaguau

SEQ ID NO: 630512 - RNA, 19 nt, Artificial Sequence
  Description of Artificial Sequence: Synthetic oligonucleotide
  Sense strand starting at position 3582 of SEQ ID NO: 585319
agagaaugugggcauggua

SEQ ID NO: 630513 - RNA, 19 nt, Artificial Sequence
  Description of Artificial Sequence: Synthetic oligonucleotide
  Antisense strand to SEQ ID NO: 630512
uaccaugcccacauucucu

SEQ ID NO: 630514 - RNA, 19 nt, Artificial Sequence
  Description of Artificial Sequence: Synthetic oligonucleotide
  Sense strand starting at position 3618 of SEQ ID NO: 585319
uggaauguacuaugugaau

SEQ ID NO: 630515 - RNA, 19 nt, Artificial Sequence
  Description of Artificial Sequence: Synthetic oligonucleotide
  Antisense strand to SEQ ID NO: 630514
auucacauaguacauucca

SEQ ID NO: 630516 - RNA, 19 nt, Artificial Sequence
  Description of Artificial Sequence: Synthetic oligonucleotide
  Sense strand starting at position 3627 of SEQ ID NO: 585319
cuaugugaauugcugagga

SEQ ID NO: 630517 - RNA, 19 nt, Artificial Sequence
  Description of Artificial Sequence: Synthetic oligonucleotide
  Antisense strand to SEQ ID NO: 630516
uccucagcaauucacauag

SEQ ID NO: 630518 - RNA, 19 nt, Artificial Sequence
  Description of Artificial Sequence: Synthetic oligonucleotide
  Sense strand starting at position 3759 of SEQ ID NO: 585319
ggagaauaguggccaauua

SEQ ID NO: 630519 - RNA, 19 nt, Artificial Sequence
  Description of Artificial Sequence: Synthetic oligonucleotide
  Antisense strand to SEQ ID NO: 630518
uaauuggccacuauucucc

SEQ ID NO: 630520 - RNA, 19 nt, Artificial Sequence
  Description of Artificial Sequence: Synthetic oligonucleotide
  Sense strand starting at position 3937 of SEQ ID NO: 585319
guccuuccugaagaaguaa

SEQ ID NO: 630521 - RNA, 19 nt, Artificial Sequence
  Description of Artificial Sequence: Synthetic oligonucleotide
  Antisense strand to SEQ ID NO: 630520
uuacuucuucaggaaggac

SEQ ID NO: 630522 - RNA, 19 nt, Artificial Sequence
  Description of Artificial Sequence: Synthetic oligonucleotide
  Sense strand starting at position 10 of SEQ ID NO: 585320
gcagaaacauuuggacaga

SEQ ID NO: 630523 - RNA, 19 nt, Artificial Sequence
  Description of Artificial Sequence: Synthetic oligonucleotide
  Antisense strand to SEQ ID NO: 630522
ucuguccaaauguuucugc

SEQ ID NO: 630524 - RNA, 19 nt, Artificial Sequence
  Description of Artificial Sequence: Synthetic oligonucleotide
  Sense strand starting at position 133 of SEQ ID NO: 585320
ucauauagucuggguucua

SEQ ID NO: 630525 - RNA, 19 nt, Artificial Sequence
  Description of Artificial Sequence: Synthetic oligonucleotide
  Antisense strand to SEQ ID NO: 630524
uagaacccagacuauauga

SEQ ID NO: 630526 - RNA, 19 nt, Artificial Sequence
  Description of Artificial Sequence: Synthetic oligonucleotide
  Sense strand starting at position 255 of SEQ ID NO: 585320
cugccacaucuaugagaau

SEQ ID NO: 630527 - RNA, 19 nt, Artificial Sequence
  Description of Artificial Sequence: Synthetic oligonucleotide
  Antisense strand to SEQ ID NO: 630526
auucucauagauguggcag

SEQ ID NO: 630528 - RNA, 19 nt, Artificial Sequence
  Description of Artificial Sequence: Synthetic oligonucleotide
  Sense strand starting at position 512 of SEQ ID NO: 585320
gaaauacucauguggguga

SEQ ID NO: 630529 - RNA, 19 nt, Artificial Sequence
  Description of Artificial Sequence: Synthetic oligonucleotide
  Antisense strand to SEQ ID NO: 630528
ucacccacaugaguauuuc

SEQ ID NO: 630530 - RNA, 19 nt, Artificial Sequence
  Description of Artificial Sequence: Synthetic oligonucleotide
  Sense strand starting at position 514 of SEQ ID NO: 585320
aauacucaugugggugaaa

SEQ ID NO: 630531 - RNA, 19 nt, Artificial Sequence
  Description of Artificial Sequence: Synthetic oligonucleotide
  Antisense strand to SEQ ID NO: 630530
uuucacccacaugaguauu

SEQ ID NO: 630532 - RNA, 19 nt, Artificial Sequence
  Description of Artificial Sequence: Synthetic oligonucleotide
  Sense strand starting at position 611 of SEQ ID NO: 585320
uaauguuugccaggaacug

SEQ ID NO: 630533 - RNA, 19 nt, Artificial Sequence
  Description of Artificial Sequence: Synthetic oligonucleotide
  Antisense strand to SEQ ID NO: 630532
caguuccuggcaaacauua

SEQ ID NO: 630534 - RNA, 19 nt, Artificial Sequence
  Description of Artificial Sequence: Synthetic oligonucleotide
  Sense strand starting at position 612 of SEQ ID NO: 585320
aauguuugccaggaacugu

SEQ ID NO: 630535 - RNA, 19 nt, Artificial Sequence
  Description of Artificial Sequence: Synthetic oligonucleotide
  Antisense strand to SEQ ID NO: 630534
acaguuccuggcaaacauu

SEQ ID NO: 630536 - RNA, 19 nt, Artificial Sequence
  Description of Artificial Sequence: Synthetic oligonucleotide
  Sense strand starting at position 622 of SEQ ID NO: 585320
aggaacugugcccaguauu

SEQ ID NO: 630537 - RNA, 19 nt, Artificial Sequence
  Description of Artificial Sequence: Synthetic oligonucleotide
  Antisense strand to SEQ ID NO: 630536
aauacugggcacaguuccu

SEQ ID NO: 630538 - RNA, 19 nt, Artificial Sequence
  Description of Artificial Sequence: Synthetic oligonucleotide
  Sense strand starting at position 679 of SEQ ID NO: 585320
gagauugagucucugaaug

SEQ ID NO: 630539 - RNA, 19 nt, Artificial Sequence
  Description of Artificial Sequence: Synthetic oligonucleotide
  Antisense strand to SEQ ID NO: 630538
cauucagagacucaaucuc

SEQ ID NO: 630540 - RNA, 19 nt, Artificial Sequence
  Description of Artificial Sequence: Synthetic oligonucleotide
  Sense strand starting at position 684 of SEQ ID NO: 585320
ugagucucugaaugauucu

SEQ ID NO: 630541 - RNA, 19 nt, Artificial Sequence
  Description of Artificial Sequence: Synthetic oligonucleotide
  Antisense strand to SEQ ID NO: 630540
agaaucauucagagacuca

SEQ ID NO: 630542 - RNA, 19 nt, Artificial Sequence
  Description of Artificial Sequence: Synthetic oligonucleotide
  Sense strand starting at position 801 of SEQ ID NO: 585320
gaucccaugucugugggaa

SEQ ID NO: 630543 - RNA, 19 nt, Artificial Sequence
  Description of Artificial Sequence: Synthetic oligonucleotide
  Antisense strand to SEQ ID NO: 630542
uucccacagacaugggauc

SEQ ID NO: 630544 - RNA, 19 nt, Artificial Sequence
  Description of Artificial Sequence: Synthetic oligonucleotide
  Sense strand starting at position 802 of SEQ ID NO: 585320
aucccaugucugugggaag

SEQ ID NO: 630545 - RNA, 19 nt, Artificial Sequence
  Description of Artificial Sequence: Synthetic oligonucleotide
  Antisense strand to SEQ ID NO: 630544
cuucccacagacaugggau

SEQ ID NO: 630546 - RNA, 19 nt, Artificial Sequence
  Description of Artificial Sequence: Synthetic oligonucleotide
  Sense strand starting at position 1005 of SEQ ID NO: 585320
gugagucagagauguggaa

SEQ ID NO: 630547 - RNA, 19 nt, Artificial Sequence
  Description of Artificial Sequence: Synthetic oligonucleotide
  Antisense strand to SEQ ID NO: 630546
uuccacaucucugacucac

SEQ ID NO: 630548 - RNA, 19 nt, Artificial Sequence
  Description of Artificial Sequence: Synthetic oligonucleotide
  Sense strand starting at position 1007 of SEQ ID NO: 585320
gagucagagauguggaaug

SEQ ID NO: 630549 - RNA, 19 nt, Artificial Sequence
  Description of Artificial Sequence: Synthetic oligonucleotide
  Antisense strand to SEQ ID NO: 630548
cauuccacaucucugacuc

SEQ ID NO: 630550 - RNA, 19 nt, Artificial Sequence
  Description of Artificial Sequence: Synthetic oligonucleotide
  Sense strand starting at position 1012 of SEQ ID NO: 585320
agagauguggaaugaguca

SEQ ID NO: 630551 - RNA, 19 nt, Artificial Sequence
  Description of Artificial Sequence: Synthetic oligonucleotide
  Antisense strand to SEQ ID NO: 630550
ugacucauuccacaucucu

SEQ ID NO: 630552 - RNA, 19 nt, Artificial Sequence
  Description of Artificial Sequence: Synthetic oligonucleotide
  Sense strand starting at position 1017 of SEQ ID NO: 585320
uguggaaugagucaggagu

SEQ ID NO: 630553 - RNA, 19 nt, Artificial Sequence
  Description of Artificial Sequence: Synthetic oligonucleotide
  Antisense strand to SEQ ID NO: 630552
acuccugacucauuccaca

SEQ ID NO: 630554 - RNA, 19 nt, Artificial Sequence
  Description of Artificial Sequence: Synthetic oligonucleotide
  Sense strand starting at position 1046 of SEQ ID NO: 585320
gguucuccucucuauacca

SEQ ID NO: 630555 - RNA, 19 nt, Artificial Sequence
  Description of Artificial Sequence: Synthetic oligonucleotide
  Antisense strand to SEQ ID NO: 630554
ugguauagagaggagaacc

SEQ ID NO: 630556 - RNA, 19 nt, Artificial Sequence
  Description of Artificial Sequence: Synthetic oligonucleotide
  Sense strand starting at position 1092 of SEQ ID NO: 585320
accugaccuuuccuacgau

SEQ ID NO: 630557 - RNA, 19 nt, Artificial Sequence
  Description of Artificial Sequence: Synthetic oligonucleotide
  Antisense strand to SEQ ID NO: 630556
aucguaggaaaggucaggu

SEQ ID NO: 630558 - RNA, 19 nt, Artificial Sequence
  Description of Artificial Sequence: Synthetic oligonucleotide
  Sense strand starting at position 3121 of SEQ ID NO: 585320
ggcacucaccaauagcuaa

SEQ ID NO: 630559 - RNA, 19 nt, Artificial Sequence
  Description of Artificial Sequence: Synthetic oligonucleotide
  Antisense strand to SEQ ID NO: 630558
uuagcuauuggugagugcc

SEQ ID NO: 630560 - RNA, 19 nt, Artificial Sequence
  Description of Artificial Sequence: Synthetic oligonucleotide
  Sense strand starting at position 3132 of SEQ ID NO: 585320
auagcuaaagauuaucagu

SEQ ID NO: 630561 - RNA, 19 nt, Artificial Sequence
  Description of Artificial Sequence: Synthetic oligonucleotide
  Antisense strand to SEQ ID NO: 630560
acugauaaucuuuagcuau

SEQ ID NO: 630562 - RNA, 19 nt, Artificial Sequence
  Description of Artificial Sequence: Synthetic oligonucleotide
  Sense strand starting at position 3137 of SEQ ID NO: 585320
uaaagauuaucagugguuu

SEQ ID NO: 630563 - RNA, 19 nt, Artificial Sequence
  Description of Artificial Sequence: Synthetic oligonucleotide
  Antisense strand to SEQ ID NO: 630562
aaaccacugauaaucuuua

SEQ ID NO: 630564 - RNA, 19 nt, Artificial Sequence
  Description of Artificial Sequence: Synthetic oligonucleotide
  Sense strand starting at position 3138 of SEQ ID NO: 585320
aaagauuaucagugguuua

SEQ ID NO: 630565 - RNA, 19 nt, Artificial Sequence
  Description of Artificial Sequence: Synthetic oligonucleotide
  Antisense strand to SEQ ID NO: 630564
uaaaccacugauaaucuuu

SEQ ID NO: 630566 - RNA, 19 nt, Artificial Sequence
  Description of Artificial Sequence: Synthetic oligonucleotide
  Sense strand starting at position 3141 of SEQ ID NO: 585320
gauuaucagugguuuagaa

SEQ ID NO: 630567 - RNA, 19 nt, Artificial Sequence
  Description of Artificial Sequence: Synthetic oligonucleotide
  Antisense strand to SEQ ID NO: 630566
uucuaaaccacugauaauc

SEQ ID NO: 630568 - RNA, 19 nt, Artificial Sequence
  Description of Artificial Sequence: Synthetic oligonucleotide
  Sense strand starting at position 3143 of SEQ ID NO: 585320
uuaucagugguuuagaagu

SEQ ID NO: 630569 - RNA, 19 nt, Artificial Sequence
  Description of Artificial Sequence: Synthetic oligonucleotide
  Antisense strand to SEQ ID NO: 630568
acuucuaaaccacugauaa

SEQ ID NO: 630570 - RNA, 19 nt, Artificial Sequence
  Description of Artificial Sequence: Synthetic oligonucleotide
  Sense strand starting at position 3185 of SEQ ID NO: 585320
ggacauggauuuggaaacu

SEQ ID NO: 630571 - RNA, 19 nt, Artificial Sequence
  Description of Artificial Sequence: Synthetic oligonucleotide
  Antisense strand to SEQ ID NO: 630570
aguuuccaaauccaugucc

SEQ ID NO: 630572 - RNA, 19 nt, Artificial Sequence
  Description of Artificial Sequence: Synthetic oligonucleotide
  Sense strand starting at position 3275 of SEQ ID NO: 585320
agguccuuuccacagacuu

SEQ ID NO: 630573 - RNA, 19 nt, Artificial Sequence
  Description of Artificial Sequence: Synthetic oligonucleotide
  Antisense strand to SEQ ID NO: 630572
aagucuguggaaaggaccu

SEQ ID NO: 630574 - RNA, 19 nt, Artificial Sequence
  Description of Artificial Sequence: Synthetic oligonucleotide
  Sense strand starting at position 3287 of SEQ ID NO: 585320
cagacuuucugauugagua

SEQ ID NO: 630575 - RNA, 19 nt, Artificial Sequence
  Description of Artificial Sequence: Synthetic oligonucleotide
  Antisense strand to SEQ ID NO: 630574
uacucaaucagaaagucug

SEQ ID NO: 630576 - RNA, 19 nt, Artificial Sequence
  Description of Artificial Sequence: Synthetic oligonucleotide
  Sense strand starting at position 3288 of SEQ ID NO: 585320
agacuuucugauugaguag

SEQ ID NO: 630577 - RNA, 19 nt, Artificial Sequence
  Description of Artificial Sequence: Synthetic oligonucleotide
  Antisense strand to SEQ ID NO: 630576
cuacucaaucagaaagucu

SEQ ID NO: 630578 - RNA, 19 nt, Artificial Sequence
  Description of Artificial Sequence: Synthetic oligonucleotide
  Sense strand starting at position 3314 of SEQ ID NO: 585320
uguguaagacuccacuaaa

SEQ ID NO: 630579 - RNA, 19 nt, Artificial Sequence
  Description of Artificial Sequence: Synthetic oligonucleotide
  Antisense strand to SEQ ID NO: 630578
uuuaguggagucuuacaca

SEQ ID NO: 630580 - RNA, 19 nt, Artificial Sequence
  Description of Artificial Sequence: Synthetic oligonucleotide
  Sense strand starting at position 3342 of SEQ ID NO: 585320
ugguuuauagaccaguuua

SEQ ID NO: 630581 - RNA, 19 nt, Artificial Sequence
  Description of Artificial Sequence: Synthetic oligonucleotide
  Antisense strand to SEQ ID NO: 630580
uaaacuggucuauaaacca

SEQ ID NO: 630582 - RNA, 19 nt, Artificial Sequence
  Description of Artificial Sequence: Synthetic oligonucleotide
  Sense strand starting at position 3416 of SEQ ID NO: 585320
aggacuugucaaugacagu

SEQ ID NO: 630583 - RNA, 19 nt, Artificial Sequence
  Description of Artificial Sequence: Synthetic oligonucleotide
  Antisense strand to SEQ ID NO: 630582
acugucauugacaaguccu

SEQ ID NO: 630584 - RNA, 19 nt, Artificial Sequence
  Description of Artificial Sequence: Synthetic oligonucleotide
  Sense strand starting at position 3431 of SEQ ID NO: 585320
caguaugaauuguuuggaa

SEQ ID NO: 630585 - RNA, 19 nt, Artificial Sequence
  Description of Artificial Sequence: Synthetic oligonucleotide
  Antisense strand to SEQ ID NO: 630584
uuccaaacaauucauacug

SEQ ID NO: 630586 - RNA, 19 nt, Artificial Sequence
  Description of Artificial Sequence: Synthetic oligonucleotide
  Sense strand starting at position 3433 of SEQ ID NO: 585320
guaugaauuguuuggaacu

SEQ ID NO: 630587 - RNA, 19 nt, Artificial Sequence
  Description of Artificial Sequence: Synthetic oligonucleotide
  Antisense strand to SEQ ID NO: 630586
aguuccaaacaauucauac

SEQ ID NO: 630588 - RNA, 19 nt, Artificial Sequence
  Description of Artificial Sequence: Synthetic oligonucleotide
  Sense strand starting at position 3465 of SEQ ID NO: 585320
uuggguuuagggugaguga

SEQ ID NO: 630589 - RNA, 19 nt, Artificial Sequence
  Description of Artificial Sequence: Synthetic oligonucleotide
  Antisense strand to SEQ ID NO: 630588
ucacucacccuaaacccaa

SEQ ID NO: 630590 - RNA, 19 nt, Artificial Sequence
  Description of Artificial Sequence: Synthetic oligonucleotide
  Sense strand starting at position 3780 of SEQ ID NO: 585320
uccagucuuggucagcuau

SEQ ID NO: 630591 - RNA, 19 nt, Artificial Sequence
  Description of Artificial Sequence: Synthetic oligonucleotide
  Antisense strand to SEQ ID NO: 630590
auagcugaccaagacugga

SEQ ID NO: 630592 - RNA, 19 nt, Artificial Sequence
  Description of Artificial Sequence: Synthetic oligonucleotide
  Sense strand starting at position 3787 of SEQ ID NO: 585320
uuggucagcuauucucaca

SEQ ID NO: 630593 - RNA, 19 nt, Artificial Sequence
  Description of Artificial Sequence: Synthetic oligonucleotide
  Antisense strand to SEQ ID NO: 630592
ugugagaauagcugaccaa

SEQ ID NO: 630594 - RNA, 19 nt, Artificial Sequence
  Description of Artificial Sequence: Synthetic oligonucleotide
  Sense strand starting at position 3828 of SEQ ID NO: 585320
cacccaguccuuuaguguu

SEQ ID NO: 630595 - RNA, 19 nt, Artificial Sequence
  Description of Artificial Sequence: Synthetic oligonucleotide
  Antisense strand to SEQ ID NO: 630594
aacacuaaaggacugggug

SEQ ID NO: 630596 - RNA, 19 nt, Artificial Sequence
  Description of Artificial Sequence: Synthetic oligonucleotide
  Sense strand starting at position 3872 of SEQ ID NO: 585320
gcacauauuccaugugauu

SEQ ID NO: 630597 - RNA, 19 nt, Artificial Sequence
  Description of Artificial Sequence: Synthetic oligonucleotide
  Antisense strand to SEQ ID NO: 630596
aaucacauggaauaugugc

SEQ ID NO: 630598 - RNA, 19 nt, Artificial Sequence
  Description of Artificial Sequence: Synthetic oligonucleotide
  Sense strand starting at position 3894 of SEQ ID NO: 585320
gaugaugucccuugcccaa

SEQ ID NO: 630599 - RNA, 19 nt, Artificial Sequence
  Description of Artificial Sequence: Synthetic oligonucleotide
  Antisense strand to SEQ ID NO: 630598
uugggcaagggacaucauc

SEQ ID NO: 630600 - RNA, 19 nt, Artificial Sequence
  Description of Artificial Sequence: Synthetic oligonucleotide
  Sense strand starting at position 3896 of SEQ ID NO: 585320
ugaugucccuugcccaaau

SEQ ID NO: 630601 - RNA, 19 nt, Artificial Sequence
  Description of Artificial Sequence: Synthetic oligonucleotide
  Antisense strand to SEQ ID NO: 630600
auuugggcaagggacauca

SEQ ID NO: 630602 - RNA, 19 nt, Artificial Sequence
  Description of Artificial Sequence: Synthetic oligonucleotide
  Sense strand starting at position 77 of SEQ ID NO: 585321
cugacaugauacucugauu

SEQ ID NO: 630603 - RNA, 19 nt, Artificial Sequence
  Description of Artificial Sequence: Synthetic oligonucleotide
  Antisense strand to SEQ ID NO: 630602
aaucagaguaucaugucag

SEQ ID NO: 630604 - RNA, 19 nt, Artificial Sequence
  Description of Artificial Sequence: Synthetic oligonucleotide
  Sense strand starting at position 176 of SEQ ID NO: 585321
gagagaaucucaguccaau

SEQ ID NO: 630605 - RNA, 19 nt, Artificial Sequence
  Description of Artificial Sequence: Synthetic oligonucleotide
  Antisense strand to SEQ ID NO: 630604
auuggacugagauucucuc

SEQ ID NO: 630606 - RNA, 19 nt, Artificial Sequence
  Description of Artificial Sequence: Synthetic oligonucleotide
  Sense strand starting at position 216 of SEQ ID NO: 585321
gaguaacagucuguacuga

SEQ ID NO: 630607 - RNA, 19 nt, Artificial Sequence
  Description of Artificial Sequence: Synthetic oligonucleotide
  Antisense strand to SEQ ID NO: 630606
ucaguacagacuguuacuc

SEQ ID NO: 630608 - RNA, 19 nt, Artificial Sequence
  Description of Artificial Sequence: Synthetic oligonucleotide
  Sense strand starting at position 217 of SEQ ID NO: 585321
aguaacagucuguacugau

SEQ ID NO: 630609 - RNA, 19 nt, Artificial Sequence
  Description of Artificial Sequence: Synthetic oligonucleotide
  Antisense strand to SEQ ID NO: 630608
aucaguacagacuguuacu

SEQ ID NO: 630610 - RNA, 19 nt, Artificial Sequence
  Description of Artificial Sequence: Synthetic oligonucleotide
  Sense strand starting at position 308 of SEQ ID NO: 585321
guggcuggcuuucuuauuu

SEQ ID NO: 630611 - RNA, 19 nt, Artificial Sequence
  Description of Artificial Sequence: Synthetic oligonucleotide
  Antisense strand to SEQ ID NO: 630610
aaauaagaaagccagccac

SEQ ID NO: 630612 - RNA, 19 nt, Artificial Sequence
  Description of Artificial Sequence: Synthetic oligonucleotide
  Sense strand starting at position 338 of SEQ ID NO: 585321
uguacaauuguacagaauu

SEQ ID NO: 630613 - RNA, 19 nt, Artificial Sequence
  Description of Artificial Sequence: Synthetic oligonucleotide
  Antisense strand to SEQ ID NO: 630612
aauucuguacaauuguaca

SEQ ID NO: 630614 - RNA, 19 nt, Artificial Sequence
  Description of Artificial Sequence: Synthetic oligonucleotide
  Sense strand starting at position 501 of SEQ ID NO: 585321
caaggcaaacuaugguauu

SEQ ID NO: 630615 - RNA, 19 nt, Artificial Sequence
  Description of Artificial Sequence: Synthetic oligonucleotide
  Antisense strand to SEQ ID NO: 630614
aauaccauaguuugccuug

SEQ ID NO: 630616 - RNA, 19 nt, Artificial Sequence
  Description of Artificial Sequence: Synthetic oligonucleotide
  Sense strand starting at position 721 of SEQ ID NO: 585321
gccucaauaggugaucauc

SEQ ID NO: 630617 - RNA, 19 nt, Artificial Sequence
  Description of Artificial Sequence: Synthetic oligonucleotide
  Antisense strand to SEQ ID NO: 630616
gaugaucaccuauugaggc

SEQ ID NO: 630618 - RNA, 19 nt, Artificial Sequence
  Description of Artificial Sequence: Synthetic oligonucleotide
  Sense strand starting at position 723 of SEQ ID NO: 585321
cucaauaggugaucaucua

SEQ ID NO: 630619 - RNA, 19 nt, Artificial Sequence
  Description of Artificial Sequence: Synthetic oligonucleotide
  Antisense strand to SEQ ID NO: 630618
uagaugaucaccuauugag

SEQ ID NO: 630620 - RNA, 19 nt, Artificial Sequence
  Description of Artificial Sequence: Synthetic oligonucleotide
  Sense strand starting at position 784 of SEQ ID NO: 585321
agccuaggaguguauucua

SEQ ID NO: 630621 - RNA, 19 nt, Artificial Sequence
  Description of Artificial Sequence: Synthetic oligonucleotide
  Antisense strand to SEQ ID NO: 630620
uagaauacacuccuaggcu

SEQ ID NO: 630622 - RNA, 19 nt, Artificial Sequence
  Description of Artificial Sequence: Synthetic oligonucleotide
  Sense strand starting at position 787 of SEQ ID NO: 585321
cuaggaguguauucuaaug

SEQ ID NO: 630623 - RNA, 19 nt, Artificial Sequence
  Description of Artificial Sequence: Synthetic oligonucleotide
  Antisense strand to SEQ ID NO: 630622
cauuagaauacacuccuag

SEQ ID NO: 630624 - RNA, 19 nt, Artificial Sequence
  Description of Artificial Sequence: Synthetic oligonucleotide
  Sense strand starting at position 818 of SEQ ID NO: 585321
ggauguaaauaaucauucu

SEQ ID NO: 630625 - RNA, 19 nt, Artificial Sequence
  Description of Artificial Sequence: Synthetic oligonucleotide
  Antisense strand to SEQ ID NO: 630624
agaaugauuauuuacaucc

SEQ ID NO: 630626 - RNA, 19 nt, Artificial Sequence
  Description of Artificial Sequence: Synthetic oligonucleotide
  Sense strand starting at position 952 of SEQ ID NO: 585321
cuuguuuagaagcagaguu

SEQ ID NO: 630627 - RNA, 19 nt, Artificial Sequence
  Description of Artificial Sequence: Synthetic oligonucleotide
  Antisense strand to SEQ ID NO: 630626
aacucugcuucuaaacaag

SEQ ID NO: 630628 - RNA, 19 nt, Artificial Sequence
  Description of Artificial Sequence: Synthetic oligonucleotide
  Sense strand starting at position 1370 of SEQ ID NO: 585321
augagugugcaguaaagag

SEQ ID NO: 630629 - RNA, 19 nt, Artificial Sequence
  Description of Artificial Sequence: Synthetic oligonucleotide
  Antisense strand to SEQ ID NO: 630628
cucuuuacugcacacucau

SEQ ID NO: 630630 - RNA, 19 nt, Artificial Sequence
  Description of Artificial Sequence: Synthetic oligonucleotide
  Sense strand starting at position 2172 of SEQ ID NO: 585321
uacagaagccuugauggua

SEQ ID NO: 630631 - RNA, 19 nt, Artificial Sequence
  Description of Artificial Sequence: Synthetic oligonucleotide
  Antisense strand to SEQ ID NO: 630630
uaccaucaaggcuucugua

SEQ ID NO: 630632 - RNA, 19 nt, Artificial Sequence
  Description of Artificial Sequence: Synthetic oligonucleotide
  Sense strand starting at position 2192 of SEQ ID NO: 585321
cagacuuaggcuugggaga

SEQ ID NO: 630633 - RNA, 19 nt, Artificial Sequence
  Description of Artificial Sequence: Synthetic oligonucleotide
  Antisense strand to SEQ ID NO: 630632
ucucccaagccuaagucug

SEQ ID NO: 630634 - RNA, 19 nt, Artificial Sequence
  Description of Artificial Sequence: Synthetic oligonucleotide
  Sense strand starting at position 2230 of SEQ ID NO: 585321
guggaaacagcuuaugguu

SEQ ID NO: 630635 - RNA, 19 nt, Artificial Sequence
  Description of Artificial Sequence: Synthetic oligonucleotide
  Antisense strand to SEQ ID NO: 630634
aaccauaagcuguuuccac

SEQ ID NO: 630636 - RNA, 19 nt, Artificial Sequence
  Description of Artificial Sequence: Synthetic oligonucleotide
  Sense strand starting at position 2283 of SEQ ID NO: 585321
cagggccuuugagucauaa

SEQ ID NO: 630637 - RNA, 19 nt, Artificial Sequence
  Description of Artificial Sequence: Synthetic oligonucleotide
  Antisense strand to SEQ ID NO: 630636
uuaugacucaaaggcccug

SEQ ID NO: 630638 - RNA, 19 nt, Artificial Sequence
  Description of Artificial Sequence: Synthetic oligonucleotide
  Sense strand starting at position 2285 of SEQ ID NO: 585321
gggccuuugagucauaagu

SEQ ID NO: 630639 - RNA, 19 nt, Artificial Sequence
  Description of Artificial Sequence: Synthetic oligonucleotide
  Antisense strand to SEQ ID NO: 630638
acuuaugacucaaaggccc

SEQ ID NO: 630640 - RNA, 19 nt, Artificial Sequence
  Description of Artificial Sequence: Synthetic oligonucleotide
  Sense strand starting at position 2679 of SEQ ID NO: 585321
ugccuaagagauugguaua

SEQ ID NO: 630641 - RNA, 19 nt, Artificial Sequence
  Description of Artificial Sequence: Synthetic oligonucleotide
  Antisense strand to SEQ ID NO: 630640
uauaccaaucucuuaggca

SEQ ID NO: 630642 - RNA, 19 nt, Artificial Sequence
  Description of Artificial Sequence: Synthetic oligonucleotide
  Sense strand starting at position 2680 of SEQ ID NO: 585321
gccuaagagauugguauag

SEQ ID NO: 630643 - RNA, 19 nt, Artificial Sequence
  Description of Artificial Sequence: Synthetic oligonucleotide
  Antisense strand to SEQ ID NO: 630642
cuauaccaaucucuuaggc

SEQ ID NO: 630644 - RNA, 19 nt, Artificial Sequence
  Description of Artificial Sequence: Synthetic oligonucleotide
  Sense strand starting at position 2868 of SEQ ID NO: 585321
cuaagagugucuuuaauac

SEQ ID NO: 630645 - RNA, 19 nt, Artificial Sequence
  Description of Artificial Sequence: Synthetic oligonucleotide
  Antisense strand to SEQ ID NO: 630644
guauuaaagacacucuuag

SEQ ID NO: 630646 - RNA, 19 nt, Artificial Sequence
  Description of Artificial Sequence: Synthetic oligonucleotide
  Sense strand starting at position 3008 of SEQ ID NO: 585321
ucaacauaggauugguuua

SEQ ID NO: 630647 - RNA, 19 nt, Artificial Sequence
  Description of Artificial Sequence: Synthetic oligonucleotide
  Antisense strand to SEQ ID NO: 630646
uaaaccaauccuauguuga

SEQ ID NO: 630648 - RNA, 19 nt, Artificial Sequence
  Description of Artificial Sequence: Synthetic oligonucleotide
  Sense strand starting at position 3021 of SEQ ID NO: 585321
gguuuacuucuugggugaa

SEQ ID NO: 630649 - RNA, 19 nt, Artificial Sequence
  Description of Artificial Sequence: Synthetic oligonucleotide
  Antisense strand to SEQ ID NO: 630648
uucacccaagaaguaaacc

SEQ ID NO: 630650 - RNA, 19 nt, Artificial Sequence
  Description of Artificial Sequence: Synthetic oligonucleotide
  Sense strand starting at position 3023 of SEQ ID NO: 585321
uuuacuucuugggugaaug

SEQ ID NO: 630651 - RNA, 19 nt, Artificial Sequence
  Description of Artificial Sequence: Synthetic oligonucleotide
  Antisense strand to SEQ ID NO: 630650
cauucacccaagaaguaaa

SEQ ID NO: 630652 - RNA, 19 nt, Artificial Sequence
  Description of Artificial Sequence: Synthetic oligonucleotide
  Sense strand starting at position 3025 of SEQ ID NO: 585321
uacuucuugggugaaugua

SEQ ID NO: 630653 - RNA, 19 nt, Artificial Sequence
  Description of Artificial Sequence: Synthetic oligonucleotide
  Antisense strand to SEQ ID NO: 630652
uacauucacccaagaagua

SEQ ID NO: 630654 - RNA, 19 nt, Artificial Sequence
  Description of Artificial Sequence: Synthetic oligonucleotide
  Sense strand starting at position 3177 of SEQ ID NO: 585321
gaggcaugcaugugauaga

SEQ ID NO: 630655 - RNA, 19 nt, Artificial Sequence
  Description of Artificial Sequence: Synthetic oligonucleotide
  Antisense strand to SEQ ID NO: 630654
ucuaucacaugcaugccuc

SEQ ID NO: 630656 - RNA, 19 nt, Artificial Sequence
  Description of Artificial Sequence: Synthetic oligonucleotide
  Sense strand starting at position 3184 of SEQ ID NO: 585321
gcaugugauagaggaagua

SEQ ID NO: 630657 - RNA, 19 nt, Artificial Sequence
  Description of Artificial Sequence: Synthetic oligonucleotide
  Antisense strand to SEQ ID NO: 630656
uacuuccucuaucacaugc

SEQ ID NO: 630658 - RNA, 19 nt, Artificial Sequence
  Description of Artificial Sequence: Synthetic oligonucleotide
  Sense strand starting at position 3225 of SEQ ID NO: 585321
ugccaagggcuuuacauau

SEQ ID NO: 630659 - RNA, 19 nt, Artificial Sequence
  Description of Artificial Sequence: Synthetic oligonucleotide
  Antisense strand to SEQ ID NO: 630658
auauguaaagcccuuggca

SEQ ID NO: 630660 - RNA, 19 nt, Artificial Sequence
  Description of Artificial Sequence: Synthetic oligonucleotide
  Sense strand starting at position 3435 of SEQ ID NO: 585321
gcucaagaugcuuauauuc

SEQ ID NO: 630661 - RNA, 19 nt, Artificial Sequence
  Description of Artificial Sequence: Synthetic oligonucleotide
  Antisense strand to SEQ ID NO: 630660
gaauauaagcaucuugagc

SEQ ID NO: 630662 - RNA, 19 nt, Artificial Sequence
  Description of Artificial Sequence: Synthetic oligonucleotide
  Sense strand starting at position 3551 of SEQ ID NO: 585321
gacagauuaguagguuaag

SEQ ID NO: 630663 - RNA, 19 nt, Artificial Sequence
  Description of Artificial Sequence: Synthetic oligonucleotide
  Antisense strand to SEQ ID NO: 630662
cuuaaccuacuaaucuguc

SEQ ID NO: 630664 - RNA, 19 nt, Artificial Sequence
  Description of Artificial Sequence: Synthetic oligonucleotide
  Sense strand starting at position 3610 of SEQ ID NO: 585321
ugggucuugagguacaaau

SEQ ID NO: 630665 - RNA, 19 nt, Artificial Sequence
  Description of Artificial Sequence: Synthetic oligonucleotide
  Antisense strand to SEQ ID NO: 630664
auuuguaccucaagaccca

SEQ ID NO: 630666 - RNA, 19 nt, Artificial Sequence
  Description of Artificial Sequence: Synthetic oligonucleotide
  Sense strand starting at position 3684 of SEQ ID NO: 585321
gaucaugucugucuaugga

SEQ ID NO: 630667 - RNA, 19 nt, Artificial Sequence
  Description of Artificial Sequence: Synthetic oligonucleotide
  Antisense strand to SEQ ID NO: 630666
uccauagacagacaugauc

SEQ ID NO: 630668 - RNA, 19 nt, Artificial Sequence
  Description of Artificial Sequence: Synthetic oligonucleotide
  Sense strand starting at position 3732 of SEQ ID NO: 585321
gugucuaaggaggaaaugu

SEQ ID NO: 630669 - RNA, 19 nt, Artificial Sequence
  Description of Artificial Sequence: Synthetic oligonucleotide
  Antisense strand to SEQ ID NO: 630668
acauuuccuccuuagacac

SEQ ID NO: 630670 - RNA, 19 nt, Artificial Sequence
  Description of Artificial Sequence: Synthetic oligonucleotide
  Sense strand starting at position 3741 of SEQ ID NO: 585321
gaggaaauguggccuacuu

SEQ ID NO: 630671 - RNA, 19 nt, Artificial Sequence
  Description of Artificial Sequence: Synthetic oligonucleotide
  Antisense strand to SEQ ID NO: 630670
aaguaggccacauuuccuc

SEQ ID NO: 630672 - RNA, 19 nt, Artificial Sequence
  Description of Artificial Sequence: Synthetic oligonucleotide
  Sense strand starting at position 3743 of SEQ ID NO: 585321
ggaaauguggccuacuuuc

SEQ ID NO: 630673 - RNA, 19 nt, Artificial Sequence
  Description of Artificial Sequence: Synthetic oligonucleotide
  Antisense strand to SEQ ID NO: 630672
gaaaguaggccacauuucc

SEQ ID NO: 630674 - RNA, 19 nt, Artificial Sequence
  Description of Artificial Sequence: Synthetic oligonucleotide
  Sense strand starting at position 3812 of SEQ ID NO: 585321
gcagaaacuugucuuugga

SEQ ID NO: 630675 - RNA, 19 nt, Artificial Sequence
  Description of Artificial Sequence: Synthetic oligonucleotide
  Antisense strand to SEQ ID NO: 630674
uccaaagacaaguuucugc

SEQ ID NO: 630676 - RNA, 19 nt, Artificial Sequence
  Description of Artificial Sequence: Synthetic oligonucleotide
  Sense strand starting at position 3814 of SEQ ID NO: 585321
agaaacuugucuuuggaca

SEQ ID NO: 630677 - RNA, 19 nt, Artificial Sequence
  Description of Artificial Sequence: Synthetic oligonucleotide
  Antisense strand to SEQ ID NO: 630676
uguccaaagacaaguuucu

SEQ ID NO: 630678 - RNA, 19 nt, Artificial Sequence
  Description of Artificial Sequence: Synthetic oligonucleotide
  Sense strand starting at position 3815 of SEQ ID NO: 585321
gaaacuugucuuuggacau

SEQ ID NO: 630679 - RNA, 19 nt, Artificial Sequence
  Description of Artificial Sequence: Synthetic oligonucleotide
  Antisense strand to SEQ ID NO: 630678
auguccaaagacaaguuuc

SEQ ID NO: 630680 - RNA, 19 nt, Artificial Sequence
  Description of Artificial Sequence: Synthetic oligonucleotide
  Sense strand starting at position 3869 of SEQ ID NO: 585321
gggugccauacuuaguuua

SEQ ID NO: 630681 - RNA, 19 nt, Artificial Sequence
  Description of Artificial Sequence: Synthetic oligonucleotide
  Antisense strand to SEQ ID NO: 630680
uaaacuaaguauggcaccc

SEQ ID NO: 630682 - RNA, 19 nt, Artificial Sequence
  Description of Artificial Sequence: Synthetic oligonucleotide
  Sense strand starting at position 8 of SEQ ID NO: 585322
uggacauagucccuuccaa

SEQ ID NO: 630683 - RNA, 19 nt, Artificial Sequence
  Description of Artificial Sequence: Synthetic oligonucleotide
  Antisense strand to SEQ ID NO: 630682
uuggaagggacuaugucca

SEQ ID NO: 630684 - RNA, 19 nt, Artificial Sequence
  Description of Artificial Sequence: Synthetic oligonucleotide
  Sense strand starting at position 27 of SEQ ID NO: 585322
guucaagauggccagagua

SEQ ID NO: 630685 - RNA, 19 nt, Artificial Sequence
  Description of Artificial Sequence: Synthetic oligonucleotide
  Antisense strand to SEQ ID NO: 630684
uacucuggccaucuugaac

SEQ ID NO: 630686 - RNA, 19 nt, Artificial Sequence
  Description of Artificial Sequence: Synthetic oligonucleotide
  Sense strand starting at position 58 of SEQ ID NO: 585322
uuggaauagcugcaaguuu

SEQ ID NO: 630687 - RNA, 19 nt, Artificial Sequence
  Description of Artificial Sequence: Synthetic oligonucleotide
  Antisense strand to SEQ ID NO: 630686
aaacuugcagcuauuccaa

SEQ ID NO: 630688 - RNA, 19 nt, Artificial Sequence
  Description of Artificial Sequence: Synthetic oligonucleotide
  Sense strand starting at position 398 of SEQ ID NO: 585322
aucauuuguuaggaccuua

SEQ ID NO: 630689 - RNA, 19 nt, Artificial Sequence
  Description of Artificial Sequence: Synthetic oligonucleotide
  Antisense strand to SEQ ID NO: 630688
uaagguccuaacaaaugau

SEQ ID NO: 630690 - RNA, 19 nt, Artificial Sequence
  Description of Artificial Sequence: Synthetic oligonucleotide
  Sense strand starting at position 421 of SEQ ID NO: 585322
gugaguucagacugguuua

SEQ ID NO: 630691 - RNA, 19 nt, Artificial Sequence
  Description of Artificial Sequence: Synthetic oligonucleotide
  Antisense strand to SEQ ID NO: 630690
uaaaccagucugaacucac

SEQ ID NO: 630692 - RNA, 19 nt, Artificial Sequence
  Description of Artificial Sequence: Synthetic oligonucleotide
  Sense strand starting at position 432 of SEQ ID NO: 585322
cugguuuaaccggaguacu

SEQ ID NO: 630693 - RNA, 19 nt, Artificial Sequence
  Description of Artificial Sequence: Synthetic oligonucleotide
  Antisense strand to SEQ ID NO: 630692
aguacuccgguuaaaccag

SEQ ID NO: 630694 - RNA, 19 nt, Artificial Sequence
  Description of Artificial Sequence: Synthetic oligonucleotide
  Sense strand starting at position 435 of SEQ ID NO: 585322
guuuaaccggaguacuauc

SEQ ID NO: 630695 - RNA, 19 nt, Artificial Sequence
  Description of Artificial Sequence: Synthetic oligonucleotide
  Antisense strand to SEQ ID NO: 630694
gauaguacuccgguuaaac

SEQ ID NO: 630696 - RNA, 19 nt, Artificial Sequence
  Description of Artificial Sequence: Synthetic oligonucleotide
  Sense strand starting at position 443 of SEQ ID NO: 585322
ggaguacuaucccuuccca

SEQ ID NO: 630697 - RNA, 19 nt, Artificial Sequence
  Description of Artificial Sequence: Synthetic oligonucleotide
  Antisense strand to SEQ ID NO: 630696
ugggaagggauaguacucc

SEQ ID NO: 630698 - RNA, 19 nt, Artificial Sequence
  Description of Artificial Sequence: Synthetic oligonucleotide
  Sense strand starting at position 734 of SEQ ID NO: 585322
agaucaaagugacuaguuu

SEQ ID NO: 630699 - RNA, 19 nt, Artificial Sequence
  Description of Artificial Sequence: Synthetic oligonucleotide
  Antisense strand to SEQ ID NO: 630698
aaacuagucacuuugaucu

SEQ ID NO: 630700 - RNA, 19 nt, Artificial Sequence
  Description of Artificial Sequence: Synthetic oligonucleotide
  Sense strand starting at position 738 of SEQ ID NO: 585322
caaagugacuaguuuaaga

SEQ ID NO: 630701 - RNA, 19 nt, Artificial Sequence
  Description of Artificial Sequence: Synthetic oligonucleotide
  Antisense strand to SEQ ID NO: 630700
ucuuaaacuagucacuuug

SEQ ID NO: 630702 - RNA, 19 nt, Artificial Sequence
  Description of Artificial Sequence: Synthetic oligonucleotide
  Sense strand starting at position 850 of SEQ ID NO: 585322
ggaauaaccugggauccau

SEQ ID NO: 630703 - RNA, 19 nt, Artificial Sequence
  Description of Artificial Sequence: Synthetic oligonucleotide
  Antisense strand to SEQ ID NO: 630702
auggaucccagguuauucc

SEQ ID NO: 630704 - RNA, 19 nt, Artificial Sequence
  Description of Artificial Sequence: Synthetic oligonucleotide
  Sense strand starting at position 1218 of SEQ ID NO: 585322
caagaaagaucuggaagga

SEQ ID NO: 630705 - RNA, 19 nt, Artificial Sequence
  Description of Artificial Sequence: Synthetic oligonucleotide
  Antisense strand to SEQ ID NO: 630704
uccuuccagaucuuucuug

SEQ ID NO: 630706 - RNA, 19 nt, Artificial Sequence
  Description of Artificial Sequence: Synthetic oligonucleotide
  Sense strand starting at position 1237 of SEQ ID NO: 585322
gggaguaucgggugcugga

SEQ ID NO: 630707 - RNA, 19 nt, Artificial Sequence
  Description of Artificial Sequence: Synthetic oligonucleotide
  Antisense strand to SEQ ID NO: 630706
uccagcacccgauacuccc

SEQ ID NO: 630708 - RNA, 19 nt, Artificial Sequence
  Description of Artificial Sequence: Synthetic oligonucleotide
  Sense strand starting at position 1324 of SEQ ID NO: 585322
caacgcguccgauaagaga

SEQ ID NO: 630709 - RNA, 19 nt, Artificial Sequence
  Description of Artificial Sequence: Synthetic oligonucleotide
  Antisense strand to SEQ ID NO: 630708
ucucuuaucggacgcguug

SEQ ID NO: 630710 - RNA, 19 nt, Artificial Sequence
  Description of Artificial Sequence: Synthetic oligonucleotide
  Sense strand starting at position 1639 of SEQ ID NO: 585322
uccagagcguuauccacaa

SEQ ID NO: 630711 - RNA, 19 nt, Artificial Sequence
  Description of Artificial Sequence: Synthetic oligonucleotide
  Antisense strand to SEQ ID NO: 630710
uuguggauaacgcucugga

SEQ ID NO: 630712 - RNA, 19 nt, Artificial Sequence
  Description of Artificial Sequence: Synthetic oligonucleotide
  Sense strand starting at position 1643 of SEQ ID NO: 585322
gagcguuauccacaagcca

SEQ ID NO: 630713 - RNA, 19 nt, Artificial Sequence
  Description of Artificial Sequence: Synthetic oligonucleotide
  Antisense strand to SEQ ID NO: 630712
uggcuuguggauaacgcuc

SEQ ID NO: 630714 - RNA, 19 nt, Artificial Sequence
  Description of Artificial Sequence: Synthetic oligonucleotide
  Sense strand starting at position 2043 of SEQ ID NO: 585322
acauuugcuugugaucaca

SEQ ID NO: 630715 - RNA, 19 nt, Artificial Sequence
  Description of Artificial Sequence: Synthetic oligonucleotide
  Antisense strand to SEQ ID NO: 630714
ugugaucacaagcaaaugu

SEQ ID NO: 630716 - RNA, 19 nt, Artificial Sequence
  Description of Artificial Sequence: Synthetic oligonucleotide
  Sense strand starting at position 2112 of SEQ ID NO: 585322
gagugcucauuuggcauaa

SEQ ID NO: 630717 - RNA, 19 nt, Artificial Sequence
  Description of Artificial Sequence: Synthetic oligonucleotide
  Antisense strand to SEQ ID NO: 630716
uuaugccaaaugagcacuc

SEQ ID NO: 630718 - RNA, 19 nt, Artificial Sequence
  Description of Artificial Sequence: Synthetic oligonucleotide
  Sense strand starting at position 2113 of SEQ ID NO: 585322
agugcucauuuggcauaaa

SEQ ID NO: 630719 - RNA, 19 nt, Artificial Sequence
  Description of Artificial Sequence: Synthetic oligonucleotide
  Antisense strand to SEQ ID NO: 630718
uuuaugccaaaugagcacu

SEQ ID NO: 630720 - RNA, 19 nt, Artificial Sequence
  Description of Artificial Sequence: Synthetic oligonucleotide
  Sense strand starting at position 2114 of SEQ ID NO: 585322
gugcucauuuggcauaaac

SEQ ID NO: 630721 - RNA, 19 nt, Artificial Sequence
  Description of Artificial Sequence: Synthetic oligonucleotide
  Antisense strand to SEQ ID NO: 630720
guuuaugccaaaugagcac

SEQ ID NO: 630722 - RNA, 19 nt, Artificial Sequence
  Description of Artificial Sequence: Synthetic oligonucleotide
  Sense strand starting at position 2360 of SEQ ID NO: 585322
cgacucucgcaggaguaga

SEQ ID NO: 630723 - RNA, 19 nt, Artificial Sequence
  Description of Artificial Sequence: Synthetic oligonucleotide
  Antisense strand to SEQ ID NO: 630722
ucuacuccugcgagagucg

SEQ ID NO: 630724 - RNA, 19 nt, Artificial Sequence
  Description of Artificial Sequence: Synthetic oligonucleotide
  Sense strand starting at position 2608 of SEQ ID NO: 585322
cucugaccuguccgagaga

SEQ ID NO: 630725 - RNA, 19 nt, Artificial Sequence
  Description of Artificial Sequence: Synthetic oligonucleotide
  Antisense strand to SEQ ID NO: 630724
ucucucggacaggucagag

SEQ ID NO: 630726 - RNA, 19 nt, Artificial Sequence
  Description of Artificial Sequence: Synthetic oligonucleotide
  Sense strand starting at position 3194 of SEQ ID NO: 585322
ugcucugugcccuguagau

SEQ ID NO: 630727 - RNA, 19 nt, Artificial Sequence
  Description of Artificial Sequence: Synthetic oligonucleotide
  Antisense strand to SEQ ID NO: 630726
aucuacagggcacagagca

SEQ ID NO: 630728 - RNA, 19 nt, Artificial Sequence
  Description of Artificial Sequence: Synthetic oligonucleotide
  Sense strand starting at position 3243 of SEQ ID NO: 585322
ugggaugcuugggaagagu

SEQ ID NO: 630729 - RNA, 19 nt, Artificial Sequence
  Description of Artificial Sequence: Synthetic oligonucleotide
  Antisense strand to SEQ ID NO: 630728
acucuucccaagcauccca

SEQ ID NO: 630730 - RNA, 19 nt, Artificial Sequence
  Description of Artificial Sequence: Synthetic oligonucleotide
  Sense strand starting at position 3312 of SEQ ID NO: 585322
agucuacgauucguuaaca

SEQ ID NO: 630731 - RNA, 19 nt, Artificial Sequence
  Description of Artificial Sequence: Synthetic oligonucleotide
  Antisense strand to SEQ ID NO: 630730
uguuaacgaaucguagacu

SEQ ID NO: 630732 - RNA, 19 nt, Artificial Sequence
  Description of Artificial Sequence: Synthetic oligonucleotide
  Sense strand starting at position 3313 of SEQ ID NO: 585322
gucuacgauucguuaacaa

SEQ ID NO: 630733 - RNA, 19 nt, Artificial Sequence
  Description of Artificial Sequence: Synthetic oligonucleotide
  Antisense strand to SEQ ID NO: 630732
uuguuaacgaaucguagac

SEQ ID NO: 630734 - RNA, 19 nt, Artificial Sequence
  Description of Artificial Sequence: Synthetic oligonucleotide
  Sense strand starting at position 3339 of SEQ ID NO: 585322
ucauguguugaauaccaaa

SEQ ID NO: 630735 - RNA, 19 nt, Artificial Sequence
  Description of Artificial Sequence: Synthetic oligonucleotide
  Antisense strand to SEQ ID NO: 630734
uuugguauucaacacauga

SEQ ID NO: 630736 - RNA, 19 nt, Artificial Sequence
  Description of Artificial Sequence: Synthetic oligonucleotide
  Sense strand starting at position 3342 of SEQ ID NO: 585322
uguguugaauaccaaagaa

SEQ ID NO: 630737 - RNA, 19 nt, Artificial Sequence
  Description of Artificial Sequence: Synthetic oligonucleotide
  Antisense strand to SEQ ID NO: 630736
uucuuugguauucaacaca

SEQ ID NO: 630738 - RNA, 19 nt, Artificial Sequence
  Description of Artificial Sequence: Synthetic oligonucleotide
  Sense strand starting at position 3420 of SEQ ID NO: 585322
caccaucccgauuggauau

SEQ ID NO: 630739 - RNA, 19 nt, Artificial Sequence
  Description of Artificial Sequence: Synthetic oligonucleotide
  Antisense strand to SEQ ID NO: 630738
auauccaaucgggauggug

SEQ ID NO: 630740 - RNA, 19 nt, Artificial Sequence
  Description of Artificial Sequence: Synthetic oligonucleotide
  Sense strand starting at position 3468 of SEQ ID NO: 585322
aagccuauggcugggagaa

SEQ ID NO: 630741 - RNA, 19 nt, Artificial Sequence
  Description of Artificial Sequence: Synthetic oligonucleotide
  Antisense strand to SEQ ID NO: 630740
uucucccagccauaggcuu

SEQ ID NO: 630742 - RNA, 19 nt, Artificial Sequence
  Description of Artificial Sequence: Synthetic oligonucleotide
  Sense strand starting at position 3499 of SEQ ID NO: 585322
gggcguugggugcucuauu

SEQ ID NO: 630743 - RNA, 19 nt, Artificial Sequence
  Description of Artificial Sequence: Synthetic oligonucleotide
  Antisense strand to SEQ ID NO: 630742
aauagagcacccaacgccc

SEQ ID NO: 630744 - RNA, 19 nt, Artificial Sequence
  Description of Artificial Sequence: Synthetic oligonucleotide
  Sense strand starting at position 3539 of SEQ ID NO: 585322
gugggagcgugaucccuua

SEQ ID NO: 630745 - RNA, 19 nt, Artificial Sequence
  Description of Artificial Sequence: Synthetic oligonucleotide
  Antisense strand to SEQ ID NO: 630744
uaagggaucacgcucccac

SEQ ID NO: 630746 - RNA, 19 nt, Artificial Sequence
  Description of Artificial Sequence: Synthetic oligonucleotide
  Sense strand starting at position 3573 of SEQ ID NO: 585322
cuaagcagagcucauuaaa

SEQ ID NO: 630747 - RNA, 19 nt, Artificial Sequence
  Description of Artificial Sequence: Synthetic oligonucleotide
  Antisense strand to SEQ ID NO: 630746
uuuaaugagcucugcuuag

SEQ ID NO: 630748 - RNA, 19 nt, Artificial Sequence
  Description of Artificial Sequence: Synthetic oligonucleotide
  Sense strand starting at position 3646 of SEQ ID NO: 585322
ggaugaaagucagugugca

SEQ ID NO: 630749 - RNA, 19 nt, Artificial Sequence
  Description of Artificial Sequence: Synthetic oligonucleotide
  Antisense strand to SEQ ID NO: 630748
ugcacacugacuuucaucc

SEQ ID NO: 630750 - RNA, 19 nt, Artificial Sequence
  Description of Artificial Sequence: Synthetic oligonucleotide
  Sense strand starting at position 3650 of SEQ ID NO: 585322
gaaagucagugugcacauu

SEQ ID NO: 630751 - RNA, 19 nt, Artificial Sequence
  Description of Artificial Sequence: Synthetic oligonucleotide
  Antisense strand to SEQ ID NO: 630750
aaugugcacacugacuuuc

SEQ ID NO: 630752 - RNA, 19 nt, Artificial Sequence
  Description of Artificial Sequence: Synthetic oligonucleotide
  Sense strand starting at position 3833 of SEQ ID NO: 585322
uggauccuuucugugucaa

SEQ ID NO: 630753 - RNA, 19 nt, Artificial Sequence
  Description of Artificial Sequence: Synthetic oligonucleotide
  Antisense strand to SEQ ID NO: 630752
uugacacagaaaggaucca

SEQ ID NO: 630754 - RNA, 19 nt, Artificial Sequence
  Description of Artificial Sequence: Synthetic oligonucleotide
  Sense strand starting at position 3834 of SEQ ID NO: 585322
ggauccuuucugugucaag

SEQ ID NO: 630755 - RNA, 19 nt, Artificial Sequence
  Description of Artificial Sequence: Synthetic oligonucleotide
  Antisense strand to SEQ ID NO: 630754
cuugacacagaaaggaucc

SEQ ID NO: 630756 - RNA, 19 nt, Artificial Sequence
  Description of Artificial Sequence: Synthetic oligonucleotide
  Sense strand starting at position 3835 of SEQ ID NO: 585322
gauccuuucugugucaaga

SEQ ID NO: 630757 - RNA, 19 nt, Artificial Sequence
  Description of Artificial Sequence: Synthetic oligonucleotide
  Antisense strand to SEQ ID NO: 630756
ucuugacacagaaaggauc

SEQ ID NO: 630758 - RNA, 19 nt, Artificial Sequence
  Description of Artificial Sequence: Synthetic oligonucleotide
  Sense strand starting at position 3896 of SEQ ID NO: 585322
auguuacaccagcauagaa

SEQ ID NO: 630759 - RNA, 19 nt, Artificial Sequence
  Description of Artificial Sequence: Synthetic oligonucleotide
  Antisense strand to SEQ ID NO: 630758
uucuaugcugguguaacau

SEQ ID NO: 630760 - RNA, 19 nt, Artificial Sequence
  Description of Artificial Sequence: Synthetic oligonucleotide
  Sense strand starting at position 3898 of SEQ ID NO: 585322
guuacaccagcauagaaau

SEQ ID NO: 630761 - RNA, 19 nt, Artificial Sequence
  Description of Artificial Sequence: Synthetic oligonucleotide
  Antisense strand to SEQ ID NO: 630760
auuucuaugcugguguaac

SEQ ID NO: 630762 - RNA, 19 nt, Artificial Sequence
  Description of Artificial Sequence: Synthetic oligonucleotide
  Sense strand starting at position 3 of SEQ ID NO: 585323
gucaguuccuaagaccagu

SEQ ID NO: 630763 - RNA, 19 nt, Artificial Sequence
  Description of Artificial Sequence: Synthetic oligonucleotide
  Antisense strand to SEQ ID NO: 630762
acuggucuuaggaacugac

SEQ ID NO: 630764 - RNA, 19 nt, Artificial Sequence
  Description of Artificial Sequence: Synthetic oligonucleotide
  Sense strand starting at position 58 of SEQ ID NO: 585323
ggaauaaccugggauccau

SEQ ID NO: 630765 - RNA, 19 nt, Artificial Sequence
  Description of Artificial Sequence: Synthetic oligonucleotide
  Antisense strand to SEQ ID NO: 630764
auggaucccagguuauucc

SEQ ID NO: 630766 - RNA, 19 nt, Artificial Sequence
  Description of Artificial Sequence: Synthetic oligonucleotide
  Sense strand starting at position 95 of SEQ ID NO: 585323
gcaauuaaauccggacaaa

SEQ ID NO: 630767 - RNA, 19 nt, Artificial Sequence
  Description of Artificial Sequence: Synthetic oligonucleotide
  Antisense strand to SEQ ID NO: 630766
uuuguccggauuuaauugc

SEQ ID NO: 630768 - RNA, 19 nt, Artificial Sequence
  Description of Artificial Sequence: Synthetic oligonucleotide
  Sense strand starting at position 338 of SEQ ID NO: 585323
aaucucagcucucgaggaa

SEQ ID NO: 630769 - RNA, 19 nt, Artificial Sequence
  Description of Artificial Sequence: Synthetic oligonucleotide
  Antisense strand to SEQ ID NO: 630768
uuccucgagagcugagauu

SEQ ID NO: 630770 - RNA, 19 nt, Artificial Sequence
  Description of Artificial Sequence: Synthetic oligonucleotide
  Sense strand starting at position 426 of SEQ ID NO: 585323
caagaaagaucuggaagga

SEQ ID NO: 630771 - RNA, 19 nt, Artificial Sequence
  Description of Artificial Sequence: Synthetic oligonucleotide
  Antisense strand to SEQ ID NO: 630770
uccuuccagaucuuucuug

SEQ ID NO: 630772 - RNA, 19 nt, Artificial Sequence
  Description of Artificial Sequence: Synthetic oligonucleotide
  Sense strand starting at position 445 of SEQ ID NO: 585323
gggaguaucgggugcugga

SEQ ID NO: 630773 - RNA, 19 nt, Artificial Sequence
  Description of Artificial Sequence: Synthetic oligonucleotide
  Antisense strand to SEQ ID NO: 630772
uccagcacccgauacuccc

SEQ ID NO: 630774 - RNA, 19 nt, Artificial Sequence
  Description of Artificial Sequence: Synthetic oligonucleotide
  Sense strand starting at position 532 of SEQ ID NO: 585323
caacgcguccgauaagaga

SEQ ID NO: 630775 - RNA, 19 nt, Artificial Sequence
  Description of Artificial Sequence: Synthetic oligonucleotide
  Antisense strand to SEQ ID NO: 630774
ucucuuaucggacgcguug

SEQ ID NO: 630776 - RNA, 19 nt, Artificial Sequence
  Description of Artificial Sequence: Synthetic oligonucleotide
  Sense strand starting at position 847 of SEQ ID NO: 585323
uccagagcguuauccacaa

SEQ ID NO: 630777 - RNA, 19 nt, Artificial Sequence
  Description of Artificial Sequence: Synthetic oligonucleotide
  Antisense strand to SEQ ID NO: 630776
uuguggauaacgcucugga

SEQ ID NO: 630778 - RNA, 19 nt, Artificial Sequence
  Description of Artificial Sequence: Synthetic oligonucleotide
  Sense strand starting at position 851 of SEQ ID NO: 585323
gagcguuauccacaagcca

SEQ ID NO: 630779 - RNA, 19 nt, Artificial Sequence
  Description of Artificial Sequence: Synthetic oligonucleotide
  Antisense strand to SEQ ID NO: 630778
uggcuuguggauaacgcuc

SEQ ID NO: 630780 - RNA, 19 nt, Artificial Sequence
  Description of Artificial Sequence: Synthetic oligonucleotide
  Sense strand starting at position 1251 of SEQ ID NO: 585323
acauuugcuugugaucaca

SEQ ID NO: 630781 - RNA, 19 nt, Artificial Sequence
  Description of Artificial Sequence: Synthetic oligonucleotide
  Antisense strand to SEQ ID NO: 630780
ugugaucacaagcaaaugu

SEQ ID NO: 630782 - RNA, 19 nt, Artificial Sequence
  Description of Artificial Sequence: Synthetic oligonucleotide
  Sense strand starting at position 1320 of SEQ ID NO: 585323
gagugcucauuuggcauaa

SEQ ID NO: 630783 - RNA, 19 nt, Artificial Sequence
  Description of Artificial Sequence: Synthetic oligonucleotide
  Antisense strand to SEQ ID NO: 630782
uuaugccaaaugagcacuc

SEQ ID NO: 630784 - RNA, 19 nt, Artificial Sequence
  Description of Artificial Sequence: Synthetic oligonucleotide
  Sense strand starting at position 1321 of SEQ ID NO: 585323
agugcucauuuggcauaaa

SEQ ID NO: 630785 - RNA, 19 nt, Artificial Sequence
  Description of Artificial Sequence: Synthetic oligonucleotide
  Antisense strand to SEQ ID NO: 630784
uuuaugccaaaugagcacu

SEQ ID NO: 630786 - RNA, 19 nt, Artificial Sequence
  Description of Artificial Sequence: Synthetic oligonucleotide
  Sense strand starting at position 1322 of SEQ ID NO: 585323
gugcucauuuggcauaaac

SEQ ID NO: 630787 - RNA, 19 nt, Artificial Sequence
  Description of Artificial Sequence: Synthetic oligonucleotide
  Antisense strand to SEQ ID NO: 630786
guuuaugccaaaugagcac

SEQ ID NO: 630788 - RNA, 19 nt, Artificial Sequence
  Description of Artificial Sequence: Synthetic oligonucleotide
  Sense strand starting at position 1568 of SEQ ID NO: 585323
cgacucucgcaggaguaga

SEQ ID NO: 630789 - RNA, 19 nt, Artificial Sequence
  Description of Artificial Sequence: Synthetic oligonucleotide
  Antisense strand to SEQ ID NO: 630788
ucuacuccugcgagagucg

SEQ ID NO: 630790 - RNA, 19 nt, Artificial Sequence
  Description of Artificial Sequence: Synthetic oligonucleotide
  Sense strand starting at position 1816 of SEQ ID NO: 585323
cucugaccuguccgagaga

SEQ ID NO: 630791 - RNA, 19 nt, Artificial Sequence
  Description of Artificial Sequence: Synthetic oligonucleotide
  Antisense strand to SEQ ID NO: 630790
ucucucggacaggucagag

SEQ ID NO: 630792 - RNA, 19 nt, Artificial Sequence
  Description of Artificial Sequence: Synthetic oligonucleotide
  Sense strand starting at position 2402 of SEQ ID NO: 585323
ugcucugugcccuguagau

SEQ ID NO: 630793 - RNA, 19 nt, Artificial Sequence
  Description of Artificial Sequence: Synthetic oligonucleotide
  Antisense strand to SEQ ID NO: 630792
aucuacagggcacagagca

SEQ ID NO: 630794 - RNA, 19 nt, Artificial Sequence
  Description of Artificial Sequence: Synthetic oligonucleotide
  Sense strand starting at position 2451 of SEQ ID NO: 585323
ugggaugcuugggaagagu

SEQ ID NO: 630795 - RNA, 19 nt, Artificial Sequence
  Description of Artificial Sequence: Synthetic oligonucleotide
  Antisense strand to SEQ ID NO: 630794
acucuucccaagcauccca

SEQ ID NO: 630796 - RNA, 19 nt, Artificial Sequence
  Description of Artificial Sequence: Synthetic oligonucleotide
  Sense strand starting at position 2520 of SEQ ID NO: 585323
agucuacgauucguuaaca

SEQ ID NO: 630797 - RNA, 19 nt, Artificial Sequence
  Description of Artificial Sequence: Synthetic oligonucleotide
  Antisense strand to SEQ ID NO: 630796
uguuaacgaaucguagacu

SEQ ID NO: 630798 - RNA, 19 nt, Artificial Sequence
  Description of Artificial Sequence: Synthetic oligonucleotide
  Sense strand starting at position 2521 of SEQ ID NO: 585323
gucuacgauucguuaacaa

SEQ ID NO: 630799 - RNA, 19 nt, Artificial Sequence
  Description of Artificial Sequence: Synthetic oligonucleotide
  Antisense strand to SEQ ID NO: 630798
uuguuaacgaaucguagac

SEQ ID NO: 630800 - RNA, 19 nt, Artificial Sequence
  Description of Artificial Sequence: Synthetic oligonucleotide
  Sense strand starting at position 2525 of SEQ ID NO: 585323
acgauucguuaacaaguuu

SEQ ID NO: 630801 - RNA, 19 nt, Artificial Sequence
  Description of Artificial Sequence: Synthetic oligonucleotide
  Antisense strand to SEQ ID NO: 630800
aaacuuguuaacgaaucgu

SEQ ID NO: 630802 - RNA, 19 nt, Artificial Sequence
  Description of Artificial Sequence: Synthetic oligonucleotide
  Sense strand starting at position 2547 of SEQ ID NO: 585323
ucauguguugaauaccaaa

SEQ ID NO: 630803 - RNA, 19 nt, Artificial Sequence
  Description of Artificial Sequence: Synthetic oligonucleotide
  Antisense strand to SEQ ID NO: 630802
uuugguauucaacacauga

SEQ ID NO: 630804 - RNA, 19 nt, Artificial Sequence
  Description of Artificial Sequence: Synthetic oligonucleotide
  Sense strand starting at position 2550 of SEQ ID NO: 585323
uguguugaauaccaaagaa

SEQ ID NO: 630805 - RNA, 19 nt, Artificial Sequence
  Description of Artificial Sequence: Synthetic oligonucleotide
  Antisense strand to SEQ ID NO: 630804
uucuuugguauucaacaca

SEQ ID NO: 630806 - RNA, 19 nt, Artificial Sequence
  Description of Artificial Sequence: Synthetic oligonucleotide
  Sense strand starting at position 2628 of SEQ ID NO: 585323
caccaucccgauuggauau

SEQ ID NO: 630807 - RNA, 19 nt, Artificial Sequence
  Description of Artificial Sequence: Synthetic oligonucleotide
  Antisense strand to SEQ ID NO: 630806
auauccaaucgggauggug

SEQ ID NO: 630808 - RNA, 19 nt, Artificial Sequence
  Description of Artificial Sequence: Synthetic oligonucleotide
  Sense strand starting at position 2676 of SEQ ID NO: 585323
aagccuauggcugggagaa

SEQ ID NO: 630809 - RNA, 19 nt, Artificial Sequence
  Description of Artificial Sequence: Synthetic oligonucleotide
  Antisense strand to SEQ ID NO: 630808
uucucccagccauaggcuu

SEQ ID NO: 630810 - RNA, 19 nt, Artificial Sequence
  Description of Artificial Sequence: Synthetic oligonucleotide
  Sense strand starting at position 2678 of SEQ ID NO: 585323
gccuauggcugggagaagu

SEQ ID NO: 630811 - RNA, 19 nt, Artificial Sequence
  Description of Artificial Sequence: Synthetic oligonucleotide
  Antisense strand to SEQ ID NO: 630810
acuucucccagccauaggc

SEQ ID NO: 630812 - RNA, 19 nt, Artificial Sequence
  Description of Artificial Sequence: Synthetic oligonucleotide
  Sense strand starting at position 2707 of SEQ ID NO: 585323
gggcguugggugcucuauu

SEQ ID NO: 630813 - RNA, 19 nt, Artificial Sequence
  Description of Artificial Sequence: Synthetic oligonucleotide
  Antisense strand to SEQ ID NO: 630812
aauagagcacccaacgccc

SEQ ID NO: 630814 - RNA, 19 nt, Artificial Sequence
  Description of Artificial Sequence: Synthetic oligonucleotide
  Sense strand starting at position 2747 of SEQ ID NO: 585323
gugggagcgugaucccuua

SEQ ID NO: 630815 - RNA, 19 nt, Artificial Sequence
  Description of Artificial Sequence: Synthetic oligonucleotide
  Antisense strand to SEQ ID NO: 630814
uaagggaucacgcucccac

SEQ ID NO: 630816 - RNA, 19 nt, Artificial Sequence
  Description of Artificial Sequence: Synthetic oligonucleotide
  Sense strand starting at position 2781 of SEQ ID NO: 585323
cuaagcagagcucauuaaa

SEQ ID NO: 630817 - RNA, 19 nt, Artificial Sequence
  Description of Artificial Sequence: Synthetic oligonucleotide
  Antisense strand to SEQ ID NO: 630816
uuuaaugagcucugcuuag

SEQ ID NO: 630818 - RNA, 19 nt, Artificial Sequence
  Description of Artificial Sequence: Synthetic oligonucleotide
  Sense strand starting at position 2854 of SEQ ID NO: 585323
ggaugaaagucagugugca

SEQ ID NO: 630819 - RNA, 19 nt, Artificial Sequence
  Description of Artificial Sequence: Synthetic oligonucleotide
  Antisense strand to SEQ ID NO: 630818
ugcacacugacuuucaucc

SEQ ID NO: 630820 - RNA, 19 nt, Artificial Sequence
  Description of Artificial Sequence: Synthetic oligonucleotide
  Sense strand starting at position 2858 of SEQ ID NO: 585323
gaaagucagugugcacauu

SEQ ID NO: 630821 - RNA, 19 nt, Artificial Sequence
  Description of Artificial Sequence: Synthetic oligonucleotide
  Antisense strand to SEQ ID NO: 630820
aaugugcacacugacuuuc

SEQ ID NO: 630822 - RNA, 19 nt, Artificial Sequence
  Description of Artificial Sequence: Synthetic oligonucleotide
  Sense strand starting at position 3007 of SEQ ID NO: 585323
aggaaucacuccuguggau

SEQ ID NO: 630823 - RNA, 19 nt, Artificial Sequence
  Description of Artificial Sequence: Synthetic oligonucleotide
  Antisense strand to SEQ ID NO: 630822
auccacaggagugauuccu

SEQ ID NO: 630824 - RNA, 19 nt, Artificial Sequence
  Description of Artificial Sequence: Synthetic oligonucleotide
  Sense strand starting at position 3041 of SEQ ID NO: 585323
uggauccuuucugugucaa

SEQ ID NO: 630825 - RNA, 19 nt, Artificial Sequence
  Description of Artificial Sequence: Synthetic oligonucleotide
  Antisense strand to SEQ ID NO: 630824
uugacacagaaaggaucca

SEQ ID NO: 630826 - RNA, 19 nt, Artificial Sequence
  Description of Artificial Sequence: Synthetic oligonucleotide
  Sense strand starting at position 3042 of SEQ ID NO: 585323
ggauccuuucugugucaag

SEQ ID NO: 630827 - RNA, 19 nt, Artificial Sequence
  Description of Artificial Sequence: Synthetic oligonucleotide
  Antisense strand to SEQ ID NO: 630826
cuugacacagaaaggaucc

SEQ ID NO: 630828 - RNA, 19 nt, Artificial Sequence
  Description of Artificial Sequence: Synthetic oligonucleotide
  Sense strand starting at position 3043 of SEQ ID NO: 585323
gauccuuucugugucaaga

SEQ ID NO: 630829 - RNA, 19 nt, Artificial Sequence
  Description of Artificial Sequence: Synthetic oligonucleotide
  Antisense strand to SEQ ID NO: 630828
ucuugacacagaaaggauc

SEQ ID NO: 630830 - RNA, 19 nt, Artificial Sequence
  Description of Artificial Sequence: Synthetic oligonucleotide
  Sense strand starting at position 3104 of SEQ ID NO: 585323
auguuacaccagcauagaa

SEQ ID NO: 630831 - RNA, 19 nt, Artificial Sequence
  Description of Artificial Sequence: Synthetic oligonucleotide
  Antisense strand to SEQ ID NO: 630830
uucuaugcugguguaacau

SEQ ID NO: 630832 - RNA, 19 nt, Artificial Sequence
  Description of Artificial Sequence: Synthetic oligonucleotide
  Sense strand starting at position 3106 of SEQ ID NO: 585323
guuacaccagcauagaaau

SEQ ID NO: 630833 - RNA, 19 nt, Artificial Sequence
  Description of Artificial Sequence: Synthetic oligonucleotide
  Antisense strand to SEQ ID NO: 630832
auuucuaugcugguguaac

SEQ ID NO: 630834 - RNA, 19 nt, Artificial Sequence
  Description of Artificial Sequence: Synthetic oligonucleotide
  Sense strand starting at position 3201 of SEQ ID NO: 585323
cgaggucaguaguucacaa

SEQ ID NO: 630835 - RNA, 19 nt, Artificial Sequence
  Description of Artificial Sequence: Synthetic oligonucleotide
  Antisense strand to SEQ ID NO: 630834
uugugaacuacugaccucg

SEQ ID NO: 630836 - RNA, 19 nt, Artificial Sequence
  Description of Artificial Sequence: Synthetic oligonucleotide
  Sense strand starting at position 3913 of SEQ ID NO: 585323
gugugaaccauaggaggau

SEQ ID NO: 630837 - RNA, 19 nt, Artificial Sequence
  Description of Artificial Sequence: Synthetic oligonucleotide
  Antisense strand to SEQ ID NO: 630836
auccuccuaugguucacac

SEQ ID NO: 630838 - RNA, 19 nt, Artificial Sequence
  Description of Artificial Sequence: Synthetic oligonucleotide
  Sense strand starting at position 3951 of SEQ ID NO: 585323
cucagcucagcuugggaaa

SEQ ID NO: 630839 - RNA, 19 nt, Artificial Sequence
  Description of Artificial Sequence: Synthetic oligonucleotide
  Antisense strand to SEQ ID NO: 630838
uuucccaagcugagcugag

SEQ ID NO: 630840 - RNA, 19 nt, Artificial Sequence
  Description of Artificial Sequence: Synthetic oligonucleotide
  Sense strand starting at position 3971 of SEQ ID NO: 585323
ggagcagucuuaggaccau

SEQ ID NO: 630841 - RNA, 19 nt, Artificial Sequence
  Description of Artificial Sequence: Synthetic oligonucleotide
  Antisense strand to SEQ ID NO: 630840
augguccuaagacugcucc

SEQ ID NO: 630842 - RNA, 19 nt, Artificial Sequence
  Description of Artificial Sequence: Synthetic oligonucleotide
  Sense strand starting at position 2415 of SEQ ID NO: 585324
ccacguuacaauggagaua

SEQ ID NO: 630843 - RNA, 19 nt, Artificial Sequence
  Description of Artificial Sequence: Synthetic oligonucleotide
  Antisense strand to SEQ ID NO: 630842
uaucuccauuguaacgugg

SEQ ID NO: 630844 - RNA, 19 nt, Artificial Sequence
  Description of Artificial Sequence: Synthetic oligonucleotide
  Sense strand starting at position 2428 of SEQ ID NO: 585324
gagauacugucucugaccu

SEQ ID NO: 630845 - RNA, 19 nt, Artificial Sequence
  Description of Artificial Sequence: Synthetic oligonucleotide
  Antisense strand to SEQ ID NO: 630844
aggucagagacaguaucuc

SEQ ID NO: 630846 - RNA, 19 nt, Artificial Sequence
  Description of Artificial Sequence: Synthetic oligonucleotide
  Sense strand starting at position 2577 of SEQ ID NO: 585324
cugcguaaucuggacguuu

SEQ ID NO: 630847 - RNA, 19 nt, Artificial Sequence
  Description of Artificial Sequence: Synthetic oligonucleotide
  Antisense strand to SEQ ID NO: 630846
aaacguccagauuacgcag

SEQ ID NO: 630848 - RNA, 19 nt, Artificial Sequence
  Description of Artificial Sequence: Synthetic oligonucleotide
  Sense strand starting at position 2632 of SEQ ID NO: 585324
ccaguagggaucugauuga

SEQ ID NO: 630849 - RNA, 19 nt, Artificial Sequence
  Description of Artificial Sequence: Synthetic oligonucleotide
  Antisense strand to SEQ ID NO: 630848
ucaaucagaucccuacugg

SEQ ID NO: 630850 - RNA, 19 nt, Artificial Sequence
  Description of Artificial Sequence: Synthetic oligonucleotide
  Sense strand starting at position 2636 of SEQ ID NO: 585324
uagggaucugauugauugu

SEQ ID NO: 630851 - RNA, 19 nt, Artificial Sequence
  Description of Artificial Sequence: Synthetic oligonucleotide
  Antisense strand to SEQ ID NO: 630850
acaaucaaucagaucccua

SEQ ID NO: 630852 - RNA, 19 nt, Artificial Sequence
  Description of Artificial Sequence: Synthetic oligonucleotide
  Sense strand starting at position 2639 of SEQ ID NO: 585324
ggaucugauugauugugaa

SEQ ID NO: 630853 - RNA, 19 nt, Artificial Sequence
  Description of Artificial Sequence: Synthetic oligonucleotide
  Antisense strand to SEQ ID NO: 630852
uucacaaucaaucagaucc

SEQ ID NO: 630854 - RNA, 19 nt, Artificial Sequence
  Description of Artificial Sequence: Synthetic oligonucleotide
  Sense strand starting at position 2671 of SEQ ID NO: 585324
guagguccuuguuugggaa

SEQ ID NO: 630855 - RNA, 19 nt, Artificial Sequence
  Description of Artificial Sequence: Synthetic oligonucleotide
  Antisense strand to SEQ ID NO: 630854
uucccaaacaaggaccuac

SEQ ID NO: 630856 - RNA, 19 nt, Artificial Sequence
  Description of Artificial Sequence: Synthetic oligonucleotide
  Sense strand starting at position 2672 of SEQ ID NO: 585324
uagguccuuguuugggaaa

SEQ ID NO: 630857 - RNA, 19 nt, Artificial Sequence
  Description of Artificial Sequence: Synthetic oligonucleotide
  Antisense strand to SEQ ID NO: 630856
uuucccaaacaaggaccua

SEQ ID NO: 630858 - RNA, 19 nt, Artificial Sequence
  Description of Artificial Sequence: Synthetic oligonucleotide
  Sense strand starting at position 2684 of SEQ ID NO: 585324
ugggaaaguacuggaaagu

SEQ ID NO: 630859 - RNA, 19 nt, Artificial Sequence
  Description of Artificial Sequence: Synthetic oligonucleotide
  Antisense strand to SEQ ID NO: 630858
acuuuccaguacuuuccca

SEQ ID NO: 630860 - RNA, 19 nt, Artificial Sequence
  Description of Artificial Sequence: Synthetic oligonucleotide
  Sense strand starting at position 2693 of SEQ ID NO: 585324
acuggaaaguucccuaguu

SEQ ID NO: 630861 - RNA, 19 nt, Artificial Sequence
  Description of Artificial Sequence: Synthetic oligonucleotide
  Antisense strand to SEQ ID NO: 630860
aacuagggaacuuuccagu

SEQ ID NO: 630862 - RNA, 19 nt, Artificial Sequence
  Description of Artificial Sequence: Synthetic oligonucleotide
  Sense strand starting at position 2694 of SEQ ID NO: 585324
cuggaaaguucccuaguug

SEQ ID NO: 630863 - RNA, 19 nt, Artificial Sequence
  Description of Artificial Sequence: Synthetic oligonucleotide
  Antisense strand to SEQ ID NO: 630862
caacuagggaacuuuccag

SEQ ID NO: 630864 - RNA, 19 nt, Artificial Sequence
  Description of Artificial Sequence: Synthetic oligonucleotide
  Sense strand starting at position 2710 of SEQ ID NO: 585324
uugguuuaagccugaggua

SEQ ID NO: 630865 - RNA, 19 nt, Artificial Sequence
  Description of Artificial Sequence: Synthetic oligonucleotide
  Antisense strand to SEQ ID NO: 630864
uaccucaggcuuaaaccaa

SEQ ID NO: 630866 - RNA, 19 nt, Artificial Sequence
  Description of Artificial Sequence: Synthetic oligonucleotide
  Sense strand starting at position 2711 of SEQ ID NO: 585324
ugguuuaagccugagguau

SEQ ID NO: 630867 - RNA, 19 nt, Artificial Sequence
  Description of Artificial Sequence: Synthetic oligonucleotide
  Antisense strand to SEQ ID NO: 630866
auaccucaggcuuaaacca

SEQ ID NO: 630868 - RNA, 19 nt, Artificial Sequence
  Description of Artificial Sequence: Synthetic oligonucleotide
  Sense strand starting at position 2787 of SEQ ID NO: 585324
gauugauuggucggagcag

SEQ ID NO: 630869 - RNA, 19 nt, Artificial Sequence
  Description of Artificial Sequence: Synthetic oligonucleotide
  Antisense strand to SEQ ID NO: 630868
cugcuccgaccaaucaauc

SEQ ID NO: 630870 - RNA, 19 nt, Artificial Sequence
  Description of Artificial Sequence: Synthetic oligonucleotide
  Sense strand starting at position 2910 of SEQ ID NO: 585324
gggagugcggccuaggaau

SEQ ID NO: 630871 - RNA, 19 nt, Artificial Sequence
  Description of Artificial Sequence: Synthetic oligonucleotide
  Antisense strand to SEQ ID NO: 630870
auuccuaggccgcacuccc

SEQ ID NO: 630872 - RNA, 19 nt, Artificial Sequence
  Description of Artificial Sequence: Synthetic oligonucleotide
  Sense strand starting at position 3394 of SEQ ID NO: 585324
acccuuuauugaucaguua

SEQ ID NO: 630873 - RNA, 19 nt, Artificial Sequence
  Description of Artificial Sequence: Synthetic oligonucleotide
  Antisense strand to SEQ ID NO: 630872
uaacugaucaauaaagggu

SEQ ID NO: 630874 - RNA, 19 nt, Artificial Sequence
  Description of Artificial Sequence: Synthetic oligonucleotide
  Sense strand starting at position 3395 of SEQ ID NO: 585324
cccuuuauugaucaguuau

SEQ ID NO: 630875 - RNA, 19 nt, Artificial Sequence
  Description of Artificial Sequence: Synthetic oligonucleotide
  Antisense strand to SEQ ID NO: 630874
auaacugaucaauaaaggg

SEQ ID NO: 630876 - RNA, 19 nt, Artificial Sequence
  Description of Artificial Sequence: Synthetic oligonucleotide
  Sense strand starting at position 3397 of SEQ ID NO: 585324
cuuuauugaucaguuauug

SEQ ID NO: 630877 - RNA, 19 nt, Artificial Sequence
  Description of Artificial Sequence: Synthetic oligonucleotide
  Antisense strand to SEQ ID NO: 630876
caauaacugaucaauaaag

SEQ ID NO: 630878 - RNA, 19 nt, Artificial Sequence
  Description of Artificial Sequence: Synthetic oligonucleotide
  Sense strand starting at position 3405 of SEQ ID NO: 585324
aucaguuauuggcuccaga

SEQ ID NO: 630879 - RNA, 19 nt, Artificial Sequence
  Description of Artificial Sequence: Synthetic oligonucleotide
  Antisense strand to SEQ ID NO: 630878
ucuggagccaauaacugau

SEQ ID NO: 630880 - RNA, 19 nt, Artificial Sequence
  Description of Artificial Sequence: Synthetic oligonucleotide
  Sense strand starting at position 3451 of SEQ ID NO: 585324
uacagauacugucuggagu

SEQ ID NO: 630881 - RNA, 19 nt, Artificial Sequence
  Description of Artificial Sequence: Synthetic oligonucleotide
  Antisense strand to SEQ ID NO: 630880
acuccagacaguaucugua

SEQ ID NO: 630882 - RNA, 19 nt, Artificial Sequence
  Description of Artificial Sequence: Synthetic oligonucleotide
  Sense strand starting at position 3467 of SEQ ID NO: 585324
agugccaugucguuugaga

SEQ ID NO: 630883 - RNA, 19 nt, Artificial Sequence
  Description of Artificial Sequence: Synthetic oligonucleotide
  Antisense strand to SEQ ID NO: 630882
ucucaaacgacauggcacu

SEQ ID NO: 630884 - RNA, 19 nt, Artificial Sequence
  Description of Artificial Sequence: Synthetic oligonucleotide
  Sense strand starting at position 3469 of SEQ ID NO: 585324
ugccaugucguuugagaaa

SEQ ID NO: 630885 - RNA, 19 nt, Artificial Sequence
  Description of Artificial Sequence: Synthetic oligonucleotide
  Antisense strand to SEQ ID NO: 630884
uuucucaaacgacauggca

SEQ ID NO: 630886 - RNA, 19 nt, Artificial Sequence
  Description of Artificial Sequence: Synthetic oligonucleotide
  Sense strand starting at position 3532 of SEQ ID NO: 585324
ggaauuuacugccggugaa

SEQ ID NO: 630887 - RNA, 19 nt, Artificial Sequence
  Description of Artificial Sequence: Synthetic oligonucleotide
  Antisense strand to SEQ ID NO: 630886
uucaccggcaguaaauucc

SEQ ID NO: 630888 - RNA, 19 nt, Artificial Sequence
  Description of Artificial Sequence: Synthetic oligonucleotide
  Sense strand starting at position 3561 of SEQ ID NO: 585324
agaauauuaucccaggaag

SEQ ID NO: 630889 - RNA, 19 nt, Artificial Sequence
  Description of Artificial Sequence: Synthetic oligonucleotide
  Antisense strand to SEQ ID NO: 630888
cuuccugggauaauauucu

SEQ ID NO: 630890 - RNA, 19 nt, Artificial Sequence
  Description of Artificial Sequence: Synthetic oligonucleotide
  Sense strand starting at position 3583 of SEQ ID NO: 585324
gcagaacucaaguguggag

SEQ ID NO: 630891 - RNA, 19 nt, Artificial Sequence
  Description of Artificial Sequence: Synthetic oligonucleotide
  Antisense strand to SEQ ID NO: 630890
cuccacacuugaguucugc

SEQ ID NO: 630892 - RNA, 19 nt, Artificial Sequence
  Description of Artificial Sequence: Synthetic oligonucleotide
  Sense strand starting at position 3636 of SEQ ID NO: 585324
acucuugggucauaaagag

SEQ ID NO: 630893 - RNA, 19 nt, Artificial Sequence
  Description of Artificial Sequence: Synthetic oligonucleotide
  Antisense strand to SEQ ID NO: 630892
cucuuuaugacccaagagu

SEQ ID NO: 630894 - RNA, 19 nt, Artificial Sequence
  Description of Artificial Sequence: Synthetic oligonucleotide
  Sense strand starting at position 3652 of SEQ ID NO: 585324
gagacagaaucccacagua

SEQ ID NO: 630895 - RNA, 19 nt, Artificial Sequence
  Description of Artificial Sequence: Synthetic oligonucleotide
  Antisense strand to SEQ ID NO: 630894
uacugugggauucugucuc

SEQ ID NO: 630896 - RNA, 19 nt, Artificial Sequence
  Description of Artificial Sequence: Synthetic oligonucleotide
  Sense strand starting at position 3740 of SEQ ID NO: 585324
ucccaacuucuuugaguag

SEQ ID NO: 630897 - RNA, 19 nt, Artificial Sequence
  Description of Artificial Sequence: Synthetic oligonucleotide
  Antisense strand to SEQ ID NO: 630896
cuacucaaagaaguuggga

SEQ ID NO: 630898 - RNA, 19 nt, Artificial Sequence
  Description of Artificial Sequence: Synthetic oligonucleotide
  Sense strand starting at position 3747 of SEQ ID NO: 585324
uucuuugaguagcugagaa

SEQ ID NO: 630899 - RNA, 19 nt, Artificial Sequence
  Description of Artificial Sequence: Synthetic oligonucleotide
  Antisense strand to SEQ ID NO: 630898
uucucagcuacucaaagaa

SEQ ID NO: 630900 - RNA, 19 nt, Artificial Sequence
  Description of Artificial Sequence: Synthetic oligonucleotide
  Sense strand starting at position 3749 of SEQ ID NO: 585324
cuuugaguagcugagaaua

SEQ ID NO: 630901 - RNA, 19 nt, Artificial Sequence
  Description of Artificial Sequence: Synthetic oligonucleotide
  Antisense strand to SEQ ID NO: 630900
uauucucagcuacucaaag

SEQ ID NO: 630902 - RNA, 19 nt, Artificial Sequence
  Description of Artificial Sequence: Synthetic oligonucleotide
  Sense strand starting at position 3790 of SEQ ID NO: 585324
agcagucugccaugacagu

SEQ ID NO: 630903 - RNA, 19 nt, Artificial Sequence
  Description of Artificial Sequence: Synthetic oligonucleotide
  Antisense strand to SEQ ID NO: 630902
acugucauggcagacugcu

SEQ ID NO: 630904 - RNA, 19 nt, Artificial Sequence
  Description of Artificial Sequence: Synthetic oligonucleotide
  Sense strand starting at position 3791 of SEQ ID NO: 585324
gcagucugccaugacagua

SEQ ID NO: 630905 - RNA, 19 nt, Artificial Sequence
  Description of Artificial Sequence: Synthetic oligonucleotide
  Antisense strand to SEQ ID NO: 630904
uacugucauggcagacugc

SEQ ID NO: 630906 - RNA, 19 nt, Artificial Sequence
  Description of Artificial Sequence: Synthetic oligonucleotide
  Sense strand starting at position 3812 of SEQ ID NO: 585324
gucuccauguauuuguaua

SEQ ID NO: 630907 - RNA, 19 nt, Artificial Sequence
  Description of Artificial Sequence: Synthetic oligonucleotide
  Antisense strand to SEQ ID NO: 630906
uauacaaauacauggagac

SEQ ID NO: 630908 - RNA, 19 nt, Artificial Sequence
  Description of Artificial Sequence: Synthetic oligonucleotide
  Sense strand starting at position 3823 of SEQ ID NO: 585324
uuuguauaggcuugcucau

SEQ ID NO: 630909 - RNA, 19 nt, Artificial Sequence
  Description of Artificial Sequence: Synthetic oligonucleotide
  Antisense strand to SEQ ID NO: 630908
augagcaagccuauacaaa

SEQ ID NO: 630910 - RNA, 19 nt, Artificial Sequence
  Description of Artificial Sequence: Synthetic oligonucleotide
  Sense strand starting at position 3853 of SEQ ID NO: 585324
ucuguaaauucuguaaucu

SEQ ID NO: 630911 - RNA, 19 nt, Artificial Sequence
  Description of Artificial Sequence: Synthetic oligonucleotide
  Antisense strand to SEQ ID NO: 630910
agauuacagaauuuacaga

SEQ ID NO: 630912 - RNA, 19 nt, Artificial Sequence
  Description of Artificial Sequence: Synthetic oligonucleotide
  Sense strand starting at position 3854 of SEQ ID NO: 585324
cuguaaauucuguaaucug

SEQ ID NO: 630913 - RNA, 19 nt, Artificial Sequence
  Description of Artificial Sequence: Synthetic oligonucleotide
  Antisense strand to SEQ ID NO: 630912
cagauuacagaauuuacag

SEQ ID NO: 630914 - RNA, 19 nt, Artificial Sequence
  Description of Artificial Sequence: Synthetic oligonucleotide
  Sense strand starting at position 3861 of SEQ ID NO: 585324
uucuguaaucuguauccau

SEQ ID NO: 630915 - RNA, 19 nt, Artificial Sequence
  Description of Artificial Sequence: Synthetic oligonucleotide
  Antisense strand to SEQ ID NO: 630914
auggauacagauuacagaa

SEQ ID NO: 630916 - RNA, 19 nt, Artificial Sequence
  Description of Artificial Sequence: Synthetic oligonucleotide
  Sense strand starting at position 3864 of SEQ ID NO: 585324
uguaaucuguauccaucga

SEQ ID NO: 630917 - RNA, 19 nt, Artificial Sequence
  Description of Artificial Sequence: Synthetic oligonucleotide
  Antisense strand to SEQ ID NO: 630916
ucgauggauacagauuaca

SEQ ID NO: 630918 - RNA, 19 nt, Artificial Sequence
  Description of Artificial Sequence: Synthetic oligonucleotide
  Sense strand starting at position 3868 of SEQ ID NO: 585324
aucuguauccaucgagaga

SEQ ID NO: 630919 - RNA, 19 nt, Artificial Sequence
  Description of Artificial Sequence: Synthetic oligonucleotide
  Antisense strand to SEQ ID NO: 630918
ucucucgauggauacagau

SEQ ID NO: 630920 - RNA, 19 nt, Artificial Sequence
  Description of Artificial Sequence: Synthetic oligonucleotide
  Sense strand starting at position 3869 of SEQ ID NO: 585324
ucuguauccaucgagagau

SEQ ID NO: 630921 - RNA, 19 nt, Artificial Sequence
  Description of Artificial Sequence: Synthetic oligonucleotide
  Antisense strand to SEQ ID NO: 630920
aucucucgauggauacaga

SEQ ID NO: 630922 - RNA, 19 nt, Artificial Sequence
  Description of Artificial Sequence: Synthetic oligonucleotide
  Sense strand starting at position 2328 of SEQ ID NO: 585325
gugcgagauuggucggaug

SEQ ID NO: 630923 - RNA, 19 nt, Artificial Sequence
  Description of Artificial Sequence: Synthetic oligonucleotide
  Antisense strand to SEQ ID NO: 630922
cauccgaccaaucucgcac

SEQ ID NO: 630924 - RNA, 19 nt, Artificial Sequence
  Description of Artificial Sequence: Synthetic oligonucleotide
  Sense strand starting at position 2329 of SEQ ID NO: 585325
ugcgagauuggucggauga

SEQ ID NO: 630925 - RNA, 19 nt, Artificial Sequence
  Description of Artificial Sequence: Synthetic oligonucleotide
  Antisense strand to SEQ ID NO: 630924
ucauccgaccaaucucgca

SEQ ID NO: 630926 - RNA, 19 nt, Artificial Sequence
  Description of Artificial Sequence: Synthetic oligonucleotide
  Sense strand starting at position 2330 of SEQ ID NO: 585325
gcgagauuggucggaugac

SEQ ID NO: 630927 - RNA, 19 nt, Artificial Sequence
  Description of Artificial Sequence: Synthetic oligonucleotide
  Antisense strand to SEQ ID NO: 630926
gucauccgaccaaucucgc

SEQ ID NO: 630928 - RNA, 19 nt, Artificial Sequence
  Description of Artificial Sequence: Synthetic oligonucleotide
  Sense strand starting at position 2331 of SEQ ID NO: 585325
cgagauuggucggaugacu

SEQ ID NO: 630929 - RNA, 19 nt, Artificial Sequence
  Description of Artificial Sequence: Synthetic oligonucleotide
  Antisense strand to SEQ ID NO: 630928
agucauccgaccaaucucg

SEQ ID NO: 630930 - RNA, 19 nt, Artificial Sequence
  Description of Artificial Sequence: Synthetic oligonucleotide
  Sense strand starting at position 2339 of SEQ ID NO: 585325
gucggaugacuuuggagac

SEQ ID NO: 630931 - RNA, 19 nt, Artificial Sequence
  Description of Artificial Sequence: Synthetic oligonucleotide
  Antisense strand to SEQ ID NO: 630930
gucuccaaagucauccgac

SEQ ID NO: 630932 - RNA, 19 nt, Artificial Sequence
  Description of Artificial Sequence: Synthetic oligonucleotide
  Sense strand starting at position 2340 of SEQ ID NO: 585325
ucggaugacuuuggagaca

SEQ ID NO: 630933 - RNA, 19 nt, Artificial Sequence
  Description of Artificial Sequence: Synthetic oligonucleotide
  Antisense strand to SEQ ID NO: 630932
ugucuccaaagucauccga

SEQ ID NO: 630934 - RNA, 19 nt, Artificial Sequence
  Description of Artificial Sequence: Synthetic oligonucleotide
  Sense strand starting at position 2365 of SEQ ID NO: 585325
acccgaaaguuaccuuguu

SEQ ID NO: 630935 - RNA, 19 nt, Artificial Sequence
  Description of Artificial Sequence: Synthetic oligonucleotide
  Antisense strand to SEQ ID NO: 630934
aacaagguaacuuucgggu

SEQ ID NO: 630936 - RNA, 19 nt, Artificial Sequence
  Description of Artificial Sequence: Synthetic oligonucleotide
  Sense strand starting at position 2366 of SEQ ID NO: 585325
cccgaaaguuaccuuguuu

SEQ ID NO: 630937 - RNA, 19 nt, Artificial Sequence
  Description of Artificial Sequence: Synthetic oligonucleotide
  Antisense strand to SEQ ID NO: 630936
aaacaagguaacuuucggg

SEQ ID NO: 630938 - RNA, 19 nt, Artificial Sequence
  Description of Artificial Sequence: Synthetic oligonucleotide
  Sense strand starting at position 2375 of SEQ ID NO: 585325
uaccuuguuucucgaagga

SEQ ID NO: 630939 - RNA, 19 nt, Artificial Sequence
  Description of Artificial Sequence: Synthetic oligonucleotide
  Antisense strand to SEQ ID NO: 630938
uccuucgagaaacaaggua

SEQ ID NO: 630940 - RNA, 19 nt, Artificial Sequence
  Description of Artificial Sequence: Synthetic oligonucleotide
  Sense strand starting at position 2401 of SEQ ID NO: 585325
caucgaugugccugggaaa

SEQ ID NO: 630941 - RNA, 19 nt, Artificial Sequence
  Description of Artificial Sequence: Synthetic oligonucleotide
  Antisense strand to SEQ ID NO: 630940
uuucccaggcacaucgaug

SEQ ID NO: 630942 - RNA, 19 nt, Artificial Sequence
  Description of Artificial Sequence: Synthetic oligonucleotide
  Sense strand starting at position 2412 of SEQ ID NO: 585325
cugggaaacucugauugga

SEQ ID NO: 630943 - RNA, 19 nt, Artificial Sequence
  Description of Artificial Sequence: Synthetic oligonucleotide
  Antisense strand to SEQ ID NO: 630942
uccaaucagaguuucccag

SEQ ID NO: 630944 - RNA, 19 nt, Artificial Sequence
  Description of Artificial Sequence: Synthetic oligonucleotide
  Sense strand starting at position 2425 of SEQ ID NO: 585325
auuggacugugucugugaa

SEQ ID NO: 630945 - RNA, 19 nt, Artificial Sequence
  Description of Artificial Sequence: Synthetic oligonucleotide
  Antisense strand to SEQ ID NO: 630944
uucacagacacaguccaau

SEQ ID NO: 630946 - RNA, 19 nt, Artificial Sequence
  Description of Artificial Sequence: Synthetic oligonucleotide
  Sense strand starting at position 2429 of SEQ ID NO: 585325
gacugugucugugaaggac

SEQ ID NO: 630947 - RNA, 19 nt, Artificial Sequence
  Description of Artificial Sequence: Synthetic oligonucleotide
  Antisense strand to SEQ ID NO: 630946
guccuucacagacacaguc

SEQ ID NO: 630948 - RNA, 19 nt, Artificial Sequence
  Description of Artificial Sequence: Synthetic oligonucleotide
  Sense strand starting at position 2459 of SEQ ID NO: 585325
ggguccuuucuccgaggca

SEQ ID NO: 630949 - RNA, 19 nt, Artificial Sequence
  Description of Artificial Sequence: Synthetic oligonucleotide
  Antisense strand to SEQ ID NO: 630948
ugccucggagaaaggaccc

SEQ ID NO: 630950 - RNA, 19 nt, Artificial Sequence
  Description of Artificial Sequence: Synthetic oligonucleotide
  Sense strand starting at position 2484 of SEQ ID NO: 585325
ggccuagucugccugagaa

SEQ ID NO: 630951 - RNA, 19 nt, Artificial Sequence
  Description of Artificial Sequence: Synthetic oligonucleotide
  Antisense strand to SEQ ID NO: 630950
uucucaggcagacuaggcc

SEQ ID NO: 630952 - RNA, 19 nt, Artificial Sequence
  Description of Artificial Sequence: Synthetic oligonucleotide
  Sense strand starting at position 2486 of SEQ ID NO: 585325
ccuagucugccugagaaac

SEQ ID NO: 630953 - RNA, 19 nt, Artificial Sequence
  Description of Artificial Sequence: Synthetic oligonucleotide
  Antisense strand to SEQ ID NO: 630952
guuucucaggcagacuagg

SEQ ID NO: 630954 - RNA, 19 nt, Artificial Sequence
  Description of Artificial Sequence: Synthetic oligonucleotide
  Sense strand starting at position 2641 of SEQ ID NO: 585325
gaaagcaguuguguaaaca

SEQ ID NO: 630955 - RNA, 19 nt, Artificial Sequence
  Description of Artificial Sequence: Synthetic oligonucleotide
  Antisense strand to SEQ ID NO: 630954
uguuuacacaacugcuuuc

SEQ ID NO: 630956 - RNA, 19 nt, Artificial Sequence
  Description of Artificial Sequence: Synthetic oligonucleotide
  Sense strand starting at position 2660 of SEQ ID NO: 585325
ggcaguucuuagcaagaca

SEQ ID NO: 630957 - RNA, 19 nt, Artificial Sequence
  Description of Artificial Sequence: Synthetic oligonucleotide
  Antisense strand to SEQ ID NO: 630956
ugucuugcuaagaacugcc

SEQ ID NO: 630958 - RNA, 19 nt, Artificial Sequence
  Description of Artificial Sequence: Synthetic oligonucleotide
  Sense strand starting at position 2941 of SEQ ID NO: 585325
cacagucccgaguaagauu

SEQ ID NO: 630959 - RNA, 19 nt, Artificial Sequence
  Description of Artificial Sequence: Synthetic oligonucleotide
  Antisense strand to SEQ ID NO: 630958
aaucuuacucgggacugug

SEQ ID NO: 630960 - RNA, 19 nt, Artificial Sequence
  Description of Artificial Sequence: Synthetic oligonucleotide
  Sense strand starting at position 3001 of SEQ ID NO: 585325
ggucaaauuuaacaagaug

SEQ ID NO: 630961 - RNA, 19 nt, Artificial Sequence
  Description of Artificial Sequence: Synthetic oligonucleotide
  Antisense strand to SEQ ID NO: 630960
caucuuguuaaauuugacc

SEQ ID NO: 630962 - RNA, 19 nt, Artificial Sequence
  Description of Artificial Sequence: Synthetic oligonucleotide
  Sense strand starting at position 3046 of SEQ ID NO: 585325
guguuuagcucucuuuaac

SEQ ID NO: 630963 - RNA, 19 nt, Artificial Sequence
  Description of Artificial Sequence: Synthetic oligonucleotide
  Antisense strand to SEQ ID NO: 630962
guuaaagagagcuaaacac

SEQ ID NO: 630964 - RNA, 19 nt, Artificial Sequence
  Description of Artificial Sequence: Synthetic oligonucleotide
  Sense strand starting at position 3113 of SEQ ID NO: 585325
guggagugaugcuggaaag

SEQ ID NO: 630965 - RNA, 19 nt, Artificial Sequence
  Description of Artificial Sequence: Synthetic oligonucleotide
  Antisense strand to SEQ ID NO: 630964
cuuuccagcaucacuccac

SEQ ID NO: 630966 - RNA, 19 nt, Artificial Sequence
  Description of Artificial Sequence: Synthetic oligonucleotide
  Sense strand starting at position 3181 of SEQ ID NO: 585325
cagguuaugugucuuaagu

SEQ ID NO: 630967 - RNA, 19 nt, Artificial Sequence
  Description of Artificial Sequence: Synthetic oligonucleotide
  Antisense strand to SEQ ID NO: 630966
acuuaagacacauaaccug

SEQ ID NO: 630968 - RNA, 19 nt, Artificial Sequence
  Description of Artificial Sequence: Synthetic oligonucleotide
  Sense strand starting at position 3183 of SEQ ID NO: 585325
gguuaugugucuuaaguuu

SEQ ID NO: 630969 - RNA, 19 nt, Artificial Sequence
  Description of Artificial Sequence: Synthetic oligonucleotide
  Antisense strand to SEQ ID NO: 630968
aaacuuaagacacauaacc

SEQ ID NO: 630970 - RNA, 19 nt, Artificial Sequence
  Description of Artificial Sequence: Synthetic oligonucleotide
  Sense strand starting at position 3189 of SEQ ID NO: 585325
gugucuuaaguuuguuguu

SEQ ID NO: 630971 - RNA, 19 nt, Artificial Sequence
  Description of Artificial Sequence: Synthetic oligonucleotide
  Antisense strand to SEQ ID NO: 630970
aacaacaaacuuaagacac

SEQ ID NO: 630972 - RNA, 19 nt, Artificial Sequence
  Description of Artificial Sequence: Synthetic oligonucleotide
  Sense strand starting at position 3750 of SEQ ID NO: 585325
ccaggcugaaugugucuaa

SEQ ID NO: 630973 - RNA, 19 nt, Artificial Sequence
  Description of Artificial Sequence: Synthetic oligonucleotide
  Antisense strand to SEQ ID NO: 630972
uuagacacauucagccugg

SEQ ID NO: 630974 - RNA, 19 nt, Artificial Sequence
  Description of Artificial Sequence: Synthetic oligonucleotide
  Sense strand starting at position 3753 of SEQ ID NO: 585325
ggcugaaugugucuaaguu

SEQ ID NO: 630975 - RNA, 19 nt, Artificial Sequence
  Description of Artificial Sequence: Synthetic oligonucleotide
  Antisense strand to SEQ ID NO: 630974
aacuuagacacauucagcc

SEQ ID NO: 630976 - RNA, 19 nt, Artificial Sequence
  Description of Artificial Sequence: Synthetic oligonucleotide
  Sense strand starting at position 3754 of SEQ ID NO: 585325
gcugaaugugucuaaguuu

SEQ ID NO: 630977 - RNA, 19 nt, Artificial Sequence
  Description of Artificial Sequence: Synthetic oligonucleotide
  Antisense strand to SEQ ID NO: 630976
aaacuuagacacauucagc

SEQ ID NO: 630978 - RNA, 19 nt, Artificial Sequence
  Description of Artificial Sequence: Synthetic oligonucleotide
  Sense strand starting at position 3816 of SEQ ID NO: 585325
uuuaaauacgguugcauuu

SEQ ID NO: 630979 - RNA, 19 nt, Artificial Sequence
  Description of Artificial Sequence: Synthetic oligonucleotide
  Antisense strand to SEQ ID NO: 630978
aaaugcaaccguauuuaaa

SEQ ID NO: 630980 - RNA, 19 nt, Artificial Sequence
  Description of Artificial Sequence: Synthetic oligonucleotide
  Sense strand starting at position 3825 of SEQ ID NO: 585325
gguugcauuuaguaauuua

SEQ ID NO: 630981 - RNA, 19 nt, Artificial Sequence
  Description of Artificial Sequence: Synthetic oligonucleotide
  Antisense strand to SEQ ID NO: 630980
uaaauuacuaaaugcaacc

SEQ ID NO: 630982 - RNA, 19 nt, Artificial Sequence
  Description of Artificial Sequence: Synthetic oligonucleotide
  Sense strand starting at position 3866 of SEQ ID NO: 585325
cauucuuagugugaaugca

SEQ ID NO: 630983 - RNA, 19 nt, Artificial Sequence
  Description of Artificial Sequence: Synthetic oligonucleotide
  Antisense strand to SEQ ID NO: 630982
ugcauucacacuaagaaug

SEQ ID NO: 630984 - RNA, 19 nt, Artificial Sequence
  Description of Artificial Sequence: Synthetic oligonucleotide
  Sense strand starting at position 3888 of SEQ ID NO: 585325
cccuuuguuaggcgucuga

SEQ ID NO: 630985 - RNA, 19 nt, Artificial Sequence
  Description of Artificial Sequence: Synthetic oligonucleotide
  Antisense strand to SEQ ID NO: 630984
ucagacgccuaacaaaggg

SEQ ID NO: 630986 - RNA, 19 nt, Artificial Sequence
  Description of Artificial Sequence: Synthetic oligonucleotide
  Sense strand starting at position 3928 of SEQ ID NO: 585325
aagcaauaguacuguguuu

SEQ ID NO: 630987 - RNA, 19 nt, Artificial Sequence
  Description of Artificial Sequence: Synthetic oligonucleotide
  Antisense strand to SEQ ID NO: 630986
aaacacaguacuauugcuu

SEQ ID NO: 630988 - RNA, 19 nt, Artificial Sequence
  Description of Artificial Sequence: Synthetic oligonucleotide
  Sense strand starting at position 3930 of SEQ ID NO: 585325
gcaauaguacuguguuuac

SEQ ID NO: 630989 - RNA, 19 nt, Artificial Sequence
  Description of Artificial Sequence: Synthetic oligonucleotide
  Antisense strand to SEQ ID NO: 630988
guaaacacaguacuauugc

SEQ ID NO: 630990 - RNA, 19 nt, Artificial Sequence
  Description of Artificial Sequence: Synthetic oligonucleotide
  Sense strand starting at position 3933 of SEQ ID NO: 585325
auaguacuguguuuacaac

SEQ ID NO: 630991 - RNA, 19 nt, Artificial Sequence
  Description of Artificial Sequence: Synthetic oligonucleotide
  Antisense strand to SEQ ID NO: 630990
guuguaaacacaguacuau

SEQ ID NO: 630992 - RNA, 19 nt, Artificial Sequence
  Description of Artificial Sequence: Synthetic oligonucleotide
  Sense strand starting at position 20 of SEQ ID NO: 585326
gucaccaaguguuaggauu

SEQ ID NO: 630993 - RNA, 19 nt, Artificial Sequence
  Description of Artificial Sequence: Synthetic oligonucleotide
  Antisense strand to SEQ ID NO: 630992
aauccuaacacuuggugac

SEQ ID NO: 630994 - RNA, 19 nt, Artificial Sequence
  Description of Artificial Sequence: Synthetic oligonucleotide
  Sense strand starting at position 22 of SEQ ID NO: 585326
caccaaguguuaggauuau

SEQ ID NO: 630995 - RNA, 19 nt, Artificial Sequence
  Description of Artificial Sequence: Synthetic oligonucleotide
  Antisense strand to SEQ ID NO: 630994
auaauccuaacacuuggug

SEQ ID NO: 630996 - RNA, 19 nt, Artificial Sequence
  Description of Artificial Sequence: Synthetic oligonucleotide
  Sense strand starting at position 139 of SEQ ID NO: 585326
ugugacuuugcuuauguca

SEQ ID NO: 630997 - RNA, 19 nt, Artificial Sequence
  Description of Artificial Sequence: Synthetic oligonucleotide
  Antisense strand to SEQ ID NO: 630996
ugacauaagcaaagucaca

SEQ ID NO: 630998 - RNA, 19 nt, Artificial Sequence
  Description of Artificial Sequence: Synthetic oligonucleotide
  Sense strand starting at position 141 of SEQ ID NO: 585326
ugacuuugcuuaugucacu

SEQ ID NO: 630999 - RNA, 19 nt, Artificial Sequence
  Description of Artificial Sequence: Synthetic oligonucleotide
  Antisense strand to SEQ ID NO: 630998
agugacauaagcaaaguca

SEQ ID NO: 631000 - RNA, 19 nt, Artificial Sequence
  Description of Artificial Sequence: Synthetic oligonucleotide
  Sense strand starting at position 146 of SEQ ID NO: 585326
uugcuuaugucacuuagcu

SEQ ID NO: 631001 - RNA, 19 nt, Artificial Sequence
  Description of Artificial Sequence: Synthetic oligonucleotide
  Antisense strand to SEQ ID NO: 631000
agcuaagugacauaagcaa

SEQ ID NO: 631002 - RNA, 19 nt, Artificial Sequence
  Description of Artificial Sequence: Synthetic oligonucleotide
  Sense strand starting at position 187 of SEQ ID NO: 585326
guuguaacaugucacaauu

SEQ ID NO: 631003 - RNA, 19 nt, Artificial Sequence
  Description of Artificial Sequence: Synthetic oligonucleotide
  Antisense strand to SEQ ID NO: 631002
aauugugacauguuacaac

SEQ ID NO: 631004 - RNA, 19 nt, Artificial Sequence
  Description of Artificial Sequence: Synthetic oligonucleotide
  Sense strand starting at position 207 of SEQ ID NO: 585326
ccuuccuaaggcugaguaa

SEQ ID NO: 631005 - RNA, 19 nt, Artificial Sequence
  Description of Artificial Sequence: Synthetic oligonucleotide
  Antisense strand to SEQ ID NO: 631004
uuacucagccuuaggaagg

SEQ ID NO: 631006 - RNA, 19 nt, Artificial Sequence
  Description of Artificial Sequence: Synthetic oligonucleotide
  Sense strand starting at position 208 of SEQ ID NO: 585326
cuuccuaaggcugaguaau

SEQ ID NO: 631007 - RNA, 19 nt, Artificial Sequence
  Description of Artificial Sequence: Synthetic oligonucleotide
  Antisense strand to SEQ ID NO: 631006
auuacucagccuuaggaag

SEQ ID NO: 631008 - RNA, 19 nt, Artificial Sequence
  Description of Artificial Sequence: Synthetic oligonucleotide
  Sense strand starting at position 564 of SEQ ID NO: 585326
uuaucuaucucucgaugga

SEQ ID NO: 631009 - RNA, 19 nt, Artificial Sequence
  Description of Artificial Sequence: Synthetic oligonucleotide
  Antisense strand to SEQ ID NO: 631008
uccaucgagagauagauaa

SEQ ID NO: 631010 - RNA, 19 nt, Artificial Sequence
  Description of Artificial Sequence: Synthetic oligonucleotide
  Sense strand starting at position 565 of SEQ ID NO: 585326
uaucuaucucucgauggau

SEQ ID NO: 631011 - RNA, 19 nt, Artificial Sequence
  Description of Artificial Sequence: Synthetic oligonucleotide
  Antisense strand to SEQ ID NO: 631010
auccaucgagagauagaua

SEQ ID NO: 631012 - RNA, 19 nt, Artificial Sequence
  Description of Artificial Sequence: Synthetic oligonucleotide
  Sense strand starting at position 567 of SEQ ID NO: 585326
ucuaucucucgauggauac

SEQ ID NO: 631013 - RNA, 19 nt, Artificial Sequence
  Description of Artificial Sequence: Synthetic oligonucleotide
  Antisense strand to SEQ ID NO: 631012
guauccaucgagagauaga

SEQ ID NO: 631014 - RNA, 19 nt, Artificial Sequence
  Description of Artificial Sequence: Synthetic oligonucleotide
  Sense strand starting at position 568 of SEQ ID NO: 585326
cuaucucucgauggauaca

SEQ ID NO: 631015 - RNA, 19 nt, Artificial Sequence
  Description of Artificial Sequence: Synthetic oligonucleotide
  Antisense strand to SEQ ID NO: 631014
uguauccaucgagagauag

SEQ ID NO: 631016 - RNA, 19 nt, Artificial Sequence
  Description of Artificial Sequence: Synthetic oligonucleotide
  Sense strand starting at position 580 of SEQ ID NO: 585326
ggauacagauuacagaauu

SEQ ID NO: 631017 - RNA, 19 nt, Artificial Sequence
  Description of Artificial Sequence: Synthetic oligonucleotide
  Antisense strand to SEQ ID NO: 631016
aauucuguaaucuguaucc

SEQ ID NO: 631018 - RNA, 19 nt, Artificial Sequence
  Description of Artificial Sequence: Synthetic oligonucleotide
  Sense strand starting at position 606 of SEQ ID NO: 585326
uaauguugcuaugagcaag

SEQ ID NO: 631019 - RNA, 19 nt, Artificial Sequence
  Description of Artificial Sequence: Synthetic oligonucleotide
  Antisense strand to SEQ ID NO: 631018
cuugcucauagcaacauua

SEQ ID NO: 631020 - RNA, 19 nt, Artificial Sequence
  Description of Artificial Sequence: Synthetic oligonucleotide
  Sense strand starting at position 617 of SEQ ID NO: 585326
ugagcaagccuauacaaau

SEQ ID NO: 631021 - RNA, 19 nt, Artificial Sequence
  Description of Artificial Sequence: Synthetic oligonucleotide
  Antisense strand to SEQ ID NO: 631020
auuuguauaggcuugcuca

SEQ ID NO: 631022 - RNA, 19 nt, Artificial Sequence
  Description of Artificial Sequence: Synthetic oligonucleotide
  Sense strand starting at position 715 of SEQ ID NO: 585326
ggaagcaaguagcuguaua

SEQ ID NO: 631023 - RNA, 19 nt, Artificial Sequence
  Description of Artificial Sequence: Synthetic oligonucleotide
  Antisense strand to SEQ ID NO: 631022
uauacagcuacuugcuucc

SEQ ID NO: 631024 - RNA, 19 nt, Artificial Sequence
  Description of Artificial Sequence: Synthetic oligonucleotide
  Sense strand starting at position 765 of SEQ ID NO: 585326
acuguccuguuccuauaua

SEQ ID NO: 631025 - RNA, 19 nt, Artificial Sequence
  Description of Artificial Sequence: Synthetic oligonucleotide
  Antisense strand to SEQ ID NO: 631024
uauauaggaacaggacagu

SEQ ID NO: 631026 - RNA, 19 nt, Artificial Sequence
  Description of Artificial Sequence: Synthetic oligonucleotide
  Sense strand starting at position 766 of SEQ ID NO: 585326
cuguccuguuccuauauau

SEQ ID NO: 631027 - RNA, 19 nt, Artificial Sequence
  Description of Artificial Sequence: Synthetic oligonucleotide
  Antisense strand to SEQ ID NO: 631026
auauauaggaacaggacag

SEQ ID NO: 631028 - RNA, 19 nt, Artificial Sequence
  Description of Artificial Sequence: Synthetic oligonucleotide
  Sense strand starting at position 793 of SEQ ID NO: 585326
gggauucugucucuuuaug

SEQ ID NO: 631029 - RNA, 19 nt, Artificial Sequence
  Description of Artificial Sequence: Synthetic oligonucleotide
  Antisense strand to SEQ ID NO: 631028
cauaaagagacagaauccc

SEQ ID NO: 631030 - RNA, 19 nt, Artificial Sequence
  Description of Artificial Sequence: Synthetic oligonucleotide
  Sense strand starting at position 801 of SEQ ID NO: 585326
gucucuuuaugacccaaga

SEQ ID NO: 631031 - RNA, 19 nt, Artificial Sequence
  Description of Artificial Sequence: Synthetic oligonucleotide
  Antisense strand to SEQ ID NO: 631030
ucuugggucauaaagagac

SEQ ID NO: 631032 - RNA, 19 nt, Artificial Sequence
  Description of Artificial Sequence: Synthetic oligonucleotide
  Sense strand starting at position 812 of SEQ ID NO: 585326
acccaagaguaguguacau

SEQ ID NO: 631033 - RNA, 19 nt, Artificial Sequence
  Description of Artificial Sequence: Synthetic oligonucleotide
  Antisense strand to SEQ ID NO: 631032
auguacacuacucuugggu

SEQ ID NO: 631034 - RNA, 19 nt, Artificial Sequence
  Description of Artificial Sequence: Synthetic oligonucleotide
  Sense strand starting at position 814 of SEQ ID NO: 585326
ccaagaguaguguacauuc

SEQ ID NO: 631035 - RNA, 19 nt, Artificial Sequence
  Description of Artificial Sequence: Synthetic oligonucleotide
  Antisense strand to SEQ ID NO: 631034
gaauguacacuacucuugg

SEQ ID NO: 631036 - RNA, 19 nt, Artificial Sequence
  Description of Artificial Sequence: Synthetic oligonucleotide
  Sense strand starting at position 872 of SEQ ID NO: 585326
ugcugccuuccugggauaa

SEQ ID NO: 631037 - RNA, 19 nt, Artificial Sequence
  Description of Artificial Sequence: Synthetic oligonucleotide
  Antisense strand to SEQ ID NO: 631036
uuaucccaggaaggcagca

SEQ ID NO: 631038 - RNA, 19 nt, Artificial Sequence
  Description of Artificial Sequence: Synthetic oligonucleotide
  Sense strand starting at position 873 of SEQ ID NO: 585326
gcugccuuccugggauaau

SEQ ID NO: 631039 - RNA, 19 nt, Artificial Sequence
  Description of Artificial Sequence: Synthetic oligonucleotide
  Antisense strand to SEQ ID NO: 631038
auuaucccaggaaggcagc

SEQ ID NO: 631040 - RNA, 19 nt, Artificial Sequence
  Description of Artificial Sequence: Synthetic oligonucleotide
  Sense strand starting at position 874 of SEQ ID NO: 585326
cugccuuccugggauaaua

SEQ ID NO: 631041 - RNA, 19 nt, Artificial Sequence
  Description of Artificial Sequence: Synthetic oligonucleotide
  Antisense strand to SEQ ID NO: 631040
uauuaucccaggaaggcag

SEQ ID NO: 631042 - RNA, 19 nt, Artificial Sequence
  Description of Artificial Sequence: Synthetic oligonucleotide
  Sense strand starting at position 876 of SEQ ID NO: 585326
gccuuccugggauaauauu

SEQ ID NO: 631043 - RNA, 19 nt, Artificial Sequence
  Description of Artificial Sequence: Synthetic oligonucleotide
  Antisense strand to SEQ ID NO: 631042
aauauuaucccaggaaggc

SEQ ID NO: 631044 - RNA, 19 nt, Artificial Sequence
  Description of Artificial Sequence: Synthetic oligonucleotide
  Sense strand starting at position 882 of SEQ ID NO: 585326
cugggauaauauucucuau

SEQ ID NO: 631045 - RNA, 19 nt, Artificial Sequence
  Description of Artificial Sequence: Synthetic oligonucleotide
  Antisense strand to SEQ ID NO: 631044
auagagaauauuaucccag

SEQ ID NO: 631046 - RNA, 19 nt, Artificial Sequence
  Description of Artificial Sequence: Synthetic oligonucleotide
  Sense strand starting at position 932 of SEQ ID NO: 585326
gcugaagaugacugcuaga

SEQ ID NO: 631047 - RNA, 19 nt, Artificial Sequence
  Description of Artificial Sequence: Synthetic oligonucleotide
  Antisense strand to SEQ ID NO: 631046
ucuagcagucaucuucagc

SEQ ID NO: 631048 - RNA, 19 nt, Artificial Sequence
  Description of Artificial Sequence: Synthetic oligonucleotide
  Sense strand starting at position 1497 of SEQ ID NO: 585326
ggguuuagugucuaucccu

SEQ ID NO: 631049 - RNA, 19 nt, Artificial Sequence
  Description of Artificial Sequence: Synthetic oligonucleotide
  Antisense strand to SEQ ID NO: 631048
agggauagacacuaaaccc

SEQ ID NO: 631050 - RNA, 19 nt, Artificial Sequence
  Description of Artificial Sequence: Synthetic oligonucleotide
  Sense strand starting at position 1749 of SEQ ID NO: 585326
uagggaacuuuccaguacu

SEQ ID NO: 631051 - RNA, 19 nt, Artificial Sequence
  Description of Artificial Sequence: Synthetic oligonucleotide
  Antisense strand to SEQ ID NO: 631050
aguacuggaaaguucccua

SEQ ID NO: 631052 - RNA, 19 nt, Artificial Sequence
  Description of Artificial Sequence: Synthetic oligonucleotide
  Sense strand starting at position 1752 of SEQ ID NO: 585326
ggaacuuuccaguacuuuc

SEQ ID NO: 631053 - RNA, 19 nt, Artificial Sequence
  Description of Artificial Sequence: Synthetic oligonucleotide
  Antisense strand to SEQ ID NO: 631052
gaaaguacuggaaaguucc

SEQ ID NO: 631054 - RNA, 19 nt, Artificial Sequence
  Description of Artificial Sequence: Synthetic oligonucleotide
  Sense strand starting at position 1857 of SEQ ID NO: 585326
uuuggaaacguccagauua

SEQ ID NO: 631055 - RNA, 19 nt, Artificial Sequence
  Description of Artificial Sequence: Synthetic oligonucleotide
  Antisense strand to SEQ ID NO: 631054
uaaucuggacguuuccaaa

SEQ ID NO: 631056 - RNA, 19 nt, Artificial Sequence
  Description of Artificial Sequence: Synthetic oligonucleotide
  Sense strand starting at position 1898 of SEQ ID NO: 585326
gggcucccucaauaucaaa

SEQ ID NO: 631057 - RNA, 19 nt, Artificial Sequence
  Description of Artificial Sequence: Synthetic oligonucleotide
  Antisense strand to SEQ ID NO: 631056
uuugauauugagggagccc

SEQ ID NO: 631058 - RNA, 19 nt, Artificial Sequence
  Description of Artificial Sequence: Synthetic oligonucleotide
  Sense strand starting at position 1949 of SEQ ID NO: 585326
cgucccucccugcaaauuu

SEQ ID NO: 631059 - RNA, 19 nt, Artificial Sequence
  Description of Artificial Sequence: Synthetic oligonucleotide
  Antisense strand to SEQ ID NO: 631058
aaauuugcagggagggacg

SEQ ID NO: 631060 - RNA, 19 nt, Artificial Sequence
  Description of Artificial Sequence: Synthetic oligonucleotide
  Sense strand starting at position 1973 of SEQ ID NO: 585326
ggcuccaacucaguaaucu

SEQ ID NO: 631061 - RNA, 19 nt, Artificial Sequence
  Description of Artificial Sequence: Synthetic oligonucleotide
  Antisense strand to SEQ ID NO: 631060
agauuacugaguuggagcc

SEQ ID NO: 631062 - RNA, 19 nt, Artificial Sequence
  Description of Artificial Sequence: Synthetic oligonucleotide
  Sense strand starting at position 2017 of SEQ ID NO: 585326
gagacaguaucuccauugu

SEQ ID NO: 631063 - RNA, 19 nt, Artificial Sequence
  Description of Artificial Sequence: Synthetic oligonucleotide
  Antisense strand to SEQ ID NO: 631062
acaauggagauacugucuc

SEQ ID NO: 631064 - RNA, 19 nt, Artificial Sequence
  Description of Artificial Sequence: Synthetic oligonucleotide
  Sense strand starting at position 2174 of SEQ ID NO: 585326
cugucaauuaggcgcugaa

SEQ ID NO: 631065 - RNA, 19 nt, Artificial Sequence
  Description of Artificial Sequence: Synthetic oligonucleotide
  Antisense strand to SEQ ID NO: 631064
uucagcgccuaauugacag

SEQ ID NO: 631066 - RNA, 19 nt, Artificial Sequence
  Description of Artificial Sequence: Synthetic oligonucleotide
  Sense strand starting at position 2409 of SEQ ID NO: 585326
cucggugauuggcucagaa

SEQ ID NO: 631067 - RNA, 19 nt, Artificial Sequence
  Description of Artificial Sequence: Synthetic oligonucleotide
  Antisense strand to SEQ ID NO: 631066
uucugagccaaucaccgag

SEQ ID NO: 631068 - RNA, 19 nt, Artificial Sequence
  Description of Artificial Sequence: Synthetic oligonucleotide
  Sense strand starting at position 2413 of SEQ ID NO: 585326
gugauuggcucagaaggga

SEQ ID NO: 631069 - RNA, 19 nt, Artificial Sequence
  Description of Artificial Sequence: Synthetic oligonucleotide
  Antisense strand to SEQ ID NO: 631068
ucccuucugagccaaucac

SEQ ID NO: 631070 - RNA, 19 nt, Artificial Sequence
  Description of Artificial Sequence: Synthetic oligonucleotide
  Sense strand starting at position 2438 of SEQ ID NO: 585326
gggucuccgugacgacuua

SEQ ID NO: 631071 - RNA, 19 nt, Artificial Sequence
  Description of Artificial Sequence: Synthetic oligonucleotide
  Antisense strand to SEQ ID NO: 631070
uaagucgucacggagaccc

SEQ ID NO: 631072 - RNA, 19 nt, Artificial Sequence
  Description of Artificial Sequence: Synthetic oligonucleotide
  Sense strand starting at position 20 of SEQ ID NO: 585327
aaugguuuguuuguuagag

SEQ ID NO: 631073 - RNA, 19 nt, Artificial Sequence
  Description of Artificial Sequence: Synthetic oligonucleotide
  Antisense strand to SEQ ID NO: 631072
cucuaacaaacaaaccauu

SEQ ID NO: 631074 - RNA, 19 nt, Artificial Sequence
  Description of Artificial Sequence: Synthetic oligonucleotide
  Sense strand starting at position 35 of SEQ ID NO: 585327
agaguuguggcuugacaau

SEQ ID NO: 631075 - RNA, 19 nt, Artificial Sequence
  Description of Artificial Sequence: Synthetic oligonucleotide
  Antisense strand to SEQ ID NO: 631074
auugucaagccacaacucu

SEQ ID NO: 631076 - RNA, 19 nt, Artificial Sequence
  Description of Artificial Sequence: Synthetic oligonucleotide
  Sense strand starting at position 107 of SEQ ID NO: 585327
uguugauucucaguuuaac

SEQ ID NO: 631077 - RNA, 19 nt, Artificial Sequence
  Description of Artificial Sequence: Synthetic oligonucleotide
  Antisense strand to SEQ ID NO: 631076
guuaaacugagaaucaaca

SEQ ID NO: 631078 - RNA, 19 nt, Artificial Sequence
  Description of Artificial Sequence: Synthetic oligonucleotide
  Sense strand starting at position 384 of SEQ ID NO: 585327
ggcauuaagcgucuaguuc

SEQ ID NO: 631079 - RNA, 19 nt, Artificial Sequence
  Description of Artificial Sequence: Synthetic oligonucleotide
  Antisense strand to SEQ ID NO: 631078
gaacuagacgcuuaaugcc

SEQ ID NO: 631080 - RNA, 19 nt, Artificial Sequence
  Description of Artificial Sequence: Synthetic oligonucleotide
  Sense strand starting at position 475 of SEQ ID NO: 585327
gugggcauuauccacgaua

SEQ ID NO: 631081 - RNA, 19 nt, Artificial Sequence
  Description of Artificial Sequence: Synthetic oligonucleotide
  Antisense strand to SEQ ID NO: 631080
uaucguggauaaugcccac

SEQ ID NO: 631082 - RNA, 19 nt, Artificial Sequence
  Description of Artificial Sequence: Synthetic oligonucleotide
  Sense strand starting at position 477 of SEQ ID NO: 585327
gggcauuauccacgauacc

SEQ ID NO: 631083 - RNA, 19 nt, Artificial Sequence
  Description of Artificial Sequence: Synthetic oligonucleotide
  Antisense strand to SEQ ID NO: 631082
gguaucguggauaaugccc

SEQ ID NO: 631084 - RNA, 19 nt, Artificial Sequence
  Description of Artificial Sequence: Synthetic oligonucleotide
  Sense strand starting at position 478 of SEQ ID NO: 585327
ggcauuauccacgauacca

SEQ ID NO: 631085 - RNA, 19 nt, Artificial Sequence
  Description of Artificial Sequence: Synthetic oligonucleotide
  Antisense strand to SEQ ID NO: 631084
ugguaucguggauaaugcc

SEQ ID NO: 631086 - RNA, 19 nt, Artificial Sequence
  Description of Artificial Sequence: Synthetic oligonucleotide
  Sense strand starting at position 673 of SEQ ID NO: 585327
ggacuauucuggcuucuca

SEQ ID NO: 631087 - RNA, 19 nt, Artificial Sequence
  Description of Artificial Sequence: Synthetic oligonucleotide
  Antisense strand to SEQ ID NO: 631086
ugagaagccagaauagucc

SEQ ID NO: 631088 - RNA, 19 nt, Artificial Sequence
  Description of Artificial Sequence: Synthetic oligonucleotide
  Sense strand starting at position 677 of SEQ ID NO: 585327
uauucuggcuucucaggau

SEQ ID NO: 631089 - RNA, 19 nt, Artificial Sequence
  Description of Artificial Sequence: Synthetic oligonucleotide
  Antisense strand to SEQ ID NO: 631088
auccugagaagccagaaua

SEQ ID NO: 631090 - RNA, 19 nt, Artificial Sequence
  Description of Artificial Sequence: Synthetic oligonucleotide
  Sense strand starting at position 681 of SEQ ID NO: 585327
cuggcuucucaggauccau

SEQ ID NO: 631091 - RNA, 19 nt, Artificial Sequence
  Description of Artificial Sequence: Synthetic oligonucleotide
  Antisense strand to SEQ ID NO: 631090
auggauccugagaagccag

SEQ ID NO: 631092 - RNA, 19 nt, Artificial Sequence
  Description of Artificial Sequence: Synthetic oligonucleotide
  Sense strand starting at position 826 of SEQ ID NO: 585327
agucaacuugugcacuuaa

SEQ ID NO: 631093 - RNA, 19 nt, Artificial Sequence
  Description of Artificial Sequence: Synthetic oligonucleotide
  Antisense strand to SEQ ID NO: 631092
uuaagugcacaaguugacu

SEQ ID NO: 631094 - RNA, 19 nt, Artificial Sequence
  Description of Artificial Sequence: Synthetic oligonucleotide
  Sense strand starting at position 845 of SEQ ID NO: 585327
aacguaucaguuuauggaa

SEQ ID NO: 631095 - RNA, 19 nt, Artificial Sequence
  Description of Artificial Sequence: Synthetic oligonucleotide
  Antisense strand to SEQ ID NO: 631094
uuccauaaacugauacguu

SEQ ID NO: 631096 - RNA, 19 nt, Artificial Sequence
  Description of Artificial Sequence: Synthetic oligonucleotide
  Sense strand starting at position 858 of SEQ ID NO: 585327
auggaaugcuuguuuaaag

SEQ ID NO: 631097 - RNA, 19 nt, Artificial Sequence
  Description of Artificial Sequence: Synthetic oligonucleotide
  Antisense strand to SEQ ID NO: 631096
cuuuaaacaagcauuccau

SEQ ID NO: 631098 - RNA, 19 nt, Artificial Sequence
  Description of Artificial Sequence: Synthetic oligonucleotide
  Sense strand starting at position 859 of SEQ ID NO: 585327
uggaaugcuuguuuaaagu

SEQ ID NO: 631099 - RNA, 19 nt, Artificial Sequence
  Description of Artificial Sequence: Synthetic oligonucleotide
  Antisense strand to SEQ ID NO: 631098
acuuuaaacaagcauucca

SEQ ID NO: 631100 - RNA, 19 nt, Artificial Sequence
  Description of Artificial Sequence: Synthetic oligonucleotide
  Sense strand starting at position 869 of SEQ ID NO: 585327
guuuaaaguccucauugga

SEQ ID NO: 631101 - RNA, 19 nt, Artificial Sequence
  Description of Artificial Sequence: Synthetic oligonucleotide
  Antisense strand to SEQ ID NO: 631100
uccaaugaggacuuuaaac

SEQ ID NO: 631102 - RNA, 19 nt, Artificial Sequence
  Description of Artificial Sequence: Synthetic oligonucleotide
  Sense strand starting at position 876 of SEQ ID NO: 585327
guccucauuggacauggua

SEQ ID NO: 631103 - RNA, 19 nt, Artificial Sequence
  Description of Artificial Sequence: Synthetic oligonucleotide
  Antisense strand to SEQ ID NO: 631102
uaccauguccaaugaggac

SEQ ID NO: 631104 - RNA, 19 nt, Artificial Sequence
  Description of Artificial Sequence: Synthetic oligonucleotide
  Sense strand starting at position 926 of SEQ ID NO: 585327
agcccagccaugugaagaa

SEQ ID NO: 631105 - RNA, 19 nt, Artificial Sequence
  Description of Artificial Sequence: Synthetic oligonucleotide
  Antisense strand to SEQ ID NO: 631104
uucuucacauggcugggcu

SEQ ID NO: 631106 - RNA, 19 nt, Artificial Sequence
  Description of Artificial Sequence: Synthetic oligonucleotide
  Sense strand starting at position 947 of SEQ ID NO: 585327
caaagauggcuagguggaa

SEQ ID NO: 631107 - RNA, 19 nt, Artificial Sequence
  Description of Artificial Sequence: Synthetic oligonucleotide
  Antisense strand to SEQ ID NO: 631106
uuccaccuagccaucuuug

SEQ ID NO: 631108 - RNA, 19 nt, Artificial Sequence
  Description of Artificial Sequence: Synthetic oligonucleotide
  Sense strand starting at position 986 of SEQ ID NO: 585327
uaggcaucacuagggagau

SEQ ID NO: 631109 - RNA, 19 nt, Artificial Sequence
  Description of Artificial Sequence: Synthetic oligonucleotide
  Antisense strand to SEQ ID NO: 631108
aucucccuagugaugccua

SEQ ID NO: 631110 - RNA, 19 nt, Artificial Sequence
  Description of Artificial Sequence: Synthetic oligonucleotide
  Sense strand starting at position 1043 of SEQ ID NO: 585327
aaaugaucccuagggucuu

SEQ ID NO: 631111 - RNA, 19 nt, Artificial Sequence
  Description of Artificial Sequence: Synthetic oligonucleotide
  Antisense strand to SEQ ID NO: 631110
aagacccuagggaucauuu

SEQ ID NO: 631112 - RNA, 19 nt, Artificial Sequence
  Description of Artificial Sequence: Synthetic oligonucleotide
  Sense strand starting at position 1175 of SEQ ID NO: 585327
cgggaacccgcgaguuaau

SEQ ID NO: 631113 - RNA, 19 nt, Artificial Sequence
  Description of Artificial Sequence: Synthetic oligonucleotide
  Antisense strand to SEQ ID NO: 631112
auuaacucgcggguucccg

SEQ ID NO: 631114 - RNA, 19 nt, Artificial Sequence
  Description of Artificial Sequence: Synthetic oligonucleotide
  Sense strand starting at position 1178 of SEQ ID NO: 585327
gaacccgcgaguuaauaga

SEQ ID NO: 631115 - RNA, 19 nt, Artificial Sequence
  Description of Artificial Sequence: Synthetic oligonucleotide
  Antisense strand to SEQ ID NO: 631114
ucuauuaacucgcggguuc

SEQ ID NO: 631116 - RNA, 19 nt, Artificial Sequence
  Description of Artificial Sequence: Synthetic oligonucleotide
  Sense strand starting at position 1187 of SEQ ID NO: 585327
aguuaauagaggugaccga

SEQ ID NO: 631117 - RNA, 19 nt, Artificial Sequence
  Description of Artificial Sequence: Synthetic oligonucleotide
  Antisense strand to SEQ ID NO: 631116
ucggucaccucuauuaacu

SEQ ID NO: 631118 - RNA, 19 nt, Artificial Sequence
  Description of Artificial Sequence: Synthetic oligonucleotide
  Sense strand starting at position 1920 of SEQ ID NO: 585327
agaggauaaguuggcuuga

SEQ ID NO: 631119 - RNA, 19 nt, Artificial Sequence
  Description of Artificial Sequence: Synthetic oligonucleotide
  Antisense strand to SEQ ID NO: 631118
ucaagccaacuuauccucu

SEQ ID NO: 631120 - RNA, 19 nt, Artificial Sequence
  Description of Artificial Sequence: Synthetic oligonucleotide
  Sense strand starting at position 2106 of SEQ ID NO: 585327
ccgugaguuccucaauuau

SEQ ID NO: 631121 - RNA, 19 nt, Artificial Sequence
  Description of Artificial Sequence: Synthetic oligonucleotide
  Antisense strand to SEQ ID NO: 631120
auaauugaggaacucacgg

SEQ ID NO: 631122 - RNA, 19 nt, Artificial Sequence
  Description of Artificial Sequence: Synthetic oligonucleotide
  Sense strand starting at position 2434 of SEQ ID NO: 585327
agacuuugcccacaggagu

SEQ ID NO: 631123 - RNA, 19 nt, Artificial Sequence
  Description of Artificial Sequence: Synthetic oligonucleotide
  Antisense strand to SEQ ID NO: 631122
acuccugugggcaaagucu

SEQ ID NO: 631124 - RNA, 19 nt, Artificial Sequence
  Description of Artificial Sequence: Synthetic oligonucleotide
  Sense strand starting at position 2447 of SEQ ID NO: 585327
aggaguuuccuagguguag

SEQ ID NO: 631125 - RNA, 19 nt, Artificial Sequence
  Description of Artificial Sequence: Synthetic oligonucleotide
  Antisense strand to SEQ ID NO: 631124
cuacaccuaggaaacuccu

SEQ ID NO: 631126 - RNA, 19 nt, Artificial Sequence
  Description of Artificial Sequence: Synthetic oligonucleotide
  Sense strand starting at position 2448 of SEQ ID NO: 585327
ggaguuuccuagguguaga

SEQ ID NO: 631127 - RNA, 19 nt, Artificial Sequence
  Description of Artificial Sequence: Synthetic oligonucleotide
  Antisense strand to SEQ ID NO: 631126
ucuacaccuaggaaacucc

SEQ ID NO: 631128 - RNA, 19 nt, Artificial Sequence
  Description of Artificial Sequence: Synthetic oligonucleotide
  Sense strand starting at position 2449 of SEQ ID NO: 585327
gaguuuccuagguguagag

SEQ ID NO: 631129 - RNA, 19 nt, Artificial Sequence
  Description of Artificial Sequence: Synthetic oligonucleotide
  Antisense strand to SEQ ID NO: 631128
cucuacaccuaggaaacuc

SEQ ID NO: 631130 - RNA, 19 nt, Artificial Sequence
  Description of Artificial Sequence: Synthetic oligonucleotide
  Sense strand starting at position 2486 of SEQ ID NO: 585327
gcgagaggucccgagaucu

SEQ ID NO: 631131 - RNA, 19 nt, Artificial Sequence
  Description of Artificial Sequence: Synthetic oligonucleotide
  Antisense strand to SEQ ID NO: 631130
agaucucgggaccucucgc

SEQ ID NO: 631132 - RNA, 19 nt, Artificial Sequence
  Description of Artificial Sequence: Synthetic oligonucleotide
  Sense strand starting at position 3195 of SEQ ID NO: 585327
cagugagacccauguccuu

SEQ ID NO: 631133 - RNA, 19 nt, Artificial Sequence
  Description of Artificial Sequence: Synthetic oligonucleotide
  Antisense strand to SEQ ID NO: 631132
aaggacaugggucucacug

SEQ ID NO: 631134 - RNA, 19 nt, Artificial Sequence
  Description of Artificial Sequence: Synthetic oligonucleotide
  Sense strand starting at position 3224 of SEQ ID NO: 585327
acagguuuaguccagcagu

SEQ ID NO: 631135 - RNA, 19 nt, Artificial Sequence
  Description of Artificial Sequence: Synthetic oligonucleotide
  Antisense strand to SEQ ID NO: 631134
acugcuggacuaaaccugu

SEQ ID NO: 631136 - RNA, 19 nt, Artificial Sequence
  Description of Artificial Sequence: Synthetic oligonucleotide
  Sense strand starting at position 3550 of SEQ ID NO: 585327
aagccaacuguaugugaaa

SEQ ID NO: 631137 - RNA, 19 nt, Artificial Sequence
  Description of Artificial Sequence: Synthetic oligonucleotide
  Antisense strand to SEQ ID NO: 631136
uuucacauacaguuggcuu

SEQ ID NO: 631138 - RNA, 19 nt, Artificial Sequence
  Description of Artificial Sequence: Synthetic oligonucleotide
  Sense strand starting at position 3551 of SEQ ID NO: 585327
agccaacuguaugugaaau

SEQ ID NO: 631139 - RNA, 19 nt, Artificial Sequence
  Description of Artificial Sequence: Synthetic oligonucleotide
  Antisense strand to SEQ ID NO: 631138
auuucacauacaguuggcu

SEQ ID NO: 631140 - RNA, 19 nt, Artificial Sequence
  Description of Artificial Sequence: Synthetic oligonucleotide
  Sense strand starting at position 3634 of SEQ ID NO: 585327
gccaguaagcguguuccuu

SEQ ID NO: 631141 - RNA, 19 nt, Artificial Sequence
  Description of Artificial Sequence: Synthetic oligonucleotide
  Antisense strand to SEQ ID NO: 631140
aaggaacacgcuuacuggc

SEQ ID NO: 631142 - RNA, 19 nt, Artificial Sequence
  Description of Artificial Sequence: Synthetic oligonucleotide
  Sense strand starting at position 3765 of SEQ ID NO: 585327
aacuaauaugugggaaugu

SEQ ID NO: 631143 - RNA, 19 nt, Artificial Sequence
  Description of Artificial Sequence: Synthetic oligonucleotide
  Antisense strand to SEQ ID NO: 631142
acauucccacauauuaguu

SEQ ID NO: 631144 - RNA, 19 nt, Artificial Sequence
  Description of Artificial Sequence: Synthetic oligonucleotide
  Sense strand starting at position 3774 of SEQ ID NO: 585327
gugggaaugucagccauaa

SEQ ID NO: 631145 - RNA, 19 nt, Artificial Sequence
  Description of Artificial Sequence: Synthetic oligonucleotide
  Antisense strand to SEQ ID NO: 631144
uuauggcugacauucccac

SEQ ID NO: 631146 - RNA, 19 nt, Artificial Sequence
  Description of Artificial Sequence: Synthetic oligonucleotide
  Sense strand starting at position 3776 of SEQ ID NO: 585327
gggaaugucagccauaagc

SEQ ID NO: 631147 - RNA, 19 nt, Artificial Sequence
  Description of Artificial Sequence: Synthetic oligonucleotide
  Antisense strand to SEQ ID NO: 631146
gcuuauggcugacauuccc

SEQ ID NO: 631148 - RNA, 19 nt, Artificial Sequence
  Description of Artificial Sequence: Synthetic oligonucleotide
  Sense strand starting at position 3778 of SEQ ID NO: 585327
gaaugucagccauaagcug

SEQ ID NO: 631149 - RNA, 19 nt, Artificial Sequence
  Description of Artificial Sequence: Synthetic oligonucleotide
  Antisense strand to SEQ ID NO: 631148
cagcuuauggcugacauuc

SEQ ID NO: 631150 - RNA, 19 nt, Artificial Sequence
  Description of Artificial Sequence: Synthetic oligonucleotide
  Sense strand starting at position 3900 of SEQ ID NO: 585327
aucagaaaguaugaagaaa

SEQ ID NO: 631151 - RNA, 19 nt, Artificial Sequence
  Description of Artificial Sequence: Synthetic oligonucleotide
  Antisense strand to SEQ ID NO: 631150
uuucuucauacuuucugau

SEQ ID NO: 631152 - RNA, 19 nt, Artificial Sequence
  Description of Artificial Sequence: Synthetic oligonucleotide
  Sense strand starting at position 171 of SEQ ID NO: 585328
aagacagggucaucucauu

SEQ ID NO: 631153 - RNA, 19 nt, Artificial Sequence
  Description of Artificial Sequence: Synthetic oligonucleotide
  Antisense strand to SEQ ID NO: 631152
aaugagaugacccugucuu

SEQ ID NO: 631154 - RNA, 19 nt, Artificial Sequence
  Description of Artificial Sequence: Synthetic oligonucleotide
  Sense strand starting at position 264 of SEQ ID NO: 585328
acauaugcuccucaugaag

SEQ ID NO: 631155 - RNA, 19 nt, Artificial Sequence
  Description of Artificial Sequence: Synthetic oligonucleotide
  Antisense strand to SEQ ID NO: 631154
cuucaugaggagcauaugu

SEQ ID NO: 631156 - RNA, 19 nt, Artificial Sequence
  Description of Artificial Sequence: Synthetic oligonucleotide
  Sense strand starting at position 467 of SEQ ID NO: 585328
ugcuuagagcuuugaggga

SEQ ID NO: 631157 - RNA, 19 nt, Artificial Sequence
  Description of Artificial Sequence: Synthetic oligonucleotide
  Antisense strand to SEQ ID NO: 631156
ucccucaaagcucuaagca

SEQ ID NO: 631158 - RNA, 19 nt, Artificial Sequence
  Description of Artificial Sequence: Synthetic oligonucleotide
  Sense strand starting at position 692 of SEQ ID NO: 585328
cagcguuggguugaauaca

SEQ ID NO: 631159 - RNA, 19 nt, Artificial Sequence
  Description of Artificial Sequence: Synthetic oligonucleotide
  Antisense strand to SEQ ID NO: 631158
uguauucaacccaacgcug

SEQ ID NO: 631160 - RNA, 19 nt, Artificial Sequence
  Description of Artificial Sequence: Synthetic oligonucleotide
  Sense strand starting at position 856 of SEQ ID NO: 585328
ugcaguauuggguggagau

SEQ ID NO: 631161 - RNA, 19 nt, Artificial Sequence
  Description of Artificial Sequence: Synthetic oligonucleotide
  Antisense strand to SEQ ID NO: 631160
aucuccacccaauacugca

SEQ ID NO: 631162 - RNA, 19 nt, Artificial Sequence
  Description of Artificial Sequence: Synthetic oligonucleotide
  Sense strand starting at position 857 of SEQ ID NO: 585328
gcaguauuggguggagaug

SEQ ID NO: 631163 - RNA, 19 nt, Artificial Sequence
  Description of Artificial Sequence: Synthetic oligonucleotide
  Antisense strand to SEQ ID NO: 631162
caucuccacccaauacugc

SEQ ID NO: 631164 - RNA, 19 nt, Artificial Sequence
  Description of Artificial Sequence: Synthetic oligonucleotide
  Sense strand starting at position 985 of SEQ ID NO: 585328
gacugagcacaguauuauu

SEQ ID NO: 631165 - RNA, 19 nt, Artificial Sequence
  Description of Artificial Sequence: Synthetic oligonucleotide
  Antisense strand to SEQ ID NO: 631164
aauaauacugugcucaguc

SEQ ID NO: 631166 - RNA, 19 nt, Artificial Sequence
  Description of Artificial Sequence: Synthetic oligonucleotide
  Sense strand starting at position 1051 of SEQ ID NO: 585328
uuaaucagcuggcuuugaa

SEQ ID NO: 631167 - RNA, 19 nt, Artificial Sequence
  Description of Artificial Sequence: Synthetic oligonucleotide
  Antisense strand to SEQ ID NO: 631166
uucaaagccagcugauuaa

SEQ ID NO: 631168 - RNA, 19 nt, Artificial Sequence
  Description of Artificial Sequence: Synthetic oligonucleotide
  Sense strand starting at position 1054 of SEQ ID NO: 585328
aucagcuggcuuugaaauc

SEQ ID NO: 631169 - RNA, 19 nt, Artificial Sequence
  Description of Artificial Sequence: Synthetic oligonucleotide
  Antisense strand to SEQ ID NO: 631168
gauuucaaagccagcugau

SEQ ID NO: 631170 - RNA, 19 nt, Artificial Sequence
  Description of Artificial Sequence: Synthetic oligonucleotide
  Sense strand starting at position 1100 of SEQ ID NO: 585328
acaccaccucccugugauu

SEQ ID NO: 631171 - RNA, 19 nt, Artificial Sequence
  Description of Artificial Sequence: Synthetic oligonucleotide
  Antisense strand to SEQ ID NO: 631170
aaucacagggagguggugu

SEQ ID NO: 631172 - RNA, 19 nt, Artificial Sequence
  Description of Artificial Sequence: Synthetic oligonucleotide
  Sense strand starting at position 1151 of SEQ ID NO: 585328
cccguuccauaccuauuua

SEQ ID NO: 631173 - RNA, 19 nt, Artificial Sequence
  Description of Artificial Sequence: Synthetic oligonucleotide
  Antisense strand to SEQ ID NO: 631172
uaaauagguauggaacggg

SEQ ID NO: 631174 - RNA, 19 nt, Artificial Sequence
  Description of Artificial Sequence: Synthetic oligonucleotide
  Sense strand starting at position 1227 of SEQ ID NO: 585328
aguuauacacaauguugau

SEQ ID NO: 631175 - RNA, 19 nt, Artificial Sequence
  Description of Artificial Sequence: Synthetic oligonucleotide
  Antisense strand to SEQ ID NO: 631174
aucaacauuguguauaacu

SEQ ID NO: 631176 - RNA, 19 nt, Artificial Sequence
  Description of Artificial Sequence: Synthetic oligonucleotide
  Sense strand starting at position 1236 of SEQ ID NO: 585328
caauguugauucucagguu

SEQ ID NO: 631177 - RNA, 19 nt, Artificial Sequence
  Description of Artificial Sequence: Synthetic oligonucleotide
  Antisense strand to SEQ ID NO: 631176
aaccugagaaucaacauug

SEQ ID NO: 631178 - RNA, 19 nt, Artificial Sequence
  Description of Artificial Sequence: Synthetic oligonucleotide
  Sense strand starting at position 1370 of SEQ ID NO: 585328
gccgccuuugcgccucaaa

SEQ ID NO: 631179 - RNA, 19 nt, Artificial Sequence
  Description of Artificial Sequence: Synthetic oligonucleotide
  Antisense strand to SEQ ID NO: 631178
uuugaggcgcaaaggcggc

SEQ ID NO: 631180 - RNA, 19 nt, Artificial Sequence
  Description of Artificial Sequence: Synthetic oligonucleotide
  Sense strand starting at position 1993 of SEQ ID NO: 585328
ccaggucuugcuuagguua

SEQ ID NO: 631181 - RNA, 19 nt, Artificial Sequence
  Description of Artificial Sequence: Synthetic oligonucleotide
  Antisense strand to SEQ ID NO: 631180
uaaccuaagcaagaccugg

SEQ ID NO: 631182 - RNA, 19 nt, Artificial Sequence
  Description of Artificial Sequence: Synthetic oligonucleotide
  Sense strand starting at position 2499 of SEQ ID NO: 585328
ggcugaaagaccugcugaa

SEQ ID NO: 631183 - RNA, 19 nt, Artificial Sequence
  Description of Artificial Sequence: Synthetic oligonucleotide
  Antisense strand to SEQ ID NO: 631182
uucagcaggucuuucagcc

SEQ ID NO: 631184 - RNA, 19 nt, Artificial Sequence
  Description of Artificial Sequence: Synthetic oligonucleotide
  Sense strand starting at position 2561 of SEQ ID NO: 585328
gcgccaucucagguuguca

SEQ ID NO: 631185 - RNA, 19 nt, Artificial Sequence
  Description of Artificial Sequence: Synthetic oligonucleotide
  Antisense strand to SEQ ID NO: 631184
ugacaaccugagauggcgc

SEQ ID NO: 631186 - RNA, 19 nt, Artificial Sequence
  Description of Artificial Sequence: Synthetic oligonucleotide
  Sense strand starting at position 2715 of SEQ ID NO: 585328
ugguuauucucuguggaga

SEQ ID NO: 631187 - RNA, 19 nt, Artificial Sequence
  Description of Artificial Sequence: Synthetic oligonucleotide
  Antisense strand to SEQ ID NO: 631186
ucuccacagagaauaacca

SEQ ID NO: 631188 - RNA, 19 nt, Artificial Sequence
  Description of Artificial Sequence: Synthetic oligonucleotide
  Sense strand starting at position 2716 of SEQ ID NO: 585328
gguuauucucuguggagaa

SEQ ID NO: 631189 - RNA, 19 nt, Artificial Sequence
  Description of Artificial Sequence: Synthetic oligonucleotide
  Antisense strand to SEQ ID NO: 631188
uucuccacagagaauaacc

SEQ ID NO: 631190 - RNA, 19 nt, Artificial Sequence
  Description of Artificial Sequence: Synthetic oligonucleotide
  Sense strand starting at position 2718 of SEQ ID NO: 585328
uuauucucuguggagaacu

SEQ ID NO: 631191 - RNA, 19 nt, Artificial Sequence
  Description of Artificial Sequence: Synthetic oligonucleotide
  Antisense strand to SEQ ID NO: 631190
aguucuccacagagaauaa

SEQ ID NO: 631192 - RNA, 19 nt, Artificial Sequence
  Description of Artificial Sequence: Synthetic oligonucleotide
  Sense strand starting at position 2729 of SEQ ID NO: 585328
ggagaacuugggugacuca

SEQ ID NO: 631193 - RNA, 19 nt, Artificial Sequence
  Description of Artificial Sequence: Synthetic oligonucleotide
  Antisense strand to SEQ ID NO: 631192
ugagucacccaaguucucc

SEQ ID NO: 631194 - RNA, 19 nt, Artificial Sequence
  Description of Artificial Sequence: Synthetic oligonucleotide
  Sense strand starting at position 2732 of SEQ ID NO: 585328
gaacuugggugacucaaca

SEQ ID NO: 631195 - RNA, 19 nt, Artificial Sequence
  Description of Artificial Sequence: Synthetic oligonucleotide
  Antisense strand to SEQ ID NO: 631194
uguugagucacccaaguuc

SEQ ID NO: 631196 - RNA, 19 nt, Artificial Sequence
  Description of Artificial Sequence: Synthetic oligonucleotide
  Sense strand starting at position 2842 of SEQ ID NO: 585328
gagacaguaugaucuguag

SEQ ID NO: 631197 - RNA, 19 nt, Artificial Sequence
  Description of Artificial Sequence: Synthetic oligonucleotide
  Antisense strand to SEQ ID NO: 631196
cuacagaucauacugucuc

SEQ ID NO: 631198 - RNA, 19 nt, Artificial Sequence
  Description of Artificial Sequence: Synthetic oligonucleotide
  Sense strand starting at position 2845 of SEQ ID NO: 585328
acaguaugaucuguagaca

SEQ ID NO: 631199 - RNA, 19 nt, Artificial Sequence
  Description of Artificial Sequence: Synthetic oligonucleotide
  Antisense strand to SEQ ID NO: 631198
ugucuacagaucauacugu

SEQ ID NO: 631200 - RNA, 19 nt, Artificial Sequence
  Description of Artificial Sequence: Synthetic oligonucleotide
  Sense strand starting at position 3167 of SEQ ID NO: 585328
guugguaaacuauagucuu

SEQ ID NO: 631201 - RNA, 19 nt, Artificial Sequence
  Description of Artificial Sequence: Synthetic oligonucleotide
  Antisense strand to SEQ ID NO: 631200
aagacuauaguuuaccaac

SEQ ID NO: 631202 - RNA, 19 nt, Artificial Sequence
  Description of Artificial Sequence: Synthetic oligonucleotide
  Sense strand starting at position 3170 of SEQ ID NO: 585328
gguaaacuauagucuuaaa

SEQ ID NO: 631203 - RNA, 19 nt, Artificial Sequence
  Description of Artificial Sequence: Synthetic oligonucleotide
  Antisense strand to SEQ ID NO: 631202
uuuaagacuauaguuuacc

SEQ ID NO: 631204 - RNA, 19 nt, Artificial Sequence
  Description of Artificial Sequence: Synthetic oligonucleotide
  Sense strand starting at position 3183 of SEQ ID NO: 585328
cuuaaauugugauuugcuu

SEQ ID NO: 631205 - RNA, 19 nt, Artificial Sequence
  Description of Artificial Sequence: Synthetic oligonucleotide
  Antisense strand to SEQ ID NO: 631204
aagcaaaucacaauuuaag

SEQ ID NO: 631206 - RNA, 19 nt, Artificial Sequence
  Description of Artificial Sequence: Synthetic oligonucleotide
  Sense strand starting at position 3192 of SEQ ID NO: 585328
ugauuugcuucuguuaauc

SEQ ID NO: 631207 - RNA, 19 nt, Artificial Sequence
  Description of Artificial Sequence: Synthetic oligonucleotide
  Antisense strand to SEQ ID NO: 631206
gauuaacagaagcaaauca

SEQ ID NO: 631208 - RNA, 19 nt, Artificial Sequence
  Description of Artificial Sequence: Synthetic oligonucleotide
  Sense strand starting at position 3294 of SEQ ID NO: 585328
caucuugaaguuuguuuga

SEQ ID NO: 631209 - RNA, 19 nt, Artificial Sequence
  Description of Artificial Sequence: Synthetic oligonucleotide
  Antisense strand to SEQ ID NO: 631208
ucaaacaaacuucaagaug

SEQ ID NO: 631210 - RNA, 19 nt, Artificial Sequence
  Description of Artificial Sequence: Synthetic oligonucleotide
  Sense strand starting at position 3296 of SEQ ID NO: 585328
ucuugaaguuuguuugaug

SEQ ID NO: 631211 - RNA, 19 nt, Artificial Sequence
  Description of Artificial Sequence: Synthetic oligonucleotide
  Antisense strand to SEQ ID NO: 631210
caucaaacaaacuucaaga

SEQ ID NO: 631212 - RNA, 19 nt, Artificial Sequence
  Description of Artificial Sequence: Synthetic oligonucleotide
  Sense strand starting at position 3297 of SEQ ID NO: 585328
cuugaaguuuguuugauga

SEQ ID NO: 631213 - RNA, 19 nt, Artificial Sequence
  Description of Artificial Sequence: Synthetic oligonucleotide
  Antisense strand to SEQ ID NO: 631212
ucaucaaacaaacuucaag

SEQ ID NO: 631214 - RNA, 19 nt, Artificial Sequence
  Description of Artificial Sequence: Synthetic oligonucleotide
  Sense strand starting at position 3308 of SEQ ID NO: 585328
uuugaugauaaagguguua

SEQ ID NO: 631215 - RNA, 19 nt, Artificial Sequence
  Description of Artificial Sequence: Synthetic oligonucleotide
  Antisense strand to SEQ ID NO: 631214
uaacaccuuuaucaucaaa

SEQ ID NO: 631216 - RNA, 19 nt, Artificial Sequence
  Description of Artificial Sequence: Synthetic oligonucleotide
  Sense strand starting at position 3310 of SEQ ID NO: 585328
ugaugauaaagguguuaug

SEQ ID NO: 631217 - RNA, 19 nt, Artificial Sequence
  Description of Artificial Sequence: Synthetic oligonucleotide
  Antisense strand to SEQ ID NO: 631216
cauaacaccuuuaucauca

SEQ ID NO: 631218 - RNA, 19 nt, Artificial Sequence
  Description of Artificial Sequence: Synthetic oligonucleotide
  Sense strand starting at position 3413 of SEQ ID NO: 585328
aaguaaggacauuguucua

SEQ ID NO: 631219 - RNA, 19 nt, Artificial Sequence
  Description of Artificial Sequence: Synthetic oligonucleotide
  Antisense strand to SEQ ID NO: 631218
uagaacaauguccuuacuu

SEQ ID NO: 631220 - RNA, 19 nt, Artificial Sequence
  Description of Artificial Sequence: Synthetic oligonucleotide
  Sense strand starting at position 3464 of SEQ ID NO: 585328
aaggaaauaugaguuuguu

SEQ ID NO: 631221 - RNA, 19 nt, Artificial Sequence
  Description of Artificial Sequence: Synthetic oligonucleotide
  Antisense strand to SEQ ID NO: 631220
aacaaacucauauuuccuu

SEQ ID NO: 631222 - RNA, 19 nt, Artificial Sequence
  Description of Artificial Sequence: Synthetic oligonucleotide
  Sense strand starting at position 3618 of SEQ ID NO: 585328
uuaugaagugucugauuau

SEQ ID NO: 631223 - RNA, 19 nt, Artificial Sequence
  Description of Artificial Sequence: Synthetic oligonucleotide
  Antisense strand to SEQ ID NO: 631222
auaaucagacacuucauaa

SEQ ID NO: 631224 - RNA, 19 nt, Artificial Sequence
  Description of Artificial Sequence: Synthetic oligonucleotide
  Sense strand starting at position 3743 of SEQ ID NO: 585328
uccaguggccucuaugagu

SEQ ID NO: 631225 - RNA, 19 nt, Artificial Sequence
  Description of Artificial Sequence: Synthetic oligonucleotide
  Antisense strand to SEQ ID NO: 631224
acucauagaggccacugga

SEQ ID NO: 631226 - RNA, 19 nt, Artificial Sequence
  Description of Artificial Sequence: Synthetic oligonucleotide
  Sense strand starting at position 3752 of SEQ ID NO: 585328
cucuaugagugcuuuaaga

SEQ ID NO: 631227 - RNA, 19 nt, Artificial Sequence
  Description of Artificial Sequence: Synthetic oligonucleotide
  Antisense strand to SEQ ID NO: 631226
ucuuaaagcacucauagag

SEQ ID NO: 631228 - RNA, 19 nt, Artificial Sequence
  Description of Artificial Sequence: Synthetic oligonucleotide
  Sense strand starting at position 3807 of SEQ ID NO: 585328
uagagaauuccuugucagu

SEQ ID NO: 631229 - RNA, 19 nt, Artificial Sequence
  Description of Artificial Sequence: Synthetic oligonucleotide
  Antisense strand to SEQ ID NO: 631228
acugacaaggaauucucua

SEQ ID NO: 631230 - RNA, 19 nt, Artificial Sequence
  Description of Artificial Sequence: Synthetic oligonucleotide
  Sense strand starting at position 3809 of SEQ ID NO: 585328
gagaauuccuugucaguua

SEQ ID NO: 631231 - RNA, 19 nt, Artificial Sequence
  Description of Artificial Sequence: Synthetic oligonucleotide
  Antisense strand to SEQ ID NO: 631230
uaacugacaaggaauucuc

SEQ ID NO: 631232 - RNA, 19 nt, Artificial Sequence
  Description of Artificial Sequence: Synthetic oligonucleotide
  Sense strand starting at position 48 of SEQ ID NO: 585329
aguguauaaacuugguuga

SEQ ID NO: 631233 - RNA, 19 nt, Artificial Sequence
  Description of Artificial Sequence: Synthetic oligonucleotide
  Antisense strand to SEQ ID NO: 631232
ucaaccaaguuuauacacu

SEQ ID NO: 631234 - RNA, 19 nt, Artificial Sequence
  Description of Artificial Sequence: Synthetic oligonucleotide
  Sense strand starting at position 49 of SEQ ID NO: 585329
guguauaaacuugguugau

SEQ ID NO: 631235 - RNA, 19 nt, Artificial Sequence
  Description of Artificial Sequence: Synthetic oligonucleotide
  Antisense strand to SEQ ID NO: 631234
aucaaccaaguuuauacac

SEQ ID NO: 631236 - RNA, 19 nt, Artificial Sequence
  Description of Artificial Sequence: Synthetic oligonucleotide
  Sense strand starting at position 50 of SEQ ID NO: 585329
uguauaaacuugguugaua

SEQ ID NO: 631237 - RNA, 19 nt, Artificial Sequence
  Description of Artificial Sequence: Synthetic oligonucleotide
  Antisense strand to SEQ ID NO: 631236
uaucaaccaaguuuauaca

SEQ ID NO: 631238 - RNA, 19 nt, Artificial Sequence
  Description of Artificial Sequence: Synthetic oligonucleotide
  Sense strand starting at position 51 of SEQ ID NO: 585329
guauaaacuugguugauaa

SEQ ID NO: 631239 - RNA, 19 nt, Artificial Sequence
  Description of Artificial Sequence: Synthetic oligonucleotide
  Antisense strand to SEQ ID NO: 631238
uuaucaaccaaguuuauac

SEQ ID NO: 631240 - RNA, 19 nt, Artificial Sequence
  Description of Artificial Sequence: Synthetic oligonucleotide
  Sense strand starting at position 242 of SEQ ID NO: 585329
ggaaucagucagcagcuau

SEQ ID NO: 631241 - RNA, 19 nt, Artificial Sequence
  Description of Artificial Sequence: Synthetic oligonucleotide
  Antisense strand to SEQ ID NO: 631240
auagcugcugacugauucc

SEQ ID NO: 631242 - RNA, 19 nt, Artificial Sequence
  Description of Artificial Sequence: Synthetic oligonucleotide
  Sense strand starting at position 385 of SEQ ID NO: 585329
guacuauuguacucucaac

SEQ ID NO: 631243 - RNA, 19 nt, Artificial Sequence
  Description of Artificial Sequence: Synthetic oligonucleotide
  Antisense strand to SEQ ID NO: 631242
guugagaguacaauaguac

SEQ ID NO: 631244 - RNA, 19 nt, Artificial Sequence
  Description of Artificial Sequence: Synthetic oligonucleotide
  Sense strand starting at position 508 of SEQ ID NO: 585329
cuuggaguaucucugagac

SEQ ID NO: 631245 - RNA, 19 nt, Artificial Sequence
  Description of Artificial Sequence: Synthetic oligonucleotide
  Antisense strand to SEQ ID NO: 631244
gucucagagauacuccaag

SEQ ID NO: 631246 - RNA, 19 nt, Artificial Sequence
  Description of Artificial Sequence: Synthetic oligonucleotide
  Sense strand starting at position 510 of SEQ ID NO: 585329
uggaguaucucugagacau

SEQ ID NO: 631247 - RNA, 19 nt, Artificial Sequence
  Description of Artificial Sequence: Synthetic oligonucleotide
  Antisense strand to SEQ ID NO: 631246
augucucagagauacucca

SEQ ID NO: 631248 - RNA, 19 nt, Artificial Sequence
  Description of Artificial Sequence: Synthetic oligonucleotide
  Sense strand starting at position 540 of SEQ ID NO: 585329
cuugauuucuaaugugaau

SEQ ID NO: 631249 - RNA, 19 nt, Artificial Sequence
  Description of Artificial Sequence: Synthetic oligonucleotide
  Antisense strand to SEQ ID NO: 631248
auucacauuagaaaucaag

SEQ ID NO: 631250 - RNA, 19 nt, Artificial Sequence
  Description of Artificial Sequence: Synthetic oligonucleotide
  Sense strand starting at position 543 of SEQ ID NO: 585329
gauuucuaaugugaauaug

SEQ ID NO: 631251 - RNA, 19 nt, Artificial Sequence
  Description of Artificial Sequence: Synthetic oligonucleotide
  Antisense strand to SEQ ID NO: 631250
cauauucacauuagaaauc

SEQ ID NO: 631252 - RNA, 19 nt, Artificial Sequence
  Description of Artificial Sequence: Synthetic oligonucleotide
  Sense strand starting at position 779 of SEQ ID NO: 585329
aggagaacuuucccgcuuu

SEQ ID NO: 631253 - RNA, 19 nt, Artificial Sequence
  Description of Artificial Sequence: Synthetic oligonucleotide
  Antisense strand to SEQ ID NO: 631252
aaagcgggaaaguucuccu

SEQ ID NO: 631254 - RNA, 19 nt, Artificial Sequence
  Description of Artificial Sequence: Synthetic oligonucleotide
  Sense strand starting at position 896 of SEQ ID NO: 585329
guugaagaauaacuuugau

SEQ ID NO: 631255 - RNA, 19 nt, Artificial Sequence
  Description of Artificial Sequence: Synthetic oligonucleotide
  Antisense strand to SEQ ID NO: 631254
aucaaaguuauucuucaac

SEQ ID NO: 631256 - RNA, 19 nt, Artificial Sequence
  Description of Artificial Sequence: Synthetic oligonucleotide
  Sense strand starting at position 910 of SEQ ID NO: 585329
uugauagaaucuuaagcag

SEQ ID NO: 631257 - RNA, 19 nt, Artificial Sequence
  Description of Artificial Sequence: Synthetic oligonucleotide
  Antisense strand to SEQ ID NO: 631256
cugcuuaagauucuaucaa

SEQ ID NO: 631258 - RNA, 19 nt, Artificial Sequence
  Description of Artificial Sequence: Synthetic oligonucleotide
  Sense strand starting at position 1038 of SEQ ID NO: 585329
ugcauaagucagugaaggu

SEQ ID NO: 631259 - RNA, 19 nt, Artificial Sequence
  Description of Artificial Sequence: Synthetic oligonucleotide
  Antisense strand to SEQ ID NO: 631258
accuucacugacuuaugca

SEQ ID NO: 631260 - RNA, 19 nt, Artificial Sequence
  Description of Artificial Sequence: Synthetic oligonucleotide
  Sense strand starting at position 1039 of SEQ ID NO: 585329
gcauaagucagugaagguc

SEQ ID NO: 631261 - RNA, 19 nt, Artificial Sequence
  Description of Artificial Sequence: Synthetic oligonucleotide
  Antisense strand to SEQ ID NO: 631260
gaccuucacugacuuaugc

SEQ ID NO: 631262 - RNA, 19 nt, Artificial Sequence
  Description of Artificial Sequence: Synthetic oligonucleotide
  Sense strand starting at position 1071 of SEQ ID NO: 585329
caauuaacucagggucugu

SEQ ID NO: 631263 - RNA, 19 nt, Artificial Sequence
  Description of Artificial Sequence: Synthetic oligonucleotide
  Antisense strand to SEQ ID NO: 631262
acagacccugaguuaauug

SEQ ID NO: 631264 - RNA, 19 nt, Artificial Sequence
  Description of Artificial Sequence: Synthetic oligonucleotide
  Sense strand starting at position 1202 of SEQ ID NO: 585329
agaagaguauugucccaaa

SEQ ID NO: 631265 - RNA, 19 nt, Artificial Sequence
  Description of Artificial Sequence: Synthetic oligonucleotide
  Antisense strand to SEQ ID NO: 631264
uuugggacaauacucuucu

SEQ ID NO: 631266 - RNA, 19 nt, Artificial Sequence
  Description of Artificial Sequence: Synthetic oligonucleotide
  Sense strand starting at position 1743 of SEQ ID NO: 585329
gguggaucucaucgagauc

SEQ ID NO: 631267 - RNA, 19 nt, Artificial Sequence
  Description of Artificial Sequence: Synthetic oligonucleotide
  Antisense strand to SEQ ID NO: 631266
gaucucgaugagauccacc

SEQ ID NO: 631268 - RNA, 19 nt, Artificial Sequence
  Description of Artificial Sequence: Synthetic oligonucleotide
  Sense strand starting at position 1744 of SEQ ID NO: 585329
guggaucucaucgagaucu

SEQ ID NO: 631269 - RNA, 19 nt, Artificial Sequence
  Description of Artificial Sequence: Synthetic oligonucleotide
  Antisense strand to SEQ ID NO: 631268
agaucucgaugagauccac

SEQ ID NO: 631270 - RNA, 19 nt, Artificial Sequence
  Description of Artificial Sequence: Synthetic oligonucleotide
  Sense strand starting at position 1746 of SEQ ID NO: 585329
ggaucucaucgagaucuuc

SEQ ID NO: 631271 - RNA, 19 nt, Artificial Sequence
  Description of Artificial Sequence: Synthetic oligonucleotide
  Antisense strand to SEQ ID NO: 631270
gaagaucucgaugagaucc

SEQ ID NO: 631272 - RNA, 19 nt, Artificial Sequence
  Description of Artificial Sequence: Synthetic oligonucleotide
  Sense strand starting at position 1767 of SEQ ID NO: 585329
agacaccuuccaugcgaaa

SEQ ID NO: 631273 - RNA, 19 nt, Artificial Sequence
  Description of Artificial Sequence: Synthetic oligonucleotide
  Antisense strand to SEQ ID NO: 631272
uuucgcauggaaggugucu

SEQ ID NO: 631274 - RNA, 19 nt, Artificial Sequence
  Description of Artificial Sequence: Synthetic oligonucleotide
  Sense strand starting at position 1959 of SEQ ID NO: 585329
ugaucuuggcgcgaaacuu

SEQ ID NO: 631275 - RNA, 19 nt, Artificial Sequence
  Description of Artificial Sequence: Synthetic oligonucleotide
  Antisense strand to SEQ ID NO: 631274
aaguuucgcgccaagauca

SEQ ID NO: 631276 - RNA, 19 nt, Artificial Sequence
  Description of Artificial Sequence: Synthetic oligonucleotide
  Sense strand starting at position 2232 of SEQ ID NO: 585329
uuccacuccgguuauaaga

SEQ ID NO: 631277 - RNA, 19 nt, Artificial Sequence
  Description of Artificial Sequence: Synthetic oligonucleotide
  Antisense strand to SEQ ID NO: 631276
ucuuauaaccggaguggaa

SEQ ID NO: 631278 - RNA, 19 nt, Artificial Sequence
  Description of Artificial Sequence: Synthetic oligonucleotide
  Sense strand starting at position 2267 of SEQ ID NO: 585329
ugcugaaacuucuuaguau

SEQ ID NO: 631279 - RNA, 19 nt, Artificial Sequence
  Description of Artificial Sequence: Synthetic oligonucleotide
  Antisense strand to SEQ ID NO: 631278
auacuaagaaguuucagca

SEQ ID NO: 631280 - RNA, 19 nt, Artificial Sequence
  Description of Artificial Sequence: Synthetic oligonucleotide
  Sense strand starting at position 2387 of SEQ ID NO: 585329
gauauaguuccacgugucu

SEQ ID NO: 631281 - RNA, 19 nt, Artificial Sequence
  Description of Artificial Sequence: Synthetic oligonucleotide
  Antisense strand to SEQ ID NO: 631280
agacacguggaacuauauc

SEQ ID NO: 631282 - RNA, 19 nt, Artificial Sequence
  Description of Artificial Sequence: Synthetic oligonucleotide
  Sense strand starting at position 2474 of SEQ ID NO: 585329
ccuuuccaugcuggugaaa

SEQ ID NO: 631283 - RNA, 19 nt, Artificial Sequence
  Description of Artificial Sequence: Synthetic oligonucleotide
  Antisense strand to SEQ ID NO: 631282
uuucaccagcauggaaagg

SEQ ID NO: 631284 - RNA, 19 nt, Artificial Sequence
  Description of Artificial Sequence: Synthetic oligonucleotide
  Sense strand starting at position 2529 of SEQ ID NO: 585329
aguguauggaguuauaaca

SEQ ID NO: 631285 - RNA, 19 nt, Artificial Sequence
  Description of Artificial Sequence: Synthetic oligonucleotide
  Antisense strand to SEQ ID NO: 631284
uguuauaacuccauacacu

SEQ ID NO: 631286 - RNA, 19 nt, Artificial Sequence
  Description of Artificial Sequence: Synthetic oligonucleotide
  Sense strand starting at position 2658 of SEQ ID NO: 585329
aagugaagugcuggucaau

SEQ ID NO: 631287 - RNA, 19 nt, Artificial Sequence
  Description of Artificial Sequence: Synthetic oligonucleotide
  Antisense strand to SEQ ID NO: 631286
auugaccagcacuucacuu

SEQ ID NO: 631288 - RNA, 19 nt, Artificial Sequence
  Description of Artificial Sequence: Synthetic oligonucleotide
  Sense strand starting at position 2661 of SEQ ID NO: 585329
ugaagugcuggucaaugaa

SEQ ID NO: 631289 - RNA, 19 nt, Artificial Sequence
  Description of Artificial Sequence: Synthetic oligonucleotide
  Antisense strand to SEQ ID NO: 631288
uucauugaccagcacuuca

SEQ ID NO: 631290 - RNA, 19 nt, Artificial Sequence
  Description of Artificial Sequence: Synthetic oligonucleotide
  Sense strand starting at position 2987 of SEQ ID NO: 585329
auucuuugcccuugggaaa

SEQ ID NO: 631291 - RNA, 19 nt, Artificial Sequence
  Description of Artificial Sequence: Synthetic oligonucleotide
  Antisense strand to SEQ ID NO: 631290
uuucccaagggcaaagaau

SEQ ID NO: 631292 - RNA, 19 nt, Artificial Sequence
  Description of Artificial Sequence: Synthetic oligonucleotide
  Sense strand starting at position 2988 of SEQ ID NO: 585329
uucuuugcccuugggaaau

SEQ ID NO: 631293 - RNA, 19 nt, Artificial Sequence
  Description of Artificial Sequence: Synthetic oligonucleotide
  Antisense strand to SEQ ID NO: 631292
auuucccaagggcaaagaa

SEQ ID NO: 631294 - RNA, 19 nt, Artificial Sequence
  Description of Artificial Sequence: Synthetic oligonucleotide
  Sense strand starting at position 3044 of SEQ ID NO: 585329
cuacuacuucuagggucau

SEQ ID NO: 631295 - RNA, 19 nt, Artificial Sequence
  Description of Artificial Sequence: Synthetic oligonucleotide
  Antisense strand to SEQ ID NO: 631294
augacccuagaaguaguag

SEQ ID NO: 631296 - RNA, 19 nt, Artificial Sequence
  Description of Artificial Sequence: Synthetic oligonucleotide
  Sense strand starting at position 3107 of SEQ ID NO: 585329
augacuuaguuguuugacu

SEQ ID NO: 631297 - RNA, 19 nt, Artificial Sequence
  Description of Artificial Sequence: Synthetic oligonucleotide
  Antisense strand to SEQ ID NO: 631296
agucaaacaacuaagucau

SEQ ID NO: 631298 - RNA, 19 nt, Artificial Sequence
  Description of Artificial Sequence: Synthetic oligonucleotide
  Sense strand starting at position 3109 of SEQ ID NO: 585329
gacuuaguuguuugacuca

SEQ ID NO: 631299 - RNA, 19 nt, Artificial Sequence
  Description of Artificial Sequence: Synthetic oligonucleotide
  Antisense strand to SEQ ID NO: 631298
ugagucaaacaacuaaguc

SEQ ID NO: 631300 - RNA, 19 nt, Artificial Sequence
  Description of Artificial Sequence: Synthetic oligonucleotide
  Sense strand starting at position 3112 of SEQ ID NO: 585329
uuaguuguuugacucaguu

SEQ ID NO: 631301 - RNA, 19 nt, Artificial Sequence
  Description of Artificial Sequence: Synthetic oligonucleotide
  Antisense strand to SEQ ID NO: 631300
aacugagucaaacaacuaa

SEQ ID NO: 631302 - RNA, 19 nt, Artificial Sequence
  Description of Artificial Sequence: Synthetic oligonucleotide
  Sense strand starting at position 3114 of SEQ ID NO: 585329
aguuguuugacucaguuga

SEQ ID NO: 631303 - RNA, 19 nt, Artificial Sequence
  Description of Artificial Sequence: Synthetic oligonucleotide
  Antisense strand to SEQ ID NO: 631302
ucaacugagucaaacaacu

SEQ ID NO: 631304 - RNA, 19 nt, Artificial Sequence
  Description of Artificial Sequence: Synthetic oligonucleotide
  Sense strand starting at position 3116 of SEQ ID NO: 585329
uuguuugacucaguugaaa

SEQ ID NO: 631305 - RNA, 19 nt, Artificial Sequence
  Description of Artificial Sequence: Synthetic oligonucleotide
  Antisense strand to SEQ ID NO: 631304
uuucaacugagucaaacaa

SEQ ID NO: 631306 - RNA, 19 nt, Artificial Sequence
  Description of Artificial Sequence: Synthetic oligonucleotide
  Sense strand starting at position 3436 of SEQ ID NO: 585329
gaauucugaugggaauuau

SEQ ID NO: 631307 - RNA, 19 nt, Artificial Sequence
  Description of Artificial Sequence: Synthetic oligonucleotide
  Antisense strand to SEQ ID NO: 631306
auaauucccaucagaauuc

SEQ ID NO: 631308 - RNA, 19 nt, Artificial Sequence
  Description of Artificial Sequence: Synthetic oligonucleotide
  Sense strand starting at position 3445 of SEQ ID NO: 585329
ugggaauuaucaccagccu

SEQ ID NO: 631309 - RNA, 19 nt, Artificial Sequence
  Description of Artificial Sequence: Synthetic oligonucleotide
  Antisense strand to SEQ ID NO: 631308
aggcuggugauaauuccca

SEQ ID NO: 631310 - RNA, 19 nt, Artificial Sequence
  Description of Artificial Sequence: Synthetic oligonucleotide
  Sense strand starting at position 3532 of SEQ ID NO: 585329
guucuuaucuguuccauac

SEQ ID NO: 631311 - RNA, 19 nt, Artificial Sequence
  Description of Artificial Sequence: Synthetic oligonucleotide
  Antisense strand to SEQ ID NO: 631310
guauggaacagauaagaac

SEQ ID NO: 631312 - RNA, 19 nt, Artificial Sequence
  Description of Artificial Sequence: Synthetic oligonucleotide
  Sense strand starting at position 65 of SEQ ID NO: 585330
acaagauguggugguaauu

SEQ ID NO: 631313 - RNA, 19 nt, Artificial Sequence
  Description of Artificial Sequence: Synthetic oligonucleotide
  Antisense strand to SEQ ID NO: 631312
aauuaccaccacaucuugu

SEQ ID NO: 631314 - RNA, 19 nt, Artificial Sequence
  Description of Artificial Sequence: Synthetic oligonucleotide
  Sense strand starting at position 76 of SEQ ID NO: 585330
ugguaauucccagguuucu

SEQ ID NO: 631315 - RNA, 19 nt, Artificial Sequence
  Description of Artificial Sequence: Synthetic oligonucleotide
  Antisense strand to SEQ ID NO: 631314
agaaaccugggaauuacca

SEQ ID NO: 631316 - RNA, 19 nt, Artificial Sequence
  Description of Artificial Sequence: Synthetic oligonucleotide
  Sense strand starting at position 87 of SEQ ID NO: 585330
agguuucuggcuuggagaa

SEQ ID NO: 631317 - RNA, 19 nt, Artificial Sequence
  Description of Artificial Sequence: Synthetic oligonucleotide
  Antisense strand to SEQ ID NO: 631316
uucuccaagccagaaaccu

SEQ ID NO: 631318 - RNA, 19 nt, Artificial Sequence
  Description of Artificial Sequence: Synthetic oligonucleotide
  Sense strand starting at position 135 of SEQ ID NO: 585330
gggucaauacuuuggaagu

SEQ ID NO: 631319 - RNA, 19 nt, Artificial Sequence
  Description of Artificial Sequence: Synthetic oligonucleotide
  Antisense strand to SEQ ID NO: 631318
acuuccaaaguauugaccc

SEQ ID NO: 631320 - RNA, 19 nt, Artificial Sequence
  Description of Artificial Sequence: Synthetic oligonucleotide
  Sense strand starting at position 141 of SEQ ID NO: 585330
auacuuuggaagugaguaa

SEQ ID NO: 631321 - RNA, 19 nt, Artificial Sequence
  Description of Artificial Sequence: Synthetic oligonucleotide
  Antisense strand to SEQ ID NO: 631320
uuacucacuuccaaaguau

SEQ ID NO: 631322 - RNA, 19 nt, Artificial Sequence
  Description of Artificial Sequence: Synthetic oligonucleotide
  Sense strand starting at position 425 of SEQ ID NO: 585330
aguaguauaguguaguaga

SEQ ID NO: 631323 - RNA, 19 nt, Artificial Sequence
  Description of Artificial Sequence: Synthetic oligonucleotide
  Antisense strand to SEQ ID NO: 631322
ucuacuacacuauacuacu

SEQ ID NO: 631324 - RNA, 19 nt, Artificial Sequence
  Description of Artificial Sequence: Synthetic oligonucleotide
  Sense strand starting at position 864 of SEQ ID NO: 585330
aguaaacucugguuugacu

SEQ ID NO: 631325 - RNA, 19 nt, Artificial Sequence
  Description of Artificial Sequence: Synthetic oligonucleotide
  Antisense strand to SEQ ID NO: 631324
agucaaaccagaguuuacu

SEQ ID NO: 631326 - RNA, 19 nt, Artificial Sequence
  Description of Artificial Sequence: Synthetic oligonucleotide
  Sense strand starting at position 1039 of SEQ ID NO: 585330
ccacuuuaugggcacugaa

SEQ ID NO: 631327 - RNA, 19 nt, Artificial Sequence
  Description of Artificial Sequence: Synthetic oligonucleotide
  Antisense strand to SEQ ID NO: 631326
uucagugcccauaaagugg

SEQ ID NO: 631328 - RNA, 19 nt, Artificial Sequence
  Description of Artificial Sequence: Synthetic oligonucleotide
  Sense strand starting at position 1042 of SEQ ID NO: 585330
cuuuaugggcacugaaaca

SEQ ID NO: 631329 - RNA, 19 nt, Artificial Sequence
  Description of Artificial Sequence: Synthetic oligonucleotide
  Antisense strand to SEQ ID NO: 631328
uguuucagugcccauaaag

SEQ ID NO: 631330 - RNA, 19 nt, Artificial Sequence
  Description of Artificial Sequence: Synthetic oligonucleotide
  Sense strand starting at position 1112 of SEQ ID NO: 585330
ggccuacuucgaggcauaa

SEQ ID NO: 631331 - RNA, 19 nt, Artificial Sequence
  Description of Artificial Sequence: Synthetic oligonucleotide
  Antisense strand to SEQ ID NO: 631330
uuaugccucgaaguaggcc

SEQ ID NO: 631332 - RNA, 19 nt, Artificial Sequence
  Description of Artificial Sequence: Synthetic oligonucleotide
  Sense strand starting at position 1114 of SEQ ID NO: 585330
ccuacuucgaggcauaagu

SEQ ID NO: 631333 - RNA, 19 nt, Artificial Sequence
  Description of Artificial Sequence: Synthetic oligonucleotide
  Antisense strand to SEQ ID NO: 631332
acuuaugccucgaaguagg

SEQ ID NO: 631334 - RNA, 19 nt, Artificial Sequence
  Description of Artificial Sequence: Synthetic oligonucleotide
  Sense strand starting at position 1116 of SEQ ID NO: 585330
uacuucgaggcauaaguua

SEQ ID NO: 631335 - RNA, 19 nt, Artificial Sequence
  Description of Artificial Sequence: Synthetic oligonucleotide
  Antisense strand to SEQ ID NO: 631334
uaacuuaugccucgaagua

SEQ ID NO: 631336 - RNA, 19 nt, Artificial Sequence
  Description of Artificial Sequence: Synthetic oligonucleotide
  Sense strand starting at position 1142 of SEQ ID NO: 585330
cuacaugaaucucuggcua

SEQ ID NO: 631337 - RNA, 19 nt, Artificial Sequence
  Description of Artificial Sequence: Synthetic oligonucleotide
  Antisense strand to SEQ ID NO: 631336
uagccagagauucauguag

SEQ ID NO: 631338 - RNA, 19 nt, Artificial Sequence
  Description of Artificial Sequence: Synthetic oligonucleotide
  Sense strand starting at position 1147 of SEQ ID NO: 585330
ugaaucucuggcuaacaca

SEQ ID NO: 631339 - RNA, 19 nt, Artificial Sequence
  Description of Artificial Sequence: Synthetic oligonucleotide
  Antisense strand to SEQ ID NO: 631338
uguguuagccagagauuca

SEQ ID NO: 631340 - RNA, 19 nt, Artificial Sequence
  Description of Artificial Sequence: Synthetic oligonucleotide
  Sense strand starting at position 1208 of SEQ ID NO: 585330
ggccuauguuaccuaauuc

SEQ ID NO: 631341 - RNA, 19 nt, Artificial Sequence
  Description of Artificial Sequence: Synthetic oligonucleotide
  Antisense strand to SEQ ID NO: 631340
gaauuagguaacauaggcc

SEQ ID NO: 631342 - RNA, 19 nt, Artificial Sequence
  Description of Artificial Sequence: Synthetic oligonucleotide
  Sense strand starting at position 1353 of SEQ ID NO: 585330
auguccacuuaucagauuu

SEQ ID NO: 631343 - RNA, 19 nt, Artificial Sequence
  Description of Artificial Sequence: Synthetic oligonucleotide
  Antisense strand to SEQ ID NO: 631342
aaaucugauaaguggacau

SEQ ID NO: 631344 - RNA, 19 nt, Artificial Sequence
  Description of Artificial Sequence: Synthetic oligonucleotide
  Sense strand starting at position 1474 of SEQ ID NO: 585330
ccaagacucgaaggaaagu

SEQ ID NO: 631345 - RNA, 19 nt, Artificial Sequence
  Description of Artificial Sequence: Synthetic oligonucleotide
  Antisense strand to SEQ ID NO: 631344
acuuuccuucgagucuugg

SEQ ID NO: 631346 - RNA, 19 nt, Artificial Sequence
  Description of Artificial Sequence: Synthetic oligonucleotide
  Sense strand starting at position 1864 of SEQ ID NO: 585330
agggacucauccucaguga

SEQ ID NO: 631347 - RNA, 19 nt, Artificial Sequence
  Description of Artificial Sequence: Synthetic oligonucleotide
  Antisense strand to SEQ ID NO: 631346
ucacugaggaugagucccu

SEQ ID NO: 631348 - RNA, 19 nt, Artificial Sequence
  Description of Artificial Sequence: Synthetic oligonucleotide
  Sense strand starting at position 1867 of SEQ ID NO: 585330
gacucauccucagugaagg

SEQ ID NO: 631349 - RNA, 19 nt, Artificial Sequence
  Description of Artificial Sequence: Synthetic oligonucleotide
  Antisense strand to SEQ ID NO: 631348
ccuucacugaggaugaguc

SEQ ID NO: 631350 - RNA, 19 nt, Artificial Sequence
  Description of Artificial Sequence: Synthetic oligonucleotide
  Sense strand starting at position 2011 of SEQ ID NO: 585330
ggcgguucccaguaauaag

SEQ ID NO: 631351 - RNA, 19 nt, Artificial Sequence
  Description of Artificial Sequence: Synthetic oligonucleotide
  Antisense strand to SEQ ID NO: 631350
cuuauuacugggaaccgcc

SEQ ID NO: 631352 - RNA, 19 nt, Artificial Sequence
  Description of Artificial Sequence: Synthetic oligonucleotide
  Sense strand starting at position 2052 of SEQ ID NO: 585330
uccuguaugucucuugaug

SEQ ID NO: 631353 - RNA, 19 nt, Artificial Sequence
  Description of Artificial Sequence: Synthetic oligonucleotide
  Antisense strand to SEQ ID NO: 631352
caucaagagacauacagga

SEQ ID NO: 631354 - RNA, 19 nt, Artificial Sequence
  Description of Artificial Sequence: Synthetic oligonucleotide
  Sense strand starting at position 2257 of SEQ ID NO: 585330
gccagccaucucguaguua

SEQ ID NO: 631355 - RNA, 19 nt, Artificial Sequence
  Description of Artificial Sequence: Synthetic oligonucleotide
  Antisense strand to SEQ ID NO: 631354
uaacuacgagauggcuggc

SEQ ID NO: 631356 - RNA, 19 nt, Artificial Sequence
  Description of Artificial Sequence: Synthetic oligonucleotide
  Sense strand starting at position 2275 of SEQ ID NO: 585330
agaaacgucucucuaggua

SEQ ID NO: 631357 - RNA, 19 nt, Artificial Sequence
  Description of Artificial Sequence: Synthetic oligonucleotide
  Antisense strand to SEQ ID NO: 631356
uaccuagagagacguuucu

SEQ ID NO: 631358 - RNA, 19 nt, Artificial Sequence
  Description of Artificial Sequence: Synthetic oligonucleotide
  Sense strand starting at position 2404 of SEQ ID NO: 585330
agaagaguuuccucccaug

SEQ ID NO: 631359 - RNA, 19 nt, Artificial Sequence
  Description of Artificial Sequence: Synthetic oligonucleotide
  Antisense strand to SEQ ID NO: 631358
caugggaggaaacucuucu

SEQ ID NO: 631360 - RNA, 19 nt, Artificial Sequence
  Description of Artificial Sequence: Synthetic oligonucleotide
  Sense strand starting at position 2494 of SEQ ID NO: 585330
cuccauacacccggauuau

SEQ ID NO: 631361 - RNA, 19 nt, Artificial Sequence
  Description of Artificial Sequence: Synthetic oligonucleotide
  Antisense strand to SEQ ID NO: 631360
auaauccggguguauggag

SEQ ID NO: 631362 - RNA, 19 nt, Artificial Sequence
  Description of Artificial Sequence: Synthetic oligonucleotide
  Sense strand starting at position 2519 of SEQ ID NO: 585330
gucacucccuuggucagaa

SEQ ID NO: 631363 - RNA, 19 nt, Artificial Sequence
  Description of Artificial Sequence: Synthetic oligonucleotide
  Antisense strand to SEQ ID NO: 631362
uucugaccaagggagugac

SEQ ID NO: 631364 - RNA, 19 nt, Artificial Sequence
  Description of Artificial Sequence: Synthetic oligonucleotide
  Sense strand starting at position 2539 of SEQ ID NO: 585330
gcgucacugcccucuuaga

SEQ ID NO: 631365 - RNA, 19 nt, Artificial Sequence
  Description of Artificial Sequence: Synthetic oligonucleotide
  Antisense strand to SEQ ID NO: 631364
ucuaagagggcagugacgc

SEQ ID NO: 631366 - RNA, 19 nt, Artificial Sequence
  Description of Artificial Sequence: Synthetic oligonucleotide
  Sense strand starting at position 2660 of SEQ ID NO: 585330
uuuagaaaguggucaagug

SEQ ID NO: 631367 - RNA, 19 nt, Artificial Sequence
  Description of Artificial Sequence: Synthetic oligonucleotide
  Antisense strand to SEQ ID NO: 631366
cacuugaccacuuucuaaa

SEQ ID NO: 631368 - RNA, 19 nt, Artificial Sequence
  Description of Artificial Sequence: Synthetic oligonucleotide
  Sense strand starting at position 2661 of SEQ ID NO: 585330
uuagaaaguggucaaguga

SEQ ID NO: 631369 - RNA, 19 nt, Artificial Sequence
  Description of Artificial Sequence: Synthetic oligonucleotide
  Antisense strand to SEQ ID NO: 631368
ucacuugaccacuuucuaa

SEQ ID NO: 631370 - RNA, 19 nt, Artificial Sequence
  Description of Artificial Sequence: Synthetic oligonucleotide
  Sense strand starting at position 2758 of SEQ ID NO: 585330
acgguaagcacucaguaaa

SEQ ID NO: 631371 - RNA, 19 nt, Artificial Sequence
  Description of Artificial Sequence: Synthetic oligonucleotide
  Antisense strand to SEQ ID NO: 631370
uuuacugagugcuuaccgu

SEQ ID NO: 631372 - RNA, 19 nt, Artificial Sequence
  Description of Artificial Sequence: Synthetic oligonucleotide
  Sense strand starting at position 2788 of SEQ ID NO: 585330
ggagguguagugugacuca

SEQ ID NO: 631373 - RNA, 19 nt, Artificial Sequence
  Description of Artificial Sequence: Synthetic oligonucleotide
  Antisense strand to SEQ ID NO: 631372
ugagucacacuacaccucc

SEQ ID NO: 631374 - RNA, 19 nt, Artificial Sequence
  Description of Artificial Sequence: Synthetic oligonucleotide
  Sense strand starting at position 2823 of SEQ ID NO: 585330
gaaucaugaguuggcugua

SEQ ID NO: 631375 - RNA, 19 nt, Artificial Sequence
  Description of Artificial Sequence: Synthetic oligonucleotide
  Antisense strand to SEQ ID NO: 631374
uacagccaacucaugauuc

SEQ ID NO: 631376 - RNA, 19 nt, Artificial Sequence
  Description of Artificial Sequence: Synthetic oligonucleotide
  Sense strand starting at position 2826 of SEQ ID NO: 585330
ucaugaguuggcuguacag

SEQ ID NO: 631377 - RNA, 19 nt, Artificial Sequence
  Description of Artificial Sequence: Synthetic oligonucleotide
  Antisense strand to SEQ ID NO: 631376
cuguacagccaacucauga

SEQ ID NO: 631378 - RNA, 19 nt, Artificial Sequence
  Description of Artificial Sequence: Synthetic oligonucleotide
  Sense strand starting at position 2872 of SEQ ID NO: 585330
cugagucgaccucaucuaa

SEQ ID NO: 631379 - RNA, 19 nt, Artificial Sequence
  Description of Artificial Sequence: Synthetic oligonucleotide
  Antisense strand to SEQ ID NO: 631378
uuagaugaggucgacucag

SEQ ID NO: 631380 - RNA, 19 nt, Artificial Sequence
  Description of Artificial Sequence: Synthetic oligonucleotide
  Sense strand starting at position 3582 of SEQ ID NO: 585330
ugaccugaguucguaacuu

SEQ ID NO: 631381 - RNA, 19 nt, Artificial Sequence
  Description of Artificial Sequence: Synthetic oligonucleotide
  Antisense strand to SEQ ID NO: 631380
aaguuacgaacucagguca

SEQ ID NO: 631382 - RNA, 19 nt, Artificial Sequence
  Description of Artificial Sequence: Synthetic oligonucleotide
  Sense strand starting at position 3607 of SEQ ID NO: 585330
cuuguaucugggcaaguua

SEQ ID NO: 631383 - RNA, 19 nt, Artificial Sequence
  Description of Artificial Sequence: Synthetic oligonucleotide
  Antisense strand to SEQ ID NO: 631382
uaacuugcccagauacaag

SEQ ID NO: 631384 - RNA, 19 nt, Artificial Sequence
  Description of Artificial Sequence: Synthetic oligonucleotide
  Sense strand starting at position 3764 of SEQ ID NO: 585330
agugcuaaugaauaaagua

SEQ ID NO: 631385 - RNA, 19 nt, Artificial Sequence
  Description of Artificial Sequence: Synthetic oligonucleotide
  Antisense strand to SEQ ID NO: 631384
uacuuuauucauuagcacu

SEQ ID NO: 631386 - RNA, 19 nt, Artificial Sequence
  Description of Artificial Sequence: Synthetic oligonucleotide
  Sense strand starting at position 3783 of SEQ ID NO: 585330
uuuccuuaguggcugaauu

SEQ ID NO: 631387 - RNA, 19 nt, Artificial Sequence
  Description of Artificial Sequence: Synthetic oligonucleotide
  Antisense strand to SEQ ID NO: 631386
aauucagccacuaaggaaa

SEQ ID NO: 631388 - RNA, 19 nt, Artificial Sequence
  Description of Artificial Sequence: Synthetic oligonucleotide
  Sense strand starting at position 3784 of SEQ ID NO: 585330
uuccuuaguggcugaauua

SEQ ID NO: 631389 - RNA, 19 nt, Artificial Sequence
  Description of Artificial Sequence: Synthetic oligonucleotide
  Antisense strand to SEQ ID NO: 631388
uaauucagccacuaaggaa

SEQ ID NO: 631390 - RNA, 19 nt, Artificial Sequence
  Description of Artificial Sequence: Synthetic oligonucleotide
  Sense strand starting at position 3794 of SEQ ID NO: 585330
gcugaauuaguccaagcag

SEQ ID NO: 631391 - RNA, 19 nt, Artificial Sequence
  Description of Artificial Sequence: Synthetic oligonucleotide
  Antisense strand to SEQ ID NO: 631390
cugcuuggacuaauucagc

SEQ ID NO: 631392 - RNA, 19 nt, Artificial Sequence
  Description of Artificial Sequence: Synthetic oligonucleotide
  Sense strand starting at position 84 of SEQ ID NO: 585331
accauuuaaugagagcuua

SEQ ID NO: 631393 - RNA, 19 nt, Artificial Sequence
  Description of Artificial Sequence: Synthetic oligonucleotide
  Antisense strand to SEQ ID NO: 631392
uaagcucucauuaaauggu

SEQ ID NO: 631394 - RNA, 19 nt, Artificial Sequence
  Description of Artificial Sequence: Synthetic oligonucleotide
  Sense strand starting at position 208 of SEQ ID NO: 585331
cuugaugacucauugauac

SEQ ID NO: 631395 - RNA, 19 nt, Artificial Sequence
  Description of Artificial Sequence: Synthetic oligonucleotide
  Antisense strand to SEQ ID NO: 631394
guaucaaugagucaucaag

SEQ ID NO: 631396 - RNA, 19 nt, Artificial Sequence
  Description of Artificial Sequence: Synthetic oligonucleotide
  Sense strand starting at position 424 of SEQ ID NO: 585331
uacacuuagucuguggaga

SEQ ID NO: 631397 - RNA, 19 nt, Artificial Sequence
  Description of Artificial Sequence: Synthetic oligonucleotide
  Antisense strand to SEQ ID NO: 631396
ucuccacagacuaagugua

SEQ ID NO: 631398 - RNA, 19 nt, Artificial Sequence
  Description of Artificial Sequence: Synthetic oligonucleotide
  Sense strand starting at position 509 of SEQ ID NO: 585331
gggucuaccuaaucagaca

SEQ ID NO: 631399 - RNA, 19 nt, Artificial Sequence
  Description of Artificial Sequence: Synthetic oligonucleotide
  Antisense strand to SEQ ID NO: 631398
ugucugauuagguagaccc

SEQ ID NO: 631400 - RNA, 19 nt, Artificial Sequence
  Description of Artificial Sequence: Synthetic oligonucleotide
  Sense strand starting at position 857 of SEQ ID NO: 585331
gugcauauuuaugcauaua

SEQ ID NO: 631401 - RNA, 19 nt, Artificial Sequence
  Description of Artificial Sequence: Synthetic oligonucleotide
  Antisense strand to SEQ ID NO: 631400
uauaugcauaaauaugcac

SEQ ID NO: 631402 - RNA, 19 nt, Artificial Sequence
  Description of Artificial Sequence: Synthetic oligonucleotide
  Sense strand starting at position 929 of SEQ ID NO: 585331
uuuauauguugacuacaga

SEQ ID NO: 631403 - RNA, 19 nt, Artificial Sequence
  Description of Artificial Sequence: Synthetic oligonucleotide
  Antisense strand to SEQ ID NO: 631402
ucuguagucaacauauaaa

SEQ ID NO: 631404 - RNA, 19 nt, Artificial Sequence
  Description of Artificial Sequence: Synthetic oligonucleotide
  Sense strand starting at position 1124 of SEQ ID NO: 585331
gcgcccauaccuuagagaa

SEQ ID NO: 631405 - RNA, 19 nt, Artificial Sequence
  Description of Artificial Sequence: Synthetic oligonucleotide
  Antisense strand to SEQ ID NO: 631404
uucucuaagguaugggcgc

SEQ ID NO: 631406 - RNA, 19 nt, Artificial Sequence
  Description of Artificial Sequence: Synthetic oligonucleotide
  Sense strand starting at position 1168 of SEQ ID NO: 585331
guggaauucccucagccua

SEQ ID NO: 631407 - RNA, 19 nt, Artificial Sequence
  Description of Artificial Sequence: Synthetic oligonucleotide
  Antisense strand to SEQ ID NO: 631406
uaggcugagggaauuccac

SEQ ID NO: 631408 - RNA, 19 nt, Artificial Sequence
  Description of Artificial Sequence: Synthetic oligonucleotide
  Sense strand starting at position 1208 of SEQ ID NO: 585331
gucuuauuuaguuguaagu

SEQ ID NO: 631409 - RNA, 19 nt, Artificial Sequence
  Description of Artificial Sequence: Synthetic oligonucleotide
  Antisense strand to SEQ ID NO: 631408
acuuacaacuaaauaagac

SEQ ID NO: 631410 - RNA, 19 nt, Artificial Sequence
  Description of Artificial Sequence: Synthetic oligonucleotide
  Sense strand starting at position 1214 of SEQ ID NO: 585331
uuuaguuguaaguggaaag

SEQ ID NO: 631411 - RNA, 19 nt, Artificial Sequence
  Description of Artificial Sequence: Synthetic oligonucleotide
  Antisense strand to SEQ ID NO: 631410
cuuuccacuuacaacuaaa

SEQ ID NO: 631412 - RNA, 19 nt, Artificial Sequence
  Description of Artificial Sequence: Synthetic oligonucleotide
  Sense strand starting at position 1232 of SEQ ID NO: 585331
ggaauacucuucucugcag

SEQ ID NO: 631413 - RNA, 19 nt, Artificial Sequence
  Description of Artificial Sequence: Synthetic oligonucleotide
  Antisense strand to SEQ ID NO: 631412
cugcagagaagaguauucc

SEQ ID NO: 631414 - RNA, 19 nt, Artificial Sequence
  Description of Artificial Sequence: Synthetic oligonucleotide
  Sense strand starting at position 1271 of SEQ ID NO: 585331
acauauaaguccuuaaugu

SEQ ID NO: 631415 - RNA, 19 nt, Artificial Sequence
  Description of Artificial Sequence: Synthetic oligonucleotide
  Antisense strand to SEQ ID NO: 631414
acauuaaggacuuauaugu

SEQ ID NO: 631416 - RNA, 19 nt, Artificial Sequence
  Description of Artificial Sequence: Synthetic oligonucleotide
  Sense strand starting at position 1328 of SEQ ID NO: 585331
aagaaucaguuguucugga

SEQ ID NO: 631417 - RNA, 19 nt, Artificial Sequence
  Description of Artificial Sequence: Synthetic oligonucleotide
  Antisense strand to SEQ ID NO: 631416
uccagaacaacugauucuu

SEQ ID NO: 631418 - RNA, 19 nt, Artificial Sequence
  Description of Artificial Sequence: Synthetic oligonucleotide
  Sense strand starting at position 1329 of SEQ ID NO: 585331
agaaucaguuguucuggaa

SEQ ID NO: 631419 - RNA, 19 nt, Artificial Sequence
  Description of Artificial Sequence: Synthetic oligonucleotide
  Antisense strand to SEQ ID NO: 631418
uuccagaacaacugauucu

SEQ ID NO: 631420 - RNA, 19 nt, Artificial Sequence
  Description of Artificial Sequence: Synthetic oligonucleotide
  Sense strand starting at position 1333 of SEQ ID NO: 585331
ucaguuguucuggaauauc

SEQ ID NO: 631421 - RNA, 19 nt, Artificial Sequence
  Description of Artificial Sequence: Synthetic oligonucleotide
  Antisense strand to SEQ ID NO: 631420
gauauuccagaacaacuga

SEQ ID NO: 631422 - RNA, 19 nt, Artificial Sequence
  Description of Artificial Sequence: Synthetic oligonucleotide
  Sense strand starting at position 1341 of SEQ ID NO: 585331
ucuggaauauccgucaaua

SEQ ID NO: 631423 - RNA, 19 nt, Artificial Sequence
  Description of Artificial Sequence: Synthetic oligonucleotide
  Antisense strand to SEQ ID NO: 631422
uauugacggauauuccaga

SEQ ID NO: 631424 - RNA, 19 nt, Artificial Sequence
  Description of Artificial Sequence: Synthetic oligonucleotide
  Sense strand starting at position 1343 of SEQ ID NO: 585331
uggaauauccgucaauauc

SEQ ID NO: 631425 - RNA, 19 nt, Artificial Sequence
  Description of Artificial Sequence: Synthetic oligonucleotide
  Antisense strand to SEQ ID NO: 631424
gauauugacggauauucca

SEQ ID NO: 631426 - RNA, 19 nt, Artificial Sequence
  Description of Artificial Sequence: Synthetic oligonucleotide
  Sense strand starting at position 1432 of SEQ ID NO: 585331
gcaaauaaguacucgagga

SEQ ID NO: 631427 - RNA, 19 nt, Artificial Sequence
  Description of Artificial Sequence: Synthetic oligonucleotide
  Antisense strand to SEQ ID NO: 631426
uccucgaguacuuauuugc

SEQ ID NO: 631428 - RNA, 19 nt, Artificial Sequence
  Description of Artificial Sequence: Synthetic oligonucleotide
  Sense strand starting at position 1482 of SEQ ID NO: 585331
gggccuagucagggaaauu

SEQ ID NO: 631429 - RNA, 19 nt, Artificial Sequence
  Description of Artificial Sequence: Synthetic oligonucleotide
  Antisense strand to SEQ ID NO: 631428
aauuucccugacuaggccc

SEQ ID NO: 631430 - RNA, 19 nt, Artificial Sequence
  Description of Artificial Sequence: Synthetic oligonucleotide
  Sense strand starting at position 1483 of SEQ ID NO: 585331
ggccuagucagggaaauuc

SEQ ID NO: 631431 - RNA, 19 nt, Artificial Sequence
  Description of Artificial Sequence: Synthetic oligonucleotide
  Antisense strand to SEQ ID NO: 631430
gaauuucccugacuaggcc

SEQ ID NO: 631432 - RNA, 19 nt, Artificial Sequence
  Description of Artificial Sequence: Synthetic oligonucleotide
  Sense strand starting at position 2300 of SEQ ID NO: 585331
ggacguucugagcacauua

SEQ ID NO: 631433 - RNA, 19 nt, Artificial Sequence
  Description of Artificial Sequence: Synthetic oligonucleotide
  Antisense strand to SEQ ID NO: 631432
uaaugugcucagaacgucc

SEQ ID NO: 631434 - RNA, 19 nt, Artificial Sequence
  Description of Artificial Sequence: Synthetic oligonucleotide
  Sense strand starting at position 2302 of SEQ ID NO: 585331
acguucugagcacauuaaa

SEQ ID NO: 631435 - RNA, 19 nt, Artificial Sequence
  Description of Artificial Sequence: Synthetic oligonucleotide
  Antisense strand to SEQ ID NO: 631434
uuuaaugugcucagaacgu

SEQ ID NO: 631436 - RNA, 19 nt, Artificial Sequence
  Description of Artificial Sequence: Synthetic oligonucleotide
  Sense strand starting at position 2322 of SEQ ID NO: 585331
uaaagauaaucguugugaa

SEQ ID NO: 631437 - RNA, 19 nt, Artificial Sequence
  Description of Artificial Sequence: Synthetic oligonucleotide
  Antisense strand to SEQ ID NO: 631436
uucacaacgauuaucuuua

SEQ ID NO: 631438 - RNA, 19 nt, Artificial Sequence
  Description of Artificial Sequence: Synthetic oligonucleotide
  Sense strand starting at position 2323 of SEQ ID NO: 585331
aaagauaaucguugugaaa

SEQ ID NO: 631439 - RNA, 19 nt, Artificial Sequence
  Description of Artificial Sequence: Synthetic oligonucleotide
  Antisense strand to SEQ ID NO: 631438
uuucacaacgauuaucuuu

SEQ ID NO: 631440 - RNA, 19 nt, Artificial Sequence
  Description of Artificial Sequence: Synthetic oligonucleotide
  Sense strand starting at position 2536 of SEQ ID NO: 585331
guuguaaagacuggacucu

SEQ ID NO: 631441 - RNA, 19 nt, Artificial Sequence
  Description of Artificial Sequence: Synthetic oligonucleotide
  Antisense strand to SEQ ID NO: 631440
agaguccagucuuuacaac

SEQ ID NO: 631442 - RNA, 19 nt, Artificial Sequence
  Description of Artificial Sequence: Synthetic oligonucleotide
  Sense strand starting at position 2563 of SEQ ID NO: 585331
augggaaacugacucuagu

SEQ ID NO: 631443 - RNA, 19 nt, Artificial Sequence
  Description of Artificial Sequence: Synthetic oligonucleotide
  Antisense strand to SEQ ID NO: 631442
acuagagucaguuucccau

SEQ ID NO: 631444 - RNA, 19 nt, Artificial Sequence
  Description of Artificial Sequence: Synthetic oligonucleotide
  Sense strand starting at position 2794 of SEQ ID NO: 585331
aaacauuagcgggaagcau

SEQ ID NO: 631445 - RNA, 19 nt, Artificial Sequence
  Description of Artificial Sequence: Synthetic oligonucleotide
  Antisense strand to SEQ ID NO: 631444
augcuucccgcuaauguuu

SEQ ID NO: 631446 - RNA, 19 nt, Artificial Sequence
  Description of Artificial Sequence: Synthetic oligonucleotide
  Sense strand starting at position 2895 of SEQ ID NO: 585331
ugcuguaagcaacacaaau

SEQ ID NO: 631447 - RNA, 19 nt, Artificial Sequence
  Description of Artificial Sequence: Synthetic oligonucleotide
  Antisense strand to SEQ ID NO: 631446
auuuguguugcuuacagca

SEQ ID NO: 631448 - RNA, 19 nt, Artificial Sequence
  Description of Artificial Sequence: Synthetic oligonucleotide
  Sense strand starting at position 2954 of SEQ ID NO: 585331
guucucugaguuuacaauu

SEQ ID NO: 631449 - RNA, 19 nt, Artificial Sequence
  Description of Artificial Sequence: Synthetic oligonucleotide
  Antisense strand to SEQ ID NO: 631448
aauuguaaacucagagaac

SEQ ID NO: 631450 - RNA, 19 nt, Artificial Sequence
  Description of Artificial Sequence: Synthetic oligonucleotide
  Sense strand starting at position 3201 of SEQ ID NO: 585331
cuuuguguuuaccuauuua

SEQ ID NO: 631451 - RNA, 19 nt, Artificial Sequence
  Description of Artificial Sequence: Synthetic oligonucleotide
  Antisense strand to SEQ ID NO: 631450
uaaauagguaaacacaaag

SEQ ID NO: 631452 - RNA, 19 nt, Artificial Sequence
  Description of Artificial Sequence: Synthetic oligonucleotide
  Sense strand starting at position 3298 of SEQ ID NO: 585331
gucauauacuacucccaug

SEQ ID NO: 631453 - RNA, 19 nt, Artificial Sequence
  Description of Artificial Sequence: Synthetic oligonucleotide
  Antisense strand to SEQ ID NO: 631452
caugggaguaguauaugac

SEQ ID NO: 631454 - RNA, 19 nt, Artificial Sequence
  Description of Artificial Sequence: Synthetic oligonucleotide
  Sense strand starting at position 3430 of SEQ ID NO: 585331
guaaguagccuagaucagu

SEQ ID NO: 631455 - RNA, 19 nt, Artificial Sequence
  Description of Artificial Sequence: Synthetic oligonucleotide
  Antisense strand to SEQ ID NO: 631454
acugaucuaggcuacuuac

SEQ ID NO: 631456 - RNA, 19 nt, Artificial Sequence
  Description of Artificial Sequence: Synthetic oligonucleotide
  Sense strand starting at position 3503 of SEQ ID NO: 585331
uguaaugaggucuagugga

SEQ ID NO: 631457 - RNA, 19 nt, Artificial Sequence
  Description of Artificial Sequence: Synthetic oligonucleotide
  Antisense strand to SEQ ID NO: 631456
uccacuagaccucauuaca

SEQ ID NO: 631458 - RNA, 19 nt, Artificial Sequence
  Description of Artificial Sequence: Synthetic oligonucleotide
  Sense strand starting at position 3555 of SEQ ID NO: 585331
agcuaugaagcauaacagu

SEQ ID NO: 631459 - RNA, 19 nt, Artificial Sequence
  Description of Artificial Sequence: Synthetic oligonucleotide
  Antisense strand to SEQ ID NO: 631458
acuguuaugcuucauagcu

SEQ ID NO: 631460 - RNA, 19 nt, Artificial Sequence
  Description of Artificial Sequence: Synthetic oligonucleotide
  Sense strand starting at position 3640 of SEQ ID NO: 585331
agaaaccaucuguguaauu

SEQ ID NO: 631461 - RNA, 19 nt, Artificial Sequence
  Description of Artificial Sequence: Synthetic oligonucleotide
  Antisense strand to SEQ ID NO: 631460
aauuacacagaugguuucu

SEQ ID NO: 631462 - RNA, 19 nt, Artificial Sequence
  Description of Artificial Sequence: Synthetic oligonucleotide
  Sense strand starting at position 3641 of SEQ ID NO: 585331
gaaaccaucuguguaauug

SEQ ID NO: 631463 - RNA, 19 nt, Artificial Sequence
  Description of Artificial Sequence: Synthetic oligonucleotide
  Antisense strand to SEQ ID NO: 631462
caauuacacagaugguuuc

SEQ ID NO: 631464 - RNA, 19 nt, Artificial Sequence
  Description of Artificial Sequence: Synthetic oligonucleotide
  Sense strand starting at position 3650 of SEQ ID NO: 585331
uguguaauugaccaggcua

SEQ ID NO: 631465 - RNA, 19 nt, Artificial Sequence
  Description of Artificial Sequence: Synthetic oligonucleotide
  Antisense strand to SEQ ID NO: 631464
uagccuggucaauuacaca

SEQ ID NO: 631466 - RNA, 19 nt, Artificial Sequence
  Description of Artificial Sequence: Synthetic oligonucleotide
  Sense strand starting at position 3730 of SEQ ID NO: 585331
ucauucucaguauguaaga

SEQ ID NO: 631467 - RNA, 19 nt, Artificial Sequence
  Description of Artificial Sequence: Synthetic oligonucleotide
  Antisense strand to SEQ ID NO: 631466
ucuuacauacugagaauga

SEQ ID NO: 631468 - RNA, 19 nt, Artificial Sequence
  Description of Artificial Sequence: Synthetic oligonucleotide
  Sense strand starting at position 3732 of SEQ ID NO: 585331
auucucaguauguaagagu

SEQ ID NO: 631469 - RNA, 19 nt, Artificial Sequence
  Description of Artificial Sequence: Synthetic oligonucleotide
  Antisense strand to SEQ ID NO: 631468
acucuuacauacugagaau

SEQ ID NO: 631470 - RNA, 19 nt, Artificial Sequence
  Description of Artificial Sequence: Synthetic oligonucleotide
  Sense strand starting at position 3861 of SEQ ID NO: 585331
agacuuaagcccuagaguc

SEQ ID NO: 631471 - RNA, 19 nt, Artificial Sequence
  Description of Artificial Sequence: Synthetic oligonucleotide
  Antisense strand to SEQ ID NO: 631470
gacucuagggcuuaagucu

SEQ ID NO: 631472 - RNA, 19 nt, Artificial Sequence
  Description of Artificial Sequence: Synthetic oligonucleotide
  Sense strand starting at position 193 of SEQ ID NO: 585332
ugaaccuucucgcugcaga

SEQ ID NO: 631473 - RNA, 19 nt, Artificial Sequence
  Description of Artificial Sequence: Synthetic oligonucleotide
  Antisense strand to SEQ ID NO: 631472
ucugcagcgagaagguuca

SEQ ID NO: 631474 - RNA, 19 nt, Artificial Sequence
  Description of Artificial Sequence: Synthetic oligonucleotide
  Sense strand starting at position 235 of SEQ ID NO: 585332
ucaagacaugcuugaucaa

SEQ ID NO: 631475 - RNA, 19 nt, Artificial Sequence
  Description of Artificial Sequence: Synthetic oligonucleotide
  Antisense strand to SEQ ID NO: 631474
uugaucaagcaugucuuga

SEQ ID NO: 631476 - RNA, 19 nt, Artificial Sequence
  Description of Artificial Sequence: Synthetic oligonucleotide
  Sense strand starting at position 238 of SEQ ID NO: 585332
agacaugcuugaucaacaa

SEQ ID NO: 631477 - RNA, 19 nt, Artificial Sequence
  Description of Artificial Sequence: Synthetic oligonucleotide
  Antisense strand to SEQ ID NO: 631476
uuguugaucaagcaugucu

SEQ ID NO: 631478 - RNA, 19 nt, Artificial Sequence
  Description of Artificial Sequence: Synthetic oligonucleotide
  Sense strand starting at position 562 of SEQ ID NO: 585332
cggguuuacuugcuacuua

SEQ ID NO: 631479 - RNA, 19 nt, Artificial Sequence
  Description of Artificial Sequence: Synthetic oligonucleotide
  Antisense strand to SEQ ID NO: 631478
uaaguagcaaguaaacccg

SEQ ID NO: 631480 - RNA, 19 nt, Artificial Sequence
  Description of Artificial Sequence: Synthetic oligonucleotide
  Sense strand starting at position 610 of SEQ ID NO: 585332
uugggaguuugcucucaga

SEQ ID NO: 631481 - RNA, 19 nt, Artificial Sequence
  Description of Artificial Sequence: Synthetic oligonucleotide
  Antisense strand to SEQ ID NO: 631480
ucugagagcaaacucccaa

SEQ ID NO: 631482 - RNA, 19 nt, Artificial Sequence
  Description of Artificial Sequence: Synthetic oligonucleotide
  Sense strand starting at position 613 of SEQ ID NO: 585332
ggaguuugcucucagaaac

SEQ ID NO: 631483 - RNA, 19 nt, Artificial Sequence
  Description of Artificial Sequence: Synthetic oligonucleotide
  Antisense strand to SEQ ID NO: 631482
guuucugagagcaaacucc

SEQ ID NO: 631484 - RNA, 19 nt, Artificial Sequence
  Description of Artificial Sequence: Synthetic oligonucleotide
  Sense strand starting at position 851 of SEQ ID NO: 585332
ccuggauuguccucggaaa

SEQ ID NO: 631485 - RNA, 19 nt, Artificial Sequence
  Description of Artificial Sequence: Synthetic oligonucleotide
  Antisense strand to SEQ ID NO: 631484
uuuccgaggacaauccagg

SEQ ID NO: 631486 - RNA, 19 nt, Artificial Sequence
  Description of Artificial Sequence: Synthetic oligonucleotide
  Sense strand starting at position 852 of SEQ ID NO: 585332
cuggauuguccucggaaau

SEQ ID NO: 631487 - RNA, 19 nt, Artificial Sequence
  Description of Artificial Sequence: Synthetic oligonucleotide
  Antisense strand to SEQ ID NO: 631486
auuuccgaggacaauccag

SEQ ID NO: 631488 - RNA, 19 nt, Artificial Sequence
  Description of Artificial Sequence: Synthetic oligonucleotide
  Sense strand starting at position 853 of SEQ ID NO: 585332
uggauuguccucggaaauc

SEQ ID NO: 631489 - RNA, 19 nt, Artificial Sequence
  Description of Artificial Sequence: Synthetic oligonucleotide
  Antisense strand to SEQ ID NO: 631488
gauuuccgaggacaaucca

SEQ ID NO: 631490 - RNA, 19 nt, Artificial Sequence
  Description of Artificial Sequence: Synthetic oligonucleotide
  Sense strand starting at position 2385 of SEQ ID NO: 585332
cgaagaacugcgggaaugu

SEQ ID NO: 631491 - RNA, 19 nt, Artificial Sequence
  Description of Artificial Sequence: Synthetic oligonucleotide
  Antisense strand to SEQ ID NO: 631490
acauucccgcaguucuucg

SEQ ID NO: 631492 - RNA, 19 nt, Artificial Sequence
  Description of Artificial Sequence: Synthetic oligonucleotide
  Sense strand starting at position 2397 of SEQ ID NO: 585332
ggaaugugcggccggaauu

SEQ ID NO: 631493 - RNA, 19 nt, Artificial Sequence
  Description of Artificial Sequence: Synthetic oligonucleotide
  Antisense strand to SEQ ID NO: 631492
aauuccggccgcacauucc

SEQ ID NO: 631494 - RNA, 19 nt, Artificial Sequence
  Description of Artificial Sequence: Synthetic oligonucleotide
  Sense strand starting at position 2530 of SEQ ID NO: 585332
ucacuccauccgugggauu

SEQ ID NO: 631495 - RNA, 19 nt, Artificial Sequence
  Description of Artificial Sequence: Synthetic oligonucleotide
  Antisense strand to SEQ ID NO: 631494
aaucccacggauggaguga

SEQ ID NO: 631496 - RNA, 19 nt, Artificial Sequence
  Description of Artificial Sequence: Synthetic oligonucleotide
  Sense strand starting at position 2541 of SEQ ID NO: 585332
gugggauuccagugccuua

SEQ ID NO: 631497 - RNA, 19 nt, Artificial Sequence
  Description of Artificial Sequence: Synthetic oligonucleotide
  Antisense strand to SEQ ID NO: 631496
uaaggcacuggaaucccac

SEQ ID NO: 631498 - RNA, 19 nt, Artificial Sequence
  Description of Artificial Sequence: Synthetic oligonucleotide
  Sense strand starting at position 2544 of SEQ ID NO: 585332
ggauuccagugccuuaaga

SEQ ID NO: 631499 - RNA, 19 nt, Artificial Sequence
  Description of Artificial Sequence: Synthetic oligonucleotide
  Antisense strand to SEQ ID NO: 631498
ucuuaaggcacuggaaucc

SEQ ID NO: 631500 - RNA, 19 nt, Artificial Sequence
  Description of Artificial Sequence: Synthetic oligonucleotide
  Sense strand starting at position 2546 of SEQ ID NO: 585332
auuccagugccuuaagaaa

SEQ ID NO: 631501 - RNA, 19 nt, Artificial Sequence
  Description of Artificial Sequence: Synthetic oligonucleotide
  Antisense strand to SEQ ID NO: 631500
uuucuuaaggcacuggaau

SEQ ID NO: 631502 - RNA, 19 nt, Artificial Sequence
  Description of Artificial Sequence: Synthetic oligonucleotide
  Sense strand starting at position 2993 of SEQ ID NO: 585332
ucacguauuagucagcgua

SEQ ID NO: 631503 - RNA, 19 nt, Artificial Sequence
  Description of Artificial Sequence: Synthetic oligonucleotide
  Antisense strand to SEQ ID NO: 631502
uacgcugacuaauacguga

SEQ ID NO: 631504 - RNA, 19 nt, Artificial Sequence
  Description of Artificial Sequence: Synthetic oligonucleotide
  Sense strand starting at position 3020 of SEQ ID NO: 585332
uaaauaaggugaugagaau

SEQ ID NO: 631505 - RNA, 19 nt, Artificial Sequence
  Description of Artificial Sequence: Synthetic oligonucleotide
  Antisense strand to SEQ ID NO: 631504
auucucaucaccuuauuua

SEQ ID NO: 631506 - RNA, 19 nt, Artificial Sequence
  Description of Artificial Sequence: Synthetic oligonucleotide
  Sense strand starting at position 3029 of SEQ ID NO: 585332
ugaugagaauguccagagu

SEQ ID NO: 631507 - RNA, 19 nt, Artificial Sequence
  Description of Artificial Sequence: Synthetic oligonucleotide
  Antisense strand to SEQ ID NO: 631506
acucuggacauucucauca

SEQ ID NO: 631508 - RNA, 19 nt, Artificial Sequence
  Description of Artificial Sequence: Synthetic oligonucleotide
  Sense strand starting at position 3043 of SEQ ID NO: 585332
agagucgccuccuuugaca

SEQ ID NO: 631509 - RNA, 19 nt, Artificial Sequence
  Description of Artificial Sequence: Synthetic oligonucleotide
  Antisense strand to SEQ ID NO: 631508
ugucaaaggaggcgacucu

SEQ ID NO: 631510 - RNA, 19 nt, Artificial Sequence
  Description of Artificial Sequence: Synthetic oligonucleotide
  Sense strand starting at position 3208 of SEQ ID NO: 585332
ugagcuuugguggagcauu

SEQ ID NO: 631511 - RNA, 19 nt, Artificial Sequence
  Description of Artificial Sequence: Synthetic oligonucleotide
  Antisense strand to SEQ ID NO: 631510
aaugcuccaccaaagcuca

SEQ ID NO: 631512 - RNA, 19 nt, Artificial Sequence
  Description of Artificial Sequence: Synthetic oligonucleotide
  Sense strand starting at position 3220 of SEQ ID NO: 585332
gagcauuguguguacccuu

SEQ ID NO: 631513 - RNA, 19 nt, Artificial Sequence
  Description of Artificial Sequence: Synthetic oligonucleotide
  Antisense strand to SEQ ID NO: 631512
aaggguacacacaaugcuc

SEQ ID NO: 631514 - RNA, 19 nt, Artificial Sequence
  Description of Artificial Sequence: Synthetic oligonucleotide
  Sense strand starting at position 3339 of SEQ ID NO: 585332
uuuagacacgcuuggagau

SEQ ID NO: 631515 - RNA, 19 nt, Artificial Sequence
  Description of Artificial Sequence: Synthetic oligonucleotide
  Antisense strand to SEQ ID NO: 631514
aucuccaagcgugucuaaa

SEQ ID NO: 631516 - RNA, 19 nt, Artificial Sequence
  Description of Artificial Sequence: Synthetic oligonucleotide
  Sense strand starting at position 3527 of SEQ ID NO: 585332
uuuguuuagcuaugucagu

SEQ ID NO: 631517 - RNA, 19 nt, Artificial Sequence
  Description of Artificial Sequence: Synthetic oligonucleotide
  Antisense strand to SEQ ID NO: 631516
acugacauagcuaaacaaa

SEQ ID NO: 631518 - RNA, 19 nt, Artificial Sequence
  Description of Artificial Sequence: Synthetic oligonucleotide
  Sense strand starting at position 3532 of SEQ ID NO: 585332
uuagcuaugucagugcuuu

SEQ ID NO: 631519 - RNA, 19 nt, Artificial Sequence
  Description of Artificial Sequence: Synthetic oligonucleotide
  Antisense strand to SEQ ID NO: 631518
aaagcacugacauagcuaa

SEQ ID NO: 631520 - RNA, 19 nt, Artificial Sequence
  Description of Artificial Sequence: Synthetic oligonucleotide
  Sense strand starting at position 3533 of SEQ ID NO: 585332
uagcuaugucagugcuuua

SEQ ID NO: 631521 - RNA, 19 nt, Artificial Sequence
  Description of Artificial Sequence: Synthetic oligonucleotide
  Antisense strand to SEQ ID NO: 631520
uaaagcacugacauagcua

SEQ ID NO: 631522 - RNA, 19 nt, Artificial Sequence
  Description of Artificial Sequence: Synthetic oligonucleotide
  Sense strand starting at position 3536 of SEQ ID NO: 585332
cuaugucagugcuuuauga

SEQ ID NO: 631523 - RNA, 19 nt, Artificial Sequence
  Description of Artificial Sequence: Synthetic oligonucleotide
  Antisense strand to SEQ ID NO: 631522
ucauaaagcacugacauag

SEQ ID NO: 631524 - RNA, 19 nt, Artificial Sequence
  Description of Artificial Sequence: Synthetic oligonucleotide
  Sense strand starting at position 3538 of SEQ ID NO: 585332
augucagugcuuuaugacu

SEQ ID NO: 631525 - RNA, 19 nt, Artificial Sequence
  Description of Artificial Sequence: Synthetic oligonucleotide
  Antisense strand to SEQ ID NO: 631524
agucauaaagcacugacau

SEQ ID NO: 631526 - RNA, 19 nt, Artificial Sequence
  Description of Artificial Sequence: Synthetic oligonucleotide
  Sense strand starting at position 3544 of SEQ ID NO: 585332
gugcuuuaugacuaucgca

SEQ ID NO: 631527 - RNA, 19 nt, Artificial Sequence
  Description of Artificial Sequence: Synthetic oligonucleotide
  Antisense strand to SEQ ID NO: 631526
ugcgauagucauaaagcac

SEQ ID NO: 631528 - RNA, 19 nt, Artificial Sequence
  Description of Artificial Sequence: Synthetic oligonucleotide
  Sense strand starting at position 3549 of SEQ ID NO: 585332
uuaugacuaucgcacuauu

SEQ ID NO: 631529 - RNA, 19 nt, Artificial Sequence
  Description of Artificial Sequence: Synthetic oligonucleotide
  Antisense strand to SEQ ID NO: 631528
aauagugcgauagucauaa

SEQ ID NO: 631530 - RNA, 19 nt, Artificial Sequence
  Description of Artificial Sequence: Synthetic oligonucleotide
  Sense strand starting at position 3582 of SEQ ID NO: 585332
ccuuucuccugaugaaaug

SEQ ID NO: 631531 - RNA, 19 nt, Artificial Sequence
  Description of Artificial Sequence: Synthetic oligonucleotide
  Antisense strand to SEQ ID NO: 631530
cauuucaucaggagaaagg

SEQ ID NO: 631532 - RNA, 19 nt, Artificial Sequence
  Description of Artificial Sequence: Synthetic oligonucleotide
  Sense strand starting at position 3654 of SEQ ID NO: 585332
cccuaauccuuguauguua

SEQ ID NO: 631533 - RNA, 19 nt, Artificial Sequence
  Description of Artificial Sequence: Synthetic oligonucleotide
  Antisense strand to SEQ ID NO: 631532
uaacauacaaggauuaggg

SEQ ID NO: 631534 - RNA, 19 nt, Artificial Sequence
  Description of Artificial Sequence: Synthetic oligonucleotide
  Sense strand starting at position 3665 of SEQ ID NO: 585332
guauguuacugcuucuaau

SEQ ID NO: 631535 - RNA, 19 nt, Artificial Sequence
  Description of Artificial Sequence: Synthetic oligonucleotide
  Antisense strand to SEQ ID NO: 631534
auuagaagcaguaacauac

SEQ ID NO: 631536 - RNA, 19 nt, Artificial Sequence
  Description of Artificial Sequence: Synthetic oligonucleotide
  Sense strand starting at position 3679 of SEQ ID NO: 585332
cuaauaauuguuuggaaac

SEQ ID NO: 631537 - RNA, 19 nt, Artificial Sequence
  Description of Artificial Sequence: Synthetic oligonucleotide
  Antisense strand to SEQ ID NO: 631536
guuuccaaacaauuauuag

SEQ ID NO: 631538 - RNA, 19 nt, Artificial Sequence
  Description of Artificial Sequence: Synthetic oligonucleotide
  Sense strand starting at position 3708 of SEQ ID NO: 585332
cucauuuauuuaugugcau

SEQ ID NO: 631539 - RNA, 19 nt, Artificial Sequence
  Description of Artificial Sequence: Synthetic oligonucleotide
  Antisense strand to SEQ ID NO: 631538
augcacauaaauaaaugag

SEQ ID NO: 631540 - RNA, 19 nt, Artificial Sequence
  Description of Artificial Sequence: Synthetic oligonucleotide
  Sense strand starting at position 3725 of SEQ ID NO: 585332
auacguagauggucuacau

SEQ ID NO: 631541 - RNA, 19 nt, Artificial Sequence
  Description of Artificial Sequence: Synthetic oligonucleotide
  Antisense strand to SEQ ID NO: 631540
auguagaccaucuacguau

SEQ ID NO: 631542 - RNA, 19 nt, Artificial Sequence
  Description of Artificial Sequence: Synthetic oligonucleotide
  Sense strand starting at position 3782 of SEQ ID NO: 585332
agggcuuucuucuaaagac

SEQ ID NO: 631543 - RNA, 19 nt, Artificial Sequence
  Description of Artificial Sequence: Synthetic oligonucleotide
  Antisense strand to SEQ ID NO: 631542
gucuuuagaagaaagcccu

SEQ ID NO: 631544 - RNA, 19 nt, Artificial Sequence
  Description of Artificial Sequence: Synthetic oligonucleotide
  Sense strand starting at position 3896 of SEQ ID NO: 585332
agcuauuaucuuggagcca

SEQ ID NO: 631545 - RNA, 19 nt, Artificial Sequence
  Description of Artificial Sequence: Synthetic oligonucleotide
  Antisense strand to SEQ ID NO: 631544
uggcuccaagauaauagcu

SEQ ID NO: 631546 - RNA, 19 nt, Artificial Sequence
  Description of Artificial Sequence: Synthetic oligonucleotide
  Sense strand starting at position 3905 of SEQ ID NO: 585332
cuuggagccagucauauga

SEQ ID NO: 631547 - RNA, 19 nt, Artificial Sequence
  Description of Artificial Sequence: Synthetic oligonucleotide
  Antisense strand to SEQ ID NO: 631546
ucauaugacuggcuccaag

SEQ ID NO: 631548 - RNA, 19 nt, Artificial Sequence
  Description of Artificial Sequence: Synthetic oligonucleotide
  Sense strand starting at position 3912 of SEQ ID NO: 585332
ccagucauaugagcacaga

SEQ ID NO: 631549 - RNA, 19 nt, Artificial Sequence
  Description of Artificial Sequence: Synthetic oligonucleotide
  Antisense strand to SEQ ID NO: 631548
ucugugcucauaugacugg

SEQ ID NO: 631550 - RNA, 19 nt, Artificial Sequence
  Description of Artificial Sequence: Synthetic oligonucleotide
  Sense strand starting at position 3979 of SEQ ID NO: 585332
uucucuuuccuagaguuua

SEQ ID NO: 631551 - RNA, 19 nt, Artificial Sequence
  Description of Artificial Sequence: Synthetic oligonucleotide
  Antisense strand to SEQ ID NO: 631550
uaaacucuaggaaagagaa

SEQ ID NO: 631552 - RNA, 19 nt, Artificial Sequence
  Description of Artificial Sequence: Synthetic oligonucleotide
  Sense strand starting at position 323 of SEQ ID NO: 585333
cccuucuugagccgggaau

SEQ ID NO: 631553 - RNA, 19 nt, Artificial Sequence
  Description of Artificial Sequence: Synthetic oligonucleotide
  Antisense strand to SEQ ID NO: 631552
auucccggcucaagaaggg

SEQ ID NO: 631554 - RNA, 19 nt, Artificial Sequence
  Description of Artificial Sequence: Synthetic oligonucleotide
  Sense strand starting at position 616 of SEQ ID NO: 585333
gggagucggcgcuugcaaa

SEQ ID NO: 631555 - RNA, 19 nt, Artificial Sequence
  Description of Artificial Sequence: Synthetic oligonucleotide
  Antisense strand to SEQ ID NO: 631554
uuugcaagcgccgacuccc

SEQ ID NO: 631556 - RNA, 19 nt, Artificial Sequence
  Description of Artificial Sequence: Synthetic oligonucleotide
  Sense strand starting at position 620 of SEQ ID NO: 585333
gucggcgcuugcaaagaua

SEQ ID NO: 631557 - RNA, 19 nt, Artificial Sequence
  Description of Artificial Sequence: Synthetic oligonucleotide
  Antisense strand to SEQ ID NO: 631556
uaucuuugcaagcgccgac

SEQ ID NO: 631558 - RNA, 19 nt, Artificial Sequence
  Description of Artificial Sequence: Synthetic oligonucleotide
  Sense strand starting at position 776 of SEQ ID NO: 585333
auggaaggaucucacggau

SEQ ID NO: 631559 - RNA, 19 nt, Artificial Sequence
  Description of Artificial Sequence: Synthetic oligonucleotide
  Antisense strand to SEQ ID NO: 631558
auccgugagauccuuccau

SEQ ID NO: 631560 - RNA, 19 nt, Artificial Sequence
  Description of Artificial Sequence: Synthetic oligonucleotide
  Sense strand starting at position 791 of SEQ ID NO: 585333
ggaucucauuccuaauggu

SEQ ID NO: 631561 - RNA, 19 nt, Artificial Sequence
  Description of Artificial Sequence: Synthetic oligonucleotide
  Antisense strand to SEQ ID NO: 631560
accauuaggaaugagaucc

SEQ ID NO: 631562 - RNA, 19 nt, Artificial Sequence
  Description of Artificial Sequence: Synthetic oligonucleotide
  Sense strand starting at position 812 of SEQ ID NO: 585333
gccgaagucucacacagua

SEQ ID NO: 631563 - RNA, 19 nt, Artificial Sequence
  Description of Artificial Sequence: Synthetic oligonucleotide
  Antisense strand to SEQ ID NO: 631562
uacugugugagacuucggc

SEQ ID NO: 631564 - RNA, 19 nt, Artificial Sequence
  Description of Artificial Sequence: Synthetic oligonucleotide
  Sense strand starting at position 814 of SEQ ID NO: 585333
cgaagucucacacaguaga

SEQ ID NO: 631565 - RNA, 19 nt, Artificial Sequence
  Description of Artificial Sequence: Synthetic oligonucleotide
  Antisense strand to SEQ ID NO: 631564
ucuacugugugagacuucg

SEQ ID NO: 631566 - RNA, 19 nt, Artificial Sequence
  Description of Artificial Sequence: Synthetic oligonucleotide
  Sense strand starting at position 840 of SEQ ID NO: 585333
aguugagaugcuggaggau

SEQ ID NO: 631567 - RNA, 19 nt, Artificial Sequence
  Description of Artificial Sequence: Synthetic oligonucleotide
  Antisense strand to SEQ ID NO: 631566
auccuccagcaucucaacu

SEQ ID NO: 631568 - RNA, 19 nt, Artificial Sequence
  Description of Artificial Sequence: Synthetic oligonucleotide
  Sense strand starting at position 1259 of SEQ ID NO: 585333
cgcuguaguguucugaguu

SEQ ID NO: 631569 - RNA, 19 nt, Artificial Sequence
  Description of Artificial Sequence: Synthetic oligonucleotide
  Antisense strand to SEQ ID NO: 631568
aacucagaacacuacagcg

SEQ ID NO: 631570 - RNA, 19 nt, Artificial Sequence
  Description of Artificial Sequence: Synthetic oligonucleotide
  Sense strand starting at position 1260 of SEQ ID NO: 585333
gcuguaguguucugaguuc

SEQ ID NO: 631571 - RNA, 19 nt, Artificial Sequence
  Description of Artificial Sequence: Synthetic oligonucleotide
  Antisense strand to SEQ ID NO: 631570
gaacucagaacacuacagc

SEQ ID NO: 631572 - RNA, 19 nt, Artificial Sequence
  Description of Artificial Sequence: Synthetic oligonucleotide
  Sense strand starting at position 1332 of SEQ ID NO: 585333
ugguguuucuuugugguuu

SEQ ID NO: 631573 - RNA, 19 nt, Artificial Sequence
  Description of Artificial Sequence: Synthetic oligonucleotide
  Antisense strand to SEQ ID NO: 631572
aaaccacaaagaaacacca

SEQ ID NO: 631574 - RNA, 19 nt, Artificial Sequence
  Description of Artificial Sequence: Synthetic oligonucleotide
  Sense strand starting at position 1397 of SEQ ID NO: 585333
ccggguguugcuggaggaa

SEQ ID NO: 631575 - RNA, 19 nt, Artificial Sequence
  Description of Artificial Sequence: Synthetic oligonucleotide
  Antisense strand to SEQ ID NO: 631574
uuccuccagcaacacccgg

SEQ ID NO: 631576 - RNA, 19 nt, Artificial Sequence
  Description of Artificial Sequence: Synthetic oligonucleotide
  Sense strand starting at position 1398 of SEQ ID NO: 585333
cggguguugcuggaggaaa

SEQ ID NO: 631577 - RNA, 19 nt, Artificial Sequence
  Description of Artificial Sequence: Synthetic oligonucleotide
  Antisense strand to SEQ ID NO: 631576
uuuccuccagcaacacccg

SEQ ID NO: 631578 - RNA, 19 nt, Artificial Sequence
  Description of Artificial Sequence: Synthetic oligonucleotide
  Sense strand starting at position 1399 of SEQ ID NO: 585333
ggguguugcuggaggaaag

SEQ ID NO: 631579 - RNA, 19 nt, Artificial Sequence
  Description of Artificial Sequence: Synthetic oligonucleotide
  Antisense strand to SEQ ID NO: 631578
cuuuccuccagcaacaccc

SEQ ID NO: 631580 - RNA, 19 nt, Artificial Sequence
  Description of Artificial Sequence: Synthetic oligonucleotide
  Sense strand starting at position 2098 of SEQ ID NO: 585333
gcuggaaauuccgacgauu

SEQ ID NO: 631581 - RNA, 19 nt, Artificial Sequence
  Description of Artificial Sequence: Synthetic oligonucleotide
  Antisense strand to SEQ ID NO: 631580
aaucgucggaauuuccagc

SEQ ID NO: 631582 - RNA, 19 nt, Artificial Sequence
  Description of Artificial Sequence: Synthetic oligonucleotide
  Sense strand starting at position 2100 of SEQ ID NO: 585333
uggaaauuccgacgauuaa

SEQ ID NO: 631583 - RNA, 19 nt, Artificial Sequence
  Description of Artificial Sequence: Synthetic oligonucleotide
  Antisense strand to SEQ ID NO: 631582
uuaaucgucggaauuucca

SEQ ID NO: 631584 - RNA, 19 nt, Artificial Sequence
  Description of Artificial Sequence: Synthetic oligonucleotide
  Sense strand starting at position 2134 of SEQ ID NO: 585333
ggagacuugacaugcacaa

SEQ ID NO: 631585 - RNA, 19 nt, Artificial Sequence
  Description of Artificial Sequence: Synthetic oligonucleotide
  Antisense strand to SEQ ID NO: 631584
uugugcaugucaagucucc

SEQ ID NO: 631586 - RNA, 19 nt, Artificial Sequence
  Description of Artificial Sequence: Synthetic oligonucleotide
  Sense strand starting at position 2169 of SEQ ID NO: 585333
gcacguugugaguguguga

SEQ ID NO: 631587 - RNA, 19 nt, Artificial Sequence
  Description of Artificial Sequence: Synthetic oligonucleotide
  Antisense strand to SEQ ID NO: 631586
ucacacacucacaacgugc

SEQ ID NO: 631588 - RNA, 19 nt, Artificial Sequence
  Description of Artificial Sequence: Synthetic oligonucleotide
  Sense strand starting at position 2178 of SEQ ID NO: 585333
gagugugugagucgugagu

SEQ ID NO: 631589 - RNA, 19 nt, Artificial Sequence
  Description of Artificial Sequence: Synthetic oligonucleotide
  Antisense strand to SEQ ID NO: 631588
acucacgacucacacacuc

SEQ ID NO: 631590 - RNA, 19 nt, Artificial Sequence
  Description of Artificial Sequence: Synthetic oligonucleotide
  Sense strand starting at position 2544 of SEQ ID NO: 585333
cuccguccuucuucuagua

SEQ ID NO: 631591 - RNA, 19 nt, Artificial Sequence
  Description of Artificial Sequence: Synthetic oligonucleotide
  Antisense strand to SEQ ID NO: 631590
uacuagaagaaggacggag

SEQ ID NO: 631592 - RNA, 19 nt, Artificial Sequence
  Description of Artificial Sequence: Synthetic oligonucleotide
  Sense strand starting at position 2560 of SEQ ID NO: 585333
guagucucaaguugcuauu

SEQ ID NO: 631593 - RNA, 19 nt, Artificial Sequence
  Description of Artificial Sequence: Synthetic oligonucleotide
  Antisense strand to SEQ ID NO: 631592
aauagcaacuugagacuac

SEQ ID NO: 631594 - RNA, 19 nt, Artificial Sequence
  Description of Artificial Sequence: Synthetic oligonucleotide
  Sense strand starting at position 2563 of SEQ ID NO: 585333
gucucaaguugcuauuguu

SEQ ID NO: 631595 - RNA, 19 nt, Artificial Sequence
  Description of Artificial Sequence: Synthetic oligonucleotide
  Antisense strand to SEQ ID NO: 631594
aacaauagcaacuugagac

SEQ ID NO: 631596 - RNA, 19 nt, Artificial Sequence
  Description of Artificial Sequence: Synthetic oligonucleotide
  Sense strand starting at position 2584 of SEQ ID NO: 585333
caucuuuacguccacgagu

SEQ ID NO: 631597 - RNA, 19 nt, Artificial Sequence
  Description of Artificial Sequence: Synthetic oligonucleotide
  Antisense strand to SEQ ID NO: 631596
acucguggacguaaagaug

SEQ ID NO: 631598 - RNA, 19 nt, Artificial Sequence
  Description of Artificial Sequence: Synthetic oligonucleotide
  Sense strand starting at position 2608 of SEQ ID NO: 585333
auguuugguucccacuuau

SEQ ID NO: 631599 - RNA, 19 nt, Artificial Sequence
  Description of Artificial Sequence: Synthetic oligonucleotide
  Antisense strand to SEQ ID NO: 631598
auaagugggaaccaaacau

SEQ ID NO: 631600 - RNA, 19 nt, Artificial Sequence
  Description of Artificial Sequence: Synthetic oligonucleotide
  Sense strand starting at position 2733 of SEQ ID NO: 585333
aggccauccugcugcaaua

SEQ ID NO: 631601 - RNA, 19 nt, Artificial Sequence
  Description of Artificial Sequence: Synthetic oligonucleotide
  Antisense strand to SEQ ID NO: 631600
uauugcagcaggauggccu

SEQ ID NO: 631602 - RNA, 19 nt, Artificial Sequence
  Description of Artificial Sequence: Synthetic oligonucleotide
  Sense strand starting at position 2758 of SEQ ID NO: 585333
caguuauaugcacgcauuc

SEQ ID NO: 631603 - RNA, 19 nt, Artificial Sequence
  Description of Artificial Sequence: Synthetic oligonucleotide
  Antisense strand to SEQ ID NO: 631602
gaaugcgugcauauaacug

SEQ ID NO: 631604 - RNA, 19 nt, Artificial Sequence
  Description of Artificial Sequence: Synthetic oligonucleotide
  Sense strand starting at position 2781 of SEQ ID NO: 585333
acuuguagguauccuuaga

SEQ ID NO: 631605 - RNA, 19 nt, Artificial Sequence
  Description of Artificial Sequence: Synthetic oligonucleotide
  Antisense strand to SEQ ID NO: 631604
ucuaaggauaccuacaagu

SEQ ID NO: 631606 - RNA, 19 nt, Artificial Sequence
  Description of Artificial Sequence: Synthetic oligonucleotide
  Sense strand starting at position 2817 of SEQ ID NO: 585333
aggaaauuguuacagaaau

SEQ ID NO: 631607 - RNA, 19 nt, Artificial Sequence
  Description of Artificial Sequence: Synthetic oligonucleotide
  Antisense strand to SEQ ID NO: 631606
auuucuguaacaauuuccu

SEQ ID NO: 631608 - RNA, 19 nt, Artificial Sequence
  Description of Artificial Sequence: Synthetic oligonucleotide
  Sense strand starting at position 2836 of SEQ ID NO: 585333
agucaagauuaagggagaa

SEQ ID NO: 631609 - RNA, 19 nt, Artificial Sequence
  Description of Artificial Sequence: Synthetic oligonucleotide
  Antisense strand to SEQ ID NO: 631608
uucucccuuaaucuugacu

SEQ ID NO: 631610 - RNA, 19 nt, Artificial Sequence
  Description of Artificial Sequence: Synthetic oligonucleotide
  Sense strand starting at position 2978 of SEQ ID NO: 585333
ccauuauccuaagcggauu

SEQ ID NO: 631611 - RNA, 19 nt, Artificial Sequence
  Description of Artificial Sequence: Synthetic oligonucleotide
  Antisense strand to SEQ ID NO: 631610
aauccgcuuaggauaaugg

SEQ ID NO: 631612 - RNA, 19 nt, Artificial Sequence
  Description of Artificial Sequence: Synthetic oligonucleotide
  Sense strand starting at position 3211 of SEQ ID NO: 585333
gcaguauaccuagguaaca

SEQ ID NO: 631613 - RNA, 19 nt, Artificial Sequence
  Description of Artificial Sequence: Synthetic oligonucleotide
  Antisense strand to SEQ ID NO: 631612
uguuaccuagguauacugc

SEQ ID NO: 631614 - RNA, 19 nt, Artificial Sequence
  Description of Artificial Sequence: Synthetic oligonucleotide
  Sense strand starting at position 3693 of SEQ ID NO: 585333
ccaaauuuaugggacaaac

SEQ ID NO: 631615 - RNA, 19 nt, Artificial Sequence
  Description of Artificial Sequence: Synthetic oligonucleotide
  Antisense strand to SEQ ID NO: 631614
guuugucccauaaauuugg

SEQ ID NO: 631616 - RNA, 19 nt, Artificial Sequence
  Description of Artificial Sequence: Synthetic oligonucleotide
  Sense strand starting at position 3704 of SEQ ID NO: 585333
ggacaaacauucuaaauug

SEQ ID NO: 631617 - RNA, 19 nt, Artificial Sequence
  Description of Artificial Sequence: Synthetic oligonucleotide
  Antisense strand to SEQ ID NO: 631616
caauuuagaauguuugucc

SEQ ID NO: 631618 - RNA, 19 nt, Artificial Sequence
  Description of Artificial Sequence: Synthetic oligonucleotide
  Sense strand starting at position 3738 of SEQ ID NO: 585333
auguuacaguaaugguaau

SEQ ID NO: 631619 - RNA, 19 nt, Artificial Sequence
  Description of Artificial Sequence: Synthetic oligonucleotide
  Antisense strand to SEQ ID NO: 631618
auuaccauuacuguaacau

SEQ ID NO: 631620 - RNA, 19 nt, Artificial Sequence
  Description of Artificial Sequence: Synthetic oligonucleotide
  Sense strand starting at position 69 of SEQ ID NO: 585334
gagccuuucccuggcauuu

SEQ ID NO: 631621 - RNA, 19 nt, Artificial Sequence
  Description of Artificial Sequence: Synthetic oligonucleotide
  Antisense strand to SEQ ID NO: 631620
aaaugccagggaaaggcuc

SEQ ID NO: 631622 - RNA, 19 nt, Artificial Sequence
  Description of Artificial Sequence: Synthetic oligonucleotide
  Sense strand starting at position 417 of SEQ ID NO: 585334
uuuacaauagaacgcuuaa

SEQ ID NO: 631623 - RNA, 19 nt, Artificial Sequence
  Description of Artificial Sequence: Synthetic oligonucleotide
  Antisense strand to SEQ ID NO: 631622
uuaagcguucuauuguaaa

SEQ ID NO: 631624 - RNA, 19 nt, Artificial Sequence
  Description of Artificial Sequence: Synthetic oligonucleotide
  Sense strand starting at position 773 of SEQ ID NO: 585334
acgccuacuccagaagauu

SEQ ID NO: 631625 - RNA, 19 nt, Artificial Sequence
  Description of Artificial Sequence: Synthetic oligonucleotide
  Antisense strand to SEQ ID NO: 631624
aaucuucuggaguaggcgu

SEQ ID NO: 631626 - RNA, 19 nt, Artificial Sequence
  Description of Artificial Sequence: Synthetic oligonucleotide
  Sense strand starting at position 781 of SEQ ID NO: 585334
uccagaagauuguugugaa

SEQ ID NO: 631627 - RNA, 19 nt, Artificial Sequence
  Description of Artificial Sequence: Synthetic oligonucleotide
  Antisense strand to SEQ ID NO: 631626
uucacaacaaucuucugga

SEQ ID NO: 631628 - RNA, 19 nt, Artificial Sequence
  Description of Artificial Sequence: Synthetic oligonucleotide
  Sense strand starting at position 895 of SEQ ID NO: 585334
ggagcucguaaucacaauu

SEQ ID NO: 631629 - RNA, 19 nt, Artificial Sequence
  Description of Artificial Sequence: Synthetic oligonucleotide
  Antisense strand to SEQ ID NO: 631628
aauugugauuacgagcucc

SEQ ID NO: 631630 - RNA, 19 nt, Artificial Sequence
  Description of Artificial Sequence: Synthetic oligonucleotide
  Sense strand starting at position 963 of SEQ ID NO: 585334
ucaauaagcagguggaaau

SEQ ID NO: 631631 - RNA, 19 nt, Artificial Sequence
  Description of Artificial Sequence: Synthetic oligonucleotide
  Antisense strand to SEQ ID NO: 631630
auuuccaccugcuuauuga

SEQ ID NO: 631632 - RNA, 19 nt, Artificial Sequence
  Description of Artificial Sequence: Synthetic oligonucleotide
  Sense strand starting at position 1251 of SEQ ID NO: 585334
ucacuuaacgauggagauc

SEQ ID NO: 631633 - RNA, 19 nt, Artificial Sequence
  Description of Artificial Sequence: Synthetic oligonucleotide
  Antisense strand to SEQ ID NO: 631632
gaucuccaucguuaaguga

SEQ ID NO: 631634 - RNA, 19 nt, Artificial Sequence
  Description of Artificial Sequence: Synthetic oligonucleotide
  Sense strand starting at position 1270 of SEQ ID NO: 585334
cguucugagaaauggagaa

SEQ ID NO: 631635 - RNA, 19 nt, Artificial Sequence
  Description of Artificial Sequence: Synthetic oligonucleotide
  Antisense strand to SEQ ID NO: 631634
uucuccauuucucagaacg

SEQ ID NO: 631636 - RNA, 19 nt, Artificial Sequence
  Description of Artificial Sequence: Synthetic oligonucleotide
  Sense strand starting at position 1455 of SEQ ID NO: 585334
acaguaagaagacgauauu

SEQ ID NO: 631637 - RNA, 19 nt, Artificial Sequence
  Description of Artificial Sequence: Synthetic oligonucleotide
  Antisense strand to SEQ ID NO: 631636
aauaucgucuucuuacugu

SEQ ID NO: 631638 - RNA, 19 nt, Artificial Sequence
  Description of Artificial Sequence: Synthetic oligonucleotide
  Sense strand starting at position 2117 of SEQ ID NO: 585334
uggacuucuggguguggga

SEQ ID NO: 631639 - RNA, 19 nt, Artificial Sequence
  Description of Artificial Sequence: Synthetic oligonucleotide
  Antisense strand to SEQ ID NO: 631638
ucccacacccagaagucca

SEQ ID NO: 631640 - RNA, 19 nt, Artificial Sequence
  Description of Artificial Sequence: Synthetic oligonucleotide
  Sense strand starting at position 2370 of SEQ ID NO: 585334
cugagacuuagcuagugaa

SEQ ID NO: 631641 - RNA, 19 nt, Artificial Sequence
  Description of Artificial Sequence: Synthetic oligonucleotide
  Antisense strand to SEQ ID NO: 631640
uucacuagcuaagucucag

SEQ ID NO: 631642 - RNA, 19 nt, Artificial Sequence
  Description of Artificial Sequence: Synthetic oligonucleotide
  Sense strand starting at position 2417 of SEQ ID NO: 585334
aucaaaucggcuugaccaa

SEQ ID NO: 631643 - RNA, 19 nt, Artificial Sequence
  Description of Artificial Sequence: Synthetic oligonucleotide
  Antisense strand to SEQ ID NO: 631642
uuggucaagccgauuugau

SEQ ID NO: 631644 - RNA, 19 nt, Artificial Sequence
  Description of Artificial Sequence: Synthetic oligonucleotide
  Sense strand starting at position 2436 of SEQ ID NO: 585334
gaacuacuuuguucuugga

SEQ ID NO: 631645 - RNA, 19 nt, Artificial Sequence
  Description of Artificial Sequence: Synthetic oligonucleotide
  Antisense strand to SEQ ID NO: 631644
uccaagaacaaaguaguuc

SEQ ID NO: 631646 - RNA, 19 nt, Artificial Sequence
  Description of Artificial Sequence: Synthetic oligonucleotide
  Sense strand starting at position 2438 of SEQ ID NO: 585334
acuacuuuguucuuggaga

SEQ ID NO: 631647 - RNA, 19 nt, Artificial Sequence
  Description of Artificial Sequence: Synthetic oligonucleotide
  Antisense strand to SEQ ID NO: 631646
ucuccaagaacaaaguagu

SEQ ID NO: 631648 - RNA, 19 nt, Artificial Sequence
  Description of Artificial Sequence: Synthetic oligonucleotide
  Sense strand starting at position 2440 of SEQ ID NO: 585334
uacuuuguucuuggagaaa

SEQ ID NO: 631649 - RNA, 19 nt, Artificial Sequence
  Description of Artificial Sequence: Synthetic oligonucleotide
  Antisense strand to SEQ ID NO: 631648
uuucuccaagaacaaagua

SEQ ID NO: 631650 - RNA, 19 nt, Artificial Sequence
  Description of Artificial Sequence: Synthetic oligonucleotide
  Sense strand starting at position 2547 of SEQ ID NO: 585334
cuggguuugucuguuauuu

SEQ ID NO: 631651 - RNA, 19 nt, Artificial Sequence
  Description of Artificial Sequence: Synthetic oligonucleotide
  Antisense strand to SEQ ID NO: 631650
aaauaacagacaaacccag

SEQ ID NO: 631652 - RNA, 19 nt, Artificial Sequence
  Description of Artificial Sequence: Synthetic oligonucleotide
  Sense strand starting at position 2943 of SEQ ID NO: 585334
gagguauuaucagccagau

SEQ ID NO: 631653 - RNA, 19 nt, Artificial Sequence
  Description of Artificial Sequence: Synthetic oligonucleotide
  Antisense strand to SEQ ID NO: 631652
aucuggcugauaauaccuc

SEQ ID NO: 631654 - RNA, 19 nt, Artificial Sequence
  Description of Artificial Sequence: Synthetic oligonucleotide
  Sense strand starting at position 3213 of SEQ ID NO: 585334
guuucugauguccacuaua

SEQ ID NO: 631655 - RNA, 19 nt, Artificial Sequence
  Description of Artificial Sequence: Synthetic oligonucleotide
  Antisense strand to SEQ ID NO: 631654
uauaguggacaucagaaac

SEQ ID NO: 631656 - RNA, 19 nt, Artificial Sequence
  Description of Artificial Sequence: Synthetic oligonucleotide
  Sense strand starting at position 3216 of SEQ ID NO: 585334
ucugauguccacuauauga

SEQ ID NO: 631657 - RNA, 19 nt, Artificial Sequence
  Description of Artificial Sequence: Synthetic oligonucleotide
  Antisense strand to SEQ ID NO: 631656
ucauauaguggacaucaga

SEQ ID NO: 631658 - RNA, 19 nt, Artificial Sequence
  Description of Artificial Sequence: Synthetic oligonucleotide
  Sense strand starting at position 3251 of SEQ ID NO: 585334
guuguaaggaugcaaggau

SEQ ID NO: 631659 - RNA, 19 nt, Artificial Sequence
  Description of Artificial Sequence: Synthetic oligonucleotide
  Antisense strand to SEQ ID NO: 631658
auccuugcauccuuacaac

SEQ ID NO: 631660 - RNA, 19 nt, Artificial Sequence
  Description of Artificial Sequence: Synthetic oligonucleotide
  Sense strand starting at position 3272 of SEQ ID NO: 585334
auaacugaucuuuaccguu

SEQ ID NO: 631661 - RNA, 19 nt, Artificial Sequence
  Description of Artificial Sequence: Synthetic oligonucleotide
  Antisense strand to SEQ ID NO: 631660
aacgguaaagaucaguuau

SEQ ID NO: 631662 - RNA, 19 nt, Artificial Sequence
  Description of Artificial Sequence: Synthetic oligonucleotide
  Sense strand starting at position 3378 of SEQ ID NO: 585334
aaacucugaggucgagauu

SEQ ID NO: 631663 - RNA, 19 nt, Artificial Sequence
  Description of Artificial Sequence: Synthetic oligonucleotide
  Antisense strand to SEQ ID NO: 631662
aaucucgaccucagaguuu

SEQ ID NO: 631664 - RNA, 19 nt, Artificial Sequence
  Description of Artificial Sequence: Synthetic oligonucleotide
  Sense strand starting at position 3381 of SEQ ID NO: 585334
cucugaggucgagauuaag

SEQ ID NO: 631665 - RNA, 19 nt, Artificial Sequence
  Description of Artificial Sequence: Synthetic oligonucleotide
  Antisense strand to SEQ ID NO: 631664
cuuaaucucgaccucagag

SEQ ID NO: 631666 - RNA, 19 nt, Artificial Sequence
  Description of Artificial Sequence: Synthetic oligonucleotide
  Sense strand starting at position 3384 of SEQ ID NO: 585334
ugaggucgagauuaaggua

SEQ ID NO: 631667 - RNA, 19 nt, Artificial Sequence
  Description of Artificial Sequence: Synthetic oligonucleotide
  Antisense strand to SEQ ID NO: 631666
uaccuuaaucucgaccuca

SEQ ID NO: 631668 - RNA, 19 nt, Artificial Sequence
  Description of Artificial Sequence: Synthetic oligonucleotide
  Sense strand starting at position 3399 of SEQ ID NO: 585334
gguauaaggcauugauuga

SEQ ID NO: 631669 - RNA, 19 nt, Artificial Sequence
  Description of Artificial Sequence: Synthetic oligonucleotide
  Antisense strand to SEQ ID NO: 631668
ucaaucaaugccuuauacc

SEQ ID NO: 631670 - RNA, 19 nt, Artificial Sequence
  Description of Artificial Sequence: Synthetic oligonucleotide
  Sense strand starting at position 3400 of SEQ ID NO: 585334
guauaaggcauugauugau

SEQ ID NO: 631671 - RNA, 19 nt, Artificial Sequence
  Description of Artificial Sequence: Synthetic oligonucleotide
  Antisense strand to SEQ ID NO: 631670
aucaaucaaugccuuauac

SEQ ID NO: 631672 - RNA, 19 nt, Artificial Sequence
  Description of Artificial Sequence: Synthetic oligonucleotide
  Sense strand starting at position 3406 of SEQ ID NO: 585334
ggcauugauugauuaggga

SEQ ID NO: 631673 - RNA, 19 nt, Artificial Sequence
  Description of Artificial Sequence: Synthetic oligonucleotide
  Antisense strand to SEQ ID NO: 631672
ucccuaaucaaucaaugcc

SEQ ID NO: 631674 - RNA, 19 nt, Artificial Sequence
  Description of Artificial Sequence: Synthetic oligonucleotide
  Sense strand starting at position 3421 of SEQ ID NO: 585334
gggagugcucuuggaauaa

SEQ ID NO: 631675 - RNA, 19 nt, Artificial Sequence
  Description of Artificial Sequence: Synthetic oligonucleotide
  Antisense strand to SEQ ID NO: 631674
uuauuccaagagcacuccc

SEQ ID NO: 631676 - RNA, 19 nt, Artificial Sequence
  Description of Artificial Sequence: Synthetic oligonucleotide
  Sense strand starting at position 3433 of SEQ ID NO: 585334
ggaauaaacgucugugaag

SEQ ID NO: 631677 - RNA, 19 nt, Artificial Sequence
  Description of Artificial Sequence: Synthetic oligonucleotide
  Antisense strand to SEQ ID NO: 631676
cuucacagacguuuauucc

SEQ ID NO: 631678 - RNA, 19 nt, Artificial Sequence
  Description of Artificial Sequence: Synthetic oligonucleotide
  Sense strand starting at position 3434 of SEQ ID NO: 585334
gaauaaacgucugugaagg

SEQ ID NO: 631679 - RNA, 19 nt, Artificial Sequence
  Description of Artificial Sequence: Synthetic oligonucleotide
  Antisense strand to SEQ ID NO: 631678
ccuucacagacguuuauuc

SEQ ID NO: 631680 - RNA, 19 nt, Artificial Sequence
  Description of Artificial Sequence: Synthetic oligonucleotide
  Sense strand starting at position 3476 of SEQ ID NO: 585334
ggaagaaguugaucuguga

SEQ ID NO: 631681 - RNA, 19 nt, Artificial Sequence
  Description of Artificial Sequence: Synthetic oligonucleotide
  Antisense strand to SEQ ID NO: 631680
ucacagaucaacuucuucc

SEQ ID NO: 631682 - RNA, 19 nt, Artificial Sequence
  Description of Artificial Sequence: Synthetic oligonucleotide
  Sense strand starting at position 3591 of SEQ ID NO: 585334
agcacugauuagucauuga

SEQ ID NO: 631683 - RNA, 19 nt, Artificial Sequence
  Description of Artificial Sequence: Synthetic oligonucleotide
  Antisense strand to SEQ ID NO: 631682
ucaaugacuaaucagugcu

SEQ ID NO: 631684 - RNA, 19 nt, Artificial Sequence
  Description of Artificial Sequence: Synthetic oligonucleotide
  Sense strand starting at position 3594 of SEQ ID NO: 585334
acugauuagucauugaaua

SEQ ID NO: 631685 - RNA, 19 nt, Artificial Sequence
  Description of Artificial Sequence: Synthetic oligonucleotide
  Antisense strand to SEQ ID NO: 631684
uauucaaugacuaaucagu

SEQ ID NO: 631686 - RNA, 19 nt, Artificial Sequence
  Description of Artificial Sequence: Synthetic oligonucleotide
  Sense strand starting at position 3595 of SEQ ID NO: 585334
cugauuagucauugaauac

SEQ ID NO: 631687 - RNA, 19 nt, Artificial Sequence
  Description of Artificial Sequence: Synthetic oligonucleotide
  Antisense strand to SEQ ID NO: 631686
guauucaaugacuaaucag

SEQ ID NO: 631688 - RNA, 19 nt, Artificial Sequence
  Description of Artificial Sequence: Synthetic oligonucleotide
  Sense strand starting at position 3747 of SEQ ID NO: 585334
gagggaucugggcaaguuu

SEQ ID NO: 631689 - RNA, 19 nt, Artificial Sequence
  Description of Artificial Sequence: Synthetic oligonucleotide
  Antisense strand to SEQ ID NO: 631688
aaacuugcccagaucccuc

SEQ ID NO: 631690 - RNA, 19 nt, Artificial Sequence
  Description of Artificial Sequence: Synthetic oligonucleotide
  Sense strand starting at position 3807 of SEQ ID NO: 585334
cuuugcuaguuagucauuu

SEQ ID NO: 631691 - RNA, 19 nt, Artificial Sequence
  Description of Artificial Sequence: Synthetic oligonucleotide
  Antisense strand to SEQ ID NO: 631690
aaaugacuaacuagcaaag

SEQ ID NO: 631692 - RNA, 19 nt, Artificial Sequence
  Description of Artificial Sequence: Synthetic oligonucleotide
  Sense strand starting at position 3850 of SEQ ID NO: 585334
gggugaauauuaucaagug

SEQ ID NO: 631693 - RNA, 19 nt, Artificial Sequence
  Description of Artificial Sequence: Synthetic oligonucleotide
  Antisense strand to SEQ ID NO: 631692
cacuugauaauauucaccc

SEQ ID NO: 631694 - RNA, 19 nt, Artificial Sequence
  Description of Artificial Sequence: Synthetic oligonucleotide
  Sense strand starting at position 3951 of SEQ ID NO: 585334
cugucuacugagggagaua

SEQ ID NO: 631695 - RNA, 19 nt, Artificial Sequence
  Description of Artificial Sequence: Synthetic oligonucleotide
  Antisense strand to SEQ ID NO: 631694
uaucucccucaguagacag

SEQ ID NO: 631696 - RNA, 19 nt, Artificial Sequence
  Description of Artificial Sequence: Synthetic oligonucleotide
  Sense strand starting at position 3960 of SEQ ID NO: 585334
gagggagauagcuguuaaa

SEQ ID NO: 631697 - RNA, 19 nt, Artificial Sequence
  Description of Artificial Sequence: Synthetic oligonucleotide
  Antisense strand to SEQ ID NO: 631696
uuuaacagcuaucucccuc

SEQ ID NO: 631698 - RNA, 19 nt, Artificial Sequence
  Description of Artificial Sequence: Synthetic oligonucleotide
  Sense strand starting at position 3970 of SEQ ID NO: 585334
gcuguuaaacaaggaauua

SEQ ID NO: 631699 - RNA, 19 nt, Artificial Sequence
  Description of Artificial Sequence: Synthetic oligonucleotide
  Antisense strand to SEQ ID NO: 631698
uaauuccuuguuuaacagc

SEQ ID NO: 631700 - RNA, 19 nt, Artificial Sequence
  Description of Artificial Sequence: Synthetic oligonucleotide
  Sense strand starting at position 294 of SEQ ID NO: 585335
gcgcccaggcgaguuaauu

SEQ ID NO: 631701 - RNA, 19 nt, Artificial Sequence
  Description of Artificial Sequence: Synthetic oligonucleotide
  Antisense strand to SEQ ID NO: 631700
aauuaacucgccugggcgc

SEQ ID NO: 631702 - RNA, 19 nt, Artificial Sequence
  Description of Artificial Sequence: Synthetic oligonucleotide
  Sense strand starting at position 373 of SEQ ID NO: 585335
gccugaccucguuuaagcu

SEQ ID NO: 631703 - RNA, 19 nt, Artificial Sequence
  Description of Artificial Sequence: Synthetic oligonucleotide
  Antisense strand to SEQ ID NO: 631702
agcuuaaacgaggucaggc

SEQ ID NO: 631704 - RNA, 19 nt, Artificial Sequence
  Description of Artificial Sequence: Synthetic oligonucleotide
  Sense strand starting at position 422 of SEQ ID NO: 585335
uggaguaacuauguaucuu

SEQ ID NO: 631705 - RNA, 19 nt, Artificial Sequence
  Description of Artificial Sequence: Synthetic oligonucleotide
  Antisense strand to SEQ ID NO: 631704
aagauacauaguuacucca

SEQ ID NO: 631706 - RNA, 19 nt, Artificial Sequence
  Description of Artificial Sequence: Synthetic oligonucleotide
  Sense strand starting at position 433 of SEQ ID NO: 585335
uguaucuuaggguagcuaa

SEQ ID NO: 631707 - RNA, 19 nt, Artificial Sequence
  Description of Artificial Sequence: Synthetic oligonucleotide
  Antisense strand to SEQ ID NO: 631706
uuagcuacccuaagauaca

SEQ ID NO: 631708 - RNA, 19 nt, Artificial Sequence
  Description of Artificial Sequence: Synthetic oligonucleotide
  Sense strand starting at position 444 of SEQ ID NO: 585335
guagcuaacuggucuuuaa

SEQ ID NO: 631709 - RNA, 19 nt, Artificial Sequence
  Description of Artificial Sequence: Synthetic oligonucleotide
  Antisense strand to SEQ ID NO: 631708
uuaaagaccaguuagcuac

SEQ ID NO: 631710 - RNA, 19 nt, Artificial Sequence
  Description of Artificial Sequence: Synthetic oligonucleotide
  Sense strand starting at position 447 of SEQ ID NO: 585335
gcuaacuggucuuuaaacu

SEQ ID NO: 631711 - RNA, 19 nt, Artificial Sequence
  Description of Artificial Sequence: Synthetic oligonucleotide
  Antisense strand to SEQ ID NO: 631710
aguuuaaagaccaguuagc

SEQ ID NO: 631712 - RNA, 19 nt, Artificial Sequence
  Description of Artificial Sequence: Synthetic oligonucleotide
  Sense strand starting at position 542 of SEQ ID NO: 585335
aguuucuaucgugagauca

SEQ ID NO: 631713 - RNA, 19 nt, Artificial Sequence
  Description of Artificial Sequence: Synthetic oligonucleotide
  Antisense strand to SEQ ID NO: 631712
ugaucucacgauagaaacu

SEQ ID NO: 631714 - RNA, 19 nt, Artificial Sequence
  Description of Artificial Sequence: Synthetic oligonucleotide
  Sense strand starting at position 620 of SEQ ID NO: 585335
aucucugaugcaugggaaa

SEQ ID NO: 631715 - RNA, 19 nt, Artificial Sequence
  Description of Artificial Sequence: Synthetic oligonucleotide
  Antisense strand to SEQ ID NO: 631714
uuucccaugcaucagagau

SEQ ID NO: 631716 - RNA, 19 nt, Artificial Sequence
  Description of Artificial Sequence: Synthetic oligonucleotide
  Sense strand starting at position 759 of SEQ ID NO: 585335
gagaaacuguugucuguuc

SEQ ID NO: 631717 - RNA, 19 nt, Artificial Sequence
  Description of Artificial Sequence: Synthetic oligonucleotide
  Antisense strand to SEQ ID NO: 631716
gaacagacaacaguuucuc

SEQ ID NO: 631718 - RNA, 19 nt, Artificial Sequence
  Description of Artificial Sequence: Synthetic oligonucleotide
  Sense strand starting at position 916 of SEQ ID NO: 585335
agcaguugcgcgaggugaa

SEQ ID NO: 631719 - RNA, 19 nt, Artificial Sequence
  Description of Artificial Sequence: Synthetic oligonucleotide
  Antisense strand to SEQ ID NO: 631718
uucaccucgcgcaacugcu

SEQ ID NO: 631720 - RNA, 19 nt, Artificial Sequence
  Description of Artificial Sequence: Synthetic oligonucleotide
  Sense strand starting at position 944 of SEQ ID NO: 585335
augggacugauggguuaua

SEQ ID NO: 631721 - RNA, 19 nt, Artificial Sequence
  Description of Artificial Sequence: Synthetic oligonucleotide
  Antisense strand to SEQ ID NO: 631720
uauaacccaucagucccau

SEQ ID NO: 631722 - RNA, 19 nt, Artificial Sequence
  Description of Artificial Sequence: Synthetic oligonucleotide
  Sense strand starting at position 955 of SEQ ID NO: 585335
ggguuauacaaucaugguu

SEQ ID NO: 631723 - RNA, 19 nt, Artificial Sequence
  Description of Artificial Sequence: Synthetic oligonucleotide
  Antisense strand to SEQ ID NO: 631722
aaccaugauuguauaaccc

SEQ ID NO: 631724 - RNA, 19 nt, Artificial Sequence
  Description of Artificial Sequence: Synthetic oligonucleotide
  Sense strand starting at position 1063 of SEQ ID NO: 585335
gggucaagucuugaaagcu

SEQ ID NO: 631725 - RNA, 19 nt, Artificial Sequence
  Description of Artificial Sequence: Synthetic oligonucleotide
  Antisense strand to SEQ ID NO: 631724
agcuuucaagacuugaccc

SEQ ID NO: 631726 - RNA, 19 nt, Artificial Sequence
  Description of Artificial Sequence: Synthetic oligonucleotide
  Sense strand starting at position 1556 of SEQ ID NO: 585335
gcaacuuucccucgggaac

SEQ ID NO: 631727 - RNA, 19 nt, Artificial Sequence
  Description of Artificial Sequence: Synthetic oligonucleotide
  Antisense strand to SEQ ID NO: 631726
guucccgagggaaaguugc

SEQ ID NO: 631728 - RNA, 19 nt, Artificial Sequence
  Description of Artificial Sequence: Synthetic oligonucleotide
  Sense strand starting at position 2299 of SEQ ID NO: 585335
gggugcuucccagguuaga

SEQ ID NO: 631729 - RNA, 19 nt, Artificial Sequence
  Description of Artificial Sequence: Synthetic oligonucleotide
  Antisense strand to SEQ ID NO: 631728
ucuaaccugggaagcaccc

SEQ ID NO: 631730 - RNA, 19 nt, Artificial Sequence
  Description of Artificial Sequence: Synthetic oligonucleotide
  Sense strand starting at position 2497 of SEQ ID NO: 585335
cucagaccuucugugggaa

SEQ ID NO: 631731 - RNA, 19 nt, Artificial Sequence
  Description of Artificial Sequence: Synthetic oligonucleotide
  Antisense strand to SEQ ID NO: 631730
uucccacagaaggucugag

SEQ ID NO: 631732 - RNA, 19 nt, Artificial Sequence
  Description of Artificial Sequence: Synthetic oligonucleotide
  Sense strand starting at position 2498 of SEQ ID NO: 585335
ucagaccuucugugggaau

SEQ ID NO: 631733 - RNA, 19 nt, Artificial Sequence
  Description of Artificial Sequence: Synthetic oligonucleotide
  Antisense strand to SEQ ID NO: 631732
auucccacagaaggucuga

SEQ ID NO: 631734 - RNA, 19 nt, Artificial Sequence
  Description of Artificial Sequence: Synthetic oligonucleotide
  Sense strand starting at position 2500 of SEQ ID NO: 585335
agaccuucugugggaaugu

SEQ ID NO: 631735 - RNA, 19 nt, Artificial Sequence
  Description of Artificial Sequence: Synthetic oligonucleotide
  Antisense strand to SEQ ID NO: 631734
acauucccacagaaggucu

SEQ ID NO: 631736 - RNA, 19 nt, Artificial Sequence
  Description of Artificial Sequence: Synthetic oligonucleotide
  Sense strand starting at position 2651 of SEQ ID NO: 585335
augagcuagccacaaugaa

SEQ ID NO: 631737 - RNA, 19 nt, Artificial Sequence
  Description of Artificial Sequence: Synthetic oligonucleotide
  Antisense strand to SEQ ID NO: 631736
uucauuguggcuagcucau

SEQ ID NO: 631738 - RNA, 19 nt, Artificial Sequence
  Description of Artificial Sequence: Synthetic oligonucleotide
  Sense strand starting at position 2668 of SEQ ID NO: 585335
aaaguagaacgaugaaucu

SEQ ID NO: 631739 - RNA, 19 nt, Artificial Sequence
  Description of Artificial Sequence: Synthetic oligonucleotide
  Antisense strand to SEQ ID NO: 631738
agauucaucguucuacuuu

SEQ ID NO: 631740 - RNA, 19 nt, Artificial Sequence
  Description of Artificial Sequence: Synthetic oligonucleotide
  Sense strand starting at position 2791 of SEQ ID NO: 585335
gugcuuauuccauaccaga

SEQ ID NO: 631741 - RNA, 19 nt, Artificial Sequence
  Description of Artificial Sequence: Synthetic oligonucleotide
  Antisense strand to SEQ ID NO: 631740
ucugguauggaauaagcac

SEQ ID NO: 631742 - RNA, 19 nt, Artificial Sequence
  Description of Artificial Sequence: Synthetic oligonucleotide
  Sense strand starting at position 2819 of SEQ ID NO: 585335
gcauguaagcaugaaucuu

SEQ ID NO: 631743 - RNA, 19 nt, Artificial Sequence
  Description of Artificial Sequence: Synthetic oligonucleotide
  Antisense strand to SEQ ID NO: 631742
aagauucaugcuuacaugc

SEQ ID NO: 631744 - RNA, 19 nt, Artificial Sequence
  Description of Artificial Sequence: Synthetic oligonucleotide
  Sense strand starting at position 2855 of SEQ ID NO: 585335
ggaaccuacuuauagauga

SEQ ID NO: 631745 - RNA, 19 nt, Artificial Sequence
  Description of Artificial Sequence: Synthetic oligonucleotide
  Antisense strand to SEQ ID NO: 631744
ucaucuauaaguagguucc

SEQ ID NO: 631746 - RNA, 19 nt, Artificial Sequence
  Description of Artificial Sequence: Synthetic oligonucleotide
  Sense strand starting at position 2886 of SEQ ID NO: 585335
caaggauacucagugacuu

SEQ ID NO: 631747 - RNA, 19 nt, Artificial Sequence
  Description of Artificial Sequence: Synthetic oligonucleotide
  Antisense strand to SEQ ID NO: 631746
aagucacugaguauccuug

SEQ ID NO: 631748 - RNA, 19 nt, Artificial Sequence
  Description of Artificial Sequence: Synthetic oligonucleotide
  Sense strand starting at position 2887 of SEQ ID NO: 585335
aaggauacucagugacuua

SEQ ID NO: 631749 - RNA, 19 nt, Artificial Sequence
  Description of Artificial Sequence: Synthetic oligonucleotide
  Antisense strand to SEQ ID NO: 631748
uaagucacugaguauccuu

SEQ ID NO: 631750 - RNA, 19 nt, Artificial Sequence
  Description of Artificial Sequence: Synthetic oligonucleotide
  Sense strand starting at position 2986 of SEQ ID NO: 585335
uugagcaaguaauuaugua

SEQ ID NO: 631751 - RNA, 19 nt, Artificial Sequence
  Description of Artificial Sequence: Synthetic oligonucleotide
  Antisense strand to SEQ ID NO: 631750
uacauaauuacuugcucaa

SEQ ID NO: 631752 - RNA, 19 nt, Artificial Sequence
  Description of Artificial Sequence: Synthetic oligonucleotide
  Sense strand starting at position 2990 of SEQ ID NO: 585335
gcaaguaauuauguacgaa

SEQ ID NO: 631753 - RNA, 19 nt, Artificial Sequence
  Description of Artificial Sequence: Synthetic oligonucleotide
  Antisense strand to SEQ ID NO: 631752
uucguacauaauuacuugc

SEQ ID NO: 631754 - RNA, 19 nt, Artificial Sequence
  Description of Artificial Sequence: Synthetic oligonucleotide
  Sense strand starting at position 2993 of SEQ ID NO: 585335
aguaauuauguacgaagua

SEQ ID NO: 631755 - RNA, 19 nt, Artificial Sequence
  Description of Artificial Sequence: Synthetic oligonucleotide
  Antisense strand to SEQ ID NO: 631754
uacuucguacauaauuacu

SEQ ID NO: 631756 - RNA, 19 nt, Artificial Sequence
  Description of Artificial Sequence: Synthetic oligonucleotide
  Sense strand starting at position 3002 of SEQ ID NO: 585335
guacgaaguacugaagugu

SEQ ID NO: 631757 - RNA, 19 nt, Artificial Sequence
  Description of Artificial Sequence: Synthetic oligonucleotide
  Antisense strand to SEQ ID NO: 631756
acacuucaguacuucguac

SEQ ID NO: 631758 - RNA, 19 nt, Artificial Sequence
  Description of Artificial Sequence: Synthetic oligonucleotide
  Sense strand starting at position 3073 of SEQ ID NO: 585335
gccuuuauugcauccguuu

SEQ ID NO: 631759 - RNA, 19 nt, Artificial Sequence
  Description of Artificial Sequence: Synthetic oligonucleotide
  Antisense strand to SEQ ID NO: 631758
aaacggaugcaauaaaggc

SEQ ID NO: 631760 - RNA, 19 nt, Artificial Sequence
  Description of Artificial Sequence: Synthetic oligonucleotide
  Sense strand starting at position 3126 of SEQ ID NO: 585335
auaacuaguuagucuugca

SEQ ID NO: 631761 - RNA, 19 nt, Artificial Sequence
  Description of Artificial Sequence: Synthetic oligonucleotide
  Antisense strand to SEQ ID NO: 631760
ugcaagacuaacuaguuau

SEQ ID NO: 631762 - RNA, 19 nt, Artificial Sequence
  Description of Artificial Sequence: Synthetic oligonucleotide
  Sense strand starting at position 3133 of SEQ ID NO: 585335
guuagucuugcagcuagua

SEQ ID NO: 631763 - RNA, 19 nt, Artificial Sequence
  Description of Artificial Sequence: Synthetic oligonucleotide
  Antisense strand to SEQ ID NO: 631762
uacuagcugcaagacuaac

SEQ ID NO: 631764 - RNA, 19 nt, Artificial Sequence
  Description of Artificial Sequence: Synthetic oligonucleotide
  Sense strand starting at position 3183 of SEQ ID NO: 585335
gucacaggccugugacaua

SEQ ID NO: 631765 - RNA, 19 nt, Artificial Sequence
  Description of Artificial Sequence: Synthetic oligonucleotide
  Antisense strand to SEQ ID NO: 631764
uaugucacaggccugugac

SEQ ID NO: 631766 - RNA, 19 nt, Artificial Sequence
  Description of Artificial Sequence: Synthetic oligonucleotide
  Sense strand starting at position 3314 of SEQ ID NO: 585335
gguggcucgcgacuguaaa

SEQ ID NO: 631767 - RNA, 19 nt, Artificial Sequence
  Description of Artificial Sequence: Synthetic oligonucleotide
  Antisense strand to SEQ ID NO: 631766
uuuacagucgcgagccacc

SEQ ID NO: 631768 - RNA, 19 nt, Artificial Sequence
  Description of Artificial Sequence: Synthetic oligonucleotide
  Sense strand starting at position 3686 of SEQ ID NO: 585335
auuauugugaagcggaaua

SEQ ID NO: 631769 - RNA, 19 nt, Artificial Sequence
  Description of Artificial Sequence: Synthetic oligonucleotide
  Antisense strand to SEQ ID NO: 631768
uauuccgcuucacaauaau

SEQ ID NO: 631770 - RNA, 19 nt, Artificial Sequence
  Description of Artificial Sequence: Synthetic oligonucleotide
  Sense strand starting at position 3688 of SEQ ID NO: 585335
uauugugaagcggaauauu

SEQ ID NO: 631771 - RNA, 19 nt, Artificial Sequence
  Description of Artificial Sequence: Synthetic oligonucleotide
  Antisense strand to SEQ ID NO: 631770
aauauuccgcuucacaaua

SEQ ID NO: 631772 - RNA, 19 nt, Artificial Sequence
  Description of Artificial Sequence: Synthetic oligonucleotide
  Sense strand starting at position 3699 of SEQ ID NO: 585335
ggaauauucucuuugucuc

SEQ ID NO: 631773 - RNA, 19 nt, Artificial Sequence
  Description of Artificial Sequence: Synthetic oligonucleotide
  Antisense strand to SEQ ID NO: 631772
gagacaaagagaauauucc

SEQ ID NO: 631774 - RNA, 19 nt, Artificial Sequence
  Description of Artificial Sequence: Synthetic oligonucleotide
  Sense strand starting at position 3877 of SEQ ID NO: 585335
gcuaaaggguaauauuuaa

SEQ ID NO: 631775 - RNA, 19 nt, Artificial Sequence
  Description of Artificial Sequence: Synthetic oligonucleotide
  Antisense strand to SEQ ID NO: 631774
uuaaauauuacccuuuagc

SEQ ID NO: 631776 - RNA, 19 nt, Artificial Sequence
  Description of Artificial Sequence: Synthetic oligonucleotide
  Sense strand starting at position 3902 of SEQ ID NO: 585335
guauaaucaugacucagau

SEQ ID NO: 631777 - RNA, 19 nt, Artificial Sequence
  Description of Artificial Sequence: Synthetic oligonucleotide
  Antisense strand to SEQ ID NO: 631776
aucugagucaugauuauac

SEQ ID NO: 631778 - RNA, 19 nt, Artificial Sequence
  Description of Artificial Sequence: Synthetic oligonucleotide
  Sense strand starting at position 3941 of SEQ ID NO: 585335
agguauuccuuagcucauu

SEQ ID NO: 631779 - RNA, 19 nt, Artificial Sequence
  Description of Artificial Sequence: Synthetic oligonucleotide
  Antisense strand to SEQ ID NO: 631778
aaugagcuaaggaauaccu

SEQ ID NO: 631780 - RNA, 19 nt, Artificial Sequence
  Description of Artificial Sequence: Synthetic oligonucleotide
  Sense strand starting at position 34 of SEQ ID NO: 585336
ggucuaaauacuggguaua

SEQ ID NO: 631781 - RNA, 19 nt, Artificial Sequence
  Description of Artificial Sequence: Synthetic oligonucleotide
  Antisense strand to SEQ ID NO: 631780
uauacccaguauuuagacc

SEQ ID NO: 631782 - RNA, 19 nt, Artificial Sequence
  Description of Artificial Sequence: Synthetic oligonucleotide
  Sense strand starting at position 36 of SEQ ID NO: 585336
ucuaaauacuggguauacu

SEQ ID NO: 631783 - RNA, 19 nt, Artificial Sequence
  Description of Artificial Sequence: Synthetic oligonucleotide
  Antisense strand to SEQ ID NO: 631782
aguauacccaguauuuaga

SEQ ID NO: 631784 - RNA, 19 nt, Artificial Sequence
  Description of Artificial Sequence: Synthetic oligonucleotide
  Sense strand starting at position 227 of SEQ ID NO: 585336
ggcagcucugguuaagaua

SEQ ID NO: 631785 - RNA, 19 nt, Artificial Sequence
  Description of Artificial Sequence: Synthetic oligonucleotide
  Antisense strand to SEQ ID NO: 631784
uaucuuaaccagagcugcc

SEQ ID NO: 631786 - RNA, 19 nt, Artificial Sequence
  Description of Artificial Sequence: Synthetic oligonucleotide
  Sense strand starting at position 355 of SEQ ID NO: 585336
auuggugucagugacaauu

SEQ ID NO: 631787 - RNA, 19 nt, Artificial Sequence
  Description of Artificial Sequence: Synthetic oligonucleotide
  Antisense strand to SEQ ID NO: 631786
aauugucacugacaccaau

SEQ ID NO: 631788 - RNA, 19 nt, Artificial Sequence
  Description of Artificial Sequence: Synthetic oligonucleotide
  Sense strand starting at position 472 of SEQ ID NO: 585336
uuugacugguaauucuaaa

SEQ ID NO: 631789 - RNA, 19 nt, Artificial Sequence
  Description of Artificial Sequence: Synthetic oligonucleotide
  Antisense strand to SEQ ID NO: 631788
uuuagaauuaccagucaaa

SEQ ID NO: 631790 - RNA, 19 nt, Artificial Sequence
  Description of Artificial Sequence: Synthetic oligonucleotide
  Sense strand starting at position 522 of SEQ ID NO: 585336
ggcagucugaugcauaaga

SEQ ID NO: 631791 - RNA, 19 nt, Artificial Sequence
  Description of Artificial Sequence: Synthetic oligonucleotide
  Antisense strand to SEQ ID NO: 631790
ucuuaugcaucagacugcc

SEQ ID NO: 631792 - RNA, 19 nt, Artificial Sequence
  Description of Artificial Sequence: Synthetic oligonucleotide
  Sense strand starting at position 568 of SEQ ID NO: 585336
ggaagcuuuacguacugga

SEQ ID NO: 631793 - RNA, 19 nt, Artificial Sequence
  Description of Artificial Sequence: Synthetic oligonucleotide
  Antisense strand to SEQ ID NO: 631792
uccaguacguaaagcuucc

SEQ ID NO: 631794 - RNA, 19 nt, Artificial Sequence
  Description of Artificial Sequence: Synthetic oligonucleotide
  Sense strand starting at position 775 of SEQ ID NO: 585336
aguagcagugacuagaauu

SEQ ID NO: 631795 - RNA, 19 nt, Artificial Sequence
  Description of Artificial Sequence: Synthetic oligonucleotide
  Antisense strand to SEQ ID NO: 631794
aauucuagucacugcuacu

SEQ ID NO: 631796 - RNA, 19 nt, Artificial Sequence
  Description of Artificial Sequence: Synthetic oligonucleotide
  Sense strand starting at position 788 of SEQ ID NO: 585336
agaauugaaugggaaagga

SEQ ID NO: 631797 - RNA, 19 nt, Artificial Sequence
  Description of Artificial Sequence: Synthetic oligonucleotide
  Antisense strand to SEQ ID NO: 631796
uccuuucccauucaauucu

SEQ ID NO: 631798 - RNA, 19 nt, Artificial Sequence
  Description of Artificial Sequence: Synthetic oligonucleotide
  Sense strand starting at position 821 of SEQ ID NO: 585336
auuagauuacuaugugguu

SEQ ID NO: 631799 - RNA, 19 nt, Artificial Sequence
  Description of Artificial Sequence: Synthetic oligonucleotide
  Antisense strand to SEQ ID NO: 631798
aaccacauaguaaucuaau

SEQ ID NO: 631800 - RNA, 19 nt, Artificial Sequence
  Description of Artificial Sequence: Synthetic oligonucleotide
  Sense strand starting at position 854 of SEQ ID NO: 585336
aauugugaugaugaugcau

SEQ ID NO: 631801 - RNA, 19 nt, Artificial Sequence
  Description of Artificial Sequence: Synthetic oligonucleotide
  Antisense strand to SEQ ID NO: 631800
augcaucaucaucacaauu

SEQ ID NO: 631802 - RNA, 19 nt, Artificial Sequence
  Description of Artificial Sequence: Synthetic oligonucleotide
  Sense strand starting at position 867 of SEQ ID NO: 585336
augcauugcuaaucauaga

SEQ ID NO: 631803 - RNA, 19 nt, Artificial Sequence
  Description of Artificial Sequence: Synthetic oligonucleotide
  Antisense strand to SEQ ID NO: 631802
ucuaugauuagcaaugcau

SEQ ID NO: 631804 - RNA, 19 nt, Artificial Sequence
  Description of Artificial Sequence: Synthetic oligonucleotide
  Sense strand starting at position 1043 of SEQ ID NO: 585336
auccauugguuggcaauaa

SEQ ID NO: 631805 - RNA, 19 nt, Artificial Sequence
  Description of Artificial Sequence: Synthetic oligonucleotide
  Antisense strand to SEQ ID NO: 631804
uuauugccaaccaauggau

SEQ ID NO: 631806 - RNA, 19 nt, Artificial Sequence
  Description of Artificial Sequence: Synthetic oligonucleotide
  Sense strand starting at position 1202 of SEQ ID NO: 585336
gaaacucaucgugaaguca

SEQ ID NO: 631807 - RNA, 19 nt, Artificial Sequence
  Description of Artificial Sequence: Synthetic oligonucleotide
  Antisense strand to SEQ ID NO: 631806
ugacuucacgaugaguuuc

SEQ ID NO: 631808 - RNA, 19 nt, Artificial Sequence
  Description of Artificial Sequence: Synthetic oligonucleotide
  Sense strand starting at position 1470 of SEQ ID NO: 585336
accuauguuuaguuagaau

SEQ ID NO: 631809 - RNA, 19 nt, Artificial Sequence
  Description of Artificial Sequence: Synthetic oligonucleotide
  Antisense strand to SEQ ID NO: 631808
auucuaacuaaacauaggu

SEQ ID NO: 631810 - RNA, 19 nt, Artificial Sequence
  Description of Artificial Sequence: Synthetic oligonucleotide
  Sense strand starting at position 1768 of SEQ ID NO: 585336
gcugcacaaugacuuaaau

SEQ ID NO: 631811 - RNA, 19 nt, Artificial Sequence
  Description of Artificial Sequence: Synthetic oligonucleotide
  Antisense strand to SEQ ID NO: 631810
auuuaagucauugugcagc

SEQ ID NO: 631812 - RNA, 19 nt, Artificial Sequence
  Description of Artificial Sequence: Synthetic oligonucleotide
  Sense strand starting at position 1997 of SEQ ID NO: 585336
ccugcuaugagauggacaa

SEQ ID NO: 631813 - RNA, 19 nt, Artificial Sequence
  Description of Artificial Sequence: Synthetic oligonucleotide
  Antisense strand to SEQ ID NO: 631812
uuguccaucucauagcagg

SEQ ID NO: 631814 - RNA, 19 nt, Artificial Sequence
  Description of Artificial Sequence: Synthetic oligonucleotide
  Sense strand starting at position 1998 of SEQ ID NO: 585336
cugcuaugagauggacaaa

SEQ ID NO: 631815 - RNA, 19 nt, Artificial Sequence
  Description of Artificial Sequence: Synthetic oligonucleotide
  Antisense strand to SEQ ID NO: 631814
uuuguccaucucauagcag

SEQ ID NO: 631816 - RNA, 19 nt, Artificial Sequence
  Description of Artificial Sequence: Synthetic oligonucleotide
  Sense strand starting at position 2021 of SEQ ID NO: 585336
agcgcuaucgucucucuuu

SEQ ID NO: 631817 - RNA, 19 nt, Artificial Sequence
  Description of Artificial Sequence: Synthetic oligonucleotide
  Antisense strand to SEQ ID NO: 631816
aaagagagacgauagcgcu

SEQ ID NO: 631818 - RNA, 19 nt, Artificial Sequence
  Description of Artificial Sequence: Synthetic oligonucleotide
  Sense strand starting at position 2246 of SEQ ID NO: 585336
uaugcuaugggucaauauc

SEQ ID NO: 631819 - RNA, 19 nt, Artificial Sequence
  Description of Artificial Sequence: Synthetic oligonucleotide
  Antisense strand to SEQ ID NO: 631818
gauauugacccauagcaua

SEQ ID NO: 631820 - RNA, 19 nt, Artificial Sequence
  Description of Artificial Sequence: Synthetic oligonucleotide
  Sense strand starting at position 2418 of SEQ ID NO: 585336
ccagguguuguggagacaa

SEQ ID NO: 631821 - RNA, 19 nt, Artificial Sequence
  Description of Artificial Sequence: Synthetic oligonucleotide
  Antisense strand to SEQ ID NO: 631820
uugucuccacaacaccugg

SEQ ID NO: 631822 - RNA, 19 nt, Artificial Sequence
  Description of Artificial Sequence: Synthetic oligonucleotide
  Sense strand starting at position 2420 of SEQ ID NO: 585336
agguguuguggagacaauu

SEQ ID NO: 631823 - RNA, 19 nt, Artificial Sequence
  Description of Artificial Sequence: Synthetic oligonucleotide
  Antisense strand to SEQ ID NO: 631822
aauugucuccacaacaccu

SEQ ID NO: 631824 - RNA, 19 nt, Artificial Sequence
  Description of Artificial Sequence: Synthetic oligonucleotide
  Sense strand starting at position 2438 of SEQ ID NO: 585336
uccggaaacuacucaaguu

SEQ ID NO: 631825 - RNA, 19 nt, Artificial Sequence
  Description of Artificial Sequence: Synthetic oligonucleotide
  Antisense strand to SEQ ID NO: 631824
aacuugaguaguuuccgga

SEQ ID NO: 631826 - RNA, 19 nt, Artificial Sequence
  Description of Artificial Sequence: Synthetic oligonucleotide
  Sense strand starting at position 2792 of SEQ ID NO: 585336
uucucuguacucuaaguaa

SEQ ID NO: 631827 - RNA, 19 nt, Artificial Sequence
  Description of Artificial Sequence: Synthetic oligonucleotide
  Antisense strand to SEQ ID NO: 631826
uuacuuagaguacagagaa

SEQ ID NO: 631828 - RNA, 19 nt, Artificial Sequence
  Description of Artificial Sequence: Synthetic oligonucleotide
  Sense strand starting at position 2795 of SEQ ID NO: 585336
ucuguacucuaaguaagau

SEQ ID NO: 631829 - RNA, 19 nt, Artificial Sequence
  Description of Artificial Sequence: Synthetic oligonucleotide
  Antisense strand to SEQ ID NO: 631828
aucuuacuuagaguacaga

SEQ ID NO: 631830 - RNA, 19 nt, Artificial Sequence
  Description of Artificial Sequence: Synthetic oligonucleotide
  Sense strand starting at position 2820 of SEQ ID NO: 585336
ggacucagguccuugagaa

SEQ ID NO: 631831 - RNA, 19 nt, Artificial Sequence
  Description of Artificial Sequence: Synthetic oligonucleotide
  Antisense strand to SEQ ID NO: 631830
uucucaaggaccugagucc

SEQ ID NO: 631832 - RNA, 19 nt, Artificial Sequence
  Description of Artificial Sequence: Synthetic oligonucleotide
  Sense strand starting at position 2821 of SEQ ID NO: 585336
gacucagguccuugagaau

SEQ ID NO: 631833 - RNA, 19 nt, Artificial Sequence
  Description of Artificial Sequence: Synthetic oligonucleotide
  Antisense strand to SEQ ID NO: 631832
auucucaaggaccugaguc

SEQ ID NO: 631834 - RNA, 19 nt, Artificial Sequence
  Description of Artificial Sequence: Synthetic oligonucleotide
  Sense strand starting at position 2833 of SEQ ID NO: 585336
ugagaauaguuccuucuca

SEQ ID NO: 631835 - RNA, 19 nt, Artificial Sequence
  Description of Artificial Sequence: Synthetic oligonucleotide
  Antisense strand to SEQ ID NO: 631834
ugagaaggaacuauucuca

SEQ ID NO: 631836 - RNA, 19 nt, Artificial Sequence
  Description of Artificial Sequence: Synthetic oligonucleotide
  Sense strand starting at position 2834 of SEQ ID NO: 585336
gagaauaguuccuucucag

SEQ ID NO: 631837 - RNA, 19 nt, Artificial Sequence
  Description of Artificial Sequence: Synthetic oligonucleotide
  Antisense strand to SEQ ID NO: 631836
cugagaaggaacuauucuc

SEQ ID NO: 631838 - RNA, 19 nt, Artificial Sequence
  Description of Artificial Sequence: Synthetic oligonucleotide
  Sense strand starting at position 2841 of SEQ ID NO: 585336
guuccuucucaggaauaca

SEQ ID NO: 631839 - RNA, 19 nt, Artificial Sequence
  Description of Artificial Sequence: Synthetic oligonucleotide
  Antisense strand to SEQ ID NO: 631838
uguauuccugagaaggaac

SEQ ID NO: 631840 - RNA, 19 nt, Artificial Sequence
  Description of Artificial Sequence: Synthetic oligonucleotide
  Sense strand starting at position 2966 of SEQ ID NO: 585336
gcugguaucccauauucua

SEQ ID NO: 631841 - RNA, 19 nt, Artificial Sequence
  Description of Artificial Sequence: Synthetic oligonucleotide
  Antisense strand to SEQ ID NO: 631840
uagaauaugggauaccagc

SEQ ID NO: 631842 - RNA, 19 nt, Artificial Sequence
  Description of Artificial Sequence: Synthetic oligonucleotide
  Sense strand starting at position 3021 of SEQ ID NO: 585336
acucaauggcuggagugua

SEQ ID NO: 631843 - RNA, 19 nt, Artificial Sequence
  Description of Artificial Sequence: Synthetic oligonucleotide
  Antisense strand to SEQ ID NO: 631842
uacacuccagccauugagu

SEQ ID NO: 631844 - RNA, 19 nt, Artificial Sequence
  Description of Artificial Sequence: Synthetic oligonucleotide
  Sense strand starting at position 3060 of SEQ ID NO: 585336
gaaccuguuuguccugaga

SEQ ID NO: 631845 - RNA, 19 nt, Artificial Sequence
  Description of Artificial Sequence: Synthetic oligonucleotide
  Antisense strand to SEQ ID NO: 631844
ucucaggacaaacagguuc

SEQ ID NO: 631846 - RNA, 19 nt, Artificial Sequence
  Description of Artificial Sequence: Synthetic oligonucleotide
  Sense strand starting at position 3348 of SEQ ID NO: 585336
ugacuaguucucugacuua

SEQ ID NO: 631847 - RNA, 19 nt, Artificial Sequence
  Description of Artificial Sequence: Synthetic oligonucleotide
  Antisense strand to SEQ ID NO: 631846
uaagucagagaacuaguca

SEQ ID NO: 631848 - RNA, 19 nt, Artificial Sequence
  Description of Artificial Sequence: Synthetic oligonucleotide
  Sense strand starting at position 3411 of SEQ ID NO: 585336
ccagauaaacccuggcuga

SEQ ID NO: 631849 - RNA, 19 nt, Artificial Sequence
  Description of Artificial Sequence: Synthetic oligonucleotide
  Antisense strand to SEQ ID NO: 631848
ucagccaggguuuaucugg

SEQ ID NO: 631850 - RNA, 19 nt, Artificial Sequence
  Description of Artificial Sequence: Synthetic oligonucleotide
  Sense strand starting at position 3471 of SEQ ID NO: 585336
aguagauauccuugauagg

SEQ ID NO: 631851 - RNA, 19 nt, Artificial Sequence
  Description of Artificial Sequence: Synthetic oligonucleotide
  Antisense strand to SEQ ID NO: 631850
ccuaucaaggauaucuacu

SEQ ID NO: 631852 - RNA, 19 nt, Artificial Sequence
  Description of Artificial Sequence: Synthetic oligonucleotide
  Sense strand starting at position 3472 of SEQ ID NO: 585336
guagauauccuugauaggu

SEQ ID NO: 631853 - RNA, 19 nt, Artificial Sequence
  Description of Artificial Sequence: Synthetic oligonucleotide
  Antisense strand to SEQ ID NO: 631852
accuaucaaggauaucuac

SEQ ID NO: 631854 - RNA, 19 nt, Artificial Sequence
  Description of Artificial Sequence: Synthetic oligonucleotide
  Sense strand starting at position 3478 of SEQ ID NO: 585336
auccuugauaggugaagca

SEQ ID NO: 631855 - RNA, 19 nt, Artificial Sequence
  Description of Artificial Sequence: Synthetic oligonucleotide
  Antisense strand to SEQ ID NO: 631854
ugcuucaccuaucaaggau

SEQ ID NO: 631856 - RNA, 19 nt, Artificial Sequence
  Description of Artificial Sequence: Synthetic oligonucleotide
  Sense strand starting at position 3779 of SEQ ID NO: 585336
aaagcauggcucuaauugu

SEQ ID NO: 631857 - RNA, 19 nt, Artificial Sequence
  Description of Artificial Sequence: Synthetic oligonucleotide
  Antisense strand to SEQ ID NO: 631856
acaauuagagccaugcuuu

SEQ ID NO: 631858 - RNA, 19 nt, Artificial Sequence
  Description of Artificial Sequence: Synthetic oligonucleotide
  Sense strand starting at position 3979 of SEQ ID NO: 585336
aagguauuguuucugaaau

SEQ ID NO: 631859 - RNA, 19 nt, Artificial Sequence
  Description of Artificial Sequence: Synthetic oligonucleotide
  Antisense strand to SEQ ID NO: 631858
auuucagaaacaauaccuu

SEQ ID NO: 631860 - RNA, 19 nt, Artificial Sequence
  Description of Artificial Sequence: Synthetic oligonucleotide
  Sense strand starting at position 24 of SEQ ID NO: 585337
uagaaauagcuauggagca

SEQ ID NO: 631861 - RNA, 19 nt, Artificial Sequence
  Description of Artificial Sequence: Synthetic oligonucleotide
  Antisense strand to SEQ ID NO: 631860
ugcuccauagcuauuucua

SEQ ID NO: 631862 - RNA, 19 nt, Artificial Sequence
  Description of Artificial Sequence: Synthetic oligonucleotide
  Sense strand starting at position 52 of SEQ ID NO: 585337
ccaacagaauugcuuggau

SEQ ID NO: 631863 - RNA, 19 nt, Artificial Sequence
  Description of Artificial Sequence: Synthetic oligonucleotide
  Antisense strand to SEQ ID NO: 631862
auccaagcaauucuguugg

SEQ ID NO: 631864 - RNA, 19 nt, Artificial Sequence
  Description of Artificial Sequence: Synthetic oligonucleotide
  Sense strand starting at position 55 of SEQ ID NO: 585337
acagaauugcuuggaugca

SEQ ID NO: 631865 - RNA, 19 nt, Artificial Sequence
  Description of Artificial Sequence: Synthetic oligonucleotide
  Antisense strand to SEQ ID NO: 631864
ugcauccaagcaauucugu

SEQ ID NO: 631866 - RNA, 19 nt, Artificial Sequence
  Description of Artificial Sequence: Synthetic oligonucleotide
  Sense strand starting at position 69 of SEQ ID NO: 585337
augcaauggcuuuaaauuc

SEQ ID NO: 631867 - RNA, 19 nt, Artificial Sequence
  Description of Artificial Sequence: Synthetic oligonucleotide
  Antisense strand to SEQ ID NO: 631866
gaauuuaaagccauugcau

SEQ ID NO: 631868 - RNA, 19 nt, Artificial Sequence
  Description of Artificial Sequence: Synthetic oligonucleotide
  Sense strand starting at position 136 of SEQ ID NO: 585337
gaaagcuuagauuggugua

SEQ ID NO: 631869 - RNA, 19 nt, Artificial Sequence
  Description of Artificial Sequence: Synthetic oligonucleotide
  Antisense strand to SEQ ID NO: 631868
uacaccaaucuaagcuuuc

SEQ ID NO: 631870 - RNA, 19 nt, Artificial Sequence
  Description of Artificial Sequence: Synthetic oligonucleotide
  Sense strand starting at position 141 of SEQ ID NO: 585337
cuuagauugguguaccagu

SEQ ID NO: 631871 - RNA, 19 nt, Artificial Sequence
  Description of Artificial Sequence: Synthetic oligonucleotide
  Antisense strand to SEQ ID NO: 631870
acugguacaccaaucuaag

SEQ ID NO: 631872 - RNA, 19 nt, Artificial Sequence
  Description of Artificial Sequence: Synthetic oligonucleotide
  Sense strand starting at position 172 of SEQ ID NO: 585337
aguauccagcaauguuaaa

SEQ ID NO: 631873 - RNA, 19 nt, Artificial Sequence
  Description of Artificial Sequence: Synthetic oligonucleotide
  Antisense strand to SEQ ID NO: 631872
uuuaacauugcuggauacu

SEQ ID NO: 631874 - RNA, 19 nt, Artificial Sequence
  Description of Artificial Sequence: Synthetic oligonucleotide
  Sense strand starting at position 218 of SEQ ID NO: 585337
ucuguauaaaguggaaagu

SEQ ID NO: 631875 - RNA, 19 nt, Artificial Sequence
  Description of Artificial Sequence: Synthetic oligonucleotide
  Antisense strand to SEQ ID NO: 631874
acuuuccacuuuauacaga

SEQ ID NO: 631876 - RNA, 19 nt, Artificial Sequence
  Description of Artificial Sequence: Synthetic oligonucleotide
  Sense strand starting at position 229 of SEQ ID NO: 585337
uggaaaguauucccaucua

SEQ ID NO: 631877 - RNA, 19 nt, Artificial Sequence
  Description of Artificial Sequence: Synthetic oligonucleotide
  Antisense strand to SEQ ID NO: 631876
uagaugggaauacuuucca

SEQ ID NO: 631878 - RNA, 19 nt, Artificial Sequence
  Description of Artificial Sequence: Synthetic oligonucleotide
  Sense strand starting at position 253 of SEQ ID NO: 585337
guggauugaucagaauuuc

SEQ ID NO: 631879 - RNA, 19 nt, Artificial Sequence
  Description of Artificial Sequence: Synthetic oligonucleotide
  Antisense strand to SEQ ID NO: 631878
gaaauucugaucaauccac

SEQ ID NO: 631880 - RNA, 19 nt, Artificial Sequence
  Description of Artificial Sequence: Synthetic oligonucleotide
  Sense strand starting at position 344 of SEQ ID NO: 585337
uguuuauuagaauggccaa

SEQ ID NO: 631881 - RNA, 19 nt, Artificial Sequence
  Description of Artificial Sequence: Synthetic oligonucleotide
  Antisense strand to SEQ ID NO: 631880
uuggccauucuaauaaaca

SEQ ID NO: 631882 - RNA, 19 nt, Artificial Sequence
  Description of Artificial Sequence: Synthetic oligonucleotide
  Sense strand starting at position 460 of SEQ ID NO: 585337
gaaagaugccauuguuauc

SEQ ID NO: 631883 - RNA, 19 nt, Artificial Sequence
  Description of Artificial Sequence: Synthetic oligonucleotide
  Antisense strand to SEQ ID NO: 631882
gauaacaauggcaucuuuc

SEQ ID NO: 631884 - RNA, 19 nt, Artificial Sequence
  Description of Artificial Sequence: Synthetic oligonucleotide
  Sense strand starting at position 664 of SEQ ID NO: 585337
gcuauaugccaugaaccuu

SEQ ID NO: 631885 - RNA, 19 nt, Artificial Sequence
  Description of Artificial Sequence: Synthetic oligonucleotide
  Antisense strand to SEQ ID NO: 631884
aagguucauggcauauagc

SEQ ID NO: 631886 - RNA, 19 nt, Artificial Sequence
  Description of Artificial Sequence: Synthetic oligonucleotide
  Sense strand starting at position 807 of SEQ ID NO: 585337
cuucucaggccuuaucuga

SEQ ID NO: 631887 - RNA, 19 nt, Artificial Sequence
  Description of Artificial Sequence: Synthetic oligonucleotide
  Antisense strand to SEQ ID NO: 631886
ucagauaaggccugagaag

SEQ ID NO: 631888 - RNA, 19 nt, Artificial Sequence
  Description of Artificial Sequence: Synthetic oligonucleotide
  Sense strand starting at position 815 of SEQ ID NO: 585337
gccuuaucugacuaauguc

SEQ ID NO: 631889 - RNA, 19 nt, Artificial Sequence
  Description of Artificial Sequence: Synthetic oligonucleotide
  Antisense strand to SEQ ID NO: 631888
gacauuagucagauaaggc

SEQ ID NO: 631890 - RNA, 19 nt, Artificial Sequence
  Description of Artificial Sequence: Synthetic oligonucleotide
  Sense strand starting at position 972 of SEQ ID NO: 585337
aagucaacacugggugauu

SEQ ID NO: 631891 - RNA, 19 nt, Artificial Sequence
  Description of Artificial Sequence: Synthetic oligonucleotide
  Antisense strand to SEQ ID NO: 631890
aaucacccaguguugacuu

SEQ ID NO: 631892 - RNA, 19 nt, Artificial Sequence
  Description of Artificial Sequence: Synthetic oligonucleotide
  Sense strand starting at position 1077 of SEQ ID NO: 585337
uguacauaaucccuaaagu

SEQ ID NO: 631893 - RNA, 19 nt, Artificial Sequence
  Description of Artificial Sequence: Synthetic oligonucleotide
  Antisense strand to SEQ ID NO: 631892
acuuuagggauuauguaca

SEQ ID NO: 631894 - RNA, 19 nt, Artificial Sequence
  Description of Artificial Sequence: Synthetic oligonucleotide
  Sense strand starting at position 1078 of SEQ ID NO: 585337
guacauaaucccuaaagug

SEQ ID NO: 631895 - RNA, 19 nt, Artificial Sequence
  Description of Artificial Sequence: Synthetic oligonucleotide
  Antisense strand to SEQ ID NO: 631894
cacuuuagggauuauguac

SEQ ID NO: 631896 - RNA, 19 nt, Artificial Sequence
  Description of Artificial Sequence: Synthetic oligonucleotide
  Sense strand starting at position 1844 of SEQ ID NO: 585337
ucugaaauccuaggcauga

SEQ ID NO: 631897 - RNA, 19 nt, Artificial Sequence
  Description of Artificial Sequence: Synthetic oligonucleotide
  Antisense strand to SEQ ID NO: 631896
ucaugccuaggauuucaga

SEQ ID NO: 631898 - RNA, 19 nt, Artificial Sequence
  Description of Artificial Sequence: Synthetic oligonucleotide
  Sense strand starting at position 1857 of SEQ ID NO: 585337
gcaugacaguccuuaaacc

SEQ ID NO: 631899 - RNA, 19 nt, Artificial Sequence
  Description of Artificial Sequence: Synthetic oligonucleotide
  Antisense strand to SEQ ID NO: 631898
gguuuaaggacugucaugc

SEQ ID NO: 631900 - RNA, 19 nt, Artificial Sequence
  Description of Artificial Sequence: Synthetic oligonucleotide
  Sense strand starting at position 2085 of SEQ ID NO: 585337
cccggaguuacugacgaau

SEQ ID NO: 631901 - RNA, 19 nt, Artificial Sequence
  Description of Artificial Sequence: Synthetic oligonucleotide
  Antisense strand to SEQ ID NO: 631900
auucgucaguaacuccggg

SEQ ID NO: 631902 - RNA, 19 nt, Artificial Sequence
  Description of Artificial Sequence: Synthetic oligonucleotide
  Sense strand starting at position 2088 of SEQ ID NO: 585337
ggaguuacugacgaaugca

SEQ ID NO: 631903 - RNA, 19 nt, Artificial Sequence
  Description of Artificial Sequence: Synthetic oligonucleotide
  Antisense strand to SEQ ID NO: 631902
ugcauucgucaguaacucc

SEQ ID NO: 631904 - RNA, 19 nt, Artificial Sequence
  Description of Artificial Sequence: Synthetic oligonucleotide
  Sense strand starting at position 2349 of SEQ ID NO: 585337
ccagucacgcaauaugaau

SEQ ID NO: 631905 - RNA, 19 nt, Artificial Sequence
  Description of Artificial Sequence: Synthetic oligonucleotide
  Antisense strand to SEQ ID NO: 631904
auucauauugcgugacugg

SEQ ID NO: 631906 - RNA, 19 nt, Artificial Sequence
  Description of Artificial Sequence: Synthetic oligonucleotide
  Sense strand starting at position 2398 of SEQ ID NO: 585337
agaggagccuugguacuaa

SEQ ID NO: 631907 - RNA, 19 nt, Artificial Sequence
  Description of Artificial Sequence: Synthetic oligonucleotide
  Antisense strand to SEQ ID NO: 631906
uuaguaccaaggcuccucu

SEQ ID NO: 631908 - RNA, 19 nt, Artificial Sequence
  Description of Artificial Sequence: Synthetic oligonucleotide
  Sense strand starting at position 2490 of SEQ ID NO: 585337
aaugauauacccugguagu

SEQ ID NO: 631909 - RNA, 19 nt, Artificial Sequence
  Description of Artificial Sequence: Synthetic oligonucleotide
  Antisense strand to SEQ ID NO: 631908
acuaccaggguauaucauu

SEQ ID NO: 631910 - RNA, 19 nt, Artificial Sequence
  Description of Artificial Sequence: Synthetic oligonucleotide
  Sense strand starting at position 2491 of SEQ ID NO: 585337
augauauacccugguaguu

SEQ ID NO: 631911 - RNA, 19 nt, Artificial Sequence
  Description of Artificial Sequence: Synthetic oligonucleotide
  Antisense strand to SEQ ID NO: 631910
aacuaccaggguauaucau

SEQ ID NO: 631912 - RNA, 19 nt, Artificial Sequence
  Description of Artificial Sequence: Synthetic oligonucleotide
  Sense strand starting at position 2556 of SEQ ID NO: 585337
ccuacuggugcuuaauaaa

SEQ ID NO: 631913 - RNA, 19 nt, Artificial Sequence
  Description of Artificial Sequence: Synthetic oligonucleotide
  Antisense strand to SEQ ID NO: 631912
uuuauuaagcaccaguagg

SEQ ID NO: 631914 - RNA, 19 nt, Artificial Sequence
  Description of Artificial Sequence: Synthetic oligonucleotide
  Sense strand starting at position 2658 of SEQ ID NO: 585337
ccauguaugugggcauuua

SEQ ID NO: 631915 - RNA, 19 nt, Artificial Sequence
  Description of Artificial Sequence: Synthetic oligonucleotide
  Antisense strand to SEQ ID NO: 631914
uaaaugcccacauacaugg

SEQ ID NO: 631916 - RNA, 19 nt, Artificial Sequence
  Description of Artificial Sequence: Synthetic oligonucleotide
  Sense strand starting at position 2897 of SEQ ID NO: 585337
gaguuugauuaggcuugau

SEQ ID NO: 631917 - RNA, 19 nt, Artificial Sequence
  Description of Artificial Sequence: Synthetic oligonucleotide
  Antisense strand to SEQ ID NO: 631916
aucaagccuaaucaaacuc

SEQ ID NO: 631918 - RNA, 19 nt, Artificial Sequence
  Description of Artificial Sequence: Synthetic oligonucleotide
  Sense strand starting at position 2900 of SEQ ID NO: 585337
uuugauuaggcuugauuaa

SEQ ID NO: 631919 - RNA, 19 nt, Artificial Sequence
  Description of Artificial Sequence: Synthetic oligonucleotide
  Antisense strand to SEQ ID NO: 631918
uuaaucaagccuaaucaaa

SEQ ID NO: 631920 - RNA, 19 nt, Artificial Sequence
  Description of Artificial Sequence: Synthetic oligonucleotide
  Sense strand starting at position 2901 of SEQ ID NO: 585337
uugauuaggcuugauuaau

SEQ ID NO: 631921 - RNA, 19 nt, Artificial Sequence
  Description of Artificial Sequence: Synthetic oligonucleotide
  Antisense strand to SEQ ID NO: 631920
auuaaucaagccuaaucaa

SEQ ID NO: 631922 - RNA, 19 nt, Artificial Sequence
  Description of Artificial Sequence: Synthetic oligonucleotide
  Sense strand starting at position 3054 of SEQ ID NO: 585337
acagaaguguucuuuccca

SEQ ID NO: 631923 - RNA, 19 nt, Artificial Sequence
  Description of Artificial Sequence: Synthetic oligonucleotide
  Antisense strand to SEQ ID NO: 631922
ugggaaagaacacuucugu

SEQ ID NO: 631924 - RNA, 19 nt, Artificial Sequence
  Description of Artificial Sequence: Synthetic oligonucleotide
  Sense strand starting at position 3096 of SEQ ID NO: 585337
ccagcacagggaugaguua

SEQ ID NO: 631925 - RNA, 19 nt, Artificial Sequence
  Description of Artificial Sequence: Synthetic oligonucleotide
  Antisense strand to SEQ ID NO: 631924
uaacucaucccugugcugg

SEQ ID NO: 631926 - RNA, 19 nt, Artificial Sequence
  Description of Artificial Sequence: Synthetic oligonucleotide
  Sense strand starting at position 3103 of SEQ ID NO: 585337
agggaugaguuacuguuua

SEQ ID NO: 631927 - RNA, 19 nt, Artificial Sequence
  Description of Artificial Sequence: Synthetic oligonucleotide
  Antisense strand to SEQ ID NO: 631926
uaaacaguaacucaucccu

SEQ ID NO: 631928 - RNA, 19 nt, Artificial Sequence
  Description of Artificial Sequence: Synthetic oligonucleotide
  Sense strand starting at position 3108 of SEQ ID NO: 585337
ugaguuacuguuuaccuuu

SEQ ID NO: 631929 - RNA, 19 nt, Artificial Sequence
  Description of Artificial Sequence: Synthetic oligonucleotide
  Antisense strand to SEQ ID NO: 631928
aaagguaaacaguaacuca

SEQ ID NO: 631930 - RNA, 19 nt, Artificial Sequence
  Description of Artificial Sequence: Synthetic oligonucleotide
  Sense strand starting at position 3364 of SEQ ID NO: 585337
ggaggacccuuccugaauu

SEQ ID NO: 631931 - RNA, 19 nt, Artificial Sequence
  Description of Artificial Sequence: Synthetic oligonucleotide
  Antisense strand to SEQ ID NO: 631930
aauucaggaaggguccucc

SEQ ID NO: 631932 - RNA, 19 nt, Artificial Sequence
  Description of Artificial Sequence: Synthetic oligonucleotide
  Sense strand starting at position 3374 of SEQ ID NO: 585337
uccugaauugagggucuua

SEQ ID NO: 631933 - RNA, 19 nt, Artificial Sequence
  Description of Artificial Sequence: Synthetic oligonucleotide
  Antisense strand to SEQ ID NO: 631932
uaagacccucaauucagga

SEQ ID NO: 631934 - RNA, 19 nt, Artificial Sequence
  Description of Artificial Sequence: Synthetic oligonucleotide
  Sense strand starting at position 3386 of SEQ ID NO: 585337
ggucuuauggccuaugauu

SEQ ID NO: 631935 - RNA, 19 nt, Artificial Sequence
  Description of Artificial Sequence: Synthetic oligonucleotide
  Antisense strand to SEQ ID NO: 631934
aaucauaggccauaagacc

SEQ ID NO: 631936 - RNA, 19 nt, Artificial Sequence
  Description of Artificial Sequence: Synthetic oligonucleotide
  Sense strand starting at position 3388 of SEQ ID NO: 585337
ucuuauggccuaugauuag

SEQ ID NO: 631937 - RNA, 19 nt, Artificial Sequence
  Description of Artificial Sequence: Synthetic oligonucleotide
  Antisense strand to SEQ ID NO: 631936
cuaaucauaggccauaaga

SEQ ID NO: 631938 - RNA, 19 nt, Artificial Sequence
  Description of Artificial Sequence: Synthetic oligonucleotide
  Sense strand starting at position 3723 of SEQ ID NO: 585337
ggcugugggaguuaugaac

SEQ ID NO: 631939 - RNA, 19 nt, Artificial Sequence
  Description of Artificial Sequence: Synthetic oligonucleotide
  Antisense strand to SEQ ID NO: 631938
guucauaacucccacagcc

SEQ ID NO: 631940 - RNA, 19 nt, Artificial Sequence
  Description of Artificial Sequence: Synthetic oligonucleotide
  Sense strand starting at position 2 of SEQ ID NO: 585338
ugagaaugauuccaggaac

SEQ ID NO: 631941 - RNA, 19 nt, Artificial Sequence
  Description of Artificial Sequence: Synthetic oligonucleotide
  Antisense strand to SEQ ID NO: 631940
guuccuggaaucauucuca

SEQ ID NO: 631942 - RNA, 19 nt, Artificial Sequence
  Description of Artificial Sequence: Synthetic oligonucleotide
  Sense strand starting at position 115 of SEQ ID NO: 585338
auauuaugcuaaucauggu

SEQ ID NO: 631943 - RNA, 19 nt, Artificial Sequence
  Description of Artificial Sequence: Synthetic oligonucleotide
  Antisense strand to SEQ ID NO: 631942
accaugauuagcauaauau

SEQ ID NO: 631944 - RNA, 19 nt, Artificial Sequence
  Description of Artificial Sequence: Synthetic oligonucleotide
  Sense strand starting at position 134 of SEQ ID NO: 585338
ucuuuaucguuccugagaa

SEQ ID NO: 631945 - RNA, 19 nt, Artificial Sequence
  Description of Artificial Sequence: Synthetic oligonucleotide
  Antisense strand to SEQ ID NO: 631944
uucucaggaacgauaaaga

SEQ ID NO: 631946 - RNA, 19 nt, Artificial Sequence
  Description of Artificial Sequence: Synthetic oligonucleotide
  Sense strand starting at position 136 of SEQ ID NO: 585338
uuuaucguuccugagaaca

SEQ ID NO: 631947 - RNA, 19 nt, Artificial Sequence
  Description of Artificial Sequence: Synthetic oligonucleotide
  Antisense strand to SEQ ID NO: 631946
uguucucaggaacgauaaa

SEQ ID NO: 631948 - RNA, 19 nt, Artificial Sequence
  Description of Artificial Sequence: Synthetic oligonucleotide
  Sense strand starting at position 179 of SEQ ID NO: 585338
ggaguuugauaagccauaa

SEQ ID NO: 631949 - RNA, 19 nt, Artificial Sequence
  Description of Artificial Sequence: Synthetic oligonucleotide
  Antisense strand to SEQ ID NO: 631948
uuauggcuuaucaaacucc

SEQ ID NO: 631950 - RNA, 19 nt, Artificial Sequence
  Description of Artificial Sequence: Synthetic oligonucleotide
  Sense strand starting at position 212 of SEQ ID NO: 585338
gugaaauucugucccugga

SEQ ID NO: 631951 - RNA, 19 nt, Artificial Sequence
  Description of Artificial Sequence: Synthetic oligonucleotide
  Antisense strand to SEQ ID NO: 631950
uccagggacagaauuucac

SEQ ID NO: 631952 - RNA, 19 nt, Artificial Sequence
  Description of Artificial Sequence: Synthetic oligonucleotide
  Sense strand starting at position 270 of SEQ ID NO: 585338
gagggagccgcauagacau

SEQ ID NO: 631953 - RNA, 19 nt, Artificial Sequence
  Description of Artificial Sequence: Synthetic oligonucleotide
  Antisense strand to SEQ ID NO: 631952
augucuaugcggcucccuc

SEQ ID NO: 631954 - RNA, 19 nt, Artificial Sequence
  Description of Artificial Sequence: Synthetic oligonucleotide
  Sense strand starting at position 461 of SEQ ID NO: 585338
gcauuaaucuaccugagag

SEQ ID NO: 631955 - RNA, 19 nt, Artificial Sequence
  Description of Artificial Sequence: Synthetic oligonucleotide
  Antisense strand to SEQ ID NO: 631954
cucucagguagauuaaugc

SEQ ID NO: 631956 - RNA, 19 nt, Artificial Sequence
  Description of Artificial Sequence: Synthetic oligonucleotide
  Sense strand starting at position 507 of SEQ ID NO: 585338
ccacguuguacagaagaca

SEQ ID NO: 631957 - RNA, 19 nt, Artificial Sequence
  Description of Artificial Sequence: Synthetic oligonucleotide
  Antisense strand to SEQ ID NO: 631956
ugucuucuguacaacgugg

SEQ ID NO: 631958 - RNA, 19 nt, Artificial Sequence
  Description of Artificial Sequence: Synthetic oligonucleotide
  Sense strand starting at position 550 of SEQ ID NO: 585338
gcagguaguauccagguaa

SEQ ID NO: 631959 - RNA, 19 nt, Artificial Sequence
  Description of Artificial Sequence: Synthetic oligonucleotide
  Antisense strand to SEQ ID NO: 631958
uuaccuggauacuaccugc

SEQ ID NO: 631960 - RNA, 19 nt, Artificial Sequence
  Description of Artificial Sequence: Synthetic oligonucleotide
  Sense strand starting at position 554 of SEQ ID NO: 585338
guaguauccagguaacuac

SEQ ID NO: 631961 - RNA, 19 nt, Artificial Sequence
  Description of Artificial Sequence: Synthetic oligonucleotide
  Antisense strand to SEQ ID NO: 631960
guaguuaccuggauacuac

SEQ ID NO: 631962 - RNA, 19 nt, Artificial Sequence
  Description of Artificial Sequence: Synthetic oligonucleotide
  Sense strand starting at position 673 of SEQ ID NO: 585338
aaggucucuugggucagaa

SEQ ID NO: 631963 - RNA, 19 nt, Artificial Sequence
  Description of Artificial Sequence: Synthetic oligonucleotide
  Antisense strand to SEQ ID NO: 631962
uucugacccaagagaccuu

SEQ ID NO: 631964 - RNA, 19 nt, Artificial Sequence
  Description of Artificial Sequence: Synthetic oligonucleotide
  Sense strand starting at position 739 of SEQ ID NO: 585338
acauuacuaccugguaaug

SEQ ID NO: 631965 - RNA, 19 nt, Artificial Sequence
  Description of Artificial Sequence: Synthetic oligonucleotide
  Antisense strand to SEQ ID NO: 631964
cauuaccagguaguaaugu

SEQ ID NO: 631966 - RNA, 19 nt, Artificial Sequence
  Description of Artificial Sequence: Synthetic oligonucleotide
  Sense strand starting at position 750 of SEQ ID NO: 585338
ugguaaugucagcacccaa

SEQ ID NO: 631967 - RNA, 19 nt, Artificial Sequence
  Description of Artificial Sequence: Synthetic oligonucleotide
  Antisense strand to SEQ ID NO: 631966
uugggugcugacauuacca

SEQ ID NO: 631968 - RNA, 19 nt, Artificial Sequence
  Description of Artificial Sequence: Synthetic oligonucleotide
  Sense strand starting at position 1130 of SEQ ID NO: 585338
cuguuaguugaaggcucaa

SEQ ID NO: 631969 - RNA, 19 nt, Artificial Sequence
  Description of Artificial Sequence: Synthetic oligonucleotide
  Antisense strand to SEQ ID NO: 631968
uugagccuucaacuaacag

SEQ ID NO: 631970 - RNA, 19 nt, Artificial Sequence
  Description of Artificial Sequence: Synthetic oligonucleotide
  Sense strand starting at position 1145 of SEQ ID NO: 585338
ucaauauuugcacgucagu

SEQ ID NO: 631971 - RNA, 19 nt, Artificial Sequence
  Description of Artificial Sequence: Synthetic oligonucleotide
  Antisense strand to SEQ ID NO: 631970
acugacgugcaaauauuga

SEQ ID NO: 631972 - RNA, 19 nt, Artificial Sequence
  Description of Artificial Sequence: Synthetic oligonucleotide
  Sense strand starting at position 1177 of SEQ ID NO: 585338
ucagucuacccgggaauau

SEQ ID NO: 631973 - RNA, 19 nt, Artificial Sequence
  Description of Artificial Sequence: Synthetic oligonucleotide
  Antisense strand to SEQ ID NO: 631972
auauucccggguagacuga

SEQ ID NO: 631974 - RNA, 19 nt, Artificial Sequence
  Description of Artificial Sequence: Synthetic oligonucleotide
  Sense strand starting at position 1178 of SEQ ID NO: 585338
cagucuacccgggaauauu

SEQ ID NO: 631975 - RNA, 19 nt, Artificial Sequence
  Description of Artificial Sequence: Synthetic oligonucleotide
  Antisense strand to SEQ ID NO: 631974
aauauucccggguagacug

SEQ ID NO: 631976 - RNA, 19 nt, Artificial Sequence
  Description of Artificial Sequence: Synthetic oligonucleotide
  Sense strand starting at position 1279 of SEQ ID NO: 585338
aagaucugugugcauacuu

SEQ ID NO: 631977 - RNA, 19 nt, Artificial Sequence
  Description of Artificial Sequence: Synthetic oligonucleotide
  Antisense strand to SEQ ID NO: 631976
aaguaugcacacagaucuu

SEQ ID NO: 631978 - RNA, 19 nt, Artificial Sequence
  Description of Artificial Sequence: Synthetic oligonucleotide
  Sense strand starting at position 1538 of SEQ ID NO: 585338
ucucauguacgagaaauac

SEQ ID NO: 631979 - RNA, 19 nt, Artificial Sequence
  Description of Artificial Sequence: Synthetic oligonucleotide
  Antisense strand to SEQ ID NO: 631978
guauuucucguacaugaga

SEQ ID NO: 631980 - RNA, 19 nt, Artificial Sequence
  Description of Artificial Sequence: Synthetic oligonucleotide
  Sense strand starting at position 1582 of SEQ ID NO: 585338
gaaucauucugguuuacug

SEQ ID NO: 631981 - RNA, 19 nt, Artificial Sequence
  Description of Artificial Sequence: Synthetic oligonucleotide
  Antisense strand to SEQ ID NO: 631980
caguaaaccagaaugauuc

SEQ ID NO: 631982 - RNA, 19 nt, Artificial Sequence
  Description of Artificial Sequence: Synthetic oligonucleotide
  Sense strand starting at position 1598 of SEQ ID NO: 585338
cuggauuccaauugguaga

SEQ ID NO: 631983 - RNA, 19 nt, Artificial Sequence
  Description of Artificial Sequence: Synthetic oligonucleotide
  Antisense strand to SEQ ID NO: 631982
ucuaccaauuggaauccag

SEQ ID NO: 631984 - RNA, 19 nt, Artificial Sequence
  Description of Artificial Sequence: Synthetic oligonucleotide
  Sense strand starting at position 1666 of SEQ ID NO: 585338
uaugucguaaacgaguuaa

SEQ ID NO: 631985 - RNA, 19 nt, Artificial Sequence
  Description of Artificial Sequence: Synthetic oligonucleotide
  Antisense strand to SEQ ID NO: 631984
uuaacucguuuacgacaua

SEQ ID NO: 631986 - RNA, 19 nt, Artificial Sequence
  Description of Artificial Sequence: Synthetic oligonucleotide
  Sense strand starting at position 1717 of SEQ ID NO: 585338
cuaucuguacauggucaua

SEQ ID NO: 631987 - RNA, 19 nt, Artificial Sequence
  Description of Artificial Sequence: Synthetic oligonucleotide
  Antisense strand to SEQ ID NO: 631986
uaugaccauguacagauag

SEQ ID NO: 631988 - RNA, 19 nt, Artificial Sequence
  Description of Artificial Sequence: Synthetic oligonucleotide
  Sense strand starting at position 1720 of SEQ ID NO: 585338
ucuguacauggucauaacu

SEQ ID NO: 631989 - RNA, 19 nt, Artificial Sequence
  Description of Artificial Sequence: Synthetic oligonucleotide
  Antisense strand to SEQ ID NO: 631988
aguuaugaccauguacaga

SEQ ID NO: 631990 - RNA, 19 nt, Artificial Sequence
  Description of Artificial Sequence: Synthetic oligonucleotide
  Sense strand starting at position 2063 of SEQ ID NO: 585338
cucaauucucgagaccgaa

SEQ ID NO: 631991 - RNA, 19 nt, Artificial Sequence
  Description of Artificial Sequence: Synthetic oligonucleotide
  Antisense strand to SEQ ID NO: 631990
uucggucucgagaauugag

SEQ ID NO: 631992 - RNA, 19 nt, Artificial Sequence
  Description of Artificial Sequence: Synthetic oligonucleotide
  Sense strand starting at position 2665 of SEQ ID NO: 585338
ggcaguucucgcggauuua

SEQ ID NO: 631993 - RNA, 19 nt, Artificial Sequence
  Description of Artificial Sequence: Synthetic oligonucleotide
  Antisense strand to SEQ ID NO: 631992
uaaauccgcgagaacugcc

SEQ ID NO: 631994 - RNA, 19 nt, Artificial Sequence
  Description of Artificial Sequence: Synthetic oligonucleotide
  Sense strand starting at position 2666 of SEQ ID NO: 585338
gcaguucucgcggauuuau

SEQ ID NO: 631995 - RNA, 19 nt, Artificial Sequence
  Description of Artificial Sequence: Synthetic oligonucleotide
  Antisense strand to SEQ ID NO: 631994
auaaauccgcgagaacugc

SEQ ID NO: 631996 - RNA, 19 nt, Artificial Sequence
  Description of Artificial Sequence: Synthetic oligonucleotide
  Sense strand starting at position 2806 of SEQ ID NO: 585338
gugcauugcaaagagauuc

SEQ ID NO: 631997 - RNA, 19 nt, Artificial Sequence
  Description of Artificial Sequence: Synthetic oligonucleotide
  Antisense strand to SEQ ID NO: 631996
gaaucucuuugcaaugcac

SEQ ID NO: 631998 - RNA, 19 nt, Artificial Sequence
  Description of Artificial Sequence: Synthetic oligonucleotide
  Sense strand starting at position 2837 of SEQ ID NO: 585338
cggucugauggucaguuaa

SEQ ID NO: 631999 - RNA, 19 nt, Artificial Sequence
  Description of Artificial Sequence: Synthetic oligonucleotide
  Antisense strand to SEQ ID NO: 631998
uuaacugaccaucagaccg

SEQ ID NO: 632000 - RNA, 19 nt, Artificial Sequence
  Description of Artificial Sequence: Synthetic oligonucleotide
  Sense strand starting at position 2839 of SEQ ID NO: 585338
gucugauggucaguuaaag

SEQ ID NO: 632001 - RNA, 19 nt, Artificial Sequence
  Description of Artificial Sequence: Synthetic oligonucleotide
  Antisense strand to SEQ ID NO: 632000
cuuuaacugaccaucagac

SEQ ID NO: 632002 - RNA, 19 nt, Artificial Sequence
  Description of Artificial Sequence: Synthetic oligonucleotide
  Sense strand starting at position 2875 of SEQ ID NO: 585338
gaugaaauagagcguuauu

SEQ ID NO: 632003 - RNA, 19 nt, Artificial Sequence
  Description of Artificial Sequence: Synthetic oligonucleotide
  Antisense strand to SEQ ID NO: 632002
aauaacgcucuauuucauc

SEQ ID NO: 632004 - RNA, 19 nt, Artificial Sequence
  Description of Artificial Sequence: Synthetic oligonucleotide
  Sense strand starting at position 2884 of SEQ ID NO: 585338
gagcguuauuucucgauau

SEQ ID NO: 632005 - RNA, 19 nt, Artificial Sequence
  Description of Artificial Sequence: Synthetic oligonucleotide
  Antisense strand to SEQ ID NO: 632004
auaucgagaaauaacgcuc

SEQ ID NO: 632006 - RNA, 19 nt, Artificial Sequence
  Description of Artificial Sequence: Synthetic oligonucleotide
  Sense strand starting at position 2886 of SEQ ID NO: 585338
gcguuauuucucgauauac

SEQ ID NO: 632007 - RNA, 19 nt, Artificial Sequence
  Description of Artificial Sequence: Synthetic oligonucleotide
  Antisense strand to SEQ ID NO: 632006
guauaucgagaaauaacgc

SEQ ID NO: 632008 - RNA, 19 nt, Artificial Sequence
  Description of Artificial Sequence: Synthetic oligonucleotide
  Sense strand starting at position 2937 of SEQ ID NO: 585338
ugcaucauuuaagaugaca

SEQ ID NO: 632009 - RNA, 19 nt, Artificial Sequence
  Description of Artificial Sequence: Synthetic oligonucleotide
  Antisense strand to SEQ ID NO: 632008
ugucaucuuaaaugaugca

SEQ ID NO: 632010 - RNA, 19 nt, Artificial Sequence
  Description of Artificial Sequence: Synthetic oligonucleotide
  Sense strand starting at position 3156 of SEQ ID NO: 585338
ucuaaacaugucugaacgu

SEQ ID NO: 632011 - RNA, 19 nt, Artificial Sequence
  Description of Artificial Sequence: Synthetic oligonucleotide
  Antisense strand to SEQ ID NO: 632010
acguucagacauguuuaga

SEQ ID NO: 632012 - RNA, 19 nt, Artificial Sequence
  Description of Artificial Sequence: Synthetic oligonucleotide
  Sense strand starting at position 3313 of SEQ ID NO: 585338
aggacaucacuguguacua

SEQ ID NO: 632013 - RNA, 19 nt, Artificial Sequence
  Description of Artificial Sequence: Synthetic oligonucleotide
  Antisense strand to SEQ ID NO: 632012
uaguacacagugauguccu

SEQ ID NO: 632014 - RNA, 19 nt, Artificial Sequence
  Description of Artificial Sequence: Synthetic oligonucleotide
  Sense strand starting at position 3328 of SEQ ID NO: 585338
acuacuauaggcuguauaa

SEQ ID NO: 632015 - RNA, 19 nt, Artificial Sequence
  Description of Artificial Sequence: Synthetic oligonucleotide
  Antisense strand to SEQ ID NO: 632014
uuauacagccuauaguagu

SEQ ID NO: 632016 - RNA, 19 nt, Artificial Sequence
  Description of Artificial Sequence: Synthetic oligonucleotide
  Sense strand starting at position 3339 of SEQ ID NO: 585338
cuguauaaacacuguauua

SEQ ID NO: 632017 - RNA, 19 nt, Artificial Sequence
  Description of Artificial Sequence: Synthetic oligonucleotide
  Antisense strand to SEQ ID NO: 632016
uaauacaguguuuauacag

SEQ ID NO: 632018 - RNA, 19 nt, Artificial Sequence
  Description of Artificial Sequence: Synthetic oligonucleotide
  Sense strand starting at position 3780 of SEQ ID NO: 585338
uguaauaacguuugacuua

SEQ ID NO: 632019 - RNA, 19 nt, Artificial Sequence
  Description of Artificial Sequence: Synthetic oligonucleotide
  Antisense strand to SEQ ID NO: 632018
uaagucaaacguuauuaca

SEQ ID NO: 632020 - RNA, 19 nt, Artificial Sequence
  Description of Artificial Sequence: Synthetic oligonucleotide
  Sense strand starting at position 170 of SEQ ID NO: 585339
cuaugucucugucucucaa

SEQ ID NO: 632021 - RNA, 19 nt, Artificial Sequence
  Description of Artificial Sequence: Synthetic oligonucleotide
  Antisense strand to SEQ ID NO: 632020
uugagagacagagacauag

SEQ ID NO: 632022 - RNA, 19 nt, Artificial Sequence
  Description of Artificial Sequence: Synthetic oligonucleotide
  Sense strand starting at position 223 of SEQ ID NO: 585339
agcuucucucuucgauuaa

SEQ ID NO: 632023 - RNA, 19 nt, Artificial Sequence
  Description of Artificial Sequence: Synthetic oligonucleotide
  Antisense strand to SEQ ID NO: 632022
uuaaucgaagagagaagcu

SEQ ID NO: 632024 - RNA, 19 nt, Artificial Sequence
  Description of Artificial Sequence: Synthetic oligonucleotide
  Sense strand starting at position 262 of SEQ ID NO: 585339
cuguuaguugaaggcucaa

SEQ ID NO: 632025 - RNA, 19 nt, Artificial Sequence
  Description of Artificial Sequence: Synthetic oligonucleotide
  Antisense strand to SEQ ID NO: 632024
uugagccuucaacuaacag

SEQ ID NO: 632026 - RNA, 19 nt, Artificial Sequence
  Description of Artificial Sequence: Synthetic oligonucleotide
  Sense strand starting at position 277 of SEQ ID NO: 585339
ucaauauuugcacgucagu

SEQ ID NO: 632027 - RNA, 19 nt, Artificial Sequence
  Description of Artificial Sequence: Synthetic oligonucleotide
  Antisense strand to SEQ ID NO: 632026
acugacgugcaaauauuga

SEQ ID NO: 632028 - RNA, 19 nt, Artificial Sequence
  Description of Artificial Sequence: Synthetic oligonucleotide
  Sense strand starting at position 309 of SEQ ID NO: 585339
ucagucuacccgggaauau

SEQ ID NO: 632029 - RNA, 19 nt, Artificial Sequence
  Description of Artificial Sequence: Synthetic oligonucleotide
  Antisense strand to SEQ ID NO: 632028
auauucccggguagacuga

SEQ ID NO: 632030 - RNA, 19 nt, Artificial Sequence
  Description of Artificial Sequence: Synthetic oligonucleotide
  Sense strand starting at position 310 of SEQ ID NO: 585339
cagucuacccgggaauauu

SEQ ID NO: 632031 - RNA, 19 nt, Artificial Sequence
  Description of Artificial Sequence: Synthetic oligonucleotide
  Antisense strand to SEQ ID NO: 632030
aauauucccggguagacug

SEQ ID NO: 632032 - RNA, 19 nt, Artificial Sequence
  Description of Artificial Sequence: Synthetic oligonucleotide
  Sense strand starting at position 409 of SEQ ID NO: 585339
ccaagaucugugugcauac

SEQ ID NO: 632033 - RNA, 19 nt, Artificial Sequence
  Description of Artificial Sequence: Synthetic oligonucleotide
  Antisense strand to SEQ ID NO: 632032
guaugcacacagaucuugg

SEQ ID NO: 632034 - RNA, 19 nt, Artificial Sequence
  Description of Artificial Sequence: Synthetic oligonucleotide
  Sense strand starting at position 410 of SEQ ID NO: 585339
caagaucugugugcauacu

SEQ ID NO: 632035 - RNA, 19 nt, Artificial Sequence
  Description of Artificial Sequence: Synthetic oligonucleotide
  Antisense strand to SEQ ID NO: 632034
aguaugcacacagaucuug

SEQ ID NO: 632036 - RNA, 19 nt, Artificial Sequence
  Description of Artificial Sequence: Synthetic oligonucleotide
  Sense strand starting at position 411 of SEQ ID NO: 585339
aagaucugugugcauacuu

SEQ ID NO: 632037 - RNA, 19 nt, Artificial Sequence
  Description of Artificial Sequence: Synthetic oligonucleotide
  Antisense strand to SEQ ID NO: 632036
aaguaugcacacagaucuu

SEQ ID NO: 632038 - RNA, 19 nt, Artificial Sequence
  Description of Artificial Sequence: Synthetic oligonucleotide
  Sense strand starting at position 670 of SEQ ID NO: 585339
ucucauguacgagaaauac

SEQ ID NO: 632039 - RNA, 19 nt, Artificial Sequence
  Description of Artificial Sequence: Synthetic oligonucleotide
  Antisense strand to SEQ ID NO: 632038
guauuucucguacaugaga

SEQ ID NO: 632040 - RNA, 19 nt, Artificial Sequence
  Description of Artificial Sequence: Synthetic oligonucleotide
  Sense strand starting at position 714 of SEQ ID NO: 585339
gaaucauucugguuuacug

SEQ ID NO: 632041 - RNA, 19 nt, Artificial Sequence
  Description of Artificial Sequence: Synthetic oligonucleotide
  Antisense strand to SEQ ID NO: 632040
caguaaaccagaaugauuc

SEQ ID NO: 632042 - RNA, 19 nt, Artificial Sequence
  Description of Artificial Sequence: Synthetic oligonucleotide
  Sense strand starting at position 730 of SEQ ID NO: 585339
cuggauuccaauugguaga

SEQ ID NO: 632043 - RNA, 19 nt, Artificial Sequence
  Description of Artificial Sequence: Synthetic oligonucleotide
  Antisense strand to SEQ ID NO: 632042
ucuaccaauuggaauccag

SEQ ID NO: 632044 - RNA, 19 nt, Artificial Sequence
  Description of Artificial Sequence: Synthetic oligonucleotide
  Sense strand starting at position 798 of SEQ ID NO: 585339
uaugucguaaacgaguuaa

SEQ ID NO: 632045 - RNA, 19 nt, Artificial Sequence
  Description of Artificial Sequence: Synthetic oligonucleotide
  Antisense strand to SEQ ID NO: 632044
uuaacucguuuacgacaua

SEQ ID NO: 632046 - RNA, 19 nt, Artificial Sequence
  Description of Artificial Sequence: Synthetic oligonucleotide
  Sense strand starting at position 849 of SEQ ID NO: 585339
cuaucuguacauggucaua

SEQ ID NO: 632047 - RNA, 19 nt, Artificial Sequence
  Description of Artificial Sequence: Synthetic oligonucleotide
  Antisense strand to SEQ ID NO: 632046
uaugaccauguacagauag

SEQ ID NO: 632048 - RNA, 19 nt, Artificial Sequence
  Description of Artificial Sequence: Synthetic oligonucleotide
  Sense strand starting at position 852 of SEQ ID NO: 585339
ucuguacauggucauaacu

SEQ ID NO: 632049 - RNA, 19 nt, Artificial Sequence
  Description of Artificial Sequence: Synthetic oligonucleotide
  Antisense strand to SEQ ID NO: 632048
aguuaugaccauguacaga

SEQ ID NO: 632050 - RNA, 19 nt, Artificial Sequence
  Description of Artificial Sequence: Synthetic oligonucleotide
  Sense strand starting at position 1195 of SEQ ID NO: 585339
cucaauucucgagaccgaa

SEQ ID NO: 632051 - RNA, 19 nt, Artificial Sequence
  Description of Artificial Sequence: Synthetic oligonucleotide
  Antisense strand to SEQ ID NO: 632050
uucggucucgagaauugag

SEQ ID NO: 632052 - RNA, 19 nt, Artificial Sequence
  Description of Artificial Sequence: Synthetic oligonucleotide
  Sense strand starting at position 1797 of SEQ ID NO: 585339
ggcaguucucgcggauuua

SEQ ID NO: 632053 - RNA, 19 nt, Artificial Sequence
  Description of Artificial Sequence: Synthetic oligonucleotide
  Antisense strand to SEQ ID NO: 632052
uaaauccgcgagaacugcc

SEQ ID NO: 632054 - RNA, 19 nt, Artificial Sequence
  Description of Artificial Sequence: Synthetic oligonucleotide
  Sense strand starting at position 1798 of SEQ ID NO: 585339
gcaguucucgcggauuuau

SEQ ID NO: 632055 - RNA, 19 nt, Artificial Sequence
  Description of Artificial Sequence: Synthetic oligonucleotide
  Antisense strand to SEQ ID NO: 632054
auaaauccgcgagaacugc

SEQ ID NO: 632056 - RNA, 19 nt, Artificial Sequence
  Description of Artificial Sequence: Synthetic oligonucleotide
  Sense strand starting at position 1938 of SEQ ID NO: 585339
gugcauugcaaagagauuc

SEQ ID NO: 632057 - RNA, 19 nt, Artificial Sequence
  Description of Artificial Sequence: Synthetic oligonucleotide
  Antisense strand to SEQ ID NO: 632056
gaaucucuuugcaaugcac

SEQ ID NO: 632058 - RNA, 19 nt, Artificial Sequence
  Description of Artificial Sequence: Synthetic oligonucleotide
  Sense strand starting at position 1969 of SEQ ID NO: 585339
cggucugauggucaguuaa

SEQ ID NO: 632059 - RNA, 19 nt, Artificial Sequence
  Description of Artificial Sequence: Synthetic oligonucleotide
  Antisense strand to SEQ ID NO: 632058
uuaacugaccaucagaccg

SEQ ID NO: 632060 - RNA, 19 nt, Artificial Sequence
  Description of Artificial Sequence: Synthetic oligonucleotide
  Sense strand starting at position 1971 of SEQ ID NO: 585339
gucugauggucaguuaaag

SEQ ID NO: 632061 - RNA, 19 nt, Artificial Sequence
  Description of Artificial Sequence: Synthetic oligonucleotide
  Antisense strand to SEQ ID NO: 632060
cuuuaacugaccaucagac

SEQ ID NO: 632062 - RNA, 19 nt, Artificial Sequence
  Description of Artificial Sequence: Synthetic oligonucleotide
  Sense strand starting at position 2007 of SEQ ID NO: 585339
gaugaaauagagcguuauu

SEQ ID NO: 632063 - RNA, 19 nt, Artificial Sequence
  Description of Artificial Sequence: Synthetic oligonucleotide
  Antisense strand to SEQ ID NO: 632062
aauaacgcucuauuucauc

SEQ ID NO: 632064 - RNA, 19 nt, Artificial Sequence
  Description of Artificial Sequence: Synthetic oligonucleotide
  Sense strand starting at position 2016 of SEQ ID NO: 585339
gagcguuauuucucgauau

SEQ ID NO: 632065 - RNA, 19 nt, Artificial Sequence
  Description of Artificial Sequence: Synthetic oligonucleotide
  Antisense strand to SEQ ID NO: 632064
auaucgagaaauaacgcuc

SEQ ID NO: 632066 - RNA, 19 nt, Artificial Sequence
  Description of Artificial Sequence: Synthetic oligonucleotide
  Sense strand starting at position 2018 of SEQ ID NO: 585339
gcguuauuucucgauauac

SEQ ID NO: 632067 - RNA, 19 nt, Artificial Sequence
  Description of Artificial Sequence: Synthetic oligonucleotide
  Antisense strand to SEQ ID NO: 632066
guauaucgagaaauaacgc

SEQ ID NO: 632068 - RNA, 19 nt, Artificial Sequence
  Description of Artificial Sequence: Synthetic oligonucleotide
  Sense strand starting at position 2069 of SEQ ID NO: 585339
ugcaucauuuaagaugaca

SEQ ID NO: 632069 - RNA, 19 nt, Artificial Sequence
  Description of Artificial Sequence: Synthetic oligonucleotide
  Antisense strand to SEQ ID NO: 632068
ugucaucuuaaaugaugca

SEQ ID NO: 632070 - RNA, 19 nt, Artificial Sequence
  Description of Artificial Sequence: Synthetic oligonucleotide
  Sense strand starting at position 2116 of SEQ ID NO: 585339
gaguuucuugugugaacau

SEQ ID NO: 632071 - RNA, 19 nt, Artificial Sequence
  Description of Artificial Sequence: Synthetic oligonucleotide
  Antisense strand to SEQ ID NO: 632070
auguucacacaagaaacuc

SEQ ID NO: 632072 - RNA, 19 nt, Artificial Sequence
  Description of Artificial Sequence: Synthetic oligonucleotide
  Sense strand starting at position 2288 of SEQ ID NO: 585339
ucuaaacaugucugaacgu

SEQ ID NO: 632073 - RNA, 19 nt, Artificial Sequence
  Description of Artificial Sequence: Synthetic oligonucleotide
  Antisense strand to SEQ ID NO: 632072
acguucagacauguuuaga

SEQ ID NO: 632074 - RNA, 19 nt, Artificial Sequence
  Description of Artificial Sequence: Synthetic oligonucleotide
  Sense strand starting at position 2322 of SEQ ID NO: 585339
aaaguacaguaugaaagau

SEQ ID NO: 632075 - RNA, 19 nt, Artificial Sequence
  Description of Artificial Sequence: Synthetic oligonucleotide
  Antisense strand to SEQ ID NO: 632074
aucuuucauacuguacuuu

SEQ ID NO: 632076 - RNA, 19 nt, Artificial Sequence
  Description of Artificial Sequence: Synthetic oligonucleotide
  Sense strand starting at position 2445 of SEQ ID NO: 585339
aggacaucacuguguacua

SEQ ID NO: 632077 - RNA, 19 nt, Artificial Sequence
  Description of Artificial Sequence: Synthetic oligonucleotide
  Antisense strand to SEQ ID NO: 632076
uaguacacagugauguccu

SEQ ID NO: 632078 - RNA, 19 nt, Artificial Sequence
  Description of Artificial Sequence: Synthetic oligonucleotide
  Sense strand starting at position 2460 of SEQ ID NO: 585339
acuacuauaggcuguauaa

SEQ ID NO: 632079 - RNA, 19 nt, Artificial Sequence
  Description of Artificial Sequence: Synthetic oligonucleotide
  Antisense strand to SEQ ID NO: 632078
uuauacagccuauaguagu

SEQ ID NO: 632080 - RNA, 19 nt, Artificial Sequence
  Description of Artificial Sequence: Synthetic oligonucleotide
  Sense strand starting at position 2471 of SEQ ID NO: 585339
cuguauaaacacuguauua

SEQ ID NO: 632081 - RNA, 19 nt, Artificial Sequence
  Description of Artificial Sequence: Synthetic oligonucleotide
  Antisense strand to SEQ ID NO: 632080
uaauacaguguuuauacag

SEQ ID NO: 632082 - RNA, 19 nt, Artificial Sequence
  Description of Artificial Sequence: Synthetic oligonucleotide
  Sense strand starting at position 2617 of SEQ ID NO: 585339
gauggagcauugcucugua

SEQ ID NO: 632083 - RNA, 19 nt, Artificial Sequence
  Description of Artificial Sequence: Synthetic oligonucleotide
  Antisense strand to SEQ ID NO: 632082
uacagagcaaugcuccauc

SEQ ID NO: 632084 - RNA, 19 nt, Artificial Sequence
  Description of Artificial Sequence: Synthetic oligonucleotide
  Sense strand starting at position 2912 of SEQ ID NO: 585339
uguaauaacguuugacuua

SEQ ID NO: 632085 - RNA, 19 nt, Artificial Sequence
  Description of Artificial Sequence: Synthetic oligonucleotide
  Antisense strand to SEQ ID NO: 632084
uaagucaaacguuauuaca

SEQ ID NO: 632086 - RNA, 19 nt, Artificial Sequence
  Description of Artificial Sequence: Synthetic oligonucleotide
  Sense strand starting at position 3101 of SEQ ID NO: 585339
caggauugucagugccacu

SEQ ID NO: 632087 - RNA, 19 nt, Artificial Sequence
  Description of Artificial Sequence: Synthetic oligonucleotide
  Antisense strand to SEQ ID NO: 632086
aguggcacugacaauccug

SEQ ID NO: 632088 - RNA, 19 nt, Artificial Sequence
  Description of Artificial Sequence: Synthetic oligonucleotide
  Sense strand starting at position 3143 of SEQ ID NO: 585339
ccuggaaggucuuuagaga

SEQ ID NO: 632089 - RNA, 19 nt, Artificial Sequence
  Description of Artificial Sequence: Synthetic oligonucleotide
  Antisense strand to SEQ ID NO: 632088
ucucuaaagaccuuccagg

SEQ ID NO: 632090 - RNA, 19 nt, Artificial Sequence
  Description of Artificial Sequence: Synthetic oligonucleotide
  Sense strand starting at position 3179 of SEQ ID NO: 585339
gcucuauuauaaucguaug

SEQ ID NO: 632091 - RNA, 19 nt, Artificial Sequence
  Description of Artificial Sequence: Synthetic oligonucleotide
  Antisense strand to SEQ ID NO: 632090
cauacgauuauaauagagc

SEQ ID NO: 632092 - RNA, 19 nt, Artificial Sequence
  Description of Artificial Sequence: Synthetic oligonucleotide
  Sense strand starting at position 3442 of SEQ ID NO: 585339
gugcaauuaagaggugagu

SEQ ID NO: 632093 - RNA, 19 nt, Artificial Sequence
  Description of Artificial Sequence: Synthetic oligonucleotide
  Antisense strand to SEQ ID NO: 632092
acucaccucuuaauugcac

SEQ ID NO: 632094 - RNA, 19 nt, Artificial Sequence
  Description of Artificial Sequence: Synthetic oligonucleotide
  Sense strand starting at position 3444 of SEQ ID NO: 585339
gcaauuaagaggugagucu

SEQ ID NO: 632095 - RNA, 19 nt, Artificial Sequence
  Description of Artificial Sequence: Synthetic oligonucleotide
  Antisense strand to SEQ ID NO: 632094
agacucaccucuuaauugc

SEQ ID NO: 632096 - RNA, 19 nt, Artificial Sequence
  Description of Artificial Sequence: Synthetic oligonucleotide
  Sense strand starting at position 3756 of SEQ ID NO: 585339
uucugagucgccuaaguau

SEQ ID NO: 632097 - RNA, 19 nt, Artificial Sequence
  Description of Artificial Sequence: Synthetic oligonucleotide
  Antisense strand to SEQ ID NO: 632096
auacuuaggcgacucagaa

SEQ ID NO: 632098 - RNA, 19 nt, Artificial Sequence
  Description of Artificial Sequence: Synthetic oligonucleotide
  Sense strand starting at position 3894 of SEQ ID NO: 585339
guuuguuagcugguucuuu

SEQ ID NO: 632099 - RNA, 19 nt, Artificial Sequence
  Description of Artificial Sequence: Synthetic oligonucleotide
  Antisense strand to SEQ ID NO: 632098
aaagaaccagcuaacaaac

SEQ ID NO: 632100 - RNA, 19 nt, Artificial Sequence
  Description of Artificial Sequence: Synthetic oligonucleotide
  Sense strand starting at position 29 of SEQ ID NO: 585340
ccuuauuccugagcaaagg

SEQ ID NO: 632101 - RNA, 19 nt, Artificial Sequence
  Description of Artificial Sequence: Synthetic oligonucleotide
  Antisense strand to SEQ ID NO: 632100
ccuuugcucaggaauaagg

SEQ ID NO: 632102 - RNA, 19 nt, Artificial Sequence
  Description of Artificial Sequence: Synthetic oligonucleotide
  Sense strand starting at position 133 of SEQ ID NO: 585340
caguuauuggagggcaguu

SEQ ID NO: 632103 - RNA, 19 nt, Artificial Sequence
  Description of Artificial Sequence: Synthetic oligonucleotide
  Antisense strand to SEQ ID NO: 632102
aacugcccuccaauaacug

SEQ ID NO: 632104 - RNA, 19 nt, Artificial Sequence
  Description of Artificial Sequence: Synthetic oligonucleotide
  Sense strand starting at position 182 of SEQ ID NO: 585340
guggaaagguuugugugga

SEQ ID NO: 632105 - RNA, 19 nt, Artificial Sequence
  Description of Artificial Sequence: Synthetic oligonucleotide
  Antisense strand to SEQ ID NO: 632104
uccacacaaaccuuuccac

SEQ ID NO: 632106 - RNA, 19 nt, Artificial Sequence
  Description of Artificial Sequence: Synthetic oligonucleotide
  Sense strand starting at position 187 of SEQ ID NO: 585340
aagguuuguguggauaaca

SEQ ID NO: 632107 - RNA, 19 nt, Artificial Sequence
  Description of Artificial Sequence: Synthetic oligonucleotide
  Antisense strand to SEQ ID NO: 632106
uguuauccacacaaaccuu

SEQ ID NO: 632108 - RNA, 19 nt, Artificial Sequence
  Description of Artificial Sequence: Synthetic oligonucleotide
  Sense strand starting at position 195 of SEQ ID NO: 585340
uguggauaacaucagguuu

SEQ ID NO: 632109 - RNA, 19 nt, Artificial Sequence
  Description of Artificial Sequence: Synthetic oligonucleotide
  Antisense strand to SEQ ID NO: 632108
aaaccugauguuauccaca

SEQ ID NO: 632110 - RNA, 19 nt, Artificial Sequence
  Description of Artificial Sequence: Synthetic oligonucleotide
  Sense strand starting at position 444 of SEQ ID NO: 585340
augauaauguggguuugca

SEQ ID NO: 632111 - RNA, 19 nt, Artificial Sequence
  Description of Artificial Sequence: Synthetic oligonucleotide
  Antisense strand to SEQ ID NO: 632110
ugcaaacccacauuaucau

SEQ ID NO: 632112 - RNA, 19 nt, Artificial Sequence
  Description of Artificial Sequence: Synthetic oligonucleotide
  Sense strand starting at position 452 of SEQ ID NO: 585340
guggguuugcacuauugau

SEQ ID NO: 632113 - RNA, 19 nt, Artificial Sequence
  Description of Artificial Sequence: Synthetic oligonucleotide
  Antisense strand to SEQ ID NO: 632112
aucaauagugcaaacccac

SEQ ID NO: 632114 - RNA, 19 nt, Artificial Sequence
  Description of Artificial Sequence: Synthetic oligonucleotide
  Sense strand starting at position 757 of SEQ ID NO: 585340
gcucuaguuguguaauaga

SEQ ID NO: 632115 - RNA, 19 nt, Artificial Sequence
  Description of Artificial Sequence: Synthetic oligonucleotide
  Antisense strand to SEQ ID NO: 632114
ucuauuacacaacuagagc

SEQ ID NO: 632116 - RNA, 19 nt, Artificial Sequence
  Description of Artificial Sequence: Synthetic oligonucleotide
  Sense strand starting at position 1049 of SEQ ID NO: 585340
guauuuccaucaucguguu

SEQ ID NO: 632117 - RNA, 19 nt, Artificial Sequence
  Description of Artificial Sequence: Synthetic oligonucleotide
  Antisense strand to SEQ ID NO: 632116
aacacgaugauggaaauac

SEQ ID NO: 632118 - RNA, 19 nt, Artificial Sequence
  Description of Artificial Sequence: Synthetic oligonucleotide
  Sense strand starting at position 1190 of SEQ ID NO: 585340
uuaggugugauguggaauu

SEQ ID NO: 632119 - RNA, 19 nt, Artificial Sequence
  Description of Artificial Sequence: Synthetic oligonucleotide
  Antisense strand to SEQ ID NO: 632118
aauuccacaucacaccuaa

SEQ ID NO: 632120 - RNA, 19 nt, Artificial Sequence
  Description of Artificial Sequence: Synthetic oligonucleotide
  Sense strand starting at position 1267 of SEQ ID NO: 585340
gugucaugucugggauuug

SEQ ID NO: 632121 - RNA, 19 nt, Artificial Sequence
  Description of Artificial Sequence: Synthetic oligonucleotide
  Antisense strand to SEQ ID NO: 632120
caaaucccagacaugacac

SEQ ID NO: 632122 - RNA, 19 nt, Artificial Sequence
  Description of Artificial Sequence: Synthetic oligonucleotide
  Sense strand starting at position 1329 of SEQ ID NO: 585340
ugagcugauaacuguugaa

SEQ ID NO: 632123 - RNA, 19 nt, Artificial Sequence
  Description of Artificial Sequence: Synthetic oligonucleotide
  Antisense strand to SEQ ID NO: 632122
uucaacaguuaucagcuca

SEQ ID NO: 632124 - RNA, 19 nt, Artificial Sequence
  Description of Artificial Sequence: Synthetic oligonucleotide
  Sense strand starting at position 1351 of SEQ ID NO: 585340
gggugucagguuuauuaua

SEQ ID NO: 632125 - RNA, 19 nt, Artificial Sequence
  Description of Artificial Sequence: Synthetic oligonucleotide
  Antisense strand to SEQ ID NO: 632124
uauaauaaaccugacaccc

SEQ ID NO: 632126 - RNA, 19 nt, Artificial Sequence
  Description of Artificial Sequence: Synthetic oligonucleotide
  Sense strand starting at position 1353 of SEQ ID NO: 585340
gugucagguuuauuauacu

SEQ ID NO: 632127 - RNA, 19 nt, Artificial Sequence
  Description of Artificial Sequence: Synthetic oligonucleotide
  Antisense strand to SEQ ID NO: 632126
aguauaauaaaccugacac

SEQ ID NO: 632128 - RNA, 19 nt, Artificial Sequence
  Description of Artificial Sequence: Synthetic oligonucleotide
  Sense strand starting at position 1359 of SEQ ID NO: 585340
gguuuauuauacucuacuu

SEQ ID NO: 632129 - RNA, 19 nt, Artificial Sequence
  Description of Artificial Sequence: Synthetic oligonucleotide
  Antisense strand to SEQ ID NO: 632128
aaguagaguauaauaaacc

SEQ ID NO: 632130 - RNA, 19 nt, Artificial Sequence
  Description of Artificial Sequence: Synthetic oligonucleotide
  Sense strand starting at position 1879 of SEQ ID NO: 585340
uuaugaagucuaggagauu

SEQ ID NO: 632131 - RNA, 19 nt, Artificial Sequence
  Description of Artificial Sequence: Synthetic oligonucleotide
  Antisense strand to SEQ ID NO: 632130
aaucuccuagacuucauaa

SEQ ID NO: 632132 - RNA, 19 nt, Artificial Sequence
  Description of Artificial Sequence: Synthetic oligonucleotide
  Sense strand starting at position 1885 of SEQ ID NO: 585340
agucuaggagauugguauu

SEQ ID NO: 632133 - RNA, 19 nt, Artificial Sequence
  Description of Artificial Sequence: Synthetic oligonucleotide
  Antisense strand to SEQ ID NO: 632132
aauaccaaucuccuagacu

SEQ ID NO: 632134 - RNA, 19 nt, Artificial Sequence
  Description of Artificial Sequence: Synthetic oligonucleotide
  Sense strand starting at position 1972 of SEQ ID NO: 585340
ggcucuauagcgaguagug

SEQ ID NO: 632135 - RNA, 19 nt, Artificial Sequence
  Description of Artificial Sequence: Synthetic oligonucleotide
  Antisense strand to SEQ ID NO: 632134
cacuacucgcuauagagcc

SEQ ID NO: 632136 - RNA, 19 nt, Artificial Sequence
  Description of Artificial Sequence: Synthetic oligonucleotide
  Sense strand starting at position 1992 of SEQ ID NO: 585340
uaaagugagggcugaaauc

SEQ ID NO: 632137 - RNA, 19 nt, Artificial Sequence
  Description of Artificial Sequence: Synthetic oligonucleotide
  Antisense strand to SEQ ID NO: 632136
gauuucagcccucacuuua

SEQ ID NO: 632138 - RNA, 19 nt, Artificial Sequence
  Description of Artificial Sequence: Synthetic oligonucleotide
  Sense strand starting at position 2028 of SEQ ID NO: 585340
gggccugaggaguauuaug

SEQ ID NO: 632139 - RNA, 19 nt, Artificial Sequence
  Description of Artificial Sequence: Synthetic oligonucleotide
  Antisense strand to SEQ ID NO: 632138
cauaauacuccucaggccc

SEQ ID NO: 632140 - RNA, 19 nt, Artificial Sequence
  Description of Artificial Sequence: Synthetic oligonucleotide
  Sense strand starting at position 2096 of SEQ ID NO: 585340
auagaaugaugucaaagaa

SEQ ID NO: 632141 - RNA, 19 nt, Artificial Sequence
  Description of Artificial Sequence: Synthetic oligonucleotide
  Antisense strand to SEQ ID NO: 632140
uucuuugacaucauucuau

SEQ ID NO: 632142 - RNA, 19 nt, Artificial Sequence
  Description of Artificial Sequence: Synthetic oligonucleotide
  Sense strand starting at position 2158 of SEQ ID NO: 585340
auguuuauugagcaacugu

SEQ ID NO: 632143 - RNA, 19 nt, Artificial Sequence
  Description of Artificial Sequence: Synthetic oligonucleotide
  Antisense strand to SEQ ID NO: 632142
acaguugcucaauaaacau

SEQ ID NO: 632144 - RNA, 19 nt, Artificial Sequence
  Description of Artificial Sequence: Synthetic oligonucleotide
  Sense strand starting at position 2285 of SEQ ID NO: 585340
agggcuaaguguuucuuau

SEQ ID NO: 632145 - RNA, 19 nt, Artificial Sequence
  Description of Artificial Sequence: Synthetic oligonucleotide
  Antisense strand to SEQ ID NO: 632144
auaagaaacacuuagcccu

SEQ ID NO: 632146 - RNA, 19 nt, Artificial Sequence
  Description of Artificial Sequence: Synthetic oligonucleotide
  Sense strand starting at position 2540 of SEQ ID NO: 585340
cuuauuugcugggacauua

SEQ ID NO: 632147 - RNA, 19 nt, Artificial Sequence
  Description of Artificial Sequence: Synthetic oligonucleotide
  Antisense strand to SEQ ID NO: 632146
uaaugucccagcaaauaag

SEQ ID NO: 632148 - RNA, 19 nt, Artificial Sequence
  Description of Artificial Sequence: Synthetic oligonucleotide
  Sense strand starting at position 2561 of SEQ ID NO: 585340
agcuccaccgaguaauauu

SEQ ID NO: 632149 - RNA, 19 nt, Artificial Sequence
  Description of Artificial Sequence: Synthetic oligonucleotide
  Antisense strand to SEQ ID NO: 632148
aauauuacucgguggagcu

SEQ ID NO: 632150 - RNA, 19 nt, Artificial Sequence
  Description of Artificial Sequence: Synthetic oligonucleotide
  Sense strand starting at position 2596 of SEQ ID NO: 585340
uucggcauucuggaaauaa

SEQ ID NO: 632151 - RNA, 19 nt, Artificial Sequence
  Description of Artificial Sequence: Synthetic oligonucleotide
  Antisense strand to SEQ ID NO: 632150
uuauuuccagaaugccgaa

SEQ ID NO: 632152 - RNA, 19 nt, Artificial Sequence
  Description of Artificial Sequence: Synthetic oligonucleotide
  Sense strand starting at position 2719 of SEQ ID NO: 585340
uuuggacugugaucacuaa

SEQ ID NO: 632153 - RNA, 19 nt, Artificial Sequence
  Description of Artificial Sequence: Synthetic oligonucleotide
  Antisense strand to SEQ ID NO: 632152
uuagugaucacaguccaaa

SEQ ID NO: 632154 - RNA, 19 nt, Artificial Sequence
  Description of Artificial Sequence: Synthetic oligonucleotide
  Sense strand starting at position 2773 of SEQ ID NO: 585340
gcuuaaugagguuaaccuu

SEQ ID NO: 632155 - RNA, 19 nt, Artificial Sequence
  Description of Artificial Sequence: Synthetic oligonucleotide
  Antisense strand to SEQ ID NO: 632154
aagguuaaccucauuaagc

SEQ ID NO: 632156 - RNA, 19 nt, Artificial Sequence
  Description of Artificial Sequence: Synthetic oligonucleotide
  Sense strand starting at position 2965 of SEQ ID NO: 585340
uuugguuaccuggauggau

SEQ ID NO: 632157 - RNA, 19 nt, Artificial Sequence
  Description of Artificial Sequence: Synthetic oligonucleotide
  Antisense strand to SEQ ID NO: 632156
auccauccagguaaccaaa

SEQ ID NO: 632158 - RNA, 19 nt, Artificial Sequence
  Description of Artificial Sequence: Synthetic oligonucleotide
  Sense strand starting at position 2979 of SEQ ID NO: 585340
uggauugcacaguggugaa

SEQ ID NO: 632159 - RNA, 19 nt, Artificial Sequence
  Description of Artificial Sequence: Synthetic oligonucleotide
  Antisense strand to SEQ ID NO: 632158
uucaccacugugcaaucca

SEQ ID NO: 632160 - RNA, 19 nt, Artificial Sequence
  Description of Artificial Sequence: Synthetic oligonucleotide
  Sense strand starting at position 3017 of SEQ ID NO: 585340
cucuuacccgaguaaugua

SEQ ID NO: 632161 - RNA, 19 nt, Artificial Sequence
  Description of Artificial Sequence: Synthetic oligonucleotide
  Antisense strand to SEQ ID NO: 632160
uacauuacucggguaagag

SEQ ID NO: 632162 - RNA, 19 nt, Artificial Sequence
  Description of Artificial Sequence: Synthetic oligonucleotide
  Sense strand starting at position 3024 of SEQ ID NO: 585340
ccgaguaauguacauugua

SEQ ID NO: 632163 - RNA, 19 nt, Artificial Sequence
  Description of Artificial Sequence: Synthetic oligonucleotide
  Antisense strand to SEQ ID NO: 632162
uacaauguacauuacucgg

SEQ ID NO: 632164 - RNA, 19 nt, Artificial Sequence
  Description of Artificial Sequence: Synthetic oligonucleotide
  Sense strand starting at position 3043 of SEQ ID NO: 585340
cccaauauguagcuuugau

SEQ ID NO: 632165 - RNA, 19 nt, Artificial Sequence
  Description of Artificial Sequence: Synthetic oligonucleotide
  Antisense strand to SEQ ID NO: 632164
aucaaagcuacauauuggg

SEQ ID NO: 632166 - RNA, 19 nt, Artificial Sequence
  Description of Artificial Sequence: Synthetic oligonucleotide
  Sense strand starting at position 3139 of SEQ ID NO: 585340
uguauuguuugauccugaa

SEQ ID NO: 632167 - RNA, 19 nt, Artificial Sequence
  Description of Artificial Sequence: Synthetic oligonucleotide
  Antisense strand to SEQ ID NO: 632166
uucaggaucaaacaauaca

SEQ ID NO: 632168 - RNA, 19 nt, Artificial Sequence
  Description of Artificial Sequence: Synthetic oligonucleotide
  Sense strand starting at position 3305 of SEQ ID NO: 585340
gguggaguguuccuauuaa

SEQ ID NO: 632169 - RNA, 19 nt, Artificial Sequence
  Description of Artificial Sequence: Synthetic oligonucleotide
  Antisense strand to SEQ ID NO: 632168
uuaauaggaacacuccacc

SEQ ID NO: 632170 - RNA, 19 nt, Artificial Sequence
  Description of Artificial Sequence: Synthetic oligonucleotide
  Sense strand starting at position 3370 of SEQ ID NO: 585340
ucucacucagauugaaagu

SEQ ID NO: 632171 - RNA, 19 nt, Artificial Sequence
  Description of Artificial Sequence: Synthetic oligonucleotide
  Antisense strand to SEQ ID NO: 632170
acuuucaaucugagugaga

SEQ ID NO: 632172 - RNA, 19 nt, Artificial Sequence
  Description of Artificial Sequence: Synthetic oligonucleotide
  Sense strand starting at position 3427 of SEQ ID NO: 585340
agguccuguuaccucuaaa

SEQ ID NO: 632173 - RNA, 19 nt, Artificial Sequence
  Description of Artificial Sequence: Synthetic oligonucleotide
  Antisense strand to SEQ ID NO: 632172
uuuagagguaacaggaccu

SEQ ID NO: 632174 - RNA, 19 nt, Artificial Sequence
  Description of Artificial Sequence: Synthetic oligonucleotide
  Sense strand starting at position 3559 of SEQ ID NO: 585340
aaugcucuuccugagaugu

SEQ ID NO: 632175 - RNA, 19 nt, Artificial Sequence
  Description of Artificial Sequence: Synthetic oligonucleotide
  Antisense strand to SEQ ID NO: 632174
acaucucaggaagagcauu

SEQ ID NO: 632176 - RNA, 19 nt, Artificial Sequence
  Description of Artificial Sequence: Synthetic oligonucleotide
  Sense strand starting at position 3777 of SEQ ID NO: 585340
ccacgaggucagggauguu

SEQ ID NO: 632177 - RNA, 19 nt, Artificial Sequence
  Description of Artificial Sequence: Synthetic oligonucleotide
  Antisense strand to SEQ ID NO: 632176
aacaucccugaccucgugg

SEQ ID NO: 632178 - RNA, 19 nt, Artificial Sequence
  Description of Artificial Sequence: Synthetic oligonucleotide
  Sense strand starting at position 3858 of SEQ ID NO: 585340
uuaucacaugucuagugaa

SEQ ID NO: 632179 - RNA, 19 nt, Artificial Sequence
  Description of Artificial Sequence: Synthetic oligonucleotide
  Antisense strand to SEQ ID NO: 632178
uucacuagacaugugauaa

SEQ ID NO: 632180 - RNA, 19 nt, Artificial Sequence
  Description of Artificial Sequence: Synthetic oligonucleotide
  Sense strand starting at position 242 of SEQ ID NO: 585341
gcaauauauggguguaaca

SEQ ID NO: 632181 - RNA, 19 nt, Artificial Sequence
  Description of Artificial Sequence: Synthetic oligonucleotide
  Antisense strand to SEQ ID NO: 632180
uguuacacccauauauugc

SEQ ID NO: 632182 - RNA, 19 nt, Artificial Sequence
  Description of Artificial Sequence: Synthetic oligonucleotide
  Sense strand starting at position 329 of SEQ ID NO: 585341
gcaauuacuggacauuguu

SEQ ID NO: 632183 - RNA, 19 nt, Artificial Sequence
  Description of Artificial Sequence: Synthetic oligonucleotide
  Antisense strand to SEQ ID NO: 632182
aacaauguccaguaauugc

SEQ ID NO: 632184 - RNA, 19 nt, Artificial Sequence
  Description of Artificial Sequence: Synthetic oligonucleotide
  Sense strand starting at position 337 of SEQ ID NO: 585341
uggacauuguuuccuagaa

SEQ ID NO: 632185 - RNA, 19 nt, Artificial Sequence
  Description of Artificial Sequence: Synthetic oligonucleotide
  Antisense strand to SEQ ID NO: 632184
uucuaggaaacaaugucca

SEQ ID NO: 632186 - RNA, 19 nt, Artificial Sequence
  Description of Artificial Sequence: Synthetic oligonucleotide
  Sense strand starting at position 338 of SEQ ID NO: 585341
ggacauuguuuccuagaag

SEQ ID NO: 632187 - RNA, 19 nt, Artificial Sequence
  Description of Artificial Sequence: Synthetic oligonucleotide
  Antisense strand to SEQ ID NO: 632186
cuucuaggaaacaaugucc

SEQ ID NO: 632188 - RNA, 19 nt, Artificial Sequence
  Description of Artificial Sequence: Synthetic oligonucleotide
  Sense strand starting at position 538 of SEQ ID NO: 585341
gcugauaugcaauauauga

SEQ ID NO: 632189 - RNA, 19 nt, Artificial Sequence
  Description of Artificial Sequence: Synthetic oligonucleotide
  Antisense strand to SEQ ID NO: 632188
ucauauauugcauaucagc

SEQ ID NO: 632190 - RNA, 19 nt, Artificial Sequence
  Description of Artificial Sequence: Synthetic oligonucleotide
  Sense strand starting at position 611 of SEQ ID NO: 585341
gcugaauugcuugaucaag

SEQ ID NO: 632191 - RNA, 19 nt, Artificial Sequence
  Description of Artificial Sequence: Synthetic oligonucleotide
  Antisense strand to SEQ ID NO: 632190
cuugaucaagcaauucagc

SEQ ID NO: 632192 - RNA, 19 nt, Artificial Sequence
  Description of Artificial Sequence: Synthetic oligonucleotide
  Sense strand starting at position 620 of SEQ ID NO: 585341
cuugaucaagucuacgaaa

SEQ ID NO: 632193 - RNA, 19 nt, Artificial Sequence
  Description of Artificial Sequence: Synthetic oligonucleotide
  Antisense strand to SEQ ID NO: 632192
uuucguagacuugaucaag

SEQ ID NO: 632194 - RNA, 19 nt, Artificial Sequence
  Description of Artificial Sequence: Synthetic oligonucleotide
  Sense strand starting at position 622 of SEQ ID NO: 585341
ugaucaagucuacgaaaua

SEQ ID NO: 632195 - RNA, 19 nt, Artificial Sequence
  Description of Artificial Sequence: Synthetic oligonucleotide
  Antisense strand to SEQ ID NO: 632194
uauuucguagacuugauca

SEQ ID NO: 632196 - RNA, 19 nt, Artificial Sequence
  Description of Artificial Sequence: Synthetic oligonucleotide
  Sense strand starting at position 963 of SEQ ID NO: 585341
guuuaucaucaugaagcua

SEQ ID NO: 632197 - RNA, 19 nt, Artificial Sequence
  Description of Artificial Sequence: Synthetic oligonucleotide
  Antisense strand to SEQ ID NO: 632196
uagcuucaugaugauaaac

SEQ ID NO: 632198 - RNA, 19 nt, Artificial Sequence
  Description of Artificial Sequence: Synthetic oligonucleotide
  Sense strand starting at position 1044 of SEQ ID NO: 585341
uuaugauagguaggcuuau

SEQ ID NO: 632199 - RNA, 19 nt, Artificial Sequence
  Description of Artificial Sequence: Synthetic oligonucleotide
  Antisense strand to SEQ ID NO: 632198
auaagccuaccuaucauaa

SEQ ID NO: 632200 - RNA, 19 nt, Artificial Sequence
  Description of Artificial Sequence: Synthetic oligonucleotide
  Sense strand starting at position 1246 of SEQ ID NO: 585341
agugguugucaucaugaac

SEQ ID NO: 632201 - RNA, 19 nt, Artificial Sequence
  Description of Artificial Sequence: Synthetic oligonucleotide
  Antisense strand to SEQ ID NO: 632200
guucaugaugacaaccacu

SEQ ID NO: 632202 - RNA, 19 nt, Artificial Sequence
  Description of Artificial Sequence: Synthetic oligonucleotide
  Sense strand starting at position 1271 of SEQ ID NO: 585341
gaugaagaauguuugcuau

SEQ ID NO: 632203 - RNA, 19 nt, Artificial Sequence
  Description of Artificial Sequence: Synthetic oligonucleotide
  Antisense strand to SEQ ID NO: 632202
auagcaaacauucuucauc

SEQ ID NO: 632204 - RNA, 19 nt, Artificial Sequence
  Description of Artificial Sequence: Synthetic oligonucleotide
  Sense strand starting at position 1637 of SEQ ID NO: 585341
auacuagcccgugagauca

SEQ ID NO: 632205 - RNA, 19 nt, Artificial Sequence
  Description of Artificial Sequence: Synthetic oligonucleotide
  Antisense strand to SEQ ID NO: 632204
ugaucucacgggcuaguau

SEQ ID NO: 632206 - RNA, 19 nt, Artificial Sequence
  Description of Artificial Sequence: Synthetic oligonucleotide
  Sense strand starting at position 1921 of SEQ ID NO: 585341
aggauaaccuucuugguuu

SEQ ID NO: 632207 - RNA, 19 nt, Artificial Sequence
  Description of Artificial Sequence: Synthetic oligonucleotide
  Antisense strand to SEQ ID NO: 632206
aaaccaagaagguuauccu

SEQ ID NO: 632208 - RNA, 19 nt, Artificial Sequence
  Description of Artificial Sequence: Synthetic oligonucleotide
  Sense strand starting at position 1939 of SEQ ID NO: 585341
uaccuuuaugaggguguua

SEQ ID NO: 632209 - RNA, 19 nt, Artificial Sequence
  Description of Artificial Sequence: Synthetic oligonucleotide
  Antisense strand to SEQ ID NO: 632208
uaacacccucauaaaggua

SEQ ID NO: 632210 - RNA, 19 nt, Artificial Sequence
  Description of Artificial Sequence: Synthetic oligonucleotide
  Sense strand starting at position 1941 of SEQ ID NO: 585341
ccuuuaugaggguguuaau

SEQ ID NO: 632211 - RNA, 19 nt, Artificial Sequence
  Description of Artificial Sequence: Synthetic oligonucleotide
  Antisense strand to SEQ ID NO: 632210
auuaacacccucauaaagg

SEQ ID NO: 632212 - RNA, 19 nt, Artificial Sequence
  Description of Artificial Sequence: Synthetic oligonucleotide
  Sense strand starting at position 1952 of SEQ ID NO: 585341
guguuaauuuaugaagaac

SEQ ID NO: 632213 - RNA, 19 nt, Artificial Sequence
  Description of Artificial Sequence: Synthetic oligonucleotide
  Antisense strand to SEQ ID NO: 632212
guucuucauaaauuaacac

SEQ ID NO: 632214 - RNA, 19 nt, Artificial Sequence
  Description of Artificial Sequence: Synthetic oligonucleotide
  Sense strand starting at position 2201 of SEQ ID NO: 585341
agagaauaaggcugacagu

SEQ ID NO: 632215 - RNA, 19 nt, Artificial Sequence
  Description of Artificial Sequence: Synthetic oligonucleotide
  Antisense strand to SEQ ID NO: 632214
acugucagccuuauucucu

SEQ ID NO: 632216 - RNA, 19 nt, Artificial Sequence
  Description of Artificial Sequence: Synthetic oligonucleotide
  Sense strand starting at position 2214 of SEQ ID NO: 585341
gacaguuagggucagaugu

SEQ ID NO: 632217 - RNA, 19 nt, Artificial Sequence
  Description of Artificial Sequence: Synthetic oligonucleotide
  Antisense strand to SEQ ID NO: 632216
acaucugacccuaacuguc

SEQ ID NO: 632218 - RNA, 19 nt, Artificial Sequence
  Description of Artificial Sequence: Synthetic oligonucleotide
  Sense strand starting at position 2289 of SEQ ID NO: 585341
gaaaguauaugguuaucca

SEQ ID NO: 632219 - RNA, 19 nt, Artificial Sequence
  Description of Artificial Sequence: Synthetic oligonucleotide
  Antisense strand to SEQ ID NO: 632218
uggauaaccauauacuuuc

SEQ ID NO: 632220 - RNA, 19 nt, Artificial Sequence
  Description of Artificial Sequence: Synthetic oligonucleotide
  Sense strand starting at position 2292 of SEQ ID NO: 585341
aguauaugguuauccaaua

SEQ ID NO: 632221 - RNA, 19 nt, Artificial Sequence
  Description of Artificial Sequence: Synthetic oligonucleotide
  Antisense strand to SEQ ID NO: 632220
uauuggauaaccauauacu

SEQ ID NO: 632222 - RNA, 19 nt, Artificial Sequence
  Description of Artificial Sequence: Synthetic oligonucleotide
  Sense strand starting at position 2293 of SEQ ID NO: 585341
guauaugguuauccaauau

SEQ ID NO: 632223 - RNA, 19 nt, Artificial Sequence
  Description of Artificial Sequence: Synthetic oligonucleotide
  Antisense strand to SEQ ID NO: 632222
auauuggauaaccauauac

SEQ ID NO: 632224 - RNA, 19 nt, Artificial Sequence
  Description of Artificial Sequence: Synthetic oligonucleotide
  Sense strand starting at position 2297 of SEQ ID NO: 585341
augguuauccaauauguau

SEQ ID NO: 632225 - RNA, 19 nt, Artificial Sequence
  Description of Artificial Sequence: Synthetic oligonucleotide
  Antisense strand to SEQ ID NO: 632224
auacauauuggauaaccau

SEQ ID NO: 632226 - RNA, 19 nt, Artificial Sequence
  Description of Artificial Sequence: Synthetic oligonucleotide
  Sense strand starting at position 2310 of SEQ ID NO: 585341
auguauuagucuccacaga

SEQ ID NO: 632227 - RNA, 19 nt, Artificial Sequence
  Description of Artificial Sequence: Synthetic oligonucleotide
  Antisense strand to SEQ ID NO: 632226
ucuguggagacuaauacau

SEQ ID NO: 632228 - RNA, 19 nt, Artificial Sequence
  Description of Artificial Sequence: Synthetic oligonucleotide
  Sense strand starting at position 2311 of SEQ ID NO: 585341
uguauuagucuccacagau

SEQ ID NO: 632229 - RNA, 19 nt, Artificial Sequence
  Description of Artificial Sequence: Synthetic oligonucleotide
  Antisense strand to SEQ ID NO: 632228
aucuguggagacuaauaca

SEQ ID NO: 632230 - RNA, 19 nt, Artificial Sequence
  Description of Artificial Sequence: Synthetic oligonucleotide
  Sense strand starting at position 2475 of SEQ ID NO: 585341
uucuacaaaguuuguaaga

SEQ ID NO: 632231 - RNA, 19 nt, Artificial Sequence
  Description of Artificial Sequence: Synthetic oligonucleotide
  Antisense strand to SEQ ID NO: 632230
ucuuacaaacuuuguagaa

SEQ ID NO: 632232 - RNA, 19 nt, Artificial Sequence
  Description of Artificial Sequence: Synthetic oligonucleotide
  Sense strand starting at position 2476 of SEQ ID NO: 585341
ucuacaaaguuuguaagaa

SEQ ID NO: 632233 - RNA, 19 nt, Artificial Sequence
  Description of Artificial Sequence: Synthetic oligonucleotide
  Antisense strand to SEQ ID NO: 632232
uucuuacaaacuuuguaga

SEQ ID NO: 632234 - RNA, 19 nt, Artificial Sequence
  Description of Artificial Sequence: Synthetic oligonucleotide
  Sense strand starting at position 2567 of SEQ ID NO: 585341
cuaguagucucauuugcac

SEQ ID NO: 632235 - RNA, 19 nt, Artificial Sequence
  Description of Artificial Sequence: Synthetic oligonucleotide
  Antisense strand to SEQ ID NO: 632234
gugcaaaugagacuacuag

SEQ ID NO: 632236 - RNA, 19 nt, Artificial Sequence
  Description of Artificial Sequence: Synthetic oligonucleotide
  Sense strand starting at position 2782 of SEQ ID NO: 585341
cuacauauugcugagucau

SEQ ID NO: 632237 - RNA, 19 nt, Artificial Sequence
  Description of Artificial Sequence: Synthetic oligonucleotide
  Antisense strand to SEQ ID NO: 632236
augacucagcaauauguag

SEQ ID NO: 632238 - RNA, 19 nt, Artificial Sequence
  Description of Artificial Sequence: Synthetic oligonucleotide
  Sense strand starting at position 2784 of SEQ ID NO: 585341
acauauugcugagucauga

SEQ ID NO: 632239 - RNA, 19 nt, Artificial Sequence
  Description of Artificial Sequence: Synthetic oligonucleotide
  Antisense strand to SEQ ID NO: 632238
ucaugacucagcaauaugu

SEQ ID NO: 632240 - RNA, 19 nt, Artificial Sequence
  Description of Artificial Sequence: Synthetic oligonucleotide
  Sense strand starting at position 2836 of SEQ ID NO: 585341
uuguguuguggauagacau

SEQ ID NO: 632241 - RNA, 19 nt, Artificial Sequence
  Description of Artificial Sequence: Synthetic oligonucleotide
  Antisense strand to SEQ ID NO: 632240
augucuauccacaacacaa

SEQ ID NO: 632242 - RNA, 19 nt, Artificial Sequence
  Description of Artificial Sequence: Synthetic oligonucleotide
  Sense strand starting at position 2843 of SEQ ID NO: 585341
guggauagacauuguucuu

SEQ ID NO: 632243 - RNA, 19 nt, Artificial Sequence
  Description of Artificial Sequence: Synthetic oligonucleotide
  Antisense strand to SEQ ID NO: 632242
aagaacaaugucuauccac

SEQ ID NO: 632244 - RNA, 19 nt, Artificial Sequence
  Description of Artificial Sequence: Synthetic oligonucleotide
  Sense strand starting at position 2846 of SEQ ID NO: 585341
gauagacauuguucuuaga

SEQ ID NO: 632245 - RNA, 19 nt, Artificial Sequence
  Description of Artificial Sequence: Synthetic oligonucleotide
  Antisense strand to SEQ ID NO: 632244
ucuaagaacaaugucuauc

SEQ ID NO: 632246 - RNA, 19 nt, Artificial Sequence
  Description of Artificial Sequence: Synthetic oligonucleotide
  Sense strand starting at position 2868 of SEQ ID NO: 585341
guccauagauuauccauag

SEQ ID NO: 632247 - RNA, 19 nt, Artificial Sequence
  Description of Artificial Sequence: Synthetic oligonucleotide
  Antisense strand to SEQ ID NO: 632246
cuauggauaaucuauggac

SEQ ID NO: 632248 - RNA, 19 nt, Artificial Sequence
  Description of Artificial Sequence: Synthetic oligonucleotide
  Sense strand starting at position 3670 of SEQ ID NO: 585341
gagcaacugcucuaguaca

SEQ ID NO: 632249 - RNA, 19 nt, Artificial Sequence
  Description of Artificial Sequence: Synthetic oligonucleotide
  Antisense strand to SEQ ID NO: 632248
uguacuagagcaguugcuc

SEQ ID NO: 632250 - RNA, 19 nt, Artificial Sequence
  Description of Artificial Sequence: Synthetic oligonucleotide
  Sense strand starting at position 3678 of SEQ ID NO: 585341
gcucuaguacauuacugaa

SEQ ID NO: 632251 - RNA, 19 nt, Artificial Sequence
  Description of Artificial Sequence: Synthetic oligonucleotide
  Antisense strand to SEQ ID NO: 632250
uucaguaauguacuagagc

SEQ ID NO: 632252 - RNA, 19 nt, Artificial Sequence
  Description of Artificial Sequence: Synthetic oligonucleotide
  Sense strand starting at position 3751 of SEQ ID NO: 585341
cccucauacuuguuugaua

SEQ ID NO: 632253 - RNA, 19 nt, Artificial Sequence
  Description of Artificial Sequence: Synthetic oligonucleotide
  Antisense strand to SEQ ID NO: 632252
uaucaaacaaguaugaggg

SEQ ID NO: 632254 - RNA, 19 nt, Artificial Sequence
  Description of Artificial Sequence: Synthetic oligonucleotide
  Sense strand starting at position 3752 of SEQ ID NO: 585341
ccucauacuuguuugauag

SEQ ID NO: 632255 - RNA, 19 nt, Artificial Sequence
  Description of Artificial Sequence: Synthetic oligonucleotide
  Antisense strand to SEQ ID NO: 632254
cuaucaaacaaguaugagg

SEQ ID NO: 632256 - RNA, 19 nt, Artificial Sequence
  Description of Artificial Sequence: Synthetic oligonucleotide
  Sense strand starting at position 3764 of SEQ ID NO: 585341
uugauaguuuggcuggaua

SEQ ID NO: 632257 - RNA, 19 nt, Artificial Sequence
  Description of Artificial Sequence: Synthetic oligonucleotide
  Antisense strand to SEQ ID NO: 632256
uauccagccaaacuaucaa

SEQ ID NO: 632258 - RNA, 19 nt, Artificial Sequence
  Description of Artificial Sequence: Synthetic oligonucleotide
  Sense strand starting at position 3929 of SEQ ID NO: 585341
guauucagagguggucaaa

SEQ ID NO: 632259 - RNA, 19 nt, Artificial Sequence
  Description of Artificial Sequence: Synthetic oligonucleotide
  Antisense strand to SEQ ID NO: 632258
uuugaccaccucugaauac

SEQ ID NO: 632260 - RNA, 19 nt, Artificial Sequence
  Description of Artificial Sequence: Synthetic oligonucleotide
  Sense strand starting at position 151 of SEQ ID NO: 585342
ugcuuucuucccugaagga

SEQ ID NO: 632261 - RNA, 19 nt, Artificial Sequence
  Description of Artificial Sequence: Synthetic oligonucleotide
  Antisense strand to SEQ ID NO: 632260
uccuucagggaagaaagca

SEQ ID NO: 632262 - RNA, 19 nt, Artificial Sequence
  Description of Artificial Sequence: Synthetic oligonucleotide
  Sense strand starting at position 152 of SEQ ID NO: 585342
gcuuucuucccugaaggac

SEQ ID NO: 632263 - RNA, 19 nt, Artificial Sequence
  Description of Artificial Sequence: Synthetic oligonucleotide
  Antisense strand to SEQ ID NO: 632262
guccuucagggaagaaagc

SEQ ID NO: 632264 - RNA, 19 nt, Artificial Sequence
  Description of Artificial Sequence: Synthetic oligonucleotide
  Sense strand starting at position 232 of SEQ ID NO: 585342
ccggguuucugccugggaa

SEQ ID NO: 632265 - RNA, 19 nt, Artificial Sequence
  Description of Artificial Sequence: Synthetic oligonucleotide
  Antisense strand to SEQ ID NO: 632264
uucccaggcagaaacccgg

SEQ ID NO: 632266 - RNA, 19 nt, Artificial Sequence
  Description of Artificial Sequence: Synthetic oligonucleotide
  Sense strand starting at position 233 of SEQ ID NO: 585342
cggguuucugccugggaag

SEQ ID NO: 632267 - RNA, 19 nt, Artificial Sequence
  Description of Artificial Sequence: Synthetic oligonucleotide
  Antisense strand to SEQ ID NO: 632266
cuucccaggcagaaacccg

SEQ ID NO: 632268 - RNA, 19 nt, Artificial Sequence
  Description of Artificial Sequence: Synthetic oligonucleotide
  Sense strand starting at position 235 of SEQ ID NO: 585342
gguuucugccugggaagga

SEQ ID NO: 632269 - RNA, 19 nt, Artificial Sequence
  Description of Artificial Sequence: Synthetic oligonucleotide
  Antisense strand to SEQ ID NO: 632268
uccuucccaggcagaaacc

SEQ ID NO: 632270 - RNA, 19 nt, Artificial Sequence
  Description of Artificial Sequence: Synthetic oligonucleotide
  Sense strand starting at position 482 of SEQ ID NO: 585342
uguacugagagcugucuga

SEQ ID NO: 632271 - RNA, 19 nt, Artificial Sequence
  Description of Artificial Sequence: Synthetic oligonucleotide
  Antisense strand to SEQ ID NO: 632270
ucagacagcucucaguaca

SEQ ID NO: 632272 - RNA, 19 nt, Artificial Sequence
  Description of Artificial Sequence: Synthetic oligonucleotide
  Sense strand starting at position 599 of SEQ ID NO: 585342
ggcagaggcucuuucuaau

SEQ ID NO: 632273 - RNA, 19 nt, Artificial Sequence
  Description of Artificial Sequence: Synthetic oligonucleotide
  Antisense strand to SEQ ID NO: 632272
auuagaaagagccucugcc

SEQ ID NO: 632274 - RNA, 19 nt, Artificial Sequence
  Description of Artificial Sequence: Synthetic oligonucleotide
  Sense strand starting at position 605 of SEQ ID NO: 585342
ggcucuuucuaauugaaag

SEQ ID NO: 632275 - RNA, 19 nt, Artificial Sequence
  Description of Artificial Sequence: Synthetic oligonucleotide
  Antisense strand to SEQ ID NO: 632274
cuuucaauuagaaagagcc

SEQ ID NO: 632276 - RNA, 19 nt, Artificial Sequence
  Description of Artificial Sequence: Synthetic oligonucleotide
  Sense strand starting at position 743 of SEQ ID NO: 585342
gguaguuguucauuuguua

SEQ ID NO: 632277 - RNA, 19 nt, Artificial Sequence
  Description of Artificial Sequence: Synthetic oligonucleotide
  Antisense strand to SEQ ID NO: 632276
uaacaaaugaacaacuacc

SEQ ID NO: 632278 - RNA, 19 nt, Artificial Sequence
  Description of Artificial Sequence: Synthetic oligonucleotide
  Sense strand starting at position 752 of SEQ ID NO: 585342
ucauuuguuaguggacagu

SEQ ID NO: 632279 - RNA, 19 nt, Artificial Sequence
  Description of Artificial Sequence: Synthetic oligonucleotide
  Antisense strand to SEQ ID NO: 632278
acuguccacuaacaaauga

SEQ ID NO: 632280 - RNA, 19 nt, Artificial Sequence
  Description of Artificial Sequence: Synthetic oligonucleotide
  Sense strand starting at position 813 of SEQ ID NO: 585342
gcgugcugugaugucagaa

SEQ ID NO: 632281 - RNA, 19 nt, Artificial Sequence
  Description of Artificial Sequence: Synthetic oligonucleotide
  Antisense strand to SEQ ID NO: 632280
uucugacaucacagcacgc

SEQ ID NO: 632282 - RNA, 19 nt, Artificial Sequence
  Description of Artificial Sequence: Synthetic oligonucleotide
  Sense strand starting at position 825 of SEQ ID NO: 585342
gucagaacacucuagcugu

SEQ ID NO: 632283 - RNA, 19 nt, Artificial Sequence
  Description of Artificial Sequence: Synthetic oligonucleotide
  Antisense strand to SEQ ID NO: 632282
acagcuagaguguucugac

SEQ ID NO: 632284 - RNA, 19 nt, Artificial Sequence
  Description of Artificial Sequence: Synthetic oligonucleotide
  Sense strand starting at position 904 of SEQ ID NO: 585342
uguacaagugugcaugaga

SEQ ID NO: 632285 - RNA, 19 nt, Artificial Sequence
  Description of Artificial Sequence: Synthetic oligonucleotide
  Antisense strand to SEQ ID NO: 632284
ucucaugcacacuuguaca

SEQ ID NO: 632286 - RNA, 19 nt, Artificial Sequence
  Description of Artificial Sequence: Synthetic oligonucleotide
  Sense strand starting at position 907 of SEQ ID NO: 585342
acaagugugcaugagauca

SEQ ID NO: 632287 - RNA, 19 nt, Artificial Sequence
  Description of Artificial Sequence: Synthetic oligonucleotide
  Antisense strand to SEQ ID NO: 632286
ugaucucaugcacacuugu

SEQ ID NO: 632288 - RNA, 19 nt, Artificial Sequence
  Description of Artificial Sequence: Synthetic oligonucleotide
  Sense strand starting at position 929 of SEQ ID NO: 585342
ccucuauuuguaugcuuga

SEQ ID NO: 632289 - RNA, 19 nt, Artificial Sequence
  Description of Artificial Sequence: Synthetic oligonucleotide
  Antisense strand to SEQ ID NO: 632288
ucaagcauacaaauagagg

SEQ ID NO: 632290 - RNA, 19 nt, Artificial Sequence
  Description of Artificial Sequence: Synthetic oligonucleotide
  Sense strand starting at position 930 of SEQ ID NO: 585342
cucuauuuguaugcuugaa

SEQ ID NO: 632291 - RNA, 19 nt, Artificial Sequence
  Description of Artificial Sequence: Synthetic oligonucleotide
  Antisense strand to SEQ ID NO: 632290
uucaagcauacaaauagag

SEQ ID NO: 632292 - RNA, 19 nt, Artificial Sequence
  Description of Artificial Sequence: Synthetic oligonucleotide
  Sense strand starting at position 932 of SEQ ID NO: 585342
cuauuuguaugcuugaagu

SEQ ID NO: 632293 - RNA, 19 nt, Artificial Sequence
  Description of Artificial Sequence: Synthetic oligonucleotide
  Antisense strand to SEQ ID NO: 632292
acuucaagcauacaaauag

SEQ ID NO: 632294 - RNA, 19 nt, Artificial Sequence
  Description of Artificial Sequence: Synthetic oligonucleotide
  Sense strand starting at position 1163 of SEQ ID NO: 585342
caccguuugguggagacau

SEQ ID NO: 632295 - RNA, 19 nt, Artificial Sequence
  Description of Artificial Sequence: Synthetic oligonucleotide
  Antisense strand to SEQ ID NO: 632294
augucuccaccaaacggug

SEQ ID NO: 632296 - RNA, 19 nt, Artificial Sequence
  Description of Artificial Sequence: Synthetic oligonucleotide
  Sense strand starting at position 1771 of SEQ ID NO: 585342
accagagcuuccuccgaga

SEQ ID NO: 632297 - RNA, 19 nt, Artificial Sequence
  Description of Artificial Sequence: Synthetic oligonucleotide
  Antisense strand to SEQ ID NO: 632296
ucucggaggaagcucuggu

SEQ ID NO: 632298 - RNA, 19 nt, Artificial Sequence
  Description of Artificial Sequence: Synthetic oligonucleotide
  Sense strand starting at position 1773 of SEQ ID NO: 585342
cagagcuuccuccgagauc

SEQ ID NO: 632299 - RNA, 19 nt, Artificial Sequence
  Description of Artificial Sequence: Synthetic oligonucleotide
  Antisense strand to SEQ ID NO: 632298
gaucucggaggaagcucug

SEQ ID NO: 632300 - RNA, 19 nt, Artificial Sequence
  Description of Artificial Sequence: Synthetic oligonucleotide
  Sense strand starting at position 1817 of SEQ ID NO: 585342
ccaggaaucuugucucuca

SEQ ID NO: 632301 - RNA, 19 nt, Artificial Sequence
  Description of Artificial Sequence: Synthetic oligonucleotide
  Antisense strand to SEQ ID NO: 632300
ugagagacaagauuccugg

SEQ ID NO: 632302 - RNA, 19 nt, Artificial Sequence
  Description of Artificial Sequence: Synthetic oligonucleotide
  Sense strand starting at position 2101 of SEQ ID NO: 585342
ggaggacuggucugaggca

SEQ ID NO: 632303 - RNA, 19 nt, Artificial Sequence
  Description of Artificial Sequence: Synthetic oligonucleotide
  Antisense strand to SEQ ID NO: 632302
ugccucagaccaguccucc

SEQ ID NO: 632304 - RNA, 19 nt, Artificial Sequence
  Description of Artificial Sequence: Synthetic oligonucleotide
  Sense strand starting at position 2354 of SEQ ID NO: 585342
gacguuccaucagucaaca

SEQ ID NO: 632305 - RNA, 19 nt, Artificial Sequence
  Description of Artificial Sequence: Synthetic oligonucleotide
  Antisense strand to SEQ ID NO: 632304
uguugacugauggaacguc

SEQ ID NO: 632306 - RNA, 19 nt, Artificial Sequence
  Description of Artificial Sequence: Synthetic oligonucleotide
  Sense strand starting at position 2499 of SEQ ID NO: 585342
caggauaagugucugguga

SEQ ID NO: 632307 - RNA, 19 nt, Artificial Sequence
  Description of Artificial Sequence: Synthetic oligonucleotide
  Antisense strand to SEQ ID NO: 632306
ucaccagacacuuauccug

SEQ ID NO: 632308 - RNA, 19 nt, Artificial Sequence
  Description of Artificial Sequence: Synthetic oligonucleotide
  Sense strand starting at position 2500 of SEQ ID NO: 585342
aggauaagugucuggugag

SEQ ID NO: 632309 - RNA, 19 nt, Artificial Sequence
  Description of Artificial Sequence: Synthetic oligonucleotide
  Antisense strand to SEQ ID NO: 632308
cucaccagacacuuauccu

SEQ ID NO: 632310 - RNA, 19 nt, Artificial Sequence
  Description of Artificial Sequence: Synthetic oligonucleotide
  Sense strand starting at position 2790 of SEQ ID NO: 585342
gaggaacugaggugcuuua

SEQ ID NO: 632311 - RNA, 19 nt, Artificial Sequence
  Description of Artificial Sequence: Synthetic oligonucleotide
  Antisense strand to SEQ ID NO: 632310
uaaagcaccucaguuccuc

SEQ ID NO: 632312 - RNA, 19 nt, Artificial Sequence
  Description of Artificial Sequence: Synthetic oligonucleotide
  Sense strand starting at position 2802 of SEQ ID NO: 585342
ugcuuuaugccaggaagag

SEQ ID NO: 632313 - RNA, 19 nt, Artificial Sequence
  Description of Artificial Sequence: Synthetic oligonucleotide
  Antisense strand to SEQ ID NO: 632312
cucuuccuggcauaaagca

SEQ ID NO: 632314 - RNA, 19 nt, Artificial Sequence
  Description of Artificial Sequence: Synthetic oligonucleotide
  Sense strand starting at position 2803 of SEQ ID NO: 585342
gcuuuaugccaggaagagu

SEQ ID NO: 632315 - RNA, 19 nt, Artificial Sequence
  Description of Artificial Sequence: Synthetic oligonucleotide
  Antisense strand to SEQ ID NO: 632314
acucuuccuggcauaaagc

SEQ ID NO: 632316 - RNA, 19 nt, Artificial Sequence
  Description of Artificial Sequence: Synthetic oligonucleotide
  Sense strand starting at position 2822 of SEQ ID NO: 585342
cggcucaggcuuguguuua

SEQ ID NO: 632317 - RNA, 19 nt, Artificial Sequence
  Description of Artificial Sequence: Synthetic oligonucleotide
  Antisense strand to SEQ ID NO: 632316
uaaacacaagccugagccg

SEQ ID NO: 632318 - RNA, 19 nt, Artificial Sequence
  Description of Artificial Sequence: Synthetic oligonucleotide
  Sense strand starting at position 2866 of SEQ ID NO: 585342
ugcuguccucugggagagu

SEQ ID NO: 632319 - RNA, 19 nt, Artificial Sequence
  Description of Artificial Sequence: Synthetic oligonucleotide
  Antisense strand to SEQ ID NO: 632318
acucucccagaggacagca

SEQ ID NO: 632320 - RNA, 19 nt, Artificial Sequence
  Description of Artificial Sequence: Synthetic oligonucleotide
  Sense strand starting at position 2925 of SEQ ID NO: 585342
cggcgaguuccugagaugu

SEQ ID NO: 632321 - RNA, 19 nt, Artificial Sequence
  Description of Artificial Sequence: Synthetic oligonucleotide
  Antisense strand to SEQ ID NO: 632320
acaucucaggaacucgccg

SEQ ID NO: 632322 - RNA, 19 nt, Artificial Sequence
  Description of Artificial Sequence: Synthetic oligonucleotide
  Sense strand starting at position 3146 of SEQ ID NO: 585342
cuccucucuggccagagau

SEQ ID NO: 632323 - RNA, 19 nt, Artificial Sequence
  Description of Artificial Sequence: Synthetic oligonucleotide
  Antisense strand to SEQ ID NO: 632322
aucucuggccagagaggag

SEQ ID NO: 632324 - RNA, 19 nt, Artificial Sequence
  Description of Artificial Sequence: Synthetic oligonucleotide
  Sense strand starting at position 3271 of SEQ ID NO: 585342
ugguguaguacuuacucca

SEQ ID NO: 632325 - RNA, 19 nt, Artificial Sequence
  Description of Artificial Sequence: Synthetic oligonucleotide
  Antisense strand to SEQ ID NO: 632324
uggaguaaguacuacacca

SEQ ID NO: 632326 - RNA, 19 nt, Artificial Sequence
  Description of Artificial Sequence: Synthetic oligonucleotide
  Sense strand starting at position 3292 of SEQ ID NO: 585342
uccacauguccauggagaa

SEQ ID NO: 632327 - RNA, 19 nt, Artificial Sequence
  Description of Artificial Sequence: Synthetic oligonucleotide
  Antisense strand to SEQ ID NO: 632326
uucuccauggacaugugga

SEQ ID NO: 632328 - RNA, 19 nt, Artificial Sequence
  Description of Artificial Sequence: Synthetic oligonucleotide
  Sense strand starting at position 3293 of SEQ ID NO: 585342
ccacauguccauggagaac

SEQ ID NO: 632329 - RNA, 19 nt, Artificial Sequence
  Description of Artificial Sequence: Synthetic oligonucleotide
  Antisense strand to SEQ ID NO: 632328
guucuccauggacaugugg

SEQ ID NO: 632330 - RNA, 19 nt, Artificial Sequence
  Description of Artificial Sequence: Synthetic oligonucleotide
  Sense strand starting at position 3473 of SEQ ID NO: 585342
auguguuagcggcaagaga

SEQ ID NO: 632331 - RNA, 19 nt, Artificial Sequence
  Description of Artificial Sequence: Synthetic oligonucleotide
  Antisense strand to SEQ ID NO: 632330
ucucuugccgcuaacacau

SEQ ID NO: 632332 - RNA, 19 nt, Artificial Sequence
  Description of Artificial Sequence: Synthetic oligonucleotide
  Sense strand starting at position 3592 of SEQ ID NO: 585342
ugugguaagccauaauuga

SEQ ID NO: 632333 - RNA, 19 nt, Artificial Sequence
  Description of Artificial Sequence: Synthetic oligonucleotide
  Antisense strand to SEQ ID NO: 632332
ucaauuauggcuuaccaca

SEQ ID NO: 632334 - RNA, 19 nt, Artificial Sequence
  Description of Artificial Sequence: Synthetic oligonucleotide
  Sense strand starting at position 3600 of SEQ ID NO: 585342
gccauaauugaucaugcca

SEQ ID NO: 632335 - RNA, 19 nt, Artificial Sequence
  Description of Artificial Sequence: Synthetic oligonucleotide
  Antisense strand to SEQ ID NO: 632334
uggcaugaucaauuauggc

SEQ ID NO: 632336 - RNA, 19 nt, Artificial Sequence
  Description of Artificial Sequence: Synthetic oligonucleotide
  Sense strand starting at position 3848 of SEQ ID NO: 585342
ccugaagccugguuuaaag

SEQ ID NO: 632337 - RNA, 19 nt, Artificial Sequence
  Description of Artificial Sequence: Synthetic oligonucleotide
  Antisense strand to SEQ ID NO: 632336
cuuuaaaccaggcuucagg

SEQ ID NO: 632338 - RNA, 19 nt, Artificial Sequence
  Description of Artificial Sequence: Synthetic oligonucleotide
  Sense strand starting at position 3919 of SEQ ID NO: 585342
gugacugacugaucacauu

SEQ ID NO: 632339 - RNA, 19 nt, Artificial Sequence
  Description of Artificial Sequence: Synthetic oligonucleotide
  Antisense strand to SEQ ID NO: 632338
aaugugaucagucagucac

SEQ ID NO: 632340 - RNA, 19 nt, Artificial Sequence
  Description of Artificial Sequence: Synthetic oligonucleotide
  Sense strand starting at position 28 of SEQ ID NO: 585343
ggaugcugggcugaauacu

SEQ ID NO: 632341 - RNA, 19 nt, Artificial Sequence
  Description of Artificial Sequence: Synthetic oligonucleotide
  Antisense strand to SEQ ID NO: 632340
aguauucagcccagcaucc

SEQ ID NO: 632342 - RNA, 19 nt, Artificial Sequence
  Description of Artificial Sequence: Synthetic oligonucleotide
  Sense strand starting at position 248 of SEQ ID NO: 585343
aagggauccuuggccaauc

SEQ ID NO: 632343 - RNA, 19 nt, Artificial Sequence
  Description of Artificial Sequence: Synthetic oligonucleotide
  Antisense strand to SEQ ID NO: 632342
gauuggccaaggaucccuu

SEQ ID NO: 632344 - RNA, 19 nt, Artificial Sequence
  Description of Artificial Sequence: Synthetic oligonucleotide
  Sense strand starting at position 249 of SEQ ID NO: 585343
agggauccuuggccaauca

SEQ ID NO: 632345 - RNA, 19 nt, Artificial Sequence
  Description of Artificial Sequence: Synthetic oligonucleotide
  Antisense strand to SEQ ID NO: 632344
ugauuggccaaggaucccu

SEQ ID NO: 632346 - RNA, 19 nt, Artificial Sequence
  Description of Artificial Sequence: Synthetic oligonucleotide
  Sense strand starting at position 260 of SEQ ID NO: 585343
gccaaucaacugggaaaua

SEQ ID NO: 632347 - RNA, 19 nt, Artificial Sequence
  Description of Artificial Sequence: Synthetic oligonucleotide
  Antisense strand to SEQ ID NO: 632346
uauuucccaguugauuggc

SEQ ID NO: 632348 - RNA, 19 nt, Artificial Sequence
  Description of Artificial Sequence: Synthetic oligonucleotide
  Sense strand starting at position 608 of SEQ ID NO: 585343
ccucaaguguguccuuuga

SEQ ID NO: 632349 - RNA, 19 nt, Artificial Sequence
  Description of Artificial Sequence: Synthetic oligonucleotide
  Antisense strand to SEQ ID NO: 632348
ucaaaggacacacuugagg

SEQ ID NO: 632350 - RNA, 19 nt, Artificial Sequence
  Description of Artificial Sequence: Synthetic oligonucleotide
  Sense strand starting at position 610 of SEQ ID NO: 585343
ucaaguguguccuuugacu

SEQ ID NO: 632351 - RNA, 19 nt, Artificial Sequence
  Description of Artificial Sequence: Synthetic oligonucleotide
  Antisense strand to SEQ ID NO: 632350
agucaaaggacacacuuga

SEQ ID NO: 632352 - RNA, 19 nt, Artificial Sequence
  Description of Artificial Sequence: Synthetic oligonucleotide
  Sense strand starting at position 691 of SEQ ID NO: 585343
ugaagucaaugguuccuau

SEQ ID NO: 632353 - RNA, 19 nt, Artificial Sequence
  Description of Artificial Sequence: Synthetic oligonucleotide
  Antisense strand to SEQ ID NO: 632352
auaggaaccauugacuuca

SEQ ID NO: 632354 - RNA, 19 nt, Artificial Sequence
  Description of Artificial Sequence: Synthetic oligonucleotide
  Sense strand starting at position 694 of SEQ ID NO: 585343
agucaaugguuccuauucu

SEQ ID NO: 632355 - RNA, 19 nt, Artificial Sequence
  Description of Artificial Sequence: Synthetic oligonucleotide
  Antisense strand to SEQ ID NO: 632354
agaauaggaaccauugacu

SEQ ID NO: 632356 - RNA, 19 nt, Artificial Sequence
  Description of Artificial Sequence: Synthetic oligonucleotide
  Sense strand starting at position 761 of SEQ ID NO: 585343
ugaagcauucgauguuauu

SEQ ID NO: 632357 - RNA, 19 nt, Artificial Sequence
  Description of Artificial Sequence: Synthetic oligonucleotide
  Antisense strand to SEQ ID NO: 632356
aauaacaucgaaugcuuca

SEQ ID NO: 632358 - RNA, 19 nt, Artificial Sequence
  Description of Artificial Sequence: Synthetic oligonucleotide
  Sense strand starting at position 770 of SEQ ID NO: 585343
cgauguuauugcuuugaaa

SEQ ID NO: 632359 - RNA, 19 nt, Artificial Sequence
  Description of Artificial Sequence: Synthetic oligonucleotide
  Antisense strand to SEQ ID NO: 632358
uuucaaagcaauaacaucg

SEQ ID NO: 632360 - RNA, 19 nt, Artificial Sequence
  Description of Artificial Sequence: Synthetic oligonucleotide
  Sense strand starting at position 772 of SEQ ID NO: 585343
auguuauugcuuugaaacc

SEQ ID NO: 632361 - RNA, 19 nt, Artificial Sequence
  Description of Artificial Sequence: Synthetic oligonucleotide
  Antisense strand to SEQ ID NO: 632360
gguuucaaagcaauaacau

SEQ ID NO: 632362 - RNA, 19 nt, Artificial Sequence
  Description of Artificial Sequence: Synthetic oligonucleotide
  Sense strand starting at position 829 of SEQ ID NO: 585343
aaguauucuguaugauuga

SEQ ID NO: 632363 - RNA, 19 nt, Artificial Sequence
  Description of Artificial Sequence: Synthetic oligonucleotide
  Antisense strand to SEQ ID NO: 632362
ucaaucauacagaauacuu

SEQ ID NO: 632364 - RNA, 19 nt, Artificial Sequence
  Description of Artificial Sequence: Synthetic oligonucleotide
  Sense strand starting at position 836 of SEQ ID NO: 585343
cuguaugauugauuaaugu

SEQ ID NO: 632365 - RNA, 19 nt, Artificial Sequence
  Description of Artificial Sequence: Synthetic oligonucleotide
  Antisense strand to SEQ ID NO: 632364
acauuaaucaaucauacag

SEQ ID NO: 632366 - RNA, 19 nt, Artificial Sequence
  Description of Artificial Sequence: Synthetic oligonucleotide
  Sense strand starting at position 845 of SEQ ID NO: 585343
ugauuaaugucauaugaag

SEQ ID NO: 632367 - RNA, 19 nt, Artificial Sequence
  Description of Artificial Sequence: Synthetic oligonucleotide
  Antisense strand to SEQ ID NO: 632366
cuucauaugacauuaauca

SEQ ID NO: 632368 - RNA, 19 nt, Artificial Sequence
  Description of Artificial Sequence: Synthetic oligonucleotide
  Sense strand starting at position 1182 of SEQ ID NO: 585343
aucagcugagaguaauauu

SEQ ID NO: 632369 - RNA, 19 nt, Artificial Sequence
  Description of Artificial Sequence: Synthetic oligonucleotide
  Antisense strand to SEQ ID NO: 632368
aauauuacucucagcugau

SEQ ID NO: 632370 - RNA, 19 nt, Artificial Sequence
  Description of Artificial Sequence: Synthetic oligonucleotide
  Sense strand starting at position 1238 of SEQ ID NO: 585343
ggcacaauggcuuacacuu

SEQ ID NO: 632371 - RNA, 19 nt, Artificial Sequence
  Description of Artificial Sequence: Synthetic oligonucleotide
  Antisense strand to SEQ ID NO: 632370
aaguguaagccauugugcc

SEQ ID NO: 632372 - RNA, 19 nt, Artificial Sequence
  Description of Artificial Sequence: Synthetic oligonucleotide
  Sense strand starting at position 1600 of SEQ ID NO: 585343
uguuaugaauuccuagauu

SEQ ID NO: 632373 - RNA, 19 nt, Artificial Sequence
  Description of Artificial Sequence: Synthetic oligonucleotide
  Antisense strand to SEQ ID NO: 632372
aaucuaggaauucauaaca

SEQ ID NO: 632374 - RNA, 19 nt, Artificial Sequence
  Description of Artificial Sequence: Synthetic oligonucleotide
  Sense strand starting at position 1603 of SEQ ID NO: 585343
uaugaauuccuagauucgu

SEQ ID NO: 632375 - RNA, 19 nt, Artificial Sequence
  Description of Artificial Sequence: Synthetic oligonucleotide
  Antisense strand to SEQ ID NO: 632374
acgaaucuaggaauucaua

SEQ ID NO: 632376 - RNA, 19 nt, Artificial Sequence
  Description of Artificial Sequence: Synthetic oligonucleotide
  Sense strand starting at position 1609 of SEQ ID NO: 585343
uuccuagauucgucaugca

SEQ ID NO: 632377 - RNA, 19 nt, Artificial Sequence
  Description of Artificial Sequence: Synthetic oligonucleotide
  Antisense strand to SEQ ID NO: 632376
ugcaugacgaaucuaggaa

SEQ ID NO: 632378 - RNA, 19 nt, Artificial Sequence
  Description of Artificial Sequence: Synthetic oligonucleotide
  Sense strand starting at position 1767 of SEQ ID NO: 585343
aggaaaugcucaucugagc

SEQ ID NO: 632379 - RNA, 19 nt, Artificial Sequence
  Description of Artificial Sequence: Synthetic oligonucleotide
  Antisense strand to SEQ ID NO: 632378
gcucagaugagcauuuccu

SEQ ID NO: 632380 - RNA, 19 nt, Artificial Sequence
  Description of Artificial Sequence: Synthetic oligonucleotide
  Sense strand starting at position 1772 of SEQ ID NO: 585343
augcucaucugagcucaaa

SEQ ID NO: 632381 - RNA, 19 nt, Artificial Sequence
  Description of Artificial Sequence: Synthetic oligonucleotide
  Antisense strand to SEQ ID NO: 632380
uuugagcucagaugagcau

SEQ ID NO: 632382 - RNA, 19 nt, Artificial Sequence
  Description of Artificial Sequence: Synthetic oligonucleotide
  Sense strand starting at position 1864 of SEQ ID NO: 585343
cuccgugcuguccaaacuu

SEQ ID NO: 632383 - RNA, 19 nt, Artificial Sequence
  Description of Artificial Sequence: Synthetic oligonucleotide
  Antisense strand to SEQ ID NO: 632382
aaguuuggacagcacggag

SEQ ID NO: 632384 - RNA, 19 nt, Artificial Sequence
  Description of Artificial Sequence: Synthetic oligonucleotide
  Sense strand starting at position 1991 of SEQ ID NO: 585343
gacuacaugugggcuuaga

SEQ ID NO: 632385 - RNA, 19 nt, Artificial Sequence
  Description of Artificial Sequence: Synthetic oligonucleotide
  Antisense strand to SEQ ID NO: 632384
ucuaagcccacauguaguc

SEQ ID NO: 632386 - RNA, 19 nt, Artificial Sequence
  Description of Artificial Sequence: Synthetic oligonucleotide
  Sense strand starting at position 2050 of SEQ ID NO: 585343
uaaggauaaucuucucgga

SEQ ID NO: 632387 - RNA, 19 nt, Artificial Sequence
  Description of Artificial Sequence: Synthetic oligonucleotide
  Antisense strand to SEQ ID NO: 632386
uccgagaagauuauccuua

SEQ ID NO: 632388 - RNA, 19 nt, Artificial Sequence
  Description of Artificial Sequence: Synthetic oligonucleotide
  Sense strand starting at position 2052 of SEQ ID NO: 585343
aggauaaucuucucggaua

SEQ ID NO: 632389 - RNA, 19 nt, Artificial Sequence
  Description of Artificial Sequence: Synthetic oligonucleotide
  Antisense strand to SEQ ID NO: 632388
uauccgagaagauuauccu

SEQ ID NO: 632390 - RNA, 19 nt, Artificial Sequence
  Description of Artificial Sequence: Synthetic oligonucleotide
  Sense strand starting at position 2054 of SEQ ID NO: 585343
gauaaucuucucggauaga

SEQ ID NO: 632391 - RNA, 19 nt, Artificial Sequence
  Description of Artificial Sequence: Synthetic oligonucleotide
  Antisense strand to SEQ ID NO: 632390
ucuauccgagaagauuauc

SEQ ID NO: 632392 - RNA, 19 nt, Artificial Sequence
  Description of Artificial Sequence: Synthetic oligonucleotide
  Sense strand starting at position 2055 of SEQ ID NO: 585343
auaaucuucucggauagag

SEQ ID NO: 632393 - RNA, 19 nt, Artificial Sequence
  Description of Artificial Sequence: Synthetic oligonucleotide
  Antisense strand to SEQ ID NO: 632392
cucuauccgagaagauuau

SEQ ID NO: 632394 - RNA, 19 nt, Artificial Sequence
  Description of Artificial Sequence: Synthetic oligonucleotide
  Sense strand starting at position 2057 of SEQ ID NO: 585343
aaucuucucggauagagca

SEQ ID NO: 632395 - RNA, 19 nt, Artificial Sequence
  Description of Artificial Sequence: Synthetic oligonucleotide
  Antisense strand to SEQ ID NO: 632394
ugcucuauccgagaagauu

SEQ ID NO: 632396 - RNA, 19 nt, Artificial Sequence
  Description of Artificial Sequence: Synthetic oligonucleotide
  Sense strand starting at position 2565 of SEQ ID NO: 585343
gccuaaggaaguugucuua

SEQ ID NO: 632397 - RNA, 19 nt, Artificial Sequence
  Description of Artificial Sequence: Synthetic oligonucleotide
  Antisense strand to SEQ ID NO: 632396
uaagacaacuuccuuaggc

SEQ ID NO: 632398 - RNA, 19 nt, Artificial Sequence
  Description of Artificial Sequence: Synthetic oligonucleotide
  Sense strand starting at position 2568 of SEQ ID NO: 585343
uaaggaaguugucuuauau

SEQ ID NO: 632399 - RNA, 19 nt, Artificial Sequence
  Description of Artificial Sequence: Synthetic oligonucleotide
  Antisense strand to SEQ ID NO: 632398
auauaagacaacuuccuua

SEQ ID NO: 632400 - RNA, 19 nt, Artificial Sequence
  Description of Artificial Sequence: Synthetic oligonucleotide
  Sense strand starting at position 2575 of SEQ ID NO: 585343
guugucuuauaugcaaauu

SEQ ID NO: 632401 - RNA, 19 nt, Artificial Sequence
  Description of Artificial Sequence: Synthetic oligonucleotide
  Antisense strand to SEQ ID NO: 632400
aauuugcauauaagacaac

SEQ ID NO: 632402 - RNA, 19 nt, Artificial Sequence
  Description of Artificial Sequence: Synthetic oligonucleotide
  Sense strand starting at position 2656 of SEQ ID NO: 585343
gggccuuccuaaguucuga

SEQ ID NO: 632403 - RNA, 19 nt, Artificial Sequence
  Description of Artificial Sequence: Synthetic oligonucleotide
  Antisense strand to SEQ ID NO: 632402
ucagaacuuaggaaggccc

SEQ ID NO: 632404 - RNA, 19 nt, Artificial Sequence
  Description of Artificial Sequence: Synthetic oligonucleotide
  Sense strand starting at position 2667 of SEQ ID NO: 585343
aguucugauucugucuuga

SEQ ID NO: 632405 - RNA, 19 nt, Artificial Sequence
  Description of Artificial Sequence: Synthetic oligonucleotide
  Antisense strand to SEQ ID NO: 632404
ucaagacagaaucagaacu

SEQ ID NO: 632406 - RNA, 19 nt, Artificial Sequence
  Description of Artificial Sequence: Synthetic oligonucleotide
  Sense strand starting at position 2669 of SEQ ID NO: 585343
uucugauucugucuugaau

SEQ ID NO: 632407 - RNA, 19 nt, Artificial Sequence
  Description of Artificial Sequence: Synthetic oligonucleotide
  Antisense strand to SEQ ID NO: 632406
auucaagacagaaucagaa

SEQ ID NO: 632408 - RNA, 19 nt, Artificial Sequence
  Description of Artificial Sequence: Synthetic oligonucleotide
  Sense strand starting at position 2671 of SEQ ID NO: 585343
cugauucugucuugaauuu

SEQ ID NO: 632409 - RNA, 19 nt, Artificial Sequence
  Description of Artificial Sequence: Synthetic oligonucleotide
  Antisense strand to SEQ ID NO: 632408
aaauucaagacagaaucag

SEQ ID NO: 632410 - RNA, 19 nt, Artificial Sequence
  Description of Artificial Sequence: Synthetic oligonucleotide
  Sense strand starting at position 2680 of SEQ ID NO: 585343
ucuugaauuuaucaggaca

SEQ ID NO: 632411 - RNA, 19 nt, Artificial Sequence
  Description of Artificial Sequence: Synthetic oligonucleotide
  Antisense strand to SEQ ID NO: 632410
uguccugauaaauucaaga

SEQ ID NO: 632412 - RNA, 19 nt, Artificial Sequence
  Description of Artificial Sequence: Synthetic oligonucleotide
  Sense strand starting at position 2915 of SEQ ID NO: 585343
aguuguuagucucucuaaa

SEQ ID NO: 632413 - RNA, 19 nt, Artificial Sequence
  Description of Artificial Sequence: Synthetic oligonucleotide
  Antisense strand to SEQ ID NO: 632412
uuuagagagacuaacaacu

SEQ ID NO: 632414 - RNA, 19 nt, Artificial Sequence
  Description of Artificial Sequence: Synthetic oligonucleotide
  Sense strand starting at position 3606 of SEQ ID NO: 585343
ggcagaguuuaagcuggua

SEQ ID NO: 632415 - RNA, 19 nt, Artificial Sequence
  Description of Artificial Sequence: Synthetic oligonucleotide
  Antisense strand to SEQ ID NO: 632414
uaccagcuuaaacucugcc

SEQ ID NO: 632416 - RNA, 19 nt, Artificial Sequence
  Description of Artificial Sequence: Synthetic oligonucleotide
  Sense strand starting at position 3609 of SEQ ID NO: 585343
agaguuuaagcugguauau

SEQ ID NO: 632417 - RNA, 19 nt, Artificial Sequence
  Description of Artificial Sequence: Synthetic oligonucleotide
  Antisense strand to SEQ ID NO: 632416
auauaccagcuuaaacucu

SEQ ID NO: 632418 - RNA, 19 nt, Artificial Sequence
  Description of Artificial Sequence: Synthetic oligonucleotide
  Sense strand starting at position 3794 of SEQ ID NO: 585343
gaaccaugacagugcagaa

SEQ ID NO: 632419 - RNA, 19 nt, Artificial Sequence
  Description of Artificial Sequence: Synthetic oligonucleotide
  Antisense strand to SEQ ID NO: 632418
uucugcacugucaugguuc

SEQ ID NO: 632420 - RNA, 19 nt, Artificial Sequence
  Description of Artificial Sequence: Synthetic oligonucleotide
  Sense strand starting at position 34 of SEQ ID NO: 585344
uuuaaagugccugaguaac

SEQ ID NO: 632421 - RNA, 19 nt, Artificial Sequence
  Description of Artificial Sequence: Synthetic oligonucleotide
  Antisense strand to SEQ ID NO: 632420
guuacucaggcacuuuaaa

SEQ ID NO: 632422 - RNA, 19 nt, Artificial Sequence
  Description of Artificial Sequence: Synthetic oligonucleotide
  Sense strand starting at position 54 of SEQ ID NO: 585344
gagauaaagcaauggcuuu

SEQ ID NO: 632423 - RNA, 19 nt, Artificial Sequence
  Description of Artificial Sequence: Synthetic oligonucleotide
  Antisense strand to SEQ ID NO: 632422
aaagccauugcuuuaucuc

SEQ ID NO: 632424 - RNA, 19 nt, Artificial Sequence
  Description of Artificial Sequence: Synthetic oligonucleotide
  Sense strand starting at position 180 of SEQ ID NO: 585344
uuugcaggauucucuuuaa

SEQ ID NO: 632425 - RNA, 19 nt, Artificial Sequence
  Description of Artificial Sequence: Synthetic oligonucleotide
  Antisense strand to SEQ ID NO: 632424
uuaaagagaauccugcaaa

SEQ ID NO: 632426 - RNA, 19 nt, Artificial Sequence
  Description of Artificial Sequence: Synthetic oligonucleotide
  Sense strand starting at position 183 of SEQ ID NO: 585344
gcaggauucucuuuaaggc

SEQ ID NO: 632427 - RNA, 19 nt, Artificial Sequence
  Description of Artificial Sequence: Synthetic oligonucleotide
  Antisense strand to SEQ ID NO: 632426
gccuuaaagagaauccugc

SEQ ID NO: 632428 - RNA, 19 nt, Artificial Sequence
  Description of Artificial Sequence: Synthetic oligonucleotide
  Sense strand starting at position 307 of SEQ ID NO: 585344
auuguuaaccuguacugca

SEQ ID NO: 632429 - RNA, 19 nt, Artificial Sequence
  Description of Artificial Sequence: Synthetic oligonucleotide
  Antisense strand to SEQ ID NO: 632428
ugcaguacagguuaacaau

SEQ ID NO: 632430 - RNA, 19 nt, Artificial Sequence
  Description of Artificial Sequence: Synthetic oligonucleotide
  Sense strand starting at position 402 of SEQ ID NO: 585344
aaaggaaagucucaggcaa

SEQ ID NO: 632431 - RNA, 19 nt, Artificial Sequence
  Description of Artificial Sequence: Synthetic oligonucleotide
  Antisense strand to SEQ ID NO: 632430
uugccugagacuuuccuuu

SEQ ID NO: 632432 - RNA, 19 nt, Artificial Sequence
  Description of Artificial Sequence: Synthetic oligonucleotide
  Sense strand starting at position 485 of SEQ ID NO: 585344
uuuccauacucugaugaug

SEQ ID NO: 632433 - RNA, 19 nt, Artificial Sequence
  Description of Artificial Sequence: Synthetic oligonucleotide
  Antisense strand to SEQ ID NO: 632432
caucaucagaguauggaaa

SEQ ID NO: 632434 - RNA, 19 nt, Artificial Sequence
  Description of Artificial Sequence: Synthetic oligonucleotide
  Sense strand starting at position 488 of SEQ ID NO: 585344
ccauacucugaugauguau

SEQ ID NO: 632435 - RNA, 19 nt, Artificial Sequence
  Description of Artificial Sequence: Synthetic oligonucleotide
  Antisense strand to SEQ ID NO: 632434
auacaucaucagaguaugg

SEQ ID NO: 632436 - RNA, 19 nt, Artificial Sequence
  Description of Artificial Sequence: Synthetic oligonucleotide
  Sense strand starting at position 657 of SEQ ID NO: 585344
ccuugcuugcaugauguga

SEQ ID NO: 632437 - RNA, 19 nt, Artificial Sequence
  Description of Artificial Sequence: Synthetic oligonucleotide
  Antisense strand to SEQ ID NO: 632436
ucacaucaugcaagcaagg

SEQ ID NO: 632438 - RNA, 19 nt, Artificial Sequence
  Description of Artificial Sequence: Synthetic oligonucleotide
  Sense strand starting at position 665 of SEQ ID NO: 585344
gcaugaugugagcagaaag

SEQ ID NO: 632439 - RNA, 19 nt, Artificial Sequence
  Description of Artificial Sequence: Synthetic oligonucleotide
  Antisense strand to SEQ ID NO: 632438
cuuucugcucacaucaugc

SEQ ID NO: 632440 - RNA, 19 nt, Artificial Sequence
  Description of Artificial Sequence: Synthetic oligonucleotide
  Sense strand starting at position 1292 of SEQ ID NO: 585344
gcuguagucaaagaugcuu

SEQ ID NO: 632441 - RNA, 19 nt, Artificial Sequence
  Description of Artificial Sequence: Synthetic oligonucleotide
  Antisense strand to SEQ ID NO: 632440
aagcaucuuugacuacagc

SEQ ID NO: 632442 - RNA, 19 nt, Artificial Sequence
  Description of Artificial Sequence: Synthetic oligonucleotide
  Sense strand starting at position 1457 of SEQ ID NO: 585344
gccugagaccuuuaucaaa

SEQ ID NO: 632443 - RNA, 19 nt, Artificial Sequence
  Description of Artificial Sequence: Synthetic oligonucleotide
  Antisense strand to SEQ ID NO: 632442
uuugauaaaggucucaggc

SEQ ID NO: 632444 - RNA, 19 nt, Artificial Sequence
  Description of Artificial Sequence: Synthetic oligonucleotide
  Sense strand starting at position 1459 of SEQ ID NO: 585344
cugagaccuuuaucaaagu

SEQ ID NO: 632445 - RNA, 19 nt, Artificial Sequence
  Description of Artificial Sequence: Synthetic oligonucleotide
  Antisense strand to SEQ ID NO: 632444
acuuugauaaaggucucag

SEQ ID NO: 632446 - RNA, 19 nt, Artificial Sequence
  Description of Artificial Sequence: Synthetic oligonucleotide
  Sense strand starting at position 1525 of SEQ ID NO: 585344
agaacacacuuucucgaaa

SEQ ID NO: 632447 - RNA, 19 nt, Artificial Sequence
  Description of Artificial Sequence: Synthetic oligonucleotide
  Antisense strand to SEQ ID NO: 632446
uuucgagaaaguguguucu

SEQ ID NO: 632448 - RNA, 19 nt, Artificial Sequence
  Description of Artificial Sequence: Synthetic oligonucleotide
  Sense strand starting at position 1740 of SEQ ID NO: 585344
gcaccuggcuucccagauu

SEQ ID NO: 632449 - RNA, 19 nt, Artificial Sequence
  Description of Artificial Sequence: Synthetic oligonucleotide
  Antisense strand to SEQ ID NO: 632448
aaucugggaagccaggugc

SEQ ID NO: 632450 - RNA, 19 nt, Artificial Sequence
  Description of Artificial Sequence: Synthetic oligonucleotide
  Sense strand starting at position 1743 of SEQ ID NO: 585344
ccuggcuucccagauuaca

SEQ ID NO: 632451 - RNA, 19 nt, Artificial Sequence
  Description of Artificial Sequence: Synthetic oligonucleotide
  Antisense strand to SEQ ID NO: 632450
uguaaucugggaagccagg

SEQ ID NO: 632452 - RNA, 19 nt, Artificial Sequence
  Description of Artificial Sequence: Synthetic oligonucleotide
  Sense strand starting at position 1760 of SEQ ID NO: 585344
cagagagcugagugaauau

SEQ ID NO: 632453 - RNA, 19 nt, Artificial Sequence
  Description of Artificial Sequence: Synthetic oligonucleotide
  Antisense strand to SEQ ID NO: 632452
auauucacucagcucucug

SEQ ID NO: 632454 - RNA, 19 nt, Artificial Sequence
  Description of Artificial Sequence: Synthetic oligonucleotide
  Sense strand starting at position 1843 of SEQ ID NO: 585344
uugccaucuugaucuguca

SEQ ID NO: 632455 - RNA, 19 nt, Artificial Sequence
  Description of Artificial Sequence: Synthetic oligonucleotide
  Antisense strand to SEQ ID NO: 632454
ugacagaucaagauggcaa

SEQ ID NO: 632456 - RNA, 19 nt, Artificial Sequence
  Description of Artificial Sequence: Synthetic oligonucleotide
  Sense strand starting at position 1920 of SEQ ID NO: 585344
gaguaaauccaagagcagu

SEQ ID NO: 632457 - RNA, 19 nt, Artificial Sequence
  Description of Artificial Sequence: Synthetic oligonucleotide
  Antisense strand to SEQ ID NO: 632456
acugcucuuggauuuacuc

SEQ ID NO: 632458 - RNA, 19 nt, Artificial Sequence
  Description of Artificial Sequence: Synthetic oligonucleotide
  Sense strand starting at position 1934 of SEQ ID NO: 585344
gcagucuuauuccuggauu

SEQ ID NO: 632459 - RNA, 19 nt, Artificial Sequence
  Description of Artificial Sequence: Synthetic oligonucleotide
  Antisense strand to SEQ ID NO: 632458
aauccaggaauaagacugc

SEQ ID NO: 632460 - RNA, 19 nt, Artificial Sequence
  Description of Artificial Sequence: Synthetic oligonucleotide
  Sense strand starting at position 1981 of SEQ ID NO: 585344
gcuugaggauucuacuuaa

SEQ ID NO: 632461 - RNA, 19 nt, Artificial Sequence
  Description of Artificial Sequence: Synthetic oligonucleotide
  Antisense strand to SEQ ID NO: 632460
uuaaguagaauccucaagc

SEQ ID NO: 632462 - RNA, 19 nt, Artificial Sequence
  Description of Artificial Sequence: Synthetic oligonucleotide
  Sense strand starting at position 1984 of SEQ ID NO: 585344
ugaggauucuacuuaaagc

SEQ ID NO: 632463 - RNA, 19 nt, Artificial Sequence
  Description of Artificial Sequence: Synthetic oligonucleotide
  Antisense strand to SEQ ID NO: 632462
gcuuuaaguagaauccuca

SEQ ID NO: 632464 - RNA, 19 nt, Artificial Sequence
  Description of Artificial Sequence: Synthetic oligonucleotide
  Sense strand starting at position 2044 of SEQ ID NO: 585344
caaagcugaucagagagua

SEQ ID NO: 632465 - RNA, 19 nt, Artificial Sequence
  Description of Artificial Sequence: Synthetic oligonucleotide
  Antisense strand to SEQ ID NO: 632464
uacucucugaucagcuuug

SEQ ID NO: 632466 - RNA, 19 nt, Artificial Sequence
  Description of Artificial Sequence: Synthetic oligonucleotide
  Sense strand starting at position 2058 of SEQ ID NO: 585344
gaguaaagcucuuucgaaa

SEQ ID NO: 632467 - RNA, 19 nt, Artificial Sequence
  Description of Artificial Sequence: Synthetic oligonucleotide
  Antisense strand to SEQ ID NO: 632466
uuucgaaagagcuuuacuc

SEQ ID NO: 632468 - RNA, 19 nt, Artificial Sequence
  Description of Artificial Sequence: Synthetic oligonucleotide
  Sense strand starting at position 2080 of SEQ ID NO: 585344
gaggaaguaucaucuccac

SEQ ID NO: 632469 - RNA, 19 nt, Artificial Sequence
  Description of Artificial Sequence: Synthetic oligonucleotide
  Antisense strand to SEQ ID NO: 632468
guggagaugauacuuccuc

SEQ ID NO: 632470 - RNA, 19 nt, Artificial Sequence
  Description of Artificial Sequence: Synthetic oligonucleotide
  Sense strand starting at position 2117 of SEQ ID NO: 585344
cuuccuucucauuguuaug

SEQ ID NO: 632471 - RNA, 19 nt, Artificial Sequence
  Description of Artificial Sequence: Synthetic oligonucleotide
  Antisense strand to SEQ ID NO: 632470
cauaacaaugagaaggaag

SEQ ID NO: 632472 - RNA, 19 nt, Artificial Sequence
  Description of Artificial Sequence: Synthetic oligonucleotide
  Sense strand starting at position 2150 of SEQ ID NO: 585344
ugcccauauccaggacaca

SEQ ID NO: 632473 - RNA, 19 nt, Artificial Sequence
  Description of Artificial Sequence: Synthetic oligonucleotide
  Antisense strand to SEQ ID NO: 632472
uguguccuggauaugggca

SEQ ID NO: 632474 - RNA, 19 nt, Artificial Sequence
  Description of Artificial Sequence: Synthetic oligonucleotide
  Sense strand starting at position 2323 of SEQ ID NO: 585344
agaugaucugcagagucau

SEQ ID NO: 632475 - RNA, 19 nt, Artificial Sequence
  Description of Artificial Sequence: Synthetic oligonucleotide
  Antisense strand to SEQ ID NO: 632474
augacucugcagaucaucu

SEQ ID NO: 632476 - RNA, 19 nt, Artificial Sequence
  Description of Artificial Sequence: Synthetic oligonucleotide
  Sense strand starting at position 2581 of SEQ ID NO: 585344
ggcugaaagucagagauau

SEQ ID NO: 632477 - RNA, 19 nt, Artificial Sequence
  Description of Artificial Sequence: Synthetic oligonucleotide
  Antisense strand to SEQ ID NO: 632476
auaucucugacuuucagcc

SEQ ID NO: 632478 - RNA, 19 nt, Artificial Sequence
  Description of Artificial Sequence: Synthetic oligonucleotide
  Sense strand starting at position 2647 of SEQ ID NO: 585344
agcuucuuguuucucuaua

SEQ ID NO: 632479 - RNA, 19 nt, Artificial Sequence
  Description of Artificial Sequence: Synthetic oligonucleotide
  Antisense strand to SEQ ID NO: 632478
uauagagaaacaagaagcu

SEQ ID NO: 632480 - RNA, 19 nt, Artificial Sequence
  Description of Artificial Sequence: Synthetic oligonucleotide
  Sense strand starting at position 2659 of SEQ ID NO: 585344
cucuauaccuucuagggaa

SEQ ID NO: 632481 - RNA, 19 nt, Artificial Sequence
  Description of Artificial Sequence: Synthetic oligonucleotide
  Antisense strand to SEQ ID NO: 632480
uucccuagaagguauagag

SEQ ID NO: 632482 - RNA, 19 nt, Artificial Sequence
  Description of Artificial Sequence: Synthetic oligonucleotide
  Sense strand starting at position 2661 of SEQ ID NO: 585344
cuauaccuucuagggaaau

SEQ ID NO: 632483 - RNA, 19 nt, Artificial Sequence
  Description of Artificial Sequence: Synthetic oligonucleotide
  Antisense strand to SEQ ID NO: 632482
auuucccuagaagguauag

SEQ ID NO: 632484 - RNA, 19 nt, Artificial Sequence
  Description of Artificial Sequence: Synthetic oligonucleotide
  Sense strand starting at position 3653 of SEQ ID NO: 585344
ggcuucuuguuuguguaca

SEQ ID NO: 632485 - RNA, 19 nt, Artificial Sequence
  Description of Artificial Sequence: Synthetic oligonucleotide
  Antisense strand to SEQ ID NO: 632484
uguacacaaacaagaagcc

SEQ ID NO: 632486 - RNA, 19 nt, Artificial Sequence
  Description of Artificial Sequence: Synthetic oligonucleotide
  Sense strand starting at position 3703 of SEQ ID NO: 585344
ucccuauauugaguugucu

SEQ ID NO: 632487 - RNA, 19 nt, Artificial Sequence
  Description of Artificial Sequence: Synthetic oligonucleotide
  Antisense strand to SEQ ID NO: 632486
agacaacucaauauaggga

SEQ ID NO: 632488 - RNA, 19 nt, Artificial Sequence
  Description of Artificial Sequence: Synthetic oligonucleotide
  Sense strand starting at position 3720 of SEQ ID NO: 585344
cuucuaguucccugcuuua

SEQ ID NO: 632489 - RNA, 19 nt, Artificial Sequence
  Description of Artificial Sequence: Synthetic oligonucleotide
  Antisense strand to SEQ ID NO: 632488
uaaagcagggaacuagaag

SEQ ID NO: 632490 - RNA, 19 nt, Artificial Sequence
  Description of Artificial Sequence: Synthetic oligonucleotide
  Sense strand starting at position 3754 of SEQ ID NO: 585344
gguacuaggugauauuaaa

SEQ ID NO: 632491 - RNA, 19 nt, Artificial Sequence
  Description of Artificial Sequence: Synthetic oligonucleotide
  Antisense strand to SEQ ID NO: 632490
uuuaauaucaccuaguacc

SEQ ID NO: 632492 - RNA, 19 nt, Artificial Sequence
  Description of Artificial Sequence: Synthetic oligonucleotide
  Sense strand starting at position 3770 of SEQ ID NO: 585344
aaaggaauuuagugguauc

SEQ ID NO: 632493 - RNA, 19 nt, Artificial Sequence
  Description of Artificial Sequence: Synthetic oligonucleotide
  Antisense strand to SEQ ID NO: 632492
gauaccacuaaauuccuuu

SEQ ID NO: 632494 - RNA, 19 nt, Artificial Sequence
  Description of Artificial Sequence: Synthetic oligonucleotide
  Sense strand starting at position 3773 of SEQ ID NO: 585344
ggaauuuagugguaucaac

SEQ ID NO: 632495 - RNA, 19 nt, Artificial Sequence
  Description of Artificial Sequence: Synthetic oligonucleotide
  Antisense strand to SEQ ID NO: 632494
guugauaccacuaaauucc

SEQ ID NO: 632496 - RNA, 19 nt, Artificial Sequence
  Description of Artificial Sequence: Synthetic oligonucleotide
  Sense strand starting at position 3799 of SEQ ID NO: 585344
ccuggcuucucaccagaca

SEQ ID NO: 632497 - RNA, 19 nt, Artificial Sequence
  Description of Artificial Sequence: Synthetic oligonucleotide
  Antisense strand to SEQ ID NO: 632496
ugucuggugagaagccagg

SEQ ID NO: 632498 - RNA, 19 nt, Artificial Sequence
  Description of Artificial Sequence: Synthetic oligonucleotide
  Sense strand starting at position 3800 of SEQ ID NO: 585344
cuggcuucucaccagacau

SEQ ID NO: 632499 - RNA, 19 nt, Artificial Sequence
  Description of Artificial Sequence: Synthetic oligonucleotide
  Antisense strand to SEQ ID NO: 632498
augucuggugagaagccag

SEQ ID NO: 632500 - RNA, 19 nt, Artificial Sequence
  Description of Artificial Sequence: Synthetic oligonucleotide
  Sense strand starting at position 20 of SEQ ID NO: 585345
cuacuuauuugagacagag

SEQ ID NO: 632501 - RNA, 19 nt, Artificial Sequence
  Description of Artificial Sequence: Synthetic oligonucleotide
  Antisense strand to SEQ ID NO: 632500
cucugucucaaauaaguag

SEQ ID NO: 632502 - RNA, 19 nt, Artificial Sequence
  Description of Artificial Sequence: Synthetic oligonucleotide
  Sense strand starting at position 613 of SEQ ID NO: 585345
uugcaauagacuggaagua

SEQ ID NO: 632503 - RNA, 19 nt, Artificial Sequence
  Description of Artificial Sequence: Synthetic oligonucleotide
  Antisense strand to SEQ ID NO: 632502
uacuuccagucuauugcaa

SEQ ID NO: 632504 - RNA, 19 nt, Artificial Sequence
  Description of Artificial Sequence: Synthetic oligonucleotide
  Sense strand starting at position 656 of SEQ ID NO: 585345
caaugucauccuggauaag

SEQ ID NO: 632505 - RNA, 19 nt, Artificial Sequence
  Description of Artificial Sequence: Synthetic oligonucleotide
  Antisense strand to SEQ ID NO: 632504
cuuauccaggaugacauug

SEQ ID NO: 632506 - RNA, 19 nt, Artificial Sequence
  Description of Artificial Sequence: Synthetic oligonucleotide
  Sense strand starting at position 657 of SEQ ID NO: 585345
aaugucauccuggauaagu

SEQ ID NO: 632507 - RNA, 19 nt, Artificial Sequence
  Description of Artificial Sequence: Synthetic oligonucleotide
  Antisense strand to SEQ ID NO: 632506
acuuauccaggaugacauu

SEQ ID NO: 632508 - RNA, 19 nt, Artificial Sequence
  Description of Artificial Sequence: Synthetic oligonucleotide
  Sense strand starting at position 659 of SEQ ID NO: 585345
ugucauccuggauaaguua

SEQ ID NO: 632509 - RNA, 19 nt, Artificial Sequence
  Description of Artificial Sequence: Synthetic oligonucleotide
  Antisense strand to SEQ ID NO: 632508
uaacuuauccaggaugaca

SEQ ID NO: 632510 - RNA, 19 nt, Artificial Sequence
  Description of Artificial Sequence: Synthetic oligonucleotide
  Sense strand starting at position 718 of SEQ ID NO: 585345
acugaaaucguugaucccu

SEQ ID NO: 632511 - RNA, 19 nt, Artificial Sequence
  Description of Artificial Sequence: Synthetic oligonucleotide
  Antisense strand to SEQ ID NO: 632510
agggaucaacgauuucagu

SEQ ID NO: 632512 - RNA, 19 nt, Artificial Sequence
  Description of Artificial Sequence: Synthetic oligonucleotide
  Sense strand starting at position 724 of SEQ ID NO: 585345
aucguugaucccuaugauu

SEQ ID NO: 632513 - RNA, 19 nt, Artificial Sequence
  Description of Artificial Sequence: Synthetic oligonucleotide
  Antisense strand to SEQ ID NO: 632512
aaucauagggaucaacgau

SEQ ID NO: 632514 - RNA, 19 nt, Artificial Sequence
  Description of Artificial Sequence: Synthetic oligonucleotide
  Sense strand starting at position 726 of SEQ ID NO: 585345
cguugaucccuaugauuuc

SEQ ID NO: 632515 - RNA, 19 nt, Artificial Sequence
  Description of Artificial Sequence: Synthetic oligonucleotide
  Antisense strand to SEQ ID NO: 632514
gaaaucauagggaucaacg

SEQ ID NO: 632516 - RNA, 19 nt, Artificial Sequence
  Description of Artificial Sequence: Synthetic oligonucleotide
  Sense strand starting at position 759 of SEQ ID NO: 585345
ucuaauuaucggcagaauu

SEQ ID NO: 632517 - RNA, 19 nt, Artificial Sequence
  Description of Artificial Sequence: Synthetic oligonucleotide
  Antisense strand to SEQ ID NO: 632516
aauucugccgauaauuaga

SEQ ID NO: 632518 - RNA, 19 nt, Artificial Sequence
  Description of Artificial Sequence: Synthetic oligonucleotide
  Sense strand starting at position 900 of SEQ ID NO: 585345
ugcuauuguguggauuaaa

SEQ ID NO: 632519 - RNA, 19 nt, Artificial Sequence
  Description of Artificial Sequence: Synthetic oligonucleotide
  Antisense strand to SEQ ID NO: 632518
uuuaauccacacaauagca

SEQ ID NO: 632520 - RNA, 19 nt, Artificial Sequence
  Description of Artificial Sequence: Synthetic oligonucleotide
  Sense strand starting at position 950 of SEQ ID NO: 585345
guaggcuuaagguaagauu

SEQ ID NO: 632521 - RNA, 19 nt, Artificial Sequence
  Description of Artificial Sequence: Synthetic oligonucleotide
  Antisense strand to SEQ ID NO: 632520
aaucuuaccuuaagccuac

SEQ ID NO: 632522 - RNA, 19 nt, Artificial Sequence
  Description of Artificial Sequence: Synthetic oligonucleotide
  Sense strand starting at position 964 of SEQ ID NO: 585345
agauuuguuuagugauuug

SEQ ID NO: 632523 - RNA, 19 nt, Artificial Sequence
  Description of Artificial Sequence: Synthetic oligonucleotide
  Antisense strand to SEQ ID NO: 632522
caaaucacuaaacaaaucu

SEQ ID NO: 632524 - RNA, 19 nt, Artificial Sequence
  Description of Artificial Sequence: Synthetic oligonucleotide
  Sense strand starting at position 967 of SEQ ID NO: 585345
uuuguuuagugauuugucu

SEQ ID NO: 632525 - RNA, 19 nt, Artificial Sequence
  Description of Artificial Sequence: Synthetic oligonucleotide
  Antisense strand to SEQ ID NO: 632524
agacaaaucacuaaacaaa

SEQ ID NO: 632526 - RNA, 19 nt, Artificial Sequence
  Description of Artificial Sequence: Synthetic oligonucleotide
  Sense strand starting at position 969 of SEQ ID NO: 585345
uguuuagugauuugucuca

SEQ ID NO: 632527 - RNA, 19 nt, Artificial Sequence
  Description of Artificial Sequence: Synthetic oligonucleotide
  Antisense strand to SEQ ID NO: 632526
ugagacaaaucacuaaaca

SEQ ID NO: 632528 - RNA, 19 nt, Artificial Sequence
  Description of Artificial Sequence: Synthetic oligonucleotide
  Sense strand starting at position 989 of SEQ ID NO: 585345
ggacaucuccguuaaguaa

SEQ ID NO: 632529 - RNA, 19 nt, Artificial Sequence
  Description of Artificial Sequence: Synthetic oligonucleotide
  Antisense strand to SEQ ID NO: 632528
uuacuuaacggagaugucc

SEQ ID NO: 632530 - RNA, 19 nt, Artificial Sequence
  Description of Artificial Sequence: Synthetic oligonucleotide
  Sense strand starting at position 1014 of SEQ ID NO: 585345
guauuucguauauguggua

SEQ ID NO: 632531 - RNA, 19 nt, Artificial Sequence
  Description of Artificial Sequence: Synthetic oligonucleotide
  Antisense strand to SEQ ID NO: 632530
uaccacauauacgaaauac

SEQ ID NO: 632532 - RNA, 19 nt, Artificial Sequence
  Description of Artificial Sequence: Synthetic oligonucleotide
  Sense strand starting at position 1034 of SEQ ID NO: 585345
ccacaauacuggcuugauu

SEQ ID NO: 632533 - RNA, 19 nt, Artificial Sequence
  Description of Artificial Sequence: Synthetic oligonucleotide
  Antisense strand to SEQ ID NO: 632532
aaucaagccaguauugugg

SEQ ID NO: 632534 - RNA, 19 nt, Artificial Sequence
  Description of Artificial Sequence: Synthetic oligonucleotide
  Sense strand starting at position 1172 of SEQ ID NO: 585345
ugcggaacauacucaagaa

SEQ ID NO: 632535 - RNA, 19 nt, Artificial Sequence
  Description of Artificial Sequence: Synthetic oligonucleotide
  Antisense strand to SEQ ID NO: 632534
uucuugaguauguuccgca

SEQ ID NO: 632536 - RNA, 19 nt, Artificial Sequence
  Description of Artificial Sequence: Synthetic oligonucleotide
  Sense strand starting at position 1251 of SEQ ID NO: 585345
uuccauggugcggaauaaa

SEQ ID NO: 632537 - RNA, 19 nt, Artificial Sequence
  Description of Artificial Sequence: Synthetic oligonucleotide
  Antisense strand to SEQ ID NO: 632536
uuuauuccgcaccauggaa

SEQ ID NO: 632538 - RNA, 19 nt, Artificial Sequence
  Description of Artificial Sequence: Synthetic oligonucleotide
  Sense strand starting at position 1438 of SEQ ID NO: 585345
gccugaggccaauaauuac

SEQ ID NO: 632539 - RNA, 19 nt, Artificial Sequence
  Description of Artificial Sequence: Synthetic oligonucleotide
  Antisense strand to SEQ ID NO: 632538
guaauuauuggccucaggc

SEQ ID NO: 632540 - RNA, 19 nt, Artificial Sequence
  Description of Artificial Sequence: Synthetic oligonucleotide
  Sense strand starting at position 1452 of SEQ ID NO: 585345
auuaccuucgucuaggaga

SEQ ID NO: 632541 - RNA, 19 nt, Artificial Sequence
  Description of Artificial Sequence: Synthetic oligonucleotide
  Antisense strand to SEQ ID NO: 632540
ucuccuagacgaagguaau

SEQ ID NO: 632542 - RNA, 19 nt, Artificial Sequence
  Description of Artificial Sequence: Synthetic oligonucleotide
  Sense strand starting at position 1611 of SEQ ID NO: 585345
uugugucuuccggcucuua

SEQ ID NO: 632543 - RNA, 19 nt, Artificial Sequence
  Description of Artificial Sequence: Synthetic oligonucleotide
  Antisense strand to SEQ ID NO: 632542
uaagagccggaagacacaa

SEQ ID NO: 632544 - RNA, 19 nt, Artificial Sequence
  Description of Artificial Sequence: Synthetic oligonucleotide
  Sense strand starting at position 1612 of SEQ ID NO: 585345
ugugucuuccggcucuuau

SEQ ID NO: 632545 - RNA, 19 nt, Artificial Sequence
  Description of Artificial Sequence: Synthetic oligonucleotide
  Antisense strand to SEQ ID NO: 632544
auaagagccggaagacaca

SEQ ID NO: 632546 - RNA, 19 nt, Artificial Sequence
  Description of Artificial Sequence: Synthetic oligonucleotide
  Sense strand starting at position 1613 of SEQ ID NO: 585345
gugucuuccggcucuuauu

SEQ ID NO: 632547 - RNA, 19 nt, Artificial Sequence
  Description of Artificial Sequence: Synthetic oligonucleotide
  Antisense strand to SEQ ID NO: 632546
aauaagagccggaagacac

SEQ ID NO: 632548 - RNA, 19 nt, Artificial Sequence
  Description of Artificial Sequence: Synthetic oligonucleotide
  Sense strand starting at position 2145 of SEQ ID NO: 585345
agaugucggcugagugagu

SEQ ID NO: 632549 - RNA, 19 nt, Artificial Sequence
  Description of Artificial Sequence: Synthetic oligonucleotide
  Antisense strand to SEQ ID NO: 632548
acucacucagccgacaucu

SEQ ID NO: 632550 - RNA, 19 nt, Artificial Sequence
  Description of Artificial Sequence: Synthetic oligonucleotide
  Sense strand starting at position 2434 of SEQ ID NO: 585345
gagguuucaguugagguga

SEQ ID NO: 632551 - RNA, 19 nt, Artificial Sequence
  Description of Artificial Sequence: Synthetic oligonucleotide
  Antisense strand to SEQ ID NO: 632550
ucaccucaacugaaaccuc

SEQ ID NO: 632552 - RNA, 19 nt, Artificial Sequence
  Description of Artificial Sequence: Synthetic oligonucleotide
  Sense strand starting at position 2465 of SEQ ID NO: 585345
ugugaucuuggacaguuua

SEQ ID NO: 632553 - RNA, 19 nt, Artificial Sequence
  Description of Artificial Sequence: Synthetic oligonucleotide
  Antisense strand to SEQ ID NO: 632552
uaaacuguccaagaucaca

SEQ ID NO: 632554 - RNA, 19 nt, Artificial Sequence
  Description of Artificial Sequence: Synthetic oligonucleotide
  Sense strand starting at position 2621 of SEQ ID NO: 585345
uuaucaaagcaauguugau

SEQ ID NO: 632555 - RNA, 19 nt, Artificial Sequence
  Description of Artificial Sequence: Synthetic oligonucleotide
  Antisense strand to SEQ ID NO: 632554
aucaacauugcuuugauaa

SEQ ID NO: 632556 - RNA, 19 nt, Artificial Sequence
  Description of Artificial Sequence: Synthetic oligonucleotide
  Sense strand starting at position 2648 of SEQ ID NO: 585345
ucacauuugcuaugugcuu

SEQ ID NO: 632557 - RNA, 19 nt, Artificial Sequence
  Description of Artificial Sequence: Synthetic oligonucleotide
  Antisense strand to SEQ ID NO: 632556
aagcacauagcaaauguga

SEQ ID NO: 632558 - RNA, 19 nt, Artificial Sequence
  Description of Artificial Sequence: Synthetic oligonucleotide
  Sense strand starting at position 2715 of SEQ ID NO: 585345
gaacauaauggauguuugu

SEQ ID NO: 632559 - RNA, 19 nt, Artificial Sequence
  Description of Artificial Sequence: Synthetic oligonucleotide
  Antisense strand to SEQ ID NO: 632558
acaaacauccauuauguuc

SEQ ID NO: 632560 - RNA, 19 nt, Artificial Sequence
  Description of Artificial Sequence: Synthetic oligonucleotide
  Sense strand starting at position 2718 of SEQ ID NO: 585345
cauaauggauguuuguaau

SEQ ID NO: 632561 - RNA, 19 nt, Artificial Sequence
  Description of Artificial Sequence: Synthetic oligonucleotide
  Antisense strand to SEQ ID NO: 632560
auuacaaacauccauuaug

SEQ ID NO: 632562 - RNA, 19 nt, Artificial Sequence
  Description of Artificial Sequence: Synthetic oligonucleotide
  Sense strand starting at position 3057 of SEQ ID NO: 585345
uugaauaacuaguucuaga

SEQ ID NO: 632563 - RNA, 19 nt, Artificial Sequence
  Description of Artificial Sequence: Synthetic oligonucleotide
  Antisense strand to SEQ ID NO: 632562
ucuagaacuaguuauucaa

SEQ ID NO: 632564 - RNA, 19 nt, Artificial Sequence
  Description of Artificial Sequence: Synthetic oligonucleotide
  Sense strand starting at position 3206 of SEQ ID NO: 585345
uuaggcucaucacuagauu

SEQ ID NO: 632565 - RNA, 19 nt, Artificial Sequence
  Description of Artificial Sequence: Synthetic oligonucleotide
  Antisense strand to SEQ ID NO: 632564
aaucuagugaugagccuaa

SEQ ID NO: 632566 - RNA, 19 nt, Artificial Sequence
  Description of Artificial Sequence: Synthetic oligonucleotide
  Sense strand starting at position 3209 of SEQ ID NO: 585345
ggcucaucacuagauuaac

SEQ ID NO: 632567 - RNA, 19 nt, Artificial Sequence
  Description of Artificial Sequence: Synthetic oligonucleotide
  Antisense strand to SEQ ID NO: 632566
guuaaucuagugaugagcc

SEQ ID NO: 632568 - RNA, 19 nt, Artificial Sequence
  Description of Artificial Sequence: Synthetic oligonucleotide
  Sense strand starting at position 3294 of SEQ ID NO: 585345
uaagaacuuuccgucauag

SEQ ID NO: 632569 - RNA, 19 nt, Artificial Sequence
  Description of Artificial Sequence: Synthetic oligonucleotide
  Antisense strand to SEQ ID NO: 632568
cuaugacggaaaguucuua

SEQ ID NO: 632570 - RNA, 19 nt, Artificial Sequence
  Description of Artificial Sequence: Synthetic oligonucleotide
  Sense strand starting at position 3344 of SEQ ID NO: 585345
uuucuuaaacuuggugaaa

SEQ ID NO: 632571 - RNA, 19 nt, Artificial Sequence
  Description of Artificial Sequence: Synthetic oligonucleotide
  Antisense strand to SEQ ID NO: 632570
uuucaccaaguuuaagaaa

SEQ ID NO: 632572 - RNA, 19 nt, Artificial Sequence
  Description of Artificial Sequence: Synthetic oligonucleotide
  Sense strand starting at position 3376 of SEQ ID NO: 585345
uuacgauaaaugcggaaga

SEQ ID NO: 632573 - RNA, 19 nt, Artificial Sequence
  Description of Artificial Sequence: Synthetic oligonucleotide
  Antisense strand to SEQ ID NO: 632572
ucuuccgcauuuaucguaa

SEQ ID NO: 632574 - RNA, 19 nt, Artificial Sequence
  Description of Artificial Sequence: Synthetic oligonucleotide
  Sense strand starting at position 3451 of SEQ ID NO: 585345
ggaguuaaaguguaaguau

SEQ ID NO: 632575 - RNA, 19 nt, Artificial Sequence
  Description of Artificial Sequence: Synthetic oligonucleotide
  Antisense strand to SEQ ID NO: 632574
auacuuacacuuuaacucc

SEQ ID NO: 632576 - RNA, 19 nt, Artificial Sequence
  Description of Artificial Sequence: Synthetic oligonucleotide
  Sense strand starting at position 3522 of SEQ ID NO: 585345
ggauaauuguaagcuauau

SEQ ID NO: 632577 - RNA, 19 nt, Artificial Sequence
  Description of Artificial Sequence: Synthetic oligonucleotide
  Antisense strand to SEQ ID NO: 632576
auauagcuuacaauuaucc

SEQ ID NO: 632578 - RNA, 19 nt, Artificial Sequence
  Description of Artificial Sequence: Synthetic oligonucleotide
  Sense strand starting at position 3556 of SEQ ID NO: 585345
gcuauauagcuauaguaua

SEQ ID NO: 632579 - RNA, 19 nt, Artificial Sequence
  Description of Artificial Sequence: Synthetic oligonucleotide
  Antisense strand to SEQ ID NO: 632578
uauacuauagcuauauagc

SEQ ID NO: 632580 - RNA, 19 nt, Artificial Sequence
  Description of Artificial Sequence: Synthetic oligonucleotide
  Sense strand starting at position 2007 of SEQ ID NO: 585346
agaggaacuuuauagaacu

SEQ ID NO: 632581 - RNA, 19 nt, Artificial Sequence
  Description of Artificial Sequence: Synthetic oligonucleotide
  Antisense strand to SEQ ID NO: 632580
aguucuauaaaguuccucu

SEQ ID NO: 632582 - RNA, 19 nt, Artificial Sequence
  Description of Artificial Sequence: Synthetic oligonucleotide
  Sense strand starting at position 2531 of SEQ ID NO: 585346
cgcgguguuuagagaacau

SEQ ID NO: 632583 - RNA, 19 nt, Artificial Sequence
  Description of Artificial Sequence: Synthetic oligonucleotide
  Antisense strand to SEQ ID NO: 632582
auguucucuaaacaccgcg

SEQ ID NO: 632584 - RNA, 19 nt, Artificial Sequence
  Description of Artificial Sequence: Synthetic oligonucleotide
  Sense strand starting at position 2590 of SEQ ID NO: 585346
uugagcuauuaagcuugau

SEQ ID NO: 632585 - RNA, 19 nt, Artificial Sequence
  Description of Artificial Sequence: Synthetic oligonucleotide
  Antisense strand to SEQ ID NO: 632584
aucaagcuuaauagcucaa

SEQ ID NO: 632586 - RNA, 19 nt, Artificial Sequence
  Description of Artificial Sequence: Synthetic oligonucleotide
  Sense strand starting at position 2624 of SEQ ID NO: 585346
gcgugucugacaugcuuac

SEQ ID NO: 632587 - RNA, 19 nt, Artificial Sequence
  Description of Artificial Sequence: Synthetic oligonucleotide
  Antisense strand to SEQ ID NO: 632586
guaagcaugucagacacgc

SEQ ID NO: 632588 - RNA, 19 nt, Artificial Sequence
  Description of Artificial Sequence: Synthetic oligonucleotide
  Sense strand starting at position 2652 of SEQ ID NO: 585346
caucuauuaggcuggugaa

SEQ ID NO: 632589 - RNA, 19 nt, Artificial Sequence
  Description of Artificial Sequence: Synthetic oligonucleotide
  Antisense strand to SEQ ID NO: 632588
uucaccagccuaauagaug

SEQ ID NO: 632590 - RNA, 19 nt, Artificial Sequence
  Description of Artificial Sequence: Synthetic oligonucleotide
  Sense strand starting at position 2653 of SEQ ID NO: 585346
aucuauuaggcuggugaau

SEQ ID NO: 632591 - RNA, 19 nt, Artificial Sequence
  Description of Artificial Sequence: Synthetic oligonucleotide
  Antisense strand to SEQ ID NO: 632590
auucaccagccuaauagau

SEQ ID NO: 632592 - RNA, 19 nt, Artificial Sequence
  Description of Artificial Sequence: Synthetic oligonucleotide
  Sense strand starting at position 2665 of SEQ ID NO: 585346
ggugaauugaagugacuca

SEQ ID NO: 632593 - RNA, 19 nt, Artificial Sequence
  Description of Artificial Sequence: Synthetic oligonucleotide
  Antisense strand to SEQ ID NO: 632592
ugagucacuucaauucacc

SEQ ID NO: 632594 - RNA, 19 nt, Artificial Sequence
  Description of Artificial Sequence: Synthetic oligonucleotide
  Sense strand starting at position 2672 of SEQ ID NO: 585346
ugaagugacucagacaaug

SEQ ID NO: 632595 - RNA, 19 nt, Artificial Sequence
  Description of Artificial Sequence: Synthetic oligonucleotide
  Antisense strand to SEQ ID NO: 632594
cauugucugagucacuuca

SEQ ID NO: 632596 - RNA, 19 nt, Artificial Sequence
  Description of Artificial Sequence: Synthetic oligonucleotide
  Sense strand starting at position 2710 of SEQ ID NO: 585346
auuaucuuagcaugaaaga

SEQ ID NO: 632597 - RNA, 19 nt, Artificial Sequence
  Description of Artificial Sequence: Synthetic oligonucleotide
  Antisense strand to SEQ ID NO: 632596
ucuuucaugcuaagauaau

SEQ ID NO: 632598 - RNA, 19 nt, Artificial Sequence
  Description of Artificial Sequence: Synthetic oligonucleotide
  Sense strand starting at position 2755 of SEQ ID NO: 585346
ggauccaagugcuuaauca

SEQ ID NO: 632599 - RNA, 19 nt, Artificial Sequence
  Description of Artificial Sequence: Synthetic oligonucleotide
  Antisense strand to SEQ ID NO: 632598
ugauuaagcacuuggaucc

SEQ ID NO: 632600 - RNA, 19 nt, Artificial Sequence
  Description of Artificial Sequence: Synthetic oligonucleotide
  Sense strand starting at position 3179 of SEQ ID NO: 585346
agauguccuuaaucgcaaa

SEQ ID NO: 632601 - RNA, 19 nt, Artificial Sequence
  Description of Artificial Sequence: Synthetic oligonucleotide
  Antisense strand to SEQ ID NO: 632600
uuugcgauuaaggacaucu

SEQ ID NO: 632602 - RNA, 19 nt, Artificial Sequence
  Description of Artificial Sequence: Synthetic oligonucleotide
  Sense strand starting at position 3223 of SEQ ID NO: 585346
ugagcuuucgaucgucuga

SEQ ID NO: 632603 - RNA, 19 nt, Artificial Sequence
  Description of Artificial Sequence: Synthetic oligonucleotide
  Antisense strand to SEQ ID NO: 632602
ucagacgaucgaaagcuca

SEQ ID NO: 632604 - RNA, 19 nt, Artificial Sequence
  Description of Artificial Sequence: Synthetic oligonucleotide
  Sense strand starting at position 3225 of SEQ ID NO: 585346
agcuuucgaucgucugaga

SEQ ID NO: 632605 - RNA, 19 nt, Artificial Sequence
  Description of Artificial Sequence: Synthetic oligonucleotide
  Antisense strand to SEQ ID NO: 632604
ucucagacgaucgaaagcu

SEQ ID NO: 632606 - RNA, 19 nt, Artificial Sequence
  Description of Artificial Sequence: Synthetic oligonucleotide
  Sense strand starting at position 3236 of SEQ ID NO: 585346
gucugagaugcugaguaug

SEQ ID NO: 632607 - RNA, 19 nt, Artificial Sequence
  Description of Artificial Sequence: Synthetic oligonucleotide
  Antisense strand to SEQ ID NO: 632606
cauacucagcaucucagac

SEQ ID NO: 632608 - RNA, 19 nt, Artificial Sequence
  Description of Artificial Sequence: Synthetic oligonucleotide
  Sense strand starting at position 3244 of SEQ ID NO: 585346
ugcugaguaugugcauuua

SEQ ID NO: 632609 - RNA, 19 nt, Artificial Sequence
  Description of Artificial Sequence: Synthetic oligonucleotide
  Antisense strand to SEQ ID NO: 632608
uaaaugcacauacucagca

SEQ ID NO: 632610 - RNA, 19 nt, Artificial Sequence
  Description of Artificial Sequence: Synthetic oligonucleotide
  Sense strand starting at position 3281 of SEQ ID NO: 585346
accaucagaucucugguuu

SEQ ID NO: 632611 - RNA, 19 nt, Artificial Sequence
  Description of Artificial Sequence: Synthetic oligonucleotide
  Antisense strand to SEQ ID NO: 632610
aaaccagagaucugauggu

SEQ ID NO: 632612 - RNA, 19 nt, Artificial Sequence
  Description of Artificial Sequence: Synthetic oligonucleotide
  Sense strand starting at position 3282 of SEQ ID NO: 585346
ccaucagaucucugguuuc

SEQ ID NO: 632613 - RNA, 19 nt, Artificial Sequence
  Description of Artificial Sequence: Synthetic oligonucleotide
  Antisense strand to SEQ ID NO: 632612
gaaaccagagaucugaugg

SEQ ID NO: 632614 - RNA, 19 nt, Artificial Sequence
  Description of Artificial Sequence: Synthetic oligonucleotide
  Sense strand starting at position 3285 of SEQ ID NO: 585346
ucagaucucugguuucuau

SEQ ID NO: 632615 - RNA, 19 nt, Artificial Sequence
  Description of Artificial Sequence: Synthetic oligonucleotide
  Antisense strand to SEQ ID NO: 632614
auagaaaccagagaucuga

SEQ ID NO: 632616 - RNA, 19 nt, Artificial Sequence
  Description of Artificial Sequence: Synthetic oligonucleotide
  Sense strand starting at position 3289 of SEQ ID NO: 585346
aucucugguuucuauauga

SEQ ID NO: 632617 - RNA, 19 nt, Artificial Sequence
  Description of Artificial Sequence: Synthetic oligonucleotide
  Antisense strand to SEQ ID NO: 632616
ucauauagaaaccagagau

SEQ ID NO: 632618 - RNA, 19 nt, Artificial Sequence
  Description of Artificial Sequence: Synthetic oligonucleotide
  Sense strand starting at position 3389 of SEQ ID NO: 585346
ucuuauauauugggucaau

SEQ ID NO: 632619 - RNA, 19 nt, Artificial Sequence
  Description of Artificial Sequence: Synthetic oligonucleotide
  Antisense strand to SEQ ID NO: 632618
auugacccaauauauaaga

SEQ ID NO: 632620 - RNA, 19 nt, Artificial Sequence
  Description of Artificial Sequence: Synthetic oligonucleotide
  Sense strand starting at position 3390 of SEQ ID NO: 585346
cuuauauauugggucaaug

SEQ ID NO: 632621 - RNA, 19 nt, Artificial Sequence
  Description of Artificial Sequence: Synthetic oligonucleotide
  Antisense strand to SEQ ID NO: 632620
cauugacccaauauauaag

SEQ ID NO: 632622 - RNA, 19 nt, Artificial Sequence
  Description of Artificial Sequence: Synthetic oligonucleotide
  Sense strand starting at position 3392 of SEQ ID NO: 585346
uauauauugggucaauguc

SEQ ID NO: 632623 - RNA, 19 nt, Artificial Sequence
  Description of Artificial Sequence: Synthetic oligonucleotide
  Antisense strand to SEQ ID NO: 632622
gacauugacccaauauaua

SEQ ID NO: 632624 - RNA, 19 nt, Artificial Sequence
  Description of Artificial Sequence: Synthetic oligonucleotide
  Sense strand starting at position 3424 of SEQ ID NO: 585346
agaaucuauguuuaggcua

SEQ ID NO: 632625 - RNA, 19 nt, Artificial Sequence
  Description of Artificial Sequence: Synthetic oligonucleotide
  Antisense strand to SEQ ID NO: 632624
uagccuaaacauagauucu

SEQ ID NO: 632626 - RNA, 19 nt, Artificial Sequence
  Description of Artificial Sequence: Synthetic oligonucleotide
  Sense strand starting at position 3426 of SEQ ID NO: 585346
aaucuauguuuaggcuaga

SEQ ID NO: 632627 - RNA, 19 nt, Artificial Sequence
  Description of Artificial Sequence: Synthetic oligonucleotide
  Antisense strand to SEQ ID NO: 632626
ucuagccuaaacauagauu

SEQ ID NO: 632628 - RNA, 19 nt, Artificial Sequence
  Description of Artificial Sequence: Synthetic oligonucleotide
  Sense strand starting at position 3429 of SEQ ID NO: 585346
cuauguuuaggcuagagca

SEQ ID NO: 632629 - RNA, 19 nt, Artificial Sequence
  Description of Artificial Sequence: Synthetic oligonucleotide
  Antisense strand to SEQ ID NO: 632628
ugcucuagccuaaacauag

SEQ ID NO: 632630 - RNA, 19 nt, Artificial Sequence
  Description of Artificial Sequence: Synthetic oligonucleotide
  Sense strand starting at position 3431 of SEQ ID NO: 585346
auguuuaggcuagagcaaa

SEQ ID NO: 632631 - RNA, 19 nt, Artificial Sequence
  Description of Artificial Sequence: Synthetic oligonucleotide
  Antisense strand to SEQ ID NO: 632630
uuugcucuagccuaaacau

SEQ ID NO: 632632 - RNA, 19 nt, Artificial Sequence
  Description of Artificial Sequence: Synthetic oligonucleotide
  Sense strand starting at position 3451 of SEQ ID NO: 585346
cagguagugagguauggau

SEQ ID NO: 632633 - RNA, 19 nt, Artificial Sequence
  Description of Artificial Sequence: Synthetic oligonucleotide
  Antisense strand to SEQ ID NO: 632632
auccauaccucacuaccug

SEQ ID NO: 632634 - RNA, 19 nt, Artificial Sequence
  Description of Artificial Sequence: Synthetic oligonucleotide
  Sense strand starting at position 3491 of SEQ ID NO: 585346
aacagacguucucagaaau

SEQ ID NO: 632635 - RNA, 19 nt, Artificial Sequence
  Description of Artificial Sequence: Synthetic oligonucleotide
  Antisense strand to SEQ ID NO: 632634
auuucugagaacgucuguu

SEQ ID NO: 632636 - RNA, 19 nt, Artificial Sequence
  Description of Artificial Sequence: Synthetic oligonucleotide
  Sense strand starting at position 3667 of SEQ ID NO: 585346
accugcuacuugucaggaa

SEQ ID NO: 632637 - RNA, 19 nt, Artificial Sequence
  Description of Artificial Sequence: Synthetic oligonucleotide
  Antisense strand to SEQ ID NO: 632636
uuccugacaaguagcaggu

SEQ ID NO: 632638 - RNA, 19 nt, Artificial Sequence
  Description of Artificial Sequence: Synthetic oligonucleotide
  Sense strand starting at position 3719 of SEQ ID NO: 585346
aagcaaagaucguugccuu

SEQ ID NO: 632639 - RNA, 19 nt, Artificial Sequence
  Description of Artificial Sequence: Synthetic oligonucleotide
  Antisense strand to SEQ ID NO: 632638
aaggcaacgaucuuugcuu

SEQ ID NO: 632640 - RNA, 19 nt, Artificial Sequence
  Description of Artificial Sequence: Synthetic oligonucleotide
  Sense strand starting at position 3722 of SEQ ID NO: 585346
caaagaucguugccuucuu

SEQ ID NO: 632641 - RNA, 19 nt, Artificial Sequence
  Description of Artificial Sequence: Synthetic oligonucleotide
  Antisense strand to SEQ ID NO: 632640
aagaaggcaacgaucuuug

SEQ ID NO: 632642 - RNA, 19 nt, Artificial Sequence
  Description of Artificial Sequence: Synthetic oligonucleotide
  Sense strand starting at position 3753 of SEQ ID NO: 585346
uuuaaucaguguuaccuuu

SEQ ID NO: 632643 - RNA, 19 nt, Artificial Sequence
  Description of Artificial Sequence: Synthetic oligonucleotide
  Antisense strand to SEQ ID NO: 632642
aaagguaacacugauuaaa

SEQ ID NO: 632644 - RNA, 19 nt, Artificial Sequence
  Description of Artificial Sequence: Synthetic oligonucleotide
  Sense strand starting at position 3760 of SEQ ID NO: 585346
aguguuaccuuucccucaa

SEQ ID NO: 632645 - RNA, 19 nt, Artificial Sequence
  Description of Artificial Sequence: Synthetic oligonucleotide
  Antisense strand to SEQ ID NO: 632644
uugagggaaagguaacacu

SEQ ID NO: 632646 - RNA, 19 nt, Artificial Sequence
  Description of Artificial Sequence: Synthetic oligonucleotide
  Sense strand starting at position 3761 of SEQ ID NO: 585346
guguuaccuuucccucaaa

SEQ ID NO: 632647 - RNA, 19 nt, Artificial Sequence
  Description of Artificial Sequence: Synthetic oligonucleotide
  Antisense strand to SEQ ID NO: 632646
uuugagggaaagguaacac

SEQ ID NO: 632648 - RNA, 19 nt, Artificial Sequence
  Description of Artificial Sequence: Synthetic oligonucleotide
  Sense strand starting at position 3798 of SEQ ID NO: 585346
agaggaguuugcugaggac

SEQ ID NO: 632649 - RNA, 19 nt, Artificial Sequence
  Description of Artificial Sequence: Synthetic oligonucleotide
  Antisense strand to SEQ ID NO: 632648
guccucagcaaacuccucu

SEQ ID NO: 632650 - RNA, 19 nt, Artificial Sequence
  Description of Artificial Sequence: Synthetic oligonucleotide
  Sense strand starting at position 3801 of SEQ ID NO: 585346
ggaguuugcugaggacaaa

SEQ ID NO: 632651 - RNA, 19 nt, Artificial Sequence
  Description of Artificial Sequence: Synthetic oligonucleotide
  Antisense strand to SEQ ID NO: 632650
uuuguccucagcaaacucc

SEQ ID NO: 632652 - RNA, 19 nt, Artificial Sequence
  Description of Artificial Sequence: Synthetic oligonucleotide
  Sense strand starting at position 3932 of SEQ ID NO: 585346
aacaacagucguuguguga

SEQ ID NO: 632653 - RNA, 19 nt, Artificial Sequence
  Description of Artificial Sequence: Synthetic oligonucleotide
  Antisense strand to SEQ ID NO: 632652
ucacacaacgacuguuguu

SEQ ID NO: 632654 - RNA, 19 nt, Artificial Sequence
  Description of Artificial Sequence: Synthetic oligonucleotide
  Sense strand starting at position 3935 of SEQ ID NO: 585346
aacagucguugugugaaac

SEQ ID NO: 632655 - RNA, 19 nt, Artificial Sequence
  Description of Artificial Sequence: Synthetic oligonucleotide
  Antisense strand to SEQ ID NO: 632654
guuucacacaacgacuguu

SEQ ID NO: 632656 - RNA, 19 nt, Artificial Sequence
  Description of Artificial Sequence: Synthetic oligonucleotide
  Sense strand starting at position 3936 of SEQ ID NO: 585346
acagucguugugugaaacu

SEQ ID NO: 632657 - RNA, 19 nt, Artificial Sequence
  Description of Artificial Sequence: Synthetic oligonucleotide
  Antisense strand to SEQ ID NO: 632656
aguuucacacaacgacugu

SEQ ID NO: 632658 - RNA, 19 nt, Artificial Sequence
  Description of Artificial Sequence: Synthetic oligonucleotide
  Sense strand starting at position 3945 of SEQ ID NO: 585346
gugugaaacucugagccuu

SEQ ID NO: 632659 - RNA, 19 nt, Artificial Sequence
  Description of Artificial Sequence: Synthetic oligonucleotide
  Antisense strand to SEQ ID NO: 632658
aaggcucagaguuucacac

SEQ ID NO: 632660 - RNA, 19 nt, Artificial Sequence
  Description of Artificial Sequence: Synthetic oligonucleotide
  Sense strand starting at position 1 of SEQ ID NO: 585347
auucuagccugagugagaa

SEQ ID NO: 632661 - RNA, 19 nt, Artificial Sequence
  Description of Artificial Sequence: Synthetic oligonucleotide
  Antisense strand to SEQ ID NO: 632660
uucucacucaggcuagaau

SEQ ID NO: 632662 - RNA, 19 nt, Artificial Sequence
  Description of Artificial Sequence: Synthetic oligonucleotide
  Sense strand starting at position 223 of SEQ ID NO: 585347
ucagcuuuaucagaggugu

SEQ ID NO: 632663 - RNA, 19 nt, Artificial Sequence
  Description of Artificial Sequence: Synthetic oligonucleotide
  Antisense strand to SEQ ID NO: 632662
acaccucugauaaagcuga

SEQ ID NO: 632664 - RNA, 19 nt, Artificial Sequence
  Description of Artificial Sequence: Synthetic oligonucleotide
  Sense strand starting at position 225 of SEQ ID NO: 585347
agcuuuaucagagguguuu

SEQ ID NO: 632665 - RNA, 19 nt, Artificial Sequence
  Description of Artificial Sequence: Synthetic oligonucleotide
  Antisense strand to SEQ ID NO: 632664
aaacaccucugauaaagcu

SEQ ID NO: 632666 - RNA, 19 nt, Artificial Sequence
  Description of Artificial Sequence: Synthetic oligonucleotide
  Sense strand starting at position 234 of SEQ ID NO: 585347
agagguguuuacucuguac

SEQ ID NO: 632667 - RNA, 19 nt, Artificial Sequence
  Description of Artificial Sequence: Synthetic oligonucleotide
  Antisense strand to SEQ ID NO: 632666
guacagaguaaacaccucu

SEQ ID NO: 632668 - RNA, 19 nt, Artificial Sequence
  Description of Artificial Sequence: Synthetic oligonucleotide
  Sense strand starting at position 236 of SEQ ID NO: 585347
agguguuuacucuguaccu

SEQ ID NO: 632669 - RNA, 19 nt, Artificial Sequence
  Description of Artificial Sequence: Synthetic oligonucleotide
  Antisense strand to SEQ ID NO: 632668
agguacagaguaaacaccu

SEQ ID NO: 632670 - RNA, 19 nt, Artificial Sequence
  Description of Artificial Sequence: Synthetic oligonucleotide
  Sense strand starting at position 237 of SEQ ID NO: 585347
gguguuuacucuguaccua

SEQ ID NO: 632671 - RNA, 19 nt, Artificial Sequence
  Description of Artificial Sequence: Synthetic oligonucleotide
  Antisense strand to SEQ ID NO: 632670
uagguacagaguaaacacc

SEQ ID NO: 632672 - RNA, 19 nt, Artificial Sequence
  Description of Artificial Sequence: Synthetic oligonucleotide
  Sense strand starting at position 293 of SEQ ID NO: 585347
gucacugcucucuggagga

SEQ ID NO: 632673 - RNA, 19 nt, Artificial Sequence
  Description of Artificial Sequence: Synthetic oligonucleotide
  Antisense strand to SEQ ID NO: 632672
uccuccagagagcagugac

SEQ ID NO: 632674 - RNA, 19 nt, Artificial Sequence
  Description of Artificial Sequence: Synthetic oligonucleotide
  Sense strand starting at position 306 of SEQ ID NO: 585347
ggaggaggccugcacaaau

SEQ ID NO: 632675 - RNA, 19 nt, Artificial Sequence
  Description of Artificial Sequence: Synthetic oligonucleotide
  Antisense strand to SEQ ID NO: 632674
auuugugcaggccuccucc

SEQ ID NO: 632676 - RNA, 19 nt, Artificial Sequence
  Description of Artificial Sequence: Synthetic oligonucleotide
  Sense strand starting at position 374 of SEQ ID NO: 585347
guuagaucuaguggaagug

SEQ ID NO: 632677 - RNA, 19 nt, Artificial Sequence
  Description of Artificial Sequence: Synthetic oligonucleotide
  Antisense strand to SEQ ID NO: 632676
cacuuccacuagaucuaac

SEQ ID NO: 632678 - RNA, 19 nt, Artificial Sequence
  Description of Artificial Sequence: Synthetic oligonucleotide
  Sense strand starting at position 406 of SEQ ID NO: 585347
agggauuccacgugugaag

SEQ ID NO: 632679 - RNA, 19 nt, Artificial Sequence
  Description of Artificial Sequence: Synthetic oligonucleotide
  Antisense strand to SEQ ID NO: 632678
cuucacacguggaaucccu

SEQ ID NO: 632680 - RNA, 19 nt, Artificial Sequence
  Description of Artificial Sequence: Synthetic oligonucleotide
  Sense strand starting at position 445 of SEQ ID NO: 585347
cuggaugguucugcgagaa

SEQ ID NO: 632681 - RNA, 19 nt, Artificial Sequence
  Description of Artificial Sequence: Synthetic oligonucleotide
  Antisense strand to SEQ ID NO: 632680
uucucgcagaaccauccag

SEQ ID NO: 632682 - RNA, 19 nt, Artificial Sequence
  Description of Artificial Sequence: Synthetic oligonucleotide
  Sense strand starting at position 447 of SEQ ID NO: 585347
ggaugguucugcgagaagg

SEQ ID NO: 632683 - RNA, 19 nt, Artificial Sequence
  Description of Artificial Sequence: Synthetic oligonucleotide
  Antisense strand to SEQ ID NO: 632682
ccuucucgcagaaccaucc

SEQ ID NO: 632684 - RNA, 19 nt, Artificial Sequence
  Description of Artificial Sequence: Synthetic oligonucleotide
  Sense strand starting at position 478 of SEQ ID NO: 585347
gcuggaaugccaggugaga

SEQ ID NO: 632685 - RNA, 19 nt, Artificial Sequence
  Description of Artificial Sequence: Synthetic oligonucleotide
  Antisense strand to SEQ ID NO: 632684
ucucaccuggcauuccagc

SEQ ID NO: 632686 - RNA, 19 nt, Artificial Sequence
  Description of Artificial Sequence: Synthetic oligonucleotide
  Sense strand starting at position 738 of SEQ ID NO: 585347
guggguguacccuagagga

SEQ ID NO: 632687 - RNA, 19 nt, Artificial Sequence
  Description of Artificial Sequence: Synthetic oligonucleotide
  Antisense strand to SEQ ID NO: 632686
uccucuaggguacacccac

SEQ ID NO: 632688 - RNA, 19 nt, Artificial Sequence
  Description of Artificial Sequence: Synthetic oligonucleotide
  Sense strand starting at position 890 of SEQ ID NO: 585347
agcugcuccucugaagaua

SEQ ID NO: 632689 - RNA, 19 nt, Artificial Sequence
  Description of Artificial Sequence: Synthetic oligonucleotide
  Antisense strand to SEQ ID NO: 632688
uaucuucagaggagcagcu

SEQ ID NO: 632690 - RNA, 19 nt, Artificial Sequence
  Description of Artificial Sequence: Synthetic oligonucleotide
  Sense strand starting at position 1013 of SEQ ID NO: 585347
ggagguggcggccagaauu

SEQ ID NO: 632691 - RNA, 19 nt, Artificial Sequence
  Description of Artificial Sequence: Synthetic oligonucleotide
  Antisense strand to SEQ ID NO: 632690
aauucuggccgccaccucc

SEQ ID NO: 632692 - RNA, 19 nt, Artificial Sequence
  Description of Artificial Sequence: Synthetic oligonucleotide
  Sense strand starting at position 1019 of SEQ ID NO: 585347
ggcggccagaauuaauuaa

SEQ ID NO: 632693 - RNA, 19 nt, Artificial Sequence
  Description of Artificial Sequence: Synthetic oligonucleotide
  Antisense strand to SEQ ID NO: 632692
uuaauuaauucuggccgcc

SEQ ID NO: 632694 - RNA, 19 nt, Artificial Sequence
  Description of Artificial Sequence: Synthetic oligonucleotide
  Sense strand starting at position 1032 of SEQ ID NO: 585347
aauuaauguuugugaagug

SEQ ID NO: 632695 - RNA, 19 nt, Artificial Sequence
  Description of Artificial Sequence: Synthetic oligonucleotide
  Antisense strand to SEQ ID NO: 632694
cacuucacaaacauuaauu

SEQ ID NO: 632696 - RNA, 19 nt, Artificial Sequence
  Description of Artificial Sequence: Synthetic oligonucleotide
  Sense strand starting at position 1037 of SEQ ID NO: 585347
auguuugugaagugcugga

SEQ ID NO: 632697 - RNA, 19 nt, Artificial Sequence
  Description of Artificial Sequence: Synthetic oligonucleotide
  Antisense strand to SEQ ID NO: 632696
uccagcacuucacaaacau

SEQ ID NO: 632698 - RNA, 19 nt, Artificial Sequence
  Description of Artificial Sequence: Synthetic oligonucleotide
  Sense strand starting at position 1041 of SEQ ID NO: 585347
uugugaagugcuggagaga

SEQ ID NO: 632699 - RNA, 19 nt, Artificial Sequence
  Description of Artificial Sequence: Synthetic oligonucleotide
  Antisense strand to SEQ ID NO: 632698
ucucuccagcacuucacaa

SEQ ID NO: 632700 - RNA, 19 nt, Artificial Sequence
  Description of Artificial Sequence: Synthetic oligonucleotide
  Sense strand starting at position 1042 of SEQ ID NO: 585347
ugugaagugcuggagagaa

SEQ ID NO: 632701 - RNA, 19 nt, Artificial Sequence
  Description of Artificial Sequence: Synthetic oligonucleotide
  Antisense strand to SEQ ID NO: 632700
uucucuccagcacuucaca

SEQ ID NO: 632702 - RNA, 19 nt, Artificial Sequence
  Description of Artificial Sequence: Synthetic oligonucleotide
  Sense strand starting at position 1172 of SEQ ID NO: 585347
agaagacacuccuacugaa

SEQ ID NO: 632703 - RNA, 19 nt, Artificial Sequence
  Description of Artificial Sequence: Synthetic oligonucleotide
  Antisense strand to SEQ ID NO: 632702
uucaguaggagugucuucu

SEQ ID NO: 632704 - RNA, 19 nt, Artificial Sequence
  Description of Artificial Sequence: Synthetic oligonucleotide
  Sense strand starting at position 1501 of SEQ ID NO: 585347
ccgaguccuaccugagcaa

SEQ ID NO: 632705 - RNA, 19 nt, Artificial Sequence
  Description of Artificial Sequence: Synthetic oligonucleotide
  Antisense strand to SEQ ID NO: 632704
uugcucagguaggacucgg

SEQ ID NO: 632706 - RNA, 19 nt, Artificial Sequence
  Description of Artificial Sequence: Synthetic oligonucleotide
  Sense strand starting at position 1502 of SEQ ID NO: 585347
cgaguccuaccugagcaaa

SEQ ID NO: 632707 - RNA, 19 nt, Artificial Sequence
  Description of Artificial Sequence: Synthetic oligonucleotide
  Antisense strand to SEQ ID NO: 632706
uuugcucagguaggacucg

SEQ ID NO: 632708 - RNA, 19 nt, Artificial Sequence
  Description of Artificial Sequence: Synthetic oligonucleotide
  Sense strand starting at position 1504 of SEQ ID NO: 585347
aguccuaccugagcaaaca

SEQ ID NO: 632709 - RNA, 19 nt, Artificial Sequence
  Description of Artificial Sequence: Synthetic oligonucleotide
  Antisense strand to SEQ ID NO: 632708
uguuugcucagguaggacu

SEQ ID NO: 632710 - RNA, 19 nt, Artificial Sequence
  Description of Artificial Sequence: Synthetic oligonucleotide
  Sense strand starting at position 2537 of SEQ ID NO: 585347
gcgcucaucccuuugcaga

SEQ ID NO: 632711 - RNA, 19 nt, Artificial Sequence
  Description of Artificial Sequence: Synthetic oligonucleotide
  Antisense strand to SEQ ID NO: 632710
ucugcaaagggaugagcgc

SEQ ID NO: 632712 - RNA, 19 nt, Artificial Sequence
  Description of Artificial Sequence: Synthetic oligonucleotide
  Sense strand starting at position 2606 of SEQ ID NO: 585347
auagaaagugcucaggcuu

SEQ ID NO: 632713 - RNA, 19 nt, Artificial Sequence
  Description of Artificial Sequence: Synthetic oligonucleotide
  Antisense strand to SEQ ID NO: 632712
aagccugagcacuuucuau

SEQ ID NO: 632714 - RNA, 19 nt, Artificial Sequence
  Description of Artificial Sequence: Synthetic oligonucleotide
  Sense strand starting at position 2668 of SEQ ID NO: 585347
uccgcauuccuguguacaa

SEQ ID NO: 632715 - RNA, 19 nt, Artificial Sequence
  Description of Artificial Sequence: Synthetic oligonucleotide
  Antisense strand to SEQ ID NO: 632714
uuguacacaggaaugcgga

SEQ ID NO: 632716 - RNA, 19 nt, Artificial Sequence
  Description of Artificial Sequence: Synthetic oligonucleotide
  Sense strand starting at position 2669 of SEQ ID NO: 585347
ccgcauuccuguguacaaa

SEQ ID NO: 632717 - RNA, 19 nt, Artificial Sequence
  Description of Artificial Sequence: Synthetic oligonucleotide
  Antisense strand to SEQ ID NO: 632716
uuuguacacaggaaugcgg

SEQ ID NO: 632718 - RNA, 19 nt, Artificial Sequence
  Description of Artificial Sequence: Synthetic oligonucleotide
  Sense strand starting at position 2670 of SEQ ID NO: 585347
cgcauuccuguguacaaag

SEQ ID NO: 632719 - RNA, 19 nt, Artificial Sequence
  Description of Artificial Sequence: Synthetic oligonucleotide
  Antisense strand to SEQ ID NO: 632718
cuuuguacacaggaaugcg

SEQ ID NO: 632720 - RNA, 19 nt, Artificial Sequence
  Description of Artificial Sequence: Synthetic oligonucleotide
  Sense strand starting at position 2973 of SEQ ID NO: 585347
uuugcuuccuaguccuuua

SEQ ID NO: 632721 - RNA, 19 nt, Artificial Sequence
  Description of Artificial Sequence: Synthetic oligonucleotide
  Antisense strand to SEQ ID NO: 632720
uaaaggacuaggaagcaaa

SEQ ID NO: 632722 - RNA, 19 nt, Artificial Sequence
  Description of Artificial Sequence: Synthetic oligonucleotide
  Sense strand starting at position 3086 of SEQ ID NO: 585347
ggcguuugucccugggaga

SEQ ID NO: 632723 - RNA, 19 nt, Artificial Sequence
  Description of Artificial Sequence: Synthetic oligonucleotide
  Antisense strand to SEQ ID NO: 632722
ucucccagggacaaacgcc

SEQ ID NO: 632724 - RNA, 19 nt, Artificial Sequence
  Description of Artificial Sequence: Synthetic oligonucleotide
  Sense strand starting at position 3087 of SEQ ID NO: 585347
gcguuugucccugggagag

SEQ ID NO: 632725 - RNA, 19 nt, Artificial Sequence
  Description of Artificial Sequence: Synthetic oligonucleotide
  Antisense strand to SEQ ID NO: 632724
cucucccagggacaaacgc

SEQ ID NO: 632726 - RNA, 19 nt, Artificial Sequence
  Description of Artificial Sequence: Synthetic oligonucleotide
  Sense strand starting at position 3310 of SEQ ID NO: 585347
ccuccaggaucgcuaagua

SEQ ID NO: 632727 - RNA, 19 nt, Artificial Sequence
  Description of Artificial Sequence: Synthetic oligonucleotide
  Antisense strand to SEQ ID NO: 632726
uacuuagcgauccuggagg

SEQ ID NO: 632728 - RNA, 19 nt, Artificial Sequence
  Description of Artificial Sequence: Synthetic oligonucleotide
  Sense strand starting at position 3395 of SEQ ID NO: 585347
guccacaccuucgucuaua

SEQ ID NO: 632729 - RNA, 19 nt, Artificial Sequence
  Description of Artificial Sequence: Synthetic oligonucleotide
  Antisense strand to SEQ ID NO: 632728
uauagacgaagguguggac

SEQ ID NO: 632730 - RNA, 19 nt, Artificial Sequence
  Description of Artificial Sequence: Synthetic oligonucleotide
  Sense strand starting at position 3396 of SEQ ID NO: 585347
uccacaccuucgucuauau

SEQ ID NO: 632731 - RNA, 19 nt, Artificial Sequence
  Description of Artificial Sequence: Synthetic oligonucleotide
  Antisense strand to SEQ ID NO: 632730
auauagacgaaggugugga

SEQ ID NO: 632732 - RNA, 19 nt, Artificial Sequence
  Description of Artificial Sequence: Synthetic oligonucleotide
  Sense strand starting at position 3457 of SEQ ID NO: 585347
accuuugaugcaugcugau

SEQ ID NO: 632733 - RNA, 19 nt, Artificial Sequence
  Description of Artificial Sequence: Synthetic oligonucleotide
  Antisense strand to SEQ ID NO: 632732
aucagcaugcaucaaaggu

SEQ ID NO: 632734 - RNA, 19 nt, Artificial Sequence
  Description of Artificial Sequence: Synthetic oligonucleotide
  Sense strand starting at position 3510 of SEQ ID NO: 585347
ugcuuuaaugcugauugua

SEQ ID NO: 632735 - RNA, 19 nt, Artificial Sequence
  Description of Artificial Sequence: Synthetic oligonucleotide
  Antisense strand to SEQ ID NO: 632734
uacaaucagcauuaaagca

SEQ ID NO: 632736 - RNA, 19 nt, Artificial Sequence
  Description of Artificial Sequence: Synthetic oligonucleotide
  Sense strand starting at position 3512 of SEQ ID NO: 585347
cuuuaaugcugauuguaac

SEQ ID NO: 632737 - RNA, 19 nt, Artificial Sequence
  Description of Artificial Sequence: Synthetic oligonucleotide
  Antisense strand to SEQ ID NO: 632736
guuacaaucagcauuaaag

SEQ ID NO: 632738 - RNA, 19 nt, Artificial Sequence
  Description of Artificial Sequence: Synthetic oligonucleotide
  Sense strand starting at position 3714 of SEQ ID NO: 585347
cggguauucuccuauuacc

SEQ ID NO: 632739 - RNA, 19 nt, Artificial Sequence
  Description of Artificial Sequence: Synthetic oligonucleotide
  Antisense strand to SEQ ID NO: 632738
gguaauaggagaauacccg

SEQ ID NO: 632740 - RNA, 19 nt, Artificial Sequence
  Description of Artificial Sequence: Synthetic oligonucleotide
  Sense strand starting at position 238 of SEQ ID NO: 585348
agcagauguucccuggauu

SEQ ID NO: 632741 - RNA, 19 nt, Artificial Sequence
  Description of Artificial Sequence: Synthetic oligonucleotide
  Antisense strand to SEQ ID NO: 632740
aauccagggaacaucugcu

SEQ ID NO: 632742 - RNA, 19 nt, Artificial Sequence
  Description of Artificial Sequence: Synthetic oligonucleotide
  Sense strand starting at position 239 of SEQ ID NO: 585348
gcagauguucccuggauua

SEQ ID NO: 632743 - RNA, 19 nt, Artificial Sequence
  Description of Artificial Sequence: Synthetic oligonucleotide
  Antisense strand to SEQ ID NO: 632742
uaauccagggaacaucugc

SEQ ID NO: 632744 - RNA, 19 nt, Artificial Sequence
  Description of Artificial Sequence: Synthetic oligonucleotide
  Sense strand starting at position 263 of SEQ ID NO: 585348
agugcuucuccgcugggua

SEQ ID NO: 632745 - RNA, 19 nt, Artificial Sequence
  Description of Artificial Sequence: Synthetic oligonucleotide
  Antisense strand to SEQ ID NO: 632744
uacccagcggagaagcacu

SEQ ID NO: 632746 - RNA, 19 nt, Artificial Sequence
  Description of Artificial Sequence: Synthetic oligonucleotide
  Sense strand starting at position 286 of SEQ ID NO: 585348
ugacguucugaguggaaga

SEQ ID NO: 632747 - RNA, 19 nt, Artificial Sequence
  Description of Artificial Sequence: Synthetic oligonucleotide
  Antisense strand to SEQ ID NO: 632746
ucuuccacucagaacguca

SEQ ID NO: 632748 - RNA, 19 nt, Artificial Sequence
  Description of Artificial Sequence: Synthetic oligonucleotide
  Sense strand starting at position 768 of SEQ ID NO: 585348
gcaucauuagcccagcuga

SEQ ID NO: 632749 - RNA, 19 nt, Artificial Sequence
  Description of Artificial Sequence: Synthetic oligonucleotide
  Antisense strand to SEQ ID NO: 632748
ucagcugggcuaaugaugc

SEQ ID NO: 632750 - RNA, 19 nt, Artificial Sequence
  Description of Artificial Sequence: Synthetic oligonucleotide
  Sense strand starting at position 1107 of SEQ ID NO: 585348
cccugacugcaccgucaaa

SEQ ID NO: 632751 - RNA, 19 nt, Artificial Sequence
  Description of Artificial Sequence: Synthetic oligonucleotide
  Antisense strand to SEQ ID NO: 632750
uuugacggugcagucaggg

SEQ ID NO: 632752 - RNA, 19 nt, Artificial Sequence
  Description of Artificial Sequence: Synthetic oligonucleotide
  Sense strand starting at position 1305 of SEQ ID NO: 585348
ggugaugccacuugguaga

SEQ ID NO: 632753 - RNA, 19 nt, Artificial Sequence
  Description of Artificial Sequence: Synthetic oligonucleotide
  Antisense strand to SEQ ID NO: 632752
ucuaccaaguggcaucacc

SEQ ID NO: 632754 - RNA, 19 nt, Artificial Sequence
  Description of Artificial Sequence: Synthetic oligonucleotide
  Sense strand starting at position 1307 of SEQ ID NO: 585348
ugaugccacuugguagauu

SEQ ID NO: 632755 - RNA, 19 nt, Artificial Sequence
  Description of Artificial Sequence: Synthetic oligonucleotide
  Antisense strand to SEQ ID NO: 632754
aaucuaccaaguggcauca

SEQ ID NO: 632756 - RNA, 19 nt, Artificial Sequence
  Description of Artificial Sequence: Synthetic oligonucleotide
  Sense strand starting at position 1308 of SEQ ID NO: 585348
gaugccacuugguagauuu

SEQ ID NO: 632757 - RNA, 19 nt, Artificial Sequence
  Description of Artificial Sequence: Synthetic oligonucleotide
  Antisense strand to SEQ ID NO: 632756
aaaucuaccaaguggcauc

SEQ ID NO: 632758 - RNA, 19 nt, Artificial Sequence
  Description of Artificial Sequence: Synthetic oligonucleotide
  Sense strand starting at position 1377 of SEQ ID NO: 585348
ugggaugaauuccugcaga

SEQ ID NO: 632759 - RNA, 19 nt, Artificial Sequence
  Description of Artificial Sequence: Synthetic oligonucleotide
  Antisense strand to SEQ ID NO: 632758
ucugcaggaauucauccca

SEQ ID NO: 632760 - RNA, 19 nt, Artificial Sequence
  Description of Artificial Sequence: Synthetic oligonucleotide
  Sense strand starting at position 1414 of SEQ ID NO: 585348
acagaauuguagccaggga

SEQ ID NO: 632761 - RNA, 19 nt, Artificial Sequence
  Description of Artificial Sequence: Synthetic oligonucleotide
  Antisense strand to SEQ ID NO: 632760
ucccuggcuacaauucugu

SEQ ID NO: 632762 - RNA, 19 nt, Artificial Sequence
  Description of Artificial Sequence: Synthetic oligonucleotide
  Sense strand starting at position 2006 of SEQ ID NO: 585348
cugugaggacuuugcaaag

SEQ ID NO: 632763 - RNA, 19 nt, Artificial Sequence
  Description of Artificial Sequence: Synthetic oligonucleotide
  Antisense strand to SEQ ID NO: 632762
cuuugcaaaguccucacag

SEQ ID NO: 632764 - RNA, 19 nt, Artificial Sequence
  Description of Artificial Sequence: Synthetic oligonucleotide
  Sense strand starting at position 2052 of SEQ ID NO: 585348
gguguuguggcuuugguua

SEQ ID NO: 632765 - RNA, 19 nt, Artificial Sequence
  Description of Artificial Sequence: Synthetic oligonucleotide
  Antisense strand to SEQ ID NO: 632764
uaaccaaagccacaacacc

SEQ ID NO: 632766 - RNA, 19 nt, Artificial Sequence
  Description of Artificial Sequence: Synthetic oligonucleotide
  Sense strand starting at position 2095 of SEQ ID NO: 585348
aaguauguacucugucgau

SEQ ID NO: 632767 - RNA, 19 nt, Artificial Sequence
  Description of Artificial Sequence: Synthetic oligonucleotide
  Antisense strand to SEQ ID NO: 632766
aucgacagaguacauacuu

SEQ ID NO: 632768 - RNA, 19 nt, Artificial Sequence
  Description of Artificial Sequence: Synthetic oligonucleotide
  Sense strand starting at position 2099 of SEQ ID NO: 585348
auguacucugucgauauau

SEQ ID NO: 632769 - RNA, 19 nt, Artificial Sequence
  Description of Artificial Sequence: Synthetic oligonucleotide
  Antisense strand to SEQ ID NO: 632768
auauaucgacagaguacau

SEQ ID NO: 632770 - RNA, 19 nt, Artificial Sequence
  Description of Artificial Sequence: Synthetic oligonucleotide
  Sense strand starting at position 2101 of SEQ ID NO: 585348
guacucugucgauauauuc

SEQ ID NO: 632771 - RNA, 19 nt, Artificial Sequence
  Description of Artificial Sequence: Synthetic oligonucleotide
  Antisense strand to SEQ ID NO: 632770
gaauauaucgacagaguac

SEQ ID NO: 632772 - RNA, 19 nt, Artificial Sequence
  Description of Artificial Sequence: Synthetic oligonucleotide
  Sense strand starting at position 2108 of SEQ ID NO: 585348
gucgauauauucuuagaca

SEQ ID NO: 632773 - RNA, 19 nt, Artificial Sequence
  Description of Artificial Sequence: Synthetic oligonucleotide
  Antisense strand to SEQ ID NO: 632772
ugucuaagaauauaucgac

SEQ ID NO: 632774 - RNA, 19 nt, Artificial Sequence
  Description of Artificial Sequence: Synthetic oligonucleotide
  Sense strand starting at position 2133 of SEQ ID NO: 585348
gccagaaucugaguaagaa

SEQ ID NO: 632775 - RNA, 19 nt, Artificial Sequence
  Description of Artificial Sequence: Synthetic oligonucleotide
  Antisense strand to SEQ ID NO: 632774
uucuuacucagauucuggc

SEQ ID NO: 632776 - RNA, 19 nt, Artificial Sequence
  Description of Artificial Sequence: Synthetic oligonucleotide
  Sense strand starting at position 2142 of SEQ ID NO: 585348
ugaguaagaacuugcaugu

SEQ ID NO: 632777 - RNA, 19 nt, Artificial Sequence
  Description of Artificial Sequence: Synthetic oligonucleotide
  Antisense strand to SEQ ID NO: 632776
acaugcaaguucuuacuca

SEQ ID NO: 632778 - RNA, 19 nt, Artificial Sequence
  Description of Artificial Sequence: Synthetic oligonucleotide
  Sense strand starting at position 2146 of SEQ ID NO: 585348
uaagaacuugcaugugcua

SEQ ID NO: 632779 - RNA, 19 nt, Artificial Sequence
  Description of Artificial Sequence: Synthetic oligonucleotide
  Antisense strand to SEQ ID NO: 632778
uagcacaugcaaguucuua

SEQ ID NO: 632780 - RNA, 19 nt, Artificial Sequence
  Description of Artificial Sequence: Synthetic oligonucleotide
  Sense strand starting at position 2148 of SEQ ID NO: 585348
agaacuugcaugugcuaga

SEQ ID NO: 632781 - RNA, 19 nt, Artificial Sequence
  Description of Artificial Sequence: Synthetic oligonucleotide
  Antisense strand to SEQ ID NO: 632780
ucuagcacaugcaaguucu

SEQ ID NO: 632782 - RNA, 19 nt, Artificial Sequence
  Description of Artificial Sequence: Synthetic oligonucleotide
  Sense strand starting at position 2149 of SEQ ID NO: 585348
gaacuugcaugugcuagau

SEQ ID NO: 632783 - RNA, 19 nt, Artificial Sequence
  Description of Artificial Sequence: Synthetic oligonucleotide
  Antisense strand to SEQ ID NO: 632782
aucuagcacaugcaaguuc

SEQ ID NO: 632784 - RNA, 19 nt, Artificial Sequence
  Description of Artificial Sequence: Synthetic oligonucleotide
  Sense strand starting at position 2234 of SEQ ID NO: 585348
cucagaucugcuggaagaa

SEQ ID NO: 632785 - RNA, 19 nt, Artificial Sequence
  Description of Artificial Sequence: Synthetic oligonucleotide
  Antisense strand to SEQ ID NO: 632784
uucuuccagcagaucugag

SEQ ID NO: 632786 - RNA, 19 nt, Artificial Sequence
  Description of Artificial Sequence: Synthetic oligonucleotide
  Sense strand starting at position 2262 of SEQ ID NO: 585348
gaaagagguuuggcaccau

SEQ ID NO: 632787 - RNA, 19 nt, Artificial Sequence
  Description of Artificial Sequence: Synthetic oligonucleotide
  Antisense strand to SEQ ID NO: 632786
auggugccaaaccucuuuc

SEQ ID NO: 632788 - RNA, 19 nt, Artificial Sequence
  Description of Artificial Sequence: Synthetic oligonucleotide
  Sense strand starting at position 2266 of SEQ ID NO: 585348
gagguuuggcaccaugcau

SEQ ID NO: 632789 - RNA, 19 nt, Artificial Sequence
  Description of Artificial Sequence: Synthetic oligonucleotide
  Antisense strand to SEQ ID NO: 632788
augcauggugccaaaccuc

SEQ ID NO: 632790 - RNA, 19 nt, Artificial Sequence
  Description of Artificial Sequence: Synthetic oligonucleotide
  Sense strand starting at position 2428 of SEQ ID NO: 585348
gugacaacuugauuaugua

SEQ ID NO: 632791 - RNA, 19 nt, Artificial Sequence
  Description of Artificial Sequence: Synthetic oligonucleotide
  Antisense strand to SEQ ID NO: 632790
uacauaaucaaguugucac

SEQ ID NO: 632792 - RNA, 19 nt, Artificial Sequence
  Description of Artificial Sequence: Synthetic oligonucleotide
  Sense strand starting at position 2492 of SEQ ID NO: 585348
uagaaagugccuuagucag

SEQ ID NO: 632793 - RNA, 19 nt, Artificial Sequence
  Description of Artificial Sequence: Synthetic oligonucleotide
  Antisense strand to SEQ ID NO: 632792
cugacuaaggcacuuucua

SEQ ID NO: 632794 - RNA, 19 nt, Artificial Sequence
  Description of Artificial Sequence: Synthetic oligonucleotide
  Sense strand starting at position 2494 of SEQ ID NO: 585348
gaaagugccuuagucaguu

SEQ ID NO: 632795 - RNA, 19 nt, Artificial Sequence
  Description of Artificial Sequence: Synthetic oligonucleotide
  Antisense strand to SEQ ID NO: 632794
aacugacuaaggcacuuuc

SEQ ID NO: 632796 - RNA, 19 nt, Artificial Sequence
  Description of Artificial Sequence: Synthetic oligonucleotide
  Sense strand starting at position 2500 of SEQ ID NO: 585348
gccuuagucaguuauggcu

SEQ ID NO: 632797 - RNA, 19 nt, Artificial Sequence
  Description of Artificial Sequence: Synthetic oligonucleotide
  Antisense strand to SEQ ID NO: 632796
agccauaacugacuaaggc

SEQ ID NO: 632798 - RNA, 19 nt, Artificial Sequence
  Description of Artificial Sequence: Synthetic oligonucleotide
  Sense strand starting at position 2506 of SEQ ID NO: 585348
gucaguuauggcugaaaua

SEQ ID NO: 632799 - RNA, 19 nt, Artificial Sequence
  Description of Artificial Sequence: Synthetic oligonucleotide
  Antisense strand to SEQ ID NO: 632798
uauuucagccauaacugac

SEQ ID NO: 632800 - RNA, 19 nt, Artificial Sequence
  Description of Artificial Sequence: Synthetic oligonucleotide
  Sense strand starting at position 2507 of SEQ ID NO: 585348
ucaguuauggcugaaauaa

SEQ ID NO: 632801 - RNA, 19 nt, Artificial Sequence
  Description of Artificial Sequence: Synthetic oligonucleotide
  Antisense strand to SEQ ID NO: 632800
uuauuucagccauaacuga

SEQ ID NO: 632802 - RNA, 19 nt, Artificial Sequence
  Description of Artificial Sequence: Synthetic oligonucleotide
  Sense strand starting at position 2719 of SEQ ID NO: 585348
ggugguacaugccugcaaa

SEQ ID NO: 632803 - RNA, 19 nt, Artificial Sequence
  Description of Artificial Sequence: Synthetic oligonucleotide
  Antisense strand to SEQ ID NO: 632802
uuugcaggcauguaccacc

SEQ ID NO: 632804 - RNA, 19 nt, Artificial Sequence
  Description of Artificial Sequence: Synthetic oligonucleotide
  Sense strand starting at position 2839 of SEQ ID NO: 585348
gagugaaaguuccucuaaa

SEQ ID NO: 632805 - RNA, 19 nt, Artificial Sequence
  Description of Artificial Sequence: Synthetic oligonucleotide
  Antisense strand to SEQ ID NO: 632804
uuuagaggaacuuucacuc

SEQ ID NO: 632806 - RNA, 19 nt, Artificial Sequence
  Description of Artificial Sequence: Synthetic oligonucleotide
  Sense strand starting at position 3003 of SEQ ID NO: 585348
aauuaaggugcuggcaaau

SEQ ID NO: 632807 - RNA, 19 nt, Artificial Sequence
  Description of Artificial Sequence: Synthetic oligonucleotide
  Antisense strand to SEQ ID NO: 632806
auuugccagcaccuuaauu

SEQ ID NO: 632808 - RNA, 19 nt, Artificial Sequence
  Description of Artificial Sequence: Synthetic oligonucleotide
  Sense strand starting at position 3272 of SEQ ID NO: 585348
ggugcaaacguauguauaa

SEQ ID NO: 632809 - RNA, 19 nt, Artificial Sequence
  Description of Artificial Sequence: Synthetic oligonucleotide
  Antisense strand to SEQ ID NO: 632808
uuauacauacguuugcacc

SEQ ID NO: 632810 - RNA, 19 nt, Artificial Sequence
  Description of Artificial Sequence: Synthetic oligonucleotide
  Sense strand starting at position 3371 of SEQ ID NO: 585348
acucuaaggagcgguuaua

SEQ ID NO: 632811 - RNA, 19 nt, Artificial Sequence
  Description of Artificial Sequence: Synthetic oligonucleotide
  Antisense strand to SEQ ID NO: 632810
uauaaccgcuccuuagagu

SEQ ID NO: 632812 - RNA, 19 nt, Artificial Sequence
  Description of Artificial Sequence: Synthetic oligonucleotide
  Sense strand starting at position 3382 of SEQ ID NO: 585348
cgguuauaucaggaauucu

SEQ ID NO: 632813 - RNA, 19 nt, Artificial Sequence
  Description of Artificial Sequence: Synthetic oligonucleotide
  Antisense strand to SEQ ID NO: 632812
agaauuccugauauaaccg

SEQ ID NO: 632814 - RNA, 19 nt, Artificial Sequence
  Description of Artificial Sequence: Synthetic oligonucleotide
  Sense strand starting at position 3508 of SEQ ID NO: 585348
ggacaagggugagagaauu

SEQ ID NO: 632815 - RNA, 19 nt, Artificial Sequence
  Description of Artificial Sequence: Synthetic oligonucleotide
  Antisense strand to SEQ ID NO: 632814
aauucucucacccuugucc

SEQ ID NO: 632816 - RNA, 19 nt, Artificial Sequence
  Description of Artificial Sequence: Synthetic oligonucleotide
  Sense strand starting at position 3694 of SEQ ID NO: 585348
auaucauauugguucucua

SEQ ID NO: 632817 - RNA, 19 nt, Artificial Sequence
  Description of Artificial Sequence: Synthetic oligonucleotide
  Antisense strand to SEQ ID NO: 632816
uagagaaccaauaugauau

SEQ ID NO: 632818 - RNA, 19 nt, Artificial Sequence
  Description of Artificial Sequence: Synthetic oligonucleotide
  Sense strand starting at position 3715 of SEQ ID NO: 585348
uccagagaacucuguagaa

SEQ ID NO: 632819 - RNA, 19 nt, Artificial Sequence
  Description of Artificial Sequence: Synthetic oligonucleotide
  Antisense strand to SEQ ID NO: 632818
uucuacagaguucucugga

SEQ ID NO: 632820 - RNA, 19 nt, Artificial Sequence
  Description of Artificial Sequence: Synthetic oligonucleotide
  Sense strand starting at position 10 of SEQ ID NO: 585349
uuuggaguacgguauauau

SEQ ID NO: 632821 - RNA, 19 nt, Artificial Sequence
  Description of Artificial Sequence: Synthetic oligonucleotide
  Antisense strand to SEQ ID NO: 632820
auauauaccguacuccaaa

SEQ ID NO: 632822 - RNA, 19 nt, Artificial Sequence
  Description of Artificial Sequence: Synthetic oligonucleotide
  Sense strand starting at position 12 of SEQ ID NO: 585349
uggaguacgguauauauua

SEQ ID NO: 632823 - RNA, 19 nt, Artificial Sequence
  Description of Artificial Sequence: Synthetic oligonucleotide
  Antisense strand to SEQ ID NO: 632822
uaauauauaccguacucca

SEQ ID NO: 632824 - RNA, 19 nt, Artificial Sequence
  Description of Artificial Sequence: Synthetic oligonucleotide
  Sense strand starting at position 84 of SEQ ID NO: 585349
gcaacagggacugguuuaa

SEQ ID NO: 632825 - RNA, 19 nt, Artificial Sequence
  Description of Artificial Sequence: Synthetic oligonucleotide
  Antisense strand to SEQ ID NO: 632824
uuaaaccagucccuguugc

SEQ ID NO: 632826 - RNA, 19 nt, Artificial Sequence
  Description of Artificial Sequence: Synthetic oligonucleotide
  Sense strand starting at position 120 of SEQ ID NO: 585349
ggcauuaccgaguaccaaa

SEQ ID NO: 632827 - RNA, 19 nt, Artificial Sequence
  Description of Artificial Sequence: Synthetic oligonucleotide
  Antisense strand to SEQ ID NO: 632826
uuugguacucgguaaugcc

SEQ ID NO: 632828 - RNA, 19 nt, Artificial Sequence
  Description of Artificial Sequence: Synthetic oligonucleotide
  Sense strand starting at position 186 of SEQ ID NO: 585349
uagguauuagccuacugua

SEQ ID NO: 632829 - RNA, 19 nt, Artificial Sequence
  Description of Artificial Sequence: Synthetic oligonucleotide
  Antisense strand to SEQ ID NO: 632828
uacaguaggcuaauaccua

SEQ ID NO: 632830 - RNA, 19 nt, Artificial Sequence
  Description of Artificial Sequence: Synthetic oligonucleotide
  Sense strand starting at position 234 of SEQ ID NO: 585349
uuggauuacuugucgacau

SEQ ID NO: 632831 - RNA, 19 nt, Artificial Sequence
  Description of Artificial Sequence: Synthetic oligonucleotide
  Antisense strand to SEQ ID NO: 632830
augucgacaaguaauccaa

SEQ ID NO: 632832 - RNA, 19 nt, Artificial Sequence
  Description of Artificial Sequence: Synthetic oligonucleotide
  Sense strand starting at position 236 of SEQ ID NO: 585349
ggauuacuugucgacauaa

SEQ ID NO: 632833 - RNA, 19 nt, Artificial Sequence
  Description of Artificial Sequence: Synthetic oligonucleotide
  Antisense strand to SEQ ID NO: 632832
uuaugucgacaaguaaucc

SEQ ID NO: 632834 - RNA, 19 nt, Artificial Sequence
  Description of Artificial Sequence: Synthetic oligonucleotide
  Sense strand starting at position 238 of SEQ ID NO: 585349
auuacuugucgacauaauu

SEQ ID NO: 632835 - RNA, 19 nt, Artificial Sequence
  Description of Artificial Sequence: Synthetic oligonucleotide
  Antisense strand to SEQ ID NO: 632834
aauuaugucgacaaguaau

SEQ ID NO: 632836 - RNA, 19 nt, Artificial Sequence
  Description of Artificial Sequence: Synthetic oligonucleotide
  Sense strand starting at position 494 of SEQ ID NO: 585349
cugaacaauuugugaugaa

SEQ ID NO: 632837 - RNA, 19 nt, Artificial Sequence
  Description of Artificial Sequence: Synthetic oligonucleotide
  Antisense strand to SEQ ID NO: 632836
uucaucacaaauuguucag

SEQ ID NO: 632838 - RNA, 19 nt, Artificial Sequence
  Description of Artificial Sequence: Synthetic oligonucleotide
  Sense strand starting at position 495 of SEQ ID NO: 585349
ugaacaauuugugaugaau

SEQ ID NO: 632839 - RNA, 19 nt, Artificial Sequence
  Description of Artificial Sequence: Synthetic oligonucleotide
  Antisense strand to SEQ ID NO: 632838
auucaucacaaauuguuca

SEQ ID NO: 632840 - RNA, 19 nt, Artificial Sequence
  Description of Artificial Sequence: Synthetic oligonucleotide
  Sense strand starting at position 819 of SEQ ID NO: 585349
ugaucaaauaguggugaag

SEQ ID NO: 632841 - RNA, 19 nt, Artificial Sequence
  Description of Artificial Sequence: Synthetic oligonucleotide
  Antisense strand to SEQ ID NO: 632840
cuucaccacuauuugauca

SEQ ID NO: 632842 - RNA, 19 nt, Artificial Sequence
  Description of Artificial Sequence: Synthetic oligonucleotide
  Sense strand starting at position 853 of SEQ ID NO: 585349
uguuauucucccuaggaau

SEQ ID NO: 632843 - RNA, 19 nt, Artificial Sequence
  Description of Artificial Sequence: Synthetic oligonucleotide
  Antisense strand to SEQ ID NO: 632842
auuccuagggagaauaaca

SEQ ID NO: 632844 - RNA, 19 nt, Artificial Sequence
  Description of Artificial Sequence: Synthetic oligonucleotide
  Sense strand starting at position 986 of SEQ ID NO: 585349
aagguauugcagugggagu

SEQ ID NO: 632845 - RNA, 19 nt, Artificial Sequence
  Description of Artificial Sequence: Synthetic oligonucleotide
  Antisense strand to SEQ ID NO: 632844
acucccacugcaauaccuu

SEQ ID NO: 632846 - RNA, 19 nt, Artificial Sequence
  Description of Artificial Sequence: Synthetic oligonucleotide
  Sense strand starting at position 999 of SEQ ID NO: 585349
gggagucgugcucaacaca

SEQ ID NO: 632847 - RNA, 19 nt, Artificial Sequence
  Description of Artificial Sequence: Synthetic oligonucleotide
  Antisense strand to SEQ ID NO: 632846
uguguugagcacgacuccc

SEQ ID NO: 632848 - RNA, 19 nt, Artificial Sequence
  Description of Artificial Sequence: Synthetic oligonucleotide
  Sense strand starting at position 1002 of SEQ ID NO: 585349
agucgugcucaacacaauu

SEQ ID NO: 632849 - RNA, 19 nt, Artificial Sequence
  Description of Artificial Sequence: Synthetic oligonucleotide
  Antisense strand to SEQ ID NO: 632848
aauuguguugagcacgacu

SEQ ID NO: 632850 - RNA, 19 nt, Artificial Sequence
  Description of Artificial Sequence: Synthetic oligonucleotide
  Sense strand starting at position 1045 of SEQ ID NO: 585349
ugaguuucucaaggacauc

SEQ ID NO: 632851 - RNA, 19 nt, Artificial Sequence
  Description of Artificial Sequence: Synthetic oligonucleotide
  Antisense strand to SEQ ID NO: 632850
gauguccuugagaaacuca

SEQ ID NO: 632852 - RNA, 19 nt, Artificial Sequence
  Description of Artificial Sequence: Synthetic oligonucleotide
  Sense strand starting at position 1048 of SEQ ID NO: 585349
guuucucaaggacaucauu

SEQ ID NO: 632853 - RNA, 19 nt, Artificial Sequence
  Description of Artificial Sequence: Synthetic oligonucleotide
  Antisense strand to SEQ ID NO: 632852
aaugauguccuugagaaac

SEQ ID NO: 632854 - RNA, 19 nt, Artificial Sequence
  Description of Artificial Sequence: Synthetic oligonucleotide
  Sense strand starting at position 1243 of SEQ ID NO: 585349
uauaaagaggcauacuguu

SEQ ID NO: 632855 - RNA, 19 nt, Artificial Sequence
  Description of Artificial Sequence: Synthetic oligonucleotide
  Antisense strand to SEQ ID NO: 632854
aacaguaugccucuuuaua

SEQ ID NO: 632856 - RNA, 19 nt, Artificial Sequence
  Description of Artificial Sequence: Synthetic oligonucleotide
  Sense strand starting at position 1292 of SEQ ID NO: 585349
ugacuuaguuaaguggcaa

SEQ ID NO: 632857 - RNA, 19 nt, Artificial Sequence
  Description of Artificial Sequence: Synthetic oligonucleotide
  Antisense strand to SEQ ID NO: 632856
uugccacuuaacuaaguca

SEQ ID NO: 632858 - RNA, 19 nt, Artificial Sequence
  Description of Artificial Sequence: Synthetic oligonucleotide
  Sense strand starting at position 1304 of SEQ ID NO: 585349
guggcaauggcagguauuu

SEQ ID NO: 632859 - RNA, 19 nt, Artificial Sequence
  Description of Artificial Sequence: Synthetic oligonucleotide
  Antisense strand to SEQ ID NO: 632858
aaauaccugccauugccac

SEQ ID NO: 632860 - RNA, 19 nt, Artificial Sequence
  Description of Artificial Sequence: Synthetic oligonucleotide
  Sense strand starting at position 1360 of SEQ ID NO: 585349
ugguuucccugcucagaag

SEQ ID NO: 632861 - RNA, 19 nt, Artificial Sequence
  Description of Artificial Sequence: Synthetic oligonucleotide
  Antisense strand to SEQ ID NO: 632860
cuucugagcagggaaacca

SEQ ID NO: 632862 - RNA, 19 nt, Artificial Sequence
  Description of Artificial Sequence: Synthetic oligonucleotide
  Sense strand starting at position 1361 of SEQ ID NO: 585349
gguuucccugcucagaaga

SEQ ID NO: 632863 - RNA, 19 nt, Artificial Sequence
  Description of Artificial Sequence: Synthetic oligonucleotide
  Antisense strand to SEQ ID NO: 632862
ucuucugagcagggaaacc

SEQ ID NO: 632864 - RNA, 19 nt, Artificial Sequence
  Description of Artificial Sequence: Synthetic oligonucleotide
  Sense strand starting at position 1442 of SEQ ID NO: 585349
ugacaagucuuccuuuggu

SEQ ID NO: 632865 - RNA, 19 nt, Artificial Sequence
  Description of Artificial Sequence: Synthetic oligonucleotide
  Antisense strand to SEQ ID NO: 632864
accaaaggaagacuuguca

SEQ ID NO: 632866 - RNA, 19 nt, Artificial Sequence
  Description of Artificial Sequence: Synthetic oligonucleotide
  Sense strand starting at position 1472 of SEQ ID NO: 585349
aaauaacagucaguaggua

SEQ ID NO: 632867 - RNA, 19 nt, Artificial Sequence
  Description of Artificial Sequence: Synthetic oligonucleotide
  Antisense strand to SEQ ID NO: 632866
uaccuacugacuguuauuu

SEQ ID NO: 632868 - RNA, 19 nt, Artificial Sequence
  Description of Artificial Sequence: Synthetic oligonucleotide
  Sense strand starting at position 1670 of SEQ ID NO: 585349
agcacagcuuucccugaau

SEQ ID NO: 632869 - RNA, 19 nt, Artificial Sequence
  Description of Artificial Sequence: Synthetic oligonucleotide
  Antisense strand to SEQ ID NO: 632868
auucagggaaagcugugcu

SEQ ID NO: 632870 - RNA, 19 nt, Artificial Sequence
  Description of Artificial Sequence: Synthetic oligonucleotide
  Sense strand starting at position 2843 of SEQ ID NO: 585349
ugcgguucucguccaaguu

SEQ ID NO: 632871 - RNA, 19 nt, Artificial Sequence
  Description of Artificial Sequence: Synthetic oligonucleotide
  Antisense strand to SEQ ID NO: 632870
aacuuggacgagaaccgca

SEQ ID NO: 632872 - RNA, 19 nt, Artificial Sequence
  Description of Artificial Sequence: Synthetic oligonucleotide
  Sense strand starting at position 2948 of SEQ ID NO: 585349
uuucuacagcccgaguuua

SEQ ID NO: 632873 - RNA, 19 nt, Artificial Sequence
  Description of Artificial Sequence: Synthetic oligonucleotide
  Antisense strand to SEQ ID NO: 632872
uaaacucgggcuguagaaa

SEQ ID NO: 632874 - RNA, 19 nt, Artificial Sequence
  Description of Artificial Sequence: Synthetic oligonucleotide
  Sense strand starting at position 2996 of SEQ ID NO: 585349
cugcaaugcggauguauuu

SEQ ID NO: 632875 - RNA, 19 nt, Artificial Sequence
  Description of Artificial Sequence: Synthetic oligonucleotide
  Antisense strand to SEQ ID NO: 632874
aaauacauccgcauugcag

SEQ ID NO: 632876 - RNA, 19 nt, Artificial Sequence
  Description of Artificial Sequence: Synthetic oligonucleotide
  Sense strand starting at position 3033 of SEQ ID NO: 585349
uggaacagcuuucuaaguu

SEQ ID NO: 632877 - RNA, 19 nt, Artificial Sequence
  Description of Artificial Sequence: Synthetic oligonucleotide
  Antisense strand to SEQ ID NO: 632876
aacuuagaaagcuguucca

SEQ ID NO: 632878 - RNA, 19 nt, Artificial Sequence
  Description of Artificial Sequence: Synthetic oligonucleotide
  Sense strand starting at position 3045 of SEQ ID NO: 585349
cuaaguugggcuugauuau

SEQ ID NO: 632879 - RNA, 19 nt, Artificial Sequence
  Description of Artificial Sequence: Synthetic oligonucleotide
  Antisense strand to SEQ ID NO: 632878
auaaucaagcccaacuuag

SEQ ID NO: 632880 - RNA, 19 nt, Artificial Sequence
  Description of Artificial Sequence: Synthetic oligonucleotide
  Sense strand starting at position 3046 of SEQ ID NO: 585349
uaaguugggcuugauuauu

SEQ ID NO: 632881 - RNA, 19 nt, Artificial Sequence
  Description of Artificial Sequence: Synthetic oligonucleotide
  Antisense strand to SEQ ID NO: 632880
aauaaucaagcccaacuua

SEQ ID NO: 632882 - RNA, 19 nt, Artificial Sequence
  Description of Artificial Sequence: Synthetic oligonucleotide
  Sense strand starting at position 3091 of SEQ ID NO: 585349
aguugacgugucuagauaa

SEQ ID NO: 632883 - RNA, 19 nt, Artificial Sequence
  Description of Artificial Sequence: Synthetic oligonucleotide
  Antisense strand to SEQ ID NO: 632882
uuaucuagacacgucaacu

SEQ ID NO: 632884 - RNA, 19 nt, Artificial Sequence
  Description of Artificial Sequence: Synthetic oligonucleotide
  Sense strand starting at position 3181 of SEQ ID NO: 585349
ggucaucucucauuacaca

SEQ ID NO: 632885 - RNA, 19 nt, Artificial Sequence
  Description of Artificial Sequence: Synthetic oligonucleotide
  Antisense strand to SEQ ID NO: 632884
uguguaaugagagaugacc

SEQ ID NO: 632886 - RNA, 19 nt, Artificial Sequence
  Description of Artificial Sequence: Synthetic oligonucleotide
  Sense strand starting at position 3356 of SEQ ID NO: 585349
agaucacucgagugcauau

SEQ ID NO: 632887 - RNA, 19 nt, Artificial Sequence
  Description of Artificial Sequence: Synthetic oligonucleotide
  Antisense strand to SEQ ID NO: 632886
auaugcacucgagugaucu

SEQ ID NO: 632888 - RNA, 19 nt, Artificial Sequence
  Description of Artificial Sequence: Synthetic oligonucleotide
  Sense strand starting at position 3363 of SEQ ID NO: 585349
ucgagugcauauuugguua

SEQ ID NO: 632889 - RNA, 19 nt, Artificial Sequence
  Description of Artificial Sequence: Synthetic oligonucleotide
  Antisense strand to SEQ ID NO: 632888
uaaccaaauaugcacucga

SEQ ID NO: 632890 - RNA, 19 nt, Artificial Sequence
  Description of Artificial Sequence: Synthetic oligonucleotide
  Sense strand starting at position 3719 of SEQ ID NO: 585349
gcuguaacaugauucccaa

SEQ ID NO: 632891 - RNA, 19 nt, Artificial Sequence
  Description of Artificial Sequence: Synthetic oligonucleotide
  Antisense strand to SEQ ID NO: 632890
uugggaaucauguuacagc

SEQ ID NO: 632892 - RNA, 19 nt, Artificial Sequence
  Description of Artificial Sequence: Synthetic oligonucleotide
  Sense strand starting at position 3804 of SEQ ID NO: 585349
aagagaagaucgccauaau

SEQ ID NO: 632893 - RNA, 19 nt, Artificial Sequence
  Description of Artificial Sequence: Synthetic oligonucleotide
  Antisense strand to SEQ ID NO: 632892
auuauggcgaucuucucuu

SEQ ID NO: 632894 - RNA, 19 nt, Artificial Sequence
  Description of Artificial Sequence: Synthetic oligonucleotide
  Sense strand starting at position 3906 of SEQ ID NO: 585349
ggcucauuugcaugcaaag

SEQ ID NO: 632895 - RNA, 19 nt, Artificial Sequence
  Description of Artificial Sequence: Synthetic oligonucleotide
  Antisense strand to SEQ ID NO: 632894
cuuugcaugcaaaugagcc

SEQ ID NO: 632896 - RNA, 19 nt, Artificial Sequence
  Description of Artificial Sequence: Synthetic oligonucleotide
  Sense strand starting at position 3937 of SEQ ID NO: 585349
ccaaauccgcuugagaaug

SEQ ID NO: 632897 - RNA, 19 nt, Artificial Sequence
  Description of Artificial Sequence: Synthetic oligonucleotide
  Antisense strand to SEQ ID NO: 632896
cauucucaagcggauuugg

SEQ ID NO: 632898 - RNA, 19 nt, Artificial Sequence
  Description of Artificial Sequence: Synthetic oligonucleotide
  Sense strand starting at position 3951 of SEQ ID NO: 585349
gaaugcaguuuaguuacau

SEQ ID NO: 632899 - RNA, 19 nt, Artificial Sequence
  Description of Artificial Sequence: Synthetic oligonucleotide
  Antisense strand to SEQ ID NO: 632898
auguaacuaaacugcauuc

SEQ ID NO: 632900 - RNA, 19 nt, Artificial Sequence
  Description of Artificial Sequence: Synthetic oligonucleotide
  Sense strand starting at position 68 of SEQ ID NO: 585350
uuucuacagcccgaguuua

SEQ ID NO: 632901 - RNA, 19 nt, Artificial Sequence
  Description of Artificial Sequence: Synthetic oligonucleotide
  Antisense strand to SEQ ID NO: 632900
uaaacucgggcuguagaaa

SEQ ID NO: 632902 - RNA, 19 nt, Artificial Sequence
  Description of Artificial Sequence: Synthetic oligonucleotide
  Sense strand starting at position 116 of SEQ ID NO: 585350
cugcaaugcggauguauuu

SEQ ID NO: 632903 - RNA, 19 nt, Artificial Sequence
  Description of Artificial Sequence: Synthetic oligonucleotide
  Antisense strand to SEQ ID NO: 632902
aaauacauccgcauugcag

SEQ ID NO: 632904 - RNA, 19 nt, Artificial Sequence
  Description of Artificial Sequence: Synthetic oligonucleotide
  Sense strand starting at position 153 of SEQ ID NO: 585350
uggaacagcuuucuaaguu

SEQ ID NO: 632905 - RNA, 19 nt, Artificial Sequence
  Description of Artificial Sequence: Synthetic oligonucleotide
  Antisense strand to SEQ ID NO: 632904
aacuuagaaagcuguucca

SEQ ID NO: 632906 - RNA, 19 nt, Artificial Sequence
  Description of Artificial Sequence: Synthetic oligonucleotide
  Sense strand starting at position 165 of SEQ ID NO: 585350
cuaaguugggcuugauuau

SEQ ID NO: 632907 - RNA, 19 nt, Artificial Sequence
  Description of Artificial Sequence: Synthetic oligonucleotide
  Antisense strand to SEQ ID NO: 632906
auaaucaagcccaacuuag

SEQ ID NO: 632908 - RNA, 19 nt, Artificial Sequence
  Description of Artificial Sequence: Synthetic oligonucleotide
  Sense strand starting at position 166 of SEQ ID NO: 585350
uaaguugggcuugauuauu

SEQ ID NO: 632909 - RNA, 19 nt, Artificial Sequence
  Description of Artificial Sequence: Synthetic oligonucleotide
  Antisense strand to SEQ ID NO: 632908
aauaaucaagcccaacuua

SEQ ID NO: 632910 - RNA, 19 nt, Artificial Sequence
  Description of Artificial Sequence: Synthetic oligonucleotide
  Sense strand starting at position 211 of SEQ ID NO: 585350
aguugacgugucuagauaa

SEQ ID NO: 632911 - RNA, 19 nt, Artificial Sequence
  Description of Artificial Sequence: Synthetic oligonucleotide
  Antisense strand to SEQ ID NO: 632910
uuaucuagacacgucaacu

SEQ ID NO: 632912 - RNA, 19 nt, Artificial Sequence
  Description of Artificial Sequence: Synthetic oligonucleotide
  Sense strand starting at position 301 of SEQ ID NO: 585350
ggucaucucucauuacaca

SEQ ID NO: 632913 - RNA, 19 nt, Artificial Sequence
  Description of Artificial Sequence: Synthetic oligonucleotide
  Antisense strand to SEQ ID NO: 632912
uguguaaugagagaugacc

SEQ ID NO: 632914 - RNA, 19 nt, Artificial Sequence
  Description of Artificial Sequence: Synthetic oligonucleotide
  Sense strand starting at position 476 of SEQ ID NO: 585350
agaucacucgagugcauau

SEQ ID NO: 632915 - RNA, 19 nt, Artificial Sequence
  Description of Artificial Sequence: Synthetic oligonucleotide
  Antisense strand to SEQ ID NO: 632914
auaugcacucgagugaucu

SEQ ID NO: 632916 - RNA, 19 nt, Artificial Sequence
  Description of Artificial Sequence: Synthetic oligonucleotide
  Sense strand starting at position 483 of SEQ ID NO: 585350
ucgagugcauauuugguua

SEQ ID NO: 632917 - RNA, 19 nt, Artificial Sequence
  Description of Artificial Sequence: Synthetic oligonucleotide
  Antisense strand to SEQ ID NO: 632916
uaaccaaauaugcacucga

SEQ ID NO: 632918 - RNA, 19 nt, Artificial Sequence
  Description of Artificial Sequence: Synthetic oligonucleotide
  Sense strand starting at position 839 of SEQ ID NO: 585350
gcuguaacaugauucccaa

SEQ ID NO: 632919 - RNA, 19 nt, Artificial Sequence
  Description of Artificial Sequence: Synthetic oligonucleotide
  Antisense strand to SEQ ID NO: 632918
uugggaaucauguuacagc

SEQ ID NO: 632920 - RNA, 19 nt, Artificial Sequence
  Description of Artificial Sequence: Synthetic oligonucleotide
  Sense strand starting at position 924 of SEQ ID NO: 585350
aagagaagaucgccauaau

SEQ ID NO: 632921 - RNA, 19 nt, Artificial Sequence
  Description of Artificial Sequence: Synthetic oligonucleotide
  Antisense strand to SEQ ID NO: 632920
auuauggcgaucuucucuu

SEQ ID NO: 632922 - RNA, 19 nt, Artificial Sequence
  Description of Artificial Sequence: Synthetic oligonucleotide
  Sense strand starting at position 1026 of SEQ ID NO: 585350
ggcucauuugcaugcaaag

SEQ ID NO: 632923 - RNA, 19 nt, Artificial Sequence
  Description of Artificial Sequence: Synthetic oligonucleotide
  Antisense strand to SEQ ID NO: 632922
cuuugcaugcaaaugagcc

SEQ ID NO: 632924 - RNA, 19 nt, Artificial Sequence
  Description of Artificial Sequence: Synthetic oligonucleotide
  Sense strand starting at position 1056 of SEQ ID NO: 585350
gccaaauccgcuugagaau

SEQ ID NO: 632925 - RNA, 19 nt, Artificial Sequence
  Description of Artificial Sequence: Synthetic oligonucleotide
  Antisense strand to SEQ ID NO: 632924
auucucaagcggauuuggc

SEQ ID NO: 632926 - RNA, 19 nt, Artificial Sequence
  Description of Artificial Sequence: Synthetic oligonucleotide
  Sense strand starting at position 1057 of SEQ ID NO: 585350
ccaaauccgcuugagaaug

SEQ ID NO: 632927 - RNA, 19 nt, Artificial Sequence
  Description of Artificial Sequence: Synthetic oligonucleotide
  Antisense strand to SEQ ID NO: 632926
cauucucaagcggauuugg

SEQ ID NO: 632928 - RNA, 19 nt, Artificial Sequence
  Description of Artificial Sequence: Synthetic oligonucleotide
  Sense strand starting at position 1071 of SEQ ID NO: 585350
gaaugcaguuuaguuacau

SEQ ID NO: 632929 - RNA, 19 nt, Artificial Sequence
  Description of Artificial Sequence: Synthetic oligonucleotide
  Antisense strand to SEQ ID NO: 632928
auguaacuaaacugcauuc

SEQ ID NO: 632930 - RNA, 19 nt, Artificial Sequence
  Description of Artificial Sequence: Synthetic oligonucleotide
  Sense strand starting at position 1188 of SEQ ID NO: 585350
gagguaucucuacaccagu

SEQ ID NO: 632931 - RNA, 19 nt, Artificial Sequence
  Description of Artificial Sequence: Synthetic oligonucleotide
  Antisense strand to SEQ ID NO: 632930
acugguguagagauaccuc

SEQ ID NO: 632932 - RNA, 19 nt, Artificial Sequence
  Description of Artificial Sequence: Synthetic oligonucleotide
  Sense strand starting at position 1361 of SEQ ID NO: 585350
agucaaaggauguguuguu

SEQ ID NO: 632933 - RNA, 19 nt, Artificial Sequence
  Description of Artificial Sequence: Synthetic oligonucleotide
  Antisense strand to SEQ ID NO: 632932
aacaacacauccuuugacu

SEQ ID NO: 632934 - RNA, 19 nt, Artificial Sequence
  Description of Artificial Sequence: Synthetic oligonucleotide
  Sense strand starting at position 1362 of SEQ ID NO: 585350
gucaaaggauguguuguua

SEQ ID NO: 632935 - RNA, 19 nt, Artificial Sequence
  Description of Artificial Sequence: Synthetic oligonucleotide
  Antisense strand to SEQ ID NO: 632934
uaacaacacauccuuugac

SEQ ID NO: 632936 - RNA, 19 nt, Artificial Sequence
  Description of Artificial Sequence: Synthetic oligonucleotide
  Sense strand starting at position 2793 of SEQ ID NO: 585350
gccuguggaaucgaggaau

SEQ ID NO: 632937 - RNA, 19 nt, Artificial Sequence
  Description of Artificial Sequence: Synthetic oligonucleotide
  Antisense strand to SEQ ID NO: 632936
auuccucgauuccacaggc

SEQ ID NO: 632938 - RNA, 19 nt, Artificial Sequence
  Description of Artificial Sequence: Synthetic oligonucleotide
  Sense strand starting at position 2947 of SEQ ID NO: 585350
gaggaauccucggugcgaa

SEQ ID NO: 632939 - RNA, 19 nt, Artificial Sequence
  Description of Artificial Sequence: Synthetic oligonucleotide
  Antisense strand to SEQ ID NO: 632938
uucgcaccgaggauuccuc

SEQ ID NO: 632940 - RNA, 19 nt, Artificial Sequence
  Description of Artificial Sequence: Synthetic oligonucleotide
  Sense strand starting at position 3288 of SEQ ID NO: 585350
cguguuuaaagagacugaa

SEQ ID NO: 632941 - RNA, 19 nt, Artificial Sequence
  Description of Artificial Sequence: Synthetic oligonucleotide
  Antisense strand to SEQ ID NO: 632940
uucagucucuuuaaacacg

SEQ ID NO: 632942 - RNA, 19 nt, Artificial Sequence
  Description of Artificial Sequence: Synthetic oligonucleotide
  Sense strand starting at position 3402 of SEQ ID NO: 585350
cgcaauuguaaggaaacau

SEQ ID NO: 632943 - RNA, 19 nt, Artificial Sequence
  Description of Artificial Sequence: Synthetic oligonucleotide
  Antisense strand to SEQ ID NO: 632942
auguuuccuuacaauugcg

SEQ ID NO: 632944 - RNA, 19 nt, Artificial Sequence
  Description of Artificial Sequence: Synthetic oligonucleotide
  Sense strand starting at position 3427 of SEQ ID NO: 585350
caccgagugccaggaauau

SEQ ID NO: 632945 - RNA, 19 nt, Artificial Sequence
  Description of Artificial Sequence: Synthetic oligonucleotide
  Antisense strand to SEQ ID NO: 632944
auauuccuggcacucggug

SEQ ID NO: 632946 - RNA, 19 nt, Artificial Sequence
  Description of Artificial Sequence: Synthetic oligonucleotide
  Sense strand starting at position 3494 of SEQ ID NO: 585350
ccugucgugcugguuuaau

SEQ ID NO: 632947 - RNA, 19 nt, Artificial Sequence
  Description of Artificial Sequence: Synthetic oligonucleotide
  Antisense strand to SEQ ID NO: 632946
auuaaaccagcacgacagg

SEQ ID NO: 632948 - RNA, 19 nt, Artificial Sequence
  Description of Artificial Sequence: Synthetic oligonucleotide
  Sense strand starting at position 3503 of SEQ ID NO: 585350
cugguuuaaucgcugaaac

SEQ ID NO: 632949 - RNA, 19 nt, Artificial Sequence
  Description of Artificial Sequence: Synthetic oligonucleotide
  Antisense strand to SEQ ID NO: 632948
guuucagcgauuaaaccag

SEQ ID NO: 632950 - RNA, 19 nt, Artificial Sequence
  Description of Artificial Sequence: Synthetic oligonucleotide
  Sense strand starting at position 3504 of SEQ ID NO: 585350
ugguuuaaucgcugaaaca

SEQ ID NO: 632951 - RNA, 19 nt, Artificial Sequence
  Description of Artificial Sequence: Synthetic oligonucleotide
  Antisense strand to SEQ ID NO: 632950
uguuucagcgauuaaacca

SEQ ID NO: 632952 - RNA, 19 nt, Artificial Sequence
  Description of Artificial Sequence: Synthetic oligonucleotide
  Sense strand starting at position 3505 of SEQ ID NO: 585350
gguuuaaucgcugaaacaa

SEQ ID NO: 632953 - RNA, 19 nt, Artificial Sequence
  Description of Artificial Sequence: Synthetic oligonucleotide
  Antisense strand to SEQ ID NO: 632952
uuguuucagcgauuaaacc

SEQ ID NO: 632954 - RNA, 19 nt, Artificial Sequence
  Description of Artificial Sequence: Synthetic oligonucleotide
  Sense strand starting at position 3513 of SEQ ID NO: 585350
cgcugaaacaaaugaagua

SEQ ID NO: 632955 - RNA, 19 nt, Artificial Sequence
  Description of Artificial Sequence: Synthetic oligonucleotide
  Antisense strand to SEQ ID NO: 632954
uacuucauuuguuucagcg

SEQ ID NO: 632956 - RNA, 19 nt, Artificial Sequence
  Description of Artificial Sequence: Synthetic oligonucleotide
  Sense strand starting at position 3593 of SEQ ID NO: 585350
cgcgauucugccuuguuaa

SEQ ID NO: 632957 - RNA, 19 nt, Artificial Sequence
  Description of Artificial Sequence: Synthetic oligonucleotide
  Antisense strand to SEQ ID NO: 632956
uuaacaaggcagaaucgcg

SEQ ID NO: 632958 - RNA, 19 nt, Artificial Sequence
  Description of Artificial Sequence: Synthetic oligonucleotide
  Sense strand starting at position 3664 of SEQ ID NO: 585350
caggcuagccucggaauaa

SEQ ID NO: 632959 - RNA, 19 nt, Artificial Sequence
  Description of Artificial Sequence: Synthetic oligonucleotide
  Antisense strand to SEQ ID NO: 632958
uuauuccgaggcuagccug

SEQ ID NO: 632960 - RNA, 19 nt, Artificial Sequence
  Description of Artificial Sequence: Synthetic oligonucleotide
  Sense strand starting at position 3703 of SEQ ID NO: 585350
gcgaacacauacccauaua

SEQ ID NO: 632961 - RNA, 19 nt, Artificial Sequence
  Description of Artificial Sequence: Synthetic oligonucleotide
  Antisense strand to SEQ ID NO: 632960
uauauggguauguguucgc

SEQ ID NO: 632962 - RNA, 19 nt, Artificial Sequence
  Description of Artificial Sequence: Synthetic oligonucleotide
  Sense strand starting at position 3728 of SEQ ID NO: 585350
ucuaccuauucccuagagu

SEQ ID NO: 632963 - RNA, 19 nt, Artificial Sequence
  Description of Artificial Sequence: Synthetic oligonucleotide
  Antisense strand to SEQ ID NO: 632962
acucuagggaauagguaga

SEQ ID NO: 632964 - RNA, 19 nt, Artificial Sequence
  Description of Artificial Sequence: Synthetic oligonucleotide
  Sense strand starting at position 3729 of SEQ ID NO: 585350
cuaccuauucccuagaguc

SEQ ID NO: 632965 - RNA, 19 nt, Artificial Sequence
  Description of Artificial Sequence: Synthetic oligonucleotide
  Antisense strand to SEQ ID NO: 632964
gacucuagggaauagguag

SEQ ID NO: 632966 - RNA, 19 nt, Artificial Sequence
  Description of Artificial Sequence: Synthetic oligonucleotide
  Sense strand starting at position 3737 of SEQ ID NO: 585350
ucccuagagucugcuaacu

SEQ ID NO: 632967 - RNA, 19 nt, Artificial Sequence
  Description of Artificial Sequence: Synthetic oligonucleotide
  Antisense strand to SEQ ID NO: 632966
aguuagcagacucuaggga

SEQ ID NO: 632968 - RNA, 19 nt, Artificial Sequence
  Description of Artificial Sequence: Synthetic oligonucleotide
  Sense strand starting at position 3790 of SEQ ID NO: 585350
gcagcaguauuugaagaga

SEQ ID NO: 632969 - RNA, 19 nt, Artificial Sequence
  Description of Artificial Sequence: Synthetic oligonucleotide
  Antisense strand to SEQ ID NO: 632968
ucucuucaaauacugcugc

SEQ ID NO: 632970 - RNA, 19 nt, Artificial Sequence
  Description of Artificial Sequence: Synthetic oligonucleotide
  Sense strand starting at position 3803 of SEQ ID NO: 585350
aagagauaaccuugguguc

SEQ ID NO: 632971 - RNA, 19 nt, Artificial Sequence
  Description of Artificial Sequence: Synthetic oligonucleotide
  Antisense strand to SEQ ID NO: 632970
gacaccaagguuaucucuu

SEQ ID NO: 632972 - RNA, 19 nt, Artificial Sequence
  Description of Artificial Sequence: Synthetic oligonucleotide
  Sense strand starting at position 3804 of SEQ ID NO: 585350
agagauaaccuuggugucu

SEQ ID NO: 632973 - RNA, 19 nt, Artificial Sequence
  Description of Artificial Sequence: Synthetic oligonucleotide
  Antisense strand to SEQ ID NO: 632972
agacaccaagguuaucucu

SEQ ID NO: 632974 - RNA, 19 nt, Artificial Sequence
  Description of Artificial Sequence: Synthetic oligonucleotide
  Sense strand starting at position 3805 of SEQ ID NO: 585350
gagauaaccuuggugucua

SEQ ID NO: 632975 - RNA, 19 nt, Artificial Sequence
  Description of Artificial Sequence: Synthetic oligonucleotide
  Antisense strand to SEQ ID NO: 632974
uagacaccaagguuaucuc

SEQ ID NO: 632976 - RNA, 19 nt, Artificial Sequence
  Description of Artificial Sequence: Synthetic oligonucleotide
  Sense strand starting at position 3809 of SEQ ID NO: 585350
uaaccuuggugucuagaaa

SEQ ID NO: 632977 - RNA, 19 nt, Artificial Sequence
  Description of Artificial Sequence: Synthetic oligonucleotide
  Antisense strand to SEQ ID NO: 632976
uuucuagacaccaagguua

SEQ ID NO: 632978 - RNA, 19 nt, Artificial Sequence
  Description of Artificial Sequence: Synthetic oligonucleotide
  Sense strand starting at position 3928 of SEQ ID NO: 585350
cugcaaauuaguggugauc

SEQ ID NO: 632979 - RNA, 19 nt, Artificial Sequence
  Description of Artificial Sequence: Synthetic oligonucleotide
  Antisense strand to SEQ ID NO: 632978
gaucaccacuaauuugcag

SEQ ID NO: 632980 - RNA, 19 nt, Artificial Sequence
  Description of Artificial Sequence: Synthetic oligonucleotide
  Sense strand starting at position 328 of SEQ ID NO: 585351
cgagauagcuggguccaca

SEQ ID NO: 632981 - RNA, 19 nt, Artificial Sequence
  Description of Artificial Sequence: Synthetic oligonucleotide
  Antisense strand to SEQ ID NO: 632980
uguggacccagcuaucucg

SEQ ID NO: 632982 - RNA, 19 nt, Artificial Sequence
  Description of Artificial Sequence: Synthetic oligonucleotide
  Sense strand starting at position 541 of SEQ ID NO: 585351
cuggaauuugcaggcguaa

SEQ ID NO: 632983 - RNA, 19 nt, Artificial Sequence
  Description of Artificial Sequence: Synthetic oligonucleotide
  Antisense strand to SEQ ID NO: 632982
uuacgccugcaaauuccag

SEQ ID NO: 632984 - RNA, 19 nt, Artificial Sequence
  Description of Artificial Sequence: Synthetic oligonucleotide
  Sense strand starting at position 1993 of SEQ ID NO: 585351
agcauaaugcaggaagagu

SEQ ID NO: 632985 - RNA, 19 nt, Artificial Sequence
  Description of Artificial Sequence: Synthetic oligonucleotide
  Antisense strand to SEQ ID NO: 632984
acucuuccugcauuaugcu

SEQ ID NO: 632986 - RNA, 19 nt, Artificial Sequence
  Description of Artificial Sequence: Synthetic oligonucleotide
  Sense strand starting at position 2025 of SEQ ID NO: 585351
guauuugucgacugucugu

SEQ ID NO: 632987 - RNA, 19 nt, Artificial Sequence
  Description of Artificial Sequence: Synthetic oligonucleotide
  Antisense strand to SEQ ID NO: 632986
acagacagucgacaaauac

SEQ ID NO: 632988 - RNA, 19 nt, Artificial Sequence
  Description of Artificial Sequence: Synthetic oligonucleotide
  Sense strand starting at position 2090 of SEQ ID NO: 585351
agcucuugagcucacucau

SEQ ID NO: 632989 - RNA, 19 nt, Artificial Sequence
  Description of Artificial Sequence: Synthetic oligonucleotide
  Antisense strand to SEQ ID NO: 632988
augagugagcucaagagcu

SEQ ID NO: 632990 - RNA, 19 nt, Artificial Sequence
  Description of Artificial Sequence: Synthetic oligonucleotide
  Sense strand starting at position 2110 of SEQ ID NO: 585351
gugaguguucagugaauua

SEQ ID NO: 632991 - RNA, 19 nt, Artificial Sequence
  Description of Artificial Sequence: Synthetic oligonucleotide
  Antisense strand to SEQ ID NO: 632990
uaauucacugaacacucac

SEQ ID NO: 632992 - RNA, 19 nt, Artificial Sequence
  Description of Artificial Sequence: Synthetic oligonucleotide
  Sense strand starting at position 2134 of SEQ ID NO: 585351
ccgucaguucagggaacaa

SEQ ID NO: 632993 - RNA, 19 nt, Artificial Sequence
  Description of Artificial Sequence: Synthetic oligonucleotide
  Antisense strand to SEQ ID NO: 632992
uuguucccugaacugacgg

SEQ ID NO: 632994 - RNA, 19 nt, Artificial Sequence
  Description of Artificial Sequence: Synthetic oligonucleotide
  Sense strand starting at position 2162 of SEQ ID NO: 585351
aggcaugauuccuugucuu

SEQ ID NO: 632995 - RNA, 19 nt, Artificial Sequence
  Description of Artificial Sequence: Synthetic oligonucleotide
  Antisense strand to SEQ ID NO: 632994
aagacaaggaaucaugccu

SEQ ID NO: 632996 - RNA, 19 nt, Artificial Sequence
  Description of Artificial Sequence: Synthetic oligonucleotide
  Sense strand starting at position 2261 of SEQ ID NO: 585351
uaaaguuaugugggaauug

SEQ ID NO: 632997 - RNA, 19 nt, Artificial Sequence
  Description of Artificial Sequence: Synthetic oligonucleotide
  Antisense strand to SEQ ID NO: 632996
caauucccacauaacuuua

SEQ ID NO: 632998 - RNA, 19 nt, Artificial Sequence
  Description of Artificial Sequence: Synthetic oligonucleotide
  Sense strand starting at position 2266 of SEQ ID NO: 585351
uuaugugggaauugugagu

SEQ ID NO: 632999 - RNA, 19 nt, Artificial Sequence
  Description of Artificial Sequence: Synthetic oligonucleotide
  Antisense strand to SEQ ID NO: 632998
acucacaauucccacauaa

SEQ ID NO: 633000 - RNA, 19 nt, Artificial Sequence
  Description of Artificial Sequence: Synthetic oligonucleotide
  Sense strand starting at position 2273 of SEQ ID NO: 585351
ggaauugugaguugagagu

SEQ ID NO: 633001 - RNA, 19 nt, Artificial Sequence
  Description of Artificial Sequence: Synthetic oligonucleotide
  Antisense strand to SEQ ID NO: 633000
acucucaacucacaauucc

SEQ ID NO: 633002 - RNA, 19 nt, Artificial Sequence
  Description of Artificial Sequence: Synthetic oligonucleotide
  Sense strand starting at position 2363 of SEQ ID NO: 585351
gauuucucauggcaugaag

SEQ ID NO: 633003 - RNA, 19 nt, Artificial Sequence
  Description of Artificial Sequence: Synthetic oligonucleotide
  Antisense strand to SEQ ID NO: 633002
cuucaugccaugagaaauc

SEQ ID NO: 633004 - RNA, 19 nt, Artificial Sequence
  Description of Artificial Sequence: Synthetic oligonucleotide
  Sense strand starting at position 2500 of SEQ ID NO: 585351
cccugucaucuggaaacca

SEQ ID NO: 633005 - RNA, 19 nt, Artificial Sequence
  Description of Artificial Sequence: Synthetic oligonucleotide
  Antisense strand to SEQ ID NO: 633004
ugguuuccagaugacaggg

SEQ ID NO: 633006 - RNA, 19 nt, Artificial Sequence
  Description of Artificial Sequence: Synthetic oligonucleotide
  Sense strand starting at position 2547 of SEQ ID NO: 585351
gucuauucuggacauauca

SEQ ID NO: 633007 - RNA, 19 nt, Artificial Sequence
  Description of Artificial Sequence: Synthetic oligonucleotide
  Antisense strand to SEQ ID NO: 633006
ugauauguccagaauagac

SEQ ID NO: 633008 - RNA, 19 nt, Artificial Sequence
  Description of Artificial Sequence: Synthetic oligonucleotide
  Sense strand starting at position 2580 of SEQ ID NO: 585351
uacgguauauggucuuuau

SEQ ID NO: 633009 - RNA, 19 nt, Artificial Sequence
  Description of Artificial Sequence: Synthetic oligonucleotide
  Antisense strand to SEQ ID NO: 633008
auaaagaccauauaccgua

SEQ ID NO: 633010 - RNA, 19 nt, Artificial Sequence
  Description of Artificial Sequence: Synthetic oligonucleotide
  Sense strand starting at position 2583 of SEQ ID NO: 585351
gguauauggucuuuauguc

SEQ ID NO: 633011 - RNA, 19 nt, Artificial Sequence
  Description of Artificial Sequence: Synthetic oligonucleotide
  Antisense strand to SEQ ID NO: 633010
gacauaaagaccauauacc

SEQ ID NO: 633012 - RNA, 19 nt, Artificial Sequence
  Description of Artificial Sequence: Synthetic oligonucleotide
  Sense strand starting at position 2584 of SEQ ID NO: 585351
guauauggucuuuaugucu

SEQ ID NO: 633013 - RNA, 19 nt, Artificial Sequence
  Description of Artificial Sequence: Synthetic oligonucleotide
  Antisense strand to SEQ ID NO: 633012
agacauaaagaccauauac

SEQ ID NO: 633014 - RNA, 19 nt, Artificial Sequence
  Description of Artificial Sequence: Synthetic oligonucleotide
  Sense strand starting at position 2862 of SEQ ID NO: 585351
augguaacucuguauucca

SEQ ID NO: 633015 - RNA, 19 nt, Artificial Sequence
  Description of Artificial Sequence: Synthetic oligonucleotide
  Antisense strand to SEQ ID NO: 633014
uggaauacagaguuaccau

SEQ ID NO: 633016 - RNA, 19 nt, Artificial Sequence
  Description of Artificial Sequence: Synthetic oligonucleotide
  Sense strand starting at position 2869 of SEQ ID NO: 585351
cucuguauuccauaguuua

SEQ ID NO: 633017 - RNA, 19 nt, Artificial Sequence
  Description of Artificial Sequence: Synthetic oligonucleotide
  Antisense strand to SEQ ID NO: 633016
uaaacuauggaauacagag

SEQ ID NO: 633018 - RNA, 19 nt, Artificial Sequence
  Description of Artificial Sequence: Synthetic oligonucleotide
  Sense strand starting at position 2965 of SEQ ID NO: 585351
ucauaagcauuauuggauu

SEQ ID NO: 633019 - RNA, 19 nt, Artificial Sequence
  Description of Artificial Sequence: Synthetic oligonucleotide
  Antisense strand to SEQ ID NO: 633018
aauccaauaaugcuuauga

SEQ ID NO: 633020 - RNA, 19 nt, Artificial Sequence
  Description of Artificial Sequence: Synthetic oligonucleotide
  Sense strand starting at position 3082 of SEQ ID NO: 585351
uguuuaaauugaguucuag

SEQ ID NO: 633021 - RNA, 19 nt, Artificial Sequence
  Description of Artificial Sequence: Synthetic oligonucleotide
  Antisense strand to SEQ ID NO: 633020
cuagaacucaauuuaaaca

SEQ ID NO: 633022 - RNA, 19 nt, Artificial Sequence
  Description of Artificial Sequence: Synthetic oligonucleotide
  Sense strand starting at position 3088 of SEQ ID NO: 585351
aauugaguucuagguauuc

SEQ ID NO: 633023 - RNA, 19 nt, Artificial Sequence
  Description of Artificial Sequence: Synthetic oligonucleotide
  Antisense strand to SEQ ID NO: 633022
gaauaccuagaacucaauu

SEQ ID NO: 633024 - RNA, 19 nt, Artificial Sequence
  Description of Artificial Sequence: Synthetic oligonucleotide
  Sense strand starting at position 3093 of SEQ ID NO: 585351
aguucuagguauucuauua

SEQ ID NO: 633025 - RNA, 19 nt, Artificial Sequence
  Description of Artificial Sequence: Synthetic oligonucleotide
  Antisense strand to SEQ ID NO: 633024
uaauagaauaccuagaacu

SEQ ID NO: 633026 - RNA, 19 nt, Artificial Sequence
  Description of Artificial Sequence: Synthetic oligonucleotide
  Sense strand starting at position 3180 of SEQ ID NO: 585351
cccugaagcuucuuaagca

SEQ ID NO: 633027 - RNA, 19 nt, Artificial Sequence
  Description of Artificial Sequence: Synthetic oligonucleotide
  Antisense strand to SEQ ID NO: 633026
ugcuuaagaagcuucaggg

SEQ ID NO: 633028 - RNA, 19 nt, Artificial Sequence
  Description of Artificial Sequence: Synthetic oligonucleotide
  Sense strand starting at position 3270 of SEQ ID NO: 585351
ugaagacugaguugcucau

SEQ ID NO: 633029 - RNA, 19 nt, Artificial Sequence
  Description of Artificial Sequence: Synthetic oligonucleotide
  Antisense strand to SEQ ID NO: 633028
augagcaacucagucuuca

SEQ ID NO: 633030 - RNA, 19 nt, Artificial Sequence
  Description of Artificial Sequence: Synthetic oligonucleotide
  Sense strand starting at position 3309 of SEQ ID NO: 585351
agucgcuugacucagcuaa

SEQ ID NO: 633031 - RNA, 19 nt, Artificial Sequence
  Description of Artificial Sequence: Synthetic oligonucleotide
  Antisense strand to SEQ ID NO: 633030
uuagcugagucaagcgacu

SEQ ID NO: 633032 - RNA, 19 nt, Artificial Sequence
  Description of Artificial Sequence: Synthetic oligonucleotide
  Sense strand starting at position 3316 of SEQ ID NO: 585351
ugacucagcuaaucaguuu

SEQ ID NO: 633033 - RNA, 19 nt, Artificial Sequence
  Description of Artificial Sequence: Synthetic oligonucleotide
  Antisense strand to SEQ ID NO: 633032
aaacugauuagcugaguca

SEQ ID NO: 633034 - RNA, 19 nt, Artificial Sequence
  Description of Artificial Sequence: Synthetic oligonucleotide
  Sense strand starting at position 3349 of SEQ ID NO: 585351
ggugcauaaucauuuguac

SEQ ID NO: 633035 - RNA, 19 nt, Artificial Sequence
  Description of Artificial Sequence: Synthetic oligonucleotide
  Antisense strand to SEQ ID NO: 633034
guacaaaugauuaugcacc

SEQ ID NO: 633036 - RNA, 19 nt, Artificial Sequence
  Description of Artificial Sequence: Synthetic oligonucleotide
  Sense strand starting at position 3368 of SEQ ID NO: 585351
cacacagggcugugauaaa

SEQ ID NO: 633037 - RNA, 19 nt, Artificial Sequence
  Description of Artificial Sequence: Synthetic oligonucleotide
  Antisense strand to SEQ ID NO: 633036
uuuaucacagcccugugug

SEQ ID NO: 633038 - RNA, 19 nt, Artificial Sequence
  Description of Artificial Sequence: Synthetic oligonucleotide
  Sense strand starting at position 3387 of SEQ ID NO: 585351
aaguaaaugcuauagaugu

SEQ ID NO: 633039 - RNA, 19 nt, Artificial Sequence
  Description of Artificial Sequence: Synthetic oligonucleotide
  Antisense strand to SEQ ID NO: 633038
acaucuauagcauuuacuu

SEQ ID NO: 633040 - RNA, 19 nt, Artificial Sequence
  Description of Artificial Sequence: Synthetic oligonucleotide
  Sense strand starting at position 3630 of SEQ ID NO: 585351
gguacaguuccacaccaaa

SEQ ID NO: 633041 - RNA, 19 nt, Artificial Sequence
  Description of Artificial Sequence: Synthetic oligonucleotide
  Antisense strand to SEQ ID NO: 633040
uuugguguggaacuguacc

SEQ ID NO: 633042 - RNA, 19 nt, Artificial Sequence
  Description of Artificial Sequence: Synthetic oligonucleotide
  Sense strand starting at position 3660 of SEQ ID NO: 585351
acucaagucucucuaagag

SEQ ID NO: 633043 - RNA, 19 nt, Artificial Sequence
  Description of Artificial Sequence: Synthetic oligonucleotide
  Antisense strand to SEQ ID NO: 633042
cucuuagagagacuugagu

SEQ ID NO: 633044 - RNA, 19 nt, Artificial Sequence
  Description of Artificial Sequence: Synthetic oligonucleotide
  Sense strand starting at position 3672 of SEQ ID NO: 585351
cuaagagauuugcauguua

SEQ ID NO: 633045 - RNA, 19 nt, Artificial Sequence
  Description of Artificial Sequence: Synthetic oligonucleotide
  Antisense strand to SEQ ID NO: 633044
uaacaugcaaaucucuuag

SEQ ID NO: 633046 - RNA, 19 nt, Artificial Sequence
  Description of Artificial Sequence: Synthetic oligonucleotide
  Sense strand starting at position 3719 of SEQ ID NO: 585351
cugaauuuguuauaacagu

SEQ ID NO: 633047 - RNA, 19 nt, Artificial Sequence
  Description of Artificial Sequence: Synthetic oligonucleotide
  Antisense strand to SEQ ID NO: 633046
acuguuauaacaaauucag

SEQ ID NO: 633048 - RNA, 19 nt, Artificial Sequence
  Description of Artificial Sequence: Synthetic oligonucleotide
  Sense strand starting at position 3725 of SEQ ID NO: 585351
uuguuauaacaguguccau

SEQ ID NO: 633049 - RNA, 19 nt, Artificial Sequence
  Description of Artificial Sequence: Synthetic oligonucleotide
  Antisense strand to SEQ ID NO: 633048
auggacacuguuauaacaa

SEQ ID NO: 633050 - RNA, 19 nt, Artificial Sequence
  Description of Artificial Sequence: Synthetic oligonucleotide
  Sense strand starting at position 3749 of SEQ ID NO: 585351
gguuuccaugcugacagau

SEQ ID NO: 633051 - RNA, 19 nt, Artificial Sequence
  Description of Artificial Sequence: Synthetic oligonucleotide
  Antisense strand to SEQ ID NO: 633050
aucugucagcauggaaacc

SEQ ID NO: 633052 - RNA, 19 nt, Artificial Sequence
  Description of Artificial Sequence: Synthetic oligonucleotide
  Sense strand starting at position 3781 of SEQ ID NO: 585351
guguuaaagaaguaguauc

SEQ ID NO: 633053 - RNA, 19 nt, Artificial Sequence
  Description of Artificial Sequence: Synthetic oligonucleotide
  Antisense strand to SEQ ID NO: 633052
gauacuacuucuuuaacac

SEQ ID NO: 633054 - RNA, 19 nt, Artificial Sequence
  Description of Artificial Sequence: Synthetic oligonucleotide
  Sense strand starting at position 3788 of SEQ ID NO: 585351
agaaguaguaucuacgguu

SEQ ID NO: 633055 - RNA, 19 nt, Artificial Sequence
  Description of Artificial Sequence: Synthetic oligonucleotide
  Antisense strand to SEQ ID NO: 633054
aaccguagauacuacuucu

SEQ ID NO: 633056 - RNA, 19 nt, Artificial Sequence
  Description of Artificial Sequence: Synthetic oligonucleotide
  Sense strand starting at position 3794 of SEQ ID NO: 585351
aguaucuacgguuauaaug

SEQ ID NO: 633057 - RNA, 19 nt, Artificial Sequence
  Description of Artificial Sequence: Synthetic oligonucleotide
  Antisense strand to SEQ ID NO: 633056
cauuauaaccguagauacu

SEQ ID NO: 633058 - RNA, 19 nt, Artificial Sequence
  Description of Artificial Sequence: Synthetic oligonucleotide
  Sense strand starting at position 3922 of SEQ ID NO: 585351
aggacaauucgugggcuuu

SEQ ID NO: 633059 - RNA, 19 nt, Artificial Sequence
  Description of Artificial Sequence: Synthetic oligonucleotide
  Antisense strand to SEQ ID NO: 633058
aaagcccacgaauuguccu

SEQ ID NO: 633060 - RNA, 19 nt, Artificial Sequence
  Description of Artificial Sequence: Synthetic oligonucleotide
  Sense strand starting at position 16 of SEQ ID NO: 585352
agcuauuuggcauguuauc

SEQ ID NO: 633061 - RNA, 19 nt, Artificial Sequence
  Description of Artificial Sequence: Synthetic oligonucleotide
  Antisense strand to SEQ ID NO: 633060
gauaacaugccaaauagcu

SEQ ID NO: 633062 - RNA, 19 nt, Artificial Sequence
  Description of Artificial Sequence: Synthetic oligonucleotide
  Sense strand starting at position 25 of SEQ ID NO: 585352
gcauguuaucaacacugac

SEQ ID NO: 633063 - RNA, 19 nt, Artificial Sequence
  Description of Artificial Sequence: Synthetic oligonucleotide
  Antisense strand to SEQ ID NO: 633062
gucaguguugauaacaugc

SEQ ID NO: 633064 - RNA, 19 nt, Artificial Sequence
  Description of Artificial Sequence: Synthetic oligonucleotide
  Sense strand starting at position 119 of SEQ ID NO: 585352
ucaacaauguuguuaauag

SEQ ID NO: 633065 - RNA, 19 nt, Artificial Sequence
  Description of Artificial Sequence: Synthetic oligonucleotide
  Antisense strand to SEQ ID NO: 633064
cuauuaacaacauuguuga

SEQ ID NO: 633066 - RNA, 19 nt, Artificial Sequence
  Description of Artificial Sequence: Synthetic oligonucleotide
  Sense strand starting at position 128 of SEQ ID NO: 585352
uuguuaauagagugaauuc

SEQ ID NO: 633067 - RNA, 19 nt, Artificial Sequence
  Description of Artificial Sequence: Synthetic oligonucleotide
  Antisense strand to SEQ ID NO: 633066
gaauucacucuauuaacaa

SEQ ID NO: 633068 - RNA, 19 nt, Artificial Sequence
  Description of Artificial Sequence: Synthetic oligonucleotide
  Sense strand starting at position 206 of SEQ ID NO: 585352
uggagaaucccuuguggac

SEQ ID NO: 633069 - RNA, 19 nt, Artificial Sequence
  Description of Artificial Sequence: Synthetic oligonucleotide
  Antisense strand to SEQ ID NO: 633068
guccacaagggauucucca

SEQ ID NO: 633070 - RNA, 19 nt, Artificial Sequence
  Description of Artificial Sequence: Synthetic oligonucleotide
  Sense strand starting at position 258 of SEQ ID NO: 585352
acgcuucuugaauaaccaa

SEQ ID NO: 633071 - RNA, 19 nt, Artificial Sequence
  Description of Artificial Sequence: Synthetic oligonucleotide
  Antisense strand to SEQ ID NO: 633070
uugguuauucaagaagcgu

SEQ ID NO: 633072 - RNA, 19 nt, Artificial Sequence
  Description of Artificial Sequence: Synthetic oligonucleotide
  Sense strand starting at position 265 of SEQ ID NO: 585352
uugaauaaccaacgcuaua

SEQ ID NO: 633073 - RNA, 19 nt, Artificial Sequence
  Description of Artificial Sequence: Synthetic oligonucleotide
  Antisense strand to SEQ ID NO: 633072
uauagcguugguuauucaa

SEQ ID NO: 633074 - RNA, 19 nt, Artificial Sequence
  Description of Artificial Sequence: Synthetic oligonucleotide
  Sense strand starting at position 410 of SEQ ID NO: 585352
ccuauuucuugguauaaga

SEQ ID NO: 633075 - RNA, 19 nt, Artificial Sequence
  Description of Artificial Sequence: Synthetic oligonucleotide
  Antisense strand to SEQ ID NO: 633074
ucuuauaccaagaaauagg

SEQ ID NO: 633076 - RNA, 19 nt, Artificial Sequence
  Description of Artificial Sequence: Synthetic oligonucleotide
  Sense strand starting at position 496 of SEQ ID NO: 585352
gaucacaaugucuggaaau

SEQ ID NO: 633077 - RNA, 19 nt, Artificial Sequence
  Description of Artificial Sequence: Synthetic oligonucleotide
  Antisense strand to SEQ ID NO: 633076
auuuccagacauugugauc

SEQ ID NO: 633078 - RNA, 19 nt, Artificial Sequence
  Description of Artificial Sequence: Synthetic oligonucleotide
  Sense strand starting at position 835 of SEQ ID NO: 585352
cuacuaaggugauuaucau

SEQ ID NO: 633079 - RNA, 19 nt, Artificial Sequence
  Description of Artificial Sequence: Synthetic oligonucleotide
  Antisense strand to SEQ ID NO: 633078
augauaaucaccuuaguag

SEQ ID NO: 633080 - RNA, 19 nt, Artificial Sequence
  Description of Artificial Sequence: Synthetic oligonucleotide
  Sense strand starting at position 841 of SEQ ID NO: 585352
aggugauuaucauugugau

SEQ ID NO: 633081 - RNA, 19 nt, Artificial Sequence
  Description of Artificial Sequence: Synthetic oligonucleotide
  Antisense strand to SEQ ID NO: 633080
aucacaaugauaaucaccu

SEQ ID NO: 633082 - RNA, 19 nt, Artificial Sequence
  Description of Artificial Sequence: Synthetic oligonucleotide
  Sense strand starting at position 842 of SEQ ID NO: 585352
ggugauuaucauugugauu

SEQ ID NO: 633083 - RNA, 19 nt, Artificial Sequence
  Description of Artificial Sequence: Synthetic oligonucleotide
  Antisense strand to SEQ ID NO: 633082
aaucacaaugauaaucacc

SEQ ID NO: 633084 - RNA, 19 nt, Artificial Sequence
  Description of Artificial Sequence: Synthetic oligonucleotide
  Sense strand starting at position 848 of SEQ ID NO: 585352
uaucauugugauuacguga

SEQ ID NO: 633085 - RNA, 19 nt, Artificial Sequence
  Description of Artificial Sequence: Synthetic oligonucleotide
  Antisense strand to SEQ ID NO: 633084
ucacguaaucacaaugaua

SEQ ID NO: 633086 - RNA, 19 nt, Artificial Sequence
  Description of Artificial Sequence: Synthetic oligonucleotide
  Sense strand starting at position 851 of SEQ ID NO: 585352
cauugugauuacgugacaa

SEQ ID NO: 633087 - RNA, 19 nt, Artificial Sequence
  Description of Artificial Sequence: Synthetic oligonucleotide
  Antisense strand to SEQ ID NO: 633086
uugucacguaaucacaaug

SEQ ID NO: 633088 - RNA, 19 nt, Artificial Sequence
  Description of Artificial Sequence: Synthetic oligonucleotide
  Sense strand starting at position 853 of SEQ ID NO: 585352
uugugauuacgugacaaag

SEQ ID NO: 633089 - RNA, 19 nt, Artificial Sequence
  Description of Artificial Sequence: Synthetic oligonucleotide
  Antisense strand to SEQ ID NO: 633088
cuuugucacguaaucacaa

SEQ ID NO: 633090 - RNA, 19 nt, Artificial Sequence
  Description of Artificial Sequence: Synthetic oligonucleotide
  Sense strand starting at position 989 of SEQ ID NO: 585352
ggaaguuaguaacuaauau

SEQ ID NO: 633091 - RNA, 19 nt, Artificial Sequence
  Description of Artificial Sequence: Synthetic oligonucleotide
  Antisense strand to SEQ ID NO: 633090
auauuaguuacuaacuucc

SEQ ID NO: 633092 - RNA, 19 nt, Artificial Sequence
  Description of Artificial Sequence: Synthetic oligonucleotide
  Sense strand starting at position 1063 of SEQ ID NO: 585352
gagauuauccacuguaagg

SEQ ID NO: 633093 - RNA, 19 nt, Artificial Sequence
  Description of Artificial Sequence: Synthetic oligonucleotide
  Antisense strand to SEQ ID NO: 633092
ccuuacaguggauaaucuc

SEQ ID NO: 633094 - RNA, 19 nt, Artificial Sequence
  Description of Artificial Sequence: Synthetic oligonucleotide
  Sense strand starting at position 1484 of SEQ ID NO: 585352
gggacugucaccuaagcca

SEQ ID NO: 633095 - RNA, 19 nt, Artificial Sequence
  Description of Artificial Sequence: Synthetic oligonucleotide
  Antisense strand to SEQ ID NO: 633094
uggcuuaggugacaguccc

SEQ ID NO: 633096 - RNA, 19 nt, Artificial Sequence
  Description of Artificial Sequence: Synthetic oligonucleotide
  Sense strand starting at position 1500 of SEQ ID NO: 585352
ccaaguuaucguggacaac

SEQ ID NO: 633097 - RNA, 19 nt, Artificial Sequence
  Description of Artificial Sequence: Synthetic oligonucleotide
  Antisense strand to SEQ ID NO: 633096
guuguccacgauaacuugg

SEQ ID NO: 633098 - RNA, 19 nt, Artificial Sequence
  Description of Artificial Sequence: Synthetic oligonucleotide
  Sense strand starting at position 1501 of SEQ ID NO: 585352
caaguuaucguggacaaca

SEQ ID NO: 633099 - RNA, 19 nt, Artificial Sequence
  Description of Artificial Sequence: Synthetic oligonucleotide
  Antisense strand to SEQ ID NO: 633098
uguuguccacgauaacuug

SEQ ID NO: 633100 - RNA, 19 nt, Artificial Sequence
  Description of Artificial Sequence: Synthetic oligonucleotide
  Sense strand starting at position 2044 of SEQ ID NO: 585352
uaguauagaccuuggugua

SEQ ID NO: 633101 - RNA, 19 nt, Artificial Sequence
  Description of Artificial Sequence: Synthetic oligonucleotide
  Antisense strand to SEQ ID NO: 633100
uacaccaaggucuauacua

SEQ ID NO: 633102 - RNA, 19 nt, Artificial Sequence
  Description of Artificial Sequence: Synthetic oligonucleotide
  Sense strand starting at position 2183 of SEQ ID NO: 585352
ggugaauguccaggaucaa

SEQ ID NO: 633103 - RNA, 19 nt, Artificial Sequence
  Description of Artificial Sequence: Synthetic oligonucleotide
  Antisense strand to SEQ ID NO: 633102
uugauccuggacauucacc

SEQ ID NO: 633104 - RNA, 19 nt, Artificial Sequence
  Description of Artificial Sequence: Synthetic oligonucleotide
  Sense strand starting at position 2200 of SEQ ID NO: 585352
aagcaauucguuuaugaca

SEQ ID NO: 633105 - RNA, 19 nt, Artificial Sequence
  Description of Artificial Sequence: Synthetic oligonucleotide
  Antisense strand to SEQ ID NO: 633104
ugucauaaacgaauugcuu

SEQ ID NO: 633106 - RNA, 19 nt, Artificial Sequence
  Description of Artificial Sequence: Synthetic oligonucleotide
  Sense strand starting at position 2260 of SEQ ID NO: 585352
gcuccaugucaugacauaa

SEQ ID NO: 633107 - RNA, 19 nt, Artificial Sequence
  Description of Artificial Sequence: Synthetic oligonucleotide
  Antisense strand to SEQ ID NO: 633106
uuaugucaugacauggagc

SEQ ID NO: 633108 - RNA, 19 nt, Artificial Sequence
  Description of Artificial Sequence: Synthetic oligonucleotide
  Sense strand starting at position 2496 of SEQ ID NO: 585352
acgcaagguaauuaaguuu

SEQ ID NO: 633109 - RNA, 19 nt, Artificial Sequence
  Description of Artificial Sequence: Synthetic oligonucleotide
  Antisense strand to SEQ ID NO: 633108
aaacuuaauuaccuugcgu

SEQ ID NO: 633110 - RNA, 19 nt, Artificial Sequence
  Description of Artificial Sequence: Synthetic oligonucleotide
  Sense strand starting at position 2907 of SEQ ID NO: 585352
gcaacuacuaugugugaga

SEQ ID NO: 633111 - RNA, 19 nt, Artificial Sequence
  Description of Artificial Sequence: Synthetic oligonucleotide
  Antisense strand to SEQ ID NO: 633110
ucucacacauaguaguugc

SEQ ID NO: 633112 - RNA, 19 nt, Artificial Sequence
  Description of Artificial Sequence: Synthetic oligonucleotide
  Sense strand starting at position 2909 of SEQ ID NO: 585352
aacuacuaugugugagaca

SEQ ID NO: 633113 - RNA, 19 nt, Artificial Sequence
  Description of Artificial Sequence: Synthetic oligonucleotide
  Antisense strand to SEQ ID NO: 633112
ugucucacacauaguaguu

SEQ ID NO: 633114 - RNA, 19 nt, Artificial Sequence
  Description of Artificial Sequence: Synthetic oligonucleotide
  Sense strand starting at position 2914 of SEQ ID NO: 585352
cuaugugugagacaguguu

SEQ ID NO: 633115 - RNA, 19 nt, Artificial Sequence
  Description of Artificial Sequence: Synthetic oligonucleotide
  Antisense strand to SEQ ID NO: 633114
aacacugucucacacauag

SEQ ID NO: 633116 - RNA, 19 nt, Artificial Sequence
  Description of Artificial Sequence: Synthetic oligonucleotide
  Sense strand starting at position 2940 of SEQ ID NO: 585352
gguauacaguggucacgaa

SEQ ID NO: 633117 - RNA, 19 nt, Artificial Sequence
  Description of Artificial Sequence: Synthetic oligonucleotide
  Antisense strand to SEQ ID NO: 633116
uucgugaccacuguauacc

SEQ ID NO: 633118 - RNA, 19 nt, Artificial Sequence
  Description of Artificial Sequence: Synthetic oligonucleotide
  Sense strand starting at position 2941 of SEQ ID NO: 585352
guauacaguggucacgaaa

SEQ ID NO: 633119 - RNA, 19 nt, Artificial Sequence
  Description of Artificial Sequence: Synthetic oligonucleotide
  Antisense strand to SEQ ID NO: 633118
uuucgugaccacuguauac

SEQ ID NO: 633120 - RNA, 19 nt, Artificial Sequence
  Description of Artificial Sequence: Synthetic oligonucleotide
  Sense strand starting at position 2944 of SEQ ID NO: 585352
uacaguggucacgaaauag

SEQ ID NO: 633121 - RNA, 19 nt, Artificial Sequence
  Description of Artificial Sequence: Synthetic oligonucleotide
  Antisense strand to SEQ ID NO: 633120
cuauuucgugaccacugua

SEQ ID NO: 633122 - RNA, 19 nt, Artificial Sequence
  Description of Artificial Sequence: Synthetic oligonucleotide
  Sense strand starting at position 2992 of SEQ ID NO: 585352
cgucucaacugaguggaaa

SEQ ID NO: 633123 - RNA, 19 nt, Artificial Sequence
  Description of Artificial Sequence: Synthetic oligonucleotide
  Antisense strand to SEQ ID NO: 633122
uuuccacucaguugagacg

SEQ ID NO: 633124 - RNA, 19 nt, Artificial Sequence
  Description of Artificial Sequence: Synthetic oligonucleotide
  Sense strand starting at position 3227 of SEQ ID NO: 585352
guaugauuccauugauaag

SEQ ID NO: 633125 - RNA, 19 nt, Artificial Sequence
  Description of Artificial Sequence: Synthetic oligonucleotide
  Antisense strand to SEQ ID NO: 633124
cuuaucaauggaaucauac

SEQ ID NO: 633126 - RNA, 19 nt, Artificial Sequence
  Description of Artificial Sequence: Synthetic oligonucleotide
  Sense strand starting at position 3590 of SEQ ID NO: 585352
auaauaauagcugaucagu

SEQ ID NO: 633127 - RNA, 19 nt, Artificial Sequence
  Description of Artificial Sequence: Synthetic oligonucleotide
  Antisense strand to SEQ ID NO: 633126
acugaucagcuauuauuau

SEQ ID NO: 633128 - RNA, 19 nt, Artificial Sequence
  Description of Artificial Sequence: Synthetic oligonucleotide
  Sense strand starting at position 3678 of SEQ ID NO: 585352
uauuuaaggugauggaaag

SEQ ID NO: 633129 - RNA, 19 nt, Artificial Sequence
  Description of Artificial Sequence: Synthetic oligonucleotide
  Antisense strand to SEQ ID NO: 633128
cuuuccaucaccuuaaaua

SEQ ID NO: 633130 - RNA, 19 nt, Artificial Sequence
  Description of Artificial Sequence: Synthetic oligonucleotide
  Sense strand starting at position 3719 of SEQ ID NO: 585352
cuuacacagguguaaacau

SEQ ID NO: 633131 - RNA, 19 nt, Artificial Sequence
  Description of Artificial Sequence: Synthetic oligonucleotide
  Antisense strand to SEQ ID NO: 633130
auguuuacaccuguguaag

SEQ ID NO: 633132 - RNA, 19 nt, Artificial Sequence
  Description of Artificial Sequence: Synthetic oligonucleotide
  Sense strand starting at position 3784 of SEQ ID NO: 585352
guguacguacgcguauuau

SEQ ID NO: 633133 - RNA, 19 nt, Artificial Sequence
  Description of Artificial Sequence: Synthetic oligonucleotide
  Antisense strand to SEQ ID NO: 633132
auaauacgcguacguacac

SEQ ID NO: 633134 - RNA, 19 nt, Artificial Sequence
  Description of Artificial Sequence: Synthetic oligonucleotide
  Sense strand starting at position 3787 of SEQ ID NO: 585352
uacguacgcguauuauaua

SEQ ID NO: 633135 - RNA, 19 nt, Artificial Sequence
  Description of Artificial Sequence: Synthetic oligonucleotide
  Antisense strand to SEQ ID NO: 633134
uauauaauacgcguacgua

SEQ ID NO: 633136 - RNA, 19 nt, Artificial Sequence
  Description of Artificial Sequence: Synthetic oligonucleotide
  Sense strand starting at position 3792 of SEQ ID NO: 585352
acgcguauuauauaugaag

SEQ ID NO: 633137 - RNA, 19 nt, Artificial Sequence
  Description of Artificial Sequence: Synthetic oligonucleotide
  Antisense strand to SEQ ID NO: 633136
cuucauauauaauacgcgu

SEQ ID NO: 633138 - RNA, 19 nt, Artificial Sequence
  Description of Artificial Sequence: Synthetic oligonucleotide
  Sense strand starting at position 3794 of SEQ ID NO: 585352
gcguauuauauaugaagau

SEQ ID NO: 633139 - RNA, 19 nt, Artificial Sequence
  Description of Artificial Sequence: Synthetic oligonucleotide
  Antisense strand to SEQ ID NO: 633138
aucuucauauauaauacgc

SEQ ID NO: 633140 - RNA, 19 nt, Artificial Sequence
  Description of Artificial Sequence: Synthetic oligonucleotide
  Sense strand starting at position 219 of SEQ ID NO: 585353
gcgaguuagguugcagcua

SEQ ID NO: 633141 - RNA, 19 nt, Artificial Sequence
  Description of Artificial Sequence: Synthetic oligonucleotide
  Antisense strand to SEQ ID NO: 633140
uagcugcaaccuaacucgc

SEQ ID NO: 633142 - RNA, 19 nt, Artificial Sequence
  Description of Artificial Sequence: Synthetic oligonucleotide
  Sense strand starting at position 728 of SEQ ID NO: 585353
augcuaauuugugugguga

SEQ ID NO: 633143 - RNA, 19 nt, Artificial Sequence
  Description of Artificial Sequence: Synthetic oligonucleotide
  Antisense strand to SEQ ID NO: 633142
ucaccacacaaauuagcau

SEQ ID NO: 633144 - RNA, 19 nt, Artificial Sequence
  Description of Artificial Sequence: Synthetic oligonucleotide
  Sense strand starting at position 858 of SEQ ID NO: 585353
gggauuguaauagguaauu

SEQ ID NO: 633145 - RNA, 19 nt, Artificial Sequence
  Description of Artificial Sequence: Synthetic oligonucleotide
  Antisense strand to SEQ ID NO: 633144
aauuaccuauuacaauccc

SEQ ID NO: 633146 - RNA, 19 nt, Artificial Sequence
  Description of Artificial Sequence: Synthetic oligonucleotide
  Sense strand starting at position 916 of SEQ ID NO: 585353
aguggaucaugauuggauu

SEQ ID NO: 633147 - RNA, 19 nt, Artificial Sequence
  Description of Artificial Sequence: Synthetic oligonucleotide
  Antisense strand to SEQ ID NO: 633146
aauccaaucaugauccacu

SEQ ID NO: 633148 - RNA, 19 nt, Artificial Sequence
  Description of Artificial Sequence: Synthetic oligonucleotide
  Sense strand starting at position 917 of SEQ ID NO: 585353
guggaucaugauuggauua

SEQ ID NO: 633149 - RNA, 19 nt, Artificial Sequence
  Description of Artificial Sequence: Synthetic oligonucleotide
  Antisense strand to SEQ ID NO: 633148
uaauccaaucaugauccac

SEQ ID NO: 633150 - RNA, 19 nt, Artificial Sequence
  Description of Artificial Sequence: Synthetic oligonucleotide
  Sense strand starting at position 927 of SEQ ID NO: 585353
auuggauuaagcuggucau

SEQ ID NO: 633151 - RNA, 19 nt, Artificial Sequence
  Description of Artificial Sequence: Synthetic oligonucleotide
  Antisense strand to SEQ ID NO: 633150
augaccagcuuaauccaau

SEQ ID NO: 633152 - RNA, 19 nt, Artificial Sequence
  Description of Artificial Sequence: Synthetic oligonucleotide
  Sense strand starting at position 930 of SEQ ID NO: 585353
ggauuaagcuggucaugac

SEQ ID NO: 633153 - RNA, 19 nt, Artificial Sequence
  Description of Artificial Sequence: Synthetic oligonucleotide
  Antisense strand to SEQ ID NO: 633152
gucaugaccagcuuaaucc

SEQ ID NO: 633154 - RNA, 19 nt, Artificial Sequence
  Description of Artificial Sequence: Synthetic oligonucleotide
  Sense strand starting at position 1384 of SEQ ID NO: 585353
gaaguaugaaaguguggga

SEQ ID NO: 633155 - RNA, 19 nt, Artificial Sequence
  Description of Artificial Sequence: Synthetic oligonucleotide
  Antisense strand to SEQ ID NO: 633154
ucccacacuuucauacuuc

SEQ ID NO: 633156 - RNA, 19 nt, Artificial Sequence
  Description of Artificial Sequence: Synthetic oligonucleotide
  Sense strand starting at position 1421 of SEQ ID NO: 585353
guugauaacgcugacauau

SEQ ID NO: 633157 - RNA, 19 nt, Artificial Sequence
  Description of Artificial Sequence: Synthetic oligonucleotide
  Antisense strand to SEQ ID NO: 633156
auaugucagcguuaucaac

SEQ ID NO: 633158 - RNA, 19 nt, Artificial Sequence
  Description of Artificial Sequence: Synthetic oligonucleotide
  Sense strand starting at position 1506 of SEQ ID NO: 585353
uaccgauaugguuauucuu

SEQ ID NO: 633159 - RNA, 19 nt, Artificial Sequence
  Description of Artificial Sequence: Synthetic oligonucleotide
  Antisense strand to SEQ ID NO: 633158
aagaauaaccauaucggua

SEQ ID NO: 633160 - RNA, 19 nt, Artificial Sequence
  Description of Artificial Sequence: Synthetic oligonucleotide
  Sense strand starting at position 1809 of SEQ ID NO: 585353
agguguaguucuccaggaa

SEQ ID NO: 633161 - RNA, 19 nt, Artificial Sequence
  Description of Artificial Sequence: Synthetic oligonucleotide
  Antisense strand to SEQ ID NO: 633160
uuccuggagaacuacaccu

SEQ ID NO: 633162 - RNA, 19 nt, Artificial Sequence
  Description of Artificial Sequence: Synthetic oligonucleotide
  Sense strand starting at position 1810 of SEQ ID NO: 585353
gguguaguucuccaggaag

SEQ ID NO: 633163 - RNA, 19 nt, Artificial Sequence
  Description of Artificial Sequence: Synthetic oligonucleotide
  Antisense strand to SEQ ID NO: 633162
cuuccuggagaacuacacc

SEQ ID NO: 633164 - RNA, 19 nt, Artificial Sequence
  Description of Artificial Sequence: Synthetic oligonucleotide
  Sense strand starting at position 2308 of SEQ ID NO: 585353
ccaaguuggauagauguuu

SEQ ID NO: 633165 - RNA, 19 nt, Artificial Sequence
  Description of Artificial Sequence: Synthetic oligonucleotide
  Antisense strand to SEQ ID NO: 633164
aaacaucuauccaacuugg

SEQ ID NO: 633166 - RNA, 19 nt, Artificial Sequence
  Description of Artificial Sequence: Synthetic oligonucleotide
  Sense strand starting at position 2319 of SEQ ID NO: 585353
agauguuucugggcuaaau

SEQ ID NO: 633167 - RNA, 19 nt, Artificial Sequence
  Description of Artificial Sequence: Synthetic oligonucleotide
  Antisense strand to SEQ ID NO: 633166
auuuagcccagaaacaucu

SEQ ID NO: 633168 - RNA, 19 nt, Artificial Sequence
  Description of Artificial Sequence: Synthetic oligonucleotide
  Sense strand starting at position 2330 of SEQ ID NO: 585353
ggcuaaaucggauaggugu

SEQ ID NO: 633169 - RNA, 19 nt, Artificial Sequence
  Description of Artificial Sequence: Synthetic oligonucleotide
  Antisense strand to SEQ ID NO: 633168
acaccuauccgauuuagcc

SEQ ID NO: 633170 - RNA, 19 nt, Artificial Sequence
  Description of Artificial Sequence: Synthetic oligonucleotide
  Sense strand starting at position 2401 of SEQ ID NO: 585353
acccuugaaggcuguaaga

SEQ ID NO: 633171 - RNA, 19 nt, Artificial Sequence
  Description of Artificial Sequence: Synthetic oligonucleotide
  Antisense strand to SEQ ID NO: 633170
ucuuacagccuucaagggu

SEQ ID NO: 633172 - RNA, 19 nt, Artificial Sequence
  Description of Artificial Sequence: Synthetic oligonucleotide
  Sense strand starting at position 2538 of SEQ ID NO: 585353
aguaaacugcgugacaaau

SEQ ID NO: 633173 - RNA, 19 nt, Artificial Sequence
  Description of Artificial Sequence: Synthetic oligonucleotide
  Antisense strand to SEQ ID NO: 633172
auuugucacgcaguuuacu

SEQ ID NO: 633174 - RNA, 19 nt, Artificial Sequence
  Description of Artificial Sequence: Synthetic oligonucleotide
  Sense strand starting at position 2565 of SEQ ID NO: 585353
aguaaauagacaggugauu

SEQ ID NO: 633175 - RNA, 19 nt, Artificial Sequence
  Description of Artificial Sequence: Synthetic oligonucleotide
  Antisense strand to SEQ ID NO: 633174
aaucaccugucuauuuacu

SEQ ID NO: 633176 - RNA, 19 nt, Artificial Sequence
  Description of Artificial Sequence: Synthetic oligonucleotide
  Sense strand starting at position 2606 of SEQ ID NO: 585353
gaguaucaggguugauucu

SEQ ID NO: 633177 - RNA, 19 nt, Artificial Sequence
  Description of Artificial Sequence: Synthetic oligonucleotide
  Antisense strand to SEQ ID NO: 633176
agaaucaacccugauacuc

SEQ ID NO: 633178 - RNA, 19 nt, Artificial Sequence
  Description of Artificial Sequence: Synthetic oligonucleotide
  Sense strand starting at position 2616 of SEQ ID NO: 585353
guugauucugcugauaagu

SEQ ID NO: 633179 - RNA, 19 nt, Artificial Sequence
  Description of Artificial Sequence: Synthetic oligonucleotide
  Antisense strand to SEQ ID NO: 633178
acuuaucagcagaaucaac

SEQ ID NO: 633180 - RNA, 19 nt, Artificial Sequence
  Description of Artificial Sequence: Synthetic oligonucleotide
  Sense strand starting at position 2657 of SEQ ID NO: 585353
cuugcuaauuugucuugca

SEQ ID NO: 633181 - RNA, 19 nt, Artificial Sequence
  Description of Artificial Sequence: Synthetic oligonucleotide
  Antisense strand to SEQ ID NO: 633180
ugcaagacaaauuagcaag

SEQ ID NO: 633182 - RNA, 19 nt, Artificial Sequence
  Description of Artificial Sequence: Synthetic oligonucleotide
  Sense strand starting at position 2658 of SEQ ID NO: 585353
uugcuaauuugucuugcau

SEQ ID NO: 633183 - RNA, 19 nt, Artificial Sequence
  Description of Artificial Sequence: Synthetic oligonucleotide
  Antisense strand to SEQ ID NO: 633182
augcaagacaaauuagcaa

SEQ ID NO: 633184 - RNA, 19 nt, Artificial Sequence
  Description of Artificial Sequence: Synthetic oligonucleotide
  Sense strand starting at position 2688 of SEQ ID NO: 585353
guggguuaccuucagagga

SEQ ID NO: 633185 - RNA, 19 nt, Artificial Sequence
  Description of Artificial Sequence: Synthetic oligonucleotide
  Antisense strand to SEQ ID NO: 633184
uccucugaagguaacccac

SEQ ID NO: 633186 - RNA, 19 nt, Artificial Sequence
  Description of Artificial Sequence: Synthetic oligonucleotide
  Sense strand starting at position 2701 of SEQ ID NO: 585353
agaggauaugucggugaaa

SEQ ID NO: 633187 - RNA, 19 nt, Artificial Sequence
  Description of Artificial Sequence: Synthetic oligonucleotide
  Antisense strand to SEQ ID NO: 633186
uuucaccgacauauccucu

SEQ ID NO: 633188 - RNA, 19 nt, Artificial Sequence
  Description of Artificial Sequence: Synthetic oligonucleotide
  Sense strand starting at position 2702 of SEQ ID NO: 585353
gaggauaugucggugaaau

SEQ ID NO: 633189 - RNA, 19 nt, Artificial Sequence
  Description of Artificial Sequence: Synthetic oligonucleotide
  Antisense strand to SEQ ID NO: 633188
auuucaccgacauauccuc

SEQ ID NO: 633190 - RNA, 19 nt, Artificial Sequence
  Description of Artificial Sequence: Synthetic oligonucleotide
  Sense strand starting at position 2703 of SEQ ID NO: 585353
aggauaugucggugaaaua

SEQ ID NO: 633191 - RNA, 19 nt, Artificial Sequence
  Description of Artificial Sequence: Synthetic oligonucleotide
  Antisense strand to SEQ ID NO: 633190
uauuucaccgacauauccu

SEQ ID NO: 633192 - RNA, 19 nt, Artificial Sequence
  Description of Artificial Sequence: Synthetic oligonucleotide
  Sense strand starting at position 2704 of SEQ ID NO: 585353
ggauaugucggugaaauau

SEQ ID NO: 633193 - RNA, 19 nt, Artificial Sequence
  Description of Artificial Sequence: Synthetic oligonucleotide
  Antisense strand to SEQ ID NO: 633192
auauuucaccgacauaucc

SEQ ID NO: 633194 - RNA, 19 nt, Artificial Sequence
  Description of Artificial Sequence: Synthetic oligonucleotide
  Sense strand starting at position 2713 of SEQ ID NO: 585353
ggugaaauauaugugugaa

SEQ ID NO: 633195 - RNA, 19 nt, Artificial Sequence
  Description of Artificial Sequence: Synthetic oligonucleotide
  Antisense strand to SEQ ID NO: 633194
uucacacauauauuucacc

SEQ ID NO: 633196 - RNA, 19 nt, Artificial Sequence
  Description of Artificial Sequence: Synthetic oligonucleotide
  Sense strand starting at position 2789 of SEQ ID NO: 585353
aguggauggaauugagagu

SEQ ID NO: 633197 - RNA, 19 nt, Artificial Sequence
  Description of Artificial Sequence: Synthetic oligonucleotide
  Antisense strand to SEQ ID NO: 633196
acucucaauuccauccacu

SEQ ID NO: 633198 - RNA, 19 nt, Artificial Sequence
  Description of Artificial Sequence: Synthetic oligonucleotide
  Sense strand starting at position 3060 of SEQ ID NO: 585353
uuucuaguugauggacauu

SEQ ID NO: 633199 - RNA, 19 nt, Artificial Sequence
  Description of Artificial Sequence: Synthetic oligonucleotide
  Antisense strand to SEQ ID NO: 633198
aauguccaucaacuagaaa

SEQ ID NO: 633200 - RNA, 19 nt, Artificial Sequence
  Description of Artificial Sequence: Synthetic oligonucleotide
  Sense strand starting at position 3118 of SEQ ID NO: 585353
uaugaaccucuguguauga

SEQ ID NO: 633201 - RNA, 19 nt, Artificial Sequence
  Description of Artificial Sequence: Synthetic oligonucleotide
  Antisense strand to SEQ ID NO: 633200
ucauacacagagguucaua

SEQ ID NO: 633202 - RNA, 19 nt, Artificial Sequence
  Description of Artificial Sequence: Synthetic oligonucleotide
  Sense strand starting at position 3120 of SEQ ID NO: 585353
ugaaccucuguguaugagu

SEQ ID NO: 633203 - RNA, 19 nt, Artificial Sequence
  Description of Artificial Sequence: Synthetic oligonucleotide
  Antisense strand to SEQ ID NO: 633202
acucauacacagagguuca

SEQ ID NO: 633204 - RNA, 19 nt, Artificial Sequence
  Description of Artificial Sequence: Synthetic oligonucleotide
  Sense strand starting at position 3205 of SEQ ID NO: 585353
cuggccacucuguauugaa

SEQ ID NO: 633205 - RNA, 19 nt, Artificial Sequence
  Description of Artificial Sequence: Synthetic oligonucleotide
  Antisense strand to SEQ ID NO: 633204
uucaauacagaguggccag

SEQ ID NO: 633206 - RNA, 19 nt, Artificial Sequence
  Description of Artificial Sequence: Synthetic oligonucleotide
  Sense strand starting at position 3292 of SEQ ID NO: 585353
cgaggauuccaauaucucu

SEQ ID NO: 633207 - RNA, 19 nt, Artificial Sequence
  Description of Artificial Sequence: Synthetic oligonucleotide
  Antisense strand to SEQ ID NO: 633206
agagauauuggaauccucg

SEQ ID NO: 633208 - RNA, 19 nt, Artificial Sequence
  Description of Artificial Sequence: Synthetic oligonucleotide
  Sense strand starting at position 3428 of SEQ ID NO: 585353
ccagguaauugagcauaau

SEQ ID NO: 633209 - RNA, 19 nt, Artificial Sequence
  Description of Artificial Sequence: Synthetic oligonucleotide
  Antisense strand to SEQ ID NO: 633208
auuaugcucaauuaccugg

SEQ ID NO: 633210 - RNA, 19 nt, Artificial Sequence
  Description of Artificial Sequence: Synthetic oligonucleotide
  Sense strand starting at position 3429 of SEQ ID NO: 585353
cagguaauugagcauaauu

SEQ ID NO: 633211 - RNA, 19 nt, Artificial Sequence
  Description of Artificial Sequence: Synthetic oligonucleotide
  Antisense strand to SEQ ID NO: 633210
aauuaugcucaauuaccug

SEQ ID NO: 633212 - RNA, 19 nt, Artificial Sequence
  Description of Artificial Sequence: Synthetic oligonucleotide
  Sense strand starting at position 3437 of SEQ ID NO: 585353
ugagcauaauuggucuaag

SEQ ID NO: 633213 - RNA, 19 nt, Artificial Sequence
  Description of Artificial Sequence: Synthetic oligonucleotide
  Antisense strand to SEQ ID NO: 633212
cuuagaccaauuaugcuca

SEQ ID NO: 633214 - RNA, 19 nt, Artificial Sequence
  Description of Artificial Sequence: Synthetic oligonucleotide
  Sense strand starting at position 3440 of SEQ ID NO: 585353
gcauaauuggucuaaguca

SEQ ID NO: 633215 - RNA, 19 nt, Artificial Sequence
  Description of Artificial Sequence: Synthetic oligonucleotide
  Antisense strand to SEQ ID NO: 633214
ugacuuagaccaauuaugc

SEQ ID NO: 633216 - RNA, 19 nt, Artificial Sequence
  Description of Artificial Sequence: Synthetic oligonucleotide
  Sense strand starting at position 3499 of SEQ ID NO: 585353
cagugaagucacugaagac

SEQ ID NO: 633217 - RNA, 19 nt, Artificial Sequence
  Description of Artificial Sequence: Synthetic oligonucleotide
  Antisense strand to SEQ ID NO: 633216
gucuucagugacuucacug

SEQ ID NO: 633218 - RNA, 19 nt, Artificial Sequence
  Description of Artificial Sequence: Synthetic oligonucleotide
  Sense strand starting at position 3664 of SEQ ID NO: 585353
acauuaguccgucacucau

SEQ ID NO: 633219 - RNA, 19 nt, Artificial Sequence
  Description of Artificial Sequence: Synthetic oligonucleotide
  Antisense strand to SEQ ID NO: 633218
augagugacggacuaaugu

SEQ ID NO: 633220 - RNA, 19 nt, Artificial Sequence
  Description of Artificial Sequence: Synthetic oligonucleotide
  Sense strand starting at position 12 of SEQ ID NO: 585354
aguauuuaugcugguuaac

SEQ ID NO: 633221 - RNA, 19 nt, Artificial Sequence
  Description of Artificial Sequence: Synthetic oligonucleotide
  Antisense strand to SEQ ID NO: 633220
guuaaccagcauaaauacu

SEQ ID NO: 633222 - RNA, 19 nt, Artificial Sequence
  Description of Artificial Sequence: Synthetic oligonucleotide
  Sense strand starting at position 43 of SEQ ID NO: 585354
uggcuauguagccaugcau

SEQ ID NO: 633223 - RNA, 19 nt, Artificial Sequence
  Description of Artificial Sequence: Synthetic oligonucleotide
  Antisense strand to SEQ ID NO: 633222
augcauggcuacauagcca

SEQ ID NO: 633224 - RNA, 19 nt, Artificial Sequence
  Description of Artificial Sequence: Synthetic oligonucleotide
  Sense strand starting at position 210 of SEQ ID NO: 585354
cagugcuuggcacacgaua

SEQ ID NO: 633225 - RNA, 19 nt, Artificial Sequence
  Description of Artificial Sequence: Synthetic oligonucleotide
  Antisense strand to SEQ ID NO: 633224
uaucgugugccaagcacug

SEQ ID NO: 633226 - RNA, 19 nt, Artificial Sequence
  Description of Artificial Sequence: Synthetic oligonucleotide
  Sense strand starting at position 242 of SEQ ID NO: 585354
ggcauuuacuguuauuaua

SEQ ID NO: 633227 - RNA, 19 nt, Artificial Sequence
  Description of Artificial Sequence: Synthetic oligonucleotide
  Antisense strand to SEQ ID NO: 633226
uauaauaacaguaaaugcc

SEQ ID NO: 633228 - RNA, 19 nt, Artificial Sequence
  Description of Artificial Sequence: Synthetic oligonucleotide
  Sense strand starting at position 313 of SEQ ID NO: 585354
ccaccuuugcaaggguaau

SEQ ID NO: 633229 - RNA, 19 nt, Artificial Sequence
  Description of Artificial Sequence: Synthetic oligonucleotide
  Antisense strand to SEQ ID NO: 633228
auuacccuugcaaaggugg

SEQ ID NO: 633230 - RNA, 19 nt, Artificial Sequence
  Description of Artificial Sequence: Synthetic oligonucleotide
  Sense strand starting at position 356 of SEQ ID NO: 585354
ccagcagucgggcuguauu

SEQ ID NO: 633231 - RNA, 19 nt, Artificial Sequence
  Description of Artificial Sequence: Synthetic oligonucleotide
  Antisense strand to SEQ ID NO: 633230
aauacagcccgacugcugg

SEQ ID NO: 633232 - RNA, 19 nt, Artificial Sequence
  Description of Artificial Sequence: Synthetic oligonucleotide
  Sense strand starting at position 363 of SEQ ID NO: 585354
ucgggcuguauuugcagaa

SEQ ID NO: 633233 - RNA, 19 nt, Artificial Sequence
  Description of Artificial Sequence: Synthetic oligonucleotide
  Antisense strand to SEQ ID NO: 633232
uucugcaaauacagcccga

SEQ ID NO: 633234 - RNA, 19 nt, Artificial Sequence
  Description of Artificial Sequence: Synthetic oligonucleotide
  Sense strand starting at position 409 of SEQ ID NO: 585354
acuuuagguccuuaguaga

SEQ ID NO: 633235 - RNA, 19 nt, Artificial Sequence
  Description of Artificial Sequence: Synthetic oligonucleotide
  Antisense strand to SEQ ID NO: 633234
ucuacuaaggaccuaaagu

SEQ ID NO: 633236 - RNA, 19 nt, Artificial Sequence
  Description of Artificial Sequence: Synthetic oligonucleotide
  Sense strand starting at position 687 of SEQ ID NO: 585354
aucaaugccuccgccaaau

SEQ ID NO: 633237 - RNA, 19 nt, Artificial Sequence
  Description of Artificial Sequence: Synthetic oligonucleotide
  Antisense strand to SEQ ID NO: 633236
auuuggcggaggcauugau

SEQ ID NO: 633238 - RNA, 19 nt, Artificial Sequence
  Description of Artificial Sequence: Synthetic oligonucleotide
  Sense strand starting at position 800 of SEQ ID NO: 585354
aggagccucugcucagauu

SEQ ID NO: 633239 - RNA, 19 nt, Artificial Sequence
  Description of Artificial Sequence: Synthetic oligonucleotide
  Antisense strand to SEQ ID NO: 633238
aaucugagcagaggcuccu

SEQ ID NO: 633240 - RNA, 19 nt, Artificial Sequence
  Description of Artificial Sequence: Synthetic oligonucleotide
  Sense strand starting at position 814 of SEQ ID NO: 585354
agauuuaccucugaguccu

SEQ ID NO: 633241 - RNA, 19 nt, Artificial Sequence
  Description of Artificial Sequence: Synthetic oligonucleotide
  Antisense strand to SEQ ID NO: 633240
aggacucagagguaaaucu

SEQ ID NO: 633242 - RNA, 19 nt, Artificial Sequence
  Description of Artificial Sequence: Synthetic oligonucleotide
  Sense strand starting at position 886 of SEQ ID NO: 585354
caguccuuguguccgaaga

SEQ ID NO: 633243 - RNA, 19 nt, Artificial Sequence
  Description of Artificial Sequence: Synthetic oligonucleotide
  Antisense strand to SEQ ID NO: 633242
ucuucggacacaaggacug

SEQ ID NO: 633244 - RNA, 19 nt, Artificial Sequence
  Description of Artificial Sequence: Synthetic oligonucleotide
  Sense strand starting at position 887 of SEQ ID NO: 585354
aguccuuguguccgaagac

SEQ ID NO: 633245 - RNA, 19 nt, Artificial Sequence
  Description of Artificial Sequence: Synthetic oligonucleotide
  Antisense strand to SEQ ID NO: 633244
gucuucggacacaaggacu

SEQ ID NO: 633246 - RNA, 19 nt, Artificial Sequence
  Description of Artificial Sequence: Synthetic oligonucleotide
  Sense strand starting at position 896 of SEQ ID NO: 585354
guccgaagacucggaguaa

SEQ ID NO: 633247 - RNA, 19 nt, Artificial Sequence
  Description of Artificial Sequence: Synthetic oligonucleotide
  Antisense strand to SEQ ID NO: 633246
uuacuccgagucuucggac

SEQ ID NO: 633248 - RNA, 19 nt, Artificial Sequence
  Description of Artificial Sequence: Synthetic oligonucleotide
  Sense strand starting at position 1182 of SEQ ID NO: 585354
ggcguuuagcucuuugcca

SEQ ID NO: 633249 - RNA, 19 nt, Artificial Sequence
  Description of Artificial Sequence: Synthetic oligonucleotide
  Antisense strand to SEQ ID NO: 633248
uggcaaagagcuaaacgcc

SEQ ID NO: 633250 - RNA, 19 nt, Artificial Sequence
  Description of Artificial Sequence: Synthetic oligonucleotide
  Sense strand starting at position 1496 of SEQ ID NO: 585354
cccgacguuucccugaaca

SEQ ID NO: 633251 - RNA, 19 nt, Artificial Sequence
  Description of Artificial Sequence: Synthetic oligonucleotide
  Antisense strand to SEQ ID NO: 633250
uguucagggaaacgucggg

SEQ ID NO: 633252 - RNA, 19 nt, Artificial Sequence
  Description of Artificial Sequence: Synthetic oligonucleotide
  Sense strand starting at position 1649 of SEQ ID NO: 585354
gguccagacacgugaaguu

SEQ ID NO: 633253 - RNA, 19 nt, Artificial Sequence
  Description of Artificial Sequence: Synthetic oligonucleotide
  Antisense strand to SEQ ID NO: 633252
aacuucacgugucuggacc

SEQ ID NO: 633254 - RNA, 19 nt, Artificial Sequence
  Description of Artificial Sequence: Synthetic oligonucleotide
  Sense strand starting at position 1658 of SEQ ID NO: 585354
acgugaaguucugcaacag

SEQ ID NO: 633255 - RNA, 19 nt, Artificial Sequence
  Description of Artificial Sequence: Synthetic oligonucleotide
  Antisense strand to SEQ ID NO: 633254
cuguugcagaacuucacgu

SEQ ID NO: 633256 - RNA, 19 nt, Artificial Sequence
  Description of Artificial Sequence: Synthetic oligonucleotide
  Sense strand starting at position 1679 of SEQ ID NO: 585354
cccacuugucgcgcuggaa

SEQ ID NO: 633257 - RNA, 19 nt, Artificial Sequence
  Description of Artificial Sequence: Synthetic oligonucleotide
  Antisense strand to SEQ ID NO: 633256
uuccagcgcgacaaguggg

SEQ ID NO: 633258 - RNA, 19 nt, Artificial Sequence
  Description of Artificial Sequence: Synthetic oligonucleotide
  Sense strand starting at position 1934 of SEQ ID NO: 585354
cucguaucuccucucgcaa

SEQ ID NO: 633259 - RNA, 19 nt, Artificial Sequence
  Description of Artificial Sequence: Synthetic oligonucleotide
  Antisense strand to SEQ ID NO: 633258
uugcgagaggagauacgag

SEQ ID NO: 633260 - RNA, 19 nt, Artificial Sequence
  Description of Artificial Sequence: Synthetic oligonucleotide
  Sense strand starting at position 2310 of SEQ ID NO: 585354
aggacuugcugucugucaa

SEQ ID NO: 633261 - RNA, 19 nt, Artificial Sequence
  Description of Artificial Sequence: Synthetic oligonucleotide
  Antisense strand to SEQ ID NO: 633260
uugacagacagcaaguccu

SEQ ID NO: 633262 - RNA, 19 nt, Artificial Sequence
  Description of Artificial Sequence: Synthetic oligonucleotide
  Sense strand starting at position 2311 of SEQ ID NO: 585354
ggacuugcugucugucaau

SEQ ID NO: 633263 - RNA, 19 nt, Artificial Sequence
  Description of Artificial Sequence: Synthetic oligonucleotide
  Antisense strand to SEQ ID NO: 633262
auugacagacagcaagucc

SEQ ID NO: 633264 - RNA, 19 nt, Artificial Sequence
  Description of Artificial Sequence: Synthetic oligonucleotide
  Sense strand starting at position 2402 of SEQ ID NO: 585354
gccacuuguccaugagcuu

SEQ ID NO: 633265 - RNA, 19 nt, Artificial Sequence
  Description of Artificial Sequence: Synthetic oligonucleotide
  Antisense strand to SEQ ID NO: 633264
aagcucauggacaaguggc

SEQ ID NO: 633266 - RNA, 19 nt, Artificial Sequence
  Description of Artificial Sequence: Synthetic oligonucleotide
  Sense strand starting at position 2510 of SEQ ID NO: 585354
cgucuaggcugugugaaga

SEQ ID NO: 633267 - RNA, 19 nt, Artificial Sequence
  Description of Artificial Sequence: Synthetic oligonucleotide
  Antisense strand to SEQ ID NO: 633266
ucuucacacagccuagacg

SEQ ID NO: 633268 - RNA, 19 nt, Artificial Sequence
  Description of Artificial Sequence: Synthetic oligonucleotide
  Sense strand starting at position 2548 of SEQ ID NO: 585354
cccaguccuuucuuggaua

SEQ ID NO: 633269 - RNA, 19 nt, Artificial Sequence
  Description of Artificial Sequence: Synthetic oligonucleotide
  Antisense strand to SEQ ID NO: 633268
uauccaagaaaggacuggg

SEQ ID NO: 633270 - RNA, 19 nt, Artificial Sequence
  Description of Artificial Sequence: Synthetic oligonucleotide
  Sense strand starting at position 2550 of SEQ ID NO: 585354
caguccuuucuuggauaug

SEQ ID NO: 633271 - RNA, 19 nt, Artificial Sequence
  Description of Artificial Sequence: Synthetic oligonucleotide
  Antisense strand to SEQ ID NO: 633270
cauauccaagaaaggacug

SEQ ID NO: 633272 - RNA, 19 nt, Artificial Sequence
  Description of Artificial Sequence: Synthetic oligonucleotide
  Sense strand starting at position 2748 of SEQ ID NO: 585354
ccgggauggaguggucuaa

SEQ ID NO: 633273 - RNA, 19 nt, Artificial Sequence
  Description of Artificial Sequence: Synthetic oligonucleotide
  Antisense strand to SEQ ID NO: 633272
uuagaccacuccaucccgg

SEQ ID NO: 633274 - RNA, 19 nt, Artificial Sequence
  Description of Artificial Sequence: Synthetic oligonucleotide
  Sense strand starting at position 2752 of SEQ ID NO: 585354
gauggaguggucuaaaucu

SEQ ID NO: 633275 - RNA, 19 nt, Artificial Sequence
  Description of Artificial Sequence: Synthetic oligonucleotide
  Antisense strand to SEQ ID NO: 633274
agauuuagaccacuccauc

SEQ ID NO: 633276 - RNA, 19 nt, Artificial Sequence
  Description of Artificial Sequence: Synthetic oligonucleotide
  Sense strand starting at position 2761 of SEQ ID NO: 585354
gucuaaaucucuccugguc

SEQ ID NO: 633277 - RNA, 19 nt, Artificial Sequence
  Description of Artificial Sequence: Synthetic oligonucleotide
  Antisense strand to SEQ ID NO: 633276
gaccaggagagauuuagac

SEQ ID NO: 633278 - RNA, 19 nt, Artificial Sequence
  Description of Artificial Sequence: Synthetic oligonucleotide
  Sense strand starting at position 2818 of SEQ ID NO: 585354
gagaaugcauuccugagag

SEQ ID NO: 633279 - RNA, 19 nt, Artificial Sequence
  Description of Artificial Sequence: Synthetic oligonucleotide
  Antisense strand to SEQ ID NO: 633278
cucucaggaaugcauucuc

SEQ ID NO: 633280 - RNA, 19 nt, Artificial Sequence
  Description of Artificial Sequence: Synthetic oligonucleotide
  Sense strand starting at position 2855 of SEQ ID NO: 585354
gcucacuuucuggaaggau

SEQ ID NO: 633281 - RNA, 19 nt, Artificial Sequence
  Description of Artificial Sequence: Synthetic oligonucleotide
  Antisense strand to SEQ ID NO: 633280
auccuuccagaaagugagc

SEQ ID NO: 633282 - RNA, 19 nt, Artificial Sequence
  Description of Artificial Sequence: Synthetic oligonucleotide
  Sense strand starting at position 2988 of SEQ ID NO: 585354
ggccauguucaggaaagug

SEQ ID NO: 633283 - RNA, 19 nt, Artificial Sequence
  Description of Artificial Sequence: Synthetic oligonucleotide
  Antisense strand to SEQ ID NO: 633282
cacuuuccugaacauggcc

SEQ ID NO: 633284 - RNA, 19 nt, Artificial Sequence
  Description of Artificial Sequence: Synthetic oligonucleotide
  Sense strand starting at position 3231 of SEQ ID NO: 585354
ggcuauucccaucauagca

SEQ ID NO: 633285 - RNA, 19 nt, Artificial Sequence
  Description of Artificial Sequence: Synthetic oligonucleotide
  Antisense strand to SEQ ID NO: 633284
ugcuaugaugggaauagcc

SEQ ID NO: 633286 - RNA, 19 nt, Artificial Sequence
  Description of Artificial Sequence: Synthetic oligonucleotide
  Sense strand starting at position 3427 of SEQ ID NO: 585354
ucauccuuuguuuguguaa

SEQ ID NO: 633287 - RNA, 19 nt, Artificial Sequence
  Description of Artificial Sequence: Synthetic oligonucleotide
  Antisense strand to SEQ ID NO: 633286
uuacacaaacaaaggauga

SEQ ID NO: 633288 - RNA, 19 nt, Artificial Sequence
  Description of Artificial Sequence: Synthetic oligonucleotide
  Sense strand starting at position 3439 of SEQ ID NO: 585354
uguguaaggucuccuggaa

SEQ ID NO: 633289 - RNA, 19 nt, Artificial Sequence
  Description of Artificial Sequence: Synthetic oligonucleotide
  Antisense strand to SEQ ID NO: 633288
uuccaggagaccuuacaca

SEQ ID NO: 633290 - RNA, 19 nt, Artificial Sequence
  Description of Artificial Sequence: Synthetic oligonucleotide
  Sense strand starting at position 3582 of SEQ ID NO: 585354
cucuguuacuuucuuggau

SEQ ID NO: 633291 - RNA, 19 nt, Artificial Sequence
  Description of Artificial Sequence: Synthetic oligonucleotide
  Antisense strand to SEQ ID NO: 633290
auccaagaaaguaacagag

SEQ ID NO: 633292 - RNA, 19 nt, Artificial Sequence
  Description of Artificial Sequence: Synthetic oligonucleotide
  Sense strand starting at position 3583 of SEQ ID NO: 585354
ucuguuacuuucuuggaua

SEQ ID NO: 633293 - RNA, 19 nt, Artificial Sequence
  Description of Artificial Sequence: Synthetic oligonucleotide
  Antisense strand to SEQ ID NO: 633292
uauccaagaaaguaacaga

SEQ ID NO: 633294 - RNA, 19 nt, Artificial Sequence
  Description of Artificial Sequence: Synthetic oligonucleotide
  Sense strand starting at position 3585 of SEQ ID NO: 585354
uguuacuuucuuggauaua

SEQ ID NO: 633295 - RNA, 19 nt, Artificial Sequence
  Description of Artificial Sequence: Synthetic oligonucleotide
  Antisense strand to SEQ ID NO: 633294
uauauccaagaaaguaaca

SEQ ID NO: 633296 - RNA, 19 nt, Artificial Sequence
  Description of Artificial Sequence: Synthetic oligonucleotide
  Sense strand starting at position 3597 of SEQ ID NO: 585354
ggauauaccugucuccuuu

SEQ ID NO: 633297 - RNA, 19 nt, Artificial Sequence
  Description of Artificial Sequence: Synthetic oligonucleotide
  Antisense strand to SEQ ID NO: 633296
aaaggagacagguauaucc

SEQ ID NO: 633298 - RNA, 19 nt, Artificial Sequence
  Description of Artificial Sequence: Synthetic oligonucleotide
  Sense strand starting at position 3944 of SEQ ID NO: 585354
ccgauacacugagauauaa

SEQ ID NO: 633299 - RNA, 19 nt, Artificial Sequence
  Description of Artificial Sequence: Synthetic oligonucleotide
  Antisense strand to SEQ ID NO: 633298
uuauaucucaguguaucgg

SEQ ID NO: 633300 - RNA, 19 nt, Artificial Sequence
  Description of Artificial Sequence: Synthetic oligonucleotide
  Sense strand starting at position 13 of SEQ ID NO: 585355
aguauuuaugcugguuaac

SEQ ID NO: 633301 - RNA, 19 nt, Artificial Sequence
  Description of Artificial Sequence: Synthetic oligonucleotide
  Antisense strand to SEQ ID NO: 633300
guuaaccagcauaaauacu

SEQ ID NO: 633302 - RNA, 19 nt, Artificial Sequence
  Description of Artificial Sequence: Synthetic oligonucleotide
  Sense strand starting at position 44 of SEQ ID NO: 585355
uggcuauguagccaugcau

SEQ ID NO: 633303 - RNA, 19 nt, Artificial Sequence
  Description of Artificial Sequence: Synthetic oligonucleotide
  Antisense strand to SEQ ID NO: 633302
augcauggcuacauagcca

SEQ ID NO: 633304 - RNA, 19 nt, Artificial Sequence
  Description of Artificial Sequence: Synthetic oligonucleotide
  Sense strand starting at position 211 of SEQ ID NO: 585355
cagugcuuggcacacgaua

SEQ ID NO: 633305 - RNA, 19 nt, Artificial Sequence
  Description of Artificial Sequence: Synthetic oligonucleotide
  Antisense strand to SEQ ID NO: 633304
uaucgugugccaagcacug

SEQ ID NO: 633306 - RNA, 19 nt, Artificial Sequence
  Description of Artificial Sequence: Synthetic oligonucleotide
  Sense strand starting at position 243 of SEQ ID NO: 585355
ggcauuuacuguuauuaua

SEQ ID NO: 633307 - RNA, 19 nt, Artificial Sequence
  Description of Artificial Sequence: Synthetic oligonucleotide
  Antisense strand to SEQ ID NO: 633306
uauaauaacaguaaaugcc

SEQ ID NO: 633308 - RNA, 19 nt, Artificial Sequence
  Description of Artificial Sequence: Synthetic oligonucleotide
  Sense strand starting at position 314 of SEQ ID NO: 585355
ccaccuuugcaaggguaau

SEQ ID NO: 633309 - RNA, 19 nt, Artificial Sequence
  Description of Artificial Sequence: Synthetic oligonucleotide
  Antisense strand to SEQ ID NO: 633308
auuacccuugcaaaggugg

SEQ ID NO: 633310 - RNA, 19 nt, Artificial Sequence
  Description of Artificial Sequence: Synthetic oligonucleotide
  Sense strand starting at position 357 of SEQ ID NO: 585355
ccagcagucgggcuguauu

SEQ ID NO: 633311 - RNA, 19 nt, Artificial Sequence
  Description of Artificial Sequence: Synthetic oligonucleotide
  Antisense strand to SEQ ID NO: 633310
aauacagcccgacugcugg

SEQ ID NO: 633312 - RNA, 19 nt, Artificial Sequence
  Description of Artificial Sequence: Synthetic oligonucleotide
  Sense strand starting at position 364 of SEQ ID NO: 585355
ucgggcuguauuugcagaa

SEQ ID NO: 633313 - RNA, 19 nt, Artificial Sequence
  Description of Artificial Sequence: Synthetic oligonucleotide
  Antisense strand to SEQ ID NO: 633312
uucugcaaauacagcccga

SEQ ID NO: 633314 - RNA, 19 nt, Artificial Sequence
  Description of Artificial Sequence: Synthetic oligonucleotide
  Sense strand starting at position 410 of SEQ ID NO: 585355
acuuuagguccuuaguaga

SEQ ID NO: 633315 - RNA, 19 nt, Artificial Sequence
  Description of Artificial Sequence: Synthetic oligonucleotide
  Antisense strand to SEQ ID NO: 633314
ucuacuaaggaccuaaagu

SEQ ID NO: 633316 - RNA, 19 nt, Artificial Sequence
  Description of Artificial Sequence: Synthetic oligonucleotide
  Sense strand starting at position 688 of SEQ ID NO: 585355
aucaaugccuccgccaaau

SEQ ID NO: 633317 - RNA, 19 nt, Artificial Sequence
  Description of Artificial Sequence: Synthetic oligonucleotide
  Antisense strand to SEQ ID NO: 633316
auuuggcggaggcauugau

SEQ ID NO: 633318 - RNA, 19 nt, Artificial Sequence
  Description of Artificial Sequence: Synthetic oligonucleotide
  Sense strand starting at position 801 of SEQ ID NO: 585355
aggagccucugcucagauu

SEQ ID NO: 633319 - RNA, 19 nt, Artificial Sequence
  Description of Artificial Sequence: Synthetic oligonucleotide
  Antisense strand to SEQ ID NO: 633318
aaucugagcagaggcuccu

SEQ ID NO: 633320 - RNA, 19 nt, Artificial Sequence
  Description of Artificial Sequence: Synthetic oligonucleotide
  Sense strand starting at position 815 of SEQ ID NO: 585355
agauuuaccucugaguccu

SEQ ID NO: 633321 - RNA, 19 nt, Artificial Sequence
  Description of Artificial Sequence: Synthetic oligonucleotide
  Antisense strand to SEQ ID NO: 633320
aggacucagagguaaaucu

SEQ ID NO: 633322 - RNA, 19 nt, Artificial Sequence
  Description of Artificial Sequence: Synthetic oligonucleotide
  Sense strand starting at position 887 of SEQ ID NO: 585355
caguccuuguguccgaaga

SEQ ID NO: 633323 - RNA, 19 nt, Artificial Sequence
  Description of Artificial Sequence: Synthetic oligonucleotide
  Antisense strand to SEQ ID NO: 633322
ucuucggacacaaggacug

SEQ ID NO: 633324 - RNA, 19 nt, Artificial Sequence
  Description of Artificial Sequence: Synthetic oligonucleotide
  Sense strand starting at position 888 of SEQ ID NO: 585355
aguccuuguguccgaagac

SEQ ID NO: 633325 - RNA, 19 nt, Artificial Sequence
  Description of Artificial Sequence: Synthetic oligonucleotide
  Antisense strand to SEQ ID NO: 633324
gucuucggacacaaggacu

SEQ ID NO: 633326 - RNA, 19 nt, Artificial Sequence
  Description of Artificial Sequence: Synthetic oligonucleotide
  Sense strand starting at position 897 of SEQ ID NO: 585355
guccgaagacucggaguaa

SEQ ID NO: 633327 - RNA, 19 nt, Artificial Sequence
  Description of Artificial Sequence: Synthetic oligonucleotide
  Antisense strand to SEQ ID NO: 633326
uuacuccgagucuucggac

SEQ ID NO: 633328 - RNA, 19 nt, Artificial Sequence
  Description of Artificial Sequence: Synthetic oligonucleotide
  Sense strand starting at position 1183 of SEQ ID NO: 585355
ggcguuuagcucuuugcca

SEQ ID NO: 633329 - RNA, 19 nt, Artificial Sequence
  Description of Artificial Sequence: Synthetic oligonucleotide
  Antisense strand to SEQ ID NO: 633328
uggcaaagagcuaaacgcc

SEQ ID NO: 633330 - RNA, 19 nt, Artificial Sequence
  Description of Artificial Sequence: Synthetic oligonucleotide
  Sense strand starting at position 1497 of SEQ ID NO: 585355
cccgacguuucccugaaca

SEQ ID NO: 633331 - RNA, 19 nt, Artificial Sequence
  Description of Artificial Sequence: Synthetic oligonucleotide
  Antisense strand to SEQ ID NO: 633330
uguucagggaaacgucggg

SEQ ID NO: 633332 - RNA, 19 nt, Artificial Sequence
  Description of Artificial Sequence: Synthetic oligonucleotide
  Sense strand starting at position 1650 of SEQ ID NO: 585355
gguccagacacgugaaguu

SEQ ID NO: 633333 - RNA, 19 nt, Artificial Sequence
  Description of Artificial Sequence: Synthetic oligonucleotide
  Antisense strand to SEQ ID NO: 633332
aacuucacgugucuggacc

SEQ ID NO: 633334 - RNA, 19 nt, Artificial Sequence
  Description of Artificial Sequence: Synthetic oligonucleotide
  Sense strand starting at position 1659 of SEQ ID NO: 585355
acgugaaguucugcaacag

SEQ ID NO: 633335 - RNA, 19 nt, Artificial Sequence
  Description of Artificial Sequence: Synthetic oligonucleotide
  Antisense strand to SEQ ID NO: 633334
cuguugcagaacuucacgu

SEQ ID NO: 633336 - RNA, 19 nt, Artificial Sequence
  Description of Artificial Sequence: Synthetic oligonucleotide
  Sense strand starting at position 1680 of SEQ ID NO: 585355
cccacuugucgcgcuggaa

SEQ ID NO: 633337 - RNA, 19 nt, Artificial Sequence
  Description of Artificial Sequence: Synthetic oligonucleotide
  Antisense strand to SEQ ID NO: 633336
uuccagcgcgacaaguggg

SEQ ID NO: 633338 - RNA, 19 nt, Artificial Sequence
  Description of Artificial Sequence: Synthetic oligonucleotide
  Sense strand starting at position 1935 of SEQ ID NO: 585355
cucguaucuccucucgcaa

SEQ ID NO: 633339 - RNA, 19 nt, Artificial Sequence
  Description of Artificial Sequence: Synthetic oligonucleotide
  Antisense strand to SEQ ID NO: 633338
uugcgagaggagauacgag

SEQ ID NO: 633340 - RNA, 19 nt, Artificial Sequence
  Description of Artificial Sequence: Synthetic oligonucleotide
  Sense strand starting at position 2311 of SEQ ID NO: 585355
aggacuugcugucugucaa

SEQ ID NO: 633341 - RNA, 19 nt, Artificial Sequence
  Description of Artificial Sequence: Synthetic oligonucleotide
  Antisense strand to SEQ ID NO: 633340
uugacagacagcaaguccu

SEQ ID NO: 633342 - RNA, 19 nt, Artificial Sequence
  Description of Artificial Sequence: Synthetic oligonucleotide
  Sense strand starting at position 2312 of SEQ ID NO: 585355
ggacuugcugucugucaau

SEQ ID NO: 633343 - RNA, 19 nt, Artificial Sequence
  Description of Artificial Sequence: Synthetic oligonucleotide
  Antisense strand to SEQ ID NO: 633342
auugacagacagcaagucc

SEQ ID NO: 633344 - RNA, 19 nt, Artificial Sequence
  Description of Artificial Sequence: Synthetic oligonucleotide
  Sense strand starting at position 2403 of SEQ ID NO: 585355
gccacuuguccaugagcuu

SEQ ID NO: 633345 - RNA, 19 nt, Artificial Sequence
  Description of Artificial Sequence: Synthetic oligonucleotide
  Antisense strand to SEQ ID NO: 633344
aagcucauggacaaguggc

SEQ ID NO: 633346 - RNA, 19 nt, Artificial Sequence
  Description of Artificial Sequence: Synthetic oligonucleotide
  Sense strand starting at position 2511 of SEQ ID NO: 585355
cgucuaggcugugugaaga

SEQ ID NO: 633347 - RNA, 19 nt, Artificial Sequence
  Description of Artificial Sequence: Synthetic oligonucleotide
  Antisense strand to SEQ ID NO: 633346
ucuucacacagccuagacg

SEQ ID NO: 633348 - RNA, 19 nt, Artificial Sequence
  Description of Artificial Sequence: Synthetic oligonucleotide
  Sense strand starting at position 2549 of SEQ ID NO: 585355
cccaguccuuucuuggaua

SEQ ID NO: 633349 - RNA, 19 nt, Artificial Sequence
  Description of Artificial Sequence: Synthetic oligonucleotide
  Antisense strand to SEQ ID NO: 633348
uauccaagaaaggacuggg

SEQ ID NO: 633350 - RNA, 19 nt, Artificial Sequence
  Description of Artificial Sequence: Synthetic oligonucleotide
  Sense strand starting at position 2551 of SEQ ID NO: 585355
caguccuuucuuggauaug

SEQ ID NO: 633351 - RNA, 19 nt, Artificial Sequence
  Description of Artificial Sequence: Synthetic oligonucleotide
  Antisense strand to SEQ ID NO: 633350
cauauccaagaaaggacug

SEQ ID NO: 633352 - RNA, 19 nt, Artificial Sequence
  Description of Artificial Sequence: Synthetic oligonucleotide
  Sense strand starting at position 2749 of SEQ ID NO: 585355
ccgggauggaguggucuaa

SEQ ID NO: 633353 - RNA, 19 nt, Artificial Sequence
  Description of Artificial Sequence: Synthetic oligonucleotide
  Antisense strand to SEQ ID NO: 633352
uuagaccacuccaucccgg

SEQ ID NO: 633354 - RNA, 19 nt, Artificial Sequence
  Description of Artificial Sequence: Synthetic oligonucleotide
  Sense strand starting at position 2753 of SEQ ID NO: 585355
gauggaguggucuaaaucu

SEQ ID NO: 633355 - RNA, 19 nt, Artificial Sequence
  Description of Artificial Sequence: Synthetic oligonucleotide
  Antisense strand to SEQ ID NO: 633354
agauuuagaccacuccauc

SEQ ID NO: 633356 - RNA, 19 nt, Artificial Sequence
  Description of Artificial Sequence: Synthetic oligonucleotide
  Sense strand starting at position 2762 of SEQ ID NO: 585355
gucuaaaucucuccugguc

SEQ ID NO: 633357 - RNA, 19 nt, Artificial Sequence
  Description of Artificial Sequence: Synthetic oligonucleotide
  Antisense strand to SEQ ID NO: 633356
gaccaggagagauuuagac

SEQ ID NO: 633358 - RNA, 19 nt, Artificial Sequence
  Description of Artificial Sequence: Synthetic oligonucleotide
  Sense strand starting at position 2819 of SEQ ID NO: 585355
gagaaugcauuccugagag

SEQ ID NO: 633359 - RNA, 19 nt, Artificial Sequence
  Description of Artificial Sequence: Synthetic oligonucleotide
  Antisense strand to SEQ ID NO: 633358
cucucaggaaugcauucuc

SEQ ID NO: 633360 - RNA, 19 nt, Artificial Sequence
  Description of Artificial Sequence: Synthetic oligonucleotide
  Sense strand starting at position 2856 of SEQ ID NO: 585355
gcucacuuucuggaaggau

SEQ ID NO: 633361 - RNA, 19 nt, Artificial Sequence
  Description of Artificial Sequence: Synthetic oligonucleotide
  Antisense strand to SEQ ID NO: 633360
auccuuccagaaagugagc

SEQ ID NO: 633362 - RNA, 19 nt, Artificial Sequence
  Description of Artificial Sequence: Synthetic oligonucleotide
  Sense strand starting at position 2989 of SEQ ID NO: 585355
ggccauguucaggaaagug

SEQ ID NO: 633363 - RNA, 19 nt, Artificial Sequence
  Description of Artificial Sequence: Synthetic oligonucleotide
  Antisense strand to SEQ ID NO: 633362
cacuuuccugaacauggcc

SEQ ID NO: 633364 - RNA, 19 nt, Artificial Sequence
  Description of Artificial Sequence: Synthetic oligonucleotide
  Sense strand starting at position 3232 of SEQ ID NO: 585355
ggcuauucccaucauagca

SEQ ID NO: 633365 - RNA, 19 nt, Artificial Sequence
  Description of Artificial Sequence: Synthetic oligonucleotide
  Antisense strand to SEQ ID NO: 633364
ugcuaugaugggaauagcc

SEQ ID NO: 633366 - RNA, 19 nt, Artificial Sequence
  Description of Artificial Sequence: Synthetic oligonucleotide
  Sense strand starting at position 3428 of SEQ ID NO: 585355
ucauccuuuguuuguguaa

SEQ ID NO: 633367 - RNA, 19 nt, Artificial Sequence
  Description of Artificial Sequence: Synthetic oligonucleotide
  Antisense strand to SEQ ID NO: 633366
uuacacaaacaaaggauga

SEQ ID NO: 633368 - RNA, 19 nt, Artificial Sequence
  Description of Artificial Sequence: Synthetic oligonucleotide
  Sense strand starting at position 3440 of SEQ ID NO: 585355
uguguaaggucuccuggaa

SEQ ID NO: 633369 - RNA, 19 nt, Artificial Sequence
  Description of Artificial Sequence: Synthetic oligonucleotide
  Antisense strand to SEQ ID NO: 633368
uuccaggagaccuuacaca

SEQ ID NO: 633370 - RNA, 19 nt, Artificial Sequence
  Description of Artificial Sequence: Synthetic oligonucleotide
  Sense strand starting at position 3583 of SEQ ID NO: 585355
cucuguuacuuucuuggau

SEQ ID NO: 633371 - RNA, 19 nt, Artificial Sequence
  Description of Artificial Sequence: Synthetic oligonucleotide
  Antisense strand to SEQ ID NO: 633370
auccaagaaaguaacagag

SEQ ID NO: 633372 - RNA, 19 nt, Artificial Sequence
  Description of Artificial Sequence: Synthetic oligonucleotide
  Sense strand starting at position 3584 of SEQ ID NO: 585355
ucuguuacuuucuuggaua

SEQ ID NO: 633373 - RNA, 19 nt, Artificial Sequence
  Description of Artificial Sequence: Synthetic oligonucleotide
  Antisense strand to SEQ ID NO: 633372
uauccaagaaaguaacaga

SEQ ID NO: 633374 - RNA, 19 nt, Artificial Sequence
  Description of Artificial Sequence: Synthetic oligonucleotide
  Sense strand starting at position 3586 of SEQ ID NO: 585355
uguuacuuucuuggauaua

SEQ ID NO: 633375 - RNA, 19 nt, Artificial Sequence
  Description of Artificial Sequence: Synthetic oligonucleotide
  Antisense strand to SEQ ID NO: 633374
uauauccaagaaaguaaca

SEQ ID NO: 633376 - RNA, 19 nt, Artificial Sequence
  Description of Artificial Sequence: Synthetic oligonucleotide
  Sense strand starting at position 3598 of SEQ ID NO: 585355
ggauauaccugucuccuuu

SEQ ID NO: 633377 - RNA, 19 nt, Artificial Sequence
  Description of Artificial Sequence: Synthetic oligonucleotide
  Antisense strand to SEQ ID NO: 633376
aaaggagacagguauaucc

SEQ ID NO: 633378 - RNA, 19 nt, Artificial Sequence
  Description of Artificial Sequence: Synthetic oligonucleotide
  Sense strand starting at position 3945 of SEQ ID NO: 585355
ccgauacacugagauauaa

SEQ ID NO: 633379 - RNA, 19 nt, Artificial Sequence
  Description of Artificial Sequence: Synthetic oligonucleotide
  Antisense strand to SEQ ID NO: 633378
uuauaucucaguguaucgg

SEQ ID NO: 633380 - RNA, 19 nt, Artificial Sequence
  Description of Artificial Sequence: Synthetic oligonucleotide
  Sense strand starting at position 64 of SEQ ID NO: 585356
gcaagagacucuccacuaa

SEQ ID NO: 633381 - RNA, 19 nt, Artificial Sequence
  Description of Artificial Sequence: Synthetic oligonucleotide
  Antisense strand to SEQ ID NO: 633380
uuaguggagagucucuugc

SEQ ID NO: 633382 - RNA, 19 nt, Artificial Sequence
  Description of Artificial Sequence: Synthetic oligonucleotide
  Sense strand starting at position 92 of SEQ ID NO: 585356
cuaagccugcuagacuaaa

SEQ ID NO: 633383 - RNA, 19 nt, Artificial Sequence
  Description of Artificial Sequence: Synthetic oligonucleotide
  Antisense strand to SEQ ID NO: 633382
uuuagucuagcaggcuuag

SEQ ID NO: 633384 - RNA, 19 nt, Artificial Sequence
  Description of Artificial Sequence: Synthetic oligonucleotide
  Sense strand starting at position 164 of SEQ ID NO: 585356
agcaaauacguauaugcuu

SEQ ID NO: 633385 - RNA, 19 nt, Artificial Sequence
  Description of Artificial Sequence: Synthetic oligonucleotide
  Antisense strand to SEQ ID NO: 633384
aagcauauacguauuugcu

SEQ ID NO: 633386 - RNA, 19 nt, Artificial Sequence
  Description of Artificial Sequence: Synthetic oligonucleotide
  Sense strand starting at position 185 of SEQ ID NO: 585356
cugugugauguccaucaau

SEQ ID NO: 633387 - RNA, 19 nt, Artificial Sequence
  Description of Artificial Sequence: Synthetic oligonucleotide
  Antisense strand to SEQ ID NO: 633386
auugauggacaucacacag

SEQ ID NO: 633388 - RNA, 19 nt, Artificial Sequence
  Description of Artificial Sequence: Synthetic oligonucleotide
  Sense strand starting at position 188 of SEQ ID NO: 585356
ugugauguccaucaaucug

SEQ ID NO: 633389 - RNA, 19 nt, Artificial Sequence
  Description of Artificial Sequence: Synthetic oligonucleotide
  Antisense strand to SEQ ID NO: 633388
cagauugauggacaucaca

SEQ ID NO: 633390 - RNA, 19 nt, Artificial Sequence
  Description of Artificial Sequence: Synthetic oligonucleotide
  Sense strand starting at position 247 of SEQ ID NO: 585356
caguccguggcagaaauaa

SEQ ID NO: 633391 - RNA, 19 nt, Artificial Sequence
  Description of Artificial Sequence: Synthetic oligonucleotide
  Antisense strand to SEQ ID NO: 633390
uuauuucugccacggacug

SEQ ID NO: 633392 - RNA, 19 nt, Artificial Sequence
  Description of Artificial Sequence: Synthetic oligonucleotide
  Sense strand starting at position 267 of SEQ ID NO: 585356
gaaugaggaugggcucauu

SEQ ID NO: 633393 - RNA, 19 nt, Artificial Sequence
  Description of Artificial Sequence: Synthetic oligonucleotide
  Antisense strand to SEQ ID NO: 633392
aaugagcccauccucauuc

SEQ ID NO: 633394 - RNA, 19 nt, Artificial Sequence
  Description of Artificial Sequence: Synthetic oligonucleotide
  Sense strand starting at position 327 of SEQ ID NO: 585356
acgacuagauaggcauaaa

SEQ ID NO: 633395 - RNA, 19 nt, Artificial Sequence
  Description of Artificial Sequence: Synthetic oligonucleotide
  Antisense strand to SEQ ID NO: 633394
uuuaugccuaucuagucgu

SEQ ID NO: 633396 - RNA, 19 nt, Artificial Sequence
  Description of Artificial Sequence: Synthetic oligonucleotide
  Sense strand starting at position 421 of SEQ ID NO: 585356
agguaacacccuggacaau

SEQ ID NO: 633397 - RNA, 19 nt, Artificial Sequence
  Description of Artificial Sequence: Synthetic oligonucleotide
  Antisense strand to SEQ ID NO: 633396
auuguccaggguguuaccu

SEQ ID NO: 633398 - RNA, 19 nt, Artificial Sequence
  Description of Artificial Sequence: Synthetic oligonucleotide
  Sense strand starting at position 458 of SEQ ID NO: 585356
ugcugcaaucuagaacuuu

SEQ ID NO: 633399 - RNA, 19 nt, Artificial Sequence
  Description of Artificial Sequence: Synthetic oligonucleotide
  Antisense strand to SEQ ID NO: 633398
aaaguucuagauugcagca

SEQ ID NO: 633400 - RNA, 19 nt, Artificial Sequence
  Description of Artificial Sequence: Synthetic oligonucleotide
  Sense strand starting at position 515 of SEQ ID NO: 585356
agaagaguugaugguugaa

SEQ ID NO: 633401 - RNA, 19 nt, Artificial Sequence
  Description of Artificial Sequence: Synthetic oligonucleotide
  Antisense strand to SEQ ID NO: 633400
uucaaccaucaacucuucu

SEQ ID NO: 633402 - RNA, 19 nt, Artificial Sequence
  Description of Artificial Sequence: Synthetic oligonucleotide
  Sense strand starting at position 533 of SEQ ID NO: 585356
agcugagcccucgagaaac

SEQ ID NO: 633403 - RNA, 19 nt, Artificial Sequence
  Description of Artificial Sequence: Synthetic oligonucleotide
  Antisense strand to SEQ ID NO: 633402
guuucucgagggcucagcu

SEQ ID NO: 633404 - RNA, 19 nt, Artificial Sequence
  Description of Artificial Sequence: Synthetic oligonucleotide
  Sense strand starting at position 743 of SEQ ID NO: 585356
ggacuacgcggguauuauu

SEQ ID NO: 633405 - RNA, 19 nt, Artificial Sequence
  Description of Artificial Sequence: Synthetic oligonucleotide
  Antisense strand to SEQ ID NO: 633404
aauaauacccgcguagucc

SEQ ID NO: 633406 - RNA, 19 nt, Artificial Sequence
  Description of Artificial Sequence: Synthetic oligonucleotide
  Sense strand starting at position 753 of SEQ ID NO: 585356
gguauuauucguuugugca

SEQ ID NO: 633407 - RNA, 19 nt, Artificial Sequence
  Description of Artificial Sequence: Synthetic oligonucleotide
  Antisense strand to SEQ ID NO: 633406
ugcacaaacgaauaauacc

SEQ ID NO: 633408 - RNA, 19 nt, Artificial Sequence
  Description of Artificial Sequence: Synthetic oligonucleotide
  Sense strand starting at position 811 of SEQ ID NO: 585356
ggaugucuccgcgagauaa

SEQ ID NO: 633409 - RNA, 19 nt, Artificial Sequence
  Description of Artificial Sequence: Synthetic oligonucleotide
  Antisense strand to SEQ ID NO: 633408
uuaucucgcggagacaucc

SEQ ID NO: 633410 - RNA, 19 nt, Artificial Sequence
  Description of Artificial Sequence: Synthetic oligonucleotide
  Sense strand starting at position 1093 of SEQ ID NO: 585356
agcgucuccagggaaagau

SEQ ID NO: 633411 - RNA, 19 nt, Artificial Sequence
  Description of Artificial Sequence: Synthetic oligonucleotide
  Antisense strand to SEQ ID NO: 633410
aucuuucccuggagacgcu

SEQ ID NO: 633412 - RNA, 19 nt, Artificial Sequence
  Description of Artificial Sequence: Synthetic oligonucleotide
  Sense strand starting at position 1115 of SEQ ID NO: 585356
cgccuuuauccgucccaca

SEQ ID NO: 633413 - RNA, 19 nt, Artificial Sequence
  Description of Artificial Sequence: Synthetic oligonucleotide
  Antisense strand to SEQ ID NO: 633412
ugugggacggauaaaggcg

SEQ ID NO: 633414 - RNA, 19 nt, Artificial Sequence
  Description of Artificial Sequence: Synthetic oligonucleotide
  Sense strand starting at position 1210 of SEQ ID NO: 585356
ccaauuugucuccggccaa

SEQ ID NO: 633415 - RNA, 19 nt, Artificial Sequence
  Description of Artificial Sequence: Synthetic oligonucleotide
  Antisense strand to SEQ ID NO: 633414
uuggccggagacaaauugg

SEQ ID NO: 633416 - RNA, 19 nt, Artificial Sequence
  Description of Artificial Sequence: Synthetic oligonucleotide
  Sense strand starting at position 1442 of SEQ ID NO: 585356
gcgacugaccucuaggauc

SEQ ID NO: 633417 - RNA, 19 nt, Artificial Sequence
  Description of Artificial Sequence: Synthetic oligonucleotide
  Antisense strand to SEQ ID NO: 633416
gauccuagaggucagucgc

SEQ ID NO: 633418 - RNA, 19 nt, Artificial Sequence
  Description of Artificial Sequence: Synthetic oligonucleotide
  Sense strand starting at position 1444 of SEQ ID NO: 585356
gacugaccucuaggaucuu

SEQ ID NO: 633419 - RNA, 19 nt, Artificial Sequence
  Description of Artificial Sequence: Synthetic oligonucleotide
  Antisense strand to SEQ ID NO: 633418
aagauccuagaggucaguc

SEQ ID NO: 633420 - RNA, 19 nt, Artificial Sequence
  Description of Artificial Sequence: Synthetic oligonucleotide
  Sense strand starting at position 1487 of SEQ ID NO: 585356
cgggaacuccuugagcaga

SEQ ID NO: 633421 - RNA, 19 nt, Artificial Sequence
  Description of Artificial Sequence: Synthetic oligonucleotide
  Antisense strand to SEQ ID NO: 633420
ucugcucaaggaguucccg

SEQ ID NO: 633422 - RNA, 19 nt, Artificial Sequence
  Description of Artificial Sequence: Synthetic oligonucleotide
  Sense strand starting at position 1555 of SEQ ID NO: 585356
ccuccagcacuucgaagau

SEQ ID NO: 633423 - RNA, 19 nt, Artificial Sequence
  Description of Artificial Sequence: Synthetic oligonucleotide
  Antisense strand to SEQ ID NO: 633422
aucuucgaagugcuggagg

SEQ ID NO: 633424 - RNA, 19 nt, Artificial Sequence
  Description of Artificial Sequence: Synthetic oligonucleotide
  Sense strand starting at position 2140 of SEQ ID NO: 585356
cgaggugagcgcuagaaga

SEQ ID NO: 633425 - RNA, 19 nt, Artificial Sequence
  Description of Artificial Sequence: Synthetic oligonucleotide
  Antisense strand to SEQ ID NO: 633424
ucuucuagcgcucaccucg

SEQ ID NO: 633426 - RNA, 19 nt, Artificial Sequence
  Description of Artificial Sequence: Synthetic oligonucleotide
  Sense strand starting at position 2297 of SEQ ID NO: 585356
aaaugauugugacugaggu

SEQ ID NO: 633427 - RNA, 19 nt, Artificial Sequence
  Description of Artificial Sequence: Synthetic oligonucleotide
  Antisense strand to SEQ ID NO: 633426
accucagucacaaucauuu

SEQ ID NO: 633428 - RNA, 19 nt, Artificial Sequence
  Description of Artificial Sequence: Synthetic oligonucleotide
  Sense strand starting at position 2299 of SEQ ID NO: 585356
augauugugacugagguca

SEQ ID NO: 633429 - RNA, 19 nt, Artificial Sequence
  Description of Artificial Sequence: Synthetic oligonucleotide
  Antisense strand to SEQ ID NO: 633428
ugaccucagucacaaucau

SEQ ID NO: 633430 - RNA, 19 nt, Artificial Sequence
  Description of Artificial Sequence: Synthetic oligonucleotide
  Sense strand starting at position 2426 of SEQ ID NO: 585356
ucuuguaagccugaggaag

SEQ ID NO: 633431 - RNA, 19 nt, Artificial Sequence
  Description of Artificial Sequence: Synthetic oligonucleotide
  Antisense strand to SEQ ID NO: 633430
cuuccucaggcuuacaaga

SEQ ID NO: 633432 - RNA, 19 nt, Artificial Sequence
  Description of Artificial Sequence: Synthetic oligonucleotide
  Sense strand starting at position 2550 of SEQ ID NO: 585356
gggugagaacccugcaucu

SEQ ID NO: 633433 - RNA, 19 nt, Artificial Sequence
  Description of Artificial Sequence: Synthetic oligonucleotide
  Antisense strand to SEQ ID NO: 633432
agaugcaggguucucaccc

SEQ ID NO: 633434 - RNA, 19 nt, Artificial Sequence
  Description of Artificial Sequence: Synthetic oligonucleotide
  Sense strand starting at position 2620 of SEQ ID NO: 585356
acaguaucucuacgggaaa

SEQ ID NO: 633435 - RNA, 19 nt, Artificial Sequence
  Description of Artificial Sequence: Synthetic oligonucleotide
  Antisense strand to SEQ ID NO: 633434
uuucccguagagauacugu

SEQ ID NO: 633436 - RNA, 19 nt, Artificial Sequence
  Description of Artificial Sequence: Synthetic oligonucleotide
  Sense strand starting at position 2622 of SEQ ID NO: 585356
aguaucucuacgggaaaca

SEQ ID NO: 633437 - RNA, 19 nt, Artificial Sequence
  Description of Artificial Sequence: Synthetic oligonucleotide
  Antisense strand to SEQ ID NO: 633436
uguuucccguagagauacu

SEQ ID NO: 633438 - RNA, 19 nt, Artificial Sequence
  Description of Artificial Sequence: Synthetic oligonucleotide
  Sense strand starting at position 3000 of SEQ ID NO: 585356
auacauaugcuccagcuga

SEQ ID NO: 633439 - RNA, 19 nt, Artificial Sequence
  Description of Artificial Sequence: Synthetic oligonucleotide
  Antisense strand to SEQ ID NO: 633438
ucagcuggagcauauguau

SEQ ID NO: 633440 - RNA, 19 nt, Artificial Sequence
  Description of Artificial Sequence: Synthetic oligonucleotide
  Sense strand starting at position 3211 of SEQ ID NO: 585356
gauggagaaucugucuugu

SEQ ID NO: 633441 - RNA, 19 nt, Artificial Sequence
  Description of Artificial Sequence: Synthetic oligonucleotide
  Antisense strand to SEQ ID NO: 633440
acaagacagauucuccauc

SEQ ID NO: 633442 - RNA, 19 nt, Artificial Sequence
  Description of Artificial Sequence: Synthetic oligonucleotide
  Sense strand starting at position 3227 of SEQ ID NO: 585356
uguguaaugauguauccac

SEQ ID NO: 633443 - RNA, 19 nt, Artificial Sequence
  Description of Artificial Sequence: Synthetic oligonucleotide
  Antisense strand to SEQ ID NO: 633442
guggauacaucauuacaca

SEQ ID NO: 633444 - RNA, 19 nt, Artificial Sequence
  Description of Artificial Sequence: Synthetic oligonucleotide
  Sense strand starting at position 3277 of SEQ ID NO: 585356
uaaccaugugugcaaugaa

SEQ ID NO: 633445 - RNA, 19 nt, Artificial Sequence
  Description of Artificial Sequence: Synthetic oligonucleotide
  Antisense strand to SEQ ID NO: 633444
uucauugcacacaugguua

SEQ ID NO: 633446 - RNA, 19 nt, Artificial Sequence
  Description of Artificial Sequence: Synthetic oligonucleotide
  Sense strand starting at position 3280 of SEQ ID NO: 585356
ccaugugugcaaugaagga

SEQ ID NO: 633447 - RNA, 19 nt, Artificial Sequence
  Description of Artificial Sequence: Synthetic oligonucleotide
  Antisense strand to SEQ ID NO: 633446
uccuucauugcacacaugg

SEQ ID NO: 633448 - RNA, 19 nt, Artificial Sequence
  Description of Artificial Sequence: Synthetic oligonucleotide
  Sense strand starting at position 3429 of SEQ ID NO: 585356
cccacuuugcagugaggaa

SEQ ID NO: 633449 - RNA, 19 nt, Artificial Sequence
  Description of Artificial Sequence: Synthetic oligonucleotide
  Antisense strand to SEQ ID NO: 633448
uuccucacugcaaaguggg

SEQ ID NO: 633450 - RNA, 19 nt, Artificial Sequence
  Description of Artificial Sequence: Synthetic oligonucleotide
  Sense strand starting at position 3430 of SEQ ID NO: 585356
ccacuuugcagugaggaaa

SEQ ID NO: 633451 - RNA, 19 nt, Artificial Sequence
  Description of Artificial Sequence: Synthetic oligonucleotide
  Antisense strand to SEQ ID NO: 633450
uuuccucacugcaaagugg

SEQ ID NO: 633452 - RNA, 19 nt, Artificial Sequence
  Description of Artificial Sequence: Synthetic oligonucleotide
  Sense strand starting at position 3745 of SEQ ID NO: 585356
cuccaaaucuggcuggaau

SEQ ID NO: 633453 - RNA, 19 nt, Artificial Sequence
  Description of Artificial Sequence: Synthetic oligonucleotide
  Antisense strand to SEQ ID NO: 633452
auuccagccagauuuggag

SEQ ID NO: 633454 - RNA, 19 nt, Artificial Sequence
  Description of Artificial Sequence: Synthetic oligonucleotide
  Sense strand starting at position 3746 of SEQ ID NO: 585356
uccaaaucuggcuggaaug

SEQ ID NO: 633455 - RNA, 19 nt, Artificial Sequence
  Description of Artificial Sequence: Synthetic oligonucleotide
  Antisense strand to SEQ ID NO: 633454
cauuccagccagauuugga

SEQ ID NO: 633456 - RNA, 19 nt, Artificial Sequence
  Description of Artificial Sequence: Synthetic oligonucleotide
  Sense strand starting at position 3782 of SEQ ID NO: 585356
guuggaagcauugaucuga

SEQ ID NO: 633457 - RNA, 19 nt, Artificial Sequence
  Description of Artificial Sequence: Synthetic oligonucleotide
  Antisense strand to SEQ ID NO: 633456
ucagaucaaugcuuccaac

SEQ ID NO: 633458 - RNA, 19 nt, Artificial Sequence
  Description of Artificial Sequence: Synthetic oligonucleotide
  Sense strand starting at position 3972 of SEQ ID NO: 585356
ggugcuucucuguagacaa

SEQ ID NO: 633459 - RNA, 19 nt, Artificial Sequence
  Description of Artificial Sequence: Synthetic oligonucleotide
  Antisense strand to SEQ ID NO: 633458
uugucuacagagaagcacc

SEQ ID NO: 633460 - RNA, 19 nt, Artificial Sequence
  Description of Artificial Sequence: Synthetic oligonucleotide
  Sense strand starting at position 67 of SEQ ID NO: 585357
aggaauguaucagcgagua

SEQ ID NO: 633461 - RNA, 19 nt, Artificial Sequence
  Description of Artificial Sequence: Synthetic oligonucleotide
  Antisense strand to SEQ ID NO: 633460
uacucgcugauacauuccu

SEQ ID NO: 633462 - RNA, 19 nt, Artificial Sequence
  Description of Artificial Sequence: Synthetic oligonucleotide
  Sense strand starting at position 69 of SEQ ID NO: 585357
gaauguaucagcgaguauc

SEQ ID NO: 633463 - RNA, 19 nt, Artificial Sequence
  Description of Artificial Sequence: Synthetic oligonucleotide
  Antisense strand to SEQ ID NO: 633462
gauacucgcugauacauuc

SEQ ID NO: 633464 - RNA, 19 nt, Artificial Sequence
  Description of Artificial Sequence: Synthetic oligonucleotide
  Sense strand starting at position 111 of SEQ ID NO: 585357
uaagguugaugucuuuaua

SEQ ID NO: 633465 - RNA, 19 nt, Artificial Sequence
  Description of Artificial Sequence: Synthetic oligonucleotide
  Antisense strand to SEQ ID NO: 633464
uauaaagacaucaaccuua

SEQ ID NO: 633466 - RNA, 19 nt, Artificial Sequence
  Description of Artificial Sequence: Synthetic oligonucleotide
  Sense strand starting at position 383 of SEQ ID NO: 585357
uuaagcauucucugcuaga

SEQ ID NO: 633467 - RNA, 19 nt, Artificial Sequence
  Description of Artificial Sequence: Synthetic oligonucleotide
  Antisense strand to SEQ ID NO: 633466
ucuagcagagaaugcuuaa

SEQ ID NO: 633468 - RNA, 19 nt, Artificial Sequence
  Description of Artificial Sequence: Synthetic oligonucleotide
  Sense strand starting at position 390 of SEQ ID NO: 585357
uucucugcuagauggagaa

SEQ ID NO: 633469 - RNA, 19 nt, Artificial Sequence
  Description of Artificial Sequence: Synthetic oligonucleotide
  Antisense strand to SEQ ID NO: 633468
uucuccaucuagcagagaa

SEQ ID NO: 633470 - RNA, 19 nt, Artificial Sequence
  Description of Artificial Sequence: Synthetic oligonucleotide
  Sense strand starting at position 403 of SEQ ID NO: 585357
ggagaaggcuuacuacaca

SEQ ID NO: 633471 - RNA, 19 nt, Artificial Sequence
  Description of Artificial Sequence: Synthetic oligonucleotide
  Antisense strand to SEQ ID NO: 633470
uguguaguaagccuucucc

SEQ ID NO: 633472 - RNA, 19 nt, Artificial Sequence
  Description of Artificial Sequence: Synthetic oligonucleotide
  Sense strand starting at position 489 of SEQ ID NO: 585357
cugcccgaucucugucaga

SEQ ID NO: 633473 - RNA, 19 nt, Artificial Sequence
  Description of Artificial Sequence: Synthetic oligonucleotide
  Antisense strand to SEQ ID NO: 633472
ucugacagagaucgggcag

SEQ ID NO: 633474 - RNA, 19 nt, Artificial Sequence
  Description of Artificial Sequence: Synthetic oligonucleotide
  Sense strand starting at position 923 of SEQ ID NO: 585357
ucgguugaaguuuacguau

SEQ ID NO: 633475 - RNA, 19 nt, Artificial Sequence
  Description of Artificial Sequence: Synthetic oligonucleotide
  Antisense strand to SEQ ID NO: 633474
auacguaaacuucaaccga

SEQ ID NO: 633476 - RNA, 19 nt, Artificial Sequence
  Description of Artificial Sequence: Synthetic oligonucleotide
  Sense strand starting at position 926 of SEQ ID NO: 585357
guugaaguuuacguaucuu

SEQ ID NO: 633477 - RNA, 19 nt, Artificial Sequence
  Description of Artificial Sequence: Synthetic oligonucleotide
  Antisense strand to SEQ ID NO: 633476
aagauacguaaacuucaac

SEQ ID NO: 633478 - RNA, 19 nt, Artificial Sequence
  Description of Artificial Sequence: Synthetic oligonucleotide
  Sense strand starting at position 930 of SEQ ID NO: 585357
aaguuuacguaucuuggga

SEQ ID NO: 633479 - RNA, 19 nt, Artificial Sequence
  Description of Artificial Sequence: Synthetic oligonucleotide
  Antisense strand to SEQ ID NO: 633478
ucccaagauacguaaacuu

SEQ ID NO: 633480 - RNA, 19 nt, Artificial Sequence
  Description of Artificial Sequence: Synthetic oligonucleotide
  Sense strand starting at position 946 of SEQ ID NO: 585357
ggaccuaauugcucccaau

SEQ ID NO: 633481 - RNA, 19 nt, Artificial Sequence
  Description of Artificial Sequence: Synthetic oligonucleotide
  Antisense strand to SEQ ID NO: 633480
auugggagcaauuaggucc

SEQ ID NO: 633482 - RNA, 19 nt, Artificial Sequence
  Description of Artificial Sequence: Synthetic oligonucleotide
  Sense strand starting at position 1054 of SEQ ID NO: 585357
agguucaagcuguagagau

SEQ ID NO: 633483 - RNA, 19 nt, Artificial Sequence
  Description of Artificial Sequence: Synthetic oligonucleotide
  Antisense strand to SEQ ID NO: 633482
aucucuacagcuugaaccu

SEQ ID NO: 633484 - RNA, 19 nt, Artificial Sequence
  Description of Artificial Sequence: Synthetic oligonucleotide
  Sense strand starting at position 1056 of SEQ ID NO: 585357
guucaagcuguagagauga

SEQ ID NO: 633485 - RNA, 19 nt, Artificial Sequence
  Description of Artificial Sequence: Synthetic oligonucleotide
  Antisense strand to SEQ ID NO: 633484
ucaucucuacagcuugaac

SEQ ID NO: 633486 - RNA, 19 nt, Artificial Sequence
  Description of Artificial Sequence: Synthetic oligonucleotide
  Sense strand starting at position 2124 of SEQ ID NO: 585357
gcgcgaguucgguuugguu

SEQ ID NO: 633487 - RNA, 19 nt, Artificial Sequence
  Description of Artificial Sequence: Synthetic oligonucleotide
  Antisense strand to SEQ ID NO: 633486
aaccaaaccgaacucgcgc

SEQ ID NO: 633488 - RNA, 19 nt, Artificial Sequence
  Description of Artificial Sequence: Synthetic oligonucleotide
  Sense strand starting at position 2295 of SEQ ID NO: 585357
cccugccuuccagguauua

SEQ ID NO: 633489 - RNA, 19 nt, Artificial Sequence
  Description of Artificial Sequence: Synthetic oligonucleotide
  Antisense strand to SEQ ID NO: 633488
uaauaccuggaaggcaggg

SEQ ID NO: 633490 - RNA, 19 nt, Artificial Sequence
  Description of Artificial Sequence: Synthetic oligonucleotide
  Sense strand starting at position 2307 of SEQ ID NO: 585357
gguauuaucuagccuggag

SEQ ID NO: 633491 - RNA, 19 nt, Artificial Sequence
  Description of Artificial Sequence: Synthetic oligonucleotide
  Antisense strand to SEQ ID NO: 633490
cuccaggcuagauaauacc

SEQ ID NO: 633492 - RNA, 19 nt, Artificial Sequence
  Description of Artificial Sequence: Synthetic oligonucleotide
  Sense strand starting at position 2377 of SEQ ID NO: 585357
gggcgaguccucagcaguu

SEQ ID NO: 633493 - RNA, 19 nt, Artificial Sequence
  Description of Artificial Sequence: Synthetic oligonucleotide
  Antisense strand to SEQ ID NO: 633492
aacugcugaggacucgccc

SEQ ID NO: 633494 - RNA, 19 nt, Artificial Sequence
  Description of Artificial Sequence: Synthetic oligonucleotide
  Sense strand starting at position 2379 of SEQ ID NO: 585357
gcgaguccucagcaguuca

SEQ ID NO: 633495 - RNA, 19 nt, Artificial Sequence
  Description of Artificial Sequence: Synthetic oligonucleotide
  Antisense strand to SEQ ID NO: 633494
ugaacugcugaggacucgc

SEQ ID NO: 633496 - RNA, 19 nt, Artificial Sequence
  Description of Artificial Sequence: Synthetic oligonucleotide
  Sense strand starting at position 2487 of SEQ ID NO: 585357
uuuccaucccaguaucaga

SEQ ID NO: 633497 - RNA, 19 nt, Artificial Sequence
  Description of Artificial Sequence: Synthetic oligonucleotide
  Antisense strand to SEQ ID NO: 633496
ucugauacugggauggaaa

SEQ ID NO: 633498 - RNA, 19 nt, Artificial Sequence
  Description of Artificial Sequence: Synthetic oligonucleotide
  Sense strand starting at position 2648 of SEQ ID NO: 585357
ccaguucccuccgucaaga

SEQ ID NO: 633499 - RNA, 19 nt, Artificial Sequence
  Description of Artificial Sequence: Synthetic oligonucleotide
  Antisense strand to SEQ ID NO: 633498
ucuugacggagggaacugg

SEQ ID NO: 633500 - RNA, 19 nt, Artificial Sequence
  Description of Artificial Sequence: Synthetic oligonucleotide
  Sense strand starting at position 2650 of SEQ ID NO: 585357
aguucccuccgucaagaaa

SEQ ID NO: 633501 - RNA, 19 nt, Artificial Sequence
  Description of Artificial Sequence: Synthetic oligonucleotide
  Antisense strand to SEQ ID NO: 633500
uuucuugacggagggaacu

SEQ ID NO: 633502 - RNA, 19 nt, Artificial Sequence
  Description of Artificial Sequence: Synthetic oligonucleotide
  Sense strand starting at position 2672 of SEQ ID NO: 585357
ccauuuaaguccgagaaag

SEQ ID NO: 633503 - RNA, 19 nt, Artificial Sequence
  Description of Artificial Sequence: Synthetic oligonucleotide
  Antisense strand to SEQ ID NO: 633502
cuuucucggacuuaaaugg

SEQ ID NO: 633504 - RNA, 19 nt, Artificial Sequence
  Description of Artificial Sequence: Synthetic oligonucleotide
  Sense strand starting at position 2680 of SEQ ID NO: 585357
guccgagaaagucauauga

SEQ ID NO: 633505 - RNA, 19 nt, Artificial Sequence
  Description of Artificial Sequence: Synthetic oligonucleotide
  Antisense strand to SEQ ID NO: 633504
ucauaugacuuucucggac

SEQ ID NO: 633506 - RNA, 19 nt, Artificial Sequence
  Description of Artificial Sequence: Synthetic oligonucleotide
  Sense strand starting at position 2724 of SEQ ID NO: 585357
ggacccagugucugggaaa

SEQ ID NO: 633507 - RNA, 19 nt, Artificial Sequence
  Description of Artificial Sequence: Synthetic oligonucleotide
  Antisense strand to SEQ ID NO: 633506
uuucccagacacugggucc

SEQ ID NO: 633508 - RNA, 19 nt, Artificial Sequence
  Description of Artificial Sequence: Synthetic oligonucleotide
  Sense strand starting at position 2953 of SEQ ID NO: 585357
gaaacaguguauuacaaag

SEQ ID NO: 633509 - RNA, 19 nt, Artificial Sequence
  Description of Artificial Sequence: Synthetic oligonucleotide
  Antisense strand to SEQ ID NO: 633508
cuuuguaauacacuguuuc

SEQ ID NO: 633510 - RNA, 19 nt, Artificial Sequence
  Description of Artificial Sequence: Synthetic oligonucleotide
  Sense strand starting at position 3221 of SEQ ID NO: 585357
cgagauaaauacuuuccca

SEQ ID NO: 633511 - RNA, 19 nt, Artificial Sequence
  Description of Artificial Sequence: Synthetic oligonucleotide
  Antisense strand to SEQ ID NO: 633510
ugggaaaguauuuaucucg

SEQ ID NO: 633512 - RNA, 19 nt, Artificial Sequence
  Description of Artificial Sequence: Synthetic oligonucleotide
  Sense strand starting at position 3281 of SEQ ID NO: 585357
ugauuucugucuucugcaa

SEQ ID NO: 633513 - RNA, 19 nt, Artificial Sequence
  Description of Artificial Sequence: Synthetic oligonucleotide
  Antisense strand to SEQ ID NO: 633512
uugcagaagacagaaauca

SEQ ID NO: 633514 - RNA, 19 nt, Artificial Sequence
  Description of Artificial Sequence: Synthetic oligonucleotide
  Sense strand starting at position 3305 of SEQ ID NO: 585357
cgauuuaaaugcuuugcuu

SEQ ID NO: 633515 - RNA, 19 nt, Artificial Sequence
  Description of Artificial Sequence: Synthetic oligonucleotide
  Antisense strand to SEQ ID NO: 633514
aagcaaagcauuuaaaucg

SEQ ID NO: 633516 - RNA, 19 nt, Artificial Sequence
  Description of Artificial Sequence: Synthetic oligonucleotide
  Sense strand starting at position 3338 of SEQ ID NO: 585357
cacuauuauuugugugaag

SEQ ID NO: 633517 - RNA, 19 nt, Artificial Sequence
  Description of Artificial Sequence: Synthetic oligonucleotide
  Antisense strand to SEQ ID NO: 633516
cuucacacaaauaauagug

SEQ ID NO: 633518 - RNA, 19 nt, Artificial Sequence
  Description of Artificial Sequence: Synthetic oligonucleotide
  Sense strand starting at position 3498 of SEQ ID NO: 585357
agagucacucucuagcuuu

SEQ ID NO: 633519 - RNA, 19 nt, Artificial Sequence
  Description of Artificial Sequence: Synthetic oligonucleotide
  Antisense strand to SEQ ID NO: 633518
aaagcuagagagugacucu

SEQ ID NO: 633520 - RNA, 19 nt, Artificial Sequence
  Description of Artificial Sequence: Synthetic oligonucleotide
  Sense strand starting at position 3574 of SEQ ID NO: 585357
ggugcuauucgaggcagau

SEQ ID NO: 633521 - RNA, 19 nt, Artificial Sequence
  Description of Artificial Sequence: Synthetic oligonucleotide
  Antisense strand to SEQ ID NO: 633520
aucugccucgaauagcacc

SEQ ID NO: 633522 - RNA, 19 nt, Artificial Sequence
  Description of Artificial Sequence: Synthetic oligonucleotide
  Sense strand starting at position 3687 of SEQ ID NO: 585357
uuagacucccuauggaguu

SEQ ID NO: 633523 - RNA, 19 nt, Artificial Sequence
  Description of Artificial Sequence: Synthetic oligonucleotide
  Antisense strand to SEQ ID NO: 633522
aacuccauagggagucuaa

SEQ ID NO: 633524 - RNA, 19 nt, Artificial Sequence
  Description of Artificial Sequence: Synthetic oligonucleotide
  Sense strand starting at position 3699 of SEQ ID NO: 585357
uggaguuucugugcaggga

SEQ ID NO: 633525 - RNA, 19 nt, Artificial Sequence
  Description of Artificial Sequence: Synthetic oligonucleotide
  Antisense strand to SEQ ID NO: 633524
ucccugcacagaaacucca

SEQ ID NO: 633526 - RNA, 19 nt, Artificial Sequence
  Description of Artificial Sequence: Synthetic oligonucleotide
  Sense strand starting at position 3751 of SEQ ID NO: 585357
acucgugugcccgcuuuaa

SEQ ID NO: 633527 - RNA, 19 nt, Artificial Sequence
  Description of Artificial Sequence: Synthetic oligonucleotide
  Antisense strand to SEQ ID NO: 633526
uuaaagcgggcacacgagu

SEQ ID NO: 633528 - RNA, 19 nt, Artificial Sequence
  Description of Artificial Sequence: Synthetic oligonucleotide
  Sense strand starting at position 3753 of SEQ ID NO: 585357
ucgugugcccgcuuuaaac

SEQ ID NO: 633529 - RNA, 19 nt, Artificial Sequence
  Description of Artificial Sequence: Synthetic oligonucleotide
  Antisense strand to SEQ ID NO: 633528
guuuaaagcgggcacacga

SEQ ID NO: 633530 - RNA, 19 nt, Artificial Sequence
  Description of Artificial Sequence: Synthetic oligonucleotide
  Sense strand starting at position 3943 of SEQ ID NO: 585357
gggacacguuucccuggaa

SEQ ID NO: 633531 - RNA, 19 nt, Artificial Sequence
  Description of Artificial Sequence: Synthetic oligonucleotide
  Antisense strand to SEQ ID NO: 633530
uuccagggaaacguguccc

SEQ ID NO: 633532 - RNA, 19 nt, Artificial Sequence
  Description of Artificial Sequence: Synthetic oligonucleotide
  Sense strand starting at position 3946 of SEQ ID NO: 585357
acacguuucccuggaagac

SEQ ID NO: 633533 - RNA, 19 nt, Artificial Sequence
  Description of Artificial Sequence: Synthetic oligonucleotide
  Antisense strand to SEQ ID NO: 633532
gucuuccagggaaacgugu

SEQ ID NO: 633534 - RNA, 19 nt, Artificial Sequence
  Description of Artificial Sequence: Synthetic oligonucleotide
  Sense strand starting at position 3947 of SEQ ID NO: 585357
cacguuucccuggaagaca

SEQ ID NO: 633535 - RNA, 19 nt, Artificial Sequence
  Description of Artificial Sequence: Synthetic oligonucleotide
  Antisense strand to SEQ ID NO: 633534
ugucuuccagggaaacgug

SEQ ID NO: 633536 - RNA, 19 nt, Artificial Sequence
  Description of Artificial Sequence: Synthetic oligonucleotide
  Sense strand starting at position 3963 of SEQ ID NO: 585357
acagccagcuguuuaauuu

SEQ ID NO: 633537 - RNA, 19 nt, Artificial Sequence
  Description of Artificial Sequence: Synthetic oligonucleotide
  Antisense strand to SEQ ID NO: 633536
aaauuaaacagcuggcugu

SEQ ID NO: 633538 - RNA, 19 nt, Artificial Sequence
  Description of Artificial Sequence: Synthetic oligonucleotide
  Sense strand starting at position 3971 of SEQ ID NO: 585357
cuguuuaauuucuaaguga

SEQ ID NO: 633539 - RNA, 19 nt, Artificial Sequence
  Description of Artificial Sequence: Synthetic oligonucleotide
  Antisense strand to SEQ ID NO: 633538
ucacuuagaaauuaaacag

SEQ ID NO: 633540 - RNA, 19 nt, Artificial Sequence
  Description of Artificial Sequence: Synthetic oligonucleotide
  Sense strand starting at position 4 of SEQ ID NO: 585358
ccagaaauaugugucuaua

SEQ ID NO: 633541 - RNA, 19 nt, Artificial Sequence
  Description of Artificial Sequence: Synthetic oligonucleotide
  Antisense strand to SEQ ID NO: 633540
uauagacacauauuucugg

SEQ ID NO: 633542 - RNA, 19 nt, Artificial Sequence
  Description of Artificial Sequence: Synthetic oligonucleotide
  Sense strand starting at position 7 of SEQ ID NO: 585358
gaaauaugugucuauauug

SEQ ID NO: 633543 - RNA, 19 nt, Artificial Sequence
  Description of Artificial Sequence: Synthetic oligonucleotide
  Antisense strand to SEQ ID NO: 633542
caauauagacacauauuuc

SEQ ID NO: 633544 - RNA, 19 nt, Artificial Sequence
  Description of Artificial Sequence: Synthetic oligonucleotide
  Sense strand starting at position 71 of SEQ ID NO: 585358
aggcauuacgcagguauuu

SEQ ID NO: 633545 - RNA, 19 nt, Artificial Sequence
  Description of Artificial Sequence: Synthetic oligonucleotide
  Antisense strand to SEQ ID NO: 633544
aaauaccugcguaaugccu

SEQ ID NO: 633546 - RNA, 19 nt, Artificial Sequence
  Description of Artificial Sequence: Synthetic oligonucleotide
  Sense strand starting at position 96 of SEQ ID NO: 585358
uaaauuaacguccagcuga

SEQ ID NO: 633547 - RNA, 19 nt, Artificial Sequence
  Description of Artificial Sequence: Synthetic oligonucleotide
  Antisense strand to SEQ ID NO: 633546
ucagcuggacguuaauuua

SEQ ID NO: 633548 - RNA, 19 nt, Artificial Sequence
  Description of Artificial Sequence: Synthetic oligonucleotide
  Sense strand starting at position 166 of SEQ ID NO: 585358
cagucaaggccaugggaau

SEQ ID NO: 633549 - RNA, 19 nt, Artificial Sequence
  Description of Artificial Sequence: Synthetic oligonucleotide
  Antisense strand to SEQ ID NO: 633548
auucccauggccuugacug

SEQ ID NO: 633550 - RNA, 19 nt, Artificial Sequence
  Description of Artificial Sequence: Synthetic oligonucleotide
  Sense strand starting at position 167 of SEQ ID NO: 585358
agucaaggccaugggaauu

SEQ ID NO: 633551 - RNA, 19 nt, Artificial Sequence
  Description of Artificial Sequence: Synthetic oligonucleotide
  Antisense strand to SEQ ID NO: 633550
aauucccauggccuugacu

SEQ ID NO: 633552 - RNA, 19 nt, Artificial Sequence
  Description of Artificial Sequence: Synthetic oligonucleotide
  Sense strand starting at position 177 of SEQ ID NO: 585358
augggaauuauauggcauu

SEQ ID NO: 633553 - RNA, 19 nt, Artificial Sequence
  Description of Artificial Sequence: Synthetic oligonucleotide
  Antisense strand to SEQ ID NO: 633552
aaugccauauaauucccau

SEQ ID NO: 633554 - RNA, 19 nt, Artificial Sequence
  Description of Artificial Sequence: Synthetic oligonucleotide
  Sense strand starting at position 259 of SEQ ID NO: 585358
uuaagcucugaugauacua

SEQ ID NO: 633555 - RNA, 19 nt, Artificial Sequence
  Description of Artificial Sequence: Synthetic oligonucleotide
  Antisense strand to SEQ ID NO: 633554
uaguaucaucagagcuuaa

SEQ ID NO: 633556 - RNA, 19 nt, Artificial Sequence
  Description of Artificial Sequence: Synthetic oligonucleotide
  Sense strand starting at position 299 of SEQ ID NO: 585358
agauuaaugggcuaucucu

SEQ ID NO: 633557 - RNA, 19 nt, Artificial Sequence
  Description of Artificial Sequence: Synthetic oligonucleotide
  Antisense strand to SEQ ID NO: 633556
agagauagcccauuaaucu

SEQ ID NO: 633558 - RNA, 19 nt, Artificial Sequence
  Description of Artificial Sequence: Synthetic oligonucleotide
  Sense strand starting at position 305 of SEQ ID NO: 585358
augggcuaucucuaaacca

SEQ ID NO: 633559 - RNA, 19 nt, Artificial Sequence
  Description of Artificial Sequence: Synthetic oligonucleotide
  Antisense strand to SEQ ID NO: 633558
ugguuuagagauagcccau

SEQ ID NO: 633560 - RNA, 19 nt, Artificial Sequence
  Description of Artificial Sequence: Synthetic oligonucleotide
  Sense strand starting at position 321 of SEQ ID NO: 585358
ccaucagagcaauaucgga

SEQ ID NO: 633561 - RNA, 19 nt, Artificial Sequence
  Description of Artificial Sequence: Synthetic oligonucleotide
  Antisense strand to SEQ ID NO: 633560
uccgauauugcucugaugg

SEQ ID NO: 633562 - RNA, 19 nt, Artificial Sequence
  Description of Artificial Sequence: Synthetic oligonucleotide
  Sense strand starting at position 329 of SEQ ID NO: 585358
gcaauaucggaauaugcau

SEQ ID NO: 633563 - RNA, 19 nt, Artificial Sequence
  Description of Artificial Sequence: Synthetic oligonucleotide
  Antisense strand to SEQ ID NO: 633562
augcauauuccgauauugc

SEQ ID NO: 633564 - RNA, 19 nt, Artificial Sequence
  Description of Artificial Sequence: Synthetic oligonucleotide
  Sense strand starting at position 519 of SEQ ID NO: 585358
agguggugucugucaacgu

SEQ ID NO: 633565 - RNA, 19 nt, Artificial Sequence
  Description of Artificial Sequence: Synthetic oligonucleotide
  Antisense strand to SEQ ID NO: 633564
acguugacagacaccaccu

SEQ ID NO: 633566 - RNA, 19 nt, Artificial Sequence
  Description of Artificial Sequence: Synthetic oligonucleotide
  Sense strand starting at position 545 of SEQ ID NO: 585358
gucccuggaucaucaguaa

SEQ ID NO: 633567 - RNA, 19 nt, Artificial Sequence
  Description of Artificial Sequence: Synthetic oligonucleotide
  Antisense strand to SEQ ID NO: 633566
uuacugaugauccagggac

SEQ ID NO: 633568 - RNA, 19 nt, Artificial Sequence
  Description of Artificial Sequence: Synthetic oligonucleotide
  Sense strand starting at position 586 of SEQ ID NO: 585358
gcuuaaaucccagacucag

SEQ ID NO: 633569 - RNA, 19 nt, Artificial Sequence
  Description of Artificial Sequence: Synthetic oligonucleotide
  Antisense strand to SEQ ID NO: 633568
cugagucugggauuuaagc

SEQ ID NO: 633570 - RNA, 19 nt, Artificial Sequence
  Description of Artificial Sequence: Synthetic oligonucleotide
  Sense strand starting at position 1033 of SEQ ID NO: 585358
accugaagacacugcuaua

SEQ ID NO: 633571 - RNA, 19 nt, Artificial Sequence
  Description of Artificial Sequence: Synthetic oligonucleotide
  Antisense strand to SEQ ID NO: 633570
uauagcagugucuucaggu

SEQ ID NO: 633572 - RNA, 19 nt, Artificial Sequence
  Description of Artificial Sequence: Synthetic oligonucleotide
  Sense strand starting at position 1253 of SEQ ID NO: 585358
gccaauuaauugccagaaa

SEQ ID NO: 633573 - RNA, 19 nt, Artificial Sequence
  Description of Artificial Sequence: Synthetic oligonucleotide
  Antisense strand to SEQ ID NO: 633572
uuucuggcaauuaauuggc

SEQ ID NO: 633574 - RNA, 19 nt, Artificial Sequence
  Description of Artificial Sequence: Synthetic oligonucleotide
  Sense strand starting at position 2016 of SEQ ID NO: 585358
uguagaauacgcucgugca

SEQ ID NO: 633575 - RNA, 19 nt, Artificial Sequence
  Description of Artificial Sequence: Synthetic oligonucleotide
  Antisense strand to SEQ ID NO: 633574
ugcacgagcguauucuaca

SEQ ID NO: 633576 - RNA, 19 nt, Artificial Sequence
  Description of Artificial Sequence: Synthetic oligonucleotide
  Sense strand starting at position 2135 of SEQ ID NO: 585358
aaacgcauuugcucgaaag

SEQ ID NO: 633577 - RNA, 19 nt, Artificial Sequence
  Description of Artificial Sequence: Synthetic oligonucleotide
  Antisense strand to SEQ ID NO: 633576
cuuucgagcaaaugcguuu

SEQ ID NO: 633578 - RNA, 19 nt, Artificial Sequence
  Description of Artificial Sequence: Synthetic oligonucleotide
  Sense strand starting at position 2136 of SEQ ID NO: 585358
aacgcauuugcucgaaagu

SEQ ID NO: 633579 - RNA, 19 nt, Artificial Sequence
  Description of Artificial Sequence: Synthetic oligonucleotide
  Antisense strand to SEQ ID NO: 633578
acuuucgagcaaaugcguu

SEQ ID NO: 633580 - RNA, 19 nt, Artificial Sequence
  Description of Artificial Sequence: Synthetic oligonucleotide
  Sense strand starting at position 2137 of SEQ ID NO: 585358
acgcauuugcucgaaaguc

SEQ ID NO: 633581 - RNA, 19 nt, Artificial Sequence
  Description of Artificial Sequence: Synthetic oligonucleotide
  Antisense strand to SEQ ID NO: 633580
gacuuucgagcaaaugcgu

SEQ ID NO: 633582 - RNA, 19 nt, Artificial Sequence
  Description of Artificial Sequence: Synthetic oligonucleotide
  Sense strand starting at position 2152 of SEQ ID NO: 585358
agucacuacccuggauaua

SEQ ID NO: 633583 - RNA, 19 nt, Artificial Sequence
  Description of Artificial Sequence: Synthetic oligonucleotide
  Antisense strand to SEQ ID NO: 633582
uauauccaggguagugacu

SEQ ID NO: 633584 - RNA, 19 nt, Artificial Sequence
  Description of Artificial Sequence: Synthetic oligonucleotide
  Sense strand starting at position 2741 of SEQ ID NO: 585358
uuguaaauuguugaaagcu

SEQ ID NO: 633585 - RNA, 19 nt, Artificial Sequence
  Description of Artificial Sequence: Synthetic oligonucleotide
  Antisense strand to SEQ ID NO: 633584
agcuuucaacaauuuacaa

SEQ ID NO: 633586 - RNA, 19 nt, Artificial Sequence
  Description of Artificial Sequence: Synthetic oligonucleotide
  Sense strand starting at position 2749 of SEQ ID NO: 585358
uguugaaagcucuauaaac

SEQ ID NO: 633587 - RNA, 19 nt, Artificial Sequence
  Description of Artificial Sequence: Synthetic oligonucleotide
  Antisense strand to SEQ ID NO: 633586
guuuauagagcuuucaaca

SEQ ID NO: 633588 - RNA, 19 nt, Artificial Sequence
  Description of Artificial Sequence: Synthetic oligonucleotide
  Sense strand starting at position 2848 of SEQ ID NO: 585358
ggauuagaauugguguuga

SEQ ID NO: 633589 - RNA, 19 nt, Artificial Sequence
  Description of Artificial Sequence: Synthetic oligonucleotide
  Antisense strand to SEQ ID NO: 633588
ucaacaccaauucuaaucc

SEQ ID NO: 633590 - RNA, 19 nt, Artificial Sequence
  Description of Artificial Sequence: Synthetic oligonucleotide
  Sense strand starting at position 2919 of SEQ ID NO: 585358
cggauacuuguauagcaaa

SEQ ID NO: 633591 - RNA, 19 nt, Artificial Sequence
  Description of Artificial Sequence: Synthetic oligonucleotide
  Antisense strand to SEQ ID NO: 633590
uuugcuauacaaguauccg

SEQ ID NO: 633592 - RNA, 19 nt, Artificial Sequence
  Description of Artificial Sequence: Synthetic oligonucleotide
  Sense strand starting at position 3046 of SEQ ID NO: 585358
ccucguuuaugacuauaaa

SEQ ID NO: 633593 - RNA, 19 nt, Artificial Sequence
  Description of Artificial Sequence: Synthetic oligonucleotide
  Antisense strand to SEQ ID NO: 633592
uuuauagucauaaacgagg

SEQ ID NO: 633594 - RNA, 19 nt, Artificial Sequence
  Description of Artificial Sequence: Synthetic oligonucleotide
  Sense strand starting at position 3047 of SEQ ID NO: 585358
cucguuuaugacuauaaag

SEQ ID NO: 633595 - RNA, 19 nt, Artificial Sequence
  Description of Artificial Sequence: Synthetic oligonucleotide
  Antisense strand to SEQ ID NO: 633594
cuuuauagucauaaacgag

SEQ ID NO: 633596 - RNA, 19 nt, Artificial Sequence
  Description of Artificial Sequence: Synthetic oligonucleotide
  Sense strand starting at position 3049 of SEQ ID NO: 585358
cguuuaugacuauaaagua

SEQ ID NO: 633597 - RNA, 19 nt, Artificial Sequence
  Description of Artificial Sequence: Synthetic oligonucleotide
  Antisense strand to SEQ ID NO: 633596
uacuuuauagucauaaacg

SEQ ID NO: 633598 - RNA, 19 nt, Artificial Sequence
  Description of Artificial Sequence: Synthetic oligonucleotide
  Sense strand starting at position 3061 of SEQ ID NO: 585358
uaaaguaugcaggacugua

SEQ ID NO: 633599 - RNA, 19 nt, Artificial Sequence
  Description of Artificial Sequence: Synthetic oligonucleotide
  Antisense strand to SEQ ID NO: 633598
uacaguccugcauacuuua

SEQ ID NO: 633600 - RNA, 19 nt, Artificial Sequence
  Description of Artificial Sequence: Synthetic oligonucleotide
  Sense strand starting at position 3337 of SEQ ID NO: 585358
cucuaagaaggcugugaga

SEQ ID NO: 633601 - RNA, 19 nt, Artificial Sequence
  Description of Artificial Sequence: Synthetic oligonucleotide
  Antisense strand to SEQ ID NO: 633600
ucucacagccuucuuagag

SEQ ID NO: 633602 - RNA, 19 nt, Artificial Sequence
  Description of Artificial Sequence: Synthetic oligonucleotide
  Sense strand starting at position 3339 of SEQ ID NO: 585358
cuaagaaggcugugagaua

SEQ ID NO: 633603 - RNA, 19 nt, Artificial Sequence
  Description of Artificial Sequence: Synthetic oligonucleotide
  Antisense strand to SEQ ID NO: 633602
uaucucacagccuucuuag

SEQ ID NO: 633604 - RNA, 19 nt, Artificial Sequence
  Description of Artificial Sequence: Synthetic oligonucleotide
  Sense strand starting at position 3346 of SEQ ID NO: 585358
ggcugugagauauaaauuc

SEQ ID NO: 633605 - RNA, 19 nt, Artificial Sequence
  Description of Artificial Sequence: Synthetic oligonucleotide
  Antisense strand to SEQ ID NO: 633604
gaauuuauaucucacagcc

SEQ ID NO: 633606 - RNA, 19 nt, Artificial Sequence
  Description of Artificial Sequence: Synthetic oligonucleotide
  Sense strand starting at position 3353 of SEQ ID NO: 585358
agauauaaauuccuguaug

SEQ ID NO: 633607 - RNA, 19 nt, Artificial Sequence
  Description of Artificial Sequence: Synthetic oligonucleotide
  Antisense strand to SEQ ID NO: 633606
cauacaggaauuuauaucu

SEQ ID NO: 633608 - RNA, 19 nt, Artificial Sequence
  Description of Artificial Sequence: Synthetic oligonucleotide
  Sense strand starting at position 3363 of SEQ ID NO: 585358
uccuguaugccuggagaaa

SEQ ID NO: 633609 - RNA, 19 nt, Artificial Sequence
  Description of Artificial Sequence: Synthetic oligonucleotide
  Antisense strand to SEQ ID NO: 633608
uuucuccaggcauacagga

SEQ ID NO: 633610 - RNA, 19 nt, Artificial Sequence
  Description of Artificial Sequence: Synthetic oligonucleotide
  Sense strand starting at position 3403 of SEQ ID NO: 585358
guaaacacauggcuauaaa

SEQ ID NO: 633611 - RNA, 19 nt, Artificial Sequence
  Description of Artificial Sequence: Synthetic oligonucleotide
  Antisense strand to SEQ ID NO: 633610
uuuauagccauguguuuac

SEQ ID NO: 633612 - RNA, 19 nt, Artificial Sequence
  Description of Artificial Sequence: Synthetic oligonucleotide
  Sense strand starting at position 3434 of SEQ ID NO: 585358
aguuauaggcuccaaacuu

SEQ ID NO: 633613 - RNA, 19 nt, Artificial Sequence
  Description of Artificial Sequence: Synthetic oligonucleotide
  Antisense strand to SEQ ID NO: 633612
aaguuuggagccuauaacu

SEQ ID NO: 633614 - RNA, 19 nt, Artificial Sequence
  Description of Artificial Sequence: Synthetic oligonucleotide
  Sense strand starting at position 3604 of SEQ ID NO: 585358
aaagauuccuucccguaga

SEQ ID NO: 633615 - RNA, 19 nt, Artificial Sequence
  Description of Artificial Sequence: Synthetic oligonucleotide
  Antisense strand to SEQ ID NO: 633614
ucuacgggaaggaaucuuu

SEQ ID NO: 633616 - RNA, 19 nt, Artificial Sequence
  Description of Artificial Sequence: Synthetic oligonucleotide
  Sense strand starting at position 3614 of SEQ ID NO: 585358
ucccguagauuuguauauu

SEQ ID NO: 633617 - RNA, 19 nt, Artificial Sequence
  Description of Artificial Sequence: Synthetic oligonucleotide
  Antisense strand to SEQ ID NO: 633616
aauauacaaaucuacggga

SEQ ID NO: 633618 - RNA, 19 nt, Artificial Sequence
  Description of Artificial Sequence: Synthetic oligonucleotide
  Sense strand starting at position 3807 of SEQ ID NO: 585358
uggccugaaguuuggagaa

SEQ ID NO: 633619 - RNA, 19 nt, Artificial Sequence
  Description of Artificial Sequence: Synthetic oligonucleotide
  Antisense strand to SEQ ID NO: 633618
uucuccaaacuucaggcca

SEQ ID NO: 633620 - RNA, 19 nt, Artificial Sequence
  Description of Artificial Sequence: Synthetic oligonucleotide
  Sense strand starting at position 7 of SEQ ID NO: 585359
agaaaugguuaacaaggaa

SEQ ID NO: 633621 - RNA, 19 nt, Artificial Sequence
  Description of Artificial Sequence: Synthetic oligonucleotide
  Antisense strand to SEQ ID NO: 633620
uuccuuguuaaccauuucu

SEQ ID NO: 633622 - RNA, 19 nt, Artificial Sequence
  Description of Artificial Sequence: Synthetic oligonucleotide
  Sense strand starting at position 54 of SEQ ID NO: 585359
uuaaaucuuaucgaggguu

SEQ ID NO: 633623 - RNA, 19 nt, Artificial Sequence
  Description of Artificial Sequence: Synthetic oligonucleotide
  Antisense strand to SEQ ID NO: 633622
aacccucgauaagauuuaa

SEQ ID NO: 633624 - RNA, 19 nt, Artificial Sequence
  Description of Artificial Sequence: Synthetic oligonucleotide
  Sense strand starting at position 97 of SEQ ID NO: 585359
uauacaauugaggguuaua

SEQ ID NO: 633625 - RNA, 19 nt, Artificial Sequence
  Description of Artificial Sequence: Synthetic oligonucleotide
  Antisense strand to SEQ ID NO: 633624
uauaacccucaauuguaua

SEQ ID NO: 633626 - RNA, 19 nt, Artificial Sequence
  Description of Artificial Sequence: Synthetic oligonucleotide
  Sense strand starting at position 674 of SEQ ID NO: 585359
ugaaguacuccugaccuca

SEQ ID NO: 633627 - RNA, 19 nt, Artificial Sequence
  Description of Artificial Sequence: Synthetic oligonucleotide
  Antisense strand to SEQ ID NO: 633626
ugaggucaggaguacuuca

SEQ ID NO: 633628 - RNA, 19 nt, Artificial Sequence
  Description of Artificial Sequence: Synthetic oligonucleotide
  Sense strand starting at position 707 of SEQ ID NO: 585359
ucggccucccaauauugaa

SEQ ID NO: 633629 - RNA, 19 nt, Artificial Sequence
  Description of Artificial Sequence: Synthetic oligonucleotide
  Antisense strand to SEQ ID NO: 633628
uucaauauugggaggccga

SEQ ID NO: 633630 - RNA, 19 nt, Artificial Sequence
  Description of Artificial Sequence: Synthetic oligonucleotide
  Sense strand starting at position 929 of SEQ ID NO: 585359
uggucaaagccuugaguua

SEQ ID NO: 633631 - RNA, 19 nt, Artificial Sequence
  Description of Artificial Sequence: Synthetic oligonucleotide
  Antisense strand to SEQ ID NO: 633630
uaacucaaggcuuugacca

SEQ ID NO: 633632 - RNA, 19 nt, Artificial Sequence
  Description of Artificial Sequence: Synthetic oligonucleotide
  Sense strand starting at position 930 of SEQ ID NO: 585359
ggucaaagccuugaguuau

SEQ ID NO: 633633 - RNA, 19 nt, Artificial Sequence
  Description of Artificial Sequence: Synthetic oligonucleotide
  Antisense strand to SEQ ID NO: 633632
auaacucaaggcuuugacc

SEQ ID NO: 633634 - RNA, 19 nt, Artificial Sequence
  Description of Artificial Sequence: Synthetic oligonucleotide
  Sense strand starting at position 1040 of SEQ ID NO: 585359
ugguuuccacaucacugaa

SEQ ID NO: 633635 - RNA, 19 nt, Artificial Sequence
  Description of Artificial Sequence: Synthetic oligonucleotide
  Antisense strand to SEQ ID NO: 633634
uucagugauguggaaacca

SEQ ID NO: 633636 - RNA, 19 nt, Artificial Sequence
  Description of Artificial Sequence: Synthetic oligonucleotide
  Sense strand starting at position 1195 of SEQ ID NO: 585359
uggcaaugcucaucaaguc

SEQ ID NO: 633637 - RNA, 19 nt, Artificial Sequence
  Description of Artificial Sequence: Synthetic oligonucleotide
  Antisense strand to SEQ ID NO: 633636
gacuugaugagcauugcca

SEQ ID NO: 633638 - RNA, 19 nt, Artificial Sequence
  Description of Artificial Sequence: Synthetic oligonucleotide
  Sense strand starting at position 1224 of SEQ ID NO: 585359
guggcugugccagagaauu

SEQ ID NO: 633639 - RNA, 19 nt, Artificial Sequence
  Description of Artificial Sequence: Synthetic oligonucleotide
  Antisense strand to SEQ ID NO: 633638
aauucucuggcacagccac

SEQ ID NO: 633640 - RNA, 19 nt, Artificial Sequence
  Description of Artificial Sequence: Synthetic oligonucleotide
  Sense strand starting at position 1226 of SEQ ID NO: 585359
ggcugugccagagaauuac

SEQ ID NO: 633641 - RNA, 19 nt, Artificial Sequence
  Description of Artificial Sequence: Synthetic oligonucleotide
  Antisense strand to SEQ ID NO: 633640
guaauucucuggcacagcc

SEQ ID NO: 633642 - RNA, 19 nt, Artificial Sequence
  Description of Artificial Sequence: Synthetic oligonucleotide
  Sense strand starting at position 1232 of SEQ ID NO: 585359
gccagagaauuacuacaac

SEQ ID NO: 633643 - RNA, 19 nt, Artificial Sequence
  Description of Artificial Sequence: Synthetic oligonucleotide
  Antisense strand to SEQ ID NO: 633642
guuguaguaauucucuggc

SEQ ID NO: 633644 - RNA, 19 nt, Artificial Sequence
  Description of Artificial Sequence: Synthetic oligonucleotide
  Sense strand starting at position 1308 of SEQ ID NO: 585359
gggaguuccuacuccagga

SEQ ID NO: 633645 - RNA, 19 nt, Artificial Sequence
  Description of Artificial Sequence: Synthetic oligonucleotide
  Antisense strand to SEQ ID NO: 633644
uccuggaguaggaacuccc

SEQ ID NO: 633646 - RNA, 19 nt, Artificial Sequence
  Description of Artificial Sequence: Synthetic oligonucleotide
  Sense strand starting at position 2397 of SEQ ID NO: 585359
aacgauuugcuaggagugu

SEQ ID NO: 633647 - RNA, 19 nt, Artificial Sequence
  Description of Artificial Sequence: Synthetic oligonucleotide
  Antisense strand to SEQ ID NO: 633646
acacuccuagcaaaucguu

SEQ ID NO: 633648 - RNA, 19 nt, Artificial Sequence
  Description of Artificial Sequence: Synthetic oligonucleotide
  Sense strand starting at position 2465 of SEQ ID NO: 585359
agcaaucagcccugugaag

SEQ ID NO: 633649 - RNA, 19 nt, Artificial Sequence
  Description of Artificial Sequence: Synthetic oligonucleotide
  Antisense strand to SEQ ID NO: 633648
cuucacagggcugauugcu

SEQ ID NO: 633650 - RNA, 19 nt, Artificial Sequence
  Description of Artificial Sequence: Synthetic oligonucleotide
  Sense strand starting at position 2467 of SEQ ID NO: 585359
caaucagcccugugaagug

SEQ ID NO: 633651 - RNA, 19 nt, Artificial Sequence
  Description of Artificial Sequence: Synthetic oligonucleotide
  Antisense strand to SEQ ID NO: 633650
cacuucacagggcugauug

SEQ ID NO: 633652 - RNA, 19 nt, Artificial Sequence
  Description of Artificial Sequence: Synthetic oligonucleotide
  Sense strand starting at position 2814 of SEQ ID NO: 585359
ccugguguauuagugauuu

SEQ ID NO: 633653 - RNA, 19 nt, Artificial Sequence
  Description of Artificial Sequence: Synthetic oligonucleotide
  Antisense strand to SEQ ID NO: 633652
aaaucacuaauacaccagg

SEQ ID NO: 633654 - RNA, 19 nt, Artificial Sequence
  Description of Artificial Sequence: Synthetic oligonucleotide
  Sense strand starting at position 2850 of SEQ ID NO: 585359
cugccaaauagugagugau

SEQ ID NO: 633655 - RNA, 19 nt, Artificial Sequence
  Description of Artificial Sequence: Synthetic oligonucleotide
  Antisense strand to SEQ ID NO: 633654
aucacucacuauuuggcag

SEQ ID NO: 633656 - RNA, 19 nt, Artificial Sequence
  Description of Artificial Sequence: Synthetic oligonucleotide
  Sense strand starting at position 2860 of SEQ ID NO: 585359
gugagugaucccuggugau

SEQ ID NO: 633657 - RNA, 19 nt, Artificial Sequence
  Description of Artificial Sequence: Synthetic oligonucleotide
  Antisense strand to SEQ ID NO: 633656
aucaccagggaucacucac

SEQ ID NO: 633658 - RNA, 19 nt, Artificial Sequence
  Description of Artificial Sequence: Synthetic oligonucleotide
  Sense strand starting at position 2870 of SEQ ID NO: 585359
ccuggugaugugggaaacu

SEQ ID NO: 633659 - RNA, 19 nt, Artificial Sequence
  Description of Artificial Sequence: Synthetic oligonucleotide
  Antisense strand to SEQ ID NO: 633658
aguuucccacaucaccagg

SEQ ID NO: 633660 - RNA, 19 nt, Artificial Sequence
  Description of Artificial Sequence: Synthetic oligonucleotide
  Sense strand starting at position 2926 of SEQ ID NO: 585359
uacacagguguauguauau

SEQ ID NO: 633661 - RNA, 19 nt, Artificial Sequence
  Description of Artificial Sequence: Synthetic oligonucleotide
  Antisense strand to SEQ ID NO: 633660
auauacauacaccugugua

SEQ ID NO: 633662 - RNA, 19 nt, Artificial Sequence
  Description of Artificial Sequence: Synthetic oligonucleotide
  Sense strand starting at position 2972 of SEQ ID NO: 585359
uuaagaugugugcaccuua

SEQ ID NO: 633663 - RNA, 19 nt, Artificial Sequence
  Description of Artificial Sequence: Synthetic oligonucleotide
  Antisense strand to SEQ ID NO: 633662
uaaggugcacacaucuuaa

SEQ ID NO: 633664 - RNA, 19 nt, Artificial Sequence
  Description of Artificial Sequence: Synthetic oligonucleotide
  Sense strand starting at position 2977 of SEQ ID NO: 585359
augugugcaccuuaggaaa

SEQ ID NO: 633665 - RNA, 19 nt, Artificial Sequence
  Description of Artificial Sequence: Synthetic oligonucleotide
  Antisense strand to SEQ ID NO: 633664
uuuccuaaggugcacacau

SEQ ID NO: 633666 - RNA, 19 nt, Artificial Sequence
  Description of Artificial Sequence: Synthetic oligonucleotide
  Sense strand starting at position 2988 of SEQ ID NO: 585359
uuaggaaaguuucuucuca

SEQ ID NO: 633667 - RNA, 19 nt, Artificial Sequence
  Description of Artificial Sequence: Synthetic oligonucleotide
  Antisense strand to SEQ ID NO: 633666
ugagaagaaacuuuccuaa

SEQ ID NO: 633668 - RNA, 19 nt, Artificial Sequence
  Description of Artificial Sequence: Synthetic oligonucleotide
  Sense strand starting at position 2990 of SEQ ID NO: 585359
aggaaaguuucuucucaau

SEQ ID NO: 633669 - RNA, 19 nt, Artificial Sequence
  Description of Artificial Sequence: Synthetic oligonucleotide
  Antisense strand to SEQ ID NO: 633668
auugagaagaaacuuuccu

SEQ ID NO: 633670 - RNA, 19 nt, Artificial Sequence
  Description of Artificial Sequence: Synthetic oligonucleotide
  Sense strand starting at position 3084 of SEQ ID NO: 585359
cuuuguuugugggcagaaa

SEQ ID NO: 633671 - RNA, 19 nt, Artificial Sequence
  Description of Artificial Sequence: Synthetic oligonucleotide
  Antisense strand to SEQ ID NO: 633670
uuucugcccacaaacaaag

SEQ ID NO: 633672 - RNA, 19 nt, Artificial Sequence
  Description of Artificial Sequence: Synthetic oligonucleotide
  Sense strand starting at position 3085 of SEQ ID NO: 585359
uuuguuugugggcagaaau

SEQ ID NO: 633673 - RNA, 19 nt, Artificial Sequence
  Description of Artificial Sequence: Synthetic oligonucleotide
  Antisense strand to SEQ ID NO: 633672
auuucugcccacaaacaaa

SEQ ID NO: 633674 - RNA, 19 nt, Artificial Sequence
  Description of Artificial Sequence: Synthetic oligonucleotide
  Sense strand starting at position 3185 of SEQ ID NO: 585359
gauguauacaaguggaguc

SEQ ID NO: 633675 - RNA, 19 nt, Artificial Sequence
  Description of Artificial Sequence: Synthetic oligonucleotide
  Antisense strand to SEQ ID NO: 633674
gacuccacuuguauacauc

SEQ ID NO: 633676 - RNA, 19 nt, Artificial Sequence
  Description of Artificial Sequence: Synthetic oligonucleotide
  Sense strand starting at position 3377 of SEQ ID NO: 585359
cccaguguuggagacggaa

SEQ ID NO: 633677 - RNA, 19 nt, Artificial Sequence
  Description of Artificial Sequence: Synthetic oligonucleotide
  Antisense strand to SEQ ID NO: 633676
uuccgucuccaacacuggg

SEQ ID NO: 633678 - RNA, 19 nt, Artificial Sequence
  Description of Artificial Sequence: Synthetic oligonucleotide
  Sense strand starting at position 3385 of SEQ ID NO: 585359
uggagacggaagugucauu

SEQ ID NO: 633679 - RNA, 19 nt, Artificial Sequence
  Description of Artificial Sequence: Synthetic oligonucleotide
  Antisense strand to SEQ ID NO: 633678
aaugacacuuccgucucca

SEQ ID NO: 633680 - RNA, 19 nt, Artificial Sequence
  Description of Artificial Sequence: Synthetic oligonucleotide
  Sense strand starting at position 3464 of SEQ ID NO: 585359
agacaugauuaaguuaugu

SEQ ID NO: 633681 - RNA, 19 nt, Artificial Sequence
  Description of Artificial Sequence: Synthetic oligonucleotide
  Antisense strand to SEQ ID NO: 633680
acauaacuuaaucaugucu

SEQ ID NO: 633682 - RNA, 19 nt, Artificial Sequence
  Description of Artificial Sequence: Synthetic oligonucleotide
  Sense strand starting at position 3472 of SEQ ID NO: 585359
uuaaguuaugugcaugauu

SEQ ID NO: 633683 - RNA, 19 nt, Artificial Sequence
  Description of Artificial Sequence: Synthetic oligonucleotide
  Antisense strand to SEQ ID NO: 633682
aaucaugcacauaacuuaa

SEQ ID NO: 633684 - RNA, 19 nt, Artificial Sequence
  Description of Artificial Sequence: Synthetic oligonucleotide
  Sense strand starting at position 3498 of SEQ ID NO: 585359
acaguucaaguuuguguga

SEQ ID NO: 633685 - RNA, 19 nt, Artificial Sequence
  Description of Artificial Sequence: Synthetic oligonucleotide
  Antisense strand to SEQ ID NO: 633684
ucacacaaacuugaacugu

SEQ ID NO: 633686 - RNA, 19 nt, Artificial Sequence
  Description of Artificial Sequence: Synthetic oligonucleotide
  Sense strand starting at position 3501 of SEQ ID NO: 585359
guucaaguuugugugaaag

SEQ ID NO: 633687 - RNA, 19 nt, Artificial Sequence
  Description of Artificial Sequence: Synthetic oligonucleotide
  Antisense strand to SEQ ID NO: 633686
cuuucacacaaacuugaac

SEQ ID NO: 633688 - RNA, 19 nt, Artificial Sequence
  Description of Artificial Sequence: Synthetic oligonucleotide
  Sense strand starting at position 3507 of SEQ ID NO: 585359
guuugugugaaaggaauag

SEQ ID NO: 633689 - RNA, 19 nt, Artificial Sequence
  Description of Artificial Sequence: Synthetic oligonucleotide
  Antisense strand to SEQ ID NO: 633688
cuauuccuuucacacaaac

SEQ ID NO: 633690 - RNA, 19 nt, Artificial Sequence
  Description of Artificial Sequence: Synthetic oligonucleotide
  Sense strand starting at position 3608 of SEQ ID NO: 585359
gaauuuagguuccagaguu

SEQ ID NO: 633691 - RNA, 19 nt, Artificial Sequence
  Description of Artificial Sequence: Synthetic oligonucleotide
  Antisense strand to SEQ ID NO: 633690
aacucuggaaccuaaauuc

SEQ ID NO: 633692 - RNA, 19 nt, Artificial Sequence
  Description of Artificial Sequence: Synthetic oligonucleotide
  Sense strand starting at position 3616 of SEQ ID NO: 585359
guuccagaguuucugaaug

SEQ ID NO: 633693 - RNA, 19 nt, Artificial Sequence
  Description of Artificial Sequence: Synthetic oligonucleotide
  Antisense strand to SEQ ID NO: 633692
cauucagaaacucuggaac

SEQ ID NO: 633694 - RNA, 19 nt, Artificial Sequence
  Description of Artificial Sequence: Synthetic oligonucleotide
  Sense strand starting at position 3764 of SEQ ID NO: 585359
acaaauauuugcuaagaag

SEQ ID NO: 633695 - RNA, 19 nt, Artificial Sequence
  Description of Artificial Sequence: Synthetic oligonucleotide
  Antisense strand to SEQ ID NO: 633694
cuucuuagcaaauauuugu

SEQ ID NO: 633696 - RNA, 19 nt, Artificial Sequence
  Description of Artificial Sequence: Synthetic oligonucleotide
  Sense strand starting at position 3843 of SEQ ID NO: 585359
ggccaaauuuggcaacaaa

SEQ ID NO: 633697 - RNA, 19 nt, Artificial Sequence
  Description of Artificial Sequence: Synthetic oligonucleotide
  Antisense strand to SEQ ID NO: 633696
uuuguugccaaauuuggcc

SEQ ID NO: 633698 - RNA, 19 nt, Artificial Sequence
  Description of Artificial Sequence: Synthetic oligonucleotide
  Sense strand starting at position 3937 of SEQ ID NO: 585359
ccaauaauagcaugcuagu

SEQ ID NO: 633699 - RNA, 19 nt, Artificial Sequence
  Description of Artificial Sequence: Synthetic oligonucleotide
  Antisense strand to SEQ ID NO: 633698
acuagcaugcuauuauugg

SEQ ID NO: 633700 - RNA, 19 nt, Artificial Sequence
  Description of Artificial Sequence: Synthetic oligonucleotide
  Sense strand starting at position 497 of SEQ ID NO: 585360
cugugacuucugggcucaa

SEQ ID NO: 633701 - RNA, 19 nt, Artificial Sequence
  Description of Artificial Sequence: Synthetic oligonucleotide
  Antisense strand to SEQ ID NO: 633700
uugagcccagaagucacag

SEQ ID NO: 633702 - RNA, 19 nt, Artificial Sequence
  Description of Artificial Sequence: Synthetic oligonucleotide
  Sense strand starting at position 498 of SEQ ID NO: 585360
ugugacuucugggcucaag

SEQ ID NO: 633703 - RNA, 19 nt, Artificial Sequence
  Description of Artificial Sequence: Synthetic oligonucleotide
  Antisense strand to SEQ ID NO: 633702
cuugagcccagaagucaca

SEQ ID NO: 633704 - RNA, 19 nt, Artificial Sequence
  Description of Artificial Sequence: Synthetic oligonucleotide
  Sense strand starting at position 954 of SEQ ID NO: 585360
gggacuccgcuuugagauc

SEQ ID NO: 633705 - RNA, 19 nt, Artificial Sequence
  Description of Artificial Sequence: Synthetic oligonucleotide
  Antisense strand to SEQ ID NO: 633704
gaucucaaagcggaguccc

SEQ ID NO: 633706 - RNA, 19 nt, Artificial Sequence
  Description of Artificial Sequence: Synthetic oligonucleotide
  Sense strand starting at position 1052 of SEQ ID NO: 585360
cugggauuccugggacuuc

SEQ ID NO: 633707 - RNA, 19 nt, Artificial Sequence
  Description of Artificial Sequence: Synthetic oligonucleotide
  Antisense strand to SEQ ID NO: 633706
gaagucccaggaaucccag

SEQ ID NO: 633708 - RNA, 19 nt, Artificial Sequence
  Description of Artificial Sequence: Synthetic oligonucleotide
  Sense strand starting at position 1081 of SEQ ID NO: 585360
gugcacaaauguccuagau

SEQ ID NO: 633709 - RNA, 19 nt, Artificial Sequence
  Description of Artificial Sequence: Synthetic oligonucleotide
  Antisense strand to SEQ ID NO: 633708
aucuaggacauuugugcac

SEQ ID NO: 633710 - RNA, 19 nt, Artificial Sequence
  Description of Artificial Sequence: Synthetic oligonucleotide
  Sense strand starting at position 1083 of SEQ ID NO: 585360
gcacaaauguccuagauuu

SEQ ID NO: 633711 - RNA, 19 nt, Artificial Sequence
  Description of Artificial Sequence: Synthetic oligonucleotide
  Antisense strand to SEQ ID NO: 633710
aaaucuaggacauuugugc

SEQ ID NO: 633712 - RNA, 19 nt, Artificial Sequence
  Description of Artificial Sequence: Synthetic oligonucleotide
  Sense strand starting at position 1111 of SEQ ID NO: 585360
gguugcuucuagccacaau

SEQ ID NO: 633713 - RNA, 19 nt, Artificial Sequence
  Description of Artificial Sequence: Synthetic oligonucleotide
  Antisense strand to SEQ ID NO: 633712
auuguggcuagaagcaacc

SEQ ID NO: 633714 - RNA, 19 nt, Artificial Sequence
  Description of Artificial Sequence: Synthetic oligonucleotide
  Sense strand starting at position 1198 of SEQ ID NO: 585360
cauggugauuugcagaacu

SEQ ID NO: 633715 - RNA, 19 nt, Artificial Sequence
  Description of Artificial Sequence: Synthetic oligonucleotide
  Antisense strand to SEQ ID NO: 633714
aguucugcaaaucaccaug

SEQ ID NO: 633716 - RNA, 19 nt, Artificial Sequence
  Description of Artificial Sequence: Synthetic oligonucleotide
  Sense strand starting at position 1337 of SEQ ID NO: 585360
cucgauuucugcggaucca

SEQ ID NO: 633717 - RNA, 19 nt, Artificial Sequence
  Description of Artificial Sequence: Synthetic oligonucleotide
  Antisense strand to SEQ ID NO: 633716
uggauccgcagaaaucgag

SEQ ID NO: 633718 - RNA, 19 nt, Artificial Sequence
  Description of Artificial Sequence: Synthetic oligonucleotide
  Sense strand starting at position 1388 of SEQ ID NO: 585360
ucgcaagggucuggagaaa

SEQ ID NO: 633719 - RNA, 19 nt, Artificial Sequence
  Description of Artificial Sequence: Synthetic oligonucleotide
  Antisense strand to SEQ ID NO: 633718
uuucuccagacccuugcga

SEQ ID NO: 633720 - RNA, 19 nt, Artificial Sequence
  Description of Artificial Sequence: Synthetic oligonucleotide
  Sense strand starting at position 1429 of SEQ ID NO: 585360
aggacuccguauucugaga

SEQ ID NO: 633721 - RNA, 19 nt, Artificial Sequence
  Description of Artificial Sequence: Synthetic oligonucleotide
  Antisense strand to SEQ ID NO: 633720
ucucagaauacggaguccu

SEQ ID NO: 633722 - RNA, 19 nt, Artificial Sequence
  Description of Artificial Sequence: Synthetic oligonucleotide
  Sense strand starting at position 1431 of SEQ ID NO: 585360
gacuccguauucugagacu

SEQ ID NO: 633723 - RNA, 19 nt, Artificial Sequence
  Description of Artificial Sequence: Synthetic oligonucleotide
  Antisense strand to SEQ ID NO: 633722
agucucagaauacggaguc

SEQ ID NO: 633724 - RNA, 19 nt, Artificial Sequence
  Description of Artificial Sequence: Synthetic oligonucleotide
  Sense strand starting at position 1434 of SEQ ID NO: 585360
uccguauucugagacuguu

SEQ ID NO: 633725 - RNA, 19 nt, Artificial Sequence
  Description of Artificial Sequence: Synthetic oligonucleotide
  Antisense strand to SEQ ID NO: 633724
aacagucucagaauacgga

SEQ ID NO: 633726 - RNA, 19 nt, Artificial Sequence
  Description of Artificial Sequence: Synthetic oligonucleotide
  Sense strand starting at position 1502 of SEQ ID NO: 585360
cgcguuucuggccugggaa

SEQ ID NO: 633727 - RNA, 19 nt, Artificial Sequence
  Description of Artificial Sequence: Synthetic oligonucleotide
  Antisense strand to SEQ ID NO: 633726
uucccaggccagaaacgcg

SEQ ID NO: 633728 - RNA, 19 nt, Artificial Sequence
  Description of Artificial Sequence: Synthetic oligonucleotide
  Sense strand starting at position 1503 of SEQ ID NO: 585360
gcguuucuggccugggaaa

SEQ ID NO: 633729 - RNA, 19 nt, Artificial Sequence
  Description of Artificial Sequence: Synthetic oligonucleotide
  Antisense strand to SEQ ID NO: 633728
uuucccaggccagaaacgc

SEQ ID NO: 633730 - RNA, 19 nt, Artificial Sequence
  Description of Artificial Sequence: Synthetic oligonucleotide
  Sense strand starting at position 1505 of SEQ ID NO: 585360
guuucuggccugggaaagu

SEQ ID NO: 633731 - RNA, 19 nt, Artificial Sequence
  Description of Artificial Sequence: Synthetic oligonucleotide
  Antisense strand to SEQ ID NO: 633730
acuuucccaggccagaaac

SEQ ID NO: 633732 - RNA, 19 nt, Artificial Sequence
  Description of Artificial Sequence: Synthetic oligonucleotide
  Sense strand starting at position 1671 of SEQ ID NO: 585360
ugcacagucuagguggauu

SEQ ID NO: 633733 - RNA, 19 nt, Artificial Sequence
  Description of Artificial Sequence: Synthetic oligonucleotide
  Antisense strand to SEQ ID NO: 633732
aauccaccuagacugugca

SEQ ID NO: 633734 - RNA, 19 nt, Artificial Sequence
  Description of Artificial Sequence: Synthetic oligonucleotide
  Sense strand starting at position 1673 of SEQ ID NO: 585360
cacagucuagguggauuaa

SEQ ID NO: 633735 - RNA, 19 nt, Artificial Sequence
  Description of Artificial Sequence: Synthetic oligonucleotide
  Antisense strand to SEQ ID NO: 633734
uuaauccaccuagacugug

SEQ ID NO: 633736 - RNA, 19 nt, Artificial Sequence
  Description of Artificial Sequence: Synthetic oligonucleotide
  Sense strand starting at position 1955 of SEQ ID NO: 585360
gggcuccgcgccuuaauua

SEQ ID NO: 633737 - RNA, 19 nt, Artificial Sequence
  Description of Artificial Sequence: Synthetic oligonucleotide
  Antisense strand to SEQ ID NO: 633736
uaauuaaggcgcggagccc

SEQ ID NO: 633738 - RNA, 19 nt, Artificial Sequence
  Description of Artificial Sequence: Synthetic oligonucleotide
  Sense strand starting at position 2068 of SEQ ID NO: 585360
cgauccuuuagacgacuuu

SEQ ID NO: 633739 - RNA, 19 nt, Artificial Sequence
  Description of Artificial Sequence: Synthetic oligonucleotide
  Antisense strand to SEQ ID NO: 633738
aaagucgucuaaaggaucg

SEQ ID NO: 633740 - RNA, 19 nt, Artificial Sequence
  Description of Artificial Sequence: Synthetic oligonucleotide
  Sense strand starting at position 2287 of SEQ ID NO: 585360
gggcuggguguguaagaau

SEQ ID NO: 633741 - RNA, 19 nt, Artificial Sequence
  Description of Artificial Sequence: Synthetic oligonucleotide
  Antisense strand to SEQ ID NO: 633740
auucuuacacacccagccc

SEQ ID NO: 633742 - RNA, 19 nt, Artificial Sequence
  Description of Artificial Sequence: Synthetic oligonucleotide
  Sense strand starting at position 999 of SEQ ID NO: 585361
uuguaaaccagaggugaua

SEQ ID NO: 633743 - RNA, 19 nt, Artificial Sequence
  Description of Artificial Sequence: Synthetic oligonucleotide
  Antisense strand to SEQ ID NO: 633742
uaucaccucugguuuacaa

SEQ ID NO: 633744 - RNA, 19 nt, Artificial Sequence
  Description of Artificial Sequence: Synthetic oligonucleotide
  Sense strand starting at position 1001 of SEQ ID NO: 585361
guaaaccagaggugauaau

SEQ ID NO: 633745 - RNA, 19 nt, Artificial Sequence
  Description of Artificial Sequence: Synthetic oligonucleotide
  Antisense strand to SEQ ID NO: 633744
auuaucaccucugguuuac

SEQ ID NO: 633746 - RNA, 19 nt, Artificial Sequence
  Description of Artificial Sequence: Synthetic oligonucleotide
  Sense strand starting at position 1012 of SEQ ID NO: 585361
gugauaauaguauacccau

SEQ ID NO: 633747 - RNA, 19 nt, Artificial Sequence
  Description of Artificial Sequence: Synthetic oligonucleotide
  Antisense strand to SEQ ID NO: 633746
auggguauacuauuaucac

SEQ ID NO: 633748 - RNA, 19 nt, Artificial Sequence
  Description of Artificial Sequence: Synthetic oligonucleotide
  Sense strand starting at position 1045 of SEQ ID NO: 585361
gugagaacuagaggaguua

SEQ ID NO: 633749 - RNA, 19 nt, Artificial Sequence
  Description of Artificial Sequence: Synthetic oligonucleotide
  Antisense strand to SEQ ID NO: 633748
uaacuccucuaguucucac

SEQ ID NO: 633750 - RNA, 19 nt, Artificial Sequence
  Description of Artificial Sequence: Synthetic oligonucleotide
  Sense strand starting at position 1206 of SEQ ID NO: 585361
augccuuugcuugaauacu

SEQ ID NO: 633751 - RNA, 19 nt, Artificial Sequence
  Description of Artificial Sequence: Synthetic oligonucleotide
  Antisense strand to SEQ ID NO: 633750
aguauucaagcaaaggcau

SEQ ID NO: 633752 - RNA, 19 nt, Artificial Sequence
  Description of Artificial Sequence: Synthetic oligonucleotide
  Sense strand starting at position 1257 of SEQ ID NO: 585361
accucaugcgauuacuuua

SEQ ID NO: 633753 - RNA, 19 nt, Artificial Sequence
  Description of Artificial Sequence: Synthetic oligonucleotide
  Antisense strand to SEQ ID NO: 633752
uaaaguaaucgcaugaggu

SEQ ID NO: 633754 - RNA, 19 nt, Artificial Sequence
  Description of Artificial Sequence: Synthetic oligonucleotide
  Sense strand starting at position 1260 of SEQ ID NO: 585361
ucaugcgauuacuuuaaau

SEQ ID NO: 633755 - RNA, 19 nt, Artificial Sequence
  Description of Artificial Sequence: Synthetic oligonucleotide
  Antisense strand to SEQ ID NO: 633754
auuuaaaguaaucgcauga

SEQ ID NO: 633756 - RNA, 19 nt, Artificial Sequence
  Description of Artificial Sequence: Synthetic oligonucleotide
  Sense strand starting at position 1262 of SEQ ID NO: 585361
augcgauuacuuuaaauga

SEQ ID NO: 633757 - RNA, 19 nt, Artificial Sequence
  Description of Artificial Sequence: Synthetic oligonucleotide
  Antisense strand to SEQ ID NO: 633756
ucauuuaaaguaaucgcau

SEQ ID NO: 633758 - RNA, 19 nt, Artificial Sequence
  Description of Artificial Sequence: Synthetic oligonucleotide
  Sense strand starting at position 1522 of SEQ ID NO: 585361
agauauucuuaggaugaac

SEQ ID NO: 633759 - RNA, 19 nt, Artificial Sequence
  Description of Artificial Sequence: Synthetic oligonucleotide
  Antisense strand to SEQ ID NO: 633758
guucauccuaagaauaucu

SEQ ID NO: 633760 - RNA, 19 nt, Artificial Sequence
  Description of Artificial Sequence: Synthetic oligonucleotide
  Sense strand starting at position 1524 of SEQ ID NO: 585361
auauucuuaggaugaacuu

SEQ ID NO: 633761 - RNA, 19 nt, Artificial Sequence
  Description of Artificial Sequence: Synthetic oligonucleotide
  Antisense strand to SEQ ID NO: 633760
aaguucauccuaagaauau

SEQ ID NO: 633762 - RNA, 19 nt, Artificial Sequence
  Description of Artificial Sequence: Synthetic oligonucleotide
  Sense strand starting at position 1533 of SEQ ID NO: 585361
ggaugaacuuaguaagaaa

SEQ ID NO: 633763 - RNA, 19 nt, Artificial Sequence
  Description of Artificial Sequence: Synthetic oligonucleotide
  Antisense strand to SEQ ID NO: 633762
uuucuuacuaaguucaucc

SEQ ID NO: 633764 - RNA, 19 nt, Artificial Sequence
  Description of Artificial Sequence: Synthetic oligonucleotide
  Sense strand starting at position 1544 of SEQ ID NO: 585361
guaagaaaugugcaagauc

SEQ ID NO: 633765 - RNA, 19 nt, Artificial Sequence
  Description of Artificial Sequence: Synthetic oligonucleotide
  Antisense strand to SEQ ID NO: 633764
gaucuugcacauuucuuac

SEQ ID NO: 633766 - RNA, 19 nt, Artificial Sequence
  Description of Artificial Sequence: Synthetic oligonucleotide
  Sense strand starting at position 1627 of SEQ ID NO: 585361
aggaaauuaucccacaaag

SEQ ID NO: 633767 - RNA, 19 nt, Artificial Sequence
  Description of Artificial Sequence: Synthetic oligonucleotide
  Antisense strand to SEQ ID NO: 633766
cuuugugggauaauuuccu

SEQ ID NO: 633768 - RNA, 19 nt, Artificial Sequence
  Description of Artificial Sequence: Synthetic oligonucleotide
  Sense strand starting at position 1776 of SEQ ID NO: 585361
gggcuuugacgguaggaau

SEQ ID NO: 633769 - RNA, 19 nt, Artificial Sequence
  Description of Artificial Sequence: Synthetic oligonucleotide
  Antisense strand to SEQ ID NO: 633768
auuccuaccgucaaagccc

SEQ ID NO: 633770 - RNA, 19 nt, Artificial Sequence
  Description of Artificial Sequence: Synthetic oligonucleotide
  Sense strand starting at position 2063 of SEQ ID NO: 585361
gccugcucuguguaggaga

SEQ ID NO: 633771 - RNA, 19 nt, Artificial Sequence
  Description of Artificial Sequence: Synthetic oligonucleotide
  Antisense strand to SEQ ID NO: 633770
ucuccuacacagagcaggc

SEQ ID NO: 633772 - RNA, 19 nt, Artificial Sequence
  Description of Artificial Sequence: Synthetic oligonucleotide
  Sense strand starting at position 2125 of SEQ ID NO: 585361
ucuugaguccaggaagcaa

SEQ ID NO: 633773 - RNA, 19 nt, Artificial Sequence
  Description of Artificial Sequence: Synthetic oligonucleotide
  Antisense strand to SEQ ID NO: 633772
uugcuuccuggacucaaga

SEQ ID NO: 633774 - RNA, 19 nt, Artificial Sequence
  Description of Artificial Sequence: Synthetic oligonucleotide
  Sense strand starting at position 2505 of SEQ ID NO: 585361
ugguguauuugagauccca

SEQ ID NO: 633775 - RNA, 19 nt, Artificial Sequence
  Description of Artificial Sequence: Synthetic oligonucleotide
  Antisense strand to SEQ ID NO: 633774
ugggaucucaaauacacca

SEQ ID NO: 633776 - RNA, 19 nt, Artificial Sequence
  Description of Artificial Sequence: Synthetic oligonucleotide
  Sense strand starting at position 2604 of SEQ ID NO: 585361
cguuuauggccucaaacau

SEQ ID NO: 633777 - RNA, 19 nt, Artificial Sequence
  Description of Artificial Sequence: Synthetic oligonucleotide
  Antisense strand to SEQ ID NO: 633776
auguuugaggccauaaacg

SEQ ID NO: 633778 - RNA, 19 nt, Artificial Sequence
  Description of Artificial Sequence: Synthetic oligonucleotide
  Sense strand starting at position 3035 of SEQ ID NO: 585361
cuugcaaucuuaucuaggu

SEQ ID NO: 633779 - RNA, 19 nt, Artificial Sequence
  Description of Artificial Sequence: Synthetic oligonucleotide
  Antisense strand to SEQ ID NO: 633778
accuagauaagauugcaag

SEQ ID NO: 633780 - RNA, 19 nt, Artificial Sequence
  Description of Artificial Sequence: Synthetic oligonucleotide
  Sense strand starting at position 3036 of SEQ ID NO: 585361
uugcaaucuuaucuagguu

SEQ ID NO: 633781 - RNA, 19 nt, Artificial Sequence
  Description of Artificial Sequence: Synthetic oligonucleotide
  Antisense strand to SEQ ID NO: 633780
aaccuagauaagauugcaa

SEQ ID NO: 633782 - RNA, 19 nt, Artificial Sequence
  Description of Artificial Sequence: Synthetic oligonucleotide
  Sense strand starting at position 3101 of SEQ ID NO: 585361
gggucaagauagcuaagau

SEQ ID NO: 633783 - RNA, 19 nt, Artificial Sequence
  Description of Artificial Sequence: Synthetic oligonucleotide
  Antisense strand to SEQ ID NO: 633782
aucuuagcuaucuugaccc

SEQ ID NO: 633784 - RNA, 19 nt, Artificial Sequence
  Description of Artificial Sequence: Synthetic oligonucleotide
  Sense strand starting at position 3158 of SEQ ID NO: 585361
ugaggacuccuccaguauu

SEQ ID NO: 633785 - RNA, 19 nt, Artificial Sequence
  Description of Artificial Sequence: Synthetic oligonucleotide
  Antisense strand to SEQ ID NO: 633784
aauacuggaggaguccuca

SEQ ID NO: 633786 - RNA, 19 nt, Artificial Sequence
  Description of Artificial Sequence: Synthetic oligonucleotide
  Sense strand starting at position 3161 of SEQ ID NO: 585361
ggacuccuccaguauucuu

SEQ ID NO: 633787 - RNA, 19 nt, Artificial Sequence
  Description of Artificial Sequence: Synthetic oligonucleotide
  Antisense strand to SEQ ID NO: 633786
aagaauacuggaggagucc

SEQ ID NO: 633788 - RNA, 19 nt, Artificial Sequence
  Description of Artificial Sequence: Synthetic oligonucleotide
  Sense strand starting at position 3336 of SEQ ID NO: 585361
uagaguccugaagguuuaa

SEQ ID NO: 633789 - RNA, 19 nt, Artificial Sequence
  Description of Artificial Sequence: Synthetic oligonucleotide
  Antisense strand to SEQ ID NO: 633788
uuaaaccuucaggacucua

SEQ ID NO: 633790 - RNA, 19 nt, Artificial Sequence
  Description of Artificial Sequence: Synthetic oligonucleotide
  Sense strand starting at position 3561 of SEQ ID NO: 585361
gaguuccucuagcugacau

SEQ ID NO: 633791 - RNA, 19 nt, Artificial Sequence
  Description of Artificial Sequence: Synthetic oligonucleotide
  Antisense strand to SEQ ID NO: 633790
augucagcuagaggaacuc

SEQ ID NO: 633792 - RNA, 19 nt, Artificial Sequence
  Description of Artificial Sequence: Synthetic oligonucleotide
  Sense strand starting at position 3625 of SEQ ID NO: 585361
acuggaugcugccuaauga

SEQ ID NO: 633793 - RNA, 19 nt, Artificial Sequence
  Description of Artificial Sequence: Synthetic oligonucleotide
  Antisense strand to SEQ ID NO: 633792
ucauuaggcagcauccagu

SEQ ID NO: 633794 - RNA, 19 nt, Artificial Sequence
  Description of Artificial Sequence: Synthetic oligonucleotide
  Sense strand starting at position 3652 of SEQ ID NO: 585361
gccagugauaccuggacuc

SEQ ID NO: 633795 - RNA, 19 nt, Artificial Sequence
  Description of Artificial Sequence: Synthetic oligonucleotide
  Antisense strand to SEQ ID NO: 633794
gaguccagguaucacuggc

SEQ ID NO: 633796 - RNA, 19 nt, Artificial Sequence
  Description of Artificial Sequence: Synthetic oligonucleotide
  Sense strand starting at position 3654 of SEQ ID NO: 585361
cagugauaccuggacucuu

SEQ ID NO: 633797 - RNA, 19 nt, Artificial Sequence
  Description of Artificial Sequence: Synthetic oligonucleotide
  Antisense strand to SEQ ID NO: 633796
aagaguccagguaucacug

SEQ ID NO: 633798 - RNA, 19 nt, Artificial Sequence
  Description of Artificial Sequence: Synthetic oligonucleotide
  Sense strand starting at position 3664 of SEQ ID NO: 585361
uggacucuugagugagcaa

SEQ ID NO: 633799 - RNA, 19 nt, Artificial Sequence
  Description of Artificial Sequence: Synthetic oligonucleotide
  Antisense strand to SEQ ID NO: 633798
uugcucacucaagagucca

SEQ ID NO: 633800 - RNA, 19 nt, Artificial Sequence
  Description of Artificial Sequence: Synthetic oligonucleotide
  Sense strand starting at position 3711 of SEQ ID NO: 585361
caaguaagcccggagauga

SEQ ID NO: 633801 - RNA, 19 nt, Artificial Sequence
  Description of Artificial Sequence: Synthetic oligonucleotide
  Antisense strand to SEQ ID NO: 633800
ucaucuccgggcuuacuug

SEQ ID NO: 633802 - RNA, 19 nt, Artificial Sequence
  Description of Artificial Sequence: Synthetic oligonucleotide
  Sense strand starting at position 3722 of SEQ ID NO: 585361
ggagaugauuaccuguagu

SEQ ID NO: 633803 - RNA, 19 nt, Artificial Sequence
  Description of Artificial Sequence: Synthetic oligonucleotide
  Antisense strand to SEQ ID NO: 633802
acuacagguaaucaucucc

SEQ ID NO: 633804 - RNA, 19 nt, Artificial Sequence
  Description of Artificial Sequence: Synthetic oligonucleotide
  Sense strand starting at position 3725 of SEQ ID NO: 585361
gaugauuaccuguaguuuc

SEQ ID NO: 633805 - RNA, 19 nt, Artificial Sequence
  Description of Artificial Sequence: Synthetic oligonucleotide
  Antisense strand to SEQ ID NO: 633804
gaaacuacagguaaucauc

SEQ ID NO: 633806 - RNA, 19 nt, Artificial Sequence
  Description of Artificial Sequence: Synthetic oligonucleotide
  Sense strand starting at position 3736 of SEQ ID NO: 585361
guaguuucugcugcucuua

SEQ ID NO: 633807 - RNA, 19 nt, Artificial Sequence
  Description of Artificial Sequence: Synthetic oligonucleotide
  Antisense strand to SEQ ID NO: 633806
uaagagcagcagaaacuac

SEQ ID NO: 633808 - RNA, 19 nt, Artificial Sequence
  Description of Artificial Sequence: Synthetic oligonucleotide
  Sense strand starting at position 3760 of SEQ ID NO: 585361
agaaucaucugagaacuga

SEQ ID NO: 633809 - RNA, 19 nt, Artificial Sequence
  Description of Artificial Sequence: Synthetic oligonucleotide
  Antisense strand to SEQ ID NO: 633808
ucaguucucagaugauucu

SEQ ID NO: 633810 - RNA, 19 nt, Artificial Sequence
  Description of Artificial Sequence: Synthetic oligonucleotide
  Sense strand starting at position 3777 of SEQ ID NO: 585361
gauugaggagugcauguau

SEQ ID NO: 633811 - RNA, 19 nt, Artificial Sequence
  Description of Artificial Sequence: Synthetic oligonucleotide
  Antisense strand to SEQ ID NO: 633810
auacaugcacuccucaauc

SEQ ID NO: 633812 - RNA, 19 nt, Artificial Sequence
  Description of Artificial Sequence: Synthetic oligonucleotide
  Sense strand starting at position 3805 of SEQ ID NO: 585361
acuagugcacucuaggaua

SEQ ID NO: 633813 - RNA, 19 nt, Artificial Sequence
  Description of Artificial Sequence: Synthetic oligonucleotide
  Antisense strand to SEQ ID NO: 633812
uauccuagagugcacuagu

SEQ ID NO: 633814 - RNA, 19 nt, Artificial Sequence
  Description of Artificial Sequence: Synthetic oligonucleotide
  Sense strand starting at position 3807 of SEQ ID NO: 585361
uagugcacucuaggauaaa

SEQ ID NO: 633815 - RNA, 19 nt, Artificial Sequence
  Description of Artificial Sequence: Synthetic oligonucleotide
  Antisense strand to SEQ ID NO: 633814
uuuauccuagagugcacua

SEQ ID NO: 633816 - RNA, 19 nt, Artificial Sequence
  Description of Artificial Sequence: Synthetic oligonucleotide
  Sense strand starting at position 3900 of SEQ ID NO: 585361
agaccuuuagguugaguga

SEQ ID NO: 633817 - RNA, 19 nt, Artificial Sequence
  Description of Artificial Sequence: Synthetic oligonucleotide
  Antisense strand to SEQ ID NO: 633816
ucacucaaccuaaaggucu

SEQ ID NO: 633818 - RNA, 19 nt, Artificial Sequence
  Description of Artificial Sequence: Synthetic oligonucleotide
  Sense strand starting at position 3959 of SEQ ID NO: 585361
cuauuuagcuguucugcau

SEQ ID NO: 633819 - RNA, 19 nt, Artificial Sequence
  Description of Artificial Sequence: Synthetic oligonucleotide
  Antisense strand to SEQ ID NO: 633818
augcagaacagcuaaauag

SEQ ID NO: 633820 - RNA, 19 nt, Artificial Sequence
  Description of Artificial Sequence: Synthetic oligonucleotide
  Sense strand starting at position 3973 of SEQ ID NO: 585361
ugcauaggccuuugagaua

SEQ ID NO: 633821 - RNA, 19 nt, Artificial Sequence
  Description of Artificial Sequence: Synthetic oligonucleotide
  Antisense strand to SEQ ID NO: 633820
uaucucaaaggccuaugca

SEQ ID NO: 633822 - RNA, 19 nt, Artificial Sequence
  Description of Artificial Sequence: Synthetic oligonucleotide
  Sense strand starting at position 22 of SEQ ID NO: 585362
ucagcacuugcccagagaa

SEQ ID NO: 633823 - RNA, 19 nt, Artificial Sequence
  Description of Artificial Sequence: Synthetic oligonucleotide
  Antisense strand to SEQ ID NO: 633822
uucucugggcaagugcuga

SEQ ID NO: 633824 - RNA, 19 nt, Artificial Sequence
  Description of Artificial Sequence: Synthetic oligonucleotide
  Sense strand starting at position 149 of SEQ ID NO: 585362
ucaggagacuucccucaga

SEQ ID NO: 633825 - RNA, 19 nt, Artificial Sequence
  Description of Artificial Sequence: Synthetic oligonucleotide
  Antisense strand to SEQ ID NO: 633824
ucugagggaagucuccuga

SEQ ID NO: 633826 - RNA, 19 nt, Artificial Sequence
  Description of Artificial Sequence: Synthetic oligonucleotide
  Sense strand starting at position 292 of SEQ ID NO: 585362
gagaucagucuccggugua

SEQ ID NO: 633827 - RNA, 19 nt, Artificial Sequence
  Description of Artificial Sequence: Synthetic oligonucleotide
  Antisense strand to SEQ ID NO: 633826
uacaccggagacugaucuc

SEQ ID NO: 633828 - RNA, 19 nt, Artificial Sequence
  Description of Artificial Sequence: Synthetic oligonucleotide
  Sense strand starting at position 328 of SEQ ID NO: 585362
aggugaccaggucaucauu

SEQ ID NO: 633829 - RNA, 19 nt, Artificial Sequence
  Description of Artificial Sequence: Synthetic oligonucleotide
  Antisense strand to SEQ ID NO: 633828
aaugaugaccuggucaccu

SEQ ID NO: 633830 - RNA, 19 nt, Artificial Sequence
  Description of Artificial Sequence: Synthetic oligonucleotide
  Sense strand starting at position 393 of SEQ ID NO: 585362
aaagaauugccuggagcug

SEQ ID NO: 633831 - RNA, 19 nt, Artificial Sequence
  Description of Artificial Sequence: Synthetic oligonucleotide
  Antisense strand to SEQ ID NO: 633830
cagcuccaggcaauucuuu

SEQ ID NO: 633832 - RNA, 19 nt, Artificial Sequence
  Description of Artificial Sequence: Synthetic oligonucleotide
  Sense strand starting at position 394 of SEQ ID NO: 585362
aagaauugccuggagcuga

SEQ ID NO: 633833 - RNA, 19 nt, Artificial Sequence
  Description of Artificial Sequence: Synthetic oligonucleotide
  Antisense strand to SEQ ID NO: 633832
ucagcuccaggcaauucuu

SEQ ID NO: 633834 - RNA, 19 nt, Artificial Sequence
  Description of Artificial Sequence: Synthetic oligonucleotide
  Sense strand starting at position 971 of SEQ ID NO: 585362
agggaugugugacucauga

SEQ ID NO: 633835 - RNA, 19 nt, Artificial Sequence
  Description of Artificial Sequence: Synthetic oligonucleotide
  Antisense strand to SEQ ID NO: 633834
ucaugagucacacaucccu

SEQ ID NO: 633836 - RNA, 19 nt, Artificial Sequence
  Description of Artificial Sequence: Synthetic oligonucleotide
  Sense strand starting at position 1763 of SEQ ID NO: 585362
caagaucacgagcgagaau

SEQ ID NO: 633837 - RNA, 19 nt, Artificial Sequence
  Description of Artificial Sequence: Synthetic oligonucleotide
  Antisense strand to SEQ ID NO: 633836
auucucgcucgugaucuug

SEQ ID NO: 633838 - RNA, 19 nt, Artificial Sequence
  Description of Artificial Sequence: Synthetic oligonucleotide
  Sense strand starting at position 1863 of SEQ ID NO: 585362
gguccucuuccauguggaa

SEQ ID NO: 633839 - RNA, 19 nt, Artificial Sequence
  Description of Artificial Sequence: Synthetic oligonucleotide
  Antisense strand to SEQ ID NO: 633838
uuccacauggaagaggacc

SEQ ID NO: 633840 - RNA, 19 nt, Artificial Sequence
  Description of Artificial Sequence: Synthetic oligonucleotide
  Sense strand starting at position 1984 of SEQ ID NO: 585362
gggaaagucuaacaaacug

SEQ ID NO: 633841 - RNA, 19 nt, Artificial Sequence
  Description of Artificial Sequence: Synthetic oligonucleotide
  Antisense strand to SEQ ID NO: 633840
caguuuguuagacuuuccc

SEQ ID NO: 633842 - RNA, 19 nt, Artificial Sequence
  Description of Artificial Sequence: Synthetic oligonucleotide
  Sense strand starting at position 2064 of SEQ ID NO: 585362
cuuaauaaggguuguugga

SEQ ID NO: 633843 - RNA, 19 nt, Artificial Sequence
  Description of Artificial Sequence: Synthetic oligonucleotide
  Antisense strand to SEQ ID NO: 633842
uccaacaacccuuauuaag

SEQ ID NO: 633844 - RNA, 19 nt, Artificial Sequence
  Description of Artificial Sequence: Synthetic oligonucleotide
  Sense strand starting at position 2066 of SEQ ID NO: 585362
uaauaaggguuguuggaau

SEQ ID NO: 633845 - RNA, 19 nt, Artificial Sequence
  Description of Artificial Sequence: Synthetic oligonucleotide
  Antisense strand to SEQ ID NO: 633844
auuccaacaacccuuauua

SEQ ID NO: 633846 - RNA, 19 nt, Artificial Sequence
  Description of Artificial Sequence: Synthetic oligonucleotide
  Sense strand starting at position 2208 of SEQ ID NO: 585362
ucugauaagugcuuggcuu

SEQ ID NO: 633847 - RNA, 19 nt, Artificial Sequence
  Description of Artificial Sequence: Synthetic oligonucleotide
  Antisense strand to SEQ ID NO: 633846
aagccaagcacuuaucaga

SEQ ID NO: 633848 - RNA, 19 nt, Artificial Sequence
  Description of Artificial Sequence: Synthetic oligonucleotide
  Sense strand starting at position 2209 of SEQ ID NO: 585362
cugauaagugcuuggcuuu

SEQ ID NO: 633849 - RNA, 19 nt, Artificial Sequence
  Description of Artificial Sequence: Synthetic oligonucleotide
  Antisense strand to SEQ ID NO: 633848
aaagccaagcacuuaucag

SEQ ID NO: 633850 - RNA, 19 nt, Artificial Sequence
  Description of Artificial Sequence: Synthetic oligonucleotide
  Sense strand starting at position 2223 of SEQ ID NO: 585362
gcuuucugauguccuggaa

SEQ ID NO: 633851 - RNA, 19 nt, Artificial Sequence
  Description of Artificial Sequence: Synthetic oligonucleotide
  Antisense strand to SEQ ID NO: 633850
uuccaggacaucagaaagc

SEQ ID NO: 633852 - RNA, 19 nt, Artificial Sequence
  Description of Artificial Sequence: Synthetic oligonucleotide
  Sense strand starting at position 2226 of SEQ ID NO: 585362
uucugauguccuggaauca

SEQ ID NO: 633853 - RNA, 19 nt, Artificial Sequence
  Description of Artificial Sequence: Synthetic oligonucleotide
  Antisense strand to SEQ ID NO: 633852
ugauuccaggacaucagaa

SEQ ID NO: 633854 - RNA, 19 nt, Artificial Sequence
  Description of Artificial Sequence: Synthetic oligonucleotide
  Sense strand starting at position 2371 of SEQ ID NO: 585362
aguguauuccaacacgacu

SEQ ID NO: 633855 - RNA, 19 nt, Artificial Sequence
  Description of Artificial Sequence: Synthetic oligonucleotide
  Antisense strand to SEQ ID NO: 633854
agucguguuggaauacacu

SEQ ID NO: 633856 - RNA, 19 nt, Artificial Sequence
  Description of Artificial Sequence: Synthetic oligonucleotide
  Sense strand starting at position 2380 of SEQ ID NO: 585362
caacacgacuugguuuauu

SEQ ID NO: 633857 - RNA, 19 nt, Artificial Sequence
  Description of Artificial Sequence: Synthetic oligonucleotide
  Antisense strand to SEQ ID NO: 633856
aauaaaccaagucguguug

SEQ ID NO: 633858 - RNA, 19 nt, Artificial Sequence
  Description of Artificial Sequence: Synthetic oligonucleotide
  Sense strand starting at position 2400 of SEQ ID NO: 585362
gguguguugcgucaaggga

SEQ ID NO: 633859 - RNA, 19 nt, Artificial Sequence
  Description of Artificial Sequence: Synthetic oligonucleotide
  Antisense strand to SEQ ID NO: 633858
ucccuugacgcaacacacc

SEQ ID NO: 633860 - RNA, 19 nt, Artificial Sequence
  Description of Artificial Sequence: Synthetic oligonucleotide
  Sense strand starting at position 2449 of SEQ ID NO: 585362
aggauagugucauagggag

SEQ ID NO: 633861 - RNA, 19 nt, Artificial Sequence
  Description of Artificial Sequence: Synthetic oligonucleotide
  Antisense strand to SEQ ID NO: 633860
cucccuaugacacuauccu

SEQ ID NO: 633862 - RNA, 19 nt, Artificial Sequence
  Description of Artificial Sequence: Synthetic oligonucleotide
  Sense strand starting at position 2535 of SEQ ID NO: 585362
ggugcaauuugaugauuau

SEQ ID NO: 633863 - RNA, 19 nt, Artificial Sequence
  Description of Artificial Sequence: Synthetic oligonucleotide
  Antisense strand to SEQ ID NO: 633862
auaaucaucaaauugcacc

SEQ ID NO: 633864 - RNA, 19 nt, Artificial Sequence
  Description of Artificial Sequence: Synthetic oligonucleotide
  Sense strand starting at position 2560 of SEQ ID NO: 585362
aaauuuaucuaggaaguug

SEQ ID NO: 633865 - RNA, 19 nt, Artificial Sequence
  Description of Artificial Sequence: Synthetic oligonucleotide
  Antisense strand to SEQ ID NO: 633864
caacuuccuagauaaauuu

SEQ ID NO: 633866 - RNA, 19 nt, Artificial Sequence
  Description of Artificial Sequence: Synthetic oligonucleotide
  Sense strand starting at position 2568 of SEQ ID NO: 585362
cuaggaaguugagagacua

SEQ ID NO: 633867 - RNA, 19 nt, Artificial Sequence
  Description of Artificial Sequence: Synthetic oligonucleotide
  Antisense strand to SEQ ID NO: 633866
uagucucucaacuuccuag

SEQ ID NO: 633868 - RNA, 19 nt, Artificial Sequence
  Description of Artificial Sequence: Synthetic oligonucleotide
  Sense strand starting at position 2578 of SEQ ID NO: 585362
gagagacuaauguggucuu

SEQ ID NO: 633869 - RNA, 19 nt, Artificial Sequence
  Description of Artificial Sequence: Synthetic oligonucleotide
  Antisense strand to SEQ ID NO: 633868
aagaccacauuagucucuc

SEQ ID NO: 633870 - RNA, 19 nt, Artificial Sequence
  Description of Artificial Sequence: Synthetic oligonucleotide
  Sense strand starting at position 2600 of SEQ ID NO: 585362
ugcagaauguuaucucucu

SEQ ID NO: 633871 - RNA, 19 nt, Artificial Sequence
  Description of Artificial Sequence: Synthetic oligonucleotide
  Antisense strand to SEQ ID NO: 633870
agagagauaacauucugca

SEQ ID NO: 633872 - RNA, 19 nt, Artificial Sequence
  Description of Artificial Sequence: Synthetic oligonucleotide
  Sense strand starting at position 2678 of SEQ ID NO: 585362
agcaaacuugacugcuuaa

SEQ ID NO: 633873 - RNA, 19 nt, Artificial Sequence
  Description of Artificial Sequence: Synthetic oligonucleotide
  Antisense strand to SEQ ID NO: 633872
uuaagcagucaaguuugcu

SEQ ID NO: 633874 - RNA, 19 nt, Artificial Sequence
  Description of Artificial Sequence: Synthetic oligonucleotide
  Sense strand starting at position 2834 of SEQ ID NO: 585362
aauacauuagccggagugu

SEQ ID NO: 633875 - RNA, 19 nt, Artificial Sequence
  Description of Artificial Sequence: Synthetic oligonucleotide
  Antisense strand to SEQ ID NO: 633874
acacuccggcuaauguauu

SEQ ID NO: 633876 - RNA, 19 nt, Artificial Sequence
  Description of Artificial Sequence: Synthetic oligonucleotide
  Sense strand starting at position 3021 of SEQ ID NO: 585362
gugugugguagggaagauu

SEQ ID NO: 633877 - RNA, 19 nt, Artificial Sequence
  Description of Artificial Sequence: Synthetic oligonucleotide
  Antisense strand to SEQ ID NO: 633876
aaucuucccuaccacacac

SEQ ID NO: 633878 - RNA, 19 nt, Artificial Sequence
  Description of Artificial Sequence: Synthetic oligonucleotide
  Sense strand starting at position 3065 of SEQ ID NO: 585362
gcaaguuccugggugauuu

SEQ ID NO: 633879 - RNA, 19 nt, Artificial Sequence
  Description of Artificial Sequence: Synthetic oligonucleotide
  Antisense strand to SEQ ID NO: 633878
aaaucacccaggaacuugc

SEQ ID NO: 633880 - RNA, 19 nt, Artificial Sequence
  Description of Artificial Sequence: Synthetic oligonucleotide
  Sense strand starting at position 3131 of SEQ ID NO: 585362
ggacuuucaucugugaggu

SEQ ID NO: 633881 - RNA, 19 nt, Artificial Sequence
  Description of Artificial Sequence: Synthetic oligonucleotide
  Antisense strand to SEQ ID NO: 633880
accucacagaugaaagucc

SEQ ID NO: 633882 - RNA, 19 nt, Artificial Sequence
  Description of Artificial Sequence: Synthetic oligonucleotide
  Sense strand starting at position 3163 of SEQ ID NO: 585362
acugucugaguccacagau

SEQ ID NO: 633883 - RNA, 19 nt, Artificial Sequence
  Description of Artificial Sequence: Synthetic oligonucleotide
  Antisense strand to SEQ ID NO: 633882
aucuguggacucagacagu

SEQ ID NO: 633884 - RNA, 19 nt, Artificial Sequence
  Description of Artificial Sequence: Synthetic oligonucleotide
  Sense strand starting at position 3194 of SEQ ID NO: 585362
gggagaacauucucugcau

SEQ ID NO: 633885 - RNA, 19 nt, Artificial Sequence
  Description of Artificial Sequence: Synthetic oligonucleotide
  Antisense strand to SEQ ID NO: 633884
augcagagaauguucuccc

SEQ ID NO: 633886 - RNA, 19 nt, Artificial Sequence
  Description of Artificial Sequence: Synthetic oligonucleotide
  Sense strand starting at position 3195 of SEQ ID NO: 585362
ggagaacauucucugcauc

SEQ ID NO: 633887 - RNA, 19 nt, Artificial Sequence
  Description of Artificial Sequence: Synthetic oligonucleotide
  Antisense strand to SEQ ID NO: 633886
gaugcagagaauguucucc

SEQ ID NO: 633888 - RNA, 19 nt, Artificial Sequence
  Description of Artificial Sequence: Synthetic oligonucleotide
  Sense strand starting at position 3265 of SEQ ID NO: 585362
auauaaugacugcacagua

SEQ ID NO: 633889 - RNA, 19 nt, Artificial Sequence
  Description of Artificial Sequence: Synthetic oligonucleotide
  Antisense strand to SEQ ID NO: 633888
uacugugcagucauuauau

SEQ ID NO: 633890 - RNA, 19 nt, Artificial Sequence
  Description of Artificial Sequence: Synthetic oligonucleotide
  Sense strand starting at position 3638 of SEQ ID NO: 585362
uagucaaaugcagguaauu

SEQ ID NO: 633891 - RNA, 19 nt, Artificial Sequence
  Description of Artificial Sequence: Synthetic oligonucleotide
  Antisense strand to SEQ ID NO: 633890
aauuaccugcauuugacua

SEQ ID NO: 633892 - RNA, 19 nt, Artificial Sequence
  Description of Artificial Sequence: Synthetic oligonucleotide
  Sense strand starting at position 3682 of SEQ ID NO: 585362
cuaguaauagguugcaaag

SEQ ID NO: 633893 - RNA, 19 nt, Artificial Sequence
  Description of Artificial Sequence: Synthetic oligonucleotide
  Antisense strand to SEQ ID NO: 633892
cuuugcaaccuauuacuag

SEQ ID NO: 633894 - RNA, 19 nt, Artificial Sequence
  Description of Artificial Sequence: Synthetic oligonucleotide
  Sense strand starting at position 3865 of SEQ ID NO: 585362
guccuuggcuggccaagaa

SEQ ID NO: 633895 - RNA, 19 nt, Artificial Sequence
  Description of Artificial Sequence: Synthetic oligonucleotide
  Antisense strand to SEQ ID NO: 633894
uucuuggccagccaaggac

SEQ ID NO: 633896 - RNA, 19 nt, Artificial Sequence
  Description of Artificial Sequence: Synthetic oligonucleotide
  Sense strand starting at position 3961 of SEQ ID NO: 585362
aaguuagugucaucuauug

SEQ ID NO: 633897 - RNA, 19 nt, Artificial Sequence
  Description of Artificial Sequence: Synthetic oligonucleotide
  Antisense strand to SEQ ID NO: 633896
caauagaugacacuaacuu

SEQ ID NO: 633898 - RNA, 19 nt, Artificial Sequence
  Description of Artificial Sequence: Synthetic oligonucleotide
  Sense strand starting at position 3963 of SEQ ID NO: 585362
guuagugucaucuauugau

SEQ ID NO: 633899 - RNA, 19 nt, Artificial Sequence
  Description of Artificial Sequence: Synthetic oligonucleotide
  Antisense strand to SEQ ID NO: 633898
aucaauagaugacacuaac

SEQ ID NO: 633900 - RNA, 19 nt, Artificial Sequence
  Description of Artificial Sequence: Synthetic oligonucleotide
  Sense strand starting at position 3979 of SEQ ID NO: 585362
gauuucugcuaggaccaga

SEQ ID NO: 633901 - RNA, 19 nt, Artificial Sequence
  Description of Artificial Sequence: Synthetic oligonucleotide
  Antisense strand to SEQ ID NO: 633900
ucugguccuagcagaaauc

SEQ ID NO: 633902 - RNA, 19 nt, Artificial Sequence
  Description of Artificial Sequence: Synthetic oligonucleotide
  Sense strand starting at position 159 of SEQ ID NO: 585363
cugagaaaguguucuguga

SEQ ID NO: 633903 - RNA, 19 nt, Artificial Sequence
  Description of Artificial Sequence: Synthetic oligonucleotide
  Antisense strand to SEQ ID NO: 633902
ucacagaacacuuucucag

SEQ ID NO: 633904 - RNA, 19 nt, Artificial Sequence
  Description of Artificial Sequence: Synthetic oligonucleotide
  Sense strand starting at position 161 of SEQ ID NO: 585363
gagaaaguguucugugaca

SEQ ID NO: 633905 - RNA, 19 nt, Artificial Sequence
  Description of Artificial Sequence: Synthetic oligonucleotide
  Antisense strand to SEQ ID NO: 633904
ugucacagaacacuuucuc

SEQ ID NO: 633906 - RNA, 19 nt, Artificial Sequence
  Description of Artificial Sequence: Synthetic oligonucleotide
  Sense strand starting at position 163 of SEQ ID NO: 585363
gaaaguguucugugacaga

SEQ ID NO: 633907 - RNA, 19 nt, Artificial Sequence
  Description of Artificial Sequence: Synthetic oligonucleotide
  Antisense strand to SEQ ID NO: 633906
ucugucacagaacacuuuc

SEQ ID NO: 633908 - RNA, 19 nt, Artificial Sequence
  Description of Artificial Sequence: Synthetic oligonucleotide
  Sense strand starting at position 166 of SEQ ID NO: 585363
aguguucugugacagagua

SEQ ID NO: 633909 - RNA, 19 nt, Artificial Sequence
  Description of Artificial Sequence: Synthetic oligonucleotide
  Antisense strand to SEQ ID NO: 633908
uacucugucacagaacacu

SEQ ID NO: 633910 - RNA, 19 nt, Artificial Sequence
  Description of Artificial Sequence: Synthetic oligonucleotide
  Sense strand starting at position 244 of SEQ ID NO: 585363
ccaagucaccuugaguaga

SEQ ID NO: 633911 - RNA, 19 nt, Artificial Sequence
  Description of Artificial Sequence: Synthetic oligonucleotide
  Antisense strand to SEQ ID NO: 633910
ucuacucaaggugacuugg

SEQ ID NO: 633912 - RNA, 19 nt, Artificial Sequence
  Description of Artificial Sequence: Synthetic oligonucleotide
  Sense strand starting at position 280 of SEQ ID NO: 585363
gagauuuccuagugggcca

SEQ ID NO: 633913 - RNA, 19 nt, Artificial Sequence
  Description of Artificial Sequence: Synthetic oligonucleotide
  Antisense strand to SEQ ID NO: 633912
uggcccacuaggaaaucuc

SEQ ID NO: 633914 - RNA, 19 nt, Artificial Sequence
  Description of Artificial Sequence: Synthetic oligonucleotide
  Sense strand starting at position 300 of SEQ ID NO: 585363
agaggcuucucaccuguua

SEQ ID NO: 633915 - RNA, 19 nt, Artificial Sequence
  Description of Artificial Sequence: Synthetic oligonucleotide
  Antisense strand to SEQ ID NO: 633914
uaacaggugagaagccucu

SEQ ID NO: 633916 - RNA, 19 nt, Artificial Sequence
  Description of Artificial Sequence: Synthetic oligonucleotide
  Sense strand starting at position 321 of SEQ ID NO: 585363
gccagaugcgcgcgguuaa

SEQ ID NO: 633917 - RNA, 19 nt, Artificial Sequence
  Description of Artificial Sequence: Synthetic oligonucleotide
  Antisense strand to SEQ ID NO: 633916
uuaaccgcgcgcaucuggc

SEQ ID NO: 633918 - RNA, 19 nt, Artificial Sequence
  Description of Artificial Sequence: Synthetic oligonucleotide
  Sense strand starting at position 1112 of SEQ ID NO: 585363
cuuuccugagccuggaaga

SEQ ID NO: 633919 - RNA, 19 nt, Artificial Sequence
  Description of Artificial Sequence: Synthetic oligonucleotide
  Antisense strand to SEQ ID NO: 633918
ucuuccaggcucaggaaag

SEQ ID NO: 633920 - RNA, 19 nt, Artificial Sequence
  Description of Artificial Sequence: Synthetic oligonucleotide
  Sense strand starting at position 1113 of SEQ ID NO: 585363
uuuccugagccuggaagaa

SEQ ID NO: 633921 - RNA, 19 nt, Artificial Sequence
  Description of Artificial Sequence: Synthetic oligonucleotide
  Antisense strand to SEQ ID NO: 633920
uucuuccaggcucaggaaa

SEQ ID NO: 633922 - RNA, 19 nt, Artificial Sequence
  Description of Artificial Sequence: Synthetic oligonucleotide
  Sense strand starting at position 1147 of SEQ ID NO: 585363
gccacagcugugucucuau

SEQ ID NO: 633923 - RNA, 19 nt, Artificial Sequence
  Description of Artificial Sequence: Synthetic oligonucleotide
  Antisense strand to SEQ ID NO: 633922
auagagacacagcuguggc

SEQ ID NO: 633924 - RNA, 19 nt, Artificial Sequence
  Description of Artificial Sequence: Synthetic oligonucleotide
  Sense strand starting at position 2271 of SEQ ID NO: 585363
gagucuuaaccauggacuc

SEQ ID NO: 633925 - RNA, 19 nt, Artificial Sequence
  Description of Artificial Sequence: Synthetic oligonucleotide
  Antisense strand to SEQ ID NO: 633924
gaguccaugguuaagacuc

SEQ ID NO: 633926 - RNA, 19 nt, Artificial Sequence
  Description of Artificial Sequence: Synthetic oligonucleotide
  Sense strand starting at position 2272 of SEQ ID NO: 585363
agucuuaaccauggacuca

SEQ ID NO: 633927 - RNA, 19 nt, Artificial Sequence
  Description of Artificial Sequence: Synthetic oligonucleotide
  Antisense strand to SEQ ID NO: 633926
ugaguccaugguuaagacu

SEQ ID NO: 633928 - RNA, 19 nt, Artificial Sequence
  Description of Artificial Sequence: Synthetic oligonucleotide
  Sense strand starting at position 2309 of SEQ ID NO: 585363
caguaucucucccagagga

SEQ ID NO: 633929 - RNA, 19 nt, Artificial Sequence
  Description of Artificial Sequence: Synthetic oligonucleotide
  Antisense strand to SEQ ID NO: 633928
uccucugggagagauacug

SEQ ID NO: 633930 - RNA, 19 nt, Artificial Sequence
  Description of Artificial Sequence: Synthetic oligonucleotide
  Sense strand starting at position 2419 of SEQ ID NO: 585363
ucagauuauucugucacuu

SEQ ID NO: 633931 - RNA, 19 nt, Artificial Sequence
  Description of Artificial Sequence: Synthetic oligonucleotide
  Antisense strand to SEQ ID NO: 633930
aagugacagaauaaucuga

SEQ ID NO: 633932 - RNA, 19 nt, Artificial Sequence
  Description of Artificial Sequence: Synthetic oligonucleotide
  Sense strand starting at position 2427 of SEQ ID NO: 585363
uucugucacuugccugaga

SEQ ID NO: 633933 - RNA, 19 nt, Artificial Sequence
  Description of Artificial Sequence: Synthetic oligonucleotide
  Antisense strand to SEQ ID NO: 633932
ucucaggcaagugacagaa

SEQ ID NO: 633934 - RNA, 19 nt, Artificial Sequence
  Description of Artificial Sequence: Synthetic oligonucleotide
  Sense strand starting at position 2429 of SEQ ID NO: 585363
cugucacuugccugagacu

SEQ ID NO: 633935 - RNA, 19 nt, Artificial Sequence
  Description of Artificial Sequence: Synthetic oligonucleotide
  Antisense strand to SEQ ID NO: 633934
agucucaggcaagugacag

SEQ ID NO: 633936 - RNA, 19 nt, Artificial Sequence
  Description of Artificial Sequence: Synthetic oligonucleotide
  Sense strand starting at position 2438 of SEQ ID NO: 585363
gccugagacugcugaguac

SEQ ID NO: 633937 - RNA, 19 nt, Artificial Sequence
  Description of Artificial Sequence: Synthetic oligonucleotide
  Antisense strand to SEQ ID NO: 633936
guacucagcagucucaggc

SEQ ID NO: 633938 - RNA, 19 nt, Artificial Sequence
  Description of Artificial Sequence: Synthetic oligonucleotide
  Sense strand starting at position 2441 of SEQ ID NO: 585363
ugagacugcugaguacaga

SEQ ID NO: 633939 - RNA, 19 nt, Artificial Sequence
  Description of Artificial Sequence: Synthetic oligonucleotide
  Antisense strand to SEQ ID NO: 633938
ucuguacucagcagucuca

SEQ ID NO: 633940 - RNA, 19 nt, Artificial Sequence
  Description of Artificial Sequence: Synthetic oligonucleotide
  Sense strand starting at position 2507 of SEQ ID NO: 585363
guuauagggucuguguagu

SEQ ID NO: 633941 - RNA, 19 nt, Artificial Sequence
  Description of Artificial Sequence: Synthetic oligonucleotide
  Antisense strand to SEQ ID NO: 633940
acuacacagacccuauaac

SEQ ID NO: 633942 - RNA, 19 nt, Artificial Sequence
  Description of Artificial Sequence: Synthetic oligonucleotide
  Sense strand starting at position 2513 of SEQ ID NO: 585363
gggucuguguagugagauu

SEQ ID NO: 633943 - RNA, 19 nt, Artificial Sequence
  Description of Artificial Sequence: Synthetic oligonucleotide
  Antisense strand to SEQ ID NO: 633942
aaucucacuacacagaccc

SEQ ID NO: 633944 - RNA, 19 nt, Artificial Sequence
  Description of Artificial Sequence: Synthetic oligonucleotide
  Sense strand starting at position 2522 of SEQ ID NO: 585363
uagugagauuugcauagua

SEQ ID NO: 633945 - RNA, 19 nt, Artificial Sequence
  Description of Artificial Sequence: Synthetic oligonucleotide
  Antisense strand to SEQ ID NO: 633944
uacuaugcaaaucucacua

SEQ ID NO: 633946 - RNA, 19 nt, Artificial Sequence
  Description of Artificial Sequence: Synthetic oligonucleotide
  Sense strand starting at position 2697 of SEQ ID NO: 585363
cacagauaguucucguggu

SEQ ID NO: 633947 - RNA, 19 nt, Artificial Sequence
  Description of Artificial Sequence: Synthetic oligonucleotide
  Antisense strand to SEQ ID NO: 633946
accacgagaacuaucugug

SEQ ID NO: 633948 - RNA, 19 nt, Artificial Sequence
  Description of Artificial Sequence: Synthetic oligonucleotide
  Sense strand starting at position 2823 of SEQ ID NO: 585363
gggcgguggugugauuaua

SEQ ID NO: 633949 - RNA, 19 nt, Artificial Sequence
  Description of Artificial Sequence: Synthetic oligonucleotide
  Antisense strand to SEQ ID NO: 633948
uauaaucacaccaccgccc

SEQ ID NO: 633950 - RNA, 19 nt, Artificial Sequence
  Description of Artificial Sequence: Synthetic oligonucleotide
  Sense strand starting at position 2935 of SEQ ID NO: 585363
ugaugccucuguucucuaa

SEQ ID NO: 633951 - RNA, 19 nt, Artificial Sequence
  Description of Artificial Sequence: Synthetic oligonucleotide
  Antisense strand to SEQ ID NO: 633950
uuagagaacagaggcauca

SEQ ID NO: 633952 - RNA, 19 nt, Artificial Sequence
  Description of Artificial Sequence: Synthetic oligonucleotide
  Sense strand starting at position 3037 of SEQ ID NO: 585363
cugacaaggguucguuaug

SEQ ID NO: 633953 - RNA, 19 nt, Artificial Sequence
  Description of Artificial Sequence: Synthetic oligonucleotide
  Antisense strand to SEQ ID NO: 633952
cauaacgaacccuugucag

SEQ ID NO: 633954 - RNA, 19 nt, Artificial Sequence
  Description of Artificial Sequence: Synthetic oligonucleotide
  Sense strand starting at position 3038 of SEQ ID NO: 585363
ugacaaggguucguuaugu

SEQ ID NO: 633955 - RNA, 19 nt, Artificial Sequence
  Description of Artificial Sequence: Synthetic oligonucleotide
  Antisense strand to SEQ ID NO: 633954
acauaacgaacccuuguca

SEQ ID NO: 633956 - RNA, 19 nt, Artificial Sequence
  Description of Artificial Sequence: Synthetic oligonucleotide
  Sense strand starting at position 3186 of SEQ ID NO: 585363
gugggacaaucccuugauc

SEQ ID NO: 633957 - RNA, 19 nt, Artificial Sequence
  Description of Artificial Sequence: Synthetic oligonucleotide
  Antisense strand to SEQ ID NO: 633956
gaucaagggauugucccac

SEQ ID NO: 633958 - RNA, 19 nt, Artificial Sequence
  Description of Artificial Sequence: Synthetic oligonucleotide
  Sense strand starting at position 3308 of SEQ ID NO: 585363
uuagauguguugcuauaag

SEQ ID NO: 633959 - RNA, 19 nt, Artificial Sequence
  Description of Artificial Sequence: Synthetic oligonucleotide
  Antisense strand to SEQ ID NO: 633958
cuuauagcaacacaucuaa

SEQ ID NO: 633960 - RNA, 19 nt, Artificial Sequence
  Description of Artificial Sequence: Synthetic oligonucleotide
  Sense strand starting at position 3382 of SEQ ID NO: 585363
ucagguuugccacauuaau

SEQ ID NO: 633961 - RNA, 19 nt, Artificial Sequence
  Description of Artificial Sequence: Synthetic oligonucleotide
  Antisense strand to SEQ ID NO: 633960
auuaauguggcaaaccuga

SEQ ID NO: 633962 - RNA, 19 nt, Artificial Sequence
  Description of Artificial Sequence: Synthetic oligonucleotide
  Sense strand starting at position 3391 of SEQ ID NO: 585363
ccacauuaauaggccgaau

SEQ ID NO: 633963 - RNA, 19 nt, Artificial Sequence
  Description of Artificial Sequence: Synthetic oligonucleotide
  Antisense strand to SEQ ID NO: 633962
auucggccuauuaaugugg

SEQ ID NO: 633964 - RNA, 19 nt, Artificial Sequence
  Description of Artificial Sequence: Synthetic oligonucleotide
  Sense strand starting at position 3393 of SEQ ID NO: 585363
acauuaauaggccgaaugu

SEQ ID NO: 633965 - RNA, 19 nt, Artificial Sequence
  Description of Artificial Sequence: Synthetic oligonucleotide
  Antisense strand to SEQ ID NO: 633964
acauucggccuauuaaugu

SEQ ID NO: 633966 - RNA, 19 nt, Artificial Sequence
  Description of Artificial Sequence: Synthetic oligonucleotide
  Sense strand starting at position 3394 of SEQ ID NO: 585363
cauuaauaggccgaaugua

SEQ ID NO: 633967 - RNA, 19 nt, Artificial Sequence
  Description of Artificial Sequence: Synthetic oligonucleotide
  Antisense strand to SEQ ID NO: 633966
uacauucggccuauuaaug

SEQ ID NO: 633968 - RNA, 19 nt, Artificial Sequence
  Description of Artificial Sequence: Synthetic oligonucleotide
  Sense strand starting at position 3427 of SEQ ID NO: 585363
gcccaaccggcugaauaua

SEQ ID NO: 633969 - RNA, 19 nt, Artificial Sequence
  Description of Artificial Sequence: Synthetic oligonucleotide
  Antisense strand to SEQ ID NO: 633968
uauauucagccgguugggc

SEQ ID NO: 633970 - RNA, 19 nt, Artificial Sequence
  Description of Artificial Sequence: Synthetic oligonucleotide
  Sense strand starting at position 3464 of SEQ ID NO: 585363
uuuaguaguugggaaauuc

SEQ ID NO: 633971 - RNA, 19 nt, Artificial Sequence
  Description of Artificial Sequence: Synthetic oligonucleotide
  Antisense strand to SEQ ID NO: 633970
gaauuucccaacuacuaaa

SEQ ID NO: 633972 - RNA, 19 nt, Artificial Sequence
  Description of Artificial Sequence: Synthetic oligonucleotide
  Sense strand starting at position 3482 of SEQ ID NO: 585363
cuuacuugcuaauugagau

SEQ ID NO: 633973 - RNA, 19 nt, Artificial Sequence
  Description of Artificial Sequence: Synthetic oligonucleotide
  Antisense strand to SEQ ID NO: 633972
aucucaauuagcaaguaag

SEQ ID NO: 633974 - RNA, 19 nt, Artificial Sequence
  Description of Artificial Sequence: Synthetic oligonucleotide
  Sense strand starting at position 3486 of SEQ ID NO: 585363
cuugcuaauugagaugauu

SEQ ID NO: 633975 - RNA, 19 nt, Artificial Sequence
  Description of Artificial Sequence: Synthetic oligonucleotide
  Antisense strand to SEQ ID NO: 633974
aaucaucucaauuagcaag

SEQ ID NO: 633976 - RNA, 19 nt, Artificial Sequence
  Description of Artificial Sequence: Synthetic oligonucleotide
  Sense strand starting at position 3737 of SEQ ID NO: 585363
ccgauaucaggcuacugaa

SEQ ID NO: 633977 - RNA, 19 nt, Artificial Sequence
  Description of Artificial Sequence: Synthetic oligonucleotide
  Antisense strand to SEQ ID NO: 633976
uucaguagccugauaucgg

SEQ ID NO: 633978 - RNA, 19 nt, Artificial Sequence
  Description of Artificial Sequence: Synthetic oligonucleotide
  Sense strand starting at position 3775 of SEQ ID NO: 585363
gcgagacugucuccacaaa

SEQ ID NO: 633979 - RNA, 19 nt, Artificial Sequence
  Description of Artificial Sequence: Synthetic oligonucleotide
  Antisense strand to SEQ ID NO: 633978
uuuguggagacagucucgc

SEQ ID NO: 633980 - RNA, 19 nt, Artificial Sequence
  Description of Artificial Sequence: Synthetic oligonucleotide
  Sense strand starting at position 3882 of SEQ ID NO: 585363
ccgcaucacuaaucagaag

SEQ ID NO: 633981 - RNA, 19 nt, Artificial Sequence
  Description of Artificial Sequence: Synthetic oligonucleotide
  Antisense strand to SEQ ID NO: 633980
cuucugauuagugaugcgg

SEQ ID NO: 633982 - RNA, 19 nt, Artificial Sequence
  Description of Artificial Sequence: Synthetic oligonucleotide
  Sense strand starting at position 42 of SEQ ID NO: 585364
ugaauuaaucuuugagcca

SEQ ID NO: 633983 - RNA, 19 nt, Artificial Sequence
  Description of Artificial Sequence: Synthetic oligonucleotide
  Antisense strand to SEQ ID NO: 633982
uggcucaaagauuaauuca

SEQ ID NO: 633984 - RNA, 19 nt, Artificial Sequence
  Description of Artificial Sequence: Synthetic oligonucleotide
  Sense strand starting at position 53 of SEQ ID NO: 585364
uugagccacuugucucaaa

SEQ ID NO: 633985 - RNA, 19 nt, Artificial Sequence
  Description of Artificial Sequence: Synthetic oligonucleotide
  Antisense strand to SEQ ID NO: 633984
uuugagacaaguggcucaa

SEQ ID NO: 633986 - RNA, 19 nt, Artificial Sequence
  Description of Artificial Sequence: Synthetic oligonucleotide
  Sense strand starting at position 54 of SEQ ID NO: 585364
ugagccacuugucucaaau

SEQ ID NO: 633987 - RNA, 19 nt, Artificial Sequence
  Description of Artificial Sequence: Synthetic oligonucleotide
  Antisense strand to SEQ ID NO: 633986
auuugagacaaguggcuca

SEQ ID NO: 633988 - RNA, 19 nt, Artificial Sequence
  Description of Artificial Sequence: Synthetic oligonucleotide
  Sense strand starting at position 86 of SEQ ID NO: 585364
gcgggucagagagaaugau

SEQ ID NO: 633989 - RNA, 19 nt, Artificial Sequence
  Description of Artificial Sequence: Synthetic oligonucleotide
  Antisense strand to SEQ ID NO: 633988
aucauucucucugacccgc

SEQ ID NO: 633990 - RNA, 19 nt, Artificial Sequence
  Description of Artificial Sequence: Synthetic oligonucleotide
  Sense strand starting at position 378 of SEQ ID NO: 585364
aagaaaguaguaggcauaa

SEQ ID NO: 633991 - RNA, 19 nt, Artificial Sequence
  Description of Artificial Sequence: Synthetic oligonucleotide
  Antisense strand to SEQ ID NO: 633990
uuaugccuacuacuuucuu

SEQ ID NO: 633992 - RNA, 19 nt, Artificial Sequence
  Description of Artificial Sequence: Synthetic oligonucleotide
  Sense strand starting at position 614 of SEQ ID NO: 585364
uuuauucuuccuugguaca

SEQ ID NO: 633993 - RNA, 19 nt, Artificial Sequence
  Description of Artificial Sequence: Synthetic oligonucleotide
  Antisense strand to SEQ ID NO: 633992
uguaccaaggaagaauaaa

SEQ ID NO: 633994 - RNA, 19 nt, Artificial Sequence
  Description of Artificial Sequence: Synthetic oligonucleotide
  Sense strand starting at position 889 of SEQ ID NO: 585364
uggaguaauucgguuaaua

SEQ ID NO: 633995 - RNA, 19 nt, Artificial Sequence
  Description of Artificial Sequence: Synthetic oligonucleotide
  Antisense strand to SEQ ID NO: 633994
uauuaaccgaauuacucca

SEQ ID NO: 633996 - RNA, 19 nt, Artificial Sequence
  Description of Artificial Sequence: Synthetic oligonucleotide
  Sense strand starting at position 891 of SEQ ID NO: 585364
gaguaauucgguuaauaaa

SEQ ID NO: 633997 - RNA, 19 nt, Artificial Sequence
  Description of Artificial Sequence: Synthetic oligonucleotide
  Antisense strand to SEQ ID NO: 633996
uuuauuaaccgaauuacuc

SEQ ID NO: 633998 - RNA, 19 nt, Artificial Sequence
  Description of Artificial Sequence: Synthetic oligonucleotide
  Sense strand starting at position 961 of SEQ ID NO: 585364
agacauauguguuccucua

SEQ ID NO: 633999 - RNA, 19 nt, Artificial Sequence
  Description of Artificial Sequence: Synthetic oligonucleotide
  Antisense strand to SEQ ID NO: 633998
uagaggaacacauaugucu

SEQ ID NO: 634000 - RNA, 19 nt, Artificial Sequence
  Description of Artificial Sequence: Synthetic oligonucleotide
  Sense strand starting at position 968 of SEQ ID NO: 585364
uguguuccucuaggaauga

SEQ ID NO: 634001 - RNA, 19 nt, Artificial Sequence
  Description of Artificial Sequence: Synthetic oligonucleotide
  Antisense strand to SEQ ID NO: 634000
ucauuccuagaggaacaca

SEQ ID NO: 634002 - RNA, 19 nt, Artificial Sequence
  Description of Artificial Sequence: Synthetic oligonucleotide
  Sense strand starting at position 972 of SEQ ID NO: 585364
uuccucuaggaaugaaauc

SEQ ID NO: 634003 - RNA, 19 nt, Artificial Sequence
  Description of Artificial Sequence: Synthetic oligonucleotide
  Antisense strand to SEQ ID NO: 634002
gauuucauuccuagaggaa

SEQ ID NO: 634004 - RNA, 19 nt, Artificial Sequence
  Description of Artificial Sequence: Synthetic oligonucleotide
  Sense strand starting at position 1050 of SEQ ID NO: 585364
uauagaguguucccaggga

SEQ ID NO: 634005 - RNA, 19 nt, Artificial Sequence
  Description of Artificial Sequence: Synthetic oligonucleotide
  Antisense strand to SEQ ID NO: 634004
ucccugggaacacucuaua

SEQ ID NO: 634006 - RNA, 19 nt, Artificial Sequence
  Description of Artificial Sequence: Synthetic oligonucleotide
  Sense strand starting at position 1054 of SEQ ID NO: 585364
gaguguucccagggaccaa

SEQ ID NO: 634007 - RNA, 19 nt, Artificial Sequence
  Description of Artificial Sequence: Synthetic oligonucleotide
  Antisense strand to SEQ ID NO: 634006
uuggucccugggaacacuc

SEQ ID NO: 634008 - RNA, 19 nt, Artificial Sequence
  Description of Artificial Sequence: Synthetic oligonucleotide
  Sense strand starting at position 1055 of SEQ ID NO: 585364
aguguucccagggaccaau

SEQ ID NO: 634009 - RNA, 19 nt, Artificial Sequence
  Description of Artificial Sequence: Synthetic oligonucleotide
  Antisense strand to SEQ ID NO: 634008
auuggucccugggaacacu

SEQ ID NO: 634010 - RNA, 19 nt, Artificial Sequence
  Description of Artificial Sequence: Synthetic oligonucleotide
  Sense strand starting at position 1157 of SEQ ID NO: 585364
gaacaugcauaguuuaaug

SEQ ID NO: 634011 - RNA, 19 nt, Artificial Sequence
  Description of Artificial Sequence: Synthetic oligonucleotide
  Antisense strand to SEQ ID NO: 634010
cauuaaacuaugcauguuc

SEQ ID NO: 634012 - RNA, 19 nt, Artificial Sequence
  Description of Artificial Sequence: Synthetic oligonucleotide
  Sense strand starting at position 1202 of SEQ ID NO: 585364
aggauagacuuugauuaaa

SEQ ID NO: 634013 - RNA, 19 nt, Artificial Sequence
  Description of Artificial Sequence: Synthetic oligonucleotide
  Antisense strand to SEQ ID NO: 634012
uuuaaucaaagucuauccu

SEQ ID NO: 634014 - RNA, 19 nt, Artificial Sequence
  Description of Artificial Sequence: Synthetic oligonucleotide
  Sense strand starting at position 1362 of SEQ ID NO: 585364
ccuguagaccgcguuacau

SEQ ID NO: 634015 - RNA, 19 nt, Artificial Sequence
  Description of Artificial Sequence: Synthetic oligonucleotide
  Antisense strand to SEQ ID NO: 634014
auguaacgcggucuacagg

SEQ ID NO: 634016 - RNA, 19 nt, Artificial Sequence
  Description of Artificial Sequence: Synthetic oligonucleotide
  Sense strand starting at position 1384 of SEQ ID NO: 585364
cuuuaugguuucucuauca

SEQ ID NO: 634017 - RNA, 19 nt, Artificial Sequence
  Description of Artificial Sequence: Synthetic oligonucleotide
  Antisense strand to SEQ ID NO: 634016
ugauagagaaaccauaaag

SEQ ID NO: 634018 - RNA, 19 nt, Artificial Sequence
  Description of Artificial Sequence: Synthetic oligonucleotide
  Sense strand starting at position 1433 of SEQ ID NO: 585364
auuagaucuccguagcuuu

SEQ ID NO: 634019 - RNA, 19 nt, Artificial Sequence
  Description of Artificial Sequence: Synthetic oligonucleotide
  Antisense strand to SEQ ID NO: 634018
aaagcuacggagaucuaau

SEQ ID NO: 634020 - RNA, 19 nt, Artificial Sequence
  Description of Artificial Sequence: Synthetic oligonucleotide
  Sense strand starting at position 2463 of SEQ ID NO: 585364
acuccaguugugcaggaau

SEQ ID NO: 634021 - RNA, 19 nt, Artificial Sequence
  Description of Artificial Sequence: Synthetic oligonucleotide
  Antisense strand to SEQ ID NO: 634020
auuccugcacaacuggagu

SEQ ID NO: 634022 - RNA, 19 nt, Artificial Sequence
  Description of Artificial Sequence: Synthetic oligonucleotide
  Sense strand starting at position 2565 of SEQ ID NO: 585364
gcaguaggauguucauuga

SEQ ID NO: 634023 - RNA, 19 nt, Artificial Sequence
  Description of Artificial Sequence: Synthetic oligonucleotide
  Antisense strand to SEQ ID NO: 634022
ucaaugaacauccuacugc

SEQ ID NO: 634024 - RNA, 19 nt, Artificial Sequence
  Description of Artificial Sequence: Synthetic oligonucleotide
  Sense strand starting at position 2604 of SEQ ID NO: 585364
aagaaauauugugcagaga

SEQ ID NO: 634025 - RNA, 19 nt, Artificial Sequence
  Description of Artificial Sequence: Synthetic oligonucleotide
  Antisense strand to SEQ ID NO: 634024
ucucugcacaauauuucuu

SEQ ID NO: 634026 - RNA, 19 nt, Artificial Sequence
  Description of Artificial Sequence: Synthetic oligonucleotide
  Sense strand starting at position 2622 of SEQ ID NO: 585364
acaugauugagguguacaa

SEQ ID NO: 634027 - RNA, 19 nt, Artificial Sequence
  Description of Artificial Sequence: Synthetic oligonucleotide
  Antisense strand to SEQ ID NO: 634026
uuguacaccucaaucaugu

SEQ ID NO: 634028 - RNA, 19 nt, Artificial Sequence
  Description of Artificial Sequence: Synthetic oligonucleotide
  Sense strand starting at position 2632 of SEQ ID NO: 585364
gguguacaaucauuaggau

SEQ ID NO: 634029 - RNA, 19 nt, Artificial Sequence
  Description of Artificial Sequence: Synthetic oligonucleotide
  Antisense strand to SEQ ID NO: 634028
auccuaaugauuguacacc

SEQ ID NO: 634030 - RNA, 19 nt, Artificial Sequence
  Description of Artificial Sequence: Synthetic oligonucleotide
  Sense strand starting at position 2757 of SEQ ID NO: 585364
uuagucacaguuugugaaa

SEQ ID NO: 634031 - RNA, 19 nt, Artificial Sequence
  Description of Artificial Sequence: Synthetic oligonucleotide
  Antisense strand to SEQ ID NO: 634030
uuucacaaacugugacuaa

SEQ ID NO: 634032 - RNA, 19 nt, Artificial Sequence
  Description of Artificial Sequence: Synthetic oligonucleotide
  Sense strand starting at position 2942 of SEQ ID NO: 585364
ucaugauaucaccaagcgu

SEQ ID NO: 634033 - RNA, 19 nt, Artificial Sequence
  Description of Artificial Sequence: Synthetic oligonucleotide
  Antisense strand to SEQ ID NO: 634032
acgcuuggugauaucauga

SEQ ID NO: 634034 - RNA, 19 nt, Artificial Sequence
  Description of Artificial Sequence: Synthetic oligonucleotide
  Sense strand starting at position 3014 of SEQ ID NO: 585364
ugccucaaucgcuaggaaa

SEQ ID NO: 634035 - RNA, 19 nt, Artificial Sequence
  Description of Artificial Sequence: Synthetic oligonucleotide
  Antisense strand to SEQ ID NO: 634034
uuuccuagcgauugaggca

SEQ ID NO: 634036 - RNA, 19 nt, Artificial Sequence
  Description of Artificial Sequence: Synthetic oligonucleotide
  Sense strand starting at position 3016 of SEQ ID NO: 585364
ccucaaucgcuaggaaaca

SEQ ID NO: 634037 - RNA, 19 nt, Artificial Sequence
  Description of Artificial Sequence: Synthetic oligonucleotide
  Antisense strand to SEQ ID NO: 634036
uguuuccuagcgauugagg

SEQ ID NO: 634038 - RNA, 19 nt, Artificial Sequence
  Description of Artificial Sequence: Synthetic oligonucleotide
  Sense strand starting at position 3122 of SEQ ID NO: 585364
gggccaacuuugcuacaaa

SEQ ID NO: 634039 - RNA, 19 nt, Artificial Sequence
  Description of Artificial Sequence: Synthetic oligonucleotide
  Antisense strand to SEQ ID NO: 634038
uuuguagcaaaguuggccc

SEQ ID NO: 634040 - RNA, 19 nt, Artificial Sequence
  Description of Artificial Sequence: Synthetic oligonucleotide
  Sense strand starting at position 3275 of SEQ ID NO: 585364
ucaauacguccucacagaa

SEQ ID NO: 634041 - RNA, 19 nt, Artificial Sequence
  Description of Artificial Sequence: Synthetic oligonucleotide
  Antisense strand to SEQ ID NO: 634040
uucugugaggacguauuga

SEQ ID NO: 634042 - RNA, 19 nt, Artificial Sequence
  Description of Artificial Sequence: Synthetic oligonucleotide
  Sense strand starting at position 3653 of SEQ ID NO: 585364
gaggaaugguaauuguuga

SEQ ID NO: 634043 - RNA, 19 nt, Artificial Sequence
  Description of Artificial Sequence: Synthetic oligonucleotide
  Antisense strand to SEQ ID NO: 634042
ucaacaauuaccauuccuc

SEQ ID NO: 634044 - RNA, 19 nt, Artificial Sequence
  Description of Artificial Sequence: Synthetic oligonucleotide
  Sense strand starting at position 3660 of SEQ ID NO: 585364
gguaauuguugacugcaau

SEQ ID NO: 634045 - RNA, 19 nt, Artificial Sequence
  Description of Artificial Sequence: Synthetic oligonucleotide
  Antisense strand to SEQ ID NO: 634044
auugcagucaacaauuacc

SEQ ID NO: 634046 - RNA, 19 nt, Artificial Sequence
  Description of Artificial Sequence: Synthetic oligonucleotide
  Sense strand starting at position 3661 of SEQ ID NO: 585364
guaauuguugacugcaaua

SEQ ID NO: 634047 - RNA, 19 nt, Artificial Sequence
  Description of Artificial Sequence: Synthetic oligonucleotide
  Antisense strand to SEQ ID NO: 634046
uauugcagucaacaauuac

SEQ ID NO: 634048 - RNA, 19 nt, Artificial Sequence
  Description of Artificial Sequence: Synthetic oligonucleotide
  Sense strand starting at position 3722 of SEQ ID NO: 585364
ggaagacauuaguuucuuu

SEQ ID NO: 634049 - RNA, 19 nt, Artificial Sequence
  Description of Artificial Sequence: Synthetic oligonucleotide
  Antisense strand to SEQ ID NO: 634048
aaagaaacuaaugucuucc

SEQ ID NO: 634050 - RNA, 19 nt, Artificial Sequence
  Description of Artificial Sequence: Synthetic oligonucleotide
  Sense strand starting at position 3760 of SEQ ID NO: 585364
auacaaucucgauaagcag

SEQ ID NO: 634051 - RNA, 19 nt, Artificial Sequence
  Description of Artificial Sequence: Synthetic oligonucleotide
  Antisense strand to SEQ ID NO: 634050
cugcuuaucgagauuguau

SEQ ID NO: 634052 - RNA, 19 nt, Artificial Sequence
  Description of Artificial Sequence: Synthetic oligonucleotide
  Sense strand starting at position 3818 of SEQ ID NO: 585364
aagugaguacaaugugcaa

SEQ ID NO: 634053 - RNA, 19 nt, Artificial Sequence
  Description of Artificial Sequence: Synthetic oligonucleotide
  Antisense strand to SEQ ID NO: 634052
uugcacauuguacucacuu

SEQ ID NO: 634054 - RNA, 19 nt, Artificial Sequence
  Description of Artificial Sequence: Synthetic oligonucleotide
  Sense strand starting at position 3914 of SEQ ID NO: 585364
gacugaggucaaugugacu

SEQ ID NO: 634055 - RNA, 19 nt, Artificial Sequence
  Description of Artificial Sequence: Synthetic oligonucleotide
  Antisense strand to SEQ ID NO: 634054
agucacauugaccucaguc

SEQ ID NO: 634056 - RNA, 19 nt, Artificial Sequence
  Description of Artificial Sequence: Synthetic oligonucleotide
  Sense strand starting at position 3919 of SEQ ID NO: 585364
aggucaaugugacuacugu

SEQ ID NO: 634057 - RNA, 19 nt, Artificial Sequence
  Description of Artificial Sequence: Synthetic oligonucleotide
  Antisense strand to SEQ ID NO: 634056
acaguagucacauugaccu

SEQ ID NO: 634058 - RNA, 19 nt, Artificial Sequence
  Description of Artificial Sequence: Synthetic oligonucleotide
  Sense strand starting at position 3920 of SEQ ID NO: 585364
ggucaaugugacuacugua

SEQ ID NO: 634059 - RNA, 19 nt, Artificial Sequence
  Description of Artificial Sequence: Synthetic oligonucleotide
  Antisense strand to SEQ ID NO: 634058
uacaguagucacauugacc

SEQ ID NO: 634060 - RNA, 19 nt, Artificial Sequence
  Description of Artificial Sequence: Synthetic oligonucleotide
  Sense strand starting at position 3925 of SEQ ID NO: 585364
augugacuacuguaauaug

SEQ ID NO: 634061 - RNA, 19 nt, Artificial Sequence
  Description of Artificial Sequence: Synthetic oligonucleotide
  Antisense strand to SEQ ID NO: 634060
cauauuacaguagucacau

SEQ ID NO: 634062 - RNA, 19 nt, Artificial Sequence
  Description of Artificial Sequence: Synthetic oligonucleotide
  Sense strand starting at position 66 of SEQ ID NO: 585365
ugggauagcuuccuggaca

SEQ ID NO: 634063 - RNA, 19 nt, Artificial Sequence
  Description of Artificial Sequence: Synthetic oligonucleotide
  Antisense strand to SEQ ID NO: 634062
uguccaggaagcuauccca

SEQ ID NO: 634064 - RNA, 19 nt, Artificial Sequence
  Description of Artificial Sequence: Synthetic oligonucleotide
  Sense strand starting at position 185 of SEQ ID NO: 585365
ccuucuuaacuguauguau

SEQ ID NO: 634065 - RNA, 19 nt, Artificial Sequence
  Description of Artificial Sequence: Synthetic oligonucleotide
  Antisense strand to SEQ ID NO: 634064
auacauacaguuaagaagg

SEQ ID NO: 634066 - RNA, 19 nt, Artificial Sequence
  Description of Artificial Sequence: Synthetic oligonucleotide
  Sense strand starting at position 188 of SEQ ID NO: 585365
ucuuaacuguauguauaga

SEQ ID NO: 634067 - RNA, 19 nt, Artificial Sequence
  Description of Artificial Sequence: Synthetic oligonucleotide
  Antisense strand to SEQ ID NO: 634066
ucuauacauacaguuaaga

SEQ ID NO: 634068 - RNA, 19 nt, Artificial Sequence
  Description of Artificial Sequence: Synthetic oligonucleotide
  Sense strand starting at position 198 of SEQ ID NO: 585365
auguauagaucccauuuau

SEQ ID NO: 634069 - RNA, 19 nt, Artificial Sequence
  Description of Artificial Sequence: Synthetic oligonucleotide
  Antisense strand to SEQ ID NO: 634068
auaaaugggaucuauacau

SEQ ID NO: 634070 - RNA, 19 nt, Artificial Sequence
  Description of Artificial Sequence: Synthetic oligonucleotide
  Sense strand starting at position 370 of SEQ ID NO: 585365
cacaguuuccaagaacgua

SEQ ID NO: 634071 - RNA, 19 nt, Artificial Sequence
  Description of Artificial Sequence: Synthetic oligonucleotide
  Antisense strand to SEQ ID NO: 634070
uacguucuuggaaacugug

SEQ ID NO: 634072 - RNA, 19 nt, Artificial Sequence
  Description of Artificial Sequence: Synthetic oligonucleotide
  Sense strand starting at position 384 of SEQ ID NO: 585365
acguaucaagaauguuaag

SEQ ID NO: 634073 - RNA, 19 nt, Artificial Sequence
  Description of Artificial Sequence: Synthetic oligonucleotide
  Antisense strand to SEQ ID NO: 634072
cuuaacauucuugauacgu

SEQ ID NO: 634074 - RNA, 19 nt, Artificial Sequence
  Description of Artificial Sequence: Synthetic oligonucleotide
  Sense strand starting at position 427 of SEQ ID NO: 585365
agagaaugcuuccuaucua

SEQ ID NO: 634075 - RNA, 19 nt, Artificial Sequence
  Description of Artificial Sequence: Synthetic oligonucleotide
  Antisense strand to SEQ ID NO: 634074
uagauaggaagcauucucu

SEQ ID NO: 634076 - RNA, 19 nt, Artificial Sequence
  Description of Artificial Sequence: Synthetic oligonucleotide
  Sense strand starting at position 438 of SEQ ID NO: 585365
ccuaucuauuggcuaggga

SEQ ID NO: 634077 - RNA, 19 nt, Artificial Sequence
  Description of Artificial Sequence: Synthetic oligonucleotide
  Antisense strand to SEQ ID NO: 634076
ucccuagccaauagauagg

SEQ ID NO: 634078 - RNA, 19 nt, Artificial Sequence
  Description of Artificial Sequence: Synthetic oligonucleotide
  Sense strand starting at position 589 of SEQ ID NO: 585365
uaaguucuugccucggcau

SEQ ID NO: 634079 - RNA, 19 nt, Artificial Sequence
  Description of Artificial Sequence: Synthetic oligonucleotide
  Antisense strand to SEQ ID NO: 634078
augccgaggcaagaacuua

SEQ ID NO: 634080 - RNA, 19 nt, Artificial Sequence
  Description of Artificial Sequence: Synthetic oligonucleotide
  Sense strand starting at position 652 of SEQ ID NO: 585365
aaaucagaguacuuaggua

SEQ ID NO: 634081 - RNA, 19 nt, Artificial Sequence
  Description of Artificial Sequence: Synthetic oligonucleotide
  Antisense strand to SEQ ID NO: 634080
uaccuaaguacucugauuu

SEQ ID NO: 634082 - RNA, 19 nt, Artificial Sequence
  Description of Artificial Sequence: Synthetic oligonucleotide
  Sense strand starting at position 656 of SEQ ID NO: 585365
cagaguacuuagguaauau

SEQ ID NO: 634083 - RNA, 19 nt, Artificial Sequence
  Description of Artificial Sequence: Synthetic oligonucleotide
  Antisense strand to SEQ ID NO: 634082
auauuaccuaaguacucug

SEQ ID NO: 634084 - RNA, 19 nt, Artificial Sequence
  Description of Artificial Sequence: Synthetic oligonucleotide
  Sense strand starting at position 725 of SEQ ID NO: 585365
cuccuacgucuauaacuga

SEQ ID NO: 634085 - RNA, 19 nt, Artificial Sequence
  Description of Artificial Sequence: Synthetic oligonucleotide
  Antisense strand to SEQ ID NO: 634084
ucaguuauagacguaggag

SEQ ID NO: 634086 - RNA, 19 nt, Artificial Sequence
  Description of Artificial Sequence: Synthetic oligonucleotide
  Sense strand starting at position 815 of SEQ ID NO: 585365
uuggcauaacuuuaguagu

SEQ ID NO: 634087 - RNA, 19 nt, Artificial Sequence
  Description of Artificial Sequence: Synthetic oligonucleotide
  Antisense strand to SEQ ID NO: 634086
acuacuaaaguuaugccaa

SEQ ID NO: 634088 - RNA, 19 nt, Artificial Sequence
  Description of Artificial Sequence: Synthetic oligonucleotide
  Sense strand starting at position 825 of SEQ ID NO: 585365
uuuaguagucucuacaauu

SEQ ID NO: 634089 - RNA, 19 nt, Artificial Sequence
  Description of Artificial Sequence: Synthetic oligonucleotide
  Antisense strand to SEQ ID NO: 634088
aauuguagagacuacuaaa

SEQ ID NO: 634090 - RNA, 19 nt, Artificial Sequence
  Description of Artificial Sequence: Synthetic oligonucleotide
  Sense strand starting at position 872 of SEQ ID NO: 585365
uuggaaagugagcauguau

SEQ ID NO: 634091 - RNA, 19 nt, Artificial Sequence
  Description of Artificial Sequence: Synthetic oligonucleotide
  Antisense strand to SEQ ID NO: 634090
auacaugcucacuuuccaa

SEQ ID NO: 634092 - RNA, 19 nt, Artificial Sequence
  Description of Artificial Sequence: Synthetic oligonucleotide
  Sense strand starting at position 1080 of SEQ ID NO: 585365
agugcacaugaguauguau

SEQ ID NO: 634093 - RNA, 19 nt, Artificial Sequence
  Description of Artificial Sequence: Synthetic oligonucleotide
  Antisense strand to SEQ ID NO: 634092
auacauacucaugugcacu

SEQ ID NO: 634094 - RNA, 19 nt, Artificial Sequence
  Description of Artificial Sequence: Synthetic oligonucleotide
  Sense strand starting at position 1165 of SEQ ID NO: 585365
guuuauccucccgauuaau

SEQ ID NO: 634095 - RNA, 19 nt, Artificial Sequence
  Description of Artificial Sequence: Synthetic oligonucleotide
  Antisense strand to SEQ ID NO: 634094
auuaaucgggaggauaaac

SEQ ID NO: 634096 - RNA, 19 nt, Artificial Sequence
  Description of Artificial Sequence: Synthetic oligonucleotide
  Sense strand starting at position 1186 of SEQ ID NO: 585365
gugacauuccuuggaggga

SEQ ID NO: 634097 - RNA, 19 nt, Artificial Sequence
  Description of Artificial Sequence: Synthetic oligonucleotide
  Antisense strand to SEQ ID NO: 634096
ucccuccaaggaaugucac

SEQ ID NO: 634098 - RNA, 19 nt, Artificial Sequence
  Description of Artificial Sequence: Synthetic oligonucleotide
  Sense strand starting at position 1298 of SEQ ID NO: 585365
aauaguucugaaugaaguu

SEQ ID NO: 634099 - RNA, 19 nt, Artificial Sequence
  Description of Artificial Sequence: Synthetic oligonucleotide
  Antisense strand to SEQ ID NO: 634098
aacuucauucagaacuauu

SEQ ID NO: 634100 - RNA, 19 nt, Artificial Sequence
  Description of Artificial Sequence: Synthetic oligonucleotide
  Sense strand starting at position 1448 of SEQ ID NO: 585365
ccagaagaaucuuaagaaa

SEQ ID NO: 634101 - RNA, 19 nt, Artificial Sequence
  Description of Artificial Sequence: Synthetic oligonucleotide
  Antisense strand to SEQ ID NO: 634100
uuucuuaagauucuucugg

SEQ ID NO: 634102 - RNA, 19 nt, Artificial Sequence
  Description of Artificial Sequence: Synthetic oligonucleotide
  Sense strand starting at position 1555 of SEQ ID NO: 585365
ggcgcucugggaaguagau

SEQ ID NO: 634103 - RNA, 19 nt, Artificial Sequence
  Description of Artificial Sequence: Synthetic oligonucleotide
  Antisense strand to SEQ ID NO: 634102
aucuacuucccagagcgcc

SEQ ID NO: 634104 - RNA, 19 nt, Artificial Sequence
  Description of Artificial Sequence: Synthetic oligonucleotide
  Sense strand starting at position 1670 of SEQ ID NO: 585365
cgucaucgcaggucuuaca

SEQ ID NO: 634105 - RNA, 19 nt, Artificial Sequence
  Description of Artificial Sequence: Synthetic oligonucleotide
  Antisense strand to SEQ ID NO: 634104
uguaagaccugcgaugacg

SEQ ID NO: 634106 - RNA, 19 nt, Artificial Sequence
  Description of Artificial Sequence: Synthetic oligonucleotide
  Sense strand starting at position 2160 of SEQ ID NO: 585365
cccgguugcgcucuaagua

SEQ ID NO: 634107 - RNA, 19 nt, Artificial Sequence
  Description of Artificial Sequence: Synthetic oligonucleotide
  Antisense strand to SEQ ID NO: 634106
uacuuagagcgcaaccggg

SEQ ID NO: 634108 - RNA, 19 nt, Artificial Sequence
  Description of Artificial Sequence: Synthetic oligonucleotide
  Sense strand starting at position 2584 of SEQ ID NO: 585365
cuggaugcccaguauaguu

SEQ ID NO: 634109 - RNA, 19 nt, Artificial Sequence
  Description of Artificial Sequence: Synthetic oligonucleotide
  Antisense strand to SEQ ID NO: 634108
aacuauacugggcauccag

SEQ ID NO: 634110 - RNA, 19 nt, Artificial Sequence
  Description of Artificial Sequence: Synthetic oligonucleotide
  Sense strand starting at position 2591 of SEQ ID NO: 585365
cccaguauaguuugacauu

SEQ ID NO: 634111 - RNA, 19 nt, Artificial Sequence
  Description of Artificial Sequence: Synthetic oligonucleotide
  Antisense strand to SEQ ID NO: 634110
aaugucaaacuauacuggg

SEQ ID NO: 634112 - RNA, 19 nt, Artificial Sequence
  Description of Artificial Sequence: Synthetic oligonucleotide
  Sense strand starting at position 2612 of SEQ ID NO: 585365
caucuugaggaacgugaua

SEQ ID NO: 634113 - RNA, 19 nt, Artificial Sequence
  Description of Artificial Sequence: Synthetic oligonucleotide
  Antisense strand to SEQ ID NO: 634112
uaucacguuccucaagaug

SEQ ID NO: 634114 - RNA, 19 nt, Artificial Sequence
  Description of Artificial Sequence: Synthetic oligonucleotide
  Sense strand starting at position 2614 of SEQ ID NO: 585365
ucuugaggaacgugauaau

SEQ ID NO: 634115 - RNA, 19 nt, Artificial Sequence
  Description of Artificial Sequence: Synthetic oligonucleotide
  Antisense strand to SEQ ID NO: 634114
auuaucacguuccucaaga

SEQ ID NO: 634116 - RNA, 19 nt, Artificial Sequence
  Description of Artificial Sequence: Synthetic oligonucleotide
  Sense strand starting at position 2690 of SEQ ID NO: 585365
ugcgaaagcaucuagggau

SEQ ID NO: 634117 - RNA, 19 nt, Artificial Sequence
  Description of Artificial Sequence: Synthetic oligonucleotide
  Antisense strand to SEQ ID NO: 634116
aucccuagaugcuuucgca

SEQ ID NO: 634118 - RNA, 19 nt, Artificial Sequence
  Description of Artificial Sequence: Synthetic oligonucleotide
  Sense strand starting at position 2750 of SEQ ID NO: 585365
aucucauuacuaggaggua

SEQ ID NO: 634119 - RNA, 19 nt, Artificial Sequence
  Description of Artificial Sequence: Synthetic oligonucleotide
  Antisense strand to SEQ ID NO: 634118
uaccuccuaguaaugagau

SEQ ID NO: 634120 - RNA, 19 nt, Artificial Sequence
  Description of Artificial Sequence: Synthetic oligonucleotide
  Sense strand starting at position 2753 of SEQ ID NO: 585365
ucauuacuaggagguauaa

SEQ ID NO: 634121 - RNA, 19 nt, Artificial Sequence
  Description of Artificial Sequence: Synthetic oligonucleotide
  Antisense strand to SEQ ID NO: 634120
uuauaccuccuaguaauga

SEQ ID NO: 634122 - RNA, 19 nt, Artificial Sequence
  Description of Artificial Sequence: Synthetic oligonucleotide
  Sense strand starting at position 2785 of SEQ ID NO: 585365
ggcugagucacacacuguu

SEQ ID NO: 634123 - RNA, 19 nt, Artificial Sequence
  Description of Artificial Sequence: Synthetic oligonucleotide
  Antisense strand to SEQ ID NO: 634122
aacagugugugacucagcc

SEQ ID NO: 634124 - RNA, 19 nt, Artificial Sequence
  Description of Artificial Sequence: Synthetic oligonucleotide
  Sense strand starting at position 2788 of SEQ ID NO: 585365
ugagucacacacuguugau

SEQ ID NO: 634125 - RNA, 19 nt, Artificial Sequence
  Description of Artificial Sequence: Synthetic oligonucleotide
  Antisense strand to SEQ ID NO: 634124
aucaacagugugugacuca

SEQ ID NO: 634126 - RNA, 19 nt, Artificial Sequence
  Description of Artificial Sequence: Synthetic oligonucleotide
  Sense strand starting at position 2821 of SEQ ID NO: 585365
gcuacucguauuuaccgaa

SEQ ID NO: 634127 - RNA, 19 nt, Artificial Sequence
  Description of Artificial Sequence: Synthetic oligonucleotide
  Antisense strand to SEQ ID NO: 634126
uucgguaaauacgaguagc

SEQ ID NO: 634128 - RNA, 19 nt, Artificial Sequence
  Description of Artificial Sequence: Synthetic oligonucleotide
  Sense strand starting at position 3429 of SEQ ID NO: 585365
aauguuguuuccucugaag

SEQ ID NO: 634129 - RNA, 19 nt, Artificial Sequence
  Description of Artificial Sequence: Synthetic oligonucleotide
  Antisense strand to SEQ ID NO: 634128
cuucagaggaaacaacauu

SEQ ID NO: 634130 - RNA, 19 nt, Artificial Sequence
  Description of Artificial Sequence: Synthetic oligonucleotide
  Sense strand starting at position 3658 of SEQ ID NO: 585365
ccaagacucucccuggaau

SEQ ID NO: 634131 - RNA, 19 nt, Artificial Sequence
  Description of Artificial Sequence: Synthetic oligonucleotide
  Antisense strand to SEQ ID NO: 634130
auuccagggagagucuugg

SEQ ID NO: 634132 - RNA, 19 nt, Artificial Sequence
  Description of Artificial Sequence: Synthetic oligonucleotide
  Sense strand starting at position 3759 of SEQ ID NO: 585365
gcaucaagccaaugaaucu

SEQ ID NO: 634133 - RNA, 19 nt, Artificial Sequence
  Description of Artificial Sequence: Synthetic oligonucleotide
  Antisense strand to SEQ ID NO: 634132
agauucauuggcuugaugc

SEQ ID NO: 634134 - RNA, 19 nt, Artificial Sequence
  Description of Artificial Sequence: Synthetic oligonucleotide
  Sense strand starting at position 3790 of SEQ ID NO: 585365
aacgauccuuggcugauua

SEQ ID NO: 634135 - RNA, 19 nt, Artificial Sequence
  Description of Artificial Sequence: Synthetic oligonucleotide
  Antisense strand to SEQ ID NO: 634134
uaaucagccaaggaucguu

SEQ ID NO: 634136 - RNA, 19 nt, Artificial Sequence
  Description of Artificial Sequence: Synthetic oligonucleotide
  Sense strand starting at position 3850 of SEQ ID NO: 585365
aggcuuagcccagaauguu

SEQ ID NO: 634137 - RNA, 19 nt, Artificial Sequence
  Description of Artificial Sequence: Synthetic oligonucleotide
  Antisense strand to SEQ ID NO: 634136
aacauucugggcuaagccu

SEQ ID NO: 634138 - RNA, 19 nt, Artificial Sequence
  Description of Artificial Sequence: Synthetic oligonucleotide
  Sense strand starting at position 3856 of SEQ ID NO: 585365
agcccagaauguuuaacua

SEQ ID NO: 634139 - RNA, 19 nt, Artificial Sequence
  Description of Artificial Sequence: Synthetic oligonucleotide
  Antisense strand to SEQ ID NO: 634138
uaguuaaacauucugggcu

SEQ ID NO: 634140 - RNA, 19 nt, Artificial Sequence
  Description of Artificial Sequence: Synthetic oligonucleotide
  Sense strand starting at position 3961 of SEQ ID NO: 585365
uuagucuccuucuuuagga

SEQ ID NO: 634141 - RNA, 19 nt, Artificial Sequence
  Description of Artificial Sequence: Synthetic oligonucleotide
  Antisense strand to SEQ ID NO: 634140
uccuaaagaaggagacuaa

SEQ ID NO: 634142 - RNA, 19 nt, Artificial Sequence
  Description of Artificial Sequence: Synthetic oligonucleotide
  Sense strand starting at position 200 of SEQ ID NO: 585366
ugggauagcuuccuggaca

SEQ ID NO: 634143 - RNA, 19 nt, Artificial Sequence
  Description of Artificial Sequence: Synthetic oligonucleotide
  Antisense strand to SEQ ID NO: 634142
uguccaggaagcuauccca

SEQ ID NO: 634144 - RNA, 19 nt, Artificial Sequence
  Description of Artificial Sequence: Synthetic oligonucleotide
  Sense strand starting at position 319 of SEQ ID NO: 585366
ccuucuuaacuguauguau

SEQ ID NO: 634145 - RNA, 19 nt, Artificial Sequence
  Description of Artificial Sequence: Synthetic oligonucleotide
  Antisense strand to SEQ ID NO: 634144
auacauacaguuaagaagg

SEQ ID NO: 634146 - RNA, 19 nt, Artificial Sequence
  Description of Artificial Sequence: Synthetic oligonucleotide
  Sense strand starting at position 322 of SEQ ID NO: 585366
ucuuaacuguauguauaga

SEQ ID NO: 634147 - RNA, 19 nt, Artificial Sequence
  Description of Artificial Sequence: Synthetic oligonucleotide
  Antisense strand to SEQ ID NO: 634146
ucuauacauacaguuaaga

SEQ ID NO: 634148 - RNA, 19 nt, Artificial Sequence
  Description of Artificial Sequence: Synthetic oligonucleotide
  Sense strand starting at position 332 of SEQ ID NO: 585366
auguauagaucccauuuau

SEQ ID NO: 634149 - RNA, 19 nt, Artificial Sequence
  Description of Artificial Sequence: Synthetic oligonucleotide
  Antisense strand to SEQ ID NO: 634148
auaaaugggaucuauacau

SEQ ID NO: 634150 - RNA, 19 nt, Artificial Sequence
  Description of Artificial Sequence: Synthetic oligonucleotide
  Sense strand starting at position 504 of SEQ ID NO: 585366
cacaguuuccaagaacgua

SEQ ID NO: 634151 - RNA, 19 nt, Artificial Sequence
  Description of Artificial Sequence: Synthetic oligonucleotide
  Antisense strand to SEQ ID NO: 634150
uacguucuuggaaacugug

SEQ ID NO: 634152 - RNA, 19 nt, Artificial Sequence
  Description of Artificial Sequence: Synthetic oligonucleotide
  Sense strand starting at position 518 of SEQ ID NO: 585366
acguaucaagaauguuaag

SEQ ID NO: 634153 - RNA, 19 nt, Artificial Sequence
  Description of Artificial Sequence: Synthetic oligonucleotide
  Antisense strand to SEQ ID NO: 634152
cuuaacauucuugauacgu

SEQ ID NO: 634154 - RNA, 19 nt, Artificial Sequence
  Description of Artificial Sequence: Synthetic oligonucleotide
  Sense strand starting at position 561 of SEQ ID NO: 585366
agagaaugcuuccuaucua

SEQ ID NO: 634155 - RNA, 19 nt, Artificial Sequence
  Description of Artificial Sequence: Synthetic oligonucleotide
  Antisense strand to SEQ ID NO: 634154
uagauaggaagcauucucu

SEQ ID NO: 634156 - RNA, 19 nt, Artificial Sequence
  Description of Artificial Sequence: Synthetic oligonucleotide
  Sense strand starting at position 572 of SEQ ID NO: 585366
ccuaucuauuggcuaggga

SEQ ID NO: 634157 - RNA, 19 nt, Artificial Sequence
  Description of Artificial Sequence: Synthetic oligonucleotide
  Antisense strand to SEQ ID NO: 634156
ucccuagccaauagauagg

SEQ ID NO: 634158 - RNA, 19 nt, Artificial Sequence
  Description of Artificial Sequence: Synthetic oligonucleotide
  Sense strand starting at position 723 of SEQ ID NO: 585366
uaaguucuugccucggcau

SEQ ID NO: 634159 - RNA, 19 nt, Artificial Sequence
  Description of Artificial Sequence: Synthetic oligonucleotide
  Antisense strand to SEQ ID NO: 634158
augccgaggcaagaacuua

SEQ ID NO: 634160 - RNA, 19 nt, Artificial Sequence
  Description of Artificial Sequence: Synthetic oligonucleotide
  Sense strand starting at position 786 of SEQ ID NO: 585366
aaaucagaguacuuaggua

SEQ ID NO: 634161 - RNA, 19 nt, Artificial Sequence
  Description of Artificial Sequence: Synthetic oligonucleotide
  Antisense strand to SEQ ID NO: 634160
uaccuaaguacucugauuu

SEQ ID NO: 634162 - RNA, 19 nt, Artificial Sequence
  Description of Artificial Sequence: Synthetic oligonucleotide
  Sense strand starting at position 790 of SEQ ID NO: 585366
cagaguacuuagguaauau

SEQ ID NO: 634163 - RNA, 19 nt, Artificial Sequence
  Description of Artificial Sequence: Synthetic oligonucleotide
  Antisense strand to SEQ ID NO: 634162
auauuaccuaaguacucug

SEQ ID NO: 634164 - RNA, 19 nt, Artificial Sequence
  Description of Artificial Sequence: Synthetic oligonucleotide
  Sense strand starting at position 859 of SEQ ID NO: 585366
cuccuacgucuauaacuga

SEQ ID NO: 634165 - RNA, 19 nt, Artificial Sequence
  Description of Artificial Sequence: Synthetic oligonucleotide
  Antisense strand to SEQ ID NO: 634164
ucaguuauagacguaggag

SEQ ID NO: 634166 - RNA, 19 nt, Artificial Sequence
  Description of Artificial Sequence: Synthetic oligonucleotide
  Sense strand starting at position 949 of SEQ ID NO: 585366
uuggcauaacuuuaguagu

SEQ ID NO: 634167 - RNA, 19 nt, Artificial Sequence
  Description of Artificial Sequence: Synthetic oligonucleotide
  Antisense strand to SEQ ID NO: 634166
acuacuaaaguuaugccaa

SEQ ID NO: 634168 - RNA, 19 nt, Artificial Sequence
  Description of Artificial Sequence: Synthetic oligonucleotide
  Sense strand starting at position 959 of SEQ ID NO: 585366
uuuaguagucucuacaauu

SEQ ID NO: 634169 - RNA, 19 nt, Artificial Sequence
  Description of Artificial Sequence: Synthetic oligonucleotide
  Antisense strand to SEQ ID NO: 634168
aauuguagagacuacuaaa

SEQ ID NO: 634170 - RNA, 19 nt, Artificial Sequence
  Description of Artificial Sequence: Synthetic oligonucleotide
  Sense strand starting at position 1006 of SEQ ID NO: 585366
uuggaaagugagcauguau

SEQ ID NO: 634171 - RNA, 19 nt, Artificial Sequence
  Description of Artificial Sequence: Synthetic oligonucleotide
  Antisense strand to SEQ ID NO: 634170
auacaugcucacuuuccaa

SEQ ID NO: 634172 - RNA, 19 nt, Artificial Sequence
  Description of Artificial Sequence: Synthetic oligonucleotide
  Sense strand starting at position 1214 of SEQ ID NO: 585366
agugcacaugaguauguau

SEQ ID NO: 634173 - RNA, 19 nt, Artificial Sequence
  Description of Artificial Sequence: Synthetic oligonucleotide
  Antisense strand to SEQ ID NO: 634172
auacauacucaugugcacu

SEQ ID NO: 634174 - RNA, 19 nt, Artificial Sequence
  Description of Artificial Sequence: Synthetic oligonucleotide
  Sense strand starting at position 1299 of SEQ ID NO: 585366
guuuauccucccgauuaau

SEQ ID NO: 634175 - RNA, 19 nt, Artificial Sequence
  Description of Artificial Sequence: Synthetic oligonucleotide
  Antisense strand to SEQ ID NO: 634174
auuaaucgggaggauaaac

SEQ ID NO: 634176 - RNA, 19 nt, Artificial Sequence
  Description of Artificial Sequence: Synthetic oligonucleotide
  Sense strand starting at position 1320 of SEQ ID NO: 585366
gugacauuccuuggaggga

SEQ ID NO: 634177 - RNA, 19 nt, Artificial Sequence
  Description of Artificial Sequence: Synthetic oligonucleotide
  Antisense strand to SEQ ID NO: 634176
ucccuccaaggaaugucac

SEQ ID NO: 634178 - RNA, 19 nt, Artificial Sequence
  Description of Artificial Sequence: Synthetic oligonucleotide
  Sense strand starting at position 1432 of SEQ ID NO: 585366
aauaguucugaaugaaguu

SEQ ID NO: 634179 - RNA, 19 nt, Artificial Sequence
  Description of Artificial Sequence: Synthetic oligonucleotide
  Antisense strand to SEQ ID NO: 634178
aacuucauucagaacuauu

SEQ ID NO: 634180 - RNA, 19 nt, Artificial Sequence
  Description of Artificial Sequence: Synthetic oligonucleotide
  Sense strand starting at position 1582 of SEQ ID NO: 585366
ccagaagaaucuuaagaaa

SEQ ID NO: 634181 - RNA, 19 nt, Artificial Sequence
  Description of Artificial Sequence: Synthetic oligonucleotide
  Antisense strand to SEQ ID NO: 634180
uuucuuaagauucuucugg

SEQ ID NO: 634182 - RNA, 19 nt, Artificial Sequence
  Description of Artificial Sequence: Synthetic oligonucleotide
  Sense strand starting at position 1689 of SEQ ID NO: 585366
ggcgcucugggaaguagau

SEQ ID NO: 634183 - RNA, 19 nt, Artificial Sequence
  Description of Artificial Sequence: Synthetic oligonucleotide
  Antisense strand to SEQ ID NO: 634182
aucuacuucccagagcgcc

SEQ ID NO: 634184 - RNA, 19 nt, Artificial Sequence
  Description of Artificial Sequence: Synthetic oligonucleotide
  Sense strand starting at position 1804 of SEQ ID NO: 585366
cgucaucgcaggucuuaca

SEQ ID NO: 634185 - RNA, 19 nt, Artificial Sequence
  Description of Artificial Sequence: Synthetic oligonucleotide
  Antisense strand to SEQ ID NO: 634184
uguaagaccugcgaugacg

SEQ ID NO: 634186 - RNA, 19 nt, Artificial Sequence
  Description of Artificial Sequence: Synthetic oligonucleotide
  Sense strand starting at position 2294 of SEQ ID NO: 585366
cccgguugcgcucuaagua

SEQ ID NO: 634187 - RNA, 19 nt, Artificial Sequence
  Description of Artificial Sequence: Synthetic oligonucleotide
  Antisense strand to SEQ ID NO: 634186
uacuuagagcgcaaccggg

SEQ ID NO: 634188 - RNA, 19 nt, Artificial Sequence
  Description of Artificial Sequence: Synthetic oligonucleotide
  Sense strand starting at position 2586 of SEQ ID NO: 585366
ccauucuuccagugggagu

SEQ ID NO: 634189 - RNA, 19 nt, Artificial Sequence
  Description of Artificial Sequence: Synthetic oligonucleotide
  Antisense strand to SEQ ID NO: 634188
acucccacuggaagaaugg

SEQ ID NO: 634190 - RNA, 19 nt, Artificial Sequence
  Description of Artificial Sequence: Synthetic oligonucleotide
  Sense strand starting at position 2647 of SEQ ID NO: 585366
ggugcuuucugacugagac

SEQ ID NO: 634191 - RNA, 19 nt, Artificial Sequence
  Description of Artificial Sequence: Synthetic oligonucleotide
  Antisense strand to SEQ ID NO: 634190
gucucagucagaaagcacc

SEQ ID NO: 634192 - RNA, 19 nt, Artificial Sequence
  Description of Artificial Sequence: Synthetic oligonucleotide
  Sense strand starting at position 2718 of SEQ ID NO: 585366
cuggaugcccaguauaguu

SEQ ID NO: 634193 - RNA, 19 nt, Artificial Sequence
  Description of Artificial Sequence: Synthetic oligonucleotide
  Antisense strand to SEQ ID NO: 634192
aacuauacugggcauccag

SEQ ID NO: 634194 - RNA, 19 nt, Artificial Sequence
  Description of Artificial Sequence: Synthetic oligonucleotide
  Sense strand starting at position 2725 of SEQ ID NO: 585366
cccaguauaguuugacauu

SEQ ID NO: 634195 - RNA, 19 nt, Artificial Sequence
  Description of Artificial Sequence: Synthetic oligonucleotide
  Antisense strand to SEQ ID NO: 634194
aaugucaaacuauacuggg

SEQ ID NO: 634196 - RNA, 19 nt, Artificial Sequence
  Description of Artificial Sequence: Synthetic oligonucleotide
  Sense strand starting at position 2746 of SEQ ID NO: 585366
caucuugaggaacgugaua

SEQ ID NO: 634197 - RNA, 19 nt, Artificial Sequence
  Description of Artificial Sequence: Synthetic oligonucleotide
  Antisense strand to SEQ ID NO: 634196
uaucacguuccucaagaug

SEQ ID NO: 634198 - RNA, 19 nt, Artificial Sequence
  Description of Artificial Sequence: Synthetic oligonucleotide
  Sense strand starting at position 2748 of SEQ ID NO: 585366
ucuugaggaacgugauaau

SEQ ID NO: 634199 - RNA, 19 nt, Artificial Sequence
  Description of Artificial Sequence: Synthetic oligonucleotide
  Antisense strand to SEQ ID NO: 634198
auuaucacguuccucaaga

SEQ ID NO: 634200 - RNA, 19 nt, Artificial Sequence
  Description of Artificial Sequence: Synthetic oligonucleotide
  Sense strand starting at position 2824 of SEQ ID NO: 585366
ugcgaaagcaucuagggau

SEQ ID NO: 634201 - RNA, 19 nt, Artificial Sequence
  Description of Artificial Sequence: Synthetic oligonucleotide
  Antisense strand to SEQ ID NO: 634200
aucccuagaugcuuucgca

SEQ ID NO: 634202 - RNA, 19 nt, Artificial Sequence
  Description of Artificial Sequence: Synthetic oligonucleotide
  Sense strand starting at position 2884 of SEQ ID NO: 585366
aucucauuacuaggaggua

SEQ ID NO: 634203 - RNA, 19 nt, Artificial Sequence
  Description of Artificial Sequence: Synthetic oligonucleotide
  Antisense strand to SEQ ID NO: 634202
uaccuccuaguaaugagau

SEQ ID NO: 634204 - RNA, 19 nt, Artificial Sequence
  Description of Artificial Sequence: Synthetic oligonucleotide
  Sense strand starting at position 2887 of SEQ ID NO: 585366
ucauuacuaggagguauaa

SEQ ID NO: 634205 - RNA, 19 nt, Artificial Sequence
  Description of Artificial Sequence: Synthetic oligonucleotide
  Antisense strand to SEQ ID NO: 634204
uuauaccuccuaguaauga

SEQ ID NO: 634206 - RNA, 19 nt, Artificial Sequence
  Description of Artificial Sequence: Synthetic oligonucleotide
  Sense strand starting at position 2919 of SEQ ID NO: 585366
ggcugagucacacacuguu

SEQ ID NO: 634207 - RNA, 19 nt, Artificial Sequence
  Description of Artificial Sequence: Synthetic oligonucleotide
  Antisense strand to SEQ ID NO: 634206
aacagugugugacucagcc

SEQ ID NO: 634208 - RNA, 19 nt, Artificial Sequence
  Description of Artificial Sequence: Synthetic oligonucleotide
  Sense strand starting at position 2922 of SEQ ID NO: 585366
ugagucacacacuguugau

SEQ ID NO: 634209 - RNA, 19 nt, Artificial Sequence
  Description of Artificial Sequence: Synthetic oligonucleotide
  Antisense strand to SEQ ID NO: 634208
aucaacagugugugacuca

SEQ ID NO: 634210 - RNA, 19 nt, Artificial Sequence
  Description of Artificial Sequence: Synthetic oligonucleotide
  Sense strand starting at position 2940 of SEQ ID NO: 585366
ugaauaagcuucuuggcua

SEQ ID NO: 634211 - RNA, 19 nt, Artificial Sequence
  Description of Artificial Sequence: Synthetic oligonucleotide
  Antisense strand to SEQ ID NO: 634210
uagccaagaagcuuauuca

SEQ ID NO: 634212 - RNA, 19 nt, Artificial Sequence
  Description of Artificial Sequence: Synthetic oligonucleotide
  Sense strand starting at position 2955 of SEQ ID NO: 585366
gcuacucguauuuaccgaa

SEQ ID NO: 634213 - RNA, 19 nt, Artificial Sequence
  Description of Artificial Sequence: Synthetic oligonucleotide
  Antisense strand to SEQ ID NO: 634212
uucgguaaauacgaguagc

SEQ ID NO: 634214 - RNA, 19 nt, Artificial Sequence
  Description of Artificial Sequence: Synthetic oligonucleotide
  Sense strand starting at position 3563 of SEQ ID NO: 585366
aauguuguuuccucugaag

SEQ ID NO: 634215 - RNA, 19 nt, Artificial Sequence
  Description of Artificial Sequence: Synthetic oligonucleotide
  Antisense strand to SEQ ID NO: 634214
cuucagaggaaacaacauu

SEQ ID NO: 634216 - RNA, 19 nt, Artificial Sequence
  Description of Artificial Sequence: Synthetic oligonucleotide
  Sense strand starting at position 3792 of SEQ ID NO: 585366
ccaagacucucccuggaau

SEQ ID NO: 634217 - RNA, 19 nt, Artificial Sequence
  Description of Artificial Sequence: Synthetic oligonucleotide
  Antisense strand to SEQ ID NO: 634216
auuccagggagagucuugg

SEQ ID NO: 634218 - RNA, 19 nt, Artificial Sequence
  Description of Artificial Sequence: Synthetic oligonucleotide
  Sense strand starting at position 3893 of SEQ ID NO: 585366
gcaucaagccaaugaaucu

SEQ ID NO: 634219 - RNA, 19 nt, Artificial Sequence
  Description of Artificial Sequence: Synthetic oligonucleotide
  Antisense strand to SEQ ID NO: 634218
agauucauuggcuugaugc

SEQ ID NO: 634220 - RNA, 19 nt, Artificial Sequence
  Description of Artificial Sequence: Synthetic oligonucleotide
  Sense strand starting at position 3924 of SEQ ID NO: 585366
aacgauccuuggcugauua

SEQ ID NO: 634221 - RNA, 19 nt, Artificial Sequence
  Description of Artificial Sequence: Synthetic oligonucleotide
  Antisense strand to SEQ ID NO: 634220
uaaucagccaaggaucguu

SEQ ID NO: 634222 - RNA, 19 nt, Artificial Sequence
  Description of Artificial Sequence: Synthetic oligonucleotide
  Sense strand starting at position 57 of SEQ ID NO: 585367
cucaaauguguguauggaa

SEQ ID NO: 634223 - RNA, 19 nt, Artificial Sequence
  Description of Artificial Sequence: Synthetic oligonucleotide
  Antisense strand to SEQ ID NO: 634222
uuccauacacacauuugag

SEQ ID NO: 634224 - RNA, 19 nt, Artificial Sequence
  Description of Artificial Sequence: Synthetic oligonucleotide
  Sense strand starting at position 251 of SEQ ID NO: 585367
ucgcuaagucgguuuauau

SEQ ID NO: 634225 - RNA, 19 nt, Artificial Sequence
  Description of Artificial Sequence: Synthetic oligonucleotide
  Antisense strand to SEQ ID NO: 634224
auauaaaccgacuuagcga

SEQ ID NO: 634226 - RNA, 19 nt, Artificial Sequence
  Description of Artificial Sequence: Synthetic oligonucleotide
  Sense strand starting at position 337 of SEQ ID NO: 585367
ggcaaauugugaccuggaa

SEQ ID NO: 634227 - RNA, 19 nt, Artificial Sequence
  Description of Artificial Sequence: Synthetic oligonucleotide
  Antisense strand to SEQ ID NO: 634226
uuccaggucacaauuugcc

SEQ ID NO: 634228 - RNA, 19 nt, Artificial Sequence
  Description of Artificial Sequence: Synthetic oligonucleotide
  Sense strand starting at position 364 of SEQ ID NO: 585367
uuggcaacucuagagaugu

SEQ ID NO: 634229 - RNA, 19 nt, Artificial Sequence
  Description of Artificial Sequence: Synthetic oligonucleotide
  Antisense strand to SEQ ID NO: 634228
acaucucuagaguugccaa

SEQ ID NO: 634230 - RNA, 19 nt, Artificial Sequence
  Description of Artificial Sequence: Synthetic oligonucleotide
  Sense strand starting at position 400 of SEQ ID NO: 585367
agauaaguagaauguccuu

SEQ ID NO: 634231 - RNA, 19 nt, Artificial Sequence
  Description of Artificial Sequence: Synthetic oligonucleotide
  Antisense strand to SEQ ID NO: 634230
aaggacauucuacuuaucu

SEQ ID NO: 634232 - RNA, 19 nt, Artificial Sequence
  Description of Artificial Sequence: Synthetic oligonucleotide
  Sense strand starting at position 405 of SEQ ID NO: 585367
aguagaauguccuuaacac

SEQ ID NO: 634233 - RNA, 19 nt, Artificial Sequence
  Description of Artificial Sequence: Synthetic oligonucleotide
  Antisense strand to SEQ ID NO: 634232
guguuaaggacauucuacu

SEQ ID NO: 634234 - RNA, 19 nt, Artificial Sequence
  Description of Artificial Sequence: Synthetic oligonucleotide
  Sense strand starting at position 406 of SEQ ID NO: 585367
guagaauguccuuaacacu

SEQ ID NO: 634235 - RNA, 19 nt, Artificial Sequence
  Description of Artificial Sequence: Synthetic oligonucleotide
  Antisense strand to SEQ ID NO: 634234
aguguuaaggacauucuac

SEQ ID NO: 634236 - RNA, 19 nt, Artificial Sequence
  Description of Artificial Sequence: Synthetic oligonucleotide
  Sense strand starting at position 568 of SEQ ID NO: 585367
acuugcaugccugaaacuu

SEQ ID NO: 634237 - RNA, 19 nt, Artificial Sequence
  Description of Artificial Sequence: Synthetic oligonucleotide
  Antisense strand to SEQ ID NO: 634236
aaguuucaggcaugcaagu

SEQ ID NO: 634238 - RNA, 19 nt, Artificial Sequence
  Description of Artificial Sequence: Synthetic oligonucleotide
  Sense strand starting at position 938 of SEQ ID NO: 585367
uggguucaguagcuaagaa

SEQ ID NO: 634239 - RNA, 19 nt, Artificial Sequence
  Description of Artificial Sequence: Synthetic oligonucleotide
  Antisense strand to SEQ ID NO: 634238
uucuuagcuacugaaccca

SEQ ID NO: 634240 - RNA, 19 nt, Artificial Sequence
  Description of Artificial Sequence: Synthetic oligonucleotide
  Sense strand starting at position 945 of SEQ ID NO: 585367
aguagcuaagaagguauua

SEQ ID NO: 634241 - RNA, 19 nt, Artificial Sequence
  Description of Artificial Sequence: Synthetic oligonucleotide
  Antisense strand to SEQ ID NO: 634240
uaauaccuucuuagcuacu

SEQ ID NO: 634242 - RNA, 19 nt, Artificial Sequence
  Description of Artificial Sequence: Synthetic oligonucleotide
  Sense strand starting at position 981 of SEQ ID NO: 585367
uacgcugugcuguuagaca

SEQ ID NO: 634243 - RNA, 19 nt, Artificial Sequence
  Description of Artificial Sequence: Synthetic oligonucleotide
  Antisense strand to SEQ ID NO: 634242
ugucuaacagcacagcgua

SEQ ID NO: 634244 - RNA, 19 nt, Artificial Sequence
  Description of Artificial Sequence: Synthetic oligonucleotide
  Sense strand starting at position 1009 of SEQ ID NO: 585367
uccaguuacuuacuugaga

SEQ ID NO: 634245 - RNA, 19 nt, Artificial Sequence
  Description of Artificial Sequence: Synthetic oligonucleotide
  Antisense strand to SEQ ID NO: 634244
ucucaaguaaguaacugga

SEQ ID NO: 634246 - RNA, 19 nt, Artificial Sequence
  Description of Artificial Sequence: Synthetic oligonucleotide
  Sense strand starting at position 1166 of SEQ ID NO: 585367
acuagauaaccugggcaga

SEQ ID NO: 634247 - RNA, 19 nt, Artificial Sequence
  Description of Artificial Sequence: Synthetic oligonucleotide
  Antisense strand to SEQ ID NO: 634246
ucugcccagguuaucuagu

SEQ ID NO: 634248 - RNA, 19 nt, Artificial Sequence
  Description of Artificial Sequence: Synthetic oligonucleotide
  Sense strand starting at position 1211 of SEQ ID NO: 585367
agugcagauuaccuuagau

SEQ ID NO: 634249 - RNA, 19 nt, Artificial Sequence
  Description of Artificial Sequence: Synthetic oligonucleotide
  Antisense strand to SEQ ID NO: 634248
aucuaagguaaucugcacu

SEQ ID NO: 634250 - RNA, 19 nt, Artificial Sequence
  Description of Artificial Sequence: Synthetic oligonucleotide
  Sense strand starting at position 1213 of SEQ ID NO: 585367
ugcagauuaccuuagauau

SEQ ID NO: 634251 - RNA, 19 nt, Artificial Sequence
  Description of Artificial Sequence: Synthetic oligonucleotide
  Antisense strand to SEQ ID NO: 634250
auaucuaagguaaucugca

SEQ ID NO: 634252 - RNA, 19 nt, Artificial Sequence
  Description of Artificial Sequence: Synthetic oligonucleotide
  Sense strand starting at position 1457 of SEQ ID NO: 585367
uaaccauuaguaugugaug

SEQ ID NO: 634253 - RNA, 19 nt, Artificial Sequence
  Description of Artificial Sequence: Synthetic oligonucleotide
  Antisense strand to SEQ ID NO: 634252
caucacauacuaaugguua

SEQ ID NO: 634254 - RNA, 19 nt, Artificial Sequence
  Description of Artificial Sequence: Synthetic oligonucleotide
  Sense strand starting at position 1458 of SEQ ID NO: 585367
aaccauuaguaugugauga

SEQ ID NO: 634255 - RNA, 19 nt, Artificial Sequence
  Description of Artificial Sequence: Synthetic oligonucleotide
  Antisense strand to SEQ ID NO: 634254
ucaucacauacuaaugguu

SEQ ID NO: 634256 - RNA, 19 nt, Artificial Sequence
  Description of Artificial Sequence: Synthetic oligonucleotide
  Sense strand starting at position 1459 of SEQ ID NO: 585367
accauuaguaugugaugag

SEQ ID NO: 634257 - RNA, 19 nt, Artificial Sequence
  Description of Artificial Sequence: Synthetic oligonucleotide
  Antisense strand to SEQ ID NO: 634256
cucaucacauacuaauggu

SEQ ID NO: 634258 - RNA, 19 nt, Artificial Sequence
  Description of Artificial Sequence: Synthetic oligonucleotide
  Sense strand starting at position 1498 of SEQ ID NO: 585367
ucugacuauccauaucagu

SEQ ID NO: 634259 - RNA, 19 nt, Artificial Sequence
  Description of Artificial Sequence: Synthetic oligonucleotide
  Antisense strand to SEQ ID NO: 634258
acugauauggauagucaga

SEQ ID NO: 634260 - RNA, 19 nt, Artificial Sequence
  Description of Artificial Sequence: Synthetic oligonucleotide
  Sense strand starting at position 1653 of SEQ ID NO: 585367
cucccagcugcagauauua

SEQ ID NO: 634261 - RNA, 19 nt, Artificial Sequence
  Description of Artificial Sequence: Synthetic oligonucleotide
  Antisense strand to SEQ ID NO: 634260
uaauaucugcagcugggag

SEQ ID NO: 634262 - RNA, 19 nt, Artificial Sequence
  Description of Artificial Sequence: Synthetic oligonucleotide
  Sense strand starting at position 1754 of SEQ ID NO: 585367
ccaauaugugguggagaaa

SEQ ID NO: 634263 - RNA, 19 nt, Artificial Sequence
  Description of Artificial Sequence: Synthetic oligonucleotide
  Antisense strand to SEQ ID NO: 634262
uuucuccaccacauauugg

SEQ ID NO: 634264 - RNA, 19 nt, Artificial Sequence
  Description of Artificial Sequence: Synthetic oligonucleotide
  Sense strand starting at position 1813 of SEQ ID NO: 585367
acaccuuaagaaugaguuu

SEQ ID NO: 634265 - RNA, 19 nt, Artificial Sequence
  Description of Artificial Sequence: Synthetic oligonucleotide
  Antisense strand to SEQ ID NO: 634264
aaacucauucuuaaggugu

SEQ ID NO: 634266 - RNA, 19 nt, Artificial Sequence
  Description of Artificial Sequence: Synthetic oligonucleotide
  Sense strand starting at position 1869 of SEQ ID NO: 585367
aggucaaaugcuuacugaa

SEQ ID NO: 634267 - RNA, 19 nt, Artificial Sequence
  Description of Artificial Sequence: Synthetic oligonucleotide
  Antisense strand to SEQ ID NO: 634266
uucaguaagcauuugaccu

SEQ ID NO: 634268 - RNA, 19 nt, Artificial Sequence
  Description of Artificial Sequence: Synthetic oligonucleotide
  Sense strand starting at position 1871 of SEQ ID NO: 585367
gucaaaugcuuacugaaug

SEQ ID NO: 634269 - RNA, 19 nt, Artificial Sequence
  Description of Artificial Sequence: Synthetic oligonucleotide
  Antisense strand to SEQ ID NO: 634268
cauucaguaagcauuugac

SEQ ID NO: 634270 - RNA, 19 nt, Artificial Sequence
  Description of Artificial Sequence: Synthetic oligonucleotide
  Sense strand starting at position 1876 of SEQ ID NO: 585367
augcuuacugaaugguaga

SEQ ID NO: 634271 - RNA, 19 nt, Artificial Sequence
  Description of Artificial Sequence: Synthetic oligonucleotide
  Antisense strand to SEQ ID NO: 634270
ucuaccauucaguaagcau

SEQ ID NO: 634272 - RNA, 19 nt, Artificial Sequence
  Description of Artificial Sequence: Synthetic oligonucleotide
  Sense strand starting at position 2042 of SEQ ID NO: 585367
gguggaaucuucccagguu

SEQ ID NO: 634273 - RNA, 19 nt, Artificial Sequence
  Description of Artificial Sequence: Synthetic oligonucleotide
  Antisense strand to SEQ ID NO: 634272
aaccugggaagauuccacc

SEQ ID NO: 634274 - RNA, 19 nt, Artificial Sequence
  Description of Artificial Sequence: Synthetic oligonucleotide
  Sense strand starting at position 2045 of SEQ ID NO: 585367
ggaaucuucccagguucua

SEQ ID NO: 634275 - RNA, 19 nt, Artificial Sequence
  Description of Artificial Sequence: Synthetic oligonucleotide
  Antisense strand to SEQ ID NO: 634274
uagaaccugggaagauucc

SEQ ID NO: 634276 - RNA, 19 nt, Artificial Sequence
  Description of Artificial Sequence: Synthetic oligonucleotide
  Sense strand starting at position 2055 of SEQ ID NO: 585367
cagguucuauggguuauua

SEQ ID NO: 634277 - RNA, 19 nt, Artificial Sequence
  Description of Artificial Sequence: Synthetic oligonucleotide
  Antisense strand to SEQ ID NO: 634276
uaauaacccauagaaccug

SEQ ID NO: 634278 - RNA, 19 nt, Artificial Sequence
  Description of Artificial Sequence: Synthetic oligonucleotide
  Sense strand starting at position 2057 of SEQ ID NO: 585367
gguucuauggguuauuaca

SEQ ID NO: 634279 - RNA, 19 nt, Artificial Sequence
  Description of Artificial Sequence: Synthetic oligonucleotide
  Antisense strand to SEQ ID NO: 634278
uguaauaacccauagaacc

SEQ ID NO: 634280 - RNA, 19 nt, Artificial Sequence
  Description of Artificial Sequence: Synthetic oligonucleotide
  Sense strand starting at position 2260 of SEQ ID NO: 585367
guuugugacgucgugcaau

SEQ ID NO: 634281 - RNA, 19 nt, Artificial Sequence
  Description of Artificial Sequence: Synthetic oligonucleotide
  Antisense strand to SEQ ID NO: 634280
auugcacgacgucacaaac

SEQ ID NO: 634282 - RNA, 19 nt, Artificial Sequence
  Description of Artificial Sequence: Synthetic oligonucleotide
  Sense strand starting at position 2309 of SEQ ID NO: 585367
ccuguaaggaccugcugaa

SEQ ID NO: 634283 - RNA, 19 nt, Artificial Sequence
  Description of Artificial Sequence: Synthetic oligonucleotide
  Antisense strand to SEQ ID NO: 634282
uucagcagguccuuacagg

SEQ ID NO: 634284 - RNA, 19 nt, Artificial Sequence
  Description of Artificial Sequence: Synthetic oligonucleotide
  Sense strand starting at position 2344 of SEQ ID NO: 585367
ccuaguggucagggaggaa

SEQ ID NO: 634285 - RNA, 19 nt, Artificial Sequence
  Description of Artificial Sequence: Synthetic oligonucleotide
  Antisense strand to SEQ ID NO: 634284
uuccucccugaccacuagg

SEQ ID NO: 634286 - RNA, 19 nt, Artificial Sequence
  Description of Artificial Sequence: Synthetic oligonucleotide
  Sense strand starting at position 2730 of SEQ ID NO: 585367
caacguauugagugacaag

SEQ ID NO: 634287 - RNA, 19 nt, Artificial Sequence
  Description of Artificial Sequence: Synthetic oligonucleotide
  Antisense strand to SEQ ID NO: 634286
cuugucacucaauacguug

SEQ ID NO: 634288 - RNA, 19 nt, Artificial Sequence
  Description of Artificial Sequence: Synthetic oligonucleotide
  Sense strand starting at position 2853 of SEQ ID NO: 585367
gauugaguguaauccuaag

SEQ ID NO: 634289 - RNA, 19 nt, Artificial Sequence
  Description of Artificial Sequence: Synthetic oligonucleotide
  Antisense strand to SEQ ID NO: 634288
cuuaggauuacacucaauc

SEQ ID NO: 634290 - RNA, 19 nt, Artificial Sequence
  Description of Artificial Sequence: Synthetic oligonucleotide
  Sense strand starting at position 3163 of SEQ ID NO: 585367
uugcgauauguccagauac

SEQ ID NO: 634291 - RNA, 19 nt, Artificial Sequence
  Description of Artificial Sequence: Synthetic oligonucleotide
  Antisense strand to SEQ ID NO: 634290
guaucuggacauaucgcaa

SEQ ID NO: 634292 - RNA, 19 nt, Artificial Sequence
  Description of Artificial Sequence: Synthetic oligonucleotide
  Sense strand starting at position 3165 of SEQ ID NO: 585367
gcgauauguccagauacua

SEQ ID NO: 634293 - RNA, 19 nt, Artificial Sequence
  Description of Artificial Sequence: Synthetic oligonucleotide
  Antisense strand to SEQ ID NO: 634292
uaguaucuggacauaucgc

SEQ ID NO: 634294 - RNA, 19 nt, Artificial Sequence
  Description of Artificial Sequence: Synthetic oligonucleotide
  Sense strand starting at position 3230 of SEQ ID NO: 585367
cugagugcuccagagggau

SEQ ID NO: 634295 - RNA, 19 nt, Artificial Sequence
  Description of Artificial Sequence: Synthetic oligonucleotide
  Antisense strand to SEQ ID NO: 634294
aucccucuggagcacucag

SEQ ID NO: 634296 - RNA, 19 nt, Artificial Sequence
  Description of Artificial Sequence: Synthetic oligonucleotide
  Sense strand starting at position 3232 of SEQ ID NO: 585367
gagugcuccagagggauca

SEQ ID NO: 634297 - RNA, 19 nt, Artificial Sequence
  Description of Artificial Sequence: Synthetic oligonucleotide
  Antisense strand to SEQ ID NO: 634296
ugaucccucuggagcacuc

SEQ ID NO: 634298 - RNA, 19 nt, Artificial Sequence
  Description of Artificial Sequence: Synthetic oligonucleotide
  Sense strand starting at position 3662 of SEQ ID NO: 585367
cccaaagauccugggccaa

SEQ ID NO: 634299 - RNA, 19 nt, Artificial Sequence
  Description of Artificial Sequence: Synthetic oligonucleotide
  Antisense strand to SEQ ID NO: 634298
uuggcccaggaucuuuggg

SEQ ID NO: 634300 - RNA, 19 nt, Artificial Sequence
  Description of Artificial Sequence: Synthetic oligonucleotide
  Sense strand starting at position 3977 of SEQ ID NO: 585367
aaauaugauuugugaaagg

SEQ ID NO: 634301 - RNA, 19 nt, Artificial Sequence
  Description of Artificial Sequence: Synthetic oligonucleotide
  Antisense strand to SEQ ID NO: 634300
ccuuucacaaaucauauuu

SEQ ID NO: 634302 - RNA, 19 nt, Artificial Sequence
  Description of Artificial Sequence: Synthetic oligonucleotide
  Sense strand starting at position 6 of SEQ ID NO: 585368
cuggcaucuaugugggaga

SEQ ID NO: 634303 - RNA, 19 nt, Artificial Sequence
  Description of Artificial Sequence: Synthetic oligonucleotide
  Antisense strand to SEQ ID NO: 634302
ucucccacauagaugccag

SEQ ID NO: 634304 - RNA, 19 nt, Artificial Sequence
  Description of Artificial Sequence: Synthetic oligonucleotide
  Sense strand starting at position 8 of SEQ ID NO: 585368
ggcaucuaugugggagaga

SEQ ID NO: 634305 - RNA, 19 nt, Artificial Sequence
  Description of Artificial Sequence: Synthetic oligonucleotide
  Antisense strand to SEQ ID NO: 634304
ucucucccacauagaugcc

SEQ ID NO: 634306 - RNA, 19 nt, Artificial Sequence
  Description of Artificial Sequence: Synthetic oligonucleotide
  Sense strand starting at position 145 of SEQ ID NO: 585368
cagagugagcugcauuacu

SEQ ID NO: 634307 - RNA, 19 nt, Artificial Sequence
  Description of Artificial Sequence: Synthetic oligonucleotide
  Antisense strand to SEQ ID NO: 634306
aguaaugcagcucacucug

SEQ ID NO: 634308 - RNA, 19 nt, Artificial Sequence
  Description of Artificial Sequence: Synthetic oligonucleotide
  Sense strand starting at position 229 of SEQ ID NO: 585368
ggcugaaagccagaauuau

SEQ ID NO: 634309 - RNA, 19 nt, Artificial Sequence
  Description of Artificial Sequence: Synthetic oligonucleotide
  Antisense strand to SEQ ID NO: 634308
auaauucuggcuuucagcc

SEQ ID NO: 634310 - RNA, 19 nt, Artificial Sequence
  Description of Artificial Sequence: Synthetic oligonucleotide
  Sense strand starting at position 243 of SEQ ID NO: 585368
auuauaaagaguugugagu

SEQ ID NO: 634311 - RNA, 19 nt, Artificial Sequence
  Description of Artificial Sequence: Synthetic oligonucleotide
  Antisense strand to SEQ ID NO: 634310
acucacaacucuuuauaau

SEQ ID NO: 634312 - RNA, 19 nt, Artificial Sequence
  Description of Artificial Sequence: Synthetic oligonucleotide
  Sense strand starting at position 321 of SEQ ID NO: 585368
guaagcaaaguuuaagagu

SEQ ID NO: 634313 - RNA, 19 nt, Artificial Sequence
  Description of Artificial Sequence: Synthetic oligonucleotide
  Antisense strand to SEQ ID NO: 634312
acucuuaaacuuugcuuac

SEQ ID NO: 634314 - RNA, 19 nt, Artificial Sequence
  Description of Artificial Sequence: Synthetic oligonucleotide
  Sense strand starting at position 558 of SEQ ID NO: 585368
uauuguuuagaguacuugu

SEQ ID NO: 634315 - RNA, 19 nt, Artificial Sequence
  Description of Artificial Sequence: Synthetic oligonucleotide
  Antisense strand to SEQ ID NO: 634314
acaaguacucuaaacaaua

SEQ ID NO: 634316 - RNA, 19 nt, Artificial Sequence
  Description of Artificial Sequence: Synthetic oligonucleotide
  Sense strand starting at position 740 of SEQ ID NO: 585368
ucugcuuaacuuugaugga

SEQ ID NO: 634317 - RNA, 19 nt, Artificial Sequence
  Description of Artificial Sequence: Synthetic oligonucleotide
  Antisense strand to SEQ ID NO: 634316
uccaucaaaguuaagcaga

SEQ ID NO: 634318 - RNA, 19 nt, Artificial Sequence
  Description of Artificial Sequence: Synthetic oligonucleotide
  Sense strand starting at position 787 of SEQ ID NO: 585368
agaguaauguaccauuuac

SEQ ID NO: 634319 - RNA, 19 nt, Artificial Sequence
  Description of Artificial Sequence: Synthetic oligonucleotide
  Antisense strand to SEQ ID NO: 634318
guaaaugguacauuacucu

SEQ ID NO: 634320 - RNA, 19 nt, Artificial Sequence
  Description of Artificial Sequence: Synthetic oligonucleotide
  Sense strand starting at position 970 of SEQ ID NO: 585368
guguauugcugauuuagca

SEQ ID NO: 634321 - RNA, 19 nt, Artificial Sequence
  Description of Artificial Sequence: Synthetic oligonucleotide
  Antisense strand to SEQ ID NO: 634320
ugcuaaaucagcaauacac

SEQ ID NO: 634322 - RNA, 19 nt, Artificial Sequence
  Description of Artificial Sequence: Synthetic oligonucleotide
  Sense strand starting at position 1030 of SEQ ID NO: 585368
ugcaauuccgaaugaauca

SEQ ID NO: 634323 - RNA, 19 nt, Artificial Sequence
  Description of Artificial Sequence: Synthetic oligonucleotide
  Antisense strand to SEQ ID NO: 634322
ugauucauucggaauugca

SEQ ID NO: 634324 - RNA, 19 nt, Artificial Sequence
  Description of Artificial Sequence: Synthetic oligonucleotide
  Sense strand starting at position 1170 of SEQ ID NO: 585368
aacauuugguuugaguaaa

SEQ ID NO: 634325 - RNA, 19 nt, Artificial Sequence
  Description of Artificial Sequence: Synthetic oligonucleotide
  Antisense strand to SEQ ID NO: 634324
uuuacucaaaccaaauguu

SEQ ID NO: 634326 - RNA, 19 nt, Artificial Sequence
  Description of Artificial Sequence: Synthetic oligonucleotide
  Sense strand starting at position 1240 of SEQ ID NO: 585368
cuccuaaacguagauuauu

SEQ ID NO: 634327 - RNA, 19 nt, Artificial Sequence
  Description of Artificial Sequence: Synthetic oligonucleotide
  Antisense strand to SEQ ID NO: 634326
aauaaucuacguuuaggag

SEQ ID NO: 634328 - RNA, 19 nt, Artificial Sequence
  Description of Artificial Sequence: Synthetic oligonucleotide
  Sense strand starting at position 1380 of SEQ ID NO: 585368
ccaggauugugaccuuuaa

SEQ ID NO: 634329 - RNA, 19 nt, Artificial Sequence
  Description of Artificial Sequence: Synthetic oligonucleotide
  Antisense strand to SEQ ID NO: 634328
uuaaaggucacaauccugg

SEQ ID NO: 634330 - RNA, 19 nt, Artificial Sequence
  Description of Artificial Sequence: Synthetic oligonucleotide
  Sense strand starting at position 1465 of SEQ ID NO: 585368
aaucaaugaugggcaaagu

SEQ ID NO: 634331 - RNA, 19 nt, Artificial Sequence
  Description of Artificial Sequence: Synthetic oligonucleotide
  Antisense strand to SEQ ID NO: 634330
acuuugcccaucauugauu

SEQ ID NO: 634332 - RNA, 19 nt, Artificial Sequence
  Description of Artificial Sequence: Synthetic oligonucleotide
  Sense strand starting at position 1656 of SEQ ID NO: 585368
agcagagacagauguugaa

SEQ ID NO: 634333 - RNA, 19 nt, Artificial Sequence
  Description of Artificial Sequence: Synthetic oligonucleotide
  Antisense strand to SEQ ID NO: 634332
uucaacaucugucucugcu

SEQ ID NO: 634334 - RNA, 19 nt, Artificial Sequence
  Description of Artificial Sequence: Synthetic oligonucleotide
  Sense strand starting at position 1731 of SEQ ID NO: 585368
uguauccugccauaauuag

SEQ ID NO: 634335 - RNA, 19 nt, Artificial Sequence
  Description of Artificial Sequence: Synthetic oligonucleotide
  Antisense strand to SEQ ID NO: 634334
cuaauuauggcaggauaca

SEQ ID NO: 634336 - RNA, 19 nt, Artificial Sequence
  Description of Artificial Sequence: Synthetic oligonucleotide
  Sense strand starting at position 1759 of SEQ ID NO: 585368
uguaaacuugccggaaaga

SEQ ID NO: 634337 - RNA, 19 nt, Artificial Sequence
  Description of Artificial Sequence: Synthetic oligonucleotide
  Antisense strand to SEQ ID NO: 634336
ucuuuccggcaaguuuaca

SEQ ID NO: 634338 - RNA, 19 nt, Artificial Sequence
  Description of Artificial Sequence: Synthetic oligonucleotide
  Sense strand starting at position 1760 of SEQ ID NO: 585368
guaaacuugccggaaagaa

SEQ ID NO: 634339 - RNA, 19 nt, Artificial Sequence
  Description of Artificial Sequence: Synthetic oligonucleotide
  Antisense strand to SEQ ID NO: 634338
uucuuuccggcaaguuuac

SEQ ID NO: 634340 - RNA, 19 nt, Artificial Sequence
  Description of Artificial Sequence: Synthetic oligonucleotide
  Sense strand starting at position 1797 of SEQ ID NO: 585368
ggagaaauccuauggaugc

SEQ ID NO: 634341 - RNA, 19 nt, Artificial Sequence
  Description of Artificial Sequence: Synthetic oligonucleotide
  Antisense strand to SEQ ID NO: 634340
gcauccauaggauuucucc

SEQ ID NO: 634342 - RNA, 19 nt, Artificial Sequence
  Description of Artificial Sequence: Synthetic oligonucleotide
  Sense strand starting at position 1815 of SEQ ID NO: 585368
cucgaccacuggucaauua

SEQ ID NO: 634343 - RNA, 19 nt, Artificial Sequence
  Description of Artificial Sequence: Synthetic oligonucleotide
  Antisense strand to SEQ ID NO: 634342
uaauugaccaguggucgag

SEQ ID NO: 634344 - RNA, 19 nt, Artificial Sequence
  Description of Artificial Sequence: Synthetic oligonucleotide
  Sense strand starting at position 1826 of SEQ ID NO: 585368
gucaauuagcaguggaaga

SEQ ID NO: 634345 - RNA, 19 nt, Artificial Sequence
  Description of Artificial Sequence: Synthetic oligonucleotide
  Antisense strand to SEQ ID NO: 634344
ucuuccacugcuaauugac

SEQ ID NO: 634346 - RNA, 19 nt, Artificial Sequence
  Description of Artificial Sequence: Synthetic oligonucleotide
  Sense strand starting at position 1827 of SEQ ID NO: 585368
ucaauuagcaguggaagaa

SEQ ID NO: 634347 - RNA, 19 nt, Artificial Sequence
  Description of Artificial Sequence: Synthetic oligonucleotide
  Antisense strand to SEQ ID NO: 634346
uucuuccacugcuaauuga

SEQ ID NO: 634348 - RNA, 19 nt, Artificial Sequence
  Description of Artificial Sequence: Synthetic oligonucleotide
  Sense strand starting at position 2080 of SEQ ID NO: 585368
accagagcucuguaacuuu

SEQ ID NO: 634349 - RNA, 19 nt, Artificial Sequence
  Description of Artificial Sequence: Synthetic oligonucleotide
  Antisense strand to SEQ ID NO: 634348
aaaguuacagagcucuggu

SEQ ID NO: 634350 - RNA, 19 nt, Artificial Sequence
  Description of Artificial Sequence: Synthetic oligonucleotide
  Sense strand starting at position 2083 of SEQ ID NO: 585368
agagcucuguaacuuuaga

SEQ ID NO: 634351 - RNA, 19 nt, Artificial Sequence
  Description of Artificial Sequence: Synthetic oligonucleotide
  Antisense strand to SEQ ID NO: 634350
ucuaaaguuacagagcucu

SEQ ID NO: 634352 - RNA, 19 nt, Artificial Sequence
  Description of Artificial Sequence: Synthetic oligonucleotide
  Sense strand starting at position 2107 of SEQ ID NO: 585368
ucaugcucuggguaaacaa

SEQ ID NO: 634353 - RNA, 19 nt, Artificial Sequence
  Description of Artificial Sequence: Synthetic oligonucleotide
  Antisense strand to SEQ ID NO: 634352
uuguuuacccagagcauga

SEQ ID NO: 634354 - RNA, 19 nt, Artificial Sequence
  Description of Artificial Sequence: Synthetic oligonucleotide
  Sense strand starting at position 2153 of SEQ ID NO: 585368
uauaauggagcccaguauu

SEQ ID NO: 634355 - RNA, 19 nt, Artificial Sequence
  Description of Artificial Sequence: Synthetic oligonucleotide
  Antisense strand to SEQ ID NO: 634354
aauacugggcuccauuaua

SEQ ID NO: 634356 - RNA, 19 nt, Artificial Sequence
  Description of Artificial Sequence: Synthetic oligonucleotide
  Sense strand starting at position 2186 of SEQ ID NO: 585368
aagagcugguuguuaacau

SEQ ID NO: 634357 - RNA, 19 nt, Artificial Sequence
  Description of Artificial Sequence: Synthetic oligonucleotide
  Antisense strand to SEQ ID NO: 634356
auguuaacaaccagcucuu

SEQ ID NO: 634358 - RNA, 19 nt, Artificial Sequence
  Description of Artificial Sequence: Synthetic oligonucleotide
  Sense strand starting at position 2193 of SEQ ID NO: 585368
gguuguuaacaucauacaa

SEQ ID NO: 634359 - RNA, 19 nt, Artificial Sequence
  Description of Artificial Sequence: Synthetic oligonucleotide
  Antisense strand to SEQ ID NO: 634358
uuguaugauguuaacaacc

SEQ ID NO: 634360 - RNA, 19 nt, Artificial Sequence
  Description of Artificial Sequence: Synthetic oligonucleotide
  Sense strand starting at position 2367 of SEQ ID NO: 585368
agaacaauauguguagcau

SEQ ID NO: 634361 - RNA, 19 nt, Artificial Sequence
  Description of Artificial Sequence: Synthetic oligonucleotide
  Antisense strand to SEQ ID NO: 634360
augcuacacauauuguucu

SEQ ID NO: 634362 - RNA, 19 nt, Artificial Sequence
  Description of Artificial Sequence: Synthetic oligonucleotide
  Sense strand starting at position 2368 of SEQ ID NO: 585368
gaacaauauguguagcaua

SEQ ID NO: 634363 - RNA, 19 nt, Artificial Sequence
  Description of Artificial Sequence: Synthetic oligonucleotide
  Antisense strand to SEQ ID NO: 634362
uaugcuacacauauuguuc

SEQ ID NO: 634364 - RNA, 19 nt, Artificial Sequence
  Description of Artificial Sequence: Synthetic oligonucleotide
  Sense strand starting at position 2416 of SEQ ID NO: 585368
cugugaaaguuaucaaacu

SEQ ID NO: 634365 - RNA, 19 nt, Artificial Sequence
  Description of Artificial Sequence: Synthetic oligonucleotide
  Antisense strand to SEQ ID NO: 634364
aguuugauaacuuucacag

SEQ ID NO: 634366 - RNA, 19 nt, Artificial Sequence
  Description of Artificial Sequence: Synthetic oligonucleotide
  Sense strand starting at position 2530 of SEQ ID NO: 585368
augucuuuacguuagagaa

SEQ ID NO: 634367 - RNA, 19 nt, Artificial Sequence
  Description of Artificial Sequence: Synthetic oligonucleotide
  Antisense strand to SEQ ID NO: 634366
uucucuaacguaaagacau

SEQ ID NO: 634368 - RNA, 19 nt, Artificial Sequence
  Description of Artificial Sequence: Synthetic oligonucleotide
  Sense strand starting at position 2623 of SEQ ID NO: 585368
augagauaccuaugggcuu

SEQ ID NO: 634369 - RNA, 19 nt, Artificial Sequence
  Description of Artificial Sequence: Synthetic oligonucleotide
  Antisense strand to SEQ ID NO: 634368
aagcccauagguaucucau

SEQ ID NO: 634370 - RNA, 19 nt, Artificial Sequence
  Description of Artificial Sequence: Synthetic oligonucleotide
  Sense strand starting at position 2732 of SEQ ID NO: 585368
ucugaaaugcuaggagauc

SEQ ID NO: 634371 - RNA, 19 nt, Artificial Sequence
  Description of Artificial Sequence: Synthetic oligonucleotide
  Antisense strand to SEQ ID NO: 634370
gaucuccuagcauuucaga

SEQ ID NO: 634372 - RNA, 19 nt, Artificial Sequence
  Description of Artificial Sequence: Synthetic oligonucleotide
  Sense strand starting at position 2920 of SEQ ID NO: 585368
ugguguggucuuuaaagua

SEQ ID NO: 634373 - RNA, 19 nt, Artificial Sequence
  Description of Artificial Sequence: Synthetic oligonucleotide
  Antisense strand to SEQ ID NO: 634372
uacuuuaaagaccacacca

SEQ ID NO: 634374 - RNA, 19 nt, Artificial Sequence
  Description of Artificial Sequence: Synthetic oligonucleotide
  Sense strand starting at position 2991 of SEQ ID NO: 585368
ggagcuaaaguuuaguaau

SEQ ID NO: 634375 - RNA, 19 nt, Artificial Sequence
  Description of Artificial Sequence: Synthetic oligonucleotide
  Antisense strand to SEQ ID NO: 634374
auuacuaaacuuuagcucc

SEQ ID NO: 634376 - RNA, 19 nt, Artificial Sequence
  Description of Artificial Sequence: Synthetic oligonucleotide
  Sense strand starting at position 3062 of SEQ ID NO: 585368
cauacucugugucuggaaa

SEQ ID NO: 634377 - RNA, 19 nt, Artificial Sequence
  Description of Artificial Sequence: Synthetic oligonucleotide
  Antisense strand to SEQ ID NO: 634376
uuuccagacacagaguaug

SEQ ID NO: 634378 - RNA, 19 nt, Artificial Sequence
  Description of Artificial Sequence: Synthetic oligonucleotide
  Sense strand starting at position 3223 of SEQ ID NO: 585368
gagcaauucugucucuaga

SEQ ID NO: 634379 - RNA, 19 nt, Artificial Sequence
  Description of Artificial Sequence: Synthetic oligonucleotide
  Antisense strand to SEQ ID NO: 634378
ucuagagacagaauugcuc

SEQ ID NO: 634380 - RNA, 19 nt, Artificial Sequence
  Description of Artificial Sequence: Synthetic oligonucleotide
  Sense strand starting at position 3287 of SEQ ID NO: 585368
gugguaaagcaucaugcaa

SEQ ID NO: 634381 - RNA, 19 nt, Artificial Sequence
  Description of Artificial Sequence: Synthetic oligonucleotide
  Antisense strand to SEQ ID NO: 634380
uugcaugaugcuuuaccac

SEQ ID NO: 634382 - RNA, 19 nt, Artificial Sequence
  Description of Artificial Sequence: Synthetic oligonucleotide
  Sense strand starting at position 67 of SEQ ID NO: 585369
augaaugcccugcacuauu

SEQ ID NO: 634383 - RNA, 19 nt, Artificial Sequence
  Description of Artificial Sequence: Synthetic oligonucleotide
  Antisense strand to SEQ ID NO: 634382
aauagugcagggcauucau

SEQ ID NO: 634384 - RNA, 19 nt, Artificial Sequence
  Description of Artificial Sequence: Synthetic oligonucleotide
  Sense strand starting at position 108 of SEQ ID NO: 585369
ugucuugucuugcuaauga

SEQ ID NO: 634385 - RNA, 19 nt, Artificial Sequence
  Description of Artificial Sequence: Synthetic oligonucleotide
  Antisense strand to SEQ ID NO: 634384
ucauuagcaagacaagaca

SEQ ID NO: 634386 - RNA, 19 nt, Artificial Sequence
  Description of Artificial Sequence: Synthetic oligonucleotide
  Sense strand starting at position 372 of SEQ ID NO: 585369
cuaggaauggcauguuuaa

SEQ ID NO: 634387 - RNA, 19 nt, Artificial Sequence
  Description of Artificial Sequence: Synthetic oligonucleotide
  Antisense strand to SEQ ID NO: 634386
uuaaacaugccauuccuag

SEQ ID NO: 634388 - RNA, 19 nt, Artificial Sequence
  Description of Artificial Sequence: Synthetic oligonucleotide
  Sense strand starting at position 394 of SEQ ID NO: 585369
acaauugggcccugcuuua

SEQ ID NO: 634389 - RNA, 19 nt, Artificial Sequence
  Description of Artificial Sequence: Synthetic oligonucleotide
  Antisense strand to SEQ ID NO: 634388
uaaagcagggcccaauugu

SEQ ID NO: 634390 - RNA, 19 nt, Artificial Sequence
  Description of Artificial Sequence: Synthetic oligonucleotide
  Sense strand starting at position 453 of SEQ ID NO: 585369
uuuggaaucuagcuucgaa

SEQ ID NO: 634391 - RNA, 19 nt, Artificial Sequence
  Description of Artificial Sequence: Synthetic oligonucleotide
  Antisense strand to SEQ ID NO: 634390
uucgaagcuagauuccaaa

SEQ ID NO: 634392 - RNA, 19 nt, Artificial Sequence
  Description of Artificial Sequence: Synthetic oligonucleotide
  Sense strand starting at position 456 of SEQ ID NO: 585369
ggaaucuagcuucgaauca

SEQ ID NO: 634393 - RNA, 19 nt, Artificial Sequence
  Description of Artificial Sequence: Synthetic oligonucleotide
  Antisense strand to SEQ ID NO: 634392
ugauucgaagcuagauucc

SEQ ID NO: 634394 - RNA, 19 nt, Artificial Sequence
  Description of Artificial Sequence: Synthetic oligonucleotide
  Sense strand starting at position 516 of SEQ ID NO: 585369
gcuuuaagagccuugcugu

SEQ ID NO: 634395 - RNA, 19 nt, Artificial Sequence
  Description of Artificial Sequence: Synthetic oligonucleotide
  Antisense strand to SEQ ID NO: 634394
acagcaaggcucuuaaagc

SEQ ID NO: 634396 - RNA, 19 nt, Artificial Sequence
  Description of Artificial Sequence: Synthetic oligonucleotide
  Sense strand starting at position 526 of SEQ ID NO: 585369
ccuugcuguucucucagau

SEQ ID NO: 634397 - RNA, 19 nt, Artificial Sequence
  Description of Artificial Sequence: Synthetic oligonucleotide
  Antisense strand to SEQ ID NO: 634396
aucugagagaacagcaagg

SEQ ID NO: 634398 - RNA, 19 nt, Artificial Sequence
  Description of Artificial Sequence: Synthetic oligonucleotide
  Sense strand starting at position 640 of SEQ ID NO: 585369
ugaugauaggcacagguuu

SEQ ID NO: 634399 - RNA, 19 nt, Artificial Sequence
  Description of Artificial Sequence: Synthetic oligonucleotide
  Antisense strand to SEQ ID NO: 634398
aaaccugugccuaucauca

SEQ ID NO: 634400 - RNA, 19 nt, Artificial Sequence
  Description of Artificial Sequence: Synthetic oligonucleotide
  Sense strand starting at position 642 of SEQ ID NO: 585369
augauaggcacagguuuaa

SEQ ID NO: 634401 - RNA, 19 nt, Artificial Sequence
  Description of Artificial Sequence: Synthetic oligonucleotide
  Antisense strand to SEQ ID NO: 634400
uuaaaccugugccuaucau

SEQ ID NO: 634402 - RNA, 19 nt, Artificial Sequence
  Description of Artificial Sequence: Synthetic oligonucleotide
  Sense strand starting at position 777 of SEQ ID NO: 585369
gcuaaaggcucuucucuau

SEQ ID NO: 634403 - RNA, 19 nt, Artificial Sequence
  Description of Artificial Sequence: Synthetic oligonucleotide
  Antisense strand to SEQ ID NO: 634402
auagagaagagccuuuagc

SEQ ID NO: 634404 - RNA, 19 nt, Artificial Sequence
  Description of Artificial Sequence: Synthetic oligonucleotide
  Sense strand starting at position 834 of SEQ ID NO: 585369
cagugaugguucuugguug

SEQ ID NO: 634405 - RNA, 19 nt, Artificial Sequence
  Description of Artificial Sequence: Synthetic oligonucleotide
  Antisense strand to SEQ ID NO: 634404
caaccaagaaccaucacug

SEQ ID NO: 634406 - RNA, 19 nt, Artificial Sequence
  Description of Artificial Sequence: Synthetic oligonucleotide
  Sense strand starting at position 998 of SEQ ID NO: 585369
cccaaaguaugcuucugau

SEQ ID NO: 634407 - RNA, 19 nt, Artificial Sequence
  Description of Artificial Sequence: Synthetic oligonucleotide
  Antisense strand to SEQ ID NO: 634406
aucagaagcauacuuuggg

SEQ ID NO: 634408 - RNA, 19 nt, Artificial Sequence
  Description of Artificial Sequence: Synthetic oligonucleotide
  Sense strand starting at position 1004 of SEQ ID NO: 585369
guaugcuucugaucuauuu

SEQ ID NO: 634409 - RNA, 19 nt, Artificial Sequence
  Description of Artificial Sequence: Synthetic oligonucleotide
  Antisense strand to SEQ ID NO: 634408
aaauagaucagaagcauac

SEQ ID NO: 634410 - RNA, 19 nt, Artificial Sequence
  Description of Artificial Sequence: Synthetic oligonucleotide
  Sense strand starting at position 1065 of SEQ ID NO: 585369
acugaaaugucuuuccguu

SEQ ID NO: 634411 - RNA, 19 nt, Artificial Sequence
  Description of Artificial Sequence: Synthetic oligonucleotide
  Antisense strand to SEQ ID NO: 634410
aacggaaagacauuucagu

SEQ ID NO: 634412 - RNA, 19 nt, Artificial Sequence
  Description of Artificial Sequence: Synthetic oligonucleotide
  Sense strand starting at position 1105 of SEQ ID NO: 585369
caaccugagucugaugaga

SEQ ID NO: 634413 - RNA, 19 nt, Artificial Sequence
  Description of Artificial Sequence: Synthetic oligonucleotide
  Antisense strand to SEQ ID NO: 634412
ucucaucagacucagguug

SEQ ID NO: 634414 - RNA, 19 nt, Artificial Sequence
  Description of Artificial Sequence: Synthetic oligonucleotide
  Sense strand starting at position 1516 of SEQ ID NO: 585369
gcgguucccgaggaagguu

SEQ ID NO: 634415 - RNA, 19 nt, Artificial Sequence
  Description of Artificial Sequence: Synthetic oligonucleotide
  Antisense strand to SEQ ID NO: 634414
aaccuuccucgggaaccgc

SEQ ID NO: 634416 - RNA, 19 nt, Artificial Sequence
  Description of Artificial Sequence: Synthetic oligonucleotide
  Sense strand starting at position 1531 of SEQ ID NO: 585369
gguuucggagagugaaaga

SEQ ID NO: 634417 - RNA, 19 nt, Artificial Sequence
  Description of Artificial Sequence: Synthetic oligonucleotide
  Antisense strand to SEQ ID NO: 634416
ucuuucacucuccgaaacc

SEQ ID NO: 634418 - RNA, 19 nt, Artificial Sequence
  Description of Artificial Sequence: Synthetic oligonucleotide
  Sense strand starting at position 1606 of SEQ ID NO: 585369
ucaauuucccgaggcgacu

SEQ ID NO: 634419 - RNA, 19 nt, Artificial Sequence
  Description of Artificial Sequence: Synthetic oligonucleotide
  Antisense strand to SEQ ID NO: 634418
agucgccucgggaaauuga

SEQ ID NO: 634420 - RNA, 19 nt, Artificial Sequence
  Description of Artificial Sequence: Synthetic oligonucleotide
  Sense strand starting at position 2536 of SEQ ID NO: 585369
gcuugauaugcccaaggaa

SEQ ID NO: 634421 - RNA, 19 nt, Artificial Sequence
  Description of Artificial Sequence: Synthetic oligonucleotide
  Antisense strand to SEQ ID NO: 634420
uuccuugggcauaucaagc

SEQ ID NO: 634422 - RNA, 19 nt, Artificial Sequence
  Description of Artificial Sequence: Synthetic oligonucleotide
  Sense strand starting at position 2675 of SEQ ID NO: 585369
cugaauugcugcccuguga

SEQ ID NO: 634423 - RNA, 19 nt, Artificial Sequence
  Description of Artificial Sequence: Synthetic oligonucleotide
  Antisense strand to SEQ ID NO: 634422
ucacagggcagcaauucag

SEQ ID NO: 634424 - RNA, 19 nt, Artificial Sequence
  Description of Artificial Sequence: Synthetic oligonucleotide
  Sense strand starting at position 2890 of SEQ ID NO: 585369
aaagguucugcaggaaucu

SEQ ID NO: 634425 - RNA, 19 nt, Artificial Sequence
  Description of Artificial Sequence: Synthetic oligonucleotide
  Antisense strand to SEQ ID NO: 634424
agauuccugcagaaccuuu

SEQ ID NO: 634426 - RNA, 19 nt, Artificial Sequence
  Description of Artificial Sequence: Synthetic oligonucleotide
  Sense strand starting at position 2891 of SEQ ID NO: 585369
aagguucugcaggaaucua

SEQ ID NO: 634427 - RNA, 19 nt, Artificial Sequence
  Description of Artificial Sequence: Synthetic oligonucleotide
  Antisense strand to SEQ ID NO: 634426
uagauuccugcagaaccuu

SEQ ID NO: 634428 - RNA, 19 nt, Artificial Sequence
  Description of Artificial Sequence: Synthetic oligonucleotide
  Sense strand starting at position 3035 of SEQ ID NO: 585369
ccagguuacuuguuuagga

SEQ ID NO: 634429 - RNA, 19 nt, Artificial Sequence
  Description of Artificial Sequence: Synthetic oligonucleotide
  Antisense strand to SEQ ID NO: 634428
uccuaaacaaguaaccugg

SEQ ID NO: 634430 - RNA, 19 nt, Artificial Sequence
  Description of Artificial Sequence: Synthetic oligonucleotide
  Sense strand starting at position 3036 of SEQ ID NO: 585369
cagguuacuuguuuaggaa

SEQ ID NO: 634431 - RNA, 19 nt, Artificial Sequence
  Description of Artificial Sequence: Synthetic oligonucleotide
  Antisense strand to SEQ ID NO: 634430
uuccuaaacaaguaaccug

SEQ ID NO: 634432 - RNA, 19 nt, Artificial Sequence
  Description of Artificial Sequence: Synthetic oligonucleotide
  Sense strand starting at position 3161 of SEQ ID NO: 585369
augagauacuuguagauuu

SEQ ID NO: 634433 - RNA, 19 nt, Artificial Sequence
  Description of Artificial Sequence: Synthetic oligonucleotide
  Antisense strand to SEQ ID NO: 634432
aaaucuacaaguaucucau

SEQ ID NO: 634434 - RNA, 19 nt, Artificial Sequence
  Description of Artificial Sequence: Synthetic oligonucleotide
  Sense strand starting at position 3251 of SEQ ID NO: 585369
guuguugaugccucgaguu

SEQ ID NO: 634435 - RNA, 19 nt, Artificial Sequence
  Description of Artificial Sequence: Synthetic oligonucleotide
  Antisense strand to SEQ ID NO: 634434
aacucgaggcaucaacaac

SEQ ID NO: 634436 - RNA, 19 nt, Artificial Sequence
  Description of Artificial Sequence: Synthetic oligonucleotide
  Sense strand starting at position 3253 of SEQ ID NO: 585369
uguugaugccucgaguuug

SEQ ID NO: 634437 - RNA, 19 nt, Artificial Sequence
  Description of Artificial Sequence: Synthetic oligonucleotide
  Antisense strand to SEQ ID NO: 634436
caaacucgaggcaucaaca

SEQ ID NO: 634438 - RNA, 19 nt, Artificial Sequence
  Description of Artificial Sequence: Synthetic oligonucleotide
  Sense strand starting at position 3258 of SEQ ID NO: 585369
augccucgaguuugacaaa

SEQ ID NO: 634439 - RNA, 19 nt, Artificial Sequence
  Description of Artificial Sequence: Synthetic oligonucleotide
  Antisense strand to SEQ ID NO: 634438
uuugucaaacucgaggcau

SEQ ID NO: 634440 - RNA, 19 nt, Artificial Sequence
  Description of Artificial Sequence: Synthetic oligonucleotide
  Sense strand starting at position 3265 of SEQ ID NO: 585369
gaguuugacaaagguugca

SEQ ID NO: 634441 - RNA, 19 nt, Artificial Sequence
  Description of Artificial Sequence: Synthetic oligonucleotide
  Antisense strand to SEQ ID NO: 634440
ugcaaccuuugucaaacuc

SEQ ID NO: 634442 - RNA, 19 nt, Artificial Sequence
  Description of Artificial Sequence: Synthetic oligonucleotide
  Sense strand starting at position 3311 of SEQ ID NO: 585369
uucucaaaucauggguaca

SEQ ID NO: 634443 - RNA, 19 nt, Artificial Sequence
  Description of Artificial Sequence: Synthetic oligonucleotide
  Antisense strand to SEQ ID NO: 634442
uguacccaugauuugagaa

SEQ ID NO: 634444 - RNA, 19 nt, Artificial Sequence
  Description of Artificial Sequence: Synthetic oligonucleotide
  Sense strand starting at position 3365 of SEQ ID NO: 585369
guccgaaauccgaggugua

SEQ ID NO: 634445 - RNA, 19 nt, Artificial Sequence
  Description of Artificial Sequence: Synthetic oligonucleotide
  Antisense strand to SEQ ID NO: 634444
uacaccucggauuucggac

SEQ ID NO: 634446 - RNA, 19 nt, Artificial Sequence
  Description of Artificial Sequence: Synthetic oligonucleotide
  Sense strand starting at position 3366 of SEQ ID NO: 585369
uccgaaauccgagguguag

SEQ ID NO: 634447 - RNA, 19 nt, Artificial Sequence
  Description of Artificial Sequence: Synthetic oligonucleotide
  Antisense strand to SEQ ID NO: 634446
cuacaccucggauuucgga

SEQ ID NO: 634448 - RNA, 19 nt, Artificial Sequence
  Description of Artificial Sequence: Synthetic oligonucleotide
  Sense strand starting at position 3585 of SEQ ID NO: 585369
cagauaauguacuuggguu

SEQ ID NO: 634449 - RNA, 19 nt, Artificial Sequence
  Description of Artificial Sequence: Synthetic oligonucleotide
  Antisense strand to SEQ ID NO: 634448
aacccaaguacauuaucug

SEQ ID NO: 634450 - RNA, 19 nt, Artificial Sequence
  Description of Artificial Sequence: Synthetic oligonucleotide
  Sense strand starting at position 3586 of SEQ ID NO: 585369
agauaauguacuuggguua

SEQ ID NO: 634451 - RNA, 19 nt, Artificial Sequence
  Description of Artificial Sequence: Synthetic oligonucleotide
  Antisense strand to SEQ ID NO: 634450
uaacccaaguacauuaucu

SEQ ID NO: 634452 - RNA, 19 nt, Artificial Sequence
  Description of Artificial Sequence: Synthetic oligonucleotide
  Sense strand starting at position 3587 of SEQ ID NO: 585369
gauaauguacuuggguuaa

SEQ ID NO: 634453 - RNA, 19 nt, Artificial Sequence
  Description of Artificial Sequence: Synthetic oligonucleotide
  Antisense strand to SEQ ID NO: 634452
uuaacccaaguacauuauc

SEQ ID NO: 634454 - RNA, 19 nt, Artificial Sequence
  Description of Artificial Sequence: Synthetic oligonucleotide
  Sense strand starting at position 3589 of SEQ ID NO: 585369
uaauguacuuggguuaaag

SEQ ID NO: 634455 - RNA, 19 nt, Artificial Sequence
  Description of Artificial Sequence: Synthetic oligonucleotide
  Antisense strand to SEQ ID NO: 634454
cuuuaacccaaguacauua

SEQ ID NO: 634456 - RNA, 19 nt, Artificial Sequence
  Description of Artificial Sequence: Synthetic oligonucleotide
  Sense strand starting at position 3646 of SEQ ID NO: 585369
cuuuauaucguguagcaaa

SEQ ID NO: 634457 - RNA, 19 nt, Artificial Sequence
  Description of Artificial Sequence: Synthetic oligonucleotide
  Antisense strand to SEQ ID NO: 634456
uuugcuacacgauauaaag

SEQ ID NO: 634458 - RNA, 19 nt, Artificial Sequence
  Description of Artificial Sequence: Synthetic oligonucleotide
  Sense strand starting at position 3726 of SEQ ID NO: 585369
agcauaagugaauauacuu

SEQ ID NO: 634459 - RNA, 19 nt, Artificial Sequence
  Description of Artificial Sequence: Synthetic oligonucleotide
  Antisense strand to SEQ ID NO: 634458
aaguauauucacuuaugcu

SEQ ID NO: 634460 - RNA, 19 nt, Artificial Sequence
  Description of Artificial Sequence: Synthetic oligonucleotide
  Sense strand starting at position 3870 of SEQ ID NO: 585369
aaaugauacucugagggau

SEQ ID NO: 634461 - RNA, 19 nt, Artificial Sequence
  Description of Artificial Sequence: Synthetic oligonucleotide
  Antisense strand to SEQ ID NO: 634460
aucccucagaguaucauuu

SEQ ID NO: 634462 - RNA, 19 nt, Artificial Sequence
  Description of Artificial Sequence: Synthetic oligonucleotide
  Sense strand starting at position 17 of SEQ ID NO: 585370
uuagaaagguuccaaaugu

SEQ ID NO: 634463 - RNA, 19 nt, Artificial Sequence
  Description of Artificial Sequence: Synthetic oligonucleotide
  Antisense strand to SEQ ID NO: 634462
acauuuggaaccuuucuaa

SEQ ID NO: 634464 - RNA, 19 nt, Artificial Sequence
  Description of Artificial Sequence: Synthetic oligonucleotide
  Sense strand starting at position 141 of SEQ ID NO: 585370
aacaauguuuagggaggaa

SEQ ID NO: 634465 - RNA, 19 nt, Artificial Sequence
  Description of Artificial Sequence: Synthetic oligonucleotide
  Antisense strand to SEQ ID NO: 634464
uuccucccuaaacauuguu

SEQ ID NO: 634466 - RNA, 19 nt, Artificial Sequence
  Description of Artificial Sequence: Synthetic oligonucleotide
  Sense strand starting at position 448 of SEQ ID NO: 585370
uguccaaagugugcucaga

SEQ ID NO: 634467 - RNA, 19 nt, Artificial Sequence
  Description of Artificial Sequence: Synthetic oligonucleotide
  Antisense strand to SEQ ID NO: 634466
ucugagcacacuuuggaca

SEQ ID NO: 634468 - RNA, 19 nt, Artificial Sequence
  Description of Artificial Sequence: Synthetic oligonucleotide
  Sense strand starting at position 450 of SEQ ID NO: 585370
uccaaagugugcucagaaa

SEQ ID NO: 634469 - RNA, 19 nt, Artificial Sequence
  Description of Artificial Sequence: Synthetic oligonucleotide
  Antisense strand to SEQ ID NO: 634468
uuucugagcacacuuugga

SEQ ID NO: 634470 - RNA, 19 nt, Artificial Sequence
  Description of Artificial Sequence: Synthetic oligonucleotide
  Sense strand starting at position 2108 of SEQ ID NO: 585370
cagcgaagucgucucccuu

SEQ ID NO: 634471 - RNA, 19 nt, Artificial Sequence
  Description of Artificial Sequence: Synthetic oligonucleotide
  Antisense strand to SEQ ID NO: 634470
aagggagacgacuucgcug

SEQ ID NO: 634472 - RNA, 19 nt, Artificial Sequence
  Description of Artificial Sequence: Synthetic oligonucleotide
  Sense strand starting at position 2125 of SEQ ID NO: 585370
uucgguguugcucuacuau

SEQ ID NO: 634473 - RNA, 19 nt, Artificial Sequence
  Description of Artificial Sequence: Synthetic oligonucleotide
  Antisense strand to SEQ ID NO: 634472
auaguagagcaacaccgaa

SEQ ID NO: 634474 - RNA, 19 nt, Artificial Sequence
  Description of Artificial Sequence: Synthetic oligonucleotide
  Sense strand starting at position 2155 of SEQ ID NO: 585370
cgaguucuuucucucacuu

SEQ ID NO: 634475 - RNA, 19 nt, Artificial Sequence
  Description of Artificial Sequence: Synthetic oligonucleotide
  Antisense strand to SEQ ID NO: 634474
aagugagagaaagaacucg

SEQ ID NO: 634476 - RNA, 19 nt, Artificial Sequence
  Description of Artificial Sequence: Synthetic oligonucleotide
  Sense strand starting at position 2181 of SEQ ID NO: 585370
accaaauauucgucuaugu

SEQ ID NO: 634477 - RNA, 19 nt, Artificial Sequence
  Description of Artificial Sequence: Synthetic oligonucleotide
  Antisense strand to SEQ ID NO: 634476
acauagacgaauauuuggu

SEQ ID NO: 634478 - RNA, 19 nt, Artificial Sequence
  Description of Artificial Sequence: Synthetic oligonucleotide
  Sense strand starting at position 2186 of SEQ ID NO: 585370
auauucgucuauguaauag

SEQ ID NO: 634479 - RNA, 19 nt, Artificial Sequence
  Description of Artificial Sequence: Synthetic oligonucleotide
  Antisense strand to SEQ ID NO: 634478
cuauuacauagacgaauau

SEQ ID NO: 634480 - RNA, 19 nt, Artificial Sequence
  Description of Artificial Sequence: Synthetic oligonucleotide
  Sense strand starting at position 2190 of SEQ ID NO: 585370
ucgucuauguaauagauca

SEQ ID NO: 634481 - RNA, 19 nt, Artificial Sequence
  Description of Artificial Sequence: Synthetic oligonucleotide
  Antisense strand to SEQ ID NO: 634480
ugaucuauuacauagacga

SEQ ID NO: 634482 - RNA, 19 nt, Artificial Sequence
  Description of Artificial Sequence: Synthetic oligonucleotide
  Sense strand starting at position 2201 of SEQ ID NO: 585370
auagaucaaugggaaugaa

SEQ ID NO: 634483 - RNA, 19 nt, Artificial Sequence
  Description of Artificial Sequence: Synthetic oligonucleotide
  Antisense strand to SEQ ID NO: 634482
uucauucccauugaucuau

SEQ ID NO: 634484 - RNA, 19 nt, Artificial Sequence
  Description of Artificial Sequence: Synthetic oligonucleotide
  Sense strand starting at position 2228 of SEQ ID NO: 585370
gugugugauuugcucagaa

SEQ ID NO: 634485 - RNA, 19 nt, Artificial Sequence
  Description of Artificial Sequence: Synthetic oligonucleotide
  Antisense strand to SEQ ID NO: 634484
uucugagcaaaucacacac

SEQ ID NO: 634486 - RNA, 19 nt, Artificial Sequence
  Description of Artificial Sequence: Synthetic oligonucleotide
  Sense strand starting at position 2232 of SEQ ID NO: 585370
gugauuugcucagaaauug

SEQ ID NO: 634487 - RNA, 19 nt, Artificial Sequence
  Description of Artificial Sequence: Synthetic oligonucleotide
  Antisense strand to SEQ ID NO: 634486
caauuucugagcaaaucac

SEQ ID NO: 634488 - RNA, 19 nt, Artificial Sequence
  Description of Artificial Sequence: Synthetic oligonucleotide
  Sense strand starting at position 2390 of SEQ ID NO: 585370
accuguuauugacaagucu

SEQ ID NO: 634489 - RNA, 19 nt, Artificial Sequence
  Description of Artificial Sequence: Synthetic oligonucleotide
  Antisense strand to SEQ ID NO: 634488
agacuugucaauaacaggu

SEQ ID NO: 634490 - RNA, 19 nt, Artificial Sequence
  Description of Artificial Sequence: Synthetic oligonucleotide
  Sense strand starting at position 2475 of SEQ ID NO: 585370
ggagcuaugagguaucuga

SEQ ID NO: 634491 - RNA, 19 nt, Artificial Sequence
  Description of Artificial Sequence: Synthetic oligonucleotide
  Antisense strand to SEQ ID NO: 634490
ucagauaccucauagcucc

SEQ ID NO: 634492 - RNA, 19 nt, Artificial Sequence
  Description of Artificial Sequence: Synthetic oligonucleotide
  Sense strand starting at position 2479 of SEQ ID NO: 585370
cuaugagguaucugauuag

SEQ ID NO: 634493 - RNA, 19 nt, Artificial Sequence
  Description of Artificial Sequence: Synthetic oligonucleotide
  Antisense strand to SEQ ID NO: 634492
cuaaucagauaccucauag

SEQ ID NO: 634494 - RNA, 19 nt, Artificial Sequence
  Description of Artificial Sequence: Synthetic oligonucleotide
  Sense strand starting at position 2482 of SEQ ID NO: 585370
ugagguaucugauuagcca

SEQ ID NO: 634495 - RNA, 19 nt, Artificial Sequence
  Description of Artificial Sequence: Synthetic oligonucleotide
  Antisense strand to SEQ ID NO: 634494
uggcuaaucagauaccuca

SEQ ID NO: 634496 - RNA, 19 nt, Artificial Sequence
  Description of Artificial Sequence: Synthetic oligonucleotide
  Sense strand starting at position 2483 of SEQ ID NO: 585370
gagguaucugauuagccaa

SEQ ID NO: 634497 - RNA, 19 nt, Artificial Sequence
  Description of Artificial Sequence: Synthetic oligonucleotide
  Antisense strand to SEQ ID NO: 634496
uuggcuaaucagauaccuc

SEQ ID NO: 634498 - RNA, 19 nt, Artificial Sequence
  Description of Artificial Sequence: Synthetic oligonucleotide
  Sense strand starting at position 2568 of SEQ ID NO: 585370
ugggauaauuggugaccca

SEQ ID NO: 634499 - RNA, 19 nt, Artificial Sequence
  Description of Artificial Sequence: Synthetic oligonucleotide
  Antisense strand to SEQ ID NO: 634498
ugggucaccaauuauccca

SEQ ID NO: 634500 - RNA, 19 nt, Artificial Sequence
  Description of Artificial Sequence: Synthetic oligonucleotide
  Sense strand starting at position 2571 of SEQ ID NO: 585370
gauaauuggugacccacau

SEQ ID NO: 634501 - RNA, 19 nt, Artificial Sequence
  Description of Artificial Sequence: Synthetic oligonucleotide
  Antisense strand to SEQ ID NO: 634500
augugggucaccaauuauc

SEQ ID NO: 634502 - RNA, 19 nt, Artificial Sequence
  Description of Artificial Sequence: Synthetic oligonucleotide
  Sense strand starting at position 2577 of SEQ ID NO: 585370
uggugacccacauguagaa

SEQ ID NO: 634503 - RNA, 19 nt, Artificial Sequence
  Description of Artificial Sequence: Synthetic oligonucleotide
  Antisense strand to SEQ ID NO: 634502
uucuacaugugggucacca

SEQ ID NO: 634504 - RNA, 19 nt, Artificial Sequence
  Description of Artificial Sequence: Synthetic oligonucleotide
  Sense strand starting at position 2731 of SEQ ID NO: 585370
ggcaaagacuucgcgauga

SEQ ID NO: 634505 - RNA, 19 nt, Artificial Sequence
  Description of Artificial Sequence: Synthetic oligonucleotide
  Antisense strand to SEQ ID NO: 634504
ucaucgcgaagucuuugcc

SEQ ID NO: 634506 - RNA, 19 nt, Artificial Sequence
  Description of Artificial Sequence: Synthetic oligonucleotide
  Sense strand starting at position 2733 of SEQ ID NO: 585370
caaagacuucgcgaugaag

SEQ ID NO: 634507 - RNA, 19 nt, Artificial Sequence
  Description of Artificial Sequence: Synthetic oligonucleotide
  Antisense strand to SEQ ID NO: 634506
cuucaucgcgaagucuuug

SEQ ID NO: 634508 - RNA, 19 nt, Artificial Sequence
  Description of Artificial Sequence: Synthetic oligonucleotide
  Sense strand starting at position 2735 of SEQ ID NO: 585370
aagacuucgcgaugaagaa

SEQ ID NO: 634509 - RNA, 19 nt, Artificial Sequence
  Description of Artificial Sequence: Synthetic oligonucleotide
  Antisense strand to SEQ ID NO: 634508
uucuucaucgcgaagucuu

SEQ ID NO: 634510 - RNA, 19 nt, Artificial Sequence
  Description of Artificial Sequence: Synthetic oligonucleotide
  Sense strand starting at position 2736 of SEQ ID NO: 585370
agacuucgcgaugaagaac

SEQ ID NO: 634511 - RNA, 19 nt, Artificial Sequence
  Description of Artificial Sequence: Synthetic oligonucleotide
  Antisense strand to SEQ ID NO: 634510
guucuucaucgcgaagucu

SEQ ID NO: 634512 - RNA, 19 nt, Artificial Sequence
  Description of Artificial Sequence: Synthetic oligonucleotide
  Sense strand starting at position 2968 of SEQ ID NO: 585370
ccgucuagugcugugugua

SEQ ID NO: 634513 - RNA, 19 nt, Artificial Sequence
  Description of Artificial Sequence: Synthetic oligonucleotide
  Antisense strand to SEQ ID NO: 634512
uacacacagcacuagacgg

SEQ ID NO: 634514 - RNA, 19 nt, Artificial Sequence
  Description of Artificial Sequence: Synthetic oligonucleotide
  Sense strand starting at position 2969 of SEQ ID NO: 585370
cgucuagugcuguguguaa

SEQ ID NO: 634515 - RNA, 19 nt, Artificial Sequence
  Description of Artificial Sequence: Synthetic oligonucleotide
  Antisense strand to SEQ ID NO: 634514
uuacacacagcacuagacg

SEQ ID NO: 634516 - RNA, 19 nt, Artificial Sequence
  Description of Artificial Sequence: Synthetic oligonucleotide
  Sense strand starting at position 2971 of SEQ ID NO: 585370
ucuagugcuguguguaaag

SEQ ID NO: 634517 - RNA, 19 nt, Artificial Sequence
  Description of Artificial Sequence: Synthetic oligonucleotide
  Antisense strand to SEQ ID NO: 634516
cuuuacacacagcacuaga

SEQ ID NO: 634518 - RNA, 19 nt, Artificial Sequence
  Description of Artificial Sequence: Synthetic oligonucleotide
  Sense strand starting at position 3065 of SEQ ID NO: 585370
agaguauugugcucagaaa

SEQ ID NO: 634519 - RNA, 19 nt, Artificial Sequence
  Description of Artificial Sequence: Synthetic oligonucleotide
  Antisense strand to SEQ ID NO: 634518
uuucugagcacaauacucu

SEQ ID NO: 634520 - RNA, 19 nt, Artificial Sequence
  Description of Artificial Sequence: Synthetic oligonucleotide
  Sense strand starting at position 3066 of SEQ ID NO: 585370
gaguauugugcucagaaac

SEQ ID NO: 634521 - RNA, 19 nt, Artificial Sequence
  Description of Artificial Sequence: Synthetic oligonucleotide
  Antisense strand to SEQ ID NO: 634520
guuucugagcacaauacuc

SEQ ID NO: 634522 - RNA, 19 nt, Artificial Sequence
  Description of Artificial Sequence: Synthetic oligonucleotide
  Sense strand starting at position 3274 of SEQ ID NO: 585370
gcuauuauucucggucuuu

SEQ ID NO: 634523 - RNA, 19 nt, Artificial Sequence
  Description of Artificial Sequence: Synthetic oligonucleotide
  Antisense strand to SEQ ID NO: 634522
aaagaccgagaauaauagc

SEQ ID NO: 634524 - RNA, 19 nt, Artificial Sequence
  Description of Artificial Sequence: Synthetic oligonucleotide
  Sense strand starting at position 3313 of SEQ ID NO: 585370
agaauuguuuauucugcuu

SEQ ID NO: 634525 - RNA, 19 nt, Artificial Sequence
  Description of Artificial Sequence: Synthetic oligonucleotide
  Antisense strand to SEQ ID NO: 634524
aagcagaauaaacaauucu

SEQ ID NO: 634526 - RNA, 19 nt, Artificial Sequence
  Description of Artificial Sequence: Synthetic oligonucleotide
  Sense strand starting at position 3389 of SEQ ID NO: 585370
uggguaguauggguaguau

SEQ ID NO: 634527 - RNA, 19 nt, Artificial Sequence
  Description of Artificial Sequence: Synthetic oligonucleotide
  Antisense strand to SEQ ID NO: 634526
auacuacccauacuaccca

SEQ ID NO: 634528 - RNA, 19 nt, Artificial Sequence
  Description of Artificial Sequence: Synthetic oligonucleotide
  Sense strand starting at position 3535 of SEQ ID NO: 585370
caguguauccuguacccga

SEQ ID NO: 634529 - RNA, 19 nt, Artificial Sequence
  Description of Artificial Sequence: Synthetic oligonucleotide
  Antisense strand to SEQ ID NO: 634528
ucggguacaggauacacug

SEQ ID NO: 634530 - RNA, 19 nt, Artificial Sequence
  Description of Artificial Sequence: Synthetic oligonucleotide
  Sense strand starting at position 3542 of SEQ ID NO: 585370
uccuguacccgaugucuuu

SEQ ID NO: 634531 - RNA, 19 nt, Artificial Sequence
  Description of Artificial Sequence: Synthetic oligonucleotide
  Antisense strand to SEQ ID NO: 634530
aaagacaucggguacagga

SEQ ID NO: 634532 - RNA, 19 nt, Artificial Sequence
  Description of Artificial Sequence: Synthetic oligonucleotide
  Sense strand starting at position 3594 of SEQ ID NO: 585370
ccugaaguccuauguguca

SEQ ID NO: 634533 - RNA, 19 nt, Artificial Sequence
  Description of Artificial Sequence: Synthetic oligonucleotide
  Antisense strand to SEQ ID NO: 634532
ugacacauaggacuucagg

SEQ ID NO: 634534 - RNA, 19 nt, Artificial Sequence
  Description of Artificial Sequence: Synthetic oligonucleotide
  Sense strand starting at position 3596 of SEQ ID NO: 585370
ugaaguccuaugugucauu

SEQ ID NO: 634535 - RNA, 19 nt, Artificial Sequence
  Description of Artificial Sequence: Synthetic oligonucleotide
  Antisense strand to SEQ ID NO: 634534
aaugacacauaggacuuca

SEQ ID NO: 634536 - RNA, 19 nt, Artificial Sequence
  Description of Artificial Sequence: Synthetic oligonucleotide
  Sense strand starting at position 3601 of SEQ ID NO: 585370
uccuaugugucauucuuau

SEQ ID NO: 634537 - RNA, 19 nt, Artificial Sequence
  Description of Artificial Sequence: Synthetic oligonucleotide
  Antisense strand to SEQ ID NO: 634536
auaagaaugacacauagga

SEQ ID NO: 634538 - RNA, 19 nt, Artificial Sequence
  Description of Artificial Sequence: Synthetic oligonucleotide
  Sense strand starting at position 3729 of SEQ ID NO: 585370
gauugcugugaauaccagu

SEQ ID NO: 634539 - RNA, 19 nt, Artificial Sequence
  Description of Artificial Sequence: Synthetic oligonucleotide
  Antisense strand to SEQ ID NO: 634538
acugguauucacagcaauc

SEQ ID NO: 634540 - RNA, 19 nt, Artificial Sequence
  Description of Artificial Sequence: Synthetic oligonucleotide
  Sense strand starting at position 3954 of SEQ ID NO: 585370
gguuauuccucuuccuagu

SEQ ID NO: 634541 - RNA, 19 nt, Artificial Sequence
  Description of Artificial Sequence: Synthetic oligonucleotide
  Antisense strand to SEQ ID NO: 634540
acuaggaagaggaauaacc

SEQ ID NO: 634542 - RNA, 19 nt, Artificial Sequence
  Description of Artificial Sequence: Synthetic oligonucleotide
  Sense strand starting at position 110 of SEQ ID NO: 585371
ucccaaauguuucucguua

SEQ ID NO: 634543 - RNA, 19 nt, Artificial Sequence
  Description of Artificial Sequence: Synthetic oligonucleotide
  Antisense strand to SEQ ID NO: 634542
uaacgagaaacauuuggga

SEQ ID NO: 634544 - RNA, 19 nt, Artificial Sequence
  Description of Artificial Sequence: Synthetic oligonucleotide
  Sense strand starting at position 111 of SEQ ID NO: 585371
cccaaauguuucucguuac

SEQ ID NO: 634545 - RNA, 19 nt, Artificial Sequence
  Description of Artificial Sequence: Synthetic oligonucleotide
  Antisense strand to SEQ ID NO: 634544
guaacgagaaacauuuggg

SEQ ID NO: 634546 - RNA, 19 nt, Artificial Sequence
  Description of Artificial Sequence: Synthetic oligonucleotide
  Sense strand starting at position 136 of SEQ ID NO: 585371
agaaaccauugcucuuuga

SEQ ID NO: 634547 - RNA, 19 nt, Artificial Sequence
  Description of Artificial Sequence: Synthetic oligonucleotide
  Antisense strand to SEQ ID NO: 634546
ucaaagagcaaugguuucu

SEQ ID NO: 634548 - RNA, 19 nt, Artificial Sequence
  Description of Artificial Sequence: Synthetic oligonucleotide
  Sense strand starting at position 162 of SEQ ID NO: 585371
uuacguugcuuacuccaua

SEQ ID NO: 634549 - RNA, 19 nt, Artificial Sequence
  Description of Artificial Sequence: Synthetic oligonucleotide
  Antisense strand to SEQ ID NO: 634548
uauggaguaagcaacguaa

SEQ ID NO: 634550 - RNA, 19 nt, Artificial Sequence
  Description of Artificial Sequence: Synthetic oligonucleotide
  Sense strand starting at position 165 of SEQ ID NO: 585371
cguugcuuacuccauaaca

SEQ ID NO: 634551 - RNA, 19 nt, Artificial Sequence
  Description of Artificial Sequence: Synthetic oligonucleotide
  Antisense strand to SEQ ID NO: 634550
uguuauggaguaagcaacg

SEQ ID NO: 634552 - RNA, 19 nt, Artificial Sequence
  Description of Artificial Sequence: Synthetic oligonucleotide
  Sense strand starting at position 232 of SEQ ID NO: 585371
uuagaaagguuccaaaugu

SEQ ID NO: 634553 - RNA, 19 nt, Artificial Sequence
  Description of Artificial Sequence: Synthetic oligonucleotide
  Antisense strand to SEQ ID NO: 634552
acauuuggaaccuuucuaa

SEQ ID NO: 634554 - RNA, 19 nt, Artificial Sequence
  Description of Artificial Sequence: Synthetic oligonucleotide
  Sense strand starting at position 356 of SEQ ID NO: 585371
aacaauguuuagggaggaa

SEQ ID NO: 634555 - RNA, 19 nt, Artificial Sequence
  Description of Artificial Sequence: Synthetic oligonucleotide
  Antisense strand to SEQ ID NO: 634554
uuccucccuaaacauuguu

SEQ ID NO: 634556 - RNA, 19 nt, Artificial Sequence
  Description of Artificial Sequence: Synthetic oligonucleotide
  Sense strand starting at position 663 of SEQ ID NO: 585371
uguccaaagugugcucaga

SEQ ID NO: 634557 - RNA, 19 nt, Artificial Sequence
  Description of Artificial Sequence: Synthetic oligonucleotide
  Antisense strand to SEQ ID NO: 634556
ucugagcacacuuuggaca

SEQ ID NO: 634558 - RNA, 19 nt, Artificial Sequence
  Description of Artificial Sequence: Synthetic oligonucleotide
  Sense strand starting at position 665 of SEQ ID NO: 585371
uccaaagugugcucagaaa

SEQ ID NO: 634559 - RNA, 19 nt, Artificial Sequence
  Description of Artificial Sequence: Synthetic oligonucleotide
  Antisense strand to SEQ ID NO: 634558
uuucugagcacacuuugga

SEQ ID NO: 634560 - RNA, 19 nt, Artificial Sequence
  Description of Artificial Sequence: Synthetic oligonucleotide
  Sense strand starting at position 2323 of SEQ ID NO: 585371
cagcgaagucgucucccuu

SEQ ID NO: 634561 - RNA, 19 nt, Artificial Sequence
  Description of Artificial Sequence: Synthetic oligonucleotide
  Antisense strand to SEQ ID NO: 634560
aagggagacgacuucgcug

SEQ ID NO: 634562 - RNA, 19 nt, Artificial Sequence
  Description of Artificial Sequence: Synthetic oligonucleotide
  Sense strand starting at position 2340 of SEQ ID NO: 585371
uucgguguugcucuacuau

SEQ ID NO: 634563 - RNA, 19 nt, Artificial Sequence
  Description of Artificial Sequence: Synthetic oligonucleotide
  Antisense strand to SEQ ID NO: 634562
auaguagagcaacaccgaa

SEQ ID NO: 634564 - RNA, 19 nt, Artificial Sequence
  Description of Artificial Sequence: Synthetic oligonucleotide
  Sense strand starting at position 2370 of SEQ ID NO: 585371
cgaguucuuucucucacuu

SEQ ID NO: 634565 - RNA, 19 nt, Artificial Sequence
  Description of Artificial Sequence: Synthetic oligonucleotide
  Antisense strand to SEQ ID NO: 634564
aagugagagaaagaacucg

SEQ ID NO: 634566 - RNA, 19 nt, Artificial Sequence
  Description of Artificial Sequence: Synthetic oligonucleotide
  Sense strand starting at position 2396 of SEQ ID NO: 585371
accaaauauucgucuaugu

SEQ ID NO: 634567 - RNA, 19 nt, Artificial Sequence
  Description of Artificial Sequence: Synthetic oligonucleotide
  Antisense strand to SEQ ID NO: 634566
acauagacgaauauuuggu

SEQ ID NO: 634568 - RNA, 19 nt, Artificial Sequence
  Description of Artificial Sequence: Synthetic oligonucleotide
  Sense strand starting at position 2401 of SEQ ID NO: 585371
auauucgucuauguaauag

SEQ ID NO: 634569 - RNA, 19 nt, Artificial Sequence
  Description of Artificial Sequence: Synthetic oligonucleotide
  Antisense strand to SEQ ID NO: 634568
cuauuacauagacgaauau

SEQ ID NO: 634570 - RNA, 19 nt, Artificial Sequence
  Description of Artificial Sequence: Synthetic oligonucleotide
  Sense strand starting at position 2416 of SEQ ID NO: 585371
auagaucaaugggaaugaa

SEQ ID NO: 634571 - RNA, 19 nt, Artificial Sequence
  Description of Artificial Sequence: Synthetic oligonucleotide
  Antisense strand to SEQ ID NO: 634570
uucauucccauugaucuau

SEQ ID NO: 634572 - RNA, 19 nt, Artificial Sequence
  Description of Artificial Sequence: Synthetic oligonucleotide
  Sense strand starting at position 2443 of SEQ ID NO: 585371
gugugugauuugcucagaa

SEQ ID NO: 634573 - RNA, 19 nt, Artificial Sequence
  Description of Artificial Sequence: Synthetic oligonucleotide
  Antisense strand to SEQ ID NO: 634572
uucugagcaaaucacacac

SEQ ID NO: 634574 - RNA, 19 nt, Artificial Sequence
  Description of Artificial Sequence: Synthetic oligonucleotide
  Sense strand starting at position 2447 of SEQ ID NO: 585371
gugauuugcucagaaauug

SEQ ID NO: 634575 - RNA, 19 nt, Artificial Sequence
  Description of Artificial Sequence: Synthetic oligonucleotide
  Antisense strand to SEQ ID NO: 634574
caauuucugagcaaaucac

SEQ ID NO: 634576 - RNA, 19 nt, Artificial Sequence
  Description of Artificial Sequence: Synthetic oligonucleotide
  Sense strand starting at position 2690 of SEQ ID NO: 585371
ggagcuaugagguaucuga

SEQ ID NO: 634577 - RNA, 19 nt, Artificial Sequence
  Description of Artificial Sequence: Synthetic oligonucleotide
  Antisense strand to SEQ ID NO: 634576
ucagauaccucauagcucc

SEQ ID NO: 634578 - RNA, 19 nt, Artificial Sequence
  Description of Artificial Sequence: Synthetic oligonucleotide
  Sense strand starting at position 2694 of SEQ ID NO: 585371
cuaugagguaucugauuag

SEQ ID NO: 634579 - RNA, 19 nt, Artificial Sequence
  Description of Artificial Sequence: Synthetic oligonucleotide
  Antisense strand to SEQ ID NO: 634578
cuaaucagauaccucauag

SEQ ID NO: 634580 - RNA, 19 nt, Artificial Sequence
  Description of Artificial Sequence: Synthetic oligonucleotide
  Sense strand starting at position 2697 of SEQ ID NO: 585371
ugagguaucugauuagcca

SEQ ID NO: 634581 - RNA, 19 nt, Artificial Sequence
  Description of Artificial Sequence: Synthetic oligonucleotide
  Antisense strand to SEQ ID NO: 634580
uggcuaaucagauaccuca

SEQ ID NO: 634582 - RNA, 19 nt, Artificial Sequence
  Description of Artificial Sequence: Synthetic oligonucleotide
  Sense strand starting at position 2698 of SEQ ID NO: 585371
gagguaucugauuagccaa

SEQ ID NO: 634583 - RNA, 19 nt, Artificial Sequence
  Description of Artificial Sequence: Synthetic oligonucleotide
  Antisense strand to SEQ ID NO: 634582
uuggcuaaucagauaccuc

SEQ ID NO: 634584 - RNA, 19 nt, Artificial Sequence
  Description of Artificial Sequence: Synthetic oligonucleotide
  Sense strand starting at position 2786 of SEQ ID NO: 585371
gauaauuggugacccacau

SEQ ID NO: 634585 - RNA, 19 nt, Artificial Sequence
  Description of Artificial Sequence: Synthetic oligonucleotide
  Antisense strand to SEQ ID NO: 634584
augugggucaccaauuauc

SEQ ID NO: 634586 - RNA, 19 nt, Artificial Sequence
  Description of Artificial Sequence: Synthetic oligonucleotide
  Sense strand starting at position 2792 of SEQ ID NO: 585371
uggugacccacauguagaa

SEQ ID NO: 634587 - RNA, 19 nt, Artificial Sequence
  Description of Artificial Sequence: Synthetic oligonucleotide
  Antisense strand to SEQ ID NO: 634586
uucuacaugugggucacca

SEQ ID NO: 634588 - RNA, 19 nt, Artificial Sequence
  Description of Artificial Sequence: Synthetic oligonucleotide
  Sense strand starting at position 2946 of SEQ ID NO: 585371
ggcaaagacuucgcgauga

SEQ ID NO: 634589 - RNA, 19 nt, Artificial Sequence
  Description of Artificial Sequence: Synthetic oligonucleotide
  Antisense strand to SEQ ID NO: 634588
ucaucgcgaagucuuugcc

SEQ ID NO: 634590 - RNA, 19 nt, Artificial Sequence
  Description of Artificial Sequence: Synthetic oligonucleotide
  Sense strand starting at position 2948 of SEQ ID NO: 585371
caaagacuucgcgaugaag

SEQ ID NO: 634591 - RNA, 19 nt, Artificial Sequence
  Description of Artificial Sequence: Synthetic oligonucleotide
  Antisense strand to SEQ ID NO: 634590
cuucaucgcgaagucuuug

SEQ ID NO: 634592 - RNA, 19 nt, Artificial Sequence
  Description of Artificial Sequence: Synthetic oligonucleotide
  Sense strand starting at position 2950 of SEQ ID NO: 585371
aagacuucgcgaugaagaa

SEQ ID NO: 634593 - RNA, 19 nt, Artificial Sequence
  Description of Artificial Sequence: Synthetic oligonucleotide
  Antisense strand to SEQ ID NO: 634592
uucuucaucgcgaagucuu

SEQ ID NO: 634594 - RNA, 19 nt, Artificial Sequence
  Description of Artificial Sequence: Synthetic oligonucleotide
  Sense strand starting at position 2951 of SEQ ID NO: 585371
agacuucgcgaugaagaac

SEQ ID NO: 634595 - RNA, 19 nt, Artificial Sequence
  Description of Artificial Sequence: Synthetic oligonucleotide
  Antisense strand to SEQ ID NO: 634594
guucuucaucgcgaagucu

SEQ ID NO: 634596 - RNA, 19 nt, Artificial Sequence
  Description of Artificial Sequence: Synthetic oligonucleotide
  Sense strand starting at position 3183 of SEQ ID NO: 585371
ccgucuagugcugugugua

SEQ ID NO: 634597 - RNA, 19 nt, Artificial Sequence
  Description of Artificial Sequence: Synthetic oligonucleotide
  Antisense strand to SEQ ID NO: 634596
uacacacagcacuagacgg

SEQ ID NO: 634598 - RNA, 19 nt, Artificial Sequence
  Description of Artificial Sequence: Synthetic oligonucleotide
  Sense strand starting at position 3186 of SEQ ID NO: 585371
ucuagugcuguguguaaag

SEQ ID NO: 634599 - RNA, 19 nt, Artificial Sequence
  Description of Artificial Sequence: Synthetic oligonucleotide
  Antisense strand to SEQ ID NO: 634598
cuuuacacacagcacuaga

SEQ ID NO: 634600 - RNA, 19 nt, Artificial Sequence
  Description of Artificial Sequence: Synthetic oligonucleotide
  Sense strand starting at position 3280 of SEQ ID NO: 585371
agaguauugugcucagaaa

SEQ ID NO: 634601 - RNA, 19 nt, Artificial Sequence
  Description of Artificial Sequence: Synthetic oligonucleotide
  Antisense strand to SEQ ID NO: 634600
uuucugagcacaauacucu

SEQ ID NO: 634602 - RNA, 19 nt, Artificial Sequence
  Description of Artificial Sequence: Synthetic oligonucleotide
  Sense strand starting at position 3281 of SEQ ID NO: 585371
gaguauugugcucagaaac

SEQ ID NO: 634603 - RNA, 19 nt, Artificial Sequence
  Description of Artificial Sequence: Synthetic oligonucleotide
  Antisense strand to SEQ ID NO: 634602
guuucugagcacaauacuc

SEQ ID NO: 634604 - RNA, 19 nt, Artificial Sequence
  Description of Artificial Sequence: Synthetic oligonucleotide
  Sense strand starting at position 3489 of SEQ ID NO: 585371
gcuauuauucucggucuuu

SEQ ID NO: 634605 - RNA, 19 nt, Artificial Sequence
  Description of Artificial Sequence: Synthetic oligonucleotide
  Antisense strand to SEQ ID NO: 634604
aaagaccgagaauaauagc

SEQ ID NO: 634606 - RNA, 19 nt, Artificial Sequence
  Description of Artificial Sequence: Synthetic oligonucleotide
  Sense strand starting at position 3528 of SEQ ID NO: 585371
agaauuguuuauucugcuu

SEQ ID NO: 634607 - RNA, 19 nt, Artificial Sequence
  Description of Artificial Sequence: Synthetic oligonucleotide
  Antisense strand to SEQ ID NO: 634606
aagcagaauaaacaauucu

SEQ ID NO: 634608 - RNA, 19 nt, Artificial Sequence
  Description of Artificial Sequence: Synthetic oligonucleotide
  Sense strand starting at position 3604 of SEQ ID NO: 585371
uggguaguauggguaguau

SEQ ID NO: 634609 - RNA, 19 nt, Artificial Sequence
  Description of Artificial Sequence: Synthetic oligonucleotide
  Antisense strand to SEQ ID NO: 634608
auacuacccauacuaccca

SEQ ID NO: 634610 - RNA, 19 nt, Artificial Sequence
  Description of Artificial Sequence: Synthetic oligonucleotide
  Sense strand starting at position 3750 of SEQ ID NO: 585371
caguguauccuguacccga

SEQ ID NO: 634611 - RNA, 19 nt, Artificial Sequence
  Description of Artificial Sequence: Synthetic oligonucleotide
  Antisense strand to SEQ ID NO: 634610
ucggguacaggauacacug

SEQ ID NO: 634612 - RNA, 19 nt, Artificial Sequence
  Description of Artificial Sequence: Synthetic oligonucleotide
  Sense strand starting at position 3757 of SEQ ID NO: 585371
uccuguacccgaugucuuu

SEQ ID NO: 634613 - RNA, 19 nt, Artificial Sequence
  Description of Artificial Sequence: Synthetic oligonucleotide
  Antisense strand to SEQ ID NO: 634612
aaagacaucggguacagga

SEQ ID NO: 634614 - RNA, 19 nt, Artificial Sequence
  Description of Artificial Sequence: Synthetic oligonucleotide
  Sense strand starting at position 3809 of SEQ ID NO: 585371
ccugaaguccuauguguca

SEQ ID NO: 634615 - RNA, 19 nt, Artificial Sequence
  Description of Artificial Sequence: Synthetic oligonucleotide
  Antisense strand to SEQ ID NO: 634614
ugacacauaggacuucagg

SEQ ID NO: 634616 - RNA, 19 nt, Artificial Sequence
  Description of Artificial Sequence: Synthetic oligonucleotide
  Sense strand starting at position 3811 of SEQ ID NO: 585371
ugaaguccuaugugucauu

SEQ ID NO: 634617 - RNA, 19 nt, Artificial Sequence
  Description of Artificial Sequence: Synthetic oligonucleotide
  Antisense strand to SEQ ID NO: 634616
aaugacacauaggacuuca

SEQ ID NO: 634618 - RNA, 19 nt, Artificial Sequence
  Description of Artificial Sequence: Synthetic oligonucleotide
  Sense strand starting at position 3816 of SEQ ID NO: 585371
uccuaugugucauucuuau

SEQ ID NO: 634619 - RNA, 19 nt, Artificial Sequence
  Description of Artificial Sequence: Synthetic oligonucleotide
  Antisense strand to SEQ ID NO: 634618
auaagaaugacacauagga

SEQ ID NO: 634620 - RNA, 19 nt, Artificial Sequence
  Description of Artificial Sequence: Synthetic oligonucleotide
  Sense strand starting at position 3944 of SEQ ID NO: 585371
gauugcugugaauaccagu

SEQ ID NO: 634621 - RNA, 19 nt, Artificial Sequence
  Description of Artificial Sequence: Synthetic oligonucleotide
  Antisense strand to SEQ ID NO: 634620
acugguauucacagcaauc

SEQ ID NO: 634622 - RNA, 19 nt, Artificial Sequence
  Description of Artificial Sequence: Synthetic oligonucleotide
  Sense strand starting at position 98 of SEQ ID NO: 585372
cuuccacgccaucagaauu

SEQ ID NO: 634623 - RNA, 19 nt, Artificial Sequence
  Description of Artificial Sequence: Synthetic oligonucleotide
  Antisense strand to SEQ ID NO: 634622
aauucugauggcguggaag

SEQ ID NO: 634624 - RNA, 19 nt, Artificial Sequence
  Description of Artificial Sequence: Synthetic oligonucleotide
  Sense strand starting at position 106 of SEQ ID NO: 585372
ccaucagaauuagucagua

SEQ ID NO: 634625 - RNA, 19 nt, Artificial Sequence
  Description of Artificial Sequence: Synthetic oligonucleotide
  Antisense strand to SEQ ID NO: 634624
uacugacuaauucugaugg

SEQ ID NO: 634626 - RNA, 19 nt, Artificial Sequence
  Description of Artificial Sequence: Synthetic oligonucleotide
  Sense strand starting at position 110 of SEQ ID NO: 585372
cagaauuagucaguaaagg

SEQ ID NO: 634627 - RNA, 19 nt, Artificial Sequence
  Description of Artificial Sequence: Synthetic oligonucleotide
  Antisense strand to SEQ ID NO: 634626
ccuuuacugacuaauucug

SEQ ID NO: 634628 - RNA, 19 nt, Artificial Sequence
  Description of Artificial Sequence: Synthetic oligonucleotide
  Sense strand starting at position 118 of SEQ ID NO: 585372
gucaguaaagguugcuuaa

SEQ ID NO: 634629 - RNA, 19 nt, Artificial Sequence
  Description of Artificial Sequence: Synthetic oligonucleotide
  Antisense strand to SEQ ID NO: 634628
uuaagcaaccuuuacugac

SEQ ID NO: 634630 - RNA, 19 nt, Artificial Sequence
  Description of Artificial Sequence: Synthetic oligonucleotide
  Sense strand starting at position 192 of SEQ ID NO: 585372
cagugucagcaagagguaa

SEQ ID NO: 634631 - RNA, 19 nt, Artificial Sequence
  Description of Artificial Sequence: Synthetic oligonucleotide
  Antisense strand to SEQ ID NO: 634630
uuaccucuugcugacacug

SEQ ID NO: 634632 - RNA, 19 nt, Artificial Sequence
  Description of Artificial Sequence: Synthetic oligonucleotide
  Sense strand starting at position 205 of SEQ ID NO: 585372
agguaaggauuacaauuga

SEQ ID NO: 634633 - RNA, 19 nt, Artificial Sequence
  Description of Artificial Sequence: Synthetic oligonucleotide
  Antisense strand to SEQ ID NO: 634632
ucaauuguaauccuuaccu

SEQ ID NO: 634634 - RNA, 19 nt, Artificial Sequence
  Description of Artificial Sequence: Synthetic oligonucleotide
  Sense strand starting at position 478 of SEQ ID NO: 585372
ggacaagucagugacgacu

SEQ ID NO: 634635 - RNA, 19 nt, Artificial Sequence
  Description of Artificial Sequence: Synthetic oligonucleotide
  Antisense strand to SEQ ID NO: 634634
agucgucacugacuugucc

SEQ ID NO: 634636 - RNA, 19 nt, Artificial Sequence
  Description of Artificial Sequence: Synthetic oligonucleotide
  Sense strand starting at position 573 of SEQ ID NO: 585372
ggcucagagucccugagau

SEQ ID NO: 634637 - RNA, 19 nt, Artificial Sequence
  Description of Artificial Sequence: Synthetic oligonucleotide
  Antisense strand to SEQ ID NO: 634636
aucucagggacucugagcc

SEQ ID NO: 634638 - RNA, 19 nt, Artificial Sequence
  Description of Artificial Sequence: Synthetic oligonucleotide
  Sense strand starting at position 644 of SEQ ID NO: 585372
ggaucauaauuaucaagug

SEQ ID NO: 634639 - RNA, 19 nt, Artificial Sequence
  Description of Artificial Sequence: Synthetic oligonucleotide
  Antisense strand to SEQ ID NO: 634638
cacuugauaauuaugaucc

SEQ ID NO: 634640 - RNA, 19 nt, Artificial Sequence
  Description of Artificial Sequence: Synthetic oligonucleotide
  Sense strand starting at position 837 of SEQ ID NO: 585372
ccagcugugugauccagaa

SEQ ID NO: 634641 - RNA, 19 nt, Artificial Sequence
  Description of Artificial Sequence: Synthetic oligonucleotide
  Antisense strand to SEQ ID NO: 634640
uucuggaucacacagcugg

SEQ ID NO: 634642 - RNA, 19 nt, Artificial Sequence
  Description of Artificial Sequence: Synthetic oligonucleotide
  Sense strand starting at position 839 of SEQ ID NO: 585372
agcugugugauccagaaag

SEQ ID NO: 634643 - RNA, 19 nt, Artificial Sequence
  Description of Artificial Sequence: Synthetic oligonucleotide
  Antisense strand to SEQ ID NO: 634642
cuuucuggaucacacagcu

SEQ ID NO: 634644 - RNA, 19 nt, Artificial Sequence
  Description of Artificial Sequence: Synthetic oligonucleotide
  Sense strand starting at position 841 of SEQ ID NO: 585372
cugugugauccagaaaguc

SEQ ID NO: 634645 - RNA, 19 nt, Artificial Sequence
  Description of Artificial Sequence: Synthetic oligonucleotide
  Antisense strand to SEQ ID NO: 634644
gacuuucuggaucacacag

SEQ ID NO: 634646 - RNA, 19 nt, Artificial Sequence
  Description of Artificial Sequence: Synthetic oligonucleotide
  Sense strand starting at position 1000 of SEQ ID NO: 585372
cggccaaagaccuggugaa

SEQ ID NO: 634647 - RNA, 19 nt, Artificial Sequence
  Description of Artificial Sequence: Synthetic oligonucleotide
  Antisense strand to SEQ ID NO: 634646
uucaccaggucuuuggccg

SEQ ID NO: 634648 - RNA, 19 nt, Artificial Sequence
  Description of Artificial Sequence: Synthetic oligonucleotide
  Sense strand starting at position 1369 of SEQ ID NO: 585372
gcuugcuggagcugaaaga

SEQ ID NO: 634649 - RNA, 19 nt, Artificial Sequence
  Description of Artificial Sequence: Synthetic oligonucleotide
  Antisense strand to SEQ ID NO: 634648
ucuuucagcuccagcaagc

SEQ ID NO: 634650 - RNA, 19 nt, Artificial Sequence
  Description of Artificial Sequence: Synthetic oligonucleotide
  Sense strand starting at position 2019 of SEQ ID NO: 585372
uugauaugguugccuagga

SEQ ID NO: 634651 - RNA, 19 nt, Artificial Sequence
  Description of Artificial Sequence: Synthetic oligonucleotide
  Antisense strand to SEQ ID NO: 634650
uccuaggcaaccauaucaa

SEQ ID NO: 634652 - RNA, 19 nt, Artificial Sequence
  Description of Artificial Sequence: Synthetic oligonucleotide
  Sense strand starting at position 2169 of SEQ ID NO: 585372
ccaaaccauuaugaggaaa
